United States Patent Application Publication US 2005/0221354 A1 - sequence listing, part 6

SEQ ID NO: 183832 - DNA, 25 bp, probe
cgtgtggtcttttggaatcttactc

SEQ ID NO: 183833 - DNA, 25 bp, probe
cgtgtggtcttttggaatcttactc

SEQ ID NO: 183834 - DNA, 25 bp, probe
cgttggtctatgattgacaagtacc

SEQ ID NO: 183835 - DNA, 25 bp, probe
cgttcgtggaactttacagatgacc

SEQ ID NO: 183836 - DNA, 25 bp, probe
cgtttttggcaagtctacagatgaa

SEQ ID NO: 183837 - DNA, 25 bp, probe
cgtttttggcaagtctacagatgaa

SEQ ID NO: 183838 - DNA, 25 bp, probe
cgctttggggctaattcttgctgaa

SEQ ID NO: 183839 - DNA, 25 bp, probe
cgcttaggtagaaactattggtgct

SEQ ID NO: 183840 - DNA, 25 bp, probe
cgctggaagaaaaacttcattgctg

SEQ ID NO: 183841 - DNA, 25 bp, probe
cggagagtgtcagaactcttctgct

SEQ ID NO: 183842 - DNA, 25 bp, probe
cggtggctgtgagtctagtttttgc

SEQ ID NO: 183843 - DNA, 25 bp, probe
cggggcgctgcatagagtgctgtct

SEQ ID NO: 183844 - DNA, 25 bp, probe
cggagaccactgaggtgcatgcact

SEQ ID NO: 183845 - DNA, 25 bp, probe
cggagaccactgaggtgcatgcact

SEQ ID NO: 183846 - DNA, 25 bp, probe
cgggaccagcagaatttgccctacg

SEQ ID NO: 183847 - DNA, 25 bp, probe
cgtggcacgcaagatgttccgacag

SEQ ID NO: 183848 - DNA, 25 bp, probe
cgtgagctatgacagtgaaccgaag

SEQ ID NO: 183849 - DNA, 25 bp, probe
cggagcatcgagaggaggccagatg

SEQ ID NO: 183850 - DNA, 25 bp, probe
cgtgacacaggttctggccaatgat

SEQ ID NO: 183851 - DNA, 25 bp, probe
cgatggacaatgaacggccttgctg

SEQ ID NO: 183852 - DNA, 25 bp, probe
cgggatatgttactgtccggcagca

SEQ ID NO: 183853 - DNA, 25 bp, probe
cgggaattcttcaatcgcagagctc

SEQ ID NO: 183854 - DNA, 25 bp, probe
cggagaacgtcttcatcagcgtgca

SEQ ID NO: 183855 - DNA, 25 bp, probe
cggagctacgttttgcagggctcag

SEQ ID NO: 183856 - DNA, 25 bp, probe
cgaagctaccttttgggatgattgc

SEQ ID NO: 183857 - DNA, 25 bp, probe
cgaagctaccttttgggatgattgc

SEQ ID NO: 183858 - DNA, 25 bp, probe
cgggtagtattgttcccgttgcgca

SEQ ID NO: 183859 - DNA, 25 bp, probe
cggagtagctcaaggtctcctgttc

SEQ ID NO: 183860 - DNA, 25 bp, probe
cggtgtaggcacagctctcctattg

SEQ ID NO: 183861 - DNA, 25 bp, probe
cggatgataggagcctgccatgcca

SEQ ID NO: 183862 - DNA, 25 bp, probe
cggagaagcagcgcttctactcctg

SEQ ID NO: 183863 - DNA, 25 bp, probe
cggagagtacgagagctcctccagc

SEQ ID NO: 183864 - DNA, 25 bp, probe
cgggatctaccatacccattgacta

SEQ ID NO: 183865 - DNA, 25 bp, probe
cgaatttagtcacaccatcttaaat

SEQ ID NO: 183866 - DNA, 25 bp, probe
cgtatttagccattacccacgtgac

SEQ ID NO: 183867 - DNA, 25 bp, probe
cgcttaaagatatgtcccagggcaa

SEQ ID NO: 183868 - DNA, 25 bp, probe
cgcttaaagatatgtcccagggcaa

SEQ ID NO: 183869 - DNA, 25 bp, probe
cgttaggaataacactgcagccctc

SEQ ID NO: 183870 - DNA, 25 bp, probe
cgtctgcaggacaaaaagctcccac

SEQ ID NO: 183871 - DNA, 25 bp, probe
cgtaaggacggaacgcagcctgcac

SEQ ID NO: 183872 - DNA, 25 bp, probe
cggaggatgagctgtaccagctgtc

SEQ ID NO: 183873 - DNA, 25 bp, probe
cggatggtgcagcaattccagttcc

SEQ ID NO: 183874 - DNA, 25 bp, probe
cgtatcagggaaattgcaggtctgc

SEQ ID NO: 183875 - DNA, 25 bp, probe
cggatccactgaaacatgggctcca

SEQ ID NO: 183876 - DNA, 25 bp, probe
cgtgatgacctgagacaagatgctg

SEQ ID NO: 183877 - DNA, 25 bp, probe
cggagccatcaacagcaagcagctc

SEQ ID NO: 183878 - DNA, 25 bp, probe
cggagcctgcacaagcagatccggc

SEQ ID NO: 183879 - DNA, 25 bp, probe
cggagcctgcacaagcagatccggc

SEQ ID NO: 183880 - DNA, 25 bp, probe
cggagcctgcacaagcagatccggc

SEQ ID NO: 183881 - DNA, 25 bp, probe
cgtgcagacccaggagacgcgcacg

SEQ ID NO: 183882 - DNA, 25 bp, probe
cgtcagacacgatgagaagccctct

SEQ ID NO: 183883 - DNA, 25 bp, probe
cgtcagacacgatgagaagccctct

SEQ ID NO: 183884 - DNA, 25 bp, probe
cgggacatctacaaagaccccagct

SEQ ID NO: 183885 - DNA, 25 bp, probe
cggtacgcagacaaacacatgaaca

SEQ ID NO: 183886 - DNA, 25 bp, probe
cgggatccagtgaagccagaagcca

SEQ ID NO: 183887 - DNA, 25 bp, probe
cggagacaagtcgagcggcaagcac

SEQ ID NO: 183888 - DNA, 25 bp, probe
cggatgaagacgcacggcagaaccc

SEQ ID NO: 183889 - DNA, 25 bp, probe
cggatgaagacgcacggcagaaccc

SEQ ID NO: 183890 - DNA, 25 bp, probe
cggtgttgcatcgatacaggcaggt

SEQ ID NO: 183891 - DNA, 25 bp, probe
cggtgtccaggctacagagggtgac

SEQ ID NO: 183892 - DNA, 25 bp, probe
cgtgtcctatgaggacagggaggag

SEQ ID NO: 183893 - DNA, 25 bp, probe
cgtgtgcctgtaactctgagggggg

SEQ ID NO: 183894 - DNA, 25 bp, probe
cggggtgctaagcatgaggcctggc

SEQ ID NO: 183895 - DNA, 25 bp, probe
cggggacatgaagagcagcgcccgg

SEQ ID NO: 183896 - DNA, 25 bp, probe
cgtattatctgatggaccccagcgg

SEQ ID NO: 183897 - DNA, 25 bp, probe
cgtgatctacgtgaactggctcaac

SEQ ID NO: 183898 - DNA, 25 bp, probe
cggattattgctgcaactggcaaac

SEQ ID NO: 183899 - DNA, 25 bp, probe
cggtacctcatggcacatctaaaga

SEQ ID NO: 183900 - DNA, 25 bp, probe
cggtacctcatggcacatctaaaga

SEQ ID NO: 183901 - DNA, 25 bp, probe
cggtacctcatggcacatctaaaga

SEQ ID NO: 183902 - DNA, 25 bp, probe
cggtcgcctctggcagcgaaaagac

SEQ ID NO: 183903 - DNA, 25 bp, probe
gctgttagccttgcttccacaaggc

SEQ ID NO: 183904 - DNA, 25 bp, probe
cgtctacactggatacccactgagc

SEQ ID NO: 183905 - DNA, 25 bp, probe
cggtctcctgagaaacacacagcaa

SEQ ID NO: 183906 - DNA, 25 bp, probe
cggattgccgatcctgagcatgacc

SEQ ID NO: 183907 - DNA, 25 bp, probe
cggatgctggagttcggcagccacc

SEQ ID NO: 183908 - DNA, 25 bp, probe
cggatgtgaggttcagcagtgccgt

SEQ ID NO: 183909 - DNA, 25 bp, probe
cggatgctgaggccacagctggtga

SEQ ID NO: 183910 - DNA, 25 bp, probe
cgtgagctggggagtgggctgtggt

SEQ ID NO: 183911 - DNA, 25 bp, probe
cgtgttagtgtgaacgcaggcctgg

SEQ ID NO: 183912 - DNA, 25 bp, probe
cgtgctcaacatcgtcaacgtggtg

SEQ ID NO: 183913 - DNA, 25 bp, probe
cgtgctcaacatcgtcaacgtggtg

SEQ ID NO: 183914 - DNA, 25 bp, probe
cgtgctgaaaggccaaaatttgaac

SEQ ID NO: 183915 - DNA, 25 bp, probe
cggtggactgcgccagaagcaattg

SEQ ID NO: 183916 - DNA, 25 bp, probe
cggtggacagcggaacatatgagga

SEQ ID NO: 183917 - DNA, 25 bp, probe
cgggagctctggcaagctataggag

SEQ ID NO: 183918 - DNA, 25 bp, probe
cgggagctcagtgtagctgaagatg

SEQ ID NO: 183919 - DNA, 25 bp, probe
cgggagtagcaggtccgcatcatca

SEQ ID NO: 183920 - DNA, 25 bp, probe
cgggagtagcaggtccgcatcatca

SEQ ID NO: 183921 - DNA, 25 bp, probe
cggagaggagagctgcggcacatcc

SEQ ID NO: 183922 - DNA, 25 bp, probe
cggaggatcatggctgcggccaaac

SEQ ID NO: 183923 - DNA, 25 bp, probe
cggaggctcacagggaacaagacac

SEQ ID NO: 183924 - DNA, 25 bp, probe
cgcggggcactttgtacaaatcctt

SEQ ID NO: 183925 - DNA, 25 bp, probe
cgcggggcactttgtacaaatcctt

SEQ ID NO: 183926 - DNA, 25 bp, probe
cgcggggcactttgtacaaatcctt

SEQ ID NO: 183927 - DNA, 25 bp, probe
cgaagcctcctaagacgagaacctt

SEQ ID NO: 183928 - DNA, 25 bp, probe
cgaatcgccctcaagtgaggccctt

SEQ ID NO: 183929 - DNA, 25 bp, probe
cggttccgctgccctgaggcactct

SEQ ID NO: 183930 - DNA, 25 bp, probe
cggtcatccgtctgctgcagaaact

SEQ ID NO: 183931 - DNA, 25 bp, probe
cgggcctgcagtgcgtgaagtacat

SEQ ID NO: 183932 - DNA, 25 bp, probe
cgggactgagcaggcaatggcctaa

SEQ ID NO: 183933 - DNA, 25 bp, probe
cgggatgaagggctgcgcttaaaac

SEQ ID NO: 183934 - DNA, 25 bp, probe
cgggatgaagggctgcgcttaaaac

SEQ ID NO: 183935 - DNA, 25 bp, probe
cgagggccagagcaagcgctgtaaa

SEQ ID NO: 183936 - DNA, 25 bp, probe
cgagggccagagcaagcgctgtaaa

SEQ ID NO: 183937 - DNA, 25 bp, probe
cggggctgaagccacacagcccaga

SEQ ID NO: 183938 - DNA, 25 bp, probe
cggtgcactgatcgctgccaatgca

SEQ ID NO: 183939 - DNA, 25 bp, probe
cggtgacgtggtcagcatgcacagg

SEQ ID NO: 183940 - DNA, 25 bp, probe
cggtgacgtggtcagcatgcacagg

SEQ ID NO: 183941 - DNA, 25 bp, probe
cggtgcaaggagacgtgctcatcgt

SEQ ID NO: 183942 - DNA, 25 bp, probe
cggtgcaaggagacgtgctcatcgt

SEQ ID NO: 183943 - DNA, 25 bp, probe
cggatcacggcaatgcggctgcact

SEQ ID NO: 183944 - DNA, 25 bp, probe
cggtccatggcactgctgcggaccg

SEQ ID NO: 183945 - DNA, 25 bp, probe
cggtccatggcactgctgcggaccg

SEQ ID NO: 183946 - DNA, 25 bp, probe
cggatctgctctgtctggaatccag

SEQ ID NO: 183947 - DNA, 25 bp, probe
cgtgaagctcaagtcggacacgcgc

SEQ ID NO: 183948 - DNA, 25 bp, probe
cgtgaagctcaagtcggacacgcgc

SEQ ID NO: 183949 - DNA, 25 bp, probe
cggagggcagaggcgcagaatcctg

SEQ ID NO: 183950 - DNA, 25 bp, probe
cggtgaggcaaggtgacgatggcgc

SEQ ID NO: 183951 - DNA, 25 bp, probe
cgggaagccttgtacagtggcgcct

SEQ ID NO: 183952 - DNA, 25 bp, probe
cgggaagcttgtcatcaatggaaat

SEQ ID NO: 183953 - DNA, 25 bp, probe
cgtggacgttggctacaggactgat

SEQ ID NO: 183954 - DNA, 25 bp, probe
cgtgtatggtagggtaagtgagaga

SEQ ID NO: 183955 - DNA, 25 bp, probe
cgtttgtgtaccgtgggctgagagg

SEQ ID NO: 183956 - DNA, 25 bp, probe
cgttcttggaagcatggggagtgat

SEQ ID NO: 183957 - DNA, 25 bp, probe
cgttcccgcagaccaaagagagtgt

SEQ ID NO: 183958 - DNA, 25 bp, probe
cgagtccccaaggactagtggagtc

SEQ ID NO: 183959 - DNA, 25 bp, probe
cggtacgcactagccacatgtggct

SEQ ID NO: 183960 - DNA, 25 bp, probe
cgggactctcacggtgacatgttta

SEQ ID NO: 183961 - DNA, 25 bp, probe
cgggactctcacggtgacatgttta

SEQ ID NO: 183962 - DNA, 25 bp, probe
cgcggactccaaggggttgcaggaa

SEQ ID NO: 183963 - DNA, 25 bp, probe
cgggacgcccacgtgggtgaagaag

SEQ ID NO: 183964 - DNA, 25 bp, probe
cgaggcccaccgaagggtactgaag

SEQ ID NO: 183965 - DNA, 25 bp, probe
cgaggcccaccgaagggtactgaag

SEQ ID NO: 183966 - DNA, 25 bp, probe
cgaggcccaccgaagggtactgaag

SEQ ID NO: 183967 - DNA, 25 bp, probe
cgtcccgacgcacatgggtagcgac

SEQ ID NO: 183968 - DNA, 25 bp, probe
cgtcccgacgcacatgggtagcgac

SEQ ID NO: 183969 - DNA, 25 bp, probe
cgtaccaatcatcttgggacagcca

SEQ ID NO: 183970 - DNA, 25 bp, probe
cgtgccaatcaacatgctggtgaag

SEQ ID NO: 183971 - DNA, 25 bp, probe
cggtcaacacagcctctaggatgga

SEQ ID NO: 183972 - DNA, 25 bp, probe
cgggaactcagggtgagcagctgga

SEQ ID NO: 183973 - DNA, 25 bp, probe
cgggatgaccatggactggatgctt

SEQ ID NO: 183974 - DNA, 25 bp, probe
cgggacacccagacagatgagattg

SEQ ID NO: 183975 - DNA, 25 bp, probe
cgggaagccatcagagggttctcgc

SEQ ID NO: 183976 - DNA, 25 bp, probe
cgggaagccacacggcgagagacac

SEQ ID NO: 183977 - DNA, 25 bp, probe
cggtgagaccaccgtgtgagggacg

SEQ ID NO: 183978 - DNA, 25 bp, probe
cgggcaaccattcctgaaggctgag

SEQ ID NO: 183979 - DNA, 25 bp, probe
cggttcaccttgccgagagaggcgc

SEQ ID NO: 183980 - DNA, 25 bp, probe
cgtgttacttacaaagaggtgctca

SEQ ID NO: 183981 - DNA, 25 bp, probe
taacttccttaaaaaggtgcggcat

SEQ ID NO: 183982 - DNA, 25 bp, probe
cgtcgtccttcgtaacggtcagagt

SEQ ID NO: 183983 - DNA, 25 bp, probe
cgttgaactccaccaacggggagct

SEQ ID NO: 183984 - DNA, 25 bp, probe
cgtaatccccacgtgacatgggagg

SEQ ID NO: 183985 - DNA, 25 bp, probe
cgtccaccgactgctgaggtgtggg

SEQ ID NO: 183986 - DNA, 25 bp, probe
cgtggactgggcacgcaggtgcatg

SEQ ID NO: 183987 - DNA, 25 bp, probe
cggtgcacgcgctttaagtgtgctg

SEQ ID NO: 183988 - DNA, 25 bp, probe
cgggtgtgctcacttacattatgct

SEQ ID NO: 183989 - DNA, 25 bp, probe
cgaactgcttacttgaaattgtcat

SEQ ID NO: 183990 - DNA, 25 bp, probe
cgaaccttacctatgttcatatatt

SEQ ID NO: 183991 - DNA, 25 bp, probe
cgacaacttgcacgtattttaatag

SEQ ID NO: 183992 - DNA, 25 bp, probe
cgacaacttgcacgtattttaatag

SEQ ID NO: 183993 - DNA, 25 bp, probe
cgaaggctagcatggttttaggttt

SEQ ID NO: 183994 - DNA, 25 bp, probe
cgaaccagtcactacttttagagtt

SEQ ID NO: 183995 - DNA, 25 bp, probe
cgaaccagtcactacttttagagtt

SEQ ID NO: 183996 - DNA, 25 bp, probe
cgaactcatgtacaactgttggacc

SEQ ID NO: 183997 - DNA, 25 bp, probe
cgaactcatgtacaactgttggacc

SEQ ID NO: 183998 - DNA, 25 bp, probe
cgaagctataggctcttgttggata

SEQ ID NO: 183999 - DNA, 25 bp, probe
cgtatcatccatctacttggggatc

SEQ ID NO: 184000 - DNA, 25 bp, probe
cgtgtcacctactacttggactgga

SEQ ID NO: 184001 - DNA, 25 bp, probe
cgtgcacacctatcacgtggagctc

SEQ ID NO: 184002 - DNA, 25 bp, probe
cgtggacaccaaggcgggccacggg

SEQ ID NO: 184003 - DNA, 25 bp, probe
cgtggacaccaaggcaagctgctat

SEQ ID NO: 184004 - DNA, 25 bp, probe
cgggtgatgctcaaggaaatctacc

SEQ ID NO: 184005 - DNA, 25 bp, probe
cggatctcagtcaaaggcattcgcc

SEQ ID NO: 184006 - DNA, 25 bp, probe
cggtcgagctattattcttacaccc

SEQ ID NO: 184007 - DNA, 25 bp, probe
cgagctcgaattaattcctcttccg

SEQ ID NO: 184008 - DNA, 25 bp, probe
cgagatccaccagatcgacttgatc

SEQ ID NO: 184009 - DNA, 25 bp, probe
cgagatgccacgactattcttggac

SEQ ID NO: 184010 - DNA, 25 bp, probe
cggtgccgctcagtggaattggatc

SEQ ID NO: 184011 - DNA, 25 bp, probe
cggtgccagtctagagcttctggaa

SEQ ID NO: 184012 - DNA, 25 bp, probe
cgctgtgggcttcagcgtcggtagt

SEQ ID NO: 184013 - DNA, 25 bp, probe
cgtgtggagttgtgtgtggagttat

SEQ ID NO: 184014 - DNA, 25 bp, probe
cgggtgcttgagttgttgtcgtttt

SEQ ID NO: 184015 - DNA, 25 bp, probe
cggatttggagaggtttgcgcctgt

SEQ ID NO: 184016 - DNA, 25 bp, probe
cggattattacaggatctatgtagg

SEQ ID NO: 184017 - DNA, 25 bp, probe
cgtggaattccatgatcctgatagg

SEQ ID NO: 184018 - DNA, 25 bp, probe
cgttgagttccattgcgttaattga

SEQ ID NO: 184019 - DNA, 25 bp, probe
cgtatgcagtatcctatctctttct

SEQ ID NO: 184020 - DNA, 25 bp, probe
cgtcataaagtccagcttgtctccc

SEQ ID NO: 184021 - DNA, 25 bp, probe
cgtcatgaacgtcatccacagcatc

SEQ ID NO: 184022 - DNA, 25 bp, probe
cggtgcacatgctggcattcaacat

SEQ ID NO: 184023 - DNA, 25 bp, probe
cggtcagtgctgggcggagactgtc

SEQ ID NO: 184024 - DNA, 25 bp, probe
cgaacagtgatgctggaaacccagt

SEQ ID NO: 184025 - DNA, 25 bp, probe
cgtgcacaggtgctggacaagttca

SEQ ID NO: 184026 - DNA, 25 bp, probe
cgggagatatgagggctcaagtcgc

SEQ ID NO: 184027 - DNA, 25 bp, probe
cggtgggaagctggtgctcagctcc

SEQ ID NO: 184028 - DNA, 25 bp, probe
gcgttgggaactaggccacctatta

SEQ ID NO: 184029 - DNA, 25 bp, probe
cgtgtgaaaactccctattctctta

SEQ ID NO: 184030 - DNA, 25 bp, probe
gcgtgtaaaagaagccgactccctc

SEQ ID NO: 184031 - DNA, 25 bp, probe
cgagtccaaggcagcctatgtcctc

SEQ ID NO: 184032 - DNA, 25 bp, probe
cgatttgcccgaatcatgttgtccc

SEQ ID NO: 184033 - DNA, 25 bp, probe
cgcgtggctcatcaaatgtttaccc

SEQ ID NO: 184034 - DNA, 25 bp, probe
cgcgcttccatcaagaaggagacca

SEQ ID NO: 184035 - DNA, 25 bp, probe
cggttcctggcagaggatgcactca

SEQ ID NO: 184036 - DNA, 25 bp, probe
cgtgccgctcatcgggaagtactac

SEQ ID NO: 184037 - DNA, 25 bp, probe
cgttctgccatccggaagaggtggc

SEQ ID NO: 184038 - DNA, 25 bp, probe
cgtgaccctcgcctaagaggcgtgc

SEQ ID NO: 184039 - DNA, 25 bp, probe
cgtagcctcatttcttacagacggg

SEQ ID NO: 184040 - DNA, 25 bp, probe
cgtagcctcatttcttacagacggg

SEQ ID NO: 184041 - DNA, 25 bp, probe
cgttgccatcatgatcgtgacctac

SEQ ID NO: 184042 - DNA, 25 bp, probe
cggtgtatgcagtggtgatgcctaa

SEQ ID NO: 184043 - DNA, 25 bp, probe
cgtgtttgcaggtcgactcattgaa

SEQ ID NO: 184044 - DNA, 25 bp, probe
cgtgtttgcaggtcgactcattgaa

SEQ ID NO: 184045 - DNA, 25 bp, probe
cgcctttaatgtgggcagcatatag

SEQ ID NO: 184046 - DNA, 25 bp, probe
cgcctctttgcaaaggacctcaggg

SEQ ID NO: 184047 - DNA, 25 bp, probe
cgcctctttgcaaaggacctcaggg

SEQ ID NO: 184048 - DNA, 25 bp, probe
cgtcctttgcattatctgatcaaat

SEQ ID NO: 184049 - DNA, 25 bp, probe
cgtccattgctggcaactgacttgt

SEQ ID NO: 184050 - DNA, 25 bp, probe
cgcatcctgtacgtgatgcgcctgg

SEQ ID NO: 184051 - DNA, 25 bp, probe
cgatcacagttcaatgcagccttga

SEQ ID NO: 184052 - DNA, 25 bp, probe
cgtagatccatccaagacttgactg

SEQ ID NO: 184053 - DNA, 25 bp, probe
cgtgcaacctggaaagttcatctct

SEQ ID NO: 184054 - DNA, 25 bp, probe
cgtgcaccctggaagggcaggtctg

SEQ ID NO: 184055 - DNA, 25 bp, probe
gcgtccccaggatggatcagggcta

SEQ ID NO: 184056 - DNA, 25 bp, probe
gcgtccccaggatggatcagggcta

SEQ ID NO: 184057 - DNA, 25 bp, probe
cgtcccgaaggaagctcatggagta

SEQ ID NO: 184058 - DNA, 25 bp, probe
cgtctctcggggaccaataagcctg

SEQ ID NO: 184059 - DNA, 25 bp, probe
cgtctcaggtggcctctgaaacacc

SEQ ID NO: 184060 - DNA, 25 bp, probe
cgtccgagagtgctcggcaggactt

SEQ ID NO: 184061 - DNA, 25 bp, probe
cgtcctgtgcggaccggcagagaac

SEQ ID NO: 184062 - DNA, 25 bp, probe
cgtccaggcggaccgagacaatcga

SEQ ID NO: 184063 - DNA, 25 bp, probe
cgtcacgcgcaggtgacggccttag

SEQ ID NO: 184064 - DNA, 25 bp, probe
cgtgatcgccgaggacttcacaatc

SEQ ID NO: 184065 - DNA, 25 bp, probe
ctcatgctgtttagtgatggcactg

SEQ ID NO: 184066 - DNA, 25 bp, probe
cgtgtcagtggtggacctgacctgc

SEQ ID NO: 184067 - DNA, 25 bp, probe
cgtggagctggtgacacgcacacgc

SEQ ID NO: 184068 - DNA, 25 bp, probe
cgaggagctggttacacctttgggc

SEQ ID NO: 184069 - DNA, 25 bp, probe
cgggaatgaacttccgctttggtgc

SEQ ID NO: 184070 - DNA, 25 bp, probe
cgaggaagaacctgtcccaggtctt

SEQ ID NO: 184071 - DNA, 25 bp, probe
ccatcgaaaccctcatccgggatat

SEQ ID NO: 184072 - DNA, 25 bp, probe
cgacgaatattacaacgcggcagca

SEQ ID NO: 184073 - DNA, 25 bp, probe
cgactggaagtcgaacacgcggctg

SEQ ID NO: 184074 - DNA, 25 bp, probe
cgactttggtcagaaaggcctggaa

SEQ ID NO: 184075 - DNA, 25 bp, probe
gcgaccttgggagaaaagggccagg

SEQ ID NO: 184076 - DNA, 25 bp, probe
cgaggcttgggaggaaaccgccgca

SEQ ID NO: 184077 - DNA, 25 bp, probe
cgggctgtggtgaccgcaacaagcc

SEQ ID NO: 184078 - DNA, 25 bp, probe
cggtgttggagtccgcagagcactc

SEQ ID NO: 184079 - DNA, 25 bp, probe
cggtgttgtgagtccacatgagctc

SEQ ID NO: 184080 - DNA, 25 bp, probe
cggtggcttgcaacatgctcatgcc

SEQ ID NO: 184081 - DNA, 25 bp, probe
cgtttctatgcattcaggctgcctt

SEQ ID NO: 184082 - DNA, 25 bp, probe
cgtgtctgctagactctatttcctc

SEQ ID NO: 184083 - DNA, 25 bp, probe
cgctgattgtgattccttctttgtc

SEQ ID NO: 184084 - DNA, 25 bp, probe
cgtgggtgatgacgattgctctctt

SEQ ID NO: 184085 - DNA, 25 bp, probe
cgtgggccatagcatctctattgta

SEQ ID NO: 184086 - DNA, 25 bp, probe
cggtggtgtcagcactgctgcagtg

SEQ ID NO: 184087 - DNA, 25 bp, probe
cggtggtgtcagcactgctgcagtg

SEQ ID NO: 184088 - DNA, 25 bp, probe
cggtggtgtcagcactgctgcagtg

SEQ ID NO: 184089 - DNA, 25 bp, probe
cggtgtgaatcacacatccagctgc

SEQ ID NO: 184090 - DNA, 25 bp, probe
cggggagacagcaacaccagatgca

SEQ ID NO: 184091 - DNA, 25 bp, probe
cggtggcaggacaagcactcgatcc

SEQ ID NO: 184092 - DNA, 25 bp, probe
cggggcagggatacatctcgaggcc

SEQ ID NO: 184093 - DNA, 25 bp, probe
cggtgtgcggtgaactctggcagag

SEQ ID NO: 184094 - DNA, 25 bp, probe
cgggtcatggcagactctatgcaag

SEQ ID NO: 184095 - DNA, 25 bp, probe
cgggtcacacaaaggcatgctggag

SEQ ID NO: 184096 - DNA, 25 bp, probe
cgggagatccgcaaggtgctggacg

SEQ ID NO: 184097 - DNA, 25 bp, probe
cggtggtccctttgtgtgtgaggac

SEQ ID NO: 184098 - DNA, 25 bp, probe
cgtcatggtgacccagtgtgttgag

SEQ ID NO: 184099 - DNA, 25 bp, probe
cgtgcatgtggctgtcagtgacatc

SEQ ID NO: 184100 - DNA, 25 bp, probe
cgtgctgctcctaggcaatgactac

SEQ ID NO: 184101 - DNA, 25 bp, probe
cggtgatcttgggcagaacataccg

SEQ ID NO: 184102 - DNA, 25 bp, probe
cggtgatcgtgctgcagtaccacca

SEQ ID NO: 184103 - DNA, 25 bp, probe
cggtgacggggtcacccacactgtg

SEQ ID NO: 184104 - DNA, 25 bp, probe
cgttaccagcagctgaaaccaattg

SEQ ID NO: 184105 - DNA, 25 bp, probe
cgtcttccacaaggaaatcgcagct

SEQ ID NO: 184106 - DNA, 25 bp, probe
cgtcgtaacagcaacagcaaccctc

SEQ ID NO: 184107 - DNA, 25 bp, probe
cgggctaatccacggaattgcctcc

SEQ ID NO: 184108 - DNA, 25 bp, probe
cgggctaatccacggaattgcctcc

SEQ ID NO: 184109 - DNA, 25 bp, probe
cgggtcactccatcgatgttcttct

SEQ ID NO: 184110 - DNA, 25 bp, probe
cgtggacaagactcgcagattttct

SEQ ID NO: 184111 - DNA, 25 bp, probe
cgtgggaggtcatcgaggtgtcctg

SEQ ID NO: 184112 - DNA, 25 bp, probe
cgtgggaggtcatcgaggtgtcctg

SEQ ID NO: 184113 - DNA, 25 bp, probe
cgagatttttgctcaggcgttcctg

SEQ ID NO: 184114 - DNA, 25 bp, probe
cgagatttttgctcaggcgttcctg

SEQ ID NO: 184115 - DNA, 25 bp, probe
cgtgttctaatcttaggcgcttcag

SEQ ID NO: 184116 - DNA, 25 bp, probe
cgagaactactgatagggctgggtc

SEQ ID NO: 184117 - DNA, 25 bp, probe
cgagtactaccgcgtgcgcgaggat

SEQ ID NO: 184118 - DNA, 25 bp, probe
cgcagttttcttgggggcagaggaa

SEQ ID NO: 184119 - DNA, 25 bp, probe
cgggttcctctctgagcgagcggac

SEQ ID NO: 184120 - DNA, 25 bp, probe
cgggattcgaggcgtgcgagtggac

SEQ ID NO: 184121 - DNA, 25 bp, probe
cgggaaagaacaggtcgtgtctcct

SEQ ID NO: 184122 - DNA, 25 bp, probe
cggggaagtacagctcagagttctg

SEQ ID NO: 184123 - DNA, 25 bp, probe
gcggggaagtacagctcagagttct

SEQ ID NO: 184124 - DNA, 25 bp, probe
cgcggtgcacgcgctttaagtgtgc

SEQ ID NO: 184125 - DNA, 25 bp, probe
cgctttgagtgccttttgaacgctg

SEQ ID NO: 184126 - DNA, 25 bp, probe
cgttttgttgccatctgcaatcctc

SEQ ID NO: 184127 - DNA, 25 bp, probe
cgttctttatccagacagacaatgt

SEQ ID NO: 184128 - DNA, 25 bp, probe
cgagatctggccacacgaaactgtt

SEQ ID NO: 184129 - DNA, 25 bp, probe
cgtcgctggacaacccagaactgga

SEQ ID NO: 184130 - DNA, 25 bp, probe
cgatggcggctctcgccaaaaggaa

SEQ ID NO: 184131 - DNA, 25 bp, probe
cgtggaggcctgcctcaacaaagac

SEQ ID NO: 184132 - DNA, 25 bp, probe
cgtggatggcatcttataaatatgt

SEQ ID NO: 184133 - DNA, 25 bp, probe
cgtgcatgtgggatgtatttgaagc

SEQ ID NO: 184134 - DNA, 25 bp, probe
cgggggaacatgattccacagccca

SEQ ID NO: 184135 - DNA, 25 bp, probe
cgggggaacatgattccacagccca

SEQ ID NO: 184136 - DNA, 25 bp, probe
cgggaggtgaggctcttcacatccc

SEQ ID NO: 184137 - DNA, 25 bp, probe
aaaaagagcttgttaatgatgatga

SEQ ID NO: 184138 - DNA, 25 bp, probe
cgggaggcaaggcctcatctacctc

SEQ ID NO: 184139 - DNA, 25 bp, probe
cgggacagcaatgggcgcatcatcc

SEQ ID NO: 184140 - DNA, 25 bp, probe
cgggagcacttgaggtatcccgcag

SEQ ID NO: 184141 - DNA, 25 bp, probe
cgggacagctgcaagggtgactccg

SEQ ID NO: 184142 - DNA, 25 bp, probe
cgaggagcaggctgcaggtttcctg

SEQ ID NO: 184143 - DNA, 25 bp, probe
cgaggagcaggctgcaggtttcctg

SEQ ID NO: 184144 - DNA, 25 bp, probe
cgaggccagcctagaggtggcttct

SEQ ID NO: 184145 - DNA, 25 bp, probe
cggtggtggtgacggtgatcgtgct

SEQ ID NO: 184146 - DNA, 25 bp, probe
cggtggctgggcagagctgcatcat

SEQ ID NO: 184147 - DNA, 25 bp, probe
cgggatcaggccaagaggatcaatc

SEQ ID NO: 184148 - DNA, 25 bp, probe
cgggatgtggcacagacgtccatca

SEQ ID NO: 184149 - DNA, 25 bp, probe
cgtggaaggcagcaggagccctcac

SEQ ID NO: 184150 - DNA, 25 bp, probe
cgtggaaggcagcaggagccctcac

SEQ ID NO: 184151 - DNA, 25 bp, probe
cgtggaggtgcgcagtggactcaca

SEQ ID NO: 184152 - DNA, 25 bp, probe
cgtggacatagccctgtgatactgc

SEQ ID NO: 184153 - DNA, 25 bp, probe
cgtggctctgatgctgagcgaagct

SEQ ID NO: 184154 - DNA, 25 bp, probe
cgtggtcagcatgcacaggagctcc

SEQ ID NO: 184155 - DNA, 25 bp, probe
cgtggtcacatttcaggaagcatca

SEQ ID NO: 184156 - DNA, 25 bp, probe
cgtggtcctttgcaagagcgcagac

SEQ ID NO: 184157 - DNA, 25 bp, probe
cgtggactttagcatgcagagcagc

SEQ ID NO: 184158 - DNA, 25 bp, probe
cgtggactgcacaatgacagagaag

SEQ ID NO: 184159 - DNA, 25 bp, probe
cgggagtccaagtagctgcatagcc

SEQ ID NO: 184160 - DNA, 25 bp, probe
cgtggagtcagaactgcctctgagc

SEQ ID NO: 184161 - DNA, 25 bp, probe
cgtgtggtcatatctgcaccgagtt

SEQ ID NO: 184162 - DNA, 25 bp, probe
cgggatctgagatgccagccaagtg

SEQ ID NO: 184163 - DNA, 25 bp, probe
cgggcttatgcagaccagcaagctg

SEQ ID NO: 184164 - DNA, 25 bp, probe
cgtggcatttgctgaccgaatgctc

SEQ ID NO: 184165 - DNA, 25 bp, probe
cgggctttggcgccaggagatgcca

SEQ ID NO: 184166 - DNA, 25 bp, probe
cgggccagtgagttcgctaatgagc

SEQ ID NO: 184167 - DNA, 25 bp, probe
cgggccagtgagttcgctaatgagc

SEQ ID NO: 184168 - DNA, 25 bp, probe
cgtggcctgtagaatagcctgtggc

SEQ ID NO: 184169 - DNA, 25 bp, probe
cgtctcctatggaaagtcgtcaggg

SEQ ID NO: 184170 - DNA, 25 bp, probe
cgtcacctacgcaggatcgtggagg

SEQ ID NO: 184171 - DNA, 25 bp, probe
cgtatcctatggacggtcggatgca

SEQ ID NO: 184172 - DNA, 25 bp, probe
cgtaccttactgagatctggagaca

SEQ ID NO: 184173 - DNA, 25 bp, probe
cgagagcgcttagtaggtcggagga

SEQ ID NO: 184174 - DNA, 25 bp, probe
cgggcgctctagaggataacaagca

SEQ ID NO: 184175 - DNA, 25 bp, probe
cgggcagccgggcttcaaaagcaac

SEQ ID NO: 184176 - DNA, 25 bp, probe
cgggcccagaggccactaagagaca

SEQ ID NO: 184177 - DNA, 25 bp, probe
cgggtgtaagtgccatctggtagct

SEQ ID NO: 184178 - DNA, 25 bp, probe
cgggatgtgcaaggaagggattctg

SEQ ID NO: 184179 - DNA, 25 bp, probe
cgtgagtggacatgacagggaacag

SEQ ID NO: 184180 - DNA, 25 bp, probe
cgtcttgtacagaagccgccacaag

SEQ ID NO: 184181 - DNA, 25 bp, probe
cctttgtaaaacagcctatagatga

SEQ ID NO: 184182 - DNA, 25 bp, probe
ccgtttaccaacctcttgaatggca

SEQ ID NO: 184183 - DNA, 25 bp, probe
ccgtttaccaacctcttgaatggca

SEQ ID NO: 184184 - DNA, 25 bp, probe
ccaggcttaccaaagtattaagtca

SEQ ID NO: 184185 - DNA, 25 bp, probe
cgggccgacaccagtacataaatga

SEQ ID NO: 184186 - DNA, 25 bp, probe
cgtggccgaccagtgggagttcaag

SEQ ID NO: 184187 - DNA, 25 bp, probe
cgagtccgtcacgtgggagaacctg

SEQ ID NO: 184188 - DNA, 25 bp, probe
cgtgtggccgcagcggcgagaactt

SEQ ID NO: 184189 - DNA, 25 bp, probe
cgtgatatgcacctgcaacggagac

SEQ ID NO: 184190 - DNA, 25 bp, probe
cgtttgaccccagcgagatcaaagt

SEQ ID NO: 184191 - DNA, 25 bp, probe
cgttctacccaggtacgctgcaaag

SEQ ID NO: 184192 - DNA, 25 bp, probe
cgttctatccctgtaagtgcgcaga

SEQ ID NO: 184193 - DNA, 25 bp, probe
cgttctatccctgtaagtgcgcaga

SEQ ID NO: 184194 - DNA, 25 bp, probe
cgttctatccctgtaagtgcgcaga

SEQ ID NO: 184195 - DNA, 25 bp, probe
cgttaacagcctttggagtcgcaat

SEQ ID NO: 184196 - DNA, 25 bp, probe
cgtgtaacacttgttgcttggcaac

SEQ ID NO: 184197 - DNA, 25 bp, probe
cgtgtaacacttgttgcttggcaac

SEQ ID NO: 184198 - DNA, 25 bp, probe
cgtgtgaaccttttgtgttgtcaga

SEQ ID NO: 184199 - DNA, 25 bp, probe
cgtgtcaactttcagtgctggccaa

SEQ ID NO: 184200 - DNA, 25 bp, probe
cgtgtcaactttcagtgctggccaa

SEQ ID NO: 184201 - DNA, 25 bp, probe
cgttcatttaaggaggcgctggcaa

SEQ ID NO: 184202 - DNA, 25 bp, probe
cgatccatttaagagggcctgtgcc

SEQ ID NO: 184203 - DNA, 25 bp, probe
cgtccatgttcttgccagggaaatg

SEQ ID NO: 184204 - DNA, 25 bp, probe
cgtgaatgtatttctcgtggcaaga

SEQ ID NO: 184205 - DNA, 25 bp, probe
cgtgaatgtatttctcgtggcaaga

SEQ ID NO: 184206 - DNA, 25 bp, probe
cgtggatgtctttcacgctgtgaag

SEQ ID NO: 184207 - DNA, 25 bp, probe
cgagggtcttcccatcacatgaaga

SEQ ID NO: 184208 - DNA, 25 bp, probe
cgaaggatctgtccgttcagggtct

SEQ ID NO: 184209 - DNA, 25 bp, probe
cgggtgtgccatccagtgccgggtc

SEQ ID NO: 184210 - DNA, 25 bp, probe
cgtggtgcttcatcagcaccgggcg

SEQ ID NO: 184211 - DNA, 25 bp, probe
cgaggctcctaatggccaaggctgt

SEQ ID NO: 184212 - DNA, 25 bp, probe
cgtggccctgagcatggcaaggggg

SEQ ID NO: 184213 - DNA, 25 bp, probe
cgtggccaggatgctggaaggggtg

SEQ ID NO: 184214 - DNA, 25 bp, probe
cgctgcccgagtgctacaagaagcc

SEQ ID NO: 184215 - DNA, 25 bp, probe
cgtggccgaggacttcaagacgcag

SEQ ID NO: 184216 - DNA, 25 bp, probe
cgtcgccctggacttcgagcaagag

SEQ ID NO: 184217 - DNA, 25 bp, probe
cgtcgtctccgtatcgaaatgatgt

SEQ ID NO: 184218 - DNA, 25 bp, probe
cgtcgtctccgtatcgaaatgatgt

SEQ ID NO: 184219 - DNA, 25 bp, probe
cgtgttctcttttgtcaggaaactc

SEQ ID NO: 184220 - DNA, 25 bp, probe
cgatttctcttgaccatagccataa

SEQ ID NO: 184221 - DNA, 25 bp, probe
cgtctgtctcttggctattttaacc

SEQ ID NO: 184222 - DNA, 25 bp, probe
cgatctgcccctggaagattaaacc

SEQ ID NO: 184223 - DNA, 25 bp, probe
cgtctcccctgtcaatgagaatcag

SEQ ID NO: 184224 - DNA, 25 bp, probe
cgtgcccaaactccaaagaatctat

SEQ ID NO: 184225 - DNA, 25 bp, probe
cgtgccagcacaatctgccaaagtt

SEQ ID NO: 184226 - DNA, 25 bp, probe
cgatgtcacgtattgccaagagctt

SEQ ID NO: 184227 - DNA, 25 bp, probe
cgctatagagtattccataatttga

SEQ ID NO: 184228 - DNA, 25 bp, probe
cgcgtggcattttcacattatttaa

SEQ ID NO: 184229 - DNA, 25 bp, probe
cgctgcaggctcagtactttttatg

SEQ ID NO: 184230 - DNA, 25 bp, probe
cgctgccagatgcgggctttttttt

SEQ ID NO: 184231 - DNA, 25 bp, probe
cgatgaacatgccgttggttttatt

SEQ ID NO: 184232 - DNA, 25 bp, probe
cgtgtgttccagtggatgagtttta

SEQ ID NO: 184233 - DNA, 25 bp, probe
cgggaagctcactggcatggccttc

SEQ ID NO: 184234 - DNA, 25 bp, probe
cgtgaggactgcagggcatgtcccc

SEQ ID NO: 184235 - DNA, 25 bp, probe
cgtggtgattgtggtgagcgtgttc

SEQ ID NO: 184236 - DNA, 25 bp, probe
cgtggagatggtgggccagcttgtc

SEQ ID NO: 184237 - DNA, 25 bp, probe
cgggaggttgatggcgagtggtgct

SEQ ID NO: 184238 - DNA, 25 bp, probe
cgatgacacagacaccaccgtgtac

SEQ ID NO: 184239 - DNA, 25 bp, probe
cgtggcaagggaatagcgacttagt

SEQ ID NO: 184240 - DNA, 25 bp, probe
cgggaaatgagaagacggctcggtg

SEQ ID NO: 184241 - DNA, 25 bp, probe
cgggaaatgcaggaaggccgggttg

SEQ ID NO: 184242 - DNA, 25 bp, probe
cgggcagcacaggtgaaggcgaggg

SEQ ID NO: 184243 - DNA, 25 bp, probe
cgggcagaaggcgaaagtccagctg

SEQ ID NO: 184244 - DNA, 25 bp, probe
cgggcagtcggagacaggatcactg

SEQ ID NO: 184245 - DNA, 25 bp, probe
cgggcagtcggagacaggatcactg

SEQ ID NO: 184246 - DNA, 25 bp, probe
cgggacttggcagccagaaacatcc

SEQ ID NO: 184247 - DNA, 25 bp, probe
cgcgatttggccaccaggaactgcc

SEQ ID NO: 184248 - DNA, 25 bp, probe
cgggagatggacatcctggcaactg

SEQ ID NO: 184249 - DNA, 25 bp, probe
cgggaggctgacttgttgatgaatc

SEQ ID NO: 184250 - DNA, 25 bp, probe
cgggcacgctggagttcatggctcc

SEQ ID NO: 184251 - DNA, 25 bp, probe
cgggcacgctggagttcatggctcc

SEQ ID NO: 184252 - DNA, 25 bp, probe
cgggcacgctggagttcatggctcc

SEQ ID NO: 184253 - DNA, 25 bp, probe
cgggcagtgcggaagatgctgctgg

SEQ ID NO: 184254 - DNA, 25 bp, probe
cgggagatcctggcatagcacaggg

SEQ ID NO: 184255 - DNA, 25 bp, probe
cgtcaggcatgcgagtaacaagggc

SEQ ID NO: 184256 - DNA, 25 bp, probe
cgatgctgctccagtaactacagtg

SEQ ID NO: 184257 - DNA, 25 bp, probe
cgtggctactttcacttcagagtgt

SEQ ID NO: 184258 - DNA, 25 bp, probe
cgggacacactgatacttcatggga

SEQ ID NO: 184259 - DNA, 25 bp, probe
cgaggctccactaatctctttagta

SEQ ID NO: 184260 - DNA, 25 bp, probe
cgaggccaactcactggtcaatgct

SEQ ID NO: 184261 - DNA, 25 bp, probe
cgaggccaactcactggtcaatgct

SEQ ID NO: 184262 - DNA, 25 bp, probe
cgaccaccccttgggtatatctaat

SEQ ID NO: 184263 - DNA, 25 bp, probe
ggacgggcccaaagttatttatgat

SEQ ID NO: 184264 - DNA, 25 bp, probe
cgaggtggcctacatgtttatttta

SEQ ID NO: 184265 - DNA, 25 bp, probe
cgttgttagtatcatggtgtttttg

SEQ ID NO: 184266 - DNA, 25 bp, probe
cgattttctgtatgatgttacttta

SEQ ID NO: 184267 - DNA, 25 bp, probe
cgtgtattctattttgcgtttctta

SEQ ID NO: 184268 - DNA, 25 bp, probe
cgtttggtgattttcatgtttctta

SEQ ID NO: 184269 - DNA, 25 bp, probe
gcgtctgtgattcatttcatgtagt

SEQ ID NO: 184270 - DNA, 25 bp, probe
cgtcatcatgaacacggctctagat

SEQ ID NO: 184271 - DNA, 25 bp, probe
cgcatcatcatcatgctgaccgtcg

SEQ ID NO: 184272 - DNA, 25 bp, probe
cgcatcatcatcatgctgaccgtcg

SEQ ID NO: 184273 - DNA, 25 bp, probe
cgacttcattcgaccagagttcttg

SEQ ID NO: 184274 - DNA, 25 bp, probe
cgacttcattcgaccagagttcttg

SEQ ID NO: 184275 - DNA, 25 bp, probe
cgacttcatccgggaggtcaatgcc

SEQ ID NO: 184276 - DNA, 25 bp, probe
cgagttggcaccaaacgctatatgc

SEQ ID NO: 184277 - DNA, 25 bp, probe
cgcatgtgtaacaacagccgcttct

SEQ ID NO: 184278 - DNA, 25 bp, probe
cgagtggagatcagagccctctccc

SEQ ID NO: 184279 - DNA, 25 bp, probe
cgtggcggcgacgacccattcgaac

SEQ ID NO: 184280 - DNA, 25 bp, probe
cgaggggcgacttaccaaaatcagc

SEQ ID NO: 184281 - DNA, 25 bp, probe
cgaggcgtgcgagtggactaacaac

SEQ ID NO: 184282 - DNA, 25 bp, probe
cgggcgtgcagacagcaggaagccc

SEQ ID NO: 184283 - DNA, 25 bp, probe
cgaactgtagagtgcagggacccct

SEQ ID NO: 184284 - DNA, 25 bp, probe
gcgttggtcaaagcggagaccacgt

SEQ ID NO: 184285 - DNA, 25 bp, probe
cgttggtcaaagcggagaccacgtg

SEQ ID NO: 184286 - DNA, 25 bp, probe
cgttgggctggtggggaggcctagt

SEQ ID NO: 184287 - DNA, 25 bp, probe
ccctaggctggttggtaaaagagag

SEQ ID NO: 184288 - DNA, 25 bp, probe
cgtccggttgtatgtaaactggagg

SEQ ID NO: 184289 - DNA, 25 bp, probe
cgacctggtagtgagaacattttag

SEQ ID NO: 184290 - DNA, 25 bp, probe
cgaccgtgccgcagaagggtttaga

SEQ ID NO: 184291 - DNA, 25 bp, probe
cgatgccgggatcaaagtctgttct

SEQ ID NO: 184292 - DNA, 25 bp, probe
cgttcggaaccaagcagacgttatt

SEQ ID NO: 184293 - DNA, 25 bp, probe
cgtttacaatagactgaatccttac

SEQ ID NO: 184294 - DNA, 25 bp, probe
cgtgtgtgaaattctctttcctgta

SEQ ID NO: 184295 - DNA, 25 bp, probe
cgtgatggaaaccacttcctctaca

SEQ ID NO: 184296 - DNA, 25 bp, probe
cgtgaggaacgccattgtcctcttc

SEQ ID NO: 184297 - DNA, 25 bp, probe
cgggctgaagcagttttcctgcctc

SEQ ID NO: 184298 - DNA, 25 bp, probe
cgggaagagactgtatccttcacag

SEQ ID NO: 184299 - DNA, 25 bp, probe
cgaccaaagaccactctcagataca

SEQ ID NO: 184300 - DNA, 25 bp, probe
cgggaaatccgaatgctcaagcaac

SEQ ID NO: 184301 - DNA, 25 bp, probe
cgggaaattgagatccaggctcatc

SEQ ID NO: 184302 - DNA, 25 bp, probe
cgaatatgatacggtctccggcctc

SEQ ID NO: 184303 - DNA, 25 bp, probe
cgtcaagatcgcagactttggcctc

SEQ ID NO: 184304 - DNA, 25 bp, probe
cgtggcggcgcatgagttcggccac

SEQ ID NO: 184305 - DNA, 25 bp, probe
cgggccacgaggacttcgtgcagtg

SEQ ID NO: 184306 - DNA, 25 bp, probe
cgggccacgaggacttcgtgcagtg

SEQ ID NO: 184307 - DNA, 25 bp, probe
cgtacccagagggcttgcattggtc

SEQ ID NO: 184308 - DNA, 25 bp, probe
cgtacagccatatgagtgcctcggt

SEQ ID NO: 184309 - DNA, 25 bp, probe
cgtagcagcacctactatgcttcag

SEQ ID NO: 184310 - DNA, 25 bp, probe
cgtcatgagcaccttgctggctaat

SEQ ID NO: 184311 - DNA, 25 bp, probe
cgtgtgcgatctctggagctggatg

SEQ ID NO: 184312 - DNA, 25 bp, probe
cgtggtgcacatgctggtcatggtg

SEQ ID NO: 184313 - DNA, 25 bp, probe
cgggccacaagcacgatgagtgaag

SEQ ID NO: 184314 - DNA, 25 bp, probe
cgtggccagcccaaggatgaggtgg

SEQ ID NO: 184315 - DNA, 25 bp, probe
cgtggccagcccaaggatgaggtgg

SEQ ID NO: 184316 - DNA, 25 bp, probe
cgggccagaccaatggctgagagcc

SEQ ID NO: 184317 - DNA, 25 bp, probe
cgggctacacggagaagcagcgccg

SEQ ID NO: 184318 - DNA, 25 bp, probe
cgaggccaacctcatgaagcagctg

SEQ ID NO: 184319 - DNA, 25 bp, probe
cgaggccaacctcatgaagcagctg

SEQ ID NO: 184320 - DNA, 25 bp, probe
cgggctcagacactctgcaagaggt

SEQ ID NO: 184321 - DNA, 25 bp, probe
cgtagccatctactctgagcaggac

SEQ ID NO: 184322 - DNA, 25 bp, probe
cgtgatggaatacctgcacgtgctc

SEQ ID NO: 184323 - DNA, 25 bp, probe
cgatgatggacttgagcgccgtgtt

SEQ ID NO: 184324 - DNA, 25 bp, probe
cgagatgtggctcttcgttgtttag

SEQ ID NO: 184325 - DNA, 25 bp, probe
cgagcatctggcggagtacttggaa

SEQ ID NO: 184326 - DNA, 25 bp, probe
cgactgtggcggttagcattggatt

SEQ ID NO: 184327 - DNA, 25 bp, probe
cgacatgggcggtgagtattactct

SEQ ID NO: 184328 - DNA, 25 bp, probe
cgacgccggagagtatgtccaacct

SEQ ID NO: 184329 - DNA, 25 bp, probe
cgatacacgggacgttgagcacaac

SEQ ID NO: 184330 - DNA, 25 bp, probe
cgatacacgggacgttgagcacaac

SEQ ID NO: 184331 - DNA, 25 bp, probe
cgatagctaggccaagtttgccagc

SEQ ID NO: 184332 - DNA, 25 bp, probe
cgaggcagaggtcatgttcccagcc

SEQ ID NO: 184333 - DNA, 25 bp, probe
cgtgatgcaggggtgtgaggcccag

SEQ ID NO: 184334 - DNA, 25 bp, probe
cgtgatgctggaaggtgggcgtcgt

SEQ ID NO: 184335 - DNA, 25 bp, probe
cgttgggacagggaggtgtgaggca

SEQ ID NO: 184336 - DNA, 25 bp, probe
cgttgagaagggggtgagtggtgcc

SEQ ID NO: 184337 - DNA, 25 bp, probe
cgtgtggacgaggcttgtggtgacc

SEQ ID NO: 184338 - DNA, 25 bp, probe
cgtggccaagggtgaggtggccaaa

SEQ ID NO: 184339 - DNA, 25 bp, probe
cgaggtcaagggtgaaaagcagctg

SEQ ID NO: 184340 - DNA, 25 bp, probe
cgaccgcggggacatgaagagcagc

SEQ ID NO: 184341 - DNA, 25 bp, probe
cgagcggggagggtaatgtgcacca

SEQ ID NO: 184342 - DNA, 25 bp, probe
cgagcggaaggggctagactcaagc

SEQ ID NO: 184343 - DNA, 25 bp, probe
cgatcagataccgtcgtagttccga

SEQ ID NO: 184344 - DNA, 25 bp, probe
cgagcagctaatgttctggtctccg

SEQ ID NO: 184345 - DNA, 25 bp, probe
cgtgcactaacttcatgatgacccc

SEQ ID NO: 184346 - DNA, 25 bp, probe
cgtcacgctgaatatatgaccacgc

SEQ ID NO: 184347 - DNA, 25 bp, probe
cgtcaccgcaagatgaagccagtgc

SEQ ID NO: 184348 - DNA, 25 bp, probe
cgtcacccatacatcactgtttggt

SEQ ID NO: 184349 - DNA, 25 bp, probe
cgtcatcctttacactctagtggtc

SEQ ID NO: 184350 - DNA, 25 bp, probe
cgtcatcctttacactctagtggtc

SEQ ID NO: 184351 - DNA, 25 bp, probe
cgtccttcttagtttgcttgtggcc

SEQ ID NO: 184352 - DNA, 25 bp, probe
cgtccatacttcgattcttatcatg

SEQ ID NO: 184353 - DNA, 25 bp, probe
cgtgccagtcactgttctaatgctg

SEQ ID NO: 184354 - DNA, 25 bp, probe
cgctgacagtcaaggttctcggtgc

SEQ ID NO: 184355 - DNA, 25 bp, probe
cgtgccagggcgattctggaggccc

SEQ ID NO: 184356 - DNA, 25 bp, probe
cgtgacgagatccttcgtggggaac

SEQ ID NO: 184357 - DNA, 25 bp, probe
cgtcactgactttggctgggaggat

SEQ ID NO: 184358 - DNA, 25 bp, probe
cgtcactgactttggctgggaggat

SEQ ID NO: 184359 - DNA, 25 bp, probe
cgtcactgactttggctgggaggat

SEQ ID NO: 184360 - DNA, 25 bp, probe
cgtgcactgcagtgatggtgcgggg

SEQ ID NO: 184361 - DNA, 25 bp, probe
cgtcagctctgtggtggtggcaagc

SEQ ID NO: 184362 - DNA, 25 bp, probe
cgtcctcatgagcagctgctgggag

SEQ ID NO: 184363 - DNA, 25 bp, probe
cgtcttcagcatcagcatgttggac

SEQ ID NO: 184364 - DNA, 25 bp, probe
cgtcttcagcatcagcatgttggac

SEQ ID NO: 184365 - DNA, 25 bp, probe
cgtgcattatcaacatcatattcag

SEQ ID NO: 184366 - DNA, 25 bp, probe
cgatctcttgacctcatgatctgcc

SEQ ID NO: 184367 - DNA, 25 bp, probe
cgatgctcttagctgagtgtcccgc

SEQ ID NO: 184368 - DNA, 25 bp, probe
gctgataactactgacttcactgga

SEQ ID NO: 184369 - DNA, 25 bp, probe
gcgacaaccacgcgtcgagtgagca

SEQ ID NO: 184370 - DNA, 25 bp, probe
cgagcgagcagctcggtccagtgac

SEQ ID NO: 184371 - DNA, 25 bp, probe
cgaccatggggcgggccagtgagtt

SEQ ID NO: 184372 - DNA, 25 bp, probe
cgaccatggggcgggccagtgagtt

SEQ ID NO: 184373 - DNA, 25 bp, probe
cgaggcatttggagagcaagggttc

SEQ ID NO: 184374 - DNA, 25 bp, probe
cgagggcttcgacgaggagggccgc

SEQ ID NO: 184375 - DNA, 25 bp, probe
cgtggagatgtggaatggggggctg

SEQ ID NO: 184376 - DNA, 25 bp, probe
cgtgctcagcgggaggaggggcttg

SEQ ID NO: 184377 - DNA, 25 bp, probe
cgtgcttgggaaaagggtcttgctc

SEQ ID NO: 184378 - DNA, 25 bp, probe
cgtgttaggaacaaggtgcaccata

SEQ ID NO: 184379 - DNA, 25 bp, probe
cgatgtctgggaacttgggacgcca

SEQ ID NO: 184380 - DNA, 25 bp, probe
cgatgtctgggaacttgggacgcca

SEQ ID NO: 184381 - DNA, 25 bp, probe
cgatgtctggagctatggggtcacc

SEQ ID NO: 184382 - DNA, 25 bp, probe
cgatgtctggagctttggagtgttg

SEQ ID NO: 184383 - DNA, 25 bp, probe
cgtgtctgtgcaggattgtctgggt

SEQ ID NO: 184384 - DNA, 25 bp, probe
cgtgtcctgacgttttgttgcttat

SEQ ID NO: 184385 - DNA, 25 bp, probe
cgtgccactacctacttgtgtgatt

SEQ ID NO: 184386 - DNA, 25 bp, probe
cgtggtgtatactctgtgattgatc

SEQ ID NO: 184387 - DNA, 25 bp, probe
cgtggtgatatactttgcaactggc

SEQ ID NO: 184388 - DNA, 25 bp, probe
cgtggtgtatgataacaacagcagc

SEQ ID NO: 184389 - DNA, 25 bp, probe
cgtgtcagctttcacagcatcaagc

SEQ ID NO: 184390 - DNA, 25 bp, probe
cgtgacactggtgatcgcatacatc

SEQ ID NO: 184391 - DNA, 25 bp, probe
cgtggagttgtccatcgtgacatca

SEQ ID NO: 184392 - DNA, 25 bp, probe
cgtgtggttgacccagatatctccg

SEQ ID NO: 184393 - DNA, 25 bp, probe
cgatgggcagtttcacagttcatcc

SEQ ID NO: 184394 - DNA, 25 bp, probe
cgagcacctgaatgacgtcaacgca

SEQ ID NO: 184395 - DNA, 25 bp, probe
cgagcacctgaatgacgtcaacgca

SEQ ID NO: 184396 - DNA, 25 bp, probe
cgtgaccgaacctgacatcaacaac

SEQ ID NO: 184397 - DNA, 25 bp, probe
cgtgggagaacctgcaccagcagac

SEQ ID NO: 184398 - DNA, 25 bp, probe
cgtcaaagaaagcgccgctcatgac

SEQ ID NO: 184399 - DNA, 25 bp, probe
cgtcaaatggatggctcccgaattc

SEQ ID NO: 184400 - DNA, 25 bp, probe
cgtatgtggagaggcccacggtcct

SEQ ID NO: 184401 - DNA, 25 bp, probe
cgtatggagacagcactgccaggtc

SEQ ID NO: 184402 - DNA, 25 bp, probe
cgtatgtgatgactgtgacggggct

SEQ ID NO: 184403 - DNA, 25 bp, probe
cgtttggagctatgggatcgtcatg

SEQ ID NO: 184404 - DNA, 25 bp, probe
cgtgttcgactatgagtacgactgg

SEQ ID NO: 184405 - DNA, 25 bp, probe
cgtcgtcgacaacggctccggcatg

SEQ ID NO: 184406 - DNA, 25 bp, probe
cgtcgtgagcagaaaggcccgggga

SEQ ID NO: 184407 - DNA, 25 bp, probe
cgttgctgtcgattaagaccggagc

SEQ ID NO: 184408 - DNA, 25 bp, probe
cgtcggccggagatgagccgaggct

SEQ ID NO: 184409 - DNA, 25 bp, probe
cgtaagtcaggctcgagggagactg

SEQ ID NO: 184410 - DNA, 25 bp, probe
cgtaactgccgcactcaggtgaaag

SEQ ID NO: 184411 - DNA, 25 bp, probe
cgtattgcgccgctagaggtgaaat

SEQ ID NO: 184412 - DNA, 25 bp, probe
cgtttcgccagtgatgcggccaatg

SEQ ID NO: 184413 - DNA, 25 bp, probe
cgatgtttccggtatgcagagctat

SEQ ID NO: 184414 - DNA, 25 bp, probe
cgatgtttccggtatgcagagctat

SEQ ID NO: 184415 - DNA, 25 bp, probe
cgtcttctgccacaatgacatccag

SEQ ID NO: 184416 - DNA, 25 bp, probe
cgtgctccatgaactcaaacaccag

SEQ ID NO: 184417 - DNA, 25 bp, probe
cgtgcagcgcatcttcgaaaacggc

SEQ ID NO: 184418 - DNA, 25 bp, probe
cgtgcagcgcatcttcgaaaacggc

SEQ ID NO: 184419 - DNA, 25 bp, probe
cgtctgcctgtttcgaaatggggaa

SEQ ID NO: 184420 - DNA, 25 bp, probe
cgtgcgcctttctgccggacgcgag

SEQ ID NO: 184421 - DNA, 25 bp, probe
cgtcacctttttccgacagatgtcg

SEQ ID NO: 184422 - DNA, 25 bp, probe
cgtcacctttttccgacagatgtcg

SEQ ID NO: 184423 - DNA, 25 bp, probe
cgtcatgcatctgttctacgtgcgg

SEQ ID NO: 184424 - DNA, 25 bp, probe
cgtcatgcatctgttctacgtgcgg

SEQ ID NO: 184425 - DNA, 25 bp, probe
cgtctgctgctcctacaagggaagc

SEQ ID NO: 184426 - DNA, 25 bp, probe
cgaggctctcaaacacgggaagttc

SEQ ID NO: 184427 - DNA, 25 bp, probe
cgaccgctataagcgctggaagtca

SEQ ID NO: 184428 - DNA, 25 bp, probe
cgacgcctataaactgtcgcgcctg

SEQ ID NO: 184429 - DNA, 25 bp, probe
cgtccttgtcataactttgtgttgg

SEQ ID NO: 184430 - DNA, 25 bp, probe
cgactcttcttcagctttgtggagg

SEQ ID NO: 184431 - DNA, 25 bp, probe
cgtcctgtgcgtatgctacgctggt

SEQ ID NO: 184432 - DNA, 25 bp, probe
cgtctatgctgctttgttcactgca

SEQ ID NO: 184433 - DNA, 25 bp, probe
cgtgcttggcattcaattcctgcag

SEQ ID NO: 184434 - DNA, 25 bp, probe
cgtgctgggcatcggtgatcggcac

SEQ ID NO: 184435 - DNA, 25 bp, probe
cgtggtgctctgggagatcttcacc

SEQ ID NO: 184436 - DNA, 25 bp, probe
cgaggagctgagggtttaccccgtg

SEQ ID NO: 184437 - DNA, 25 bp, probe
cgatggcaagcgggtctacaaccct

SEQ ID NO: 184438 - DNA, 25 bp, probe
cgtagaagggcgcccagcatagcac

SEQ ID NO: 184439 - DNA, 25 bp, probe
gctgtaaaggagtcccccagacaat

SEQ ID NO: 184440 - DNA, 25 bp, probe
cgtgccggggacacacacagagaac

SEQ ID NO: 184441 - DNA, 25 bp, probe
cgtgccggggacacacacagagaac

SEQ ID NO: 184442 - DNA, 25 bp, probe
cgtgttaggaacgtcaaagaaagcg

SEQ ID NO: 184443 - DNA, 25 bp, probe
cgatgtgtccaatcggagacaaaag

SEQ ID NO: 184444 - DNA, 25 bp, probe
cgaggcaaccacgagacagacaaca

SEQ ID NO: 184445 - DNA, 25 bp, probe
cgagaaactgcatggtcgcccatga

SEQ ID NO: 184446 - DNA, 25 bp, probe
cgagaagacatccaggccacgggat

SEQ ID NO: 184447 - DNA, 25 bp, probe
cgtgaagatcttcgacttcggcgca

SEQ ID NO: 184448 - DNA, 25 bp, probe
cgctgaagctcctgcagcttctgtg

SEQ ID NO: 184449 - DNA, 25 bp, probe
cgatgacgtctctgtgttcgtgatt

SEQ ID NO: 184450 - DNA, 25 bp, probe
cgatatcctctgacgtatcatcttt

SEQ ID NO: 184451 - DNA, 25 bp, probe
cgaccgtgctgtgtgacatcatagt

SEQ ID NO: 184452 - DNA, 25 bp, probe
cgaccgtgctgtgtgacatcatagt

SEQ ID NO: 184453 - DNA, 25 bp, probe
cgtcctgacctgtgagcacattggc

SEQ ID NO: 184454 - DNA, 25 bp, probe
cgtctcagacatgttgagaatcatg

SEQ ID NO: 184455 - DNA, 25 bp, probe
cgatgaagactggaaagcgacgggt

SEQ ID NO: 184456 - DNA, 25 bp, probe
cgaacagtcgctgaacggcgtgcat

SEQ ID NO: 184457 - DNA, 25 bp, probe
cgatacgaccatcaacagagactga

SEQ ID NO: 184458 - DNA, 25 bp, probe
cgtctgctgaccagctaaacaccaa

SEQ ID NO: 184459 - DNA, 25 bp, probe
cgtgcatttatcagatcaaaaccaa

SEQ ID NO: 184460 - DNA, 25 bp, probe
cgtgtttgagcaggcatccagcaac

SEQ ID NO: 184461 - DNA, 25 bp, probe
cgatgatatagcaatggcacgtcaa

SEQ ID NO: 184462 - DNA, 25 bp, probe
cgtgcattcaaacgcactgctctga

SEQ ID NO: 184463 - DNA, 25 bp, probe
cgtgttctgcaatgcaggcatcatc

SEQ ID NO: 184464 - DNA, 25 bp, probe
cgtgtgcttgcacgtgcacgcacac

SEQ ID NO: 184465 - DNA, 25 bp, probe
cgtgtgcattaagtcaacaaatccc

SEQ ID NO: 184466 - DNA, 25 bp, probe
cgtaagcttacaaatcatcctactc

SEQ ID NO: 184467 - DNA, 25 bp, probe
cgtaagcttacaaatcatcctactc

SEQ ID NO: 184468 - DNA, 25 bp, probe
cgctttctatacttaatcccatgtc

SEQ ID NO: 184469 - DNA, 25 bp, probe
cgctgggcttagatcattcctcagt

SEQ ID NO: 184470 - DNA, 25 bp, probe
cgtgtgagcctaactgctattctcg

SEQ ID NO: 184471 - DNA, 25 bp, probe
cgtgcatgatttctttgatctgctc

SEQ ID NO: 184472 - DNA, 25 bp, probe
cgtgctgtgtgacatcatagtcctc

SEQ ID NO: 184473 - DNA, 25 bp, probe
cgagcagtgtgagagccagctcaac

SEQ ID NO: 184474 - DNA, 25 bp, probe
cgaggtgttgccagtgctaagctgc

SEQ ID NO: 184475 - DNA, 25 bp, probe
cgcagggggcggtggaagctgccaa

SEQ ID NO: 184476 - DNA, 25 bp, probe
gccagaagtgccggtccgaattcga

SEQ ID NO: 184477 - DNA, 25 bp, probe
cgaggagatcaaggtccagccattc

SEQ ID NO: 184478 - DNA, 25 bp, probe
cgagggactcaacacgctgattctc

SEQ ID NO: 184479 - DNA, 25 bp, probe
gctgggagccttttatgggacttgc

SEQ ID NO: 184480 - DNA, 25 bp, probe
cgaggaggattctagagtgaacttc

SEQ ID NO: 184481 - DNA, 25 bp, probe
cgattacgcttcagagataccaatg

SEQ ID NO: 184482 - DNA, 25 bp, probe
cgaaatcgctttcgaattccatttc

SEQ ID NO: 184483 - DNA, 25 bp, probe
cgagaatgccttctatttctgcttt

SEQ ID NO: 184484 - DNA, 25 bp, probe
cgagaatgccttctatttctgcttt

SEQ ID NO: 184485 - DNA, 25 bp, probe
tcgaggctacttgtacctggccatt

SEQ ID NO: 184486 - DNA, 25 bp, probe
cgaggtcctgatgaacacctacagt

SEQ ID NO: 184487 - DNA, 25 bp, probe
cgaggccaaatgtgtcaccttcagc

SEQ ID NO: 184488 - DNA, 25 bp, probe
cgaggcctatgttagggcctttgcc

SEQ ID NO: 184489 - DNA, 25 bp, probe
cgaggcattatttgaccggatctac

SEQ ID NO: 184490 - DNA, 25 bp, probe
cgagtgggatgattactcggacacc

SEQ ID NO: 184491 - DNA, 25 bp, probe
cgagtgagaaacaacagggtgatgg

SEQ ID NO: 184492 - DNA, 25 bp, probe
cgaggagtcagaaagcagtggggaa

SEQ ID NO: 184493 - DNA, 25 bp, probe
cgaggtcatcaaacagtcggcctat

SEQ ID NO: 184494 - DNA, 25 bp, probe
cgaagtcatcctgggtatgggctac

SEQ ID NO: 184495 - DNA, 25 bp, probe
cgagaccctgtgggagctgggctac

SEQ ID NO: 184496 - DNA, 25 bp, probe
cgacacccggcaagcagccggagac

SEQ ID NO: 184497 - DNA, 25 bp, probe
cgataacgtggctgccggctatgac

SEQ ID NO: 184498 - DNA, 25 bp, probe
cgatgtacaggactttcctctaaaa

SEQ ID NO: 184499 - DNA, 25 bp, probe
cgatgaaagcagccatttctccttt

SEQ ID NO: 184500 - DNA, 25 bp, probe
cgatagacagcataatcccctacat

SEQ ID NO: 184501 - DNA, 25 bp, probe
cgtacctcatgaaataccactccat

SEQ ID NO: 184502 - DNA, 25 bp, probe
cgtacctcatgaaataccactccat

SEQ ID NO: 184503 - DNA, 25 bp, probe
cgtatcttccagaatacccatgcca

SEQ ID NO: 184504 - DNA, 25 bp, probe
cgatatttaaggaccccagagctag

SEQ ID NO: 184505 - DNA, 25 bp, probe
cgtttgtagaagatactagttgagg

SEQ ID NO: 184506 - DNA, 25 bp, probe
cgtgcttatagacgttaccgcttaa

SEQ ID NO: 184507 - DNA, 25 bp, probe
cgtgcaaaaagggtcacgcctccca

SEQ ID NO: 184508 - DNA, 25 bp, probe
cgtgcaaaaagggtcacgcctccca

SEQ ID NO: 184509 - DNA, 25 bp, probe
cgtgagactcagccgctgtctcgcc

SEQ ID NO: 184510 - DNA, 25 bp, probe
cgtgaagtcaggacttgccgtctct

SEQ ID NO: 184511 - DNA, 25 bp, probe
cgatacaggcaggtgctggcattgt

SEQ ID NO: 184512 - DNA, 25 bp, probe
cgaatagtgctgtccatagctagtg

SEQ ID NO: 184513 - DNA, 25 bp, probe
cgcgaacatcttgatcagtgagcag

SEQ ID NO: 184514 - DNA, 25 bp, probe
cgtgcacgtcattggagaggatgcc

SEQ ID NO: 184515 - DNA, 25 bp, probe
cgtgcacttgtgtccgaggagcgag

SEQ ID NO: 184516 - DNA, 25 bp, probe
cgtgatgctggattccgaggggcac

SEQ ID NO: 184517 - DNA, 25 bp, probe
cgagcagtagactggtggggcctag

SEQ ID NO: 184518 - DNA, 25 bp, probe
cgagggagacataggaggcattgct

SEQ ID NO: 184519 - DNA, 25 bp, probe
cgaggggcacatcaaaatcgctgac

SEQ ID NO: 184520 - DNA, 25 bp, probe
cgaaggccatggcatgaaccctgcc

SEQ ID NO: 184521 - DNA, 25 bp, probe
cgaaggccatggcatgaaccctgcc

SEQ ID NO: 184522 - DNA, 25 bp, probe
cgagacagacaacatgaaccagatc

SEQ ID NO: 184523 - DNA, 25 bp, probe
cgagaagccaacagagcagtaagcg

SEQ ID NO: 184524 - DNA, 25 bp, probe
cgaacgagactctggcatgctaact

SEQ ID NO: 184525 - DNA, 25 bp, probe
cgaaggatgatcgcccgataaagac

SEQ ID NO: 184526 - DNA, 25 bp, probe
cgaagcgtgatcagccgtggaacac

SEQ ID NO: 184527 - DNA, 25 bp, probe
cgagacagtgacacacctctgtccc

SEQ ID NO: 184528 - DNA, 25 bp, probe
cgaggcagtgaacatcccggagagc

SEQ ID NO: 184529 - DNA, 25 bp, probe
cgagtattgacaccccaggggaggg

SEQ ID NO: 184530 - DNA, 25 bp, probe
cgagtccccattcccaggggatgat

SEQ ID NO: 184531 - DNA, 25 bp, probe
cgacccctttgtggaggtggagatc

SEQ ID NO: 184532 - DNA, 25 bp, probe
cgagggcgtttggagaggaggagtt

SEQ ID NO: 184533 - DNA, 25 bp, probe
cgagtggttggtgggcaaacaggtg

SEQ ID NO: 184534 - DNA, 25 bp, probe
cgagcagttctcggcggtgaaaggg

SEQ ID NO: 184535 - DNA, 25 bp, probe
cgtcactgtccccaagtgaatctcc

SEQ ID NO: 184536 - DNA, 25 bp, probe
cgtctcttcactgcacattgcaatg

SEQ ID NO: 184537 - DNA, 25 bp, probe
cgaccatcaacagagactgactgcc

SEQ ID NO: 184538 - DNA, 25 bp, probe
cgacgctacattgatgagtacagaa

SEQ ID NO: 184539 - DNA, 25 bp, probe
cgtcctccaccttgcagaaagaatc

SEQ ID NO: 184540 - DNA, 25 bp, probe
cgtccccagagctggcgaagaagtc

SEQ ID NO: 184541 - DNA, 25 bp, probe
cgtcttcctgagtggtgccaaacaa

SEQ ID NO: 184542 - DNA, 25 bp, probe
cgtcttcctgagtggtgccaaacaa

SEQ ID NO: 184543 - DNA, 25 bp, probe
cgtctctactgggggctacagtgac

SEQ ID NO: 184544 - DNA, 25 bp, probe
cgcctctgcagcaagcagggcttca

SEQ ID NO: 184545 - DNA, 25 bp, probe
cgtgctctcgatggcatgagcgccc

SEQ ID NO: 184546 - DNA, 25 bp, probe
cgtgctctcgatggcatgagcgccc

SEQ ID NO: 184547 - DNA, 25 bp, probe
cgtgcatctcgtggaagcggtcatc

SEQ ID NO: 184548 - DNA, 25 bp, probe
cgtgcatctcgtggaagcggtcatc

SEQ ID NO: 184549 - DNA, 25 bp, probe
cgtgctgctctcggagcagggtgat

SEQ ID NO: 184550 - DNA, 25 bp, probe
cgtgctgctctcggagcagggtgat

SEQ ID NO: 184551 - DNA, 25 bp, probe
cgctgcttagctgccaggcagatgt

SEQ ID NO: 184552 - DNA, 25 bp, probe
cgtgctggacttcctggaggaggtg

SEQ ID NO: 184553 - DNA, 25 bp, probe
cgttggcatcaccttaggcagggaa

SEQ ID NO: 184554 - DNA, 25 bp, probe
cgtatcccactgcctatggtgggaa

SEQ ID NO: 184555 - DNA, 25 bp, probe
cgttcagccaaccaatgtgtgcgcg

SEQ ID NO: 184556 - DNA, 25 bp, probe
cgtctgccgaggctctgtgagcctg

SEQ ID NO: 184557 - DNA, 25 bp, probe
cgagctgcctgacggccaggtcatc

SEQ ID NO: 184558 - DNA, 25 bp, probe
cgatgccacgacggtggacacactc

SEQ ID NO: 184559 - DNA, 25 bp, probe
cgtcccgagctggggtaatcaagat

SEQ ID NO: 184560 - DNA, 25 bp, probe
cgtcaccaactgggacgacatggag

SEQ ID NO: 184561 - DNA, 25 bp, probe
cgtcaccaactgggacgacatggag

SEQ ID NO: 184562 - DNA, 25 bp, probe
cgagaccagaggggacggaagcatt

SEQ ID NO: 184563 - DNA, 25 bp, probe
cgaactggcagtggagataatgaag

SEQ ID NO: 184564 - DNA, 25 bp, probe
cgaactggcagtggagataatgaag

SEQ ID NO: 184565 - DNA, 25 bp, probe
cgaggttgcactggactgcaagcac

SEQ ID NO: 184566 - DNA, 25 bp, probe
cgtcgtgtgactcagtgcagagaca

SEQ ID NO: 184567 - DNA, 25 bp, probe
cgtacatggcctcactgcagagaaa

SEQ ID NO: 184568 - DNA, 25 bp, probe
cgaacttgactatctagaggaagta

SEQ ID NO: 184569 - DNA, 25 bp, probe
cgagcaattgactatcttcacagta

SEQ ID NO: 184570 - DNA, 25 bp, probe
cgagctttgcagacatagcccaggc

SEQ ID NO: 184571 - DNA, 25 bp, probe
ccagattgacagacaagtcccccaa

SEQ ID NO: 184572 - DNA, 25 bp, probe
cgcaaggacagtgagcgctatgccc

SEQ ID NO: 184573 - DNA, 25 bp, probe
cgaggtggagatgatggctcagctc

SEQ ID NO: 184574 - DNA, 25 bp, probe
cgtcgtgtgagtgtggtatgcctga

SEQ ID NO: 184575 - DNA, 25 bp, probe
cgctttgtgattgggcatttgccta

SEQ ID NO: 184576 - DNA, 25 bp, probe
cgtatttatctctgatgtgccgctg

SEQ ID NO: 184577 - DNA, 25 bp, probe
cgatgttcttcttcggatcacgccc

SEQ ID NO: 184578 - DNA, 25 bp, probe
gcgatgttgatttgtgctggattcc

SEQ ID NO: 184579 - DNA, 25 bp, probe
cgttgctatccaggctgtgctatcc

SEQ ID NO: 184580 - DNA, 25 bp, probe
cgttgctatccaggctgtgctatcc

SEQ ID NO: 184581 - DNA, 25 bp, probe
cgatggctcatgtcacaggcctacc

SEQ ID NO: 184582 - DNA, 25 bp, probe
cgcttcaattcaagacctgaccgct

SEQ ID NO: 184583 - DNA, 25 bp, probe
cgtcatcttgtatatcctactcagc

SEQ ID NO: 184584 - DNA, 25 bp, probe
cgtccttgatgcaaacacaactcag

SEQ ID NO: 184585 - DNA, 25 bp, probe
cgacgatgtatcaacagagaaactg

SEQ ID NO: 184586 - DNA, 25 bp, probe
cgcctatgtgtcccgagaaatgctg

SEQ ID NO: 184587 - DNA, 25 bp, probe
cgttggatgccaccagagtccattt

SEQ ID NO: 184588 - DNA, 25 bp, probe
cgtctgagtagacagcaggctgatg

SEQ ID NO: 184589 - DNA, 25 bp, probe
cgtctgagtcagctaagagcgagtg

SEQ ID NO: 184590 - DNA, 25 bp, probe
cgtgctgacgctgctcatcaagcag

SEQ ID NO: 184591 - DNA, 25 bp, probe
cgtctctttgacctcattcagaaaa

SEQ ID NO: 184592 - DNA, 25 bp, probe
cgtctctttgacctcattcagaaaa

SEQ ID NO: 184593 - DNA, 25 bp, probe
cgtctctttgacctcattcagaaaa

SEQ ID NO: 184594 - DNA, 25 bp, probe
cgattctttcatgatttcaggaaaa

SEQ ID NO: 184595 - DNA, 25 bp, probe
cgatttccctatgattcatggggaa

SEQ ID NO: 184596 - DNA, 25 bp, probe
cgttaccagctcttactctgggatg

SEQ ID NO: 184597 - DNA, 25 bp, probe
cgtctacctcttcgaccaggagacg

SEQ ID NO: 184598 - DNA, 25 bp, probe
cgaggacctcttcgacatcgaggat

SEQ ID NO: 184599 - DNA, 25 bp, probe
cgaggacctcttcgacatcgaggat

SEQ ID NO: 184600 - DNA, 25 bp, probe
cgacccgagctgactcgacggtgat

SEQ ID NO: 184601 - DNA, 25 bp, probe
cgaccgcgtcatgtggagcgtcgtg

SEQ ID NO: 184602 - DNA, 25 bp, probe
cgtcatccacctggagggtgtcgtg

SEQ ID NO: 184603 - DNA, 25 bp, probe
cgatctccacctcgaagtagtggct

SEQ ID NO: 184604 - DNA, 25 bp, probe
cgattcccctggagtgtgaagctga

SEQ ID NO: 184605 - DNA, 25 bp, probe
cgattcccctggagtgtgaagctga

SEQ ID NO: 184606 - DNA, 25 bp, probe
cgatgtacgcactgtcagttacacc

SEQ ID NO: 184607 - DNA, 25 bp, probe
cgtctatcgcaggagtgctgaaaca

SEQ ID NO: 184608 - DNA, 25 bp, probe
cgtcaagtgccaggcgctgagcgac

SEQ ID NO: 184609 - DNA, 25 bp, probe
cgtcaagtgccaggcgctgagcgac

SEQ ID NO: 184610 - DNA, 25 bp, probe
cgtcgtacacgcgagctgtggactg

SEQ ID NO: 184611 - DNA, 25 bp, probe
cgtcgtacacgcgagctgtggactg

SEQ ID NO: 184612 - DNA, 25 bp, probe
cgtctctacactgcctgtgtgtatc

SEQ ID NO: 184613 - DNA, 25 bp, probe
cgatgtcaagccgctcttagaattg

SEQ ID NO: 184614 - DNA, 25 bp, probe
cgcagccaggcccgttataaatgta

SEQ ID NO: 184615 - DNA, 25 bp, probe
cgcagccaggcccgttataaatgta

SEQ ID NO: 184616 - DNA, 25 bp, probe
cgaattagccgagttagaagcagaa

SEQ ID NO: 184617 - DNA, 25 bp, probe
cgaattagccgagttagaagcagaa

SEQ ID NO: 184618 - DNA, 25 bp, probe
cgacctcctcgagttcatcaagtgc

SEQ ID NO: 184619 - DNA, 25 bp, probe
cgcacctcgtccaaacacaaggagg

SEQ ID NO: 184620 - DNA, 25 bp, probe
cgaaaggatagcatacacgctggtg

SEQ ID NO: 184621 - DNA, 25 bp, probe
cgaaaacaacacgcactttctgtgc

SEQ ID NO: 184622 - DNA, 25 bp, probe
cgaccaagtgacagcaatgctgttt

SEQ ID NO: 184623 - DNA, 25 bp, probe
cgactacttcacacatactgtgatg

SEQ ID NO: 184624 - DNA, 25 bp, probe
cgaagactgcctggtgaactgtatg

SEQ ID NO: 184625 - DNA, 25 bp, probe
cgaagttgccatctaccttgggatc

SEQ ID NO: 184626 - DNA, 25 bp, probe
cgtagttcccaaactcatggaagtc

SEQ ID NO: 184627 - DNA, 25 bp, probe
cgaagttgcctcttttaggaatctc

SEQ ID NO: 184628 - DNA, 25 bp, probe
cgaagttaccttcatattccacgca

SEQ ID NO: 184629 - DNA, 25 bp, probe
cgaggattattcaagaattctacca

SEQ ID NO: 184630 - DNA, 25 bp, probe
cgagtgatgattgggagattcctga

SEQ ID NO: 184631 - DNA, 25 bp, probe
cgattgctgtagcggttgccaggga

SEQ ID NO: 184632 - DNA, 25 bp, probe
cgaatcggagtcactctggcgggac

SEQ ID NO: 184633 - DNA, 25 bp, probe
cgaactgaactaggcctggtggaag

SEQ ID NO: 184634 - DNA, 25 bp, probe
tttacttctggatgccaatctgaat

SEQ ID NO: 184635 - DNA, 25 bp, probe
cgaactgaactaggcctggtggaag

SEQ ID NO: 184636 - DNA, 25 bp, probe
cgagaatgagggtcctttgggaaag

SEQ ID NO: 184637 - DNA, 25 bp, probe
cgagaagaggccatcctttgtgaag

SEQ ID NO: 184638 - DNA, 25 bp, probe
cgtcatcaaggccactcctgatggc

SEQ ID NO: 184639 - DNA, 25 bp, probe
cgtccgctgttactcagctgagtcc

SEQ ID NO: 184640 - DNA, 25 bp, probe
cgtagatgcagtgcaccctggctac

SEQ ID NO: 184641 - DNA, 25 bp, probe
cgacagtggccttagcctagctagc

SEQ ID NO: 184642 - DNA, 25 bp, probe
cgagcactacctcagaatgacgacc

SEQ ID NO: 184643 - DNA, 25 bp, probe
cgacattgacgtgttcatgcctacc

SEQ ID NO: 184644 - DNA, 25 bp, probe
cgacattgacgtgttcatgcctacc

SEQ ID NO: 184645 - DNA, 25 bp, probe
cgaaatcaggtggttagctcaacca

SEQ ID NO: 184646 - DNA, 25 bp, probe
cgatactagtttgctttgctgacca

SEQ ID NO: 184647 - DNA, 25 bp, probe
cgtacttcttctgtgtggctgacag

SEQ ID NO: 184648 - DNA, 25 bp, probe
cgtatgtcatcaacgggggtgacaa

SEQ ID NO: 184649 - DNA, 25 bp, probe
cgtttcatcattcggcgtgcgaatt

SEQ ID NO: 184650 - DNA, 25 bp, probe
cgtttcatcattcggcgtgcgaatt

SEQ ID NO: 184651 - DNA, 25 bp, probe
cgttttatgtgttgcttggagtctg

SEQ ID NO: 184652 - DNA, 25 bp, probe
cgttcttaggaatctggtgtctgtc

SEQ ID NO: 184653 - DNA, 25 bp, probe
cgttctatctggcaactggtacttt

SEQ ID NO: 184654 - DNA, 25 bp, probe
gctgttcagataggggacggaaggt

SEQ ID NO: 184655 - DNA, 25 bp, probe
cgtctcattccgttgtctgtggatg

SEQ ID NO: 184656 - DNA, 25 bp, probe
cgtcagaatccgttcctgagcagct

SEQ ID NO: 184657 - DNA, 25 bp, probe
cgtcaagcagactttctcttgcctc

SEQ ID NO: 184658 - DNA, 25 bp, probe
cgtcaagcagactttctcttgcctc

SEQ ID NO: 184659 - DNA, 25 bp, probe
cgtcaagcagacagaatcccattcc

SEQ ID NO: 184660 - DNA, 25 bp, probe
cgatgccaaggcagaacccattctt

SEQ ID NO: 184661 - DNA, 25 bp, probe
cgatgccaaggcagaacccattctt

SEQ ID NO: 184662 - DNA, 25 bp, probe
cgatgactcggctggtcaacattct

SEQ ID NO: 184663 - DNA, 25 bp, probe
cgattccttgcatgagccacagttc

SEQ ID NO: 184664 - DNA, 25 bp, probe
gctgacttcggattggcccgattga

SEQ ID NO: 184665 - DNA, 25 bp, probe
gctgacttcggattggcccgattga

SEQ ID NO: 184666 - DNA, 25 bp, probe
cgaattcgaattggccttcactcag

SEQ ID NO: 184667 - DNA, 25 bp, probe
cgactgtcaagaatagccttcccgc

SEQ ID NO: 184668 - DNA, 25 bp, probe
cgaatgttagattcctcttgcctct

SEQ ID NO: 184669 - DNA, 25 bp, probe
cgaggttgagaattccttcctcctc

SEQ ID NO: 184670 - DNA, 25 bp, probe
cgtttgtgatgatcacgttcctccc

SEQ ID NO: 184671 - DNA, 25 bp, probe
cgtttgtgatgatcacgttcctccc

SEQ ID NO: 184672 - DNA, 25 bp, probe
cgttgatgactgtcacactggatcc

SEQ ID NO: 184673 - DNA, 25 bp, probe
cgtacacacaggacttggtctgctg

SEQ ID NO: 184674 - DNA, 25 bp, probe
cgtcacaccaggctgtgtgctctgg

SEQ ID NO: 184675 - DNA, 25 bp, probe
cgtacacgcgagctgtggactggtg

SEQ ID NO: 184676 - DNA, 25 bp, probe
cgtcacgcgtgaccatgtcgacgag

SEQ ID NO: 184677 - DNA, 25 bp, probe
cgtcggttgaccttctgaacatgag

SEQ ID NO: 184678 - DNA, 25 bp, probe
cgttgccttcacagtggacaatgga

SEQ ID NO: 184679 - DNA, 25 bp, probe
cgttgccatcacaactgggcaccat

SEQ ID NO: 184680 - DNA, 25 bp, probe
cgtcttcatcacgcttagcatcgtg

SEQ ID NO: 184681 - DNA, 25 bp, probe
cgtcttcgagatgctcatccatctg

SEQ ID NO: 184682 - DNA, 25 bp, probe
cgtcttcgagatgctcatccatctg

SEQ ID NO: 184683 - DNA, 25 bp, probe
cgatttcgtgaggcggcagccaggt

SEQ ID NO: 184684 - DNA, 25 bp, probe
cgtctctgagtgtagcagggccagg

SEQ ID NO: 184685 - DNA, 25 bp, probe
cgtctctggtgtagctgatgatccg

SEQ ID NO: 184686 - DNA, 25 bp, probe
cgtctgctggtgtagtagcactgtt

SEQ ID NO: 184687 - DNA, 25 bp, probe
cgtctgctggtgtagcgctgtttaa

SEQ ID NO: 184688 - DNA, 25 bp, probe
cgttgctggatctgctgtttgaagc

SEQ ID NO: 184689 - DNA, 25 bp, probe
cgttgtgcctcagtatgaccgaaca

SEQ ID NO: 184690 - DNA, 25 bp, probe
cgtattgcctcagtggaggcgctcc

SEQ ID NO: 184691 - DNA, 25 bp, probe
cgcagactggcatggccatgggtcc

SEQ ID NO: 184692 - DNA, 25 bp, probe
cgcagactggcatggccatgggtcc

SEQ ID NO: 184693 - DNA, 25 bp, probe
cgtacgtgctgggcatcggtgatcg

SEQ ID NO: 184694 - DNA, 25 bp, probe
cgtaccgggcgatgcttgtgcctga

SEQ ID NO: 184695 - DNA, 25 bp, probe
cgttcgctgggcctttattgacatg

SEQ ID NO: 184696 - DNA, 25 bp, probe
cgaatctgggtgtttcaaagacatc

SEQ ID NO: 184697 - DNA, 25 bp, probe
cgacctggagttacccagagagatg

SEQ ID NO: 184698 - DNA, 25 bp, probe
cgatcctgggtgtgcacctcaagga

SEQ ID NO: 184699 - DNA, 25 bp, probe
cgtctgaaggagtacaccatcaagt

SEQ ID NO: 184700 - DNA, 25 bp, probe
cgtctggaggactcaagcaatggag

SEQ ID NO: 184701 - DNA, 25 bp, probe
cgatcaggagggagctagcactgga

SEQ ID NO: 184702 - DNA, 25 bp, probe
cgatagggctgggcctgaccaaaaa

SEQ ID NO: 184703 - DNA, 25 bp, probe
cgaagtcctgtcactgagcacagtc

SEQ ID NO: 184704 - DNA, 25 bp, probe
cgaggatgcttacccgagacagata

SEQ ID NO: 184705 - DNA, 25 bp, probe
cgaggatgatttcactaggcatttg

SEQ ID NO: 184706 - DNA, 25 bp, probe
cgagcaagtttctcattactgtctg

SEQ ID NO: 184707 - DNA, 25 bp, probe
cgagcaagtttctcattactgtctg

SEQ ID NO: 184708 - DNA, 25 bp, probe
cgatcaaaatccccagctacagtgg

SEQ ID NO: 184709 - DNA, 25 bp, probe
cgacagaagcattccctataaggcc

SEQ ID NO: 184710 - DNA, 25 bp, probe
cgagcactgaagtcaccattaggtc

SEQ ID NO: 184711 - DNA, 25 bp, probe
cgacatcttgctctctttaggtctg

SEQ ID NO: 184712 - DNA, 25 bp, probe
cgagtttgtggggttcatgtggcgg

SEQ ID NO: 184713 - DNA, 25 bp, probe
cgagctgtttgtgttgaatgcggcg

SEQ ID NO: 184714 - DNA, 25 bp, probe
cgagctgtttgtgttgaatgcggcg

SEQ ID NO: 184715 - DNA, 25 bp, probe
cgagcagttctccactgtgaagggc

SEQ ID NO: 184716 - DNA, 25 bp, probe
cgacatcttcgaacgcatcgcaggt

SEQ ID NO: 184717 - DNA, 25 bp, probe
cgtctctgtcgtggacacgcgtgat

SEQ ID NO: 184718 - DNA, 25 bp, probe
cgtttctgagaaaagcagcgtgtcc

SEQ ID NO: 184719 - DNA, 25 bp, probe
cgatactctggacaaggggctcctg

SEQ ID NO: 184720 - DNA, 25 bp, probe
cgatactctggacaaggggctcctg

SEQ ID NO: 184721 - DNA, 25 bp, probe
cgatacctggagaccatgaagagct

SEQ ID NO: 184722 - DNA, 25 bp, probe
cgaagcctatacaacattaatcttt

SEQ ID NO: 184723 - DNA, 25 bp, probe
cgcacagcactatgtgacagaattt

SEQ ID NO: 184724 - DNA, 25 bp, probe
cgaccagctcagactggcagtcgac

SEQ ID NO: 184725 - DNA, 25 bp, probe
cgagatcagcagcaattgcctctga

SEQ ID NO: 184726 - DNA, 25 bp, probe
cgaatcatgcatgcaattagctccc

SEQ ID NO: 184727 - DNA, 25 bp, probe
cgaatcatgcatgcaattagctccc

SEQ ID NO: 184728 - DNA, 25 bp, probe
cgaagatgccgacctcagcatcggc

SEQ ID NO: 184729 - DNA, 25 bp, probe
cgatactcggccatcatgcatggag

SEQ ID NO: 184730 - DNA, 25 bp, probe
cgatactgctggccaatcagtgtca

SEQ ID NO: 184731 - DNA, 25 bp, probe
cgatactgctggccaatcagtgtca

SEQ ID NO: 184732 - DNA, 25 bp, probe
cgatatgtgagacgaatgatggcta

SEQ ID NO: 184733 - DNA, 25 bp, probe
cgatagcgctcacgcaagcatggtt

SEQ ID NO: 184734 - DNA, 25 bp, probe
cgattggccagcgatgggtgtctgc

SEQ ID NO: 184735 - DNA, 25 bp, probe
cgtttcaaggtggatgtgtggtccc

SEQ ID NO: 184736 - DNA, 25 bp, probe
cgtttcaaggtggatgtgtggtccc

SEQ ID NO: 184737 - DNA, 25 bp, probe
cgagtacaaggccagtggcggcccc

SEQ ID NO: 184738 - DNA, 25 bp, probe
cgagtacaaggccagtggcggcccc

SEQ ID NO: 184739 - DNA, 25 bp, probe
cgagtacaaggccagtggcggcccc

SEQ ID NO: 184740 - DNA, 25 bp, probe
cgattacaagcggaggcgctgccgc

SEQ ID NO: 184741 - DNA, 25 bp, probe
cgattacatcagtgagccggcgacg

SEQ ID NO: 184742 - DNA, 25 bp, probe
cgttcactcatggaaaatagcgatc

SEQ ID NO: 184743 - DNA, 25 bp, probe
cgtcatcgttgccaacacaatgccc

SEQ ID NO: 184744 - DNA, 25 bp, probe
cgtcactgtgtgcaacaacaacccg

SEQ ID NO: 184745 - DNA, 25 bp, probe
cgtcactgtgtgcaacaacaacccg

SEQ ID NO: 184746 - DNA, 25 bp, probe
cgtatctttaaaaagcagtcctctt

SEQ ID NO: 184747 - DNA, 25 bp, probe
cgttctccttacaatcaagttcttg

SEQ ID NO: 184748 - DNA, 25 bp, probe
cgtttcttttgcatgactgtggcct

SEQ ID NO: 184749 - DNA, 25 bp, probe
cgtttgtgttccaggtttcagcttc

SEQ ID NO: 184750 - DNA, 25 bp, probe
cgatatctgtttcctctggtttcag

SEQ ID NO: 184751 - DNA, 25 bp, probe
cgatgactttatttgcggagcattt

SEQ ID NO: 184752 - DNA, 25 bp, probe
cgaatattacaacgcggcagcatta

SEQ ID NO: 184753 - DNA, 25 bp, probe
cgaagcttacaacatggcagctttg

SEQ ID NO: 184754 - DNA, 25 bp, probe
cgaagcttacaacatggcagctttg

SEQ ID NO: 184755 - DNA, 25 bp, probe
cgatgcctgtaaaggggactctgga

SEQ ID NO: 184756 - DNA, 25 bp, probe
cgatacttacacaaggagaagagga

SEQ ID NO: 184757 - DNA, 25 bp, probe
cgacctctaagccgagagaggagga

SEQ ID NO: 184758 - DNA, 25 bp, probe
cgacctaagacttcacagggttcac

SEQ ID NO: 184759 - DNA, 25 bp, probe
ccacctaagttctcttcgcttaaag

SEQ ID NO: 184760 - DNA, 25 bp, probe
ccacctaagttctcttcgcttaaag

SEQ ID NO: 184761 - DNA, 25 bp, probe
cccctagcctactcttgtgtttagg

SEQ ID NO: 184762 - DNA, 25 bp, probe
cctttacacgtgtgcttggttttgc

SEQ ID NO: 184763 - DNA, 25 bp, probe
cccttgaaggtcacttagccttctt

SEQ ID NO: 184764 - DNA, 25 bp, probe
cgaccttagtttcaaagcttattct

SEQ ID NO: 184765 - DNA, 25 bp, probe
cgacattttgtgactgaagagactt

SEQ ID NO: 184766 - DNA, 25 bp, probe
cgtcaggaggtgcctgagagcagaa

SEQ ID NO: 184767 - DNA, 25 bp, probe
cgataacagtcatgtggagatgaaa

SEQ ID NO: 184768 - DNA, 25 bp, probe
cgatgcactactcggtgtgaatgaa

SEQ ID NO: 184769 - DNA, 25 bp, probe
cgtcactcgctgctttgagcattac

SEQ ID NO: 184770 - DNA, 25 bp, probe
cgtcactcgctgctttgagcattac

SEQ ID NO: 184771 - DNA, 25 bp, probe
cgtcatgtgggaagtcatgtcattt

SEQ ID NO: 184772 - DNA, 25 bp, probe
cgtcatgtggagcgtcgtgtcacag

SEQ ID NO: 184773 - DNA, 25 bp, probe
cgttgagtgaatctcaggcgcagcg

SEQ ID NO: 184774 - DNA, 25 bp, probe
cgaaggtgatcatcatccaggcctg

SEQ ID NO: 184775 - DNA, 25 bp, probe
cgaaggtgatcatcatccaggcctg

SEQ ID NO: 184776 - DNA, 25 bp, probe
cgaaaggctgagtgcatcgtccgtc

SEQ ID NO: 184777 - DNA, 25 bp, probe
cgaatgatggctagatcgacgatcg

SEQ ID NO: 184778 - DNA, 25 bp, probe
cgatgctggcgctgagtacgtcgtg

SEQ ID NO: 184779 - DNA, 25 bp, probe
cgatgccatccagcaagacttcgtg

SEQ ID NO: 184780 - DNA, 25 bp, probe
cgcattgatccctggagctttgtgt

SEQ ID NO: 184781 - DNA, 25 bp, probe
cgcattgatccctggagctttgtgt

SEQ ID NO: 184782 - DNA, 25 bp, probe
cgtttatgctgtcggtgtgtctgtg

SEQ ID NO: 184783 - DNA, 25 bp, probe
cgacgtatggagcctgggcatctcg

SEQ ID NO: 184784 - DNA, 25 bp, probe
cgagcagtcggatgtgaggttcagc

SEQ ID NO: 184785 - DNA, 25 bp, probe
cgcaggtctggttcggggtcagatt

SEQ ID NO: 184786 - DNA, 25 bp, probe
cgaggtgctcggtggagtcatggca

SEQ ID NO: 184787 - DNA, 25 bp, probe
cgttctctcgtgggagacgcaggca

SEQ ID NO: 184788 - DNA, 25 bp, probe
cgttctgtggctgggctatgccaac

SEQ ID NO: 184789 - DNA, 25 bp, probe
cgttcagaagctccgcttcacatgc

SEQ ID NO: 184790 - DNA, 25 bp, probe
ggtgtccttatgttggaaactcaag

SEQ ID NO: 184791 - DNA, 25 bp, probe
cgttcgcagttgcagcgattgcaac

SEQ ID NO: 184792 - DNA, 25 bp, probe
cgacgtgctgttcgaggatgtgtac

SEQ ID NO: 184793 - DNA, 25 bp, probe
cgagcggttgatggaagttgaacag

SEQ ID NO: 184794 - DNA, 25 bp, probe
cgttggcttgaggaaggtgaccttc

SEQ ID NO: 184795 - DNA, 25 bp, probe
cgattgtctctgaaacatcgtggcc

SEQ ID NO: 184796 - DNA, 25 bp, probe
cgttttggcaaactgctgctgcgac

SEQ ID NO: 184797 - DNA, 25 bp, probe
cgttattaaaacttgatcagcacat

SEQ ID NO: 184798 - DNA, 25 bp, probe
cgttctacgataagcattgtgacct

SEQ ID NO: 184799 - DNA, 25 bp, probe
cgtatcacaggcaaccagttggcct

SEQ ID NO: 184800 - DNA, 25 bp, probe
cgttcactctgttccagttgacaaa

SEQ ID NO: 184801 - DNA, 25 bp, probe
cgttactctccaacctggacaacaa

SEQ ID NO: 184802 - DNA, 25 bp, probe
cgttattccgaaaggggcacaggca

SEQ ID NO: 184803 - DNA, 25 bp, probe
cgtcacttctgctaaggagggaccc

SEQ ID NO: 184804 - DNA, 25 bp, probe
cgagcacttgctgaaggcaggtgcc

SEQ ID NO: 184805 - DNA, 25 bp, probe
cgaggcgtctggacaagctgggcct

SEQ ID NO: 184806 - DNA, 25 bp, probe
cgaggcgctgctggagaaggacccg

SEQ ID NO: 184807 - DNA, 25 bp, probe
cgagatgactgcccagagggacctg

SEQ ID NO: 184808 - DNA, 25 bp, probe
cgcagtgcctgaagccaggaacctg

SEQ ID NO: 184809 - DNA, 25 bp, probe
cgcagtgcctgaagccaggaacctg

SEQ ID NO: 184810 - DNA, 25 bp, probe
cgaggtgtgcaacgggaaactgtac

SEQ ID NO: 184811 - DNA, 25 bp, probe
cgaggctgccaccaaagaaatttaa

SEQ ID NO: 184812 - DNA, 25 bp, probe
cgcaggcgctcggagaagaaaatca

SEQ ID NO: 184813 - DNA, 25 bp, probe
cgttggcccacgtagcaaaaagata

SEQ ID NO: 184814 - DNA, 25 bp, probe
cgttgtggaacttcgcatcaatacc

SEQ ID NO: 184815 - DNA, 25 bp, probe
cgttgtggaacttcgcatcaatacc

SEQ ID NO: 184816 - DNA, 25 bp, probe
cgtatgaggagaagccgccctacgc

SEQ ID NO: 184817 - DNA, 25 bp, probe
cgtatgaggagaagccgccctacgc

SEQ ID NO: 184818 - DNA, 25 bp, probe
cgtatgaggagaagccgccctacgc

SEQ ID NO: 184819 - DNA, 25 bp, probe
cgctatggtcaggagacccttagcc

SEQ ID NO: 184820 - DNA, 25 bp, probe
cgctagtgatgtgtgggcctttgga

SEQ ID NO: 184821 - DNA, 25 bp, probe
ccgatctggtctgttggtttgagga

SEQ ID NO: 184822 - DNA, 25 bp, probe
ccgacgacgacgtgctgttcgagga

SEQ ID NO: 184823 - DNA, 25 bp, probe
ccttcgacaacctctattactggga

SEQ ID NO: 184824 - DNA, 25 bp, probe
cgcttggacccctggaaactggtct

SEQ ID NO: 184825 - DNA, 25 bp, probe
cgcttggacccctggaaactggtct

SEQ ID NO: 184826 - DNA, 25 bp, probe
ccgggacagacctggacactagggt

SEQ ID NO: 184827 - DNA, 25 bp, probe
ccgacgagtacctggacctgtcggc

SEQ ID NO: 184828 - DNA, 25 bp, probe
ccaggcggaaggtgaccgtcctggt

SEQ ID NO: 184829 - DNA, 25 bp, probe
aaccaaacgaatgtcactgaagagg

SEQ ID NO: 184830 - DNA, 25 bp, probe
cgacgagaacccagagctgttccag

SEQ ID NO: 184831 - DNA, 25 bp, probe
ccctgacaaactacggcttctacgg

SEQ ID NO: 184832 - DNA, 25 bp, probe
ccctggaaaatacagctggtgttaa

SEQ ID NO: 184833 - DNA, 25 bp, probe
ccctaagaaacgactgggttgtcat

SEQ ID NO: 184834 - DNA, 25 bp, probe
ccggaggaaccgaggtgttgccagt

SEQ ID NO: 184835 - DNA, 25 bp, probe
cccgtgggaaacaggtcttgaagct

SEQ ID NO: 184836 - DNA, 25 bp, probe
cctcgggaatgaacttccgctttgg

SEQ ID NO: 184837 - DNA, 25 bp, probe
cccaggaatctgtccttcttcctga

SEQ ID NO: 184838 - DNA, 25 bp, probe
cccgtaatccccacgtgacatggga

SEQ ID NO: 184839 - DNA, 25 bp, probe
ccgcattttcttctacgtgcggcgg

SEQ ID NO: 184840 - DNA, 25 bp, probe
ccgcattttcttctacgtgcggcgg

SEQ ID NO: 184841 - DNA, 25 bp, probe
cccgagtattgacaccccaggggag

SEQ ID NO: 184842 - DNA, 25 bp, probe
cccgagtttgagacccagttggagc

SEQ ID NO: 184843 - DNA, 25 bp, probe
ccgggtttacttcatgacacttgga

SEQ ID NO: 184844 - DNA, 25 bp, probe
ccgggtttacttcatgacacttgga

SEQ ID NO: 184845 - DNA, 25 bp, probe
cgcaggttttcagatctaggatttg

SEQ ID NO: 184846 - DNA, 25 bp, probe
cgaggtcttcctatctggaatgact

SEQ ID NO: 184847 - DNA, 25 bp, probe
cgacgattctccaccgagtatgagc

SEQ ID NO: 184848 - DNA, 25 bp, probe
cgaccagaccacagcggagaagcag

SEQ ID NO: 184849 - DNA, 25 bp, probe
cgaccgaaagcaagaggtgcctcat

SEQ ID NO: 184850 - DNA, 25 bp, probe
cgagggaatatgcgaagctgccgcg

SEQ ID NO: 184851 - DNA, 25 bp, probe
cgaggtaaggtgcaagtgcagagtg

SEQ ID NO: 184852 - DNA, 25 bp, probe
cgagagagaagggcccggagggtgt

SEQ ID NO: 184853 - DNA, 25 bp, probe
cgagaggaagggccccgagatgcca

SEQ ID NO: 184854 - DNA, 25 bp, probe
cgagtgggaggtgtctcgagagaag

SEQ ID NO: 184855 - DNA, 25 bp, probe
cgagggctggcgttttggaatgcaa

SEQ ID NO: 184856 - DNA, 25 bp, probe
cgagctgacgctggttttgtgtaca

SEQ ID NO: 184857 - DNA, 25 bp, probe
cgaatcagcgcttgatttggcaaaa

SEQ ID NO: 184858 - DNA, 25 bp, probe
cgacatcagctcctggttcatggaa

SEQ ID NO: 184859 - DNA, 25 bp, probe
cgagctcaacctgggtcagatcaca

SEQ ID NO: 184860 - DNA, 25 bp, probe
cgagctcaacctgggtcagatcaca

SEQ ID NO: 184861 - DNA, 25 bp, probe
cgcactactctttgatgtattactc

SEQ ID NO: 184862 - DNA, 25 bp, probe
cgcatgctaatcgctttttaccgcc

SEQ ID NO: 184863 - DNA, 25 bp, probe
cgctgacctacgataattatacgac

SEQ ID NO: 184864 - DNA, 25 bp, probe
cgcgactccatctctacaaataaat

SEQ ID NO: 184865 - DNA, 25 bp, probe
cgctattcctctcacggaatacaat

SEQ ID NO: 184866 - DNA, 25 bp, probe
cgctcagcacactctagggaataat

SEQ ID NO: 184867 - DNA, 25 bp, probe
cgctcaaccccagggtggttttcag

SEQ ID NO: 184868 - DNA, 25 bp, probe
cgataattccagttggtggctagtg

SEQ ID NO: 184869 - DNA, 25 bp, probe
cgataagtctcagctggatgcagtg

SEQ ID NO: 184870 - DNA, 25 bp, probe
cgaaactctcatccgcgatatgtta

SEQ ID NO: 184871 - DNA, 25 bp, probe
cgaaagcctggaggctattttgctg

SEQ ID NO: 184872 - DNA, 25 bp, probe
cgcaaagacttgcgccatgtgtccc

SEQ ID NO: 184873 - DNA, 25 bp, probe
cgcaaagacttgcgccatgtgtccc

SEQ ID NO: 184874 - DNA, 25 bp, probe
cgcaggagcagttgacccttgagcc

SEQ ID NO: 184875 - DNA, 25 bp, probe
cgaggacgaggacctcttcgacatc

SEQ ID NO: 184876 - DNA, 25 bp, probe
cgaggacgaggacctcttcgacatc

SEQ ID NO: 184877 - DNA, 25 bp, probe
cgcaggaaggcgatctcctggtcct

SEQ ID NO: 184878 - DNA, 25 bp, probe
cgcaggaaggcgatctcctggtcct

SEQ ID NO: 184879 - DNA, 25 bp, probe
cgcaggaagctgcttcggggggtga

SEQ ID NO: 184880 - DNA, 25 bp, probe
cgaggacactttctggctagtgggc

SEQ ID NO: 184881 - DNA, 25 bp, probe
cgaagacattttcgggctcacgctg

SEQ ID NO: 184882 - DNA, 25 bp, probe
cgaggactttctggaggagacgctg

SEQ ID NO: 184883 - DNA, 25 bp, probe
cgagccatggcaggatcgggagacc

SEQ ID NO: 184884 - DNA, 25 bp, probe
cgagtatatgcggcacggggacctc

SEQ ID NO: 184885 - DNA, 25 bp, probe
cgagtgatgaggttcgcaagaacct

SEQ ID NO: 184886 - DNA, 25 bp, probe
cgaggtggcggtgctgaggcacctg

SEQ ID NO: 184887 - DNA, 25 bp, probe
cgacgtgtggagctttggcatcttg

SEQ ID NO: 184888 - DNA, 25 bp, probe
cgattggtggggacttggctgtctg

SEQ ID NO: 184889 - DNA, 25 bp, probe
cgctggagggggactttgtgctcat

SEQ ID NO: 184890 - DNA, 25 bp, probe
cgcaggcatgcacgggtttcctgcc

SEQ ID NO: 184891 - DNA, 25 bp, probe
cgaggcgcatgcagtacgccatctg

SEQ ID NO: 184892 - DNA, 25 bp, probe
cgagcacggcatcgtcaccaactgg

SEQ ID NO: 184893 - DNA, 25 bp, probe
cgatgcaggtccatcctgacctggt

SEQ ID NO: 184894 - DNA, 25 bp, probe
cgacgtacacttctgaccattttgt

SEQ ID NO: 184895 - DNA, 25 bp, probe
cgtttactctgtttacacattttgc

SEQ ID NO: 184896 - DNA, 25 bp, probe
cgtttacttatcttatgccacggga

SEQ ID NO: 184897 - DNA, 25 bp, probe
cgttttattctattcctatctgtgg

SEQ ID NO: 184898 - DNA, 25 bp, probe
ccttctagtctttatttatggtcgt

SEQ ID NO: 184899 - DNA, 25 bp, probe
ccggcattttatgtactttgtcctt

SEQ ID NO: 184900 - DNA, 25 bp, probe
ccatacatgtttttgtacttttact

SEQ ID NO: 184901 - DNA, 25 bp, probe
cccacctgtccaattggttttacat

SEQ ID NO: 184902 - DNA, 25 bp, probe
cgcaagttgtcctatttttgtcatt

SEQ ID NO: 184903 - DNA, 25 bp, probe
cgacatttttcagctctttgctatt

SEQ ID NO: 184904 - DNA, 25 bp, probe
cgagctttcgtgcactttttacata

SEQ ID NO: 184905 - DNA, 25 bp, probe
cgagctttcgtgcactttttacata

SEQ ID NO: 184906 - DNA, 25 bp, probe
ccgcttgggtaacttgttcaagata

SEQ ID NO: 184907 - DNA, 25 bp, probe
cccttgggaagctcattgcccgatg

SEQ ID NO: 184908 - DNA, 25 bp, probe
cgccttgggggctccatgaaggatg

SEQ ID NO: 184909 - DNA, 25 bp, probe
cgcaatgtggtggtcactgccatca

SEQ ID NO: 184910 - DNA, 25 bp, probe
cgaatgcagcctggagcaggccctg

SEQ ID NO: 184911 - DNA, 25 bp, probe
cgacatgcagacgccgagatgactg

SEQ ID NO: 184912 - DNA, 25 bp, probe
cgatcatcatgagtccacgggtgtg

SEQ ID NO: 184913 - DNA, 25 bp, probe
cgacatatggtctctgggtatcatg

SEQ ID NO: 184914 - DNA, 25 bp, probe
cgagattgaccttcacgtgtatcag

SEQ ID NO: 184915 - DNA, 25 bp, probe
cgagttatccatgccttcaacatga

SEQ ID NO: 184916 - DNA, 25 bp, probe
cgagtttgatctggccattctccag

SEQ ID NO: 184917 - DNA, 25 bp, probe
cgaggttgtggacttcctctcagat

SEQ ID NO: 184918 - DNA, 25 bp, probe
cgagggtgctcttatttctacagtt

SEQ ID NO: 184919 - DNA, 25 bp, probe
cgaatgggtcttattcagaccccag

SEQ ID NO: 184920 - DNA, 25 bp, probe
cgaaggctttgagtatatcaaccca

SEQ ID NO: 184921 - DNA, 25 bp, probe
cgacaggtttgggatctggaccggg

SEQ ID NO: 184922 - DNA, 25 bp, probe
cgacggtgatggggggcaactcggc

SEQ ID NO: 184923 - DNA, 25 bp, probe
cgcaagggaggggggaggctcgctt

SEQ ID NO: 184924 - DNA, 25 bp, probe
cgcaagggaggggggaggctcgctt

SEQ ID NO: 184925 - DNA, 25 bp, probe
cgcaggggcgagtgggacgcgccct

SEQ ID NO: 184926 - DNA, 25 bp, probe
cgccgggtgaagcctgtgacccggg

SEQ ID NO: 184927 - DNA, 25 bp, probe
cgctcgggaaatgcaggaaggccgg

SEQ ID NO: 184928 - DNA, 25 bp, probe
cgacgtggagccggacgagagcagc

SEQ ID NO: 184929 - DNA, 25 bp, probe
cgacgacgtgctgttcgaggatgtg

SEQ ID NO: 184930 - DNA, 25 bp, probe
cgaccaggatccattgagacgtatg

SEQ ID NO: 184931 - DNA, 25 bp, probe
cgcggagaacaaactgaacgacatt

SEQ ID NO: 184932 - DNA, 25 bp, probe
cgagtgaaggcaccatgctgaagcg

SEQ ID NO: 184933 - DNA, 25 bp, probe
cgagatgcaggtcctgtgcttcagc

SEQ ID NO: 184934 - DNA, 25 bp, probe
cgcaggggtgacgtgcatcatcctg

SEQ ID NO: 184935 - DNA, 25 bp, probe
cgatgccagcgtgtggatctcctgg

SEQ ID NO: 184936 - DNA, 25 bp, probe
cgatgcggcggcgttattcccatga

SEQ ID NO: 184937 - DNA, 25 bp, probe
cgaccatggatggtttcctccaagg

SEQ ID NO: 184938 - DNA, 25 bp, probe
cgaccatggatggtttcctccaagg

SEQ ID NO: 184939 - DNA, 25 bp, probe
cgagccaaatggatatcacaggaca

SEQ ID NO: 184940 - DNA, 25 bp, probe
cgcactctcaaaaactgcacggaca

SEQ ID NO: 184941 - DNA, 25 bp, probe
cgctcaccaagaacaacgcggccat

SEQ ID NO: 184942 - DNA, 25 bp, probe
cgctcaccaagaacaacgcggccat

SEQ ID NO: 184943 - DNA, 25 bp, probe
cgctaccacagcatcatgaccgtga

SEQ ID NO: 184944 - DNA, 25 bp, probe
cgctaccacagcatcatgaccgtga

SEQ ID NO: 184945 - DNA, 25 bp, probe
cgctaccgcaacctgaactgtgagg

SEQ ID NO: 184946 - DNA, 25 bp, probe
cgcttacctagcttggcctagagtg

SEQ ID NO: 184947 - DNA, 25 bp, probe
cgcttacctagcttggcctagagtg

SEQ ID NO: 184948 - DNA, 25 bp, probe
cgatttccagagtatggcaaagtgg

SEQ ID NO: 184949 - DNA, 25 bp, probe
cgatcttctctactttcattgggga

SEQ ID NO: 184950 - DNA, 25 bp, probe
cgttctgtccttgtcatgatgctgg

SEQ ID NO: 184951 - DNA, 25 bp, probe
cgcgtggtcctttgcaagagcgcag

SEQ ID NO: 184952 - DNA, 25 bp, probe
cgatgctgttccatctgcacatgaa

SEQ ID NO: 184953 - DNA, 25 bp, probe
cgcatgccttacctggacatgtatc

SEQ ID NO: 184954 - DNA, 25 bp, probe
cgatgtgtctaccaggcagcgaagc

SEQ ID NO: 184955 - DNA, 25 bp, probe
cgatggcccagaggcgcagcaagag

SEQ ID NO: 184956 - DNA, 25 bp, probe
cgcagatgcccaccactgaaagagt

SEQ ID NO: 184957 - DNA, 25 bp, probe
cgcagatgcccaccactgaaagagt

SEQ ID NO: 184958 - DNA, 25 bp, probe
cgaatgccaccccgaaaggatagca

SEQ ID NO: 184959 - DNA, 25 bp, probe
cgaatcatgcccggggcaggtaaac

SEQ ID NO: 184960 - DNA, 25 bp, probe
cgaactgcatcaggcgtggcaggcg

SEQ ID NO: 184961 - DNA, 25 bp, probe
cgagatggtgcagcaggccgagctg

SEQ ID NO: 184962 - DNA, 25 bp, probe
cgagatatggcccgcgctggagttt

SEQ ID NO: 184963 - DNA, 25 bp, probe
cgcaatagcgacgcgctggcgttac

SEQ ID NO: 184964 - DNA, 25 bp, probe
cgaaagagccggcctgtgagtgtaa

SEQ ID NO: 184965 - DNA, 25 bp, probe
cgacatgaagcgggccctgatgatg

SEQ ID NO: 184966 - DNA, 25 bp, probe
cgactgctaggaactccatctcagg

SEQ ID NO: 184967 - DNA, 25 bp, probe
cgactgctaggaactccatctcagg

SEQ ID NO: 184968 - DNA, 25 bp, probe
cgcactgcggggacaaattccagca

SEQ ID NO: 184969 - DNA, 25 bp, probe
cgagctagaggtgaagatccgcgac

SEQ ID NO: 184970 - DNA, 25 bp, probe
cgagctgaacgtgtggcgctcggac

SEQ ID NO: 184971 - DNA, 25 bp, probe
cgagctgaacgtgtggcgctcggac

SEQ ID NO: 184972 - DNA, 25 bp, probe
cgagctctacagggtggtcttcgac

SEQ ID NO: 184973 - DNA, 25 bp, probe
cgaccgccatgaagctgggcttcag

SEQ ID NO: 184974 - DNA, 25 bp, probe
cgacatcagttgtgtgtggggggac

SEQ ID NO: 184975 - DNA, 25 bp, probe
cgagctgactcgacggtgatggggg

SEQ ID NO: 184976 - DNA, 25 bp, probe
cgactgccgctgagaagggttgatc

SEQ ID NO: 184977 - DNA, 25 bp, probe
cgacagacactgtgaacggaagaca

SEQ ID NO: 184978 - DNA, 25 bp, probe
cgcaagacggaccagagcgaaagca

SEQ ID NO: 184979 - DNA, 25 bp, probe
cgctgagagggggctgggaaaagca

SEQ ID NO: 184980 - DNA, 25 bp, probe
cgcagaaggacgtcctaaacaagga

SEQ ID NO: 184981 - DNA, 25 bp, probe
cgagagatgaaccccaactacacgg

SEQ ID NO: 184982 - DNA, 25 bp, probe
cgagtctgaatctgcactactcaac

SEQ ID NO: 184983 - DNA, 25 bp, probe
cgagccatagacatcatctactccc

SEQ ID NO: 184984 - DNA, 25 bp, probe
cgagccattgtcattcaagtgccca

SEQ ID NO: 184985 - DNA, 25 bp, probe
cgagccattgtcattcaagtgccca

SEQ ID NO: 184986 - DNA, 25 bp, probe
cgatctcagttcactgcaagctcca

SEQ ID NO: 184987 - DNA, 25 bp, probe
cgatcctcgtcaggtgcaggtcagc

SEQ ID NO: 184988 - DNA, 25 bp, probe
cgagtctgcttctttgcaggtcggg

SEQ ID NO: 184989 - DNA, 25 bp, probe
cgagtctgcttctttgcaggtcggg

SEQ ID NO: 184990 - DNA, 25 bp, probe
cgagatcctctctctgaaatcactg

SEQ ID NO: 184991 - DNA, 25 bp, probe
cgagatatcaaagctgccaacgtgc

SEQ ID NO: 184992 - DNA, 25 bp, probe
cgagatatcaaagctgccaacgtgc

SEQ ID NO: 184993 - DNA, 25 bp, probe
cgagaaggaagctggcataggccac

SEQ ID NO: 184994 - DNA, 25 bp, probe
cgagaaggaagctggcataggccac

SEQ ID NO: 184995 - DNA, 25 bp, probe
cgcagaaggagaacggcatctactc

SEQ ID NO: 184996 - DNA, 25 bp, probe
cgcctggaggagtcgtctcaactcc

SEQ ID NO: 184997 - DNA, 25 bp, probe
cgctcacgcaagcatggttaacgtc

SEQ ID NO: 184998 - DNA, 25 bp, probe
cgcatcggccctttgtgaagacgac

SEQ ID NO: 184999 - DNA, 25 bp, probe
cgcatcggccctttgtgaagacgac

SEQ ID NO: 185000 - DNA, 25 bp, probe
cgagcggtctgtggggaagacgaca

SEQ ID NO: 185001 - DNA, 25 bp, probe
cgattggtgctgttgggcgcatgac

SEQ ID NO: 185002 - DNA, 25 bp, probe
cgattgtgacagcgtatgtgatgac

SEQ ID NO: 185003 - DNA, 25 bp, probe
cgctctgtagagccatgtagatagc

SEQ ID NO: 185004 - DNA, 25 bp, probe
cgcttcattgaggctgcaagagcac

SEQ ID NO: 185005 - DNA, 25 bp, probe
cgcactttatgagggagaccccgac

SEQ ID NO: 185006 - DNA, 25 bp, probe
cgactcttaagagaacactgcacag

SEQ ID NO: 185007 - DNA, 25 bp, probe
cgactcttaagagaacactgcacag

SEQ ID NO: 185008 - DNA, 25 bp, probe
cgcagccttacaccttaactagctg

SEQ ID NO: 185009 - DNA, 25 bp, probe
cgcagccttacaccttaactagctg

SEQ ID NO: 185010 - DNA, 25 bp, probe
cgcaccgtagccatctactctgagc

SEQ ID NO: 185011 - DNA, 25 bp, probe
cgaactgtacgcactcatgagtgac

SEQ ID NO: 185012 - DNA, 25 bp, probe
cgaatggtgtccatcgtggtggctg

SEQ ID NO: 185013 - DNA, 25 bp, probe
cgaagggtgcaaagtgggacgcggc

SEQ ID NO: 185014 - DNA, 25 bp, probe
cgaagggtgcaaagtgggacgcggc

SEQ ID NO: 185015 - DNA, 25 bp, probe
cgagaagggacatgtgggacgtgag

SEQ ID NO: 185016 - DNA, 25 bp, probe
cgcgaaaggcttccgggactgtgac

SEQ ID NO: 185017 - DNA, 25 bp, probe
cccaacaagttgtgggactccagtc

SEQ ID NO: 185018 - DNA, 25 bp, probe
ccatttaaagttctggagcccaggc

SEQ ID NO: 185019 - DNA, 25 bp, probe
gcaccttaggagaggggaccttcgg

SEQ ID NO: 185020 - DNA, 25 bp, probe
cgccttaatggggggaactgccttg

SEQ ID NO: 185021 - DNA, 25 bp, probe
cgcgcttcaagcaggagggtgtcct

SEQ ID NO: 185022 - DNA, 25 bp, probe
cgcgcttcaagcaggagggtgtcct

SEQ ID NO: 185023 - DNA, 25 bp, probe
cgctgccacaacttggtggacgttt

SEQ ID NO: 185024 - DNA, 25 bp, probe
cgctgccagctttactggagaactt

SEQ ID NO: 185025 - DNA, 25 bp, probe
cgcgatcttaaatgtgacaacatct

SEQ ID NO: 185026 - DNA, 25 bp, probe
cgctatgttggaaatgtgcaaccac

SEQ ID NO: 185027 - DNA, 25 bp, probe
cgcatctttgcttacagtgcatcac

SEQ ID NO: 185028 - DNA, 25 bp, probe
cgcactgtcagttacaccaatctga

SEQ ID NO: 185029 - DNA, 25 bp, probe
cgaagtgcagtgcacccagcagtgc

SEQ ID NO: 185030 - DNA, 25 bp, probe
cgaggtgcctgccatgatcaaactg

SEQ ID NO: 185031 - DNA, 25 bp, probe
cgaggtgcagctgcaacagtacttc

SEQ ID NO: 185032 - DNA, 25 bp, probe
cgagggggacagacagacagcctgc

SEQ ID NO: 185033 - DNA, 25 bp, probe
cgaggggtacaaggccagccacaag

SEQ ID NO: 185034 - DNA, 25 bp, probe
cgcagggggagggcaacatcaaaaa

SEQ ID NO: 185035 - DNA, 25 bp, probe
cgcgcagggggagggcaacatcaaa

SEQ ID NO: 185036 - DNA, 25 bp, probe
cgacaattaggagagccagaaaaat

SEQ ID NO: 185037 - DNA, 25 bp, probe
cgctcaagtcgggctacacggagaa

SEQ ID NO: 185038 - DNA, 25 bp, probe
cccaacacggtcaccatggaaatgc

SEQ ID NO: 185039 - DNA, 25 bp, probe
cccaaaagaaaggccaagatttgca

SEQ ID NO: 185040 - DNA, 25 bp, probe
cccagaaacggacgccggtgcttgg

SEQ ID NO: 185041 - DNA, 25 bp, probe
cccagaaacggacgccggtgcttgg

SEQ ID NO: 185042 - DNA, 25 bp, probe
cgaggacaacgttggcccagatggg

SEQ ID NO: 185043 - DNA, 25 bp, probe
cgaggacaacgttggcccagatggg

SEQ ID NO: 185044 - DNA, 25 bp, probe
cgacggaggcagacaagcccaatgg

SEQ ID NO: 185045 - DNA, 25 bp, probe
cgacagcgacgacaaatgccaatga

SEQ ID NO: 185046 - DNA, 25 bp, probe
cgacagcgacgacaaatgccaatga

SEQ ID NO: 185047 - DNA, 25 bp, probe
cgaatttctggcaaaatggcactga

SEQ ID NO: 185048 - DNA, 25 bp, probe
cgactcatctccctcaagagtggga

SEQ ID NO: 185049 - DNA, 25 bp, probe
cgactcatctccctcaagagtggga

SEQ ID NO: 185050 - DNA, 25 bp, probe
cgactacagcaacctacgggagacc

SEQ ID NO: 185051 - DNA, 25 bp, probe
cgacttcaggaggctcctgcgcaaa

SEQ ID NO: 185052 - DNA, 25 bp, probe
cgacgtctggaggactcaagcaatg

SEQ ID NO: 185053 - DNA, 25 bp, probe
cgacctgctggatgcactggacaag

SEQ ID NO: 185054 - DNA, 25 bp, probe
cgacagtcgaccgagcttaccaaat

SEQ ID NO: 185055 - DNA, 25 bp, probe
cgacgacgacgtgctgttcgaggat

SEQ ID NO: 185056 - DNA, 25 bp, probe
cgacgaacactacgagtaccggcat

SEQ ID NO: 185057 - DNA, 25 bp, probe
cgacgaacactacgagtaccggcat

SEQ ID NO: 185058 - DNA, 25 bp, probe
cgaggaaaatcactcctacacgcta

SEQ ID NO: 185059 - DNA, 25 bp, probe
cgaaggagaatccagccaagcacag

SEQ ID NO: 185060 - DNA, 25 bp, probe
cgaaaagttctacagcatgcgcagt

SEQ ID NO: 185061 - DNA, 25 bp, probe
cgaacaccgtcttcgagatgctcat

SEQ ID NO: 185062 - DNA, 25 bp, probe
cgaacaccgtcttcgagatgctcat

SEQ ID NO: 185063 - DNA, 25 bp, probe
cgaggcaggcggatcatgaggtcag

SEQ ID NO: 185064 - DNA, 25 bp, probe
cgaccggcatgggctgcaggagccg

SEQ ID NO: 185065 - DNA, 25 bp, probe
cgaccggcatgggctgcaggagccg

SEQ ID NO: 185066 - DNA, 25 bp, probe
cgacggcatgcaggtgctcatggac

SEQ ID NO: 185067 - DNA, 25 bp, probe
cgacggcatgcaggtgctcatggac

SEQ ID NO: 185068 - DNA, 25 bp, probe
cgactggatcaattcggtgattgca

SEQ ID NO: 185069 - DNA, 25 bp, probe
cgagcgatggatttccgtctctggt

SEQ ID NO: 185070 - DNA, 25 bp, probe
cgagcagaggagattcatggcctgt

SEQ ID NO: 185071 - DNA, 25 bp, probe
cgagctgcaggaggttatcggcagt

SEQ ID NO: 185072 - DNA, 25 bp, probe
cgacgcgctggcgttacagcgcaac

SEQ ID NO: 185073 - DNA, 25 bp, probe
cgaggcgctggccaagcaagtagcc

SEQ ID NO: 185074 - DNA, 25 bp, probe
cgaggcgctggccaagcaagtagcc

SEQ ID NO: 185075 - DNA, 25 bp, probe
cgacgtcatgggcataggtgaccgc

SEQ ID NO: 185076 - DNA, 25 bp, probe
cgactggatgggctgggtgggcccg

SEQ ID NO: 185077 - DNA, 25 bp, probe
gcgaatgaagaggcccggggaggac

SEQ ID NO: 185078 - DNA, 25 bp, probe
cgcactgaggaggttgctggggaaa

SEQ ID NO: 185079 - DNA, 25 bp, probe
cgcaccaggagaccctagagtggtt

SEQ ID NO: 185080 - DNA, 25 bp, probe
cgcggccgaagacctcaagggtggc

SEQ ID NO: 185081 - DNA, 25 bp, probe
cgcggccaaatgacacgacttgggg

SEQ ID NO: 185082 - DNA, 25 bp, probe
cgcacagccaacatcaagagcctag

SEQ ID NO: 185083 - DNA, 25 bp, probe
cgaatgggactggctgctggccaag

SEQ ID NO: 185084 - DNA, 25 bp, probe
cgacagaggacgcttgagccagaat

SEQ ID NO: 185085 - DNA, 25 bp, probe
cgatgggaacgctttgtccacagtg

SEQ ID NO: 185086 - DNA, 25 bp, probe
cgcaagaacaacatcgtcctcagtg

SEQ ID NO: 185087 - DNA, 25 bp, probe
cgcagagtgacgtgtggtcctttgg

SEQ ID NO: 185088 - DNA, 25 bp, probe
cgaagtgacgttgagatcctcggct

SEQ ID NO: 185089 - DNA, 25 bp, probe
cgagagcgacgtgtggagcttcggc

SEQ ID NO: 185090 - DNA, 25 bp, probe
cgagacgacggcctgaagatctggg

SEQ ID NO: 185091 - DNA, 25 bp, probe
cgagacgacggcctgaagatctggg

SEQ ID NO: 185092 - DNA, 25 bp, probe
cgcaagctgacaggctgtgaaatat

SEQ ID NO: 185093 - DNA, 25 bp, probe
cgaagcagacaggcaatgagtgtgt

SEQ ID NO: 185094 - DNA, 25 bp, probe
cgaacacgagcgatgctgctggtgc

SEQ ID NO: 185095 - DNA, 25 bp, probe
cgaaagcggcaggatcgacgcgctt

SEQ ID NO: 185096 - DNA, 25 bp, probe
cgaccagtcagagttcgaaggcttt

SEQ ID NO: 185097 - DNA, 25 bp, probe
cgaccagtctcagtacaagaggctg

SEQ ID NO: 185098 - DNA, 25 bp, probe
cgccctgtacataaccagcaagctc

SEQ ID NO: 185099 - DNA, 25 bp, probe
cgctctcagtcagatactgcgcaag

SEQ ID NO: 185100 - DNA, 25 bp, probe
cgcatctgccaacagcacacaaagg

SEQ ID NO: 185101 - DNA, 25 bp, probe
cgcttccatccaggcactgaaggag

SEQ ID NO: 185102 - DNA, 25 bp, probe
cgcttgcccagagatcttacgaggc

SEQ ID NO: 185103 - DNA, 25 bp, probe
cgagtcactagagcccaactcaggc

SEQ ID NO: 185104 - DNA, 25 bp, probe
cgagtcccaggagccaatcagaggc

SEQ ID NO: 185105 - DNA, 25 bp, probe
aatacatgccgacgggcgctgaccc

SEQ ID NO: 185106 - DNA, 25 bp, probe
cgacatcttctcaaccttatcaagg

SEQ ID NO: 185107 - DNA, 25 bp, probe
cgaaattccattcgctcatctcaag

SEQ ID NO: 185108 - DNA, 25 bp, probe
cgaaatggtcaacgccatgcaccag

SEQ ID NO: 185109 - DNA, 25 bp, probe
cgacttagtccatgtgatgcgcaca

SEQ ID NO: 185110 - DNA, 25 bp, probe
cgagtatggctgcctcaaggccatc

SEQ ID NO: 185111 - DNA, 25 bp, probe
cgacagggctctgagaggctcatcc

SEQ ID NO: 185112 - DNA, 25 bp, probe
cgacagatgtcgtcgggagccatcc

SEQ ID NO: 185113 - DNA, 25 bp, probe
cgcagtgttcagtgctggagcgcct

SEQ ID NO: 185114 - DNA, 25 bp, probe
cgcaccttcaaagtgggcagcttcc

SEQ ID NO: 185115 - DNA, 25 bp, probe
cgcaccttcaaagtgggcagcttcc

SEQ ID NO: 185116 - DNA, 25 bp, probe
cgaggatccaaagtgggaattccct

SEQ ID NO: 185117 - DNA, 25 bp, probe
cgaggacaccatagcggagaactcc

SEQ ID NO: 185118 - DNA, 25 bp, probe
cgaggagcgccaagaagatgtcact

SEQ ID NO: 185119 - DNA, 25 bp, probe
cgaggagcgccaagaagatgtcact

SEQ ID NO: 185120 - DNA, 25 bp, probe
cgagctgtgcgtttgtatcgccact

SEQ ID NO: 185121 - DNA, 25 bp, probe
cgacatagtgctagtgtctccgccg

SEQ ID NO: 185122 - DNA, 25 bp, probe
cgacaaggatatgatgtccgctctg

SEQ ID NO: 185123 - DNA, 25 bp, probe
cgacacgagtctcaaccaggctgtg

SEQ ID NO: 185124 - DNA, 25 bp, probe
cgacagcgcatgcaggaacgggggt

SEQ ID NO: 185125 - DNA, 25 bp, probe
cgacacctggatgttcggggtgaca

SEQ ID NO: 185126 - DNA, 25 bp, probe
cgagcaactggggttgggcggcagc

SEQ ID NO: 185127 - DNA, 25 bp, probe
cgacgacgatgtcgtcggggccacg

SEQ ID NO: 185128 - DNA, 25 bp, probe
cgaagcaggagtagctgccgggccc

SEQ ID NO: 185129 - DNA, 25 bp, probe
cgaagcaggagtagctgccgggccc

SEQ ID NO: 185130 - DNA, 25 bp, probe
cgaggagggcatggtggaggggcgc

SEQ ID NO: 185131 - DNA, 25 bp, probe
cgaggcgggacactggaggtggagt

SEQ ID NO: 185132 - DNA, 25 bp, probe
cgagaggcgtgatgcaggggtgtga

SEQ ID NO: 185133 - DNA, 25 bp, probe
cgaagtagtggctgcgggtgctgag

SEQ ID NO: 185134 - DNA, 25 bp, probe
cgaagtagtggctgcgggtgctgag

SEQ ID NO: 185135 - DNA, 25 bp, probe
cgaaatcagtgagacctggattcaa

SEQ ID NO: 185136 - DNA, 25 bp, probe
cgagaattctgagatcctccagaaa

SEQ ID NO: 185137 - DNA, 25 bp, probe
cgagatagggcagatcactctcaag

SEQ ID NO: 185138 - DNA, 25 bp, probe
cgagaaaggaagtcatcttcatcct

SEQ ID NO: 185139 - DNA, 25 bp, probe
cgagaatgtgcacagactcttcacc

SEQ ID NO: 185140 - DNA, 25 bp, probe
cgacattctgcagagattcccaacc

SEQ ID NO: 185141 - DNA, 25 bp, probe
cgcattttacgaattcaccttccga

SEQ ID NO: 185142 - DNA, 25 bp, probe
cgcactttaagaacatccccatcgg

SEQ ID NO: 185143 - DNA, 25 bp, probe
cgcactttaagaacatccccatcgg

SEQ ID NO: 185144 - DNA, 25 bp, probe
cgccttcaggagaatctacacgcat

SEQ ID NO: 185145 - DNA, 25 bp, probe
ctacctttgtaaaacagcctataga

SEQ ID NO: 185146 - DNA, 25 bp, probe
cgagaacgagatggccgacagcccc

SEQ ID NO: 185147 - DNA, 25 bp, probe
cgagaacgagatggccgacagcccc

SEQ ID NO: 185148 - DNA, 25 bp, probe
cgagacaagcagagtcgcacgctcc

SEQ ID NO: 185149 - DNA, 25 bp, probe
cgcaacgacatcatgttgctgcgcc

SEQ ID NO: 185150 - DNA, 25 bp, probe
cgcaaggacttccatggcgagctgg

SEQ ID NO: 185151 - DNA, 25 bp, probe
cgcagacggcttcgtcagtgacgtc

SEQ ID NO: 185152 - DNA, 25 bp, probe
cgacatcgccgtcgatggtgagccc

SEQ ID NO: 185153 - DNA, 25 bp, probe
cgacatcaccgaggagtgtaggccc

SEQ ID NO: 185154 - DNA, 25 bp, probe
cgactccacaatctggaagggccag

SEQ ID NO: 185155 - DNA, 25 bp, probe
cgactccacaatctggaagggccag

SEQ ID NO: 185156 - DNA, 25 bp, probe
cgaccgcacagacgggtacctgaag

SEQ ID NO: 185157 - DNA, 25 bp, probe
cgagacagccacagtagaagcggta

SEQ ID NO: 185158 - DNA, 25 bp, probe
cgagcatgctgcccttgggaagctc

SEQ ID NO: 185159 - DNA, 25 bp, probe
cgagatgctcgtgtgcagagagcac

SEQ ID NO: 185160 - DNA, 25 bp, probe
cgagtgcagcgcatggcagagcatg

SEQ ID NO: 185161 - DNA, 25 bp, probe
cgagtgcagcgcatggcagagcatg

SEQ ID NO: 185162 - DNA, 25 bp, probe
cgcaacagcagcctgcagctggatt

SEQ ID NO: 185163 - DNA, 25 bp, probe
cgaagcatctgaatcatgtccactc

SEQ ID NO: 185164 - DNA, 25 bp, probe
cgcaagcctgatactctccaggctg

SEQ ID NO: 185165 - DNA, 25 bp, probe
cgcatacatcatgaccgtcactgac

SEQ ID NO: 185166 - DNA, 25 bp, probe
cgcatgcactcagagcacagagccg

SEQ ID NO: 185167 - DNA, 25 bp, probe
cgcacatcatcagcgcgcaagaggg

SEQ ID NO: 185168 - DNA, 25 bp, probe
cgagatgagcaccgagcacagggga

SEQ ID NO: 185169 - DNA, 25 bp, probe
cgagatgagcaccgagcacagggga

SEQ ID NO: 185170 - DNA, 25 bp, probe
cgagagggcgagaccagaggggacg

SEQ ID NO: 185171 - DNA, 25 bp, probe
cgaggtgggcagccacgagaaggtg

SEQ ID NO: 185172 - DNA, 25 bp, probe
cgagcgtggctaccaggagagcagg

SEQ ID NO: 185173 - DNA, 25 bp, probe
cgaggtgatcctcagctggatgcac

SEQ ID NO: 185174 - DNA, 25 bp, probe
cgacgtggccattgacatgtggagc

SEQ ID NO: 185175 - DNA, 25 bp, probe
cgacctgtacatgatcatgcgggag

SEQ ID NO: 185176 - DNA, 25 bp, probe
cgacctgttgcacatgagcgaggcg

SEQ ID NO: 185177 - DNA, 25 bp, probe
cgactcagtatccgagagctgacac

SEQ ID NO: 185178 - DNA, 25 bp, probe
cgaaagaagagcctgggccacggcc

SEQ ID NO: 185179 - DNA, 25 bp, probe
cgaaaccaaggcgggctgccaggtg

SEQ ID NO: 185180 - DNA, 25 bp, probe
cctacactacagaggggccagggga

SEQ ID NO: 185181 - DNA, 25 bp, probe
cccacctatcgttggttcgcaaagt

SEQ ID NO: 185182 - DNA, 25 bp, probe
cccacctatcgttggttcgcaaagt

SEQ ID NO: 185183 - DNA, 25 bp, probe
ccctctccatgggtgttttcaaggc

SEQ ID NO: 185184 - DNA, 25 bp, probe
cgccctcatcatgggggtcttaacc

SEQ ID NO: 185185 - DNA, 25 bp, probe
cgcacggtcatccggagtactaagc

SEQ ID NO: 185186 - DNA, 25 bp, probe
cgacttcgacgaggagtacttcagc

SEQ ID NO: 185187 - DNA, 25 bp, probe
cgagatctgggcgagggtcacttcg

SEQ ID NO: 185188 - DNA, 25 bp, probe
cgcagatcatgcaccagctggacaa

SEQ ID NO: 185189 - DNA, 25 bp, probe
cgcagtcgcaggcacgtgacagatg

SEQ ID NO: 185190 - DNA, 25 bp, probe
cgagctccagctgccttaggaggag

SEQ ID NO: 185191 - DNA, 25 bp, probe
cgagctccagctgccttaggaggag

SEQ ID NO: 185192 - DNA, 25 bp, probe
cgagctcctgaacttcttgtgggag

SEQ ID NO: 185193 - DNA, 25 bp, probe
cgagctcctgaacttcttgtgggag

SEQ ID NO: 185194 - DNA, 25 bp, probe
cgagctcctgaacttcttgtgggag

SEQ ID NO: 185195 - DNA, 25 bp, probe
cgagtgcctgaactgcatgatttat

SEQ ID NO: 185196 - DNA, 25 bp, probe
cgcaaggtgacacgcatgatcctca

SEQ ID NO: 185197 - DNA, 25 bp, probe
cgaagcaaatctgctgtcctcaaag

SEQ ID NO: 185198 - DNA, 25 bp, probe
cgaagcaaatctgctgtcctcaaag

SEQ ID NO: 185199 - DNA, 25 bp, probe
cgcgaaaatctgtgacccagggctg

SEQ ID NO: 185200 - DNA, 25 bp, probe
cgaacttcagtgtgatcggggcgcg

SEQ ID NO: 185201 - DNA, 25 bp, probe
cgaacttcagtgtgatcggggcgcg

SEQ ID NO: 185202 - DNA, 25 bp, probe
cgaaactgagtcagagcggggcgtg

SEQ ID NO: 185203 - DNA, 25 bp, probe
cgaagtcgagttgcggcggacgctc

SEQ ID NO: 185204 - DNA, 25 bp, probe
cgaagtcgagttgcggcggacgctc

SEQ ID NO: 185205 - DNA, 25 bp, probe
cgcaaagcgaaagcggcaggatcga

SEQ ID NO: 185206 - DNA, 25 bp, probe
cgaagaaaaagccatccagtgaaga

SEQ ID NO: 185207 - DNA, 25 bp, probe
cgagcagaaagatccatcttgctga

SEQ ID NO: 185208 - DNA, 25 bp, probe
cgagcaatgaagtcatccactcctg

SEQ ID NO: 185209 - DNA, 25 bp, probe
cgagcaatgaagtcatccactcctg

SEQ ID NO: 185210 - DNA, 25 bp, probe
cgcatgcctgtaattccagctactc

SEQ ID NO: 185211 - DNA, 25 bp, probe
cgcgcctgtaatcccagctactcgg

SEQ ID NO: 185212 - DNA, 25 bp, probe
cgcttctctcgtcggcggacttgtg

SEQ ID NO: 185213 - DNA, 25 bp, probe
cgcattctgggtctgcaagtctaga

SEQ ID NO: 185214 - DNA, 25 bp, probe
cgcattctgggtctgcaagtctaga

SEQ ID NO: 185215 - DNA, 25 bp, probe
cgcgatctcagttcactgcaagctc

SEQ ID NO: 185216 - DNA, 25 bp, probe
cgcgtgctcatctgttgcacacagc

SEQ ID NO: 185217 - DNA, 25 bp, probe
cgcagtgcaatctttcagcagcaac

SEQ ID NO: 185218 - DNA, 25 bp, probe
cgcagtgcaatctttcagcagcaac

SEQ ID NO: 185219 - DNA, 25 bp, probe
cgcagcatgcaagagctcagcacga

SEQ ID NO: 185220 - DNA, 25 bp, probe
cgctgatcatcaccagctactgcta

SEQ ID NO: 185221 - DNA, 25 bp, probe
cgctgcttctgggcataagtcctgc

SEQ ID NO: 185222 - DNA, 25 bp, probe
cgctgtttgtggagacatccctgag

SEQ ID NO: 185223 - DNA, 25 bp, probe
cgcgttgttacaggacactcgctgg

SEQ ID NO: 185224 - DNA, 25 bp, probe
cgcgttgttacaggacactcgctgg

SEQ ID NO: 185225 - DNA, 25 bp, probe
cgcgtctgaggctcagaccctgctg

SEQ ID NO: 185226 - DNA, 25 bp, probe
cgccgctgctgggagagatcccctg

SEQ ID NO: 185227 - DNA, 25 bp, probe
cgctcagctgtcttgtaaaacagtg

SEQ ID NO: 185228 - DNA, 25 bp, probe
cgctgctgacgctgtgtaaatgtgc

SEQ ID NO: 185229 - DNA, 25 bp, probe
cgcttggatgcctgtaaggatcccg

SEQ ID NO: 185230 - DNA, 25 bp, probe
cgcgctgtgtactgtaaggacgtgc

SEQ ID NO: 185231 - DNA, 25 bp, probe
cgcaggtgcatggtcttcaaggagc

SEQ ID NO: 185232 - DNA, 25 bp, probe
cgcttcctggtcttatcatggacaa

SEQ ID NO: 185233 - DNA, 25 bp, probe
cgcacccaggttagactctgaagga

SEQ ID NO: 185234 - DNA, 25 bp, probe
cgactgcacagaatggctgacttga

SEQ ID NO: 185235 - DNA, 25 bp, probe
cgctctgatgcattctgtcatgact

SEQ ID NO: 185236 - DNA, 25 bp, probe
cccgagctttgattgactccgttat

SEQ ID NO: 185237 - DNA, 25 bp, probe
ccagtgattttatacctcaggtttc

SEQ ID NO: 185238 - DNA, 25 bp, probe
ccggaagtgtatccaccgggacctg

SEQ ID NO: 185239 - DNA, 25 bp, probe
cgcattggcgggtcccgcagggagc

SEQ ID NO: 185240 - DNA, 25 bp, probe
cgctcggggctgggcagaaggggcg

SEQ ID NO: 185241 - DNA, 25 bp, probe
cccaggccctggctaatgggcccga

SEQ ID NO: 185242 - DNA, 25 bp, probe
cccaggccctggctaatgggcccga

SEQ ID NO: 185243 - DNA, 25 bp, probe
cgccggccctggttagtgaagtacg

SEQ ID NO: 185244 - DNA, 25 bp, probe
ccaccccagttgtaggtagaacaag

SEQ ID NO: 185245 - DNA, 25 bp, probe
cgcaccgccatgcatgatgggtaaa

SEQ ID NO: 185246 - DNA, 25 bp, probe
cgcagactgtagctgctgtgggaaa

SEQ ID NO: 185247 - DNA, 25 bp, probe
cgcaatgattcagctcgctgaggaa

SEQ ID NO: 185248 - DNA, 25 bp, probe
cgctatgagcctgtgctctttgaag

SEQ ID NO: 185249 - DNA, 25 bp, probe
cgctatgagcctgtgctctttgaag

SEQ ID NO: 185250 - DNA, 25 bp, probe
cgctcagtgccatgcgttcgctgaa

SEQ ID NO: 185251 - DNA, 25 bp, probe
cgccatggcttagacccgagattgg

SEQ ID NO: 185252 - DNA, 25 bp, probe
cgcctgggaagcacaacgacattga

SEQ ID NO: 185253 - DNA, 25 bp, probe
cgcctgggaagcacaacgacattga

SEQ ID NO: 185254 - DNA, 25 bp, probe
cgccttcagcatgcctgaactacat

SEQ ID NO: 185255 - DNA, 25 bp, probe
cgagcttcacactaataacaataat

SEQ ID NO: 185256 - DNA, 25 bp, probe
cgactgctccaagaatcagagaatt

SEQ ID NO: 185257 - DNA, 25 bp, probe
cgcaccatctgccacaaacagaatt

SEQ ID NO: 185258 - DNA, 25 bp, probe
cgaaccagcaagctcacaacatttg

SEQ ID NO: 185259 - DNA, 25 bp, probe
cgacacaagtccaccaaatttggaa

SEQ ID NO: 185260 - DNA, 25 bp, probe
cgaacagagaccttctgcagcagct

SEQ ID NO: 185261 - DNA, 25 bp, probe
cgaaagcaagcttttgccaatgatc

SEQ ID NO: 185262 - DNA, 25 bp, probe
cgacgaggagtacttcagcaacacc

SEQ ID NO: 185263 - DNA, 25 bp, probe
cgagcggaagaactacattcaccgg

SEQ ID NO: 185264 - DNA, 25 bp, probe
cgacagggataacagcttcctccag

SEQ ID NO: 185265 - DNA, 25 bp, probe
cgacaggtggaacatgttaccatca

SEQ ID NO: 185266 - DNA, 25 bp, probe
cgaaggaggacctcagcttccatca

SEQ ID NO: 185267 - DNA, 25 bp, probe
cgaagggtactgaagagcctcacct

SEQ ID NO: 185268 - DNA, 25 bp, probe
cgaagtgctggacgaaagcctgaac

SEQ ID NO: 185269 - DNA, 25 bp, probe
cgcaatgagtggggctacgcctgct

SEQ ID NO: 185270 - DNA, 25 bp, probe
cgcaatgagtggggctacgcctgct

SEQ ID NO: 185271 - DNA, 25 bp, probe
cgctgtggatggtgtgcacggtctt

SEQ ID NO: 185272 - DNA, 25 bp, probe
cgctgtggatggtgtgcacggtctt

SEQ ID NO: 185273 - DNA, 25 bp, probe
cgcctacaggtacccaggctttatg

SEQ ID NO: 185274 - DNA, 25 bp, probe
cgctgtagagtttgcacctggggaa

SEQ ID NO: 185275 - DNA, 25 bp, probe
cgctgtagagtttgcacctggggaa

SEQ ID NO: 185276 - DNA, 25 bp, probe
cgctgtcaggatcatgccctgtggc

SEQ ID NO: 185277 - DNA, 25 bp, probe
cgcttcagctgttgatccgctggtc

SEQ ID NO: 185278 - DNA, 25 bp, probe
cgcttcagctgttgatccgctggtc

SEQ ID NO: 185279 - DNA, 25 bp, probe
cgctgtattgtgtatcaccgggggc

SEQ ID NO: 185280 - DNA, 25 bp, probe
cgctgcacaaactcagccggaggcg

SEQ ID NO: 185281 - DNA, 25 bp, probe
cgcagagcaacctgcatctgctgga

SEQ ID NO: 185282 - DNA, 25 bp, probe
cgcacgaactaccattcaggcagtc

SEQ ID NO: 185283 - DNA, 25 bp, probe
cgcacgaactaccattcaggcagtc

SEQ ID NO: 185284 - DNA, 25 bp, probe
cgcccaagctcagcttagaagttcg

SEQ ID NO: 185285 - DNA, 25 bp, probe
cgaccacctcaacattggagacatc

SEQ ID NO: 185286 - DNA, 25 bp, probe
cgacaacctctattactgggaccag

SEQ ID NO: 185287 - DNA, 25 bp, probe
cgactgacctgtctttggaaccaga

SEQ ID NO: 185288 - DNA, 25 bp, probe
cgcctaactgctcttcgtattaaga

SEQ ID NO: 185289 - DNA, 25 bp, probe
cgcctaactgctcttcgtattaaga

SEQ ID NO: 185290 - DNA, 25 bp, probe
cctccctctaccacgtatatgaggt

SEQ ID NO: 185291 - DNA, 25 bp, probe
gtcttgccttttcacggtagtggtc

SEQ ID NO: 185292 - DNA, 25 bp, probe
gtcgtccttcgtaacggtcagagtg

SEQ ID NO: 185293 - DNA, 25 bp, probe
gtcgtcctaccagaggggattgtga

SEQ ID NO: 185294 - DNA, 25 bp, probe
tcttccctaccggggagggatggat

SEQ ID NO: 185295 - DNA, 25 bp, probe
cccacctacccagctgatgggggtt

SEQ ID NO: 185296 - DNA, 25 bp, probe
cctcaccattccagcctgggatatc

SEQ ID NO: 185297 - DNA, 25 bp, probe
cccaattctccagcctggtgttact

SEQ ID NO: 185298 - DNA, 25 bp, probe
cccagaccgagagcgcttagtaggt

SEQ ID NO: 185299 - DNA, 25 bp, probe
ccggaacgaaatagcttatttgaat

SEQ ID NO: 185300 - DNA, 25 bp, probe
cgagcccgggaaggctcctttgaat

SEQ ID NO: 185301 - DNA, 25 bp, probe
cgagcatcctggtaacctactaggt

SEQ ID NO: 185302 - DNA, 25 bp, probe
cgagcatcctggtaacctactaggt

SEQ ID NO: 185303 - DNA, 25 bp, probe
cgacatggctgggctacgtgaatag

SEQ ID NO: 185304 - DNA, 25 bp, probe
cgacggcatgggaatctcttcatca

SEQ ID NO: 185305 - DNA, 25 bp, probe
cgactgccatcttggacttgtcagc

SEQ ID NO: 185306 - DNA, 25 bp, probe
cgcatctgccaggtggtctggcgcc

SEQ ID NO: 185307 - DNA, 25 bp, probe
cgacagcagcaggagcgtcatggcc

SEQ ID NO: 185308 - DNA, 25 bp, probe
cgaaagcagggcatcatgtccttcc

SEQ ID NO: 185309 - DNA, 25 bp, probe
cgcagatagagacaatcttacccgc

SEQ ID NO: 185310 - DNA, 25 bp, probe
cgctgcaaggctgcagacggacccg

SEQ ID NO: 185311 - DNA, 25 bp, probe
cgcccaggcgacaaaagtgctagga

SEQ ID NO: 185312 - DNA, 25 bp, probe
cgcccaggcgacaaaagtgctagga

SEQ ID NO: 185313 - DNA, 25 bp, probe
cgctgccggcaaccgaaactagcag

SEQ ID NO: 185314 - DNA, 25 bp, probe
cgctggccggagcagtgaaccagca

SEQ ID NO: 185315 - DNA, 25 bp, probe
cgctggccggagcagtgaaccagca

SEQ ID NO: 185316 - DNA, 25 bp, probe
cgctcccgggggaagtcacagatga

SEQ ID NO: 185317 - DNA, 25 bp, probe
cgctcccaggtactgcaagtcctgg

SEQ ID NO: 185318 - DNA, 25 bp, probe
cgcccgcagtctatgaagtcatgaa

SEQ ID NO: 185319 - DNA, 25 bp, probe
cgcccgcagtctatgaagtcatgaa

SEQ ID NO: 185320 - DNA, 25 bp, probe
cgcatcttgcgcatctttaagctga

SEQ ID NO: 185321 - DNA, 25 bp, probe
cgcatcttgcgcatctttaagctga

SEQ ID NO: 185322 - DNA, 25 bp, probe
cgcacctgaggtgcttcgagctcag

SEQ ID NO: 185323 - DNA, 25 bp, probe
cgaactggtgacctgtaggccatgt

SEQ ID NO: 185324 - DNA, 25 bp, probe
cgaagtggatacctctagtgcaatt

SEQ ID NO: 185325 - DNA, 25 bp, probe
cgacagctggatccggcaatgtgaa

SEQ ID NO: 185326 - DNA, 25 bp, probe
cgacagctgattggcggattggaga

SEQ ID NO: 185327 - DNA, 25 bp, probe
cgacatgtgcttgcatttctagcga

SEQ ID NO: 185328 - DNA, 25 bp, probe
cgcatcatgtgtgcactgtcgcggc

SEQ ID NO: 185329 - DNA, 25 bp, probe
cgcatcatgtgtgcactgtcgcggc

SEQ ID NO: 185330 - DNA, 25 bp, probe
cgcaatgttgcatcagctctgggca

SEQ ID NO: 185331 - DNA, 25 bp, probe
cgacgttcgatcttgcatggagcaa

SEQ ID NO: 185332 - DNA, 25 bp, probe
cgcgtgtttgactacagtgagtact

SEQ ID NO: 185333 - DNA, 25 bp, probe
cgcttttctggctgactattactca

SEQ ID NO: 185334 - DNA, 25 bp, probe
cgcattgtccggagatacctactca

SEQ ID NO: 185335 - DNA, 25 bp, probe
cgccttctcaggagtgtccaacatt

SEQ ID NO: 185336 - DNA, 25 bp, probe
cgcacttatcaggaacgcctcgata

SEQ ID NO: 185337 - DNA, 25 bp, probe
cgctctccatcaagaaatgccctat

SEQ ID NO: 185338 - DNA, 25 bp, probe
cgctcattccaactaatcatcatct

SEQ ID NO: 185339 - DNA, 25 bp, probe
cgacattggaaatcacttctgtgag

SEQ ID NO: 185340 - DNA, 25 bp, probe
cgacgggaagacaagttcatgtact

SEQ ID NO: 185341 - DNA, 25 bp, probe
cgacgtggccgccaagttagtcgct

SEQ ID NO: 185342 - DNA, 25 bp, probe
cgacgaggcccagagcaagagaggc

SEQ ID NO: 185343 - DNA, 25 bp, probe
cgacgaaacatctctgcaaagatac

SEQ ID NO: 185344 - DNA, 25 bp, probe
cgacgaagacttcttagagctccca

SEQ ID NO: 185345 - DNA, 25 bp, probe
cgacagagaaaaccttcaccatccc

SEQ ID NO: 185346 - DNA, 25 bp, probe
cgaataaaaggccctccatctgccc

SEQ ID NO: 185347 - DNA, 25 bp, probe
cgacaatgagaagtgctggtttggc

SEQ ID NO: 185348 - DNA, 25 bp, probe
cgacgatgaacatgccgttggtttt

SEQ ID NO: 185349 - DNA, 25 bp, probe
gcgacgatgaacatgccgttggttt

SEQ ID NO: 185350 - DNA, 25 bp, probe
gcgacgatgaacatgccgttggttt

SEQ ID NO: 185351 - DNA, 25 bp, probe
cgacggaaagcgacgtctggagcct

SEQ ID NO: 185352 - DNA, 25 bp, probe
cgacggaaagcgacgtctggagcct

SEQ ID NO: 185353 - DNA, 25 bp, probe
cgagcgcgaccaggtggacgcgagc

SEQ ID NO: 185354 - DNA, 25 bp, probe
cgactgcatcacgcagggacgtgag

SEQ ID NO: 185355 - DNA, 25 bp, probe
cgcgtcatcactgcagaaacgtgca

SEQ ID NO: 185356 - DNA, 25 bp, probe
cgctgatgaccccggacaccgacga

SEQ ID NO: 185357 - DNA, 25 bp, probe
cgaatagcccagccaatcaactgtc

SEQ ID NO: 185358 - DNA, 25 bp, probe
cgaacatctcggccattcaaagccc

SEQ ID NO: 185359 - DNA, 25 bp, probe
cgaagccatcggcatcatgagaagg

SEQ ID NO: 185360 - DNA, 25 bp, probe
cgaagccatcggcatcatgagaagg

SEQ ID NO: 185361 - DNA, 25 bp, probe
cgcacagccctggacatcaagattg

SEQ ID NO: 185362 - DNA, 25 bp, probe
cgcacccagctttgctcaaaagcca

SEQ ID NO: 185363 - DNA, 25 bp, probe
cgcacccagctttgctcaaaagcca

SEQ ID NO: 185364 - DNA, 25 bp, probe
cgcggtgatgtttgtagcctacagc

SEQ ID NO: 185365 - DNA, 25 bp, probe
cgcggtgatgtttgtagcctacagc

SEQ ID NO: 185366 - DNA, 25 bp, probe
cgacgtggcatttgctgaccgaatg

SEQ ID NO: 185367 - DNA, 25 bp, probe
cgcagcgtggcactgggacgtaagt

SEQ ID NO: 185368 - DNA, 25 bp, probe
cgcagcttggggccaactgacgagt

SEQ ID NO: 185369 - DNA, 25 bp, probe
cgctgccgcagaggtaactgaggag

SEQ ID NO: 185370 - DNA, 25 bp, probe
cgcttcgagggaatatgcgaagctg

SEQ ID NO: 185371 - DNA, 25 bp, probe
cgctgggagggtacatggatgaggc

SEQ ID NO: 185372 - DNA, 25 bp, probe
cgctgggcacagccattgtggtggg

SEQ ID NO: 185373 - DNA, 25 bp, probe
cgctgcgcatcctgtacgtgatgcg

SEQ ID NO: 185374 - DNA, 25 bp, probe
cgacctcctagaacgctgtgggtgc

SEQ ID NO: 185375 - DNA, 25 bp, probe
cgcacctcttcgaaagcctggaggc

SEQ ID NO: 185376 - DNA, 25 bp, probe
cgcacctcgtccaagagcttggagt

SEQ ID NO: 185377 - DNA, 25 bp, probe
cgcacccaggccgatgagttgcctg

SEQ ID NO: 185378 - DNA, 25 bp, probe
cgacgccacggtgagtcagctgtcg

SEQ ID NO: 185379 - DNA, 25 bp, probe
cgacggccagaagatctcctggcag

SEQ ID NO: 185380 - DNA, 25 bp, probe
cgcccccagaacatacactgtgaac

SEQ ID NO: 185381 - DNA, 25 bp, probe
cgccgacctgaacaacatcgtcaag

SEQ ID NO: 185382 - DNA, 25 bp, probe
cgccgacctgaacaacatcgtcaag

SEQ ID NO: 185383 - DNA, 25 bp, probe
cctgcaggggaacaaaggtccttgg

SEQ ID NO: 185384 - DNA, 25 bp, probe
cctcagtactgaagaaaaatccatt

SEQ ID NO: 185385 - DNA, 25 bp, probe
cctcagtactgaagaaaaatccatt

SEQ ID NO: 185386 - DNA, 25 bp, probe
cccagctcctagggtacagtctact

SEQ ID NO: 185387 - DNA, 25 bp, probe
cccagctgcctatgtaaggccttct

SEQ ID NO: 185388 - DNA, 25 bp, probe
cccagcccttgtccatagtttgagg

SEQ ID NO: 185389 - DNA, 25 bp, probe
cccagggtagtagatggcattgaag

SEQ ID NO: 185390 - DNA, 25 bp, probe
cgacgcgggggagatggtcatcgag

SEQ ID NO: 185391 - DNA, 25 bp, probe
cgaccgggagaggaaggtgagtatg

SEQ ID NO: 185392 - DNA, 25 bp, probe
cgaccggacaagggagcgctggtgt

SEQ ID NO: 185393 - DNA, 25 bp, probe
cgaccggacaagggagcgctggtgt

SEQ ID NO: 185394 - DNA, 25 bp, probe
gaacgggaaacacacgcttggggag

SEQ ID NO: 185395 - DNA, 25 bp, probe
gaaccggaactctgaggggtgacaa

SEQ ID NO: 185396 - DNA, 25 bp, probe
gaaccccaactacacggagttcaag

SEQ ID NO: 185397 - DNA, 25 bp, probe
gtcacctccagtgactaccgggtac

SEQ ID NO: 185398 - DNA, 25 bp, probe
gaacctccaggtctagcctgggtat

SEQ ID NO: 185399 - DNA, 25 bp, probe
gcaacctacgggagaccgatattta

SEQ ID NO: 185400 - DNA, 25 bp, probe
cccctatcgggagaggggattcaca

SEQ ID NO: 185401 - DNA, 25 bp, probe
ccctttagtttgtgttggtgtcagt

SEQ ID NO: 185402 - DNA, 25 bp, probe
ccctttagtttgtgttggtgtcagt

SEQ ID NO: 185403 - DNA, 25 bp, probe
ccgatttatctatacggtggtccag

SEQ ID NO: 185404 - DNA, 25 bp, probe
cctgcatggtatcactaaaggtttc

SEQ ID NO: 185405 - DNA, 25 bp, probe
cctgatgagtatgctctaaaagaat

SEQ ID NO: 185406 - DNA, 25 bp, probe
ccaggagttcctgaacgagaaggcg

SEQ ID NO: 185407 - DNA, 25 bp, probe
cgctggttttgtgtacagtgaagct

SEQ ID NO: 185408 - DNA, 25 bp, probe
cgctcgattctattcgctacattac

SEQ ID NO: 185409 - DNA, 25 bp, probe
cgctcggtgcgatactgatgatgaa

SEQ ID NO: 185410 - DNA, 25 bp, probe
cgctcggtgcgatactgatgatgaa

SEQ ID NO: 185411 - DNA, 25 bp, probe
cgctctggttgagctcagtggagcc

SEQ ID NO: 185412 - DNA, 25 bp, probe
cgctcaggtggagcgctatgtgccc

SEQ ID NO: 185413 - DNA, 25 bp, probe
cgcatcagtgttctctgaggtcctg

SEQ ID NO: 185414 - DNA, 25 bp, probe
cgcaaggtgttcctgaggctcttgc

SEQ ID NO: 185415 - DNA, 25 bp, probe
cgcacgagtagtgggtcgtcttgtt

SEQ ID NO: 185416 - DNA, 25 bp, probe
cgcacgagtagtgggtcgtcttgtt

SEQ ID NO: 185417 - DNA, 25 bp, probe
cgcagccacaattcactgtcttttg

SEQ ID NO: 185418 - DNA, 25 bp, probe
cgcgtgctacttatgtctcgcttgt

SEQ ID NO: 185419 - DNA, 25 bp, probe
cgcagcgaagccatgtgtcttcctg

SEQ ID NO: 185420 - DNA, 25 bp, probe
cgcaccatagctgtggtgctgactg

SEQ ID NO: 185421 - DNA, 25 bp, probe
cgccctatgagtttgagctcgtgcc

SEQ ID NO: 185422 - DNA, 25 bp, probe
cgctggcctgggatgagagggccca

SEQ ID NO: 185423 - DNA, 25 bp, probe
cgctggcctgggatgagagggccca

SEQ ID NO: 185424 - DNA, 25 bp, probe
cgctggcctgggatgagagggccca

SEQ ID NO: 185425 - DNA, 25 bp, probe
cgcggcctggagcaacatgtggctc

SEQ ID NO: 185426 - DNA, 25 bp, probe
cgcggcctggagcaacatgtggctc

SEQ ID NO: 185427 - DNA, 25 bp, probe
cgcgcctgcatggatgacaccattg

SEQ ID NO: 185428 - DNA, 25 bp, probe
cgctgacctgcaggaagcatatgga

SEQ ID NO: 185429 - DNA, 25 bp, probe
cgcgcgccagcaagaagatactgct

SEQ ID NO: 185430 - DNA, 25 bp, probe
cgcaagcgcagccgcaaggagagct

SEQ ID NO: 185431 - DNA, 25 bp, probe
cgcaaggtggtgctgatgcagtgca

SEQ ID NO: 185432 - DNA, 25 bp, probe
cgcctggagggcctacagtcagaaa

SEQ ID NO: 185433 - DNA, 25 bp, probe
cccggcctccaagcagttgaaaaag

SEQ ID NO: 185434 - DNA, 25 bp, probe
ccttgtcccgttgtgttaaagacat

SEQ ID NO: 185435 - DNA, 25 bp, probe
ccttcttaacttctagctaacaact

SEQ ID NO: 185436 - DNA, 25 bp, probe
ccccttaaatatcttgtctacattc

SEQ ID NO: 185437 - DNA, 25 bp, probe
cctcctataaacattttcccttcat

SEQ ID NO: 185438 - DNA, 25 bp, probe
cctacaaaacacagtgaacgacttt

SEQ ID NO: 185439 - DNA, 25 bp, probe
cgctgtacccccagtaaagagcttt

SEQ ID NO: 185440 - DNA, 25 bp, probe
cgcttctcccggagtagctcaaggt

SEQ ID NO: 185441 - DNA, 25 bp, probe
cgcttctcccggagtagctcaaggt

SEQ ID NO: 185442 - DNA, 25 bp, probe
cccttatccttagctatgccaacag

SEQ ID NO: 185443 - DNA, 25 bp, probe
ccggtggctttagccgtgcaaatcc

SEQ ID NO: 185444 - DNA, 25 bp, probe
ccggaggctttacacaccaaagaag

SEQ ID NO: 185445 - DNA, 25 bp, probe
ccgggaggtggacaacgacgaggag

SEQ ID NO: 185446 - DNA, 25 bp, probe
ccgggacgtgtacagcactgactac

SEQ ID NO: 185447 - DNA, 25 bp, probe
cgcgatggacagactcacaacctga

SEQ ID NO: 185448 - DNA, 25 bp, probe
cgcaagaagctgagccagcccatca

SEQ ID NO: 185449 - DNA, 25 bp, probe
cgacagatgaccgcacagcactatg

SEQ ID NO: 185450 - DNA, 25 bp, probe
cgaaggacgcgcaaatgcagcaaga

SEQ ID NO: 185451 - DNA, 25 bp, probe
cgcaattccgccaaagccaagaaat

SEQ ID NO: 185452 - DNA, 25 bp, probe
cgaactccaccggaggcaattgcac

SEQ ID NO: 185453 - DNA, 25 bp, probe
cgaagaccctctgagatgctacaga

SEQ ID NO: 185454 - DNA, 25 bp, probe
cgacaacggctccggcatgtgcaag

SEQ ID NO: 185455 - DNA, 25 bp, probe
cgaaaccagccaattctgctgcaga

SEQ ID NO: 185456 - DNA, 25 bp, probe
cgcaaagccagcgtgaccatcgagg

SEQ ID NO: 185457 - DNA, 25 bp, probe
cgcaaaggcagcaggctaccggacg

SEQ ID NO: 185458 - DNA, 25 bp, probe
cgctcaagcgacaggtgtccctgga

SEQ ID NO: 185459 - DNA, 25 bp, probe
cccaatggcttatcttacactggat

SEQ ID NO: 185460 - DNA, 25 bp, probe
ccgaagttgccatctaccttgggat

SEQ ID NO: 185461 - DNA, 25 bp, probe
gccgtagtgaccaggcctttttttg

SEQ ID NO: 185462 - DNA, 25 bp, probe
gccgtagtgaccaggcctttttttg

SEQ ID NO: 185463 - DNA, 25 bp, probe
cctatacgaaatatggttccttttg

SEQ ID NO: 185464 - DNA, 25 bp, probe
cgcctatacgaaatatggttccttt

SEQ ID NO: 185465 - DNA, 25 bp, probe
cgcccaagtaactggaccctgttgg

SEQ ID NO: 185466 - DNA, 25 bp, probe
ccccggaacagatcgaccaatttgt

SEQ ID NO: 185467 - DNA, 25 bp, probe
tccccggaacagatcgaccaatttg

SEQ ID NO: 185468 - DNA, 25 bp, probe
cgcccggaccagatacattccgtgt

SEQ ID NO: 185469 - DNA, 25 bp, probe
ccctccaaacttcatcattcgggtc

SEQ ID NO: 185470 - DNA, 25 bp, probe
cccgtaaagcttcatttgcaagaaa

SEQ ID NO: 185471 - DNA, 25 bp, probe
cccgtaaagcttcatttgcaagaaa

SEQ ID NO: 185472 - DNA, 25 bp, probe
cccagatgaaggttttgttgcattc

SEQ ID NO: 185473 - DNA, 25 bp, probe
cccggtcgagctattattcttacac

SEQ ID NO: 185474 - DNA, 25 bp, probe
ccctgagggacggttttgctttatg

SEQ ID NO: 185475 - DNA, 25 bp, probe
ccctgagggacggttttgctttatg

SEQ ID NO: 185476 - DNA, 25 bp, probe
cccgaaggatctgtccgttcagggt

SEQ ID NO: 185477 - DNA, 25 bp, probe
cccaaattatgtggtcgctgaccgg

SEQ ID NO: 185478 - DNA, 25 bp, probe
cccaatttttggtatgtgctcatag

SEQ ID NO: 185479 - DNA, 25 bp, probe
cccaatccttagcaatgccttagct

SEQ ID NO: 185480 - DNA, 25 bp, probe
cccaatttgtggtctaccttcagca

SEQ ID NO: 185481 - DNA, 25 bp, probe
cccgagttgtgtccaacgattcgga

SEQ ID NO: 185482 - DNA, 25 bp, probe
cgccgagtttgttagccgaaataga

SEQ ID NO: 185483 - DNA, 25 bp, probe
cgccgagtttgttagccgaaataga

SEQ ID NO: 185484 - DNA, 25 bp, probe
cgctggagtttcaataccggagatc

SEQ ID NO: 185485 - DNA, 25 bp, probe
cgcaaggttcatgtgaccaaggaca

SEQ ID NO: 185486 - DNA, 25 bp, probe
cgcaactgtctagtgggccagggac

SEQ ID NO: 185487 - DNA, 25 bp, probe
cgctccttgctaaccggtgagtgac

SEQ ID NO: 185488 - DNA, 25 bp, probe
cgctgcttctttggccaagtagtgg

SEQ ID NO: 185489 - DNA, 25 bp, probe
cgctgcttctttggccaagtagtgg

SEQ ID NO: 185490 - DNA, 25 bp, probe
cgctttctcttggcaatcagaaggc

SEQ ID NO: 185491 - DNA, 25 bp, probe
cgcggactcacgtcaagcggatcgc

SEQ ID NO: 185492 - DNA, 25 bp, probe
cgcgtgtcaagcgacaatggtgctc

SEQ ID NO: 185493 - DNA, 25 bp, probe
cgcgtgtcaagcgacaatggtgctc

SEQ ID NO: 185494 - DNA, 25 bp, probe
cgcttgagcaccgcatcggctgcat

SEQ ID NO: 185495 - DNA, 25 bp, probe
cgcttgagcaccgcatcggctgcat

SEQ ID NO: 185496 - DNA, 25 bp, probe
cgcttgcacgcggccttggcagcag

SEQ ID NO: 185497 - DNA, 25 bp, probe
cgctggcgagatgctcgtgtgcaga

SEQ ID NO: 185498 - DNA, 25 bp, probe
cgctgccaatgcactcgatcttgtc

SEQ ID NO: 185499 - DNA, 25 bp, probe
cgctgccaatgatgtttcatttgcc

SEQ ID NO: 185500 - DNA, 25 bp, probe
cgcgtcaagcagactttctcttgcc

SEQ ID NO: 185501 - DNA, 25 bp, probe
cgcagagccaagattagcctcgcct

SEQ ID NO: 185502 - DNA, 25 bp, probe
cgcagacaaacacatgaacatcgac

SEQ ID NO: 185503 - DNA, 25 bp, probe
cgcttcaaggcagagcaaatgtgac

SEQ ID NO: 185504 - DNA, 25 bp, probe
cgctctcaaaattagcttcagtgac

SEQ ID NO: 185505 - DNA, 25 bp, probe
cgctcaaacacctgtttgcagaccc

SEQ ID NO: 185506 - DNA, 25 bp, probe
cgcataaaactgaaggtggagagca

SEQ ID NO: 185507 - DNA, 25 bp, probe
cgaaaggcacgcagcgggagcagca

SEQ ID NO: 185508 - DNA, 25 bp, probe
cgacaaccacgcgtcgagtgagcag

SEQ ID NO: 185509 - DNA, 25 bp, probe
cgacaactcggagctactggctgag

SEQ ID NO: 185510 - DNA, 25 bp, probe
cccaatctaggaggctcctggcgga

SEQ ID NO: 185511 - DNA, 25 bp, probe
cccaatctaggaggctcctggcgga

SEQ ID NO: 185512 - DNA, 25 bp, probe
cgcaaacatgggtgctcttggagct

SEQ ID NO: 185513 - DNA, 25 bp, probe
cgctgaacggcgtgcattatcaaca

SEQ ID NO: 185514 - DNA, 25 bp, probe
cgcatccacgtgaacttgagcactg

SEQ ID NO: 185515 - DNA, 25 bp, probe
cgcactatgaggcactgcggcactt

SEQ ID NO: 185516 - DNA, 25 bp, probe
cgctctgatcaggggtgctggtttt

SEQ ID NO: 185517 - DNA, 25 bp, probe
cgcttacgcgatgcgggtagtattg

SEQ ID NO: 185518 - DNA, 25 bp, probe
cgcacttccgatggcgtcaggaatt

SEQ ID NO: 185519 - DNA, 25 bp, probe
cgcagtgacctcatgttcgagaagc

SEQ ID NO: 185520 - DNA, 25 bp, probe
cgcagtacgtttctccagagctgct

SEQ ID NO: 185521 - DNA, 25 bp, probe
cgcagtcacgatcaacttaggcatg

SEQ ID NO: 185522 - DNA, 25 bp, probe
cgcagtacctggccacttatggccc

SEQ ID NO: 185523 - DNA, 25 bp, probe
cgcaaagcattgtgcacttggacct

SEQ ID NO: 185524 - DNA, 25 bp, probe
cgctaagactgcaagccttacacct

SEQ ID NO: 185525 - DNA, 25 bp, probe
cgcaaatagtcatctctctaatctt

SEQ ID NO: 185526 - DNA, 25 bp, probe
cgcatcagtggcgatgactttattt

SEQ ID NO: 185527 - DNA, 25 bp, probe
cccagggcctgagttagactatttc

SEQ ID NO: 185528 - DNA, 25 bp, probe
cgcagcgggagaagcttacctttct

SEQ ID NO: 185529 - DNA, 25 bp, probe
cgcagcgacgtgagggtcctgattc

SEQ ID NO: 185530 - DNA, 25 bp, probe
cgcagaaatgtgatcagttcctttg

SEQ ID NO: 185531 - DNA, 25 bp, probe
cgcagaaatgtgatcagttcctttg

SEQ ID NO: 185532 - DNA, 25 bp, probe
cgacaaatgggtctcaagctctctg

SEQ ID NO: 185533 - DNA, 25 bp, probe
cccagagaacgtctgcaacatcgtg

SEQ ID NO: 185534 - DNA, 25 bp, probe
cctaaagcaaatctgccaccgtggg

SEQ ID NO: 185535 - DNA, 25 bp, probe
ccttatccaagaattcccctgaagg

SEQ ID NO: 185536 - DNA, 25 bp, probe
ccttaccaatttagttatcgccaga

SEQ ID NO: 185537 - DNA, 25 bp, probe
cgcttacccagaattcttgttcaca

SEQ ID NO: 185538 - DNA, 25 bp, probe
cgctctacatttgtgtttgtgttca

SEQ ID NO: 185539 - DNA, 25 bp, probe
ccgcttcatatggtttagttttcaa

SEQ ID NO: 185540 - DNA, 25 bp, probe
cccactgcttggagaagtccccaag

SEQ ID NO: 185541 - DNA, 25 bp, probe
ccctcattaatgacacttgtcccca

SEQ ID NO: 185542 - DNA, 25 bp, probe
ccctcattaatgacacttgtcccca

SEQ ID NO: 185543 - DNA, 25 bp, probe
cccttctacgaggacttcctcatct

SEQ ID NO: 185544 - DNA, 25 bp, probe
cccttccaccgttgttagtatcatg

SEQ ID NO: 185545 - DNA, 25 bp, probe
cccttccgacagcgacgacaaatgc

SEQ ID NO: 185546 - DNA, 25 bp, probe
cccttccgacagcgacgacaaatgc

SEQ ID NO: 185547 - DNA, 25 bp, probe
cccttcccaatcagcactgaaaata

SEQ ID NO: 185548 - DNA, 25 bp, probe
cgcaaccccaacagcttgaagagga

SEQ ID NO: 185549 - DNA, 25 bp, probe
cgaacaacagcaacgtcttgaacag

SEQ ID NO: 185550 - DNA, 25 bp, probe
cgcacacaaccattcaggctttaca

SEQ ID NO: 185551 - DNA, 25 bp, probe
cgcacacaaccattcaggctttaca

SEQ ID NO: 185552 - DNA, 25 bp, probe
cgaaaactcagcaatggcagattat

SEQ ID NO: 185553 - DNA, 25 bp, probe
cgaaatactcataagccacctctgt

SEQ ID NO: 185554 - DNA, 25 bp, probe
cgaacatgttgcttaccgcaccatt

SEQ ID NO: 185555 - DNA, 25 bp, probe
cgaacatatgcagttattccactaa

SEQ ID NO: 185556 - DNA, 25 bp, probe
cgaacttcagtttcttcataagatg

SEQ ID NO: 185557 - DNA, 25 bp, probe
cgaaccacaaattcttctgaacaac

SEQ ID NO: 185558 - DNA, 25 bp, probe
cgcaagtcacagaattatttgaaaa

SEQ ID NO: 185559 - DNA, 25 bp, probe
cgccgccaaagagttttaccagaag

SEQ ID NO: 185560 - DNA, 25 bp, probe
cgccgacaacgggggtctcaaggcg

SEQ ID NO: 185561 - DNA, 25 bp, probe
cccaacagaccgggtgtctacacga

SEQ ID NO: 185562 - DNA, 25 bp, probe
ccctaaagggtcatgcctcacactt

SEQ ID NO: 185563 - DNA, 25 bp, probe
cccaaaagaggtgtccagagccaag

SEQ ID NO: 185564 - DNA, 25 bp, probe
taccggaaaggtgtgatcaaggcca

SEQ ID NO: 185565 - DNA, 25 bp, probe
cgccgggaaattgagatccaggctc

SEQ ID NO: 185566 - DNA, 25 bp, probe
cgccgaggacttcacaatcaagctg

SEQ ID NO: 185567 - DNA, 25 bp, probe
cgccgaggacttcacaatcaagctg

SEQ ID NO: 185568 - DNA, 25 bp, probe
cgccgaggacactttctggctagtg

SEQ ID NO: 185569 - DNA, 25 bp, probe
cgcaaaggagacattggccaagaga

SEQ ID NO: 185570 - DNA, 25 bp, probe
cgcaaaggggcgctgaggcagaaga

SEQ ID NO: 185571 - DNA, 25 bp, probe
cgcaaaggggcgctgaggcagaaga

SEQ ID NO: 185572 - DNA, 25 bp, probe
cgcaacctgaactgtgaggcgggca

SEQ ID NO: 185573 - DNA, 25 bp, probe
cgcaacctccagggaactcgaggcc

SEQ ID NO: 185574 - DNA, 25 bp, probe
gtcggctcccacggagaccgtgggc

SEQ ID NO: 185575 - DNA, 25 bp, probe
ccgagtccccaaggactagtggagt

SEQ ID NO: 185576 - DNA, 25 bp, probe
ccgagcatcctggtaacctactagg

SEQ ID NO: 185577 - DNA, 25 bp, probe
ccgagcatcctggtaacctactagg

SEQ ID NO: 185578 - DNA, 25 bp, probe
cgctactcctccgaaagcgacgtgt

SEQ ID NO: 185579 - DNA, 25 bp, probe
cgctactcctccgaaagcgacgtgt

SEQ ID NO: 185580 - DNA, 25 bp, probe
cgctgagataccgcaacaggccgaa

SEQ ID NO: 185581 - DNA, 25 bp, probe
cgctgagataccgcaacaggccgaa

SEQ ID NO: 185582 - DNA, 25 bp, probe
cgcagcgtaccttgaacagagggag

SEQ ID NO: 185583 - DNA, 25 bp, probe
cgcagaatacctcgaaccaggcggg

SEQ ID NO: 185584 - DNA, 25 bp, probe
cgaagtgactccaagaccatgacag

SEQ ID NO: 185585 - DNA, 25 bp, probe
cgcaaggactcgctggacgacagcg

SEQ ID NO: 185586 - DNA, 25 bp, probe
cgcaaggaccagatccagcggctgg

SEQ ID NO: 185587 - DNA, 25 bp, probe
cgcaaaactcatgatgctccggctg

SEQ ID NO: 185588 - DNA, 25 bp, probe
cccaatgactgtagcattcaaggct

SEQ ID NO: 185589 - DNA, 25 bp, probe
cgcagctgagcaccaaatccagggc

SEQ ID NO: 185590 - DNA, 25 bp, probe
cgcagctgagcaccaaatccagggc

SEQ ID NO: 185591 - DNA, 25 bp, probe
cgcagctgcctaggatgttctgggc

SEQ ID NO: 185592 - DNA, 25 bp, probe
cgcatcttctacctcaagctggagg

SEQ ID NO: 185593 - DNA, 25 bp, probe
cgcctctgtccagtcagatgcaggc

SEQ ID NO: 185594 - DNA, 25 bp, probe
cgcttctccccaaatgaggcaggaa

SEQ ID NO: 185595 - DNA, 25 bp, probe
cgcacttctcccaaaaggcagatga

SEQ ID NO: 185596 - DNA, 25 bp, probe
cgcacttctcccaaaaggcagatga

SEQ ID NO: 185597 - DNA, 25 bp, probe
cgccttcagctcctttagggatggg

SEQ ID NO: 185598 - DNA, 25 bp, probe
cgccttcagctcctttagggatggg

SEQ ID NO: 185599 - DNA, 25 bp, probe
cgctttcagcagcagtctcttggga

SEQ ID NO: 185600 - DNA, 25 bp, probe
cgcttccacgtggtctatgtggacc

SEQ ID NO: 185601 - DNA, 25 bp, probe
cgcatctcccgtcatccagggagac

SEQ ID NO: 185602 - DNA, 25 bp, probe
cgcatccccgtgggatcaagagaga

SEQ ID NO: 185603 - DNA, 25 bp, probe
cgcatctaccgagtggccaagcgtc

SEQ ID NO: 185604 - DNA, 25 bp, probe
cgcactcactgggcggcttggagtg

SEQ ID NO: 185605 - DNA, 25 bp, probe
cgcacctctgaaggttttctgtgtg

SEQ ID NO: 185606 - DNA, 25 bp, probe
cgcacctggccagatctttgtatgt

SEQ ID NO: 185607 - DNA, 25 bp, probe
cgccctggaagaagcctcttttata

SEQ ID NO: 185608 - DNA, 25 bp, probe
cgccactggagatatcccgtttcaa

SEQ ID NO: 185609 - DNA, 25 bp, probe
cgccgccggaaagcgtgccaatcaa

SEQ ID NO: 185610 - DNA, 25 bp, probe
ccctcggagaagagctgttcacagc

SEQ ID NO: 185611 - DNA, 25 bp, probe
cgcacgcgcaagaggcgcgcttcga

SEQ ID NO: 185612 - DNA, 25 bp, probe
cgcctgagctggagcgagctcttcg

SEQ ID NO: 185613 - DNA, 25 bp, probe
cgcagctgttggacacgtgtctgtg

SEQ ID NO: 185614 - DNA, 25 bp, probe
cgcaagttggccgaggtgggcagcc

SEQ ID NO: 185615 - DNA, 25 bp, probe
cgcaagggcggcaagacgggcccag

SEQ ID NO: 185616 - DNA, 25 bp, probe
cgcataggggtccatactgggccag

SEQ ID NO: 185617 - DNA, 25 bp, probe
cgctgaggtccccaatggggcgggc

SEQ ID NO: 185618 - DNA, 25 bp, probe
cgctgaggtccccaatggggcgggc

SEQ ID NO: 185619 - DNA, 25 bp, probe
cgcagaggtaactgaggagaggggc

SEQ ID NO: 185620 - DNA, 25 bp, probe
cgaagcgtatcagcgtaagaggtgg

SEQ ID NO: 185621 - DNA, 25 bp, probe
cgcacaatgaccaacgtactggggg

SEQ ID NO: 185622 - DNA, 25 bp, probe
cgcacaatgaccaacgtactggggg

SEQ ID NO: 185623 - DNA, 25 bp, probe
cgcacacttcaatctcaactttgtg

SEQ ID NO: 185624 - DNA, 25 bp, probe
cgcacacttcaatctcaactttgtg

SEQ ID NO: 185625 - DNA, 25 bp, probe
cccactcttacccaatttctgggct

SEQ ID NO: 185626 - DNA, 25 bp, probe
cgcacctagtgagccgtttgtggcc

SEQ ID NO: 185627 - DNA, 25 bp, probe
cgaatggtagcagccagctttgcgg

SEQ ID NO: 185628 - DNA, 25 bp, probe
cgaagaatctgcaccagttcatctc

SEQ ID NO: 185629 - DNA, 25 bp, probe
cgcaggacattcttgccgtattctc

SEQ ID NO: 185630 - DNA, 25 bp, probe
cgaatgcatcaacttccgcaagttc

SEQ ID NO: 185631 - DNA, 25 bp, probe
cgcaaaataatgtgccaacttcttt

SEQ ID NO: 185632 - DNA, 25 bp, probe
cgcacaaaggggtccaacagctctt

SEQ ID NO: 185633 - DNA, 25 bp, probe
cgcagccaacgggcttatgcagacc

SEQ ID NO: 185634 - DNA, 25 bp, probe
cgcccagacagtgctgcgaaacccg

SEQ ID NO: 185635 - DNA, 25 bp, probe
cccctgtggggtggaaatgtactgc

SEQ ID NO: 185636 - DNA, 25 bp, probe
cgcacccggccgagaatatgtgttg

SEQ ID NO: 185637 - DNA, 25 bp, probe
cctcctaagacgagaaccttctgag

SEQ ID NO: 185638 - DNA, 25 bp, probe
ccggtattatcgggaaccatttgtg

SEQ ID NO: 185639 - DNA, 25 bp, probe
cgcagtggtttgtggatgcaccctt

SEQ ID NO: 185640 - DNA, 25 bp, probe
cgctggaggtgtttggcttcctcct

SEQ ID NO: 185641 - DNA, 25 bp, probe
cgcggacgaggacgaggacctcttc

SEQ ID NO: 185642 - DNA, 25 bp, probe
cgcttgagccagaatctcaggaccc

SEQ ID NO: 185643 - DNA, 25 bp, probe
cgctgtccacaggcactgaggaccc

SEQ ID NO: 185644 - DNA, 25 bp, probe
cgcagtaccatggtcggaacgccat

SEQ ID NO: 185645 - DNA, 25 bp, probe
gccactacctggaggaaaatcactt

SEQ ID NO: 185646 - DNA, 25 bp, probe
gccagccaaaacgggaaaacagtat

SEQ ID NO: 185647 - DNA, 25 bp, probe
gccagccaaaacgggaaaacagtat

SEQ ID NO: 185648 - DNA, 25 bp, probe
cgcctcgatacgctggaaaaagtgc

SEQ ID NO: 185649 - DNA, 25 bp, probe
cgctacgagacgctggaggtggacg

SEQ ID NO: 185650 - DNA, 25 bp, probe
cgctacgagacgctggaggtggacg

SEQ ID NO: 185651 - DNA, 25 bp, probe
cgctacgagacgctggaggtggacg

SEQ ID NO: 185652 - DNA, 25 bp, probe
cgcttcacgcctggggagttggaag

SEQ ID NO: 185653 - DNA, 25 bp, probe
cgcagtcaccacagggttctgagaa

SEQ ID NO: 185654 - DNA, 25 bp, probe
cgcgttcccgtggggatcactgaac

SEQ ID NO: 185655 - DNA, 25 bp, probe
cgcccccaggtggggtactggcatc

SEQ ID NO: 185656 - DNA, 25 bp, probe
cccgtaaacttgctcaacgacatcg

SEQ ID NO: 185657 - DNA, 25 bp, probe
cccgtaaacttgctcaacgacatcg

SEQ ID NO: 185658 - DNA, 25 bp, probe
cgccggaaagcgtgccaatcaacat

SEQ ID NO: 185659 - DNA, 25 bp, probe
cgcggatgaagacgcacggcagaac

SEQ ID NO: 185660 - DNA, 25 bp, probe
cgctgtatgcagagctgcgcaggga

SEQ ID NO: 185661 - DNA, 25 bp, probe
cgctgcctgcagagctggaggagtt

SEQ ID NO: 185662 - DNA, 25 bp, probe
cgctgcacgagcagggggtgctgtg

SEQ ID NO: 185663 - DNA, 25 bp, probe
cgcatcacgacaaggatatgatgtc

SEQ ID NO: 185664 - DNA, 25 bp, probe
cgcacacacctgaaacatgttctcc

SEQ ID NO: 185665 - DNA, 25 bp, probe
cgccgccgtgatgaatgtactgacg

SEQ ID NO: 185666 - DNA, 25 bp, probe
cgccagacgtgagccgatcattaag

SEQ ID NO: 185667 - DNA, 25 bp, probe
cgcaaatgctgtcaccgatattcca

SEQ ID NO: 185668 - DNA, 25 bp, probe
gccaattgtgtctaatcggtggaac

SEQ ID NO: 185669 - DNA, 25 bp, probe
cccttggtctgcaacgggctaatcc

SEQ ID NO: 185670 - DNA, 25 bp, probe
cccttggtctgcaacgggctaatcc

SEQ ID NO: 185671 - DNA, 25 bp, probe
cccaaggtcacaaggccgaacattt

SEQ ID NO: 185672 - DNA, 25 bp, probe
cccaaggagcaatacatcgaagcat

SEQ ID NO: 185673 - DNA, 25 bp, probe
cctagagggaactcagactcctttc

SEQ ID NO: 185674 - DNA, 25 bp, probe
ccagggaggtacaccagacctttct

SEQ ID NO: 185675 - DNA, 25 bp, probe
ccgaagggtactgaagagcctcacc

SEQ ID NO: 185676 - DNA, 25 bp, probe
cccaaggtgttctaaaacggcagcg

SEQ ID NO: 185677 - DNA, 25 bp, probe
cccaaaggttcctaagcctggctgc

SEQ ID NO: 185678 - DNA, 25 bp, probe
cccaaaggttcctaagcctggctgc

SEQ ID NO: 185679 - DNA, 25 bp, probe
cccaatagggctcagggttcctggg

SEQ ID NO: 185680 - DNA, 25 bp, probe
gaccaacggacggattggctggttt

SEQ ID NO: 185681 - DNA, 25 bp, probe
ccctacctacggtgacagatgtcag

SEQ ID NO: 185682 - DNA, 25 bp, probe
ccctgaaccaggatctgcctattac

SEQ ID NO: 185683 - DNA, 25 bp, probe
ccccagaccagtctactgcaatctg

SEQ ID NO: 185684 - DNA, 25 bp, probe
cgcatccagaaagacgcactcctgg

SEQ ID NO: 185685 - DNA, 25 bp, probe
cgcagcagggctacgacgagtcctg

SEQ ID NO: 185686 - DNA, 25 bp, probe
cctgatgggctcctacaggtcggtg

SEQ ID NO: 185687 - DNA, 25 bp, probe
cccttggtggtcaggatgggtggga

SEQ ID NO: 185688 - DNA, 25 bp, probe
cccattgaccccaggggtgtgctgg

SEQ ID NO: 185689 - DNA, 25 bp, probe
cgcccgaagtcatcctgggtatggg

SEQ ID NO: 185690 - DNA, 25 bp, probe
cgctcacgaatgccaaatctgaatg

SEQ ID NO: 185691 - DNA, 25 bp, probe
cgccactgaatgaaactggagaagt

SEQ ID NO: 185692 - DNA, 25 bp, probe
cccaaagatgccacggactggtgct

SEQ ID NO: 185693 - DNA, 25 bp, probe
cccaaggagccttcgaatccaggtt

SEQ ID NO: 185694 - DNA, 25 bp, probe
cccaaggagccttcgaatccaggtt

SEQ ID NO: 185695 - DNA, 25 bp, probe
cccaaggagccttcgaatccaggtt

SEQ ID NO: 185696 - DNA, 25 bp, probe
cccaactaccgtttcacaaggattg

SEQ ID NO: 185697 - DNA, 25 bp, probe
cccaactaccgtttcacaaggattg

SEQ ID NO: 185698 - DNA, 25 bp, probe
cccaactaccgtttcacaaggattg

SEQ ID NO: 185699 - DNA, 25 bp, probe
cgcaagatccaccgagatatcaaag

SEQ ID NO: 185700 - DNA, 25 bp, probe
cgcatcaacacagcagacaccaaaa

SEQ ID NO: 185701 - DNA, 25 bp, probe
cgcacaaacgtcacaagacatgcaa

SEQ ID NO: 185702 - DNA, 25 bp, probe
cccaatccagatgtctatgatcatt

SEQ ID NO: 185703 - DNA, 25 bp, probe
cgcgattgcgcaatgccataaattt

SEQ ID NO: 185704 - DNA, 25 bp, probe
cgcgagggcaggacatcaatacact

SEQ ID NO: 185705 - DNA, 25 bp, probe
cgcagctggtgcagatcatcaagaa

SEQ ID NO: 185706 - DNA, 25 bp, probe
cgcgctgagtgcaaactggacacca

SEQ ID NO: 185707 - DNA, 25 bp, probe
cgctgctcaaggacacggtctacac

SEQ ID NO: 185708 - DNA, 25 bp, probe
cgctgaaaggcatcggtgccacgca

SEQ ID NO: 185709 - DNA, 25 bp, probe
cgcgtgactggttgagcgggcaggc

SEQ ID NO: 185710 - DNA, 25 bp, probe
cgcggcgctgttcagccgcgaatgc

SEQ ID NO: 185711 - DNA, 25 bp, probe
cgcggcgctgttcagccgcgaatgc

SEQ ID NO: 185712 - DNA, 25 bp, probe
cgcagcggctgtgggagccgctcag

SEQ ID NO: 185713 - DNA, 25 bp, probe
cgcagcgtctgggaggccagctgcg

SEQ ID NO: 185714 - DNA, 25 bp, probe
cgcacggctgccggtgaagtggatg

SEQ ID NO: 185715 - DNA, 25 bp, probe
cgcgggtgcaccgcgagtggagccg

SEQ ID NO: 185716 - DNA, 25 bp, probe
cccatgggcccagcgaggcaaggaa

SEQ ID NO: 185717 - DNA, 25 bp, probe
cccaagtgtctctggggacctgaag

SEQ ID NO: 185718 - DNA, 25 bp, probe
cccaaggtctagctaggcccaagac

SEQ ID NO: 185719 - DNA, 25 bp, probe
cccaaggacgagcccagtgtagttg

SEQ ID NO: 185720 - DNA, 25 bp, probe
cgcacacgggtgtcacaatgttgag

SEQ ID NO: 185721 - DNA, 25 bp, probe
cgcacagcggaaacatattcttgca

SEQ ID NO: 185722 - DNA, 25 bp, probe
cccaaggcatatttctcctagaccc

SEQ ID NO: 185723 - DNA, 25 bp, probe
cccagtgatgcagttttcctcaaaa

SEQ ID NO: 185724 - DNA, 25 bp, probe
cgcaaatatgcccattatcccaaca

SEQ ID NO: 185725 - DNA, 25 bp, probe
cgcaccttgtcatgtaccatcaata

SEQ ID NO: 185726 - DNA, 25 bp, probe
cgcccagttcattgaaaccactaag

SEQ ID NO: 185727 - DNA, 25 bp, probe
cccacgttttgtgaccactgtgggt

SEQ ID NO: 185728 - DNA, 25 bp, probe
cccacgggtgatgcttccaggggtt

SEQ ID NO: 185729 - DNA, 25 bp, probe
cccagaacgtctgacccaggggtgt

SEQ ID NO: 185730 - DNA, 25 bp, probe
cccaaatcgtcttatattagggaat

SEQ ID NO: 185731 - DNA, 25 bp, probe
cccaaatcagatcaagtcgggaact

SEQ ID NO: 185732 - DNA, 25 bp, probe
cccaaagcacagttcttggttgaac

SEQ ID NO: 185733 - DNA, 25 bp, probe
cccacacagcctctaagcgtgctga

SEQ ID NO: 185734 - DNA, 25 bp, probe
cccacaatcctattctcgggctgag

SEQ ID NO: 185735 - DNA, 25 bp, probe
cccaagaggcactgccagtcgtagc

SEQ ID NO: 185736 - DNA, 25 bp, probe
cgccggggactccggctagaagccg

SEQ ID NO: 185737 - DNA, 25 bp, probe
cgcctggaccgcatcggcaagaaga

SEQ ID NO: 185738 - DNA, 25 bp, probe
cgctttctctggatctggcaataga

SEQ ID NO: 185739 - DNA, 25 bp, probe
cgcttgtcttgggctggacatataa

SEQ ID NO: 185740 - DNA, 25 bp, probe
cgctatgttcgtgagaactgcaaac

SEQ ID NO: 185741 - DNA, 25 bp, probe
cgctataagcgctggaagtcagagg

SEQ ID NO: 185742 - DNA, 25 bp, probe
cgcctcaggccagctcaagatagcg

SEQ ID NO: 185743 - DNA, 25 bp, probe
cgcctcaggccagctcaagatagcg

SEQ ID NO: 185744 - DNA, 25 bp, probe
cgcctcagactctgctgcagatgat

SEQ ID NO: 185745 - DNA, 25 bp, probe
cgctccaactgatccagatgctacg

SEQ ID NO: 185746 - DNA, 25 bp, probe
cgcccaagtgaagcgcatgcgcagc

SEQ ID NO: 185747 - DNA, 25 bp, probe
cgcccaagtgaagcgcatgcgcagc

SEQ ID NO: 185748 - DNA, 25 bp, probe
cgccgtatggagacagcactgccag

SEQ ID NO: 185749 - DNA, 25 bp, probe
cgctcgtgagcgtgagaagccataa

SEQ ID NO: 185750 - DNA, 25 bp, probe
cgctcgtgagcgtgagaagccataa

SEQ ID NO: 185751 - DNA, 25 bp, probe
cgctcgtgagcgtgagaagccataa

SEQ ID NO: 185752 - DNA, 25 bp, probe
cgctgtgtgactttgggcaagccaa

SEQ ID NO: 185753 - DNA, 25 bp, probe
cgctgctgtgcctcgatggcaaacg

SEQ ID NO: 185754 - DNA, 25 bp, probe
cgctgctgtgcctcgatggcaaacg

SEQ ID NO: 185755 - DNA, 25 bp, probe
cgcgttgactacgagcagatcaaga

SEQ ID NO: 185756 - DNA, 25 bp, probe
cgctggatggccatcgagtcactga

SEQ ID NO: 185757 - DNA, 25 bp, probe
cgctggatcaccaaggagtccaagg

SEQ ID NO: 185758 - DNA, 25 bp, probe
cgcgagtcctgcaggatctcgacac

SEQ ID NO: 185759 - DNA, 25 bp, probe
cccacatcactaaagtccttcaggt

SEQ ID NO: 185760 - DNA, 25 bp, probe
cccacccattgaagtctccttgggc

SEQ ID NO: 185761 - DNA, 25 bp, probe
cccacccattgaagtctccttgggc

SEQ ID NO: 185762 - DNA, 25 bp, probe
cccagaatggaaagtcccagtggtc

SEQ ID NO: 185763 - DNA, 25 bp, probe
cccaaatgtgtacacctgcggggcc

SEQ ID NO: 185764 - DNA, 25 bp, probe
cccacaggtttaaggctgaggctgc

SEQ ID NO: 185765 - DNA, 25 bp, probe
cgctacatagttcacctggggcagc

SEQ ID NO: 185766 - DNA, 25 bp, probe
cgcatttgggctcagccttggacat

SEQ ID NO: 185767 - DNA, 25 bp, probe
cgcatttgggctcagccttggacat

SEQ ID NO: 185768 - DNA, 25 bp, probe
cgctctggtggtcatgtctggagac

SEQ ID NO: 185769 - DNA, 25 bp, probe
cgctgctgggagagatcccctggct

SEQ ID NO: 185770 - DNA, 25 bp, probe
cgctgcggggatggtgtacctggcg

SEQ ID NO: 185771 - DNA, 25 bp, probe
cgcagggagacgctgctccctgacg

SEQ ID NO: 185772 - DNA, 25 bp, probe
cgcagagggaagcgtcagcgggcgc

SEQ ID NO: 185773 - DNA, 25 bp, probe
cgcacggagaacgagctgcatgggg

SEQ ID NO: 185774 - DNA, 25 bp, probe
cgcatcgcagcttccaagctgtggg

SEQ ID NO: 185775 - DNA, 25 bp, probe
cgcagctcatctaccaggagtggcg

SEQ ID NO: 185776 - DNA, 25 bp, probe
cgctgatcatctaccatgtcattga

SEQ ID NO: 185777 - DNA, 25 bp, probe
cgctgatcatctaccatgtcattga

SEQ ID NO: 185778 - DNA, 25 bp, probe
cgctgatgactgttcagcttctcag

SEQ ID NO: 185779 - DNA, 25 bp, probe
cgctgatgtgtgatggtgtgctcca

SEQ ID NO: 185780 - DNA, 25 bp, probe
cctgatagtgcaggcttgcgcctca

SEQ ID NO: 185781 - DNA, 25 bp, probe
cgctgctgcggcagcatatgcagcc

SEQ ID NO: 185782 - DNA, 25 bp, probe
cgcttcggcagccaatgcatgcagc

SEQ ID NO: 185783 - DNA, 25 bp, probe
cgctgcccgagctttgcagacatag

SEQ ID NO: 185784 - DNA, 25 bp, probe
cgctcgcaaagacttgcgccatgtg

SEQ ID NO: 185785 - DNA, 25 bp, probe
cgctcgcaaagacttgcgccatgtg

SEQ ID NO: 185786 - DNA, 25 bp, probe
cgctgcacaacgcttgtgccagcgg

SEQ ID NO: 185787 - DNA, 25 bp, probe
cgctgcacaacgcttgtgccagcgg

SEQ ID NO: 185788 - DNA, 25 bp, probe
cccagcaacgtggctgtgaacgagg

SEQ ID NO: 185789 - DNA, 25 bp, probe
cccaaactggatgggacacgtgggg

SEQ ID NO: 185790 - DNA, 25 bp, probe
cccaaacaactcagcttcggggccg

SEQ ID NO: 185791 - DNA, 25 bp, probe
ccctcaacgaccactttgtcaagct

SEQ ID NO: 185792 - DNA, 25 bp, probe
ccctcaggaaacggctttgtccgca

SEQ ID NO: 185793 - DNA, 25 bp, probe
ccctcttgaaggtgtgttctccagg

SEQ ID NO: 185794 - DNA, 25 bp, probe
cgcccgataaagacggattctaagg

SEQ ID NO: 185795 - DNA, 25 bp, probe
cgcccagtgcacatgttgaatttta

SEQ ID NO: 185796 - DNA, 25 bp, probe
cgcgagcgcgacttcgtgaagatct

SEQ ID NO: 185797 - DNA, 25 bp, probe
cgcgagcgcgacttcgtgaagatct

SEQ ID NO: 185798 - DNA, 25 bp, probe
cgcgaggcagaggctcggaaccggg

SEQ ID NO: 185799 - DNA, 25 bp, probe
cgcagaagctgcctgcatcggagac

SEQ ID NO: 185800 - DNA, 25 bp, probe
cgctgaagcgcactgctgttcagat

SEQ ID NO: 185801 - DNA, 25 bp, probe
cgcagcatccagtctgtgctatcag

SEQ ID NO: 185802 - DNA, 25 bp, probe
tagcagcacctactatgcttcaggc

SEQ ID NO: 185803 - DNA, 25 bp, probe
cgccatctgctactactacatggcc

SEQ ID NO: 185804 - DNA, 25 bp, probe
cgcgcatgctcatgaagctggtgag

SEQ ID NO: 185805 - DNA, 25 bp, probe
cgcgatgcactactcggtgtgaatg

SEQ ID NO: 185806 - DNA, 25 bp, probe
cgcgagatatggcccgcgctggagt

SEQ ID NO: 185807 - DNA, 25 bp, probe
cgcgatgttgactgcacaggtaata

SEQ ID NO: 185808 - DNA, 25 bp, probe
cgctggttagcaccgcaggtgtaga

SEQ ID NO: 185809 - DNA, 25 bp, probe
cgctggcggacacccaggagaacgt

SEQ ID NO: 185810 - DNA, 25 bp, probe
cgcggcgggcagtgcggaagatgct

SEQ ID NO: 185811 - DNA, 25 bp, probe
cgcaggggccactagatgggagcct

SEQ ID NO: 185812 - DNA, 25 bp, probe
cccaggagccagcactggggaccac

SEQ ID NO: 185813 - DNA, 25 bp, probe
cccgtacaccagaagggaggccctg

SEQ ID NO: 185814 - DNA, 25 bp, probe
cctccttcacggactcgaagtgacc

SEQ ID NO: 185815 - DNA, 25 bp, probe
cgcctttctcggaactgaactgaac

SEQ ID NO: 185816 - DNA, 25 bp, probe
cgcctgttctggcggcagcaagctg

SEQ ID NO: 185817 - DNA, 25 bp, probe
cgcatcatggaagtggtgggcacac

SEQ ID NO: 185818 - DNA, 25 bp, probe
cgcattgagatccatggggtgcccg

SEQ ID NO: 185819 - DNA, 25 bp, probe
cgctcggagcggaaggtgacgcgca

SEQ ID NO: 185820 - DNA, 25 bp, probe
cgctcagcctgctgataggggctcc

SEQ ID NO: 185821 - DNA, 25 bp, probe
cgctcagcctgctgataggggctcc

SEQ ID NO: 185822 - DNA, 25 bp, probe
cgcgccacttcgagggaatcagcgc

SEQ ID NO: 185823 - DNA, 25 bp, probe
cgcgccacttcgagggaatcagcgc

SEQ ID NO: 185824 - DNA, 25 bp, probe
cgcgtggtggcgatggccaacagcg

SEQ ID NO: 185825 - DNA, 25 bp, probe
cgcgtggtggcgatggccaacagcg

SEQ ID NO: 185826 - DNA, 25 bp, probe
cgcggagggcagaggcgcagaatcc

SEQ ID NO: 185827 - DNA, 25 bp, probe
cgcggagggcagaggcgcagaatcc

SEQ ID NO: 185828 - DNA, 25 bp, probe
cgcgcgacggcaagtggcagaacgt

SEQ ID NO: 185829 - DNA, 25 bp, probe
cgctgccaaggctgtgggcaaggtc

SEQ ID NO: 185830 - DNA, 25 bp, probe
cgctacaagcgctggcgtaagcatg

SEQ ID NO: 185831 - DNA, 25 bp, probe
cgctgacaaccagcgcctcaaggat

SEQ ID NO: 185832 - DNA, 25 bp, probe
cgctggagttcatggctccggagat

SEQ ID NO: 185833 - DNA, 25 bp, probe
cgctgcggaatctgttcttggtgga

SEQ ID NO: 185834 - DNA, 25 bp, probe
cgctctgatgtctggagtttgggga

SEQ ID NO: 185835 - DNA, 25 bp, probe
cgctgctttcctgactgtggagagg

SEQ ID NO: 185836 - DNA, 25 bp, probe
cgcttcatttccctcattgtgaagt

SEQ ID NO: 185837 - DNA, 25 bp, probe
cccacattgtccctgactctagggg

SEQ ID NO: 185838 - DNA, 25 bp, probe
cccaatttagcgccagggagccacg

SEQ ID NO: 185839 - DNA, 25 bp, probe
ccctttaaggcgcggggcattgtgg

SEQ ID NO: 185840 - DNA, 25 bp, probe
cctttcttattatgggggtgtgcta

SEQ ID NO: 185841 - DNA, 25 bp, probe
cgcttatttatttgtagggtttgct

SEQ ID NO: 185842 - DNA, 25 bp, probe
cgctgtctttgagttgtggtggacg

SEQ ID NO: 185843 - DNA, 25 bp, probe
cgcagtacattgacgggcagggccg

SEQ ID NO: 185844 - DNA, 25 bp, probe
cgcctacaggttcgtgaaggacagg

SEQ ID NO: 185845 - DNA, 25 bp, probe
cgctctgaatgacttcgggggccag

SEQ ID NO: 185846 - DNA, 25 bp, probe
cgctctgaatgacttcgggggccag

SEQ ID NO: 185847 - DNA, 25 bp, probe
cgccataacagcatctcggaggcca

SEQ ID NO: 185848 - DNA, 25 bp, probe
cgccttcaggcaccacagataagcc

SEQ ID NO: 185849 - DNA, 25 bp, probe
cgcctcctggattccagcaattctc

SEQ ID NO: 185850 - DNA, 25 bp, probe
cgcataccatgcgagacccgattct

SEQ ID NO: 185851 - DNA, 25 bp, probe
cgcataccatgcgagacccgattct

SEQ ID NO: 185852 - DNA, 25 bp, probe
cgctcacagatgggctccagcgtat

SEQ ID NO: 185853 - DNA, 25 bp, probe
cgctcaccatgggtgccaggatgct

SEQ ID NO: 185854 - DNA, 25 bp, probe
cgctacagcaggagtgcatgaggca

SEQ ID NO: 185855 - DNA, 25 bp, probe
cgcttcagagataccaatgggcatt

SEQ ID NO: 185856 - DNA, 25 bp, probe
cgctctcaagtgcctacatggtgat

SEQ ID NO: 185857 - DNA, 25 bp, probe
cgctctcaagtgcctacatggtgat

SEQ ID NO: 185858 - DNA, 25 bp, probe
cgcctcacagtcgatgactttgaaa

SEQ ID NO: 185859 - DNA, 25 bp, probe
cgcctcaattctccattgtcatgga

SEQ ID NO: 185860 - DNA, 25 bp, probe
cgcgcgagatatggcccgcgctgga

SEQ ID NO: 185861 - DNA, 25 bp, probe
cgctggtgtgcaacacgctcagcgg

SEQ ID NO: 185862 - DNA, 25 bp, probe
cgctggtgtgctaacaattgccctg

SEQ ID NO: 185863 - DNA, 25 bp, probe
cgctggtgtgctaacaattgccctg

SEQ ID NO: 185864 - DNA, 25 bp, probe
cgctcgggcatggagaattccgctt

SEQ ID NO: 185865 - DNA, 25 bp, probe
cgcgccggcagctgaaaaagttgga

SEQ ID NO: 185866 - DNA, 25 bp, probe
cgctgcgggccacgaacaatagttt

SEQ ID NO: 185867 - DNA, 25 bp, probe
cgctgagggcacaaggaattagtaa

SEQ ID NO: 185868 - DNA, 25 bp, probe
cgctggtgtatcagttagtgcagga

SEQ ID NO: 185869 - DNA, 25 bp, probe
cgctggtgcttcagggtggaggagg

SEQ ID NO: 185870 - DNA, 25 bp, probe
cgctggcctcggagattgtgggggg

SEQ ID NO: 185871 - DNA, 25 bp, probe
cgctggcctcggagattgtgggggg

SEQ ID NO: 185872 - DNA, 25 bp, probe
cgcgtggcggtgaagacggtcaacg

SEQ ID NO: 185873 - DNA, 25 bp, probe
cgcgaggcatttggagagcaagggt

SEQ ID NO: 185874 - DNA, 25 bp, probe
cgccggattattgctgcaactggca

SEQ ID NO: 185875 - DNA, 25 bp, probe
ccctggttatcagccaccaggcttt

SEQ ID NO: 185876 - DNA, 25 bp, probe
ccttagggttgggccctgaggcttg

SEQ ID NO: 185877 - DNA, 25 bp, probe
cgccgagggactcggccggagagct

SEQ ID NO: 185878 - DNA, 25 bp, probe
cgcggggtgcaccgagtgaggagga

SEQ ID NO: 185879 - DNA, 25 bp, probe
cgctgagtggactggagtggagcat

SEQ ID NO: 185880 - DNA, 25 bp, probe
cgctgatgtggagtggaaatttgca

SEQ ID NO: 185881 - DNA, 25 bp, probe
cgctgcagtgcggggaaacggactt

SEQ ID NO: 185882 - DNA, 25 bp, probe
cgcgcttcgagggaatatgcgaagc

SEQ ID NO: 185883 - DNA, 25 bp, probe
cgccatcacggccgaattggacgcc

SEQ ID NO: 185884 - DNA, 25 bp, probe
cgctcaagctgtcatgtacggagcc

SEQ ID NO: 185885 - DNA, 25 bp, probe
cgcatctatgtcacagctaaggagc

SEQ ID NO: 185886 - DNA, 25 bp, probe
cgccattgctctgagtcagaagctg

SEQ ID NO: 185887 - DNA, 25 bp, probe
cgctatatgcctccagaagtgttgg

SEQ ID NO: 185888 - DNA, 25 bp, probe
cgcccatgcctgggaaggtgataga

SEQ ID NO: 185889 - DNA, 25 bp, probe
cgctccatccagactgacaagcggg

SEQ ID NO: 185890 - DNA, 25 bp, probe
cgcgctacactgactggctcagcgt

SEQ ID NO: 185891 - DNA, 25 bp, probe
ccctgaacaggcaccacttactaag

SEQ ID NO: 185892 - DNA, 25 bp, probe
cccaagagccgcagacctactaaaa

SEQ ID NO: 185893 - DNA, 25 bp, probe
gcctccaacctcagaacctttggaa

SEQ ID NO: 185894 - DNA, 25 bp, probe
cgctgccaccgtgtataaatcctgg

SEQ ID NO: 185895 - DNA, 25 bp, probe
cgctgccaccgtgtataaatcctgg

SEQ ID NO: 185896 - DNA, 25 bp, probe
cgccaggtgcggctgaaacaccgga

SEQ ID NO: 185897 - DNA, 25 bp, probe
cgcccgaggctctcaaacacgggaa

SEQ ID NO: 185898 - DNA, 25 bp, probe
cgcccgaggctctcaaacacgggaa

SEQ ID NO: 185899 - DNA, 25 bp, probe
cgcccgcagagcttttgaaaggcgg

SEQ ID NO: 185900 - DNA, 25 bp, probe
cgcccagcagagtggccagcaagga

SEQ ID NO: 185901 - DNA, 25 bp, probe
cgcccagctggacgtccaggatgga

SEQ ID NO: 185902 - DNA, 25 bp, probe
cgcccagctggacgtccaggatgga

SEQ ID NO: 185903 - DNA, 25 bp, probe
cgccaccgggagagatgctgagaaa

SEQ ID NO: 185904 - DNA, 25 bp, probe
cccatccggaagatctcgtcaaagg

SEQ ID NO: 185905 - DNA, 25 bp, probe
cccatccggaagatctcgtcaaagg

SEQ ID NO: 185906 - DNA, 25 bp, probe
cccaacgggaggatggcttcacagc

SEQ ID NO: 185907 - DNA, 25 bp, probe
cccaaggatgagggggttgtccagc

SEQ ID NO: 185908 - DNA, 25 bp, probe
cccacaagggagtagccttgtccag

SEQ ID NO: 185909 - DNA, 25 bp, probe
cccactagaaggtacgctctacaag

SEQ ID NO: 185910 - DNA, 25 bp, probe
cgccctgacaaactacggcttctac

SEQ ID NO: 185911 - DNA, 25 bp, probe
cgccctggagggacatcagtgcttc

SEQ ID NO: 185912 - DNA, 25 bp, probe
cgccgctgtgaggctgcttgtggcg

SEQ ID NO: 185913 - DNA, 25 bp, probe
cgccgctgtgaggctgcttgtggcg

SEQ ID NO: 185914 - DNA, 25 bp, probe
cgcggaggcagaggatggaggcagc

SEQ ID NO: 185915 - DNA, 25 bp, probe
cgctggagtgctaggtggaggcagc

SEQ ID NO: 185916 - DNA, 25 bp, probe
cgctggcgtaagcatggggtctttg

SEQ ID NO: 185917 - DNA, 25 bp, probe
cgcgacttgaagaacggaggccgtt

SEQ ID NO: 185918 - DNA, 25 bp, probe
cgcgagaccaaggaagccaggccgc

SEQ ID NO: 185919 - DNA, 25 bp, probe
cgctcagaccaaggcgcagagcaac

SEQ ID NO: 185920 - DNA, 25 bp, probe
cccagacagtcatgactagcagaat

SEQ ID NO: 185921 - DNA, 25 bp, probe
cgcccacagtgatgatgtcgagatc

SEQ ID NO: 185922 - DNA, 25 bp, probe
cgcccaggatcagattgcatgtgac

SEQ ID NO: 185923 - DNA, 25 bp, probe
cgcccaggatcagattgcatgtgac

SEQ ID NO: 185924 - DNA, 25 bp, probe
cgctactggccagatgagggtgcct

SEQ ID NO: 185925 - DNA, 25 bp, probe
cgctagcccgatggtaggattcagt

SEQ ID NO: 185926 - DNA, 25 bp, probe
cgcgatggccgtggaaggttctggg

SEQ ID NO: 185927 - DNA, 25 bp, probe
cgcctggccgatggtactatttaga

SEQ ID NO: 185928 - DNA, 25 bp, probe
cgcctggccgatggtactatttaga

SEQ ID NO: 185929 - DNA, 25 bp, probe
ccccccgtgaggactaatccagata

SEQ ID NO: 185930 - DNA, 25 bp, probe
cccacctggtggcttcttaatgtaa

SEQ ID NO: 185931 - DNA, 25 bp, probe
cgcctactttggccatgttagcctg

SEQ ID NO: 185932 - DNA, 25 bp, probe
cgccgacttctggcgcatggtgtgg

SEQ ID NO: 185933 - DNA, 25 bp, probe
cgccgacttctggcgcatggtgtgg

SEQ ID NO: 185934 - DNA, 25 bp, probe
cgctcagtttccgtgcaggatggca

SEQ ID NO: 185935 - DNA, 25 bp, probe
cgctactttgacctgcgtgtgtctt

SEQ ID NO: 185936 - DNA, 25 bp, probe
cccaaggctgacccgggtcattggt

SEQ ID NO: 185937 - DNA, 25 bp, probe
cccaaggctgacccgggtcattggt

SEQ ID NO: 185938 - DNA, 25 bp, probe
cccaatctggttcggtattttggtg

SEQ ID NO: 185939 - DNA, 25 bp, probe
cccaacttcctgggttttctcattg

SEQ ID NO: 185940 - DNA, 25 bp, probe
cccaactgtacagatttgtttgttg

SEQ ID NO: 185941 - DNA, 25 bp, probe
cccaaatggaccctgtggggtatag

SEQ ID NO: 185942 - DNA, 25 bp, probe
cccacaaggagtcccttgcgggaag

SEQ ID NO: 185943 - DNA, 25 bp, probe
cccaaagcagtgcacaattccgtgg

SEQ ID NO: 185944 - DNA, 25 bp, probe
cgcgagatagggcagatcactctca

SEQ ID NO: 185945 - DNA, 25 bp, probe
cgctgagaagggttgatcctgcatc

SEQ ID NO: 185946 - DNA, 25 bp, probe
cgctaagcatggcaatcgctctgtc

SEQ ID NO: 185947 - DNA, 25 bp, probe
cgctaagcatggcaatcgctctgtc

SEQ ID NO: 185948 - DNA, 25 bp, probe
cgctgaagctggcgacaggcagtcc

SEQ ID NO: 185949 - DNA, 25 bp, probe
cgcgaccaggtggacgcgagcgacc

SEQ ID NO: 185950 - DNA, 25 bp, probe
cgcgcaaagcgaaagcggcaggatc

SEQ ID NO: 185951 - DNA, 25 bp, probe
cgcgccaggcggacgaggagatgac

SEQ ID NO: 185952 - DNA, 25 bp, probe
cgcgccaggcggacgaggagatgac

SEQ ID NO: 185953 - DNA, 25 bp, probe
cgcctcctggagaagctgggtgatg

SEQ ID NO: 185954 - DNA, 25 bp, probe
cgcccagtgagaacatctggccggg

SEQ ID NO: 185955 - DNA, 25 bp, probe
cgcccagtgagaacatctggccggg

SEQ ID NO: 185956 - DNA, 25 bp, probe
cgcttcgtgcagatcgtggacgagg

SEQ ID NO: 185957 - DNA, 25 bp, probe
cgcttcgacatcattgtgtttggga

SEQ ID NO: 185958 - DNA, 25 bp, probe
cgcttcgacatcattgtgtttggga

SEQ ID NO: 185959 - DNA, 25 bp, probe
cgcgcctggcccaatgtatttggat

SEQ ID NO: 185960 - DNA, 25 bp, probe
cgcgcctggcgcaaatatgtattct

SEQ ID NO: 185961 - DNA, 25 bp, probe
gcctttatgggctttataacccctg

SEQ ID NO: 185962 - DNA, 25 bp, probe
cgctctctgttgtacactttcaatc

SEQ ID NO: 185963 - DNA, 25 bp, probe
ccgttgcttgtggatttatagtagt

SEQ ID NO: 185964 - DNA, 25 bp, probe
cgcgccgatttgatttgtatccact

SEQ ID NO: 185965 - DNA, 25 bp, probe
cgctctcgtttcattttctgcagcg

SEQ ID NO: 185966 - DNA, 25 bp, probe
cgctctcgtttcattttctgcagcg

SEQ ID NO: 185967 - DNA, 25 bp, probe
cgctttgtgcccattgtagctgagg

SEQ ID NO: 185968 - DNA, 25 bp, probe
cgctttgtgcccattgtagctgagg

SEQ ID NO: 185969 - DNA, 25 bp, probe
cgccattacaccaatgcttcagatg

SEQ ID NO: 185970 - DNA, 25 bp, probe
cgccatcatccaggagatcgtcaag

SEQ ID NO: 185971 - DNA, 25 bp, probe
cctgacccgggaagtcaggccattt

SEQ ID NO: 185972 - DNA, 25 bp, probe
ccaactcctggagagctcctacttt

SEQ ID NO: 185973 - DNA, 25 bp, probe
ccaactcctggagagctcctacttt

SEQ ID NO: 185974 - DNA, 25 bp, probe
ccaactcctggagagctcctacttt

SEQ ID NO: 185975 - DNA, 25 bp, probe
ccctccctgggttcatccaggttgt

SEQ ID NO: 185976 - DNA, 25 bp, probe
cccactgccgagcaattccaggaag

SEQ ID NO: 185977 - DNA, 25 bp, probe
gccaaaccaagcaaattaggaacct

SEQ ID NO: 185978 - DNA, 25 bp, probe
ccctatcctacacgactaggaactt

SEQ ID NO: 185979 - DNA, 25 bp, probe
cccaatccccagagcttggagtctg

SEQ ID NO: 185980 - DNA, 25 bp, probe
cgccgattaccaaggctatggatgt

SEQ ID NO: 185981 - DNA, 25 bp, probe
cgccgattaccaaggctatggatgt

SEQ ID NO: 185982 - DNA, 25 bp, probe
cgctcaaaactcggtgatcatagtt

SEQ ID NO: 185983 - DNA, 25 bp, probe
cgccagaaacgcggcgtgctctatc

SEQ ID NO: 185984 - DNA, 25 bp, probe
ccgaaaaccaggccttatctccaag

SEQ ID NO: 185985 - DNA, 25 bp, probe
ccgaaaaccaggccttatctccaag

SEQ ID NO: 185986 - DNA, 25 bp, probe
ccaaaaaccagtagtttccacacag

SEQ ID NO: 185987 - DNA, 25 bp, probe
cccaaacccaataggttccagcctg

SEQ ID NO: 185988 - DNA, 25 bp, probe
cccaagccctttagggctacagtct

SEQ ID NO: 185989 - DNA, 25 bp, probe
cccactgccaatatcggtttaccaa

SEQ ID NO: 185990 - DNA, 25 bp, probe
cccccatcaacactcggattgaacc

SEQ ID NO: 185991 - DNA, 25 bp, probe
cccccatcaacactcggattgaacc

SEQ ID NO: 185992 - DNA, 25 bp, probe
ccccttcccaatcagcactgaaaat

SEQ ID NO: 185993 - DNA, 25 bp, probe
cccactttccagcaagcacagatgt

SEQ ID NO: 185994 - DNA, 25 bp, probe
cgctctcctttgagcaagccgagct

SEQ ID NO: 185995 - DNA, 25 bp, probe
cgccctctttgtacatgagcacttc

SEQ ID NO: 185996 - DNA, 25 bp, probe
cgctcctctgatggtgcagctgagc

SEQ ID NO: 185997 - DNA, 25 bp, probe
cgctcactctcagtgtgctgggagc

SEQ ID NO: 185998 - DNA, 25 bp, probe
cgcgcgctcacagtgcagatgaaga

SEQ ID NO: 185999 - DNA, 25 bp, probe
cgcgcgcgccagcaagaagatactg

SEQ ID NO: 186000 - DNA, 25 bp, probe
cgcgctgcggatcaagaagacacta

SEQ ID NO: 186001 - DNA, 25 bp, probe
cgcctgccgcattacaacaagcgct

SEQ ID NO: 186002 - DNA, 25 bp, probe
cgcgctggcgttacagcgcaacagc

SEQ ID NO: 186003 - DNA, 25 bp, probe
cgcgccggattattgctgcaactgg

SEQ ID NO: 186004 - DNA, 25 bp, probe
cgcccgtcactgttgccaaatggga

SEQ ID NO: 186005 - DNA, 25 bp, probe
cgccgtgtcctatgaggacagggag

SEQ ID NO: 186006 - DNA, 25 bp, probe
cgcccttccagctgaggacaggctg

SEQ ID NO: 186007 - DNA, 25 bp, probe
cgccatccccagttgcagggggatc

SEQ ID NO: 186008 - DNA, 25 bp, probe
cgctcaaaccagtgaggctgcacag

SEQ ID NO: 186009 - DNA, 25 bp, probe
cgctgcggatcaagaagacactaca

SEQ ID NO: 186010 - DNA, 25 bp, probe
cgctgggacaagagacgctggcgca

SEQ ID NO: 186011 - DNA, 25 bp, probe
cgctgcgggagggtgacgtggtgag

SEQ ID NO: 186012 - DNA, 25 bp, probe
cgctcctgggtgcagagcgtggttg

SEQ ID NO: 186013 - DNA, 25 bp, probe
cgctacgtggctcggaagtgcggct

SEQ ID NO: 186014 - DNA, 25 bp, probe
cgcccctgagtccagggatgctgcg

SEQ ID NO: 186015 - DNA, 25 bp, probe
cgctccctggactatggctatggag

SEQ ID NO: 186016 - DNA, 25 bp, probe
cgctctccaaggtgtgctagcagtg

SEQ ID NO: 186017 - DNA, 25 bp, probe
cgcctgtcaagtgcgagccacagga

SEQ ID NO: 186018 - DNA, 25 bp, probe
cgccgccaagatggcggacctggag

SEQ ID NO: 186019 - DNA, 25 bp, probe
cccacacggtcggatgacttggcgt

SEQ ID NO: 186020 - DNA, 25 bp, probe
ccccaagttcgctgacatcgtcagc

SEQ ID NO: 186021 - DNA, 25 bp, probe
cccacggtactgtgaacgtcgtgtg

SEQ ID NO: 186022 - DNA, 25 bp, probe
cccacggtactgtgaacgtcgtgtg

SEQ ID NO: 186023 - DNA, 25 bp, probe
cccacagtccaaacaaacctcagtg

SEQ ID NO: 186024 - DNA, 25 bp, probe
cccacagtccaaacaaacctcagtg

SEQ ID NO: 186025 - DNA, 25 bp, probe
cccaaccaaaccaagccctgttgtg

SEQ ID NO: 186026 - DNA, 25 bp, probe
cccacccacagagggagggctttgg

SEQ ID NO: 186027 - DNA, 25 bp, probe
cccacccaggtgatgactgtcttag

SEQ ID NO: 186028 - DNA, 25 bp, probe
cccagccgggagtgaagccctgagg

SEQ ID NO: 186029 - DNA, 25 bp, probe
cgcccacgtgggtgaagaaggagct

SEQ ID NO: 186030 - DNA, 25 bp, probe
cgccccggtcactgcaaggggatgc

SEQ ID NO: 186031 - DNA, 25 bp, probe
cgccccggtcactgcaaggggatgc

SEQ ID NO: 186032 - DNA, 25 bp, probe
cccgggagtccatcaagttggtgaa

SEQ ID NO: 186033 - DNA, 25 bp, probe
cgccggggagccagaagatggagga

SEQ ID NO: 186034 - DNA, 25 bp, probe
cccacgggactcagaagtgcgccgc

SEQ ID NO: 186035 - DNA, 25 bp, probe
cccacggggcctgacaatggccaag

SEQ ID NO: 186036 - DNA, 25 bp, probe
cccagctagggctggactctggcac

SEQ ID NO: 186037 - DNA, 25 bp, probe
cccacttggcgaaggactttataga

SEQ ID NO: 186038 - DNA, 25 bp, probe
ccccttaggtactccgtgatcatga

SEQ ID NO: 186039 - DNA, 25 bp, probe
ccccttaggtactccgtgatcatga

SEQ ID NO: 186040 - DNA, 25 bp, probe
cccactctactgaaacccggaacag

SEQ ID NO: 186041 - DNA, 25 bp, probe
cccactcaagctgaagctcctggac

SEQ ID NO: 186042 - DNA, 25 bp, probe
cccactcaagctgaagctcctggac

SEQ ID NO: 186043 - DNA, 25 bp, probe
cccaaaactgattacaactgctaca

SEQ ID NO: 186044 - DNA, 25 bp, probe
cgctccagtacttccagcaaggaaa

SEQ ID NO: 186045 - DNA, 25 bp, probe
cgcctggtcaatgctctaagtgaag

SEQ ID NO: 186046 - DNA, 25 bp, probe
cgctcatgactatacgctaagagaa

SEQ ID NO: 186047 - DNA, 25 bp, probe
cgccgcacatcatcagcgcgcaaga

SEQ ID NO: 186048 - DNA, 25 bp, probe
cgccgtgcagaagcagcagcagcag

SEQ ID NO: 186049 - DNA, 25 bp, probe
cgccggaagcagatgcagctggcct

SEQ ID NO: 186050 - DNA, 25 bp, probe
cccagcgaagacacatggcccgggg

SEQ ID NO: 186051 - DNA, 25 bp, probe
cccagtgagaacatctggccgggct

SEQ ID NO: 186052 - DNA, 25 bp, probe
cccagtgagaacatctggccgggct

SEQ ID NO: 186053 - DNA, 25 bp, probe
cgcctggagaaccgctacgaggcgc

SEQ ID NO: 186054 - DNA, 25 bp, probe
cgccgagatgactggctacgtggtg

SEQ ID NO: 186055 - DNA, 25 bp, probe
cgctcgaaagccctatacttagcgt

SEQ ID NO: 186056 - DNA, 25 bp, probe
cgctggaaatgctctttcctagccg

SEQ ID NO: 186057 - DNA, 25 bp, probe
cgccgaacatgttgcttaccgcacc

SEQ ID NO: 186058 - DNA, 25 bp, probe
cgcgccaagcgcaaggtgacacgca

SEQ ID NO: 186059 - DNA, 25 bp, probe
cgcccatcatggaggagcacctgaa

SEQ ID NO: 186060 - DNA, 25 bp, probe
cgcccatgctggatgaatcagtcat

SEQ ID NO: 186061 - DNA, 25 bp, probe
cccaatgctgcagagcagtcaggct

SEQ ID NO: 186062 - DNA, 25 bp, probe
cgccacagcatcaaggatgtgcacg

SEQ ID NO: 186063 - DNA, 25 bp, probe
cgccaagcattatgtgctgtgcgtg

SEQ ID NO: 186064 - DNA, 25 bp, probe
cccacagctccatggtaggagtcaa

SEQ ID NO: 186065 - DNA, 25 bp, probe
cccaatcccagaactcaggactgga

SEQ ID NO: 186066 - DNA, 25 bp, probe
cgcccaacacagtcaccatggagat

SEQ ID NO: 186067 - DNA, 25 bp, probe
cgctgcagcaagagaacaaggtgct

SEQ ID NO: 186068 - DNA, 25 bp, probe
cgcgatgccgggatcaaagtctgtt

SEQ ID NO: 186069 - DNA, 25 bp, probe
cgcgagccgggattacagggtctgc

SEQ ID NO: 186070 - DNA, 25 bp, probe
cgcgaggcaaggctacaggtgcatc

SEQ ID NO: 186071 - DNA, 25 bp, probe
cgcgtggcacagggcataagggagg

SEQ ID NO: 186072 - DNA, 25 bp, probe
ccggacaagcccatttggaagaaga

SEQ ID NO: 186073 - DNA, 25 bp, probe
cccataagattccttttgtgaaaag

SEQ ID NO: 186074 - DNA, 25 bp, probe
ccctccaatatgctagtaaacacaa

SEQ ID NO: 186075 - DNA, 25 bp, probe
cccctagaaacttgaaaccacatca

SEQ ID NO: 186076 - DNA, 25 bp, probe
cccatccaagacttttaggccattc

SEQ ID NO: 186077 - DNA, 25 bp, probe
cccaccagggtatgtaaatatctct

SEQ ID NO: 186078 - DNA, 25 bp, probe
gcggaaaccggctgaaacaacctgc

SEQ ID NO: 186079 - DNA, 25 bp, probe
gcggaaaccggctgaaacaacctgc

SEQ ID NO: 186080 - DNA, 25 bp, probe
gtggttaccttgtggtacagacctc

SEQ ID NO: 186081 - DNA, 25 bp, probe
gtggttaccttgtggtacagacctc

SEQ ID NO: 186082 - DNA, 25 bp, probe
ggcggtagttggtggtggaacccag

SEQ ID NO: 186083 - DNA, 25 bp, probe
cctgcagttgggtgggttaacgcca

SEQ ID NO: 186084 - DNA, 25 bp, probe
cccagatattggtgtccttaaacag

SEQ ID NO: 186085 - DNA, 25 bp, probe
cccagtacaggggtatcctggaagc

SEQ ID NO: 186086 - DNA, 25 bp, probe
cccaaagcatggactaaccccaacg

SEQ ID NO: 186087 - DNA, 25 bp, probe
cccaaaacctggcacccagaacagt

SEQ ID NO: 186088 - DNA, 25 bp, probe
cccaaaacactgtgactgaagacaa

SEQ ID NO: 186089 - DNA, 25 bp, probe
cccaccaccctatgacgaaaaagca

SEQ ID NO: 186090 - DNA, 25 bp, probe
cccaccgcctactggcaaggaagaa

SEQ ID NO: 186091 - DNA, 25 bp, probe
cccacaacctcacagcgaaagaact

SEQ ID NO: 186092 - DNA, 25 bp, probe
cccaaccaacatggcagctaacaca

SEQ ID NO: 186093 - DNA, 25 bp, probe
cccacatccaggagtgtaagcaccc

SEQ ID NO: 186094 - DNA, 25 bp, probe
cccaacctgcaatgtgactatccac

SEQ ID NO: 186095 - DNA, 25 bp, probe
cccaagccagacagtgacgtgactc

SEQ ID NO: 186096 - DNA, 25 bp, probe
cccacgctggacattgtcgcaagtc

SEQ ID NO: 186097 - DNA, 25 bp, probe
cgcccacgctggacattgtcgcaag

SEQ ID NO: 186098 - DNA, 25 bp, probe
cccaacgtgcccatttgcatcaggg

SEQ ID NO: 186099 - DNA, 25 bp, probe
tccaaaggggcctcttactgttctc

SEQ ID NO: 186100 - DNA, 25 bp, probe
tcgaaagccctatacttagcgtttt

SEQ ID NO: 186101 - DNA, 25 bp, probe
cgccaaccctatcatttatttcttt

SEQ ID NO: 186102 - DNA, 25 bp, probe
cgccaccacacctggctaatttttt

SEQ ID NO: 186103 - DNA, 25 bp, probe
cccactagacacaggtcactgccaa

SEQ ID NO: 186104 - DNA, 25 bp, probe
cccaccagagacctggtagcctaga

SEQ ID NO: 186105 - DNA, 25 bp, probe
cgccccagagatcttgctgggtcag

SEQ ID NO: 186106 - DNA, 25 bp, probe
cgcccctgagatcctacagggcctg

SEQ ID NO: 186107 - DNA, 25 bp, probe
cgcccactatgagagccaaggcctc

SEQ ID NO: 186108 - DNA, 25 bp, probe
cccaagttgaaacaggggcccatca

SEQ ID NO: 186109 - DNA, 25 bp, probe
cccaagccgcagttaagggggcaca

SEQ ID NO: 186110 - DNA, 25 bp, probe
cccaaaaggccttagtgagcgagtc

SEQ ID NO: 186111 - DNA, 25 bp, probe
cctcaacaaggtatacctcagttcc

SEQ ID NO: 186112 - DNA, 25 bp, probe
cccaatcaaagtgccaagtgagctt

SEQ ID NO: 186113 - DNA, 25 bp, probe
cccaactgggagcctgaagtccttt

SEQ ID NO: 186114 - DNA, 25 bp, probe
cccacacggactacatcaatggcca

SEQ ID NO: 186115 - DNA, 25 bp, probe
cccacacggactacatcaatggcca

SEQ ID NO: 186116 - DNA, 25 bp, probe
cccacactgaaatgaagctggctca

SEQ ID NO: 186117 - DNA, 25 bp, probe
cgcgcacgctcagcgagaagcgcgc

SEQ ID NO: 186118 - DNA, 25 bp, probe
cgccacttcgagggaatcagcgccg

SEQ ID NO: 186119 - DNA, 25 bp, probe
cgccacttcgagggaatcagcgccg

SEQ ID NO: 186120 - DNA, 25 bp, probe
cgccatctacgaggagaaggaggcc

SEQ ID NO: 186121 - DNA, 25 bp, probe
cgcctctacgactgccaggaagagg

SEQ ID NO: 186122 - DNA, 25 bp, probe
cgccctgacaactgtccagaggagc

SEQ ID NO: 186123 - DNA, 25 bp, probe
cgccctgacaactgtccagaggagc

SEQ ID NO: 186124 - DNA, 25 bp, probe
cgccctgacaactgtccagaggagc

SEQ ID NO: 186125 - DNA, 25 bp, probe
cgcccgggatcaggccaagaggatc

SEQ ID NO: 186126 - DNA, 25 bp, probe
cgcccttctacagccaagatgtatc

SEQ ID NO: 186127 - DNA, 25 bp, probe
cgcccttctacagccaagatgtatc

SEQ ID NO: 186128 - DNA, 25 bp, probe
ccgtttcttgccgcaagacgtcgcg

SEQ ID NO: 186129 - DNA, 25 bp, probe
cgccgtttcttgccgcaagacgtcg

SEQ ID NO: 186130 - DNA, 25 bp, probe
cgccgtctgtcctggacagcatcaa

SEQ ID NO: 186131 - DNA, 25 bp, probe
cgccgtctgtcctggacagcatcaa

SEQ ID NO: 186132 - DNA, 25 bp, probe
cgcgcgtttgcggcaaccgcaagaa

SEQ ID NO: 186133 - DNA, 25 bp, probe
cgcgcaagagggcagaccgatagaa

SEQ ID NO: 186134 - DNA, 25 bp, probe
cgcgcaaggactcgctggacgacag

SEQ ID NO: 186135 - DNA, 25 bp, probe
cgccgaggtgctcggtggagtcatg

SEQ ID NO: 186136 - DNA, 25 bp, probe
cgcccaggcctgccaggatgcaggg

SEQ ID NO: 186137 - DNA, 25 bp, probe
cgcccaaactgccgttgatgtgtgg

SEQ ID NO: 186138 - DNA, 25 bp, probe
cgcccaagcaaggtttgatgcctat

SEQ ID NO: 186139 - DNA, 25 bp, probe
cgcccaagtgtgactgactaccttg

SEQ ID NO: 186140 - DNA, 25 bp, probe
cgcgcgaaggtgatgagctcgcccg

SEQ ID NO: 186141 - DNA, 25 bp, probe
cccagcagaggcaacatgcctcccc

SEQ ID NO: 186142 - DNA, 25 bp, probe
cccagcagaggcaacatgcctcccc

SEQ ID NO: 186143 - DNA, 25 bp, probe
cccagaaagccttattgagcccctt

SEQ ID NO: 186144 - DNA, 25 bp, probe
cccagaagactgtggatggcccctc

SEQ ID NO: 186145 - DNA, 25 bp, probe
cccaggaaataaggggcctgctcct

SEQ ID NO: 186146 - DNA, 25 bp, probe
cccatggaaaccttctggacttcct

SEQ ID NO: 186147 - DNA, 25 bp, probe
cccagttctcccatttgaataccat

SEQ ID NO: 186148 - DNA, 25 bp, probe
cgccagttgtgcacttttacaagcc

SEQ ID NO: 186149 - DNA, 25 bp, probe
cgcctgtttgctgtcattctgagca

SEQ ID NO: 186150 - DNA, 25 bp, probe
cccagattacatgtatctgaggcag

SEQ ID NO: 186151 - DNA, 25 bp, probe
cgccagattgtgtcctttgacaagc

SEQ ID NO: 186152 - DNA, 25 bp, probe
cgccatcatgtcttaccagtgacgc

SEQ ID NO: 186153 - DNA, 25 bp, probe
cgcctttctagatgacaacttccgg

SEQ ID NO: 186154 - DNA, 25 bp, probe
cgcctcctgggttgaagcgattctc

SEQ ID NO: 186155 - DNA, 25 bp, probe
cgcctcctcgtgctggaagaattca

SEQ ID NO: 186156 - DNA, 25 bp, probe
cgcctcctcgtgctggaagaattca

SEQ ID NO: 186157 - DNA, 25 bp, probe
cgcctacagcgcgtcggaaggttta

SEQ ID NO: 186158 - DNA, 25 bp, probe
cgccttgagcgggtgggagctgtgt

SEQ ID NO: 186159 - DNA, 25 bp, probe
cgccctgactgggaggaagctgtga

SEQ ID NO: 186160 - DNA, 25 bp, probe
cccactaatgggtgtcatcttggcc

SEQ ID NO: 186161 - DNA, 25 bp, probe
cccccattggactgtactttgacac

SEQ ID NO: 186162 - DNA, 25 bp, probe
cccccattggactgtactttgacac

SEQ ID NO: 186163 - DNA, 25 bp, probe
cccaccatttgagagctcaccttgc

SEQ ID NO: 186164 - DNA, 25 bp, probe
cgccagcatttataactcaccagag

SEQ ID NO: 186165 - DNA, 25 bp, probe
cccagaattaacccatacaaatgta

SEQ ID NO: 186166 - DNA, 25 bp, probe
cccgaatttagtcacaccatcttaa

SEQ ID NO: 186167 - DNA, 25 bp, probe
cccgaatttagtcacaccatcttaa

SEQ ID NO: 186168 - DNA, 25 bp, probe
ccaagaatttacagagttgctaaaa

SEQ ID NO: 186169 - DNA, 25 bp, probe
ccgaacattttcagaaatctttcag

SEQ ID NO: 186170 - DNA, 25 bp, probe
ccgaaatttctacacctgtgtctag

SEQ ID NO: 186171 - DNA, 25 bp, probe
ccgaaactcttcaccttgatgtatg

SEQ ID NO: 186172 - DNA, 25 bp, probe
ccgaaactcttcaccttgatgtatg

SEQ ID NO: 186173 - DNA, 25 bp, probe
cccagacccttctccttagaagtgg

SEQ ID NO: 186174 - DNA, 25 bp, probe
cccagacctgtttcttctaagggag

SEQ ID NO: 186175 - DNA, 25 bp, probe
cgccgaacctatcttcagtcagagg

SEQ ID NO: 186176 - DNA, 25 bp, probe
cgccccaccttttcatattgaggct

SEQ ID NO: 186177 - DNA, 25 bp, probe
cccatcctgccctttagatctgggc

SEQ ID NO: 186178 - DNA, 25 bp, probe
cccactctctgtttcaattctgggg

SEQ ID NO: 186179 - DNA, 25 bp, probe
cccacccatatggaaattgctgggc

SEQ ID NO: 186180 - DNA, 25 bp, probe
cccaccacactggacttttctagag

SEQ ID NO: 186181 - DNA, 25 bp, probe
cccaaatatcatgtttttctccaca

SEQ ID NO: 186182 - DNA, 25 bp, probe
cccaaggactttcttttgccaagcg

SEQ ID NO: 186183 - DNA, 25 bp, probe
ccaaggtacctacattctaccacgc

SEQ ID NO: 186184 - DNA, 25 bp, probe
cccagcgttacataatcattaccac

SEQ ID NO: 186185 - DNA, 25 bp, probe
cccagcgttacataatcattaccac

SEQ ID NO: 186186 - DNA, 25 bp, probe
cccacagctccaggaaccttgaagc

SEQ ID NO: 186187 - DNA, 25 bp, probe
cccacagccgaggagacctggcttg

SEQ ID NO: 186188 - DNA, 25 bp, probe
cccactgcaagacaacctggttatc

SEQ ID NO: 186189 - DNA, 25 bp, probe
cccactgagatacaccattttaacc

SEQ ID NO: 186190 - DNA, 25 bp, probe
cctggaatctacaccctgttaacca

SEQ ID NO: 186191 - DNA, 25 bp, probe
ccttgattgctaggaccctttacaa

SEQ ID NO: 186192 - DNA, 25 bp, probe
cctactgtcaatgacccctaaacct

SEQ ID NO: 186193 - DNA, 25 bp, probe
cctactgtcaatgacccctaaacct

SEQ ID NO: 186194 - DNA, 25 bp, probe
cctactgtagtcactaccagtacca

SEQ ID NO: 186195 - DNA, 25 bp, probe
cccatctgtaatatattgccagtat

SEQ ID NO: 186196 - DNA, 25 bp, probe
cccatctgtaatatattgccagtat

SEQ ID NO: 186197 - DNA, 25 bp, probe
cgccatcttggtactttaggttaat

SEQ ID NO: 186198 - DNA, 25 bp, probe
ccctaagttgtcactcagtttaatt

SEQ ID NO: 186199 - DNA, 25 bp, probe
cccaaaatttatcatatgtagaaat

SEQ ID NO: 186200 - DNA, 25 bp, probe
cccacaaattattcttacagaaaga

SEQ ID NO: 186201 - DNA, 25 bp, probe
cccagaaattcattccaacccagga

SEQ ID NO: 186202 - DNA, 25 bp, probe
ccaaaaagtacagagacaacaggac

SEQ ID NO: 186203 - DNA, 25 bp, probe
cctcggggtaatgaccacaccgact

SEQ ID NO: 186204 - DNA, 25 bp, probe
cccaggccgaaatggtcaacgccat

SEQ ID NO: 186205 - DNA, 25 bp, probe
cccagaggaaagtgcgtcagatcag

SEQ ID NO: 186206 - DNA, 25 bp, probe
cccaaggacaagacagcagtgctgc

SEQ ID NO: 186207 - DNA, 25 bp, probe
cgccgagcgagcaggagcggcggcg

SEQ ID NO: 186208 - DNA, 25 bp, probe
cgccatcggatggggcgctggggca

SEQ ID NO: 186209 - DNA, 25 bp, probe
cgccatgggggatcagtgcaggtat

SEQ ID NO: 186210 - DNA, 25 bp, probe
cgcctggggccaacgaagcgtgatc

SEQ ID NO: 186211 - DNA, 25 bp, probe
cccttctcgacaaggatccagcgac

SEQ ID NO: 186212 - DNA, 25 bp, probe
cccttctcgacaaggatccagcgac

SEQ ID NO: 186213 - DNA, 25 bp, probe
cccatttccaaagcatcccagatgc

SEQ ID NO: 186214 - DNA, 25 bp, probe
cccagattccaaggacctcacgatg

SEQ ID NO: 186215 - DNA, 25 bp, probe
cccagtgacacttaggcccctggga

SEQ ID NO: 186216 - DNA, 25 bp, probe
cccagtaccttcagttccaggattt

SEQ ID NO: 186217 - DNA, 25 bp, probe
cccactccctctggtttataggact

SEQ ID NO: 186218 - DNA, 25 bp, probe
cccagcccctatggtttcacataga

SEQ ID NO: 186219 - DNA, 25 bp, probe
cccacacccaagtatttgcacaata

SEQ ID NO: 186220 - DNA, 25 bp, probe
cccaccgcatcctttttgaagaatt

SEQ ID NO: 186221 - DNA, 25 bp, probe
cccactcagcatattaccaggggtt

SEQ ID NO: 186222 - DNA, 25 bp, probe
cccagcgatttttgcccaggaagtt

SEQ ID NO: 186223 - DNA, 25 bp, probe
cccagcgatttttgcccaggaagtt

SEQ ID NO: 186224 - DNA, 25 bp, probe
cgcgccaaattttgcgctcggtgcg

SEQ ID NO: 186225 - DNA, 25 bp, probe
cgccaaattttgcgctcggtgcgat

SEQ ID NO: 186226 - DNA, 25 bp, probe
cccaatcattttctctagtgtaatg

SEQ ID NO: 186227 - DNA, 25 bp, probe
cccatctcactaagccttagttctt

SEQ ID NO: 186228 - DNA, 25 bp, probe
cgcctcatcctctacaatgatggtg

SEQ ID NO: 186229 - DNA, 25 bp, probe
cgcctcaacatggacttctggcgcc

SEQ ID NO: 186230 - DNA, 25 bp, probe
cgcctctgcgaggagttctggggct

SEQ ID NO: 186231 - DNA, 25 bp, probe
cgcctctgtgaagatctctgggctc

SEQ ID NO: 186232 - DNA, 25 bp, probe
cgcctctggccgtaccactggcatc

SEQ ID NO: 186233 - DNA, 25 bp, probe
cgcccattgctttaggcctggagac

SEQ ID NO: 186234 - DNA, 25 bp, probe
cgcctgtttggtgccgtggagcacc

SEQ ID NO: 186235 - DNA, 25 bp, probe
cgcgctttaagtgtgctgggcagag

SEQ ID NO: 186236 - DNA, 25 bp, probe
cgcctttccacgggcaggatgagga

SEQ ID NO: 186237 - DNA, 25 bp, probe
cgcctgttcccagcaagtgctgaaa

SEQ ID NO: 186238 - DNA, 25 bp, probe
cgcctttctcacgatcaagggcgcc

SEQ ID NO: 186239 - DNA, 25 bp, probe
cgcccttctcacatactggggcagt

SEQ ID NO: 186240 - DNA, 25 bp, probe
cgccctctctacttcagtgatgagg

SEQ ID NO: 186241 - DNA, 25 bp, probe
cgcgcccacgacgtggagatggtgg

SEQ ID NO: 186242 - DNA, 25 bp, probe
cgcccccgagaacgtggagctggcg

SEQ ID NO: 186243 - DNA, 25 bp, probe
cgccctctcacagaggatgggtgag

SEQ ID NO: 186244 - DNA, 25 bp, probe
cccacctgcacacagtctgttggat

SEQ ID NO: 186245 - DNA, 25 bp, probe
cccactgctgtgcaatgccttagga

SEQ ID NO: 186246 - DNA, 25 bp, probe
cccactgctgtgcaatgccttagga

SEQ ID NO: 186247 - DNA, 25 bp, probe
cgccgctcatgactatacgctaaga

SEQ ID NO: 186248 - DNA, 25 bp, probe
cccactgcaggtagccctaaacagg

SEQ ID NO: 186249 - DNA, 25 bp, probe
cgccgtgagatgagcacccagggag

SEQ ID NO: 186250 - DNA, 25 bp, probe
cgcctgtaatcccagcactttggga

SEQ ID NO: 186251 - DNA, 25 bp, probe
cgcctgtaatcccagctactcggga

SEQ ID NO: 186252 - DNA, 25 bp, probe
cgcctgtaatcccagtacttgggag

SEQ ID NO: 186253 - DNA, 25 bp, probe
cgcctgtagtcccagctacttggga

SEQ ID NO: 186254 - DNA, 25 bp, probe
cgccagtggttccgcaagctggcgg

SEQ ID NO: 186255 - DNA, 25 bp, probe
cgccagtggttccgcaagctggcgg

SEQ ID NO: 186256 - DNA, 25 bp, probe
ccgagttgtgtccaacgattcggac

SEQ ID NO: 186257 - DNA, 25 bp, probe
ccgagctctggagcgtggataccgg

SEQ ID NO: 186258 - DNA, 25 bp, probe
ccgactggaaaccgagtgaactggc

SEQ ID NO: 186259 - DNA, 25 bp, probe
cccaaacaaacctagctaactgcct

SEQ ID NO: 186260 - DNA, 25 bp, probe
cccaaacccacctactatgttgaca

SEQ ID NO: 186261 - DNA, 25 bp, probe
cccaatccccatgaacttgtttcag

SEQ ID NO: 186262 - DNA, 25 bp, probe
cccaatccccatgaacttgtttcag

SEQ ID NO: 186263 - DNA, 25 bp, probe
cccactcccaaccacgttgggacag

SEQ ID NO: 186264 - DNA, 25 bp, probe
cccacttccaccactttgtggagca

SEQ ID NO: 186265 - DNA, 25 bp, probe
cccacttccaccactttgtggagca

SEQ ID NO: 186266 - DNA, 25 bp, probe
cccagttccccaagtgtctctgggg

SEQ ID NO: 186267 - DNA, 25 bp, probe
cccagttacactgcagtatgtccca

SEQ ID NO: 186268 - DNA, 25 bp, probe
cccactcaatacgctggagtccacg

SEQ ID NO: 186269 - DNA, 25 bp, probe
cccacaaaagccaggactctctgtg

SEQ ID NO: 186270 - DNA, 25 bp, probe
cgccagaaggatgccgcagaccatt

SEQ ID NO: 186271 - DNA, 25 bp, probe
cccacaagagggccatcagaatcat

SEQ ID NO: 186272 - DNA, 25 bp, probe
cgccaccagacccctaaatcttggc

SEQ ID NO: 186273 - DNA, 25 bp, probe
cccatgctaaaccctataatttaca

SEQ ID NO: 186274 - DNA, 25 bp, probe
cgccatctgtaaccctttattgtac

SEQ ID NO: 186275 - DNA, 25 bp, probe
cgccatcttgagacatccttttttt

SEQ ID NO: 186276 - DNA, 25 bp, probe
ccctcctacctgcttacaatttgga

SEQ ID NO: 186277 - DNA, 25 bp, probe
cccacctactatgttgacacatttc

SEQ ID NO: 186278 - DNA, 25 bp, probe
cccaaatctgatatttacagctttg

SEQ ID NO: 186279 - DNA, 25 bp, probe
cccaactggtcggcttcagagtttc

SEQ ID NO: 186280 - DNA, 25 bp, probe
cccaactttttcacagcagattacc

SEQ ID NO: 186281 - DNA, 25 bp, probe
cccacacgtgtcctgaagacaaaga

SEQ ID NO: 186282 - DNA, 25 bp, probe
cccacacgtggaccaagtcatgccg

SEQ ID NO: 186283 - DNA, 25 bp, probe
cccactgttgtacatggtcaccatg

SEQ ID NO: 186284 - DNA, 25 bp, probe
cccactgttgtacatggtcaccatg

SEQ ID NO: 186285 - DNA, 25 bp, probe
ccatacttatatcaaggtcccaaaa

SEQ ID NO: 186286 - DNA, 25 bp, probe
cccactttattatgaccaaacagaa

SEQ ID NO: 186287 - DNA, 25 bp, probe
cccactttattatgaccaaacagaa

SEQ ID NO: 186288 - DNA, 25 bp, probe
cccagttctattttggccattggaa

SEQ ID NO: 186289 - DNA, 25 bp, probe
cccacgtccatgtttgactattgtg

SEQ ID NO: 186290 - DNA, 25 bp, probe
cgcccctacatggcttatcttatga

SEQ ID NO: 186291 - DNA, 25 bp, probe
cgcccctacatggcgtatcttcaga

SEQ ID NO: 186292 - DNA, 25 bp, probe
cgcctcccacagtgagacttacaga

SEQ ID NO: 186293 - DNA, 25 bp, probe
cgcccccaggtcaaggtgaagatgt

SEQ ID NO: 186294 - DNA, 25 bp, probe
cgcctcgagcggggagggtaatgtg

SEQ ID NO: 186295 - DNA, 25 bp, probe
cgcccggcaaggtagtggaagactg

SEQ ID NO: 186296 - DNA, 25 bp, probe
cgcctgggacggaagatcgggagcg

SEQ ID NO: 186297 - DNA, 25 bp, probe
cccagggattggaaacggatgacgg

SEQ ID NO: 186298 - DNA, 25 bp, probe
cccagggattggaaacggatgacgg

SEQ ID NO: 186299 - DNA, 25 bp, probe
ccccaggatcggagtcccatcctgg

SEQ ID NO: 186300 - DNA, 25 bp, probe
cgcccgagtgggacgattacttgga

SEQ ID NO: 186301 - DNA, 25 bp, probe
cgcccgagtgggatgattactcgga

SEQ ID NO: 186302 - DNA, 25 bp, probe
cgccggagcttggaagtcatacccg

SEQ ID NO: 186303 - DNA, 25 bp, probe
cgccaggcggtggagcagttttccg

SEQ ID NO: 186304 - DNA, 25 bp, probe
cgccaggcggtggagcagttttccg

SEQ ID NO: 186305 - DNA, 25 bp, probe
cgccaggcggtggagcagttttccg

SEQ ID NO: 186306 - DNA, 25 bp, probe
cccagaatgtgtcactgtcttacct

SEQ ID NO: 186307 - DNA, 25 bp, probe
cccttggtgtgggttttatctctgg

SEQ ID NO: 186308 - DNA, 25 bp, probe
cccataggtcttgctttgttgcctg

SEQ ID NO: 186309 - DNA, 25 bp, probe
ccgaaggtcaggactcatctgggca

SEQ ID NO: 186310 - DNA, 25 bp, probe
ccgaaggtcaggactcatctgggca

SEQ ID NO: 186311 - DNA, 25 bp, probe
cccagaggagcagtactcaagccgc

SEQ ID NO: 186312 - DNA, 25 bp, probe
cccaaatgagcaggtccaagacact

SEQ ID NO: 186313 - DNA, 25 bp, probe
cccaccaggagtgccagacagcact

SEQ ID NO: 186314 - DNA, 25 bp, probe
cccatcacagtcatcgagggcagcc

SEQ ID NO: 186315 - DNA, 25 bp, probe
cccatcacagtcatcgagggcagcc

SEQ ID NO: 186316 - DNA, 25 bp, probe
ccctcaagtctgacgatgacacctc

SEQ ID NO: 186317 - DNA, 25 bp, probe
cccaaaggctgggagaagcctcaag

SEQ ID NO: 186318 - DNA, 25 bp, probe
cccaacaggaggccgtggctctgat

SEQ ID NO: 186319 - DNA, 25 bp, probe
cccagacctagggctggactcagga

SEQ ID NO: 186320 - DNA, 25 bp, probe
ccctagcctagggtcccatattggg

SEQ ID NO: 186321 - DNA, 25 bp, probe
ccctagcctagggtcccatattggg

SEQ ID NO: 186322 - DNA, 25 bp, probe
ccccacgaaggagcccattgtggcc

SEQ ID NO: 186323 - DNA, 25 bp, probe
cctggtcggggagaacttgctggtg

SEQ ID NO: 186324 - DNA, 25 bp, probe
cctgggcgttaacagcctttggagt

SEQ ID NO: 186325 - DNA, 25 bp, probe
cctttgggaaatcaccagcttggca

SEQ ID NO: 186326 - DNA, 25 bp, probe
cccttgaggacctggcttttggcaa

SEQ ID NO: 186327 - DNA, 25 bp, probe
ccctgtaaatcctggttatcggcga

SEQ ID NO: 186328 - DNA, 25 bp, probe
cccactatagcttccaggtattcgg

SEQ ID NO: 186329 - DNA, 25 bp, probe
cccactgttgtatacgcttattgag

SEQ ID NO: 186330 - DNA, 25 bp, probe
ccgcaagcttattccctttagtgag

SEQ ID NO: 186331 - DNA, 25 bp, probe
cccatacttctaccctgtggtgaag

SEQ ID NO: 186332 - DNA, 25 bp, probe
cccaacactgtacccagctggttgg

SEQ ID NO: 186333 - DNA, 25 bp, probe
cccataaatgtgccccagttctatt

SEQ ID NO: 186334 - DNA, 25 bp, probe
cccccaagtcctcagtattttagct

SEQ ID NO: 186335 - DNA, 25 bp, probe
ccagcccagaccagaagttagttca

SEQ ID NO: 186336 - DNA, 25 bp, probe
cccacacgacgggaagacaagttca

SEQ ID NO: 186337 - DNA, 25 bp, probe
cccaacatacggtaaacaacatttg

SEQ ID NO: 186338 - DNA, 25 bp, probe
ccaaattgtcttcctaaaatattag

SEQ ID NO: 186339 - DNA, 25 bp, probe
cccaattcaccttctaaaaactcat

SEQ ID NO: 186340 - DNA, 25 bp, probe
cccaatccctatttgagaaacactg

SEQ ID NO: 186341 - DNA, 25 bp, probe
cccaaagccagccattaaaatcact

SEQ ID NO: 186342 - DNA, 25 bp, probe
cccaaaccctcaaacagagtgcctt

SEQ ID NO: 186343 - DNA, 25 bp, probe
cccaaaccctaccacaaattcatgg

SEQ ID NO: 186344 - DNA, 25 bp, probe
cgccgaatatccagggccaactcat

SEQ ID NO: 186345 - DNA, 25 bp, probe
cctgaagaattgatgggccacccgt

SEQ ID NO: 186346 - DNA, 25 bp, probe
cccagaagtgatcctgggccacccc

SEQ ID NO: 186347 - DNA, 25 bp, probe
cccaacgtctgcatgggagaccaca

SEQ ID NO: 186348 - DNA, 25 bp, probe
cgccagcaccttgtggaagaccaca

SEQ ID NO: 186349 - DNA, 25 bp, probe
cgcccgcactatggtggacaagctg

SEQ ID NO: 186350 - DNA, 25 bp, probe
cgccggctctcaggggagatgatct

SEQ ID NO: 186351 - DNA, 25 bp, probe
cccagcctctgctgtccaaggctgg

SEQ ID NO: 186352 - DNA, 25 bp, probe
cccaactatgtggctccagaagtgc

SEQ ID NO: 186353 - DNA, 25 bp, probe
cccaagctgaatgccgagaagccac

SEQ ID NO: 186354 - DNA, 25 bp, probe
cccaggtcactcctctgagtataac

SEQ ID NO: 186355 - DNA, 25 bp, probe
cccactttgtgcgctgcattaaacc

SEQ ID NO: 186356 - DNA, 25 bp, probe
tcccacttttggatcagtaaatcga

SEQ ID NO: 186357 - DNA, 25 bp, probe
cccaagtttagttcaggaagctctg

SEQ ID NO: 186358 - DNA, 25 bp, probe
cgccagccttgttttcaggtggtct

SEQ ID NO: 186359 - DNA, 25 bp, probe
cccagcgtcagtccaataggtcagt

SEQ ID NO: 186360 - DNA, 25 bp, probe
cccacgaatcccaataatgacagct

SEQ ID NO: 186361 - DNA, 25 bp, probe
cccaaattgcccattcacacaatca

SEQ ID NO: 186362 - DNA, 25 bp, probe
cccaaaatgccacaattcaaaaaga

SEQ ID NO: 186363 - DNA, 25 bp, probe
cccaaaagccgtgatgtgcaatgaa

SEQ ID NO: 186364 - DNA, 25 bp, probe
cccaactcacccatgagggatgaaa

SEQ ID NO: 186365 - DNA, 25 bp, probe
cccagcctaccagagatggaccaac

SEQ ID NO: 186366 - DNA, 25 bp, probe
cccaccaggccaggatgcaggcatc

SEQ ID NO: 186367 - DNA, 25 bp, probe
cccaccatgtggacagacatagccc

SEQ ID NO: 186368 - DNA, 25 bp, probe
cccaccctgtaaactaggcggctgc

SEQ ID NO: 186369 - DNA, 25 bp, probe
cccagaacgaacactaggcggcacc

SEQ ID NO: 186370 - DNA, 25 bp, probe
cccagacaccaaggaccggtggcgc

SEQ ID NO: 186371 - DNA, 25 bp, probe
cgccgccgccaagatggcggacctg

SEQ ID NO: 186372 - DNA, 25 bp, probe
cccagccccaaactgggggctctgt

SEQ ID NO: 186373 - DNA, 25 bp, probe
cccacttcgaagtggaggtctgcca

SEQ ID NO: 186374 - DNA, 25 bp, probe
cccaggtggttctgaaggtctccca

SEQ ID NO: 186375 - DNA, 25 bp, probe
cccagggggtgtctaggtagcaaca

SEQ ID NO: 186376 - DNA, 25 bp, probe
cccacgggaggacaagcaataactc

SEQ ID NO: 186377 - DNA, 25 bp, probe
cgccagggtgagcagtacatgaaca

SEQ ID NO: 186378 - DNA, 25 bp, probe
cccagactctgtcgactatcgaaag

SEQ ID NO: 186379 - DNA, 25 bp, probe
cccagagcgcagtgagtcttcggag

SEQ ID NO: 186380 - DNA, 25 bp, probe
cccagagcgcagtgagtcttcggag

SEQ ID NO: 186381 - DNA, 25 bp, probe
cccaagctcagaaggctcttctgac

SEQ ID NO: 186382 - DNA, 25 bp, probe
cccaagcagccaaagcagtgtcgac

SEQ ID NO: 186383 - DNA, 25 bp, probe
cccacagtggcagcgtgttggagcg

SEQ ID NO: 186384 - DNA, 25 bp, probe
cgccgcagggaggcgcggaggacga

SEQ ID NO: 186385 - DNA, 25 bp, probe
cgccgcagggaggcgcggaggacga

SEQ ID NO: 186386 - DNA, 25 bp, probe
cgccgcctgtgagcggcggcgagcg

SEQ ID NO: 186387 - DNA, 25 bp, probe
cgcccctggaggcagcgggagggcg

SEQ ID NO: 186388 - DNA, 25 bp, probe
cgcccctggaggcagcgggagggcg

SEQ ID NO: 186389 - DNA, 25 bp, probe
cgccccgtgcaggagacgtaggtag

SEQ ID NO: 186390 - DNA, 25 bp, probe
cgccccgtcagcggacgggcagaag

SEQ ID NO: 186391 - DNA, 25 bp, probe
cgccgccgtcgcggaggaggaggag

SEQ ID NO: 186392 - DNA, 25 bp, probe
cgcctgcctagcccaggatgaaggg

SEQ ID NO: 186393 - DNA, 25 bp, probe
cgcctgcctagcccaggatgaaggg

SEQ ID NO: 186394 - DNA, 25 bp, probe
cgccaccaacagtcagaggccaagg

SEQ ID NO: 186395 - DNA, 25 bp, probe
cgccagtcaactacgcgaggcagag

SEQ ID NO: 186396 - DNA, 25 bp, probe
cgccagtcacagtgtgcggcgacat

SEQ ID NO: 186397 - DNA, 25 bp, probe
cgccaagacagacacgctgcagatc

SEQ ID NO: 186398 - DNA, 25 bp, probe
cccaagacattaaatctgccatctc

SEQ ID NO: 186399 - DNA, 25 bp, probe
cccaaagatcttggtgctccatctg

SEQ ID NO: 186400 - DNA, 25 bp, probe
cccaaatgtcagggttctgctcggc

SEQ ID NO: 186401 - DNA, 25 bp, probe
cccaaatgggagctgtctcgggccc

SEQ ID NO: 186402 - DNA, 25 bp, probe
cccaagaggggggtctgaggctgtg

SEQ ID NO: 186403 - DNA, 25 bp, probe
cgccaagatggcggacctggaggcg

SEQ ID NO: 186404 - DNA, 25 bp, probe
cgccatcagggagcacctggggcgc

SEQ ID NO: 186405 - DNA, 25 bp, probe
cgccatcagggagcacctggggcgc

SEQ ID NO: 186406 - DNA, 25 bp, probe
cgccatcagggagcacctggggcgc

SEQ ID NO: 186407 - DNA, 25 bp, probe
cgccataggaagacccccagagaga

SEQ ID NO: 186408 - DNA, 25 bp, probe
cccagcggaacatcttcctgacaga

SEQ ID NO: 186409 - DNA, 25 bp, probe
cccagcggaacatcttcctgacaga

SEQ ID NO: 186410 - DNA, 25 bp, probe
cccagtgggaatgatccctgacatc

SEQ ID NO: 186411 - DNA, 25 bp, probe
cgccatgctgaggaacaacctagaa

SEQ ID NO: 186412 - DNA, 25 bp, probe
cgccgcagcgagaccaacgctgaga

SEQ ID NO: 186413 - DNA, 25 bp, probe
cgccactctcagacaaaactagatg

SEQ ID NO: 186414 - DNA, 25 bp, probe
cccacatcctgtgcatcaaggacat

SEQ ID NO: 186415 - DNA, 25 bp, probe
cccagatcctggccacaattgagct

SEQ ID NO: 186416 - DNA, 25 bp, probe
cccacactgctggacatggacatgg

SEQ ID NO: 186417 - DNA, 25 bp, probe
cccacactgctggacatggacatgg

SEQ ID NO: 186418 - DNA, 25 bp, probe
cccaccgtctgcgttgacatgagta

SEQ ID NO: 186419 - DNA, 25 bp, probe
cccagctgcagtggctgcactacta

SEQ ID NO: 186420 - DNA, 25 bp, probe
cccactgagcaggccaacatgctgt

SEQ ID NO: 186421 - DNA, 25 bp, probe
cccagctggaagccccagcagatgc

SEQ ID NO: 186422 - DNA, 25 bp, probe
cccagcgagaagccgacatgcatcg

SEQ ID NO: 186423 - DNA, 25 bp, probe
cccagcaagagcagcagcagcagcc

SEQ ID NO: 186424 - DNA, 25 bp, probe
cccaaatgcagcagatgcacggcag

SEQ ID NO: 186425 - DNA, 25 bp, probe
cccagacatcatcaaggtggccaag

SEQ ID NO: 186426 - DNA, 25 bp, probe
cccaagattgagcggagtgcctcgg

SEQ ID NO: 186427 - DNA, 25 bp, probe
cccagtatccagcgggaactcaggg

SEQ ID NO: 186428 - DNA, 25 bp, probe
cccaagaccgctcgggaaatgcagg

SEQ ID NO: 186429 - DNA, 25 bp, probe
cccaagcagtacccaggctttgcag

SEQ ID NO: 186430 - DNA, 25 bp, probe
cccagctggaacccgagtttgagga

SEQ ID NO: 186431 - DNA, 25 bp, probe
cccacgggcacacagaggtctgaag

SEQ ID NO: 186432 - DNA, 25 bp, probe
cccacgggcacacagaggtctgaag

SEQ ID NO: 186433 - DNA, 25 bp, probe
cccaagctcagcttagaagttcgaa

SEQ ID NO: 186434 - DNA, 25 bp, probe
cccacaggcagctttaaccattaaa

SEQ ID NO: 186435 - DNA, 25 bp, probe
cccacaggcagctttaaccattaaa

SEQ ID NO: 186436 - DNA, 25 bp, probe
cccacaggcagctttaaccattaaa

SEQ ID NO: 186437 - DNA, 25 bp, probe
cccaagtggtttccacatgctctga

SEQ ID NO: 186438 - DNA, 25 bp, probe
cccaagtctgtgccctaatgcttgc

SEQ ID NO: 186439 - DNA, 25 bp, probe
cccaaggatgtgaccttgagtgtca

SEQ ID NO: 186440 - DNA, 25 bp, probe
cccaaggatatgtcttctgaagatc

SEQ ID NO: 186441 - DNA, 25 bp, probe
cccaagtgataacttcgaagccata

SEQ ID NO: 186442 - DNA, 25 bp, probe
cccaaataaagtcctaatgcatcaa

SEQ ID NO: 186443 - DNA, 25 bp, probe
cccaactcagtcttctgcttatgga

SEQ ID NO: 186444 - DNA, 25 bp, probe
cccaactcagtcttctgcttatgga

SEQ ID NO: 186445 - DNA, 25 bp, probe
cccacccagctctgagttcatggat

SEQ ID NO: 186446 - DNA, 25 bp, probe
cccacccagctctgagttcatggat

SEQ ID NO: 186447 - DNA, 25 bp, probe
cccaactacctggacaagcatgagg

SEQ ID NO: 186448 - DNA, 25 bp, probe
cgccaagcagacgaggactacagcc

SEQ ID NO: 186449 - DNA, 25 bp, probe
cgccagctagctccatagggaagcc

SEQ ID NO: 186450 - DNA, 25 bp, probe
cgccagtgatgacggaggagtagcc

SEQ ID NO: 186451 - DNA, 25 bp, probe
cgccatggagacggtacagctgagg

SEQ ID NO: 186452 - DNA, 25 bp, probe
cgcctgtggacgcctaggcaagagc

SEQ ID NO: 186453 - DNA, 25 bp, probe
cgcctttcctgggaggatcaagcta

SEQ ID NO: 186454 - DNA, 25 bp, probe
cgcctttcctgggtgacaatgatgc

SEQ ID NO: 186455 - DNA, 25 bp, probe
cgcctctcactggtgcgatggaagg

SEQ ID NO: 186456 - DNA, 25 bp, probe
ccctgtacggtggatggcaccggag

SEQ ID NO: 186457 - DNA, 25 bp, probe
cccagatacctgtgaggactggttg

SEQ ID NO: 186458 - DNA, 25 bp, probe
cccaggcaaggtagagggcgagttg

SEQ ID NO: 186459 - DNA, 25 bp, probe
cccagccagcggattgggggtggcc

SEQ ID NO: 186460 - DNA, 25 bp, probe
cgccagcggcgggtacgagaggctg

SEQ ID NO: 186461 - DNA, 25 bp, probe
cccacaacgtgcggacgcaggagcc

SEQ ID NO: 186462 - DNA, 25 bp, probe
cccaaagatggcccacacagggacc

SEQ ID NO: 186463 - DNA, 25 bp, probe
cccaagatagcccgcgaaggcgaca

SEQ ID NO: 186464 - DNA, 25 bp, probe
cccagaaggcccggcttggaacagt

SEQ ID NO: 186465 - DNA, 25 bp, probe
cccaggaggtcttgaccggtaagct

SEQ ID NO: 186466 - DNA, 25 bp, probe
cccaaagtgctcagaccttgtctag

SEQ ID NO: 186467 - DNA, 25 bp, probe
cccacaaagccgctgccattttatt

SEQ ID NO: 186468 - DNA, 25 bp, probe
cccacaaagccgctgccattttatt

SEQ ID NO: 186469 - DNA, 25 bp, probe
cccaaactcaactctcaatctattt

SEQ ID NO: 186470 - DNA, 25 bp, probe
cccagagaccaacgttcaagcagtt

SEQ ID NO: 186471 - DNA, 25 bp, probe
cccacagaccagatgtccactgaga

SEQ ID NO: 186472 - DNA, 25 bp, probe
cgccagagacacctagtcctgatga

SEQ ID NO: 186473 - DNA, 25 bp, probe
cccaatatcactcagctccttgata

SEQ ID NO: 186474 - DNA, 25 bp, probe
cccactataccttgcatttgctgag

SEQ ID NO: 186475 - DNA, 25 bp, probe
ccctctcttccatcatatttggatg

SEQ ID NO: 186476 - DNA, 25 bp, probe
cccatctttcacacacattctggac

SEQ ID NO: 186477 - DNA, 25 bp, probe
cccactattagcaggctttggattt

SEQ ID NO: 186478 - DNA, 25 bp, probe
cccatctttaggggtctggattttg

SEQ ID NO: 186479 - DNA, 25 bp, probe
cccatctttaggggtctggattttg

SEQ ID NO: 186480 - DNA, 25 bp, probe
cgccacgttggcggctgtgtggcat

SEQ ID NO: 186481 - DNA, 25 bp, probe
cgccatctattgcgtggtgggcagc

SEQ ID NO: 186482 - DNA, 25 bp, probe
cgccagccctgcagtattgatgtgc

SEQ ID NO: 186483 - DNA, 25 bp, probe
cgccatcaccgagcgcttgatgtgc

SEQ ID NO: 186484 - DNA, 25 bp, probe
cgccatcaccgagcgcttgatgtgc

SEQ ID NO: 186485 - DNA, 25 bp, probe
cccatgaccaagccgctggtgggca

SEQ ID NO: 186486 - DNA, 25 bp, probe
cccaggacatagcccagggctgcca

SEQ ID NO: 186487 - DNA, 25 bp, probe
cgccaggaagctctcgagtggctca

SEQ ID NO: 186488 - DNA, 25 bp, probe
cccaggaatctgaatcttgtggtct

SEQ ID NO: 186489 - DNA, 25 bp, probe
cccaagaacatcacgtgcatttgct

SEQ ID NO: 186490 - DNA, 25 bp, probe
cccacagataacatcagctgaggtt

SEQ ID NO: 186491 - DNA, 25 bp, probe
cccagagtacatagctcctgaggtt

SEQ ID NO: 186492 - DNA, 25 bp, probe
cccaagaaatagttgatgaatttgc

SEQ ID NO: 186493 - DNA, 25 bp, probe
cccaaggactagtggagtcctgagt

SEQ ID NO: 186494 - DNA, 25 bp, probe
cccaaggccgacaaggagccactgg

SEQ ID NO: 186495 - DNA, 25 bp, probe
cgccagtcctctgcaaggagaactg

SEQ ID NO: 186496 - DNA, 25 bp, probe
cccagcaccttcaaagggacaccta

SEQ ID NO: 186497 - DNA, 25 bp, probe
cccagccatgctttgcaagatgggc

SEQ ID NO: 186498 - DNA, 25 bp, probe
cgccagctatctcagcacgaagaga

SEQ ID NO: 186499 - DNA, 25 bp, probe
cgccaatatcatcaccaggaggagt

SEQ ID NO: 186500 - DNA, 25 bp, probe
cccaatgatcttgccattccgagtg

SEQ ID NO: 186501 - DNA, 25 bp, probe
cccaatgatcttgccattccgagtg

SEQ ID NO: 186502 - DNA, 25 bp, probe
cccaaggctgattgacatgtcggcg

SEQ ID NO: 186503 - DNA, 25 bp, probe
cccaagtgcagagtcaaggcaggga

SEQ ID NO: 186504 - DNA, 25 bp, probe
cccacggccgctggaacgtggacac

SEQ ID NO: 186505 - DNA, 25 bp, probe
cccacggcctcgctatgaggaacat

SEQ ID NO: 186506 - DNA, 25 bp, probe
cccacaggacggtttatgagcacac

SEQ ID NO: 186507 - DNA, 25 bp, probe
cccacaggtctacgtgtttgcaacg

SEQ ID NO: 186508 - DNA, 25 bp, probe
cccacagagggagggctttggagcg

SEQ ID NO: 186509 - DNA, 25 bp, probe
cccagccatgggggtttagggctgg

SEQ ID NO: 186510 - DNA, 25 bp, probe
cccatcgctgggggacggtgaacgg

SEQ ID NO: 186511 - DNA, 25 bp, probe
cccatgcgccctgggacttgagaag

SEQ ID NO: 186512 - DNA, 25 bp, probe
cccaatgccttcccagcttggaagc

SEQ ID NO: 186513 - DNA, 25 bp, probe
cccatggtcttcagccatgtggagg

SEQ ID NO: 186514 - DNA, 25 bp, probe
cccaagtttatggcctggagagcgt

SEQ ID NO: 186515 - DNA, 25 bp, probe
cccagagggcttgcattggtcagga

SEQ ID NO: 186516 - DNA, 25 bp, probe
cccaagaggcttccactggggagaa

SEQ ID NO: 186517 - DNA, 25 bp, probe
cccaagaggcttccactggggagaa

SEQ ID NO: 186518 - DNA, 25 bp, probe
cccaagggctctgaaagggagacaa

SEQ ID NO: 186519 - DNA, 25 bp, probe
cccgtggattctgctaagggaaaat

SEQ ID NO: 186520 - DNA, 25 bp, probe
cccttcagtgttgtacgacgatgta

SEQ ID NO: 186521 - DNA, 25 bp, probe
cccttagtctagaaaatgatctgtt

SEQ ID NO: 186522 - DNA, 25 bp, probe
cccactcatttagtaatgtaccttg

SEQ ID NO: 186523 - DNA, 25 bp, probe
cgccatcttctacttaattacattg

SEQ ID NO: 186524 - DNA, 25 bp, probe
cgccatcttcagggttgcacagaat

SEQ ID NO: 186525 - DNA, 25 bp, probe
cccacttcagggctgctgtgagatg

SEQ ID NO: 186526 - DNA, 25 bp, probe
cccacatcatcgtggtgtccatgat

SEQ ID NO: 186527 - DNA, 25 bp, probe
cccacatcatcgtggtgtccatgat

SEQ ID NO: 186528 - DNA, 25 bp, probe
cccaacatcgtgcgtctcattggtg

SEQ ID NO: 186529 - DNA, 25 bp, probe
cccagtcacaggcagctctttggtg

SEQ ID NO: 186530 - DNA, 25 bp, probe
cccaaacacgtgttctcttttgtca

SEQ ID NO: 186531 - DNA, 25 bp, probe
cccaaaccagctattcttttcatta

SEQ ID NO: 186532 - DNA, 25 bp, probe
cccaagacctctatatttgctcttt

SEQ ID NO: 186533 - DNA, 25 bp, probe
cccaagtccatgcaatcgattcctt

SEQ ID NO: 186534 - DNA, 25 bp, probe
cccagtgtggatgaactactcctac

SEQ ID NO: 186535 - DNA, 25 bp, probe
cctcattggtggcacctacctttta

SEQ ID NO: 186536 - DNA, 25 bp, probe
ccctgggatggagccaacctgggta

SEQ ID NO: 186537 - DNA, 25 bp, probe
cccagggatgagcaaccccgaggtc

SEQ ID NO: 186538 - DNA, 25 bp, probe
cccagggatgtcaaaccctgaagtg

SEQ ID NO: 186539 - DNA, 25 bp, probe
cctaaggggagctccctgcaagtca

SEQ ID NO: 186540 - DNA, 25 bp, probe
cccaagtgaaggttcccgaggacat

SEQ ID NO: 186541 - DNA, 25 bp, probe
cccaaggaggaggaccatcgagcta

SEQ ID NO: 186542 - DNA, 25 bp, probe
cccaatggggggtcgagctggatga

SEQ ID NO: 186543 - DNA, 25 bp, probe
cccacatgggggctctaggaatgcc

SEQ ID NO: 186544 - DNA, 25 bp, probe
cccagagcttggagtctgggcccca

SEQ ID NO: 186545 - DNA, 25 bp, probe
cccaacttgagatgtatgaaggctt

SEQ ID NO: 186546 - DNA, 25 bp, probe
cccagactgctacagtagagtggcc

SEQ ID NO: 186547 - DNA, 25 bp, probe
cccacattcaagcagttggtcgaag

SEQ ID NO: 186548 - DNA, 25 bp, probe
cccaattcagagattctttatgcaa

SEQ ID NO: 186549 - DNA, 25 bp, probe
cccatttgcaggatccgtctgtgca

SEQ ID NO: 186550 - DNA, 25 bp, probe
cgccactttggcatggcgcttggcg

SEQ ID NO: 186551 - DNA, 25 bp, probe
cccacatcttgcctctggtgttggg

SEQ ID NO: 186552 - DNA, 25 bp, probe
ccggctttggttgtgtgtgcgggga

SEQ ID NO: 186553 - DNA, 25 bp, probe
cctggctttatgtttatggggagag

SEQ ID NO: 186554 - DNA, 25 bp, probe
cctgtcgcttacgcgatgcgggtag

SEQ ID NO: 186555 - DNA, 25 bp, probe
cccactgcgtccgcagagtggggct

SEQ ID NO: 186556 - DNA, 25 bp, probe
cccacccaactgaaggcatggcggc

SEQ ID NO: 186557 - DNA, 25 bp, probe
cccacccaactgaaggcatggcggc

SEQ ID NO: 186558 - DNA, 25 bp, probe
cccaaccataatgagccatgggctc

SEQ ID NO: 186559 - DNA, 25 bp, probe
cccaaccataatgagccatgggctc

SEQ ID NO: 186560 - DNA, 25 bp, probe
cccatactccaatatgcttggcact

SEQ ID NO: 186561 - DNA, 25 bp, probe
ccctcagatttccattgtgtggcct

SEQ ID NO: 186562 - DNA, 25 bp, probe
cccatcggtgtgtaaggtggcctat

SEQ ID NO: 186563 - DNA, 25 bp, probe
cccacacttgctgaaggtggcctgt

SEQ ID NO: 186564 - DNA, 25 bp, probe
cccagcactttgggaggccgaggtg

SEQ ID NO: 186565 - DNA, 25 bp, probe
cccagctttgtgtgaccatcgagga

SEQ ID NO: 186566 - DNA, 25 bp, probe
cccagtatatgtctcagcatccagg

SEQ ID NO: 186567 - DNA, 25 bp, probe
cccagaaagttggctgcctcagagc

SEQ ID NO: 186568 - DNA, 25 bp, probe
cccccaagctgtgtcctatgaaggg

SEQ ID NO: 186569 - DNA, 25 bp, probe
ccctcccaggctctcaacaggggag

SEQ ID NO: 186570 - DNA, 25 bp, probe
ccctcccaggctctcaacaggggag

SEQ ID NO: 186571 - DNA, 25 bp, probe
cccactcctggcccaagacaggggc

SEQ ID NO: 186572 - DNA, 25 bp, probe
cccacttcttctcaggaggggagct

SEQ ID NO: 186573 - DNA, 25 bp, probe
cccagcctcttcctgggagatgcgt

SEQ ID NO: 186574 - DNA, 25 bp, probe
cccagcgtcttgacgggagcattgg

SEQ ID NO: 186575 - DNA, 25 bp, probe
ccgcaagccggagaggatttggtcc

SEQ ID NO: 186576 - DNA, 25 bp, probe
cccttgcctgggcagtacgggtgac

SEQ ID NO: 186577 - DNA, 25 bp, probe
cccattcttggagtagttttagtgt

SEQ ID NO: 186578 - DNA, 25 bp, probe
cccagctcacgtgtattctattttg

SEQ ID NO: 186579 - DNA, 25 bp, probe
cccagctagggggcgttatttatgg

SEQ ID NO: 186580 - DNA, 25 bp, probe
cccagggggcaggcacttactggta

SEQ ID NO: 186581 - DNA, 25 bp, probe
cccagaggagatggccacgtacctg

SEQ ID NO: 186582 - DNA, 25 bp, probe
cccagggaacatcccaggacgtcag

SEQ ID NO: 186583 - DNA, 25 bp, probe
cccagtgaggcctgccaggcctccc

SEQ ID NO: 186584 - DNA, 25 bp, probe
cccagtgaggcctgccaggcctccc

SEQ ID NO: 186585 - DNA, 25 bp, probe
cccagatagctggtggtgggcgcta

SEQ ID NO: 186586 - DNA, 25 bp, probe
cgccaagcagaggctgagtgccgcc

SEQ ID NO: 186587 - DNA, 25 bp, probe
cgccaatgcttgttcaggcacgcca

SEQ ID NO: 186588 - DNA, 25 bp, probe
cgccaagcctggacaggatcttcac

SEQ ID NO: 186589 - DNA, 25 bp, probe
ccacgcagcgggagaagcttacctt

SEQ ID NO: 186590 - DNA, 25 bp, probe
ccccgccggtggatcattgatccga

SEQ ID NO: 186591 - DNA, 25 bp, probe
ccccgacgggggcaagatgcccaag

SEQ ID NO: 186592 - DNA, 25 bp, probe
cccaccatagtgcggaaaggcggaa

SEQ ID NO: 186593 - DNA, 25 bp, probe
cccaccatgaggcatggagcagggc

SEQ ID NO: 186594 - DNA, 25 bp, probe
cccactcatccttatgtgctaggga

SEQ ID NO: 186595 - DNA, 25 bp, probe
cccactcatccttatgtgctaggga

SEQ ID NO: 186596 - DNA, 25 bp, probe
cccactcctcagtgtttgtggagtc

SEQ ID NO: 186597 - DNA, 25 bp, probe
cccacgcctcagactgtgttgagga

SEQ ID NO: 186598 - DNA, 25 bp, probe
cccagctgcttatctgtctaacttg

SEQ ID NO: 186599 - DNA, 25 bp, probe
cccatctttatgacatttcaaatgt

SEQ ID NO: 186600 - DNA, 25 bp, probe
cccatctttatgacatttcaaatgt

SEQ ID NO: 186601 - DNA, 25 bp, probe
cccatctgttggaatattctacttt

SEQ ID NO: 186602 - DNA, 25 bp, probe
cccaatgtttcgtatatctgttctc

SEQ ID NO: 186603 - DNA, 25 bp, probe
cccaatgtttcgtatatctgttctc

SEQ ID NO: 186604 - DNA, 25 bp, probe
cccagatgttctttattcatgccct

SEQ ID NO: 186605 - DNA, 25 bp, probe
cccagttggctcttagtcacagccc

SEQ ID NO: 186606 - DNA, 25 bp, probe
cccactgtgaccatcagtacagatg

SEQ ID NO: 186607 - DNA, 25 bp, probe
cccactgtgaccatcagtacagatg

SEQ ID NO: 186608 - DNA, 25 bp, probe
cgccaaggccgcattgctaagatgc

SEQ ID NO: 186609 - DNA, 25 bp, probe
cccaagcagctggacttccagagac

SEQ ID NO: 186610 - DNA, 25 bp, probe
cccacagcatctgagtgcccagaaa

SEQ ID NO: 186611 - DNA, 25 bp, probe
cccacgttgagagcctgcaggagaa

SEQ ID NO: 186612 - DNA, 25 bp, probe
cccactctaggatactgcacagcag

SEQ ID NO: 186613 - DNA, 25 bp, probe
cccactctaggatactgcacagcag

SEQ ID NO: 186614 - DNA, 25 bp, probe
cccatgctcttgggcaactacagca

SEQ ID NO: 186615 - DNA, 25 bp, probe
cccaagctctgcggaaatcaacagc

SEQ ID NO: 186616 - DNA, 25 bp, probe
cccaagctctggagagcaacaatgc

SEQ ID NO: 186617 - DNA, 25 bp, probe
cccagatgtcggcggcaacgaccag

SEQ ID NO: 186618 - DNA, 25 bp, probe
cccagatgtcggcggcaacgaccag

SEQ ID NO: 186619 - DNA, 25 bp, probe
cccagcattcctcgagagatctcgt

SEQ ID NO: 186620 - DNA, 25 bp, probe
cccagagtcctgctggacacggagt

SEQ ID NO: 186621 - DNA, 25 bp, probe
cccaaaccggtggagcagtgatgag

SEQ ID NO: 186622 - DNA, 25 bp, probe
cccacacccgctctacaatatgagc

SEQ ID NO: 186623 - DNA, 25 bp, probe
cccacacctcgtgaactgtaatgag

SEQ ID NO: 186624 - DNA, 25 bp, probe
cccacatggcctccaaggagtaaga

SEQ ID NO: 186625 - DNA, 25 bp, probe
cccacagaggcaactcaggagtaag

SEQ ID NO: 186626 - DNA, 25 bp, probe
cccaagaccatctcagggtggagca

SEQ ID NO: 186627 - DNA, 25 bp, probe
cctaacactgacacggtctggaaga

SEQ ID NO: 186628 - DNA, 25 bp, probe
cccagcaacgacagcggctttggag

SEQ ID NO: 186629 - DNA, 25 bp, probe
cccacaagcgcctgggctgtgtggc

SEQ ID NO: 186630 - DNA, 25 bp, probe
cccagcatagcacgtaggcggtgag

SEQ ID NO: 186631 - DNA, 25 bp, probe
cccagctacatcctgggatggggtt

SEQ ID NO: 186632 - DNA, 25 bp, probe
cccatctagcactttggaaatcagt

SEQ ID NO: 186633 - DNA, 25 bp, probe
cccactatgcctgatgtgacgctac

SEQ ID NO: 186634 - DNA, 25 bp, probe
cccacccctcattgtgacttatgag

SEQ ID NO: 186635 - DNA, 25 bp, probe
cccaccacctgacggtgatcttggg

SEQ ID NO: 186636 - DNA, 25 bp, probe
cccacaccactgccatggaagatct

SEQ ID NO: 186637 - DNA, 25 bp, probe
cccaacctgggatgaaatctcccca

SEQ ID NO: 186638 - DNA, 25 bp, probe
ccttaccttaatgaaaatccactca

SEQ ID NO: 186639 - DNA, 25 bp, probe
ccgtccttttcagaaccaaactcat

SEQ ID NO: 186640 - DNA, 25 bp, probe
cccccttgtacagaatcgaactctg

SEQ ID NO: 186641 - DNA, 25 bp, probe
gaccttctttaggtaaccgagcatt

SEQ ID NO: 186642 - DNA, 25 bp, probe
cccttctttagtggcaacttaactg

SEQ ID NO: 186643 - DNA, 25 bp, probe
cccttgctttactgctagattcgtc

SEQ ID NO: 186644 - DNA, 25 bp, probe
cccttctcactacgggaagacctca

SEQ ID NO: 186645 - DNA, 25 bp, probe
cccttccaatgctgtgggtttccaa

SEQ ID NO: 186646 - DNA, 25 bp, probe
ccctattcacactctgggaagacgc

SEQ ID NO: 186647 - DNA, 25 bp, probe
cccattatcctgccagcatgggacc

SEQ ID NO: 186648 - DNA, 25 bp, probe
cccagagacgctcagcttgtatcca

SEQ ID NO: 186649 - DNA, 25 bp, probe
cccagagacgctcagcttgtatcca

SEQ ID NO: 186650 - DNA, 25 bp, probe
cccagagcggcctatcatttttctg

SEQ ID NO: 186651 - DNA, 25 bp, probe
cccagagggccaggatttgaggctg

SEQ ID NO: 186652 - DNA, 25 bp, probe
cccatactggcccgaggtgggcatg

SEQ ID NO: 186653 - DNA, 25 bp, probe
cccacctgagcccatgcgtgtggga

SEQ ID NO: 186654 - DNA, 25 bp, probe
cccagcctggctatggttcagtgag

SEQ ID NO: 186655 - DNA, 25 bp, probe
cccagcctggctatggttcagtgag

SEQ ID NO: 186656 - DNA, 25 bp, probe
cccagcctggctatggttcagtgag

SEQ ID NO: 186657 - DNA, 25 bp, probe
cccagcctggctatggttcagtgag

SEQ ID NO: 186658 - DNA, 25 bp, probe
cccagcctgactgtggcttcagggc

SEQ ID NO: 186659 - DNA, 25 bp, probe
cccaccagcctgttggcgaagttgc

SEQ ID NO: 186660 - DNA, 25 bp, probe
cccagccgttttggcaaactgctgc

SEQ ID NO: 186661 - DNA, 25 bp, probe
cccagccaggctttcgagtatatcc

SEQ ID NO: 186662 - DNA, 25 bp, probe
cccagcactgtcatctagattttcc

SEQ ID NO: 186663 - DNA, 25 bp, probe
cccaactgctcaataaacctcctgc

SEQ ID NO: 186664 - DNA, 25 bp, probe
cccagcacgacgaggacctggctga

SEQ ID NO: 186665 - DNA, 25 bp, probe
cccagcacctggaatggatcctgga

SEQ ID NO: 186666 - DNA, 25 bp, probe
cccaggccagggtcgaatctggaat

SEQ ID NO: 186667 - DNA, 25 bp, probe
cccggacacggacaggattgacaga

SEQ ID NO: 186668 - DNA, 25 bp, probe
cccggacacggacaggattgacaga

SEQ ID NO: 186669 - DNA, 25 bp, probe
cccaggatccatggcaggacggtgt

SEQ ID NO: 186670 - DNA, 25 bp, probe
cccaggaaaggagccacaatgtgat

SEQ ID NO: 186671 - DNA, 25 bp, probe
cccacgtgacaccaccgaatatatt

SEQ ID NO: 186672 - DNA, 25 bp, probe
cccaagttgcctcatctacaatttg

SEQ ID NO: 186673 - DNA, 25 bp, probe
cccagcgttgccagcactataagtt

SEQ ID NO: 186674 - DNA, 25 bp, probe
cccagttggatcagtttgatagaat

SEQ ID NO: 186675 - DNA, 25 bp, probe
cccacctggatcagttgtctcagct

SEQ ID NO: 186676 - DNA, 25 bp, probe
cccagcctggtatggagtccagtct

SEQ ID NO: 186677 - DNA, 25 bp, probe
cccgtccagctttgacagtcagttt

SEQ ID NO: 186678 - DNA, 25 bp, probe
cccttgtacttgtcaagtcgacatc

SEQ ID NO: 186679 - DNA, 25 bp, probe
cccattaactggacaaactatactt

SEQ ID NO: 186680 - DNA, 25 bp, probe
cccattgaagttaacaacggacttg

SEQ ID NO: 186681 - DNA, 25 bp, probe
cccacccactacaacaatggcaact

SEQ ID NO: 186682 - DNA, 25 bp, probe
cccaagcgcatcacgacaaggatat

SEQ ID NO: 186683 - DNA, 25 bp, probe
cccagagctcaaccagaagggatac

SEQ ID NO: 186684 - DNA, 25 bp, probe
cccacctcaaaccaaggatcaatga

SEQ ID NO: 186685 - DNA, 25 bp, probe
cccacctcaaaccaaggatcaatga

SEQ ID NO: 186686 - DNA, 25 bp, probe
cccatggccaaggccaagcccaagt

SEQ ID NO: 186687 - DNA, 25 bp, probe
cccacggcatcagctatgagaccat

SEQ ID NO: 186688 - DNA, 25 bp, probe
cccacggacaggtaggcacgagacg

SEQ ID NO: 186689 - DNA, 25 bp, probe
cccacgtacgagtatgcgttgagac

SEQ ID NO: 186690 - DNA, 25 bp, probe
cccacgtacgagtatgcgttgagac

SEQ ID NO: 186691 - DNA, 25 bp, probe
cccacctaaaaatgtctgaatgctt

SEQ ID NO: 186692 - DNA, 25 bp, probe
cccgaaaaaggttgtcatggcatct

SEQ ID NO: 186693 - DNA, 25 bp, probe
cccgaaaaaggttgtcatggcatct

SEQ ID NO: 186694 - DNA, 25 bp, probe
ccccaaagaatcacaccaagacttt

SEQ ID NO: 186695 - DNA, 25 bp, probe
cccataaacactgccatcatctaac

SEQ ID NO: 186696 - DNA, 25 bp, probe
cccaaactctcatcaacatctgaca

SEQ ID NO: 186697 - DNA, 25 bp, probe
cccaaccattcatcagactcagtac

SEQ ID NO: 186698 - DNA, 25 bp, probe
cccgaggcattatttgaccggatct

SEQ ID NO: 186699 - DNA, 25 bp, probe
cccactggcctgaatctacactgga

SEQ ID NO: 186700 - DNA, 25 bp, probe
cccactgtgtccatctatggtagca

SEQ ID NO: 186701 - DNA, 25 bp, probe
cccactggctgcatgtcagggtgtc

SEQ ID NO: 186702 - DNA, 25 bp, probe
cccactgcctgtatgagatggtgct

SEQ ID NO: 186703 - DNA, 25 bp, probe
cccacatcctggtcactgatggtct

SEQ ID NO: 186704 - DNA, 25 bp, probe
cccagtactggccatctgatggact

SEQ ID NO: 186705 - DNA, 25 bp, probe
cccagatactatcacatgcaaggat

SEQ ID NO: 186706 - DNA, 25 bp, probe
cccagtacctccaagcaagtagctt

SEQ ID NO: 186707 - DNA, 25 bp, probe
cccaggaacccaacagagctcagga

SEQ ID NO: 186708 - DNA, 25 bp, probe
cccagagaaccctactgtgtcatgt

SEQ ID NO: 186709 - DNA, 25 bp, probe
cccatggccagaatatgaccgtcag

SEQ ID NO: 186710 - DNA, 25 bp, probe
cccagccaatcaactgtcctgatga

SEQ ID NO: 186711 - DNA, 25 bp, probe
cccagaagccacgatgtgctctgta

SEQ ID NO: 186712 - DNA, 25 bp, probe
cccgcaacatccgattcggtaccat

SEQ ID NO: 186713 - DNA, 25 bp, probe
cccacataaagcagtcaggaatcca

SEQ ID NO: 186714 - DNA, 25 bp, probe
cccaccagagacagtacagaatccc

SEQ ID NO: 186715 - DNA, 25 bp, probe
cccacctgcaggacattaaaatctc

SEQ ID NO: 186716 - DNA, 25 bp, probe
cccacctgcaggacattaaaatctc

SEQ ID NO: 186717 - DNA, 25 bp, probe
cccagacgaagcctatacaacatta

SEQ ID NO: 186718 - DNA, 25 bp, probe
cccagccagaatggatgtactacac

SEQ ID NO: 186719 - DNA, 25 bp, probe
cccaccgaagggtactgaagagcct

SEQ ID NO: 186720 - DNA, 25 bp, probe
ccctaagaaagagccgaaagcacca

SEQ ID NO: 186721 - DNA, 25 bp, probe
ccctctaaaaactcttaaccatcag

SEQ ID NO: 186722 - DNA, 25 bp, probe
ccctctaaaaactcttaaccatcag

SEQ ID NO: 186723 - DNA, 25 bp, probe
ccctcagaaaaattgtcttaaagca

SEQ ID NO: 186724 - DNA, 25 bp, probe
ccctaatcactattgcttcctaaag

SEQ ID NO: 186725 - DNA, 25 bp, probe
cccacaaatgcttattagcctaaaa

SEQ ID NO: 186726 - DNA, 25 bp, probe
cccaaaggcatgctccagacataaa

SEQ ID NO: 186727 - DNA, 25 bp, probe
cccagcagggtctctgcagcaaaaa

SEQ ID NO: 186728 - DNA, 25 bp, probe
cccagcagggtctctgcagcaaaaa

SEQ ID NO: 186729 - DNA, 25 bp, probe
cccagctctggatgaaggcaaaaac

SEQ ID NO: 186730 - DNA, 25 bp, probe
cccaccaggagacaccagaacgact

SEQ ID NO: 186731 - DNA, 25 bp, probe
cccagccagaggccaatgctcagag

SEQ ID NO: 186732 - DNA, 25 bp, probe
cccaccaagtcaaatcacagacctt

SEQ ID NO: 186733 - DNA, 25 bp, probe
cccaccacaactaacaatgccttgt

SEQ ID NO: 186734 - DNA, 25 bp, probe
cccacaccacatcaatagatctttt

SEQ ID NO: 186735 - DNA, 25 bp, probe
cccacacgcacacacatgtgcacac

SEQ ID NO: 186736 - DNA, 25 bp, probe
cccacacgtgcacgtcattggagag

SEQ ID NO: 186737 - DNA, 25 bp, probe
cccactgcagggcttgctggagagg

SEQ ID NO: 186738 - DNA, 25 bp, probe
cccaccaactggtgatggaaggtta

SEQ ID NO: 186739 - DNA, 25 bp, probe
cccaccaaccagtgagaatttcttc

SEQ ID NO: 186740 - DNA, 25 bp, probe
cccaccaaccagtgagaatttcttc

SEQ ID NO: 186741 - DNA, 25 bp, probe
cccaccgtcctatgagagtgtcact

SEQ ID NO: 186742 - DNA, 25 bp, probe
cccaccgtcctatgagagtgtcact

SEQ ID NO: 186743 - DNA, 25 bp, probe
ccctttggcattcagtggttcctaa

SEQ ID NO: 186744 - DNA, 25 bp, probe
cccttatgcaaacaggtgtcgacta

SEQ ID NO: 186745 - DNA, 25 bp, probe
ccctcacttaacagtgggcggctcc

SEQ ID NO: 186746 - DNA, 25 bp, probe
cccgcagtcagtgttggggggctcc

SEQ ID NO: 186747 - DNA, 25 bp, probe
cccgcagtcagtgttggggggctcc

SEQ ID NO: 186748 - DNA, 25 bp, probe
cccagttcggctccgaggtggagct

SEQ ID NO: 186749 - DNA, 25 bp, probe
cccatttctggtaagagcctgaagt

SEQ ID NO: 186750 - DNA, 25 bp, probe
cccttgcataaggacgacgtgaatg

SEQ ID NO: 186751 - DNA, 25 bp, probe
ccctacgggaaggccgtagatgtgt

SEQ ID NO: 186752 - DNA, 25 bp, probe
cccttcaggcgagcaactggggttg

SEQ ID NO: 186753 - DNA, 25 bp, probe
cccacccaggagccagcactgggga

SEQ ID NO: 186754 - DNA, 25 bp, probe
cccacccaggagccagcactgggga

SEQ ID NO: 186755 - DNA, 25 bp, probe
cccaccacaccgcagaagcgggacg

SEQ ID NO: 186756 - DNA, 25 bp, probe
cccaccacaccgcagaagcgggacg

SEQ ID NO: 186757 - DNA, 25 bp, probe
cccacacactcccaggagcagggaa

SEQ ID NO: 186758 - DNA, 25 bp, probe
cccacatcctcaggctcagaaggga

SEQ ID NO: 186759 - DNA, 25 bp, probe
cccacatcctcaggctcagaaggga

SEQ ID NO: 186760 - DNA, 25 bp, probe
cccaccctcaagtctgacgatgaca

SEQ ID NO: 186761 - DNA, 25 bp, probe
cccaccagctcaaattccgagtgca

SEQ ID NO: 186762 - DNA, 25 bp, probe
cccaccagctcaaattccgagtgca

SEQ ID NO: 186763 - DNA, 25 bp, probe
cccaccagctcaaattccgagtgca

SEQ ID NO: 186764 - DNA, 25 bp, probe
cccaccagctcaaattccgagtgca

SEQ ID NO: 186765 - DNA, 25 bp, probe
cccaccagctcaaattccgagtgca

SEQ ID NO: 186766 - DNA, 25 bp, probe
cccatctacattgtcaccgagtaca

SEQ ID NO: 186767 - DNA, 25 bp, probe
cccatttacatcgtcacggagtaca

SEQ ID NO: 186768 - DNA, 25 bp, probe
cccatcatctacagctcaaggaata

SEQ ID NO: 186769 - DNA, 25 bp, probe
cccactcttcatctggttgaagatg

SEQ ID NO: 186770 - DNA, 25 bp, probe
cccactttgagtacgtcaagaatga

SEQ ID NO: 186771 - DNA, 25 bp, probe
ccctagataggatggccaagtatga

SEQ ID NO: 186772 - DNA, 25 bp, probe
cccaaatgactgtaagccagacttg

SEQ ID NO: 186773 - DNA, 25 bp, probe
cccagctggccggaaggagactgtg

SEQ ID NO: 186774 - DNA, 25 bp, probe
cccatggtcctgcggtagactggtg

SEQ ID NO: 186775 - DNA, 25 bp, probe
ccctagaactcagcgttgccaggtg

SEQ ID NO: 186776 - DNA, 25 bp, probe
cccagagaagatctgtttccctgtg

SEQ ID NO: 186777 - DNA, 25 bp, probe
cccaggacgtttgcttacactggcc

SEQ ID NO: 186778 - DNA, 25 bp, probe
cccagagcagcactgtctggcttcc

SEQ ID NO: 186779 - DNA, 25 bp, probe
cccagcagcaggtcctggtgctggc

SEQ ID NO: 186780 - DNA, 25 bp, probe
cccagcagcaggtcctggtgctggc

SEQ ID NO: 186781 - DNA, 25 bp, probe
cccacagcatgggcacttatgagga

SEQ ID NO: 186782 - DNA, 25 bp, probe
cccaggcatgcagtcacatttaatc

SEQ ID NO: 186783 - DNA, 25 bp, probe
cccaggacagtgacatcttgttcgg

SEQ ID NO: 186784 - DNA, 25 bp, probe
cccaggacagtgacatcttgttcgg

SEQ ID NO: 186785 - DNA, 25 bp, probe
cccagatgtcttccagatttgctct

SEQ ID NO: 186786 - DNA, 25 bp, probe
cccagcttattgctgcatcactcca

SEQ ID NO: 186787 - DNA, 25 bp, probe
cccagctgtatgaggagagcttcag

SEQ ID NO: 186788 - DNA, 25 bp, probe
cccagctgaagaccaagcacctgag

SEQ ID NO: 186789 - DNA, 25 bp, probe
cccagatggtgaccctgttgctgag

SEQ ID NO: 186790 - DNA, 25 bp, probe
cccatacttctaccctgtggtgaag

SEQ ID NO: 186791 - DNA, 25 bp, probe
cccatttttccggctaattgattgg

SEQ ID NO: 186792 - DNA, 25 bp, probe
ccctttcttcctgcttatatttagg

SEQ ID NO: 186793 - DNA, 25 bp, probe
ccctttttcagtaccatccaatgga

SEQ ID NO: 186794 - DNA, 25 bp, probe
ccctctttcggtcaatgccagtaat

SEQ ID NO: 186795 - DNA, 25 bp, probe
ccctcttcccgggaagcgactgtat

SEQ ID NO: 186796 - DNA, 25 bp, probe
cccagcttccagcaggagggacagt

SEQ ID NO: 186797 - DNA, 25 bp, probe
cccactgtgtggcagggggatggca

SEQ ID NO: 186798 - DNA, 25 bp, probe
gcctccagaagtgttggacgagagc

SEQ ID NO: 186799 - DNA, 25 bp, probe
cccacttcttctaggcagtgtgatg

SEQ ID NO: 186800 - DNA, 25 bp, probe
cccacgcattcttcaggagtgtggc

SEQ ID NO: 186801 - DNA, 25 bp, probe
cccactgactcttcaaggacgtgcc

SEQ ID NO: 186802 - DNA, 25 bp, probe
cccactgactcttcaaggacgtgcc

SEQ ID NO: 186803 - DNA, 25 bp, probe
cccagtgagtctcccagatacgttg

SEQ ID NO: 186804 - DNA, 25 bp, probe
cccagctggtcaccaaaagcttgat

SEQ ID NO: 186805 - DNA, 25 bp, probe
cccagtgttagggtagcatgggatt

SEQ ID NO: 186806 - DNA, 25 bp, probe
cccagtgtcctggctgtttggtgat

SEQ ID NO: 186807 - DNA, 25 bp, probe
cccagattcactccgttgatcagaa

SEQ ID NO: 186808 - DNA, 25 bp, probe
cccattgctactcagatctacagat

SEQ ID NO: 186809 - DNA, 25 bp, probe
ccacaggtatgtaaaagacaatact

SEQ ID NO: 186810 - DNA, 25 bp, probe
cccagacttaatcttgaatgatacg

SEQ ID NO: 186811 - DNA, 25 bp, probe
cccagagcttttccttgcaggagcg

SEQ ID NO: 186812 - DNA, 25 bp, probe
cccagagatgttttgcttataagga

SEQ ID NO: 186813 - DNA, 25 bp, probe
cccagaattcttgttcacaaagtgt

SEQ ID NO: 186814 - DNA, 25 bp, probe
cccaccaccagttcttcattaactg

SEQ ID NO: 186815 - DNA, 25 bp, probe
cccaccacaaggtttcatagccctg

SEQ ID NO: 186816 - DNA, 25 bp, probe
cccaccacaaggtttcatagccctg

SEQ ID NO: 186817 - DNA, 25 bp, probe
cccaccacatagaatcaacatatgg

SEQ ID NO: 186818 - DNA, 25 bp, probe
cccatcccacaaacagatgcatagt

SEQ ID NO: 186819 - DNA, 25 bp, probe
cccattcagccgtgcaaatgcagct

SEQ ID NO: 186820 - DNA, 25 bp, probe
cccattcagccgtgcaaatgcagct

SEQ ID NO: 186821 - DNA, 25 bp, probe
cccatagccctttgccaagcaatta

SEQ ID NO: 186822 - DNA, 25 bp, probe
cccaccgccatggcagccaaaatgt

SEQ ID NO: 186823 - DNA, 25 bp, probe
cccaggctggcaaagcaaaaagtga

SEQ ID NO: 186824 - DNA, 25 bp, probe
cccggctgccgggaaagaagctcag

SEQ ID NO: 186825 - DNA, 25 bp, probe
cccggctgccgggaaagaagctcag

SEQ ID NO: 186826 - DNA, 25 bp, probe
cccaggcaacaagaagagccctcag

SEQ ID NO: 186827 - DNA, 25 bp, probe
cccattgatggcactaagaacttcg

SEQ ID NO: 186828 - DNA, 25 bp, probe
cccatcttggaagtaaaattgacca

SEQ ID NO: 186829 - DNA, 25 bp, probe
cccttgtggacgaagcaattgtaaa

SEQ ID NO: 186830 - DNA, 25 bp, probe
ccctttgatgacaccaatctcaaaa

SEQ ID NO: 186831 - DNA, 25 bp, probe
ccctgttattccacagcctcaaaat

SEQ ID NO: 186832 - DNA, 25 bp, probe
cccagtacttccgtcagggacacaa

SEQ ID NO: 186833 - DNA, 25 bp, probe
cctgagaacccctctgggaaaatct

SEQ ID NO: 186834 - DNA, 25 bp, probe
ccgaatgcatcctctttgggttaat

SEQ ID NO: 186835 - DNA, 25 bp, probe
cctggtcccagtgttagggtagcat

SEQ ID NO: 186836 - DNA, 25 bp, probe
ccagtctaccgtggtccaggttatc

SEQ ID NO: 186837 - DNA, 25 bp, probe
cccgccaccgttatcggtgtcattc

SEQ ID NO: 186838 - DNA, 25 bp, probe
cccagtagggatttttcgtctattg

SEQ ID NO: 186839 - DNA, 25 bp, probe
cccagaagggtggataccccacaag

SEQ ID NO: 186840 - DNA, 25 bp, probe
cccgaaagaagatagccacccagac

SEQ ID NO: 186841 - DNA, 25 bp, probe
cccgaaagaagatagccacccagac

SEQ ID NO: 186842 - DNA, 25 bp, probe
cccaccaagaaacaacagctccatt

SEQ ID NO: 186843 - DNA, 25 bp, probe
cccaccaagaaacaacagctccatt

SEQ ID NO: 186844 - DNA, 25 bp, probe
cccactcctgaacctgaatgagccc

SEQ ID NO: 186845 - DNA, 25 bp, probe
cccactgcctgctagggaataccag

SEQ ID NO: 186846 - DNA, 25 bp, probe
cccactggctctcaacacatagtag

SEQ ID NO: 186847 - DNA, 25 bp, probe
cccagagcctcctaaaattctagcc

SEQ ID NO: 186848 - DNA, 25 bp, probe
tccctagttcctgaaactttcctag

SEQ ID NO: 186849 - DNA, 25 bp, probe
cccttttcttgccaaaatatatctc

SEQ ID NO: 186850 - DNA, 25 bp, probe
cccttctatggagataagatgaatc

SEQ ID NO: 186851 - DNA, 25 bp, probe
cccatttgatgggccaggaaacacg

SEQ ID NO: 186852 - DNA, 25 bp, probe
cccagtcgtcgtaacagcaacagca

SEQ ID NO: 186853 - DNA, 25 bp, probe
cccagttcatcgacgagaacccaga

SEQ ID NO: 186854 - DNA, 25 bp, probe
ccctggtatcctcaaacctgacatt

SEQ ID NO: 186855 - DNA, 25 bp, probe
cccggctactctcgaaattggacag

SEQ ID NO: 186856 - DNA, 25 bp, probe
cccaggatgaccccaaaagagaagg

SEQ ID NO: 186857 - DNA, 25 bp, probe
cccactaccagaacatcaaagagaa

SEQ ID NO: 186858 - DNA, 25 bp, probe
cccactttctaattcacagaagcat

SEQ ID NO: 186859 - DNA, 25 bp, probe
cccagacccttattccagatgctga

SEQ ID NO: 186860 - DNA, 25 bp, probe
cccagacccttattccagatgctga

SEQ ID NO: 186861 - DNA, 25 bp, probe
cccagcctgtctacaggccaaggat

SEQ ID NO: 186862 - DNA, 25 bp, probe
cccagcctgtctacaggccaaggat

SEQ ID NO: 186863 - DNA, 25 bp, probe
cccacctgtttcagctcaagagatg

SEQ ID NO: 186864 - DNA, 25 bp, probe
cccagtttgttcatgtcagtgagag

SEQ ID NO: 186865 - DNA, 25 bp, probe
cccattcttttacttagtgcatttg

SEQ ID NO: 186866 - DNA, 25 bp, probe
cccatatctcttggccttggttttg

SEQ ID NO: 186867 - DNA, 25 bp, probe
cccatattcttttacatggcttctt

SEQ ID NO: 186868 - DNA, 25 bp, probe
cccatattcttttacatggcttctt

SEQ ID NO: 186869 - DNA, 25 bp, probe
cccatacttatatcaaggtcccaaa

SEQ ID NO: 186870 - DNA, 25 bp, probe
cccatgtttagatccaggtctccaa

SEQ ID NO: 186871 - DNA, 25 bp, probe
ccctttgtaacagcgtggcccaaag

SEQ ID NO: 186872 - DNA, 25 bp, probe
ccctttgtaacagcgtggcccaaag

SEQ ID NO: 186873 - DNA, 25 bp, probe
ccctttgtacacagcttgggggaca

SEQ ID NO: 186874 - DNA, 25 bp, probe
ccctttgctcatgactcctgtaggg

SEQ ID NO: 186875 - DNA, 25 bp, probe
cccagattgtcaataccctggacaa

SEQ ID NO: 186876 - DNA, 25 bp, probe
cccagaggctactatcccgagaaat

SEQ ID NO: 186877 - DNA, 25 bp, probe
cccagaaccgctacacagcggaaga

SEQ ID NO: 186878 - DNA, 25 bp, probe
cccatgaactccacaatcaggggag

SEQ ID NO: 186879 - DNA, 25 bp, probe
cccaggcctgccaggatgcaggggt

SEQ ID NO: 186880 - DNA, 25 bp, probe
cccagcagccccagggcaggaggat

SEQ ID NO: 186881 - DNA, 25 bp, probe
cccagccctgcagcaaggaggaaga

SEQ ID NO: 186882 - DNA, 25 bp, probe
cccagccctcattgctgggggccag

SEQ ID NO: 186883 - DNA, 25 bp, probe
cccaccctgcactggggggagggtg

SEQ ID NO: 186884 - DNA, 25 bp, probe
cccactcggtgctgttgggtagggg

SEQ ID NO: 186885 - DNA, 25 bp, probe
cccagctcagagtacctcgggaatg

SEQ ID NO: 186886 - DNA, 25 bp, probe
cccagccgtgtagccaggcaacagt

SEQ ID NO: 186887 - DNA, 25 bp, probe
cccacggatgttgtcaggaatcatg

SEQ ID NO: 186888 - DNA, 25 bp, probe
cccactgtggttttaggcgcacact

SEQ ID NO: 186889 - DNA, 25 bp, probe
cccagtttgtatttagctgccaaat

SEQ ID NO: 186890 - DNA, 25 bp, probe
cccagttgtcaatgatgtgcttcaa

SEQ ID NO: 186891 - DNA, 25 bp, probe
cccatgcatttactagattctagca

SEQ ID NO: 186892 - DNA, 25 bp, probe
cccagatcatgtttgagaccttcaa

SEQ ID NO: 186893 - DNA, 25 bp, probe
cccagtgatgtgtagcacccttgca

SEQ ID NO: 186894 - DNA, 25 bp, probe
cccagtgatgtgtagcacccttgca

SEQ ID NO: 186895 - DNA, 25 bp, probe
cccagtctgtgagctgccatgttga

SEQ ID NO: 186896 - DNA, 25 bp, probe
cccagctcagaggcttggcatttgc

SEQ ID NO: 186897 - DNA, 25 bp, probe
cccagccatgtacgttgctatccag

SEQ ID NO: 186898 - DNA, 25 bp, probe
cccagaatgtaggtgccactgcctc

SEQ ID NO: 186899 - DNA, 25 bp, probe
cccagacctagcagtgacatctcat

SEQ ID NO: 186900 - DNA, 25 bp, probe
cccagacctagcagtgacatctcat

SEQ ID NO: 186901 - DNA, 25 bp, probe
cccagacccagagctgagcagctct

SEQ ID NO: 186902 - DNA, 25 bp, probe
cccagacccagagctgagcagctct

SEQ ID NO: 186903 - DNA, 25 bp, probe
cccagcactgccaaactggactact

SEQ ID NO: 186904 - DNA, 25 bp, probe
cccagatctgcacaattgatgtcta

SEQ ID NO: 186905 - DNA, 25 bp, probe
cccagctctgagttcatggatgtta

SEQ ID NO: 186906 - DNA, 25 bp, probe
cctgcagtcgttccagggtttcttc

SEQ ID NO: 186907 - DNA, 25 bp, probe
cccagggaatgccagggacattttc

SEQ ID NO: 186908 - DNA, 25 bp, probe
cccagaaatggcagggacacttctc

SEQ ID NO: 186909 - DNA, 25 bp, probe
ccctactgaggaggggaccttcgag

SEQ ID NO: 186910 - DNA, 25 bp, probe
ccccacggtactgtgaacgtcgtgt

SEQ ID NO: 186911 - DNA, 25 bp, probe
ccctcttttactctagacgacgaat

SEQ ID NO: 186912 - DNA, 25 bp, probe
ccctcttttactctagacgacgaat

SEQ ID NO: 186913 - DNA, 25 bp, probe
ccctttagctaccttgaacttcagc

SEQ ID NO: 186914 - DNA, 25 bp, probe
ccctttagctaccttgaacttcagc

SEQ ID NO: 186915 - DNA, 25 bp, probe
ccgattcttggtctctgaacttggc

SEQ ID NO: 186916 - DNA, 25 bp, probe
cgggaggcaaggcctcatctacctc

SEQ ID NO: 186917 - DNA, 25 bp, probe
cccagcagacaagttctctgcagag

SEQ ID NO: 186918 - DNA, 25 bp, probe
cccagagctcttctctgtgcagagt

SEQ ID NO: 186919 - DNA, 25 bp, probe
cccagcacttgtcagggctgacatc

SEQ ID NO: 186920 - DNA, 25 bp, probe
cccacctctctgaatagtgtgtatg

SEQ ID NO: 186921 - DNA, 25 bp, probe
cccatcccgatgcaaatgttctggt

SEQ ID NO: 186922 - DNA, 25 bp, probe
cccaccatggagcttgtgttctcag

SEQ ID NO: 186923 - DNA, 25 bp, probe
cccaccatggagcttgtgttctcag

SEQ ID NO: 186924 - DNA, 25 bp, probe
cccaccatgccaggggtggcaatcg

SEQ ID NO: 186925 - DNA, 25 bp, probe
cccaccatgccaggggtggcaatcg

SEQ ID NO: 186926 - DNA, 25 bp, probe
cccaggctgcaaggggtggactgtg

SEQ ID NO: 186927 - DNA, 25 bp, probe
cccatgggcattgcaagtgccaccg

SEQ ID NO: 186928 - DNA, 25 bp, probe
cccagtggttcctaatcctctagga

SEQ ID NO: 186929 - DNA, 25 bp, probe
cccaccagattacaatcctgaaggg

SEQ ID NO: 186930 - DNA, 25 bp, probe
cccatccagcctataatcctaagaa

SEQ ID NO: 186931 - DNA, 25 bp, probe
cccacctggccttaataacaatggt

SEQ ID NO: 186932 - DNA, 25 bp, probe
cccacctggccttaataacaatggt

SEQ ID NO: 186933 - DNA, 25 bp, probe
cccctgccactttcaataaagacct

SEQ ID NO: 186934 - DNA, 25 bp, probe
cccttgccaacttacatcagaaaag

SEQ ID NO: 186935 - DNA, 25 bp, probe
cccagttcaacgcagccaatgacat

SEQ ID NO: 186936 - DNA, 25 bp, probe
cccagttcaacgcagccaatgacat

SEQ ID NO: 186937 - DNA, 25 bp, probe
cccagcatgtacggaggcaccaatc

SEQ ID NO: 186938 - DNA, 25 bp, probe
cccaggtagctggagctgatcataa

SEQ ID NO: 186939 - DNA, 25 bp, probe
cccatgaggcctggcactttgcaag

SEQ ID NO: 186940 - DNA, 25 bp, probe
cccatgaggcctggcactttgcaag

SEQ ID NO: 186941 - DNA, 25 bp, probe
ccctaagcccctcttgaaggtgtgt

SEQ ID NO: 186942 - DNA, 25 bp, probe
cccataaggatcatctctctgaagg

SEQ ID NO: 186943 - DNA, 25 bp, probe
cccatcgaggtgctctgcgagaact

SEQ ID NO: 186944 - DNA, 25 bp, probe
cccaccatactgctcataataacat

SEQ ID NO: 186945 - DNA, 25 bp, probe
cccatcctttgccttatctaacaaa

SEQ ID NO: 186946 - DNA, 25 bp, probe
cccagtcctgtactttctttcaagg

SEQ ID NO: 186947 - DNA, 25 bp, probe
cccagtcctgtactttctttcaagg

SEQ ID NO: 186948 - DNA, 25 bp, probe
cccattttcgaggctccttataagg

SEQ ID NO: 186949 - DNA, 25 bp, probe
cccaggcttaattgccctacaaagg

SEQ ID NO: 186950 - DNA, 25 bp, probe
cccaggcaatacacctctgaacatg

SEQ ID NO: 186951 - DNA, 25 bp, probe
cccaggcaatacacctctgaacatg

SEQ ID NO: 186952 - DNA, 25 bp, probe
cccatggaacatagccacatctaga

SEQ ID NO: 186953 - DNA, 25 bp, probe
cccaggaccctgcagatgctgcaga

SEQ ID NO: 186954 - DNA, 25 bp, probe
cccaggagtcttcagtgtgtgagcc

SEQ ID NO: 186955 - DNA, 25 bp, probe
cccagtggatgcgccagattgtgtc

SEQ ID NO: 186956 - DNA, 25 bp, probe
cccagtggagcaggctcagtcactc

SEQ ID NO: 186957 - DNA, 25 bp, probe
cccagctggtgacccagctgacccg

SEQ ID NO: 186958 - DNA, 25 bp, probe
cccagctggtgacccagctgacccg

SEQ ID NO: 186959 - DNA, 25 bp, probe
cccagaggtgacccaatgctcctgg

SEQ ID NO: 186960 - DNA, 25 bp, probe
cccagggaactgaactcttgtggac

SEQ ID NO: 186961 - DNA, 25 bp, probe
cccagggaagtgagccctctggagg

SEQ ID NO: 186962 - DNA, 25 bp, probe
cccagaggcaaggggacctgctgtg

SEQ ID NO: 186963 - DNA, 25 bp, probe
cccaggccgatgagttgcctgcctg

SEQ ID NO: 186964 - DNA, 25 bp, probe
cccagtccaaattgtctgtctgctc

SEQ ID NO: 186965 - DNA, 25 bp, probe
cccatgaacaaattcctgcttgtcc

SEQ ID NO: 186966 - DNA, 25 bp, probe
ccttccaaaatatctctttcctgag

SEQ ID NO: 186967 - DNA, 25 bp, probe
cccaccaaatattcacttttctgga

SEQ ID NO: 186968 - DNA, 25 bp, probe
cccaccaaatattcacttttctgga

SEQ ID NO: 186969 - DNA, 25 bp, probe
cccatcacaattcaactttgtccca

SEQ ID NO: 186970 - DNA, 25 bp, probe
cccatcacaattcaactttgtccca

SEQ ID NO: 186971 - DNA, 25 bp, probe
cccacctatgtgccaactgttgtaa

SEQ ID NO: 186972 - DNA, 25 bp, probe
cccatccacaatactactgatttta

SEQ ID NO: 186973 - DNA, 25 bp, probe
cccatccagacacgctggctggttt

SEQ ID NO: 186974 - DNA, 25 bp, probe
ccgactaacaccactggaagcttgt

SEQ ID NO: 186975 - DNA, 25 bp, probe
cccttcaaccacacaacaacagtta

SEQ ID NO: 186976 - DNA, 25 bp, probe
cccttcgactgctccaagaatcaga

SEQ ID NO: 186977 - DNA, 25 bp, probe
cctttcaaccagtcctagagcctgt

SEQ ID NO: 186978 - DNA, 25 bp, probe
ccctaccacctggtgaagacgctgt

SEQ ID NO: 186979 - DNA, 25 bp, probe
ccgtactccctctgaacaacaaagg

SEQ ID NO: 186980 - DNA, 25 bp, probe
ccgtactccctctgaacaacaaagg

SEQ ID NO: 186981 - DNA, 25 bp, probe
ccctacccctcatggaaagacagct

SEQ ID NO: 186982 - DNA, 25 bp, probe
ccctcaaacttctgtgcacaaagtg

SEQ ID NO: 186983 - DNA, 25 bp, probe
ccctaaataatgtgctctccggctt

SEQ ID NO: 186984 - DNA, 25 bp, probe
ccctcaccaaacttgagctccaggc

SEQ ID NO: 186985 - DNA, 25 bp, probe
ccctcaccaaacttgagctccaggc

SEQ ID NO: 186986 - DNA, 25 bp, probe
ccctacctcaactggaacaccaagt

SEQ ID NO: 186987 - DNA, 25 bp, probe
ccctatgattcatggggaactccat

SEQ ID NO: 186988 - DNA, 25 bp, probe
ccctatgattcatggggaactccat

SEQ ID NO: 186989 - DNA, 25 bp, probe
cccgattctataaggccaactgcac

SEQ ID NO: 186990 - DNA, 25 bp, probe
cccaggatttagggtcacatgctgc

SEQ ID NO: 186991 - DNA, 25 bp, probe
cccaggtaactgggccagcagcctt

SEQ ID NO: 186992 - DNA, 25 bp, probe
cccaggtagctgagggcatggccta

SEQ ID NO: 186993 - DNA, 25 bp, probe
cccatcgtttaaggccatgtcacta

SEQ ID NO: 186994 - DNA, 25 bp, probe
cccattcttcatttcctcagaacta

SEQ ID NO: 186995 - DNA, 25 bp, probe
cccattgctttaggcctggagactt

SEQ ID NO: 186996 - DNA, 25 bp, probe
cccttttgtcgtgggtgcgactgct

SEQ ID NO: 186997 - DNA, 25 bp, probe
cccttagatgtccggggctgcacgc

SEQ ID NO: 186998 - DNA, 25 bp, probe
ccctggaagtacaaggactcatctg

SEQ ID NO: 186999 - DNA, 25 bp, probe
cccaggactgtactacgactcttaa

SEQ ID NO: 187000 - DNA, 25 bp, probe
cccaggactgtactacgactcttaa

SEQ ID NO: 187001 - DNA, 25 bp, probe
cccaggacgtcagttctgtccatgt

SEQ ID NO: 187002 - DNA, 25 bp, probe
cccagacacttcttttggtgtgatc

SEQ ID NO: 187003 - DNA, 25 bp, probe
cccagaccagtcaggtcttgatatc

SEQ ID NO: 187004 - DNA, 25 bp, probe
cccagccaagtgcagagaatgtgaa

SEQ ID NO: 187005 - DNA, 25 bp, probe
cccagccaagagtatgagaacatcc

SEQ ID NO: 187006 - DNA, 25 bp, probe
cccatccaaggaatggccactgctc

SEQ ID NO: 187007 - DNA, 25 bp, probe
ccctccaagaagagctacgtagttc

SEQ ID NO: 187008 - DNA, 25 bp, probe
ccctctcaggaaccgggggagtgct

SEQ ID NO: 187009 - DNA, 25 bp, probe
cccttgaggtggggctggtgggtct

SEQ ID NO: 187010 - DNA, 25 bp, probe
cccttcccaggaattgagtgggcct

SEQ ID NO: 187011 - DNA, 25 bp, probe
ccctattctcttaagcggtggcgcc

SEQ ID NO: 187012 - DNA, 25 bp, probe
ccctatgacttgtatgacaactccc

SEQ ID NO: 187013 - DNA, 25 bp, probe
ccctagagtggtttccatctcacag

SEQ ID NO: 187014 - DNA, 25 bp, probe
cccatagcttggtgtcattaacata

SEQ ID NO: 187015 - DNA, 25 bp, probe
ccacttggtggggtcaccaactact

SEQ ID NO: 187016 - DNA, 25 bp, probe
ccctatcctggggtccagaaccatg

SEQ ID NO: 187017 - DNA, 25 bp, probe
cccttctgtgggccccatgaaatca

SEQ ID NO: 187018 - DNA, 25 bp, probe
cccagattgtgtctgccgtgaagca

SEQ ID NO: 187019 - DNA, 25 bp, probe
cccagcagcggtgacgtggtcagca

SEQ ID NO: 187020 - DNA, 25 bp, probe
cccagcagcggtgacgtggtcagca

SEQ ID NO: 187021 - DNA, 25 bp, probe
cccagcagaaggcacggagtcagag

SEQ ID NO: 187022 - DNA, 25 bp, probe
cccaggaggcggaggttgcagtgag

SEQ ID NO: 187023 - DNA, 25 bp, probe
cccagagacccggggatggattggc

SEQ ID NO: 187024 - DNA, 25 bp, probe
cccagagtcaccgggaggagagccg

SEQ ID NO: 187025 - DNA, 25 bp, probe
cccagaggccttgccaggaggcctg

SEQ ID NO: 187026 - DNA, 25 bp, probe
cccaggggttccaagcaggaggtgg

SEQ ID NO: 187027 - DNA, 25 bp, probe
cccagcgagtcttccagaaggggtg

SEQ ID NO: 187028 - DNA, 25 bp, probe
cccagaagtggtccgcaagatggga

SEQ ID NO: 187029 - DNA, 25 bp, probe
cccagcacggggccagaggaggaac

SEQ ID NO: 187030 - DNA, 25 bp, probe
cccagaagagccgcaaggaccagat

SEQ ID NO: 187031 - DNA, 25 bp, probe
cccagcaagagcacaagaggaagag

SEQ ID NO: 187032 - DNA, 25 bp, probe
cccagcatccataccagaaaaagag

SEQ ID NO: 187033 - DNA, 25 bp, probe
cccagcatcagccttagaacaagaa

SEQ ID NO: 187034 - DNA, 25 bp, probe
cccagcgcagcgcttgcaaagagca

SEQ ID NO: 187035 - DNA, 25 bp, probe
cccagctgtcggttgagcacagctc

SEQ ID NO: 187036 - DNA, 25 bp, probe
ccctcgacaggtggaacatgttacc

SEQ ID NO: 187037 - DNA, 25 bp, probe
cccttacatcgttcagtgctttggc

SEQ ID NO: 187038 - DNA, 25 bp, probe
ccctcttcaagggcttctttgagct

SEQ ID NO: 187039 - DNA, 25 bp, probe
ccctcttcaagggcttctttgagct

SEQ ID NO: 187040 - DNA, 25 bp, probe
cccatgcatgtgcgaacgtccgggc

SEQ ID NO: 187041 - DNA, 25 bp, probe
cccagctgtgactgagggcctggtc

SEQ ID NO: 187042 - DNA, 25 bp, probe
cccatcattgtggcctgggccattg

SEQ ID NO: 187043 - DNA, 25 bp, probe
cccttgtgcacggcagctggccgtg

SEQ ID NO: 187044 - DNA, 25 bp, probe
cccattggctggcagcccaaggagc

SEQ ID NO: 187045 - DNA, 25 bp, probe
cccagatgtgggccagccttatgga

SEQ ID NO: 187046 - DNA, 25 bp, probe
cccagtgtgaggccatcaccatgtg

SEQ ID NO: 187047 - DNA, 25 bp, probe
cccatgagcagtgccatgatccagc

SEQ ID NO: 187048 - DNA, 25 bp, probe
cccatgagcagtgccatgatccagc

SEQ ID NO: 187049 - DNA, 25 bp, probe
ccgacatgctgttctctgtcactgt

SEQ ID NO: 187050 - DNA, 25 bp, probe
cccagcagctgaaactgtcccatga

SEQ ID NO: 187051 - DNA, 25 bp, probe
cccagctgctcagaagacactatga

SEQ ID NO: 187052 - DNA, 25 bp, probe
cccagtgccagtgagcacacgcact

SEQ ID NO: 187053 - DNA, 25 bp, probe
cccagtgccagtgagcacacgcact

SEQ ID NO: 187054 - DNA, 25 bp, probe
cccagctgtcactcatgcaacagca

SEQ ID NO: 187055 - DNA, 25 bp, probe
cccagctgtcactcatgcaacagca

SEQ ID NO: 187056 - DNA, 25 bp, probe
cccagcgtcacttctgctaaggagg

SEQ ID NO: 187057 - DNA, 25 bp, probe
cccagcggctcctagaaatggcatg

SEQ ID NO: 187058 - DNA, 25 bp, probe
cccaggagcacctcaactatgtgac

SEQ ID NO: 187059 - DNA, 25 bp, probe
cccaggagcacctcaactatgtgac

SEQ ID NO: 187060 - DNA, 25 bp, probe
cccagaggacgccaagagcactggc

SEQ ID NO: 187061 - DNA, 25 bp, probe
cccagagctcatggcgaagagactt

SEQ ID NO: 187062 - DNA, 25 bp, probe
cccatggctcagcgagcactgagct

SEQ ID NO: 187063 - DNA, 25 bp, probe
cccatgaccagctgaggctacgcat

SEQ ID NO: 187064 - DNA, 25 bp, probe
cccagctactcaggaggctgacgca

SEQ ID NO: 187065 - DNA, 25 bp, probe
cccagctactcaggaggctgagaca

SEQ ID NO: 187066 - DNA, 25 bp, probe
cccagctactcgggaggctgaggca

SEQ ID NO: 187067 - DNA, 25 bp, probe
cccagctactccagaggctgagatg

SEQ ID NO: 187068 - DNA, 25 bp, probe
cccagcaagctccaacggctgatga

SEQ ID NO: 187069 - DNA, 25 bp, probe
cccagatcagccgcatcgagtatat

SEQ ID NO: 187070 - DNA, 25 bp, probe
cccttgggcctcggagatgatcaga

SEQ ID NO: 187071 - DNA, 25 bp, probe
cccttgggcctcggagatgatcaga

SEQ ID NO: 187072 - DNA, 25 bp, probe
ccctctgaaagaatctacattcaac

SEQ ID NO: 187073 - DNA, 25 bp, probe
ccccatgacagattcatcgaactta

SEQ ID NO: 187074 - DNA, 25 bp, probe
cccagtgtcagaattcaaacttcat

SEQ ID NO: 187075 - DNA, 25 bp, probe
cccagaatagttaaactctatgatt

SEQ ID NO: 187076 - DNA, 25 bp, probe
cccatgttggtagccactgctagat

SEQ ID NO: 187077 - DNA, 25 bp, probe
ccctctttgtacaaccagtatgatc

SEQ ID NO: 187078 - DNA, 25 bp, probe
ccctgcttaaactatcctgcactga

SEQ ID NO: 187079 - DNA, 25 bp, probe
ccctcttacaactatcttgttcaga

SEQ ID NO: 187080 - DNA, 25 bp, probe
cccatcaaaccagtgaatttctcaa

SEQ ID NO: 187081 - DNA, 25 bp, probe
cccatcgagactgtggtgtgcctgc

SEQ ID NO: 187082 - DNA, 25 bp, probe
cccatagggctgcctggttgactct

SEQ ID NO: 187083 - DNA, 25 bp, probe
cccaggtctgctcattttcaattcc

SEQ ID NO: 187084 - DNA, 25 bp, probe
cccaggctcagtcctagttcaggat

SEQ ID NO: 187085 - DNA, 25 bp, probe
cccagcagctatctaagtcacaggt

SEQ ID NO: 187086 - DNA, 25 bp, probe
cccagagatcatcctgaacaaaggc

SEQ ID NO: 187087 - DNA, 25 bp, probe
cccaggtgctaccagtgcaaagctg

SEQ ID NO: 187088 - DNA, 25 bp, probe
cccaggtgctaccagtgcaaagctg

SEQ ID NO: 187089 - DNA, 25 bp, probe
cccagggtagtgcctgcagggatgc

SEQ ID NO: 187090 - DNA, 25 bp, probe
cccatgttgacaggatgcccaggtc

SEQ ID NO: 187091 - DNA, 25 bp, probe
ccctttgccaggagcacagcagcag

SEQ ID NO: 187092 - DNA, 25 bp, probe
cccatctggccgccattgaaagatg

SEQ ID NO: 187093 - DNA, 25 bp, probe
cccatgtggtcgttagagacagagc

SEQ ID NO: 187094 - DNA, 25 bp, probe
cccatgacgccctacatggacactg

SEQ ID NO: 187095 - DNA, 25 bp, probe
cccagaggccactaagagacacagg

SEQ ID NO: 187096 - DNA, 25 bp, probe
cccagaggcgcagcaagagaccgat

SEQ ID NO: 187097 - DNA, 25 bp, probe
cccaggagccaatcagaggcccatg

SEQ ID NO: 187098 - DNA, 25 bp, probe
cccaggcacctatcatcgtgggcga

SEQ ID NO: 187099 - DNA, 25 bp, probe
cccagcagccatcgaccatggatgg

SEQ ID NO: 187100 - DNA, 25 bp, probe
cccagcagccatcgaccatggatgg

SEQ ID NO: 187101 - DNA, 25 bp, probe
cccagacaagcgccgctgtgaggct

SEQ ID NO: 187102 - DNA, 25 bp, probe
cccagacaagcgccgctgtgaggct

SEQ ID NO: 187103 - DNA, 25 bp, probe
cccaggcaagaacgtgtagcaataa

SEQ ID NO: 187104 - DNA, 25 bp, probe
cccatgtcgtgttggttactataac

SEQ ID NO: 187105 - DNA, 25 bp, probe
ccctgatgggttggggcagttacct

SEQ ID NO: 187106 - DNA, 25 bp, probe
cccagagggtgggtgccaattccac

SEQ ID NO: 187107 - DNA, 25 bp, probe
cccagagacgggcgagcagattcag

SEQ ID NO: 187108 - DNA, 25 bp, probe
cccagtgacggaaagggcatgatca

SEQ ID NO: 187109 - DNA, 25 bp, probe
cccatctacggaggaggtcttcaca

SEQ ID NO: 187110 - DNA, 25 bp, probe
ccctctatggggatggctattttat

SEQ ID NO: 187111 - DNA, 25 bp, probe
ccctcaaactgggtgggttctgtgt

SEQ ID NO: 187112 - DNA, 25 bp, probe
ccctcaaactgggtgggttctgtgt

SEQ ID NO: 187113 - DNA, 25 bp, probe
ccccaaccaggagttcggcttgagt

SEQ ID NO: 187114 - DNA, 25 bp, probe
ccctcaactactattccagctgtag

SEQ ID NO: 187115 - DNA, 25 bp, probe
ccctcaactactattccagctgtag

SEQ ID NO: 187116 - DNA, 25 bp, probe
ccctcaacacaggtttcctgctgca

SEQ ID NO: 187117 - DNA, 25 bp, probe
ccctcaacaaggtatacctcagttc

SEQ ID NO: 187118 - DNA, 25 bp, probe
cccatcaactctggggacctctttg

SEQ ID NO: 187119 - DNA, 25 bp, probe
tcctctaagtgggaggtccctttcg

SEQ ID NO: 187120 - DNA, 25 bp, probe
cccgaagtggggagcacctgtttgg

SEQ ID NO: 187121 - DNA, 25 bp, probe
ccctgagggaggcattcacctttat

SEQ ID NO: 187122 - DNA, 25 bp, probe
ccctggccttgtctatggcctttat

SEQ ID NO: 187123 - DNA, 25 bp, probe
ccctggccttgtctatggcctttat

SEQ ID NO: 187124 - DNA, 25 bp, probe
ccctggccttgggtgggattgagtt

SEQ ID NO: 187125 - DNA, 25 bp, probe
cccaggccttgcctgaggggtcagg

SEQ ID NO: 187126 - DNA, 25 bp, probe
cccaggcaggatgagctggggttgg

SEQ ID NO: 187127 - DNA, 25 bp, probe
cccaggcagatgggagggttgtgct

SEQ ID NO: 187128 - DNA, 25 bp, probe
cccagggatcaaggcgctgctgggc

SEQ ID NO: 187129 - DNA, 25 bp, probe
cccaggcgcatcctggcctgggtgg

SEQ ID NO: 187130 - DNA, 25 bp, probe
ccctaaatcttggccatcgtgtggc

SEQ ID NO: 187131 - DNA, 25 bp, probe
ccctatcaactttcgatggtagtcg

SEQ ID NO: 187132 - DNA, 25 bp, probe
cccagtctcctttaggcgaactgcg

SEQ ID NO: 187133 - DNA, 25 bp, probe
cccagacttgctgaatcggaatctc

SEQ ID NO: 187134 - DNA, 25 bp, probe
cccagacttgctgaatcggaatctc

SEQ ID NO: 187135 - DNA, 25 bp, probe
ccctgacattcttgaaggggttctg

SEQ ID NO: 187136 - DNA, 25 bp, probe
ccctgtgcatgtgcgaaggaaaatc

SEQ ID NO: 187137 - DNA, 25 bp, probe
cccatgtcaatgtctccatggatac

SEQ ID NO: 187138 - DNA, 25 bp, probe
cccatggcaaattccatggcaccgt

SEQ ID NO: 187139 - DNA, 25 bp, probe
cccttgtcagtgtctattgcaccag

SEQ ID NO: 187140 - DNA, 25 bp, probe
cccattgatctgaaaatgtcagccg

SEQ ID NO: 187141 - DNA, 25 bp, probe
cccattgatctgaaaatgtcagccg

SEQ ID NO: 187142 - DNA, 25 bp, probe
cccatcatgtgcccacagtgatcac

SEQ ID NO: 187143 - DNA, 25 bp, probe
cccatcatgtgcccacagtgatcac

SEQ ID NO: 187144 - DNA, 25 bp, probe
cccatcagatccagatgttacaacg

SEQ ID NO: 187145 - DNA, 25 bp, probe
cccatggagcgcgtgtttgactaca

SEQ ID NO: 187146 - DNA, 25 bp, probe
cccagatgagcctctattttcatca

SEQ ID NO: 187147 - DNA, 25 bp, probe
cccagatgatggattgattgtacag

SEQ ID NO: 187148 - DNA, 25 bp, probe
cccattgaggtctcatctgtctcag

SEQ ID NO: 187149 - DNA, 25 bp, probe
cccattgaagtctccttgggccacc

SEQ ID NO: 187150 - DNA, 25 bp, probe
cccattgaagtctccttgggccacc

SEQ ID NO: 187151 - DNA, 25 bp, probe
ccgcattgaaattcctccgcgagga

SEQ ID NO: 187152 - DNA, 25 bp, probe
cccaggtagatatctccgaaggacc

SEQ ID NO: 187153 - DNA, 25 bp, probe
cccatttcttattctcctaatggcc

SEQ ID NO: 187154 - DNA, 25 bp, probe
ccgacgtcttcaaatccttaggttg

SEQ ID NO: 187155 - DNA, 25 bp, probe
cccaggacattaaactctgatagga

SEQ ID NO: 187156 - DNA, 25 bp, probe
cccaggacagtgaaacatagtaata

SEQ ID NO: 187157 - DNA, 25 bp, probe
cccgtaaattacatgagctattcaa

SEQ ID NO: 187158 - DNA, 25 bp, probe
ccctgtaattttgatctctttaaca

SEQ ID NO: 187159 - DNA, 25 bp, probe
cccttaggccttgttatttatcctg

SEQ ID NO: 187160 - DNA, 25 bp, probe
ccctatctggattctacttatttat

SEQ ID NO: 187161 - DNA, 25 bp, probe
ccctatataatttactttcttctag

SEQ ID NO: 187162 - DNA, 25 bp, probe
cccttaaatatcttgtctacattct

SEQ ID NO: 187163 - DNA, 25 bp, probe
ccctctaactaatggtatctacata

SEQ ID NO: 187164 - DNA, 25 bp, probe
cccttacctaagtatgtgattgaca

SEQ ID NO: 187165 - DNA, 25 bp, probe
ccgattaccaaggctatggatgtgt

SEQ ID NO: 187166 - DNA, 25 bp, probe
cccatatccgaagctgtggaggtga

SEQ ID NO: 187167 - DNA, 25 bp, probe
cccatatccgaagctgtggaggtga

SEQ ID NO: 187168 - DNA, 25 bp, probe
ccctatgggaagtctgtcgattggt

SEQ ID NO: 187169 - DNA, 25 bp, probe
cccttggagaccttatctatgtggt

SEQ ID NO: 187170 - DNA, 25 bp, probe
cccttataacctggacgtgagctgt

SEQ ID NO: 187171 - DNA, 25 bp, probe
ccctattcatacctctgagttcctg

SEQ ID NO: 187172 - DNA, 25 bp, probe
cccgtcactattttagattcctggc

SEQ ID NO: 187173 - DNA, 25 bp, probe
cccaggacttggtgcagttctcatg

SEQ ID NO: 187174 - DNA, 25 bp, probe
cccaggggtgagtgtttctcaggat

SEQ ID NO: 187175 - DNA, 25 bp, probe
cccatgtgggtgtggcagttacagg

SEQ ID NO: 187176 - DNA, 25 bp, probe
cccaggtggtgagcggtttgcagtg

SEQ ID NO: 187177 - DNA, 25 bp, probe
ccccgggagaggggcctacaggctg

SEQ ID NO: 187178 - DNA, 25 bp, probe
cccgggaagatcgcgtgctagggct

SEQ ID NO: 187179 - DNA, 25 bp, probe
cccatggtggggctaggctggggct

SEQ ID NO: 187180 - DNA, 25 bp, probe
cccaggacgggcccagaggctgggg

SEQ ID NO: 187181 - DNA, 25 bp, probe
cccagaggcgagggaccagtggagg

SEQ ID NO: 187182 - DNA, 25 bp, probe
cccagatctcggtgaacgtggagga

SEQ ID NO: 187183 - DNA, 25 bp, probe
cccagatctcggtgaacgtggagga

SEQ ID NO: 187184 - DNA, 25 bp, probe
cccagattgcggtgtgagatggtgc

SEQ ID NO: 187185 - DNA, 25 bp, probe
cccagagtgtgggagctaatgggaa

SEQ ID NO: 187186 - DNA, 25 bp, probe
cccaggtgtgtcgacatcagttgtg

SEQ ID NO: 187187 - DNA, 25 bp, probe
acctagcttggcctagagtggcaaa

SEQ ID NO: 187188 - DNA, 25 bp, probe
cccattgtgattctgaattcttgga

SEQ ID NO: 187189 - DNA, 25 bp, probe
cccattgtgtctctggatttctagc

SEQ ID NO: 187190 - DNA, 25 bp, probe
cccttggtcgcctagactggatagt

SEQ ID NO: 187191 - DNA, 25 bp, probe
ccttctactacctgttggctaattt

SEQ ID NO: 187192 - DNA, 25 bp, probe
ccctccctacctcatggggaatgtc

SEQ ID NO: 187193 - DNA, 25 bp, probe
ccacccttcccacagggaacaggct

SEQ ID NO: 187194 - DNA, 25 bp, probe
ccacccttcccacagggaacaggct

SEQ ID NO: 187195 - DNA, 25 bp, probe
ccgtcactgttgccaaatgggaaag

SEQ ID NO: 187196 - DNA, 25 bp, probe
ccctaccatgtgccaaacgggaggc

SEQ ID NO: 187197 - DNA, 25 bp, probe
ccctacaaggccaagcgccagtgag

SEQ ID NO: 187198 - DNA, 25 bp, probe
cccatacatggaccaagtcgcgccg

SEQ ID NO: 187199 - DNA, 25 bp, probe
cccatacatggaccaagtcgcgccg

SEQ ID NO: 187200 - DNA, 25 bp, probe
cccatcactgtacaggtctggaacc

SEQ ID NO: 187201 - DNA, 25 bp, probe
cccatcactgtacaggtctggaacc

SEQ ID NO: 187202 - DNA, 25 bp, probe
cccatcactgtagggggcaagattg

SEQ ID NO: 187203 - DNA, 25 bp, probe
cccatccagctagagtcagccgtgg

SEQ ID NO: 187204 - DNA, 25 bp, probe
cccatggatggatgacatcccaggg

SEQ ID NO: 187205 - DNA, 25 bp, probe
cccaggagatgtggaactcgggctg

SEQ ID NO: 187206 - DNA, 25 bp, probe
cccaggcagagtgggtctcgggcag

SEQ ID NO: 187207 - DNA, 25 bp, probe
cccgaggacatgagtctgtaggagc

SEQ ID NO: 187208 - DNA, 25 bp, probe
cccaggccacagtggtgtcaggggg

SEQ ID NO: 187209 - DNA, 25 bp, probe
ccctatccacacagggcctggtgtt

SEQ ID NO: 187210 - DNA, 25 bp, probe
cccatttcttctggggtctgtggtc

SEQ ID NO: 187211 - DNA, 25 bp, probe
cccatcttccctggggacagtgggg

SEQ ID NO: 187212 - DNA, 25 bp, probe
cccatgtctccctgggaaatggtac

SEQ ID NO: 187213 - DNA, 25 bp, probe
ccctggcccaacaggactgtggtac

SEQ ID NO: 187214 - DNA, 25 bp, probe
ccctgtcctgagaaaggacctggtt

SEQ ID NO: 187215 - DNA, 25 bp, probe
ccctgtcctgagaaaggacctggtt

SEQ ID NO: 187216 - DNA, 25 bp, probe
cccttcaatacccagggcctggtgg

SEQ ID NO: 187217 - DNA, 25 bp, probe
ccgcctcgatacacgggacgttgag

SEQ ID NO: 187218 - DNA, 25 bp, probe
ccgcctcgatacacgggacgttgag

SEQ ID NO: 187219 - DNA, 25 bp, probe
cccgactaacaccactggaagcttg

SEQ ID NO: 187220 - DNA, 25 bp, probe
cccgactaacaccactggaagcttg

SEQ ID NO: 187221 - DNA, 25 bp, probe
cccgactaacaccactggaagcttg

SEQ ID NO: 187222 - DNA, 25 bp, probe
cccagggacacccaaggatatgtct

SEQ ID NO: 187223 - DNA, 25 bp, probe
cccaggttcactgtggggagatctc

SEQ ID NO: 187224 - DNA, 25 bp, probe
cccagggtcccaggtagggatgtcg

SEQ ID NO: 187225 - DNA, 25 bp, probe
cccaggggctccagctggagctagg

SEQ ID NO: 187226 - DNA, 25 bp, probe
cccaggggttgcactgagtctgcag

SEQ ID NO: 187227 - DNA, 25 bp, probe
cccaggaggggaactgagtcacgct

SEQ ID NO: 187228 - DNA, 25 bp, probe
cccagggtgggtgtctggcacccag

SEQ ID NO: 187229 - DNA, 25 bp, probe
cccagggtgaggtggcatggtccat

SEQ ID NO: 187230 - DNA, 25 bp, probe
cccaggcctgggaagagctcggccc

SEQ ID NO: 187231 - DNA, 25 bp, probe
cccagtggctgagaggagccggctg

SEQ ID NO: 187232 - DNA, 25 bp, probe
cccagtgacgcatctgtgcagcagg

SEQ ID NO: 187233 - DNA, 25 bp, probe
cccagtgacgcatctgtgcagcagg

SEQ ID NO: 187234 - DNA, 25 bp, probe
cccaggtcatgctgctgttgctgga

SEQ ID NO: 187235 - DNA, 25 bp, probe
cccaggccatcatctatactgatgg

SEQ ID NO: 187236 - DNA, 25 bp, probe
cccaggctcaagccctatagatggg

SEQ ID NO: 187237 - DNA, 25 bp, probe
cccagtctcaggtccgagagcgggg

SEQ ID NO: 187238 - DNA, 25 bp, probe
cccatgctccgtcatttgacagggg

SEQ ID NO: 187239 - DNA, 25 bp, probe
cccatgctcgtgatgtatgttgcag

SEQ ID NO: 187240 - DNA, 25 bp, probe
cccatcatcgacctaatggccatca

SEQ ID NO: 187241 - DNA, 25 bp, probe
cccatggctgggaacatgacccagc

SEQ ID NO: 187242 - DNA, 25 bp, probe
ccctggctgggaacgatggcccaga

SEQ ID NO: 187243 - DNA, 25 bp, probe
cccaggtgagacagcggtcccaggg

SEQ ID NO: 187244 - DNA, 25 bp, probe
cccaggtgagacagcggtcccaggg

SEQ ID NO: 187245 - DNA, 25 bp, probe
cccaggtgcaccatggggcaggcag

SEQ ID NO: 187246 - DNA, 25 bp, probe
cccaggtcacacgtggggtcagcag

SEQ ID NO: 187247 - DNA, 25 bp, probe
cccaggtcacacgtggggtcagcag

SEQ ID NO: 187248 - DNA, 25 bp, probe
cccaggcccagtgggggccagagga

SEQ ID NO: 187249 - DNA, 25 bp, probe
cccaggctctagtgcaggaggagaa

SEQ ID NO: 187250 - DNA, 25 bp, probe
cccaggctggagtgcagtggcgcaa

SEQ ID NO: 187251 - DNA, 25 bp, probe
cccagtgttggcagcacgagcctga

SEQ ID NO: 187252 - DNA, 25 bp, probe
cccaggactgcagggcacagaccaa

SEQ ID NO: 187253 - DNA, 25 bp, probe
cccatcgtctgcatgataagccaca

SEQ ID NO: 187254 - DNA, 25 bp, probe
ccctgcgtcgctaagactgtcataa

SEQ ID NO: 187255 - DNA, 25 bp, probe
ccctgcgtcgctaagactgtcataa

SEQ ID NO: 187256 - DNA, 25 bp, probe
cccatggtgggcaggcagatgatga

SEQ ID NO: 187257 - DNA, 25 bp, probe
cccatgtatggccaggaagtagcac

SEQ ID NO: 187258 - DNA, 25 bp, probe
cccatgtgtgcccagagctgaggag

SEQ ID NO: 187259 - DNA, 25 bp, probe
ccgcatctatgtcacagctaaggag

SEQ ID NO: 187260 - DNA, 25 bp, probe
cccatctaccagtcctcaagtagtt

SEQ ID NO: 187261 - DNA, 25 bp, probe
ccctcttccatgtctctaatgttag

SEQ ID NO: 187262 - DNA, 25 bp, probe
ccctcttcatttagccaatgcttac

SEQ ID NO: 187263 - DNA, 25 bp, probe
ccctagaatctcctggaatgcttaa

SEQ ID NO: 187264 - DNA, 25 bp, probe
ccctcaggcttctcgggtgaagaac

SEQ ID NO: 187265 - DNA, 25 bp, probe
cctcctaattgcttctggggtaaat

SEQ ID NO: 187266 - DNA, 25 bp, probe
cccctgacattcttgaaggggttct

SEQ ID NO: 187267 - DNA, 25 bp, probe
ccgctcgagcatgcatctagagggc

SEQ ID NO: 187268 - DNA, 25 bp, probe
cccatcacatcagtgcccagaggga

SEQ ID NO: 187269 - DNA, 25 bp, probe
cccattccctgctcagaggaacagt

SEQ ID NO: 187270 - DNA, 25 bp, probe
cccttggccatatcaaggcagcacg

SEQ ID NO: 187271 - DNA, 25 bp, probe
cccattatcccaacaagctgtgcac

SEQ ID NO: 187272 - DNA, 25 bp, probe
cccattctcccagagactgttcatg

SEQ ID NO: 187273 - DNA, 25 bp, probe
ccgacctcccatggcaatttttgag

SEQ ID NO: 187274 - DNA, 25 bp, probe
cccatcattgcccttattgtttttg

SEQ ID NO: 187275 - DNA, 25 bp, probe
cccatcattgcccttattgtttttg

SEQ ID NO: 187276 - DNA, 25 bp, probe
cccatctgtcctaatgggcttccct

SEQ ID NO: 187277 - DNA, 25 bp, probe
ccctcagttttatggatcccaattc

SEQ ID NO: 187278 - DNA, 25 bp, probe
ccctcagttttactaatccacttca

SEQ ID NO: 187279 - DNA, 25 bp, probe
ccctcttctcttattacaattcaca

SEQ ID NO: 187280 - DNA, 25 bp, probe
ccctttatctacagcatacggaaca

SEQ ID NO: 187281 - DNA, 25 bp, probe
ccctttatctacagcatacggaaca

SEQ ID NO: 187282 - DNA, 25 bp, probe
ccctttaatagcagatttggttgca

SEQ ID NO: 187283 - DNA, 25 bp, probe
ccctttccatacagattgcttttct

SEQ ID NO: 187284 - DNA, 25 bp, probe
ccctttctaacctatgtgcataatt

SEQ ID NO: 187285 - DNA, 25 bp, probe
cccattcatctatggctttctcaac

SEQ ID NO: 187286 - DNA, 25 bp, probe
cccttcagccaggagtatttcctgt

SEQ ID NO: 187287 - DNA, 25 bp, probe
cccgttctagggatgtaccatgacc

SEQ ID NO: 187288 - DNA, 25 bp, probe
ccctatcctagcttttaacctgagc

SEQ ID NO: 187289 - DNA, 25 bp, probe
cccgatggtaggattcagttctgtg

SEQ ID NO: 187290 - DNA, 25 bp, probe
ccctaggcatactctccaggattgt

SEQ ID NO: 187291 - DNA, 25 bp, probe
cccatcaaaagcaccagcaggcacg

SEQ ID NO: 187292 - DNA, 25 bp, probe
cctcatctacgagaacgtggccgcc

SEQ ID NO: 187293 - DNA, 25 bp, probe
ccctgacatcgagaacgctgagctc

SEQ ID NO: 187294 - DNA, 25 bp, probe
ccctcagtggaggagatccctgtgc

SEQ ID NO: 187295 - DNA, 25 bp, probe
ccctctattgacagatccttgcggc

SEQ ID NO: 187296 - DNA, 25 bp, probe
ccctcatctaacttacacgtggtgc

SEQ ID NO: 187297 - DNA, 25 bp, probe
ccctcacataatcaaactttatcag

SEQ ID NO: 187298 - DNA, 25 bp, probe
ccccaccttcaacaatatttcaacg

SEQ ID NO: 187299 - DNA, 25 bp, probe
ccctcacctttgtctacttatacaa

SEQ ID NO: 187300 - DNA, 25 bp, probe
ccctcacctttgtctacttatacaa

SEQ ID NO: 187301 - DNA, 25 bp, probe
ccctaccattttcacgttgtgctac

SEQ ID NO: 187302 - DNA, 25 bp, probe
cccatacctgctttaaccggatcga

SEQ ID NO: 187303 - DNA, 25 bp, probe
cccatccctgccgaaaacgagacaa

SEQ ID NO: 187304 - DNA, 25 bp, probe
cccatccctgccgaaaacgagacaa

SEQ ID NO: 187305 - DNA, 25 bp, probe
cccatccctgccgaaaacgagacaa

SEQ ID NO: 187306 - DNA, 25 bp, probe
ccctgcgacacccagaacaaagacg

SEQ ID NO: 187307 - DNA, 25 bp, probe
cccatggtcaccctggacaaggagg

SEQ ID NO: 187308 - DNA, 25 bp, probe
ccctggtcgccgaccacaagtgcag

SEQ ID NO: 187309 - DNA, 25 bp, probe
cccatggtgtcccacacaagtgtga

SEQ ID NO: 187310 - DNA, 25 bp, probe
cccaggtccaagccatcaagtgctt

SEQ ID NO: 187311 - DNA, 25 bp, probe
cccatccttggacatcgagactata

SEQ ID NO: 187312 - DNA, 25 bp, probe
cccatggtgggacacggagtttgcg

SEQ ID NO: 187313 - DNA, 25 bp, probe
ccccgtgggcatcaagggcttcaac

SEQ ID NO: 187314 - DNA, 25 bp, probe
ccctcaggggaacagcgagcagatc

SEQ ID NO: 187315 - DNA, 25 bp, probe
ccctcaatgagagaggcaggcagat

SEQ ID NO: 187316 - DNA, 25 bp, probe
ccctttagatctgggcaccaataaa

SEQ ID NO: 187317 - DNA, 25 bp, probe
cccttgaagagtgggcaaagacagc

SEQ ID NO: 187318 - DNA, 25 bp, probe
cccttgaagagtgggcaaagacagc

SEQ ID NO: 187319 - DNA, 25 bp, probe
cccttagctcatacggaatggacag

SEQ ID NO: 187320 - DNA, 25 bp, probe
cccatgtacctgccggagagtgtca

SEQ ID NO: 187321 - DNA, 25 bp, probe
cccaggtcacgtcggagactgacac

SEQ ID NO: 187322 - DNA, 25 bp, probe
cccatctgtaaaggggcagctgaca

SEQ ID NO: 187323 - DNA, 25 bp, probe
cccttttaacagctcacatccagat

SEQ ID NO: 187324 - DNA, 25 bp, probe
ccctagttagacacaccaagcagat

SEQ ID NO: 187325 - DNA, 25 bp, probe
ccctagtgtctccatggaccaaatt

SEQ ID NO: 187326 - DNA, 25 bp, probe
ccctcatgtgatgcctgtaaaaatg

SEQ ID NO: 187327 - DNA, 25 bp, probe
ccctcaggtcctgatcagtcagaat

SEQ ID NO: 187328 - DNA, 25 bp, probe
ccctaccactgtgatagtggacagc

SEQ ID NO: 187329 - DNA, 25 bp, probe
cctccctcctgtgaagttacactgt

SEQ ID NO: 187330 - DNA, 25 bp, probe
ccccccatgcttgtcatttaatttt

SEQ ID NO: 187331 - DNA, 25 bp, probe
cccgccccagatggattttacattt

SEQ ID NO: 187332 - DNA, 25 bp, probe
cccccaaaactgattacaactgcta

SEQ ID NO: 187333 - DNA, 25 bp, probe
cccctaatgcaaagctctttacctc

SEQ ID NO: 187334 - DNA, 25 bp, probe
ccctaatgcaaagctctttacctct

SEQ ID NO: 187335 - DNA, 25 bp, probe
ccctaagccataaactgtctcacct

SEQ ID NO: 187336 - DNA, 25 bp, probe
cccgaggtcatcaaacagtcggcct

SEQ ID NO: 187337 - DNA, 25 bp, probe
cccgatggtctcattccgtggacga

SEQ ID NO: 187338 - DNA, 25 bp, probe
cccaggattctcattctttggaaat

SEQ ID NO: 187339 - DNA, 25 bp, probe
ccctcgtttctgattaatgctaaat

SEQ ID NO: 187340 - DNA, 25 bp, probe
cccatagtctttgtgtgcttgctaa

SEQ ID NO: 187341 - DNA, 25 bp, probe
cccttgcatccattgttgtgtctgt

SEQ ID NO: 187342 - DNA, 25 bp, probe
cccttgcatccattgttgtgtctgt

SEQ ID NO: 187343 - DNA, 25 bp, probe
ccctttcatcctatgcagcttgatg

SEQ ID NO: 187344 - DNA, 25 bp, probe
ccctctattctcttgtgtctgtaag

SEQ ID NO: 187345 - DNA, 25 bp, probe
cccatgctgcttttctgagtgttga

SEQ ID NO: 187346 - DNA, 25 bp, probe
cccatgctgaatcctctaatctata

SEQ ID NO: 187347 - DNA, 25 bp, probe
ccctgccacatgttcatatatccta

SEQ ID NO: 187348 - DNA, 25 bp, probe
ccctgccacatgttcatatatccta

SEQ ID NO: 187349 - DNA, 25 bp, probe
ccctcaccaaacaatgcagcagcta

SEQ ID NO: 187350 - DNA, 25 bp, probe
cccatgcaatcacaccatgccatgt

SEQ ID NO: 187351 - DNA, 25 bp, probe
cccatgccagcgacacctggatgtt

SEQ ID NO: 187352 - DNA, 25 bp, probe
ccctgcagcatgacaagctcgtgag

SEQ ID NO: 187353 - DNA, 25 bp, probe
ccctgcatctatcgagtttgcaatg

SEQ ID NO: 187354 - DNA, 25 bp, probe
ccctgtgctatggtgtggccatttt

SEQ ID NO: 187355 - DNA, 25 bp, probe
ccctgatttgctgggcagtttttct

SEQ ID NO: 187356 - DNA, 25 bp, probe
ccctgaaggatggggtcttcaccac

SEQ ID NO: 187357 - DNA, 25 bp, probe
ccctgtggtcaccgaatctgtacta

SEQ ID NO: 187358 - DNA, 25 bp, probe
cccttgggattggtatctggaaaag

SEQ ID NO: 187359 - DNA, 25 bp, probe
ccctgatccggggtgactggaaccg

SEQ ID NO: 187360 - DNA, 25 bp, probe
ccctgatccggggtgactggaaccg

SEQ ID NO: 187361 - DNA, 25 bp, probe
ccctgatccggggtgactggaaccg

SEQ ID NO: 187362 - DNA, 25 bp, probe
ccctatgaagggatgaccaaccacg

SEQ ID NO: 187363 - DNA, 25 bp, probe
ccctatgaagggatgaccaaccacg

SEQ ID NO: 187364 - DNA, 25 bp, probe
ccctatgaagggatgaccaaccacg

SEQ ID NO: 187365 - DNA, 25 bp, probe
ccctactgggagatgaccaatcaag

SEQ ID NO: 187366 - DNA, 25 bp, probe
ccctactgggagttgtccaaccacg

SEQ ID NO: 187367 - DNA, 25 bp, probe
ccctacgaaagaatggcaacagcca

SEQ ID NO: 187368 - DNA, 25 bp, probe
ccctacaggtttaccaaccagcatt

SEQ ID NO: 187369 - DNA, 25 bp, probe
ccccaagggatcctccaaggatgct

SEQ ID NO: 187370 - DNA, 25 bp, probe
ccccaaaggtttggctcaactctga

SEQ ID NO: 187371 - DNA, 25 bp, probe
ccccaccatttgagagctcaccttg

SEQ ID NO: 187372 - DNA, 25 bp, probe
cccattccaggggatgagctacctg

SEQ ID NO: 187373 - DNA, 25 bp, probe
cccattgctcgggacaggcaactct

SEQ ID NO: 187374 - DNA, 25 bp, probe
cccatcctctggcacaagatgcaca

SEQ ID NO: 187375 - DNA, 25 bp, probe
cccatcagatcatccacagttacac

SEQ ID NO: 187376 - DNA, 25 bp, probe
ccctcaatctagaacgctacacaag

SEQ ID NO: 187377 - DNA, 25 bp, probe
ccctattcagaaagctccacatcaa

SEQ ID NO: 187378 - DNA, 25 bp, probe
cccttcaagagcacttcacatactg

SEQ ID NO: 187379 - DNA, 25 bp, probe
ccctccaagacggatactctttata

SEQ ID NO: 187380 - DNA, 25 bp, probe
ccctccagtactgcacaaattccta

SEQ ID NO: 187381 - DNA, 25 bp, probe
ccctttgtagtgccagagacttagc

SEQ ID NO: 187382 - DNA, 25 bp, probe
cccttcagtaggcaagcgtctgagt

SEQ ID NO: 187383 - DNA, 25 bp, probe
ccctgacatgtattgcgggcgctct

SEQ ID NO: 187384 - DNA, 25 bp, probe
ccctgaatgcaacttctgtgccttg

SEQ ID NO: 187385 - DNA, 25 bp, probe
ccctagcatgaacttgtgggatggt

SEQ ID NO: 187386 - DNA, 25 bp, probe
cccttctgaagttcgggacgcggcg

SEQ ID NO: 187387 - DNA, 25 bp, probe
ccctttggactgtcaggtccaagtg

SEQ ID NO: 187388 - DNA, 25 bp, probe
ccctttgagacggctgacctgaagg

SEQ ID NO: 187389 - DNA, 25 bp, probe
cccttctgcgaggtctacgtggggg

SEQ ID NO: 187390 - DNA, 25 bp, probe
cccttctgcgaggtctacgtggggg

SEQ ID NO: 187391 - DNA, 25 bp, probe
ccctcgctctgaatgacttcggggg

SEQ ID NO: 187392 - DNA, 25 bp, probe
ccctcgctctgaatgacttcggggg

SEQ ID NO: 187393 - DNA, 25 bp, probe
ccctccttcgagagctggggcaggg

SEQ ID NO: 187394 - DNA, 25 bp, probe
cccggatgtcccacgggagcagggt

SEQ ID NO: 187395 - DNA, 25 bp, probe
cccaggcccccatctgggatgatgg

SEQ ID NO: 187396 - DNA, 25 bp, probe
cccatgaagcccaagatgctgggta

SEQ ID NO: 187397 - DNA, 25 bp, probe
cccatgccacccagagaaggagcct

SEQ ID NO: 187398 - DNA, 25 bp, probe
cccatctcctcaaatatgaagaacc

SEQ ID NO: 187399 - DNA, 25 bp, probe
cccatctggctcagcatagggtcac

SEQ ID NO: 187400 - DNA, 25 bp, probe
cccatctggctcagcatagggtcac

SEQ ID NO: 187401 - DNA, 25 bp, probe
cccatctgcagcgatgcagctgggg

SEQ ID NO: 187402 - DNA, 25 bp, probe
cccatccatgcagtagaggcgctgg

SEQ ID NO: 187403 - DNA, 25 bp, probe
cccatccatgcagtagaggcgctgg

SEQ ID NO: 187404 - DNA, 25 bp, probe
cccatcatcatgtctgtttccagaa

SEQ ID NO: 187405 - DNA, 25 bp, probe
cccatcatctacagtgtcaagaccc

SEQ ID NO: 187406 - DNA, 25 bp, probe
cccatcatctactgcttcatgaaca

SEQ ID NO: 187407 - DNA, 25 bp, probe
cccatctctcatccttttggataag

SEQ ID NO: 187408 - DNA, 25 bp, probe
cccatctctctttctaatgagaagg

SEQ ID NO: 187409 - DNA, 25 bp, probe
ccctctcctgtgcagctatagaagt

SEQ ID NO: 187410 - DNA, 25 bp, probe
ccctatcaatcccagcactaactgt

SEQ ID NO: 187411 - DNA, 25 bp, probe
ccctatcaatcccagcactaactgt

SEQ ID NO: 187412 - DNA, 25 bp, probe
cccatattcctcagactcaacaatt

SEQ ID NO: 187413 - DNA, 25 bp, probe
ccctactacatgagccctgaattgt

SEQ ID NO: 187414 - DNA, 25 bp, probe
ccctactacatgagccctgaattgt

SEQ ID NO: 187415 - DNA, 25 bp, probe
ccctaccaggtgtccctgaattctg

SEQ ID NO: 187416 - DNA, 25 bp, probe
ccctaccaggtgtccttgaattctg

SEQ ID NO: 187417 - DNA, 25 bp, probe
cccttggaggtgcatttgacctgct

SEQ ID NO: 187418 - DNA, 25 bp, probe
ccctagaagtggctttcaccacctc

SEQ ID NO: 187419 - DNA, 25 bp, probe
ccctcagcagagtgtgtttaagacc

SEQ ID NO: 187420 - DNA, 25 bp, probe
ccctccagagaatttttacgcaaga

SEQ ID NO: 187421 - DNA, 25 bp, probe
ccctctctgaaattttattatgtaa

SEQ ID NO: 187422 - DNA, 25 bp, probe
ccgtccaacattccttgtttgtaag

SEQ ID NO: 187423 - DNA, 25 bp, probe
cccttccacagtcatttcttctagg

SEQ ID NO: 187424 - DNA, 25 bp, probe
cccttccacagtcatttcttctagg

SEQ ID NO: 187425 - DNA, 25 bp, probe
cccttctctaagccataatctctta

SEQ ID NO: 187426 - DNA, 25 bp, probe
ccctgtatgctagccatgcacatct

SEQ ID NO: 187427 - DNA, 25 bp, probe
cccattatgagcatccttcatctgg

SEQ ID NO: 187428 - DNA, 25 bp, probe
ccctaacttagcctctgacagtgac

SEQ ID NO: 187429 - DNA, 25 bp, probe
ccctcacctgatgcaggaacatatg

SEQ ID NO: 187430 - DNA, 25 bp, probe
cccttccctccagaattatgtcagg

SEQ ID NO: 187431 - DNA, 25 bp, probe
ccctttgttcctggaagtgttcgag

SEQ ID NO: 187432 - DNA, 25 bp, probe
ccctaggaacctcgaagctgttctc

SEQ ID NO: 187433 - DNA, 25 bp, probe
cccatttggcagcagtgaagctgtt

SEQ ID NO: 187434 - DNA, 25 bp, probe
cccatttggcagcagtgaagctgtt

SEQ ID NO: 187435 - DNA, 25 bp, probe
cccatcatcggcacagtcagcatgg

SEQ ID NO: 187436 - DNA, 25 bp, probe
cccatctggagaatcgcctgcaggt

SEQ ID NO: 187437 - DNA, 25 bp, probe
cccatgctgaccacagcctgatatt

SEQ ID NO: 187438 - DNA, 25 bp, probe
cccatctgccaagcagcctatcaga

SEQ ID NO: 187439 - DNA, 25 bp, probe
cccatctgcagggacgcgtacgagc

SEQ ID NO: 187440 - DNA, 25 bp, probe
cccatctgcagggacgcgtacgagc

SEQ ID NO: 187441 - DNA, 25 bp, probe
ccctctgatgggacggtactgagat

SEQ ID NO: 187442 - DNA, 25 bp, probe
ccctttgacgactttgactgtgatc

SEQ ID NO: 187443 - DNA, 25 bp, probe
ccctttgacgactttgactgtgatc

SEQ ID NO: 187444 - DNA, 25 bp, probe
ccctttgacgactttgactgtgatc

SEQ ID NO: 187445 - DNA, 25 bp, probe
ccctgttgcttgagtgtacgtaccg

SEQ ID NO: 187446 - DNA, 25 bp, probe
ccctgttgcttgagtgtacgtaccg

SEQ ID NO: 187447 - DNA, 25 bp, probe
ccctggtgttgagagaacgtccttc

SEQ ID NO: 187448 - DNA, 25 bp, probe
ccctggttatgtgtggcaccatctc

SEQ ID NO: 187449 - DNA, 25 bp, probe
ccctggttatgtgtggcaccatctc

SEQ ID NO: 187450 - DNA, 25 bp, probe
ccctggttttcatggtgcacatgcc

SEQ ID NO: 187451 - DNA, 25 bp, probe
ccctggttatactttgtcaatagtt

SEQ ID NO: 187452 - DNA, 25 bp, probe
ccctcaccaaactttggcaaaagat

SEQ ID NO: 187453 - DNA, 25 bp, probe
cccgaccacaagcttggagccaaaa

SEQ ID NO: 187454 - DNA, 25 bp, probe
ccctgaaacaggaatggggcaaaga

SEQ ID NO: 187455 - DNA, 25 bp, probe
ccctagagcactggtctgtgggcaa

SEQ ID NO: 187456 - DNA, 25 bp, probe
ccctaggcacctgggctgcaggaag

SEQ ID NO: 187457 - DNA, 25 bp, probe
ccctcagcctgcctgaagagaggaa

SEQ ID NO: 187458 - DNA, 25 bp, probe
cccatcatcctgcttggagcaagta

SEQ ID NO: 187459 - DNA, 25 bp, probe
ccctcatcctgcatcatggacaaga

SEQ ID NO: 187460 - DNA, 25 bp, probe
ccctcatcctgcatcatggacaaga

SEQ ID NO: 187461 - DNA, 25 bp, probe
cccttccagcccaaatctagagcat

SEQ ID NO: 187462 - DNA, 25 bp, probe
ccctctcacgacggagatctgggct

SEQ ID NO: 187463 - DNA, 25 bp, probe
ccctccttcagtgagattgccagcg

SEQ ID NO: 187464 - DNA, 25 bp, probe
ccctccaacagtcatatggcctgtg

SEQ ID NO: 187465 - DNA, 25 bp, probe
cccttcatgcatggaaattcccttc

SEQ ID NO: 187466 - DNA, 25 bp, probe
cccttagggagagctcgcctctccc

SEQ ID NO: 187467 - DNA, 25 bp, probe
cccttgaggaagaggctcgcctcca

SEQ ID NO: 187468 - DNA, 25 bp, probe
cccttggggagcaggctcggctccc

SEQ ID NO: 187469 - DNA, 25 bp, probe
cccttggattagcaagtctgtcccc

SEQ ID NO: 187470 - DNA, 25 bp, probe
cccgggttcaggcagttctgcctca

SEQ ID NO: 187471 - DNA, 25 bp, probe
cccggagactgtcgaaggtcaccaa

SEQ ID NO: 187472 - DNA, 25 bp, probe
ccctgaaacctgcatagagtttgca

SEQ ID NO: 187473 - DNA, 25 bp, probe
ccctgaaaggtcctatacaagtcag

SEQ ID NO: 187474 - DNA, 25 bp, probe
ccttaacctgtcttcaaaagttgca

SEQ ID NO: 187475 - DNA, 25 bp, probe
cctaggacctgatttaaagtgaatt

SEQ ID NO: 187476 - DNA, 25 bp, probe
cccggtgggatgtttggggcaattg

SEQ ID NO: 187477 - DNA, 25 bp, probe
cccggagatgggtttcccagcaacg

SEQ ID NO: 187478 - DNA, 25 bp, probe
ccctgaagtggatggcccctgaaag

SEQ ID NO: 187479 - DNA, 25 bp, probe
ccctgaattggagagctctccttga

SEQ ID NO: 187480 - DNA, 25 bp, probe
ccctgaaaggcagcagaccctctag

SEQ ID NO: 187481 - DNA, 25 bp, probe
ccctggcaaccaggaatccactctc

SEQ ID NO: 187482 - DNA, 25 bp, probe
ccctcgtcacaaggtgacccttgca

SEQ ID NO: 187483 - DNA, 25 bp, probe
cccctgatctgcaacgggtacttgc

SEQ ID NO: 187484 - DNA, 25 bp, probe
ccctcagatcatcatcagtgctgaa

SEQ ID NO: 187485 - DNA, 25 bp, probe
ccctcagatcatcatcagtgctgaa

SEQ ID NO: 187486 - DNA, 25 bp, probe
ccctgcagctcttcacagatggaat

SEQ ID NO: 187487 - DNA, 25 bp, probe
ccctgctttatccatgctagaacca

SEQ ID NO: 187488 - DNA, 25 bp, probe
cccgtctgctgaccagctaaacacc

SEQ ID NO: 187489 - DNA, 25 bp, probe
cccttcatgaagcactgaaactact

SEQ ID NO: 187490 - DNA, 25 bp, probe
ccctgctctacgtcatcgagaacga

SEQ ID NO: 187491 - DNA, 25 bp, probe
ccctgctctacgtcatcgagaacga

SEQ ID NO: 187492 - DNA, 25 bp, probe
ccctctgctactgctctataaagac

SEQ ID NO: 187493 - DNA, 25 bp, probe
ccctggtacagcgctacacagagac

SEQ ID NO: 187494 - DNA, 25 bp, probe
ccctggtacagcgctacacagagac

SEQ ID NO: 187495 - DNA, 25 bp, probe
ccctcttacgaggctacataacaca

SEQ ID NO: 187496 - DNA, 25 bp, probe
ccctttatgccacctactgaaaaga

SEQ ID NO: 187497 - DNA, 25 bp, probe
ccctagcctctctctacagaaagag

SEQ ID NO: 187498 - DNA, 25 bp, probe
ccctgccccattgtccagatgggca

SEQ ID NO: 187499 - DNA, 25 bp, probe
ccctgccccattgtccagatgggca

SEQ ID NO: 187500 - DNA, 25 bp, probe
ccctgctccagtagttcgaggacca

SEQ ID NO: 187501 - DNA, 25 bp, probe
ccctgcccggtctggagaggaagaa

SEQ ID NO: 187502 - DNA, 25 bp, probe
ccctgcccggtctggagaggaagaa

SEQ ID NO: 187503 - DNA, 25 bp, probe
ccctccaggactaggctggaggaag

SEQ ID NO: 187504 - DNA, 25 bp, probe
cccccaggtcatcacggggacgcag

SEQ ID NO: 187505 - DNA, 25 bp, probe
cccttcagtgttcagcgtgtgctga

SEQ ID NO: 187506 - DNA, 25 bp, probe
cccattagctgtgagatgcctgtga

SEQ ID NO: 187507 - DNA, 25 bp, probe
cccttgttgctgtagatgtgcgtgc

SEQ ID NO: 187508 - DNA, 25 bp, probe
cccttgttgctgtagatgtgcgtgc

SEQ ID NO: 187509 - DNA, 25 bp, probe
ccctatgtgcgattgcaggtgtgtt

SEQ ID NO: 187510 - DNA, 25 bp, probe
ccctatggcagaagcctttgtgatc

SEQ ID NO: 187511 - DNA, 25 bp, probe
ccctattgtatgacctttgctgagg

SEQ ID NO: 187512 - DNA, 25 bp, probe
ccctattctagaggatacttgaatg

SEQ ID NO: 187513 - DNA, 25 bp, probe
ccctgattcggaggtcggtcaatgg

SEQ ID NO: 187514 - DNA, 25 bp, probe
cccatattctggtgccgctgaaaat

SEQ ID NO: 187515 - DNA, 25 bp, probe
cccttgactggatcctgaggaaaat

SEQ ID NO: 187516 - DNA, 25 bp, probe
ccctctgacccttccattgaggaaa

SEQ ID NO: 187517 - DNA, 25 bp, probe
ccctccacctcatggcttaaggaga

SEQ ID NO: 187518 - DNA, 25 bp, probe
ccctgacagccgtggcggaggaagt

SEQ ID NO: 187519 - DNA, 25 bp, probe
cccttccgcaaactggccgagaagc

SEQ ID NO: 187520 - DNA, 25 bp, probe
cccctcctgtaagtggccaggcatt

SEQ ID NO: 187521 - DNA, 25 bp, probe
ccctctcctttaggtgcagcagtga

SEQ ID NO: 187522 - DNA, 25 bp, probe
cccttccctcataggggctgtgacc

SEQ ID NO: 187523 - DNA, 25 bp, probe
cccttccttatcactggcattgtgc

SEQ ID NO: 187524 - DNA, 25 bp, probe
cccttcttttgcgacatgacggtga

SEQ ID NO: 187525 - DNA, 25 bp, probe
cccttcttgtgccttcgaggggaca

SEQ ID NO: 187526 - DNA, 25 bp, probe
cccttgttgacacttggggctgcgg

SEQ ID NO: 187527 - DNA, 25 bp, probe
cccttgtggttgactagggctggga

SEQ ID NO: 187528 - DNA, 25 bp, probe
cccttcgccatctattgcgtggtgg

SEQ ID NO: 187529 - DNA, 25 bp, probe
ccctatccgctggatgtcttgggag

SEQ ID NO: 187530 - DNA, 25 bp, probe
cccattcacctggatctcagtatca

SEQ ID NO: 187531 - DNA, 25 bp, probe
cccattcacctggatctcagtatca

SEQ ID NO: 187532 - DNA, 25 bp, probe
cccattttgatggtgtctgtgacat

SEQ ID NO: 187533 - DNA, 25 bp, probe
ccctgccattgatggtctggattcc

SEQ ID NO: 187534 - DNA, 25 bp, probe
cccgccaggcattgcaggcttagtc

SEQ ID NO: 187535 - DNA, 25 bp, probe
ccctgctcaggagtgggctcagagt

SEQ ID NO: 187536 - DNA, 25 bp, probe
ccctgcatgaggacgtggcacgcaa

SEQ ID NO: 187537 - DNA, 25 bp, probe
ccctcatgctggtgtccagcaccat

SEQ ID NO: 187538 - DNA, 25 bp, probe
ccctacataggattctcagtgctct

SEQ ID NO: 187539 - DNA, 25 bp, probe
cccgaaatgatgtactggatgacag

SEQ ID NO: 187540 - DNA, 25 bp, probe
ccctcaagagagaatgcatggaaag

SEQ ID NO: 187541 - DNA, 25 bp, probe
ccctcaggaagtactctgtgaacta

SEQ ID NO: 187542 - DNA, 25 bp, probe
ccctagtgagggactgtgttgactg

SEQ ID NO: 187543 - DNA, 25 bp, probe
cccttcgcagttactggttggtgtt

SEQ ID NO: 187544 - DNA, 25 bp, probe
ccgcttctcttattcgtgttaggtg

SEQ ID NO: 187545 - DNA, 25 bp, probe
ccctcatcctgtctcggattgtggg

SEQ ID NO: 187546 - DNA, 25 bp, probe
ccctatcacgtcatgcggaatgtga

SEQ ID NO: 187547 - DNA, 25 bp, probe
ccctatccctgctcaggagtgggct

SEQ ID NO: 187548 - DNA, 25 bp, probe
cccttccgcgacgaggaggagttgc

SEQ ID NO: 187549 - DNA, 25 bp, probe
cccgtcctgaacgggcgactgtgtc

SEQ ID NO: 187550 - DNA, 25 bp, probe
cccttccttatcgccgacaagtggc

SEQ ID NO: 187551 - DNA, 25 bp, probe
cccttctttaccacaagctatggtg

SEQ ID NO: 187552 - DNA, 25 bp, probe
ccctgttttcccacatactaggtgc

SEQ ID NO: 187553 - DNA, 25 bp, probe
cccttctgtggtcctaatatcatag

SEQ ID NO: 187554 - DNA, 25 bp, probe
ccctgctcatggtcttcgagtatat

SEQ ID NO: 187555 - DNA, 25 bp, probe
ccctgagcagcactcatctctcaga

SEQ ID NO: 187556 - DNA, 25 bp, probe
ccctgccaatgtatctcagcagaag

SEQ ID NO: 187557 - DNA, 25 bp, probe
ccctcagctattatgcaacagatca

SEQ ID NO: 187558 - DNA, 25 bp, probe
ccctcctactgttggcagtgatcat

SEQ ID NO: 187559 - DNA, 25 bp, probe
ccctcctactgcagacagaactgag

SEQ ID NO: 187560 - DNA, 25 bp, probe
ccctgcagtacaacgactatggctg

SEQ ID NO: 187561 - DNA, 25 bp, probe
ccctcatgctaaactgtctgattat

SEQ ID NO: 187562 - DNA, 25 bp, probe
cccattcataagatgtctgctgccc

SEQ ID NO: 187563 - DNA, 25 bp, probe
ccctcatcatcagcaagtttcgcca

SEQ ID NO: 187564 - DNA, 25 bp, probe
ccctatgcacccaggtagccctggg

SEQ ID NO: 187565 - DNA, 25 bp, probe
ccctgtccctcagggtagcaccatg

SEQ ID NO: 187566 - DNA, 25 bp, probe
ccctttgcctgggtgtaaccatggt

SEQ ID NO: 187567 - DNA, 25 bp, probe
cccttccctggctgctggaaatgga

SEQ ID NO: 187568 - DNA, 25 bp, probe
cccttccctgctttgaggacaaaga

SEQ ID NO: 187569 - DNA, 25 bp, probe
cccttccctcatttccaacatagga

SEQ ID NO: 187570 - DNA, 25 bp, probe
ccctcatacgccatcaccaaaagga

SEQ ID NO: 187571 - DNA, 25 bp, probe
ccctcctacctggagctcaaacagg

SEQ ID NO: 187572 - DNA, 25 bp, probe
ccctcctacctggagctcaaacagg

SEQ ID NO: 187573 - DNA, 25 bp, probe
ccctgattatactacaccagaaatg

SEQ ID NO: 187574 - DNA, 25 bp, probe
ccactgtattaacaccacaactggt

SEQ ID NO: 187575 - DNA, 25 bp, probe
cccgtgtatgaacgaagccgacatg

SEQ ID NO: 187576 - DNA, 25 bp, probe
cccctgttggctagcaaccatacta

SEQ ID NO: 187577 - DNA, 25 bp, probe
ccctgttggctagcaaccatactat

SEQ ID NO: 187578 - DNA, 25 bp, probe
ccctgcatatgcctggtaccaaaaa

SEQ ID NO: 187579 - DNA, 25 bp, probe
ccctcatagcctctgttctcagaga

SEQ ID NO: 187580 - DNA, 25 bp, probe
ccctatgtctgccttgtttcagagt

SEQ ID NO: 187581 - DNA, 25 bp, probe
cccttgatcgccctgtgataggatc

SEQ ID NO: 187582 - DNA, 25 bp, probe
cccttgatcgccctgtgataggatc

SEQ ID NO: 187583 - DNA, 25 bp, probe
ccctttccagctattcagtgaccaa

SEQ ID NO: 187584 - DNA, 25 bp, probe
ccctttccagctattcagtgaccaa

SEQ ID NO: 187585 - DNA, 25 bp, probe
ccctttccaatctggcaatcccagg

SEQ ID NO: 187586 - DNA, 25 bp, probe
ccctttatcgcctgcagaattccag

SEQ ID NO: 187587 - DNA, 25 bp, probe
ccctgtttccaatgccaattcatct

SEQ ID NO: 187588 - DNA, 25 bp, probe
ccctgtttagcattcactaagccct

SEQ ID NO: 187589 - DNA, 25 bp, probe
ccctgggatacatctccaaggccga

SEQ ID NO: 187590 - DNA, 25 bp, probe
ccctgggatacatctccaaggccga

SEQ ID NO: 187591 - DNA, 25 bp, probe
ccactggttacctacgaaggctcca

SEQ ID NO: 187592 - DNA, 25 bp, probe
ccctggggctgcttaggaaacctca

SEQ ID NO: 187593 - DNA, 25 bp, probe
ccctggagcaccttagacaaactac

SEQ ID NO: 187594 - DNA, 25 bp, probe
ccctgggcgacacaaccaagtcatg

SEQ ID NO: 187595 - DNA, 25 bp, probe
ccctggaagagtccactgccaaaag

SEQ ID NO: 187596 - DNA, 25 bp, probe
ccctggtagaggtcatcatcaatac

SEQ ID NO: 187597 - DNA, 25 bp, probe
cccgagcaatgaagtcatccactcc

SEQ ID NO: 187598 - DNA, 25 bp, probe
cccgtgtgagatttctcacctcgag

SEQ ID NO: 187599 - DNA, 25 bp, probe
cccttgggaatgggccctcagagga

SEQ ID NO: 187600 - DNA, 25 bp, probe
cccttgggagctgacagcccatggg

SEQ ID NO: 187601 - DNA, 25 bp, probe
cccttggaacaggaggtctctgtgg

SEQ ID NO: 187602 - DNA, 25 bp, probe
cccttggcaagctcagttgccctga

SEQ ID NO: 187603 - DNA, 25 bp, probe
ccctatccaagctgcacttggtgat

SEQ ID NO: 187604 - DNA, 25 bp, probe
ccctgtaccagatcacctggtggag

SEQ ID NO: 187605 - DNA, 25 bp, probe
ccctgaacctcatgagcctctaagg

SEQ ID NO: 187606 - DNA, 25 bp, probe
ccctgaaagattaagccctgaagga

SEQ ID NO: 187607 - DNA, 25 bp, probe
ccctgatcaaacaccccgaggtgaa

SEQ ID NO: 187608 - DNA, 25 bp, probe
ccctgccaaagaatcccctggaaat

SEQ ID NO: 187609 - DNA, 25 bp, probe
ccctccaagggatctgcttgatatc

SEQ ID NO: 187610 - DNA, 25 bp, probe
cccttcaagtggttcatggagatgt

SEQ ID NO: 187611 - DNA, 25 bp, probe
cccttcaagtggttcatggagatgt

SEQ ID NO: 187612 - DNA, 25 bp, probe
ccctcttagggctctgtgagaggtg

SEQ ID NO: 187613 - DNA, 25 bp, probe
ccctttgaggccgacaatgaggacg

SEQ ID NO: 187614 - DNA, 25 bp, probe
cccttcagcaacggccaagaggatc

SEQ ID NO: 187615 - DNA, 25 bp, probe
cccttcagcaacggccaagaggatc

SEQ ID NO: 187616 - DNA, 25 bp, probe
cccttccaactggcctatgaggcag

SEQ ID NO: 187617 - DNA, 25 bp, probe
cccttctccctgcacataaagcagg

SEQ ID NO: 187618 - DNA, 25 bp, probe
cccttctccctgcacataaagcagg

SEQ ID NO: 187619 - DNA, 25 bp, probe
ccctccccagctgaaaaacaagttg

SEQ ID NO: 187620 - DNA, 25 bp, probe
ccctccccaccaataaaacagatca

SEQ ID NO: 187621 - DNA, 25 bp, probe
ccctgccctcaattacagtaacgta

SEQ ID NO: 187622 - DNA, 25 bp, probe
ccctgccccagatttactaaatcaa

SEQ ID NO: 187623 - DNA, 25 bp, probe
ccctcacctcagaagtaagacaact

SEQ ID NO: 187624 - DNA, 25 bp, probe
ccctcacgtatgaggagaagccgcc

SEQ ID NO: 187625 - DNA, 25 bp, probe
ccctcactgtccaaaatgtagtccc

SEQ ID NO: 187626 - DNA, 25 bp, probe
ccctagttccaccaaggttcacaca

SEQ ID NO: 187627 - DNA, 25 bp, probe
ccctaagtactccagcagagtccca

SEQ ID NO: 187628 - DNA, 25 bp, probe
ccctatgagtttgagctcgtgccga

SEQ ID NO: 187629 - DNA, 25 bp, probe
ccctgataagttcagccaggccagc

SEQ ID NO: 187630 - DNA, 25 bp, probe
ccctgataagttcagccaggccagc

SEQ ID NO: 187631 - DNA, 25 bp, probe
ccctgaatcatgggcacggagggcc

SEQ ID NO: 187632 - DNA, 25 bp, probe
ccctgacattggagcctgggcatcc

SEQ ID NO: 187633 - DNA, 25 bp, probe
ccctgcacctggagacggatctcca

SEQ ID NO: 187634 - DNA, 25 bp, probe
ccctcaaggtgaaagctggtaccag

SEQ ID NO: 187635 - DNA, 25 bp, probe
ccctacgtgtgggactgagtcagcg

SEQ ID NO: 187636 - DNA, 25 bp, probe
ccctactgatgatgtgttgttgcca

SEQ ID NO: 187637 - DNA, 25 bp, probe
ccctagcagaggctgtgttcacctt

SEQ ID NO: 187638 - DNA, 25 bp, probe
ccctacgggtgtacagctgcacctt

SEQ ID NO: 187639 - DNA, 25 bp, probe
ccctcaaggtgttcaagctgcctgt

SEQ ID NO: 187640 - DNA, 25 bp, probe
ccctacagcgtgcacaggtgctgga

SEQ ID NO: 187641 - DNA, 25 bp, probe
ccctcaccgctctagcggtggctgg

SEQ ID NO: 187642 - DNA, 25 bp, probe
ccctactggcgtgtggggctgatgt

SEQ ID NO: 187643 - DNA, 25 bp, probe
ccctgccgaggtgtggctgtgaggt

SEQ ID NO: 187644 - DNA, 25 bp, probe
ccctcacagtggtatgtgctgctgg

SEQ ID NO: 187645 - DNA, 25 bp, probe
ccctcacagtgccgattgtctggat

SEQ ID NO: 187646 - DNA, 25 bp, probe
ccctacggcggcagtggagatggcg

SEQ ID NO: 187647 - DNA, 25 bp, probe
ccctacggcggcagtggagatggcg

SEQ ID NO: 187648 - DNA, 25 bp, probe
ccctcggggctgagtcagatctggg

SEQ ID NO: 187649 - DNA, 25 bp, probe
ccctgtttctctatgtagtctggca

SEQ ID NO: 187650 - DNA, 25 bp, probe
ccctatcctccattcttgagtcagg

SEQ ID NO: 187651 - DNA, 25 bp, probe
ccctatgacgactccgacatcagga

SEQ ID NO: 187652 - DNA, 25 bp, probe
ccctatctgggctccaacacaggag

SEQ ID NO: 187653 - DNA, 25 bp, probe
ccctgttgggcgccataatcaattg

SEQ ID NO: 187654 - DNA, 25 bp, probe
ccctgtatggaggtctcccgattcc

SEQ ID NO: 187655 - DNA, 25 bp, probe
ccctgtgggaggtccgacaaacctg

SEQ ID NO: 187656 - DNA, 25 bp, probe
ccctggctgtggatgccaaaaactt

SEQ ID NO: 187657 - DNA, 25 bp, probe
ccctatgcagtgtattgccaaaact

SEQ ID NO: 187658 - DNA, 25 bp, probe
ccctgatgctggtaacctgaaagat

SEQ ID NO: 187659 - DNA, 25 bp, probe
ccctgagcagagcaaacgcagtacc

SEQ ID NO: 187660 - DNA, 25 bp, probe
ccctatgcagggctacgattggctg

SEQ ID NO: 187661 - DNA, 25 bp, probe
ccctatgcagggctacgattggctg

SEQ ID NO: 187662 - DNA, 25 bp, probe
ccctatgcagggctacgattggctg

SEQ ID NO: 187663 - DNA, 25 bp, probe
cccggcatggtccagacgaaggagc

SEQ ID NO: 187664 - DNA, 25 bp, probe
cccggcatggtccagacgaaggagc

SEQ ID NO: 187665 - DNA, 25 bp, probe
ccccgtggatgacactgacaggcac

SEQ ID NO: 187666 - DNA, 25 bp, probe
cccttcaggagaccagcgagaggcc

SEQ ID NO: 187667 - DNA, 25 bp, probe
ccctctctgagaggagcagcagatg

SEQ ID NO: 187668 - DNA, 25 bp, probe
cccttctgaggatgctgagaacggt

SEQ ID NO: 187669 - DNA, 25 bp, probe
ccccttgaggattgcggaaaaccag

SEQ ID NO: 187670 - DNA, 25 bp, probe
cccttagcgttgcctggaaaagcca

SEQ ID NO: 187671 - DNA, 25 bp, probe
ccctgtcactttcctgagacatgac

SEQ ID NO: 187672 - DNA, 25 bp, probe
ccctgccagttgaagtgagagagtt

SEQ ID NO: 187673 - DNA, 25 bp, probe
ccctctgactggaaaacagactcta

SEQ ID NO: 187674 - DNA, 25 bp, probe
ccctggcactggcaaacagggcctc

SEQ ID NO: 187675 - DNA, 25 bp, probe
cccgtactggattggccagggccac

SEQ ID NO: 187676 - DNA, 25 bp, probe
cccctttaaggcgcggggcattgtg

SEQ ID NO: 187677 - DNA, 25 bp, probe
ccctttattggggccttgtggcttg

SEQ ID NO: 187678 - DNA, 25 bp, probe
ccctgtctaatgaaacctgtgtctc

SEQ ID NO: 187679 - DNA, 25 bp, probe
ccctgtccaagcgagagttctgttt

SEQ ID NO: 187680 - DNA, 25 bp, probe
ccctctccatctctgagattctgtt

SEQ ID NO: 187681 - DNA, 25 bp, probe
ccctcccactgccaagaacttggaa

SEQ ID NO: 187682 - DNA, 25 bp, probe
ccctgggactgtttcagacttggaa

SEQ ID NO: 187683 - DNA, 25 bp, probe
ccctgaggaggttccctttgtgatt

SEQ ID NO: 187684 - DNA, 25 bp, probe
ccctgaggaggttccctttgtgatt

SEQ ID NO: 187685 - DNA, 25 bp, probe
tctccgcaagttgtcctatttttgt

SEQ ID NO: 187686 - DNA, 25 bp, probe
cccgaagttgccatctaccttggga

SEQ ID NO: 187687 - DNA, 25 bp, probe
cctgggatgtttctgaactttggga

SEQ ID NO: 187688 - DNA, 25 bp, probe
ccgcggatgcctattaccagtttgg

SEQ ID NO: 187689 - DNA, 25 bp, probe
cccctgactcatatatacttttttt

SEQ ID NO: 187690 - DNA, 25 bp, probe
ccctgcaactcaattgggccttttt

SEQ ID NO: 187691 - DNA, 25 bp, probe
ccctcaacatctgctgaagcctttt

SEQ ID NO: 187692 - DNA, 25 bp, probe
ccctcactctatgggaagcgcttca

SEQ ID NO: 187693 - DNA, 25 bp, probe
ccctgattcatccgagatcagcagc

SEQ ID NO: 187694 - DNA, 25 bp, probe
ccctgatgctgcatggcactcagag

SEQ ID NO: 187695 - DNA, 25 bp, probe
ccctgacgctatgacacacagcgcg

SEQ ID NO: 187696 - DNA, 25 bp, probe
ccctgcgagctaagcccaaggtgta

SEQ ID NO: 187697 - DNA, 25 bp, probe
ccctgggcctcagcaaggatgtgta

SEQ ID NO: 187698 - DNA, 25 bp, probe
ccctagccattggtgcacaggatgg

SEQ ID NO: 187699 - DNA, 25 bp, probe
ccctagctctctgcactgagctgag

SEQ ID NO: 187700 - DNA, 25 bp, probe
ccctcgatgctcttagctgagtgtc

SEQ ID NO: 187701 - DNA, 25 bp, probe
ccctgcgatgccattgactggtgct

SEQ ID NO: 187702 - DNA, 25 bp, probe
ccctgggcattatcatctgggcaat

SEQ ID NO: 187703 - DNA, 25 bp, probe
ccctggagctaagctcaggagcccg

SEQ ID NO: 187704 - DNA, 25 bp, probe
ccctgcaggtagctatcaagaccct

SEQ ID NO: 187705 - DNA, 25 bp, probe
cccggagtagctcaaggtctcctgt

SEQ ID NO: 187706 - DNA, 25 bp, probe
cctcgatagctaggccaagtttgcc

SEQ ID NO: 187707 - DNA, 25 bp, probe
cctcgatagctaggccaagtttgcc

SEQ ID NO: 187708 - DNA, 25 bp, probe
ccctgcatgaggcccacgagttctc

SEQ ID NO: 187709 - DNA, 25 bp, probe
ccctgtggctgctcatcgagatgat

SEQ ID NO: 187710 - DNA, 25 bp, probe
ccctttcttctatggatgtctcaac

SEQ ID NO: 187711 - DNA, 25 bp, probe
cccttttcctgctgagattcatcaa

SEQ ID NO: 187712 - DNA, 25 bp, probe
ccctgttttctctgcaatttattta

SEQ ID NO: 187713 - DNA, 25 bp, probe
ccctgttttctctgcaatttattta

SEQ ID NO: 187714 - DNA, 25 bp, probe
ccctgttttgcctcaatgctaacta

SEQ ID NO: 187715 - DNA, 25 bp, probe
ccctgttttgcctcaatgctaacta

SEQ ID NO: 187716 - DNA, 25 bp, probe
cccttttttgcaggcgatgctgaca

SEQ ID NO: 187717 - DNA, 25 bp, probe
ccctcttttcatcatgctgatctgc

SEQ ID NO: 187718 - DNA, 25 bp, probe
ccctcttgtctactattttgccagt

SEQ ID NO: 187719 - DNA, 25 bp, probe
ccctctggacattgacactttgcca

SEQ ID NO: 187720 - DNA, 25 bp, probe
ccctcatgggctaggacttttcatc

SEQ ID NO: 187721 - DNA, 25 bp, probe
cccgagtttgtggacttcactgctc

SEQ ID NO: 187722 - DNA, 25 bp, probe
cccgagttttgcccatatcaggaca

SEQ ID NO: 187723 - DNA, 25 bp, probe
cccgagaatcttccttacagtacca

SEQ ID NO: 187724 - DNA, 25 bp, probe
ccctgagacatgctgggttcagtat

SEQ ID NO: 187725 - DNA, 25 bp, probe
ccctgaggctgcttcggagaagttg

SEQ ID NO: 187726 - DNA, 25 bp, probe
ccctgaggctgcttcggagaagttg

SEQ ID NO: 187727 - DNA, 25 bp, probe
ccctgcagagctatggtgaggtgtg

SEQ ID NO: 187728 - DNA, 25 bp, probe
ccctgctgcacatctatgacaaagt

SEQ ID NO: 187729 - DNA, 25 bp, probe
ccctctgccacagttatcaagaatg

SEQ ID NO: 187730 - DNA, 25 bp, probe
ccctctggatcaaatagacatcaat

SEQ ID NO: 187731 - DNA, 25 bp, probe
ccctcatggatctgcataaccgcac

SEQ ID NO: 187732 - DNA, 25 bp, probe
ccctcattgccaaaaacccactggg

SEQ ID NO: 187733 - DNA, 25 bp, probe
cccgcggccaaatgacacgacttgg

SEQ ID NO: 187734 - DNA, 25 bp, probe
ccctaaccaaatcctgacctattgg

SEQ ID NO: 187735 - DNA, 25 bp, probe
ccctaaccaaatgctgtctccataa

SEQ ID NO: 187736 - DNA, 25 bp, probe
cccgaaccttacctatgttcatata

SEQ ID NO: 187737 - DNA, 25 bp, probe
ccctcagacagtttgcttattttat

SEQ ID NO: 187738 - DNA, 25 bp, probe
ccctgcagagcaataacactatatt

SEQ ID NO: 187739 - DNA, 25 bp, probe
ccctgaagactccacatactattat

SEQ ID NO: 187740 - DNA, 25 bp, probe
ccctaagatgctggcaaacatacag

SEQ ID NO: 187741 - DNA, 25 bp, probe
ccctgactgatggcaggaatccaag

SEQ ID NO: 187742 - DNA, 25 bp, probe
ccctatctgctccaggttctgaaga

SEQ ID NO: 187743 - DNA, 25 bp, probe
ccctattcccagctgtcagatgaac

SEQ ID NO: 187744 - DNA, 25 bp, probe
ccctattcccagctgtcagatgaac

SEQ ID NO: 187745 - DNA, 25 bp, probe
ccctattcccagctgtcagatgaac

SEQ ID NO: 187746 - DNA, 25 bp, probe
ccctatgtgccaaaagtagtgaaac

SEQ ID NO: 187747 - DNA, 25 bp, probe
ccgactggccaaccagtactaccaa

SEQ ID NO: 187748 - DNA, 25 bp, probe
gccagttgggaacattacttaaaat

SEQ ID NO: 187749 - DNA, 25 bp, probe
gctgacttaaaacactagcagtaaa

SEQ ID NO: 187750 - DNA, 25 bp, probe
tcgtcctaaaacactggagtatgct

SEQ ID NO: 187751 - DNA, 25 bp, probe
cccgaaggaagctcatggagtatgt

SEQ ID NO: 187752 - DNA, 25 bp, probe
ccctggggaagctcatcggcaaagt

SEQ ID NO: 187753 - DNA, 25 bp, probe
ccctggggaagctcatcggcaaagt

SEQ ID NO: 187754 - DNA, 25 bp, probe
ccctaaggacgtcatcggcagagga

SEQ ID NO: 187755 - DNA, 25 bp, probe
ccctgaataaagccaacccaaggtg

SEQ ID NO: 187756 - DNA, 25 bp, probe
ccctatctctttctacctatgaggt

SEQ ID NO: 187757 - DNA, 25 bp, probe
ccctatcagtatactagcaccttga

SEQ ID NO: 187758 - DNA, 25 bp, probe
ccctccagtgtcttctgacacttgt

SEQ ID NO: 187759 - DNA, 25 bp, probe
ccctcacagacttttagacatcgta

SEQ ID NO: 187760 - DNA, 25 bp, probe
ccctgcacaagccatttaatctcac

SEQ ID NO: 187761 - DNA, 25 bp, probe
ccctcccaggtgttaacattccaag

SEQ ID NO: 187762 - DNA, 25 bp, probe
ccctcccaggtgttaacattccaag

SEQ ID NO: 187763 - DNA, 25 bp, probe
ccctcccagggagcaatttcagtgc

SEQ ID NO: 187764 - DNA, 25 bp, probe
ccctctccagcataaaacctagtga

SEQ ID NO: 187765 - DNA, 25 bp, probe
ccctcccggaaaagtctctgagctg

SEQ ID NO: 187766 - DNA, 25 bp, probe
ccctccgggaaactgtggcgtgatg

SEQ ID NO: 187767 - DNA, 25 bp, probe
ccctccgaggctaccagtggggagg

SEQ ID NO: 187768 - DNA, 25 bp, probe
ccctccgaggctaccagtggggagg

SEQ ID NO: 187769 - DNA, 25 bp, probe
ccctcctatagccccatggtggggc

SEQ ID NO: 187770 - DNA, 25 bp, probe
ccctgtgttcaccacgagtgtggct

SEQ ID NO: 187771 - DNA, 25 bp, probe
ccctgtcttctgggcacagtggact

SEQ ID NO: 187772 - DNA, 25 bp, probe
ccctgagtcctgcttcactggactc

SEQ ID NO: 187773 - DNA, 25 bp, probe
ccctgatgctttcgtgatcacgtga

SEQ ID NO: 187774 - DNA, 25 bp, probe
ccctgcagtgtccagctaagctgat

SEQ ID NO: 187775 - DNA, 25 bp, probe
ccctgcagtgtccagctaagctgat

SEQ ID NO: 187776 - DNA, 25 bp, probe
ccctcagcagcctcaacagctgcat

SEQ ID NO: 187777 - DNA, 25 bp, probe
ccctactcctacaacgtgcaggaca

SEQ ID NO: 187778 - DNA, 25 bp, probe
ccctactcctacaacgtgcaggaca

SEQ ID NO: 187779 - DNA, 25 bp, probe
ccctccccaatcaagcctggagata

SEQ ID NO: 187780 - DNA, 25 bp, probe
ccctcatggaaagacagctggatgt

SEQ ID NO: 187781 - DNA, 25 bp, probe
ccctcatggccaacgacgaggagtc

SEQ ID NO: 187782 - DNA, 25 bp, probe
ccctcagctgacactgaagacgagc

SEQ ID NO: 187783 - DNA, 25 bp, probe
ccctaggaagtgccagtgcagcggc

SEQ ID NO: 187784 - DNA, 25 bp, probe
ccctaggcctggccaggcattgtcc

SEQ ID NO: 187785 - DNA, 25 bp, probe
ccctgtgtggctgtatgccagactc

SEQ ID NO: 187786 - DNA, 25 bp, probe
ccctggtgagtcgaatcacggaccc

SEQ ID NO: 187787 - DNA, 25 bp, probe
ccgcgggacaaatcctgagtcaccc

SEQ ID NO: 187788 - DNA, 25 bp, probe
ccgcgggacaaatcctgagtcaccc

SEQ ID NO: 187789 - DNA, 25 bp, probe
cccgggacaacagcagggacagctc

SEQ ID NO: 187790 - DNA, 25 bp, probe
ccctgggaaaagtgaagtatggctg

SEQ ID NO: 187791 - DNA, 25 bp, probe
ccctgggggaagccctggatttcag

SEQ ID NO: 187792 - DNA, 25 bp, probe
ccctcatggggaaaccttgctttat

SEQ ID NO: 187793 - DNA, 25 bp, probe
ccccatgaggtgtccactttgattt

SEQ ID NO: 187794 - DNA, 25 bp, probe
ccctagggaatccacacttaatata

SEQ ID NO: 187795 - DNA, 25 bp, probe
ccctatgacgaaaaagcagctaatg

SEQ ID NO: 187796 - DNA, 25 bp, probe
ccctcatcaggatccaatcaggaag

SEQ ID NO: 187797 - DNA, 25 bp, probe
ccctctatggtcttcaacaaggagg

SEQ ID NO: 187798 - DNA, 25 bp, probe
ccctcctggatcactactatgtatg

SEQ ID NO: 187799 - DNA, 25 bp, probe
ccctggcaggtttccctgcagtatg

SEQ ID NO: 187800 - DNA, 25 bp, probe
cccggggacttcgttactgatgccg

SEQ ID NO: 187801 - DNA, 25 bp, probe
ccctggggctagccagttactggtc

SEQ ID NO: 187802 - DNA, 25 bp, probe
ccctgggctgcattgggttggtggc

SEQ ID NO: 187803 - DNA, 25 bp, probe
ccctacctgcatgggtttcggtgtt

SEQ ID NO: 187804 - DNA, 25 bp, probe
ccctacctgcatgggtttcggtgtt

SEQ ID NO: 187805 - DNA, 25 bp, probe
ccctacctgcatgggtttcggtgtt

SEQ ID NO: 187806 - DNA, 25 bp, probe
cccgatggcgagtgtttgccggtgc

SEQ ID NO: 187807 - DNA, 25 bp, probe
cccgctgggagaagttcttcatggt

SEQ ID NO: 187808 - DNA, 25 bp, probe
cccgtgattagtagcccgtatgatc

SEQ ID NO: 187809 - DNA, 25 bp, probe
cccgatcatctcctagaacttcaat

SEQ ID NO: 187810 - DNA, 25 bp, probe
cccgatcatctcctagaacttcaat

SEQ ID NO: 187811 - DNA, 25 bp, probe
cccgagccgcctggataccgcagct

SEQ ID NO: 187812 - DNA, 25 bp, probe
ccctaccgctgaggagatgtccagc

SEQ ID NO: 187813 - DNA, 25 bp, probe
ccctactttgtgcaggtcatacctc

SEQ ID NO: 187814 - DNA, 25 bp, probe
cccgtccttgtgccaggtcaaggtg

SEQ ID NO: 187815 - DNA, 25 bp, probe
cccgtccttgtgccaggtcaaggtg

SEQ ID NO: 187816 - DNA, 25 bp, probe
cccggccattgatgaaggcaagctg

SEQ ID NO: 187817 - DNA, 25 bp, probe
ccctggctgacctgaagcgccagcg

SEQ ID NO: 187818 - DNA, 25 bp, probe
ccctgtgcaggctcaagagctggcg

SEQ ID NO: 187819 - DNA, 25 bp, probe
ccctggcagcgctcaaaccagtgag

SEQ ID NO: 187820 - DNA, 25 bp, probe
ccctctgtcctgcaaacacaatgag

SEQ ID NO: 187821 - DNA, 25 bp, probe
ccctctgctgggacaaagtgcttgg

SEQ ID NO: 187822 - DNA, 25 bp, probe
ccctcttgtggcaagaactgtggac

SEQ ID NO: 187823 - DNA, 25 bp, probe
ccctcagttgtgccagcagagttgg

SEQ ID NO: 187824 - DNA, 25 bp, probe
ccctcagttgtgccagcagagttgg

SEQ ID NO: 187825 - DNA, 25 bp, probe
ccctgcattgtacgacaggactcag

SEQ ID NO: 187826 - DNA, 25 bp, probe
ccctgtgtctgacgacagtgacctc

SEQ ID NO: 187827 - DNA, 25 bp, probe
ccctgtgttccagaggacctgatgc

SEQ ID NO: 187828 - DNA, 25 bp, probe
ccctcggaccatcgaggtcctgatg

SEQ ID NO: 187829 - DNA, 25 bp, probe
ccctcaggcccacaggtttaaggct

SEQ ID NO: 187830 - DNA, 25 bp, probe
ccctcaggcccacaggtttaaggct

SEQ ID NO: 187831 - DNA, 25 bp, probe
ccctgattgcccgtaggttaagagg

SEQ ID NO: 187832 - DNA, 25 bp, probe
ccctgcccaccaggattgctggaag

SEQ ID NO: 187833 - DNA, 25 bp, probe
ccctccccagagccaacatgaaagg

SEQ ID NO: 187834 - DNA, 25 bp, probe
ccctccccagagccaacatgaaagg

SEQ ID NO: 187835 - DNA, 25 bp, probe
ccctccacctcacttgacaaggaga

SEQ ID NO: 187836 - DNA, 25 bp, probe
ccctcgacagctgattggcggattg

SEQ ID NO: 187837 - DNA, 25 bp, probe
ccctccagaattatgtcaggttggc

SEQ ID NO: 187838 - DNA, 25 bp, probe
ccctccatggttacgtcagtcgtgt

SEQ ID NO: 187839 - DNA, 25 bp, probe
ccctccatggttacgtcagtcgtgt

SEQ ID NO: 187840 - DNA, 25 bp, probe
ccccagcctggtatggagtccagtc

SEQ ID NO: 187841 - DNA, 25 bp, probe
ccctcgccattgatgtgaacttcag

SEQ ID NO: 187842 - DNA, 25 bp, probe
ccctgcgtgcaaacatgtaccgtgg

SEQ ID NO: 187843 - DNA, 25 bp, probe
cccggacacatgggcttctcggggg

SEQ ID NO: 187844 - DNA, 25 bp, probe
cccggacacatgggcttctcggggg

SEQ ID NO: 187845 - DNA, 25 bp, probe
cccggacacatgggcttctcggggg

SEQ ID NO: 187846 - DNA, 25 bp, probe
cccggacacatgggcttctcggggg

SEQ ID NO: 187847 - DNA, 25 bp, probe
ccctggacacagaggtgcccatgga

SEQ ID NO: 187848 - DNA, 25 bp, probe
ccctgtggccaggggtactgcgtga

SEQ ID NO: 187849 - DNA, 25 bp, probe
ccctgtacctgggggagctgggcat

SEQ ID NO: 187850 - DNA, 25 bp, probe
ccctgtcacccgtgctgcacgggat

SEQ ID NO: 187851 - DNA, 25 bp, probe
ccctccccgcagtggaagtgaatcc

SEQ ID NO: 187852 - DNA, 25 bp, probe
ccctcctgcccacgggaggacaagc

SEQ ID NO: 187853 - DNA, 25 bp, probe
ccctccgcttcacgtggagtatgaa

SEQ ID NO: 187854 - DNA, 25 bp, probe
ccctgaattctctgctgtggtatca

SEQ ID NO: 187855 - DNA, 25 bp, probe
ccctgacttggctgtgggctttggg

SEQ ID NO: 187856 - DNA, 25 bp, probe
ccctcggaagcatggggcttttgag

SEQ ID NO: 187857 - DNA, 25 bp, probe
ccctcggaagcatggggcttttgag

SEQ ID NO: 187858 - DNA, 25 bp, probe
cccgcggaggcgcgtgactggttga

SEQ ID NO: 187859 - DNA, 25 bp, probe
cccgggagcccgatgaggggctgcc

SEQ ID NO: 187860 - DNA, 25 bp, probe
cccgggactccgaggtggagatgat

SEQ ID NO: 187861 - DNA, 25 bp, probe
cccgaggttccaaaggtgaatatca

SEQ ID NO: 187862 - DNA, 25 bp, probe
cccgaggttccaaaggtgaatatca

SEQ ID NO: 187863 - DNA, 25 bp, probe
cccgagggaataaacggcagattca

SEQ ID NO: 187864 - DNA, 25 bp, probe
cccggtggaggtgagctacaaacac

SEQ ID NO: 187865 - DNA, 25 bp, probe
cccgggggaacatgattccacagcc

SEQ ID NO: 187866 - DNA, 25 bp, probe
ccctgtggtggatttcacttacaag

SEQ ID NO: 187867 - DNA, 25 bp, probe
ccctggagggacatcagtgcttcct

SEQ ID NO: 187868 - DNA, 25 bp, probe
ccctgcgggagattaaggctctgca

SEQ ID NO: 187869 - DNA, 25 bp, probe
ccctgtggggtatagccggcacatg

SEQ ID NO: 187870 - DNA, 25 bp, probe
ccctgcggctggaggatacggtcgc

SEQ ID NO: 187871 - DNA, 25 bp, probe
ccctggctgtgatgggaacggtccc

SEQ ID NO: 187872 - DNA, 25 bp, probe
ccctctgtgctggaggtgtcactgc

SEQ ID NO: 187873 - DNA, 25 bp, probe
cccgtgctgcacgggattcacagcc

SEQ ID NO: 187874 - DNA, 25 bp, probe
ccctgtgctcagatggcttcctgag

SEQ ID NO: 187875 - DNA, 25 bp, probe
ccctgtgccagaagatcgagcagtg

SEQ ID NO: 187876 - DNA, 25 bp, probe
ccctgctgccagctgatctgaaatg

SEQ ID NO: 187877 - DNA, 25 bp, probe
ccctgtgctgtgatgttgagagctg

SEQ ID NO: 187878 - DNA, 25 bp, probe
ccctcattgtgacttatgaggagca

SEQ ID NO: 187879 - DNA, 25 bp, probe
ccctcaggtgatactatgaccatga

SEQ ID NO: 187880 - DNA, 25 bp, probe
ccctcagatgtgtcctaacactgca

SEQ ID NO: 187881 - DNA, 25 bp, probe
ccctccggacctgagactgagtttt

SEQ ID NO: 187882 - DNA, 25 bp, probe
ccctccggactcggatgactggagg

SEQ ID NO: 187883 - DNA, 25 bp, probe
ccctccggactcggatgactggagg

SEQ ID NO: 187884 - DNA, 25 bp, probe
ccctccggactcggatgactggagg

SEQ ID NO: 187885 - DNA, 25 bp, probe
ccctgtcccacttcgaagtggaggt

SEQ ID NO: 187886 - DNA, 25 bp, probe
ccctgtcccacttcgaagtggaggt

SEQ ID NO: 187887 - DNA, 25 bp, probe
ccctccactagcatctacctggagg

SEQ ID NO: 187888 - DNA, 25 bp, probe
ccctcctgtgaagttacactgtagg

SEQ ID NO: 187889 - DNA, 25 bp, probe
ccctcatcttgaagggcccaggagg

SEQ ID NO: 187890 - DNA, 25 bp, probe
cctcctaatgacgcggctcaaaagg

SEQ ID NO: 187891 - DNA, 25 bp, probe
ccctcttatgcctgcaggctcagaa

SEQ ID NO: 187892 - DNA, 25 bp, probe
ccctcgtgaggctggatctcaaaaa

SEQ ID NO: 187893 - DNA, 25 bp, probe
ccctgcagctcaggaaggctgtcag

SEQ ID NO: 187894 - DNA, 25 bp, probe
ccctgcctgaggatagcagctgcag

SEQ ID NO: 187895 - DNA, 25 bp, probe
ccctgcctgaggatagcagctgcag

SEQ ID NO: 187896 - DNA, 25 bp, probe
ccctgcgtgaagagcatcgtgaggc

SEQ ID NO: 187897 - DNA, 25 bp, probe
ccctcagagagaatccagtggagga

SEQ ID NO: 187898 - DNA, 25 bp, probe
ccctcagacagctggcatgagagag

SEQ ID NO: 187899 - DNA, 25 bp, probe
ccctcatgctcctggtgacatggga

SEQ ID NO: 187900 - DNA, 25 bp, probe
ccctcatgtatacttggatatggcg

SEQ ID NO: 187901 - DNA, 25 bp, probe
ccctcgagattttggaattcgtgca

SEQ ID NO: 187902 - DNA, 25 bp, probe
ccccgacttccaggagtttgtcaat

SEQ ID NO: 187903 - DNA, 25 bp, probe
ccccgacattcctcggtatttattg

SEQ ID NO: 187904 - DNA, 25 bp, probe
ccccgacattcctcggtatttattg

SEQ ID NO: 187905 - DNA, 25 bp, probe
cccccacatttctcgggtttgtgag

SEQ ID NO: 187906 - DNA, 25 bp, probe
cccccacatttctcgggtttgtgag

SEQ ID NO: 187907 - DNA, 25 bp, probe
ccctcccattttgatggtgtctgtg

SEQ ID NO: 187908 - DNA, 25 bp, probe
ccctccctgcttttaagcaggcgtt

SEQ ID NO: 187909 - DNA, 25 bp, probe
ccctccttcatatgaaaggtgccat

SEQ ID NO: 187910 - DNA, 25 bp, probe
ccctcctccatctcaagggatcaac

SEQ ID NO: 187911 - DNA, 25 bp, probe
cccccccacaacagtgtgttagctc

SEQ ID NO: 187912 - DNA, 25 bp, probe
ccctccccagctattttatgtctgt

SEQ ID NO: 187913 - DNA, 25 bp, probe
ccctctcccgttttgattttgtgag

SEQ ID NO: 187914 - DNA, 25 bp, probe
ccccgaccggtgggcatttgtgagg

SEQ ID NO: 187915 - DNA, 25 bp, probe
ccccgtccttagaatcttctggagg

SEQ ID NO: 187916 - DNA, 25 bp, probe
cccccttttagagcatccggaagtg

SEQ ID NO: 187917 - DNA, 25 bp, probe
ccagcaccctttgtttcgggagatc

SEQ ID NO: 187918 - DNA, 25 bp, probe
cccgtccttagaatcttctggagga

SEQ ID NO: 187919 - DNA, 25 bp, probe
cccgttatctatgtctttatgaacc

SEQ ID NO: 187920 - DNA, 25 bp, probe
ccctgtttcctggtacttatcaaat

SEQ ID NO: 187921 - DNA, 25 bp, probe
ccctggtttgcagctgttttcaaag

SEQ ID NO: 187922 - DNA, 25 bp, probe
cccgatgttagaaatggttccagaa

SEQ ID NO: 187923 - DNA, 25 bp, probe
cccgtgattccaagtgcttatccaa

SEQ ID NO: 187924 - DNA, 25 bp, probe
cccgtgattccaagtgcttatccaa

SEQ ID NO: 187925 - DNA, 25 bp, probe
cccgtcctcacaagctttaactgag

SEQ ID NO: 187926 - DNA, 25 bp, probe
cccgtcctcacaagctttaactgag

SEQ ID NO: 187927 - DNA, 25 bp, probe
cccgcacccgtatttatacagctgc

SEQ ID NO: 187928 - DNA, 25 bp, probe
ccctcagtgaacatcttaagcagcg

SEQ ID NO: 187929 - DNA, 25 bp, probe
ccctgcagggagtctgcattcaagc

SEQ ID NO: 187930 - DNA, 25 bp, probe
cccgctgaggagctgaccatgagcc

SEQ ID NO: 187931 - DNA, 25 bp, probe
cccgctgaggagctgaccatgagcc

SEQ ID NO: 187932 - DNA, 25 bp, probe
ccctgcaggctgtcacatgactcat

SEQ ID NO: 187933 - DNA, 25 bp, probe
ccctggtgcgcattgagatccatgg

SEQ ID NO: 187934 - DNA, 25 bp, probe
ccctccatgctataatccagtggtg

SEQ ID NO: 187935 - DNA, 25 bp, probe
ccctccactatctgaccattatgag

SEQ ID NO: 187936 - DNA, 25 bp, probe
ccctcgccttcaggagaatctacac

SEQ ID NO: 187937 - DNA, 25 bp, probe
ccctcgccttcaggagaatctacac

SEQ ID NO: 187938 - DNA, 25 bp, probe
ccctgccctctagaaagctcagatc

SEQ ID NO: 187939 - DNA, 25 bp, probe
ccctctcccttgagaagctgagtct

SEQ ID NO: 187940 - DNA, 25 bp, probe
ccctctggccggacagaactggtgc

SEQ ID NO: 187941 - DNA, 25 bp, probe
ccctctggccggacagaactggtgc

SEQ ID NO: 187942 - DNA, 25 bp, probe
ccctctggccggacagaactggtgc

SEQ ID NO: 187943 - DNA, 25 bp, probe
ccctgctagctgccttagaacgggc

SEQ ID NO: 187944 - DNA, 25 bp, probe
ccctgctagctgccttagaacgggc

SEQ ID NO: 187945 - DNA, 25 bp, probe
ccctgatggctgccatccagcacgg

SEQ ID NO: 187946 - DNA, 25 bp, probe
ccctggatgcagccatgttgcacga

SEQ ID NO: 187947 - DNA, 25 bp, probe
ccctggagcatcctggagcatctcc

SEQ ID NO: 187948 - DNA, 25 bp, probe
ccccgacacaaggagctcttgttct

SEQ ID NO: 187949 - DNA, 25 bp, probe
ccctcgaaggaggacctcagcttcc

SEQ ID NO: 187950 - DNA, 25 bp, probe
ccctcgaaggaggacctcagcttcc

SEQ ID NO: 187951 - DNA, 25 bp, probe
ccctccagggaggaagtcagagtgc

SEQ ID NO: 187952 - DNA, 25 bp, probe
ccctcgagtggagccagacagcagt

SEQ ID NO: 187953 - DNA, 25 bp, probe
ccctctcaggtcagaagacatgcct

SEQ ID NO: 187954 - DNA, 25 bp, probe
ccctctcaggatccaagctaagcac

SEQ ID NO: 187955 - DNA, 25 bp, probe
ccctgcttgggaacatctcacgagc

SEQ ID NO: 187956 - DNA, 25 bp, probe
ccctgatgtcggtcaaccacgagga

SEQ ID NO: 187957 - DNA, 25 bp, probe
ccctgatgtcggtcaaccacgagga

SEQ ID NO: 187958 - DNA, 25 bp, probe
ccccattgccgagacacaagacgac

SEQ ID NO: 187959 - DNA, 25 bp, probe
ccccattgccgagacacaagacgac

SEQ ID NO: 187960 - DNA, 25 bp, probe
cccctggccaaggtcatccatgaca

SEQ ID NO: 187961 - DNA, 25 bp, probe
ccctctgggaacgcatcctgagagg

SEQ ID NO: 187962 - DNA, 25 bp, probe
ccctgcggtagccaatcccaaaggg

SEQ ID NO: 187963 - DNA, 25 bp, probe
ccctctggtcccacccacagaggga

SEQ ID NO: 187964 - DNA, 25 bp, probe
ccctcggtcctctgaacacagagtc

SEQ ID NO: 187965 - DNA, 25 bp, probe
ccctcggtctactagcaacaacaac

SEQ ID NO: 187966 - DNA, 25 bp, probe
ccctcggtctactagcaacaacaac

SEQ ID NO: 187967 - DNA, 25 bp, probe
ccctccttccacatgtacataaact

SEQ ID NO: 187968 - DNA, 25 bp, probe
ccctccttttcaggtaaggagacag

SEQ ID NO: 187969 - DNA, 25 bp, probe
cccgcctctttcgagaggaaaaatg

SEQ ID NO: 187970 - DNA, 25 bp, probe
cccgcctgaaccgagtagaagacaa

SEQ ID NO: 187971 - DNA, 25 bp, probe
cccggcagaggacagtaaaagcaaa

SEQ ID NO: 187972 - DNA, 25 bp, probe
ccctggtgttgactgactttaacaa

SEQ ID NO: 187973 - DNA, 25 bp, probe
ccctggtgttgactgactttaacaa

SEQ ID NO: 187974 - DNA, 25 bp, probe
ccctggatttgcatacattcttcaa

SEQ ID NO: 187975 - DNA, 25 bp, probe
ccctgtcatatatttaatggcttca

SEQ ID NO: 187976 - DNA, 25 bp, probe
cccgctgctatttggaatctttaac

SEQ ID NO: 187977 - DNA, 25 bp, probe
cccgctgctatttggaatctttaac

SEQ ID NO: 187978 - DNA, 25 bp, probe
ccctgctttgggaatatggatgtaa

SEQ ID NO: 187979 - DNA, 25 bp, probe
ccctgctttgggaatatggatgtaa

SEQ ID NO: 187980 - DNA, 25 bp, probe
ccctctaccacgtatatgaggtgaa

SEQ ID NO: 187981 - DNA, 25 bp, probe
ccctctattccttgatagcggatta

SEQ ID NO: 187982 - DNA, 25 bp, probe
ccctctttgtctgggtgcggaggag

SEQ ID NO: 187983 - DNA, 25 bp, probe
ccctgttgtcctgggtgtccagagg

SEQ ID NO: 187984 - DNA, 25 bp, probe
ccctgcttcgacgtgtgtgtcatgg

SEQ ID NO: 187985 - DNA, 25 bp, probe
ccctgcctcgcatatatcttcagag

SEQ ID NO: 187986 - DNA, 25 bp, probe
ccctgcctcgcatatatcttcagag

SEQ ID NO: 187987 - DNA, 25 bp, probe
ccgtagccgctgcctatgtaggcag

SEQ ID NO: 187988 - DNA, 25 bp, probe
ccctgcacacctccaagtcagggca

SEQ ID NO: 187989 - DNA, 25 bp, probe
ccctgcacacctccaagtcagggca

SEQ ID NO: 187990 - DNA, 25 bp, probe
ccctgacaccatccagtgtgcatac

SEQ ID NO: 187991 - DNA, 25 bp, probe
ccctgaagcttgcagtgtgcactgc

SEQ ID NO: 187992 - DNA, 25 bp, probe
ccctgcaagaggctggcttcttggt

SEQ ID NO: 187993 - DNA, 25 bp, probe
ccctgcaaggatctgcagttacttt

SEQ ID NO: 187994 - DNA, 25 bp, probe
ccctgaagtgatccgagctctggag

SEQ ID NO: 187995 - DNA, 25 bp, probe
ccctgggttgcagactcagtagcgt

SEQ ID NO: 187996 - DNA, 25 bp, probe
cccgggatcggtttctgtatgcgaa

SEQ ID NO: 187997 - DNA, 25 bp, probe
ccacctggagggtgtcgtgaccaag

SEQ ID NO: 187998 - DNA, 25 bp, probe
ccgcaaaggggacatcggcaaggag

SEQ ID NO: 187999 - DNA, 25 bp, probe
cccgaggcgggacactggaggtgga

SEQ ID NO: 188000 - DNA, 25 bp, probe
cccgagagggcgagaccagagggga

SEQ ID NO: 188001 - DNA, 25 bp, probe
ccctgagagggggtactccaggact

SEQ ID NO: 188002 - DNA, 25 bp, probe
ccctgatgaaagcagtcgcaactgt

SEQ ID NO: 188003 - DNA, 25 bp, probe
ccctgatgagaagatggtcaactac

SEQ ID NO: 188004 - DNA, 25 bp, probe
ccctggcagaatgagatgatcgaat

SEQ ID NO: 188005 - DNA, 25 bp, probe
ccctgactgatagcatttcagaatg

SEQ ID NO: 188006 - DNA, 25 bp, probe
ccctgaagaaacttccagttcctct

SEQ ID NO: 188007 - DNA, 25 bp, probe
ccttcaagaacctccaggtctagcc

SEQ ID NO: 188008 - DNA, 25 bp, probe
ccctgcaaaaaagcctgggctagcc

SEQ ID NO: 188009 - DNA, 25 bp, probe
cccgcaagaagaacctctcaggctt

SEQ ID NO: 188010 - DNA, 25 bp, probe
ccctcccagagaacgtctgcaacat

SEQ ID NO: 188011 - DNA, 25 bp, probe
ccctcccagagaacgtctgcaacat

SEQ ID NO: 188012 - DNA, 25 bp, probe
ccctgccagcaggaagccctgcaac

SEQ ID NO: 188013 - DNA, 25 bp, probe
ccctgctcagaggaacagtgtgaaa

SEQ ID NO: 188014 - DNA, 25 bp, probe
ccctgatctatggactctggaacaa

SEQ ID NO: 188015 - DNA, 25 bp, probe
ccctgcctaataatgctgtaataca

SEQ ID NO: 188016 - DNA, 25 bp, probe
ccctgccaaatctacttcacagact

SEQ ID NO: 188017 - DNA, 25 bp, probe
tcccccaaactgattataggtaaca

SEQ ID NO: 188018 - DNA, 25 bp, probe
cctccggaactacaaacccaacatg

SEQ ID NO: 188019 - DNA, 25 bp, probe
ccccttggaaacagcaatcccaaat

SEQ ID NO: 188020 - DNA, 25 bp, probe
cccccagtaaagagctttctcacaa

SEQ ID NO: 188021 - DNA, 25 bp, probe
ccctccgtagaagtggctgatccta

SEQ ID NO: 188022 - DNA, 25 bp, probe
ccctgccatggacatatggggcctt

SEQ ID NO: 188023 - DNA, 25 bp, probe
ccctcctggccaatgtgcaggtggt

SEQ ID NO: 188024 - DNA, 25 bp, probe
ccctgtctgcagtcagaggaggacg

SEQ ID NO: 188025 - DNA, 25 bp, probe
ccctgtctgcagtcagaggaggacg

SEQ ID NO: 188026 - DNA, 25 bp, probe
ccctgtctgcagtcagaggaggacg

SEQ ID NO: 188027 - DNA, 25 bp, probe
ccctgcctgagcaagggggcatggg

SEQ ID NO: 188028 - DNA, 25 bp, probe
ccctgcccagatagctggtggtggg

SEQ ID NO: 188029 - DNA, 25 bp, probe
ccctgcccagagccgagttgggggt

SEQ ID NO: 188030 - DNA, 25 bp, probe
ccctgccccagtggatttgtggagc

SEQ ID NO: 188031 - DNA, 25 bp, probe
ccctgtcgcacgtgtaggaggctgc

SEQ ID NO: 188032 - DNA, 25 bp, probe
cccgttgaagttccagggagcttgc

SEQ ID NO: 188033 - DNA, 25 bp, probe
cccggaaactgatcagggcagctgc

SEQ ID NO: 188034 - DNA, 25 bp, probe
ccctgtaaactaggcggctgcagca

SEQ ID NO: 188035 - DNA, 25 bp, probe
cccgctacaacttcatccgaagcat

SEQ ID NO: 188036 - DNA, 25 bp, probe
cccgctacaacttcatccgaagcat

SEQ ID NO: 188037 - DNA, 25 bp, probe
cccgctgaccgcgcagccgcatgaa

SEQ ID NO: 188038 - DNA, 25 bp, probe
ccctggcaccggaaggccagcagag

SEQ ID NO: 188039 - DNA, 25 bp, probe
cccggatccatggacggagacaggg

SEQ ID NO: 188040 - DNA, 25 bp, probe
ccctgtgatgcccgactggatgggc

SEQ ID NO: 188041 - DNA, 25 bp, probe
ccctccgcccaggcgagatggggtg

SEQ ID NO: 188042 - DNA, 25 bp, probe
ccccctcccattttgatggtgtctg

SEQ ID NO: 188043 - DNA, 25 bp, probe
ccccctcccattttgatggtgtctg

SEQ ID NO: 188044 - DNA, 25 bp, probe
ccctcgctgcgatctattgaaagtc

SEQ ID NO: 188045 - DNA, 25 bp, probe
ccctccctgggttcagaaatgctgc

SEQ ID NO: 188046 - DNA, 25 bp, probe
ccctcccagcaactacagagaaggc

SEQ ID NO: 188047 - DNA, 25 bp, probe
ccctccagcgagtcccaggagagtg

SEQ ID NO: 188048 - DNA, 25 bp, probe
ccctccagcggtgcaatgaactata

SEQ ID NO: 188049 - DNA, 25 bp, probe
ccctccagcggtgcagaaactgaag

SEQ ID NO: 188050 - DNA, 25 bp, probe
cccctacgtctgaataaaagcaatg

SEQ ID NO: 188051 - DNA, 25 bp, probe
cccgtggccattactgcataaaaat

SEQ ID NO: 188052 - DNA, 25 bp, probe
cccgttggtctatgattgacaagta

SEQ ID NO: 188053 - DNA, 25 bp, probe
ccccttggatctctttgactatatc

SEQ ID NO: 188054 - DNA, 25 bp, probe
cctaattacattgctcctgaaattt

SEQ ID NO: 188055 - DNA, 25 bp, probe
ccctgagtacttggcacctgaagtg

SEQ ID NO: 188056 - DNA, 25 bp, probe
ccctgagtacttggcacctgaagtg

SEQ ID NO: 188057 - DNA, 25 bp, probe
cccgacatacattggtctctccaat

SEQ ID NO: 188058 - DNA, 25 bp, probe
ccctgccgatattgagtccctgcag

SEQ ID NO: 188059 - DNA, 25 bp, probe
ccctgccgatattgagtccctgcag

SEQ ID NO: 188060 - DNA, 25 bp, probe
ccctgccattcatgtgtatcctggt

SEQ ID NO: 188061 - DNA, 25 bp, probe
ccctgaacatcattgatttactggc

SEQ ID NO: 188062 - DNA, 25 bp, probe
ccctgaacatcattgatttactggc

SEQ ID NO: 188063 - DNA, 25 bp, probe
ccctgacattcatgatccaaagata

SEQ ID NO: 188064 - DNA, 25 bp, probe
ccctgaactgcttgctcatcagaaa

SEQ ID NO: 188065 - DNA, 25 bp, probe
ccctgaagtgcttcccaatcagtaa

SEQ ID NO: 188066 - DNA, 25 bp, probe
ccgtaccttactgagatctggagac

SEQ ID NO: 188067 - DNA, 25 bp, probe
cctgtccgcatataccaccagggac

SEQ ID NO: 188068 - DNA, 25 bp, probe
ccctgccgaaaacgagacaattgaa

SEQ ID NO: 188069 - DNA, 25 bp, probe
tccccggaacctcagaacaattgaa

SEQ ID NO: 188070 - DNA, 25 bp, probe
cccctggcaaccacaaatctttcca

SEQ ID NO: 188071 - DNA, 25 bp, probe
cccctgaaagcctcacgtatttcac

SEQ ID NO: 188072 - DNA, 25 bp, probe
ccctgctggaaggcaccatggttag

SEQ ID NO: 188073 - DNA, 25 bp, probe
ccctgtgggaggtgctgatgctctg

SEQ ID NO: 188074 - DNA, 25 bp, probe
ccctgctgggatctttgagcttgtg

SEQ ID NO: 188075 - DNA, 25 bp, probe
ccctgcatggattccttgtggcttt

SEQ ID NO: 188076 - DNA, 25 bp, probe
cccctggcatatgtggagacgctcc

SEQ ID NO: 188077 - DNA, 25 bp, probe
ccccctgcatctatcgagtttgcaa

SEQ ID NO: 188078 - DNA, 25 bp, probe
ccctccatctctagataagtgtcat

SEQ ID NO: 188079 - DNA, 25 bp, probe
ccctgcagcccaagatgggactcag

SEQ ID NO: 188080 - DNA, 25 bp, probe
ccctgcagcgccaatgaggatctgc

SEQ ID NO: 188081 - DNA, 25 bp, probe
ccctgctggtcaaagtcattgccca

SEQ ID NO: 188082 - DNA, 25 bp, probe
ccctggggcaaatcatgcccctgga

SEQ ID NO: 188083 - DNA, 25 bp, probe
ccctggggcaaatcatgcccctgga

SEQ ID NO: 188084 - DNA, 25 bp, probe
cccgtggagaattgattccccgaag

SEQ ID NO: 188085 - DNA, 25 bp, probe
cccgtgtggccaagttggcgtgcca

SEQ ID NO: 188086 - DNA, 25 bp, probe
ccctgatgtgttgtgtctggggctc

SEQ ID NO: 188087 - DNA, 25 bp, probe
ccctgtctgtctgatttgctgaact

SEQ ID NO: 188088 - DNA, 25 bp, probe
ccctgtgtgtgctcagtgccatgaa

SEQ ID NO: 188089 - DNA, 25 bp, probe
ccctgtcattgctggtcttgcaaga

SEQ ID NO: 188090 - DNA, 25 bp, probe
ccctgtcattgctggtcttgcaaga

SEQ ID NO: 188091 - DNA, 25 bp, probe
ccctgttacacgctgcttgtagaca

SEQ ID NO: 188092 - DNA, 25 bp, probe
ccctggtaccagctgtcaaacaatg

SEQ ID NO: 188093 - DNA, 25 bp, probe
ccctggtaccagctgtcaaacaatg

SEQ ID NO: 188094 - DNA, 25 bp, probe
cccggaagcgacttgccaagacagt

SEQ ID NO: 188095 - DNA, 25 bp, probe
cccggaagcgacttgccaagacagt

SEQ ID NO: 188096 - DNA, 25 bp, probe
ccctgacatagaccttcacaaccag

SEQ ID NO: 188097 - DNA, 25 bp, probe
ccctgacatagaccttcacaaccag

SEQ ID NO: 188098 - DNA, 25 bp, probe
ccctccaatgtccttatcaacaagg

SEQ ID NO: 188099 - DNA, 25 bp, probe
ccctccacgacgcagcagagaacgg

SEQ ID NO: 188100 - DNA, 25 bp, probe
ccctccacgacgcagcagagaacgg

SEQ ID NO: 188101 - DNA, 25 bp, probe
ccctgctgcccacaagcatgaggca

SEQ ID NO: 188102 - DNA, 25 bp, probe
ccctggccacagtaattggtcatgt

SEQ ID NO: 188103 - DNA, 25 bp, probe
ccctggccacagtaattggtcatgt

SEQ ID NO: 188104 - DNA, 25 bp, probe
ccctgaagccaggaactatgtctgt

SEQ ID NO: 188105 - DNA, 25 bp, probe
ccctgaagccaggaactatgtctgt

SEQ ID NO: 188106 - DNA, 25 bp, probe
cccggcagtcaggaggcctggtgtt

SEQ ID NO: 188107 - DNA, 25 bp, probe
cccggatgaagagggctggccgtgt

SEQ ID NO: 188108 - DNA, 25 bp, probe
ccctggaggagatgccaaccgttca

SEQ ID NO: 188109 - DNA, 25 bp, probe
ccctggagactgggaaaaggccgca

SEQ ID NO: 188110 - DNA, 25 bp, probe
ccctgcgaacgcgggaggaggtcag

SEQ ID NO: 188111 - DNA, 25 bp, probe
ccctgcgaacgcgggaggaggtcag

SEQ ID NO: 188112 - DNA, 25 bp, probe
ccctgcaacctccctaatgcaggtc

SEQ ID NO: 188113 - DNA, 25 bp, probe
ccctggtcctgccatattcataggg

SEQ ID NO: 188114 - DNA, 25 bp, probe
ccctgcgtctcagacatgttgagaa

SEQ ID NO: 188115 - DNA, 25 bp, probe
cccggtcacctgccatgatggaaat

SEQ ID NO: 188116 - DNA, 25 bp, probe
cccgggcccatgatggccatagatt

SEQ ID NO: 188117 - DNA, 25 bp, probe
cccgtgaccctgaggtcgtcaatga

SEQ ID NO: 188118 - DNA, 25 bp, probe
ccctggaccctgagaactctcatga

SEQ ID NO: 188119 - DNA, 25 bp, probe
ccctggctacccagatttcactgac

SEQ ID NO: 188120 - DNA, 25 bp, probe
cccggtctgtccggtttgcagtact

SEQ ID NO: 188121 - DNA, 25 bp, probe
cccgtgtagctcggggcttggtgcc

SEQ ID NO: 188122 - DNA, 25 bp, probe
cccgtgtagctcggggcttggtgcc

SEQ ID NO: 188123 - DNA, 25 bp, probe
ccctgtgtcgtcagaggcttgtgat

SEQ ID NO: 188124 - DNA, 25 bp, probe
ccctgcgacctgaaaggcattggtt

SEQ ID NO: 188125 - DNA, 25 bp, probe
ccctggtgcactcaacagttgggtg

SEQ ID NO: 188126 - DNA, 25 bp, probe
cccggtgcacgccgaaatttctgtt

SEQ ID NO: 188127 - DNA, 25 bp, probe
cctccggacctgagactgagttttg

SEQ ID NO: 188128 - DNA, 25 bp, probe
cccgtgggcctagatggagataatt

SEQ ID NO: 188129 - DNA, 25 bp, probe
cccgtgggcgccacggtcaacatgg

SEQ ID NO: 188130 - DNA, 25 bp, probe
cccgtgggcgccacggtcaacatgg

SEQ ID NO: 188131 - DNA, 25 bp, probe
cccgtgcaggtgacccaggtagagg

SEQ ID NO: 188132 - DNA, 25 bp, probe
cccggagtgcatacatggaggaaga

SEQ ID NO: 188133 - DNA, 25 bp, probe
cccggaggctcacagggaacaagac

SEQ ID NO: 188134 - DNA, 25 bp, probe
ccctgctgaggggctcagggaaaag

SEQ ID NO: 188135 - DNA, 25 bp, probe
ccctgggtgtcctcaggcagaattg

SEQ ID NO: 188136 - DNA, 25 bp, probe
ccctgctgggtatccggcagaatgg

SEQ ID NO: 188137 - DNA, 25 bp, probe
ccctgtggagatttcctgtgagaac

SEQ ID NO: 188138 - DNA, 25 bp, probe
cccgtggagttgtccatcgtgacat

SEQ ID NO: 188139 - DNA, 25 bp, probe
cccctggcaaggtcctcgataaagg

SEQ ID NO: 188140 - DNA, 25 bp, probe
ccccagctcagagtacctcgggaat

SEQ ID NO: 188141 - DNA, 25 bp, probe
cccccggagtacttcagaatgcaat

SEQ ID NO: 188142 - DNA, 25 bp, probe
cccctcgcatggaactcgggtgaag

SEQ ID NO: 188143 - DNA, 25 bp, probe
ccctgcaggcggtatccagaggtga

SEQ ID NO: 188144 - DNA, 25 bp, probe
ccctgcgggtgcttctgaggagatg

SEQ ID NO: 188145 - DNA, 25 bp, probe
ccctgctgggctgcatcaaggagca

SEQ ID NO: 188146 - DNA, 25 bp, probe
ccctgctgggctgcatcaaggagca

SEQ ID NO: 188147 - DNA, 25 bp, probe
cccgcagggtccaaaggccagcggt

SEQ ID NO: 188148 - DNA, 25 bp, probe
ccctggggatgcccaaggccagaat

SEQ ID NO: 188149 - DNA, 25 bp, probe
ccctgggtgatcaccatggctgcag

SEQ ID NO: 188150 - DNA, 25 bp, probe
ccctgaggcggatgtatggtcactg

SEQ ID NO: 188151 - DNA, 25 bp, probe
ccctgaagcgaatcctgtgtcacga

SEQ ID NO: 188152 - DNA, 25 bp, probe
ccctgacacgggtccttcatcagga

SEQ ID NO: 188153 - DNA, 25 bp, probe
ccctgtatcgtggaccttttgtgaa

SEQ ID NO: 188154 - DNA, 25 bp, probe
cccgagatcctcaacactactggga

SEQ ID NO: 188155 - DNA, 25 bp, probe
cccgagcacctgaatgacgtcaacg

SEQ ID NO: 188156 - DNA, 25 bp, probe
cccgagcacctgaatgacgtcaacg

SEQ ID NO: 188157 - DNA, 25 bp, probe
ccctggcccacagtgactgtaaagt

SEQ ID NO: 188158 - DNA, 25 bp, probe
ccctggcccacagtgactgtaaagt

SEQ ID NO: 188159 - DNA, 25 bp, probe
cccggccccaacatgggcaagggtg

SEQ ID NO: 188160 - DNA, 25 bp, probe
cccggccccaacatgggcaagggtg

SEQ ID NO: 188161 - DNA, 25 bp, probe
ccctgagccctgatttgtggtaggg

SEQ ID NO: 188162 - DNA, 25 bp, probe
ccgctgtctttgagttgtggtggac

SEQ ID NO: 188163 - DNA, 25 bp, probe
cccgtgcatgggttggctgtgggga

SEQ ID NO: 188164 - DNA, 25 bp, probe
cccgctgcggaatgggcgggtggct

SEQ ID NO: 188165 - DNA, 25 bp, probe
ccctgctgtggttggcttggggtgg

SEQ ID NO: 188166 - DNA, 25 bp, probe
ccctggacgtttcttgtgcgtgaga

SEQ ID NO: 188167 - DNA, 25 bp, probe
ccctgaacgttagtctcttgcatgg

SEQ ID NO: 188168 - DNA, 25 bp, probe
ccctgagccgtttgccaagctcatg

SEQ ID NO: 188169 - DNA, 25 bp, probe
ccctgagccgtttgccaagctcatg

SEQ ID NO: 188170 - DNA, 25 bp, probe
ccctggctctgtcaggcagaacagc

SEQ ID NO: 188171 - DNA, 25 bp, probe
ccctgttcgcatcagtggcgatgac

SEQ ID NO: 188172 - DNA, 25 bp, probe
ccctgctctcagagggcgctgatga

SEQ ID NO: 188173 - DNA, 25 bp, probe
ccctggccagcattgtggcttgtca

SEQ ID NO: 188174 - DNA, 25 bp, probe
ccctgtgactgcttgtaaagctaag

SEQ ID NO: 188175 - DNA, 25 bp, probe
ccctgtgcaggctgaaaaccatgac

SEQ ID NO: 188176 - DNA, 25 bp, probe
ccctgcacaggatatcaaagctctg

SEQ ID NO: 188177 - DNA, 25 bp, probe
ccctgcacagttcacagaagcctgc

SEQ ID NO: 188178 - DNA, 25 bp, probe
ccctgcacgtggggctgacagtgcg

SEQ ID NO: 188179 - DNA, 25 bp, probe
ccttcaggtagcggttgagtgcgat

SEQ ID NO: 188180 - DNA, 25 bp, probe
ccctgcaaagaggctgattgaggag

SEQ ID NO: 188181 - DNA, 25 bp, probe
ccgctgaccatgcctggttatggag

SEQ ID NO: 188182 - DNA, 25 bp, probe
ccctgatctgcggcgatttatcgat

SEQ ID NO: 188183 - DNA, 25 bp, probe
ccctgacctggccatcttgaggggt

SEQ ID NO: 188184 - DNA, 25 bp, probe
ccctgaactccttgctgctaagaag

SEQ ID NO: 188185 - DNA, 25 bp, probe
cccgaactccaccggaggcaattgc

SEQ ID NO: 188186 - DNA, 25 bp, probe
cccgaactccaccggaggcaattgc

SEQ ID NO: 188187 - DNA, 25 bp, probe
cccgaactccaccggaggcaattgc

SEQ ID NO: 188188 - DNA, 25 bp, probe
cccgagactaccaggagagccctgg

SEQ ID NO: 188189 - DNA, 25 bp, probe
cccgagttactcagagcaactttgc

SEQ ID NO: 188190 - DNA, 25 bp, probe
ccctgaatttccagacacctgggcc

SEQ ID NO: 188191 - DNA, 25 bp, probe
ccctgaatttgacctacttgctggg

SEQ ID NO: 188192 - DNA, 25 bp, probe
cccgcacaggtctttccttatggga

SEQ ID NO: 188193 - DNA, 25 bp, probe
ccccagcaggcctgaccaaaaaagg

SEQ ID NO: 188194 - DNA, 25 bp, probe
ccccaaatccctgactcaataaagt

SEQ ID NO: 188195 - DNA, 25 bp, probe
cccccgattcctggacaaccagagg

SEQ ID NO: 188196 - DNA, 25 bp, probe
cccccgattcctggacaaccagagg

SEQ ID NO: 188197 - DNA, 25 bp, probe
cccccaactactgcgaccagatggg

SEQ ID NO: 188198 - DNA, 25 bp, probe
cccccaactactgcgaccagatggg

SEQ ID NO: 188199 - DNA, 25 bp, probe
cccccaactactgcgaccagatggg

SEQ ID NO: 188200 - DNA, 25 bp, probe
cccctaaataatgtgctctccggct

SEQ ID NO: 188201 - DNA, 25 bp, probe
cccctggaggtagctgactccagcc

SEQ ID NO: 188202 - DNA, 25 bp, probe
ccccgctttgtctttgacatggacg

SEQ ID NO: 188203 - DNA, 25 bp, probe
ccccgctttgtctttgacatggacg

SEQ ID NO: 188204 - DNA, 25 bp, probe
ccccttgttgatgttaacgacgact

SEQ ID NO: 188205 - DNA, 25 bp, probe
cccctaccatgtgccaaacgggagg

SEQ ID NO: 188206 - DNA, 25 bp, probe
cccctaccatgtgccaaacgggagg

SEQ ID NO: 188207 - DNA, 25 bp, probe
cccctactggcttccaaactttatg

SEQ ID NO: 188208 - DNA, 25 bp, probe
cccctactggcttccaaactttatg

SEQ ID NO: 188209 - DNA, 25 bp, probe
ccgaccactggagccagaacctgtc

SEQ ID NO: 188210 - DNA, 25 bp, probe
cccccatggccagaatatgaccgtc

SEQ ID NO: 188211 - DNA, 25 bp, probe
cccctcaggactgcaacaggcttgt

SEQ ID NO: 188212 - DNA, 25 bp, probe
cccctacagactcaaagctcttttt

SEQ ID NO: 188213 - DNA, 25 bp, probe
cccgtgggatcaagagagaccttct

SEQ ID NO: 188214 - DNA, 25 bp, probe
cccgtggctgataaggacacttcca

SEQ ID NO: 188215 - DNA, 25 bp, probe
ccctgggctgagagaacctcacgca

SEQ ID NO: 188216 - DNA, 25 bp, probe
ccctggatcgagaacataattagtg

SEQ ID NO: 188217 - DNA, 25 bp, probe
ccctggaggagttcagagtctagct

SEQ ID NO: 188218 - DNA, 25 bp, probe
ccctgatggaggactgcgagaagag

SEQ ID NO: 188219 - DNA, 25 bp, probe
ccctgatggacaccagcggcaatgg

SEQ ID NO: 188220 - DNA, 25 bp, probe
ccctgagctacccagtgctagagtg

SEQ ID NO: 188221 - DNA, 25 bp, probe
ccctgagtccagggatgctgcggag

SEQ ID NO: 188222 - DNA, 25 bp, probe
ccctggtcctgggtctcaggatggg

SEQ ID NO: 188223 - DNA, 25 bp, probe
cccgtgtgcctgtaactctgagggg

SEQ ID NO: 188224 - DNA, 25 bp, probe
ccagctggttcgaaaattaggccga

SEQ ID NO: 188225 - DNA, 25 bp, probe
ccagctggttcgaaaattaggccga

SEQ ID NO: 188226 - DNA, 25 bp, probe
ccgctggtgtactactttagcgccg

SEQ ID NO: 188227 - DNA, 25 bp, probe
ccctggtgctacgtctttaaggcgg

SEQ ID NO: 188228 - DNA, 25 bp, probe
ccctggtcatgcagctctttcagga

SEQ ID NO: 188229 - DNA, 25 bp, probe
ccctgagctctcactatcatttgag

SEQ ID NO: 188230 - DNA, 25 bp, probe
ccctgaggcttgttacattggcaca

SEQ ID NO: 188231 - DNA, 25 bp, probe
ccctggagattctgagattgaccag

SEQ ID NO: 188232 - DNA, 25 bp, probe
ccctgggtgtcagatgatgcctccc

SEQ ID NO: 188233 - DNA, 25 bp, probe
ccctgggtgtcagatgatgcctccc

SEQ ID NO: 188234 - DNA, 25 bp, probe
ccctgtgtgctgaagggtgccacag

SEQ ID NO: 188235 - DNA, 25 bp, probe
ccctggtgctgtaggctacatcctg

SEQ ID NO: 188236 - DNA, 25 bp, probe
ccctgtggctggacttcacatcatt

SEQ ID NO: 188237 - DNA, 25 bp, probe
ccctgtggctggacttcacatcatt

SEQ ID NO: 188238 - DNA, 25 bp, probe
ccctgtgagagagttgctcctcagg

SEQ ID NO: 188239 - DNA, 25 bp, probe
ccctgtgcaaaccttggctcaggaa

SEQ ID NO: 188240 - DNA, 25 bp, probe
cccgtcaaatggatggctcccgaat

SEQ ID NO: 188241 - DNA, 25 bp, probe
ccctgatgccaagaaagtcctagaa

SEQ ID NO: 188242 - DNA, 25 bp, probe
ccctgatgccaagaaagtcctagaa

SEQ ID NO: 188243 - DNA, 25 bp, probe
cccgcagcaaacacaagtttaagat

SEQ ID NO: 188244 - DNA, 25 bp, probe
ccccagcaaatcaggacctatctag

SEQ ID NO: 188245 - DNA, 25 bp, probe
cccgacagacactgtgaacggaaga

SEQ ID NO: 188246 - DNA, 25 bp, probe
cccggactacatagccccggagatc

SEQ ID NO: 188247 - DNA, 25 bp, probe
cccggaccagatacattccgtgtac

SEQ ID NO: 188248 - DNA, 25 bp, probe
cccggaaaagtctctgagctgctcc

SEQ ID NO: 188249 - DNA, 25 bp, probe
cccgggagaatggcggggcctcaca

SEQ ID NO: 188250 - DNA, 25 bp, probe
ccctgggaggatgagctggggccct

SEQ ID NO: 188251 - DNA, 25 bp, probe
ccctggcgatgggccagaggcgggc

SEQ ID NO: 188252 - DNA, 25 bp, probe
ccctggaccgcaggctgcggcaggg

SEQ ID NO: 188253 - DNA, 25 bp, probe
ccctggaccgcaggctgcggcaggg

SEQ ID NO: 188254 - DNA, 25 bp, probe
ccctgatacagtgctgctcgagcgg

SEQ ID NO: 188255 - DNA, 25 bp, probe
ccctgactcagagggccagagtgag

SEQ ID NO: 188256 - DNA, 25 bp, probe
ccgagcccagcgctacaagtactgg

SEQ ID NO: 188257 - DNA, 25 bp, probe
ccggccccaagtgcagagtcaaggc

SEQ ID NO: 188258 - DNA, 25 bp, probe
cccgctggccaaatccaagatcgag

SEQ ID NO: 188259 - DNA, 25 bp, probe
cccgctgtgtcggatacacactcga

SEQ ID NO: 188260 - DNA, 25 bp, probe
ccctggcttgcagaaaatccagaaa

SEQ ID NO: 188261 - DNA, 25 bp, probe
ccctgactctaggggcacatccagt

SEQ ID NO: 188262 - DNA, 25 bp, probe
ccctgagctgaacgggaagctcact

SEQ ID NO: 188263 - DNA, 25 bp, probe
ccccagcttgggaaatagcccttgg

SEQ ID NO: 188264 - DNA, 25 bp, probe
cccgagctttgcagacatagcccag

SEQ ID NO: 188265 - DNA, 25 bp, probe
cccgcaccttgtcagcaagatccag

SEQ ID NO: 188266 - DNA, 25 bp, probe
ccctggcctgtgtcctgaaggccac

SEQ ID NO: 188267 - DNA, 25 bp, probe
ccctggcctgtgtcctgaaggccac

SEQ ID NO: 188268 - DNA, 25 bp, probe
ccctggagtcttctgacagtgccaa

SEQ ID NO: 188269 - DNA, 25 bp, probe
ccctgtagtgccaactgaagtgccg

SEQ ID NO: 188270 - DNA, 25 bp, probe
cccgaagtgctggacgaaagcctga

SEQ ID NO: 188271 - DNA, 25 bp, probe
ccctggttctggaggaaccgcaagc

SEQ ID NO: 188272 - DNA, 25 bp, probe
cccgacgtctggaggactcaagcaa

SEQ ID NO: 188273 - DNA, 25 bp, probe
cccgacgtctggaggactcaagcaa

SEQ ID NO: 188274 - DNA, 25 bp, probe
ccctgacgtccgtgtgttgccaggg

SEQ ID NO: 188275 - DNA, 25 bp, probe
ccctggcgagggcgtttggagagga

SEQ ID NO: 188276 - DNA, 25 bp, probe
cccccgtgagggctctcggagaaag

SEQ ID NO: 188277 - DNA, 25 bp, probe
gccccaaaggtgagtccacgggaag

SEQ ID NO: 188278 - DNA, 25 bp, probe
cccgaagtgaggagtcccaaggagc

SEQ ID NO: 188279 - DNA, 25 bp, probe
ccccagggatggaggcacctagaac

SEQ ID NO: 188280 - DNA, 25 bp, probe
cccgcggggtgcagagcaccccaac

SEQ ID NO: 188281 - DNA, 25 bp, probe
cccgcgggcgtgagactcagccgct

SEQ ID NO: 188282 - DNA, 25 bp, probe
cccgtggtctgggaatgctctggcg

SEQ ID NO: 188283 - DNA, 25 bp, probe
ccgctgggtgcgtagataatctgac

SEQ ID NO: 188284 - DNA, 25 bp, probe
ccgctgggtgcgtagataatctgac

SEQ ID NO: 188285 - DNA, 25 bp, probe
cccggtgctgcgttatgtagctcag

SEQ ID NO: 188286 - DNA, 25 bp, probe
ccctggtggcggtcaatagccgtgg

SEQ ID NO: 188287 - DNA, 25 bp, probe
ccctggtggcggtcaatagccgtgg

SEQ ID NO: 188288 - DNA, 25 bp, probe
ccctggttcggggcagtggcgaggg

SEQ ID NO: 188289 - DNA, 25 bp, probe
ccctggaggcagcgggagggcgagg

SEQ ID NO: 188290 - DNA, 25 bp, probe
ccctggaggcagcgggagggcgagg

SEQ ID NO: 188291 - DNA, 25 bp, probe
cccgggctgcgcggatgatgagggc

SEQ ID NO: 188292 - DNA, 25 bp, probe
ccctggtgctgcgggtgcagcacgg

SEQ ID NO: 188293 - DNA, 25 bp, probe
cccggagctgatggatgtgagcctg

SEQ ID NO: 188294 - DNA, 25 bp, probe
ccctggagtgtgaagctgaccagct

SEQ ID NO: 188295 - DNA, 25 bp, probe
ccctggagtgtgaagctgaccagct

SEQ ID NO: 188296 - DNA, 25 bp, probe
cccgtgtggagaactgcccagatga

SEQ ID NO: 188297 - DNA, 25 bp, probe
ccctgggacaatgacccagaagaca

SEQ ID NO: 188298 - DNA, 25 bp, probe
cccggctgaatgagaccacggagac

SEQ ID NO: 188299 - DNA, 25 bp, probe
cccggaacagatcgaccaatttgtg

SEQ ID NO: 188300 - DNA, 25 bp, probe
cccgagaagaggccatcctttgtga

SEQ ID NO: 188301 - DNA, 25 bp, probe
cccgagtgggacgattacttggaca

SEQ ID NO: 188302 - DNA, 25 bp, probe
cccgagtgggatgattactcggaca

SEQ ID NO: 188303 - DNA, 25 bp, probe
cccgacggctgtgacgcagccggag

SEQ ID NO: 188304 - DNA, 25 bp, probe
cccgacggatgagccagtggccgag

SEQ ID NO: 188305 - DNA, 25 bp, probe
cccccagctgtaagacagggacggg

SEQ ID NO: 188306 - DNA, 25 bp, probe
cccgcgctgtgtactgtaaggacgt

SEQ ID NO: 188307 - DNA, 25 bp, probe
cccggtgtgcctgtggaggaacttt

SEQ ID NO: 188308 - DNA, 25 bp, probe
ccccgagtgttgtgtgcttgaactt

SEQ ID NO: 188309 - DNA, 25 bp, probe
cccgtggctttgtgcttatgtcatt

SEQ ID NO: 188310 - DNA, 25 bp, probe
ccctgggcttttggattatgtgtac

SEQ ID NO: 188311 - DNA, 25 bp, probe
cccggactttctggccatgaattac

SEQ ID NO: 188312 - DNA, 25 bp, probe
cccccacttctaagcactgagttag

SEQ ID NO: 188313 - DNA, 25 bp, probe
ccccatacttatatcaaggtcccaa

SEQ ID NO: 188314 - DNA, 25 bp, probe
cccctttattgtggaactggcctat

SEQ ID NO: 188315 - DNA, 25 bp, probe
cccctgttagagaccctcatgggct

SEQ ID NO: 188316 - DNA, 25 bp, probe
ccgccttgtaaaaccactggacaga

SEQ ID NO: 188317 - DNA, 25 bp, probe
cccctatttggaaccctgatcatca

SEQ ID NO: 188318 - DNA, 25 bp, probe
cccctatttggaaccctgatcatca

SEQ ID NO: 188319 - DNA, 25 bp, probe
ccccattttgggactttatcagatt

SEQ ID NO: 188320 - DNA, 25 bp, probe
cccccttccagcactactatggaaa

SEQ ID NO: 188321 - DNA, 25 bp, probe
ccccctatcccctgaattggagagc

SEQ ID NO: 188322 - DNA, 25 bp, probe
ccccaaatcagatcaagtcgggaac

SEQ ID NO: 188323 - DNA, 25 bp, probe
cctccaaactgacccgaagttgcca

SEQ ID NO: 188324 - DNA, 25 bp, probe
ccaccagagttccctaaacttgctt

SEQ ID NO: 188325 - DNA, 25 bp, probe
ccccagatacctgtgaggactggtt

SEQ ID NO: 188326 - DNA, 25 bp, probe
cccgagaacctgcaggacttcgtgg

SEQ ID NO: 188327 - DNA, 25 bp, probe
ccccgagatcctcaacactactggg

SEQ ID NO: 188328 - DNA, 25 bp, probe
cccggagctggcaaaacgctcctgg

SEQ ID NO: 188329 - DNA, 25 bp, probe
cccggagctggcaaaacgctcctgg

SEQ ID NO: 188330 - DNA, 25 bp, probe
cccggatctcagtcaaaggcattcg

SEQ ID NO: 188331 - DNA, 25 bp, probe
cccggatctcagtcaaaggcattcg

SEQ ID NO: 188332 - DNA, 25 bp, probe
ccctggcatgatggacaaaggcctg

SEQ ID NO: 188333 - DNA, 25 bp, probe
cccggagatgtcgagaagcagtctg

SEQ ID NO: 188334 - DNA, 25 bp, probe
ccctggagatctgcaggcggctgga

SEQ ID NO: 188335 - DNA, 25 bp, probe
ccctggagatctgcaggcggctgga

SEQ ID NO: 188336 - DNA, 25 bp, probe
ccctggcaattttgcactgtgtggc

SEQ ID NO: 188337 - DNA, 25 bp, probe
ccctggcacattcccatttgtgctg

SEQ ID NO: 188338 - DNA, 25 bp, probe
ccctggactacatctactgatgcta

SEQ ID NO: 188339 - DNA, 25 bp, probe
ccctggtgggcatgtcatgtgtctt

SEQ ID NO: 188340 - DNA, 25 bp, probe
ccctggtgtgtaagattgctgactt

SEQ ID NO: 188341 - DNA, 25 bp, probe
ccgcgggtgacgaatacgagctcta

SEQ ID NO: 188342 - DNA, 25 bp, probe
cccgggtagcgacaagcagcagcag

SEQ ID NO: 188343 - DNA, 25 bp, probe
cccgggtagcgacaagcagcagcag

SEQ ID NO: 188344 - DNA, 25 bp, probe
cccgggatcaggccaagaggatcaa

SEQ ID NO: 188345 - DNA, 25 bp, probe
cccctggctacgccaaagtcatcaa

SEQ ID NO: 188346 - DNA, 25 bp, probe
cccctggctacgccaaagtcatcaa

SEQ ID NO: 188347 - DNA, 25 bp, probe
ccgctgctggtcaccagaatgttct

SEQ ID NO: 188348 - DNA, 25 bp, probe
ccctgtacataaccagcaagctctc

SEQ ID NO: 188349 - DNA, 25 bp, probe
ccctggcactggtcacaaagctcag

SEQ ID NO: 188350 - DNA, 25 bp, probe
ccccatctctggtctcaaagccagt

SEQ ID NO: 188351 - DNA, 25 bp, probe
ccccgcctgtcacaataaagtttat

SEQ ID NO: 188352 - DNA, 25 bp, probe
cccggacttcgtcaacaagttcctg

SEQ ID NO: 188353 - DNA, 25 bp, probe
ccccgttagcgtcataaagtccagc

SEQ ID NO: 188354 - DNA, 25 bp, probe
cccctgtttgtgacctgaatttaca

SEQ ID NO: 188355 - DNA, 25 bp, probe
ccccgtcatttacgcatacttcaac

SEQ ID NO: 188356 - DNA, 25 bp, probe
ccccttgggatatatttggcaacca

SEQ ID NO: 188357 - DNA, 25 bp, probe
cccctcgtcgtatgaactgtgcata

SEQ ID NO: 188358 - DNA, 25 bp, probe
cccctgggcagtggtcaagtgtctg

SEQ ID NO: 188359 - DNA, 25 bp, probe
cccgtggagaattggccagagcctg

SEQ ID NO: 188360 - DNA, 25 bp, probe
cccgagtggaagcgccaggtgatgg

SEQ ID NO: 188361 - DNA, 25 bp, probe
cccgagggcaggagtagggcagctg

SEQ ID NO: 188362 - DNA, 25 bp, probe
ccctggggagtgagcttggtgcggt

SEQ ID NO: 188363 - DNA, 25 bp, probe
cccgaggtgatcccggtggtgggat

SEQ ID NO: 188364 - DNA, 25 bp, probe
cccgaagtcatcctgggtatgggct

SEQ ID NO: 188365 - DNA, 25 bp, probe
cccgcaagttggccgaggtgggcag

SEQ ID NO: 188366 - DNA, 25 bp, probe
ccccaacatgggcaagggtggagaa

SEQ ID NO: 188367 - DNA, 25 bp, probe
ccccagccccggtggctgggcagag

SEQ ID NO: 188368 - DNA, 25 bp, probe
ccgtcgtccttcgtaacggtcagag

SEQ ID NO: 188369 - DNA, 25 bp, probe
cctccagtacctctaaggactctag

SEQ ID NO: 188370 - DNA, 25 bp, probe
cctccagtacctctaaggactctag

SEQ ID NO: 188371 - DNA, 25 bp, probe
ccccaggactgcacgaaggtttaca

SEQ ID NO: 188372 - DNA, 25 bp, probe
cccgcatggacgaagccacatggta

SEQ ID NO: 188373 - DNA, 25 bp, probe
ccccagattcagggcccatgtgtga

SEQ ID NO: 188374 - DNA, 25 bp, probe
cccgcagttcactactgcactttgc

SEQ ID NO: 188375 - DNA, 25 bp, probe
cccgagatgccacgactattcttgg

SEQ ID NO: 188376 - DNA, 25 bp, probe
cccggagcacaggacgaacttgcgt

SEQ ID NO: 188377 - DNA, 25 bp, probe
cccggagcacaggacgaacttgcgt

SEQ ID NO: 188378 - DNA, 25 bp, probe
ccgctgccagctctggtaacttggt

SEQ ID NO: 188379 - DNA, 25 bp, probe
ccgcggcagctccatggaaatcaat

SEQ ID NO: 188380 - DNA, 25 bp, probe
cccgtgcagaccccacaataaagaa

SEQ ID NO: 188381 - DNA, 25 bp, probe
ccctggcacccagcacaatgaagat

SEQ ID NO: 188382 - DNA, 25 bp, probe
ccctggctcccagctggagatagga

SEQ ID NO: 188383 - DNA, 25 bp, probe
ccctggctcccagctggagatagga

SEQ ID NO: 188384 - DNA, 25 bp, probe
ccctggctcccagctggagatagga

SEQ ID NO: 188385 - DNA, 25 bp, probe
ccctggtctccatcttcaatgagaa

SEQ ID NO: 188386 - DNA, 25 bp, probe
ccccgatccaagttgtagatggaat

SEQ ID NO: 188387 - DNA, 25 bp, probe
cccctgtccacagtacatacggaag

SEQ ID NO: 188388 - DNA, 25 bp, probe
cccctggccacagtaattggtcatg

SEQ ID NO: 188389 - DNA, 25 bp, probe
ccccagagtcaaccttgggtgatgc

SEQ ID NO: 188390 - DNA, 25 bp, probe
ccccaggaagactaccgctgctggc

SEQ ID NO: 188391 - DNA, 25 bp, probe
ccctgtggaagcatttcgcgatgga

SEQ ID NO: 188392 - DNA, 25 bp, probe
ccctggaggaccgtgtccgtgagat

SEQ ID NO: 188393 - DNA, 25 bp, probe
cccgagaggaagggccccgagatgc

SEQ ID NO: 188394 - DNA, 25 bp, probe
ccaccattggggtgacccgaggctt

SEQ ID NO: 188395 - DNA, 25 bp, probe
ccccttattatgtagcaccccaggt

SEQ ID NO: 188396 - DNA, 25 bp, probe
ccccattattgagcatgaccctcgg

SEQ ID NO: 188397 - DNA, 25 bp, probe
cccgctctacaatatgagccttctg

SEQ ID NO: 188398 - DNA, 25 bp, probe
ccccctgcacaagtgtgacatctac

SEQ ID NO: 188399 - DNA, 25 bp, probe
cccctcatcatagcaataacattcc

SEQ ID NO: 188400 - DNA, 25 bp, probe
cccccactaccagaacatcaaagag

SEQ ID NO: 188401 - DNA, 25 bp, probe
ccccacacgggacaacaaacatcac

SEQ ID NO: 188402 - DNA, 25 bp, probe
cccccccaaggacaagaagctcctg

SEQ ID NO: 188403 - DNA, 25 bp, probe
cccccccaaggacaagaagctcctg

SEQ ID NO: 188404 - DNA, 25 bp, probe
cccccaccagacgaggaggaggtca

SEQ ID NO: 188405 - DNA, 25 bp, probe
cccctgcaaaaatcggggcgacaat

SEQ ID NO: 188406 - DNA, 25 bp, probe
ccccttagctcatacggaatggaca

SEQ ID NO: 188407 - DNA, 25 bp, probe
cccctttctcaggccaggagggccg

SEQ ID NO: 188408 - DNA, 25 bp, probe
cccgtatctgtctccaggtgaatgt

SEQ ID NO: 188409 - DNA, 25 bp, probe
cccgaactgtacgcactcatgagtg

SEQ ID NO: 188410 - DNA, 25 bp, probe
cccgaactgtacgcactcatgagtg

SEQ ID NO: 188411 - DNA, 25 bp, probe
cccgaatcttggctgagtatgagtc

SEQ ID NO: 188412 - DNA, 25 bp, probe
cccgaatcttggctgagtatgagtc

SEQ ID NO: 188413 - DNA, 25 bp, probe
cccccacttgggagctgatatactt

SEQ ID NO: 188414 - DNA, 25 bp, probe
cccccacatctgaaacctgtaggtc

SEQ ID NO: 188415 - DNA, 25 bp, probe
ccccctcactgtccaaaatgtagtc

SEQ ID NO: 188416 - DNA, 25 bp, probe
ccccctcactgtccaaaatgtagtc

SEQ ID NO: 188417 - DNA, 25 bp, probe
cctccccccctagtaagtagatgat

SEQ ID NO: 188418 - DNA, 25 bp, probe
ccccctacccttcaagagatgattc

SEQ ID NO: 188419 - DNA, 25 bp, probe
cccccagtttccagaagactattct

SEQ ID NO: 188420 - DNA, 25 bp, probe
cccccagtttccagaagactattct

SEQ ID NO: 188421 - DNA, 25 bp, probe
ccccgcagttgtgccaaagtgcata

SEQ ID NO: 188422 - DNA, 25 bp, probe
ccccgtgtctgtgcaggattgtctg

SEQ ID NO: 188423 - DNA, 25 bp, probe
cccctggttctggaggaaccgcaag

SEQ ID NO: 188424 - DNA, 25 bp, probe
ccccggtctcctgagaaacacacag

SEQ ID NO: 188425 - DNA, 25 bp, probe
cccgggacatctacaaagaccccag

SEQ ID NO: 188426 - DNA, 25 bp, probe
cctcgggaaatgagaagacggctcg

SEQ ID NO: 188427 - DNA, 25 bp, probe
tcccgggacaggatgcaaaagaggc

SEQ ID NO: 188428 - DNA, 25 bp, probe
cccgggacaggatgcaaaagaggct

SEQ ID NO: 188429 - DNA, 25 bp, probe
cccgtgctaaggcccacaaaagcca

SEQ ID NO: 188430 - DNA, 25 bp, probe
cccctgaaaggtcctatacaagtca

SEQ ID NO: 188431 - DNA, 25 bp, probe
ccccagaaacctgtaatcagtgtct

SEQ ID NO: 188432 - DNA, 25 bp, probe
ccccagggttctgtattgcagctaa

SEQ ID NO: 188433 - DNA, 25 bp, probe
cctcaaacgtttctcctacaacaga

SEQ ID NO: 188434 - DNA, 25 bp, probe
ccaaaaggaattctccatcccacgg

SEQ ID NO: 188435 - DNA, 25 bp, probe
ccttgaagggttcaccaggtcaggg

SEQ ID NO: 188436 - DNA, 25 bp, probe
cctccctgggttcatccaggttgtt

SEQ ID NO: 188437 - DNA, 25 bp, probe
cccccgggagtccatcaagttggtg

SEQ ID NO: 188438 - DNA, 25 bp, probe
ccccgggagtccatcaagttggtga

SEQ ID NO: 188439 - DNA, 25 bp, probe
cccccagtcagtgcttaaatgggct

SEQ ID NO: 188440 - DNA, 25 bp, probe
cccccgatccaagttgtagatggaa

SEQ ID NO: 188441 - DNA, 25 bp, probe
cccccgatccaagttgtagatggaa

SEQ ID NO: 188442 - DNA, 25 bp, probe
cccgtccttccagttggagagttct

SEQ ID NO: 188443 - DNA, 25 bp, probe
cccgtccttccagttggagagttct

SEQ ID NO: 188444 - DNA, 25 bp, probe
cccccgttgatgatgggcgaattct

SEQ ID NO: 188445 - DNA, 25 bp, probe
cccccgtgtgagatttctcacctcg

SEQ ID NO: 188446 - DNA, 25 bp, probe
cccgctggtgtactactttagcgcc

SEQ ID NO: 188447 - DNA, 25 bp, probe
ccccattgtgattctgaattcttgg

SEQ ID NO: 188448 - DNA, 25 bp, probe
ccccattctgtatgttttcatgggt

SEQ ID NO: 188449 - DNA, 25 bp, probe
cccgcaacggcaagttcactgcaga

SEQ ID NO: 188450 - DNA, 25 bp, probe
cccccacgtgacagtgcctgggaat

SEQ ID NO: 188451 - DNA, 25 bp, probe
cccccactgtgaaggggctggccag

SEQ ID NO: 188452 - DNA, 25 bp, probe
cccgccagtatgaccagggcgtcga

SEQ ID NO: 188453 - DNA, 25 bp, probe
cccgccagtatgaccagggcgtcga

SEQ ID NO: 188454 - DNA, 25 bp, probe
cccggctgtatctcaggtctgggtc

SEQ ID NO: 188455 - DNA, 25 bp, probe
cccggctttgcagggagaccaggct

SEQ ID NO: 188456 - DNA, 25 bp, probe
ccctggctcttgagtgtgctccagg

SEQ ID NO: 188457 - DNA, 25 bp, probe
ccctggctccagagatggtcacatg

SEQ ID NO: 188458 - DNA, 25 bp, probe
ccctggctcctgctatgagaagata

SEQ ID NO: 188459 - DNA, 25 bp, probe
ccccactgcctgctagggaatacca

SEQ ID NO: 188460 - DNA, 25 bp, probe
ccccagtgacggaaagggcatgatc

SEQ ID NO: 188461 - DNA, 25 bp, probe
ccccgtctggtgccagtgtggaagc

SEQ ID NO: 188462 - DNA, 25 bp, probe
ccccgtctggtgccagtgtggaagc

SEQ ID NO: 188463 - DNA, 25 bp, probe
cccgaggctgggacactgtgtggcc

SEQ ID NO: 188464 - DNA, 25 bp, probe
cccgaggctgggacactgtgtggcc

SEQ ID NO: 188465 - DNA, 25 bp, probe
cccgactctggggtagtgtgtggcc

SEQ ID NO: 188466 - DNA, 25 bp, probe
cccgcccggatgaagagggctggcc

SEQ ID NO: 188467 - DNA, 25 bp, probe
cccgtcaccctaagtatggataggc

SEQ ID NO: 188468 - DNA, 25 bp, probe
cccgggcccgttgaggatgaggccg

SEQ ID NO: 188469 - DNA, 25 bp, probe
cccgtggcccctaggtggatgaggc

SEQ ID NO: 188470 - DNA, 25 bp, probe
cccgacgcaaccatggctgaagaac

SEQ ID NO: 188471 - DNA, 25 bp, probe
cccggccaagcaactgtatgaagag

SEQ ID NO: 188472 - DNA, 25 bp, probe
cccctcccagcaactacagagaagg

SEQ ID NO: 188473 - DNA, 25 bp, probe
ccccccctgcatctcaagaataaag

SEQ ID NO: 188474 - DNA, 25 bp, probe
ccccgtctccatctagcaggaaaag

SEQ ID NO: 188475 - DNA, 25 bp, probe
cccccattcctaaatatgtgaaaag

SEQ ID NO: 188476 - DNA, 25 bp, probe
cccccattctttccaagtcagatag

SEQ ID NO: 188477 - DNA, 25 bp, probe
cccccattctttccaagtcagatag

SEQ ID NO: 188478 - DNA, 25 bp, probe
ccccctttgtattatagtcatgcgg

SEQ ID NO: 188479 - DNA, 25 bp, probe
cccgcctcatctggaaatagttccg

SEQ ID NO: 188480 - DNA, 25 bp, probe
ccgcctctcacttgcagatgaagtt

SEQ ID NO: 188481 - DNA, 25 bp, probe
cccctgctttcatgtacagcttttt

SEQ ID NO: 188482 - DNA, 25 bp, probe
ccccctttgactgatcagtgtgata

SEQ ID NO: 188483 - DNA, 25 bp, probe
cccctttcatgactcagatccgagt

SEQ ID NO: 188484 - DNA, 25 bp, probe
cccgattcctggacaaccagaggag

SEQ ID NO: 188485 - DNA, 25 bp, probe
cccgtcatccagggagaccagagga

SEQ ID NO: 188486 - DNA, 25 bp, probe
cccgtgcaccctggaagggcaggtc

SEQ ID NO: 188487 - DNA, 25 bp, probe
cccgtgcaccctggaagggcaggtc

SEQ ID NO: 188488 - DNA, 25 bp, probe
cccgtgcaccctggaagggcaggtc

SEQ ID NO: 188489 - DNA, 25 bp, probe
cccgtgtccactggaggggctgtgg

SEQ ID NO: 188490 - DNA, 25 bp, probe
cccggcgcaatgagtggggctacgc

SEQ ID NO: 188491 - DNA, 25 bp, probe
cccggcgcaatgagtggggctacgc

SEQ ID NO: 188492 - DNA, 25 bp, probe
cccggtgtatgcagtggtgatgcct

SEQ ID NO: 188493 - DNA, 25 bp, probe
cccggtcactgcaaggggatgctgc

SEQ ID NO: 188494 - DNA, 25 bp, probe
cccctacactcaaggctgagaggcc

SEQ ID NO: 188495 - DNA, 25 bp, probe
cccgctcaactccagggaggctgac

SEQ ID NO: 188496 - DNA, 25 bp, probe
cccgaagactgcctggtgaactgta

SEQ ID NO: 188497 - DNA, 25 bp, probe
cccgccagactgttagaaaatggac

SEQ ID NO: 188498 - DNA, 25 bp, probe
cccccagcatctgctacaaatcagg

SEQ ID NO: 188499 - DNA, 25 bp, probe
ccccggcatctcagacaagctgatg

SEQ ID NO: 188500 - DNA, 25 bp, probe
ccccggcatctcagacaagctgatg

SEQ ID NO: 188501 - DNA, 25 bp, probe
cccgggactcttattctgatgatgt

SEQ ID NO: 188502 - DNA, 25 bp, probe
cccgggaggctgacttgttgatgaa

SEQ ID NO: 188503 - DNA, 25 bp, probe
cccggggcatggactacttgagcca

SEQ ID NO: 188504 - DNA, 25 bp, probe
ccgagtgggatgattactcggacac

SEQ ID NO: 188505 - DNA, 25 bp, probe
cccgtgggtgtttcctgagtgacac

SEQ ID NO: 188506 - DNA, 25 bp, probe
cccctggagtgtgaagctgaccagc

SEQ ID NO: 188507 - DNA, 25 bp, probe
cccctggagtgtgaagctgaccagc

SEQ ID NO: 188508 - DNA, 25 bp, probe
ccccgtgggatcaagagagaccttc

SEQ ID NO: 188509 - DNA, 25 bp, probe
ccccgctgtaatgaaacaccttctc

SEQ ID NO: 188510 - DNA, 25 bp, probe
cccctgttgcaataaccactgcttc

SEQ ID NO: 188511 - DNA, 25 bp, probe
cccctatcagtatactagcaccttg

SEQ ID NO: 188512 - DNA, 25 bp, probe
ccccttcagtaacattcgacctgga

SEQ ID NO: 188513 - DNA, 25 bp, probe
ccccttcagtaacattcgacctgga

SEQ ID NO: 188514 - DNA, 25 bp, probe
ccccttcaggataagaacttccagg

SEQ ID NO: 188515 - DNA, 25 bp, probe
cccgttgaggatgaggccgctagag

SEQ ID NO: 188516 - DNA, 25 bp, probe
cccggtgggcatggagcagcccggg

SEQ ID NO: 188517 - DNA, 25 bp, probe
cccggcagagacgtagcatcacgcg

SEQ ID NO: 188518 - DNA, 25 bp, probe
cccggcagagacgtagcatcacgcg

SEQ ID NO: 188519 - DNA, 25 bp, probe
cccggcaggagactgactacgtgct

SEQ ID NO: 188520 - DNA, 25 bp, probe
ccccgcagagcgtatgagctacctg

SEQ ID NO: 188521 - DNA, 25 bp, probe
cccggctacagaatggctcctcggg

SEQ ID NO: 188522 - DNA, 25 bp, probe
ccccgctacagaagccagactgggt

SEQ ID NO: 188523 - DNA, 25 bp, probe
ccccctaagagagcacctggtgata

SEQ ID NO: 188524 - DNA, 25 bp, probe
ccccccaaaagcgagcatggtggtg

SEQ ID NO: 188525 - DNA, 25 bp, probe
cccgcctcacaagtgcgaagtctgg

SEQ ID NO: 188526 - DNA, 25 bp, probe
cccgcctcacaagtgcgaagtctgg

SEQ ID NO: 188527 - DNA, 25 bp, probe
cccccttgagcgggacagcttgatg

SEQ ID NO: 188528 - DNA, 25 bp, probe
gtcgcccaatgacaggacctggaat

SEQ ID NO: 188529 - DNA, 25 bp, probe
gtcgcccaatgacaggacctggaat

SEQ ID NO: 188530 - DNA, 25 bp, probe
ccccaaatgagcaggtccaagacac

SEQ ID NO: 188531 - DNA, 25 bp, probe
cccgcggttgcagactgctcaaacc

SEQ ID NO: 188532 - DNA, 25 bp, probe
cccgggcgtgcagacagcaggaagc

SEQ ID NO: 188533 - DNA, 25 bp, probe
cccggctctgggtcacagaggagca

SEQ ID NO: 188534 - DNA, 25 bp, probe
cccggctgcagacacaaggaggatg

SEQ ID NO: 188535 - DNA, 25 bp, probe
cccggtgcagatcccaatgcagatg

SEQ ID NO: 188536 - DNA, 25 bp, probe
cccgaggcagacgtctgtcaggggc

SEQ ID NO: 188537 - DNA, 25 bp, probe
cccgaggcagacgtctgtcaggggc

SEQ ID NO: 188538 - DNA, 25 bp, probe
cccgatgtggtgggtatcaggaggc

SEQ ID NO: 188539 - DNA, 25 bp, probe
ccccatcggtgtgtaaggtggccta

SEQ ID NO: 188540 - DNA, 25 bp, probe
ccccgtttgtcaaagaggatggact

SEQ ID NO: 188541 - DNA, 25 bp, probe
ccccgctgctttttggctggggaga

SEQ ID NO: 188542 - DNA, 25 bp, probe
cccgtgcctctatgggggaagcaga

SEQ ID NO: 188543 - DNA, 25 bp, probe
ccggcagccttatgtgggggacagg

SEQ ID NO: 188544 - DNA, 25 bp, probe
cctgggcttacctggggggcaggat

SEQ ID NO: 188545 - DNA, 25 bp, probe
ccccctatctcctggggagggtgag

SEQ ID NO: 188546 - DNA, 25 bp, probe
ccccctatctcctggggagggtgag

SEQ ID NO: 188547 - DNA, 25 bp, probe
ccccctacactcaaggctgagaggc

SEQ ID NO: 188548 - DNA, 25 bp, probe
cccccagccaccaggctggggcctg

SEQ ID NO: 188549 - DNA, 25 bp, probe
cccgccatgccacaaggtgggggag

SEQ ID NO: 188550 - DNA, 25 bp, probe
cccgcttccacgtggtctatgtgga

SEQ ID NO: 188551 - DNA, 25 bp, probe
cctccttccgagtcatggtctcggg

SEQ ID NO: 188552 - DNA, 25 bp, probe
ccccaggccataccaggtgctaggg

SEQ ID NO: 188553 - DNA, 25 bp, probe
ccccggcctcagaggctatcacagg

SEQ ID NO: 188554 - DNA, 25 bp, probe
ccccgtttctaactctatccagaga

SEQ ID NO: 188555 - DNA, 25 bp, probe
cccgctgtctttgagttgtggtgga

SEQ ID NO: 188556 - DNA, 25 bp, probe
cccgctgtctttgagttgtggtgga

SEQ ID NO: 188557 - DNA, 25 bp, probe
cccctattgtatgacctttgctgag

SEQ ID NO: 188558 - DNA, 25 bp, probe
cccctattgtatgacctttgctgag

SEQ ID NO: 188559 - DNA, 25 bp, probe
cccgctcatttacaccttaagaaat

SEQ ID NO: 188560 - DNA, 25 bp, probe
cccctttcactctctttaaagagat

SEQ ID NO: 188561 - DNA, 25 bp, probe
ccccttccccatgttgtcgatgggg

SEQ ID NO: 188562 - DNA, 25 bp, probe
ccccttccccatgttgtcgatgggg

SEQ ID NO: 188563 - DNA, 25 bp, probe
cccctacccagtgaaggccatggag

SEQ ID NO: 188564 - DNA, 25 bp, probe
cccctacccagtgaaggccatggag

SEQ ID NO: 188565 - DNA, 25 bp, probe
cccccctttgtattatagtcatgcg

SEQ ID NO: 188566 - DNA, 25 bp, probe
ccccctttcttattgcaagacggct

SEQ ID NO: 188567 - DNA, 25 bp, probe
ccccttcttttgcgacatgacggtg

SEQ ID NO: 188568 - DNA, 25 bp, probe
cccctacttggtatatgtgcccgtg

SEQ ID NO: 188569 - DNA, 25 bp, probe
cccctggctgggaacgatggcccag

SEQ ID NO: 188570 - DNA, 25 bp, probe
ccccagagctggcgaagaagtcctg

SEQ ID NO: 188571 - DNA, 25 bp, probe
cccccagcccaagagatgaacatct

SEQ ID NO: 188572 - DNA, 25 bp, probe
cccccacaccacatcaatagatctt

SEQ ID NO: 188573 - DNA, 25 bp, probe
cccccacaccacatcaatagatctt

SEQ ID NO: 188574 - DNA, 25 bp, probe
ccccgcaccaaacaagaatccatgg

SEQ ID NO: 188575 - DNA, 25 bp, probe
cccccccaacaagaactgcatctgg

SEQ ID NO: 188576 - DNA, 25 bp, probe
cccccccaacaagaactgcatctgg

SEQ ID NO: 188577 - DNA, 25 bp, probe
cccccccaacaagaactgcatctgg

SEQ ID NO: 188578 - DNA, 25 bp, probe
cccccccacaataaagtctgtcaat

SEQ ID NO: 188579 - DNA, 25 bp, probe
cccccgacagaaaatatgttacgct

SEQ ID NO: 188580 - DNA, 25 bp, probe
gccctccgacgagctgatatttact

SEQ ID NO: 188581 - DNA, 25 bp, probe
gcacccggccgagaatatgtgttgt

SEQ ID NO: 188582 - DNA, 25 bp, probe
cccgtggcctgtagaatagcctgtg

SEQ ID NO: 188583 - DNA, 25 bp, probe
cccgtggcctgtagaatagcctgtg

SEQ ID NO: 188584 - DNA, 25 bp, probe
ccacggtactgtgaacgtcgtgtga

SEQ ID NO: 188585 - DNA, 25 bp, probe
cccgatgaacgtgcacctgcgggga

SEQ ID NO: 188586 - DNA, 25 bp, probe
cccgtacatcgaccaggtggtgcgg

SEQ ID NO: 188587 - DNA, 25 bp, probe
cccgaaaagcactggtcgtcaggga

SEQ ID NO: 188588 - DNA, 25 bp, probe
ccccgaaaagcactggtcgtcaggg

SEQ ID NO: 188589 - DNA, 25 bp, probe
ccccgcaaaaccaagggctctggcg

SEQ ID NO: 188590 - DNA, 25 bp, probe
ccccgtataacatcatggtcctggt

SEQ ID NO: 188591 - DNA, 25 bp, probe
cccctatatatttaatggtgacttt

SEQ ID NO: 188592 - DNA, 25 bp, probe
ccccatcatcttcaaggcggcctat

SEQ ID NO: 188593 - DNA, 25 bp, probe
ccgcctcatctggaaatagttccgt

SEQ ID NO: 188594 - DNA, 25 bp, probe
ccccttcaggcatcaagttgaccat

SEQ ID NO: 188595 - DNA, 25 bp, probe
cccgcttcagcagccagagtgggga

SEQ ID NO: 188596 - DNA, 25 bp, probe
cccctggcagaaggaggtggggtct

SEQ ID NO: 188597 - DNA, 25 bp, probe
cccctgtggaaccaccattggacct

SEQ ID NO: 188598 - DNA, 25 bp, probe
cccctgtggaaccaccattggacct

SEQ ID NO: 188599 - DNA, 25 bp, probe
ccccagggaacatcccaggacgtca

SEQ ID NO: 188600 - DNA, 25 bp, probe
cccggggagcactactccgagaagt

SEQ ID NO: 188601 - DNA, 25 bp, probe
cccgagtggagccaacccatgaaga

SEQ ID NO: 188602 - DNA, 25 bp, probe
cccgtgtggccgcagcggcgagaac

SEQ ID NO: 188603 - DNA, 25 bp, probe
cccgtgagtggacatgacagggaac

SEQ ID NO: 188604 - DNA, 25 bp, probe
cctcagtatttacatgaaaaacaca

SEQ ID NO: 188605 - DNA, 25 bp, probe
cctcctttctacccataaattacat

SEQ ID NO: 188606 - DNA, 25 bp, probe
ccccttttcttgccaaaatatatct

SEQ ID NO: 188607 - DNA, 25 bp, probe
ccccttttcttgccaaaatatatct

SEQ ID NO: 188608 - DNA, 25 bp, probe
cccctccccctaatgaaatcatatt

SEQ ID NO: 188609 - DNA, 25 bp, probe
cccctccaagagcattaactattta

SEQ ID NO: 188610 - DNA, 25 bp, probe
ccccctcaaggtgaagagctgattg

SEQ ID NO: 188611 - DNA, 25 bp, probe
ccccgactgggtgtcagagctgaag

SEQ ID NO: 188612 - DNA, 25 bp, probe
ccccagactgggtgacgctggaggg

SEQ ID NO: 188613 - DNA, 25 bp, probe
ccccattctgggcgggcccagtgga

SEQ ID NO: 188614 - DNA, 25 bp, probe
ccccattgtcagtgggtccacgttt

SEQ ID NO: 188615 - DNA, 25 bp, probe
cccgcttgactgtggagttttggct

SEQ ID NO: 188616 - DNA, 25 bp, probe
ccccaagagcggcggattaaggctt

SEQ ID NO: 188617 - DNA, 25 bp, probe
ccccaagaggcgtgagggcaaatct

SEQ ID NO: 188618 - DNA, 25 bp, probe
ccgcctcgagcggggagggtaatgt

SEQ ID NO: 188619 - DNA, 25 bp, probe
cccgtctgatggggagatggctgat

SEQ ID NO: 188620 - DNA, 25 bp, probe
cccgctgatgtgtgatggtgtgctc

SEQ ID NO: 188621 - DNA, 25 bp, probe
cccgaatcatgccgtggtgtctcgg

SEQ ID NO: 188622 - DNA, 25 bp, probe
cccgaatcatgccgtggtgtctcgg

SEQ ID NO: 188623 - DNA, 25 bp, probe
ccccatatctggccaagttcaaggt

SEQ ID NO: 188624 - DNA, 25 bp, probe
ccccagctcatgtgctagttcatag

SEQ ID NO: 188625 - DNA, 25 bp, probe
ccccagctcatgtgctagttcatag

SEQ ID NO: 188626 - DNA, 25 bp, probe
ccccagcctgagtcacagtgtgctg

SEQ ID NO: 188627 - DNA, 25 bp, probe
ccccagcctgagtcacagtgtgctg

SEQ ID NO: 188628 - DNA, 25 bp, probe
cccgaggtgatcctcagctggatgc

SEQ ID NO: 188629 - DNA, 25 bp, probe
cccgagagtgctggacatgctgagg

SEQ ID NO: 188630 - DNA, 25 bp, probe
cccgagaggcgtgatgcaggggtgt

SEQ ID NO: 188631 - DNA, 25 bp, probe
cccgcaagggcggcaagtgaggatg

SEQ ID NO: 188632 - DNA, 25 bp, probe
cctctaagccgagagaggaggagga

SEQ ID NO: 188633 - DNA, 25 bp, probe
cccccgcacgactagggagtgaggg

SEQ ID NO: 188634 - DNA, 25 bp, probe
ccccggaccacatgggggtgcagca

SEQ ID NO: 188635 - DNA, 25 bp, probe
cccctggaggcagcgggagggcgag

SEQ ID NO: 188636 - DNA, 25 bp, probe
cccccgtacagcctgcgggaggtga

SEQ ID NO: 188637 - DNA, 25 bp, probe
ccccaagtgtctctggggacctgaa

SEQ ID NO: 188638 - DNA, 25 bp, probe
ccccaggcgtctctactgggggcta

SEQ ID NO: 188639 - DNA, 25 bp, probe
ccccaggcgtctctactgggggcta

SEQ ID NO: 188640 - DNA, 25 bp, probe
cccgaggcagccctgtacgggaggt

SEQ ID NO: 188641 - DNA, 25 bp, probe
cccgaggcagccctgtacgggaggt

SEQ ID NO: 188642 - DNA, 25 bp, probe
cccgaagcattccattctcgtggag

SEQ ID NO: 188643 - DNA, 25 bp, probe
cccgaagcattccattctcgtggag

SEQ ID NO: 188644 - DNA, 25 bp, probe
cccgaatgctgacattgacgtagtc

SEQ ID NO: 188645 - DNA, 25 bp, probe
cccgaatgcatcaacttccgcaagt

SEQ ID NO: 188646 - DNA, 25 bp, probe
cccgaatgcatcaacttccgcaagt

SEQ ID NO: 188647 - DNA, 25 bp, probe
cccgcagtgcaatctttcagcagca

SEQ ID NO: 188648 - DNA, 25 bp, probe
cccgcagtgcaatctttcagcagca

SEQ ID NO: 188649 - DNA, 25 bp, probe
cccgcagagcaacctgcatctgctg

SEQ ID NO: 188650 - DNA, 25 bp, probe
cccgagatgcaggtcctgtgcttca

SEQ ID NO: 188651 - DNA, 25 bp, probe
cccgtatgtgcgtgcatgtgtatat

SEQ ID NO: 188652 - DNA, 25 bp, probe
ccgcgtcatgtggagcgtcgtgtca

SEQ ID NO: 188653 - DNA, 25 bp, probe
cccgacagaggacgcttgagccaga

SEQ ID NO: 188654 - DNA, 25 bp, probe
cccgatcatccaggtttgaccagca

SEQ ID NO: 188655 - DNA, 25 bp, probe
ccccagcaacaggttctttagaacg

SEQ ID NO: 188656 - DNA, 25 bp, probe
ccccacaggacggtttatgagcaca

SEQ ID NO: 188657 - DNA, 25 bp, probe
cccctcttgaaggtgtgttctccag

SEQ ID NO: 188658 - DNA, 25 bp, probe
cccccctggaggtagctgactccag

SEQ ID NO: 188659 - DNA, 25 bp, probe
cccccctggaggtagctgactccag

SEQ ID NO: 188660 - DNA, 25 bp, probe
ccccgggccaggtagtggccctgag

SEQ ID NO: 188661 - DNA, 25 bp, probe
ccccggagctgatggatgtgagcct

SEQ ID NO: 188662 - DNA, 25 bp, probe
ccccgctcagtctttgagcgagccc

SEQ ID NO: 188663 - DNA, 25 bp, probe
ccccccaaatattgggcagccctgt

SEQ ID NO: 188664 - DNA, 25 bp, probe
ccccacccagcagtgggggctcgcg

SEQ ID NO: 188665 - DNA, 25 bp, probe
cccgccctatgagtttgagctcgtg

SEQ ID NO: 188666 - DNA, 25 bp, probe
ccgcacccgaggatctgacggtggt

SEQ ID NO: 188667 - DNA, 25 bp, probe
ccccccagagctgtgtgagcaggac

SEQ ID NO: 188668 - DNA, 25 bp, probe
cccctcgacagctgattggcggatt

SEQ ID NO: 188669 - DNA, 25 bp, probe
cccgatccaagttgtagatggaata

SEQ ID NO: 188670 - DNA, 25 bp, probe
cccgatccactggggagcaggaaat

SEQ ID NO: 188671 - DNA, 25 bp, probe
cccgaagcctgtgtagcagtgagac

SEQ ID NO: 188672 - DNA, 25 bp, probe
cccgtcagcctgtgctaggcatggt

SEQ ID NO: 188673 - DNA, 25 bp, probe
cccgctcagcctgctgataggggct

SEQ ID NO: 188674 - DNA, 25 bp, probe
cccgctcagcctgctgataggggct

SEQ ID NO: 188675 - DNA, 25 bp, probe
cccgctgtgcccaggagagcagcgt

SEQ ID NO: 188676 - DNA, 25 bp, probe
cccgcagatgccgtggggcagagat

SEQ ID NO: 188677 - DNA, 25 bp, probe
ccccagagcctttaggaacaggaga

SEQ ID NO: 188678 - DNA, 25 bp, probe
cccctacctggaatggaggctggga

SEQ ID NO: 188679 - DNA, 25 bp, probe
cccctacctggaatggaggctggga

SEQ ID NO: 188680 - DNA, 25 bp, probe
ccccttcctctttggggctgaggag

SEQ ID NO: 188681 - DNA, 25 bp, probe
ccccttcctctttggggctgaggag

SEQ ID NO: 188682 - DNA, 25 bp, probe
cccctgtcccacttcgaagtggagg

SEQ ID NO: 188683 - DNA, 25 bp, probe
cccctgtcccacttcgaagtggagg

SEQ ID NO: 188684 - DNA, 25 bp, probe
cccctgtcccacttcgaagtggagg

SEQ ID NO: 188685 - DNA, 25 bp, probe
cccctgtcccacttcgaagtggagg

SEQ ID NO: 188686 - DNA, 25 bp, probe
cccctgtcccacttcgaagtggagg

SEQ ID NO: 188687 - DNA, 25 bp, probe
ccacctggccttatctgaactggat

SEQ ID NO: 188688 - DNA, 25 bp, probe
cccctgacactttgttgaacatcct

SEQ ID NO: 188689 - DNA, 25 bp, probe
cccctgacactttgttgaacatcct

SEQ ID NO: 188690 - DNA, 25 bp, probe
ccccggatctctggttaaacacatc

SEQ ID NO: 188691 - DNA, 25 bp, probe
cccctggtgtctgtactgtgtacac

SEQ ID NO: 188692 - DNA, 25 bp, probe
cccgaggtcttcctatctggaatga

SEQ ID NO: 188693 - DNA, 25 bp, probe
cccgcagtgacctcatgttcgagaa

SEQ ID NO: 188694 - DNA, 25 bp, probe
cccgagtcctatgagttgcagatat

SEQ ID NO: 188695 - DNA, 25 bp, probe
ccccaatcactatagtccatgaaat

SEQ ID NO: 188696 - DNA, 25 bp, probe
ccccttcatctacagcctgaggaac

SEQ ID NO: 188697 - DNA, 25 bp, probe
cccctccatccagacctggatcaga

SEQ ID NO: 188698 - DNA, 25 bp, probe
cccccacccagatccaggtgaaagg

SEQ ID NO: 188699 - DNA, 25 bp, probe
cccccaccaaaactcatgttgaaat

SEQ ID NO: 188700 - DNA, 25 bp, probe
cccgaaccacaaattcttctgaaca

SEQ ID NO: 188701 - DNA, 25 bp, probe
cccgacaccagaagctgttgggaga

SEQ ID NO: 188702 - DNA, 25 bp, probe
cctctgcaaggctagtctgggggga

SEQ ID NO: 188703 - DNA, 25 bp, probe
cctctgcaaggctagtctgggggga

SEQ ID NO: 188704 - DNA, 25 bp, probe
ccccaatttcactttctcagaggaa

SEQ ID NO: 188705 - DNA, 25 bp, probe
ccccaactacatgtaccagcggaag

SEQ ID NO: 188706 - DNA, 25 bp, probe
cccccagcaacagggaccataggaa

SEQ ID NO: 188707 - DNA, 25 bp, probe
ccccttgaacagcctcaagcaagga

SEQ ID NO: 188708 - DNA, 25 bp, probe
cccctgacaatgccctcaagattgt

SEQ ID NO: 188709 - DNA, 25 bp, probe
cccctgacaatgccctcaagattgt

SEQ ID NO: 188710 - DNA, 25 bp, probe
cccgagaaatgcgagccatggctct

SEQ ID NO: 188711 - DNA, 25 bp, probe
cccgcagaggaccattctggctttt

SEQ ID NO: 188712 - DNA, 25 bp, probe
cccgcagaggaccattctggctttt

SEQ ID NO: 188713 - DNA, 25 bp, probe
ccccaggaaacactgctgacctttg

SEQ ID NO: 188714 - DNA, 25 bp, probe
ccccatggaacgacctgaagctata

SEQ ID NO: 188715 - DNA, 25 bp, probe
ccccatgtcatcagtcttaaaaaaa

SEQ ID NO: 188716 - DNA, 25 bp, probe
ccccctcatcatggtctttgaatac

SEQ ID NO: 188717 - DNA, 25 bp, probe
cctccacctcatggcttaaggagac

SEQ ID NO: 188718 - DNA, 25 bp, probe
cccgcacctgtggctgtgcaggtga

SEQ ID NO: 188719 - DNA, 25 bp, probe
cccgccagtatgtgctgcagcgatt

SEQ ID NO: 188720 - DNA, 25 bp, probe
cccgctgcagtgaagagctgcgccc

SEQ ID NO: 188721 - DNA, 25 bp, probe
tccacttggtggggtcaccaactac

SEQ ID NO: 188722 - DNA, 25 bp, probe
cccgctgcagtgaagagctgcgccc

SEQ ID NO: 188723 - DNA, 25 bp, probe
cccctagtgtgagggctgcctcata

SEQ ID NO: 188724 - DNA, 25 bp, probe
ccccaggatgtaggacgcccactgg

SEQ ID NO: 188725 - DNA, 25 bp, probe
ccccacgttttgtgaccactgtggg

SEQ ID NO: 188726 - DNA, 25 bp, probe
cccgcaggttttcagatctaggatt

SEQ ID NO: 188727 - DNA, 25 bp, probe
cccgagtgcttgaggatgatccgga

SEQ ID NO: 188728 - DNA, 25 bp, probe
cccgagcggcgacggaagctggaga

SEQ ID NO: 188729 - DNA, 25 bp, probe
cccgactgtggcggttagcattgga

SEQ ID NO: 188730 - DNA, 25 bp, probe
cccgacttcacggtctacatgatca

SEQ ID NO: 188731 - DNA, 25 bp, probe
cccgacttcacggtctacatgatca

SEQ ID NO: 188732 - DNA, 25 bp, probe
cccgccaatactctcataaagcatg

SEQ ID NO: 188733 - DNA, 25 bp, probe
cccgcaggacacaggtcacaactgt

SEQ ID NO: 188734 - DNA, 25 bp, probe
cccgcaggacacaggtcacaactgt

SEQ ID NO: 188735 - DNA, 25 bp, probe
cccgaaacacttctcggccagaatt

SEQ ID NO: 188736 - DNA, 25 bp, probe
ccttactaacttctccgcaagttgt

SEQ ID NO: 188737 - DNA, 25 bp, probe
ccccctgaatttctcacaaaggatg

SEQ ID NO: 188738 - DNA, 25 bp, probe
cccccgagatcatcctgagcaaagg

SEQ ID NO: 188739 - DNA, 25 bp, probe
cccctgctggacttccgcaggaagg

SEQ ID NO: 188740 - DNA, 25 bp, probe
cccgcctgggcagccatgaatgtag

SEQ ID NO: 188741 - DNA, 25 bp, probe
cccgagctggggtaatcaagatgat

SEQ ID NO: 188742 - DNA, 25 bp, probe
ccgcgccggcagctgaaaaagttgg

SEQ ID NO: 188743 - DNA, 25 bp, probe
cccccagtcggagagtatcgtctgt

SEQ ID NO: 188744 - DNA, 25 bp, probe
cccccagtcggagagtatcgtctgt

SEQ ID NO: 188745 - DNA, 25 bp, probe
cccccaggaggagatgaccagtgcc

SEQ ID NO: 188746 - DNA, 25 bp, probe
ccgcaaaggcagcaggctaccggac

SEQ ID NO: 188747 - DNA, 25 bp, probe
ccgcaaaaccaagggctctggcgtc

SEQ ID NO: 188748 - DNA, 25 bp, probe
gacccaaactgggcgactagggctt

SEQ ID NO: 188749 - DNA, 25 bp, probe
cccgcacgactagggagtgagggca

SEQ ID NO: 188750 - DNA, 25 bp, probe
cccgcagacctctggattaggtctc

SEQ ID NO: 188751 - DNA, 25 bp, probe
ccccattcctcatggacaaggctgt

SEQ ID NO: 188752 - DNA, 25 bp, probe
cccgcgacatcctggacagggagta

SEQ ID NO: 188753 - DNA, 25 bp, probe
cccgctgcaccctcagaagaggggt

SEQ ID NO: 188754 - DNA, 25 bp, probe
cccgccctctcacagaggatgggtg

SEQ ID NO: 188755 - DNA, 25 bp, probe
cccgccctctcacagaggatgggtg

SEQ ID NO: 188756 - DNA, 25 bp, probe
ccgccacctaccacaagcaggtgtc

SEQ ID NO: 188757 - DNA, 25 bp, probe
ccccctccatctctagataagtgtc

SEQ ID NO: 188758 - DNA, 25 bp, probe
ccccgcctcatctggaaatagttcc

SEQ ID NO: 188759 - DNA, 25 bp, probe
ccccgcctcatctggaaatagttcc

SEQ ID NO: 188760 - DNA, 25 bp, probe
cccctcccattaggacaatcagtcc

SEQ ID NO: 188761 - DNA, 25 bp, probe
cccctatccttggcaccaaagatgc

SEQ ID NO: 188762 - DNA, 25 bp, probe
cccctgtcctaggccagaacagtta

SEQ ID NO: 188763 - DNA, 25 bp, probe
cccctgtcctaggccagaacagtta

SEQ ID NO: 188764 - DNA, 25 bp, probe
cccctggcctgcgagaagaacggcg

SEQ ID NO: 188765 - DNA, 25 bp, probe
ccccggagctggcaaaacgctcctg

SEQ ID NO: 188766 - DNA, 25 bp, probe
cccgcgttgttacaggacactcgct

SEQ ID NO: 188767 - DNA, 25 bp, probe
ccccgcgttgttacaggacactcgc

SEQ ID NO: 188768 - DNA, 25 bp, probe
ccccgcgttgttacaggacactcgc

SEQ ID NO: 188769 - DNA, 25 bp, probe
ccccgatggtcttacaggcaaatcc

SEQ ID NO: 188770 - DNA, 25 bp, probe
ccgctcgggaaatgcaggaaggccg

SEQ ID NO: 188771 - DNA, 25 bp, probe
ccccggtgacctcggggagcagcac

SEQ ID NO: 188772 - DNA, 25 bp, probe
cccctcaggacccagggaatgccag

SEQ ID NO: 188773 - DNA, 25 bp, probe
cccctgtggatcctcggggatgtct

SEQ ID NO: 188774 - DNA, 25 bp, probe
cccctgctggtcatcagcgtgttta

SEQ ID NO: 188775 - DNA, 25 bp, probe
ccgccgggtctgttggatgattata

SEQ ID NO: 188776 - DNA, 25 bp, probe
ccccaggacttggtgcagttctcat

SEQ ID NO: 188777 - DNA, 25 bp, probe
cctccagagcctggctctgctttgt

SEQ ID NO: 188778 - DNA, 25 bp, probe
ccccatactccaatatgcttggcac

SEQ ID NO: 188779 - DNA, 25 bp, probe
cccccacatggtgatgttgacatca

SEQ ID NO: 188780 - DNA, 25 bp, probe
cccccatctggtgatgcttgagtgc

SEQ ID NO: 188781 - DNA, 25 bp, probe
cccctcctggccaatgtgcaggtgg

SEQ ID NO: 188782 - DNA, 25 bp, probe
cccccagagatccttgatgcggtgg

SEQ ID NO: 188783 - DNA, 25 bp, probe
cccccagggcctatcgtgggagagc

SEQ ID NO: 188784 - DNA, 25 bp, probe
cccccaggtgccagttatggctata

SEQ ID NO: 188785 - DNA, 25 bp, probe
cccccgagtgctgtgtgttcagtgt

SEQ ID NO: 188786 - DNA, 25 bp, probe
ccccaggagtcttcagtgtgtgagc

SEQ ID NO: 188787 - DNA, 25 bp, probe
ccccaggagtcttcagtgtgtgagc

SEQ ID NO: 188788 - DNA, 25 bp, probe
cccgctggagtgctaggtggaggca

SEQ ID NO: 188789 - DNA, 25 bp, probe
cccctgtgcaggctcaagagctggc

SEQ ID NO: 188790 - DNA, 25 bp, probe
ccccttggcgagccagaactgggaa

SEQ ID NO: 188791 - DNA, 25 bp, probe
cccctagccgcacactagtgtggga

SEQ ID NO: 188792 - DNA, 25 bp, probe
cccctagccgcacactagtgtggga

SEQ ID NO: 188793 - DNA, 25 bp, probe
cccccacacgcactttatgagggag

SEQ ID NO: 188794 - DNA, 25 bp, probe
ccccccactgagaactatgcaatgg

SEQ ID NO: 188795 - DNA, 25 bp, probe
cccctgccctagggcttagagcatg

SEQ ID NO: 188796 - DNA, 25 bp, probe
cccctgccctagggcttagagcatg

SEQ ID NO: 188797 - DNA, 25 bp, probe
cccgctgcccaagcattttgagatt

SEQ ID NO: 188798 - DNA, 25 bp, probe
cccgctgcccaatcatttgcaatgc

SEQ ID NO: 188799 - DNA, 25 bp, probe
ccccgctccagttattggaatggga

SEQ ID NO: 188800 - DNA, 25 bp, probe
ccccgctgttgttggtggaagaggg

SEQ ID NO: 188801 - DNA, 25 bp, probe
ccccgctgtctttgagttgtggtgg

SEQ ID NO: 188802 - DNA, 25 bp, probe
ccccgctgtctttgagttgtggtgg

SEQ ID NO: 188803 - DNA, 25 bp, probe
ccccgctgtctttgagttgtggtgg

SEQ ID NO: 188804 - DNA, 25 bp, probe
cccccttttctccatttgagaggag

SEQ ID NO: 188805 - DNA, 25 bp, probe
ccccaccttttcatattgaggctgc

SEQ ID NO: 188806 - DNA, 25 bp, probe
ccccaccttctatctaagacaatca

SEQ ID NO: 188807 - DNA, 25 bp, probe
ccccctcattcttccgaattgaaat

SEQ ID NO: 188808 - DNA, 25 bp, probe
cccccatcatctgtctgaaattttt

SEQ ID NO: 188809 - DNA, 25 bp, probe
cccctgcactatgcctgtttttggg

SEQ ID NO: 188810 - DNA, 25 bp, probe
cccctgcatctatcgagtttgcaat

SEQ ID NO: 188811 - DNA, 25 bp, probe
cccctgatctatacggctttcaaca

SEQ ID NO: 188812 - DNA, 25 bp, probe
cccctgatctatacggctttcaaca

SEQ ID NO: 188813 - DNA, 25 bp, probe
ccccattgctgtaaatatttcaacg

SEQ ID NO: 188814 - DNA, 25 bp, probe
cccgctattggtataattcagatca

SEQ ID NO: 188815 - DNA, 25 bp, probe
cccgccagggtgagcagtacatgaa

SEQ ID NO: 188816 - DNA, 25 bp, probe
cccgccaccgtgatgaatgtactga

SEQ ID NO: 188817 - DNA, 25 bp, probe
ccccaaaagccgtgatgtgcaatga

SEQ ID NO: 188818 - DNA, 25 bp, probe
cccctcggagccaaatgaggcagga

SEQ ID NO: 188819 - DNA, 25 bp, probe
cccccggagaagactgaggaggagg

SEQ ID NO: 188820 - DNA, 25 bp, probe
ccccatctggccaagcttgaggaag

SEQ ID NO: 188821 - DNA, 25 bp, probe
ccgccatctgctgcagactggagcc

SEQ ID NO: 188822 - DNA, 25 bp, probe
cccgcatcactggcatggtggagcg

SEQ ID NO: 188823 - DNA, 25 bp, probe
cccgctgactagcagctggactgat

SEQ ID NO: 188824 - DNA, 25 bp, probe
ccgcatataccaccagggacttctg

SEQ ID NO: 188825 - DNA, 25 bp, probe
ccccaatctacctggacattcttgg

SEQ ID NO: 188826 - DNA, 25 bp, probe
ccccaatctacctggacattcttgg

SEQ ID NO: 188827 - DNA, 25 bp, probe
ccccaatctacctggacattcttgg

SEQ ID NO: 188828 - DNA, 25 bp, probe
ccccaatctaggaggctcctggcgg

SEQ ID NO: 188829 - DNA, 25 bp, probe
cccccatcctgagagactcctgggg

SEQ ID NO: 188830 - DNA, 25 bp, probe
cccccatcctgagagactcctgggg

SEQ ID NO: 188831 - DNA, 25 bp, probe
cccccagccatgaagaatgcccatg

SEQ ID NO: 188832 - DNA, 25 bp, probe
cccccaccagtaggttcgcaagaag

SEQ ID NO: 188833 - DNA, 25 bp, probe
cccctcctgagcagggatccaagaa

SEQ ID NO: 188834 - DNA, 25 bp, probe
cccctccaagagcgactccaaaaag

SEQ ID NO: 188835 - DNA, 25 bp, probe
cccctccaagagcgactccaaaaag

SEQ ID NO: 188836 - DNA, 25 bp, probe
cccccaaatgagcaggtccaagaca

SEQ ID NO: 188837 - DNA, 25 bp, probe
cccccaactatgtggctccagaagt

SEQ ID NO: 188838 - DNA, 25 bp, probe
cccctcaaacttctgtgcacaaagt

SEQ ID NO: 188839 - DNA, 25 bp, probe
cccctcaaactaccagtgtctagca

SEQ ID NO: 188840 - DNA, 25 bp, probe
cccctcagcagagaggcgggctcag

SEQ ID NO: 188841 - DNA, 25 bp, probe
cccctcagcaaggggctgcttctgg

SEQ ID NO: 188842 - DNA, 25 bp, probe
cccctagtgagggactgtgttgact

SEQ ID NO: 188843 - DNA, 25 bp, probe
ccccaactgggagcctgaagtcctt

SEQ ID NO: 188844 - DNA, 25 bp, probe
ccccaactgggagcctgaagtcctt

SEQ ID NO: 188845 - DNA, 25 bp, probe
ccccacagctgggagagggaatgtt

SEQ ID NO: 188846 - DNA, 25 bp, probe
cccccacggctcaagagaagatgct

SEQ ID NO: 188847 - DNA, 25 bp, probe
ccgcaccacggagaaggagctgctc

SEQ ID NO: 188848 - DNA, 25 bp, probe
cccctcagggaccaagaagtccaag

SEQ ID NO: 188849 - DNA, 25 bp, probe
cccctcagggaccaagaagtccaag

SEQ ID NO: 188850 - DNA, 25 bp, probe
cccccgcagcaaacacaagtttaag

SEQ ID NO: 188851 - DNA, 25 bp, probe
cccccagcctgaacacagttttcag

SEQ ID NO: 188852 - DNA, 25 bp, probe
cccctcagcctgtgaaactctacag

SEQ ID NO: 188853 - DNA, 25 bp, probe
cccctcagcctgtgaaactctacag

SEQ ID NO: 188854 - DNA, 25 bp, probe
cccctccagcagtgaacactgtccg

SEQ ID NO: 188855 - DNA, 25 bp, probe
cccctgcacaagtgtgacatctacc

SEQ ID NO: 188856 - DNA, 25 bp, probe
ccccatacacgctgctgatgatcat

SEQ ID NO: 188857 - DNA, 25 bp, probe
ccccatacacgctgctgatgatcat

SEQ ID NO: 188858 - DNA, 25 bp, probe
ccccatgaggctcactcattgcaga

SEQ ID NO: 188859 - DNA, 25 bp, probe
ccccatgaggctcactcattgcaga

SEQ ID NO: 188860 - DNA, 25 bp, probe
ccccgaggtgatcctcagctggatg

SEQ ID NO: 188861 - DNA, 25 bp, probe
ccgccgggtgaagcctgtgacccgg

SEQ ID NO: 188862 - DNA, 25 bp, probe
cccccagacgaagcctatacaacat

SEQ ID NO: 188863 - DNA, 25 bp, probe
ccccctgactgatagcatttcagaa

SEQ ID NO: 188864 - DNA, 25 bp, probe
ccccctgcttgaattgattccgaag

SEQ ID NO: 188865 - DNA, 25 bp, probe
ccccctggaagctgattcactatgg

SEQ ID NO: 188866 - DNA, 25 bp, probe
ccccctgtattgtatattcaaatat

SEQ ID NO: 188867 - DNA, 25 bp, probe
cccctcttcattcacttcagaaata

SEQ ID NO: 188868 - DNA, 25 bp, probe
ccgtatccacttcacaggataaaat

SEQ ID NO: 188869 - DNA, 25 bp, probe
ccgctatgaactccttgaagaaaaa

SEQ ID NO: 188870 - DNA, 25 bp, probe
ccccaaattccattatgacaacaca

SEQ ID NO: 188871 - DNA, 25 bp, probe
ccccaattatccaatagtctaataa

SEQ ID NO: 188872 - DNA, 25 bp, probe
ccccacctatctttggtatatgata

SEQ ID NO: 188873 - DNA, 25 bp, probe
cccctgcctatatctatgaaatttg

SEQ ID NO: 188874 - DNA, 25 bp, probe
ccccctgctgcttttgagaaatttg

SEQ ID NO: 188875 - DNA, 25 bp, probe
ccccctgctgcttttgagaaatttg

SEQ ID NO: 188876 - DNA, 25 bp, probe
ccacctcgtgtgcgtgaacaacgac

SEQ ID NO: 188877 - DNA, 25 bp, probe
ccacctcgtgtgcgtgaacaacgac

SEQ ID NO: 188878 - DNA, 25 bp, probe
ccccgcagagttctgcccaaggagc

SEQ ID NO: 188879 - DNA, 25 bp, probe
cccctgaagtggatggcgccagaat

SEQ ID NO: 188880 - DNA, 25 bp, probe
ccccggcagtggggagcgccggatt

SEQ ID NO: 188881 - DNA, 25 bp, probe
ccccaggaaacggaggctcggattg

SEQ ID NO: 188882 - DNA, 25 bp, probe
ccccaggagatgtggaactcgggct

SEQ ID NO: 188883 - DNA, 25 bp, probe
ccccgacagacactgtgaacggaag

SEQ ID NO: 188884 - DNA, 25 bp, probe
cccccacgaactacaactgaatcag

SEQ ID NO: 188885 - DNA, 25 bp, probe
cccccactggatggaacctgttagc

SEQ ID NO: 188886 - DNA, 25 bp, probe
ccccgaaggaggagcgctgtgatcg

SEQ ID NO: 188887 - DNA, 25 bp, probe
ccccgaaggaggagcgctgtgatcg

SEQ ID NO: 188888 - DNA, 25 bp, probe
cccccaaggatgcaacggatcgctg

SEQ ID NO: 188889 - DNA, 25 bp, probe
cccccaagagtgccaagtgcgaggg

SEQ ID NO: 188890 - DNA, 25 bp, probe
cccccacagataacatcagctgagg

SEQ ID NO: 188891 - DNA, 25 bp, probe
cccccaccatctggctcaggtggag

SEQ ID NO: 188892 - DNA, 25 bp, probe
cccccaccatctggctcaggtggag

SEQ ID NO: 188893 - DNA, 25 bp, probe
cccccaccatctggctcaggtggag

SEQ ID NO: 188894 - DNA, 25 bp, probe
cccccaccatctggctcaggtggag

SEQ ID NO: 188895 - DNA, 25 bp, probe
cccccagatcctggccacaattgag

SEQ ID NO: 188896 - DNA, 25 bp, probe
cccccagtccttgacacatgtggac

SEQ ID NO: 188897 - DNA, 25 bp, probe
cccccagtccttgacacatgtggac

SEQ ID NO: 188898 - DNA, 25 bp, probe
cccctttcctgggagacacgaagca

SEQ ID NO: 188899 - DNA, 25 bp, probe
cccctttcctgggagacacgaagca

SEQ ID NO: 188900 - DNA, 25 bp, probe
ccccgctacctaggaacatcaatga

SEQ ID NO: 188901 - DNA, 25 bp, probe
ccccgccatctggaaaagcatcttc

SEQ ID NO: 188902 - DNA, 25 bp, probe
ccccgccatctggaaaagcatcttc

SEQ ID NO: 188903 - DNA, 25 bp, probe
cccccacactgaaatgaagctggct

SEQ ID NO: 188904 - DNA, 25 bp, probe
cccccagcctggtatggagtccagt

SEQ ID NO: 188905 - DNA, 25 bp, probe
cccccagcctgaatatgtgaaccag

SEQ ID NO: 188906 - DNA, 25 bp, probe
cccccagcacagatgaggagcagct

SEQ ID NO: 188907 - DNA, 25 bp, probe
cccccagcacagatgaggagcagct

SEQ ID NO: 188908 - DNA, 25 bp, probe
ccccaatgctgcagagcagtcaggc

SEQ ID NO: 188909 - DNA, 25 bp, probe
ccccaagtaagaagtctgagtccct

SEQ ID NO: 188910 - DNA, 25 bp, probe
ccccaagagacacggggcatcccct

SEQ ID NO: 188911 - DNA, 25 bp, probe
ccccaaggaggaggaccatcgagct

SEQ ID NO: 188912 - DNA, 25 bp, probe
ccccacggcctgaagacttcatgcg

SEQ ID NO: 188913 - DNA, 25 bp, probe
ccccacggcctgaagacttcatgcg

SEQ ID NO: 188914 - DNA, 25 bp, probe
cccccataactggcagcattcccag

SEQ ID NO: 188915 - DNA, 25 bp, probe
cccccatgagcagtgccatgatcca

SEQ ID NO: 188916 - DNA, 25 bp, probe
cccccatgagcagtgccatgatcca

SEQ ID NO: 188917 - DNA, 25 bp, probe
ccccatgagcagtgccatgatccag

SEQ ID NO: 188918 - DNA, 25 bp, probe
ccccatgagcagtgccatgatccag

SEQ ID NO: 188919 - DNA, 25 bp, probe
ccccgagagggcgagaccagagggg

SEQ ID NO: 188920 - DNA, 25 bp, probe
ccgctctgatgtctggagtttgggg

SEQ ID NO: 188921 - DNA, 25 bp, probe
ccgagctgatgtgtggagcctgggc

SEQ ID NO: 188922 - DNA, 25 bp, probe
ccgagtatgtgcgggcgcagtaccc

SEQ ID NO: 188923 - DNA, 25 bp, probe
ccgcagtctgcttgagcggcaggcc

SEQ ID NO: 188924 - DNA, 25 bp, probe
ccgctcactgctggaggacgatgac

SEQ ID NO: 188925 - DNA, 25 bp, probe
ccccctcggagccaaatgaggcagg

SEQ ID NO: 188926 - DNA, 25 bp, probe
ccccctcggagccaaatgaggcagg

SEQ ID NO: 188927 - DNA, 25 bp, probe
ccccacagggggccaggggcatggc

SEQ ID NO: 188928 - DNA, 25 bp, probe
cccccaggaggtctggcagagctga

SEQ ID NO: 188929 - DNA, 25 bp, probe
cccccaggcagcacacagaaggctg

SEQ ID NO: 188930 - DNA, 25 bp, probe
ccccctggagctgcaggaggagctg

SEQ ID NO: 188931 - DNA, 25 bp, probe
cccccggagctgatggatgtgagcc

SEQ ID NO: 188932 - DNA, 25 bp, probe
ccccgctggtggaggatggtgtcaa

SEQ ID NO: 188933 - DNA, 25 bp, probe
cccctgggtgtcagatgatgcctcc

SEQ ID NO: 188934 - DNA, 25 bp, probe
cccctggtgcgcattgagatccatg

SEQ ID NO: 188935 - DNA, 25 bp, probe
ccccgggtcatgaaaatcacagaac

SEQ ID NO: 188936 - DNA, 25 bp, probe
ccccagggattggaaacggatgacg

SEQ ID NO: 188937 - DNA, 25 bp, probe
ccgcctgtaagagaaacgagtatct

SEQ ID NO: 188938 - DNA, 25 bp, probe
cccctggaagcagatacagatggct

SEQ ID NO: 188939 - DNA, 25 bp, probe
cccctggaagcagatacagatggct

SEQ ID NO: 188940 - DNA, 25 bp, probe
cccctggaggaccataactggccac

SEQ ID NO: 188941 - DNA, 25 bp, probe
ccgacggaggcagacaagcccaatg

SEQ ID NO: 188942 - DNA, 25 bp, probe
ccccgaggatgagccagaggccgag

SEQ ID NO: 188943 - DNA, 25 bp, probe
ccccaagattgagcggagtgcctcg

SEQ ID NO: 188944 - DNA, 25 bp, probe
ccccctgcattgtacgacaggactc

SEQ ID NO: 188945 - DNA, 25 bp, probe
ccccgtgttcatatgtcagggcaca

SEQ ID NO: 188946 - DNA, 25 bp, probe
cccccaggttcactgtggggagatc

SEQ ID NO: 188947 - DNA, 25 bp, probe
cccccaggcctgtagtggtggagac

SEQ ID NO: 188948 - DNA, 25 bp, probe
cccccaggctcttttctagtgagaa

SEQ ID NO: 188949 - DNA, 25 bp, probe
cccccatgtgacttttatctgtagc

SEQ ID NO: 188950 - DNA, 25 bp, probe
ccccactggtctttgacatctttat

SEQ ID NO: 188951 - DNA, 25 bp, probe
ccccatattcttttacatggcttct

SEQ ID NO: 188952 - DNA, 25 bp, probe
ccccatattcttttacatggcttct

SEQ ID NO: 188953 - DNA, 25 bp, probe
ccccagattctgattctacagctgc

SEQ ID NO: 188954 - DNA, 25 bp, probe
ccccagtttgtatttagctgccaaa

SEQ ID NO: 188955 - DNA, 25 bp, probe
ccccaggctcttttctagtgagaaa

SEQ ID NO: 188956 - DNA, 25 bp, probe
ccccaactgttagtcaattgagctg

SEQ ID NO: 188957 - DNA, 25 bp, probe
ccgcctactttggccatgttagcct

SEQ ID NO: 188958 - DNA, 25 bp, probe
ccccgacttagtccatgtgatgcgc

SEQ ID NO: 188959 - DNA, 25 bp, probe
ccgccaattccgccaagcatatggc

SEQ ID NO: 188960 - DNA, 25 bp, probe
ccccacattccactgaactgtgcgg

SEQ ID NO: 188961 - DNA, 25 bp, probe
ccccatcaacgacaactactgtgaa

SEQ ID NO: 188962 - DNA, 25 bp, probe
ccccaaaactgattacaactgctac

SEQ ID NO: 188963 - DNA, 25 bp, probe
ccgccaatactctcataaagcatgt

SEQ ID NO: 188964 - DNA, 25 bp, probe
ccgctgcaacatctccatagagaca

SEQ ID NO: 188965 - DNA, 25 bp, probe
ccgcagtgcaatctttcagcagcaa

SEQ ID NO: 188966 - DNA, 25 bp, probe
ccgcagtgcaatctttcagcagcaa

SEQ ID NO: 188967 - DNA, 25 bp, probe
ccgcaacagcatggtcattcacatc

SEQ ID NO: 188968 - DNA, 25 bp, probe
ccatgaattcatgtataaaccccat

SEQ ID NO: 188969 - DNA, 25 bp, probe
ccaggacacttacaaaccccatagg

SEQ ID NO: 188970 - DNA, 25 bp, probe
ccgggacatctacaaagaccccagc

SEQ ID NO: 188971 - DNA, 25 bp, probe
ccgaggacttcacaatcaagctgat

SEQ ID NO: 188972 - DNA, 25 bp, probe
ccgaggacttcacaatcaagctgat

SEQ ID NO: 188973 - DNA, 25 bp, probe
ccgaggactttgattgcacattgtt

SEQ ID NO: 188974 - DNA, 25 bp, probe
ccgaggactttgattgcacattgtt

SEQ ID NO: 188975 - DNA, 25 bp, probe
ccgatgacatcatcgactccctgtt

SEQ ID NO: 188976 - DNA, 25 bp, probe
ccgatgacatcatcgactccctgtt

SEQ ID NO: 188977 - DNA, 25 bp, probe
cctaagaaacgactgggttgtcatc

SEQ ID NO: 188978 - DNA, 25 bp, probe
cctacaggggattgtgttttgtcac

SEQ ID NO: 188979 - DNA, 25 bp, probe
ccgcaagttgtcctatttttgtcat

SEQ ID NO: 188980 - DNA, 25 bp, probe
ccccacattggacttccttggtttg

SEQ ID NO: 188981 - DNA, 25 bp, probe
ccccgcagtgaagttcccttgtggg

SEQ ID NO: 188982 - DNA, 25 bp, probe
ccccgagaagaggccatcctttgtg

SEQ ID NO: 188983 - DNA, 25 bp, probe
ccccaaacagaacacctccatggat

SEQ ID NO: 188984 - DNA, 25 bp, probe
ccccagaatagttaaactctatgat

SEQ ID NO: 188985 - DNA, 25 bp, probe
cctccagtactgcacaaattcctaa

SEQ ID NO: 188986 - DNA, 25 bp, probe
ccccatcacaacaacctatgtcact

SEQ ID NO: 188987 - DNA, 25 bp, probe
ccccactggacaacactgattcctg

SEQ ID NO: 188988 - DNA, 25 bp, probe
ccccctgagaagagccagtcagatg

SEQ ID NO: 188989 - DNA, 25 bp, probe
cccccgtgaggatgtcactcagatg

SEQ ID NO: 188990 - DNA, 25 bp, probe
cccctcattctggggtcaccagagg

SEQ ID NO: 188991 - DNA, 25 bp, probe
cccctgcatctagcagcctacaagg

SEQ ID NO: 188992 - DNA, 25 bp, probe
cccctgatctatggactctggaaca

SEQ ID NO: 188993 - DNA, 25 bp, probe
cccctgtcttgctgtcatgaaatca

SEQ ID NO: 188994 - DNA, 25 bp, probe
ccccttctatggagataagatgaat

SEQ ID NO: 188995 - DNA, 25 bp, probe
cccctttgtggaggtggagatcatt

SEQ ID NO: 188996 - DNA, 25 bp, probe
cccctttggatccctgaaatctgat

SEQ ID NO: 188997 - DNA, 25 bp, probe
cctactgtaggcctcctaagtctaa

SEQ ID NO: 188998 - DNA, 25 bp, probe
ccgcactgtggtggtgcttacggtc

SEQ ID NO: 188999 - DNA, 25 bp, probe
ccgcactgtggtggtgcttacggtc

SEQ ID NO: 189000 - DNA, 25 bp, probe
cccctggagctggtcattacgagga

SEQ ID NO: 189001 - DNA, 25 bp, probe
ccccgtgagtggacatgacagggaa

SEQ ID NO: 189002 - DNA, 25 bp, probe
ccccggctctgggtcacagaggagc

SEQ ID NO: 189003 - DNA, 25 bp, probe
cccctgctggggggacaggagaggg

SEQ ID NO: 189004 - DNA, 25 bp, probe
ccgccggaggtggtgacggactggc

SEQ ID NO: 189005 - DNA, 25 bp, probe
ccgcccggcaaggtagtggaagact

SEQ ID NO: 189006 - DNA, 25 bp, probe
ccgatccaagttgtagatggaatag

SEQ ID NO: 189007 - DNA, 25 bp, probe
ccgaaaagttctacagcatgcgcag

SEQ ID NO: 189008 - DNA, 25 bp, probe
ccgagaaatggagatcaatggcatg

SEQ ID NO: 189009 - DNA, 25 bp, probe
ccgtagagcagggcaaaatggtggc

SEQ ID NO: 189010 - DNA, 25 bp, probe
ccccaccagtggacaaagatgggca

SEQ ID NO: 189011 - DNA, 25 bp, probe
ccccagtcagtgcttaaatgggctc

SEQ ID NO: 189012 - DNA, 25 bp, probe
ccccagctcaagcattaagacaccc

SEQ ID NO: 189013 - DNA, 25 bp, probe
ccccagtagagcttatacatatcag

SEQ ID NO: 189014 - DNA, 25 bp, probe
ccccgtggagctgtacaatctcatg

SEQ ID NO: 189015 - DNA, 25 bp, probe
ccccctggagctttgattttgcact

SEQ ID NO: 189016 - DNA, 25 bp, probe
ccgccctatgagtttgagctcgtgc

SEQ ID NO: 189017 - DNA, 25 bp, probe
ccccactcacaatgatggtgcagtc

SEQ ID NO: 189018 - DNA, 25 bp, probe
ccccatcccaaggcaagcatgaata

SEQ ID NO: 189019 - DNA, 25 bp, probe
cccctgaccaattcacctgataaac

SEQ ID NO: 189020 - DNA, 25 bp, probe
ccgactactgaatctcctacatgta

SEQ ID NO: 189021 - DNA, 25 bp, probe
ccgctcttagaattggcctgtagtg

SEQ ID NO: 189022 - DNA, 25 bp, probe
cccctcttagggctctgtgagaggt

SEQ ID NO: 189023 - DNA, 25 bp, probe
cccctccgtgctcttcgagagggtg

SEQ ID NO: 189024 - DNA, 25 bp, probe
ccccagcacgagcggctcggagggg

SEQ ID NO: 189025 - DNA, 25 bp, probe
ccccaggcgcatcctggcctgggtg

SEQ ID NO: 189026 - DNA, 25 bp, probe
cccctgcggcatagctggcagatgc

SEQ ID NO: 189027 - DNA, 25 bp, probe
cccctgagtccagggatgctgcgga

SEQ ID NO: 189028 - DNA, 25 bp, probe
cctcctggaaccagatcctggaccc

SEQ ID NO: 189029 - DNA, 25 bp, probe
cccctgggacaatgacccagaagac

SEQ ID NO: 189030 - DNA, 25 bp, probe
ccccagtgggaatgatccctgacat

SEQ ID NO: 189031 - DNA, 25 bp, probe
ccccggagaagctgtcagccagcac

SEQ ID NO: 189032 - DNA, 25 bp, probe
ccccagcgaagtgcagtgcacccag

SEQ ID NO: 189033 - DNA, 25 bp, probe
cccctgctgaatgcacgtgcatcca

SEQ ID NO: 189034 - DNA, 25 bp, probe
cccctgctgaatgcacgtgcatcca

SEQ ID NO: 189035 - DNA, 25 bp, probe
ccccatctgaatcagctgcgctgga

SEQ ID NO: 189036 - DNA, 25 bp, probe
ccccacgcaatccagtactggactt

SEQ ID NO: 189037 - DNA, 25 bp, probe
ccccacgcaatccagtactggactt

SEQ ID NO: 189038 - DNA, 25 bp, probe
ccgcccagaagccatagacgagacg

SEQ ID NO: 189039 - DNA, 25 bp, probe
ccccacatgaggaagaacatcaagg

SEQ ID NO: 189040 - DNA, 25 bp, probe
ccccagcgggaacgcacacaagtgg

SEQ ID NO: 189041 - DNA, 25 bp, probe
ccgctacgaagcagcctgcaacagg

SEQ ID NO: 189042 - DNA, 25 bp, probe
ccccacagcaacactcatgcatgaa

SEQ ID NO: 189043 - DNA, 25 bp, probe
ccccagcacagaagcccatgtgaga

SEQ ID NO: 189044 - DNA, 25 bp, probe
ccccatcatcgtgcactgcagtgat

SEQ ID NO: 189045 - DNA, 25 bp, probe
ccccatcatctatgctctgaggagt

SEQ ID NO: 189046 - DNA, 25 bp, probe
cccctgatctgtgcttgcaggcgag

SEQ ID NO: 189047 - DNA, 25 bp, probe
ccgacgtcagcaacttcgacgagga

SEQ ID NO: 189048 - DNA, 25 bp, probe
ccgactacagcaacctacgggagac

SEQ ID NO: 189049 - DNA, 25 bp, probe
ccgcaatatcgttcagtacctgggc

SEQ ID NO: 189050 - DNA, 25 bp, probe
ccgcaatatcgttcagtacctgggc

SEQ ID NO: 189051 - DNA, 25 bp, probe
ccccatactggaaggactctgaggc

SEQ ID NO: 189052 - DNA, 25 bp, probe
cccctcactggctggactggaggct

SEQ ID NO: 189053 - DNA, 25 bp, probe
cccctacctctgatgagctatgggc

SEQ ID NO: 189054 - DNA, 25 bp, probe
ccccttcctgtaagacgatgtgact

SEQ ID NO: 189055 - DNA, 25 bp, probe
cccctccttgtaatgtagacagact

SEQ ID NO: 189056 - DNA, 25 bp, probe
ccccaccatatgaattgtacagaat

SEQ ID NO: 189057 - DNA, 25 bp, probe
cccctcatcatggtctttgaataca

SEQ ID NO: 189058 - DNA, 25 bp, probe
cccctcattgtgacttatgaggagc

SEQ ID NO: 189059 - DNA, 25 bp, probe
ccccatcattgtttacatcaagatc

SEQ ID NO: 189060 - DNA, 25 bp, probe
ccccactggtataaatacatctctc

SEQ ID NO: 189061 - DNA, 25 bp, probe
ccccactggtataaatacatctctc

SEQ ID NO: 189062 - DNA, 25 bp, probe
ccccactgactcttcaaggacgtgc

SEQ ID NO: 189063 - DNA, 25 bp, probe
ccccactgactcttcaaggacgtgc

SEQ ID NO: 189064 - DNA, 25 bp, probe
ccccgctgcaccctcagaagagggg

SEQ ID NO: 189065 - DNA, 25 bp, probe
ccccgctgcaccctcagaagagggg

SEQ ID NO: 189066 - DNA, 25 bp, probe
ccccagcccccactgtgaaggggct

SEQ ID NO: 189067 - DNA, 25 bp, probe
cccctgcaacttccgctgaggggtc

SEQ ID NO: 189068 - DNA, 25 bp, probe
cccctgaatcatgggcacggagggc

SEQ ID NO: 189069 - DNA, 25 bp, probe
ccccatcacatcagtgcccagaggg

SEQ ID NO: 189070 - DNA, 25 bp, probe
ccccacgataagcaccagtgggact

SEQ ID NO: 189071 - DNA, 25 bp, probe
ccccgcagcaaacacaagtttaaga

SEQ ID NO: 189072 - DNA, 25 bp, probe
ccgccggaaactgcaagttccgacg

SEQ ID NO: 189073 - DNA, 25 bp, probe
ccccagggaggtgcaaaggctctac

SEQ ID NO: 189074 - DNA, 25 bp, probe
ccccaagagacctagctaaggtcta

SEQ ID NO: 189075 - DNA, 25 bp, probe
cccctgaggacctttctgaggagta

SEQ ID NO: 189076 - DNA, 25 bp, probe
ccgcttagctgcgcatttgcggggc

SEQ ID NO: 189077 - DNA, 25 bp, probe
ccgcctgagcttgcatttgaaattg

SEQ ID NO: 189078 - DNA, 25 bp, probe
ccgcctgagcttgcatttgaaattg

SEQ ID NO: 189079 - DNA, 25 bp, probe
cccctgcagatctctcttggaagga

SEQ ID NO: 189080 - DNA, 25 bp, probe
ccccgactccacaatctggaagggc

SEQ ID NO: 189081 - DNA, 25 bp, probe
ccccgactccacaatctggaagggc

SEQ ID NO: 189082 - DNA, 25 bp, probe
ccccggtacatgatgctggccaggg

SEQ ID NO: 189083 - DNA, 25 bp, probe
cccctggttatcagccaccaggctt

SEQ ID NO: 189084 - DNA, 25 bp, probe
cccctggttatcagccaccaggctt

SEQ ID NO: 189085 - DNA, 25 bp, probe
cccctagagtcagttcaccacaggc

SEQ ID NO: 189086 - DNA, 25 bp, probe
ccccttcattacacatccatcatga

SEQ ID NO: 189087 - DNA, 25 bp, probe
cccctgtcaatgagaatcagatcga

SEQ ID NO: 189088 - DNA, 25 bp, probe
ccccagatcaacagactcttctaca

SEQ ID NO: 189089 - DNA, 25 bp, probe
ccgctctacaatatgagccttctga

SEQ ID NO: 189090 - DNA, 25 bp, probe
cccctggatatatatcctcctgaga

SEQ ID NO: 189091 - DNA, 25 bp, probe
cccctgagatcctacagggcctgaa

SEQ ID NO: 189092 - DNA, 25 bp, probe
ccccgagtcacttcaggtggtgtgt

SEQ ID NO: 189093 - DNA, 25 bp, probe
ccccggtcactgcaaggggatgctg

SEQ ID NO: 189094 - DNA, 25 bp, probe
ccccagttgcaccaaggagtgggtg

SEQ ID NO: 189095 - DNA, 25 bp, probe
cccctgtgccagcaaagcactgtgg

SEQ ID NO: 189096 - DNA, 25 bp, probe
cccctgtgccagcaaagcactgtgg

SEQ ID NO: 189097 - DNA, 25 bp, probe
ccccatggccagaatatgaccgtca

SEQ ID NO: 189098 - DNA, 25 bp, probe
ccccatcgcacaagaaacctgcaga

SEQ ID NO: 189099 - DNA, 25 bp, probe
ccgcgcagccgcatgaaccggatgt

SEQ ID NO: 189100 - DNA, 25 bp, probe
ccccgtcagcggtcacgggatggat

SEQ ID NO: 189101 - DNA, 25 bp, probe
cccctacagcgtgcacaggtgctgg

SEQ ID NO: 189102 - DNA, 25 bp, probe
ccccaacatgtattccatcgtgctg

SEQ ID NO: 189103 - DNA, 25 bp, probe
ccccatccatgcagtagaggcgctg

SEQ ID NO: 189104 - DNA, 25 bp, probe
ccccatccatgcagtagaggcgctg

SEQ ID NO: 189105 - DNA, 25 bp, probe
ccccacgcattcttcaggagtgtgg

SEQ ID NO: 189106 - DNA, 25 bp, probe
ccccaggctctagtgcaggaggaga

SEQ ID NO: 189107 - DNA, 25 bp, probe
ccccagcgtcttgacgggagcattg

SEQ ID NO: 189108 - DNA, 25 bp, probe
ccccagcagctgcgtaggggcacag

SEQ ID NO: 189109 - DNA, 25 bp, probe
cccctgcctcggttggtgacagagg

SEQ ID NO: 189110 - DNA, 25 bp, probe
ccccttgccgagttgagggcagctg

SEQ ID NO: 189111 - DNA, 25 bp, probe
ccccttgccgagttgagggcagctg

SEQ ID NO: 189112 - DNA, 25 bp, probe
ccccttccgcgacgaggaggagttg

SEQ ID NO: 189113 - DNA, 25 bp, probe
ccccttccgcgacgaggaggagttg

SEQ ID NO: 189114 - DNA, 25 bp, probe
ccccttcaccttgtgtggacagtgt

SEQ ID NO: 189115 - DNA, 25 bp, probe
ccccagatcccttcaagctggaagg

SEQ ID NO: 189116 - DNA, 25 bp, probe
ccccagtgctccagaacagcgggag

SEQ ID NO: 189117 - DNA, 25 bp, probe
cccctgtctgtaaggagcagcggga

SEQ ID NO: 189118 - DNA, 25 bp, probe
ccccttcgtaagccaagctgtgtgt

SEQ ID NO: 189119 - DNA, 25 bp, probe
ccccttcttccagcatactggtgga

SEQ ID NO: 189120 - DNA, 25 bp, probe
ccccttcattccgattcagcaggag

SEQ ID NO: 189121 - DNA, 25 bp, probe
ccccatcttcatgtatctcaggaga

SEQ ID NO: 189122 - DNA, 25 bp, probe
ccccatcttcatgtatctcaggaga

SEQ ID NO: 189123 - DNA, 25 bp, probe
ccccatcttctgggtcagcaagtgg

SEQ ID NO: 189124 - DNA, 25 bp, probe
ccgccatcatttgtggcaaagaatg

SEQ ID NO: 189125 - DNA, 25 bp, probe
ccccatcctgtgttgatgatataaa

SEQ ID NO: 189126 - DNA, 25 bp, probe
ccccatccggcaagcagaagcaagg

SEQ ID NO: 189127 - DNA, 25 bp, probe
ccccatcccctggcaggaggagatg

SEQ ID NO: 189128 - DNA, 25 bp, probe
ccccaccacctggatgagtacgtgc

SEQ ID NO: 189129 - DNA, 25 bp, probe
ccccaggacctggggcgactggagg

SEQ ID NO: 189130 - DNA, 25 bp, probe
ccccagtatccagcgggaactcagg

SEQ ID NO: 189131 - DNA, 25 bp, probe
ccccagatgtcttgacgggatcact

SEQ ID NO: 189132 - DNA, 25 bp, probe
cccctgatgacttgtgggtgctcct

SEQ ID NO: 189133 - DNA, 25 bp, probe
cccctgatgacttgtgggtgctcct

SEQ ID NO: 189134 - DNA, 25 bp, probe
cccctggcagagctgggtggcagct

SEQ ID NO: 189135 - DNA, 25 bp, probe
cccctcagacagctggcatgagaga

SEQ ID NO: 189136 - DNA, 25 bp, probe
cccctcagacagtttgcttatttta

SEQ ID NO: 189137 - DNA, 25 bp, probe
cctccaagagcattaactatttaaa

SEQ ID NO: 189138 - DNA, 25 bp, probe
ccccagcaagcattatatctcagtg

SEQ ID NO: 189139 - DNA, 25 bp, probe
ccccaagcacatcattctgatgcag

SEQ ID NO: 189140 - DNA, 25 bp, probe
cccctgccaatgtatctcagcagaa

SEQ ID NO: 189141 - DNA, 25 bp, probe
cccctgcctcattatgatcagcttg

SEQ ID NO: 189142 - DNA, 25 bp, probe
cccctggatgaatatcctgtgggcc

SEQ ID NO: 189143 - DNA, 25 bp, probe
cccctgtggagatttcctgtgagaa

SEQ ID NO: 189144 - DNA, 25 bp, probe
cccctgagagagcttctccgagagc

SEQ ID NO: 189145 - DNA, 25 bp, probe
cccctgcagaggctccggatggagc

SEQ ID NO: 189146 - DNA, 25 bp, probe
cccctgggcaggaggcagtggagaa

SEQ ID NO: 189147 - DNA, 25 bp, probe
ccgctgagggcacaaggaattagta

SEQ ID NO: 189148 - DNA, 25 bp, probe
ccgctttgtgcataaggacttggct

SEQ ID NO: 189149 - DNA, 25 bp, probe
ccgcgttgttacaggacactcgctg

SEQ ID NO: 189150 - DNA, 25 bp, probe
ccgcgttgttacaggacactcgctg

SEQ ID NO: 189151 - DNA, 25 bp, probe
gccgtttactgtaaggacgtcctgg

SEQ ID NO: 189152 - DNA, 25 bp, probe
ccgccgtccgatgaggatcgttttt

SEQ ID NO: 189153 - DNA, 25 bp, probe
ccgttgtccgaatcgcactgtattt

SEQ ID NO: 189154 - DNA, 25 bp, probe
ccgcatgtgtaacaacagccgcttc

SEQ ID NO: 189155 - DNA, 25 bp, probe
ccgcgagatagggcagatcactctc

SEQ ID NO: 189156 - DNA, 25 bp, probe
ccccatgaagaccagacagctctgc

SEQ ID NO: 189157 - DNA, 25 bp, probe
ccccatcgagcacggcatcgtcacc

SEQ ID NO: 189158 - DNA, 25 bp, probe
ccccaggacagtagctgctctactc

SEQ ID NO: 189159 - DNA, 25 bp, probe
ccccaggacagtagctgctctactc

SEQ ID NO: 189160 - DNA, 25 bp, probe
ccccacgaaattccttgagctcata

SEQ ID NO: 189161 - DNA, 25 bp, probe
ccccactgcaagacaacctggttat

SEQ ID NO: 189162 - DNA, 25 bp, probe
cccctagccagggacactggtctgt

SEQ ID NO: 189163 - DNA, 25 bp, probe
ccgttaccacggacacagtatgagt

SEQ ID NO: 189164 - DNA, 25 bp, probe
ccgctataagcgctggaagtcagag

SEQ ID NO: 189165 - DNA, 25 bp, probe
ccgtctcagggcaggacgccgacgg

SEQ ID NO: 189166 - DNA, 25 bp, probe
ccgtctcagggcaggacgccgacgg

SEQ ID NO: 189167 - DNA, 25 bp, probe
ccgcctcaaggaagagccagccgta

SEQ ID NO: 189168 - DNA, 25 bp, probe
ccccaaggaatatgcctgcctgaaa

SEQ ID NO: 189169 - DNA, 25 bp, probe
ccccaagcaacacgacgacacgaaa

SEQ ID NO: 189170 - DNA, 25 bp, probe
ccccaagcaacacgacgacacgaaa

SEQ ID NO: 189171 - DNA, 25 bp, probe
cccctagcatagagacagacagcga

SEQ ID NO: 189172 - DNA, 25 bp, probe
cccctacctgtccacatgatgagga

SEQ ID NO: 189173 - DNA, 25 bp, probe
cccctacctgtccacatgatgagga

SEQ ID NO: 189174 - DNA, 25 bp, probe
cccctgaactgtgatgatgaggtgt

SEQ ID NO: 189175 - DNA, 25 bp, probe
ccccaggtcctgctgatgaggtggc

SEQ ID NO: 189176 - DNA, 25 bp, probe
ccccaggtcctgctgatgaggtggc

SEQ ID NO: 189177 - DNA, 25 bp, probe
ccccagagtcaccgggaggagagcc

SEQ ID NO: 189178 - DNA, 25 bp, probe
ccccaggttcactgtggggagatct

SEQ ID NO: 189179 - DNA, 25 bp, probe
ccccagtggtcctggtgggagacca

SEQ ID NO: 189180 - DNA, 25 bp, probe
cctgtaggggcctggggaaagccag

SEQ ID NO: 189181 - DNA, 25 bp, probe
ccgctgagagggggctgggaaaagc

SEQ ID NO: 189182 - DNA, 25 bp, probe
ccgacagaggacgcttgagccagaa

SEQ ID NO: 189183 - DNA, 25 bp, probe
ccgagtcatggtctcgggcctgtaa

SEQ ID NO: 189184 - DNA, 25 bp, probe
ccgggaagtgggaggacgtagagca

SEQ ID NO: 189185 - DNA, 25 bp, probe
ccgccgagggactcggccggagagc

SEQ ID NO: 189186 - DNA, 25 bp, probe
ccccagttcggctccgaggtggagc

SEQ ID NO: 189187 - DNA, 25 bp, probe
ccccagtgagcggcagcctcagggg

SEQ ID NO: 189188 - DNA, 25 bp, probe
ccgccgtggagatcttcatggtgaa

SEQ ID NO: 189189 - DNA, 25 bp, probe
ccgcccttggtgctgtcataaaagg

SEQ ID NO: 189190 - DNA, 25 bp, probe
ccgccctggtgtactgtgtaaagaa

SEQ ID NO: 189191 - DNA, 25 bp, probe
ccccaagagctgttaggtatcaaaa

SEQ ID NO: 189192 - DNA, 25 bp, probe
ccccagaggccatagcctatcggaa

SEQ ID NO: 189193 - DNA, 25 bp, probe
ccccagagtacatagctcctgaggt

SEQ ID NO: 189194 - DNA, 25 bp, probe
ccgccaggctaaaagccttggtcac

SEQ ID NO: 189195 - DNA, 25 bp, probe
ccccaatttacttgccattactcaa

SEQ ID NO: 189196 - DNA, 25 bp, probe
ccccaatttacttgccattactcaa

SEQ ID NO: 189197 - DNA, 25 bp, probe
ccccatgatttacagcctaaggaat

SEQ ID NO: 189198 - DNA, 25 bp, probe
ccccaagtgaatctcctaacagact

SEQ ID NO: 189199 - DNA, 25 bp, probe
ccccaaggagccttcgaatccaggt

SEQ ID NO: 189200 - DNA, 25 bp, probe
ccccaaggactagtggagtcctgag

SEQ ID NO: 189201 - DNA, 25 bp, probe
ccccaaggacaagaagctcctggcc

SEQ ID NO: 189202 - DNA, 25 bp, probe
ccccaaccacaggaaagacctggct

SEQ ID NO: 189203 - DNA, 25 bp, probe
ccccaaccacaggaaagacctggct

SEQ ID NO: 189204 - DNA, 25 bp, probe
ccccacccgaaagtggacactggct

SEQ ID NO: 189205 - DNA, 25 bp, probe
ccgccgccaagatggcggacctgga

SEQ ID NO: 189206 - DNA, 25 bp, probe
ccccaacatccttggcagaacctgg

SEQ ID NO: 189207 - DNA, 25 bp, probe
ccccaagtggtttccacatgctctg

SEQ ID NO: 189208 - DNA, 25 bp, probe
ccccagagggtgttcagcttgttgc

SEQ ID NO: 189209 - DNA, 25 bp, probe
ccccaaagtggatcagtttcatctg

SEQ ID NO: 189210 - DNA, 25 bp, probe
ccccaaacatgttgtacatttcacc

SEQ ID NO: 189211 - DNA, 25 bp, probe
ccccaagacctctatatttgctctt

SEQ ID NO: 189212 - DNA, 25 bp, probe
ccgcagaggaccattctggcttttg

SEQ ID NO: 189213 - DNA, 25 bp, probe
ccgagatccaccagatcgacttgat

SEQ ID NO: 189214 - DNA, 25 bp, probe
cctggatccaagggacccattttct

SEQ ID NO: 189215 - DNA, 25 bp, probe
ccttgacccaagaacaaaggcttgt

SEQ ID NO: 189216 - DNA, 25 bp, probe
cctgctacccagtaaaaatccacta

SEQ ID NO: 189217 - DNA, 25 bp, probe
cctgctacccagtaaaaatccacta

SEQ ID NO: 189218 - DNA, 25 bp, probe
ccgcatccccagtagtcagattata

SEQ ID NO: 189219 - DNA, 25 bp, probe
cctgaccccaggccttttataggca

SEQ ID NO: 189220 - DNA, 25 bp, probe
ccgccccaccttttcatattgaggc

SEQ ID NO: 189221 - DNA, 25 bp, probe
ccgggaagccttgtacagtggcgcc

SEQ ID NO: 189222 - DNA, 25 bp, probe
ccgaggtagccttcaatcactggac

SEQ ID NO: 189223 - DNA, 25 bp, probe
cctggggcacttgaatcttggactg

SEQ ID NO: 189224 - DNA, 25 bp, probe
cctgagggcctagcattttttctac

SEQ ID NO: 189225 - DNA, 25 bp, probe
cctctggaaccacatttttatctag

SEQ ID NO: 189226 - DNA, 25 bp, probe
cctcggataccacaagtgctttccc

SEQ ID NO: 189227 - DNA, 25 bp, probe
cctgggatccccagagttggtccaa

SEQ ID NO: 189228 - DNA, 25 bp, probe
cctgtcttacccagatgttctttat

SEQ ID NO: 189229 - DNA, 25 bp, probe
ccgtgtttcctcaggagtcttctga

SEQ ID NO: 189230 - DNA, 25 bp, probe
ccgttactggccaagggctctgtag

SEQ ID NO: 189231 - DNA, 25 bp, probe
ccgtctacttcgcagaggctgacaa

SEQ ID NO: 189232 - DNA, 25 bp, probe
cctgtcttagggcagaggccaccag

SEQ ID NO: 189233 - DNA, 25 bp, probe
ccgacttagtccatgtgatgcgcac

SEQ ID NO: 189234 - DNA, 25 bp, probe
ccgaccgcgtcatgtggagcgtcgt

SEQ ID NO: 189235 - DNA, 25 bp, probe
ccgactgcgctgacaatggacagca

SEQ ID NO: 189236 - DNA, 25 bp, probe
ccgactgcgctgacaatggacagca

SEQ ID NO: 189237 - DNA, 25 bp, probe
ccgcaacggctcagtgacagcaaga

SEQ ID NO: 189238 - DNA, 25 bp, probe
cctgaaaggtcctatacaagtcagt

SEQ ID NO: 189239 - DNA, 25 bp, probe
cctaaagcaagggtaccgccacata

SEQ ID NO: 189240 - DNA, 25 bp, probe
ccgggaacggcgaaccgcaacatat

SEQ ID NO: 189241 - DNA, 25 bp, probe
ccgggaacggcgaaccgcaacatat

SEQ ID NO: 189242 - DNA, 25 bp, probe
ccgggaacggcgaaccgcaacatat

SEQ ID NO: 189243 - DNA, 25 bp, probe
ccgtgtactcgggaatccggcacaa

SEQ ID NO: 189244 - DNA, 25 bp, probe
ccgttactctgatgaattgaatgaa

SEQ ID NO: 189245 - DNA, 25 bp, probe
ccgctttgtctttgacatggacgtt

SEQ ID NO: 189246 - DNA, 25 bp, probe
cccctttgcttctatcttgaaatcc

SEQ ID NO: 189247 - DNA, 25 bp, probe
ccccttcctcgagtttgaatatcca

SEQ ID NO: 189248 - DNA, 25 bp, probe
ccccatctcactaagccttagttct

SEQ ID NO: 189249 - DNA, 25 bp, probe
ccccacctgcaggggcttagtgtct

SEQ ID NO: 189250 - DNA, 25 bp, probe
ccgtacccagagggcttgcattggt

SEQ ID NO: 189251 - DNA, 25 bp, probe
ccgctacaaggacagcttcgcggct

SEQ ID NO: 189252 - DNA, 25 bp, probe
ccgcgacgaggaggagttgcgcgcg

SEQ ID NO: 189253 - DNA, 25 bp, probe
ccggacgagtgggaggtgtctcgag

SEQ ID NO: 189254 - DNA, 25 bp, probe
ccgaaagagggccaggtcctaagct

SEQ ID NO: 189255 - DNA, 25 bp, probe
ccgaagtgctggacgaaagcctgaa

SEQ ID NO: 189256 - DNA, 25 bp, probe
ccgcacgccggtggagacggtgaac

SEQ ID NO: 189257 - DNA, 25 bp, probe
ccccatgcgcaggtggagcagcgtt

SEQ ID NO: 189258 - DNA, 25 bp, probe
ccccagctgggggagctggctctgc

SEQ ID NO: 189259 - DNA, 25 bp, probe
ccccagctgactccaagggctggca

SEQ ID NO: 189260 - DNA, 25 bp, probe
ccgcgcaggcctgcagtgggcctgc

SEQ ID NO: 189261 - DNA, 25 bp, probe
ccccagtgcagataatgggctgctg

SEQ ID NO: 189262 - DNA, 25 bp, probe
ccccactacaatttgatggctctgc

SEQ ID NO: 189263 - DNA, 25 bp, probe
ccccactacaatttgatggctctgc

SEQ ID NO: 189264 - DNA, 25 bp, probe
ccccacgaagcatgttcagcattca

SEQ ID NO: 189265 - DNA, 25 bp, probe
ccccacgaagcatgttcagcattca

SEQ ID NO: 189266 - DNA, 25 bp, probe
ccccagctgtatgaggagagcttca

SEQ ID NO: 189267 - DNA, 25 bp, probe
ccgccagtgatgacggaggagtagc

SEQ ID NO: 189268 - DNA, 25 bp, probe
ccccatggtgggcaggcagatgatg

SEQ ID NO: 189269 - DNA, 25 bp, probe
ccccatggtgggcaggcagatgatg

SEQ ID NO: 189270 - DNA, 25 bp, probe
cccctcaaggtgaagagctgattga

SEQ ID NO: 189271 - DNA, 25 bp, probe
cccctcaggggaacagcgagcagat

SEQ ID NO: 189272 - DNA, 25 bp, probe
ccccacaggatgaaacagctgaagt

SEQ ID NO: 189273 - DNA, 25 bp, probe
ccccagggacacgaagcagagactc

SEQ ID NO: 189274 - DNA, 25 bp, probe
ccgcccctgactgatggcaggaatc

SEQ ID NO: 189275 - DNA, 25 bp, probe
ccgcccctgactgatggcaggaatc

SEQ ID NO: 189276 - DNA, 25 bp, probe
ccgcccacaacatcagcagcagtgg

SEQ ID NO: 189277 - DNA, 25 bp, probe
ccgcccctgagtccagggatgctgc

SEQ ID NO: 189278 - DNA, 25 bp, probe
ccgcccctgagtccagggatgctgc

SEQ ID NO: 189279 - DNA, 25 bp, probe
ccgatgggcgacaactcggagctac

SEQ ID NO: 189280 - DNA, 25 bp, probe
ccgagtgcgaaagtccaagggaaag

SEQ ID NO: 189281 - DNA, 25 bp, probe
ccggcggaaagatctgggcaacaga

SEQ ID NO: 189282 - DNA, 25 bp, probe
ccgcagcggcgagaactttgacaag

SEQ ID NO: 189283 - DNA, 25 bp, probe
ccgacgggaacatctccaacagaag

SEQ ID NO: 189284 - DNA, 25 bp, probe
ccgaggggcgacttaccaaaatcag

SEQ ID NO: 189285 - DNA, 25 bp, probe
ccgagggatcaatctgcaaaaaatg

SEQ ID NO: 189286 - DNA, 25 bp, probe
ccgccggaaagcgtgccaatcaaca

SEQ ID NO: 189287 - DNA, 25 bp, probe
ccgtagtgtaatgatcgatgaagac

SEQ ID NO: 189288 - DNA, 25 bp, probe
ccgttgatgtgttgtctagtataga

SEQ ID NO: 189289 - DNA, 25 bp, probe
ccgtgttggccaggctggtcttgaa

SEQ ID NO: 189290 - DNA, 25 bp, probe
ccggttcagcctggctcggcaagta

SEQ ID NO: 189291 - DNA, 25 bp, probe
ccgagacctggcagctcgaaactgt

SEQ ID NO: 189292 - DNA, 25 bp, probe
ccgccacttccagatagactacgat

SEQ ID NO: 189293 - DNA, 25 bp, probe
ccccacaatcctgttctctaaatgt

SEQ ID NO: 189294 - DNA, 25 bp, probe
ccccacaggcttgtttcatggtgtt

SEQ ID NO: 189295 - DNA, 25 bp, probe
ccgccaaggccgcattgctaagatg

SEQ ID NO: 189296 - DNA, 25 bp, probe
ccccactgagtcctgacagctaagg

SEQ ID NO: 189297 - DNA, 25 bp, probe
ccccactgagtcctgacagctaagg

SEQ ID NO: 189298 - DNA, 25 bp, probe
ccccaggtgtcagggcagtaggctg

SEQ ID NO: 189299 - DNA, 25 bp, probe
ccccaggcaccagggcgtgatggtg

SEQ ID NO: 189300 - DNA, 25 bp, probe
ccccaacatgactgagcgcgaggct

SEQ ID NO: 189301 - DNA, 25 bp, probe
ccccaacatgactgagcgcgaggct

SEQ ID NO: 189302 - DNA, 25 bp, probe
ccgccaactggacggcgggcttcgg

SEQ ID NO: 189303 - DNA, 25 bp, probe
ccgccaactggacggcgggcttcgg

SEQ ID NO: 189304 - DNA, 25 bp, probe
ccagaaacggacgccggtgcttgga

SEQ ID NO: 189305 - DNA, 25 bp, probe
ccagtcaaaaacgcccggatctcag

SEQ ID NO: 189306 - DNA, 25 bp, probe
ccagtcaaaaacgcccggatctcag

SEQ ID NO: 189307 - DNA, 25 bp, probe
ccggactacatagccccggagatca

SEQ ID NO: 189308 - DNA, 25 bp, probe
cctggccaactctcgtagtggaact

SEQ ID NO: 189309 - DNA, 25 bp, probe
cctggccaactctcgtagtggaact

SEQ ID NO: 189310 - DNA, 25 bp, probe
ccgggaacacccggagggactcatg

SEQ ID NO: 189311 - DNA, 25 bp, probe
ccgtgacccccagggaggtgcaaag

SEQ ID NO: 189312 - DNA, 25 bp, probe
ccgagacccgcctagatggaggaag

SEQ ID NO: 189313 - DNA, 25 bp, probe
ccgaacctcctctgtgaagcattcg

SEQ ID NO: 189314 - DNA, 25 bp, probe
ccgctagcccgatggtaggattcag

SEQ ID NO: 189315 - DNA, 25 bp, probe
ccgctacaccgatgtggacacaggc

SEQ ID NO: 189316 - DNA, 25 bp, probe
ccgcatccaccaaggaggcacaagg

SEQ ID NO: 189317 - DNA, 25 bp, probe
ccgcatccaccaaggaggcacaagg

SEQ ID NO: 189318 - DNA, 25 bp, probe
ccgtgtactccagtgaggaagcaga

SEQ ID NO: 189319 - DNA, 25 bp, probe
ccgagtacccggtgagcagcgaggg

SEQ ID NO: 189320 - DNA, 25 bp, probe
ccgcagttcctctactatgagcaag

SEQ ID NO: 189321 - DNA, 25 bp, probe
ccgcagttcctctactatgagcaag

SEQ ID NO: 189322 - DNA, 25 bp, probe
ccgctgatgtttgccttgtcaatat

SEQ ID NO: 189323 - DNA, 25 bp, probe
ccgcttgtcttgggctggacatata

SEQ ID NO: 189324 - DNA, 25 bp, probe
gcgggtgtccgtccggaaatgaagg

SEQ ID NO: 189325 - DNA, 25 bp, probe
ccgagtgaccctccacgaaaaggag

SEQ ID NO: 189326 - DNA, 25 bp, probe
ccggtcaccttggcgggaaagctca

SEQ ID NO: 189327 - DNA, 25 bp, probe
ccgcgtccctggagtggagaactct

SEQ ID NO: 189328 - DNA, 25 bp, probe
ccgcctcttcttcttcagaagacac

SEQ ID NO: 189329 - DNA, 25 bp, probe
ccccttgtttccaatctatgaaaat

SEQ ID NO: 189330 - DNA, 25 bp, probe
cctcggtttccccatctggaaaatg

SEQ ID NO: 189331 - DNA, 25 bp, probe
ccatctgggttaattttcctacaat

SEQ ID NO: 189332 - DNA, 25 bp, probe
cctggggtgtacaccgactacatct

SEQ ID NO: 189333 - DNA, 25 bp, probe
ccttgcaaattacgacctgaaaatg

SEQ ID NO: 189334 - DNA, 25 bp, probe
ccgcctcaaaaagtgcctcaaagtg

SEQ ID NO: 189335 - DNA, 25 bp, probe
ccgcctcaaaaagtgcctcaaagtg

SEQ ID NO: 189336 - DNA, 25 bp, probe
ccgcgcccaagaagggctcgaagaa

SEQ ID NO: 189337 - DNA, 25 bp, probe
ccgatgttagaaatggttccagaaa

SEQ ID NO: 189338 - DNA, 25 bp, probe
ccgtgattccaagtgcttatccaac

SEQ ID NO: 189339 - DNA, 25 bp, probe
ccgtgattccaagtgcttatccaac

SEQ ID NO: 189340 - DNA, 25 bp, probe
ccgctgaagcgcactgctgttcaga

SEQ ID NO: 189341 - DNA, 25 bp, probe
ccgctgaagcgcactgctgttcaga

SEQ ID NO: 189342 - DNA, 25 bp, probe
ccgacaccagaagctgttgggagaa

SEQ ID NO: 189343 - DNA, 25 bp, probe
ccccaccacaaggctctgggcaaga

SEQ ID NO: 189344 - DNA, 25 bp, probe
ccccaacacacacatattcacaaga

SEQ ID NO: 189345 - DNA, 25 bp, probe
cctggaggagccactattccagaag

SEQ ID NO: 189346 - DNA, 25 bp, probe
ccactggacaacactgattcctgga

SEQ ID NO: 189347 - DNA, 25 bp, probe
ccgctcgaaagccctatacttagcg

SEQ ID NO: 189348 - DNA, 25 bp, probe
ccgctcgaaagggcgaattctgcag

SEQ ID NO: 189349 - DNA, 25 bp, probe
ccgccggaaccactgagtgtcggta

SEQ ID NO: 189350 - DNA, 25 bp, probe
ccgccggaaccactgagtgtcggta

SEQ ID NO: 189351 - DNA, 25 bp, probe
cctccaagaaccctggttgcttgct

SEQ ID NO: 189352 - DNA, 25 bp, probe
ccccatcgagactgtggtgtgcctg

SEQ ID NO: 189353 - DNA, 25 bp, probe
ccgccatggacctttttgtgactgt

SEQ ID NO: 189354 - DNA, 25 bp, probe
ccgctctacatttgtgtttgtgttc

SEQ ID NO: 189355 - DNA, 25 bp, probe
ccgcttcacctccttttgtatggag

SEQ ID NO: 189356 - DNA, 25 bp, probe
ccgtcagccgaactttgttatggag

SEQ ID NO: 189357 - DNA, 25 bp, probe
ccgattccaatgctgttttttgggg

SEQ ID NO: 189358 - DNA, 25 bp, probe
ccgtgaccgatgctttggtttgggt

SEQ ID NO: 189359 - DNA, 25 bp, probe
ccggaaggaattctggtttcgcgtg

SEQ ID NO: 189360 - DNA, 25 bp, probe
ccgagaggagtaccgtggcttcctc

SEQ ID NO: 189361 - DNA, 25 bp, probe
ccgcccaaggacctgggctacatct

SEQ ID NO: 189362 - DNA, 25 bp, probe
ccccaaagctgtggtggtgctcaca

SEQ ID NO: 189363 - DNA, 25 bp, probe
ccccactggctgtttgggaccatgg

SEQ ID NO: 189364 - DNA, 25 bp, probe
ccccaggtgtgttggggccttggct

SEQ ID NO: 189365 - DNA, 25 bp, probe
ccgccaggagtgtgggccaacggca

SEQ ID NO: 189366 - DNA, 25 bp, probe
ccgccagcggtactgggcgagaaac

SEQ ID NO: 189367 - DNA, 25 bp, probe
ccggaggatcgactgggaaaaactg

SEQ ID NO: 189368 - DNA, 25 bp, probe
ccgtggattctgctaagggaaaatg

SEQ ID NO: 189369 - DNA, 25 bp, probe
ccgtgacttctgctaaaatgcaaaa

SEQ ID NO: 189370 - DNA, 25 bp, probe
ccatctaccttgggatcaaacggaa

SEQ ID NO: 189371 - DNA, 25 bp, probe
cctcgagtccgaggtatgacgcggc

SEQ ID NO: 189372 - DNA, 25 bp, probe
ccccagtcacaatggtctccattgc

SEQ ID NO: 189373 - DNA, 25 bp, probe
ccggaacaaatgcgtcccatactgg

SEQ ID NO: 189374 - DNA, 25 bp, probe
ccgggacagagttttcccagacctg

SEQ ID NO: 189375 - DNA, 25 bp, probe
ccgaggaaaatcactcctacacgct

SEQ ID NO: 189376 - DNA, 25 bp, probe
cctattaaagaacctcgtcccagtg

SEQ ID NO: 189377 - DNA, 25 bp, probe
cctccttacagacccacattaaagg

SEQ ID NO: 189378 - DNA, 25 bp, probe
ccgcctttcagacccagaatcaaat

SEQ ID NO: 189379 - DNA, 25 bp, probe
ccgctagtagcacactccagaaaca

SEQ ID NO: 189380 - DNA, 25 bp, probe
ccggttggagcctccggagcagagg

SEQ ID NO: 189381 - DNA, 25 bp, probe
ccggttggagtgggcggagcctgtg

SEQ ID NO: 189382 - DNA, 25 bp, probe
ccgcgctgtgtactgtaaggacgtg

SEQ ID NO: 189383 - DNA, 25 bp, probe
ccgagtgttagagaaccactgtgac

SEQ ID NO: 189384 - DNA, 25 bp, probe
ccgggtgtcagtgaagctccgcaac

SEQ ID NO: 189385 - DNA, 25 bp, probe
ccgaagtatcgaaagattccgcagg

SEQ ID NO: 189386 - DNA, 25 bp, probe
ccgaaggatctgtccgttcagggtc

SEQ ID NO: 189387 - DNA, 25 bp, probe
ccgacagcgacaccaggtttgagaa

SEQ ID NO: 189388 - DNA, 25 bp, probe
ccgcaccattccggagtgtatagat

SEQ ID NO: 189389 - DNA, 25 bp, probe
ccgccttgcccacgagattgaagca

SEQ ID NO: 189390 - DNA, 25 bp, probe
ccgccttctcccagtgtgaggagtg

SEQ ID NO: 189391 - DNA, 25 bp, probe
ccccatctcctctggtgtgggagtg

SEQ ID NO: 189392 - DNA, 25 bp, probe
ccgccatccccagttgcagggggat

SEQ ID NO: 189393 - DNA, 25 bp, probe
ccgccatccccagttgcagggggat

SEQ ID NO: 189394 - DNA, 25 bp, probe
ccgccatccccagttgcagggggat

SEQ ID NO: 189395 - DNA, 25 bp, probe
ccccacacgcactttatgagggaga

SEQ ID NO: 189396 - DNA, 25 bp, probe
ccccaactcacccatgagggatgaa

SEQ ID NO: 189397 - DNA, 25 bp, probe
ccccaggccaggcatgactttgaca

SEQ ID NO: 189398 - DNA, 25 bp, probe
ccgcccagagcacaagacctctgac

SEQ ID NO: 189399 - DNA, 25 bp, probe
ccgcctgcaagatggattggccgca

SEQ ID NO: 189400 - DNA, 25 bp, probe
ccgcctgcctaaggctctgagcagg

SEQ ID NO: 189401 - DNA, 25 bp, probe
ccgctttcaaagacatagccagggt

SEQ ID NO: 189402 - DNA, 25 bp, probe
ccgctttcaaagacatagccagggt

SEQ ID NO: 189403 - DNA, 25 bp, probe
ccgctttcctggcacacaaggtgca

SEQ ID NO: 189404 - DNA, 25 bp, probe
ccgtgttgggggtactgaaggagag

SEQ ID NO: 189405 - DNA, 25 bp, probe
ccgatttactttgcactaaggacaa

SEQ ID NO: 189406 - DNA, 25 bp, probe
ccgttttatttatctacaatagaag

SEQ ID NO: 189407 - DNA, 25 bp, probe
ccgttcgttaagaactataatcaca

SEQ ID NO: 189408 - DNA, 25 bp, probe
cctcttcaagtaaacgccaagtcac

SEQ ID NO: 189409 - DNA, 25 bp, probe
ccgttcagggtctagccaaaatcat

SEQ ID NO: 189410 - DNA, 25 bp, probe
ccggtcaagttccaggttgatatca

SEQ ID NO: 189411 - DNA, 25 bp, probe
ccagatgtggagtgccagatgttgc

SEQ ID NO: 189412 - DNA, 25 bp, probe
ccgaggtgcagctgcaacagtactt

SEQ ID NO: 189413 - DNA, 25 bp, probe
ccgccattgctctgagtcagaagct

SEQ ID NO: 189414 - DNA, 25 bp, probe
ccccaagacgtggtcaggcatgctg

SEQ ID NO: 189415 - DNA, 25 bp, probe
ccccaagccgtcaatcagattgtgg

SEQ ID NO: 189416 - DNA, 25 bp, probe
ccggaagtcctcatcgattggcaac

SEQ ID NO: 189417 - DNA, 25 bp, probe
ccggaagtcctcatcgattggcaac

SEQ ID NO: 189418 - DNA, 25 bp, probe
cctgtaagtcccagctacttgcaag

SEQ ID NO: 189419 - DNA, 25 bp, probe
cctgtaaggtccaaggccttgaggg

SEQ ID NO: 189420 - DNA, 25 bp, probe
ccgtaagttcgcaggcaggggtggg

SEQ ID NO: 189421 - DNA, 25 bp, probe
ccgtcaccttccagccagaagggga

SEQ ID NO: 189422 - DNA, 25 bp, probe
ccgtccttgtgccaggtcaaggtgg

SEQ ID NO: 189423 - DNA, 25 bp, probe
ccgtccttgtgccaggtcaaggtgg

SEQ ID NO: 189424 - DNA, 25 bp, probe
cctgtacggtggatggcaccggagt

SEQ ID NO: 189425 - DNA, 25 bp, probe
ccgcttcggtggagcagctccagga

SEQ ID NO: 189426 - DNA, 25 bp, probe
ccgctggggtggaggcccaggcaga

SEQ ID NO: 189427 - DNA, 25 bp, probe
ccgcgggagaggaggccatgggcgc

SEQ ID NO: 189428 - DNA, 25 bp, probe
ccggagggcaagggatgccagtaag

SEQ ID NO: 189429 - DNA, 25 bp, probe
ccccagaggcgagggaccagtggag

SEQ ID NO: 189430 - DNA, 25 bp, probe
ccccaatggggggtcgagctggatg

SEQ ID NO: 189431 - DNA, 25 bp, probe
ccccaagaggcttccactggggaga

SEQ ID NO: 189432 - DNA, 25 bp, probe
ccccagaaggggccagtgcgggcag

SEQ ID NO: 189433 - DNA, 25 bp, probe
ccgccatgggggatcagtgcaggta

SEQ ID NO: 189434 - DNA, 25 bp, probe
ccgcaagggcggcaagtgaggatgc

SEQ ID NO: 189435 - DNA, 25 bp, probe
ccgggtgacgcccaagtgaagcgca

SEQ ID NO: 189436 - DNA, 25 bp, probe
ccgggtgacgcccaagtgaagcgca

SEQ ID NO: 189437 - DNA, 25 bp, probe
ccgcggagacctggactggagacgc

SEQ ID NO: 189438 - DNA, 25 bp, probe
ccggggacacacacagagaaccctc

SEQ ID NO: 189439 - DNA, 25 bp, probe
ccggggacacacacagagaaccctc

SEQ ID NO: 189440 - DNA, 25 bp, probe
cctggcatgatgcctcatcaacagc

SEQ ID NO: 189441 - DNA, 25 bp, probe
ccccagtgtcattcaatatgctcta

SEQ ID NO: 189442 - DNA, 25 bp, probe
ccccagtgtcattcaatatgctcta

SEQ ID NO: 189443 - DNA, 25 bp, probe
ccccagctctcttacattgctgagg

SEQ ID NO: 189444 - DNA, 25 bp, probe
ccgcccatctttggttggagcaggt

SEQ ID NO: 189445 - DNA, 25 bp, probe
ccgacccgtgtacttgcagacaggg

SEQ ID NO: 189446 - DNA, 25 bp, probe
ccgtgccctttacagaacttgtggt

SEQ ID NO: 189447 - DNA, 25 bp, probe
gccgtcaactttttcaaagaggtgg

SEQ ID NO: 189448 - DNA, 25 bp, probe
ccgctcatgactatacgctaagaga

SEQ ID NO: 189449 - DNA, 25 bp, probe
ccgtgtactatctccacagaatggg

SEQ ID NO: 189450 - DNA, 25 bp, probe
ccgaggtctatggccccatgaagaa

SEQ ID NO: 189451 - DNA, 25 bp, probe
ccgagggctggcgttttggaatgca

SEQ ID NO: 189452 - DNA, 25 bp, probe
ccgcatgctaatcgctttttaccgc

SEQ ID NO: 189453 - DNA, 25 bp, probe
ccgctgccaacactgtcgattacag

SEQ ID NO: 189454 - DNA, 25 bp, probe
ccgagtaaagtgtgatcattactgg

SEQ ID NO: 189455 - DNA, 25 bp, probe
ccggaaacggctgtatctgcagtag

SEQ ID NO: 189456 - DNA, 25 bp, probe
ccgagaaacgccaggacagacgatg

SEQ ID NO: 189457 - DNA, 25 bp, probe
ccgagaagggacatgtgggacgtga

SEQ ID NO: 189458 - DNA, 25 bp, probe
ccgcgacgggacggcagcggaggtg

SEQ ID NO: 189459 - DNA, 25 bp, probe
ccgcgacgggacggcagcggaggtg

SEQ ID NO: 189460 - DNA, 25 bp, probe
ccgcgtgtcggaggagcagcagaag

SEQ ID NO: 189461 - DNA, 25 bp, probe
ccggtatcgtgtggcagcacgtgta

SEQ ID NO: 189462 - DNA, 25 bp, probe
ccgtgatgacctgagacaagatgct

SEQ ID NO: 189463 - DNA, 25 bp, probe
ccgctcagactccgaggatgagtgc

SEQ ID NO: 189464 - DNA, 25 bp, probe
ccgccaagtcagctggatggactct

SEQ ID NO: 189465 - DNA, 25 bp, probe
ccgccagaccccaagatggatatcg

SEQ ID NO: 189466 - DNA, 25 bp, probe
ccgctgacctacgataattatacga

SEQ ID NO: 189467 - DNA, 25 bp, probe
ccgctgcgcactgcagttatttgta

SEQ ID NO: 189468 - DNA, 25 bp, probe
ccgccgccttcaaatacttggcaca

SEQ ID NO: 189469 - DNA, 25 bp, probe
ccgcccctcagataatgtaagctca

SEQ ID NO: 189470 - DNA, 25 bp, probe
ccgcccctcagataatgtaagctca

SEQ ID NO: 189471 - DNA, 25 bp, probe
ccgccaccgtgatgaatgtactgac

SEQ ID NO: 189472 - DNA, 25 bp, probe
ccgccacacctggataactgttaca

SEQ ID NO: 189473 - DNA, 25 bp, probe
ccgccacacctggataactgttaca

SEQ ID NO: 189474 - DNA, 25 bp, probe
ccgacagacactgtgaacggaagac

SEQ ID NO: 189475 - DNA, 25 bp, probe
ccgagaacccaggcaacaggaagag

SEQ ID NO: 189476 - DNA, 25 bp, probe
ccccagaaccgctacacagcggaag

SEQ ID NO: 189477 - DNA, 25 bp, probe
ccgccttaagctgatcctgcggaga

SEQ ID NO: 189478 - DNA, 25 bp, probe
ccgctgggcacagccattgtggtgg

SEQ ID NO: 189479 - DNA, 25 bp, probe
ccgctacagcaaccgatattgtggg

SEQ ID NO: 189480 - DNA, 25 bp, probe
ccgctacagaagccagactgggtcc

SEQ ID NO: 189481 - DNA, 25 bp, probe
ccgtgaaatcgactgctgcgggtcc

SEQ ID NO: 189482 - DNA, 25 bp, probe
ccgtgcacacctatcacgtggagct

SEQ ID NO: 189483 - DNA, 25 bp, probe
ccgccacatcacagcatcagggggc

SEQ ID NO: 189484 - DNA, 25 bp, probe
ccgccacatcacagcatcagggggc

SEQ ID NO: 189485 - DNA, 25 bp, probe
ccgcaacatcctggtctcagaggac

SEQ ID NO: 189486 - DNA, 25 bp, probe
ccgcacatcatcagcgcgcaagagg

SEQ ID NO: 189487 - DNA, 25 bp, probe
ccgcttcattgaggctgcaagagca

SEQ ID NO: 189488 - DNA, 25 bp, probe
ccgcttcttcaatgaagacactgga

SEQ ID NO: 189489 - DNA, 25 bp, probe
ccgcttcatgccactgaatacgttg

SEQ ID NO: 189490 - DNA, 25 bp, probe
ccagattaccgtggaagatcagctt

SEQ ID NO: 189491 - DNA, 25 bp, probe
cctcagaaccctgaatgcaacttct

SEQ ID NO: 189492 - DNA, 25 bp, probe
ccccagaagctcaaaatccagcccc

SEQ ID NO: 189493 - DNA, 25 bp, probe
ccccagaagctcaaaatccagcccc

SEQ ID NO: 189494 - DNA, 25 bp, probe
cctcaaaatgtttggataccgccca

SEQ ID NO: 189495 - DNA, 25 bp, probe
ccgcaacagcaggggcgatatcctc

SEQ ID NO: 189496 - DNA, 25 bp, probe
ccgaaggagcttacgacatcatcct

SEQ ID NO: 189497 - DNA, 25 bp, probe
ccgaaatggtcaacgccatgcacca

SEQ ID NO: 189498 - DNA, 25 bp, probe
ccaggcaaggtgaaccctactcagt

SEQ ID NO: 189499 - DNA, 25 bp, probe
ccgcctgaggtgatccttgagctgg

SEQ ID NO: 189500 - DNA, 25 bp, probe
cctcctgaaggcatccactatcgag

SEQ ID NO: 189501 - DNA, 25 bp, probe
cctcctgaatacaaccccaatgatg

SEQ ID NO: 189502 - DNA, 25 bp, probe
ccgcatcgagtatatccactccaag

SEQ ID NO: 189503 - DNA, 25 bp, probe
ccgagcaatgaagtcatccactcct

SEQ ID NO: 189504 - DNA, 25 bp, probe
ccgcaacatataatggccctcctgc

SEQ ID NO: 189505 - DNA, 25 bp, probe
ccgcaacatataatggccctcctgc

SEQ ID NO: 189506 - DNA, 25 bp, probe
ccagtagtatgaaggccctgctcca

SEQ ID NO: 189507 - DNA, 25 bp, probe
ccgtgaaagatgtcccaggatccat

SEQ ID NO: 189508 - DNA, 25 bp, probe
ccgccaatatcatcaccaggaggag

SEQ ID NO: 189509 - DNA, 25 bp, probe
ccgcaaattcactggcagctcagaa

SEQ ID NO: 189510 - DNA, 25 bp, probe
ccgaaatgccacactggtcaatgag

SEQ ID NO: 189511 - DNA, 25 bp, probe
ccgacctgaacaacatcgtcaagtg

SEQ ID NO: 189512 - DNA, 25 bp, probe
ccgacctgctaatcaagacctttgt

SEQ ID NO: 189513 - DNA, 25 bp, probe
ccgacctgctaatcaagacctttgt

SEQ ID NO: 189514 - DNA, 25 bp, probe
ccgaggcctatgttagggcctttgc

SEQ ID NO: 189515 - DNA, 25 bp, probe
ccagttcctatgtgagccggactcg

SEQ ID NO: 189516 - DNA, 25 bp, probe
ccgtgtggtccatagccgagcacgg

SEQ ID NO: 189517 - DNA, 25 bp, probe
ccgctgggacaagagacgctggcgc

SEQ ID NO: 189518 - DNA, 25 bp, probe
ccgtgggatcaagagagaccttcta

SEQ ID NO: 189519 - DNA, 25 bp, probe
cctctggctggaaggggactatttt

SEQ ID NO: 189520 - DNA, 25 bp, probe
gccttaatggggggaactgccttgt

SEQ ID NO: 189521 - DNA, 25 bp, probe
cctgttaggggttccctccatatgt

SEQ ID NO: 189522 - DNA, 25 bp, probe
ccgtcaagctggttgtccactaaac

SEQ ID NO: 189523 - DNA, 25 bp, probe
ccgtccacggagatctccatgtaca

SEQ ID NO: 189524 - DNA, 25 bp, probe
ccgatgtacaggactttcctctaaa

SEQ ID NO: 189525 - DNA, 25 bp, probe
ccgctgagaagggttgatcctgcat

SEQ ID NO: 189526 - DNA, 25 bp, probe
ccccaatagagcttatacacatcag

SEQ ID NO: 189527 - DNA, 25 bp, probe
ccccaatgagcagtgatgatgaatc

SEQ ID NO: 189528 - DNA, 25 bp, probe
ccgccactggcagttctgcaatgcc

SEQ ID NO: 189529 - DNA, 25 bp, probe
ccgccagtggttccgcaagctggcg

SEQ ID NO: 189530 - DNA, 25 bp, probe
ccgccagtggttccgcaagctggcg

SEQ ID NO: 189531 - DNA, 25 bp, probe
ccgccagggtgagcagtacatgaac

SEQ ID NO: 189532 - DNA, 25 bp, probe
ccgctaggagagtcctcttctaagc

SEQ ID NO: 189533 - DNA, 25 bp, probe
ccgctgggaggtgccagctctttgg

SEQ ID NO: 189534 - DNA, 25 bp, probe
ccgctgggagggtacatggatgagg

SEQ ID NO: 189535 - DNA, 25 bp, probe
ccgctgaggacctgacgcagatggg

SEQ ID NO: 189536 - DNA, 25 bp, probe
ccgccatgaccctgggcacagggga

SEQ ID NO: 189537 - DNA, 25 bp, probe
ccgccatctacgaggagaaggaggc

SEQ ID NO: 189538 - DNA, 25 bp, probe
ccgccgccacctttgagaagaagac

SEQ ID NO: 189539 - DNA, 25 bp, probe
ccgccgcgcacagagcataaagaat

SEQ ID NO: 189540 - DNA, 25 bp, probe
ccgccgcgcacagagcataaagaat

SEQ ID NO: 189541 - DNA, 25 bp, probe
ccccacagcgccaagacagaggagc

SEQ ID NO: 189542 - DNA, 25 bp, probe
ccccacagcgccaagacagaggagc

SEQ ID NO: 189543 - DNA, 25 bp, probe
ccgcccgcctgcaagatggattggc

SEQ ID NO: 189544 - DNA, 25 bp, probe
ccgcccggatccaagagaagctgct

SEQ ID NO: 189545 - DNA, 25 bp, probe
ccgcccgagatatgagggagctttc

SEQ ID NO: 189546 - DNA, 25 bp, probe
ccggcacatgaattgggacgacctt

SEQ ID NO: 189547 - DNA, 25 bp, probe
ccggcacatgaattgggacgacctt

SEQ ID NO: 189548 - DNA, 25 bp, probe
ccggcacatgaattgggacgacctt

SEQ ID NO: 189549 - DNA, 25 bp, probe
ccgccagcttgatgaggaccacagc

SEQ ID NO: 189550 - DNA, 25 bp, probe
ccgccagcttgatgaggaccacagc

SEQ ID NO: 189551 - DNA, 25 bp, probe
ccgccaagcagacgaggactacagc

SEQ ID NO: 189552 - DNA, 25 bp, probe
ccgcatcaacgggtgtgccatccag

SEQ ID NO: 189553 - DNA, 25 bp, probe
ccgcatcccagacttgctgaatcgg

SEQ ID NO: 189554 - DNA, 25 bp, probe
ccgcatcccagacttgctgaatcgg

SEQ ID NO: 189555 - DNA, 25 bp, probe
ccgctccaagctagcagcagcaatc

SEQ ID NO: 189556 - DNA, 25 bp, probe
ccgccaggagctagcggcacatgcg

SEQ ID NO: 189557 - DNA, 25 bp, probe
ccccaaagatggcccacacagggac

SEQ ID NO: 189558 - DNA, 25 bp, probe
ccccaaatcatggacgcacctgtgg

SEQ ID NO: 189559 - DNA, 25 bp, probe
ccccaaatattgggcagccctgtcc

SEQ ID NO: 189560 - DNA, 25 bp, probe
gccaaaaatattgagacccccaaga

SEQ ID NO: 189561 - DNA, 25 bp, probe
ccaaatcttttgggagccccaatag

SEQ ID NO: 189562 - DNA, 25 bp, probe
ccgatatttaaggaccccagagcta

SEQ ID NO: 189563 - DNA, 25 bp, probe
ccgtacttggaggacctgcacggcg

SEQ ID NO: 189564 - DNA, 25 bp, probe
ccgtacttggaggacctgcacggcg

SEQ ID NO: 189565 - DNA, 25 bp, probe
ccgctgacttgttgacactgcgagc

SEQ ID NO: 189566 - DNA, 25 bp, probe
ccgcagcctggatgaccggagcagg

SEQ ID NO: 189567 - DNA, 25 bp, probe
ccgcagcctggatgaccggagcagg

SEQ ID NO: 189568 - DNA, 25 bp, probe
ccgctgcctcaggaggcgggaggca

SEQ ID NO: 189569 - DNA, 25 bp, probe
cctcgccgagggtgagacggacaca

SEQ ID NO: 189570 - DNA, 25 bp, probe
cctcgccgagggtgagacggacaca

SEQ ID NO: 189571 - DNA, 25 bp, probe
ccgcgggggctgtgagcagcggtgc

SEQ ID NO: 189572 - DNA, 25 bp, probe
ccgcgggggctgtgagcagcggtgc

SEQ ID NO: 189573 - DNA, 25 bp, probe
ccgcgtggcggtgaagacggtcaac

SEQ ID NO: 189574 - DNA, 25 bp, probe
ccgcctgggacggaagatcgggagc

SEQ ID NO: 189575 - DNA, 25 bp, probe
ccgcctggagaaccgctacgaggcg

SEQ ID NO: 189576 - DNA, 25 bp, probe
ccgcctggagaaccgctacgaggcg

SEQ ID NO: 189577 - DNA, 25 bp, probe
ccgcctggataccgcagctaggaat

SEQ ID NO: 189578 - DNA, 25 bp, probe
ccgcactggtatgcgagccacatga

SEQ ID NO: 189579 - DNA, 25 bp, probe
ccgacaggtgcgggaccagcagaat

SEQ ID NO: 189580 - DNA, 25 bp, probe
ccgacgtctggaggactcaagcaat

SEQ ID NO: 189581 - DNA, 25 bp, probe
ccgacgtatggagcctgggcatctc

SEQ ID NO: 189582 - DNA, 25 bp, probe
ccgacgtatggagcctgggcatctc

SEQ ID NO: 189583 - DNA, 25 bp, probe
ccgaatgttagattcctcttgcctc

SEQ ID NO: 189584 - DNA, 25 bp, probe
ccggctggtaaagcaattcctcctt

SEQ ID NO: 189585 - DNA, 25 bp, probe
ccgcactgcggggacaaattccagc

SEQ ID NO: 189586 - DNA, 25 bp, probe
ccaaccgcccaaatataattcagct

SEQ ID NO: 189587 - DNA, 25 bp, probe
ccaactctgaatcttttttcaccgc

SEQ ID NO: 189588 - DNA, 25 bp, probe
ccaactctgaatcttttttcaccgc

SEQ ID NO: 189589 - DNA, 25 bp, probe
cctagcttgaggcaattttaatccc

SEQ ID NO: 189590 - DNA, 25 bp, probe
cctggttgagctcaaatcccaactt

SEQ ID NO: 189591 - DNA, 25 bp, probe
tttgggtcgggatccaaagcctctt

SEQ ID NO: 189592 - DNA, 25 bp, probe
tcctaggtcgttcaaccaggttttg

SEQ ID NO: 189593 - DNA, 25 bp, probe
gcttcggttttcatacgggattttg

SEQ ID NO: 189594 - DNA, 25 bp, probe
gcttcggttttcatacgggattttg

SEQ ID NO: 189595 - DNA, 25 bp, probe
ccgcaggttttcagatctaggattt

SEQ ID NO: 189596 - DNA, 25 bp, probe
ccgccttcattgactggattgagga

SEQ ID NO: 189597 - DNA, 25 bp, probe
ccgctctgtcagccttactatatac

SEQ ID NO: 189598 - DNA, 25 bp, probe
ccgctatgacagcctgggcttactg

SEQ ID NO: 189599 - DNA, 25 bp, probe
ccgctgcatcaagaaggttcactac

SEQ ID NO: 189600 - DNA, 25 bp, probe
ccgctgcacatcacaacatttactt

SEQ ID NO: 189601 - DNA, 25 bp, probe
ccgctgcacatcacaacatttactt

SEQ ID NO: 189602 - DNA, 25 bp, probe
ccgctatatccaaaattacagctat

SEQ ID NO: 189603 - DNA, 25 bp, probe
ccgccattacaccaatgcttcagat

SEQ ID NO: 189604 - DNA, 25 bp, probe
ccgaaccacaaattcttctgaacaa

SEQ ID NO: 189605 - DNA, 25 bp, probe
ccggaacacgacttcaactcgaaag

SEQ ID NO: 189606 - DNA, 25 bp, probe
ccggagaccgtatcatattcgctcc

SEQ ID NO: 189607 - DNA, 25 bp, probe
cctagagaggctcacttgtacccca

SEQ ID NO: 189608 - DNA, 25 bp, probe
ccgaatgggtcttattcagacccca

SEQ ID NO: 189609 - DNA, 25 bp, probe
ccgggctggtctttgacatggcccc

SEQ ID NO: 189610 - DNA, 25 bp, probe
ccgaggcgcgtttgtgtatatctgc

SEQ ID NO: 189611 - DNA, 25 bp, probe
ccgcgggacttggttttctcaagct

SEQ ID NO: 189612 - DNA, 25 bp, probe
ccggtgggctaggtttcaacctgcg

SEQ ID NO: 189613 - DNA, 25 bp, probe
ccggaaactgcaagttccgacgccg

SEQ ID NO: 189614 - DNA, 25 bp, probe
ccgtgaagtcaggacttgccgtctc

SEQ ID NO: 189615 - DNA, 25 bp, probe
ccgtgcaagcttaggctggggattc

SEQ ID NO: 189616 - DNA, 25 bp, probe
ccggcgatgcggcggcgttattccc

SEQ ID NO: 189617 - DNA, 25 bp, probe
ccgaaatcgtagtgcttgtacttac

SEQ ID NO: 189618 - DNA, 25 bp, probe
ccgtgaatgtgaagttccccatctt

SEQ ID NO: 189619 - DNA, 25 bp, probe
ccggcaatgtgaagcttttgtttgg

SEQ ID NO: 189620 - DNA, 25 bp, probe
ccgtgaaggacctcatcagctttgg

SEQ ID NO: 189621 - DNA, 25 bp, probe
cctggaattgcgcaacacctttagg

SEQ ID NO: 189622 - DNA, 25 bp, probe
cctggaattgcgcaacacctttagg

SEQ ID NO: 189623 - DNA, 25 bp, probe
ccgtgcagtatttacaacctttgaa

SEQ ID NO: 189624 - DNA, 25 bp, probe
ccgtgcagtatttacaacctttgaa

SEQ ID NO: 189625 - DNA, 25 bp, probe
cctctcatttttcagtacttctaca

SEQ ID NO: 189626 - DNA, 25 bp, probe
ccgtccatttagtactacctgcata

SEQ ID NO: 189627 - DNA, 25 bp, probe
ccgcccacatttaattaacagctga

SEQ ID NO: 189628 - DNA, 25 bp, probe
ccgcgccacttcgagggaatcagcg

SEQ ID NO: 189629 - DNA, 25 bp, probe
ccgcgccacttcgagggaatcagcg

SEQ ID NO: 189630 - DNA, 25 bp, probe
ccgcgccgctgctgggagagatccc

SEQ ID NO: 189631 - DNA, 25 bp, probe
ccgctggatgtcttgggagagtatc

SEQ ID NO: 189632 - DNA, 25 bp, probe
ccgctggattgactgggagcggctg

SEQ ID NO: 189633 - DNA, 25 bp, probe
ccgctgagtggactggagtggagca

SEQ ID NO: 189634 - DNA, 25 bp, probe
ccgcaactgtggccgagaaagcagg

SEQ ID NO: 189635 - DNA, 25 bp, probe
ccgcatattaggcgcagataaaaga

SEQ ID NO: 189636 - DNA, 25 bp, probe
cctgtacatcggcaacttcaaagat

SEQ ID NO: 189637 - DNA, 25 bp, probe
cctgtggtcggggccaacaacagag

SEQ ID NO: 189638 - DNA, 25 bp, probe
cctatggtcgtgtatataaagcaaa

SEQ ID NO: 189639 - DNA, 25 bp, probe
cctatggtcgtgtatataaagcaaa

SEQ ID NO: 189640 - DNA, 25 bp, probe
cctatggtgtcccagtaaagccaat

SEQ ID NO: 189641 - DNA, 25 bp, probe
ccattggtgattcggcgaagaaact

SEQ ID NO: 189642 - DNA, 25 bp, probe
cctgaggttttgctaaggaagcctt

SEQ ID NO: 189643 - DNA, 25 bp, probe
ccgggttctcagttttggcaattct

SEQ ID NO: 189644 - DNA, 25 bp, probe
ccgtcgctactaccgattggatggt

SEQ ID NO: 189645 - DNA, 25 bp, probe
cctggtgcaaaacaattagcagtta

SEQ ID NO: 189646 - DNA, 25 bp, probe
ccggtgcacgccgaaatttctgttt

SEQ ID NO: 189647 - DNA, 25 bp, probe
ccggggcgagacaacattccgttgg

SEQ ID NO: 189648 - DNA, 25 bp, probe
ccgggactggacacaagccagggct

SEQ ID NO: 189649 - DNA, 25 bp, probe
ccggactcggatcaaatctcagggc

SEQ ID NO: 189650 - DNA, 25 bp, probe
ccgaccttcgaatacatccagagtg

SEQ ID NO: 189651 - DNA, 25 bp, probe
ccgagctttgcagacatagcccagg

SEQ ID NO: 189652 - DNA, 25 bp, probe
ccgctgctgggagagatcccctggc

SEQ ID NO: 189653 - DNA, 25 bp, probe
ccgctcgggcatggagaattccgct

SEQ ID NO: 189654 - DNA, 25 bp, probe
ccgccatctggaaaagcatcttcct

SEQ ID NO: 189655 - DNA, 25 bp, probe
ccgctcattgccaaaaattcaccgc

SEQ ID NO: 189656 - DNA, 25 bp, probe
ccgctcattgccaaaaattcaccgc

SEQ ID NO: 189657 - DNA, 25 bp, probe
ccgttaggaataacactgcagccct

SEQ ID NO: 189658 - DNA, 25 bp, probe
ccgttaagaatactcttcaagtatc

SEQ ID NO: 189659 - DNA, 25 bp, probe
cctgttaaagaatcatctggattat

SEQ ID NO: 189660 - DNA, 25 bp, probe
ccgtcctaagagtatcatctgccag

SEQ ID NO: 189661 - DNA, 25 bp, probe
ccgatcatctcctagaacttcaatg

SEQ ID NO: 189662 - DNA, 25 bp, probe
ccgcatgactcctgcagaaactgga

SEQ ID NO: 189663 - DNA, 25 bp, probe
ccgctgacctgcaggaagcatatgg

SEQ ID NO: 189664 - DNA, 25 bp, probe
ccgctgactagcagctggactgatt

SEQ ID NO: 189665 - DNA, 25 bp, probe
ccgcatgccttacctggacatgtat

SEQ ID NO: 189666 - DNA, 25 bp, probe
cacttccaatacgacagccgaactc

SEQ ID NO: 189667 - DNA, 25 bp, probe
ccgcgatcttaaatgtgacaacatc

SEQ ID NO: 189668 - DNA, 25 bp, probe
ccgtcaccgaatcggacactcatcc

SEQ ID NO: 189669 - DNA, 25 bp, probe
ccgcttcctgaacaagcagccatac

SEQ ID NO: 189670 - DNA, 25 bp, probe
ccggtggcaggacaagcactcgatc

SEQ ID NO: 189671 - DNA, 25 bp, probe
ccgagtggctgactttggcagtgcc

SEQ ID NO: 189672 - DNA, 25 bp, probe
ccgcgtgttcacctttgaatgcagc

SEQ ID NO: 189673 - DNA, 25 bp, probe
ccgcggttgcagactgctcaaacca

SEQ ID NO: 189674 - DNA, 25 bp, probe
ccgcgcgctagagtgcgccaagatg

SEQ ID NO: 189675 - DNA, 25 bp, probe
ccgcggctaagcgcatcaaggagca

SEQ ID NO: 189676 - DNA, 25 bp, probe
ccgctgggacatggctgaaaggaca

SEQ ID NO: 189677 - DNA, 25 bp, probe
ccgcggcgacttggagagagggaag

SEQ ID NO: 189678 - DNA, 25 bp, probe
ccgcgggctgtgtggaggagcgggt

SEQ ID NO: 189679 - DNA, 25 bp, probe
ccgcggcgctgttcagccgcgaatg

SEQ ID NO: 189680 - DNA, 25 bp, probe
ccgcggcgctgttcagccgcgaatg

SEQ ID NO: 189681 - DNA, 25 bp, probe
ccgggcatctgcacacaaggagtgt

SEQ ID NO: 189682 - DNA, 25 bp, probe
ccgcaggacgctcaaggaggtgctg

SEQ ID NO: 189683 - DNA, 25 bp, probe
ccgcagcagttcctgaatggggtgg

SEQ ID NO: 189684 - DNA, 25 bp, probe
ccgacagcttctcgggcaggtttga

SEQ ID NO: 189685 - DNA, 25 bp, probe
cctgtccttcctggagcaaggttga

SEQ ID NO: 189686 - DNA, 25 bp, probe
ccgactgccgctgagaagggttgat

SEQ ID NO: 189687 - DNA, 25 bp, probe
ccgacgcctcggacgaggtgggcat

SEQ ID NO: 189688 - DNA, 25 bp, probe
ccgaggcctatgaggggctgggcat

SEQ ID NO: 189689 - DNA, 25 bp, probe
ccgaggcagggatcggtctgagcct

SEQ ID NO: 189690 - DNA, 25 bp, probe
ccgccgaggtgctcggtggagtcat

SEQ ID NO: 189691 - DNA, 25 bp, probe
ccgcagcaaactgccgtgctggcag

SEQ ID NO: 189692 - DNA, 25 bp, probe
ccgctgcacaacgcttgtgccagcg

SEQ ID NO: 189693 - DNA, 25 bp, probe
ccgctgcacaacgcttgtgccagcg

SEQ ID NO: 189694 - DNA, 25 bp, probe
ccgctcacaactatatgctaagaga

SEQ ID NO: 189695 - DNA, 25 bp, probe
ccgcgcagcttgaacgactaaagca

SEQ ID NO: 189696 - DNA, 25 bp, probe
ccgcgcagcttgaacgactaaagca

SEQ ID NO: 189697 - DNA, 25 bp, probe
ccgtcactgtgtgcaacaacaaccc

SEQ ID NO: 189698 - DNA, 25 bp, probe
ccgtcactgtgtgcaacaacaaccc

SEQ ID NO: 189699 - DNA, 25 bp, probe
ccgtctgctggagtatacaccaact

SEQ ID NO: 189700 - DNA, 25 bp, probe
ccgacatctgagctctagcctaaga

SEQ ID NO: 189701 - DNA, 25 bp, probe
ccgacactatgttgtctgcggcaaa

SEQ ID NO: 189702 - DNA, 25 bp, probe
ccgaatctatgatttctgcagaact

SEQ ID NO: 189703 - DNA, 25 bp, probe
ccgcgacggcaagtggcagaatgtg

SEQ ID NO: 189704 - DNA, 25 bp, probe
ccgctgcagccacacagtgcagaag

SEQ ID NO: 189705 - DNA, 25 bp, probe
ccgcgaccacgctaagggcgaattc

SEQ ID NO: 189706 - DNA, 25 bp, probe
ccggcatcaacctcacggagaacct

SEQ ID NO: 189707 - DNA, 25 bp, probe
ccgcaacaacctgctcatcgaaatg

SEQ ID NO: 189708 - DNA, 25 bp, probe
cctcaaaatcgtggcccgggagaat

SEQ ID NO: 189709 - DNA, 25 bp, probe
cctccaaacaaacactggagatcaa

SEQ ID NO: 189710 - DNA, 25 bp, probe
tccggagaaaaacacggaccatgac

SEQ ID NO: 189711 - DNA, 25 bp, probe
ccggagaaaaacacggaccatgaca

SEQ ID NO: 189712 - DNA, 25 bp, probe
ccgagtaaaaaggccggacacagtg

SEQ ID NO: 189713 - DNA, 25 bp, probe
ccgactgagaccaagacctacaaca

SEQ ID NO: 189714 - DNA, 25 bp, probe
ccgaaagcaccactgctttacagaa

SEQ ID NO: 189715 - DNA, 25 bp, probe
ccgtgaacctcagttattgctagat

SEQ ID NO: 189716 - DNA, 25 bp, probe
ccgagagcggattgagttcctcaat

SEQ ID NO: 189717 - DNA, 25 bp, probe
tcggtgggtattttctgcctaagtg

SEQ ID NO: 189718 - DNA, 25 bp, probe
ccgatgaggatcgttttttaagtgc

SEQ ID NO: 189719 - DNA, 25 bp, probe
ccgaggaggatcgttttctaagtgc

SEQ ID NO: 189720 - DNA, 25 bp, probe
ccgtggagaattgattccccgaaga

SEQ ID NO: 189721 - DNA, 25 bp, probe
tacttgggtttggatacccttagtg

SEQ ID NO: 189722 - DNA, 25 bp, probe
ttttccgtagtcgtgacctcagtgg

SEQ ID NO: 189723 - DNA, 25 bp, probe
gtttcccagaacgaacactaggcgg

SEQ ID NO: 189724 - DNA, 25 bp, probe
cctccccagagtcaaccttgggtga

SEQ ID NO: 189725 - DNA, 25 bp, probe
cctccccagagtcaaccttgggtga

SEQ ID NO: 189726 - DNA, 25 bp, probe
cctcctgccatgtgtaagttgtaag

SEQ ID NO: 189727 - DNA, 25 bp, probe
cctcctgccatgtgtaagttgtaag

SEQ ID NO: 189728 - DNA, 25 bp, probe
ccgcgctcctgctgaagagtttaga

SEQ ID NO: 189729 - DNA, 25 bp, probe
ccgcagtcaccacagggttctgaga

SEQ ID NO: 189730 - DNA, 25 bp, probe
ccgcagtacaactggacgccgaact

SEQ ID NO: 189731 - DNA, 25 bp, probe
cctggattctactggggtgcgtggt

SEQ ID NO: 189732 - DNA, 25 bp, probe
cctggattctactggggtgcgtggt

SEQ ID NO: 189733 - DNA, 25 bp, probe
ccgtatcttaagtgaggaggcatgg

SEQ ID NO: 189734 - DNA, 25 bp, probe
ccgtcgcttcaagagggtggtggag

SEQ ID NO: 189735 - DNA, 25 bp, probe
ccgctcgccacaaatatgggtactg

SEQ ID NO: 189736 - DNA, 25 bp, probe
cctctgtccatttcaagggtgactc

SEQ ID NO: 189737 - DNA, 25 bp, probe
ccgctgcccagatttgaggcctgac

SEQ ID NO: 189738 - DNA, 25 bp, probe
ccgcttcacaggacagcgtcgctga

SEQ ID NO: 189739 - DNA, 25 bp, probe
ccgcttcacaggacagcgtcgctga

SEQ ID NO: 189740 - DNA, 25 bp, probe
ccgcgagcactgggagcgctcgtgg

SEQ ID NO: 189741 - DNA, 25 bp, probe
ccgctgtgcccaggagagcagcgtg

SEQ ID NO: 189742 - DNA, 25 bp, probe
ccgctgctcaacggaagcttggttc

SEQ ID NO: 189743 - DNA, 25 bp, probe
ccggtgatactggtagttggtgtga

SEQ ID NO: 189744 - DNA, 25 bp, probe
ccgaggtcatcaaacagtcggccta

SEQ ID NO: 189745 - DNA, 25 bp, probe
ccgaggcattatttgaccggatcta

SEQ ID NO: 189746 - DNA, 25 bp, probe
ccgagtgcttgaggatgatccggaa

SEQ ID NO: 189747 - DNA, 25 bp, probe
ccgagctgaagacgagcgcgggaaa

SEQ ID NO: 189748 - DNA, 25 bp, probe
ccgagctgaagacgagcgcgggaaa

SEQ ID NO: 189749 - DNA, 25 bp, probe
ccgcgcagagagtgagctcagggag

SEQ ID NO: 189750 - DNA, 25 bp, probe
ccgcatggacgaagccacatggtac

SEQ ID NO: 189751 - DNA, 25 bp, probe
ccgcatcagagccacagacagagga

SEQ ID NO: 189752 - DNA, 25 bp, probe
ccgcagaagctgcctgcatcggaga

SEQ ID NO: 189753 - DNA, 25 bp, probe
ccgcagagcaacctgcatctgctgg

SEQ ID NO: 189754 - DNA, 25 bp, probe
ccgcaatggagcatgtgcactggca

SEQ ID NO: 189755 - DNA, 25 bp, probe
ccgatatgtgagacgaatgatggct

SEQ ID NO: 189756 - DNA, 25 bp, probe
ccgtctgtatgaatgcctgtggtta

SEQ ID NO: 189757 - DNA, 25 bp, probe
ccgagctttgattgactccgttatt

SEQ ID NO: 189758 - DNA, 25 bp, probe
ccggctttgtggacatccctaagca

SEQ ID NO: 189759 - DNA, 25 bp, probe
ccgacttttctaaagctctgaacaa

SEQ ID NO: 189760 - DNA, 25 bp, probe
ccgtcatttacgcatacttcaacaa

SEQ ID NO: 189761 - DNA, 25 bp, probe
cctgacctattgggatacttataaa

SEQ ID NO: 189762 - DNA, 25 bp, probe
cctgccccactctgaactaaagaag

SEQ ID NO: 189763 - DNA, 25 bp, probe
cctgacccgctacgttatggaaaag

SEQ ID NO: 189764 - DNA, 25 bp, probe
ccgacccgttgccatgattaagaga

SEQ ID NO: 189765 - DNA, 25 bp, probe
ccgattcccctggagtgtgaagctg

SEQ ID NO: 189766 - DNA, 25 bp, probe
ccgattcccctggagtgtgaagctg

SEQ ID NO: 189767 - DNA, 25 bp, probe
ccgattcccctggagtgtgaagctg

SEQ ID NO: 189768 - DNA, 25 bp, probe
ccgaggcccacactggtgtgaatat

SEQ ID NO: 189769 - DNA, 25 bp, probe
cctcaggcccacaggtttaaggctg

SEQ ID NO: 189770 - DNA, 25 bp, probe
cctagatgccaaaggggttcccctg

SEQ ID NO: 189771 - DNA, 25 bp, probe
ccaggagcaaaaggcggttcgtctt

SEQ ID NO: 189772 - DNA, 25 bp, probe
ccaggagcaaaaggcggttcgtctt

SEQ ID NO: 189773 - DNA, 25 bp, probe
ccgacagcaacatcgtgcggtggtt

SEQ ID NO: 189774 - DNA, 25 bp, probe
ccgacacaaggagctcttgttcttc

SEQ ID NO: 189775 - DNA, 25 bp, probe
cctggtcaagggttcctgttttctg

SEQ ID NO: 189776 - DNA, 25 bp, probe
cctgtccatcattgttaccgtgttt

SEQ ID NO: 189777 - DNA, 25 bp, probe
cctgataactctgtacgaggcttct

SEQ ID NO: 189778 - DNA, 25 bp, probe
cctgaacacagttttcaggactctg

SEQ ID NO: 189779 - DNA, 25 bp, probe
cctgttcactctacttagcatgtcc

SEQ ID NO: 189780 - DNA, 25 bp, probe
ccgtctcctagtgataatgctccaa

SEQ ID NO: 189781 - DNA, 25 bp, probe
ccgtctcctagtgataatgctccaa

SEQ ID NO: 189782 - DNA, 25 bp, probe
ccgcttcctggtcttatcatggaca

SEQ ID NO: 189783 - DNA, 25 bp, probe
ccgtaccactggcatcgtgatggac

SEQ ID NO: 189784 - DNA, 25 bp, probe
ccgttgccatatgggtggtgtggat

SEQ ID NO: 189785 - DNA, 25 bp, probe
ccgctgcggaatgggcgggtggctc

SEQ ID NO: 189786 - DNA, 25 bp, probe
ccgtggagatgtggaatggggggct

SEQ ID NO: 189787 - DNA, 25 bp, probe
ccgggtgttgtatgtgtggtgactt

SEQ ID NO: 189788 - DNA, 25 bp, probe
ccgaggtcttcctatctggaatgac

SEQ ID NO: 189789 - DNA, 25 bp, probe
ccgattatgctttctttggcctaca

SEQ ID NO: 189790 - DNA, 25 bp, probe
ccgctttcttttatagctgcttcag

SEQ ID NO: 189791 - DNA, 25 bp, probe
ccgctttcttttatagctgcttcag

SEQ ID NO: 189792 - DNA, 25 bp, probe
ccgtttaccttcatggtgctgttgc

SEQ ID NO: 189793 - DNA, 25 bp, probe
ccggtaggcctgattgggtttctag

SEQ ID NO: 189794 - DNA, 25 bp, probe
gccagggaggggattctccctttat

SEQ ID NO: 189795 - DNA, 25 bp, probe
ccagggcaaggtgtcttccctattc

SEQ ID NO: 189796 - DNA, 25 bp, probe
ccagggcaaggtgtcttccctattc

SEQ ID NO: 189797 - DNA, 25 bp, probe
ccggatgaaggatcttccctctacc

SEQ ID NO: 189798 - DNA, 25 bp, probe
ccggagaggatttggtccctcaact

SEQ ID NO: 189799 - DNA, 25 bp, probe
cctgcgaaggatgatcgcccgataa

SEQ ID NO: 189800 - DNA, 25 bp, probe
cctggaggagatgccaaccgttcaa

SEQ ID NO: 189801 - DNA, 25 bp, probe
ccgtaggtctcagcaacagcgtgtc

SEQ ID NO: 189802 - DNA, 25 bp, probe
ccggaagatctcgtcaaagggccac

SEQ ID NO: 189803 - DNA, 25 bp, probe
ccggaagatctcgtcaaagggccac

SEQ ID NO: 189804 - DNA, 25 bp, probe
ccgagaagtactggaagggctggaa

SEQ ID NO: 189805 - DNA, 25 bp, probe
ccggccagtcagaggccggctgctg

SEQ ID NO: 189806 - DNA, 25 bp, probe
ccggccagtcagaggccggctgctg

SEQ ID NO: 189807 - DNA, 25 bp, probe
ccgacgagccagaggacagcgagct

SEQ ID NO: 189808 - DNA, 25 bp, probe
ccgcacgacggacgtgacgcagacc

SEQ ID NO: 189809 - DNA, 25 bp, probe
ccgcaacctgaactgtgaggcgggc

SEQ ID NO: 189810 - DNA, 25 bp, probe
ccgcagaggtaactgaggagagggg

SEQ ID NO: 189811 - DNA, 25 bp, probe
ccgcacggagaacgagctgcatggg

SEQ ID NO: 189812 - DNA, 25 bp, probe
ccgagcggcagtacgagctgcagcc

SEQ ID NO: 189813 - DNA, 25 bp, probe
ccgagctgacggaagcctgtgactg

SEQ ID NO: 189814 - DNA, 25 bp, probe
ccgatgatgaggaccgaagtgattg

SEQ ID NO: 189815 - DNA, 25 bp, probe
ccgctagaggcctgaggatgagctg

SEQ ID NO: 189816 - DNA, 25 bp, probe
ccgctactggccagatgagggtgcc

SEQ ID NO: 189817 - DNA, 25 bp, probe
ccgtgagtggacatgacagggaaca

SEQ ID NO: 189818 - DNA, 25 bp, probe
ccgagcagctgggattacaggcgta

SEQ ID NO: 189819 - DNA, 25 bp, probe
ccgcagtgctgggaccagagccaga

SEQ ID NO: 189820 - DNA, 25 bp, probe
ccgtgcagtgggaccagattccagg

SEQ ID NO: 189821 - DNA, 25 bp, probe
ccgaggaggtgtcggtgtgccagga

SEQ ID NO: 189822 - DNA, 25 bp, probe
ccgaggtgggagcggcgttggtcaa

SEQ ID NO: 189823 - DNA, 25 bp, probe
ccgagagggcgagaccagaggggac

SEQ ID NO: 189824 - DNA, 25 bp, probe
ccgaggcgggacactggaggtggag

SEQ ID NO: 189825 - DNA, 25 bp, probe
ccgcaggaagctgcttcggggggtg

SEQ ID NO: 189826 - DNA, 25 bp, probe
ccgcaggatgatcagtccggggcgc

SEQ ID NO: 189827 - DNA, 25 bp, probe
ccgcagcaagatccggtctgtgggc

SEQ ID NO: 189828 - DNA, 25 bp, probe
ccgcagccaacgggcttatgcagac

SEQ ID NO: 189829 - DNA, 25 bp, probe
ccgatactagtttgctttgctgacc

SEQ ID NO: 189830 - DNA, 25 bp, probe
ccgctcgcggtgatgtttgtagcct

SEQ ID NO: 189831 - DNA, 25 bp, probe
ccgacaggagtcacctttgagcctg

SEQ ID NO: 189832 - DNA, 25 bp, probe
ccgacagggataacagcttcctcca

SEQ ID NO: 189833 - DNA, 25 bp, probe
cctgcagggcgtttacaaccagcca

SEQ ID NO: 189834 - DNA, 25 bp, probe
ccgtgggagtcatctcaaccatccc

SEQ ID NO: 189835 - DNA, 25 bp, probe
ccgtggtgttcagttcactcaacgc

SEQ ID NO: 189836 - DNA, 25 bp, probe
ccgtggtgttcagttcactcaacgc

SEQ ID NO: 189837 - DNA, 25 bp, probe
ccagggatcagtagttcctacccat

SEQ ID NO: 189838 - DNA, 25 bp, probe
ccgaggatgagattgccctctacac

SEQ ID NO: 189839 - DNA, 25 bp, probe
gcctgaaggaaaactcttaacacct

SEQ ID NO: 189840 - DNA, 25 bp, probe
cctaataaagcaatcgcaaaaacct

SEQ ID NO: 189841 - DNA, 25 bp, probe
ccgaaaaatgaagtgcacaagagca

SEQ ID NO: 189842 - DNA, 25 bp, probe
ccgcttaaagaacatcacacatcca

SEQ ID NO: 189843 - DNA, 25 bp, probe
cctgctgtacaagagagtaaccaaa

SEQ ID NO: 189844 - DNA, 25 bp, probe
cctggataccaatgaggtgacccag

SEQ ID NO: 189845 - DNA, 25 bp, probe
tccggaaactaaagtgaggctcgct

SEQ ID NO: 189846 - DNA, 25 bp, probe
ccggaagccgccaagtgattttctc

SEQ ID NO: 189847 - DNA, 25 bp, probe
ccgcacacacctgaaacatgttctc

SEQ ID NO: 189848 - DNA, 25 bp, probe
ccgacatctacaactaatctttccc

SEQ ID NO: 189849 - DNA, 25 bp, probe
ccgacatctacaactaatctttccc

SEQ ID NO: 189850 - DNA, 25 bp, probe
ccggtcgagctattattcttacacc

SEQ ID NO: 189851 - DNA, 25 bp, probe
cctggggaccaaattccattcaaat

SEQ ID NO: 189852 - DNA, 25 bp, probe
ccgggcaaaagcttcccattcaaat

SEQ ID NO: 189853 - DNA, 25 bp, probe
ccgtgcccaaactccaaagaatcta

SEQ ID NO: 189854 - DNA, 25 bp, probe
ccgatgcaccaaactaataaaactt

SEQ ID NO: 189855 - DNA, 25 bp, probe
ccggacccaactgaatgaagagcta

SEQ ID NO: 189856 - DNA, 25 bp, probe
ccgtcaccctaagtatggataggct

SEQ ID NO: 189857 - DNA, 25 bp, probe
ccgatcacctcgaagatttattggc

SEQ ID NO: 189858 - DNA, 25 bp, probe
ccgacaacagctactggttcttgag

SEQ ID NO: 189859 - DNA, 25 bp, probe
ccgcagacacgcactgttgatttgt

SEQ ID NO: 189860 - DNA, 25 bp, probe
ccgatgaaagcagccatttctcctt

SEQ ID NO: 189861 - DNA, 25 bp, probe
ccgtgaaatgtccacttttgcttct

SEQ ID NO: 189862 - DNA, 25 bp, probe
cctggcaaaacgtcctttgcattat

SEQ ID NO: 189863 - DNA, 25 bp, probe
ccggcaaaacgatgggcagtttcac

SEQ ID NO: 189864 - DNA, 25 bp, probe
ccggaaactgatcagggcagctgct

SEQ ID NO: 189865 - DNA, 25 bp, probe
ccgtggcaaggactaagggctatga

SEQ ID NO: 189866 - DNA, 25 bp, probe
ccgtggctatggcttgggccactgc

SEQ ID NO: 189867 - DNA, 25 bp, probe
ccgtggctatggcttgggccactgc

SEQ ID NO: 189868 - DNA, 25 bp, probe
ccgtggaatgtccctggagtactat

SEQ ID NO: 189869 - DNA, 25 bp, probe
ccgtagaattgtcaggagtgcacct

SEQ ID NO: 189870 - DNA, 25 bp, probe
ccgttccatctgtgagaaatcaccg

SEQ ID NO: 189871 - DNA, 25 bp, probe
ccgactccatctctgagtctgtgcc

SEQ ID NO: 189872 - DNA, 25 bp, probe
ccgagatggtcggggtgctggcggt

SEQ ID NO: 189873 - DNA, 25 bp, probe
ccgatgctttctggtgggcggtggt

SEQ ID NO: 189874 - DNA, 25 bp, probe
ccgatgctttctggtgggcggtggt

SEQ ID NO: 189875 - DNA, 25 bp, probe
ccgagcatttgttggaggcagatat

SEQ ID NO: 189876 - DNA, 25 bp, probe
ccggaccatgttcaggcagattctg

SEQ ID NO: 189877 - DNA, 25 bp, probe
cctggccagcgctaccaggagtttg

SEQ ID NO: 189878 - DNA, 25 bp, probe
ccgtgacgccaagcagaggctgagt

SEQ ID NO: 189879 - DNA, 25 bp, probe
ccggccccaacatgggcaagggtgg

SEQ ID NO: 189880 - DNA, 25 bp, probe
ccggcacccaggggtggatagggat

SEQ ID NO: 189881 - DNA, 25 bp, probe
ccggacccggatcggggcagagact

SEQ ID NO: 189882 - DNA, 25 bp, probe
ccggacccggatcggggcagagact

SEQ ID NO: 189883 - DNA, 25 bp, probe
ccgcttcgtgcagatcgtggacgag

SEQ ID NO: 189884 - DNA, 25 bp, probe
ccgcttcgtgcagatcgtggacgag

SEQ ID NO: 189885 - DNA, 25 bp, probe
ccacttgggggtctagaccaggatt

SEQ ID NO: 189886 - DNA, 25 bp, probe
ccactttggagttgtctaccacgga

SEQ ID NO: 189887 - DNA, 25 bp, probe
gccccgtggagaattgattccccga

SEQ ID NO: 189888 - DNA, 25 bp, probe
ccgggctggagaacgtgtgcaccgc

SEQ ID NO: 189889 - DNA, 25 bp, probe
cctggagggacatcagtgcttcctc

SEQ ID NO: 189890 - DNA, 25 bp, probe
ccggagggaggcactagtcaccgac

SEQ ID NO: 189891 - DNA, 25 bp, probe
ccgtggagaaggggtaccgcatgga

SEQ ID NO: 189892 - DNA, 25 bp, probe
ccgtttgaggtggggatccgagtgc

SEQ ID NO: 189893 - DNA, 25 bp, probe
ccgactgctgaggtgtggggcgggc

SEQ ID NO: 189894 - DNA, 25 bp, probe
ccgacatctggagtctgtgggtgtg

SEQ ID NO: 189895 - DNA, 25 bp, probe
ccgacatctggagtctggggtgtgt

SEQ ID NO: 189896 - DNA, 25 bp, probe
ccgaagcgcaatgtggtggtcactg

SEQ ID NO: 189897 - DNA, 25 bp, probe
ccggggcaatacagaccatcaagca

SEQ ID NO: 189898 - DNA, 25 bp, probe
ccggggctgtaatgtctccaggaag

SEQ ID NO: 189899 - DNA, 25 bp, probe
ccgggggagagacttgttaggaatg

SEQ ID NO: 189900 - DNA, 25 bp, probe
ccgtgggggaactgacgctggagat

SEQ ID NO: 189901 - DNA, 25 bp, probe
ccggagcttggaagtcatacccgaa

SEQ ID NO: 189902 - DNA, 25 bp, probe
ccgtgatgtgcaatgaagcatctca

SEQ ID NO: 189903 - DNA, 25 bp, probe
ccgaggcagagatcagcttcagagc

SEQ ID NO: 189904 - DNA, 25 bp, probe
ccgggagagcatccaggaagacctg

SEQ ID NO: 189905 - DNA, 25 bp, probe
ccgggcgtgcagacagcaggaagcc

SEQ ID NO: 189906 - DNA, 25 bp, probe
ccgagcacctgaatgacgtcaacgc

SEQ ID NO: 189907 - DNA, 25 bp, probe
cctggaatgctgggaagtgctaggc

SEQ ID NO: 189908 - DNA, 25 bp, probe
ccgcaatatctgccctaactcaggc

SEQ ID NO: 189909 - DNA, 25 bp, probe
ccgcacagacgggtacctgaagcgc

SEQ ID NO: 189910 - DNA, 25 bp, probe
ccgatagcaggtgaactcgaagccc

SEQ ID NO: 189911 - DNA, 25 bp, probe
ccgcaagagtctgtcttcgatgacc

SEQ ID NO: 189912 - DNA, 25 bp, probe
ccagcaaatttgagttccaatccaa

SEQ ID NO: 189913 - DNA, 25 bp, probe
ccgtgacattaaaggtgccaatatc

SEQ ID NO: 189914 - DNA, 25 bp, probe
ccgtcctaatcaacgtgcctatggc

SEQ ID NO: 189915 - DNA, 25 bp, probe
ccgacctgcagatcacggaccaggt

SEQ ID NO: 189916 - DNA, 25 bp, probe
ccgcagccgaaagcagggcatcatg

SEQ ID NO: 189917 - DNA, 25 bp, probe
ccgaggtgatcctcagctggatgca

SEQ ID NO: 189918 - DNA, 25 bp, probe
ccgagcgtggctaccaggagagcag

SEQ ID NO: 189919 - DNA, 25 bp, probe
ccgactttcatgagctgctgaggag

SEQ ID NO: 189920 - DNA, 25 bp, probe
ccgaattctggaacgcatgtgtgag

SEQ ID NO: 189921 - DNA, 25 bp, probe
ccgagatgactggctacgtggtgac

SEQ ID NO: 189922 - DNA, 25 bp, probe
ccgaatgtgctggctctcattggta

SEQ ID NO: 189923 - DNA, 25 bp, probe
ccgaggctgagcgctttgcaataag

SEQ ID NO: 189924 - DNA, 25 bp, probe
cctggtgagaatttatggcaataag

SEQ ID NO: 189925 - DNA, 25 bp, probe
cctgtgtagtacttatgctgctctc

SEQ ID NO: 189926 - DNA, 25 bp, probe
cctgtgtagtacttatgctgctctc

SEQ ID NO: 189927 - DNA, 25 bp, probe
cctgtgtgagcatctctgtgtaccc

SEQ ID NO: 189928 - DNA, 25 bp, probe
ccgtgggatgtctctgtccacatta

SEQ ID NO: 189929 - DNA, 25 bp, probe
ccgtacctgtcattgtgtccaattt

SEQ ID NO: 189930 - DNA, 25 bp, probe
ccagaaccttcacggccagaaagta

SEQ ID NO: 189931 - DNA, 25 bp, probe
ccaatgaccccgctcttaaagatga

SEQ ID NO: 189932 - DNA, 25 bp, probe
ccgaggctccttctctgtagaagtg

SEQ ID NO: 189933 - DNA, 25 bp, probe
ccggtgcccctgtgcttataaggga

SEQ ID NO: 189934 - DNA, 25 bp, probe
ccgttgtccctgcagtgcccatagg

SEQ ID NO: 189935 - DNA, 25 bp, probe
ccgagactaccaggagagccctggg

SEQ ID NO: 189936 - DNA, 25 bp, probe
ccgaggctaccagtggggaggcggg

SEQ ID NO: 189937 - DNA, 25 bp, probe
ccgaggctaccagtggggaggcggg

SEQ ID NO: 189938 - DNA, 25 bp, probe
ccggagcaaccagtgggggagaagc

SEQ ID NO: 189939 - DNA, 25 bp, probe
ccgagaagcaactagaggaggaaga

SEQ ID NO: 189940 - DNA, 25 bp, probe
ccgagagagacctgatgccggagcc

SEQ ID NO: 189941 - DNA, 25 bp, probe
ccgcaaggaccagatccagcggctg

SEQ ID NO: 189942 - DNA, 25 bp, probe
cctgtaagaacagagcacacttgct

SEQ ID NO: 189943 - DNA, 25 bp, probe
cctgaggacaaagggcaacctggag

SEQ ID NO: 189944 - DNA, 25 bp, probe
cctggcagaacaaccctaccagggc

SEQ ID NO: 189945 - DNA, 25 bp, probe
ccgagagcaactacctctttctggg

SEQ ID NO: 189946 - DNA, 25 bp, probe
ccgagacaccatagtcattgctgtt

SEQ ID NO: 189947 - DNA, 25 bp, probe
ccgagtcactcatgtgcaaaattgc

SEQ ID NO: 189948 - DNA, 25 bp, probe
ccgagatatcaaagctgccaacgtg

SEQ ID NO: 189949 - DNA, 25 bp, probe
ccgagatatcaaagctgccaacgtg

SEQ ID NO: 189950 - DNA, 25 bp, probe
ccgagattccaactccacagagtga

SEQ ID NO: 189951 - DNA, 25 bp, probe
ccgaatcatgcccggggcaggtaaa

SEQ ID NO: 189952 - DNA, 25 bp, probe
cctggttccctggggcaggtgaaga

SEQ ID NO: 189953 - DNA, 25 bp, probe
ccgtgtcctatgaggacagggagga

SEQ ID NO: 189954 - DNA, 25 bp, probe
ccgttctgccatccggaagaggtgg

SEQ ID NO: 189955 - DNA, 25 bp, probe
ccgttctgccatccggaagaggtgg

SEQ ID NO: 189956 - DNA, 25 bp, probe
ccgttcctgcccagaagctgaggaa

SEQ ID NO: 189957 - DNA, 25 bp, probe
ccgagtcccaccagaaggcaggtgg

SEQ ID NO: 189958 - DNA, 25 bp, probe
ccgagaccacacccaggactgggtg

SEQ ID NO: 189959 - DNA, 25 bp, probe
ccgagaccacacccaggactgggtg

SEQ ID NO: 189960 - DNA, 25 bp, probe
ccgaagtcatcctgggtatgggcta

SEQ ID NO: 189961 - DNA, 25 bp, probe
ccattatgttcgtggtgtaaagttt

SEQ ID NO: 189962 - DNA, 25 bp, probe
cctgtggttctctggtgtaaaaaag

SEQ ID NO: 189963 - DNA, 25 bp, probe
ccgatggtgccctaggtggaatcca

SEQ ID NO: 189964 - DNA, 25 bp, probe
cctggggccctgagatggccccagc

SEQ ID NO: 189965 - DNA, 25 bp, probe
ccgggagcccgatgaggggctgccc

SEQ ID NO: 189966 - DNA, 25 bp, probe
ccgacgatttcgtgaggcggcagcc

SEQ ID NO: 189967 - DNA, 25 bp, probe
ccgacgaatattacaacgcggcagc

SEQ ID NO: 189968 - DNA, 25 bp, probe
ccgagttcttctacaactggtactt

SEQ ID NO: 189969 - DNA, 25 bp, probe
ccgtgttttcatctttgttcacttg

SEQ ID NO: 189970 - DNA, 25 bp, probe
ccgtgctggtttctttgttactatt

SEQ ID NO: 189971 - DNA, 25 bp, probe
ccgtaggtttgtaactgtttcatag

SEQ ID NO: 189972 - DNA, 25 bp, probe
ccggagagtgtcagaactcttctgc

SEQ ID NO: 189973 - DNA, 25 bp, probe
ccgatgggtgccaggcctatgttgg

SEQ ID NO: 189974 - DNA, 25 bp, probe
cctgatgggggatggcctggaatga

SEQ ID NO: 189975 - DNA, 25 bp, probe
ccgagggcagagatggacgtgagga

SEQ ID NO: 189976 - DNA, 25 bp, probe
ccggagtcatcagaggattggagga

SEQ ID NO: 189977 - DNA, 25 bp, probe
ccgttgctgtcggcagtttggggaa

SEQ ID NO: 189978 - DNA, 25 bp, probe
ccgtcatcgtgaacaatttcgggat

SEQ ID NO: 189979 - DNA, 25 bp, probe
ccgtcatcgtgaacaatttcgggat

SEQ ID NO: 189980 - DNA, 25 bp, probe
cctgtatgctagccatgcacatctt

SEQ ID NO: 189981 - DNA, 25 bp, probe
ccgtaccaccatgcactgtaaatat

SEQ ID NO: 189982 - DNA, 25 bp, probe
ccgtaccaccatgcactgtaaatat

SEQ ID NO: 189983 - DNA, 25 bp, probe
ccgaaccatcactcgtgtacgaagc

SEQ ID NO: 189984 - DNA, 25 bp, probe
cctgtggcccagcactggtcaagaa

SEQ ID NO: 189985 - DNA, 25 bp, probe
ccgtgcccaccaactggtgatggaa

SEQ ID NO: 189986 - DNA, 25 bp, probe
ccgtccgactgcgctgacaatggac

SEQ ID NO: 189987 - DNA, 25 bp, probe
ccgtccgactgcgctgacaatggac

SEQ ID NO: 189988 - DNA, 25 bp, probe
ccgtgccgtcatgggtgccatgaag

SEQ ID NO: 189989 - DNA, 25 bp, probe
ccgtgacgacatgctgtgtgccggg

SEQ ID NO: 189990 - DNA, 25 bp, probe
ccgagatgcaggtcctgtgcttcag

SEQ ID NO: 189991 - DNA, 25 bp, probe
ccgagatcagcagcaattgcctctg

SEQ ID NO: 189992 - DNA, 25 bp, probe
ccgagctgcgcagcattatcctgtg

SEQ ID NO: 189993 - DNA, 25 bp, probe
ccgagatgccacgactattcttgga

SEQ ID NO: 189994 - DNA, 25 bp, probe
ccgtgagcctaaccatgatcttgag

SEQ ID NO: 189995 - DNA, 25 bp, probe
ccgttcctgggcgagaccaagcagg

SEQ ID NO: 189996 - DNA, 25 bp, probe
cctgcttccggagctacgggaggtc

SEQ ID NO: 189997 - DNA, 25 bp, probe
cctgggacggaagatcgggagcggg

SEQ ID NO: 189998 - DNA, 25 bp, probe
ccgggagaggaaggtgagtatgagg

SEQ ID NO: 189999 - DNA, 25 bp, probe
ccggagaagcgcctggggttcagag

SEQ ID NO: 190000 - DNA, 25 bp, probe
ccggagaagcgcctggggttcagag

SEQ ID NO: 190001 - DNA, 25 bp, probe
ccgagcagtcggatgtgaggttcag

SEQ ID NO: 190002 - DNA, 25 bp, probe
ccgagaggcgtgatgcaggggtgtg

SEQ ID NO: 190003 - DNA, 25 bp, probe
ccgagggcaggagtagggcagctgc

SEQ ID NO: 190004 - DNA, 25 bp, probe
ccggggtggcagtgaggaccacctt

SEQ ID NO: 190005 - DNA, 25 bp, probe
ccggggtgacaagggtacactgact

SEQ ID NO: 190006 - DNA, 25 bp, probe
ccggagactgtcgaaggtcaccaaa

SEQ ID NO: 190007 - DNA, 25 bp, probe
cctgggccttctgaacattccaaaa

SEQ ID NO: 190008 - DNA, 25 bp, probe
cctgggccttctgaacattccaaaa

SEQ ID NO: 190009 - DNA, 25 bp, probe
cctgaggctcctgggaatccgccga

SEQ ID NO: 190010 - DNA, 25 bp, probe
ccgagagccctgcagaatctcagag

SEQ ID NO: 190011 - DNA, 25 bp, probe
ccgatgagacgctggactccatagc

SEQ ID NO: 190012 - DNA, 25 bp, probe
ccgatgagacgctggactccatagc

SEQ ID NO: 190013 - DNA, 25 bp, probe
ccgagagcatcctgtaccgtaagtt

SEQ ID NO: 190014 - DNA, 25 bp, probe
ccgggaccagaagccgtccaatgtg

SEQ ID NO: 190015 - DNA, 25 bp, probe
ccgtgttccagaagccggtcaagtt

SEQ ID NO: 190016 - DNA, 25 bp, probe
gccgtgttccagaagccggtcaagt

SEQ ID NO: 190017 - DNA, 25 bp, probe
ccgtattctcatgatcccagataag

SEQ ID NO: 190018 - DNA, 25 bp, probe
ccgatttgccatgcatcagctgcgg

SEQ ID NO: 190019 - DNA, 25 bp, probe
ccgagtacaaggccagtggcggccc

SEQ ID NO: 190020 - DNA, 25 bp, probe
ccgggacaacagcagggacagctcc

SEQ ID NO: 190021 - DNA, 25 bp, probe
ccggcgaggacacacgcagagtgcc

SEQ ID NO: 190022 - DNA, 25 bp, probe
ccgaggggacagcaatgcaaatgtc

SEQ ID NO: 190023 - DNA, 25 bp, probe
ccgagggtgagacggacacagacac

SEQ ID NO: 190024 - DNA, 25 bp, probe
ccgagggtgagacggacacagacac

SEQ ID NO: 190025 - DNA, 25 bp, probe
ccgagggtagtgcctgatcaatgag

SEQ ID NO: 190026 - DNA, 25 bp, probe
ccgaggtgctcggtggagtcatggc

SEQ ID NO: 190027 - DNA, 25 bp, probe
ccgagagtgctcggcaggacttcca

SEQ ID NO: 190028 - DNA, 25 bp, probe
ccgttgtctgtggatggtcattgca

SEQ ID NO: 190029 - DNA, 25 bp, probe
ccgttgctggatctgctgtttgaag

SEQ ID NO: 190030 - DNA, 25 bp, probe
cctgattggcgtctttgttgtctgc

SEQ ID NO: 190031 - DNA, 25 bp, probe
ccgtcttcctgtggttgtatgcact

SEQ ID NO: 190032 - DNA, 25 bp, probe
ccggcattactatgtcatggtcatc

SEQ ID NO: 190033 - DNA, 25 bp, probe
cctggtaacctactaggtgctgacc

SEQ ID NO: 190034 - DNA, 25 bp, probe
cctggtaacctactaggtgctgacc

SEQ ID NO: 190035 - DNA, 25 bp, probe
ccggtggagcagtgatgagtgtcta

SEQ ID NO: 190036 - DNA, 25 bp, probe
ccagggcctgagttagactatttcc

SEQ ID NO: 190037 - DNA, 25 bp, probe
ccgaggcttgaggtatattcattca

SEQ ID NO: 190038 - DNA, 25 bp, probe
ccggagcttgtccggaagattgcaa

SEQ ID NO: 190039 - DNA, 25 bp, probe
ccgtggcttatggggtagcagtcaa

SEQ ID NO: 190040 - DNA, 25 bp, probe
ccgtttccatcattgaataagtctt

SEQ ID NO: 190041 - DNA, 25 bp, probe
ccgtttccatcattgaataagtctt

SEQ ID NO: 190042 - DNA, 25 bp, probe
ccgtggccctcatgaacatgaactg

SEQ ID NO: 190043 - DNA, 25 bp, probe
cctgtggccacctggaaagtcccag

SEQ ID NO: 190044 - DNA, 25 bp, probe
cctgaccgacctggagttacccaga

SEQ ID NO: 190045 - DNA, 25 bp, probe
cctggccttctaaacgtaggacaca

SEQ ID NO: 190046 - DNA, 25 bp, probe
cctggccttctaaacgtaggacaca

SEQ ID NO: 190047 - DNA, 25 bp, probe
cctgtgaagttacactgtaggacac

SEQ ID NO: 190048 - DNA, 25 bp, probe
ccgtgaagagatgccttttggacac

SEQ ID NO: 190049 - DNA, 25 bp, probe
ccgagaagaggccatcctttgtgaa

SEQ ID NO: 190050 - DNA, 25 bp, probe
ccggaacagatcgaccaatttgtga

SEQ ID NO: 190051 - DNA, 25 bp, probe
ccgataccatgagatgctgaataat

SEQ ID NO: 190052 - DNA, 25 bp, probe
ccgatcatccaggtttgaccagcac

SEQ ID NO: 190053 - DNA, 25 bp, probe
ccgtcccaggttgcactgcaaccaa

SEQ ID NO: 190054 - DNA, 25 bp, probe
ccagggccaggaatcccaaaccaga

SEQ ID NO: 190055 - DNA, 25 bp, probe
ccggagtcagtctatagcgcaaacc

SEQ ID NO: 190056 - DNA, 25 bp, probe
ccggagatggtgaagggagaaccca

SEQ ID NO: 190057 - DNA, 25 bp, probe
ccggcaaggtagtggaagactggct

SEQ ID NO: 190058 - DNA, 25 bp, probe
ccggcaaaggcctacgaatagcaga

SEQ ID NO: 190059 - DNA, 25 bp, probe
ccggcaaaggcctacgaatagcaga

SEQ ID NO: 190060 - DNA, 25 bp, probe
ccgtgctaaggcccacaaaagccag

SEQ ID NO: 190061 - DNA, 25 bp, probe
ccaggccttggctcaaaatggccag

SEQ ID NO: 190062 - DNA, 25 bp, probe
cctggcatttggtacccaagggaag

SEQ ID NO: 190063 - DNA, 25 bp, probe
ccgtgctcgggtttccaagaggagc

SEQ ID NO: 190064 - DNA, 25 bp, probe
ccttcatcccgaagtacacaggccc

SEQ ID NO: 190065 - DNA, 25 bp, probe
gccttccccgagtggaaggcgcccg

SEQ ID NO: 190066 - DNA, 25 bp, probe
ccgtccttccagttggagagttctc

SEQ ID NO: 190067 - DNA, 25 bp, probe
ccgtgcttgtccctgtggaagtatc

SEQ ID NO: 190068 - DNA, 25 bp, probe
ccgtcttgtgtcatgtgttcagctg

SEQ ID NO: 190069 - DNA, 25 bp, probe
ccgagatatgagggagctttcgctg

SEQ ID NO: 190070 - DNA, 25 bp, probe
cctggaacagggactttcacttgaa

SEQ ID NO: 190071 - DNA, 25 bp, probe
cctgggacagggtcagtacaagtca

SEQ ID NO: 190072 - DNA, 25 bp, probe
ccgggcaggagtgtggaaagtgccg

SEQ ID NO: 190073 - DNA, 25 bp, probe
ccggtggaagtccatctgacaaccc

SEQ ID NO: 190074 - DNA, 25 bp, probe
ccggaaaagtctctgagctgctcct

SEQ ID NO: 190075 - DNA, 25 bp, probe
ccggagaacgtcttcatcagcgtgc

SEQ ID NO: 190076 - DNA, 25 bp, probe
ccggaggacgtttcagaggtcttct

SEQ ID NO: 190077 - DNA, 25 bp, probe
ccggaggacgtttcagaggtcttct

SEQ ID NO: 190078 - DNA, 25 bp, probe
cctggggacgctgtcacaggggaca

SEQ ID NO: 190079 - DNA, 25 bp, probe
ccggtggaccagactgactggtgag

SEQ ID NO: 190080 - DNA, 25 bp, probe
ccgtgaagacgaatatgatctgtgc

SEQ ID NO: 190081 - DNA, 25 bp, probe
ccgtcacatgtcaccatgagctggc

SEQ ID NO: 190082 - DNA, 25 bp, probe
ccgatagcgctcacgcaagcatggt

SEQ ID NO: 190083 - DNA, 25 bp, probe
ccgtgccgctgttcagcaagcagag

SEQ ID NO: 190084 - DNA, 25 bp, probe
ccgtgccgctgttcagcaagcagag

SEQ ID NO: 190085 - DNA, 25 bp, probe
ccgtgtcagctttcacagcatcaag

SEQ ID NO: 190086 - DNA, 25 bp, probe
ccgtgtcagctttcacagcatcaag

SEQ ID NO: 190087 - DNA, 25 bp, probe
ccggctgtcatttgccgacagagca

SEQ ID NO: 190088 - DNA, 25 bp, probe
ccggattattgctgcaactggcaaa

SEQ ID NO: 190089 - DNA, 25 bp, probe
ccggtgtgttggtcactatggaaac

SEQ ID NO: 190090 - DNA, 25 bp, probe
gccggttatgcacatcatttaagta

SEQ ID NO: 190091 - DNA, 25 bp, probe
cctggatctgcacagtcttctaagt

SEQ ID NO: 190092 - DNA, 25 bp, probe
cctggcattccggttgatgctaact

SEQ ID NO: 190093 - DNA, 25 bp, probe
cctggcagtctcagtccaaaagtgt

SEQ ID NO: 190094 - DNA, 25 bp, probe
ccgtcatttcatttcccaaggttga

SEQ ID NO: 190095 - DNA, 25 bp, probe
cctgtttcttagtccgaatgttaga

SEQ ID NO: 190096 - DNA, 25 bp, probe
cctgcaattaggtatccgaatgttg

SEQ ID NO: 190097 - DNA, 25 bp, probe
cctgtatggaggtctcccgattcct

SEQ ID NO: 190098 - DNA, 25 bp, probe
cctggagtgtggtgcttaatccgct

SEQ ID NO: 190099 - DNA, 25 bp, probe
ccgagtgttgtgtgcttgaactttt

SEQ ID NO: 190100 - DNA, 25 bp, probe
ccgtgtgatttgtgtagtgagcctt

SEQ ID NO: 190101 - DNA, 25 bp, probe
ccgtgtgatttgtgtagtgagcctt

SEQ ID NO: 190102 - DNA, 25 bp, probe
ccaagtttagttcaggaagctctga

SEQ ID NO: 190103 - DNA, 25 bp, probe
ccgagatttagccaccaggaactgc

SEQ ID NO: 190104 - DNA, 25 bp, probe
ccgagtgactactatacagactacg

SEQ ID NO: 190105 - DNA, 25 bp, probe
cctggccagttcaatccaacccagg

SEQ ID NO: 190106 - DNA, 25 bp, probe
ccggcctatgtcatggaactgccca

SEQ ID NO: 190107 - DNA, 25 bp, probe
ccggactatgacatccgggccgacg

SEQ ID NO: 190108 - DNA, 25 bp, probe
ccggaccagcacattctgtgggacc

SEQ ID NO: 190109 - DNA, 25 bp, probe
cctggaccacgagatcgatggctcc

SEQ ID NO: 190110 - DNA, 25 bp, probe
cctggaccacgagatcgatggctcc

SEQ ID NO: 190111 - DNA, 25 bp, probe
cctggagacctagctccatgttcct

SEQ ID NO: 190112 - DNA, 25 bp, probe
cctgaaacctcagaacttactcatc

SEQ ID NO: 190113 - DNA, 25 bp, probe
cctgagaatcccaaaacccaatcga

SEQ ID NO: 190114 - DNA, 25 bp, probe
cctgagaatcccaaaacccaatcga

SEQ ID NO: 190115 - DNA, 25 bp, probe
cctgacttacaatatgcctgttatc

SEQ ID NO: 190116 - DNA, 25 bp, probe
cctgaggctaaagaccatgttcaca

SEQ ID NO: 190117 - DNA, 25 bp, probe
ccggtgatttacaatctcatgtccc

SEQ ID NO: 190118 - DNA, 25 bp, probe
ccgtgatgaatgtactgaccagctg

SEQ ID NO: 190119 - DNA, 25 bp, probe
cctgtgatgtcacactcaagaggcc

SEQ ID NO: 190120 - DNA, 25 bp, probe
cctgtgatgtcacactcaagaggcc

SEQ ID NO: 190121 - DNA, 25 bp, probe
ccgtctgctgaccagctaaacacca

SEQ ID NO: 190122 - DNA, 25 bp, probe
ccgtgctccatgaactcaaacacca

SEQ ID NO: 190123 - DNA, 25 bp, probe
ccgtgttcctgcaacagcagaccaa

SEQ ID NO: 190124 - DNA, 25 bp, probe
ccggtctcgatggcaaagacggccc

SEQ ID NO: 190125 - DNA, 25 bp, probe
ccggctctatgcggtaaagcgttcc

SEQ ID NO: 190126 - DNA, 25 bp, probe
tcctggctttcagaaaaccaacgcc

SEQ ID NO: 190127 - DNA, 25 bp, probe
cctggtgtgccagcgaaaccaaacc

SEQ ID NO: 190128 - DNA, 25 bp, probe
cctggtgtgccagcgaaaccaaacc

SEQ ID NO: 190129 - DNA, 25 bp, probe
ccgaggctgccaccaaagaaattta

SEQ ID NO: 190130 - DNA, 25 bp, probe
cctgggcatcactcagaagaatttt

SEQ ID NO: 190131 - DNA, 25 bp, probe
ccgggacacccagacagatgagatt

SEQ ID NO: 190132 - DNA, 25 bp, probe
cctgaggaactccaaaagggcttca

SEQ ID NO: 190133 - DNA, 25 bp, probe
ccggatgagcaattggaaacccttc

SEQ ID NO: 190134 - DNA, 25 bp, probe
ccggatgagcaattggaaacccttc

SEQ ID NO: 190135 - DNA, 25 bp, probe
ccggatgagcaattggaaacccttc

SEQ ID NO: 190136 - DNA, 25 bp, probe
ccggatgagcaattggaaacccttc

SEQ ID NO: 190137 - DNA, 25 bp, probe
ccgggagcagtttaaggctgccttc

SEQ ID NO: 190138 - DNA, 25 bp, probe
cctgtggagaggtaaagctggcttt

SEQ ID NO: 190139 - DNA, 25 bp, probe
cctggtggaaggaggcgcactttcc

SEQ ID NO: 190140 - DNA, 25 bp, probe
ccgtcatggaagaggcggccatgct

SEQ ID NO: 190141 - DNA, 25 bp, probe
ccgtcaggagagaagccgcgtctgt

SEQ ID NO: 190142 - DNA, 25 bp, probe
ccggatgaagagggctggccgtgtg

SEQ ID NO: 190143 - DNA, 25 bp, probe
ccgggaggcagtgctgatccggctg

SEQ ID NO: 190144 - DNA, 25 bp, probe
ccgggagatggaggccatccgcacg

SEQ ID NO: 190145 - DNA, 25 bp, probe
ccggggctgaagccacacagcccag

SEQ ID NO: 190146 - DNA, 25 bp, probe
ccggagcagtgaaccagcacggggg

SEQ ID NO: 190147 - DNA, 25 bp, probe
ccggagcagtgaaccagcacggggg

SEQ ID NO: 190148 - DNA, 25 bp, probe
ccggaggagagactcaccatcgagg

SEQ ID NO: 190149 - DNA, 25 bp, probe
ccgtatggagacagcactgccaggt

SEQ ID NO: 190150 - DNA, 25 bp, probe
ccgtgggacatcatgacatcatcac

SEQ ID NO: 190151 - DNA, 25 bp, probe
ccgtgggacatcatgacatcatcac

SEQ ID NO: 190152 - DNA, 25 bp, probe
ccgtgatggaaaccacttcctctac

SEQ ID NO: 190153 - DNA, 25 bp, probe
cctgattctggagaacttccttcac

SEQ ID NO: 190154 - DNA, 25 bp, probe
ccttgtttgaccgagtctacactca

SEQ ID NO: 190155 - DNA, 25 bp, probe
cctctggggaccaagttcagttctt

SEQ ID NO: 190156 - DNA, 25 bp, probe
tccctgtaggaagagtgggttccaa

SEQ ID NO: 190157 - DNA, 25 bp, probe
ccgtggaggtagtggggtcttcagg

SEQ ID NO: 190158 - DNA, 25 bp, probe
ccgtggaggagacctgcgggtttgc

SEQ ID NO: 190159 - DNA, 25 bp, probe
cctgggaggagaccctggttttcat

SEQ ID NO: 190160 - DNA, 25 bp, probe
cctgggaggagaccctggttttcat

SEQ ID NO: 190161 - DNA, 25 bp, probe
cctgatggggagggtctcggtggta

SEQ ID NO: 190162 - DNA, 25 bp, probe
cctgatggggagggtctcggtggta

SEQ ID NO: 190163 - DNA, 25 bp, probe
ccgtggagggagctttctctgtgta

SEQ ID NO: 190164 - DNA, 25 bp, probe
ccgtggaagaatttcgtgccatgtg

SEQ ID NO: 190165 - DNA, 25 bp, probe
ccgtggagaattggccagagcctgt

SEQ ID NO: 190166 - DNA, 25 bp, probe
ccgtatgctggatgcccaaccagat

SEQ ID NO: 190167 - DNA, 25 bp, probe
ccggagctgcgaggccaaacagcag

SEQ ID NO: 190168 - DNA, 25 bp, probe
ccggagctgcgaggccaaacagcag

SEQ ID NO: 190169 - DNA, 25 bp, probe
ccgtgatctgagggcagcaaactgc

SEQ ID NO: 190170 - DNA, 25 bp, probe
ccgttgatgatgggcgaattctagg

SEQ ID NO: 190171 - DNA, 25 bp, probe
cctgttgtgaggttccttccagggg

SEQ ID NO: 190172 - DNA, 25 bp, probe
cctgttgtaggcttgttctgttgag

SEQ ID NO: 190173 - DNA, 25 bp, probe
ccgttgttgtccattgcagtgctgg

SEQ ID NO: 190174 - DNA, 25 bp, probe
ccgtgtgcctgtaactctgaggggg

SEQ ID NO: 190175 - DNA, 25 bp, probe
ccgtgtcctcgcacgatacgaagtg

SEQ ID NO: 190176 - DNA, 25 bp, probe
ccgtgtggccgcagcggcgagaact

SEQ ID NO: 190177 - DNA, 25 bp, probe
cctggataccgcagctaggaataat

SEQ ID NO: 190178 - DNA, 25 bp, probe
ccggctgacccaaggaaaaatgaca

SEQ ID NO: 190179 - DNA, 25 bp, probe
ccggaggctcacagggaacaagaca

SEQ ID NO: 190180 - DNA, 25 bp, probe
ccggcatggtccagacgaaggagca

SEQ ID NO: 190181 - DNA, 25 bp, probe
ccggtcgcctctggcagcgaaaaga

SEQ ID NO: 190182 - DNA, 25 bp, probe
ccggtgcccagcatactcaagaaga

SEQ ID NO: 190183 - DNA, 25 bp, probe
ccgggcccatgatggccatagattt

SEQ ID NO: 190184 - DNA, 25 bp, probe
cctgggcctggatgagttcaacttc

SEQ ID NO: 190185 - DNA, 25 bp, probe
ccgtggctctgtgcagtgttacgtt

SEQ ID NO: 190186 - DNA, 25 bp, probe
ccgtgccatcttgcaaactacactt

SEQ ID NO: 190187 - DNA, 25 bp, probe
ccgtcctttccaatacgattttctg

SEQ ID NO: 190188 - DNA, 25 bp, probe
ccgtccttgtcataactttgtgttg

SEQ ID NO: 190189 - DNA, 25 bp, probe
cctgtccaatactgggttcagctgt

SEQ ID NO: 190190 - DNA, 25 bp, probe
cctgttggaccacgagggtcactgt

SEQ ID NO: 190191 - DNA, 25 bp, probe
ccatgtctctgacatcgttggtccg

SEQ ID NO: 190192 - DNA, 25 bp, probe
cctggtgctacgtctttaaggcggg

SEQ ID NO: 190193 - DNA, 25 bp, probe
ccggctcaaggagttcctgggcgag

SEQ ID NO: 190194 - DNA, 25 bp, probe
ccggtgctgcaggagtgtcctgccc

SEQ ID NO: 190195 - DNA, 25 bp, probe
ccggagctgatggatgtgagcctgg

SEQ ID NO: 190196 - DNA, 25 bp, probe
ccggcatgagatgctgaccctggag

SEQ ID NO: 190197 - DNA, 25 bp, probe
ccggctgcagtcatgaagccagatg

SEQ ID NO: 190198 - DNA, 25 bp, probe
ccgggcagtcggagacaggatcact

SEQ ID NO: 190199 - DNA, 25 bp, probe
ccggtcagttcgggatgtggcacag

SEQ ID NO: 190200 - DNA, 25 bp, probe
ccggctactctcgaaattggacagc

SEQ ID NO: 190201 - DNA, 25 bp, probe
ccgggacttcgactttgtgtcagag

SEQ ID NO: 190202 - DNA, 25 bp, probe
gccgtgaactacgacttcgacgagg

SEQ ID NO: 190203 - DNA, 25 bp, probe
cctgtacaccaaacttccaggagga

SEQ ID NO: 190204 - DNA, 25 bp, probe
cctgaaccaaaagctccagggctgg

SEQ ID NO: 190205 - DNA, 25 bp, probe
cctcctccaaaactgcccagtggag

SEQ ID NO: 190206 - DNA, 25 bp, probe
ccaggcccgtaagttcgcaggcagg

SEQ ID NO: 190207 - DNA, 25 bp, probe
ccggcagcacagctggttccggaag

SEQ ID NO: 190208 - DNA, 25 bp, probe
ccgtgccctgggcttgcagggtatc

SEQ ID NO: 190209 - DNA, 25 bp, probe
ccgtgccctgggcttgcagggtatc

SEQ ID NO: 190210 - DNA, 25 bp, probe
ccggctactcgggtaggctgaggca

SEQ ID NO: 190211 - DNA, 25 bp, probe
ccgggcccgttgaggatgaggccgc

SEQ ID NO: 190212 - DNA, 25 bp, probe
ccggctgcccgtcaaatggatggct

SEQ ID NO: 190213 - DNA, 25 bp, probe
ccgggacaggatgcaaaagaggctc

SEQ ID NO: 190214 - DNA, 25 bp, probe
ccgtcggggagccacaaggaggcct

SEQ ID NO: 190215 - DNA, 25 bp, probe
ccgtcggcatggagaacaggagggt

SEQ ID NO: 190216 - DNA, 25 bp, probe
ccttcaggataagaacttccaggtt

SEQ ID NO: 190217 - DNA, 25 bp, probe
cctgtccttcaagaacctccaggtc

SEQ ID NO: 190218 - DNA, 25 bp, probe
cctgtccttcaagaacctccaggtc

SEQ ID NO: 190219 - DNA, 25 bp, probe
cctggcgtcttaggaatactccacg

SEQ ID NO: 190220 - DNA, 25 bp, probe
cctggtgtctataccaaagtctgcc

SEQ ID NO: 190221 - DNA, 25 bp, probe
cctgtttccaatgccaattcatctc

SEQ ID NO: 190222 - DNA, 25 bp, probe
ccgtgtggacacgccacattatccc

SEQ ID NO: 190223 - DNA, 25 bp, probe
ccgggctgccacgaccaagtgacag

SEQ ID NO: 190224 - DNA, 25 bp, probe
ccaggcgtctacaccaaagtcagtg

SEQ ID NO: 190225 - DNA, 25 bp, probe
ccggcttctactgtacaggacactg

SEQ ID NO: 190226 - DNA, 25 bp, probe
ccggcttctactgtacaggacactg

SEQ ID NO: 190227 - DNA, 25 bp, probe
cctggtgttgaagatacggaatggt

SEQ ID NO: 190228 - DNA, 25 bp, probe
cctggatttgcatacattcttcaag

SEQ ID NO: 190229 - DNA, 25 bp, probe
cctggtttgggaacttcatcagcct

SEQ ID NO: 190230 - DNA, 25 bp, probe
cctggcctttgtgaattcatgcact

SEQ ID NO: 190231 - DNA, 25 bp, probe
cctggcctttgtgaattcatgcact

SEQ ID NO: 190232 - DNA, 25 bp, probe
cctggcttttggcaatttgtttctc

SEQ ID NO: 190233 - DNA, 25 bp, probe
ccgggttcatgtgagttagttttca

SEQ ID NO: 190234 - DNA, 25 bp, probe
ccggctttatgtcagtatgaatgat

SEQ ID NO: 190235 - DNA, 25 bp, probe
ccatggttgttgttagggatagtac

SEQ ID NO: 190236 - DNA, 25 bp, probe
ccgtgctgtgttgcggggaagctgt

SEQ ID NO: 190237 - DNA, 25 bp, probe
cctgtggaggacgaggcggaacgct

SEQ ID NO: 190238 - DNA, 25 bp, probe
cctggtggttcatgcctgtaatccc

SEQ ID NO: 190239 - DNA, 25 bp, probe
ccgtggagttgtccatcgtgacatc

SEQ ID NO: 190240 - DNA, 25 bp, probe
ccgtgtatggcaccctgccatacca

SEQ ID NO: 190241 - DNA, 25 bp, probe
cctgttattccacagcctcaaaatt

SEQ ID NO: 190242 - DNA, 25 bp, probe
ccgtccattcagaaagcttcaaatt

SEQ ID NO: 190243 - DNA, 25 bp, probe
ccggccaacgacacatttgacattg

SEQ ID NO: 190244 - DNA, 25 bp, probe
cctggccaacagaatccttcttgat

SEQ ID NO: 190245 - DNA, 25 bp, probe
cctgggctacatgagactgtcttaa

SEQ ID NO: 190246 - DNA, 25 bp, probe
cctggctgcccggaaggatttccag

SEQ ID NO: 190247 - DNA, 25 bp, probe
cctggttgaagggatggacttccac

SEQ ID NO: 190248 - DNA, 25 bp, probe
ccggttgctggttgtggactatgcc

SEQ ID NO: 190249 - DNA, 25 bp, probe
ccggggtgcatttgttactcatcgg

SEQ ID NO: 190250 - DNA, 25 bp, probe
ccggggtgcagtcttacatgattgt

SEQ ID NO: 190251 - DNA, 25 bp, probe
ccggggtgcagtcttacatgattgt

SEQ ID NO: 190252 - DNA, 25 bp, probe
cctggaggttgtcttcaagctgtgg

SEQ ID NO: 190253 - DNA, 25 bp, probe
cctgtgggttgtgctaatttctgtc

SEQ ID NO: 190254 - DNA, 25 bp, probe
cctgatgggttggggcagttacctg

SEQ ID NO: 190255 - DNA, 25 bp, probe
ccgtccttgttgaagcagttaccta

SEQ ID NO: 190256 - DNA, 25 bp, probe
ccgtcttttcagaagtgctgtctct

SEQ ID NO: 190257 - DNA, 25 bp, probe
cctgtcccagtccaaattgtctgtc

SEQ ID NO: 190258 - DNA, 25 bp, probe
cctgtcccagtccaaattgtctgtc

SEQ ID NO: 190259 - DNA, 25 bp, probe
cctggccaaggacacttcatcgtga

SEQ ID NO: 190260 - DNA, 25 bp, probe
cctggccaaggacacttcatcgtga

SEQ ID NO: 190261 - DNA, 25 bp, probe
cctggccaaaatcaacatcgtctac

SEQ ID NO: 190262 - DNA, 25 bp, probe
cctggctccagttggaacactttcc

SEQ ID NO: 190263 - DNA, 25 bp, probe
cctggtccagttggagaccgtcaac

SEQ ID NO: 190264 - DNA, 25 bp, probe
cctgtcccactttgagtacgtcaag

SEQ ID NO: 190265 - DNA, 25 bp, probe
cctgtcccactttgagtacgtcaag

SEQ ID NO: 190266 - DNA, 25 bp, probe
cctctccaaccctagtgaggtggag

SEQ ID NO: 190267 - DNA, 25 bp, probe
ccggcgacgcctcagtgagagggag

SEQ ID NO: 190268 - DNA, 25 bp, probe
ccggcctcgtctaggtggcagaggg

SEQ ID NO: 190269 - DNA, 25 bp, probe
ccgtggcccctaggtggatgaggcc

SEQ ID NO: 190270 - DNA, 25 bp, probe
ccggctgcacccagagggagcagtg

SEQ ID NO: 190271 - DNA, 25 bp, probe
cctggcttccctcgagtggagccag

SEQ ID NO: 190272 - DNA, 25 bp, probe
cctggcggacttcgtggagaacgtg

SEQ ID NO: 190273 - DNA, 25 bp, probe
cctggcagtagagcggggcaaagtg

SEQ ID NO: 190274 - DNA, 25 bp, probe
cctggccttgggtgggattgagttt

SEQ ID NO: 190275 - DNA, 25 bp, probe
cctgtcctggggtccagggtcaggc

SEQ ID NO: 190276 - DNA, 25 bp, probe
cctgtttgcgggtggagttagagaa

SEQ ID NO: 190277 - DNA, 25 bp, probe
cctgtttgcgggtggagttagagaa

SEQ ID NO: 190278 - DNA, 25 bp, probe
ccgtgttggtggtgaatgactattg

SEQ ID NO: 190279 - DNA, 25 bp, probe
ccgtgtctgtgtcgggaatttgcat

SEQ ID NO: 190280 - DNA, 25 bp, probe
cctgtttgtcttcccaaggtgatct

SEQ ID NO: 190281 - DNA, 25 bp, probe
cctggttgtctgaacccaggcagct

SEQ ID NO: 190282 - DNA, 25 bp, probe
cctgggtcatcgaccccattgatgg

SEQ ID NO: 190283 - DNA, 25 bp, probe
ccggtggacagcggaacatatgagg

SEQ ID NO: 190284 - DNA, 25 bp, probe
cctgttgctgccaggagacttgggg

SEQ ID NO: 190285 - DNA, 25 bp, probe
cctgagagcacctggaatttgttgg

SEQ ID NO: 190286 - DNA, 25 bp, probe
cctgtccctagtaatcattcgttgg

SEQ ID NO: 190287 - DNA, 25 bp, probe
cctggccctaggtgctacagagtgt

SEQ ID NO: 190288 - DNA, 25 bp, probe
cctgtaccgaaatgctgtccagcag

SEQ ID NO: 190289 - DNA, 25 bp, probe
ccggagctggcaaaacgctcctggt

SEQ ID NO: 190290 - DNA, 25 bp, probe
ccggagtagctcaaggtctcctgtt

SEQ ID NO: 190291 - DNA, 25 bp, probe
ccggagatgagccgaggcttgctcg

SEQ ID NO: 190292 - DNA, 25 bp, probe
ccggtagatgcacaccttgtgccac

SEQ ID NO: 190293 - DNA, 25 bp, probe
cctggtgaacagcaacttggtctgc

SEQ ID NO: 190294 - DNA, 25 bp, probe
ccgggaagcgactacattgaccagc

SEQ ID NO: 190295 - DNA, 25 bp, probe
ccggtgggaggtgcatggcatcggc

SEQ ID NO: 190296 - DNA, 25 bp, probe
ccgggacgtggtgcttcatcagcac

SEQ ID NO: 190297 - DNA, 25 bp, probe
cctggtacaagggaatgtcacaagc

SEQ ID NO: 190298 - DNA, 25 bp, probe
ccgggaagagggtatgatcgagagg

SEQ ID NO: 190299 - DNA, 25 bp, probe
ccggctgaaagcggagctgtctgac

SEQ ID NO: 190300 - DNA, 25 bp, probe
cctggagcctacagagcaggcaggc

SEQ ID NO: 190301 - DNA, 25 bp, probe
cctggaccttgtggatcctgaggca

SEQ ID NO: 190302 - DNA, 25 bp, probe
ccggctccatcgagacctatgagca

SEQ ID NO: 190303 - DNA, 25 bp, probe
ccggctccatcgagacctatgagca

SEQ ID NO: 190304 - DNA, 25 bp, probe
ccggctcaacggggccaagatgaag

SEQ ID NO: 190305 - DNA, 25 bp, probe
cctggcaccaagcggaaaataaact

SEQ ID NO: 190306 - DNA, 25 bp, probe
cctggcaccgaagggagctctgaag

SEQ ID NO: 190307 - DNA, 25 bp, probe
cctggttctggaggaaccgcaagcc

SEQ ID NO: 190308 - DNA, 25 bp, probe
ccggtgctctcagaaacctcagagc

SEQ ID NO: 190309 - DNA, 25 bp, probe
ccgggctcactgtttagtgctgaga

SEQ ID NO: 190310 - DNA, 25 bp, probe
ccgggctcactgtttagtgctgaga

SEQ ID NO: 190311 - DNA, 25 bp, probe
cctgggtccgccttaatctggaagg

SEQ ID NO: 190312 - DNA, 25 bp, probe
ccgggctgacctcaaagctgtccgg

SEQ ID NO: 190313 - DNA, 25 bp, probe
ccgggctgacctcaaagctgtccgg

SEQ ID NO: 190314 - DNA, 25 bp, probe
cctggggacgctggagaagttcaag

SEQ ID NO: 190315 - DNA, 25 bp, probe
cctggggtctgctagcaaggggaca

SEQ ID NO: 190316 - DNA, 25 bp, probe
cctggggtctgctagcaaggggaca

SEQ ID NO: 190317 - DNA, 25 bp, probe
ccggggcatcaaaggtgtggtgaca

SEQ ID NO: 190318 - DNA, 25 bp, probe
ccgggccatcgccattgctgcgggt

SEQ ID NO: 190319 - DNA, 25 bp, probe
ccgggcttcaggacactggaggggt

SEQ ID NO: 190320 - DNA, 25 bp, probe
ccagggattggaaacggatgacggg

SEQ ID NO: 190321 - DNA, 25 bp, probe
ccttggacggaatgggatgggggct

SEQ ID NO: 190322 - DNA, 25 bp, probe
cctgtggcaccgtgagggttgggac

SEQ ID NO: 190323 - DNA, 25 bp, probe
cctgttccccttgaaactgtggaca

SEQ ID NO: 190324 - DNA, 25 bp, probe
cctgttccccttgaaactgtggaca

SEQ ID NO: 190325 - DNA, 25 bp, probe
ccttcccccgtgtgaacacgagtga

SEQ ID NO: 190326 - DNA, 25 bp, probe
cctgttccccggggagaatgaggtg

SEQ ID NO: 190327 - DNA, 25 bp, probe
ccgtgtcggagccgcgcgagatatg

SEQ ID NO: 190328 - DNA, 25 bp, probe
cctggtagctgaggggcggaagatg

SEQ ID NO: 190329 - DNA, 25 bp, probe
cctggctgagcaactgggctgtagg

SEQ ID NO: 190330 - DNA, 25 bp, probe
cctggatacagtagaggtgtgcccc

SEQ ID NO: 190331 - DNA, 25 bp, probe
ccggatcacggcaatgcggctgcac

SEQ ID NO: 190332 - DNA, 25 bp, probe
ccgtgacacaggttctggccaatga

SEQ ID NO: 190333 - DNA, 25 bp, probe
ccggctccagagttgcaagtgacag

SEQ ID NO: 190334 - DNA, 25 bp, probe
cctggtcaatgctctaagtgaagat

SEQ ID NO: 190335 - DNA, 25 bp, probe
cctggccaacatactacccaaatct

SEQ ID NO: 190336 - DNA, 25 bp, probe
cctgacctcgatagctaggccaagt

SEQ ID NO: 190337 - DNA, 25 bp, probe
cctgacctcgatagctaggccaagt

SEQ ID NO: 190338 - DNA, 25 bp, probe
cctgtctgtcgtactcagcttaagt

SEQ ID NO: 190339 - DNA, 25 bp, probe
cctgtctgtcgtactcagcttaagt

SEQ ID NO: 190340 - DNA, 25 bp, probe
cctgatcagctggttattgctaaca

SEQ ID NO: 190341 - DNA, 25 bp, probe
cctgatgcaggaacatatgggaacc

SEQ ID NO: 190342 - DNA, 25 bp, probe
cctggcagaatgagatgatcgaatc

SEQ ID NO: 190343 - DNA, 25 bp, probe
cctgtaacatgccatagtgcgcctg

SEQ ID NO: 190344 - DNA, 25 bp, probe
ccgtgatcacccaagtgctgaataa

SEQ ID NO: 190345 - DNA, 25 bp, probe
ccgtgatcacccaagtgctgaataa

SEQ ID NO: 190346 - DNA, 25 bp, probe
cctggaaccagccaggccaggcaac

SEQ ID NO: 190347 - DNA, 25 bp, probe
cctggccaaggtcatccatgacaac

SEQ ID NO: 190348 - DNA, 25 bp, probe
cctggactaggactcccataaatca

SEQ ID NO: 190349 - DNA, 25 bp, probe
cctggaccaacgaccctaaagagag

SEQ ID NO: 190350 - DNA, 25 bp, probe
cctggaatacaaacacctaaaaatg

SEQ ID NO: 190351 - DNA, 25 bp, probe
cctgaaagattaagccctgaaggaa

SEQ ID NO: 190352 - DNA, 25 bp, probe
cctgaaaaccaagtcctgtagtgca

SEQ ID NO: 190353 - DNA, 25 bp, probe
cctggaaacgattttctgtatgatg

SEQ ID NO: 190354 - DNA, 25 bp, probe
ccgggaggctgacttgttgatgaat

SEQ ID NO: 190355 - DNA, 25 bp, probe
ccggggagacagatctctcaaaggc

SEQ ID NO: 190356 - DNA, 25 bp, probe
ccggtgatgctgttgatttctcaaa

SEQ ID NO: 190357 - DNA, 25 bp, probe
ccactgcaaggttgttttaaagtca

SEQ ID NO: 190358 - DNA, 25 bp, probe
ccttcgaggaagccatacccaagtc

SEQ ID NO: 190359 - DNA, 25 bp, probe
cctgatggggaacctaccatccgtg

SEQ ID NO: 190360 - DNA, 25 bp, probe
cctgggatgaaatctccccacgtgc

SEQ ID NO: 190361 - DNA, 25 bp, probe
cctggtggattatccccatcaggcc

SEQ ID NO: 190362 - DNA, 25 bp, probe
cctgaaagaatagacccaagcgcat

SEQ ID NO: 190363 - DNA, 25 bp, probe
cctaaataatgtgctctccggcttc

SEQ ID NO: 190364 - DNA, 25 bp, probe
cctgaaaaagctgtcctccattgta

SEQ ID NO: 190365 - DNA, 25 bp, probe
gcgtcaacaaacggggctcaaggaa

SEQ ID NO: 190366 - DNA, 25 bp, probe
gcgtgaaccatgagggccctcagga

SEQ ID NO: 190367 - DNA, 25 bp, probe
gcgggatcaatcagggactcccaga

SEQ ID NO: 190368 - DNA, 25 bp, probe
ccggacaacattgggatgctcaaaa

SEQ ID NO: 190369 - DNA, 25 bp, probe
ccgtgttatcttcgtggctcaaagg

SEQ ID NO: 190370 - DNA, 25 bp, probe
ccggtgtatgcagtggtgatgccta

SEQ ID NO: 190371 - DNA, 25 bp, probe
ccgtgtttgcatgctgtatgttaca

SEQ ID NO: 190372 - DNA, 25 bp, probe
cctgggttcatccaggttgttccca

SEQ ID NO: 190373 - DNA, 25 bp, probe
cctcggtatttattgtctgtcccca

SEQ ID NO: 190374 - DNA, 25 bp, probe
cctcggtatttattgtctgtcccca

SEQ ID NO: 190375 - DNA, 25 bp, probe
cctcgcgaataaaaggccctccatc

SEQ ID NO: 190376 - DNA, 25 bp, probe
cctgctgagatcataccaggccctt

SEQ ID NO: 190377 - DNA, 25 bp, probe
cctgggcagatgatgccagcaccct

SEQ ID NO: 190378 - DNA, 25 bp, probe
cctggctggatgagccgccactggc

SEQ ID NO: 190379 - DNA, 25 bp, probe
ccgtgtgtatgaacggcacagaggc

SEQ ID NO: 190380 - DNA, 25 bp, probe
ccgtggatgatttctggcagatggt

SEQ ID NO: 190381 - DNA, 25 bp, probe
cctgcgtatatttgggatttgcatt

SEQ ID NO: 190382 - DNA, 25 bp, probe
cctggtttacgagatgtggctcttc

SEQ ID NO: 190383 - DNA, 25 bp, probe
cctgggttacgaggctgcagacttc

SEQ ID NO: 190384 - DNA, 25 bp, probe
cctgggttatgctgaggagccctgc

SEQ ID NO: 190385 - DNA, 25 bp, probe
cctggcgcttaccgaggaggagctg

SEQ ID NO: 190386 - DNA, 25 bp, probe
ccggcatgtctatttggaaggactg

SEQ ID NO: 190387 - DNA, 25 bp, probe
cctgcagcatgagcacattgtcaag

SEQ ID NO: 190388 - DNA, 25 bp, probe
cctggagagcaagtgctgcatccac

SEQ ID NO: 190389 - DNA, 25 bp, probe
cctggcagcaggtgtgcagccgtag

SEQ ID NO: 190390 - DNA, 25 bp, probe
cctgggcattgacgtgcacgacgtg

SEQ ID NO: 190391 - DNA, 25 bp, probe
ccgggcgatgcttgtgcctgagctg

SEQ ID NO: 190392 - DNA, 25 bp, probe
cctggtgcgcattgagatccatggg

SEQ ID NO: 190393 - DNA, 25 bp, probe
cctggaggctgccaattatggctct

SEQ ID NO: 190394 - DNA, 25 bp, probe
cctggggattacatttgccgcaaag

SEQ ID NO: 190395 - DNA, 25 bp, probe
cctggggattacatttgccgcaaag

SEQ ID NO: 190396 - DNA, 25 bp, probe
cctggggtatcctatcttgtacaaa

SEQ ID NO: 190397 - DNA, 25 bp, probe
cctggtgttgactgactttaacaag

SEQ ID NO: 190398 - DNA, 25 bp, probe
cctggtttgctcagtcttctgaact

SEQ ID NO: 190399 - DNA, 25 bp, probe
ccgggatggtcttgatctcctgacc

SEQ ID NO: 190400 - DNA, 25 bp, probe
ccgtggggatcactgaaccagacac

SEQ ID NO: 190401 - DNA, 25 bp, probe
ccgtgggtcacaggtaaagcagcca

SEQ ID NO: 190402 - DNA, 25 bp, probe
ccggcagaggacagtaaaagcaaag

SEQ ID NO: 190403 - DNA, 25 bp, probe
ccggtctgcagcacggaaaagcaca

SEQ ID NO: 190404 - DNA, 25 bp, probe
ccgggcgcagtagggatgataagga

SEQ ID NO: 190405 - DNA, 25 bp, probe
ccggtgctcagactgtggattgaac

SEQ ID NO: 190406 - DNA, 25 bp, probe
ccggcgctaggatttgcactaatgt

SEQ ID NO: 190407 - DNA, 25 bp, probe
cctggctgcaacattgtgaccatag

SEQ ID NO: 190408 - DNA, 25 bp, probe
ccggctaattgattggagcgctctg

SEQ ID NO: 190409 - DNA, 25 bp, probe
cctggagacattgtggagctcacga

SEQ ID NO: 190410 - DNA, 25 bp, probe
cctggatgacatctatgagagtggg

SEQ ID NO: 190411 - DNA, 25 bp, probe
cctggcaccgctatgagcatgggcg

SEQ ID NO: 190412 - DNA, 25 bp, probe
cctggatgcggtggtgcattgtggg

SEQ ID NO: 190413 - DNA, 25 bp, probe
cctggatcagttgtctcagctgatt

SEQ ID NO: 190414 - DNA, 25 bp, probe
cctggacttttatacagcttttgca

SEQ ID NO: 190415 - DNA, 25 bp, probe
cctggactttctcagaaggtgtttg

SEQ ID NO: 190416 - DNA, 25 bp, probe
cctgagacaaaacctgaggggttgg

SEQ ID NO: 190417 - DNA, 25 bp, probe
cctgtggcaaaaccagaggccctgg

SEQ ID NO: 190418 - DNA, 25 bp, probe
cctgtggcaaaaccagaggccctgg

SEQ ID NO: 190419 - DNA, 25 bp, probe
cctgttgcaaagtattgtggccgag

SEQ ID NO: 190420 - DNA, 25 bp, probe
cctggttcaaggatgtcatggcgaa

SEQ ID NO: 190421 - DNA, 25 bp, probe
cctggttcaaggatgtcatggcgaa

SEQ ID NO: 190422 - DNA, 25 bp, probe
cctggttcaaggatgtcatggcgaa

SEQ ID NO: 190423 - DNA, 25 bp, probe
cctggctgctagagttgtggtggca

SEQ ID NO: 190424 - DNA, 25 bp, probe
cctggctgctagagttgtggtggca

SEQ ID NO: 190425 - DNA, 25 bp, probe
cctgtgctctgttgtgttggaggga

SEQ ID NO: 190426 - DNA, 25 bp, probe
ccggctctgggtcacagaggagcat

SEQ ID NO: 190427 - DNA, 25 bp, probe
cctgttctttgtcacaaccagcaac

SEQ ID NO: 190428 - DNA, 25 bp, probe
cctgttctttgtcacaaccagcaac

SEQ ID NO: 190429 - DNA, 25 bp, probe
cctgttttttgtctatgtcccagct

SEQ ID NO: 190430 - DNA, 25 bp, probe
cctgctttgttggggtatggttggc

SEQ ID NO: 190431 - DNA, 25 bp, probe
cctggttttgtttggattttggcat

SEQ ID NO: 190432 - DNA, 25 bp, probe
cctggatgttcggggtgacactgtg

SEQ ID NO: 190433 - DNA, 25 bp, probe
cctggtgcagtggctacaggaactg

SEQ ID NO: 190434 - DNA, 25 bp, probe
cctgggcagcccagagagacctgcc

SEQ ID NO: 190435 - DNA, 25 bp, probe
ccgggcacaggcaaggagacagccc

SEQ ID NO: 190436 - DNA, 25 bp, probe
cctggagagcgtgagctatgacagt

SEQ ID NO: 190437 - DNA, 25 bp, probe
cctggcagaggtcaagcattcgttc

SEQ ID NO: 190438 - DNA, 25 bp, probe
ccaggagaatgtgcaactttattcc

SEQ ID NO: 190439 - DNA, 25 bp, probe
cctggaaagtatcagctctttgcct

SEQ ID NO: 190440 - DNA, 25 bp, probe
cctggataatgcttccgccttccaa

SEQ ID NO: 190441 - DNA, 25 bp, probe
cctgggactgtttcagacttggaaa

SEQ ID NO: 190442 - DNA, 25 bp, probe
cctctaattatttaagattggaaca

SEQ ID NO: 190443 - DNA, 25 bp, probe
tcctttttgttatatgggatagaaa

SEQ ID NO: 190444 - DNA, 25 bp, probe
cctttttgttatatgggatagaaat

SEQ ID NO: 190445 - DNA, 25 bp, probe
cctgtctgactgatttaccctaaaa

SEQ ID NO: 190446 - DNA, 25 bp, probe
cctgtcgtgctgaaatggtccgtca

SEQ ID NO: 190447 - DNA, 25 bp, probe
cctgaaagctgggagcgtgggctca

SEQ ID NO: 190448 - DNA, 25 bp, probe
ccggagatcatgcaagctggtggct

SEQ ID NO: 190449 - DNA, 25 bp, probe
cctggcagaatgctagctctgagcc

SEQ ID NO: 190450 - DNA, 25 bp, probe
cctggcagaatgctagctctgagcc

SEQ ID NO: 190451 - DNA, 25 bp, probe
cctggctgaaggagcatctgtccca

SEQ ID NO: 190452 - DNA, 25 bp, probe
cctgtgtcaggacagtatccacccc

SEQ ID NO: 190453 - DNA, 25 bp, probe
ccggaagggcatcgtgtgcaacctc

SEQ ID NO: 190454 - DNA, 25 bp, probe
cctggaccaggcaggtcacatccgg

SEQ ID NO: 190455 - DNA, 25 bp, probe
ccggcactacgccaagatcagcgac

SEQ ID NO: 190456 - DNA, 25 bp, probe
ccggcactacgccaagatcagcgac

SEQ ID NO: 190457 - DNA, 25 bp, probe
ccgggtagcgacaagcagcagcagc

SEQ ID NO: 190458 - DNA, 25 bp, probe
ccgggatcaggccaagaggatcaat

SEQ ID NO: 190459 - DNA, 25 bp, probe
ccagggagggccagggccaatttct

SEQ ID NO: 190460 - DNA, 25 bp, probe
ccggcgatggggaggagccggctcc

SEQ ID NO: 190461 - DNA, 25 bp, probe
ccgggagggacaagtcgcagcggct

SEQ ID NO: 190462 - DNA, 25 bp, probe
ccgggaggtacagctggcagaggga

SEQ ID NO: 190463 - DNA, 25 bp, probe
cctggcgagggcgtttggagaggag

SEQ ID NO: 190464 - DNA, 25 bp, probe
cctggcagggcccaaaggcaggcga

SEQ ID NO: 190465 - DNA, 25 bp, probe
cctggagcggcggaagtcgcggtat

SEQ ID NO: 190466 - DNA, 25 bp, probe
cctggaagggcaggtctggcggctc

SEQ ID NO: 190467 - DNA, 25 bp, probe
cctggaagggcaggtctggcggctc

SEQ ID NO: 190468 - DNA, 25 bp, probe
cctgcaaggtggctgacttcggcct

SEQ ID NO: 190469 - DNA, 25 bp, probe
cctgcaaggtggctgacttcggcct

SEQ ID NO: 190470 - DNA, 25 bp, probe
cctggaggtagctgactccagccct

SEQ ID NO: 190471 - DNA, 25 bp, probe
ccggcaggagactgactacgtgctc

SEQ ID NO: 190472 - DNA, 25 bp, probe
ccggcggacagctgcttacatgttc

SEQ ID NO: 190473 - DNA, 25 bp, probe
cctggggctagccagttactggtca

SEQ ID NO: 190474 - DNA, 25 bp, probe
cctgtggacttcaagaaatgtggac

SEQ ID NO: 190475 - DNA, 25 bp, probe
cctgggaaacttcactgagagcaca

SEQ ID NO: 190476 - DNA, 25 bp, probe
cctgagaatcaacccaactgaagca

SEQ ID NO: 190477 - DNA, 25 bp, probe
cctggtatggagtccagtctaagca

SEQ ID NO: 190478 - DNA, 25 bp, probe
cctggacgaagtgcaccataagcag

SEQ ID NO: 190479 - DNA, 25 bp, probe
cctggacagaaagcgccataacagc

SEQ ID NO: 190480 - DNA, 25 bp, probe
cctgggaacagagccatccaaagca

SEQ ID NO: 190481 - DNA, 25 bp, probe
cctgtggaatcagacctccaggaga

SEQ ID NO: 190482 - DNA, 25 bp, probe
cctgggaatcaccacagtgctgacc

SEQ ID NO: 190483 - DNA, 25 bp, probe
cctggaattctacctggagaccaga

SEQ ID NO: 190484 - DNA, 25 bp, probe
cctggcaagtcttctttgacaaccc

SEQ ID NO: 190485 - DNA, 25 bp, probe
cctgcacaagtaccttaagcaccgc

SEQ ID NO: 190486 - DNA, 25 bp, probe
cctgcacaagtaccttaagcaccgc

SEQ ID NO: 190487 - DNA, 25 bp, probe
cctgcaaatgagagctttggccccc

SEQ ID NO: 190488 - DNA, 25 bp, probe
cctggacatgaatgtattgtacact

SEQ ID NO: 190489 - DNA, 25 bp, probe
ccggcggcagatcctgatgttacgc

SEQ ID NO: 190490 - DNA, 25 bp, probe
ccggctgcgcaaatggatgttcatc

SEQ ID NO: 190491 - DNA, 25 bp, probe
cctgttccaactggcatttcttgtt

SEQ ID NO: 190492 - DNA, 25 bp, probe
cctgattctctctccatttggaatt

SEQ ID NO: 190493 - DNA, 25 bp, probe
cctgtcacctccctattattaaatg

SEQ ID NO: 190494 - DNA, 25 bp, probe
cctgcataactttttgtctttaagt

SEQ ID NO: 190495 - DNA, 25 bp, probe
cctgtccatgctctttgtttttaaa

SEQ ID NO: 190496 - DNA, 25 bp, probe
cctgtccatgctctttgtttttaaa

SEQ ID NO: 190497 - DNA, 25 bp, probe
cctggccagatctttgtatgtctta

SEQ ID NO: 190498 - DNA, 25 bp, probe
ccggccagattgttgctattaagca

SEQ ID NO: 190499 - DNA, 25 bp, probe
ccggccagtcgaggctacaggatcc

SEQ ID NO: 190500 - DNA, 25 bp, probe
ccggcgcatgaacagcctcatggat

SEQ ID NO: 190501 - DNA, 25 bp, probe
ccggccagcagacaagatccagatg

SEQ ID NO: 190502 - DNA, 25 bp, probe
cctggcccagtatatgtctcagcat

SEQ ID NO: 190503 - DNA, 25 bp, probe
cctggccacagtaattggtcatgtg

SEQ ID NO: 190504 - DNA, 25 bp, probe
cctggccaaggtttgagatgcttcc

SEQ ID NO: 190505 - DNA, 25 bp, probe
cctggacatgcggtactgaggtgca

SEQ ID NO: 190506 - DNA, 25 bp, probe
cctgatgaatgggggagacctcaag

SEQ ID NO: 190507 - DNA, 25 bp, probe
cctgtattttgggagggctcaactc

SEQ ID NO: 190508 - DNA, 25 bp, probe
cctaatcatttgggagatggctcgt

SEQ ID NO: 190509 - DNA, 25 bp, probe
cctgtctgctttgtgaggcagtctt

SEQ ID NO: 190510 - DNA, 25 bp, probe
cctggtcttatcatggacaatttgg

SEQ ID NO: 190511 - DNA, 25 bp, probe
cctggtttcgccggacagagttggt

SEQ ID NO: 190512 - DNA, 25 bp, probe
cctggtttcgccggacagagttggt

SEQ ID NO: 190513 - DNA, 25 bp, probe
cctggtttcgccggacagagttggt

SEQ ID NO: 190514 - DNA, 25 bp, probe
cctggacaatccgggactgtggggg

SEQ ID NO: 190515 - DNA, 25 bp, probe
cctggacaatccggggatgtcctgc

SEQ ID NO: 190516 - DNA, 25 bp, probe
ccggtcactgcaaggggatgctgca

SEQ ID NO: 190517 - DNA, 25 bp, probe
ccggctcctggaggctggagctgat

SEQ ID NO: 190518 - DNA, 25 bp, probe
cctggccactgagcactggccgagg

SEQ ID NO: 190519 - DNA, 25 bp, probe
cctggacctcaccagggactgctgg

SEQ ID NO: 190520 - DNA, 25 bp, probe
cctggacccagcaggtgaggctcgg

SEQ ID NO: 190521 - DNA, 25 bp, probe
cctggacccagcaggtgaggctcgg

SEQ ID NO: 190522 - DNA, 25 bp, probe
cctggaccagactgctggagccaca

SEQ ID NO: 190523 - DNA, 25 bp, probe
cctggagcctgagactgggtgccag

SEQ ID NO: 190524 - DNA, 25 bp, probe
cctggggagaaagttgagtgtcagg

SEQ ID NO: 190525 - DNA, 25 bp, probe
cctgggcagcagaatatatatttta

SEQ ID NO: 190526 - DNA, 25 bp, probe
cctggcagcagggacaagtgttcca

SEQ ID NO: 190527 - DNA, 25 bp, probe
cctgctcacaggcaggcttttcctc

SEQ ID NO: 190528 - DNA, 25 bp, probe
cctgaacagcagcagttccagtccc

SEQ ID NO: 190529 - DNA, 25 bp, probe
cctgcaacaaggctctgaaacccga

SEQ ID NO: 190530 - DNA, 25 bp, probe
cctgaaaaacctgggcacctaagca

SEQ ID NO: 190531 - DNA, 25 bp, probe
cctacaagaacctgggacagaagcc

SEQ ID NO: 190532 - DNA, 25 bp, probe
cctagacgaacctgttgtggacaaa

SEQ ID NO: 190533 - DNA, 25 bp, probe
cctagacgaacctgttgtggacaaa

SEQ ID NO: 190534 - DNA, 25 bp, probe
cctaaggattcctgtagctgcctca

SEQ ID NO: 190535 - DNA, 25 bp, probe
cctaaggattcctgtagctgcctca

SEQ ID NO: 190536 - DNA, 25 bp, probe
cctggagtgtgtgaagtactgcgtg

SEQ ID NO: 190537 - DNA, 25 bp, probe
cctggaggtgggacctcctgcggaa

SEQ ID NO: 190538 - DNA, 25 bp, probe
cctggaggggtgaggatcctgagaa

SEQ ID NO: 190539 - DNA, 25 bp, probe
ccggacggcgagaagtgaaggcaga

SEQ ID NO: 190540 - DNA, 25 bp, probe
ccggagtgtggaagatgacaaggag

SEQ ID NO: 190541 - DNA, 25 bp, probe
cctggcaggaggagatgatcgagac

SEQ ID NO: 190542 - DNA, 25 bp, probe
ccggcagagggaggaaggcagagca

SEQ ID NO: 190543 - DNA, 25 bp, probe
cctggagggcaaggaaggcagcatg

SEQ ID NO: 190544 - DNA, 25 bp, probe
cctggcagaggatgcactcaacacg

SEQ ID NO: 190545 - DNA, 25 bp, probe
cctggtagtgcttattcaccactgc

SEQ ID NO: 190546 - DNA, 25 bp, probe
gctggaaatgctctttcctagccgg

SEQ ID NO: 190547 - DNA, 25 bp, probe
gcgccagaagccattaactacggga

SEQ ID NO: 190548 - DNA, 25 bp, probe
gcccagaagtctttagttaaggtca

SEQ ID NO: 190549 - DNA, 25 bp, probe
gcccagaagtctttagttaaggtca

SEQ ID NO: 190550 - DNA, 25 bp, probe
gctcgaaactgtttggtaaacgatc

SEQ ID NO: 190551 - DNA, 25 bp, probe
cctgcaaccggctggtaaagcaatt

SEQ ID NO: 190552 - DNA, 25 bp, probe
cctgacacggtgtggtccattggct

SEQ ID NO: 190553 - DNA, 25 bp, probe
cctgaccgcaggtggtgcttcaggg

SEQ ID NO: 190554 - DNA, 25 bp, probe
cctgtcctgaagctgtcatgttctg

SEQ ID NO: 190555 - DNA, 25 bp, probe
cctgtcctgaagctgtcatgttctg

SEQ ID NO: 190556 - DNA, 25 bp, probe
cctgtccagagatgctcataggtca

SEQ ID NO: 190557 - DNA, 25 bp, probe
cctggctctgattcttcattatgta

SEQ ID NO: 190558 - DNA, 25 bp, probe
cctgtctgagatgttctttctacca

SEQ ID NO: 190559 - DNA, 25 bp, probe
cctgattgcctggattccttatgca

SEQ ID NO: 190560 - DNA, 25 bp, probe
cctgattgcctggattccttatgca

SEQ ID NO: 190561 - DNA, 25 bp, probe
cctggccagctggatgttcttaaag

SEQ ID NO: 190562 - DNA, 25 bp, probe
cctggccactgctgtttggatgagc

SEQ ID NO: 190563 - DNA, 25 bp, probe
cctggctcggcaagtagatggcgat

SEQ ID NO: 190564 - DNA, 25 bp, probe
cctggctctgtcaggcagaacagca

SEQ ID NO: 190565 - DNA, 25 bp, probe
cctgatctatggactctggaacaag

SEQ ID NO: 190566 - DNA, 25 bp, probe
cctgtcttgctcctatggagtcaca

SEQ ID NO: 190567 - DNA, 25 bp, probe
cctggaccctgtagggtgccatttg

SEQ ID NO: 190568 - DNA, 25 bp, probe
cctggacccttgggtgtacatccta

SEQ ID NO: 190569 - DNA, 25 bp, probe
cctgaacttcttgtgggagatactc

SEQ ID NO: 190570 - DNA, 25 bp, probe
cctgcttactttctggaagtagtgg

SEQ ID NO: 190571 - DNA, 25 bp, probe
cctgtgttctcttggggggtcaggg

SEQ ID NO: 190572 - DNA, 25 bp, probe
cctgtgttctcttggggggtcaggg

SEQ ID NO: 190573 - DNA, 25 bp, probe
cctgtgcagtcccgtggagggtagg

SEQ ID NO: 190574 - DNA, 25 bp, probe
cctgtgcagtcccgtggagggtagg

SEQ ID NO: 190575 - DNA, 25 bp, probe
cctggatgctccccgaggtgggagc

SEQ ID NO: 190576 - DNA, 25 bp, probe
cctgggtcagtctggtgggaggacg

SEQ ID NO: 190577 - DNA, 25 bp, probe
cctggctacaagctgggggacgacc

SEQ ID NO: 190578 - DNA, 25 bp, probe
cctggtgaaggactgtggcgctgac

SEQ ID NO: 190579 - DNA, 25 bp, probe
cctggtgaaggactgtggcgctgac

SEQ ID NO: 190580 - DNA, 25 bp, probe
cctggtaaccaaggtcagcgacttt

SEQ ID NO: 190581 - DNA, 25 bp, probe
cctggtaactcaaggctaccaagtg

SEQ ID NO: 190582 - DNA, 25 bp, probe
cctggaaacatatgaccccagatgg

SEQ ID NO: 190583 - DNA, 25 bp, probe
ccggcacaatttcaactccatgcgg

SEQ ID NO: 190584 - DNA, 25 bp, probe
cctgcagaccctgtaaatcctggtt

SEQ ID NO: 190585 - DNA, 25 bp, probe
cctcagtgccctttctcaaatgggt

SEQ ID NO: 190586 - DNA, 25 bp, probe
cctccgtgcacttgtgtccgaggag

SEQ ID NO: 190587 - DNA, 25 bp, probe
ccacttgacttagttcttgggctgg

SEQ ID NO: 190588 - DNA, 25 bp, probe
cctcttgacccagtctactgagatc

SEQ ID NO: 190589 - DNA, 25 bp, probe
ccttttcccagctgactcagaacac

SEQ ID NO: 190590 - DNA, 25 bp, probe
ccttttcccagctgactcagaacac

SEQ ID NO: 190591 - DNA, 25 bp, probe
cctctttccacgagactgaagtctg

SEQ ID NO: 190592 - DNA, 25 bp, probe
cctcctccaccggatagcaaagtcg

SEQ ID NO: 190593 - DNA, 25 bp, probe
cctcggtcctctgaacacagagtcc

SEQ ID NO: 190594 - DNA, 25 bp, probe
cctgctagaccctcaaactgggtgg

SEQ ID NO: 190595 - DNA, 25 bp, probe
cctgctagaccctcaaactgggtgg

SEQ ID NO: 190596 - DNA, 25 bp, probe
cctgtaatcccagctactcgggagg

SEQ ID NO: 190597 - DNA, 25 bp, probe
cctgtaatcccagcactttgggagg

SEQ ID NO: 190598 - DNA, 25 bp, probe
cctccagtacacatcgtatggggtg

SEQ ID NO: 190599 - DNA, 25 bp, probe
cctgtcgtacatttgtttgagtcgt

SEQ ID NO: 190600 - DNA, 25 bp, probe
cctgaggtactaagaggtcaacagt

SEQ ID NO: 190601 - DNA, 25 bp, probe
cctaggccacttggagggtagcaga

SEQ ID NO: 190602 - DNA, 25 bp, probe
cctccccaccaaggggtactgcagg

SEQ ID NO: 190603 - DNA, 25 bp, probe
cctccccaccaaggggtactgcagg

SEQ ID NO: 190604 - DNA, 25 bp, probe
cctcccccgcaacagcggggcagga

SEQ ID NO: 190605 - DNA, 25 bp, probe
cctccccattttccggggcagagtg

SEQ ID NO: 190606 - DNA, 25 bp, probe
cctccaaattttcctgggatgaata

SEQ ID NO: 190607 - DNA, 25 bp, probe
cctgccctttatttgcgggatcaat

SEQ ID NO: 190608 - DNA, 25 bp, probe
cctcccttctacttgtgagttttga

SEQ ID NO: 190609 - DNA, 25 bp, probe
cctcccttctagtctttatttatgg

SEQ ID NO: 190610 - DNA, 25 bp, probe
tcctcccgtaaagcttcatttgcaa

SEQ ID NO: 190611 - DNA, 25 bp, probe
tcctcccgtaaagcttcatttgcaa

SEQ ID NO: 190612 - DNA, 25 bp, probe
cctcatccagaagatacttcaaatc

SEQ ID NO: 190613 - DNA, 25 bp, probe
cctcaccaaacttgagctccaggct

SEQ ID NO: 190614 - DNA, 25 bp, probe
cctcccggaaaagtctctgagctgc

SEQ ID NO: 190615 - DNA, 25 bp, probe
cctcgcacgatacgaagtgcttggg

SEQ ID NO: 190616 - DNA, 25 bp, probe
cctcgcacgatacgaagtgcttggg

SEQ ID NO: 190617 - DNA, 25 bp, probe
cctggacgtttcttgtgcgtgagag

SEQ ID NO: 190618 - DNA, 25 bp, probe
cctggggattatcctgttctgctac

SEQ ID NO: 190619 - DNA, 25 bp, probe
cctggaggtcaatgttatgtattta

SEQ ID NO: 190620 - DNA, 25 bp, probe
cctggggtcactcatttatcttaat

SEQ ID NO: 190621 - DNA, 25 bp, probe
cctgaacccacaaattattcttaca

SEQ ID NO: 190622 - DNA, 25 bp, probe
cctggacctccaagaagattttgat

SEQ ID NO: 190623 - DNA, 25 bp, probe
cctggagccccaaaatgcagataag

SEQ ID NO: 190624 - DNA, 25 bp, probe
cctgtgcccctcataatggaagaaa

SEQ ID NO: 190625 - DNA, 25 bp, probe
cctggcctacctgatgatgaagaaa

SEQ ID NO: 190626 - DNA, 25 bp, probe
cctggccttcctcatgatctatgag

SEQ ID NO: 190627 - DNA, 25 bp, probe
cctggcacctactctttagagagcc

SEQ ID NO: 190628 - DNA, 25 bp, probe
cctggcacctactctttagagagcc

SEQ ID NO: 190629 - DNA, 25 bp, probe
cctggcaccagacacttctggggat

SEQ ID NO: 190630 - DNA, 25 bp, probe
cctggcagctcgaaactgtttggta

SEQ ID NO: 190631 - DNA, 25 bp, probe
cctaagccataaactgtctcaccta

SEQ ID NO: 190632 - DNA, 25 bp, probe
cctgacagccataattctgttctat

SEQ ID NO: 190633 - DNA, 25 bp, probe
cctccacgcttgatctacttcaaga

SEQ ID NO: 190634 - DNA, 25 bp, probe
cctccacgcttgatctacttcaaga

SEQ ID NO: 190635 - DNA, 25 bp, probe
cctgtatcgtggaccttttgtgaac

SEQ ID NO: 190636 - DNA, 25 bp, probe
cctgtttgtggatgccttcctgaaa

SEQ ID NO: 190637 - DNA, 25 bp, probe
cctggaagattgaggttcctggaca

SEQ ID NO: 190638 - DNA, 25 bp, probe
cctggagaggtgatggctggcctgg

SEQ ID NO: 190639 - DNA, 25 bp, probe
cctgccaaggtgatgggcgtctgag

SEQ ID NO: 190640 - DNA, 25 bp, probe
cctggagaagatcggcatgggtcgg

SEQ ID NO: 190641 - DNA, 25 bp, probe
cctggaggagggcctgggtgtggac

SEQ ID NO: 190642 - DNA, 25 bp, probe
cctgtgtgggtgaaggggatagggc

SEQ ID NO: 190643 - DNA, 25 bp, probe
cctgggatgaggaatggggaaagcc

SEQ ID NO: 190644 - DNA, 25 bp, probe
cctgtggcacggaatgaaaacagag

SEQ ID NO: 190645 - DNA, 25 bp, probe
cctggacacgtggccacaaatctgg

SEQ ID NO: 190646 - DNA, 25 bp, probe
cctgctaccgctcgcaggactatgg

SEQ ID NO: 190647 - DNA, 25 bp, probe
cctgctaccgctcgcaggactatgg

SEQ ID NO: 190648 - DNA, 25 bp, probe
cctggctcacctggaggagctgcag

SEQ ID NO: 190649 - DNA, 25 bp, probe
cctggctccagcagatgatgagata

SEQ ID NO: 190650 - DNA, 25 bp, probe
cctggatacacggaatgcagataaa

SEQ ID NO: 190651 - DNA, 25 bp, probe
cctgggcatcctggcatagcagatg

SEQ ID NO: 190652 - DNA, 25 bp, probe
cctgggcatcctggcatagccagat

SEQ ID NO: 190653 - DNA, 25 bp, probe
cctggactgccaggataacgaattg

SEQ ID NO: 190654 - DNA, 25 bp, probe
cctggttgccaggaactgtgtcatt

SEQ ID NO: 190655 - DNA, 25 bp, probe
cctggcattcttgtacagtgtatat

SEQ ID NO: 190656 - DNA, 25 bp, probe
cctggctctctatatacctgtgaat

SEQ ID NO: 190657 - DNA, 25 bp, probe
cctggtatctgcagatcgatctgga

SEQ ID NO: 190658 - DNA, 25 bp, probe
cctggagatctgcaggcggctggag

SEQ ID NO: 190659 - DNA, 25 bp, probe
cctggagatctgcaggcggctggag

SEQ ID NO: 190660 - DNA, 25 bp, probe
cctgcaggtcatgaggggcctatgc

SEQ ID NO: 190661 - DNA, 25 bp, probe
cctgaggtcatcaagcagtcggcct

SEQ ID NO: 190662 - DNA, 25 bp, probe
cctggaggcatcaaaggctgcatcc

SEQ ID NO: 190663 - DNA, 25 bp, probe
cctggcagaatcacagtctcacata

SEQ ID NO: 190664 - DNA, 25 bp, probe
cctggaatacctttgcatcacatct

SEQ ID NO: 190665 - DNA, 25 bp, probe
cctgggatacgctatgaactctcac

SEQ ID NO: 190666 - DNA, 25 bp, probe
cctgtgtctgacgacagtgacctcc

SEQ ID NO: 190667 - DNA, 25 bp, probe
cctgtggctgtgcaggtgacgtccg

SEQ ID NO: 190668 - DNA, 25 bp, probe
cctgggcagggggtgatgtgcccca

SEQ ID NO: 190669 - DNA, 25 bp, probe
cctggccagtggagtggtccatgct

SEQ ID NO: 190670 - DNA, 25 bp, probe
cctggccagtggagtggtccatgct

SEQ ID NO: 190671 - DNA, 25 bp, probe
cctggccagtcaaagtagtctctcc

SEQ ID NO: 190672 - DNA, 25 bp, probe
cctggccagtcaaagtagtctctcc

SEQ ID NO: 190673 - DNA, 25 bp, probe
cctggccagtcaaagtagtctctcc

SEQ ID NO: 190674 - DNA, 25 bp, probe
cctggtcagtacatggattcttcac

SEQ ID NO: 190675 - DNA, 25 bp, probe
cctggtcagtacatggattcttcac

SEQ ID NO: 190676 - DNA, 25 bp, probe
cctggattggctacttttgcttcac

SEQ ID NO: 190677 - DNA, 25 bp, probe
cctggccatgggcttgttgcagtca

SEQ ID NO: 190678 - DNA, 25 bp, probe
cctggcacaggactgactctgggat

SEQ ID NO: 190679 - DNA, 25 bp, probe
cctggcctggcacacatcaggagtt

SEQ ID NO: 190680 - DNA, 25 bp, probe
cctggccagagccaagaaacacttt

SEQ ID NO: 190681 - DNA, 25 bp, probe
cctggccaaccatgatgaaactccg

SEQ ID NO: 190682 - DNA, 25 bp, probe
cctgacctacctcaggaaccagctg

SEQ ID NO: 190683 - DNA, 25 bp, probe
cctgttcgaactcgagggaccctgg

SEQ ID NO: 190684 - DNA, 25 bp, probe
cctggggaaagccaggatggcccga

SEQ ID NO: 190685 - DNA, 25 bp, probe
cctgggggtcatctggggccagggc

SEQ ID NO: 190686 - DNA, 25 bp, probe
cctggagggtgacttctctaccaag

SEQ ID NO: 190687 - DNA, 25 bp, probe
cctgagaggggactctcgttgccac

SEQ ID NO: 190688 - DNA, 25 bp, probe
cctggggagactcctcagtagggca

SEQ ID NO: 190689 - DNA, 25 bp, probe
cctggccgatgagatcctgtggggc

SEQ ID NO: 190690 - DNA, 25 bp, probe
cctggacgattactcgctggagcgg

SEQ ID NO: 190691 - DNA, 25 bp, probe
cctgtggccagtactcgggacagac

SEQ ID NO: 190692 - DNA, 25 bp, probe
cctggtgcctgtgtctgcagaaaaa

SEQ ID NO: 190693 - DNA, 25 bp, probe
cctggtgcctgtgtctgcagaaaaa

SEQ ID NO: 190694 - DNA, 25 bp, probe
cctggtgcctgtgtctgcagaaaaa

SEQ ID NO: 190695 - DNA, 25 bp, probe
cctggtgcggttgaagaagaatgac

SEQ ID NO: 190696 - DNA, 25 bp, probe
cctcctctggtctgacccagaagac

SEQ ID NO: 190697 - DNA, 25 bp, probe
cctcctctggtctgacccagaagac

SEQ ID NO: 190698 - DNA, 25 bp, probe
cctccttggctctggagctatgaaa

SEQ ID NO: 190699 - DNA, 25 bp, probe
cctcctatggtaaagacgaagacag

SEQ ID NO: 190700 - DNA, 25 bp, probe
cctggcttgcagaaaatccagaaaa

SEQ ID NO: 190701 - DNA, 25 bp, probe
cctggctgggtaccccagaagccat

SEQ ID NO: 190702 - DNA, 25 bp, probe
cctgtgctcggaaatcccaaagctc

SEQ ID NO: 190703 - DNA, 25 bp, probe
cctggctcggctcaaggaaagccat

SEQ ID NO: 190704 - DNA, 25 bp, probe
cctggcactggtcacaaagctcagc

SEQ ID NO: 190705 - DNA, 25 bp, probe
cctggcctgtgtcctgaaggccacg

SEQ ID NO: 190706 - DNA, 25 bp, probe
cctggctcttgattttgtctgccac

SEQ ID NO: 190707 - DNA, 25 bp, probe
cctggctagagtttcttctcatcag

SEQ ID NO: 190708 - DNA, 25 bp, probe
cctggatcacagaactcatttcatg

SEQ ID NO: 190709 - DNA, 25 bp, probe
cctggacagcaggcacatcttcaga

SEQ ID NO: 190710 - DNA, 25 bp, probe
cctgagagcagagccgttggacttc

SEQ ID NO: 190711 - DNA, 25 bp, probe
cctggtggaagcggtcttgatttca

SEQ ID NO: 190712 - DNA, 25 bp, probe
cctggatggtcagcctccagatctt

SEQ ID NO: 190713 - DNA, 25 bp, probe
cctgaagtggatggcgccagaattc

SEQ ID NO: 190714 - DNA, 25 bp, probe
cctgccggagagtgtcagaactctt

SEQ ID NO: 190715 - DNA, 25 bp, probe
cctgtgctggcgctggaaaattatt

SEQ ID NO: 190716 - DNA, 25 bp, probe
cctggtggccgtgaaacagctgcag

SEQ ID NO: 190717 - DNA, 25 bp, probe
cctggcaggcactgtggacacccag

SEQ ID NO: 190718 - DNA, 25 bp, probe
cctggatggacatgtggacggcgct

SEQ ID NO: 190719 - DNA, 25 bp, probe
cctgtctgcagtcagaggaggacgt

SEQ ID NO: 190720 - DNA, 25 bp, probe
cctgatgtcagcctaggggatggcg

SEQ ID NO: 190721 - DNA, 25 bp, probe
cctggcatagcacagggtcatggtg

SEQ ID NO: 190722 - DNA, 25 bp, probe
cctggatcagggtggatcatgtgct

SEQ ID NO: 190723 - DNA, 25 bp, probe
cctggatcagggtggatcatgtgct

SEQ ID NO: 190724 - DNA, 25 bp, probe
cctggacctggagcgcatgcaggct

SEQ ID NO: 190725 - DNA, 25 bp, probe
cctggttcatggaagccatagagta

SEQ ID NO: 190726 - DNA, 25 bp, probe
cctggttcatggaagccatagagta

SEQ ID NO: 190727 - DNA, 25 bp, probe
cctggagtgtcggatcctgtgagta

SEQ ID NO: 190728 - DNA, 25 bp, probe
cctggtgtgccggatcggcgattgg

SEQ ID NO: 190729 - DNA, 25 bp, probe
cctgacggccaggtcatcaccattg

SEQ ID NO: 190730 - DNA, 25 bp, probe
cctggtggccaggtatgcagatgat

SEQ ID NO: 190731 - DNA, 25 bp, probe
cctgcttgtgtctcttgcatgattc

SEQ ID NO: 190732 - DNA, 25 bp, probe
cctgctaattcttgccgcatttcaa

SEQ ID NO: 190733 - DNA, 25 bp, probe
cctgctaattcttgccgcatttcaa

SEQ ID NO: 190734 - DNA, 25 bp, probe
cctggcatatgtggagacgctccta

SEQ ID NO: 190735 - DNA, 25 bp, probe
cctgccttgtgaagtcagcacctat

SEQ ID NO: 190736 - DNA, 25 bp, probe
cctgtgctatggtgtggccattttc

SEQ ID NO: 190737 - DNA, 25 bp, probe
cctggacatgagccgggtgatcttt

SEQ ID NO: 190738 - DNA, 25 bp, probe
cctggatcagattcggacaatcgac

SEQ ID NO: 190739 - DNA, 25 bp, probe
cctggtctgttatgcacgcatctac

SEQ ID NO: 190740 - DNA, 25 bp, probe
cctggtttctattgatctggaaggg

SEQ ID NO: 190741 - DNA, 25 bp, probe
cctgaatttgcacagaggaaagcgg

SEQ ID NO: 190742 - DNA, 25 bp, probe
cctgaatgacgtcaacgcaaagccc

SEQ ID NO: 190743 - DNA, 25 bp, probe
cctggatgatttctacacagccacg

SEQ ID NO: 190744 - DNA, 25 bp, probe
cctggatgatttctacacagccacg

SEQ ID NO: 190745 - DNA, 25 bp, probe
cctggtgttactactcatagcagcc

SEQ ID NO: 190746 - DNA, 25 bp, probe
cctgcagtttgacttctttgagaca

SEQ ID NO: 190747 - DNA, 25 bp, probe
cctgggctatgaccacttcatgaag

SEQ ID NO: 190748 - DNA, 25 bp, probe
cctggagctcaaacaggagcaagag

SEQ ID NO: 190749 - DNA, 25 bp, probe
cctggagctcaaacaggagcaagag

SEQ ID NO: 190750 - DNA, 25 bp, probe
cctggacctaagtgacatcaactca

SEQ ID NO: 190751 - DNA, 25 bp, probe
cctgaacctgagttcaaccaaccgc

SEQ ID NO: 190752 - DNA, 25 bp, probe
cctgaagatgctcacaaaccacacc

SEQ ID NO: 190753 - DNA, 25 bp, probe
cctgggcagctgaacaagactccgt

SEQ ID NO: 190754 - DNA, 25 bp, probe
cctgggctgagagaacctcacgcac

SEQ ID NO: 190755 - DNA, 25 bp, probe
cctgggtgtcagatgatgcctccca

SEQ ID NO: 190756 - DNA, 25 bp, probe
cctggagtgtgaagctgaccagctc

SEQ ID NO: 190757 - DNA, 25 bp, probe
cctgaagtcagaagtatcaccacgg

SEQ ID NO: 190758 - DNA, 25 bp, probe
cctggattcagatgactcatccccc

SEQ ID NO: 190759 - DNA, 25 bp, probe
cctgtttagcattcactaagcccta

SEQ ID NO: 190760 - DNA, 25 bp, probe
cctggtctatcttctgcatgaaccc

SEQ ID NO: 190761 - DNA, 25 bp, probe
cctggattatctgcactcagagcgc

SEQ ID NO: 190762 - DNA, 25 bp, probe
cctggattatctgcactcagagcgc

SEQ ID NO: 190763 - DNA, 25 bp, probe
cctggacttcgagcaagagatggcc

SEQ ID NO: 190764 - DNA, 25 bp, probe
cctgaattacgagcagaaagatcca

SEQ ID NO: 190765 - DNA, 25 bp, probe
cctgaactccacggaaaaatcagaa

SEQ ID NO: 190766 - DNA, 25 bp, probe
cctcaatccccgcaaactaaagcaa

SEQ ID NO: 190767 - DNA, 25 bp, probe
cctaaccacccaatcattctaaagc

SEQ ID NO: 190768 - DNA, 25 bp, probe
cctaccccccatacttatatcaagg

SEQ ID NO: 190769 - DNA, 25 bp, probe
cctcccaccccaagtctgtagtggg

SEQ ID NO: 190770 - DNA, 25 bp, probe
cctgccgaccccaaatgggagctgt

SEQ ID NO: 190771 - DNA, 25 bp, probe
cctgtggacccgaaaggagggcaga

SEQ ID NO: 190772 - DNA, 25 bp, probe
cctgtggatcccgtcaggagggact

SEQ ID NO: 190773 - DNA, 25 bp, probe
cctgcaaggcccacaggaggcaagc

SEQ ID NO: 190774 - DNA, 25 bp, probe
cctggggctctcagggagaactgct

SEQ ID NO: 190775 - DNA, 25 bp, probe
cctggggctctcagggagaactgct

SEQ ID NO: 190776 - DNA, 25 bp, probe
ccttggtacttatggcagaatctat

SEQ ID NO: 190777 - DNA, 25 bp, probe
ccttggtacttatggcagaatctat

SEQ ID NO: 190778 - DNA, 25 bp, probe
cctctactacgtcaggcagaattct

SEQ ID NO: 190779 - DNA, 25 bp, probe
cctccactcgggagccagatggtct

SEQ ID NO: 190780 - DNA, 25 bp, probe
cctgaactcgatgatgaccgtggac

SEQ ID NO: 190781 - DNA, 25 bp, probe
cctgaaatctatcagatcatgctgg

SEQ ID NO: 190782 - DNA, 25 bp, probe
cctggacatgtatcagatgctgaga

SEQ ID NO: 190783 - DNA, 25 bp, probe
cctgggtgacaatgatgctgagacg

SEQ ID NO: 190784 - DNA, 25 bp, probe
cctgaggtgacattaatggactgca

SEQ ID NO: 190785 - DNA, 25 bp, probe
cctggacgactgccaaggactgagg

SEQ ID NO: 190786 - DNA, 25 bp, probe
cctggactacatctactgatgctag

SEQ ID NO: 190787 - DNA, 25 bp, probe
cctggagccacattctgacttcaga

SEQ ID NO: 190788 - DNA, 25 bp, probe
cctggagccacattctgacttcaga

SEQ ID NO: 190789 - DNA, 25 bp, probe
cctgggcgtcattctgtacatgatg

SEQ ID NO: 190790 - DNA, 25 bp, probe
cctgggcgtcatcttgtatatccta

SEQ ID NO: 190791 - DNA, 25 bp, probe
cctagcctattcttacttactctac

SEQ ID NO: 190792 - DNA, 25 bp, probe
cctagcctattcttacttactctac

SEQ ID NO: 190793 - DNA, 25 bp, probe
cctgagcctatttctagtataagta

SEQ ID NO: 190794 - DNA, 25 bp, probe
cctgatcttatcaccagtgtcatag

SEQ ID NO: 190795 - DNA, 25 bp, probe
cctgtctaatgaacaggtgttgaaa

SEQ ID NO: 190796 - DNA, 25 bp, probe
cctgatgtgaaagctgctgatttag

SEQ ID NO: 190797 - DNA, 25 bp, probe
cctgttggagactctgattgtcatg

SEQ ID NO: 190798 - DNA, 25 bp, probe
cctggtgcgagaagactttgtgctg

SEQ ID NO: 190799 - DNA, 25 bp, probe
cctggttgagtgcagcctgttgtca

SEQ ID NO: 190800 - DNA, 25 bp, probe
cctggtgtcaggcaggtttgccagt

SEQ ID NO: 190801 - DNA, 25 bp, probe
cctggtgagcaccttgtgttacttt

SEQ ID NO: 190802 - DNA, 25 bp, probe
cctgttgagtcagatgctttcattt

SEQ ID NO: 190803 - DNA, 25 bp, probe
cctggtgggcatgtcatgtgtcttt

SEQ ID NO: 190804 - DNA, 25 bp, probe
cctcactttgatgttgttttgcaag

SEQ ID NO: 190805 - DNA, 25 bp, probe
cctcctcttactgtgttctcagtat

SEQ ID NO: 190806 - DNA, 25 bp, probe
cctgattttaagctttgcacatgtc

SEQ ID NO: 190807 - DNA, 25 bp, probe
cctgtttgaaggcatctacaccatt

SEQ ID NO: 190808 - DNA, 25 bp, probe
cctgttctgagctgggtcaaacaaa

SEQ ID NO: 190809 - DNA, 25 bp, probe
gccttcttggggattcaaaaacagg

SEQ ID NO: 190810 - DNA, 25 bp, probe
cctgatctatacggctttcaacaag

SEQ ID NO: 190811 - DNA, 25 bp, probe
cctgatggtgacgtctttctctcag

SEQ ID NO: 190812 - DNA, 25 bp, probe
cctgaggtgagcatcatcttctggg

SEQ ID NO: 190813 - DNA, 25 bp, probe
cctggtcatgcagctctttcaggac

SEQ ID NO: 190814 - DNA, 25 bp, probe
cctggtcagccttttgggcgaggag

SEQ ID NO: 190815 - DNA, 25 bp, probe
cctgtttcctgtatggaggaggagg

SEQ ID NO: 190816 - DNA, 25 bp, probe
cctggttccctgaaggaggagaggg

SEQ ID NO: 190817 - DNA, 25 bp, probe
cctggtaccgcgaggagagcgacag

SEQ ID NO: 190818 - DNA, 25 bp, probe
cctggagggcctcctgagaaggaca

SEQ ID NO: 190819 - DNA, 25 bp, probe
cctggagggtgtcgtgaccaagagc

SEQ ID NO: 190820 - DNA, 25 bp, probe
cctggagggatgtctggctgcaaag

SEQ ID NO: 190821 - DNA, 25 bp, probe
cctggatgggctacggcagctgaag

SEQ ID NO: 190822 - DNA, 25 bp, probe
cctggagtgtggaggcagcagcggc

SEQ ID NO: 190823 - DNA, 25 bp, probe
cctggaggctggagctgatgcccgg

SEQ ID NO: 190824 - DNA, 25 bp, probe
gcccaggctcggaggaccctggaaa

SEQ ID NO: 190825 - DNA, 25 bp, probe
cctaggccgggggacatttggacag

SEQ ID NO: 190826 - DNA, 25 bp, probe
cctgcgcctgtgtggaaatttggag

SEQ ID NO: 190827 - DNA, 25 bp, probe
cctgaagttcatcccaaaattgggg

SEQ ID NO: 190828 - DNA, 25 bp, probe
cctgaaacctcagcgtgaatttggg

SEQ ID NO: 190829 - DNA, 25 bp, probe
cctgttcagagcagccggagtttgc

SEQ ID NO: 190830 - DNA, 25 bp, probe
cctgtgggacccctggatatgtggc

SEQ ID NO: 190831 - DNA, 25 bp, probe
cctggaggacccgtgctaagtggac

SEQ ID NO: 190832 - DNA, 25 bp, probe
cctggggactctgactcaattgtac

SEQ ID NO: 190833 - DNA, 25 bp, probe
cctcaaggacttttctgctatttac

SEQ ID NO: 190834 - DNA, 25 bp, probe
cctgagcaggattttaatctttttc

SEQ ID NO: 190835 - DNA, 25 bp, probe
cctcagacagtttgcttattttatt

SEQ ID NO: 190836 - DNA, 25 bp, probe
cctgagaagttacttcacatttctc

SEQ ID NO: 190837 - DNA, 25 bp, probe
cctaaatctatcctaaatgttccct

SEQ ID NO: 190838 - DNA, 25 bp, probe
cctaaaaatgtctgaatgcttacac

SEQ ID NO: 190839 - DNA, 25 bp, probe
ccaaagaaatttaatagtgccaagg

SEQ ID NO: 190840 - DNA, 25 bp, probe
cctatacaagtcagttaaggaagtt

SEQ ID NO: 190841 - DNA, 25 bp, probe
cctgtactcgtcagtggacacaaag

SEQ ID NO: 190842 - DNA, 25 bp, probe
cctgcaaccagtaaggacaactttg

SEQ ID NO: 190843 - DNA, 25 bp, probe
cctcctccaatgaggtcaccatcat

SEQ ID NO: 190844 - DNA, 25 bp, probe
cctccctaatgcaggtctcagaacg

SEQ ID NO: 190845 - DNA, 25 bp, probe
ccagccaaatagtgttctcggggtg

SEQ ID NO: 190846 - DNA, 25 bp, probe
cctgcccacaagtgttccgtgtggt

SEQ ID NO: 190847 - DNA, 25 bp, probe
cctgaccactgggtgtggacggtgt

SEQ ID NO: 190848 - DNA, 25 bp, probe
cctgcccactcgtgtggcaagggag

SEQ ID NO: 190849 - DNA, 25 bp, probe
cctggatccctgtgtggtaggagtt

SEQ ID NO: 190850 - DNA, 25 bp, probe
cctggtccactgtgaagctgggttc

SEQ ID NO: 190851 - DNA, 25 bp, probe
cctgtcccacttcgaagtggaggtc

SEQ ID NO: 190852 - DNA, 25 bp, probe
cctgtcccacttcgaagtggaggtc

SEQ ID NO: 190853 - DNA, 25 bp, probe
cctgtcccacttcgaagtggaggtc

SEQ ID NO: 190854 - DNA, 25 bp, probe
cctgtccacagctcctgtgggggtg

SEQ ID NO: 190855 - DNA, 25 bp, probe
cctgtccacagctcctgtgggggtg

SEQ ID NO: 190856 - DNA, 25 bp, probe
cctgtcctcagaccctggaaaagtg

SEQ ID NO: 190857 - DNA, 25 bp, probe
cctgggctatattcctgacaaaagt

SEQ ID NO: 190858 - DNA, 25 bp, probe
cctgtggagatttcctgtgagaaca

SEQ ID NO: 190859 - DNA, 25 bp, probe
cctgtagacacttccggatcaacta

SEQ ID NO: 190860 - DNA, 25 bp, probe
cctgtggaagcatttcgcgatggac

SEQ ID NO: 190861 - DNA, 25 bp, probe
cctgtgttccacttcctgtggaggt

SEQ ID NO: 190862 - DNA, 25 bp, probe
cctgtcgatcccttctgaggtatgg

SEQ ID NO: 190863 - DNA, 25 bp, probe
cctgtcggtttgttcactgtatgtc

SEQ ID NO: 190864 - DNA, 25 bp, probe
cctgtgcctctcatttcaatgttgt

SEQ ID NO: 190865 - DNA, 25 bp, probe
cctgtggctctgaacttcatgaagg

SEQ ID NO: 190866 - DNA, 25 bp, probe
cctgggcttcaagctctgtactgtg

SEQ ID NO: 190867 - DNA, 25 bp, probe
cctgtgggtgaagtctctgtccatg

SEQ ID NO: 190868 - DNA, 25 bp, probe
cctgtgggtgaagtctctgtccatg

SEQ ID NO: 190869 - DNA, 25 bp, probe
cctgtggggtatagccggcacatgg

SEQ ID NO: 190870 - DNA, 25 bp, probe
cctgagcccttactgccggaagggc

SEQ ID NO: 190871 - DNA, 25 bp, probe
cctgaccccatccgagtggaatttg

SEQ ID NO: 190872 - DNA, 25 bp, probe
cctgacattcttgaaggggttctgt

SEQ ID NO: 190873 - DNA, 25 bp, probe
cctgagttggctgaaatggtttctg

SEQ ID NO: 190874 - DNA, 25 bp, probe
cctgactgtggttgggatgttctat

SEQ ID NO: 190875 - DNA, 25 bp, probe
cctacgggatccgcattgacgtcat

SEQ ID NO: 190876 - DNA, 25 bp, probe
ccataaggtcatgcctttaagtaac

SEQ ID NO: 190877 - DNA, 25 bp, probe
cctgataggattgcctgcttagatg

SEQ ID NO: 190878 - DNA, 25 bp, probe
cctgagtagacagccccaagcatgg

SEQ ID NO: 190879 - DNA, 25 bp, probe
cctggtagagccaggcacccagtgt

SEQ ID NO: 190880 - DNA, 25 bp, probe
cctgttcgtacttacacccatgagg

SEQ ID NO: 190881 - DNA, 25 bp, probe
cctgtccagtggatacagccctggg

SEQ ID NO: 190882 - DNA, 25 bp, probe
cctgtggcgggtgaatctcgtgtag

SEQ ID NO: 190883 - DNA, 25 bp, probe
cctgggctccttgaagcttgtgata

SEQ ID NO: 190884 - DNA, 25 bp, probe
cctgggctccttgaagcttgtgata

SEQ ID NO: 190885 - DNA, 25 bp, probe
cctgggcttttggattatgtgtaca

SEQ ID NO: 190886 - DNA, 25 bp, probe
cctggtgactgatggacgagtgtcc

SEQ ID NO: 190887 - DNA, 25 bp, probe
cctggtgacatgggacacaagccac

SEQ ID NO: 190888 - DNA, 25 bp, probe
cctgggccagcttgggcaagccaag

SEQ ID NO: 190889 - DNA, 25 bp, probe
cctgcgggggtgggcatagaccggg

SEQ ID NO: 190890 - DNA, 25 bp, probe
cctgtggggagacaccagactgggg

SEQ ID NO: 190891 - DNA, 25 bp, probe
cctgggggatgacactcagttctgt

SEQ ID NO: 190892 - DNA, 25 bp, probe
cctgtggactgcttcaaccatttgc

SEQ ID NO: 190893 - DNA, 25 bp, probe
cctgtgcgattgctgtagcggttgc

SEQ ID NO: 190894 - DNA, 25 bp, probe
cctgatgccttactgggggatttag

SEQ ID NO: 190895 - DNA, 25 bp, probe
cctcccttcctggagggatggccag

SEQ ID NO: 190896 - DNA, 25 bp, probe
cctgcccggtctggagaggaagaag

SEQ ID NO: 190897 - DNA, 25 bp, probe
cctgagcaagggggcatgggaaatc

SEQ ID NO: 190898 - DNA, 25 bp, probe
cctgagcaaggggctgcaggtcggg

SEQ ID NO: 190899 - DNA, 25 bp, probe
cctgcacaagcagatccggctgcag

SEQ ID NO: 190900 - DNA, 25 bp, probe
cctgacagagctccacggatgcatg

SEQ ID NO: 190901 - DNA, 25 bp, probe
cctgtcagccatcatcgatggcaag

SEQ ID NO: 190902 - DNA, 25 bp, probe
cctgtacatgatcatgcgggagtgc

SEQ ID NO: 190903 - DNA, 25 bp, probe
cctgtatactgtgcacagtgatgtg

SEQ ID NO: 190904 - DNA, 25 bp, probe
cctgtcatttgttcacagcatggtg

SEQ ID NO: 190905 - DNA, 25 bp, probe
cctgatcttctgcttaatgcagttt

SEQ ID NO: 190906 - DNA, 25 bp, probe
cctgtctgtctgatttgctgaactt

SEQ ID NO: 190907 - DNA, 25 bp, probe
cctgtgtctctacacgctgtattgt

SEQ ID NO: 190908 - DNA, 25 bp, probe
cctgagtctactcagcctggagcct

SEQ ID NO: 190909 - DNA, 25 bp, probe
cctgagtccagggatgctgcggagc

SEQ ID NO: 190910 - DNA, 25 bp, probe
cctgtgtgcgcgggtgtgggagcac

SEQ ID NO: 190911 - DNA, 25 bp, probe
cctgtggtcaggtgtggaagatgcg

SEQ ID NO: 190912 - DNA, 25 bp, probe
cctgggtctggacgtgccagtgtga

SEQ ID NO: 190913 - DNA, 25 bp, probe
cctggtgtcggagcacatctggtgc

SEQ ID NO: 190914 - DNA, 25 bp, probe
cctgcttttggagtcctattgtcgt

SEQ ID NO: 190915 - DNA, 25 bp, probe
cctgtttgtggtgacgcctgtcatg

SEQ ID NO: 190916 - DNA, 25 bp, probe
cctgtttgtggtgacgcctgtcatg

SEQ ID NO: 190917 - DNA, 25 bp, probe
cctcttcttggagaccactctgagt

SEQ ID NO: 190918 - DNA, 25 bp, probe
cctccctttgagaattcacgtgagt

SEQ ID NO: 190919 - DNA, 25 bp, probe
cctgccctttggcattcagtggttc

SEQ ID NO: 190920 - DNA, 25 bp, probe
cctgagctttcaggcacaccattcg

SEQ ID NO: 190921 - DNA, 25 bp, probe
cctgtgttctcaggcacaccaaagg

SEQ ID NO: 190922 - DNA, 25 bp, probe
cctgtgttctcaggcacaccaaagg

SEQ ID NO: 190923 - DNA, 25 bp, probe
cctgtgacaccacgccagatcacag

SEQ ID NO: 190924 - DNA, 25 bp, probe
cctgtacactgacttgagaccagtt

SEQ ID NO: 190925 - DNA, 25 bp, probe
cctgtgccgctacaaggacagcttc

SEQ ID NO: 190926 - DNA, 25 bp, probe
cctgtctcccagaagggtcagctgg

SEQ ID NO: 190927 - DNA, 25 bp, probe
cctggtcctgagcaggcggcagtga

SEQ ID NO: 190928 - DNA, 25 bp, probe
cctggtgtcacgccaggaggctgtg

SEQ ID NO: 190929 - DNA, 25 bp, probe
cctgggtgatcaccatggctgcagg

SEQ ID NO: 190930 - DNA, 25 bp, probe
cctggggacagcgtggtaggcagca

SEQ ID NO: 190931 - DNA, 25 bp, probe
cctggtggacctggagctggagagc

SEQ ID NO: 190932 - DNA, 25 bp, probe
cctggggactggcactgtggtgcac

SEQ ID NO: 190933 - DNA, 25 bp, probe
cctgtaggtgctgtggtggatggac

SEQ ID NO: 190934 - DNA, 25 bp, probe
cctgaaatgcttgggagttgatgga

SEQ ID NO: 190935 - DNA, 25 bp, probe
cctgagagactcctggggtgggacc

SEQ ID NO: 190936 - DNA, 25 bp, probe
cctgggacaactagggctgcgaatc

SEQ ID NO: 190937 - DNA, 25 bp, probe
cctgggcacagaggtggctgtgcga

SEQ ID NO: 190938 - DNA, 25 bp, probe
cctgtggactgcagcagggagcaga

SEQ ID NO: 190939 - DNA, 25 bp, probe
cctgagaactctcatgagcccagca

SEQ ID NO: 190940 - DNA, 25 bp, probe
ccttcaagatcatgtaccccaattt

SEQ ID NO: 190941 - DNA, 25 bp, probe
cctgtacaatcaagatcacccacaa

SEQ ID NO: 190942 - DNA, 25 bp, probe
cctgaccaatacccaccaagtcaaa

SEQ ID NO: 190943 - DNA, 25 bp, probe
cctgtgcaaatagtgtcaaaagtaa

SEQ ID NO: 190944 - DNA, 25 bp, probe
cctgtcctgcaaactgcaaatagta

SEQ ID NO: 190945 - DNA, 25 bp, probe
cctgtgcctatgtcactgcaatttt

SEQ ID NO: 190946 - DNA, 25 bp, probe
cctctgtgctatccttcagatccaa

SEQ ID NO: 190947 - DNA, 25 bp, probe
cctgctcagatatcttcctcaatga

SEQ ID NO: 190948 - DNA, 25 bp, probe
cctgtgatgagcctgattttccatg

SEQ ID NO: 190949 - DNA, 25 bp, probe
cctgtaggccatgttagcactgcaa

SEQ ID NO: 190950 - DNA, 25 bp, probe
cctgctaggcaaggtgtacgtggcc

SEQ ID NO: 190951 - DNA, 25 bp, probe
cctgtacgccaacacagtgctgtct

SEQ ID NO: 190952 - DNA, 25 bp, probe
cctggggccaacgaagcgtgatcag

SEQ ID NO: 190953 - DNA, 25 bp, probe
cctggggtacaggaagctgtgtgca

SEQ ID NO: 190954 - DNA, 25 bp, probe
cctggggtacaggaagctgtgtgca

SEQ ID NO: 190955 - DNA, 25 bp, probe
cctgggcgaaaggagagcggagcca

SEQ ID NO: 190956 - DNA, 25 bp, probe
cctgggcgtcacggtgcaaggagac

SEQ ID NO: 190957 - DNA, 25 bp, probe
cctgggcgtcacggtgcaaggagac

SEQ ID NO: 190958 - DNA, 25 bp, probe
cctggtggctccggagcaagtgaag

SEQ ID NO: 190959 - DNA, 25 bp, probe
cctcggacaccagagacaataactg

SEQ ID NO: 190960 - DNA, 25 bp, probe
cctgccgaaaacgagacaattgaaa

SEQ ID NO: 190961 - DNA, 25 bp, probe
cctgctctggggtcggaactggagt

SEQ ID NO: 190962 - DNA, 25 bp, probe
cctgttggcctttgcaggactgcgg

SEQ ID NO: 190963 - DNA, 25 bp, probe
cctgtgtcacgagcagcaggaccgg

SEQ ID NO: 190964 - DNA, 25 bp, probe
cctgtgtctctgggagcggagaccg

SEQ ID NO: 190965 - DNA, 25 bp, probe
cctgttcgcatcagtggcgatgact

SEQ ID NO: 190966 - DNA, 25 bp, probe
cctgtcttgcttcggccagaagtag

SEQ ID NO: 190967 - DNA, 25 bp, probe
cctgtcttgcttcggccagaagtag

SEQ ID NO: 190968 - DNA, 25 bp, probe
cctgctctacgtcatcgagaacgag

SEQ ID NO: 190969 - DNA, 25 bp, probe
cctgctctacgtcatcgagaacgag

SEQ ID NO: 190970 - DNA, 25 bp, probe
cctgatcccgatgttagaaatggtt

SEQ ID NO: 190971 - DNA, 25 bp, probe
cctgtccagcgtatctcagcagaag

SEQ ID NO: 190972 - DNA, 25 bp, probe
cctgtccagcgtatctcagcagaag

SEQ ID NO: 190973 - DNA, 25 bp, probe
cctgatcgacatggttctcaacaag

SEQ ID NO: 190974 - DNA, 25 bp, probe
cctgatcgacatggttctcaacaag

SEQ ID NO: 190975 - DNA, 25 bp, probe
cctgtgcgactggatcttgctaaca

SEQ ID NO: 190976 - DNA, 25 bp, probe
cctgagcgagtggagtctgccaccc

SEQ ID NO: 190977 - DNA, 25 bp, probe
cctgcacaagtgtgacatctaccag

SEQ ID NO: 190978 - DNA, 25 bp, probe
cctgcagagagtatagaatacacaa

SEQ ID NO: 190979 - DNA, 25 bp, probe
cctgagcaagatggtgcaggaccca

SEQ ID NO: 190980 - DNA, 25 bp, probe
cctgtgcaccattcgagaagcccag

SEQ ID NO: 190981 - DNA, 25 bp, probe
cctgcagaccaagggtgccctgcag

SEQ ID NO: 190982 - DNA, 25 bp, probe
cctgcagaccaagggtgccctgcag

SEQ ID NO: 190983 - DNA, 25 bp, probe
cctgagatcctacagggcctgaagt

SEQ ID NO: 190984 - DNA, 25 bp, probe
cctgtgccctacagtggggacagct

SEQ ID NO: 190985 - DNA, 25 bp, probe
cctgtgtccacctgtgggtgtagcc

SEQ ID NO: 190986 - DNA, 25 bp, probe
cctgggccagagatggacgtgtacc

SEQ ID NO: 190987 - DNA, 25 bp, probe
cctgggtgcagagcgtggttgtatc

SEQ ID NO: 190988 - DNA, 25 bp, probe
cctgagggccagctatgagtttgac

SEQ ID NO: 190989 - DNA, 25 bp, probe
cctgaaggtcagtatatggagtcca

SEQ ID NO: 190990 - DNA, 25 bp, probe
cctaaagtcgacatatggtctctgg

SEQ ID NO: 190991 - DNA, 25 bp, probe
cctgaggcggccaattatcgtgtct

SEQ ID NO: 190992 - DNA, 25 bp, probe
cctgaggcttgtggatttctatgtt

SEQ ID NO: 190993 - DNA, 25 bp, probe
cctgggctgtgtgatatatgccaca

SEQ ID NO: 190994 - DNA, 25 bp, probe
cctgggcagccttcatatttgccat

SEQ ID NO: 190995 - DNA, 25 bp, probe
cctgctgacaccttgattttagtcc

SEQ ID NO: 190996 - DNA, 25 bp, probe
cctgtgagccagtctagttcctgat

SEQ ID NO: 190997 - DNA, 25 bp, probe
cctgcagaggaacagctgtgccaaa

SEQ ID NO: 190998 - DNA, 25 bp, probe
cctgtggtgaaggagcagtcccagc

SEQ ID NO: 190999 - DNA, 25 bp, probe
cctgggtcagatcacaaccatcagc

SEQ ID NO: 191000 - DNA, 25 bp, probe
cctgaggatcgacctaacacatctg

SEQ ID NO: 191001 - DNA, 25 bp, probe
cctgcaggaaacctgtccatcctga

SEQ ID NO: 191002 - DNA, 25 bp, probe
cctgatataacactttccagcctat

SEQ ID NO: 191003 - DNA, 25 bp, probe
cctgatgtcaaccttgtgacccagc

SEQ ID NO: 191004 - DNA, 25 bp, probe
cctgatgagaagatggtcaactacc

SEQ ID NO: 191005 - DNA, 25 bp, probe
cctgattaagcctgctcatttccac

SEQ ID NO: 191006 - DNA, 25 bp, probe
cctgttacacgctgcttgtagacat

SEQ ID NO: 191007 - DNA, 25 bp, probe
cctgcttcccatgggcattgcaagt

SEQ ID NO: 191008 - DNA, 25 bp, probe
cctgtgcatcatcatgggttgcttc

SEQ ID NO: 191009 - DNA, 25 bp, probe
cctgtgctaggcatggtgtcttcac

SEQ ID NO: 191010 - DNA, 25 bp, probe
cctctctgagcgagcggacttcgcc

SEQ ID NO: 191011 - DNA, 25 bp, probe
cctctttggggttgacttcctacag

SEQ ID NO: 191012 - DNA, 25 bp, probe
ccttttctggtttgattcccgagag

SEQ ID NO: 191013 - DNA, 25 bp, probe
ccatcttttgttaagttcaccgtag

SEQ ID NO: 191014 - DNA, 25 bp, probe
ccatcttttgttaagttcaccgtag

SEQ ID NO: 191015 - DNA, 25 bp, probe
cctccttcagtgagattgccagcgc

SEQ ID NO: 191016 - DNA, 25 bp, probe
cctcgtcaattgatttgacccctct

SEQ ID NO: 191017 - DNA, 25 bp, probe
cctcgtgaatgtatttctcgtggca

SEQ ID NO: 191018 - DNA, 25 bp, probe
cctgtgggagatcttcactctgggc

SEQ ID NO: 191019 - DNA, 25 bp, probe
cctgtgggagatactgagccgctgc

SEQ ID NO: 191020 - DNA, 25 bp, probe
cctgagcctggcattgagcagcgtc

SEQ ID NO: 191021 - DNA, 25 bp, probe
cctgagcctggcattgagcagcgtc

SEQ ID NO: 191022 - DNA, 25 bp, probe
cctgaggtgctgacggacacgtcgt

SEQ ID NO: 191023 - DNA, 25 bp, probe
cctgcaggatctcatggtccggaat

SEQ ID NO: 191024 - DNA, 25 bp, probe
cctgcaggatctcatggtccggaat

SEQ ID NO: 191025 - DNA, 25 bp, probe
cctgcagctgaccgggtcacacaaa

SEQ ID NO: 191026 - DNA, 25 bp, probe
cctgagtcatcccaggactcagcac

SEQ ID NO: 191027 - DNA, 25 bp, probe
cctgatgcatcaggcaaacccacac

SEQ ID NO: 191028 - DNA, 25 bp, probe
cctgatcatcaccagaccctgggat

SEQ ID NO: 191029 - DNA, 25 bp, probe
cctgatcatcaccagaccctgggat

SEQ ID NO: 191030 - DNA, 25 bp, probe
cctgaccagggaccagcatgagcga

SEQ ID NO: 191031 - DNA, 25 bp, probe
cctgagacgcggagacatggctggt

SEQ ID NO: 191032 - DNA, 25 bp, probe
cctgacgcacaggcggaagctgcgg

SEQ ID NO: 191033 - DNA, 25 bp, probe
cctgacgcacaggcggaagctgcgg

SEQ ID NO: 191034 - DNA, 25 bp, probe
cctgtcggcgacggtgcagtgcagg

SEQ ID NO: 191035 - DNA, 25 bp, probe
cctgtggttgtccactgcagtgcag

SEQ ID NO: 191036 - DNA, 25 bp, probe
cctgtggtagtaccgcatctctgat

SEQ ID NO: 191037 - DNA, 25 bp, probe
cctgtgggaggtgctgatgctctgt

SEQ ID NO: 191038 - DNA, 25 bp, probe
cctgtgcagggacagcgagcggtcc

SEQ ID NO: 191039 - DNA, 25 bp, probe
cctgtgcagggacagcgagcggtcc

SEQ ID NO: 191040 - DNA, 25 bp, probe
cctgtggaggagctcttcaagctgc

SEQ ID NO: 191041 - DNA, 25 bp, probe
cctgatcctgggcatctacaagcag

SEQ ID NO: 191042 - DNA, 25 bp, probe
cctgaggagtggcaggaaagaggga

SEQ ID NO: 191043 - DNA, 25 bp, probe
cctgtgggatgggaggagtgaggca

SEQ ID NO: 191044 - DNA, 25 bp, probe
cctgtgcccaggctggagctgatgt

SEQ ID NO: 191045 - DNA, 25 bp, probe
cctgtgccccagatgatggattgat

SEQ ID NO: 191046 - DNA, 25 bp, probe
cctgtgtccttagtgatgtgtgtgt

SEQ ID NO: 191047 - DNA, 25 bp, probe
cctgtggctctttctgatagtgtca

SEQ ID NO: 191048 - DNA, 25 bp, probe
cctgaggatccatcatatagttcaa

SEQ ID NO: 191049 - DNA, 25 bp, probe
cctgaggccagcccatagcatgtga

SEQ ID NO: 191050 - DNA, 25 bp, probe
cctgcaggcgaaccatatttaccta

SEQ ID NO: 191051 - DNA, 25 bp, probe
cctgagacagttccttttagactca

SEQ ID NO: 191052 - DNA, 25 bp, probe
cctgagacacttgacttcacaatcc

SEQ ID NO: 191053 - DNA, 25 bp, probe
cctgtgatcctggctacttcagagg

SEQ ID NO: 191054 - DNA, 25 bp, probe
cctgtacctcgaagtctatgggctc

SEQ ID NO: 191055 - DNA, 25 bp, probe
cctccaaaggaagtctaggagctgg

SEQ ID NO: 191056 - DNA, 25 bp, probe
cctgtccaaagagctggtgagactg

SEQ ID NO: 191057 - DNA, 25 bp, probe
cctctccaaagcactgggtgccgac

SEQ ID NO: 191058 - DNA, 25 bp, probe
cctctccaaagcactgggtgccgac

SEQ ID NO: 191059 - DNA, 25 bp, probe
cctccctgaggcaggtgagaaccca

SEQ ID NO: 191060 - DNA, 25 bp, probe
cctccttggagctcttcaaattcac

SEQ ID NO: 191061 - DNA, 25 bp, probe
cctcgcttggatgcctgtaaggatc

SEQ ID NO: 191062 - DNA, 25 bp, probe
cctgcctctactggcgctgccaagg

SEQ ID NO: 191063 - DNA, 25 bp, probe
cctgagcctcaaagcgtggaattgc

SEQ ID NO: 191064 - DNA, 25 bp, probe
cctgcgtctcagacatgttgagaat

SEQ ID NO: 191065 - DNA, 25 bp, probe
cctgtatcagcgacatgattaaaca

SEQ ID NO: 191066 - DNA, 25 bp, probe
cctgtatgctgcgctgaacagagac

SEQ ID NO: 191067 - DNA, 25 bp, probe
cctgttgcttgagtgtacgtaccgc

SEQ ID NO: 191068 - DNA, 25 bp, probe
cctgcttttgagttgacctgacttc

SEQ ID NO: 191069 - DNA, 25 bp, probe
cctgtttatctgttaactattatcc

SEQ ID NO: 191070 - DNA, 25 bp, probe
cctcgtttctgattaatgctaaatg

SEQ ID NO: 191071 - DNA, 25 bp, probe
cctcgtgtttgctatgccaactagt

SEQ ID NO: 191072 - DNA, 25 bp, probe
cctgcttatatttaggaacatatgc

SEQ ID NO: 191073 - DNA, 25 bp, probe
cctgtccagcttcagagatataagc

SEQ ID NO: 191074 - DNA, 25 bp, probe
cctgtcctgctatatgaagatcacc

SEQ ID NO: 191075 - DNA, 25 bp, probe
cctgtcattgtgtccaatttcaact

SEQ ID NO: 191076 - DNA, 25 bp, probe
cctgccacatgttcatatatcctaa

SEQ ID NO: 191077 - DNA, 25 bp, probe
cctgatcataatttcttcctatact

SEQ ID NO: 191078 - DNA, 25 bp, probe
cctgaatgcaacttctgtgccttgc

SEQ ID NO: 191079 - DNA, 25 bp, probe
cctgaggcactcttccagccttcct

SEQ ID NO: 191080 - DNA, 25 bp, probe
cctgcattgcaggttggcaccttac

SEQ ID NO: 191081 - DNA, 25 bp, probe
ctgcacttgtggcctcgaaggaagc

SEQ ID NO: 191082 - DNA, 25 bp, probe
ccattcgggttattagcagctaaga

SEQ ID NO: 191083 - DNA, 25 bp, probe
cctctggggtcctataccatacaaa

SEQ ID NO: 191084 - DNA, 25 bp, probe
cctcctgggctatattcctgacaaa

SEQ ID NO: 191085 - DNA, 25 bp, probe
cctcttcggtgatctttggtctgaa

SEQ ID NO: 191086 - DNA, 25 bp, probe
cctcttcggtgatctttggtctgaa

SEQ ID NO: 191087 - DNA, 25 bp, probe
cctcttcggtgatctttggtctgaa

SEQ ID NO: 191088 - DNA, 25 bp, probe
cctcctcaaggttgtcttcagacgt

SEQ ID NO: 191089 - DNA, 25 bp, probe
cctgacatcaaggtgctgactctca

SEQ ID NO: 191090 - DNA, 25 bp, probe
cctgagacaagatgctgtcatgcaa

SEQ ID NO: 191091 - DNA, 25 bp, probe
cctgagcacatatcagctgtgctcc

SEQ ID NO: 191092 - DNA, 25 bp, probe
cctgagaatatcctgtgtgtgaatc

SEQ ID NO: 191093 - DNA, 25 bp, probe
cctgcagaagtcaactgtgtgagtg

SEQ ID NO: 191094 - DNA, 25 bp, probe
cctgcagaattcgccatgtacttga

SEQ ID NO: 191095 - DNA, 25 bp, probe
cctcggttcctttgtactggaggag

SEQ ID NO: 191096 - DNA, 25 bp, probe
cctcgaaccgcttggaactgtacag

SEQ ID NO: 191097 - DNA, 25 bp, probe
cctcagaacctttggaatcccactt

SEQ ID NO: 191098 - DNA, 25 bp, probe
cctctggggttctggaccaagttcg

SEQ ID NO: 191099 - DNA, 25 bp, probe
cctctggggttctggaccaagttcg

SEQ ID NO: 191100 - DNA, 25 bp, probe
cctccgggtggatggtccagtttgg

SEQ ID NO: 191101 - DNA, 25 bp, probe
cctgcccggtggtggtgtcaaaagc

SEQ ID NO: 191102 - DNA, 25 bp, probe
cctcgagcggggagggtaatgtgca

SEQ ID NO: 191103 - DNA, 25 bp, probe
gcccgggcaggtacgcggggtatgc

SEQ ID NO: 191104 - DNA, 25 bp, probe
cctgcagggcattgtgtcctggggt

SEQ ID NO: 191105 - DNA, 25 bp, probe
cctcgggccagaccaatggctgaga

SEQ ID NO: 191106 - DNA, 25 bp, probe
cctctggccgtaccactggcatcgt

SEQ ID NO: 191107 - DNA, 25 bp, probe
cctctggccggacagaactggtgct

SEQ ID NO: 191108 - DNA, 25 bp, probe
cctctggccaaatggtacatgtact

SEQ ID NO: 191109 - DNA, 25 bp, probe
cctgcccaccaacgaatcaatgttt

SEQ ID NO: 191110 - DNA, 25 bp, probe
cctgaagatgccccgttattgtctt

SEQ ID NO: 191111 - DNA, 25 bp, probe
cctgatttgctgggcagtttttctg

SEQ ID NO: 191112 - DNA, 25 bp, probe
cctgtttctgctgagtttcttatca

SEQ ID NO: 191113 - DNA, 25 bp, probe
cctgcaattctacagtttcttactg

SEQ ID NO: 191114 - DNA, 25 bp, probe
cctgcaattctacagtttcttactg

SEQ ID NO: 191115 - DNA, 25 bp, probe
cctgcttatctgaaacttcccaact

SEQ ID NO: 191116 - DNA, 25 bp, probe
cctgttgtgtgaaactcactccaca

SEQ ID NO: 191117 - DNA, 25 bp, probe
cctgattgtggaaagcacatctgaa

SEQ ID NO: 191118 - DNA, 25 bp, probe
cctgcttggatctagacagcatctg

SEQ ID NO: 191119 - DNA, 25 bp, probe
cctgtctgacacaatatcaccagag

SEQ ID NO: 191120 - DNA, 25 bp, probe
cctgtgctgatacctccagatatga

SEQ ID NO: 191121 - DNA, 25 bp, probe
cctgctgtgattcttcgaaatctca

SEQ ID NO: 191122 - DNA, 25 bp, probe
cctgcgtgctttataagcctctcac

SEQ ID NO: 191123 - DNA, 25 bp, probe
cctcagcctcatcaaggagacctac

SEQ ID NO: 191124 - DNA, 25 bp, probe
cctcagcctcatcaaggagacctac

SEQ ID NO: 191125 - DNA, 25 bp, probe
cctcacgtatgaggagaagccgccc

SEQ ID NO: 191126 - DNA, 25 bp, probe
cctgaccatgtaggaagagttctcc

SEQ ID NO: 191127 - DNA, 25 bp, probe
cctgacctgcgagtgcaaggacctc

SEQ ID NO: 191128 - DNA, 25 bp, probe
cctgactcccatgcaagtagctggc

SEQ ID NO: 191129 - DNA, 25 bp, probe
cctgtctcactcacagtggatatgg

SEQ ID NO: 191130 - DNA, 25 bp, probe
cctgttactcagcagaccatgaaag

SEQ ID NO: 191131 - DNA, 25 bp, probe
cctgttggctcacagggctgaaagg

SEQ ID NO: 191132 - DNA, 25 bp, probe
cctgtatctctaagtgttgctcaga

SEQ ID NO: 191133 - DNA, 25 bp, probe
cctgtatctctaagtgttgctcaga

SEQ ID NO: 191134 - DNA, 25 bp, probe
cctgtcacattgccgactgatgaag

SEQ ID NO: 191135 - DNA, 25 bp, probe
cctgtcacattgccgactgatgaag

SEQ ID NO: 191136 - DNA, 25 bp, probe
cctgtctctgtggccattgatgcaa

SEQ ID NO: 191137 - DNA, 25 bp, probe
cctgagcagcgtccactcagagcaa

SEQ ID NO: 191138 - DNA, 25 bp, probe
cctgacgctatgacacacagcgcga

SEQ ID NO: 191139 - DNA, 25 bp, probe
cctgatggctgccatccagcacggg

SEQ ID NO: 191140 - DNA, 25 bp, probe
cctgatggcccaaatgtcagggttc

SEQ ID NO: 191141 - DNA, 25 bp, probe
cctgatggaccagtacagcgaggtt

SEQ ID NO: 191142 - DNA, 25 bp, probe
cctgtgccagaagatcgagcagtgt

SEQ ID NO: 191143 - DNA, 25 bp, probe
cctgctgaaagggatgcttgagtac

SEQ ID NO: 191144 - DNA, 25 bp, probe
cctgctgacaggatatcatctagtg

SEQ ID NO: 191145 - DNA, 25 bp, probe
cctgcagaatgggagctaccgctgc

SEQ ID NO: 191146 - DNA, 25 bp, probe
cctgcacgtggggctgacagtgcgc

SEQ ID NO: 191147 - DNA, 25 bp, probe
cctgatgggcagattacagtgggac

SEQ ID NO: 191148 - DNA, 25 bp, probe
cctgcttagatgataaaatgaggca

SEQ ID NO: 191149 - DNA, 25 bp, probe
cctgctgtcgtcttagcaagaagta

SEQ ID NO: 191150 - DNA, 25 bp, probe
cctgctgtcgtcttagcaagaagta

SEQ ID NO: 191151 - DNA, 25 bp, probe
cctgcgctcgacccaagcagaagta

SEQ ID NO: 191152 - DNA, 25 bp, probe
cctgcgctcgacccaagcagaagta

SEQ ID NO: 191153 - DNA, 25 bp, probe
cctgacctactgccatgacaagaaa

SEQ ID NO: 191154 - DNA, 25 bp, probe
cctgactctttcctcacagggaagg

SEQ ID NO: 191155 - DNA, 25 bp, probe
cctgaactgcttgctcatcagaaat

SEQ ID NO: 191156 - DNA, 25 bp, probe
cctgatgtcatccttactcgaagag

SEQ ID NO: 191157 - DNA, 25 bp, probe
cctgattctcccaatctgcagtggg

SEQ ID NO: 191158 - DNA, 25 bp, probe
cctgagtggaccatccgggagttta

SEQ ID NO: 191159 - DNA, 25 bp, probe
cctagggagcactcaggagggttcc

SEQ ID NO: 191160 - DNA, 25 bp, probe
cctgaacgacatcaccgaggagtgt

SEQ ID NO: 191161 - DNA, 25 bp, probe
cctgaacgcagtcatccggaagggc

SEQ ID NO: 191162 - DNA, 25 bp, probe
cctgtaccagatcacctggtggagg

SEQ ID NO: 191163 - DNA, 25 bp, probe
cctgtcccaggattagcagagtgga

SEQ ID NO: 191164 - DNA, 25 bp, probe
cctgtcgcacgtgtaggaggctgcc

SEQ ID NO: 191165 - DNA, 25 bp, probe
cctgtcccgatggcgagtgtttgcc

SEQ ID NO: 191166 - DNA, 25 bp, probe
cctgtagctctggggccaggtcagc

SEQ ID NO: 191167 - DNA, 25 bp, probe
cctgtagccgtggaccgaatacgca

SEQ ID NO: 191168 - DNA, 25 bp, probe
cctgtcagcctaagacctgcaacat

SEQ ID NO: 191169 - DNA, 25 bp, probe
cctgtcagcctaagacctgcaacat

SEQ ID NO: 191170 - DNA, 25 bp, probe
cctgtctaatgaaacctgtgtctct

SEQ ID NO: 191171 - DNA, 25 bp, probe
cctgttgcaataaccactgcttcca

SEQ ID NO: 191172 - DNA, 25 bp, probe
cctgtctcaaatccaatagttcaca

SEQ ID NO: 191173 - DNA, 25 bp, probe
cctccagagaacgatttgtcttcat

SEQ ID NO: 191174 - DNA, 25 bp, probe
ccttcagacgaccttttgtatgatc

SEQ ID NO: 191175 - DNA, 25 bp, probe
cctccagactgctgttcttatcaat

SEQ ID NO: 191176 - DNA, 25 bp, probe
cctccaggcagtttcttacagcaag

SEQ ID NO: 191177 - DNA, 25 bp, probe
cctccaatatgctagtaaacacaag

SEQ ID NO: 191178 - DNA, 25 bp, probe
cctccaagagcgactccaaaaagaa

SEQ ID NO: 191179 - DNA, 25 bp, probe
cctgcaccaggggtgcacaataaag

SEQ ID NO: 191180 - DNA, 25 bp, probe
cctgcccgggcagctcaagaagcag

SEQ ID NO: 191181 - DNA, 25 bp, probe
cctgtcaagtgcgagccacaggaaa

SEQ ID NO: 191182 - DNA, 25 bp, probe
cctgatcatggtgtgcccacagcaa

SEQ ID NO: 191183 - DNA, 25 bp, probe
cctgactggtgctgcagcaccgagg

SEQ ID NO: 191184 - DNA, 25 bp, probe
cctgatggaggctccacactagatc

SEQ ID NO: 191185 - DNA, 25 bp, probe
cctgtcagagcctgccaagatcaca

SEQ ID NO: 191186 - DNA, 25 bp, probe
cctgccaggcacaggcacagtgccc

SEQ ID NO: 191187 - DNA, 25 bp, probe
cctgccaggcctacgaattggccga

SEQ ID NO: 191188 - DNA, 25 bp, probe
cctccaggctctagatggcaaagcc

SEQ ID NO: 191189 - DNA, 25 bp, probe
cctgccgctgcttgagtggacagca

SEQ ID NO: 191190 - DNA, 25 bp, probe
cctgacgctggatgagatggacaat

SEQ ID NO: 191191 - DNA, 25 bp, probe
cctgaagcttgctgagaggccagag

SEQ ID NO: 191192 - DNA, 25 bp, probe
cctgagtctagcctgggagccagga

SEQ ID NO: 191193 - DNA, 25 bp, probe
cctgcattctaattggcaagccctg

SEQ ID NO: 191194 - DNA, 25 bp, probe
cctgctcatcgaaatgctgcaagcc

SEQ ID NO: 191195 - DNA, 25 bp, probe
cctgcatcatcatttgcttcaagcc

SEQ ID NO: 191196 - DNA, 25 bp, probe
cctcaccaattcatcacaactaact

SEQ ID NO: 191197 - DNA, 25 bp, probe
cctcccctccaagagcattaactat

SEQ ID NO: 191198 - DNA, 25 bp, probe
cctcatccccaaactacttgaaaag

SEQ ID NO: 191199 - DNA, 25 bp, probe
cctcccctctaatttgctcaagaaa

SEQ ID NO: 191200 - DNA, 25 bp, probe
cctgcccaccaggattgctggaagt

SEQ ID NO: 191201 - DNA, 25 bp, probe
cctgcaccctcacctgatgcaggaa

SEQ ID NO: 191202 - DNA, 25 bp, probe
cctgagctctcttcgtgatcaagaa

SEQ ID NO: 191203 - DNA, 25 bp, probe
cctgatgcctgcttcttggctaaag

SEQ ID NO: 191204 - DNA, 25 bp, probe
cctgatgcttgctttttggataaac

SEQ ID NO: 191205 - DNA, 25 bp, probe
cctgagctctcactatcatttgaga

SEQ ID NO: 191206 - DNA, 25 bp, probe
cctgacatcatcattcttgtgggag

SEQ ID NO: 191207 - DNA, 25 bp, probe
cctgacatcatcattcttgtgggag

SEQ ID NO: 191208 - DNA, 25 bp, probe
ccttaactattttgtctgccatgtc

SEQ ID NO: 191209 - DNA, 25 bp, probe
cctctacgctttggggctaattctt

SEQ ID NO: 191210 - DNA, 25 bp, probe
cctgttgccttcagtgactacattc

SEQ ID NO: 191211 - DNA, 25 bp, probe
cctgaagactccacatactattatc

SEQ ID NO: 191212 - DNA, 25 bp, probe
cctgaaacctgcatagagtttgcaa

SEQ ID NO: 191213 - DNA, 25 bp, probe
cctgaagtcactgtgacagttctcc

SEQ ID NO: 191214 - DNA, 25 bp, probe
cctgaagtaccccatcgagcacggc

SEQ ID NO: 191215 - DNA, 25 bp, probe
cctgatcaatgagggcggggcctgg

SEQ ID NO: 191216 - DNA, 25 bp, probe
cctgctagaagtgggggactcggcg

SEQ ID NO: 191217 - DNA, 25 bp, probe
cctgctagaagtgggggactcggcg

SEQ ID NO: 191218 - DNA, 25 bp, probe
cctgctagatgagcggggccagatc

SEQ ID NO: 191219 - DNA, 25 bp, probe
cctcatggagatgcttgaggctccc

SEQ ID NO: 191220 - DNA, 25 bp, probe
cctcagggacagtgaggtcccaggc

SEQ ID NO: 191221 - DNA, 25 bp, probe
cctcccagaatggaaagtcccagtg

SEQ ID NO: 191222 - DNA, 25 bp, probe
cctctcccgctaggagagtcctctt

SEQ ID NO: 191223 - DNA, 25 bp, probe
cctcccatcttattgtagttttctt

SEQ ID NO: 191224 - DNA, 25 bp, probe
cctccagaattatgtcaggttggct

SEQ ID NO: 191225 - DNA, 25 bp, probe
cctccatggttacgtcagtcgtgtg

SEQ ID NO: 191226 - DNA, 25 bp, probe
cctccatggttacgtcagtcgtgtg

SEQ ID NO: 191227 - DNA, 25 bp, probe
cctcctcagcttagctgtcaactgg

SEQ ID NO: 191228 - DNA, 25 bp, probe
ccatcgtgctgttcacgtcagacgc

SEQ ID NO: 191229 - DNA, 25 bp, probe
cctcgtgctaaaggacaaacctctc

SEQ ID NO: 191230 - DNA, 25 bp, probe
cctcgtgctaaaggacaaacctctc

SEQ ID NO: 191231 - DNA, 25 bp, probe
cctcgttacagggagtccaacaccg

SEQ ID NO: 191232 - DNA, 25 bp, probe
gcctcgttacagggagtccaacacc

SEQ ID NO: 191233 - DNA, 25 bp, probe
cctctattactgggaccaggaccca

SEQ ID NO: 191234 - DNA, 25 bp, probe
cctgaatttccagacacctgggcca

SEQ ID NO: 191235 - DNA, 25 bp, probe
cctgaatttgacctacttgctgggg

SEQ ID NO: 191236 - DNA, 25 bp, probe
cctgcaatcccagctacttggaagg

SEQ ID NO: 191237 - DNA, 25 bp, probe
cctccaagaatgacttcattggcca

SEQ ID NO: 191238 - DNA, 25 bp, probe
cctcaaatagtgatggtttacacct

SEQ ID NO: 191239 - DNA, 25 bp, probe
cctgaagaagtacggggctaccact

SEQ ID NO: 191240 - DNA, 25 bp, probe
cctgacaaactacggcttctacggc

SEQ ID NO: 191241 - DNA, 25 bp, probe
cctccaaccaagcgtatgtgaagtg

SEQ ID NO: 191242 - DNA, 25 bp, probe
cctccaagccagcgggaatggcagc

SEQ ID NO: 191243 - DNA, 25 bp, probe
cctccaagccagcgggaatggcagc

SEQ ID NO: 191244 - DNA, 25 bp, probe
cctccagactcgagagggctgagcc

SEQ ID NO: 191245 - DNA, 25 bp, probe
ccatccatgacctgggggttgtctt

SEQ ID NO: 191246 - DNA, 25 bp, probe
cctgcctgtaattttgcgtcttttt

SEQ ID NO: 191247 - DNA, 25 bp, probe
cctccttatactctgagtttctttc

SEQ ID NO: 191248 - DNA, 25 bp, probe
cctgctctttaacctggtctactgg

SEQ ID NO: 191249 - DNA, 25 bp, probe
cctgctctttaacctggtctactgg

SEQ ID NO: 191250 - DNA, 25 bp, probe
cctgcacttacaggcgtttcgagct

SEQ ID NO: 191251 - DNA, 25 bp, probe
cctccatctacttagggatcgactg

SEQ ID NO: 191252 - DNA, 25 bp, probe
cctgctaggacaaggtggaagagtg

SEQ ID NO: 191253 - DNA, 25 bp, probe
cctcatgagcgagaccgtcaacagt

SEQ ID NO: 191254 - DNA, 25 bp, probe
cctgcatgacgattatgccgtcccg

SEQ ID NO: 191255 - DNA, 25 bp, probe
cctgcatgacgattatgccgtcccg

SEQ ID NO: 191256 - DNA, 25 bp, probe
cctgaacgttagtctcttgcatggt

SEQ ID NO: 191257 - DNA, 25 bp, probe
cctgaagttttgacttctgctttct

SEQ ID NO: 191258 - DNA, 25 bp, probe
cctgatcaatttcgtatttctgttc

SEQ ID NO: 191259 - DNA, 25 bp, probe
cctgctcaattccagtatgtaccct

SEQ ID NO: 191260 - DNA, 25 bp, probe
cctgatcaatccaagtgctagccac

SEQ ID NO: 191261 - DNA, 25 bp, probe
cctgcgcagcatgcaagagctcagc

SEQ ID NO: 191262 - DNA, 25 bp, probe
cctgctgcagtggtatgagccgctg

SEQ ID NO: 191263 - DNA, 25 bp, probe
cctgccgattgttgacttgctagat

SEQ ID NO: 191264 - DNA, 25 bp, probe
cctgccgattgttgacttgctagat

SEQ ID NO: 191265 - DNA, 25 bp, probe
cctcagctgtcaccagcacttttga

SEQ ID NO: 191266 - DNA, 25 bp, probe
cctcagctgtcaccagcacttttga

SEQ ID NO: 191267 - DNA, 25 bp, probe
cctgagctggagcgagctcttcgtg

SEQ ID NO: 191268 - DNA, 25 bp, probe
cctgctcaggagtacaatgttcgtg

SEQ ID NO: 191269 - DNA, 25 bp, probe
cctgccaggtcgcagtgttcagtgc

SEQ ID NO: 191270 - DNA, 25 bp, probe
cctgcttcgacgtgtgtgtcatggc

SEQ ID NO: 191271 - DNA, 25 bp, probe
cctgctactggcgagtgtttgtgaa

SEQ ID NO: 191272 - DNA, 25 bp, probe
cctctgacgaatgggtatattgaaa

SEQ ID NO: 191273 - DNA, 25 bp, probe
cctccaaaatgtgcctattgctaga

SEQ ID NO: 191274 - DNA, 25 bp, probe
cctgctccagaaagaccttctcaag

SEQ ID NO: 191275 - DNA, 25 bp, probe
cctgctccagaaagaccttctcaag

SEQ ID NO: 191276 - DNA, 25 bp, probe
cctgcaccgagggaacaactcgagc

SEQ ID NO: 191277 - DNA, 25 bp, probe
cctgccccaggatttagatcttggc

SEQ ID NO: 191278 - DNA, 25 bp, probe
cctcaacccagaggctactcttgac

SEQ ID NO: 191279 - DNA, 25 bp, probe
cctgaacgggcgactgtgtcttgac

SEQ ID NO: 191280 - DNA, 25 bp, probe
cctgaagccaggaactatgtctgtg

SEQ ID NO: 191281 - DNA, 25 bp, probe
cctgcaaatcatcgtcactgtgctc

SEQ ID NO: 191282 - DNA, 25 bp, probe
cctgcgagccattgtactctttaac

SEQ ID NO: 191283 - DNA, 25 bp, probe
cctgcaacctggccaccattaaggc

SEQ ID NO: 191284 - DNA, 25 bp, probe
cctgcaccacggcatagcttaggtg

SEQ ID NO: 191285 - DNA, 25 bp, probe
cctgaccacgggccaggaaggcttc

SEQ ID NO: 191286 - DNA, 25 bp, probe
cctgcccacgggaggacaagcaata

SEQ ID NO: 191287 - DNA, 25 bp, probe
cctgcccacgggaggacaagcaata

SEQ ID NO: 191288 - DNA, 25 bp, probe
cctcctacctggagctcaaacagga

SEQ ID NO: 191289 - DNA, 25 bp, probe
cctcctacctggagctcaaacagga

SEQ ID NO: 191290 - DNA, 25 bp, probe
cctcgccttttaggctcaggacgga

SEQ ID NO: 191291 - DNA, 25 bp, probe
cctcacaggtttctccagaaagtac

SEQ ID NO: 191292 - DNA, 25 bp, probe
cctccggtatgtcaccatcatgaac

SEQ ID NO: 191293 - DNA, 25 bp, probe
cctccggtatgtcaccatcatgaac

SEQ ID NO: 191294 - DNA, 25 bp, probe
cctccgtgtggttgacccagatatc

SEQ ID NO: 191295 - DNA, 25 bp, probe
cctgacggtgatcttgggcagaaca

SEQ ID NO: 191296 - DNA, 25 bp, probe
cctgagccctgatttgtggtaggga

SEQ ID NO: 191297 - DNA, 25 bp, probe
cctgaccctgacgttgtgatacgcc

SEQ ID NO: 191298 - DNA, 25 bp, probe
cctgaccctaaaaagaaagccacat

SEQ ID NO: 191299 - DNA, 25 bp, probe
cctgaccccaagaaaggtagcagaa

SEQ ID NO: 191300 - DNA, 25 bp, probe
cctgaacgccaagaagtttgtgcat

SEQ ID NO: 191301 - DNA, 25 bp, probe
cctgacaccctacatgagctcggtg

SEQ ID NO: 191302 - DNA, 25 bp, probe
cctgacacagccaattatacatcgt

SEQ ID NO: 191303 - DNA, 25 bp, probe
cctgagctagcccatgtaaatccgg

SEQ ID NO: 191304 - DNA, 25 bp, probe
cctgactgagctgcttagcactgcc

SEQ ID NO: 191305 - DNA, 25 bp, probe
cctgagtgagtgggatggcatcgtc

SEQ ID NO: 191306 - DNA, 25 bp, probe
cctgagtgagtgggatggcatcgtc

SEQ ID NO: 191307 - DNA, 25 bp, probe
cctgagctcttggatgtggtcagct

SEQ ID NO: 191308 - DNA, 25 bp, probe
cctgagctgtgtgagggcaagccct

SEQ ID NO: 191309 - DNA, 25 bp, probe
cctgagctgtgtgagggcaagccct

SEQ ID NO: 191310 - DNA, 25 bp, probe
cctgagcctgtgcaggaagcaccct

SEQ ID NO: 191311 - DNA, 25 bp, probe
cctaccggaacgtgactgccgagca

SEQ ID NO: 191312 - DNA, 25 bp, probe
cctccgggaccgaaatagccggcag

SEQ ID NO: 191313 - DNA, 25 bp, probe
cctccgggaccgaaatagccggcag

SEQ ID NO: 191314 - DNA, 25 bp, probe
cctccttggtctctaggatccaggc

SEQ ID NO: 191315 - DNA, 25 bp, probe
cctcccgagtagctgggactgcagg

SEQ ID NO: 191316 - DNA, 25 bp, probe
cctgccctagggcttagagcatgga

SEQ ID NO: 191317 - DNA, 25 bp, probe
cctcccaaaggttctgcaggggaat

SEQ ID NO: 191318 - DNA, 25 bp, probe
cctcccaaaggttctgcaggggaat

SEQ ID NO: 191319 - DNA, 25 bp, probe
cctcccattaggacaatcagtcccc

SEQ ID NO: 191320 - DNA, 25 bp, probe
cctcccaggccgaaatggtcaacgc

SEQ ID NO: 191321 - DNA, 25 bp, probe
cctctacggcaccgagaaggtccgc

SEQ ID NO: 191322 - DNA, 25 bp, probe
cctctacggcaccgagaaggtccgc

SEQ ID NO: 191323 - DNA, 25 bp, probe
cctcccgtgaatgtgaagttcccca

SEQ ID NO: 191324 - DNA, 25 bp, probe
cctccaagggatctgcttgatatcc

SEQ ID NO: 191325 - DNA, 25 bp, probe
cctgacaagcggatctctgtagacg

SEQ ID NO: 191326 - DNA, 25 bp, probe
cctgccagggcgattcgggaggccc

SEQ ID NO: 191327 - DNA, 25 bp, probe
cctgcaacggagactccggtgggcc

SEQ ID NO: 191328 - DNA, 25 bp, probe
cctgcaggcggtatccagaggtgag

SEQ ID NO: 191329 - DNA, 25 bp, probe
cctgaggctgctttactctggaata

SEQ ID NO: 191330 - DNA, 25 bp, probe
cctgaggcttgttacattggcacag

SEQ ID NO: 191331 - DNA, 25 bp, probe
cctgaggccttcaactggcgacagg

SEQ ID NO: 191332 - DNA, 25 bp, probe
cctgaggcctgacacggcagatcag

SEQ ID NO: 191333 - DNA, 25 bp, probe
cctctggcttggccacagccagggg

SEQ ID NO: 191334 - DNA, 25 bp, probe
ccttggtgtgtcgcccaggcgacaa

SEQ ID NO: 191335 - DNA, 25 bp, probe
ccttggtgtgtcgcccaggcgacaa

SEQ ID NO: 191336 - DNA, 25 bp, probe
cctgaagttattacccgagccaaag

SEQ ID NO: 191337 - DNA, 25 bp, probe
gcccctttttctgcctaggataagg

SEQ ID NO: 191338 - DNA, 25 bp, probe
cctcctcttcccaccgaaagaagag

SEQ ID NO: 191339 - DNA, 25 bp, probe
cctgcctttgatcattcaccaaaca

SEQ ID NO: 191340 - DNA, 25 bp, probe
cctgccatttatcatatggccatac

SEQ ID NO: 191341 - DNA, 25 bp, probe
cctcctcttcatgtgatgtggaccc

SEQ ID NO: 191342 - DNA, 25 bp, probe
cctcctactgcagtgaggtgacccc

SEQ ID NO: 191343 - DNA, 25 bp, probe
cctcctggctgagctggagtccagc

SEQ ID NO: 191344 - DNA, 25 bp, probe
cctctctgtctgaacttgggcaagg

SEQ ID NO: 191345 - DNA, 25 bp, probe
cctgcctgtctgtacgtgtgtactg

SEQ ID NO: 191346 - DNA, 25 bp, probe
cctcgatgctcttagctgagtgtcc

SEQ ID NO: 191347 - DNA, 25 bp, probe
cctcggctcatccagcttgatgatg

SEQ ID NO: 191348 - DNA, 25 bp, probe
cctcggctcatccagcttgatgatg

SEQ ID NO: 191349 - DNA, 25 bp, probe
cctcgtgccatgatctgtatttaat

SEQ ID NO: 191350 - DNA, 25 bp, probe
cctgctgtcctattttcacaaatat

SEQ ID NO: 191351 - DNA, 25 bp, probe
cctctgggagcatcttcagcaagtt

SEQ ID NO: 191352 - DNA, 25 bp, probe
cctcgtggggagttccaggacttgc

SEQ ID NO: 191353 - DNA, 25 bp, probe
cctcgtggggagttccaggacttgc

SEQ ID NO: 191354 - DNA, 25 bp, probe
cctcctgggcagtcgtaagggttgc

SEQ ID NO: 191355 - DNA, 25 bp, probe
cctcctggagtgagacaagggctcg

SEQ ID NO: 191356 - DNA, 25 bp, probe
cctcctggaaagccaacgggatcag

SEQ ID NO: 191357 - DNA, 25 bp, probe
cctcctggaaagccaacgggatcag

SEQ ID NO: 191358 - DNA, 25 bp, probe
cctgaagagaccagcaagggggcag

SEQ ID NO: 191359 - DNA, 25 bp, probe
cctgaaggtcaaaccggaggagaga

SEQ ID NO: 191360 - DNA, 25 bp, probe
cctgacagctgttgtcctttgggga

SEQ ID NO: 191361 - DNA, 25 bp, probe
cctgcaccgttcactgtatttggag

SEQ ID NO: 191362 - DNA, 25 bp, probe
cctgacctgtggaccgtctttaatg

SEQ ID NO: 191363 - DNA, 25 bp, probe
cctgacctttgaacctctaacattg

SEQ ID NO: 191364 - DNA, 25 bp, probe
cctgccattcttgtcctaaagcaat

SEQ ID NO: 191365 - DNA, 25 bp, probe
cctgccggctatgtcggaagacgac

SEQ ID NO: 191366 - DNA, 25 bp, probe
cctgcctgtgggttcggaaagccca

SEQ ID NO: 191367 - DNA, 25 bp, probe
cctcatcatgggggtcttaacccca

SEQ ID NO: 191368 - DNA, 25 bp, probe
cctgcatcatggaggatttagtacc

SEQ ID NO: 191369 - DNA, 25 bp, probe
cctgcatctggttggtctttattga

SEQ ID NO: 191370 - DNA, 25 bp, probe
cctgcatctggttggtctttattga

SEQ ID NO: 191371 - DNA, 25 bp, probe
cctgccttgttgcggctgttgagaa

SEQ ID NO: 191372 - DNA, 25 bp, probe
cctgccttgttgcggctgttgagaa

SEQ ID NO: 191373 - DNA, 25 bp, probe
cctgcactgtattggaggcctttgc

SEQ ID NO: 191374 - DNA, 25 bp, probe
cctgcactgtattggaggcctttgc

SEQ ID NO: 191375 - DNA, 25 bp, probe
cctgacacagattggcggccttata

SEQ ID NO: 191376 - DNA, 25 bp, probe
cctgacacagattggcggccttata

SEQ ID NO: 191377 - DNA, 25 bp, probe
cctgacccagaggaagcctctattt

SEQ ID NO: 191378 - DNA, 25 bp, probe
cctgaccctgctgagcagcgtgttt

SEQ ID NO: 191379 - DNA, 25 bp, probe
cctgacagcccagagcagcactgtc

SEQ ID NO: 191380 - DNA, 25 bp, probe
cctgaatgcaccataatcgctgtat

SEQ ID NO: 191381 - DNA, 25 bp, probe
cctgcagatcctactgctatcctta

SEQ ID NO: 191382 - DNA, 25 bp, probe
cctgcattgttaatgctaccattga

SEQ ID NO: 191383 - DNA, 25 bp, probe
cctgcagtgatccattgtagcgaag

SEQ ID NO: 191384 - DNA, 25 bp, probe
cctgcatttaattggcagcacaaga

SEQ ID NO: 191385 - DNA, 25 bp, probe
cctgcagctggattacgcaacagta

SEQ ID NO: 191386 - DNA, 25 bp, probe
cctgcaagctgtttccacatcagaa

SEQ ID NO: 191387 - DNA, 25 bp, probe
cctctatggtcttcaacaaggaggg

SEQ ID NO: 191388 - DNA, 25 bp, probe
cctctgagagtgagcaccaacggga

SEQ ID NO: 191389 - DNA, 25 bp, probe
cctcgagcactgaagtcaccattag

SEQ ID NO: 191390 - DNA, 25 bp, probe
cctgctgaagctgaaagtcatgtac

SEQ ID NO: 191391 - DNA, 25 bp, probe
cctgctgggtgcacaagcacttcac

SEQ ID NO: 191392 - DNA, 25 bp, probe
cctgcttgctttgaacctaccagtt

SEQ ID NO: 191393 - DNA, 25 bp, probe
cctgcaggtggtgaacctgcccatt

SEQ ID NO: 191394 - DNA, 25 bp, probe
cctgcggctggaggatacggtcgct

SEQ ID NO: 191395 - DNA, 25 bp, probe
cctgcggctgtgagtcagcgaccga

SEQ ID NO: 191396 - DNA, 25 bp, probe
cctcgtgtggtcatatctgcaccga

SEQ ID NO: 191397 - DNA, 25 bp, probe
cctgcagtttgtacacatggtccga

SEQ ID NO: 191398 - DNA, 25 bp, probe
cctgcagtttgctcctggacagcag

SEQ ID NO: 191399 - DNA, 25 bp, probe
cctgcgcttgatcaactgaaccagt

SEQ ID NO: 191400 - DNA, 25 bp, probe
cctctcaggatccaagctaagcact

SEQ ID NO: 191401 - DNA, 25 bp, probe
cctgctcacagaatcacagctaagg

SEQ ID NO: 191402 - DNA, 25 bp, probe
cctgctacacatgccctgaatgaat

SEQ ID NO: 191403 - DNA, 25 bp, probe
cctgaaacagcttccagagtgtatg

SEQ ID NO: 191404 - DNA, 25 bp, probe
cctgcagcaaatctccaaaatgatg

SEQ ID NO: 191405 - DNA, 25 bp, probe
cctgcagagcaataacactatattt

SEQ ID NO: 191406 - DNA, 25 bp, probe
cctgcagaaattattcttgcactgt

SEQ ID NO: 191407 - DNA, 25 bp, probe
cctgacacgcatctttgcttacagt

SEQ ID NO: 191408 - DNA, 25 bp, probe
cctgcctggagcgtttctagcaagt

SEQ ID NO: 191409 - DNA, 25 bp, probe
cctgcttgctgggctgcttaagaag

SEQ ID NO: 191410 - DNA, 25 bp, probe
cctgcttgctgggctgcttaagaag

SEQ ID NO: 191411 - DNA, 25 bp, probe
cctcattgctgcgatcatgtccaag

SEQ ID NO: 191412 - DNA, 25 bp, probe
cctgcttggctgagtcacaaggggc

SEQ ID NO: 191413 - DNA, 25 bp, probe
cctcatcggcgtcccgaaggaagct

SEQ ID NO: 191414 - DNA, 25 bp, probe
cctccggcggacagctgcttacatg

SEQ ID NO: 191415 - DNA, 25 bp, probe
cctctcggggacattaaaatagtag

SEQ ID NO: 191416 - DNA, 25 bp, probe
cctcccggagtcagcacaaactcag

SEQ ID NO: 191417 - DNA, 25 bp, probe
cctccggcaaacagcagaagcccag

SEQ ID NO: 191418 - DNA, 25 bp, probe
cctcacctcaaagaaacactccagg

SEQ ID NO: 191419 - DNA, 25 bp, probe
cctgccgcattacaacaagcgctcg

SEQ ID NO: 191420 - DNA, 25 bp, probe
cctgacaattcagaaccagctctct

SEQ ID NO: 191421 - DNA, 25 bp, probe
cctgactgtccagagcatccaggtc

SEQ ID NO: 191422 - DNA, 25 bp, probe
cctgactgtggcttcagggcaggcg

SEQ ID NO: 191423 - DNA, 25 bp, probe
cctcattgtgacttatgaggagcaa

SEQ ID NO: 191424 - DNA, 25 bp, probe
cctgcatggcggtgtgggcagcaca

SEQ ID NO: 191425 - DNA, 25 bp, probe
cctgcatccggcttgggtacacagg

SEQ ID NO: 191426 - DNA, 25 bp, probe
cctgcagcacccctgggttcagggg

SEQ ID NO: 191427 - DNA, 25 bp, probe
cctgctgattccccagtttagaggg

SEQ ID NO: 191428 - DNA, 25 bp, probe
cctgctggttgctggattatgggtg

SEQ ID NO: 191429 - DNA, 25 bp, probe
cctctggctgactaaatttggggac

SEQ ID NO: 191430 - DNA, 25 bp, probe
cctctacgaacattctttgggcctc

SEQ ID NO: 191431 - DNA, 25 bp, probe
cctgccatctactttttcttgggca

SEQ ID NO: 191432 - DNA, 25 bp, probe
cctcacaaagcatcatgttcttggg

SEQ ID NO: 191433 - DNA, 25 bp, probe
cctcacaaagcatcatgttcttggg

SEQ ID NO: 191434 - DNA, 25 bp, probe
cctgcaagaggctggcttcttggtc

SEQ ID NO: 191435 - DNA, 25 bp, probe
cctgcgggacaagattcttggtgcc

SEQ ID NO: 191436 - DNA, 25 bp, probe
cctgcgggcagggaagtcttcttgc

SEQ ID NO: 191437 - DNA, 25 bp, probe
cctgcgggcagggaagtcttcttgc

SEQ ID NO: 191438 - DNA, 25 bp, probe
cctgcgggcagggaagtcttcttgc

SEQ ID NO: 191439 - DNA, 25 bp, probe
cctgcttggagctgaatgtttcttg

SEQ ID NO: 191440 - DNA, 25 bp, probe
cctgcagtggactgtcattttcctt

SEQ ID NO: 191441 - DNA, 25 bp, probe
cctgctgttagctttcattattttt

SEQ ID NO: 191442 - DNA, 25 bp, probe
cctcgtttgagttttatctgtttct

SEQ ID NO: 191443 - DNA, 25 bp, probe
cctcgtttgagttttatctgtttct

SEQ ID NO: 191444 - DNA, 25 bp, probe
gctggtttctttgttactatttgtt

SEQ ID NO: 191445 - DNA, 25 bp, probe
gcgttttttctgtgtaatctatttt

SEQ ID NO: 191446 - DNA, 25 bp, probe
cctattcgttgcctttgcaatccta

SEQ ID NO: 191447 - DNA, 25 bp, probe
cctcaatttttctttcaacagtgac

SEQ ID NO: 191448 - DNA, 25 bp, probe
cctcaatttttctttcaacagtgac

SEQ ID NO: 191449 - DNA, 25 bp, probe
cctaagaacttctccaacgacatca

SEQ ID NO: 191450 - DNA, 25 bp, probe
cctaaaacgttaccagcagctgaaa

SEQ ID NO: 191451 - DNA, 25 bp, probe
cctccttacgctttgtcacacaaaa

SEQ ID NO: 191452 - DNA, 25 bp, probe
cctcagtttccttgtgtttacaaga

SEQ ID NO: 191453 - DNA, 25 bp, probe
cctccgttcctggtgtataacaagg

SEQ ID NO: 191454 - DNA, 25 bp, probe
cctccgttcctggtgtataacaagg

SEQ ID NO: 191455 - DNA, 25 bp, probe
cctccatatcctggcggttgaaaag

SEQ ID NO: 191456 - DNA, 25 bp, probe
cctgcaatgtcctggctgtagaaaa

SEQ ID NO: 191457 - DNA, 25 bp, probe
cctgcaatgtcctggctgtagaaaa

SEQ ID NO: 191458 - DNA, 25 bp, probe
cctgccattctgcatgagctgatca

SEQ ID NO: 191459 - DNA, 25 bp, probe
cctccatctgctcatgcagtgtcag

SEQ ID NO: 191460 - DNA, 25 bp, probe
cctgctcaccatctcagtgaggggc

SEQ ID NO: 191461 - DNA, 25 bp, probe
cctccaccatggaagtcagttcctg

SEQ ID NO: 191462 - DNA, 25 bp, probe
cctcccacaggaagaaatgtacatc

SEQ ID NO: 191463 - DNA, 25 bp, probe
cctcagaccaggtggaattacttaa

SEQ ID NO: 191464 - DNA, 25 bp, probe
cctccactgcggggaactttgtgta

SEQ ID NO: 191465 - DNA, 25 bp, probe
cctgcaacaggtgtgacagtttggg

SEQ ID NO: 191466 - DNA, 25 bp, probe
cctgcagaaggctgtaggactcttg

SEQ ID NO: 191467 - DNA, 25 bp, probe
cctgcagaaggctgtaggactcttg

SEQ ID NO: 191468 - DNA, 25 bp, probe
cctgcaaggatctgcagttactttg

SEQ ID NO: 191469 - DNA, 25 bp, probe
cctgcaatgtgtcccgggagtttga

SEQ ID NO: 191470 - DNA, 25 bp, probe
cctgcaatgtgtcccgggagtttga

SEQ ID NO: 191471 - DNA, 25 bp, probe
cctccagtgtactgagggtactggc

SEQ ID NO: 191472 - DNA, 25 bp, probe
cctacaggtacccaggctttatgcc

SEQ ID NO: 191473 - DNA, 25 bp, probe
cctgaaggtttccaacttgctcatg

SEQ ID NO: 191474 - DNA, 25 bp, probe
cctgaaggtttccaacttgctcatg

SEQ ID NO: 191475 - DNA, 25 bp, probe
cctgaaaattctcaagcttctcatt

SEQ ID NO: 191476 - DNA, 25 bp, probe
cctaggaacctcgaagctgttctct

SEQ ID NO: 191477 - DNA, 25 bp, probe
cctcaggaaacggctttgtccgcac

SEQ ID NO: 191478 - DNA, 25 bp, probe
cctgaagcaaaggcgtttattcgac

SEQ ID NO: 191479 - DNA, 25 bp, probe
cctgaagcattactggttcacatcc

SEQ ID NO: 191480 - DNA, 25 bp, probe
cctgctactctgttccttcacatcc

SEQ ID NO: 191481 - DNA, 25 bp, probe
cctgcatgacctgggcattgtacac

SEQ ID NO: 191482 - DNA, 25 bp, probe
cctcaactacatggtttacatgttc

SEQ ID NO: 191483 - DNA, 25 bp, probe
cctcgagctctatttttactgtctg

SEQ ID NO: 191484 - DNA, 25 bp, probe
cctcgagctctatttttactgtctg

SEQ ID NO: 191485 - DNA, 25 bp, probe
cctccgctttcttttatagctgctt

SEQ ID NO: 191486 - DNA, 25 bp, probe
cctccgctttcttttatagctgctt

SEQ ID NO: 191487 - DNA, 25 bp, probe
cctgccactttcaataaagacctga

SEQ ID NO: 191488 - DNA, 25 bp, probe
cctgccatcttgccttaggaacagc

SEQ ID NO: 191489 - DNA, 25 bp, probe
cctccacttggtggggtcaccaact

SEQ ID NO: 191490 - DNA, 25 bp, probe
cctccatcttgggggggcggagcag

SEQ ID NO: 191491 - DNA, 25 bp, probe
cctgctacttggtgaaggagcgggc

SEQ ID NO: 191492 - DNA, 25 bp, probe
cctgaatcatgggcacggagggccg

SEQ ID NO: 191493 - DNA, 25 bp, probe
cctgcagatcacggaccaggtggcc

SEQ ID NO: 191494 - DNA, 25 bp, probe
cctgctgaacacggtcagcgtggcc

SEQ ID NO: 191495 - DNA, 25 bp, probe
cctgcgaccaggatccattgagacg

SEQ ID NO: 191496 - DNA, 25 bp, probe
cctgaaccagctgaggtggagactc

SEQ ID NO: 191497 - DNA, 25 bp, probe
cctgaaccacagcggaggagctccg

SEQ ID NO: 191498 - DNA, 25 bp, probe
cctgcagccctactatgggatggcc

SEQ ID NO: 191499 - DNA, 25 bp, probe
cctgcggccaacatgatggctgggc

SEQ ID NO: 191500 - DNA, 25 bp, probe
cctgcacccaccatgaggcatggag

SEQ ID NO: 191501 - DNA, 25 bp, probe
cctcagtagcctcaaatcatggtga

SEQ ID NO: 191502 - DNA, 25 bp, probe
cctgcagtcacctatacattattta

SEQ ID NO: 191503 - DNA, 25 bp, probe
cctgctctgcaagaatatcatctat

SEQ ID NO: 191504 - DNA, 25 bp, probe
cctgcactctaaggagatcatctac

SEQ ID NO: 191505 - DNA, 25 bp, probe
cctcaccacagatggaattaacttc

SEQ ID NO: 191506 - DNA, 25 bp, probe
tccccccaaacctctgaattttgtg

SEQ ID NO: 191507 - DNA, 25 bp, probe
cctacgggaacctgctagattttct

SEQ ID NO: 191508 - DNA, 25 bp, probe
cctacgggaaggccgtagatgtgtg

SEQ ID NO: 191509 - DNA, 25 bp, probe
cctccgggaagccttgtacagtggc

SEQ ID NO: 191510 - DNA, 25 bp, probe
ccttggggaaggtggctggactgct

SEQ ID NO: 191511 - DNA, 25 bp, probe
cctaatgggtcgctgaggctggtct

SEQ ID NO: 191512 - DNA, 25 bp, probe
cctactgtggattggtgggtttcgg

SEQ ID NO: 191513 - DNA, 25 bp, probe
cctactgtggattggtgggtttcgg

SEQ ID NO: 191514 - DNA, 25 bp, probe
cctcactggtgttttggataacttg

SEQ ID NO: 191515 - DNA, 25 bp, probe
cctgcacaggttaaccgtcagactt

SEQ ID NO: 191516 - DNA, 25 bp, probe
cctgcagggatggggctccacaggc

SEQ ID NO: 191517 - DNA, 25 bp, probe
cctgcagggatgcatgtgtccccgt

SEQ ID NO: 191518 - DNA, 25 bp, probe
cctgcagggatgcatgtgtccccgt

SEQ ID NO: 191519 - DNA, 25 bp, probe
cctcgggatggtcgatcacaactgg

SEQ ID NO: 191520 - DNA, 25 bp, probe
cctctggggaggaaaatactgctct

SEQ ID NO: 191521 - DNA, 25 bp, probe
cctgctggtggttgtagtctttgct

SEQ ID NO: 191522 - DNA, 25 bp, probe
cctctgagttgcttcggttttcata

SEQ ID NO: 191523 - DNA, 25 bp, probe
cctctgagttgcttcggttttcata

SEQ ID NO: 191524 - DNA, 25 bp, probe
cctctggctcaagtggagagtttct

SEQ ID NO: 191525 - DNA, 25 bp, probe
cctcctctcataggccaagcctatt

SEQ ID NO: 191526 - DNA, 25 bp, probe
cctcctccagtacacatcgtatggg

SEQ ID NO: 191527 - DNA, 25 bp, probe
cctcctgctgcgcatggaacagtat

SEQ ID NO: 191528 - DNA, 25 bp, probe
cctgctctagggacgattcgtttga

SEQ ID NO: 191529 - DNA, 25 bp, probe
cctgctctagggacgattcgtttga

SEQ ID NO: 191530 - DNA, 25 bp, probe
cctgcacgggagacaggtctgtctt

SEQ ID NO: 191531 - DNA, 25 bp, probe
cctcactgggcggcaagaggtctcc

SEQ ID NO: 191532 - DNA, 25 bp, probe
cctccatggtggtgagggactcagg

SEQ ID NO: 191533 - DNA, 25 bp, probe
cctccagctgtgcctgagaggtact

SEQ ID NO: 191534 - DNA, 25 bp, probe
cctgctctgggccatgcagaggaag

SEQ ID NO: 191535 - DNA, 25 bp, probe
cctgcatctgctggagggtggtaga

SEQ ID NO: 191536 - DNA, 25 bp, probe
cctgcactgcgggggatgtgatgct

SEQ ID NO: 191537 - DNA, 25 bp, probe
cctgcacgcaatggtggcctatgat

SEQ ID NO: 191538 - DNA, 25 bp, probe
cctgcacagcttgcttgtcgatgtc

SEQ ID NO: 191539 - DNA, 25 bp, probe
cctgcatcctctggttcatgtgagt

SEQ ID NO: 191540 - DNA, 25 bp, probe
cctccatgctgcagtgttcgagtgg

SEQ ID NO: 191541 - DNA, 25 bp, probe
cctgcctgtgagtgacatcggttca

SEQ ID NO: 191542 - DNA, 25 bp, probe
cctgctctctagtgactgcgaggaa

SEQ ID NO: 191543 - DNA, 25 bp, probe
cctccttggtgattccgcagtgaga

SEQ ID NO: 191544 - DNA, 25 bp, probe
cctccgtgcttttctggttgagatc

SEQ ID NO: 191545 - DNA, 25 bp, probe
cctccagctgccagacggtggatgt

SEQ ID NO: 191546 - DNA, 25 bp, probe
cctgcgcctcctggagaagctgggt

SEQ ID NO: 191547 - DNA, 25 bp, probe
cctgcggccgtgcagacagaggagc

SEQ ID NO: 191548 - DNA, 25 bp, probe
cctgcacagcagctgggcacagagg

SEQ ID NO: 191549 - DNA, 25 bp, probe
cctcatcagccgtcaggaagattgg

SEQ ID NO: 191550 - DNA, 25 bp, probe
cctgcagccacttcagagactttga

SEQ ID NO: 191551 - DNA, 25 bp, probe
cctgcagcgccaatgaggatctgct

SEQ ID NO: 191552 - DNA, 25 bp, probe
cctgctgtgcaaggaggcttgctgg

SEQ ID NO: 191553 - DNA, 25 bp, probe
cctgcagtacatagagcgtgacggc

SEQ ID NO: 191554 - DNA, 25 bp, probe
cctgcagtgtgctgttgtgcacgtc

SEQ ID NO: 191555 - DNA, 25 bp, probe
cctgcagctgaggggtgtcacgtgg

SEQ ID NO: 191556 - DNA, 25 bp, probe
cctgcagctgaggggtgtcacgtgg

SEQ ID NO: 191557 - DNA, 25 bp, probe
cctgcccttggtggtcaggatgggt

SEQ ID NO: 191558 - DNA, 25 bp, probe
cctgcccatggccgtcatcatgggg

SEQ ID NO: 191559 - DNA, 25 bp, probe
cctaccatgtgccaaacgggaggcc

SEQ ID NO: 191560 - DNA, 25 bp, probe
cctaccatgtgccaaacgggaggcc

SEQ ID NO: 191561 - DNA, 25 bp, probe
cctgcccagtgcacacaagtgtagg

SEQ ID NO: 191562 - DNA, 25 bp, probe
cctgcccatgtgacatccgcaggtg

SEQ ID NO: 191563 - DNA, 25 bp, probe
cctgcgagtgtgacaagagggctgc

SEQ ID NO: 191564 - DNA, 25 bp, probe
cctgcgggagattaaggctctgcag

SEQ ID NO: 191565 - DNA, 25 bp, probe
cctgcttcaagattaaggccctgag

SEQ ID NO: 191566 - DNA, 25 bp, probe
cctgccatcgaggtcagggcggtgg

SEQ ID NO: 191567 - DNA, 25 bp, probe
cctgccatcgaggtcagggcggtgg

SEQ ID NO: 191568 - DNA, 25 bp, probe
cctagctcagatgatgcgggagtgc

SEQ ID NO: 191569 - DNA, 25 bp, probe
cctgccggatgagtgtgggtgtgat

SEQ ID NO: 191570 - DNA, 25 bp, probe
cctgctgggatctttgagcttgtgg

SEQ ID NO: 191571 - DNA, 25 bp, probe
cctctgggtgtcagatgctctcagg

SEQ ID NO: 191572 - DNA, 25 bp, probe
cctctgggtgtcagatgctctcagg

SEQ ID NO: 191573 - DNA, 25 bp, probe
cctcaggtcgctggagtgcaccagt

SEQ ID NO: 191574 - DNA, 25 bp, probe
cctcggtcgcaggagttgcatcagt

SEQ ID NO: 191575 - DNA, 25 bp, probe
cctcggaccatcgaggtcctgatga

SEQ ID NO: 191576 - DNA, 25 bp, probe
cctgcatggccctcagggacagtga

SEQ ID NO: 191577 - DNA, 25 bp, probe
cctgcatggccctcagggacagtga

SEQ ID NO: 191578 - DNA, 25 bp, probe
cctgcatcgccatatccgagagcag

SEQ ID NO: 191579 - DNA, 25 bp, probe
cctgcatcagcactatatcctgcac

SEQ ID NO: 191580 - DNA, 25 bp, probe
cctgcatcagcactatatcctgcac

SEQ ID NO: 191581 - DNA, 25 bp, probe
cctgcatcaagtcttctgatctcag

SEQ ID NO: 191582 - DNA, 25 bp, probe
cctgctccatgagctcttatgccag

SEQ ID NO: 191583 - DNA, 25 bp, probe
cctgcctgctatgcactttgcaatg

SEQ ID NO: 191584 - DNA, 25 bp, probe
cctcatcgattggcaacttcaatga

SEQ ID NO: 191585 - DNA, 25 bp, probe
cctcatcgattggcaacttcaatga

SEQ ID NO: 191586 - DNA, 25 bp, probe
cctctgcgagtggtttcttgtgcac

SEQ ID NO: 191587 - DNA, 25 bp, probe
cctgctgagcagcgtgtttggtgcg

SEQ ID NO: 191588 - DNA, 25 bp, probe
cctgctgagcagcgtgtttggtgcg

SEQ ID NO: 191589 - DNA, 25 bp, probe
cctgcgagcagctaatgttctggtc

SEQ ID NO: 191590 - DNA, 25 bp, probe
cctgccagcaggaagccctgcaacc

SEQ ID NO: 191591 - DNA, 25 bp, probe
cctgctcagtggcaatcagctccac

SEQ ID NO: 191592 - DNA, 25 bp, probe
cctgcttgggtatgcagcagcctgc

SEQ ID NO: 191593 - DNA, 25 bp, probe
cctgcttgggtatgcagcagcctgc

SEQ ID NO: 191594 - DNA, 25 bp, probe
cctgcttgagttcccagatggctgg

SEQ ID NO: 191595 - DNA, 25 bp, probe
cctgcttcagctccggagtagctgg

SEQ ID NO: 191596 - DNA, 25 bp, probe
cctgcttcagctccggagtagctgg

SEQ ID NO: 191597 - DNA, 25 bp, probe
cctgctgccacgtggagaagggtgt

SEQ ID NO: 191598 - DNA, 25 bp, probe
cctgctccaaaacgaaacaagagat

SEQ ID NO: 191599 - DNA, 25 bp, probe
ccatgctttaaacctaacggatatc

SEQ ID NO: 191600 - DNA, 25 bp, probe
ccagattgtgaagacggacccatat

SEQ ID NO: 191601 - DNA, 25 bp, probe
cctgctgtgggagatcgtgacccta

SEQ ID NO: 191602 - DNA, 25 bp, probe
cctgctggatagggacggacacatc

SEQ ID NO: 191603 - DNA, 25 bp, probe
cctgctgtccctgtcaggacacatg

SEQ ID NO: 191604 - DNA, 25 bp, probe
cctgctgttcctgctgcagatcaag

SEQ ID NO: 191605 - DNA, 25 bp, probe
cctgctgttcctgctgcagatcaag

SEQ ID NO: 191606 - DNA, 25 bp, probe
ccttgccgcactgctggagcagatc

SEQ ID NO: 191607 - DNA, 25 bp, probe
cctgctccacctagctgtagcagac

SEQ ID NO: 191608 - DNA, 25 bp, probe
cctgcccaccatagtgcggaaaggc

SEQ ID NO: 191609 - DNA, 25 bp, probe
cctcctccctgggcagaaagtggcc

SEQ ID NO: 191610 - DNA, 25 bp, probe
cctgccaccactgggcaaacagaag

SEQ ID NO: 191611 - DNA, 25 bp, probe
cctgccacttcctcagcgaagaagt

SEQ ID NO: 191612 - DNA, 25 bp, probe
cctgctacacatacaacactgaaaa

SEQ ID NO: 191613 - DNA, 25 bp, probe
cctaaaatcaatgatcgagaaggtg

SEQ ID NO: 191614 - DNA, 25 bp, probe
cctaaagatccagtccagagaagga

SEQ ID NO: 191615 - DNA, 25 bp, probe
cctccaatgtccttatcaacaagga

SEQ ID NO: 191616 - DNA, 25 bp, probe
cctccaagacaatatcagaaaataa

SEQ ID NO: 191617 - DNA, 25 bp, probe
cctccagagaaacgacaccagcaga

SEQ ID NO: 191618 - DNA, 25 bp, probe
cctccagaaagtcgagcagcaccca

SEQ ID NO: 191619 - DNA, 25 bp, probe
cctccatgacaacaagcacgactgc

SEQ ID NO: 191620 - DNA, 25 bp, probe
cctcatcaaaaccaagtcgcagctg

SEQ ID NO: 191621 - DNA, 25 bp, probe
cctcatcaaaaccaagtcgcagctg

SEQ ID NO: 191622 - DNA, 25 bp, probe
cctctcacgacggagatctgggctt

SEQ ID NO: 191623 - DNA, 25 bp, probe
cctgctgatccaaaaggctctggtt

SEQ ID NO: 191624 - DNA, 25 bp, probe
cctgctgatccaaaaggctctggtt

SEQ ID NO: 191625 - DNA, 25 bp, probe
cctgctcataccaacgtgttttatc

SEQ ID NO: 191626 - DNA, 25 bp, probe
cctgctcataccaacgtgttttatc

SEQ ID NO: 191627 - DNA, 25 bp, probe
ccatgctcaaccactgtggcgttct

SEQ ID NO: 191628 - DNA, 25 bp, probe
ccatgctcaaccactgtggcgttct

SEQ ID NO: 191629 - DNA, 25 bp, probe
cctgcctcatccttctgagagggtt

SEQ ID NO: 191630 - DNA, 25 bp, probe
cctcctgatcctccaaatgaatttg

SEQ ID NO: 191631 - DNA, 25 bp, probe
cctccagatggtccaagatccagat

SEQ ID NO: 191632 - DNA, 25 bp, probe
cctccgcatcgtactatgaacagta

SEQ ID NO: 191633 - DNA, 25 bp, probe
cctcctctcgcatttaaaagtactt

SEQ ID NO: 191634 - DNA, 25 bp, probe
cctgctcctcagtcttgtaaatgta

SEQ ID NO: 191635 - DNA, 25 bp, probe
cctctaatagaggcagtgagactgc

SEQ ID NO: 191636 - DNA, 25 bp, probe
cctctcagtaatgaacaacagcatt

SEQ ID NO: 191637 - DNA, 25 bp, probe
cctcacagggctgcaacaaccagta

SEQ ID NO: 191638 - DNA, 25 bp, probe
cctcgaggagctggttacacctttg

SEQ ID NO: 191639 - DNA, 25 bp, probe
cctgccgaagctgtctgagcagctc

SEQ ID NO: 191640 - DNA, 25 bp, probe
cctgccatcaacgtttggagccttg

SEQ ID NO: 191641 - DNA, 25 bp, probe
cctgccatcaacgtttggagccttg

SEQ ID NO: 191642 - DNA, 25 bp, probe
cctcacggacctggtggagcatttc

SEQ ID NO: 191643 - DNA, 25 bp, probe
cctcctagccccatgtgatgtgaaa

SEQ ID NO: 191644 - DNA, 25 bp, probe
cctcctagccccatgtgatgtgaaa

SEQ ID NO: 191645 - DNA, 25 bp, probe
cctgcttacctctgatggatataaa

SEQ ID NO: 191646 - DNA, 25 bp, probe
cctctgctgccaatgggtcggacaa

SEQ ID NO: 191647 - DNA, 25 bp, probe
cctctgctgccaatgggtcggacaa

SEQ ID NO: 191648 - DNA, 25 bp, probe
cctcctgcccacgggaggacaagca

SEQ ID NO: 191649 - DNA, 25 bp, probe
cctcccccagcagttgaatgacaac

SEQ ID NO: 191650 - DNA, 25 bp, probe
ccattcctccaagctttacatagtc

SEQ ID NO: 191651 - DNA, 25 bp, probe
gcacttgtttaagcgttgactgggc

SEQ ID NO: 191652 - DNA, 25 bp, probe
ccatttattacatcgttcatccggt

SEQ ID NO: 191653 - DNA, 25 bp, probe
cctactttggccatgttagcctggt

SEQ ID NO: 191654 - DNA, 25 bp, probe
cctactttgtgcaggtcatacctcc

SEQ ID NO: 191655 - DNA, 25 bp, probe
cctcgtcaggtgcaggtcagcacgt

SEQ ID NO: 191656 - DNA, 25 bp, probe
cctccgcaagagcatgatcatcagc

SEQ ID NO: 191657 - DNA, 25 bp, probe
cctccgcaagagcatgatcatcagc

SEQ ID NO: 191658 - DNA, 25 bp, probe
cctccccatgactgtcatcagtgtc

SEQ ID NO: 191659 - DNA, 25 bp, probe
cctcccagagaacgtctgcaacatc

SEQ ID NO: 191660 - DNA, 25 bp, probe
cctgcccaggcattggaggcaatcc

SEQ ID NO: 191661 - DNA, 25 bp, probe
cctgcccaggcattggaggcaatcc

SEQ ID NO: 191662 - DNA, 25 bp, probe
cctcatcacggccatggatgccaat

SEQ ID NO: 191663 - DNA, 25 bp, probe
cctcatcacggccatggatgccaat

SEQ ID NO: 191664 - DNA, 25 bp, probe
cctagccgggagggctccattgagg

SEQ ID NO: 191665 - DNA, 25 bp, probe
cctatactgggggacatcccgatgg

SEQ ID NO: 191666 - DNA, 25 bp, probe
cctctttggggcaagatccaggtgg

SEQ ID NO: 191667 - DNA, 25 bp, probe
cctgctgataggggctccccagcag

SEQ ID NO: 191668 - DNA, 25 bp, probe
cctgctgataggggctccccagcag

SEQ ID NO: 191669 - DNA, 25 bp, probe
cctgctgaagcggaatatctcccca

SEQ ID NO: 191670 - DNA, 25 bp, probe
cctgctgaagcggaatatctcccca

SEQ ID NO: 191671 - DNA, 25 bp, probe
cctgctacacgacacacatgtctcg

SEQ ID NO: 191672 - DNA, 25 bp, probe
cctgctacacgacacacatgtctcg

SEQ ID NO: 191673 - DNA, 25 bp, probe
cctcgacaggtggaacatgttacca

SEQ ID NO: 191674 - DNA, 25 bp, probe
cctgctggaggggcaccatgtgtga

SEQ ID NO: 191675 - DNA, 25 bp, probe
cctgctggaggggcaccatgtgtga

SEQ ID NO: 191676 - DNA, 25 bp, probe
cctgctggaggggcaccatgtgtga

SEQ ID NO: 191677 - DNA, 25 bp, probe
cctgccaagggcgcgcagtggatga

SEQ ID NO: 191678 - DNA, 25 bp, probe
cctccacaggaggacctcggcagag

SEQ ID NO: 191679 - DNA, 25 bp, probe
cctccacaggaggacctcggcagag

SEQ ID NO: 191680 - DNA, 25 bp, probe
cctgcccagcatgggaccctaagag

SEQ ID NO: 191681 - DNA, 25 bp, probe
cctgctggagatgtacagcctgaag

SEQ ID NO: 191682 - DNA, 25 bp, probe
cctgcgcaaatgctgtcaccgatat

SEQ ID NO: 191683 - DNA, 25 bp, probe
cctcatgcgattctccatcaggaat

SEQ ID NO: 191684 - DNA, 25 bp, probe
cctgctcaacttaggctcagtgaaa

SEQ ID NO: 191685 - DNA, 25 bp, probe
cctccagtgctgtagagtcggaaac

SEQ ID NO: 191686 - DNA, 25 bp, probe
cctccagcatccagtatcggaaagc

SEQ ID NO: 191687 - DNA, 25 bp, probe
cctctgcagccgggaagtggaaggc

SEQ ID NO: 191688 - DNA, 25 bp, probe
cctatgaccggtatgcggccatatg

SEQ ID NO: 191689 - DNA, 25 bp, probe
cctaaccaggccctgcgggagatta

SEQ ID NO: 191690 - DNA, 25 bp, probe
cctcagagcaaatccttggcgaaaa

SEQ ID NO: 191691 - DNA, 25 bp, probe
cctctgacccttccattgaggaaat

SEQ ID NO: 191692 - DNA, 25 bp, probe
cctcgaccactacatcgagcgtgca

SEQ ID NO: 191693 - DNA, 25 bp, probe
cctgcgaaagtgccttctaggtgct

SEQ ID NO: 191694 - DNA, 25 bp, probe
cctgcgaaagtgccttctaggtgct

SEQ ID NO: 191695 - DNA, 25 bp, probe
cctcgaaacgtcttgcgggtgtgaa

SEQ ID NO: 191696 - DNA, 25 bp, probe
cctcgaagtagtggctgcgggtgct

SEQ ID NO: 191697 - DNA, 25 bp, probe
cctcgacagctgattggcggattgg

SEQ ID NO: 191698 - DNA, 25 bp, probe
cctgctgggcgagatgccggagggg

SEQ ID NO: 191699 - DNA, 25 bp, probe
cctcttggagatgaccgttgcgttg

SEQ ID NO: 191700 - DNA, 25 bp, probe
cctcctgaacatggaccgattgggc

SEQ ID NO: 191701 - DNA, 25 bp, probe
ccatactgaacagcatcaatttcga

SEQ ID NO: 191702 - DNA, 25 bp, probe
cctgcctctcacacacatagattaa

SEQ ID NO: 191703 - DNA, 25 bp, probe
cctgcctctcacacacatagattaa

SEQ ID NO: 191704 - DNA, 25 bp, probe
cctgcctctcacacacatagattaa

SEQ ID NO: 191705 - DNA, 25 bp, probe
cctcctcgtgctggaagaattcaag

SEQ ID NO: 191706 - DNA, 25 bp, probe
cctcctcgtgctggaagaattcaag

SEQ ID NO: 191707 - DNA, 25 bp, probe
cctcctttgtgcaaattaaatttga

SEQ ID NO: 191708 - DNA, 25 bp, probe
gcctccttggtcacattattttggt

SEQ ID NO: 191709 - DNA, 25 bp, probe
cctccttgttctactcatatatatc

SEQ ID NO: 191710 - DNA, 25 bp, probe
cctccactatgtagtcatcatgaat

SEQ ID NO: 191711 - DNA, 25 bp, probe
cctgccacctgaggaacagatgatt

SEQ ID NO: 191712 - DNA, 25 bp, probe
cctgcccacagatgatgaggatggt

SEQ ID NO: 191713 - DNA, 25 bp, probe
cctgccaccagccagctgtgtggca

SEQ ID NO: 191714 - DNA, 25 bp, probe
cctccactcgcaaagcattgtgcac

SEQ ID NO: 191715 - DNA, 25 bp, probe
cctccttggcaatgcatttgatggc

SEQ ID NO: 191716 - DNA, 25 bp, probe
cctcctcactaatgcacttgactag

SEQ ID NO: 191717 - DNA, 25 bp, probe
cctcctcccaagcacttcaaaggaa

SEQ ID NO: 191718 - DNA, 25 bp, probe
ccacatctggcctaggaccttaaat

SEQ ID NO: 191719 - DNA, 25 bp, probe
cctcctgagtgctggacctcattaa

SEQ ID NO: 191720 - DNA, 25 bp, probe
cctactgaggaggggaccttcgagg

SEQ ID NO: 191721 - DNA, 25 bp, probe
cctcctgaggaggtgtactcggcgg

SEQ ID NO: 191722 - DNA, 25 bp, probe
cctcaggggacaggtacctggtgtg

SEQ ID NO: 191723 - DNA, 25 bp, probe
cctcaggggacaggtacctggtgtg

SEQ ID NO: 191724 - DNA, 25 bp, probe
cctctgtggggcagtatctggtcct

SEQ ID NO: 191725 - DNA, 25 bp, probe
cctctgtggggcagtatctggtcct

SEQ ID NO: 191726 - DNA, 25 bp, probe
cctcactgataggggttctgtgtct

SEQ ID NO: 191727 - DNA, 25 bp, probe
cctcactgataggggttctgtgtct

SEQ ID NO: 191728 - DNA, 25 bp, probe
cctgcctgaaaagcctgctgtgtac

SEQ ID NO: 191729 - DNA, 25 bp, probe
cctgcctgaaaagcctgctgtgtac

SEQ ID NO: 191730 - DNA, 25 bp, probe
cctccgacatagtgctagtgtctcc

SEQ ID NO: 191731 - DNA, 25 bp, probe
cctctctgaatagtgtgtatgtgtt

SEQ ID NO: 191732 - DNA, 25 bp, probe
cctcgtgcacatcctgttgtgttta

SEQ ID NO: 191733 - DNA, 25 bp, probe
cctcttaccctttgtgaactgcagg

SEQ ID NO: 191734 - DNA, 25 bp, probe
cctcctacagccttaagtcccaggc

SEQ ID NO: 191735 - DNA, 25 bp, probe
cctcaaagcactttcatggctgccc

SEQ ID NO: 191736 - DNA, 25 bp, probe
cctcctcacagttgccatgtagacc

SEQ ID NO: 191737 - DNA, 25 bp, probe
cctcctcacagttgccatgtagacc

SEQ ID NO: 191738 - DNA, 25 bp, probe
cctcctcatagctgacattgaactt

SEQ ID NO: 191739 - DNA, 25 bp, probe
cctccttagcaccaactgtgtctta

SEQ ID NO: 191740 - DNA, 25 bp, probe
cctccttagcaccaactgtgtctta

SEQ ID NO: 191741 - DNA, 25 bp, probe
cctctctgtcagtgctactgtggct

SEQ ID NO: 191742 - DNA, 25 bp, probe
cctctctgccagtgtttgggtgggt

SEQ ID NO: 191743 - DNA, 25 bp, probe
cctccgctctacatttgtgtttgtg

SEQ ID NO: 191744 - DNA, 25 bp, probe
cctcatccctacaacaatgtttata

SEQ ID NO: 191745 - DNA, 25 bp, probe
cctcatccctacaacaatgtttata

SEQ ID NO: 191746 - DNA, 25 bp, probe
cctccactctacaaggagctcttca

SEQ ID NO: 191747 - DNA, 25 bp, probe
cctcccaatccaagtagcatctgta

SEQ ID NO: 191748 - DNA, 25 bp, probe
cctccatcgtctacgttatctgcat

SEQ ID NO: 191749 - DNA, 25 bp, probe
cctccatcgtctacgttatctgcat

SEQ ID NO: 191750 - DNA, 25 bp, probe
cctccatcgtctacgttatctgcat

SEQ ID NO: 191751 - DNA, 25 bp, probe
cctgcctcagacaagagcctttgtt

SEQ ID NO: 191752 - DNA, 25 bp, probe
cctccatcagagaaactggttttca

SEQ ID NO: 191753 - DNA, 25 bp, probe
cctccagcagagtaacattattgtt

SEQ ID NO: 191754 - DNA, 25 bp, probe
cctccagtgaagtagcctcttgtgt

SEQ ID NO: 191755 - DNA, 25 bp, probe
cctccgtgaagaagaccatggtgtg

SEQ ID NO: 191756 - DNA, 25 bp, probe
cctcgctgcagcaagagaacaaggt

SEQ ID NO: 191757 - DNA, 25 bp, probe
cctccagcaccaatgccacagagga

SEQ ID NO: 191758 - DNA, 25 bp, probe
cctccagcaccaatgccacagagga

SEQ ID NO: 191759 - DNA, 25 bp, probe
ccatggaaccaaatcaagaggaaac

SEQ ID NO: 191760 - DNA, 25 bp, probe
cctgcgcatgctgaaataactggaa

SEQ ID NO: 191761 - DNA, 25 bp, probe
cctctgcatgtgttcaacagcctgg

SEQ ID NO: 191762 - DNA, 25 bp, probe
cctctgagttcctacatcaatgcca

SEQ ID NO: 191763 - DNA, 25 bp, probe
cctgcgcgcttccatcaagaaggag

SEQ ID NO: 191764 - DNA, 25 bp, probe
cctcgccctaccaagagggcacctg

SEQ ID NO: 191765 - DNA, 25 bp, probe
cctcgccctaccaagagggcacctg

SEQ ID NO: 191766 - DNA, 25 bp, probe
cctcgccctaccaagagggcacctg

SEQ ID NO: 191767 - DNA, 25 bp, probe
cctcctcctcccatgaggtggggag

SEQ ID NO: 191768 - DNA, 25 bp, probe
cctctagccatcccttggggaaggg

SEQ ID NO: 191769 - DNA, 25 bp, probe
ccttcaactggtatggtgaacagtg

SEQ ID NO: 191770 - DNA, 25 bp, probe
ccttctccttatgtgggaaatgggc

SEQ ID NO: 191771 - DNA, 25 bp, probe
ccttatccttagctatgccaacagc

SEQ ID NO: 191772 - DNA, 25 bp, probe
cctctcaatttactaactaccagca

SEQ ID NO: 191773 - DNA, 25 bp, probe
ccttcagcttttatagtcacccagc

SEQ ID NO: 191774 - DNA, 25 bp, probe
ccttttttatgcttagaacaccagg

SEQ ID NO: 191775 - DNA, 25 bp, probe
cctttgtttcgggagatcaactggg

SEQ ID NO: 191776 - DNA, 25 bp, probe
cctctttttccaggcaatgacgtcg

SEQ ID NO: 191777 - DNA, 25 bp, probe
cctctatgccctgcagagcaataac

SEQ ID NO: 191778 - DNA, 25 bp, probe
cctcttggctcgggtgcagagttca

SEQ ID NO: 191779 - DNA, 25 bp, probe
cctcttggctcgggtgcagagttca

SEQ ID NO: 191780 - DNA, 25 bp, probe
cctcgctgcgatctattgaaagtca

SEQ ID NO: 191781 - DNA, 25 bp, probe
cctgcctcgcatatatcttcagaga

SEQ ID NO: 191782 - DNA, 25 bp, probe
cctgcctcgcatatatcttcagaga

SEQ ID NO: 191783 - DNA, 25 bp, probe
cctccacagtaagtgctgtcagtga

SEQ ID NO: 191784 - DNA, 25 bp, probe
cctccacatgtatccacatctgagc

SEQ ID NO: 191785 - DNA, 25 bp, probe
cctccagcgatgtacgcactgtcag

SEQ ID NO: 191786 - DNA, 25 bp, probe
cctccaggatactacgcttgctgaa

SEQ ID NO: 191787 - DNA, 25 bp, probe
cctccagagatgcgcacctagtgag

SEQ ID NO: 191788 - DNA, 25 bp, probe
cctcggagatgcctgccaaatggaa

SEQ ID NO: 191789 - DNA, 25 bp, probe
cctcgagaagccaacagagcagtaa

SEQ ID NO: 191790 - DNA, 25 bp, probe
cctcatacaagtaaacacagaaagt

SEQ ID NO: 191791 - DNA, 25 bp, probe
cctctcctactctacagcattaaag

SEQ ID NO: 191792 - DNA, 25 bp, probe
cctcacctgagtcccaagtacaagg

SEQ ID NO: 191793 - DNA, 25 bp, probe
cctcacctgagtcccaagtacaagg

SEQ ID NO: 191794 - DNA, 25 bp, probe
cctcctcattatcgccatggtgaag

SEQ ID NO: 191795 - DNA, 25 bp, probe
cctcctgattccagctagtgtcagc

SEQ ID NO: 191796 - DNA, 25 bp, probe
cctcctgattccagctagtgtcagc

SEQ ID NO: 191797 - DNA, 25 bp, probe
cctcataattccagagaagggcatt

SEQ ID NO: 191798 - DNA, 25 bp, probe
cctcataattccagagaagggcatt

SEQ ID NO: 191799 - DNA, 25 bp, probe
cctctacatcccctggaagtacaag

SEQ ID NO: 191800 - DNA, 25 bp, probe
cctctacacacaggtcccaaacagg

SEQ ID NO: 191801 - DNA, 25 bp, probe
cctcttccagccgcagaagaacgtg

SEQ ID NO: 191802 - DNA, 25 bp, probe
cctcctccagactcgagagggctga

SEQ ID NO: 191803 - DNA, 25 bp, probe
ccttccgcagagggcaggttggcca

SEQ ID NO: 191804 - DNA, 25 bp, probe
cctctctgccagggagggttcacca

SEQ ID NO: 191805 - DNA, 25 bp, probe
cctcttcctgggagatgcgtacgca

SEQ ID NO: 191806 - DNA, 25 bp, probe
cctctttccaggacctcagtaggca

SEQ ID NO: 191807 - DNA, 25 bp, probe
cctctgcagtctctataccaataaa

SEQ ID NO: 191808 - DNA, 25 bp, probe
cctctatgtcaggattaccagatta

SEQ ID NO: 191809 - DNA, 25 bp, probe
ccatctttaagttcccagaccaata

SEQ ID NO: 191810 - DNA, 25 bp, probe
ccatttctaatggccaaaccacaaa

SEQ ID NO: 191811 - DNA, 25 bp, probe
cctccatctcaagggatcaacccaa

SEQ ID NO: 191812 - DNA, 25 bp, probe
cctccattcagaagttccatcacta

SEQ ID NO: 191813 - DNA, 25 bp, probe
cctccatccatgtgttccaaatttg

SEQ ID NO: 191814 - DNA, 25 bp, probe
cctccacccatcattgacaagatct

SEQ ID NO: 191815 - DNA, 25 bp, probe
cctaactccattttgaaagctgcta

SEQ ID NO: 191816 - DNA, 25 bp, probe
cctccacgactttctgaacagtgcg

SEQ ID NO: 191817 - DNA, 25 bp, probe
cctccacgactttctgaacagtgcg

SEQ ID NO: 191818 - DNA, 25 bp, probe
cctcctcgagaagccaacagagcag

SEQ ID NO: 191819 - DNA, 25 bp, probe
cctcctcggacaccagagacaataa

SEQ ID NO: 191820 - DNA, 25 bp, probe
cctccggctgacccaaggaaaaatg

SEQ ID NO: 191821 - DNA, 25 bp, probe
cctcagggtagcaccatggcaggac

SEQ ID NO: 191822 - DNA, 25 bp, probe
cctcaggtggggcgcaggagagcca

SEQ ID NO: 191823 - DNA, 25 bp, probe
cctcatggacgctcgcgaggagcag

SEQ ID NO: 191824 - DNA, 25 bp, probe
cctcatggcacaggagaagggggca

SEQ ID NO: 191825 - DNA, 25 bp, probe
cctcacctacgacagtgcgagactg

SEQ ID NO: 191826 - DNA, 25 bp, probe
cctccatccacgacagagatgccaa

SEQ ID NO: 191827 - DNA, 25 bp, probe
cctcctgtcacagctggatgatcaa

SEQ ID NO: 191828 - DNA, 25 bp, probe
cctcagctgcatggagcctggaact

SEQ ID NO: 191829 - DNA, 25 bp, probe
cctcgtttgagcctgaagcactggg

SEQ ID NO: 191830 - DNA, 25 bp, probe
cctcagcctttggcgcacagaaggg

SEQ ID NO: 191831 - DNA, 25 bp, probe
cctcccacactggatgatgcagaac

SEQ ID NO: 191832 - DNA, 25 bp, probe
cctccaacacatccatggcagacag

SEQ ID NO: 191833 - DNA, 25 bp, probe
cctccaccagctcatgctggactgt

SEQ ID NO: 191834 - DNA, 25 bp, probe
cctcccaaagctggctgagactctg

SEQ ID NO: 191835 - DNA, 25 bp, probe
cctccctcacactgcatgtgatttg

SEQ ID NO: 191836 - DNA, 25 bp, probe
cctctccccagatatctgagcataa

SEQ ID NO: 191837 - DNA, 25 bp, probe
ccttcccggatgatccgaaagacaa

SEQ ID NO: 191838 - DNA, 25 bp, probe
ccttcccaggtgattgtttagtaca

SEQ ID NO: 191839 - DNA, 25 bp, probe
cctcctccagggtgattttatgatc

SEQ ID NO: 191840 - DNA, 25 bp, probe
cctcttccatgtctctaatgttagt

SEQ ID NO: 191841 - DNA, 25 bp, probe
cctcttcctgtcttaccaaacagtg

SEQ ID NO: 191842 - DNA, 25 bp, probe
cctctctctactttaccatgacaag

SEQ ID NO: 191843 - DNA, 25 bp, probe
cctccactagcatctacctggaggc

SEQ ID NO: 191844 - DNA, 25 bp, probe
cctccacctgcttgctaggggcagg

SEQ ID NO: 191845 - DNA, 25 bp, probe
cctccacctgcttgctaggggcagg

SEQ ID NO: 191846 - DNA, 25 bp, probe
cctccaactgtctcagagtctcagg

SEQ ID NO: 191847 - DNA, 25 bp, probe
cctccaacaataaagagctcaagtg

SEQ ID NO: 191848 - DNA, 25 bp, probe
cctccaacttcatttgatgctaaat

SEQ ID NO: 191849 - DNA, 25 bp, probe
cctcaaacttctgtgcacaaagtgc

SEQ ID NO: 191850 - DNA, 25 bp, probe
ccatacagacccgttcaagaaccag

SEQ ID NO: 191851 - DNA, 25 bp, probe
tcctaaaactctatcaggtcccaaa

SEQ ID NO: 191852 - DNA, 25 bp, probe
cctaagtactccagcagagtcccac

SEQ ID NO: 191853 - DNA, 25 bp, probe
cctccagtgactaccgggtacagac

SEQ ID NO: 191854 - DNA, 25 bp, probe
cctccaggactaggctggaggaagc

SEQ ID NO: 191855 - DNA, 25 bp, probe
cctccagaagtgcccggagaagcgc

SEQ ID NO: 191856 - DNA, 25 bp, probe
cctctcaggagaccctgctgtcaag

SEQ ID NO: 191857 - DNA, 25 bp, probe
cctccggaggcccaagatccatggg

SEQ ID NO: 191858 - DNA, 25 bp, probe
cctccggaggcccaagatccatggg

SEQ ID NO: 191859 - DNA, 25 bp, probe
cctccggaggcccaagatccatggg

SEQ ID NO: 191860 - DNA, 25 bp, probe
cctccggaggcccaagatccatggg

SEQ ID NO: 191861 - DNA, 25 bp, probe
cctcctaggagtacaagtgcctggg

SEQ ID NO: 191862 - DNA, 25 bp, probe
cctccatttagggatttgcttggga

SEQ ID NO: 191863 - DNA, 25 bp, probe
cctcctgttattgcactggtctgtg

SEQ ID NO: 191864 - DNA, 25 bp, probe
cctctggcttattgcctcagagttg

SEQ ID NO: 191865 - DNA, 25 bp, probe
cctctggcttattgcctcagagttg

SEQ ID NO: 191866 - DNA, 25 bp, probe
cctctggcaataccatgtcagcctc

SEQ ID NO: 191867 - DNA, 25 bp, probe
cctctgtcacttccagtgaagtcca

SEQ ID NO: 191868 - DNA, 25 bp, probe
cctctgacttcaacagcgacaccca

SEQ ID NO: 191869 - DNA, 25 bp, probe
ccattacgtcatgcaggaacatcgc

SEQ ID NO: 191870 - DNA, 25 bp, probe
ccataaatatattcagagtaacaca

SEQ ID NO: 191871 - DNA, 25 bp, probe
cctaatatcatttgtactgaagacc

SEQ ID NO: 191872 - DNA, 25 bp, probe
cctcgtatcatccatctacttgggg

SEQ ID NO: 191873 - DNA, 25 bp, probe
cctatgtaccgcttcactgaggggc

SEQ ID NO: 191874 - DNA, 25 bp, probe
cctcattcccaaaccggtggagcag

SEQ ID NO: 191875 - DNA, 25 bp, probe
cctcgtaccaatcatcttgggacag

SEQ ID NO: 191876 - DNA, 25 bp, probe
ccacagtaccaatactttcccaaca

SEQ ID NO: 191877 - DNA, 25 bp, probe
cctcgtccacaatagtcaatcctaa

SEQ ID NO: 191878 - DNA, 25 bp, probe
cctcagaacaattgaactcccctaa

SEQ ID NO: 191879 - DNA, 25 bp, probe
cctaaacaaggatctgatgacgcaa

SEQ ID NO: 191880 - DNA, 25 bp, probe
cctaaacaacgttctatctggcaac

SEQ ID NO: 191881 - DNA, 25 bp, probe
cctcaatacccctagtatctggctg

SEQ ID NO: 191882 - DNA, 25 bp, probe
cctctgaaccctgttagggcttggt

SEQ ID NO: 191883 - DNA, 25 bp, probe
cctcaaaccctgtggggcctgatgg

SEQ ID NO: 191884 - DNA, 25 bp, probe
cctccattccctatgggttctgtga

SEQ ID NO: 191885 - DNA, 25 bp, probe
cctccattccctatgggttctgtga

SEQ ID NO: 191886 - DNA, 25 bp, probe
cctccattccctatgggttctgtga

SEQ ID NO: 191887 - DNA, 25 bp, probe
cctccatttccacttggtgtttggt

SEQ ID NO: 191888 - DNA, 25 bp, probe
cctcatttaccagtgctttttcttt

SEQ ID NO: 191889 - DNA, 25 bp, probe
cctagcattactagatgcagtttct

SEQ ID NO: 191890 - DNA, 25 bp, probe
cctatatgctacttagcggtttgtc

SEQ ID NO: 191891 - DNA, 25 bp, probe
cctcaagtgcattcctgggattttc

SEQ ID NO: 191892 - DNA, 25 bp, probe
cctcatcagaagtactggcttcttt

SEQ ID NO: 191893 - DNA, 25 bp, probe
cctcatcacatcctagccgatgtct

SEQ ID NO: 191894 - DNA, 25 bp, probe
cctccagggatcagctgtgtgtgtg

SEQ ID NO: 191895 - DNA, 25 bp, probe
cctactaagagcagcgggcctgtcc

SEQ ID NO: 191896 - DNA, 25 bp, probe
ccttcattagtcacatgggcacctc

SEQ ID NO: 191897 - DNA, 25 bp, probe
ccttcagtaccgacgtacacttctg

SEQ ID NO: 191898 - DNA, 25 bp, probe
ccttcagtaccgacgtacacttctg

SEQ ID NO: 191899 - DNA, 25 bp, probe
ccattcccactcttttacagaatcg

SEQ ID NO: 191900 - DNA, 25 bp, probe
gccttccgccttgtggagaaatcct

SEQ ID NO: 191901 - DNA, 25 bp, probe
cctccccgtaggagcagagagcacc

SEQ ID NO: 191902 - DNA, 25 bp, probe
cctccccgtaggagcagagagcacc

SEQ ID NO: 191903 - DNA, 25 bp, probe
cctcccccatcagtttgcaggagca

SEQ ID NO: 191904 - DNA, 25 bp, probe
cctccccctcaggcgtgaatgaggt

SEQ ID NO: 191905 - DNA, 25 bp, probe
cctcccgcggcgacttggagagagg

SEQ ID NO: 191906 - DNA, 25 bp, probe
cctctccctgtacctgggggagctg

SEQ ID NO: 191907 - DNA, 25 bp, probe
cctctgtcgtccacaggggatggga

SEQ ID NO: 191908 - DNA, 25 bp, probe
cctctgtcttttctgggatgtggta

SEQ ID NO: 191909 - DNA, 25 bp, probe
cctctgttttatggctttctgggaa

SEQ ID NO: 191910 - DNA, 25 bp, probe
cctctggtgttgggcttgttgattg

SEQ ID NO: 191911 - DNA, 25 bp, probe
cctcctggtcagtacatggattctt

SEQ ID NO: 191912 - DNA, 25 bp, probe
cctcctgtgtgagacctgattctca

SEQ ID NO: 191913 - DNA, 25 bp, probe
cctccgcagtatacacgtacatcca

SEQ ID NO: 191914 - DNA, 25 bp, probe
cctcccatcatgaaacaaactctgc

SEQ ID NO: 191915 - DNA, 25 bp, probe
cctcaagcactggaacacgatcctc

SEQ ID NO: 191916 - DNA, 25 bp, probe
cctcaacctgggaaacttcactgag

SEQ ID NO: 191917 - DNA, 25 bp, probe
ccataccgggctacaattctttgag

SEQ ID NO: 191918 - DNA, 25 bp, probe
cctacaacgtgtcccatgtcgtggg

SEQ ID NO: 191919 - DNA, 25 bp, probe
cctacaatctgactcaactgccagg

SEQ ID NO: 191920 - DNA, 25 bp, probe
cctacatttgagacactgcgttgga

SEQ ID NO: 191921 - DNA, 25 bp, probe
cctacatttgagacactgcgttgga

SEQ ID NO: 191922 - DNA, 25 bp, probe
cctcctcggagaagcagcgcttcta

SEQ ID NO: 191923 - DNA, 25 bp, probe
cctcccagtggagcaggctcagtca

SEQ ID NO: 191924 - DNA, 25 bp, probe
cctattagttggaggctgcagtaag

SEQ ID NO: 191925 - DNA, 25 bp, probe
ccttaggcttggagagccccagatt

SEQ ID NO: 191926 - DNA, 25 bp, probe
cctatccgttggatgccaccagagt

SEQ ID NO: 191927 - DNA, 25 bp, probe
cctaactttgggtcccatcatgggc

SEQ ID NO: 191928 - DNA, 25 bp, probe
cctcagacttttctctcagttggga

SEQ ID NO: 191929 - DNA, 25 bp, probe
cctcagacttttctctcagttggga

SEQ ID NO: 191930 - DNA, 25 bp, probe
cctcatccttttcaatctcattgtc

SEQ ID NO: 191931 - DNA, 25 bp, probe
cctctctgtgttttacaccattctc

SEQ ID NO: 191932 - DNA, 25 bp, probe
cctctctgtgttttacaccattctc

SEQ ID NO: 191933 - DNA, 25 bp, probe
cctcttggtgtggtgcagggatcct

SEQ ID NO: 191934 - DNA, 25 bp, probe
cctcgctcctgggtgcagagcgtgg

SEQ ID NO: 191935 - DNA, 25 bp, probe
cctcgctcgatgactgtgaactggg

SEQ ID NO: 191936 - DNA, 25 bp, probe
cctcctctatgacatggtgtgtggg

SEQ ID NO: 191937 - DNA, 25 bp, probe
cctcctcagagcaaatccttggcga

SEQ ID NO: 191938 - DNA, 25 bp, probe
cctactcagaagacacctaccgatt

SEQ ID NO: 191939 - DNA, 25 bp, probe
ccttccacacccagctaaagttaga

SEQ ID NO: 191940 - DNA, 25 bp, probe
ccttcaaacaccatccaaaggacaa

SEQ ID NO: 191941 - DNA, 25 bp, probe
cctcaaagcccaaagccaagggaag

SEQ ID NO: 191942 - DNA, 25 bp, probe
cctcaaagcccaaagccaagggaag

SEQ ID NO: 191943 - DNA, 25 bp, probe
cctcaaagcccttgaagagtgggca

SEQ ID NO: 191944 - DNA, 25 bp, probe
cctcggactcccaaagtgctgggat

SEQ ID NO: 191945 - DNA, 25 bp, probe
cctcggcttcccaagtagctgggat

SEQ ID NO: 191946 - DNA, 25 bp, probe
gcctcggcttccgcaggaagtggtc

SEQ ID NO: 191947 - DNA, 25 bp, probe
gcctcggcttccgcaggaagtggtc

SEQ ID NO: 191948 - DNA, 25 bp, probe
cctctgccttcggagggaaattgta

SEQ ID NO: 191949 - DNA, 25 bp, probe
cctctagtgtccggggaccttgtgg

SEQ ID NO: 191950 - DNA, 25 bp, probe
cctctctgtgtcaggggacagcttg

SEQ ID NO: 191951 - DNA, 25 bp, probe
cctcctggtgactgatggacgagtg

SEQ ID NO: 191952 - DNA, 25 bp, probe
cctccgttgccatatgggtggtgtg

SEQ ID NO: 191953 - DNA, 25 bp, probe
cctcccgctgcggaatgggcgggtg

SEQ ID NO: 191954 - DNA, 25 bp, probe
cctccccagggattggaaacggatg

SEQ ID NO: 191955 - DNA, 25 bp, probe
cctccccagggattggaaacggatg

SEQ ID NO: 191956 - DNA, 25 bp, probe
cctccccagagccaacatgaaaggg

SEQ ID NO: 191957 - DNA, 25 bp, probe
cctcctcactggagactacaagtgg

SEQ ID NO: 191958 - DNA, 25 bp, probe
cctcctcagctgtggagtccagcag

SEQ ID NO: 191959 - DNA, 25 bp, probe
cctcctcagctgtggagtccagcag

SEQ ID NO: 191960 - DNA, 25 bp, probe
cctcgtgctggaagaattcaagacg

SEQ ID NO: 191961 - DNA, 25 bp, probe
cctccctgtaacatgccatagtgcg

SEQ ID NO: 191962 - DNA, 25 bp, probe
cctcccgtggaattccatgatcctg

SEQ ID NO: 191963 - DNA, 25 bp, probe
cctcccgggttcaagagattctcct

SEQ ID NO: 191964 - DNA, 25 bp, probe
cctccctgggttcagaaatgctgcc

SEQ ID NO: 191965 - DNA, 25 bp, probe
cctcctcggtggctctgaagaggcc

SEQ ID NO: 191966 - DNA, 25 bp, probe
cctcccggatatctctggagctggc

SEQ ID NO: 191967 - DNA, 25 bp, probe
cctcccggtgtatgcagtggtgatg

SEQ ID NO: 191968 - DNA, 25 bp, probe
cctccctgcagctcaggaaggctgt

SEQ ID NO: 191969 - DNA, 25 bp, probe
cctccctgctgatcaagattgacat

SEQ ID NO: 191970 - DNA, 25 bp, probe
cctcatcctggagatcgagtgatct

SEQ ID NO: 191971 - DNA, 25 bp, probe
cctctgcgaggagttctggggctcc

SEQ ID NO: 191972 - DNA, 25 bp, probe
cctcgcgaggcaaggctacaggtgc

SEQ ID NO: 191973 - DNA, 25 bp, probe
cctcgcgaggcaaggctacaggtgc

SEQ ID NO: 191974 - DNA, 25 bp, probe
cctacggtcacgtctacaaggcgag

SEQ ID NO: 191975 - DNA, 25 bp, probe
cctacggtcacgtctacaaggcgag

SEQ ID NO: 191976 - DNA, 25 bp, probe
cctcctgtctcccttcaaagggaga

SEQ ID NO: 191977 - DNA, 25 bp, probe
cctcctgtgtcccttgtaaatagaa

SEQ ID NO: 191978 - DNA, 25 bp, probe
cctcccattgtcattgaaaaagtac

SEQ ID NO: 191979 - DNA, 25 bp, probe
cctcccactatcactgcagaaaaaa

SEQ ID NO: 191980 - DNA, 25 bp, probe
cctcctcactctcacaagaaaacca

SEQ ID NO: 191981 - DNA, 25 bp, probe
cctcctgggcatcactcagaagaat

SEQ ID NO: 191982 - DNA, 25 bp, probe
cctctggctggctaactggaagcat

SEQ ID NO: 191983 - DNA, 25 bp, probe
cctcatgctcatcaaactgaacaga

SEQ ID NO: 191984 - DNA, 25 bp, probe
cctcagaatgcccacaagctacaaa

SEQ ID NO: 191985 - DNA, 25 bp, probe
cctcatgaagaccctgcagcatgac

SEQ ID NO: 191986 - DNA, 25 bp, probe
cctcatggatgaagacattgctcac

SEQ ID NO: 191987 - DNA, 25 bp, probe
cctcctgcagctgattgtgctcagg

SEQ ID NO: 191988 - DNA, 25 bp, probe
cctcctgcagctgattgtgctcagg

SEQ ID NO: 191989 - DNA, 25 bp, probe
cctcctgagcgcaagtactccgtgt

SEQ ID NO: 191990 - DNA, 25 bp, probe
cctcctggcagaatgctagctctga

SEQ ID NO: 191991 - DNA, 25 bp, probe
cctcctggcagaatgctagctctga

SEQ ID NO: 191992 - DNA, 25 bp, probe
cctcctgccagattctgatgttgag

SEQ ID NO: 191993 - DNA, 25 bp, probe
cctctctgctgccggtgatgggagg

SEQ ID NO: 191994 - DNA, 25 bp, probe
cctccctgggaggatgagctggggc

SEQ ID NO: 191995 - DNA, 25 bp, probe
cctcgcctaagaggcgtgctgtggg

SEQ ID NO: 191996 - DNA, 25 bp, probe
cctcggtcagcaccgtggtgtgagg

SEQ ID NO: 191997 - DNA, 25 bp, probe
cctcaagttcaatgtggctgtcaag

SEQ ID NO: 191998 - DNA, 25 bp, probe
cctcaagtggcagacagcgggtatg

SEQ ID NO: 191999 - DNA, 25 bp, probe
cctcagcgtgaatttgggggatttt

SEQ ID NO: 192000 - DNA, 25 bp, probe
cctaggaaagataccgaagattagt

SEQ ID NO: 192001 - DNA, 25 bp, probe
cctatggagttgttttcaaatgtag

SEQ ID NO: 192002 - DNA, 25 bp, probe
cctcttgacctgcttctgaaagtgc

SEQ ID NO: 192003 - DNA, 25 bp, probe
cctcctcgctatgttggaaatgtgc

SEQ ID NO: 192004 - DNA, 25 bp, probe
cctcctcgctatgttggaaatgtgc

SEQ ID NO: 192005 - DNA, 25 bp, probe
cctctccgctgcttttggaaagtca

SEQ ID NO: 192006 - DNA, 25 bp, probe
cctctccgctgcttttggaaagtca

SEQ ID NO: 192007 - DNA, 25 bp, probe
cctcccagtgacaatatggaattct

SEQ ID NO: 192008 - DNA, 25 bp, probe
cctctctcaggagtatcttacctgt

SEQ ID NO: 192009 - DNA, 25 bp, probe
cctcccagaggcaacctcagttgat

SEQ ID NO: 192010 - DNA, 25 bp, probe
cctcccagagtcaacctcatgtgac

SEQ ID NO: 192011 - DNA, 25 bp, probe
cctctctggacctaccgatgagacg

SEQ ID NO: 192012 - DNA, 25 bp, probe
cctctctggacctaccgatgagacg

SEQ ID NO: 192013 - DNA, 25 bp, probe
cctcattggcactgtccgatatgcc

SEQ ID NO: 192014 - DNA, 25 bp, probe
cctaatgcaacaagtcctgaatccc

SEQ ID NO: 192015 - DNA, 25 bp, probe
cctaatgcaaagctctttacctctt

SEQ ID NO: 192016 - DNA, 25 bp, probe
cctctcgaaagccagctttacctct

SEQ ID NO: 192017 - DNA, 25 bp, probe
ccttcagccaggagtatttcctgtg

SEQ ID NO: 192018 - DNA, 25 bp, probe
cctacagccaggagacccttgtggt

SEQ ID NO: 192019 - DNA, 25 bp, probe
cctcaagcaaggataccgccatgtc

SEQ ID NO: 192020 - DNA, 25 bp, probe
cctcaatgacaggttccgtctgggc

SEQ ID NO: 192021 - DNA, 25 bp, probe
cctcatgaacaggatctgggatcaa

SEQ ID NO: 192022 - DNA, 25 bp, probe
cctcatgctaagactcagtggggag

SEQ ID NO: 192023 - DNA, 25 bp, probe
gcctagcctagaatcctagcctaga

SEQ ID NO: 192024 - DNA, 25 bp, probe
cctcaatctagaacgctacacaaga

SEQ ID NO: 192025 - DNA, 25 bp, probe
cctcaatggagacctccaaaccagt

SEQ ID NO: 192026 - DNA, 25 bp, probe
cctcggagagagtcccacagggagc

SEQ ID NO: 192027 - DNA, 25 bp, probe
cctcaggacagacctccatcaagag

SEQ ID NO: 192028 - DNA, 25 bp, probe
cctcaggagcacgccgtgagatgag

SEQ ID NO: 192029 - DNA, 25 bp, probe
cctcagggcttccagcaggattgag

SEQ ID NO: 192030 - DNA, 25 bp, probe
cctcaggtgttcgcaggtgtgcagg

SEQ ID NO: 192031 - DNA, 25 bp, probe
cctcaggtgattcaccagcctcagc

SEQ ID NO: 192032 - DNA, 25 bp, probe
cctctgggagatcttcacctatgga

SEQ ID NO: 192033 - DNA, 25 bp, probe
cctctgggagatcttcacctatgga

SEQ ID NO: 192034 - DNA, 25 bp, probe
cctctgggagatcttcacctatgga

SEQ ID NO: 192035 - DNA, 25 bp, probe
cctcagtggagaagcttcctctacc

SEQ ID NO: 192036 - DNA, 25 bp, probe
cctcagcgaagaagtctgtgttcct

SEQ ID NO: 192037 - DNA, 25 bp, probe
cctaggaagaggtctgatgacatca

SEQ ID NO: 192038 - DNA, 25 bp, probe
cctcggacatggcgtatgtcatcaa

SEQ ID NO: 192039 - DNA, 25 bp, probe
cctcggccagtgcagttggatgaga

SEQ ID NO: 192040 - DNA, 25 bp, probe
cctcgccacaggcctgtggatggca

SEQ ID NO: 192041 - DNA, 25 bp, probe
cctctgcagacgtcgcttggaggag

SEQ ID NO: 192042 - DNA, 25 bp, probe
cctctgccacagttatcaagaatgg

SEQ ID NO: 192043 - DNA, 25 bp, probe
cctcccagcaactacagagaaggcc

SEQ ID NO: 192044 - DNA, 25 bp, probe
cctcaaagcagccaaaaccaggctt

SEQ ID NO: 192045 - DNA, 25 bp, probe
cctcacagttgccatgtagacccct

SEQ ID NO: 192046 - DNA, 25 bp, probe
cctaaggtgcagttagtcatatcct

SEQ ID NO: 192047 - DNA, 25 bp, probe
cctcaacctcgctatgggcatatga

SEQ ID NO: 192048 - DNA, 25 bp, probe
cctcaacctcgctatgggcatatga

SEQ ID NO: 192049 - DNA, 25 bp, probe
cctacagcactgccattggccatgg

SEQ ID NO: 192050 - DNA, 25 bp, probe
cctacagagcgtatagcctggtgct

SEQ ID NO: 192051 - DNA, 25 bp, probe
cctacgtcctgatcgacatggttct

SEQ ID NO: 192052 - DNA, 25 bp, probe
cctacccctgactcatatatacttt

SEQ ID NO: 192053 - DNA, 25 bp, probe
cctccccctaatgaaatcatattaa

SEQ ID NO: 192054 - DNA, 25 bp, probe
cctccccaccaataaaacagatcaa

SEQ ID NO: 192055 - DNA, 25 bp, probe
cctcccaccacatagaatcaacata

SEQ ID NO: 192056 - DNA, 25 bp, probe
cctccctcaacaaggtatacctcag

SEQ ID NO: 192057 - DNA, 25 bp, probe
cctccctcatccagaagatacttca

SEQ ID NO: 192058 - DNA, 25 bp, probe
cctctttctcctagaagtgcacttc

SEQ ID NO: 192059 - DNA, 25 bp, probe
cctcacttccctagagaaggcctgc

SEQ ID NO: 192060 - DNA, 25 bp, probe
cctcactgtccaaaatgtagtcccg

SEQ ID NO: 192061 - DNA, 25 bp, probe
cctacttccaggatggatgcatcac

SEQ ID NO: 192062 - DNA, 25 bp, probe
cctctcttagggactctgtgatccc

SEQ ID NO: 192063 - DNA, 25 bp, probe
cctcatcaagagctacctcttccag

SEQ ID NO: 192064 - DNA, 25 bp, probe
cctcatcaagagctatctgttccag

SEQ ID NO: 192065 - DNA, 25 bp, probe
cctctgaacactctttctcagcagt

SEQ ID NO: 192066 - DNA, 25 bp, probe
cctcataccacttgctattattagc

SEQ ID NO: 192067 - DNA, 25 bp, probe
cctcaacgaccactttgtcaagctc

SEQ ID NO: 192068 - DNA, 25 bp, probe
ccttacaaccacatttctggccatt

SEQ ID NO: 192069 - DNA, 25 bp, probe
cctaaagccgacatttattcctttg

SEQ ID NO: 192070 - DNA, 25 bp, probe
ccataatagcttccagtattcattg

SEQ ID NO: 192071 - DNA, 25 bp, probe
cctcaatgagctggtcatgttcaca

SEQ ID NO: 192072 - DNA, 25 bp, probe
ccatcaagtgctttctttccaaatg

SEQ ID NO: 192073 - DNA, 25 bp, probe
cctcggttttctcatctgcagaatg

SEQ ID NO: 192074 - DNA, 25 bp, probe
cctcggttttctcatctgcagaatg

SEQ ID NO: 192075 - DNA, 25 bp, probe
cctccccagttacactgcagtatgt

SEQ ID NO: 192076 - DNA, 25 bp, probe
cctctctacacttagcttctaattt

SEQ ID NO: 192077 - DNA, 25 bp, probe
cctactaactagcttcttatcttgt

SEQ ID NO: 192078 - DNA, 25 bp, probe
ccttttacttggcttttctagatag

SEQ ID NO: 192079 - DNA, 25 bp, probe
ccagtttccttgggagttgtcatta

SEQ ID NO: 192080 - DNA, 25 bp, probe
ccagtttccttgggagttgtcatta

SEQ ID NO: 192081 - DNA, 25 bp, probe
ccatttttcttatgagttttctaat

SEQ ID NO: 192082 - DNA, 25 bp, probe
gcgatttttgcccaggaagttagtt

SEQ ID NO: 192083 - DNA, 25 bp, probe
gcgatttttgcccaggaagttagtt

SEQ ID NO: 192084 - DNA, 25 bp, probe
cctattttccgctggtgtatcagtt

SEQ ID NO: 192085 - DNA, 25 bp, probe
cctaacttactctgtgttcaggtgt

SEQ ID NO: 192086 - DNA, 25 bp, probe
ccatcaagttccaaccattaaggtc

SEQ ID NO: 192087 - DNA, 25 bp, probe
cctaacttgcgcagaaaacaagatg

SEQ ID NO: 192088 - DNA, 25 bp, probe
cctaacactcgagttggcaccaaac

SEQ ID NO: 192089 - DNA, 25 bp, probe
cctaccaccccaaggacaagacagc

SEQ ID NO: 192090 - DNA, 25 bp, probe
cctagttaccccgacacaaggagct

SEQ ID NO: 192091 - DNA, 25 bp, probe
cctcttttctcaccaaaaaggagat

SEQ ID NO: 192092 - DNA, 25 bp, probe
cctcttttctcaccaaaaaggagat

SEQ ID NO: 192093 - DNA, 25 bp, probe
ccttagttctttcatctagatggag

SEQ ID NO: 192094 - DNA, 25 bp, probe
cctcttttctttcagacagagaaga

SEQ ID NO: 192095 - DNA, 25 bp, probe
cctctatgctttccttggagccaaa

SEQ ID NO: 192096 - DNA, 25 bp, probe
cctcacagctgtctttggacctaat

SEQ ID NO: 192097 - DNA, 25 bp, probe
cctctcactggacagtggtgcccga

SEQ ID NO: 192098 - DNA, 25 bp, probe
cctcgaggggcactgagaggccgcg

SEQ ID NO: 192099 - DNA, 25 bp, probe
ccataaggggcaaagggctccagga

SEQ ID NO: 192100 - DNA, 25 bp, probe
cctaatagcaggcaagaggatccag

SEQ ID NO: 192101 - DNA, 25 bp, probe
cctatatccagtaagtagaattatc

SEQ ID NO: 192102 - DNA, 25 bp, probe
cctacacctgtgaccaaggcttatg

SEQ ID NO: 192103 - DNA, 25 bp, probe
ccaaccaattgagaagtttgtaaca

SEQ ID NO: 192104 - DNA, 25 bp, probe
cctactccaagagtaagttctgcta

SEQ ID NO: 192105 - DNA, 25 bp, probe
cctacactcaaggctgagaggcctc

SEQ ID NO: 192106 - DNA, 25 bp, probe
ccatcaacgaagccatacggacatc

SEQ ID NO: 192107 - DNA, 25 bp, probe
cctctacagacacaagcagcaagtc

SEQ ID NO: 192108 - DNA, 25 bp, probe
cctcggcgccagaaagacaattgta

SEQ ID NO: 192109 - DNA, 25 bp, probe
cctcaccccatcacagggatttttt

SEQ ID NO: 192110 - DNA, 25 bp, probe
cctacctctccacaaggggattttg

SEQ ID NO: 192111 - DNA, 25 bp, probe
cctcaccaccgagacagttggtttt

SEQ ID NO: 192112 - DNA, 25 bp, probe
cctcaaaagcctgactttggtttct

SEQ ID NO: 192113 - DNA, 25 bp, probe
cctataatccctgcgctttggcagt

SEQ ID NO: 192114 - DNA, 25 bp, probe
cctagtaaccttctgcttgtggtgc

SEQ ID NO: 192115 - DNA, 25 bp, probe
cctcaggaaccccagtctggggtag

SEQ ID NO: 192116 - DNA, 25 bp, probe
cctcaggaacggggttggcgacatc

SEQ ID NO: 192117 - DNA, 25 bp, probe
cctaccaccagggctgttcgaattt

SEQ ID NO: 192118 - DNA, 25 bp, probe
cctagaccaagtttgtccaacctgc

SEQ ID NO: 192119 - DNA, 25 bp, probe
cctcatcagccaggtgttggccacc

SEQ ID NO: 192120 - DNA, 25 bp, probe
ccttgcccacagactgggccagtct

SEQ ID NO: 192121 - DNA, 25 bp, probe
ccttgcccacagactgggccagtct

SEQ ID NO: 192122 - DNA, 25 bp, probe
cctctcaccagcacttagacagaca

SEQ ID NO: 192123 - DNA, 25 bp, probe
cctctacattgttctctcaaagact

SEQ ID NO: 192124 - DNA, 25 bp, probe
cctctgtctatttcaatatagaact

SEQ ID NO: 192125 - DNA, 25 bp, probe
cctctgctgccatttgaattagaag

SEQ ID NO: 192126 - DNA, 25 bp, probe
ccatgtgatgtctggagcataggat

SEQ ID NO: 192127 - DNA, 25 bp, probe
cctcagatctgctgtagccagtgca

SEQ ID NO: 192128 - DNA, 25 bp, probe
cctctcagcagttcatatgccgtca

SEQ ID NO: 192129 - DNA, 25 bp, probe
cctctaatgtaaagcaccatgactc

SEQ ID NO: 192130 - DNA, 25 bp, probe
cctctctgagtccataaccaggctc

SEQ ID NO: 192131 - DNA, 25 bp, probe
cctcttatactatcatccaggtgaa

SEQ ID NO: 192132 - DNA, 25 bp, probe
ccatcgaaactctcatccgcgatat

SEQ ID NO: 192133 - DNA, 25 bp, probe
cctcagaaaccttccctggatgaat

SEQ ID NO: 192134 - DNA, 25 bp, probe
cctcaacgaacactccctggagtgc

SEQ ID NO: 192135 - DNA, 25 bp, probe
cctcaagcgacgctggtgggcagcc

SEQ ID NO: 192136 - DNA, 25 bp, probe
cctcatcccactgtgggggagtccc

SEQ ID NO: 192137 - DNA, 25 bp, probe
cctcatcccactgtgggggagtccc

SEQ ID NO: 192138 - DNA, 25 bp, probe
ccttccccatgttgtcgatggggcc

SEQ ID NO: 192139 - DNA, 25 bp, probe
cctttccctgatgggttggggcagt

SEQ ID NO: 192140 - DNA, 25 bp, probe
cctcacccctatcagtatactagca

SEQ ID NO: 192141 - DNA, 25 bp, probe
cctagccctcagaaactgtatccca

SEQ ID NO: 192142 - DNA, 25 bp, probe
cctcgccttcaggagaatctacacg

SEQ ID NO: 192143 - DNA, 25 bp, probe
cctctgtttgcactggacatattcc

SEQ ID NO: 192144 - DNA, 25 bp, probe
cctctgtttcgggactggatcaaag

SEQ ID NO: 192145 - DNA, 25 bp, probe
gccttgtaaaaccactggacagagg

SEQ ID NO: 192146 - DNA, 25 bp, probe
cctctctaagaagatttacagtggc

SEQ ID NO: 192147 - DNA, 25 bp, probe
ccatcctgggagtgtattaactgga

SEQ ID NO: 192148 - DNA, 25 bp, probe
cctcttgtggaatggagtaaaccag

SEQ ID NO: 192149 - DNA, 25 bp, probe
cctcaggtggtcaggcgtagatcac

SEQ ID NO: 192150 - DNA, 25 bp, probe
cctaagaggatccggggcaatacag

SEQ ID NO: 192151 - DNA, 25 bp, probe
cctacagagcctgaggggcaccttg

SEQ ID NO: 192152 - DNA, 25 bp, probe
cctacgggtgtacagctgcaccttg

SEQ ID NO: 192153 - DNA, 25 bp, probe
cctacgggtgtacagctgcaccttg

SEQ ID NO: 192154 - DNA, 25 bp, probe
cctacaggtttaccaaccagcattg

SEQ ID NO: 192155 - DNA, 25 bp, probe
cctagggtggtcccaaccatgtgat

SEQ ID NO: 192156 - DNA, 25 bp, probe
cctagggtggtcccaaccatgtgat

SEQ ID NO: 192157 - DNA, 25 bp, probe
cctagggtggtcccaaccatgtgat

SEQ ID NO: 192158 - DNA, 25 bp, probe
cctagggtggtcccaaccatgtgat

SEQ ID NO: 192159 - DNA, 25 bp, probe
cctacagtggttcatatcccatggc

SEQ ID NO: 192160 - DNA, 25 bp, probe
cctcactgtggtcattgtccactac

SEQ ID NO: 192161 - DNA, 25 bp, probe
cctcgcattgtccggagatacctac

SEQ ID NO: 192162 - DNA, 25 bp, probe
cctcaggcttctcgggtgaagaact

SEQ ID NO: 192163 - DNA, 25 bp, probe
cctcttcttcgcctggatcaagata

SEQ ID NO: 192164 - DNA, 25 bp, probe
cctcttccgggtgaaagtgaggccg

SEQ ID NO: 192165 - DNA, 25 bp, probe
cctttcctgggtgacaatgatgctg

SEQ ID NO: 192166 - DNA, 25 bp, probe
cctacttgctggggtacagttgctt

SEQ ID NO: 192167 - DNA, 25 bp, probe
ccttcacaggggacccgttgatatc

SEQ ID NO: 192168 - DNA, 25 bp, probe
cctacacgggagacgacgtccgcat

SEQ ID NO: 192169 - DNA, 25 bp, probe
cctaccagagggaacacggcctact

SEQ ID NO: 192170 - DNA, 25 bp, probe
ccataccaaggagacgctgacactt

SEQ ID NO: 192171 - DNA, 25 bp, probe
ccataccaaggagacgctgacactt

SEQ ID NO: 192172 - DNA, 25 bp, probe
cctctcctaaacacagcagggcttt

SEQ ID NO: 192173 - DNA, 25 bp, probe
cctctcctttagcacaggtgcagca

SEQ ID NO: 192174 - DNA, 25 bp, probe
cctcatccttctgagagggttcctt

SEQ ID NO: 192175 - DNA, 25 bp, probe
cctatcctacacgactaggaacttg

SEQ ID NO: 192176 - DNA, 25 bp, probe
cctactttacccatgatgaaattga

SEQ ID NO: 192177 - DNA, 25 bp, probe
cctacctttgaacttgaggaaatga

SEQ ID NO: 192178 - DNA, 25 bp, probe
ccatccctttgcacctgagagggga

SEQ ID NO: 192179 - DNA, 25 bp, probe
cctcactctgttttccaggggagaa

SEQ ID NO: 192180 - DNA, 25 bp, probe
cctatctacagtttccatgggaaag

SEQ ID NO: 192181 - DNA, 25 bp, probe
cctatctacagtttccatgggaaag

SEQ ID NO: 192182 - DNA, 25 bp, probe
cctctcatccagattgcctgtggga

SEQ ID NO: 192183 - DNA, 25 bp, probe
cctacatcgacgggcgcattgtgga

SEQ ID NO: 192184 - DNA, 25 bp, probe
cctcagcatcaactggcaggacgtg

SEQ ID NO: 192185 - DNA, 25 bp, probe
cctcagcatcaactggcaggacgtg

SEQ ID NO: 192186 - DNA, 25 bp, probe
cctcagagcagccgtgggagcagta

SEQ ID NO: 192187 - DNA, 25 bp, probe
cctcagacagctggcatgagagagg

SEQ ID NO: 192188 - DNA, 25 bp, probe
cctcagcgcgctggagacgctgcag

SEQ ID NO: 192189 - DNA, 25 bp, probe
cctcagccagtggaacgtgccggaa

SEQ ID NO: 192190 - DNA, 25 bp, probe
cctcagtcatgacgcaactgcggca

SEQ ID NO: 192191 - DNA, 25 bp, probe
cctcatgctcactcaggcatgctgg

SEQ ID NO: 192192 - DNA, 25 bp, probe
cctctgcttgcaatcatggtgtatg

SEQ ID NO: 192193 - DNA, 25 bp, probe
cctcagcttgcaaccatggtaacgt

SEQ ID NO: 192194 - DNA, 25 bp, probe
cctcagtgatggtgtgtcttatagt

SEQ ID NO: 192195 - DNA, 25 bp, probe
cctctggagggtcgtttactgtatc

SEQ ID NO: 192196 - DNA, 25 bp, probe
cctctgtaggtgggcttccaaggtc

SEQ ID NO: 192197 - DNA, 25 bp, probe
cctttgaggccccaactcaagtgtc

SEQ ID NO: 192198 - DNA, 25 bp, probe
cctttaggctaagactgcctgtctc

SEQ ID NO: 192199 - DNA, 25 bp, probe
ccttttggctaacttcttctgggct

SEQ ID NO: 192200 - DNA, 25 bp, probe
cctttccctaccactgtgatagtgg

SEQ ID NO: 192201 - DNA, 25 bp, probe
ccttttcctcccagtcattgaaaca

SEQ ID NO: 192202 - DNA, 25 bp, probe
cctcttggttccaggctcttgaaat

SEQ ID NO: 192203 - DNA, 25 bp, probe
cctcttccaagccaagcgctttaac

SEQ ID NO: 192204 - DNA, 25 bp, probe
cctcttccaagccaagcgctttaac

SEQ ID NO: 192205 - DNA, 25 bp, probe
cctcttcgaaatcaggtggttagct

SEQ ID NO: 192206 - DNA, 25 bp, probe
cctcttcgaaagcctggaggctatt

SEQ ID NO: 192207 - DNA, 25 bp, probe
cctcatcctgcagcggctggaggac

SEQ ID NO: 192208 - DNA, 25 bp, probe
cctctcactgccttggtggatgggc

SEQ ID NO: 192209 - DNA, 25 bp, probe
cctcaaatgccgagcctgtggagtg

SEQ ID NO: 192210 - DNA, 25 bp, probe
cctcaagtcttttgtcttctgagtg

SEQ ID NO: 192211 - DNA, 25 bp, probe
cctcagcatacttcttgctgctttc

SEQ ID NO: 192212 - DNA, 25 bp, probe
cctctctacgccaagcattatgtgc

SEQ ID NO: 192213 - DNA, 25 bp, probe
cctctgctactccacggtcatgagg

SEQ ID NO: 192214 - DNA, 25 bp, probe
cctctgctactccacggtcatgagg

SEQ ID NO: 192215 - DNA, 25 bp, probe
cctctggcctgcaactatgttcagt

SEQ ID NO: 192216 - DNA, 25 bp, probe
cctctggcctgcaactatgttcagt

SEQ ID NO: 192217 - DNA, 25 bp, probe
cctctggcctatttatatcctggta

SEQ ID NO: 192218 - DNA, 25 bp, probe
ccttagctccatttatagcacctca

SEQ ID NO: 192219 - DNA, 25 bp, probe
ccattttggctgtttggatcctcct

SEQ ID NO: 192220 - DNA, 25 bp, probe
ccattttggctgtttggatcctcct

SEQ ID NO: 192221 - DNA, 25 bp, probe
ccttttggacacaggaccccagaga

SEQ ID NO: 192222 - DNA, 25 bp, probe
ccagtttgaaccaagaactttccag

SEQ ID NO: 192223 - DNA, 25 bp, probe
ccttctttccaaaaatatattacag

SEQ ID NO: 192224 - DNA, 25 bp, probe
ccttgtgttcctaatctaaactaag

SEQ ID NO: 192225 - DNA, 25 bp, probe
ccttggttgcaactactactacaag

SEQ ID NO: 192226 - DNA, 25 bp, probe
cctctgggctgctgtagatgactac

SEQ ID NO: 192227 - DNA, 25 bp, probe
cctaggctgcagatgctactgactg

SEQ ID NO: 192228 - DNA, 25 bp, probe
cctcagccatgcttggatactcaca

SEQ ID NO: 192229 - DNA, 25 bp, probe
cctcagccatgcttggatactcaca

SEQ ID NO: 192230 - DNA, 25 bp, probe
cctcagcatctacctgaacatccag

SEQ ID NO: 192231 - DNA, 25 bp, probe
cctctgacatacatgaccctcatga

SEQ ID NO: 192232 - DNA, 25 bp, probe
cctctacaacatgacactgtgcagg

SEQ ID NO: 192233 - DNA, 25 bp, probe
cctctcagcagccatcaaactactg

SEQ ID NO: 192234 - DNA, 25 bp, probe
cctctcacctgacttcagtgacgat

SEQ ID NO: 192235 - DNA, 25 bp, probe
cctctccctgagtgaggccaggtgt

SEQ ID NO: 192236 - DNA, 25 bp, probe
cctctcctttgcttgaagccagagg

SEQ ID NO: 192237 - DNA, 25 bp, probe
cctcatggcttaaggagacccaggc

SEQ ID NO: 192238 - DNA, 25 bp, probe
cctctgccttagaggagcccacggc

SEQ ID NO: 192239 - DNA, 25 bp, probe
cctcttctaagcaaagtgcccctgc

SEQ ID NO: 192240 - DNA, 25 bp, probe
cctctatggaaggaggcctccactc

SEQ ID NO: 192241 - DNA, 25 bp, probe
cctttggacaggtggccaagtgctt

SEQ ID NO: 192242 - DNA, 25 bp, probe
cctttgcccaggtgtacgaagctac

SEQ ID NO: 192243 - DNA, 25 bp, probe
cctctccaccagcacaaatcgaagc

SEQ ID NO: 192244 - DNA, 25 bp, probe
cctctccaccagcacaaatcgaagc

SEQ ID NO: 192245 - DNA, 25 bp, probe
cctcttcactcagtctaactcaaga

SEQ ID NO: 192246 - DNA, 25 bp, probe
cctctctgcacctgctcaagaaaaa

SEQ ID NO: 192247 - DNA, 25 bp, probe
cctaatgacgcggctcaaaaggaaa

SEQ ID NO: 192248 - DNA, 25 bp, probe
ccatctagcaagttcccaaaggcaa

SEQ ID NO: 192249 - DNA, 25 bp, probe
ccattaccgagcaccagaagtcatc

SEQ ID NO: 192250 - DNA, 25 bp, probe
ccattgaccctcacctgaataaggg

SEQ ID NO: 192251 - DNA, 25 bp, probe
cctcaaccactctcctaatgattgg

SEQ ID NO: 192252 - DNA, 25 bp, probe
cctcaaccccaggcacgaatgggcg

SEQ ID NO: 192253 - DNA, 25 bp, probe
cctcaaccccaccatatgaattgta

SEQ ID NO: 192254 - DNA, 25 bp, probe
cctcacatcacagcaccttaaatct

SEQ ID NO: 192255 - DNA, 25 bp, probe
cctcatctacacgctgcggaacatg

SEQ ID NO: 192256 - DNA, 25 bp, probe
cctacatccacatgatgcccaacgc

SEQ ID NO: 192257 - DNA, 25 bp, probe
cctcagtcggcagaccagcatagca

SEQ ID NO: 192258 - DNA, 25 bp, probe
cctcagagcagggccaaagcacagc

SEQ ID NO: 192259 - DNA, 25 bp, probe
cctcatactcgggcaaggcagccga

SEQ ID NO: 192260 - DNA, 25 bp, probe
cctctacgtggggacagcaggagaa

SEQ ID NO: 192261 - DNA, 25 bp, probe
cctctgatctggcctctacgagagg

SEQ ID NO: 192262 - DNA, 25 bp, probe
cctctgcatcttcactacacagtga

SEQ ID NO: 192263 - DNA, 25 bp, probe
cctctgcacgaggagatagccctgc

SEQ ID NO: 192264 - DNA, 25 bp, probe
cctctgcacgaggagatagccctgc

SEQ ID NO: 192265 - DNA, 25 bp, probe
cctctgacttggtatatgctcatct

SEQ ID NO: 192266 - DNA, 25 bp, probe
cctctactgcttgattctttctcag

SEQ ID NO: 192267 - DNA, 25 bp, probe
cctctgattcaactcattgacttct

SEQ ID NO: 192268 - DNA, 25 bp, probe
cctctcttcaatcctgtgatctata

SEQ ID NO: 192269 - DNA, 25 bp, probe
cctctttcgctcttcgattatgact

SEQ ID NO: 192270 - DNA, 25 bp, probe
cctctttcgctcttcgattatgact

SEQ ID NO: 192271 - DNA, 25 bp, probe
cctcttgtgcccttaagcattactt

SEQ ID NO: 192272 - DNA, 25 bp, probe
cctcatccatgcactttaattgaag

SEQ ID NO: 192273 - DNA, 25 bp, probe
cctctcttctcactttgagattgaa

SEQ ID NO: 192274 - DNA, 25 bp, probe
cctcttcattcacttcagaaataat

SEQ ID NO: 192275 - DNA, 25 bp, probe
cctcactcctgacaatgcaaaaatg

SEQ ID NO: 192276 - DNA, 25 bp, probe
cctaccgctacagcaaccgatattg

SEQ ID NO: 192277 - DNA, 25 bp, probe
cctacaccaagctctactgcaattt

SEQ ID NO: 192278 - DNA, 25 bp, probe
ccatatccgcaagggtaactttccg

SEQ ID NO: 192279 - DNA, 25 bp, probe
cctacccaggctctgagactttact

SEQ ID NO: 192280 - DNA, 25 bp, probe
cctacccaggctctgagactttact

SEQ ID NO: 192281 - DNA, 25 bp, probe
gcttattaccttctgggcatttatt

SEQ ID NO: 192282 - DNA, 25 bp, probe
cctttactctccaggacattctgtt

SEQ ID NO: 192283 - DNA, 25 bp, probe
cctcttacttcacctggtttatatc

SEQ ID NO: 192284 - DNA, 25 bp, probe
cctcttcctggatctgagaatttat

SEQ ID NO: 192285 - DNA, 25 bp, probe
ccttttcttgattccagaaacatat

SEQ ID NO: 192286 - DNA, 25 bp, probe
cctttctctctgcacgaaaaacagg

SEQ ID NO: 192287 - DNA, 25 bp, probe
cctaccctctgggccaagtcaaaga

SEQ ID NO: 192288 - DNA, 25 bp, probe
ccatgaagcccgggcccaggaaaat

SEQ ID NO: 192289 - DNA, 25 bp, probe
gcgtaaggacacagcccaagtaact

SEQ ID NO: 192290 - DNA, 25 bp, probe
gcctaaggacacacaaatttggttg

SEQ ID NO: 192291 - DNA, 25 bp, probe
cctagcaagaagcgagaattctgag

SEQ ID NO: 192292 - DNA, 25 bp, probe
cctatgtatggtcatggaatacgtg

SEQ ID NO: 192293 - DNA, 25 bp, probe
cctagtgagggactgtgttgactga

SEQ ID NO: 192294 - DNA, 25 bp, probe
cctactcagtggtcttgtctatgca

SEQ ID NO: 192295 - DNA, 25 bp, probe
cctacatcaacgtctggtatgaccc

SEQ ID NO: 192296 - DNA, 25 bp, probe
cctaccacagcctggataggcagcc

SEQ ID NO: 192297 - DNA, 25 bp, probe
cctacaaactgaagtgcaaggcact

SEQ ID NO: 192298 - DNA, 25 bp, probe
cctacaaactgaagtgcaaggcact

SEQ ID NO: 192299 - DNA, 25 bp, probe
cctacaacgtgcaggacaagcgctt

SEQ ID NO: 192300 - DNA, 25 bp, probe
cctacaacgtgcaggacaagcgctt

SEQ ID NO: 192301 - DNA, 25 bp, probe
cctaactcctgcagagacagactct

SEQ ID NO: 192302 - DNA, 25 bp, probe
ccattacttgctaaggaccagaccg

SEQ ID NO: 192303 - DNA, 25 bp, probe
ccttactattcctgacaagacttgg

SEQ ID NO: 192304 - DNA, 25 bp, probe
cctttatttccaggatcaaccgtgg

SEQ ID NO: 192305 - DNA, 25 bp, probe
cctttatttccaggatcaaccgtgg

SEQ ID NO: 192306 - DNA, 25 bp, probe
cctcttagttaccctcaacagtggg

SEQ ID NO: 192307 - DNA, 25 bp, probe
cctcttactcattcatcatctaaca

SEQ ID NO: 192308 - DNA, 25 bp, probe
cctcatcaatccaataatctacact

SEQ ID NO: 192309 - DNA, 25 bp, probe
cctcatctgtccaatgacagccctt

SEQ ID NO: 192310 - DNA, 25 bp, probe
cctctccatcagaagatgccccatt

SEQ ID NO: 192311 - DNA, 25 bp, probe
ccttcctcggaagctccatggaatg

SEQ ID NO: 192312 - DNA, 25 bp, probe
cctatacctggcacctcattaagat

SEQ ID NO: 192313 - DNA, 25 bp, probe
cctataccggctacaccattcagaa

SEQ ID NO: 192314 - DNA, 25 bp, probe
cctataccggctacaccattcagaa

SEQ ID NO: 192315 - DNA, 25 bp, probe
cctataccggctacaccattcagaa

SEQ ID NO: 192316 - DNA, 25 bp, probe
cctaggctggacacaggattcagaa

SEQ ID NO: 192317 - DNA, 25 bp, probe
cctcagcagttacaagccttcaaaa

SEQ ID NO: 192318 - DNA, 25 bp, probe
tcctcaagttcaacaccccaaaaat

SEQ ID NO: 192319 - DNA, 25 bp, probe
cctcagaattgctcagccaccaaaa

SEQ ID NO: 192320 - DNA, 25 bp, probe
cctcaacatttgcatgcacctgcaa

SEQ ID NO: 192321 - DNA, 25 bp, probe
cctctcagatttcatcatccgagca

SEQ ID NO: 192322 - DNA, 25 bp, probe
cctctacagtctcatcggcaggaag

SEQ ID NO: 192323 - DNA, 25 bp, probe
cctctacgtcttcgttggcagagat

SEQ ID NO: 192324 - DNA, 25 bp, probe
cctctacgcctttctagatgacaac

SEQ ID NO: 192325 - DNA, 25 bp, probe
cctctagctcccattggctgaagac

SEQ ID NO: 192326 - DNA, 25 bp, probe
cctctagctcccattggctgaagac

SEQ ID NO: 192327 - DNA, 25 bp, probe
cctaacatctccatggggaggcctc

SEQ ID NO: 192328 - DNA, 25 bp, probe
cctacgccacgcagcgggagaagct

SEQ ID NO: 192329 - DNA, 25 bp, probe
cctttgcacctgagaggggaagttc

SEQ ID NO: 192330 - DNA, 25 bp, probe
cctttgcacctgagaggggaagttc

SEQ ID NO: 192331 - DNA, 25 bp, probe
cctttgagcctgaggcccttggtaa

SEQ ID NO: 192332 - DNA, 25 bp, probe
cctagtgaggtggaggtcctgcggg

SEQ ID NO: 192333 - DNA, 25 bp, probe
cctagtgctggaacggtacctgtgg

SEQ ID NO: 192334 - DNA, 25 bp, probe
cctagtgctggaacggtacctgtgg

SEQ ID NO: 192335 - DNA, 25 bp, probe
cctagtcttattcggtgatgactct

SEQ ID NO: 192336 - DNA, 25 bp, probe
cctatggccttttggtagcaactgt

SEQ ID NO: 192337 - DNA, 25 bp, probe
cctatggagatattacagtggaact

SEQ ID NO: 192338 - DNA, 25 bp, probe
cctatgggacagcagcggatgtgtt

SEQ ID NO: 192339 - DNA, 25 bp, probe
cctatggagaagttcaacttgctgt

SEQ ID NO: 192340 - DNA, 25 bp, probe
cctttgagaatggccgagcactggt

SEQ ID NO: 192341 - DNA, 25 bp, probe
cctatctggaatgactagagggagc

SEQ ID NO: 192342 - DNA, 25 bp, probe
cctttgtactctataatgtgaactt

SEQ ID NO: 192343 - DNA, 25 bp, probe
ccttgtggacgaagcaattgtaaag

SEQ ID NO: 192344 - DNA, 25 bp, probe
cctttccagcaccgaaattcaagaa

SEQ ID NO: 192345 - DNA, 25 bp, probe
cctctcatcctgaggaacatgaaag

SEQ ID NO: 192346 - DNA, 25 bp, probe
cctcttcgctgactgccaatatgaa

SEQ ID NO: 192347 - DNA, 25 bp, probe
cctcttcgctgactgccaatatgaa

SEQ ID NO: 192348 - DNA, 25 bp, probe
cctcttttgatgtctgcagaagaat

SEQ ID NO: 192349 - DNA, 25 bp, probe
cctcttctatggctcagccagctat

SEQ ID NO: 192350 - DNA, 25 bp, probe
cctctaccagaccacagttgctgtt

SEQ ID NO: 192351 - DNA, 25 bp, probe
cctctaccagaccacagttgctgtt

SEQ ID NO: 192352 - DNA, 25 bp, probe
cctctagattgcctcacagttgttt

SEQ ID NO: 192353 - DNA, 25 bp, probe
cctcttattgcgacatgcaggtggt

SEQ ID NO: 192354 - DNA, 25 bp, probe
cctcttgtcatcaacagccgtgacc

SEQ ID NO: 192355 - DNA, 25 bp, probe
cctcttccaaaggcagcgtgccgag

SEQ ID NO: 192356 - DNA, 25 bp, probe
cctctttgcaaaggacctcagggga

SEQ ID NO: 192357 - DNA, 25 bp, probe
cctctttgcaaaggacctcagggga

SEQ ID NO: 192358 - DNA, 25 bp, probe
cctcatcttgaagggcccaggaggg

SEQ ID NO: 192359 - DNA, 25 bp, probe
cctcactgggacccccaggaggtga

SEQ ID NO: 192360 - DNA, 25 bp, probe
cctacaaggccaagcgccagtgagg

SEQ ID NO: 192361 - DNA, 25 bp, probe
cctagagggcaaggagccgtcagtg

SEQ ID NO: 192362 - DNA, 25 bp, probe
ccttagggcagtgtccgtcagtgcc

SEQ ID NO: 192363 - DNA, 25 bp, probe
ccttgaggggtgtttcagactggcg

SEQ ID NO: 192364 - DNA, 25 bp, probe
cctttgtggtagtttgatatcctca

SEQ ID NO: 192365 - DNA, 25 bp, probe
cctttgtggtagtttgatatcctca

SEQ ID NO: 192366 - DNA, 25 bp, probe
ccttcgaggttgcactggactgcaa

SEQ ID NO: 192367 - DNA, 25 bp, probe
cctttgtgaagacgacgcggctgat

SEQ ID NO: 192368 - DNA, 25 bp, probe
cctttgcaaaggctgccgagctttc

SEQ ID NO: 192369 - DNA, 25 bp, probe
cctttgcaaaggctgccgagctttc

SEQ ID NO: 192370 - DNA, 25 bp, probe
tcctggtcaagggttcctgttttct

SEQ ID NO: 192371 - DNA, 25 bp, probe
cctatgtaaggccttctagtttgtt

SEQ ID NO: 192372 - DNA, 25 bp, probe
cctactaagatcataaacccttgga

SEQ ID NO: 192373 - DNA, 25 bp, probe
cctagctaagctctataatgcccaa

SEQ ID NO: 192374 - DNA, 25 bp, probe
cctacttcgtgacaggcatcgtcag

SEQ ID NO: 192375 - DNA, 25 bp, probe
cctttacagagcgggatgccgtcag

SEQ ID NO: 192376 - DNA, 25 bp, probe
ccttctacgacctgggcttgatggg

SEQ ID NO: 192377 - DNA, 25 bp, probe
ccttttggaatctgggctactggct

SEQ ID NO: 192378 - DNA, 25 bp, probe
ccttttggcacctttgggactgcca

SEQ ID NO: 192379 - DNA, 25 bp, probe
ccttttggcacctttgggactgcca

SEQ ID NO: 192380 - DNA, 25 bp, probe
cctcttgtcaaggtttgggaatccg

SEQ ID NO: 192381 - DNA, 25 bp, probe
cctcttgtcaaggtttgggaatccg

SEQ ID NO: 192382 - DNA, 25 bp, probe
cctcttgacagacctgattaagcct

SEQ ID NO: 192383 - DNA, 25 bp, probe
ccattaactggcctgatctaacaat

SEQ ID NO: 192384 - DNA, 25 bp, probe
ccttcaacctgcgagataccaacat

SEQ ID NO: 192385 - DNA, 25 bp, probe
cctacaaccgcaaatatgcccatta

SEQ ID NO: 192386 - DNA, 25 bp, probe
cctcaagcccgaaaatctcttgtac

SEQ ID NO: 192387 - DNA, 25 bp, probe
cctaacttcactgtattctttactt

SEQ ID NO: 192388 - DNA, 25 bp, probe
ccttacttgcactgttactcttaat

SEQ ID NO: 192389 - DNA, 25 bp, probe
ccttatttcatatgtttcctcaact

SEQ ID NO: 192390 - DNA, 25 bp, probe
ccttatgtgtaacgtttgattcaga

SEQ ID NO: 192391 - DNA, 25 bp, probe
cctacagtgtacagtcttgtattaa

SEQ ID NO: 192392 - DNA, 25 bp, probe
ccttcagcgtcctgatcacgtttga

SEQ ID NO: 192393 - DNA, 25 bp, probe
cctcttggtgcctaacctggattag

SEQ ID NO: 192394 - DNA, 25 bp, probe
cctcattggcgggaatcacctgaaa

SEQ ID NO: 192395 - DNA, 25 bp, probe
cctcttgggatgtcagaaatctaaa

SEQ ID NO: 192396 - DNA, 25 bp, probe
cctcttgaggttcagagcatcagaa

SEQ ID NO: 192397 - DNA, 25 bp, probe
cctcttaccctctaggaggcacata

SEQ ID NO: 192398 - DNA, 25 bp, probe
cctcatgtgacaccttaccggagta

SEQ ID NO: 192399 - DNA, 25 bp, probe
cctatggcacaccagcataccgtgc

SEQ ID NO: 192400 - DNA, 25 bp, probe
cctcatggagtcctcatacaatcta

SEQ ID NO: 192401 - DNA, 25 bp, probe
cctcatgctgtgtgactcaaaccaa

SEQ ID NO: 192402 - DNA, 25 bp, probe
cctcatctgtgcttatcagaataac

SEQ ID NO: 192403 - DNA, 25 bp, probe
cctcatcgtgttctgcaatgcaggc

SEQ ID NO: 192404 - DNA, 25 bp, probe
cctcatgctcggattcaagcagctg

SEQ ID NO: 192405 - DNA, 25 bp, probe
cctcttcttgcaaagcacaagctgg

SEQ ID NO: 192406 - DNA, 25 bp, probe
cctcttcttcatgttcattgggttt

SEQ ID NO: 192407 - DNA, 25 bp, probe
cctcaccatccttttgttgaaatgg

SEQ ID NO: 192408 - DNA, 25 bp, probe
cctacttccttgtctttgaaataag

SEQ ID NO: 192409 - DNA, 25 bp, probe
cctttctcctggagtccactatgaa

SEQ ID NO: 192410 - DNA, 25 bp, probe
ccttcttccggaggatcgactggga

SEQ ID NO: 192411 - DNA, 25 bp, probe
ccaactgttagtcaattgagctggg

SEQ ID NO: 192412 - DNA, 25 bp, probe
cctttgttgattcaattcctgtgat

SEQ ID NO: 192413 - DNA, 25 bp, probe
ccttatcttcttccaaatgtactgt

SEQ ID NO: 192414 - DNA, 25 bp, probe
cctcttcttttccaaatgctacatc

SEQ ID NO: 192415 - DNA, 25 bp, probe
cctcttcttttccaaatgctacatc

SEQ ID NO: 192416 - DNA, 25 bp, probe
ccttttttctacgaatgcactacat

SEQ ID NO: 192417 - DNA, 25 bp, probe
cctttggatccctgaaatctgatct

SEQ ID NO: 192418 - DNA, 25 bp, probe
cctttgacttggtgaatatccatct

SEQ ID NO: 192419 - DNA, 25 bp, probe
cctcatcgagtttggggagatcatc

SEQ ID NO: 192420 - DNA, 25 bp, probe
cctcactggtctgtggacagcagca

SEQ ID NO: 192421 - DNA, 25 bp, probe
cctcactggatctagtgttgctgcg

SEQ ID NO: 192422 - DNA, 25 bp, probe
cctcaggtgaaactctctggcagcc

SEQ ID NO: 192423 - DNA, 25 bp, probe
cctcaggtgaaactctctggcagcc

SEQ ID NO: 192424 - DNA, 25 bp, probe
cctcacagctgaaatctcagggcac

SEQ ID NO: 192425 - DNA, 25 bp, probe
cctacatcatgaagaccatgggcat

SEQ ID NO: 192426 - DNA, 25 bp, probe
cctatcatctggagccctagtatct

SEQ ID NO: 192427 - DNA, 25 bp, probe
cctaagaagtccccaggtcatgctg

SEQ ID NO: 192428 - DNA, 25 bp, probe
cctaagaagtccccaggtcatgctg

SEQ ID NO: 192429 - DNA, 25 bp, probe
cctcagacaagtccccgtgaagtgg

SEQ ID NO: 192430 - DNA, 25 bp, probe
cctcagacaagtccccgtgaagtgg

SEQ ID NO: 192431 - DNA, 25 bp, probe
cctaaatactgccctggtctagtgg

SEQ ID NO: 192432 - DNA, 25 bp, probe
cctaaatactgccctggtctagtgg

SEQ ID NO: 192433 - DNA, 25 bp, probe
cctaaatatgctggatatagctttg

SEQ ID NO: 192434 - DNA, 25 bp, probe
cctcaagttctcgctagatgtctgc

SEQ ID NO: 192435 - DNA, 25 bp, probe
cctcaatgtattttgctcaggatta

SEQ ID NO: 192436 - DNA, 25 bp, probe
cctcaatgtattttgctcaggatta

SEQ ID NO: 192437 - DNA, 25 bp, probe
cctcatctctaacagctcaggatct

SEQ ID NO: 192438 - DNA, 25 bp, probe
cctcatcctaagtgcctggcagatg

SEQ ID NO: 192439 - DNA, 25 bp, probe
cctttctgccggacgcgagcagatg

SEQ ID NO: 192440 - DNA, 25 bp, probe
cctttcctagggctgtggagtgagg

SEQ ID NO: 192441 - DNA, 25 bp, probe
cctagtcctgagggtgagggcaggc

SEQ ID NO: 192442 - DNA, 25 bp, probe
cctaatccgagtggctaatctcagg

SEQ ID NO: 192443 - DNA, 25 bp, probe
cctttcctaatccatacaccagggt

SEQ ID NO: 192444 - DNA, 25 bp, probe
ccttttatagcccaccgtagtggtg

SEQ ID NO: 192445 - DNA, 25 bp, probe
cctatttctaaccccaatatttcag

SEQ ID NO: 192446 - DNA, 25 bp, probe
ccttttcatgataccttcagattta

SEQ ID NO: 192447 - DNA, 25 bp, probe
cctttgtctattactttgtttcaca

SEQ ID NO: 192448 - DNA, 25 bp, probe
ccttctgcctatatttagtaattaa

SEQ ID NO: 192449 - DNA, 25 bp, probe
cctatcatgcctttcgattcatcta

SEQ ID NO: 192450 - DNA, 25 bp, probe
cctatcatgcctttcgattcatcta

SEQ ID NO: 192451 - DNA, 25 bp, probe
cctcatgatccttttgatcctatga

SEQ ID NO: 192452 - DNA, 25 bp, probe
cctcatgatccttttgatcctatga

SEQ ID NO: 192453 - DNA, 25 bp, probe
cctcattcctctacaatcagtcatg

SEQ ID NO: 192454 - DNA, 25 bp, probe
cctcattctgacacctgcatatagt

SEQ ID NO: 192455 - DNA, 25 bp, probe
cctcatcctatttactgcagcaaat

SEQ ID NO: 192456 - DNA, 25 bp, probe
cctcatcctatttactgcagcaaat

SEQ ID NO: 192457 - DNA, 25 bp, probe
cctcactccttttctatgcagaaaa

SEQ ID NO: 192458 - DNA, 25 bp, probe
tcctccggctgacccaaggaaaaat

SEQ ID NO: 192459 - DNA, 25 bp, probe
cctcagcggctaccaaagccaagca

SEQ ID NO: 192460 - DNA, 25 bp, probe
cctcagaggctatcacaggctcagg

SEQ ID NO: 192461 - DNA, 25 bp, probe
cctcagtggcaacctcatgaacagg

SEQ ID NO: 192462 - DNA, 25 bp, probe
cctcaggccagctcaagatagcgga

SEQ ID NO: 192463 - DNA, 25 bp, probe
cctcagcctcccaaagtgctgggat

SEQ ID NO: 192464 - DNA, 25 bp, probe
cctcagcctcccaaagtgctgggat

SEQ ID NO: 192465 - DNA, 25 bp, probe
cctcagcctcccaagtagctgggat

SEQ ID NO: 192466 - DNA, 25 bp, probe
cctcaccttggacggaatgggatgg

SEQ ID NO: 192467 - DNA, 25 bp, probe
cctcacctgatgcaggaacatatgg

SEQ ID NO: 192468 - DNA, 25 bp, probe
cctacctcatggggaatgtctggga

SEQ ID NO: 192469 - DNA, 25 bp, probe
cctacccggccaggatggctgaggg

SEQ ID NO: 192470 - DNA, 25 bp, probe
cctacccggccaggatggctgaggg

SEQ ID NO: 192471 - DNA, 25 bp, probe
cctaccacgctgacaggtgtgcttg

SEQ ID NO: 192472 - DNA, 25 bp, probe
cctcaccgctctagcggtggctggg

SEQ ID NO: 192473 - DNA, 25 bp, probe
cctcagcctccaaagtggagctggg

SEQ ID NO: 192474 - DNA, 25 bp, probe
cctcagcctccaaagtgctgggatt

SEQ ID NO: 192475 - DNA, 25 bp, probe
cctattctcactaagatggggttta

SEQ ID NO: 192476 - DNA, 25 bp, probe
ccttttcactgttatggccttttca

SEQ ID NO: 192477 - DNA, 25 bp, probe
ccttctgtcggtccaacgttattca

SEQ ID NO: 192478 - DNA, 25 bp, probe
ccttttcaggttgacctgtacccat

SEQ ID NO: 192479 - DNA, 25 bp, probe
cctcagtccattttaacctgtagca

SEQ ID NO: 192480 - DNA, 25 bp, probe
cctcaccctttgtaccagatgttga

SEQ ID NO: 192481 - DNA, 25 bp, probe
cctcaccacattcacatcctagtgg

SEQ ID NO: 192482 - DNA, 25 bp, probe
cctacgacttcaggaggctcctgcg

SEQ ID NO: 192483 - DNA, 25 bp, probe
cctcaggacccagggaatgccaggg

SEQ ID NO: 192484 - DNA, 25 bp, probe
gcgtccagggcgtaggaagccgggt

SEQ ID NO: 192485 - DNA, 25 bp, probe
ccttagggctggagaccacgggagg

SEQ ID NO: 192486 - DNA, 25 bp, probe
ccttccagttggagagttctcggag

SEQ ID NO: 192487 - DNA, 25 bp, probe
cctaccacgtggtgaacctggctga

SEQ ID NO: 192488 - DNA, 25 bp, probe
cctaccacgtggtgaacctggctga

SEQ ID NO: 192489 - DNA, 25 bp, probe
cctaccacctggtgaagacgctgta

SEQ ID NO: 192490 - DNA, 25 bp, probe
cctaacccaagctggcagactggct

SEQ ID NO: 192491 - DNA, 25 bp, probe
cctacctggaatgctgggaagtgct

SEQ ID NO: 192492 - DNA, 25 bp, probe
cctacacggagggtggggaggcgca

SEQ ID NO: 192493 - DNA, 25 bp, probe
cctcaaagccaagctggggatgccg

SEQ ID NO: 192494 - DNA, 25 bp, probe
ccttgaagccaatctggggactttc

SEQ ID NO: 192495 - DNA, 25 bp, probe
ccttatgatgccacacgggtcattt

SEQ ID NO: 192496 - DNA, 25 bp, probe
ccttaattaactgggatgatctcat

SEQ ID NO: 192497 - DNA, 25 bp, probe
cctcatgaagtaccacgccatgtcc

SEQ ID NO: 192498 - DNA, 25 bp, probe
cctagatcaggacccgtcctcaata

SEQ ID NO: 192499 - DNA, 25 bp, probe
ccatcagaaggcaccaacctcaacg

SEQ ID NO: 192500 - DNA, 25 bp, probe
ccatcagaatggaacgagttttgag

SEQ ID NO: 192501 - DNA, 25 bp, probe
cctcacctggagcgagctgtttgtg

SEQ ID NO: 192502 - DNA, 25 bp, probe
cctcacctgggggcattttgtgggt

SEQ ID NO: 192503 - DNA, 25 bp, probe
cctcaacgtgaagcttttctgggag

SEQ ID NO: 192504 - DNA, 25 bp, probe
cctaccatgtaaccctgctttggga

SEQ ID NO: 192505 - DNA, 25 bp, probe
cctttgcaatgcaagccctttctgg

SEQ ID NO: 192506 - DNA, 25 bp, probe
ccttcgctttgagtgccttttgaac

SEQ ID NO: 192507 - DNA, 25 bp, probe
ccttcgcagttactggttggtgttc

SEQ ID NO: 192508 - DNA, 25 bp, probe
ccttcggcatccttggttgaattct

SEQ ID NO: 192509 - DNA, 25 bp, probe
cctactgacattgtattggaactgc

SEQ ID NO: 192510 - DNA, 25 bp, probe
ccttctgcagcaagttcttgaaatt

SEQ ID NO: 192511 - DNA, 25 bp, probe
ccttctgcaccgaaatggaaattcc

SEQ ID NO: 192512 - DNA, 25 bp, probe
ccttctaccgaaccgcaaattcaga

SEQ ID NO: 192513 - DNA, 25 bp, probe
cctttacccaccagagacagtacag

SEQ ID NO: 192514 - DNA, 25 bp, probe
cctttaccagaccacttctcagaaa

SEQ ID NO: 192515 - DNA, 25 bp, probe
cctaatgaccataagactatcaagg

SEQ ID NO: 192516 - DNA, 25 bp, probe
cctagctactcagtagtcttaggtg

SEQ ID NO: 192517 - DNA, 25 bp, probe
cctacaagatatggaggcctctggt

SEQ ID NO: 192518 - DNA, 25 bp, probe
cctacaagatatggaggcctctggt

SEQ ID NO: 192519 - DNA, 25 bp, probe
cctacaacgtcatggtcctggtgaa

SEQ ID NO: 192520 - DNA, 25 bp, probe
cctaatacgctatgtgcttggcgtg

SEQ ID NO: 192521 - DNA, 25 bp, probe
cctaagaggcgtgctgtgggcgctg

SEQ ID NO: 192522 - DNA, 25 bp, probe
cctaagtgagggtctgcggaggctt

SEQ ID NO: 192523 - DNA, 25 bp, probe
cctcacactgcatgtgatttggaag

SEQ ID NO: 192524 - DNA, 25 bp, probe
cctcacctgcctcattggggagaag

SEQ ID NO: 192525 - DNA, 25 bp, probe
cctcacacttcctttgtggtagttt

SEQ ID NO: 192526 - DNA, 25 bp, probe
cctcacacttcctttgtggtagttt

SEQ ID NO: 192527 - DNA, 25 bp, probe
cctactcttctgtcagtggcttatg

SEQ ID NO: 192528 - DNA, 25 bp, probe
cctcaactgtctgcatctggttatc

SEQ ID NO: 192529 - DNA, 25 bp, probe
cctaactccatgtctctgagcatta

SEQ ID NO: 192530 - DNA, 25 bp, probe
cctatactcgcattgctgctgctat

SEQ ID NO: 192531 - DNA, 25 bp, probe
cctatactcgcattgctgctgctat

SEQ ID NO: 192532 - DNA, 25 bp, probe
ccttccgtgtccaggtgtgagcggg

SEQ ID NO: 192533 - DNA, 25 bp, probe
ccttctcggaggagcttctacgtgt

SEQ ID NO: 192534 - DNA, 25 bp, probe
ccttctctgggaaatctactccttt

SEQ ID NO: 192535 - DNA, 25 bp, probe
ccttttgcggtgataaccttctctg

SEQ ID NO: 192536 - DNA, 25 bp, probe
ccttttcctcaggtgaaactttgtg

SEQ ID NO: 192537 - DNA, 25 bp, probe
cctttgccgccgttaacgtgtggcg

SEQ ID NO: 192538 - DNA, 25 bp, probe
cctaagcccctcttgaaggtgtgtt

SEQ ID NO: 192539 - DNA, 25 bp, probe
cctcagagccacccctaaagagatc

SEQ ID NO: 192540 - DNA, 25 bp, probe
cctcagatcttccccattcaggaag

SEQ ID NO: 192541 - DNA, 25 bp, probe
cctcaactgtcaccactgctaaggg

SEQ ID NO: 192542 - DNA, 25 bp, probe
cctcaactgtcaccactgctaaggg

SEQ ID NO: 192543 - DNA, 25 bp, probe
cctagccgatgtctctctgaaggag

SEQ ID NO: 192544 - DNA, 25 bp, probe
cctcaccgagtatgtgcgggcgcag

SEQ ID NO: 192545 - DNA, 25 bp, probe
cctacactgactttgatgggacaag

SEQ ID NO: 192546 - DNA, 25 bp, probe
cctaatgaatttggtgggacagcag

SEQ ID NO: 192547 - DNA, 25 bp, probe
cctcaatgtcttcgagttggagcgg

SEQ ID NO: 192548 - DNA, 25 bp, probe
cctcagatgtttggagctttggagt

SEQ ID NO: 192549 - DNA, 25 bp, probe
cctaatgttgtacctatatgtgtgt

SEQ ID NO: 192550 - DNA, 25 bp, probe
cctaatgggtcaccttctcttgacc

SEQ ID NO: 192551 - DNA, 25 bp, probe
ccttatgagggtcctctacttcagg

SEQ ID NO: 192552 - DNA, 25 bp, probe
cctagatatctgctactcacatttt

SEQ ID NO: 192553 - DNA, 25 bp, probe
cctagagatctgcaagcattgtctg

SEQ ID NO: 192554 - DNA, 25 bp, probe
cctaacacatgctgccatttctggc

SEQ ID NO: 192555 - DNA, 25 bp, probe
cctaccagatgttcacattttatgc

SEQ ID NO: 192556 - DNA, 25 bp, probe
cctactatgttgacacatttcctgg

SEQ ID NO: 192557 - DNA, 25 bp, probe
cctaatcttctgaacttggcgctgc

SEQ ID NO: 192558 - DNA, 25 bp, probe
cctcagttagtgagcttgtgtctgc

SEQ ID NO: 192559 - DNA, 25 bp, probe
cctagatggaggaagcgctgctggg

SEQ ID NO: 192560 - DNA, 25 bp, probe
cctcagcatcggcatctgcagtgat

SEQ ID NO: 192561 - DNA, 25 bp, probe
cctcagcatcggcatctgcagtgat

SEQ ID NO: 192562 - DNA, 25 bp, probe
cctacataggattctcagtgctctg

SEQ ID NO: 192563 - DNA, 25 bp, probe
cctacatgaggtactgagagtgaac

SEQ ID NO: 192564 - DNA, 25 bp, probe
cctaaggtgcacatgctgaggaagg

SEQ ID NO: 192565 - DNA, 25 bp, probe
cctacaaggcaggcgcgggcagagg

SEQ ID NO: 192566 - DNA, 25 bp, probe
cctacgcgtctacgaggagaagcgg

SEQ ID NO: 192567 - DNA, 25 bp, probe
ccatcgacgtctagggggactctgg

SEQ ID NO: 192568 - DNA, 25 bp, probe
ccttgcctttagagtgaccctgcag

SEQ ID NO: 192569 - DNA, 25 bp, probe
ccttgcctttagagtgaccctgcag

SEQ ID NO: 192570 - DNA, 25 bp, probe
cctatgacttgtatgacaactccca

SEQ ID NO: 192571 - DNA, 25 bp, probe
ccttgatggttgatgcaaacattcc

SEQ ID NO: 192572 - DNA, 25 bp, probe
ccttgtagactttgccataggtgcc

SEQ ID NO: 192573 - DNA, 25 bp, probe
ccttgtagactttgccataggtgcc

SEQ ID NO: 192574 - DNA, 25 bp, probe
cctactatgcttcaggcatggtgcc

SEQ ID NO: 192575 - DNA, 25 bp, probe
cctagcttttaacctgagccagagc

SEQ ID NO: 192576 - DNA, 25 bp, probe
cctactgtggcatgacctgtgccga

SEQ ID NO: 192577 - DNA, 25 bp, probe
ccttcatgtaagactttggccgaaa

SEQ ID NO: 192578 - DNA, 25 bp, probe
ccttagaaaacatttgcctcagcca

SEQ ID NO: 192579 - DNA, 25 bp, probe
ccttctgaaaaagtatcctgcttct

SEQ ID NO: 192580 - DNA, 25 bp, probe
ccattaggacaatcagtcccctccc

SEQ ID NO: 192581 - DNA, 25 bp, probe
ccattaggaattaaattctccagcc

SEQ ID NO: 192582 - DNA, 25 bp, probe
cctacagcgacaagaacctcatcga

SEQ ID NO: 192583 - DNA, 25 bp, probe
cctacatcagacaaaatatcgccgt

SEQ ID NO: 192584 - DNA, 25 bp, probe
cctcactcacattaaatgattcact

SEQ ID NO: 192585 - DNA, 25 bp, probe
cctcagctccatgaacagcggcagg

SEQ ID NO: 192586 - DNA, 25 bp, probe
cctcactcgacagaacagtcagtgc

SEQ ID NO: 192587 - DNA, 25 bp, probe
cctcactgctggggagtccctgcca

SEQ ID NO: 192588 - DNA, 25 bp, probe
ccttctcatggcagaggcccgaact

SEQ ID NO: 192589 - DNA, 25 bp, probe
cctatgtctggcagatgagggctgg

SEQ ID NO: 192590 - DNA, 25 bp, probe
ccttcatcatcgccgagatggtcgg

SEQ ID NO: 192591 - DNA, 25 bp, probe
ccttcatcatcgccgagatggtcgg

SEQ ID NO: 192592 - DNA, 25 bp, probe
cctttgacaggtacatggccggctg

SEQ ID NO: 192593 - DNA, 25 bp, probe
cctttgacaggtacatggccggctg

SEQ ID NO: 192594 - DNA, 25 bp, probe
ccttctactcagaatatcccgagtg

SEQ ID NO: 192595 - DNA, 25 bp, probe
ccttctattcagggaacacgatgga

SEQ ID NO: 192596 - DNA, 25 bp, probe
cctttttcagtaccatccaatggag

SEQ ID NO: 192597 - DNA, 25 bp, probe
cctcacctgtgactcaggaccacag

SEQ ID NO: 192598 - DNA, 25 bp, probe
cctcaactgtgacaatcagcaaagc

SEQ ID NO: 192599 - DNA, 25 bp, probe
cctcaactttcagatcagtgaagtg

SEQ ID NO: 192600 - DNA, 25 bp, probe
cctcaagctttacacagctgtcctt

SEQ ID NO: 192601 - DNA, 25 bp, probe
gcgacaactttcagcaggctgtctg

SEQ ID NO: 192602 - DNA, 25 bp, probe
gcagacctctggattaggtctctgt

SEQ ID NO: 192603 - DNA, 25 bp, probe
gctagcctgggtgtaccttttaaga

SEQ ID NO: 192604 - DNA, 25 bp, probe
ccagacgggttttcgtatcttccag

SEQ ID NO: 192605 - DNA, 25 bp, probe
ccagacggtgggcagcgtgggtaag

SEQ ID NO: 192606 - DNA, 25 bp, probe
ccagacggtgggcagcgtgggtaag

SEQ ID NO: 192607 - DNA, 25 bp, probe
ccagacctggggctctggtaggtac

SEQ ID NO: 192608 - DNA, 25 bp, probe
cctacctggggccacagttggcctc

SEQ ID NO: 192609 - DNA, 25 bp, probe
cctaccatggtgaccacgggtgacg

SEQ ID NO: 192610 - DNA, 25 bp, probe
ccttaaggatgcaccgcgtgttctg

SEQ ID NO: 192611 - DNA, 25 bp, probe
cctttaggcgaactgcgcggttcta

SEQ ID NO: 192612 - DNA, 25 bp, probe
ccttttgggatgattgctcgattgt

SEQ ID NO: 192613 - DNA, 25 bp, probe
ccttttgggatgattgctcgattgt

SEQ ID NO: 192614 - DNA, 25 bp, probe
ccttttgttgggtgtctatgggatg

SEQ ID NO: 192615 - DNA, 25 bp, probe
ccttcggcattgggttatctatggg

SEQ ID NO: 192616 - DNA, 25 bp, probe
cctactgagttgttgctgtcattag

SEQ ID NO: 192617 - DNA, 25 bp, probe
cctactggtgtaatctcaatgcaag

SEQ ID NO: 192618 - DNA, 25 bp, probe
cctacatctgctccaaccagataat

SEQ ID NO: 192619 - DNA, 25 bp, probe
cctatctctttctacatcagatcaa

SEQ ID NO: 192620 - DNA, 25 bp, probe
agttactcaaacactctaaaatctg

SEQ ID NO: 192621 - DNA, 25 bp, probe
cctatgccatgaagcagtacgaatg

SEQ ID NO: 192622 - DNA, 25 bp, probe
ccattgagatgactcctacgaatag

SEQ ID NO: 192623 - DNA, 25 bp, probe
ccattgagatgactcctacgaatag

SEQ ID NO: 192624 - DNA, 25 bp, probe
cctttgatgacaccaatctcaaaaa

SEQ ID NO: 192625 - DNA, 25 bp, probe
cctttcatcccagactccaaaactg

SEQ ID NO: 192626 - DNA, 25 bp, probe
cctttccctgagtgctactataact

SEQ ID NO: 192627 - DNA, 25 bp, probe
cctttccctgagtgctactataact

SEQ ID NO: 192628 - DNA, 25 bp, probe
cctattccttggttctgtcagagaa

SEQ ID NO: 192629 - DNA, 25 bp, probe
cctattctagaggatacttgaatgg

SEQ ID NO: 192630 - DNA, 25 bp, probe
cctattctcacacatgatcttcaga

SEQ ID NO: 192631 - DNA, 25 bp, probe
cctattctcacacatgatcttcaga

SEQ ID NO: 192632 - DNA, 25 bp, probe
cctcacgctctggacatgatttagg

SEQ ID NO: 192633 - DNA, 25 bp, probe
cctcaacatcaagcagttcatggcg

SEQ ID NO: 192634 - DNA, 25 bp, probe
cctatggtcacagacttctggccta

SEQ ID NO: 192635 - DNA, 25 bp, probe
cctcaagtggcagacttctggcatc

SEQ ID NO: 192636 - DNA, 25 bp, probe
cctcaagtggcagacttctggcatc

SEQ ID NO: 192637 - DNA, 25 bp, probe
cctcaagtccgatttgtctgtgatt

SEQ ID NO: 192638 - DNA, 25 bp, probe
ccttgaacagcgtcttgcctgtgat

SEQ ID NO: 192639 - DNA, 25 bp, probe
ccttgaaatgctgctgtcctcttaa

SEQ ID NO: 192640 - DNA, 25 bp, probe
gccattgaaaccgctagtcttattt

SEQ ID NO: 192641 - DNA, 25 bp, probe
gccattgaaaccgctagtcttattt

SEQ ID NO: 192642 - DNA, 25 bp, probe
ccttataaactcttactcaaatgat

SEQ ID NO: 192643 - DNA, 25 bp, probe
ccttacacaaaggggatcataaagt

SEQ ID NO: 192644 - DNA, 25 bp, probe
ccttcactcaaaaacggaacacaga

SEQ ID NO: 192645 - DNA, 25 bp, probe
gccttcctggaagaagccaacctca

SEQ ID NO: 192646 - DNA, 25 bp, probe
ccttccgtgatggaaaccacttcct

SEQ ID NO: 192647 - DNA, 25 bp, probe
cctacagcaagacggaaacctccct

SEQ ID NO: 192648 - DNA, 25 bp, probe
cctacctgaaggcaatagtactctt

SEQ ID NO: 192649 - DNA, 25 bp, probe
gccccctgaaagtgggtactatcat

SEQ ID NO: 192650 - DNA, 25 bp, probe
gccccaaggaattccgtgtattatt

SEQ ID NO: 192651 - DNA, 25 bp, probe
ccagctaaggcctcctataaacatt

SEQ ID NO: 192652 - DNA, 25 bp, probe
tcctaacaggccacgttaaactgcc

SEQ ID NO: 192653 - DNA, 25 bp, probe
gccttacagtccaacctttttctgt

SEQ ID NO: 192654 - DNA, 25 bp, probe
gccttacagtccaacctttttctgt

SEQ ID NO: 192655 - DNA, 25 bp, probe
cctttggtacatgcctgttaatatt

SEQ ID NO: 192656 - DNA, 25 bp, probe
ccttggaatgggtcctgttatttat

SEQ ID NO: 192657 - DNA, 25 bp, probe
cctagacaaggattccgcttattcc

SEQ ID NO: 192658 - DNA, 25 bp, probe
ccataaacagttttcgtgcttcctc

SEQ ID NO: 192659 - DNA, 25 bp, probe
ccatcaatacagtcgcataccatgc

SEQ ID NO: 192660 - DNA, 25 bp, probe
ccatcaatacagtcgcataccatgc

SEQ ID NO: 192661 - DNA, 25 bp, probe
cctcaatgatgactgtggacctgca

SEQ ID NO: 192662 - DNA, 25 bp, probe
cctaatgctggatttgtccatcaac

SEQ ID NO: 192663 - DNA, 25 bp, probe
cctacatggccagcgtgtacaacac

SEQ ID NO: 192664 - DNA, 25 bp, probe
cctacggcggctctgaagcagagcc

SEQ ID NO: 192665 - DNA, 25 bp, probe
ccatagcaggagttattaaccagcc

SEQ ID NO: 192666 - DNA, 25 bp, probe
cctagagaagattatcctgtcctgc

SEQ ID NO: 192667 - DNA, 25 bp, probe
cctcaagtggatcgacaggtccatg

SEQ ID NO: 192668 - DNA, 25 bp, probe
cctcaatgtccaaatagcggcctcg

SEQ ID NO: 192669 - DNA, 25 bp, probe
cctcaagtctgacgatgacacctcc

SEQ ID NO: 192670 - DNA, 25 bp, probe
cctcaactcagatggatacacccct

SEQ ID NO: 192671 - DNA, 25 bp, probe
cctatgcctcagctggatggacaac

SEQ ID NO: 192672 - DNA, 25 bp, probe
cctatgagctcaacgagacagccaa

SEQ ID NO: 192673 - DNA, 25 bp, probe
cctaggtcagtctggagccacagac

SEQ ID NO: 192674 - DNA, 25 bp, probe
cctacgccagtccctgaggacaaag

SEQ ID NO: 192675 - DNA, 25 bp, probe
cctacgccagtccctgaggacaaag

SEQ ID NO: 192676 - DNA, 25 bp, probe
cctaggaagtgccagtgcagcggca

SEQ ID NO: 192677 - DNA, 25 bp, probe
cctagggctgtggagtgaggccagt

SEQ ID NO: 192678 - DNA, 25 bp, probe
cctacctctgatgagctatgggcct

SEQ ID NO: 192679 - DNA, 25 bp, probe
ccttgccactgaggaccgaggacta

SEQ ID NO: 192680 - DNA, 25 bp, probe
ccttccgcgacgaggaggagttgcg

SEQ ID NO: 192681 - DNA, 25 bp, probe
ccttccgcgacgaggaggagttgcg

SEQ ID NO: 192682 - DNA, 25 bp, probe
ccttcaggcgagcaactggggttgg

SEQ ID NO: 192683 - DNA, 25 bp, probe
ccttcgtggggaaccgcgagatagg

SEQ ID NO: 192684 - DNA, 25 bp, probe
ccttagtgagggtgccctggtcatg

SEQ ID NO: 192685 - DNA, 25 bp, probe
ccattagtacggccgccagtgtgtg

SEQ ID NO: 192686 - DNA, 25 bp, probe
ccttcagtgttgtacgacgatgtat

SEQ ID NO: 192687 - DNA, 25 bp, probe
ccttagcttgggtgagactgtttac

SEQ ID NO: 192688 - DNA, 25 bp, probe
ccattcaggtttcagagtttttcta

SEQ ID NO: 192689 - DNA, 25 bp, probe
cctacaggttatccagactactact

SEQ ID NO: 192690 - DNA, 25 bp, probe
cctacgaattggccgactacagcaa

SEQ ID NO: 192691 - DNA, 25 bp, probe
cctaagaaagagccgaaagcaccac

SEQ ID NO: 192692 - DNA, 25 bp, probe
ccttagaaggcacacaaagcaccaa

SEQ ID NO: 192693 - DNA, 25 bp, probe
gccttaaacgccaaaatgaccaata

SEQ ID NO: 192694 - DNA, 25 bp, probe
ccttcccacagcttgcaaggaccaa

SEQ ID NO: 192695 - DNA, 25 bp, probe
ccttcccacagcttgcaaggaccaa

SEQ ID NO: 192696 - DNA, 25 bp, probe
ccagtgccagacaggtaggacccag

SEQ ID NO: 192697 - DNA, 25 bp, probe
ccatctccaactcggaagtaagccc

SEQ ID NO: 192698 - DNA, 25 bp, probe
cctacaggagcacggcagttacacc

SEQ ID NO: 192699 - DNA, 25 bp, probe
cctacgtgacgcggcattgtcatgc

SEQ ID NO: 192700 - DNA, 25 bp, probe
cctacgtgacgcggcattgtcatgc

SEQ ID NO: 192701 - DNA, 25 bp, probe
cctacgatgacgtctctgtgttcgt

SEQ ID NO: 192702 - DNA, 25 bp, probe
cctacgatcggtacatggctatctg

SEQ ID NO: 192703 - DNA, 25 bp, probe
cctaatgacgtggactttagcatgc

SEQ ID NO: 192704 - DNA, 25 bp, probe
cctattaccgcatctatgtcacagc

SEQ ID NO: 192705 - DNA, 25 bp, probe
ccttttatctcactctagtccaggt

SEQ ID NO: 192706 - DNA, 25 bp, probe
ccttttcccgactgtaagcagttct

SEQ ID NO: 192707 - DNA, 25 bp, probe
cctaatcatcccaatgttgtaaagt

SEQ ID NO: 192708 - DNA, 25 bp, probe
cctacacctcaccagtttgaacagt

SEQ ID NO: 192709 - DNA, 25 bp, probe
cctaacctcgctcgatgactgtgaa

SEQ ID NO: 192710 - DNA, 25 bp, probe
ccttactgcttttgaacctgaagct

SEQ ID NO: 192711 - DNA, 25 bp, probe
cctttctacttactaccagcaatgc

SEQ ID NO: 192712 - DNA, 25 bp, probe
cctttctacttactaccagcaatgc

SEQ ID NO: 192713 - DNA, 25 bp, probe
cctactcaagttcatccacacaagt

SEQ ID NO: 192714 - DNA, 25 bp, probe
ccttaaagttgttctcccaagagct

SEQ ID NO: 192715 - DNA, 25 bp, probe
ccttccacagtcatttcttctaggt

SEQ ID NO: 192716 - DNA, 25 bp, probe
ccttcaagaacttcttttctaggca

SEQ ID NO: 192717 - DNA, 25 bp, probe
ccttgaagaccttcagtctgacccc

SEQ ID NO: 192718 - DNA, 25 bp, probe
ccttgtgaaccacaactgatccccc

SEQ ID NO: 192719 - DNA, 25 bp, probe
cctataatcctaagaacttctccaa

SEQ ID NO: 192720 - DNA, 25 bp, probe
cctaaatcagaaaacccgatcgaat

SEQ ID NO: 192721 - DNA, 25 bp, probe
gcctcaactaacaaacccttcagga

SEQ ID NO: 192722 - DNA, 25 bp, probe
cctaactatgcctcgaacttcagtg

SEQ ID NO: 192723 - DNA, 25 bp, probe
cctaactatgcctcgaacttcagtg

SEQ ID NO: 192724 - DNA, 25 bp, probe
cctaagcctgcctcagatacaagag

SEQ ID NO: 192725 - DNA, 25 bp, probe
cctaagcctggctgcaaagaagaat

SEQ ID NO: 192726 - DNA, 25 bp, probe
cctacctctggtcaagaacacacac

SEQ ID NO: 192727 - DNA, 25 bp, probe
cctacctctggtcaagaacacacac

SEQ ID NO: 192728 - DNA, 25 bp, probe
cctacctgagtggcccaaagccagc

SEQ ID NO: 192729 - DNA, 25 bp, probe
ccttcccaatcctacaaaggagcct

SEQ ID NO: 192730 - DNA, 25 bp, probe
ccttccccatcacctgaaagaaact

SEQ ID NO: 192731 - DNA, 25 bp, probe
ccttaccttcaaggagcaagtgaag

SEQ ID NO: 192732 - DNA, 25 bp, probe
cctttttttaggccacattgacagt

SEQ ID NO: 192733 - DNA, 25 bp, probe
ccttctgcttctgagttgcacatta

SEQ ID NO: 192734 - DNA, 25 bp, probe
cctacagcttgcgagctgggcacat

SEQ ID NO: 192735 - DNA, 25 bp, probe
cctacagcgtgcacaggtgctggac

SEQ ID NO: 192736 - DNA, 25 bp, probe
cctacagcagccgcatgagctgggg

SEQ ID NO: 192737 - DNA, 25 bp, probe
cctacagcgacccagaggagctcaa

SEQ ID NO: 192738 - DNA, 25 bp, probe
cctacatggcccctgagaggatcaa

SEQ ID NO: 192739 - DNA, 25 bp, probe
cctacatcccattaacaagatatca

SEQ ID NO: 192740 - DNA, 25 bp, probe
cctactccctgaagagcgcaatata

SEQ ID NO: 192741 - DNA, 25 bp, probe
cctactccctgaagagcgcaatata

SEQ ID NO: 192742 - DNA, 25 bp, probe
cctactgctcttactgcaggaagtt

SEQ ID NO: 192743 - DNA, 25 bp, probe
cctagagctctcactcactgataat

SEQ ID NO: 192744 - DNA, 25 bp, probe
ccatgatgagcggttccaccaaacc

SEQ ID NO: 192745 - DNA, 25 bp, probe
cctagagcaggtccataccaagtaa

SEQ ID NO: 192746 - DNA, 25 bp, probe
cctagagggctaataacagcattta

SEQ ID NO: 192747 - DNA, 25 bp, probe
cctagaggcacaatcttgacttgtc

SEQ ID NO: 192748 - DNA, 25 bp, probe
cctagacagcccgttactttctgtg

SEQ ID NO: 192749 - DNA, 25 bp, probe
cctagggagccgcaccttgtcatgt

SEQ ID NO: 192750 - DNA, 25 bp, probe
cctagggaatccacacttaatataa

SEQ ID NO: 192751 - DNA, 25 bp, probe
cctatgggcttggaccacttacagt

SEQ ID NO: 192752 - DNA, 25 bp, probe
cctatggccagtgtccctatgaagg

SEQ ID NO: 192753 - DNA, 25 bp, probe
ccttggaacttctcttggaactggg

SEQ ID NO: 192754 - DNA, 25 bp, probe
tccttggaacttctcttggaactgg

SEQ ID NO: 192755 - DNA, 25 bp, probe
ccattccacacggcccgggaaatgg

SEQ ID NO: 192756 - DNA, 25 bp, probe
cctaagccctggggccctgaaatgg

SEQ ID NO: 192757 - DNA, 25 bp, probe
cctaagccctggggccctgaaatgg

SEQ ID NO: 192758 - DNA, 25 bp, probe
ccttccttcagggtggcctggacag

SEQ ID NO: 192759 - DNA, 25 bp, probe
ccttccttcagggtggcctggacag

SEQ ID NO: 192760 - DNA, 25 bp, probe
ccttctctaagacagctcctgtgta

SEQ ID NO: 192761 - DNA, 25 bp, probe
ccttcttgtttctcactttgatatt

SEQ ID NO: 192762 - DNA, 25 bp, probe
ccttccgaagaagactgtatgtttg

SEQ ID NO: 192763 - DNA, 25 bp, probe
ccttctaaaaactcatgtgcaggtt

SEQ ID NO: 192764 - DNA, 25 bp, probe
cctattaagcaaacttgatgtgtgg

SEQ ID NO: 192765 - DNA, 25 bp, probe
cctagtgggcagtctctatgtgtta

SEQ ID NO: 192766 - DNA, 25 bp, probe
cctacatggtgattctcttgtccag

SEQ ID NO: 192767 - DNA, 25 bp, probe
cctacacaatgatccttcacgcagt

SEQ ID NO: 192768 - DNA, 25 bp, probe
cctatgcaaatagacatccacagcg

SEQ ID NO: 192769 - DNA, 25 bp, probe
ccttaatatgcaagactctcaagga

SEQ ID NO: 192770 - DNA, 25 bp, probe
ccatcagaatgaaagctcctcgagg

SEQ ID NO: 192771 - DNA, 25 bp, probe
cctatgacaaaacgccgctggagaa

SEQ ID NO: 192772 - DNA, 25 bp, probe
cctaccaagagggcacctgaggaga

SEQ ID NO: 192773 - DNA, 25 bp, probe
cctattgacagggatcacactgggg

SEQ ID NO: 192774 - DNA, 25 bp, probe
ccttcttcaggtagctgcttggcgg

SEQ ID NO: 192775 - DNA, 25 bp, probe
cctacccagtgaaggccatggaggt

SEQ ID NO: 192776 - DNA, 25 bp, probe
ccttccgagtcatggtctcgggcct

SEQ ID NO: 192777 - DNA, 25 bp, probe
cctagggtctcatggactgtaggca

SEQ ID NO: 192778 - DNA, 25 bp, probe
cctagggtctcatggactgtaggca

SEQ ID NO: 192779 - DNA, 25 bp, probe
cctacgagcccatggcctacatgga

SEQ ID NO: 192780 - DNA, 25 bp, probe
cctactgggacatgaacgagcagga

SEQ ID NO: 192781 - DNA, 25 bp, probe
cctactgggagatgaccaatcaaga

SEQ ID NO: 192782 - DNA, 25 bp, probe
cctattgtgtgtgccccagaaatga

SEQ ID NO: 192783 - DNA, 25 bp, probe
ccattattgctgtccaccgaggagt

SEQ ID NO: 192784 - DNA, 25 bp, probe
ccattctagtgatccaaaggctgta

SEQ ID NO: 192785 - DNA, 25 bp, probe
ccttctctggaatagttactttaca

SEQ ID NO: 192786 - DNA, 25 bp, probe
ccttctctggaatagttactttaca

SEQ ID NO: 192787 - DNA, 25 bp, probe
ccttttggatgatcagtttcaaccc

SEQ ID NO: 192788 - DNA, 25 bp, probe
ccttttcatgcaaaagttgaaacca

SEQ ID NO: 192789 - DNA, 25 bp, probe
ccttttgtgctactcagatctgata

SEQ ID NO: 192790 - DNA, 25 bp, probe
ccttcttggaagactacttcactgc

SEQ ID NO: 192791 - DNA, 25 bp, probe
ccttcttggaagactacttcactgc

SEQ ID NO: 192792 - DNA, 25 bp, probe
ccttcatggagatgcccactctcct

SEQ ID NO: 192793 - DNA, 25 bp, probe
cctttgatgagtctcacatcccacc

SEQ ID NO: 192794 - DNA, 25 bp, probe
cctttgcaagagcgcagaccaccgc

SEQ ID NO: 192795 - DNA, 25 bp, probe
cctttgtgaagctggaacactggct

SEQ ID NO: 192796 - DNA, 25 bp, probe
cctactggtagatggaacagcatgt

SEQ ID NO: 192797 - DNA, 25 bp, probe
cctaccgctgaggagatgtccagct

SEQ ID NO: 192798 - DNA, 25 bp, probe
cctacgggatggcatcatctcagat

SEQ ID NO: 192799 - DNA, 25 bp, probe
cctagcagaggctgtgttcaccttc

SEQ ID NO: 192800 - DNA, 25 bp, probe
cctacatgatcctggccatgacgct

SEQ ID NO: 192801 - DNA, 25 bp, probe
cctacatgatcctggccatgacgct

SEQ ID NO: 192802 - DNA, 25 bp, probe
ccttcatgaacattgtggacgtgct

SEQ ID NO: 192803 - DNA, 25 bp, probe
cctacagtccatggtctacagatgt

SEQ ID NO: 192804 - DNA, 25 bp, probe
cctacctagctgcatctataatgtc

SEQ ID NO: 192805 - DNA, 25 bp, probe
cctacgacgtggccattgacatgtg

SEQ ID NO: 192806 - DNA, 25 bp, probe
ccatgcagctgtcgtggagctgctc

SEQ ID NO: 192807 - DNA, 25 bp, probe
ccatcagcttgggctatgccaacag

SEQ ID NO: 192808 - DNA, 25 bp, probe
ccatcgagcacggcatcgtcaccaa

SEQ ID NO: 192809 - DNA, 25 bp, probe
ccttggacatggaggcctgacagct

SEQ ID NO: 192810 - DNA, 25 bp, probe
ccttggaatgccctgtccagaggca

SEQ ID NO: 192811 - DNA, 25 bp, probe
cctatgccttccagactggtggcaa

SEQ ID NO: 192812 - DNA, 25 bp, probe
cctatccttcttagaagcttcgaac

SEQ ID NO: 192813 - DNA, 25 bp, probe
cctacccttctattcagggaacacg

SEQ ID NO: 192814 - DNA, 25 bp, probe
gcctacatccttttctacgtggaac

SEQ ID NO: 192815 - DNA, 25 bp, probe
cctacattctttattctgcggtgaa

SEQ ID NO: 192816 - DNA, 25 bp, probe
cctacattctttattctgcggtgaa

SEQ ID NO: 192817 - DNA, 25 bp, probe
cctacttctatccgaactggacata

SEQ ID NO: 192818 - DNA, 25 bp, probe
ccattctatgccacagaagggatat

SEQ ID NO: 192819 - DNA, 25 bp, probe
cctacttgctgcagggagatgaaag

SEQ ID NO: 192820 - DNA, 25 bp, probe
gcctactgtcgcagtccagggacag

SEQ ID NO: 192821 - DNA, 25 bp, probe
cctacgtgggctaccaggtgatgcg

SEQ ID NO: 192822 - DNA, 25 bp, probe
cctagccattggtgcacaggatggg

SEQ ID NO: 192823 - DNA, 25 bp, probe
cctagaatggtgtgccagagcaggc

SEQ ID NO: 192824 - DNA, 25 bp, probe
cctaggaagtgccctcgagcactga

SEQ ID NO: 192825 - DNA, 25 bp, probe
cctatgagtttgagctcgtgccgac

SEQ ID NO: 192826 - DNA, 25 bp, probe
cctagcagactcaggcctgtgggaa

SEQ ID NO: 192827 - DNA, 25 bp, probe
cctagtgacctacctgggggcaaag

SEQ ID NO: 192828 - DNA, 25 bp, probe
ccttggtgacttcctggggccaaga

SEQ ID NO: 192829 - DNA, 25 bp, probe
cctttctggtaactggaggcccaga

SEQ ID NO: 192830 - DNA, 25 bp, probe
ccttactgcccaaggaaggggagca

SEQ ID NO: 192831 - DNA, 25 bp, probe
ccttgttgccccactaaggaatcac

SEQ ID NO: 192832 - DNA, 25 bp, probe
cctttatgccacctactgaaaagaa

SEQ ID NO: 192833 - DNA, 25 bp, probe
cctttaggactgggtggatggagaa

SEQ ID NO: 192834 - DNA, 25 bp, probe
ccttctaggtgcttggtggtcagag

SEQ ID NO: 192835 - DNA, 25 bp, probe
ccttctaggtgcttggtggtcagag

SEQ ID NO: 192836 - DNA, 25 bp, probe
cctttagttcattgtccaccatgat

SEQ ID NO: 192837 - DNA, 25 bp, probe
cctttagccaaagttgattcatgaa

SEQ ID NO: 192838 - DNA, 25 bp, probe
cctttcgcgaatccgtatctgcaga

SEQ ID NO: 192839 - DNA, 25 bp, probe
ccttagccaacattcctatctgtgg

SEQ ID NO: 192840 - DNA, 25 bp, probe
ccttatccccactgctgtggaggtt

SEQ ID NO: 192841 - DNA, 25 bp, probe
ccttgtccgctctaaggaccagttt

SEQ ID NO: 192842 - DNA, 25 bp, probe
ccttgtccagacgaagtgacgttga

SEQ ID NO: 192843 - DNA, 25 bp, probe
ccttgtcaaaactggcccatgctga

SEQ ID NO: 192844 - DNA, 25 bp, probe
cctttctacaaccaggaccatgaga

SEQ ID NO: 192845 - DNA, 25 bp, probe
cctttctgcacaaaaccagcaattg

SEQ ID NO: 192846 - DNA, 25 bp, probe
ccttcctgcaagggatccatttctg

SEQ ID NO: 192847 - DNA, 25 bp, probe
cctatcccaagacctcactggtctg

SEQ ID NO: 192848 - DNA, 25 bp, probe
cctacccatagtctttgtgtgcttg

SEQ ID NO: 192849 - DNA, 25 bp, probe
cctaccagaactgtgctctgctggc

SEQ ID NO: 192850 - DNA, 25 bp, probe
ccttaagtacatccactctgctggg

SEQ ID NO: 192851 - DNA, 25 bp, probe
ccttcaaccattccccatgggaaat

SEQ ID NO: 192852 - DNA, 25 bp, probe
ccttcaatccagtgtcaagaggaaa

SEQ ID NO: 192853 - DNA, 25 bp, probe
ccttaactcagtggtgcatacagtg

SEQ ID NO: 192854 - DNA, 25 bp, probe
ccttgaagcttgtgataacatgcat

SEQ ID NO: 192855 - DNA, 25 bp, probe
ccttgcacgcatttggataccttgt

SEQ ID NO: 192856 - DNA, 25 bp, probe
ccttgcacgcatttggataccttgt

SEQ ID NO: 192857 - DNA, 25 bp, probe
cctatcaccatacttttccatgtga

SEQ ID NO: 192858 - DNA, 25 bp, probe
ccattcaccaaaattatcctgaact

SEQ ID NO: 192859 - DNA, 25 bp, probe
ccttattcaaacatcaacaacaggg

SEQ ID NO: 192860 - DNA, 25 bp, probe
ccttgttcaaccacaaccattaatg

SEQ ID NO: 192861 - DNA, 25 bp, probe
ccttgttttcacagctatcacatgg

SEQ ID NO: 192862 - DNA, 25 bp, probe
ccttgttttcacagctatcacatgg

SEQ ID NO: 192863 - DNA, 25 bp, probe
cctttgtatctctaagttacatgac

SEQ ID NO: 192864 - DNA, 25 bp, probe
cctttgctattctcagatgactctg

SEQ ID NO: 192865 - DNA, 25 bp, probe
cctttctgactttgctgatgccttg

SEQ ID NO: 192866 - DNA, 25 bp, probe
cctttcatgaccactcacacgtggg

SEQ ID NO: 192867 - DNA, 25 bp, probe
ccttaagcaccgcaatatcgttcag

SEQ ID NO: 192868 - DNA, 25 bp, probe
cctatcaaagccctacaactctgta

SEQ ID NO: 192869 - DNA, 25 bp, probe
ccttgaagagcccatcacaggccaa

SEQ ID NO: 192870 - DNA, 25 bp, probe
ccttcaagagcacttcacatactga

SEQ ID NO: 192871 - DNA, 25 bp, probe
ccttcacatgcccatgtacttcttc

SEQ ID NO: 192872 - DNA, 25 bp, probe
cctatgacactcgtgctcacatgtc

SEQ ID NO: 192873 - DNA, 25 bp, probe
cctatgccactcgagatgacctcat

SEQ ID NO: 192874 - DNA, 25 bp, probe
cctatgctcctgggatacgctatga

SEQ ID NO: 192875 - DNA, 25 bp, probe
cctattctctctttacgcttagtta

SEQ ID NO: 192876 - DNA, 25 bp, probe
cctattctctcttaagagtgctagg

SEQ ID NO: 192877 - DNA, 25 bp, probe
cctataccttctaggtctaaggaga

SEQ ID NO: 192878 - DNA, 25 bp, probe
cctataccttctaggtctaaggaga

SEQ ID NO: 192879 - DNA, 25 bp, probe
cctatagcctttgcccacaagagaa

SEQ ID NO: 192880 - DNA, 25 bp, probe
cctatagcctttgcccacaagagaa

SEQ ID NO: 192881 - DNA, 25 bp, probe
ccttccgctattgcccaagtggcaa

SEQ ID NO: 192882 - DNA, 25 bp, probe
ccttccgctattgcccaagtggcaa

SEQ ID NO: 192883 - DNA, 25 bp, probe
ccttccctcatttccaacataggag

SEQ ID NO: 192884 - DNA, 25 bp, probe
ccttcgacctgttcaagaacatcaa

SEQ ID NO: 192885 - DNA, 25 bp, probe
ccttctacgtgctcaacatcgtcaa

SEQ ID NO: 192886 - DNA, 25 bp, probe
ccttctacgtgctcaacatcgtcaa

SEQ ID NO: 192887 - DNA, 25 bp, probe
ccttccagaggctgaattcttcaaa

SEQ ID NO: 192888 - DNA, 25 bp, probe
ccttccggcgcataaagtcagcaag

SEQ ID NO: 192889 - DNA, 25 bp, probe
ccttccctccagaattatgtcaggt

SEQ ID NO: 192890 - DNA, 25 bp, probe
ccttcagcctcccatcagaatggaa

SEQ ID NO: 192891 - DNA, 25 bp, probe
cctacccattgccaagagaggatgc

SEQ ID NO: 192892 - DNA, 25 bp, probe
cctatcccccagccatgaagaatgc

SEQ ID NO: 192893 - DNA, 25 bp, probe
cctatcccccagccatgaagaatgc

SEQ ID NO: 192894 - DNA, 25 bp, probe
cctacccctcatggaaagacagctg

SEQ ID NO: 192895 - DNA, 25 bp, probe
ccttttcacatcaccaagacagcct

SEQ ID NO: 192896 - DNA, 25 bp, probe
cctttgtgccaccactagagacaca

SEQ ID NO: 192897 - DNA, 25 bp, probe
cctttgtgccaccactagagacaca

SEQ ID NO: 192898 - DNA, 25 bp, probe
ccttctgtgggccccatgaaatcaa

SEQ ID NO: 192899 - DNA, 25 bp, probe
ccttctatggagataagatgaatct

SEQ ID NO: 192900 - DNA, 25 bp, probe
ccttgtcatgtaccatcaataaagt

SEQ ID NO: 192901 - DNA, 25 bp, probe
cctagacgctaaatcaatgctgaag

SEQ ID NO: 192902 - DNA, 25 bp, probe
cctatgacgaaaaagcagctaatga

SEQ ID NO: 192903 - DNA, 25 bp, probe
ccttgcacttaaactcattccatat

SEQ ID NO: 192904 - DNA, 25 bp, probe
ccttcatctgttcagtcatctccaa

SEQ ID NO: 192905 - DNA, 25 bp, probe
ccttttgcattgccaagtgccataa

SEQ ID NO: 192906 - DNA, 25 bp, probe
ccttttttgcaggcgatgctgacaa

SEQ ID NO: 192907 - DNA, 25 bp, probe
cctttttctgtgtctggctaatatt

SEQ ID NO: 192908 - DNA, 25 bp, probe
cctttttctgtgtctggctaatatt

SEQ ID NO: 192909 - DNA, 25 bp, probe
cctttggcctgagaactaatatgtt

SEQ ID NO: 192910 - DNA, 25 bp, probe
ccttctgtgcctttgaatacaaatt

SEQ ID NO: 192911 - DNA, 25 bp, probe
ccttcatggtcagcgggacagaatg

SEQ ID NO: 192912 - DNA, 25 bp, probe
ccttcatggtcagcgggacagaatg

SEQ ID NO: 192913 - DNA, 25 bp, probe
cctacgcgtgcagcaggcaaacaag

SEQ ID NO: 192914 - DNA, 25 bp, probe
cctacgcgtgcagcaggcaaacaag

SEQ ID NO: 192915 - DNA, 25 bp, probe
tcctacggccagaagccctacaagg

SEQ ID NO: 192916 - DNA, 25 bp, probe
ccatcaccccagaagcacttagttg

SEQ ID NO: 192917 - DNA, 25 bp, probe
ccatcaccctaataatatacgttgt

SEQ ID NO: 192918 - DNA, 25 bp, probe
ccttccctcactatatatctttatg

SEQ ID NO: 192919 - DNA, 25 bp, probe
ccttgccttcatttgtgttctttag

SEQ ID NO: 192920 - DNA, 25 bp, probe
cctagaatctcctggaatgcttaat

SEQ ID NO: 192921 - DNA, 25 bp, probe
cctagcaatcagtcagggctgcagt

SEQ ID NO: 192922 - DNA, 25 bp, probe
ccattaaagctcaaggtgcatttca

SEQ ID NO: 192923 - DNA, 25 bp, probe
ccttctaggctcaacagaatattcc

SEQ ID NO: 192924 - DNA, 25 bp, probe
ccattctttgtcaccaatattgtgg

SEQ ID NO: 192925 - DNA, 25 bp, probe
cctatccttggcaccaaagatgcag

SEQ ID NO: 192926 - DNA, 25 bp, probe
ccttcctagctgctgctcgaaaagg

SEQ ID NO: 192927 - DNA, 25 bp, probe
ccttcctacagctgctagaccaaga

SEQ ID NO: 192928 - DNA, 25 bp, probe
cctacctggagctcaaacaggagca

SEQ ID NO: 192929 - DNA, 25 bp, probe
cctacctggagctcaaacaggagca

SEQ ID NO: 192930 - DNA, 25 bp, probe
gcctacctgtgagactgaaggggta

SEQ ID NO: 192931 - DNA, 25 bp, probe
cctaccatggcagcagctgaggagg

SEQ ID NO: 192932 - DNA, 25 bp, probe
cctatacatgatgcacctacatatg

SEQ ID NO: 192933 - DNA, 25 bp, probe
cctatgcctgagtacctgaatgtgc

SEQ ID NO: 192934 - DNA, 25 bp, probe
ccttccatggaacctgacgtagctg

SEQ ID NO: 192935 - DNA, 25 bp, probe
ccttgccaggaggcctgccaaaggc

SEQ ID NO: 192936 - DNA, 25 bp, probe
ccttcaggagcaggcccaagaggac

SEQ ID NO: 192937 - DNA, 25 bp, probe
ccattcagggctgttccagagattc

SEQ ID NO: 192938 - DNA, 25 bp, probe
gccatccaattggttttaggtcttg

SEQ ID NO: 192939 - DNA, 25 bp, probe
cctaccttctttaccagatgctttg

SEQ ID NO: 192940 - DNA, 25 bp, probe
cctaccttccttggggatgttcatg

SEQ ID NO: 192941 - DNA, 25 bp, probe
gcctacaattccaccaggtatttcc

SEQ ID NO: 192942 - DNA, 25 bp, probe
ccttcagctattatgccaggttctg

SEQ ID NO: 192943 - DNA, 25 bp, probe
ccttcatgtttaatggcacctcatt

SEQ ID NO: 192944 - DNA, 25 bp, probe
ccttcatgtttaatggcacctcatt

SEQ ID NO: 192945 - DNA, 25 bp, probe
ccttcttttgaatggcctctttgtg

SEQ ID NO: 192946 - DNA, 25 bp, probe
cctatttttgtagatctccatgctt

SEQ ID NO: 192947 - DNA, 25 bp, probe
ccttagcttttagcctggctgtcac

SEQ ID NO: 192948 - DNA, 25 bp, probe
ccttatctcaaagtccgtggctgtt

SEQ ID NO: 192949 - DNA, 25 bp, probe
cctttctcagaagactgtaatgtac

SEQ ID NO: 192950 - DNA, 25 bp, probe
cctttcatagactacactgtccctg

SEQ ID NO: 192951 - DNA, 25 bp, probe
cctttgcagtctgacaatgccaccg

SEQ ID NO: 192952 - DNA, 25 bp, probe
ccttggagctcttcaaattcaccat

SEQ ID NO: 192953 - DNA, 25 bp, probe
ccttggagcccataacataacagag

SEQ ID NO: 192954 - DNA, 25 bp, probe
ccttggagcccataacataacagag

SEQ ID NO: 192955 - DNA, 25 bp, probe
cctagggcaccatggaaaacacaaa

SEQ ID NO: 192956 - DNA, 25 bp, probe
cctagaggccaccgagaaacatgat

SEQ ID NO: 192957 - DNA, 25 bp, probe
ccatcgaggtcctgatgaacaccta

SEQ ID NO: 192958 - DNA, 25 bp, probe
cctatgggttctgtgaccactgctg

SEQ ID NO: 192959 - DNA, 25 bp, probe
cctagaagctttgctgcaggatctg

SEQ ID NO: 192960 - DNA, 25 bp, probe
cctagaagttggtcatgctaatgat

SEQ ID NO: 192961 - DNA, 25 bp, probe
cctttcagtagggcgctaatgtata

SEQ ID NO: 192962 - DNA, 25 bp, probe
ccatttctgtcaccctttttataag

SEQ ID NO: 192963 - DNA, 25 bp, probe
cctttcttcctgcttatatttagga

SEQ ID NO: 192964 - DNA, 25 bp, probe
cctttcccactttctaattcacaga

SEQ ID NO: 192965 - DNA, 25 bp, probe
ccttctctcacctttaaatggcaca

SEQ ID NO: 192966 - DNA, 25 bp, probe
ccttcttcaccttgcacaaaaccaa

SEQ ID NO: 192967 - DNA, 25 bp, probe
ccttgcttccctaacaggaaggtgt

SEQ ID NO: 192968 - DNA, 25 bp, probe
cctttctcacagtgacaggaaggta

SEQ ID NO: 192969 - DNA, 25 bp, probe
cctttctcacagtgacaggaaggta

SEQ ID NO: 192970 - DNA, 25 bp, probe
cctttccagcactgttggtctgatg

SEQ ID NO: 192971 - DNA, 25 bp, probe
ccttgtccacaattgtagtttcata

SEQ ID NO: 192972 - DNA, 25 bp, probe
ccatgtgtgcccacgttgtagatgt

SEQ ID NO: 192973 - DNA, 25 bp, probe
ccatgtgtgcccacgttgtagatgt

SEQ ID NO: 192974 - DNA, 25 bp, probe
ccttgatcgccctgtgataggatct

SEQ ID NO: 192975 - DNA, 25 bp, probe
cctttgagttcatgctgtcggatct

SEQ ID NO: 192976 - DNA, 25 bp, probe
ccttcggagacatctgtctggcgat

SEQ ID NO: 192977 - DNA, 25 bp, probe
cctttgaatgcagccatgtcgtcgt

SEQ ID NO: 192978 - DNA, 25 bp, probe
cctttgaatgcagccatgtcgtcgt

SEQ ID NO: 192979 - DNA, 25 bp, probe
cctttaatagcagatttggttgcag

SEQ ID NO: 192980 - DNA, 25 bp, probe
ccttcttttcagttcattgtttgcc

SEQ ID NO: 192981 - DNA, 25 bp, probe
cctatctgtgttttgaatggtgttg

SEQ ID NO: 192982 - DNA, 25 bp, probe
ccttctggaccagtaggtttcatgg

SEQ ID NO: 192983 - DNA, 25 bp, probe
ccttcttggaatacagcctttcaag

SEQ ID NO: 192984 - DNA, 25 bp, probe
ccttttgaactcagccatctctata

SEQ ID NO: 192985 - DNA, 25 bp, probe
ccttttagactcaccagagatattg

SEQ ID NO: 192986 - DNA, 25 bp, probe
cctatcttccaggcagcccagagaa

SEQ ID NO: 192987 - DNA, 25 bp, probe
cctttgatcgatgctgctccagtaa

SEQ ID NO: 192988 - DNA, 25 bp, probe
ccttacactgctatgctccagaact

SEQ ID NO: 192989 - DNA, 25 bp, probe
ccttatgccaggatgccgagctaca

SEQ ID NO: 192990 - DNA, 25 bp, probe
cctttcctggctgatcagagcttac

SEQ ID NO: 192991 - DNA, 25 bp, probe
cctatgtcactgactcagatgcagg

SEQ ID NO: 192992 - DNA, 25 bp, probe
ccttgttgctgtagatgtgcgtgca

SEQ ID NO: 192993 - DNA, 25 bp, probe
ccttgtgtgcactctgggtgaccag

SEQ ID NO: 192994 - DNA, 25 bp, probe
ccttgtgtgcactctgggtgaccag

SEQ ID NO: 192995 - DNA, 25 bp, probe
ccttggtaacctcgtggaggggatg

SEQ ID NO: 192996 - DNA, 25 bp, probe
cctttgtgaactgcagggacgcggg

SEQ ID NO: 192997 - DNA, 25 bp, probe
cctttgggacccagatcatcggggg

SEQ ID NO: 192998 - DNA, 25 bp, probe
ccttaggtactccgtgatcatgagc

SEQ ID NO: 192999 - DNA, 25 bp, probe
ccttcggagccaaggctaatgtgct

SEQ ID NO: 193000 - DNA, 25 bp, probe
ccttcaggagtggaggccactggag

SEQ ID NO: 193001 - DNA, 25 bp, probe
ccttgcaggagcgtcagttgcgggg

SEQ ID NO: 193002 - DNA, 25 bp, probe
cctttggaggccgttgatgtggtgt

SEQ ID NO: 193003 - DNA, 25 bp, probe
ccttcatgctggccgagtttgatgg

SEQ ID NO: 193004 - DNA, 25 bp, probe
cctttgtgttctcagctctgattga

SEQ ID NO: 193005 - DNA, 25 bp, probe
cctatgtgattttaactctgtcttc

SEQ ID NO: 193006 - DNA, 25 bp, probe
cctatgtgattttaactctgtcttc

SEQ ID NO: 193007 - DNA, 25 bp, probe
cctttgcatggtgggactcttcttt

SEQ ID NO: 193008 - DNA, 25 bp, probe
ccttctgagagggttcctttctcta

SEQ ID NO: 193009 - DNA, 25 bp, probe
ccttctgagagggttcctttctcta

SEQ ID NO: 193010 - DNA, 25 bp, probe
ccttctgtacggatttgctctccgg

SEQ ID NO: 193011 - DNA, 25 bp, probe
cctatgttagggcctttgcccaggg

SEQ ID NO: 193012 - DNA, 25 bp, probe
cctatgattcatggggaactccatt

SEQ ID NO: 193013 - DNA, 25 bp, probe
cctatgtcacagcgatggatctctt

SEQ ID NO: 193014 - DNA, 25 bp, probe
cctagtctcagggatggagcagcca

SEQ ID NO: 193015 - DNA, 25 bp, probe
ccttgtcatgatgctggagccagac

SEQ ID NO: 193016 - DNA, 25 bp, probe
ccttctttggctggagccggttcat

SEQ ID NO: 193017 - DNA, 25 bp, probe
ccttctttggctggagccggttcat

SEQ ID NO: 193018 - DNA, 25 bp, probe
ccatatcttaggggcgtctggcctt

SEQ ID NO: 193019 - DNA, 25 bp, probe
ccttcgtcggtgacggggacatctt

SEQ ID NO: 193020 - DNA, 25 bp, probe
ccttctttgggagatagtgagcctt

SEQ ID NO: 193021 - DNA, 25 bp, probe
tccagtttttaggactagtacattc

SEQ ID NO: 193022 - DNA, 25 bp, probe
tccattttttataaccgctacacta

SEQ ID NO: 193023 - DNA, 25 bp, probe
ccttttggctataaccagtctcagc

SEQ ID NO: 193024 - DNA, 25 bp, probe
ccatggttacgtcagtcgtgtgcag

SEQ ID NO: 193025 - DNA, 25 bp, probe
ccatggttacgtcagtcgtgtgcag

SEQ ID NO: 193026 - DNA, 25 bp, probe
cctttttctgctaattcgagtcatg

SEQ ID NO: 193027 - DNA, 25 bp, probe
cctattattctggatcctcgtggat

SEQ ID NO: 193028 - DNA, 25 bp, probe
ccattgtgattctgaattcttggat

SEQ ID NO: 193029 - DNA, 25 bp, probe
ccttgagtgctcttgctattaacgt

SEQ ID NO: 193030 - DNA, 25 bp, probe
ccttggtgtctcacttcaactgtgt

SEQ ID NO: 193031 - DNA, 25 bp, probe
cctttgagtgacaacttctccgtga

SEQ ID NO: 193032 - DNA, 25 bp, probe
cctttcagtaccatacgccgtgaaa

SEQ ID NO: 193033 - DNA, 25 bp, probe
ccttttgtggtcatcacagccgcat

SEQ ID NO: 193034 - DNA, 25 bp, probe
cctttgtggcttgtgccattcagat

SEQ ID NO: 193035 - DNA, 25 bp, probe
ccttttgggctgcatgctattccat

SEQ ID NO: 193036 - DNA, 25 bp, probe
cctattcatcaggctgtactttcag

SEQ ID NO: 193037 - DNA, 25 bp, probe
cctattcatcaggctgtactttcag

SEQ ID NO: 193038 - DNA, 25 bp, probe
cctattcagcagatattaattcagc

SEQ ID NO: 193039 - DNA, 25 bp, probe
ccttggcagctgatgcaaacttcat

SEQ ID NO: 193040 - DNA, 25 bp, probe
cctatggcagcgtatacaaagctat

SEQ ID NO: 193041 - DNA, 25 bp, probe
ccttagctgcggtgctatatgccat

SEQ ID NO: 193042 - DNA, 25 bp, probe
ccttgactggaattgctgctaccca

SEQ ID NO: 193043 - DNA, 25 bp, probe
ccttgacttgaaatgctcttttgca

SEQ ID NO: 193044 - DNA, 25 bp, probe
cctttcttcatcatcatcttttgtt

SEQ ID NO: 193045 - DNA, 25 bp, probe
ccttcttcccattcatatttattta

SEQ ID NO: 193046 - DNA, 25 bp, probe
ccttcttcccattcatatttattta

SEQ ID NO: 193047 - DNA, 25 bp, probe
ccttcttcacacccattacattgtg

SEQ ID NO: 193048 - DNA, 25 bp, probe
cctttatagcagcccgtatgatatt

SEQ ID NO: 193049 - DNA, 25 bp, probe
ccttctccagcaggactttgaatta

SEQ ID NO: 193050 - DNA, 25 bp, probe
ccttcctcatcatggttgtggtgta

SEQ ID NO: 193051 - DNA, 25 bp, probe
ccttcccatgatacagacattggct

SEQ ID NO: 193052 - DNA, 25 bp, probe
ccttcccatgatacagacattggct

SEQ ID NO: 193053 - DNA, 25 bp, probe
ccttccttgctgcaaaatggctctg

SEQ ID NO: 193054 - DNA, 25 bp, probe
ccttccttgctgcaaaatggctctg

SEQ ID NO: 193055 - DNA, 25 bp, probe
cctatttctctgacacaaactgttc

SEQ ID NO: 193056 - DNA, 25 bp, probe
ccttttcttgccaaaatatatctct

SEQ ID NO: 193057 - DNA, 25 bp, probe
cctatttttcacctaagtcatcttt

SEQ ID NO: 193058 - DNA, 25 bp, probe
ccttctttaccacaagctatggtga

SEQ ID NO: 193059 - DNA, 25 bp, probe
ccttctttaccagatgctttgtggt

SEQ ID NO: 193060 - DNA, 25 bp, probe
cctatcttgtacaaatgcatgcttt

SEQ ID NO: 193061 - DNA, 25 bp, probe
cctttctgccaggatcacatcactg

SEQ ID NO: 193062 - DNA, 25 bp, probe
ccttctgtccagcaaatactctaat

SEQ ID NO: 193063 - DNA, 25 bp, probe
ccttcttgaagacgagtgacattca

SEQ ID NO: 193064 - DNA, 25 bp, probe
ccttcttattggcagtcacatttat

SEQ ID NO: 193065 - DNA, 25 bp, probe
cctatcttcagtcagaggagattgt

SEQ ID NO: 193066 - DNA, 25 bp, probe
cctattgtcgtgcatgtgggatgta

SEQ ID NO: 193067 - DNA, 25 bp, probe
cctttgccatgtctggggaggctct

SEQ ID NO: 193068 - DNA, 25 bp, probe
ccttctgcaattcccgggagattaa

SEQ ID NO: 193069 - DNA, 25 bp, probe
ccatttgaccatctcgggaagtgag

SEQ ID NO: 193070 - DNA, 25 bp, probe
ccttataccagtgcagtggacatgt

SEQ ID NO: 193071 - DNA, 25 bp, probe
ccttaactgcacgatattcagattt

SEQ ID NO: 193072 - DNA, 25 bp, probe
cctataaccatgttctatattcttt

SEQ ID NO: 193073 - DNA, 25 bp, probe
ccttgcagaactgccattattttct

SEQ ID NO: 193074 - DNA, 25 bp, probe
cctttaagctgaccacagagtttgt

SEQ ID NO: 193075 - DNA, 25 bp, probe
ccttgacaagaaccatcaagttcca

SEQ ID NO: 193076 - DNA, 25 bp, probe
cctttcgagactcctcaagcatgaa

SEQ ID NO: 193077 - DNA, 25 bp, probe
ccttcctgcagaatgtgctcaacaa

SEQ ID NO: 193078 - DNA, 25 bp, probe
ccttctgctgtgtgtgtgtatatat

SEQ ID NO: 193079 - DNA, 25 bp, probe
ccttcatcctgtggaatggattacg

SEQ ID NO: 193080 - DNA, 25 bp, probe
ccttatcctggacatgaatgtattg

SEQ ID NO: 193081 - DNA, 25 bp, probe
ccttcttctggaccaaagcaatgtg

SEQ ID NO: 193082 - DNA, 25 bp, probe
ccttcattccaacgactgagtgagg

SEQ ID NO: 193083 - DNA, 25 bp, probe
ccatttctccatacgcactggtatg

SEQ ID NO: 193084 - DNA, 25 bp, probe
ccatttctccatacgcactggtatg

SEQ ID NO: 193085 - DNA, 25 bp, probe
ccttttacatactgctgtctatgtg

SEQ ID NO: 193086 - DNA, 25 bp, probe
ccttctttatacttttctcagttct

SEQ ID NO: 193087 - DNA, 25 bp, probe
cctttccaatacgattttctgttgc

SEQ ID NO: 193088 - DNA, 25 bp, probe
ccttaagtgataggatttgttattc

SEQ ID NO: 193089 - DNA, 25 bp, probe
ccttcaatttatggtcttctgtttt

SEQ ID NO: 193090 - DNA, 25 bp, probe
ccttaaatatcttgtctacattctt

SEQ ID NO: 193091 - DNA, 25 bp, probe
cctattggacctgatcatgaatttt

SEQ ID NO: 193092 - DNA, 25 bp, probe
cctattggacctgatcatgaatttt

SEQ ID NO: 193093 - DNA, 25 bp, probe
ccattctaacctgactggcacatct

SEQ ID NO: 193094 - DNA, 25 bp, probe
ccattcaacactgaactgcaactgt

SEQ ID NO: 193095 - DNA, 25 bp, probe
ccttcccgctgctatttggaatctt

SEQ ID NO: 193096 - DNA, 25 bp, probe
ccttcccgctgctatttggaatctt

SEQ ID NO: 193097 - DNA, 25 bp, probe
ccttcacatcttcttaggcagtctt

SEQ ID NO: 193098 - DNA, 25 bp, probe
ccttcaccttgtgtggacagtgtct

SEQ ID NO: 193099 - DNA, 25 bp, probe
ccagaaactcatggttggcaaggtt

SEQ ID NO: 193100 - DNA, 25 bp, probe
ccaaacccaagcacgactggacgag

SEQ ID NO: 193101 - DNA, 25 bp, probe
ccaccaccctatgacgaaaaagcag

SEQ ID NO: 193102 - DNA, 25 bp, probe
ccaccaatccctgaaagattaagcc

SEQ ID NO: 193103 - DNA, 25 bp, probe
ccatcccccgctgtaaatatacact

SEQ ID NO: 193104 - DNA, 25 bp, probe
ccaggccttactgcttttgaacctg

SEQ ID NO: 193105 - DNA, 25 bp, probe
ccaggccttattgttctttgtcgga

SEQ ID NO: 193106 - DNA, 25 bp, probe
ccattccattttcttttctggctaa

SEQ ID NO: 193107 - DNA, 25 bp, probe
ccttcgatttccctatgattcatgg

SEQ ID NO: 193108 - DNA, 25 bp, probe
ccttcctttcccaagtattgcgaat

SEQ ID NO: 193109 - DNA, 25 bp, probe
ccttcttatcatggccacagtttgg

SEQ ID NO: 193110 - DNA, 25 bp, probe
ccttttcatgcttctacagtccagc

SEQ ID NO: 193111 - DNA, 25 bp, probe
cctttcaatggaattcagctctcac

SEQ ID NO: 193112 - DNA, 25 bp, probe
ccttggcaatgcatttgatggccac

SEQ ID NO: 193113 - DNA, 25 bp, probe
ccttggcccagtgtggacgcactgt

SEQ ID NO: 193114 - DNA, 25 bp, probe
ccttggcccagtgtggacgcactgt

SEQ ID NO: 193115 - DNA, 25 bp, probe
ccttggccaagggaccagagaagca

SEQ ID NO: 193116 - DNA, 25 bp, probe
ccttggagaaggtcccggacctcat

SEQ ID NO: 193117 - DNA, 25 bp, probe
cctttgaacagatcccggtgacatt

SEQ ID NO: 193118 - DNA, 25 bp, probe
cctttggcaaatgtcctgctgtggc

SEQ ID NO: 193119 - DNA, 25 bp, probe
ccttcaccaaacaatcccagtggct

SEQ ID NO: 193120 - DNA, 25 bp, probe
ccttcaccaaacaatcccagtggct

SEQ ID NO: 193121 - DNA, 25 bp, probe
ccttaccactgacaggtcgtggccc

SEQ ID NO: 193122 - DNA, 25 bp, probe
ccatccgggagacaggacgggctct

SEQ ID NO: 193123 - DNA, 25 bp, probe
ccatcggccgggggggatgagggca

SEQ ID NO: 193124 - DNA, 25 bp, probe
ccttcccttggagggagaggtggca

SEQ ID NO: 193125 - DNA, 25 bp, probe
ccttcctctttggggctgaggagga

SEQ ID NO: 193126 - DNA, 25 bp, probe
ccttccttcttattgactgggagac

SEQ ID NO: 193127 - DNA, 25 bp, probe
gccttacctaggaagacgcagggtc

SEQ ID NO: 193128 - DNA, 25 bp, probe
gccttacctaggaagacgcagggtc

SEQ ID NO: 193129 - DNA, 25 bp, probe
ccttactgccggaagggcatcgtgt

SEQ ID NO: 193130 - DNA, 25 bp, probe
ccttcagctcctttagggatggggg

SEQ ID NO: 193131 - DNA, 25 bp, probe
ccttcagctcctttagggatggggg

SEQ ID NO: 193132 - DNA, 25 bp, probe
ccttcgccatctattgcgtggtggg

SEQ ID NO: 193133 - DNA, 25 bp, probe
ccttcccactacacagttgctatga

SEQ ID NO: 193134 - DNA, 25 bp, probe
ccttaagcatttcccagctgtgtaa

SEQ ID NO: 193135 - DNA, 25 bp, probe
gcgactaactttctgcaggtttaac

SEQ ID NO: 193136 - DNA, 25 bp, probe
gcgactaactttctgcaggtttaac

SEQ ID NO: 193137 - DNA, 25 bp, probe
gctcctaactttctatcactaatca

SEQ ID NO: 193138 - DNA, 25 bp, probe
ccttaactttcccatgttcaatgca

SEQ ID NO: 193139 - DNA, 25 bp, probe
ccttacactttggctatgaacaaat

SEQ ID NO: 193140 - DNA, 25 bp, probe
ccatctactttttcttgggcagcac

SEQ ID NO: 193141 - DNA, 25 bp, probe
cctttctttatactgttgtggacaa

SEQ ID NO: 193142 - DNA, 25 bp, probe
ccttgtcataactttgtgttggagg

SEQ ID NO: 193143 - DNA, 25 bp, probe
ccttgatcatatctgaagtggttat

SEQ ID NO: 193144 - DNA, 25 bp, probe
ccatctcaatgtaagggtggtttgg

SEQ ID NO: 193145 - DNA, 25 bp, probe
ccttctacatcctggtgtttgtggt

SEQ ID NO: 193146 - DNA, 25 bp, probe
ccttctccaggcctgagtgtttttg

SEQ ID NO: 193147 - DNA, 25 bp, probe
ccttcatgccatggcctgtggatgg

SEQ ID NO: 193148 - DNA, 25 bp, probe
ccttcatgccatggcctgtggatgg

SEQ ID NO: 193149 - DNA, 25 bp, probe
cctttctctggcctgggcagatgat

SEQ ID NO: 193150 - DNA, 25 bp, probe
ccttcttctggaagctggagctaat

SEQ ID NO: 193151 - DNA, 25 bp, probe
ccatttacatcgtcacggagtacat

SEQ ID NO: 193152 - DNA, 25 bp, probe
ccatgatttacagcctaaggaataa

SEQ ID NO: 193153 - DNA, 25 bp, probe
ccatttttcaccctacatgaatcca

SEQ ID NO: 193154 - DNA, 25 bp, probe
ccttttctaccattttaatctcact

SEQ ID NO: 193155 - DNA, 25 bp, probe
ccttttcttcactacattattccac

SEQ ID NO: 193156 - DNA, 25 bp, probe
ccttttttcagctcatcctggaaca

SEQ ID NO: 193157 - DNA, 25 bp, probe
cctttatctgtgacttcatgctctg

SEQ ID NO: 193158 - DNA, 25 bp, probe
ccttttgtgctgacctctgatatgg

SEQ ID NO: 193159 - DNA, 25 bp, probe
ccttttgtgctgacctctgatatgg

SEQ ID NO: 193160 - DNA, 25 bp, probe
cctttgtgatctcacctgttggaat

SEQ ID NO: 193161 - DNA, 25 bp, probe
ccttcttgaaggagctggggactgg

SEQ ID NO: 193162 - DNA, 25 bp, probe
ccttcctgcgggtggggagactgag

SEQ ID NO: 193163 - DNA, 25 bp, probe
ccttcctgcgggtggggagactgag

SEQ ID NO: 193164 - DNA, 25 bp, probe
ccttcctgtagcatatggggagact

SEQ ID NO: 193165 - DNA, 25 bp, probe
ccttccttatcatgctgggtacaat

SEQ ID NO: 193166 - DNA, 25 bp, probe
ccttcatctacagcctgaggaacaa

SEQ ID NO: 193167 - DNA, 25 bp, probe
ccttcagtaacaccagtgtaaaagc

SEQ ID NO: 193168 - DNA, 25 bp, probe
ccttcaggacaccctgtaagaacag

SEQ ID NO: 193169 - DNA, 25 bp, probe
ccttcagcgcagttgcaatgtaaga

SEQ ID NO: 193170 - DNA, 25 bp, probe
ccttgcagagcatcacctggcagat

SEQ ID NO: 193171 - DNA, 25 bp, probe
ccttgcgggaagactgccaatatgt

SEQ ID NO: 193172 - DNA, 25 bp, probe
ccatactgggggcagacactatgtt

SEQ ID NO: 193173 - DNA, 25 bp, probe
ccatcactgttgggggcaagatcgt

SEQ ID NO: 193174 - DNA, 25 bp, probe
ccatcgattcccgggaagatcccgt

SEQ ID NO: 193175 - DNA, 25 bp, probe
ccttgatctcccggtcagttcggga

SEQ ID NO: 193176 - DNA, 25 bp, probe
ccattactcccgctgcagtgcgggg

SEQ ID NO: 193177 - DNA, 25 bp, probe
ccttagcccttgcgagggttggtct

SEQ ID NO: 193178 - DNA, 25 bp, probe
ccttggactcttccgaagggatgtg

SEQ ID NO: 193179 - DNA, 25 bp, probe
ccttgctgaggccccagtaggggtg

SEQ ID NO: 193180 - DNA, 25 bp, probe
ccttcagagtccgtcagtaagctgg

SEQ ID NO: 193181 - DNA, 25 bp, probe
ccttcagagtccgtcagtaagctgg

SEQ ID NO: 193182 - DNA, 25 bp, probe
ccttcatcgacagagcgctaagcga

SEQ ID NO: 193183 - DNA, 25 bp, probe
ccttcatcgagcagggcaagcggat

SEQ ID NO: 193184 - DNA, 25 bp, probe
gccgtaagaatgcgccagtgcgggt

SEQ ID NO: 193185 - DNA, 25 bp, probe
gttaaaatagcggcctgtgcccagt

SEQ ID NO: 193186 - DNA, 25 bp, probe
taataaagatggcactttcccgttt

SEQ ID NO: 193187 - DNA, 25 bp, probe
ccataaaatgggctttcctctgtct

SEQ ID NO: 193188 - DNA, 25 bp, probe
ccatgaaagggcgtctccctttcct

SEQ ID NO: 193189 - DNA, 25 bp, probe
ccactacagggagctcccagttgag

SEQ ID NO: 193190 - DNA, 25 bp, probe
ccataaagaggatcgaccagtcaga

SEQ ID NO: 193191 - DNA, 25 bp, probe
ccttcgaggggacaccgatgctgac

SEQ ID NO: 193192 - DNA, 25 bp, probe
ccttctcggaggtgatcctggcaga

SEQ ID NO: 193193 - DNA, 25 bp, probe
cctttagggatctagctcttcgagt

SEQ ID NO: 193194 - DNA, 25 bp, probe
ccttctgagagactcacagctcctc

SEQ ID NO: 193195 - DNA, 25 bp, probe
ccttcttgaagctcattcgccaggt

SEQ ID NO: 193196 - DNA, 25 bp, probe
ccttcttgagtgtgcttgcaccagc

SEQ ID NO: 193197 - DNA, 25 bp, probe
ccttcttgagtgtgcttgcaccagc

SEQ ID NO: 193198 - DNA, 25 bp, probe
ccttcattgggggcatgctacaagc

SEQ ID NO: 193199 - DNA, 25 bp, probe
ccttcattgggggcatgctacaagc

SEQ ID NO: 193200 - DNA, 25 bp, probe
cctttaatgtgggcagcatatagaa

SEQ ID NO: 193201 - DNA, 25 bp, probe
ccttcgagtggggcaggctgagaac

SEQ ID NO: 193202 - DNA, 25 bp, probe
ccttgagagtgacccaaagatgaga

SEQ ID NO: 193203 - DNA, 25 bp, probe
ccttagaggagcccacggctaagag

SEQ ID NO: 193204 - DNA, 25 bp, probe
ccttgtggttgactagggctgggag

SEQ ID NO: 193205 - DNA, 25 bp, probe
ccatctgtttggtgggggtagagct

SEQ ID NO: 193206 - DNA, 25 bp, probe
ccttcttatgttaggaggccttggc

SEQ ID NO: 193207 - DNA, 25 bp, probe
ccttcttatgttaggaggccttggc

SEQ ID NO: 193208 - DNA, 25 bp, probe
ccttcctgggcatggagtcctgtgg

SEQ ID NO: 193209 - DNA, 25 bp, probe
ccttgagtttgctcacagtgcctgt

SEQ ID NO: 193210 - DNA, 25 bp, probe
ccttgagcttatcatgccaagggtt

SEQ ID NO: 193211 - DNA, 25 bp, probe
ccttggcagctcctagccatagagc

SEQ ID NO: 193212 - DNA, 25 bp, probe
ccttggcagctcctagccatagagc

SEQ ID NO: 193213 - DNA, 25 bp, probe
ccttcgcaggcatagcctgcgcccc

SEQ ID NO: 193214 - DNA, 25 bp, probe
ccttcgcaggcatagcctgcgcccc

SEQ ID NO: 193215 - DNA, 25 bp, probe
ccttcagcaacatgcagagtccctg

SEQ ID NO: 193216 - DNA, 25 bp, probe
ccttctgaagcatcaaagccttaga

SEQ ID NO: 193217 - DNA, 25 bp, probe
ccttgctttgtatgcaaccttagct

SEQ ID NO: 193218 - DNA, 25 bp, probe
ccattgttctcttcagaaccctatc

SEQ ID NO: 193219 - DNA, 25 bp, probe
ccattgatggtctggattccaccac

SEQ ID NO: 193220 - DNA, 25 bp, probe
ccatcttggtcaaggacacccaggc

SEQ ID NO: 193221 - DNA, 25 bp, probe
ccatacacgcaaaagacaccgggcc

SEQ ID NO: 193222 - DNA, 25 bp, probe
ccatagaccatacatacgatcagca

SEQ ID NO: 193223 - DNA, 25 bp, probe
ccataactccagacatcactggcag

SEQ ID NO: 193224 - DNA, 25 bp, probe
ccatcaacaccacaacaggagtctt

SEQ ID NO: 193225 - DNA, 25 bp, probe
ccataacccctagtcatcgtttgtg

SEQ ID NO: 193226 - DNA, 25 bp, probe
ccatatcatcaggctctaccaggtt

SEQ ID NO: 193227 - DNA, 25 bp, probe
ccatatcatcaggctctaccaggtt

SEQ ID NO: 193228 - DNA, 25 bp, probe
ccttcatcaagcggtccgaggtgga

SEQ ID NO: 193229 - DNA, 25 bp, probe
ccttatcactggcattgtgcaggtg

SEQ ID NO: 193230 - DNA, 25 bp, probe
ccttatcactggcattgtgcaggtg

SEQ ID NO: 193231 - DNA, 25 bp, probe
ccttacctggacatgtatcagatgc

SEQ ID NO: 193232 - DNA, 25 bp, probe
ccttatttctgctactgttgctgaa

SEQ ID NO: 193233 - DNA, 25 bp, probe
ccttttgtcctcatcatgagtgata

SEQ ID NO: 193234 - DNA, 25 bp, probe
gccctttgtccttgtctgttagggc

SEQ ID NO: 193235 - DNA, 25 bp, probe
gccctccggagctaccagttaggga

SEQ ID NO: 193236 - DNA, 25 bp, probe
gcctttctagatgacaacttccgga

SEQ ID NO: 193237 - DNA, 25 bp, probe
gcccatttaaaagaggtcactggct

SEQ ID NO: 193238 - DNA, 25 bp, probe
gcccattccaaagagggctctccct

SEQ ID NO: 193239 - DNA, 25 bp, probe
gccaatcccaaagggggttgcaact

SEQ ID NO: 193240 - DNA, 25 bp, probe
gccaacgggttctgtgtgttcaaca

SEQ ID NO: 193241 - DNA, 25 bp, probe
ccaacgggttctgtgtgttcaacaa

SEQ ID NO: 193242 - DNA, 25 bp, probe
ccagatccgtccatttagtactacc

SEQ ID NO: 193243 - DNA, 25 bp, probe
ccagacgtttcgatgaagcccgagc

SEQ ID NO: 193244 - DNA, 25 bp, probe
ccagacgtttcgatgaagcccgagc

SEQ ID NO: 193245 - DNA, 25 bp, probe
ccagaagtttcgaccaagtatccca

SEQ ID NO: 193246 - DNA, 25 bp, probe
ccagattgttctgtccagtttccaa

SEQ ID NO: 193247 - DNA, 25 bp, probe
ccagaagaactcccctttgtaagat

SEQ ID NO: 193248 - DNA, 25 bp, probe
ccataagaactgtgctgacttggaa

SEQ ID NO: 193249 - DNA, 25 bp, probe
ccttgacacctctgtgctttggtaa

SEQ ID NO: 193250 - DNA, 25 bp, probe
ccttgaacctgtttattggtgtcat

SEQ ID NO: 193251 - DNA, 25 bp, probe
ccttggtcacattattttggttgct

SEQ ID NO: 193252 - DNA, 25 bp, probe
ccttggtcaccggtggtgtgtgtgg

SEQ ID NO: 193253 - DNA, 25 bp, probe
ccttggtcaccggtggtgtgtgtgg

SEQ ID NO: 193254 - DNA, 25 bp, probe
ccttggtactgcagagtctgggttg

SEQ ID NO: 193255 - DNA, 25 bp, probe
ccttggtacaattgatgactcagac

SEQ ID NO: 193256 - DNA, 25 bp, probe
ccttaatacagctttgagctcagca

SEQ ID NO: 193257 - DNA, 25 bp, probe
ccttcaataatggactatgctatga

SEQ ID NO: 193258 - DNA, 25 bp, probe
ccttccatgtcaagattcagctagt

SEQ ID NO: 193259 - DNA, 25 bp, probe
ccttaagcatgcagagtcactcgaa

SEQ ID NO: 193260 - DNA, 25 bp, probe
ccttcgactgcacggccaccatgaa

SEQ ID NO: 193261 - DNA, 25 bp, probe
ccttcgactgctccaagaatcagag

SEQ ID NO: 193262 - DNA, 25 bp, probe
ccttcgacatcgtcaagcagaggag

SEQ ID NO: 193263 - DNA, 25 bp, probe
ccttcatgatccaccagctcatggg

SEQ ID NO: 193264 - DNA, 25 bp, probe
ccttgtgacccagcagctatctaag

SEQ ID NO: 193265 - DNA, 25 bp, probe
ccttgtgacccagcagctatctaag

SEQ ID NO: 193266 - DNA, 25 bp, probe
ccatatgttgctccagaacttctga

SEQ ID NO: 193267 - DNA, 25 bp, probe
ccttcctgtccagagatgctcatag

SEQ ID NO: 193268 - DNA, 25 bp, probe
ccttcttcatccttaactgcatggt

SEQ ID NO: 193269 - DNA, 25 bp, probe
ccttctgtctatctctgttgctgag

SEQ ID NO: 193270 - DNA, 25 bp, probe
ccattctgcctcaatcttttgcaag

SEQ ID NO: 193271 - DNA, 25 bp, probe
ccatcatcacccagctgtttgaaga

SEQ ID NO: 193272 - DNA, 25 bp, probe
ccattgcagcgcgggcgttggaaga

SEQ ID NO: 193273 - DNA, 25 bp, probe
ccatatgctcttgggcctcaggaag

SEQ ID NO: 193274 - DNA, 25 bp, probe
ccttctctggccccaagtagagcca

SEQ ID NO: 193275 - DNA, 25 bp, probe
ccttccatagccagcaatgttgtca

SEQ ID NO: 193276 - DNA, 25 bp, probe
ccttcgcaacgttgactgtctttag

SEQ ID NO: 193277 - DNA, 25 bp, probe
ccttcagcacaccaatggtgtcaat

SEQ ID NO: 193278 - DNA, 25 bp, probe
ccttatagcccattggatatcagta

SEQ ID NO: 193279 - DNA, 25 bp, probe
ccattacaaccactgctaccagtag

SEQ ID NO: 193280 - DNA, 25 bp, probe
ccttgatgcaaacacaactcagttc

SEQ ID NO: 193281 - DNA, 25 bp, probe
ccacgatcaaaacaaccacaacaca

SEQ ID NO: 193282 - DNA, 25 bp, probe
ccttatctcaacaacaaccacaaaa

SEQ ID NO: 193283 - DNA, 25 bp, probe
ccttctccaaaccagatccaatcaa

SEQ ID NO: 193284 - DNA, 25 bp, probe
ccttcccattctgagatccagtaca

SEQ ID NO: 193285 - DNA, 25 bp, probe
ccttccaatgtccaaaactgctaac

SEQ ID NO: 193286 - DNA, 25 bp, probe
gccttccagaaccacaaactttatt

SEQ ID NO: 193287 - DNA, 25 bp, probe
ccatctcctgaacccacaaattatt

SEQ ID NO: 193288 - DNA, 25 bp, probe
ccatcccaggaggacctgaattgta

SEQ ID NO: 193289 - DNA, 25 bp, probe
ccatcccaggagctcattatccagt

SEQ ID NO: 193290 - DNA, 25 bp, probe
ccttacagaggcctctttactgacc

SEQ ID NO: 193291 - DNA, 25 bp, probe
ccatttcaggccatcttcagttgaa

SEQ ID NO: 193292 - DNA, 25 bp, probe
ccattgtactccagcctgggtgaca

SEQ ID NO: 193293 - DNA, 25 bp, probe
ccttgataccagctctctgtggaaa

SEQ ID NO: 193294 - DNA, 25 bp, probe
ccttatcacactcacacagttgact

SEQ ID NO: 193295 - DNA, 25 bp, probe
ccttatcacactcacacagttgact

SEQ ID NO: 193296 - DNA, 25 bp, probe
ccatgattacgtcatccagactact

SEQ ID NO: 193297 - DNA, 25 bp, probe
ccatgttagcctggtcaagatgctg

SEQ ID NO: 193298 - DNA, 25 bp, probe
ccatgttgagctacttcaagccgct

SEQ ID NO: 193299 - DNA, 25 bp, probe
ccttaggactgttacagctgagcat

SEQ ID NO: 193300 - DNA, 25 bp, probe
ccatctagcggaacaacagtgacat

SEQ ID NO: 193301 - DNA, 25 bp, probe
ccatcgagatgtccagcaaagtaca

SEQ ID NO: 193302 - DNA, 25 bp, probe
ccttgaatgatgccatgaggaacaa

SEQ ID NO: 193303 - DNA, 25 bp, probe
ccttgaatgatgccatgaggaacaa

SEQ ID NO: 193304 - DNA, 25 bp, probe
ccatataaatgtggaggctatcaac

SEQ ID NO: 193305 - DNA, 25 bp, probe
ccttctgatttggaatctctccatc

SEQ ID NO: 193306 - DNA, 25 bp, probe
ccatcttgactttcaattcctcatc

SEQ ID NO: 193307 - DNA, 25 bp, probe
ccatattacgacttagtgccctctg

SEQ ID NO: 193308 - DNA, 25 bp, probe
ccttatcctgacgtaaacacctttg

SEQ ID NO: 193309 - DNA, 25 bp, probe
ccttgcaccatgatctgaaaacaca

SEQ ID NO: 193310 - DNA, 25 bp, probe
ccttgcaccatgatctgaaaacaca

SEQ ID NO: 193311 - DNA, 25 bp, probe
ccatcgcccagttcattgaaaccac

SEQ ID NO: 193312 - DNA, 25 bp, probe
ccaggcccaggacaaactccagggc

SEQ ID NO: 193313 - DNA, 25 bp, probe
gcctggcccgttgaagttccaggga

SEQ ID NO: 193314 - DNA, 25 bp, probe
tgccgggggttcataggtcactggc

SEQ ID NO: 193315 - DNA, 25 bp, probe
gccgggggttcataggtcactggct

SEQ ID NO: 193316 - DNA, 25 bp, probe
ccttggggtctcttgatgggatcat

SEQ ID NO: 193317 - DNA, 25 bp, probe
ccttcaggcagggggcaggagcact

SEQ ID NO: 193318 - DNA, 25 bp, probe
ccttcggcatggtgtatgagggcaa

SEQ ID NO: 193319 - DNA, 25 bp, probe
ccttccaatgagagattataacata

SEQ ID NO: 193320 - DNA, 25 bp, probe
ccttgccacattaaattgataacat

SEQ ID NO: 193321 - DNA, 25 bp, probe
ccttgcgcctagagactgtagaccc

SEQ ID NO: 193322 - DNA, 25 bp, probe
ccattggccttggtacttatggcag

SEQ ID NO: 193323 - DNA, 25 bp, probe
ccattggccttggtacttatggcag

SEQ ID NO: 193324 - DNA, 25 bp, probe
ccttggctgttgtatttgaattgag

SEQ ID NO: 193325 - DNA, 25 bp, probe
gccttgggtgggattgagtttgttc

SEQ ID NO: 193326 - DNA, 25 bp, probe
ccttgggtgggattgagtttgttct

SEQ ID NO: 193327 - DNA, 25 bp, probe
ccttgggatttggcatgtgttttgt

SEQ ID NO: 193328 - DNA, 25 bp, probe
ccttgggatttggcctggatacagt

SEQ ID NO: 193329 - DNA, 25 bp, probe
ccttgggaaaatgctagcaacatta

SEQ ID NO: 193330 - DNA, 25 bp, probe
ccattggaaatggattctagaacaa

SEQ ID NO: 193331 - DNA, 25 bp, probe
ccagtaaagagctttctcacaaaaa

SEQ ID NO: 193332 - DNA, 25 bp, probe
ccattcaacttagttcccaaaatga

SEQ ID NO: 193333 - DNA, 25 bp, probe
ccttctccttgaggcttctaaataa

SEQ ID NO: 193334 - DNA, 25 bp, probe
ccatttacaattgcattcgaaaaca

SEQ ID NO: 193335 - DNA, 25 bp, probe
ccatctttcaaaggaagtaacacca

SEQ ID NO: 193336 - DNA, 25 bp, probe
ccatctttcaaaggaagtaacacca

SEQ ID NO: 193337 - DNA, 25 bp, probe
ccattatcccaacaagctgtgcacc

SEQ ID NO: 193338 - DNA, 25 bp, probe
ccatatttccggccaagcattgacc

SEQ ID NO: 193339 - DNA, 25 bp, probe
ccattcttcagtgcctagctgtaca

SEQ ID NO: 193340 - DNA, 25 bp, probe
ccttctacgtggtcgagtgcatcgc

SEQ ID NO: 193341 - DNA, 25 bp, probe
ccattcaacagagtagggtgcactg

SEQ ID NO: 193342 - DNA, 25 bp, probe
ccattgtgaccagcagcaggctttt

SEQ ID NO: 193343 - DNA, 25 bp, probe
ccttgtaaacaccatgagctctctt

SEQ ID NO: 193344 - DNA, 25 bp, probe
tagtttaacacgtggtccttttgtg

SEQ ID NO: 193345 - DNA, 25 bp, probe
taattataaccgagggctggcgttt

SEQ ID NO: 193346 - DNA, 25 bp, probe
tcaaaaacccgatgtggtgggtatc

SEQ ID NO: 193347 - DNA, 25 bp, probe
tcaaaacccagtgagggggatgttt

SEQ ID NO: 193348 - DNA, 25 bp, probe
ccaaccctagtgaggtggaggtcct

SEQ ID NO: 193349 - DNA, 25 bp, probe
ccaacttccctgatctttaagactt

SEQ ID NO: 193350 - DNA, 25 bp, probe
ccagtttacactgcctcttagcagc

SEQ ID NO: 193351 - DNA, 25 bp, probe
gccagactgaagttccctctaaagg

SEQ ID NO: 193352 - DNA, 25 bp, probe
ccaggcttaattgccctacaaaggg

SEQ ID NO: 193353 - DNA, 25 bp, probe
ccttgctcgattacttcctacagga

SEQ ID NO: 193354 - DNA, 25 bp, probe
ccttgctaatacactccttgaggag

SEQ ID NO: 193355 - DNA, 25 bp, probe
ccattgctacgatactccgagaagt

SEQ ID NO: 193356 - DNA, 25 bp, probe
ccattgctgaaatccgacgactacg

SEQ ID NO: 193357 - DNA, 25 bp, probe
ccattaataaaaggacgatctgccc

SEQ ID NO: 193358 - DNA, 25 bp, probe
ccttgtacagaatcgaactctgcac

SEQ ID NO: 193359 - DNA, 25 bp, probe
ccttgtgtagaatcactcgccattc

SEQ ID NO: 193360 - DNA, 25 bp, probe
ccttgtgtagaatcactcgccattc

SEQ ID NO: 193361 - DNA, 25 bp, probe
ccattgttcagaagacctccctgtg

SEQ ID NO: 193362 - DNA, 25 bp, probe
ccattgtagcgaaggcactgggtgc

SEQ ID NO: 193363 - DNA, 25 bp, probe
ccatcattgcacctgcaggcttagg

SEQ ID NO: 193364 - DNA, 25 bp, probe
ccttgcagcacccatggattgcagg

SEQ ID NO: 193365 - DNA, 25 bp, probe
ccttcagcatcatctggcaggaagc

SEQ ID NO: 193366 - DNA, 25 bp, probe
ccttcgcatcaacacagcagacacc

SEQ ID NO: 193367 - DNA, 25 bp, probe
ccttcgcatcaacacagcagacacc

SEQ ID NO: 193368 - DNA, 25 bp, probe
ccttcgccagcaacaatgtgaccga

SEQ ID NO: 193369 - DNA, 25 bp, probe
ccttcgccagcaacaatgtgaccga

SEQ ID NO: 193370 - DNA, 25 bp, probe
ccttgcctagaccaggtcacactga

SEQ ID NO: 193371 - DNA, 25 bp, probe
ccttgcctgtgttcagtggcaccta

SEQ ID NO: 193372 - DNA, 25 bp, probe
ccttctctgtgcagtagcatcacct

SEQ ID NO: 193373 - DNA, 25 bp, probe
ccttcacgctgatgctcactgagcg

SEQ ID NO: 193374 - DNA, 25 bp, probe
ccttcacgctgatgctcactgagcg

SEQ ID NO: 193375 - DNA, 25 bp, probe
ccttccgccaagtcagctggatgga

SEQ ID NO: 193376 - DNA, 25 bp, probe
ccttcaatgccacggctgtggtgcg

SEQ ID NO: 193377 - DNA, 25 bp, probe
ccatccggatcacggcaatgcggct

SEQ ID NO: 193378 - DNA, 25 bp, probe
ccatccggagcatcagcattgcttc

SEQ ID NO: 193379 - DNA, 25 bp, probe
ccatcactgaagacatacggcttgt

SEQ ID NO: 193380 - DNA, 25 bp, probe
gctacgttttgcagggctcagtacg

SEQ ID NO: 193381 - DNA, 25 bp, probe
ccagggtttccgctgtcaaacatgt

SEQ ID NO: 193382 - DNA, 25 bp, probe
ccagggctttggccttaaaggcgct

SEQ ID NO: 193383 - DNA, 25 bp, probe
ccagggctggtgtccctaaggttgt

SEQ ID NO: 193384 - DNA, 25 bp, probe
ccaggtgggttggaacacgtttgct

SEQ ID NO: 193385 - DNA, 25 bp, probe
gccaagtacgttggtaccgcttgtg

SEQ ID NO: 193386 - DNA, 25 bp, probe
gccaagtacgttggtaccgcttgtg

SEQ ID NO: 193387 - DNA, 25 bp, probe
ccaggtaactgggccagcagccttt

SEQ ID NO: 193388 - DNA, 25 bp, probe
ccagggacccaatcaagcattttta

SEQ ID NO: 193389 - DNA, 25 bp, probe
ccagaggacattgaaaaagacttga

SEQ ID NO: 193390 - DNA, 25 bp, probe
ccagcggcaactggtccgttactgg

SEQ ID NO: 193391 - DNA, 25 bp, probe
ccatcagaaggctgtttgttactct

SEQ ID NO: 193392 - DNA, 25 bp, probe
ccatcagaaggctgtttgttactct

SEQ ID NO: 193393 - DNA, 25 bp, probe
ccataaaggcctcttgggatgtcag

SEQ ID NO: 193394 - DNA, 25 bp, probe
ccatcaaaccttcttctggaccaaa

SEQ ID NO: 193395 - DNA, 25 bp, probe
ccatcaagacgctcaagtcgggcta

SEQ ID NO: 193396 - DNA, 25 bp, probe
ccatacagacccgaagtgaggagtc

SEQ ID NO: 193397 - DNA, 25 bp, probe
ccatactccctggcatagtacggta

SEQ ID NO: 193398 - DNA, 25 bp, probe
ccatactccctggcatagtacggta

SEQ ID NO: 193399 - DNA, 25 bp, probe
ccttctcttctgtcatcattaagga

SEQ ID NO: 193400 - DNA, 25 bp, probe
ccttcttttgcgacatgacggtgat

SEQ ID NO: 193401 - DNA, 25 bp, probe
ccttctgttggcagtgacggtgcag

SEQ ID NO: 193402 - DNA, 25 bp, probe
ccatttgttgagacttacactgttg

SEQ ID NO: 193403 - DNA, 25 bp, probe
ccatcgtttggtttagcttgcttgc

SEQ ID NO: 193404 - DNA, 25 bp, probe
ccatatgttagccatttcctgtctg

SEQ ID NO: 193405 - DNA, 25 bp, probe
ccatctgtaatcccattgtctatgc

SEQ ID NO: 193406 - DNA, 25 bp, probe
ccactgcaacattaatggatgcttg

SEQ ID NO: 193407 - DNA, 25 bp, probe
ccactgcaacattaatggatgcttg

SEQ ID NO: 193408 - DNA, 25 bp, probe
ccatcaagagcattcaattcacggg

SEQ ID NO: 193409 - DNA, 25 bp, probe
tccaatcctgaagattccggggaag

SEQ ID NO: 193410 - DNA, 25 bp, probe
ccatccctgagaccttccggggatg

SEQ ID NO: 193411 - DNA, 25 bp, probe
ccatccctgagaccttccggggatg

SEQ ID NO: 193412 - DNA, 25 bp, probe
ccatcccgcagttttcttgggggca

SEQ ID NO: 193413 - DNA, 25 bp, probe
ccatcccgcagttttcttgggggca

SEQ ID NO: 193414 - DNA, 25 bp, probe
ccatcccgcagttttcttgggggca

SEQ ID NO: 193415 - DNA, 25 bp, probe
ccatccccaccactgatatcatggg

SEQ ID NO: 193416 - DNA, 25 bp, probe
ccatcaacatcacaaataatgaaaa

SEQ ID NO: 193417 - DNA, 25 bp, probe
ccatagagatctgacaccaaacaac

SEQ ID NO: 193418 - DNA, 25 bp, probe
ccataaatggggtcgagaatcaaga

SEQ ID NO: 193419 - DNA, 25 bp, probe
ccatggctatggcacaaaataaaga

SEQ ID NO: 193420 - DNA, 25 bp, probe
ccatctctaggcaactatcaaaaag

SEQ ID NO: 193421 - DNA, 25 bp, probe
ccatctctaggcaactatcaaaaag

SEQ ID NO: 193422 - DNA, 25 bp, probe
ccatatctggccaagttcaaggtga

SEQ ID NO: 193423 - DNA, 25 bp, probe
ccttcggcctccaaaagtgctggaa

SEQ ID NO: 193424 - DNA, 25 bp, probe
ccttctgtgtctgctgagcaatgtc

SEQ ID NO: 193425 - DNA, 25 bp, probe
ccttcgtgatctggggatgtgccac

SEQ ID NO: 193426 - DNA, 25 bp, probe
ccttcgtgctctcgatggcatgagc

SEQ ID NO: 193427 - DNA, 25 bp, probe
ccttcgtgctctcgatggcatgagc

SEQ ID NO: 193428 - DNA, 25 bp, probe
ccttcggtttgatgctgacaagtcc

SEQ ID NO: 193429 - DNA, 25 bp, probe
ccttctggtttggtgtcaacagctc

SEQ ID NO: 193430 - DNA, 25 bp, probe
ccatattgggtcaagctgcttacct

SEQ ID NO: 193431 - DNA, 25 bp, probe
ccttctgaggtatggcccatccaag

SEQ ID NO: 193432 - DNA, 25 bp, probe
ccttggagcaggatggctcctctaa

SEQ ID NO: 193433 - DNA, 25 bp, probe
ccttggtgaacaaggccgctgtcga

SEQ ID NO: 193434 - DNA, 25 bp, probe
ccttgcttccacaaggccattgctg

SEQ ID NO: 193435 - DNA, 25 bp, probe
ccttctccaagcaaagccatatgga

SEQ ID NO: 193436 - DNA, 25 bp, probe
ccttctctgaaggtgactgcaagga

SEQ ID NO: 193437 - DNA, 25 bp, probe
ccttgcctgtatggagcatctgcaa

SEQ ID NO: 193438 - DNA, 25 bp, probe
ccttgctgcaaaatggctctgcacc

SEQ ID NO: 193439 - DNA, 25 bp, probe
ccttcatgcatccattgttctgttc

SEQ ID NO: 193440 - DNA, 25 bp, probe
ccattctgcccttgtatctttgcag

SEQ ID NO: 193441 - DNA, 25 bp, probe
ccatcctgacctggtatggtcatgg

SEQ ID NO: 193442 - DNA, 25 bp, probe
ccatccaccctggtgttgactgact

SEQ ID NO: 193443 - DNA, 25 bp, probe
ccatccaccctggtgttgactgact

SEQ ID NO: 193444 - DNA, 25 bp, probe
ccatccacatgcaggtggtacgcaa

SEQ ID NO: 193445 - DNA, 25 bp, probe
ccatcaacatggcattgttcacagt

SEQ ID NO: 193446 - DNA, 25 bp, probe
ccatcagagctctgatttcccactg

SEQ ID NO: 193447 - DNA, 25 bp, probe
ccatcagagctctgatttcccactg

SEQ ID NO: 193448 - DNA, 25 bp, probe
ccattggctattccattcccaagcc

SEQ ID NO: 193449 - DNA, 25 bp, probe
ccattgtcatatacccggttcagcc

SEQ ID NO: 193450 - DNA, 25 bp, probe
ccttgaccattttgaggctgtcctc

SEQ ID NO: 193451 - DNA, 25 bp, probe
ccttgcctcttgtaacgtggcacct

SEQ ID NO: 193452 - DNA, 25 bp, probe
ccttcctctgtaaaagtgtcacacc

SEQ ID NO: 193453 - DNA, 25 bp, probe
ccttggctttattatatcttacacc

SEQ ID NO: 193454 - DNA, 25 bp, probe
gcctttttattattgcctgtacaaa

SEQ ID NO: 193455 - DNA, 25 bp, probe
ccttgttctgttgacctgcatacat

SEQ ID NO: 193456 - DNA, 25 bp, probe
ccatttgttttcaacctcatgtaat

SEQ ID NO: 193457 - DNA, 25 bp, probe
ccatttgttttcaacctcatgtaat

SEQ ID NO: 193458 - DNA, 25 bp, probe
ccattggtacaaatccgctctgata

SEQ ID NO: 193459 - DNA, 25 bp, probe
ccatctggtacaaattccagtgtgc

SEQ ID NO: 193460 - DNA, 25 bp, probe
ccatctggtggatcattcgtggtcc

SEQ ID NO: 193461 - DNA, 25 bp, probe
ccattttgtcagtatccaggacccc

SEQ ID NO: 193462 - DNA, 25 bp, probe
ccttgtgtgtagctgctcggacact

SEQ ID NO: 193463 - DNA, 25 bp, probe
ccttgtgtgtagctgctcggacact

SEQ ID NO: 193464 - DNA, 25 bp, probe
ccatcctggttgctctcaggaggct

SEQ ID NO: 193465 - DNA, 25 bp, probe
ccatttctgttcccagaggagccag

SEQ ID NO: 193466 - DNA, 25 bp, probe
ccatctattgcgtggtgggcagcca

SEQ ID NO: 193467 - DNA, 25 bp, probe
ccatctccacagtggtgggggccca

SEQ ID NO: 193468 - DNA, 25 bp, probe
ccatttcctttgtggggtgcacagc

SEQ ID NO: 193469 - DNA, 25 bp, probe
ccttgtccctggtgcagaggtgagc

SEQ ID NO: 193470 - DNA, 25 bp, probe
ccttgtagcccccagcgaggggcag

SEQ ID NO: 193471 - DNA, 25 bp, probe
ccttctcagtccagctggaggctgg

SEQ ID NO: 193472 - DNA, 25 bp, probe
ccatcctagaccagaggagcccagg

SEQ ID NO: 193473 - DNA, 25 bp, probe
ccatctccagttctggaggctccag

SEQ ID NO: 193474 - DNA, 25 bp, probe
ccattccgcttcaaggcagagcaaa

SEQ ID NO: 193475 - DNA, 25 bp, probe
ccttctccatataagcaaagccaga

SEQ ID NO: 193476 - DNA, 25 bp, probe
ccattctcctaagtaaagcctgaag

SEQ ID NO: 193477 - DNA, 25 bp, probe
ccatcctccgaagtaagagcttgga

SEQ ID NO: 193478 - DNA, 25 bp, probe
ccatgcctccgaaagagggccaggt

SEQ ID NO: 193479 - DNA, 25 bp, probe
ccatccccagtcaagggtgagggtg

SEQ ID NO: 193480 - DNA, 25 bp, probe
ccatcttcggttgctgttattgagg

SEQ ID NO: 193481 - DNA, 25 bp, probe
ccttgccttgttgatgtggacatga

SEQ ID NO: 193482 - DNA, 25 bp, probe
ccttcctggctaccatgggccagtg

SEQ ID NO: 193483 - DNA, 25 bp, probe
ccttcctggctaccatgggccagtg

SEQ ID NO: 193484 - DNA, 25 bp, probe
ccttcctgctgaacacggtcagcgt

SEQ ID NO: 193485 - DNA, 25 bp, probe
ccttcccgagaggcgtgatgcaggg

SEQ ID NO: 193486 - DNA, 25 bp, probe
ccttcccaagtgagtctctctgggc

SEQ ID NO: 193487 - DNA, 25 bp, probe
ccttccaacgtggtgctatctctga

SEQ ID NO: 193488 - DNA, 25 bp, probe
ccttctgcagaagtcctttcatgtg

SEQ ID NO: 193489 - DNA, 25 bp, probe
ccttctgcagaagtcctttcatgtg

SEQ ID NO: 193490 - DNA, 25 bp, probe
ccttgtgcactgcaccacgattgtg

SEQ ID NO: 193491 - DNA, 25 bp, probe
ccttgtcctaatacgctatgtgctt

SEQ ID NO: 193492 - DNA, 25 bp, probe
ccttggactagcaatttatgcttct

SEQ ID NO: 193493 - DNA, 25 bp, probe
ccttgcagtgcgccaagttgctgct

SEQ ID NO: 193494 - DNA, 25 bp, probe
ccattcctgcagccaagggcactgg

SEQ ID NO: 193495 - DNA, 25 bp, probe
ccataatgctgctcgcaggaaatgg

SEQ ID NO: 193496 - DNA, 25 bp, probe
ccatagcagccatgtgctggaaatg

SEQ ID NO: 193497 - DNA, 25 bp, probe
ccatccgccaaggtgccaatatgaa

SEQ ID NO: 193498 - DNA, 25 bp, probe
ccatcggccagggctccaagagaaa

SEQ ID NO: 193499 - DNA, 25 bp, probe
ccttggacatgctcaccagggaaaa

SEQ ID NO: 193500 - DNA, 25 bp, probe
ccttgctgatttgcacacattggcc

SEQ ID NO: 193501 - DNA, 25 bp, probe
ccattcgctcgcaaagacttgcgcc

SEQ ID NO: 193502 - DNA, 25 bp, probe
ccatttctcagctataaattgcgct

SEQ ID NO: 193503 - DNA, 25 bp, probe
ccatcctcacagctgaaatctcagg

SEQ ID NO: 193504 - DNA, 25 bp, probe
ccatttcagcagctcaaacaggtgg

SEQ ID NO: 193505 - DNA, 25 bp, probe
ccattataaccctacagaggtggtg

SEQ ID NO: 193506 - DNA, 25 bp, probe
ccatggaaacccaaagaagctgtgg

SEQ ID NO: 193507 - DNA, 25 bp, probe
ccatggacaaatgcctatgaaatta

SEQ ID NO: 193508 - DNA, 25 bp, probe
ccagcccaaattgctttgcagataa

SEQ ID NO: 193509 - DNA, 25 bp, probe
ccagtaaacagtgcttctagtgaag

SEQ ID NO: 193510 - DNA, 25 bp, probe
ccagtatgaaaagctatcttaaaat

SEQ ID NO: 193511 - DNA, 25 bp, probe
ccatcttgcaaactacactttaaaa

SEQ ID NO: 193512 - DNA, 25 bp, probe
ccatctacctagcaaaattaacaat

SEQ ID NO: 193513 - DNA, 25 bp, probe
ccatattgctcttaaaaatcttggt

SEQ ID NO: 193514 - DNA, 25 bp, probe
ccatcgtgctggtagaagagtcttt

SEQ ID NO: 193515 - DNA, 25 bp, probe
ccatccagcttctagaagacccatt

SEQ ID NO: 193516 - DNA, 25 bp, probe
ccatccatcttatgaggatcccagc

SEQ ID NO: 193517 - DNA, 25 bp, probe
ccactcccatattttgacccggaag

SEQ ID NO: 193518 - DNA, 25 bp, probe
ccactcccatattttgacccggaag

SEQ ID NO: 193519 - DNA, 25 bp, probe
ccttgcacgtttattccacggtaga

SEQ ID NO: 193520 - DNA, 25 bp, probe
ccttccgcttggagcccaaggatgg

SEQ ID NO: 193521 - DNA, 25 bp, probe
ccttccgcttggagcccaaggatgg

SEQ ID NO: 193522 - DNA, 25 bp, probe
ccttccgcttggagcccaaggatgg

SEQ ID NO: 193523 - DNA, 25 bp, probe
ccttccgcttggagcccaaggatgg

SEQ ID NO: 193524 - DNA, 25 bp, probe
ccttcggggcagagccctatgcagg

SEQ ID NO: 193525 - DNA, 25 bp, probe
ccttcggggcagagccctatgcagg

SEQ ID NO: 193526 - DNA, 25 bp, probe
ccttcggggcagagccctatgcagg

SEQ ID NO: 193527 - DNA, 25 bp, probe
ccttctgggcagttgatgccgtggc

SEQ ID NO: 193528 - DNA, 25 bp, probe
ccttctgtacgagatgctcattggc

SEQ ID NO: 193529 - DNA, 25 bp, probe
ccttcgtaagccaagctgtgtgtgc

SEQ ID NO: 193530 - DNA, 25 bp, probe
ccttggtaacgccatggactgcagc

SEQ ID NO: 193531 - DNA, 25 bp, probe
ccttcgttccagacatgagcttgag

SEQ ID NO: 193532 - DNA, 25 bp, probe
ccttcctctgcctgcaagtgagcag

SEQ ID NO: 193533 - DNA, 25 bp, probe
ccttcctctgcctgcaagtgagcag

SEQ ID NO: 193534 - DNA, 25 bp, probe
ccttcctctgcctgcaagtgagcag

SEQ ID NO: 193535 - DNA, 25 bp, probe
ccttctgtggcctgcaatgccaggc

SEQ ID NO: 193536 - DNA, 25 bp, probe
ccttctgtggcctgcaatgccaggc

SEQ ID NO: 193537 - DNA, 25 bp, probe
ccttctgtggccctaatgtgttgga

SEQ ID NO: 193538 - DNA, 25 bp, probe
ccttctgtgaccccaatatcataga

SEQ ID NO: 193539 - DNA, 25 bp, probe
ccttctgtgaccccaatatcataga

SEQ ID NO: 193540 - DNA, 25 bp, probe
ccttgggactagtagatcagaagca

SEQ ID NO: 193541 - DNA, 25 bp, probe
ccttggccagtgcaagcatcagcca

SEQ ID NO: 193542 - DNA, 25 bp, probe
ccttgtggatggacagccacgccag

SEQ ID NO: 193543 - DNA, 25 bp, probe
ccttgtagagatgcagcctgcccag

SEQ ID NO: 193544 - DNA, 25 bp, probe
ccttgtagagatgcagcctgcccag

SEQ ID NO: 193545 - DNA, 25 bp, probe
ccatttgagagctcaccttgcagca

SEQ ID NO: 193546 - DNA, 25 bp, probe
ccttctgggcattacatcgcataga

SEQ ID NO: 193547 - DNA, 25 bp, probe
ccttctggctgacaatcctggaaat

SEQ ID NO: 193548 - DNA, 25 bp, probe
ccttcctgctgtgattcttcgaaat

SEQ ID NO: 193549 - DNA, 25 bp, probe
ccttcgcgtggcattttcacattat

SEQ ID NO: 193550 - DNA, 25 bp, probe
ccttgccttgaaatttacacagtga

SEQ ID NO: 193551 - DNA, 25 bp, probe
ccttcctctaatttcacactcaaga

SEQ ID NO: 193552 - DNA, 25 bp, probe
ccttcctgctggagtcaaccatgaa

SEQ ID NO: 193553 - DNA, 25 bp, probe
ccatccgagcggtggcaaagcagca

SEQ ID NO: 193554 - DNA, 25 bp, probe
ccatccgagcggtggcaaagcagca

SEQ ID NO: 193555 - DNA, 25 bp, probe
ccatcagggctggcaggacaaactg

SEQ ID NO: 193556 - DNA, 25 bp, probe
ccatcaggactttccctgacagctg

SEQ ID NO: 193557 - DNA, 25 bp, probe
ccataggtgtcatcgcctacatctt

SEQ ID NO: 193558 - DNA, 25 bp, probe
tccaagtagtccaccttcatttaac

SEQ ID NO: 193559 - DNA, 25 bp, probe
ccagagtagcccaggtcactgttaa

SEQ ID NO: 193560 - DNA, 25 bp, probe
ccattttgatcctttgtactctata

SEQ ID NO: 193561 - DNA, 25 bp, probe
ccattcttgtcctaaagcaattgaa

SEQ ID NO: 193562 - DNA, 25 bp, probe
ccattgtcttccttaataattggac

SEQ ID NO: 193563 - DNA, 25 bp, probe
ccattgccttcctgcacaaaaacca

SEQ ID NO: 193564 - DNA, 25 bp, probe
ccttgccaacttacatcagaaaagc

SEQ ID NO: 193565 - DNA, 25 bp, probe
ccttgccatcccatctgagaacaag

SEQ ID NO: 193566 - DNA, 25 bp, probe
ccttgccatcccatctgagaacaag

SEQ ID NO: 193567 - DNA, 25 bp, probe
ccattcctggccacagaatgctaat

SEQ ID NO: 193568 - DNA, 25 bp, probe
ccatatgcctgccttccaaaggaga

SEQ ID NO: 193569 - DNA, 25 bp, probe
ccatacgctggcatcgaaaacactg

SEQ ID NO: 193570 - DNA, 25 bp, probe
ccttcgtggcctcgaatcaagctta

SEQ ID NO: 193571 - DNA, 25 bp, probe
ccttgggagccacgggattgtaact

SEQ ID NO: 193572 - DNA, 25 bp, probe
ccttgtggggggcgcttgagaacag

SEQ ID NO: 193573 - DNA, 25 bp, probe
ccttgtaggggtctctcagaggttc

SEQ ID NO: 193574 - DNA, 25 bp, probe
ccttgctcggcggtggattgcgaag

SEQ ID NO: 193575 - DNA, 25 bp, probe
ccttcctggctgaagtgaagcagat

SEQ ID NO: 193576 - DNA, 25 bp, probe
ccatccttcctgacgtagagcagtt

SEQ ID NO: 193577 - DNA, 25 bp, probe
ccatccttcctgacgtagagcagtt

SEQ ID NO: 193578 - DNA, 25 bp, probe
ccatactccaatatgcttggcactt

SEQ ID NO: 193579 - DNA, 25 bp, probe
ccatcacgaatacttttggatcaat

SEQ ID NO: 193580 - DNA, 25 bp, probe
ccatcacagcccctactgaagtaga

SEQ ID NO: 193581 - DNA, 25 bp, probe
ccatcacagcccctactgaagtaga

SEQ ID NO: 193582 - DNA, 25 bp, probe
ccatacagccttggactagcaattt

SEQ ID NO: 193583 - DNA, 25 bp, probe
ccatacatactataaggcactttta

SEQ ID NO: 193584 - DNA, 25 bp, probe
ccatattcttttacatggcttcttt

SEQ ID NO: 193585 - DNA, 25 bp, probe
ccataatttttgtcattctgtgtta

SEQ ID NO: 193586 - DNA, 25 bp, probe
ccatcctttttgttatatgggatag

SEQ ID NO: 193587 - DNA, 25 bp, probe
ccatccttccttatcatgctgggta

SEQ ID NO: 193588 - DNA, 25 bp, probe
ccatcctgagcacatatcagctgtg

SEQ ID NO: 193589 - DNA, 25 bp, probe
ccatccatgcagcgaacatcgaccg

SEQ ID NO: 193590 - DNA, 25 bp, probe
ccatccagcctataatcctaagaac

SEQ ID NO: 193591 - DNA, 25 bp, probe
ccattcaggttctcccaaagatgac

SEQ ID NO: 193592 - DNA, 25 bp, probe
ccaaaggacacgggccaaactggct

SEQ ID NO: 193593 - DNA, 25 bp, probe
ccaggggacaactgagaaatctact

SEQ ID NO: 193594 - DNA, 25 bp, probe
ccactgggcaaacagaagaattttt

SEQ ID NO: 193595 - DNA, 25 bp, probe
ccatcatggtcatctatcatcaaga

SEQ ID NO: 193596 - DNA, 25 bp, probe
ccatcatggtcatctatcatcaaga

SEQ ID NO: 193597 - DNA, 25 bp, probe
ccatatggagcatctacccagactc

SEQ ID NO: 193598 - DNA, 25 bp, probe
ccattgaggggcacaccaagtctgg

SEQ ID NO: 193599 - DNA, 25 bp, probe
ccatggtgggacacggagtttgcgt

SEQ ID NO: 193600 - DNA, 25 bp, probe
ccagtggggccatgattggtttcta

SEQ ID NO: 193601 - DNA, 25 bp, probe
ccaggggggcaggtgtagagttgag

SEQ ID NO: 193602 - DNA, 25 bp, probe
ccaggccttaggtgctacagctaaa

SEQ ID NO: 193603 - DNA, 25 bp, probe
ccatccctacgttactccaggaaag

SEQ ID NO: 193604 - DNA, 25 bp, probe
ccatccctacgttactccaggaaag

SEQ ID NO: 193605 - DNA, 25 bp, probe
ccatccctcaccaaactttggcaaa

SEQ ID NO: 193606 - DNA, 25 bp, probe
ccatctcttccacgaagttccggaa

SEQ ID NO: 193607 - DNA, 25 bp, probe
ccattcttcaagagaggtacgctgt

SEQ ID NO: 193608 - DNA, 25 bp, probe
ccattccccactagaatgtttgctg

SEQ ID NO: 193609 - DNA, 25 bp, probe
ccattccccactagaatgtttgctg

SEQ ID NO: 193610 - DNA, 25 bp, probe
ccagtcccaaagcacagttcttggt

SEQ ID NO: 193611 - DNA, 25 bp, probe
gccgttcctacacatagtggttctg

SEQ ID NO: 193612 - DNA, 25 bp, probe
acctgccggagagtgtcagaactct

SEQ ID NO: 193613 - DNA, 25 bp, probe
ccaggtctgtactcctgttgtcttt

SEQ ID NO: 193614 - DNA, 25 bp, probe
ccagtttgtacatcacgtcctgcat

SEQ ID NO: 193615 - DNA, 25 bp, probe
ccatttaaacacaaatttgctgcac

SEQ ID NO: 193616 - DNA, 25 bp, probe
ccatttagagcccaatttgtggtct

SEQ ID NO: 193617 - DNA, 25 bp, probe
ccagctaaacaccaatttcttcctg

SEQ ID NO: 193618 - DNA, 25 bp, probe
ccatcttaacctatcaactttctgc

SEQ ID NO: 193619 - DNA, 25 bp, probe
ccatcatctaaccattacagcctgt

SEQ ID NO: 193620 - DNA, 25 bp, probe
ccatccataaccttgaggcttctct

SEQ ID NO: 193621 - DNA, 25 bp, probe
ccatttatagcacctcagacattcc

SEQ ID NO: 193622 - DNA, 25 bp, probe
ccatttgcaaccctctgagataccc

SEQ ID NO: 193623 - DNA, 25 bp, probe
ccatgcagtagaggcgctgggcaga

SEQ ID NO: 193624 - DNA, 25 bp, probe
ccatcatgtcaaggtcacaggcatc

SEQ ID NO: 193625 - DNA, 25 bp, probe
ccatgattcaaattatctcgcaccg

SEQ ID NO: 193626 - DNA, 25 bp, probe
ccatcatgaaacaaactctgcctac

SEQ ID NO: 193627 - DNA, 25 bp, probe
ccatcatgaaacaaactctgcctac

SEQ ID NO: 193628 - DNA, 25 bp, probe
ccttgataatcgttctcagcacaga

SEQ ID NO: 193629 - DNA, 25 bp, probe
ccttgaaagcagtagcatcaccatc

SEQ ID NO: 193630 - DNA, 25 bp, probe
ccttgtgcttggtgctcaccattat

SEQ ID NO: 193631 - DNA, 25 bp, probe
ccattgtttggttgccagtcataca

SEQ ID NO: 193632 - DNA, 25 bp, probe
ccattgtttggttgccagtcataca

SEQ ID NO: 193633 - DNA, 25 bp, probe
ccagggtcggattccagttaaatgg

SEQ ID NO: 193634 - DNA, 25 bp, probe
ccaagatgtgggcaccgggaagtgg

SEQ ID NO: 193635 - DNA, 25 bp, probe
ccattgtgtgggcaccggagggtgg

SEQ ID NO: 193636 - DNA, 25 bp, probe
ccttggggacgaagcgtatcagcgt

SEQ ID NO: 193637 - DNA, 25 bp, probe
ccattgggaacagggtgattgagga

SEQ ID NO: 193638 - DNA, 25 bp, probe
ccttggtggtcaggatgggtgggag

SEQ ID NO: 193639 - DNA, 25 bp, probe
ccattgtgtggcctggtgggtcagg

SEQ ID NO: 193640 - DNA, 25 bp, probe
ccatttggagggcctgggcctggct

SEQ ID NO: 193641 - DNA, 25 bp, probe
ccattctgggagccgtggatggggg

SEQ ID NO: 193642 - DNA, 25 bp, probe
ccatcatcttcaaggcggcctatgg

SEQ ID NO: 193643 - DNA, 25 bp, probe
ccattttcatggctgtgtgttgtgt

SEQ ID NO: 193644 - DNA, 25 bp, probe
ccattttgatggtgtctgtgacatt

SEQ ID NO: 193645 - DNA, 25 bp, probe
ccatctctcagctgaggactttaat

SEQ ID NO: 193646 - DNA, 25 bp, probe
ccatcctggagggtgacttctctac

SEQ ID NO: 193647 - DNA, 25 bp, probe
ccattttaggcattacattttccac

SEQ ID NO: 193648 - DNA, 25 bp, probe
ccatgtttgggcaaattctgttagc

SEQ ID NO: 193649 - DNA, 25 bp, probe
ccaggactatgggtctttgtctagg

SEQ ID NO: 193650 - DNA, 25 bp, probe
ccaggactatgggtctttgtctagg

SEQ ID NO: 193651 - DNA, 25 bp, probe
ccagtacagcgaggttaatgccatc

SEQ ID NO: 193652 - DNA, 25 bp, probe
ccatggccacaggttgaagcagccc

SEQ ID NO: 193653 - DNA, 25 bp, probe
ccatcaccatcaccattaaggatcc

SEQ ID NO: 193654 - DNA, 25 bp, probe
ccatgcaaatgtcttccaggtccaa

SEQ ID NO: 193655 - DNA, 25 bp, probe
ccatgcaacgtcctgaggacagttc

SEQ ID NO: 193656 - DNA, 25 bp, probe
ccatcaactcatggcaggggtggtt

SEQ ID NO: 193657 - DNA, 25 bp, probe
ccatcaagctctgggagggtctcac

SEQ ID NO: 193658 - DNA, 25 bp, probe
ccatcggctatggtgacgtggtgcc

SEQ ID NO: 193659 - DNA, 25 bp, probe
ccatcggagatgtttcattggtcca

SEQ ID NO: 193660 - DNA, 25 bp, probe
ccatcggagatgtttcattggtcca

SEQ ID NO: 193661 - DNA, 25 bp, probe
ccttgtaggaatcatgccgctctca

SEQ ID NO: 193662 - DNA, 25 bp, probe
ccttgccagggttcatccctgtagt

SEQ ID NO: 193663 - DNA, 25 bp, probe
ccttgttagagttatccctgcagga

SEQ ID NO: 193664 - DNA, 25 bp, probe
ccttgttccaggaatcctcagcctg

SEQ ID NO: 193665 - DNA, 25 bp, probe
ccatttctctagcattcctgatggc

SEQ ID NO: 193666 - DNA, 25 bp, probe
ccattctgttcagtgcgatcctgat

SEQ ID NO: 193667 - DNA, 25 bp, probe
ccatccgattcttggtctctgaact

SEQ ID NO: 193668 - DNA, 25 bp, probe
ccttgcgattctgcagccacaaagt

SEQ ID NO: 193669 - DNA, 25 bp, probe
ccattggcatctaccggacagagag

SEQ ID NO: 193670 - DNA, 25 bp, probe
ccattggcatctaccggacagagag

SEQ ID NO: 193671 - DNA, 25 bp, probe
ccatttcccatcctgagaagcacag

SEQ ID NO: 193672 - DNA, 25 bp, probe
ccttgggcctcggagatgatcagag

SEQ ID NO: 193673 - DNA, 25 bp, probe
ccttgctggctggggagtacatcat

SEQ ID NO: 193674 - DNA, 25 bp, probe
ccttgctggcgctggatgtggattc

SEQ ID NO: 193675 - DNA, 25 bp, probe
ccttgctggcgctggatgtggattc

SEQ ID NO: 193676 - DNA, 25 bp, probe
ccttgctgcagagttggtggagaac

SEQ ID NO: 193677 - DNA, 25 bp, probe
ccttgctgcagagttggtggagaac

SEQ ID NO: 193678 - DNA, 25 bp, probe
ccttgctgcagtaatggggtctatg

SEQ ID NO: 193679 - DNA, 25 bp, probe
ccttggggagattgctgtgtctatc

SEQ ID NO: 193680 - DNA, 25 bp, probe
ccttgctggaagtactggagcgaat

SEQ ID NO: 193681 - DNA, 25 bp, probe
ccttgctgtcaacatctggtgctag

SEQ ID NO: 193682 - DNA, 25 bp, probe
ccattgctggcaactgacttgtcat

SEQ ID NO: 193683 - DNA, 25 bp, probe
ccattgtggctcctatctgtgtttt

SEQ ID NO: 193684 - DNA, 25 bp, probe
ccatcttgagacatcctttttttaa

SEQ ID NO: 193685 - DNA, 25 bp, probe
tcctactaactagcttcttatcttg

SEQ ID NO: 193686 - DNA, 25 bp, probe
ccacctacaatagctttcaatttca

SEQ ID NO: 193687 - DNA, 25 bp, probe
ccaccttaatctcttctaatctgtg

SEQ ID NO: 193688 - DNA, 25 bp, probe
ccattttaattggtgtctatgacat

SEQ ID NO: 193689 - DNA, 25 bp, probe
ccatgctttatttggggctttgtgc

SEQ ID NO: 193690 - DNA, 25 bp, probe
ccatgttctcgataggccttttgat

SEQ ID NO: 193691 - DNA, 25 bp, probe
ccatttctggtaagagcctgaagtt

SEQ ID NO: 193692 - DNA, 25 bp, probe
ccatttctggaagtgactttggctg

SEQ ID NO: 193693 - DNA, 25 bp, probe
ccattgtttacagtgaaggtgtcat

SEQ ID NO: 193694 - DNA, 25 bp, probe
ccatgatgttgttcctggagggatt

SEQ ID NO: 193695 - DNA, 25 bp, probe
ccatgggggatcagtgcaggtattt

SEQ ID NO: 193696 - DNA, 25 bp, probe
ccatgggagcattctcaaaggcttt

SEQ ID NO: 193697 - DNA, 25 bp, probe
ccaggaacttcctatggccttttgg

SEQ ID NO: 193698 - DNA, 25 bp, probe
ccatgaagcagtacgaatgcagcct

SEQ ID NO: 193699 - DNA, 25 bp, probe
ccattcacagagacctagcagcacg

SEQ ID NO: 193700 - DNA, 25 bp, probe
ccattcagaagcacctgaactccac

SEQ ID NO: 193701 - DNA, 25 bp, probe
ccattgccaacagctgcatgaaccc

SEQ ID NO: 193702 - DNA, 25 bp, probe
ccattgccatatcggctcgcaaatc

SEQ ID NO: 193703 - DNA, 25 bp, probe
ccttgctctcatcaccagctagagc

SEQ ID NO: 193704 - DNA, 25 bp, probe
ccttgctatcaggatgcatagggag

SEQ ID NO: 193705 - DNA, 25 bp, probe
ccattgctctgagtcagaagctgga

SEQ ID NO: 193706 - DNA, 25 bp, probe
ccatctggcagattggaagcgggga

SEQ ID NO: 193707 - DNA, 25 bp, probe
ccatttcaactgggcaggtggagag

SEQ ID NO: 193708 - DNA, 25 bp, probe
ccatcacatcagtgcccagagggag

SEQ ID NO: 193709 - DNA, 25 bp, probe
ccatatctaggaccttgtctgtggc

SEQ ID NO: 193710 - DNA, 25 bp, probe
ccatagggaagcctgtgtctcctgc

SEQ ID NO: 193711 - DNA, 25 bp, probe
ccaagtggaccagagtcatccttct

SEQ ID NO: 193712 - DNA, 25 bp, probe
ccataggccactagggcctctttcc

SEQ ID NO: 193713 - DNA, 25 bp, probe
ccatcaggccaaagaatccttctct

SEQ ID NO: 193714 - DNA, 25 bp, probe
ccatcaggcctaatctcatacctct

SEQ ID NO: 193715 - DNA, 25 bp, probe
ccatgcagtcaggattctccactct

SEQ ID NO: 193716 - DNA, 25 bp, probe
ccatcagtactgagtgctgcctgtc

SEQ ID NO: 193717 - DNA, 25 bp, probe
ccatcctcactgactatgtgccaac

SEQ ID NO: 193718 - DNA, 25 bp, probe
ccatcactctctggcaaatgactac

SEQ ID NO: 193719 - DNA, 25 bp, probe
ccatcctttgtgaagctggaacact

SEQ ID NO: 193720 - DNA, 25 bp, probe
ccattgctttaggcctggagacttt

SEQ ID NO: 193721 - DNA, 25 bp, probe
ccatattattcagctcgagtacttg

SEQ ID NO: 193722 - DNA, 25 bp, probe
ccatttcattgtggccctgaaggtt

SEQ ID NO: 193723 - DNA, 25 bp, probe
ccatattctggtgccgctgaaaatc

SEQ ID NO: 193724 - DNA, 25 bp, probe
ccattatagggcccgtgccataatt

SEQ ID NO: 193725 - DNA, 25 bp, probe
ccatctgtaaaccccttcattatgt

SEQ ID NO: 193726 - DNA, 25 bp, probe
ccatctgtaaaccccttcattatgt

SEQ ID NO: 193727 - DNA, 25 bp, probe
ccatcataatgtttcgccttatttt

SEQ ID NO: 193728 - DNA, 25 bp, probe
ccatcataatgtttcgccttatttt

SEQ ID NO: 193729 - DNA, 25 bp, probe
ccatcatagagatcgattcttgtat

SEQ ID NO: 193730 - DNA, 25 bp, probe
ccatcgtgatcatcgttcaatactt

SEQ ID NO: 193731 - DNA, 25 bp, probe
ccatgcatttactagattctagcac

SEQ ID NO: 193732 - DNA, 25 bp, probe
ccataaacactgccatcatctaacc

SEQ ID NO: 193733 - DNA, 25 bp, probe
ccatgaaatcctggccatgggaccc

SEQ ID NO: 193734 - DNA, 25 bp, probe
ccagaactccacggtgagggccgat

SEQ ID NO: 193735 - DNA, 25 bp, probe
ccaggacacccagtggggtggagtc

SEQ ID NO: 193736 - DNA, 25 bp, probe
ccaggacctgttgctggagtcggcc

SEQ ID NO: 193737 - DNA, 25 bp, probe
ccatgccatcctgcgtctggacctg

SEQ ID NO: 193738 - DNA, 25 bp, probe
ccatcagatcatccacagttacacg

SEQ ID NO: 193739 - DNA, 25 bp, probe
ccatcagatccagatgttacaacgg

SEQ ID NO: 193740 - DNA, 25 bp, probe
ccacggccacgtataaacctccgag

SEQ ID NO: 193741 - DNA, 25 bp, probe
ccagggcgacttctatcaacccctg

SEQ ID NO: 193742 - DNA, 25 bp, probe
ccagagtccattttttataaccgct

SEQ ID NO: 193743 - DNA, 25 bp, probe
ccagagtcaactgttcccataaccc

SEQ ID NO: 193744 - DNA, 25 bp, probe
ccaggtatacgcgttccctgtgagc

SEQ ID NO: 193745 - DNA, 25 bp, probe
ccaggggaagctggaaccagtagca

SEQ ID NO: 193746 - DNA, 25 bp, probe
ccattgggaagggcaactttgccaa

SEQ ID NO: 193747 - DNA, 25 bp, probe
ccattgggaagccctcactgttcat

SEQ ID NO: 193748 - DNA, 25 bp, probe
ccatgctggaagtcaccatcactgt

SEQ ID NO: 193749 - DNA, 25 bp, probe
ccatctaaaatacccatgctgcttt

SEQ ID NO: 193750 - DNA, 25 bp, probe
ccatcaacaacgttctcatgtctct

SEQ ID NO: 193751 - DNA, 25 bp, probe
ccatcaaactcattgtcactgtcct

SEQ ID NO: 193752 - DNA, 25 bp, probe
ccatcgcaaccagtgccagtactgc

SEQ ID NO: 193753 - DNA, 25 bp, probe
ccatcacaacaacctatgtcactga

SEQ ID NO: 193754 - DNA, 25 bp, probe
ccatcagtgcactgtctttctgtga

SEQ ID NO: 193755 - DNA, 25 bp, probe
ccatcagtgaagaatcaaccggacc

SEQ ID NO: 193756 - DNA, 25 bp, probe
ccattgaacaggactaccggctgcc

SEQ ID NO: 193757 - DNA, 25 bp, probe
ccattacaccatcaagtcctctggc

SEQ ID NO: 193758 - DNA, 25 bp, probe
ccatataccatctccagctatttac

SEQ ID NO: 193759 - DNA, 25 bp, probe
ccatcacactcatggctgcagtgat

SEQ ID NO: 193760 - DNA, 25 bp, probe
ccatcacagcgctgagcgtcgagcg

SEQ ID NO: 193761 - DNA, 25 bp, probe
ccatctgcagcgatgcagctggggc

SEQ ID NO: 193762 - DNA, 25 bp, probe
ccatcacgctgtggtttgatgatgc

SEQ ID NO: 193763 - DNA, 25 bp, probe
ccatcaccgagcgcttgatgtgcgc

SEQ ID NO: 193764 - DNA, 25 bp, probe
ccatcccgagctgaatatcggggtc

SEQ ID NO: 193765 - DNA, 25 bp, probe
ccatccctgccgaaaacgagacaat

SEQ ID NO: 193766 - DNA, 25 bp, probe
ccatcattcccgttgaacgtcacat

SEQ ID NO: 193767 - DNA, 25 bp, probe
ccaattccaggtgttggtacatatg

SEQ ID NO: 193768 - DNA, 25 bp, probe
ccatatcccagttttggtttcatag

SEQ ID NO: 193769 - DNA, 25 bp, probe
ccagtcccgtcattctgggctagaa

SEQ ID NO: 193770 - DNA, 25 bp, probe
ccatgtcaccggatcctgggtggtc

SEQ ID NO: 193771 - DNA, 25 bp, probe
ccagtcccgggcactgagtgttgaa

SEQ ID NO: 193772 - DNA, 25 bp, probe
ccagtcccgggcactgagtgttgaa

SEQ ID NO: 193773 - DNA, 25 bp, probe
ccactcccgggacaggatgcaaaag

SEQ ID NO: 193774 - DNA, 25 bp, probe
ccacagcccgggtgagaagtaaaag

SEQ ID NO: 193775 - DNA, 25 bp, probe
tccaagggtttgagtaaatacaaag

SEQ ID NO: 193776 - DNA, 25 bp, probe
tccgagtttcttctctacgaaaaga

SEQ ID NO: 193777 - DNA, 25 bp, probe
ccatgatgttttccagttaacatag

SEQ ID NO: 193778 - DNA, 25 bp, probe
ccatattcttgttcagcttgcacta

SEQ ID NO: 193779 - DNA, 25 bp, probe
ccatagtctttgtgtgcttgctaaa

SEQ ID NO: 193780 - DNA, 25 bp, probe
ccttgtctattcctgtctgtataaa

SEQ ID NO: 193781 - DNA, 25 bp, probe
ccttgtgctctgagatggctgttga

SEQ ID NO: 193782 - DNA, 25 bp, probe
ccatcgagactgtggtgtgcctgca

SEQ ID NO: 193783 - DNA, 25 bp, probe
ccatctggtctaaggtggctgcttc

SEQ ID NO: 193784 - DNA, 25 bp, probe
ccatctgtggcgacgggtgatgctc

SEQ ID NO: 193785 - DNA, 25 bp, probe
ccatcttggcacagcgagcaggatc

SEQ ID NO: 193786 - DNA, 25 bp, probe
ccatcttccccaatgagcagtgatg

SEQ ID NO: 193787 - DNA, 25 bp, probe
ccatcttccccaatgagcagtgatg

SEQ ID NO: 193788 - DNA, 25 bp, probe
ccattgctccccagctggggaacct

SEQ ID NO: 193789 - DNA, 25 bp, probe
ccaggtaccccagtgggtgatcacc

SEQ ID NO: 193790 - DNA, 25 bp, probe
ccaggtaccccagtgggtgatcacc

SEQ ID NO: 193791 - DNA, 25 bp, probe
ccagttcaccccttattatgtagca

SEQ ID NO: 193792 - DNA, 25 bp, probe
ccatgtctaccctacctgtaggaac

SEQ ID NO: 193793 - DNA, 25 bp, probe
ccaggtccccaaacttatggacact

SEQ ID NO: 193794 - DNA, 25 bp, probe
ccatggaccccaagaatactggcca

SEQ ID NO: 193795 - DNA, 25 bp, probe
ccaggtgtccctgaattctggctac

SEQ ID NO: 193796 - DNA, 25 bp, probe
ccatccttttctgaactggtgtccc

SEQ ID NO: 193797 - DNA, 25 bp, probe
ccacgactttctgaacagtgcgccc

SEQ ID NO: 193798 - DNA, 25 bp, probe
ccacgttttgtgaccactgtgggtc

SEQ ID NO: 193799 - DNA, 25 bp, probe
ccaagtaactggaccctgttggcct

SEQ ID NO: 193800 - DNA, 25 bp, probe
ccaggctacaaggtgtttttggcct

SEQ ID NO: 193801 - DNA, 25 bp, probe
ccaggctcctgcagtttgtgactgg

SEQ ID NO: 193802 - DNA, 25 bp, probe
ccaggctcatctacagtaaggacag

SEQ ID NO: 193803 - DNA, 25 bp, probe
ccatactttgaattagtggcagagc

SEQ ID NO: 193804 - DNA, 25 bp, probe
ccatgactgtcgtactggatgtaac

SEQ ID NO: 193805 - DNA, 25 bp, probe
ccatgcccatcaaacgtggacaagc

SEQ ID NO: 193806 - DNA, 25 bp, probe
ccattgcactccagcctggacaaca

SEQ ID NO: 193807 - DNA, 25 bp, probe
ccattccagtcttcacagtatcaac

SEQ ID NO: 193808 - DNA, 25 bp, probe
ccatctggagaatcgcctgcaggtg

SEQ ID NO: 193809 - DNA, 25 bp, probe
ccattggggacgcctacatggtggt

SEQ ID NO: 193810 - DNA, 25 bp, probe
ccatggtggaggccgtcacagggag

SEQ ID NO: 193811 - DNA, 25 bp, probe
ccatagagtacatcgatgccgtgaa

SEQ ID NO: 193812 - DNA, 25 bp, probe
ccatagagtacatcgatgccgtgaa

SEQ ID NO: 193813 - DNA, 25 bp, probe
ccatagacagcctgcgagacctaag

SEQ ID NO: 193814 - DNA, 25 bp, probe
ccataacagcatctcggaggccaag

SEQ ID NO: 193815 - DNA, 25 bp, probe
ccatatagacaccaaggaggcggag

SEQ ID NO: 193816 - DNA, 25 bp, probe
ccagaaggacagcaggaaagggggc

SEQ ID NO: 193817 - DNA, 25 bp, probe
gcggaagaactacattcaccgggac

SEQ ID NO: 193818 - DNA, 25 bp, probe
ggatgaggacctgtttaccggtgac

SEQ ID NO: 193819 - DNA, 25 bp, probe
ccatagcaacccatgtttcctggga

SEQ ID NO: 193820 - DNA, 25 bp, probe
ccatagcaacccatgtttcctggga

SEQ ID NO: 193821 - DNA, 25 bp, probe
ccattgctaagcgaggttatcctga

SEQ ID NO: 193822 - DNA, 25 bp, probe
ccatccaagccaaggtctccttagg

SEQ ID NO: 193823 - DNA, 25 bp, probe
ccatatccccatagagtctacctag

SEQ ID NO: 193824 - DNA, 25 bp, probe
ccatgaccgactgatgttcccacgg

SEQ ID NO: 193825 - DNA, 25 bp, probe
ccagtcaaagtagtctctcccctgg

SEQ ID NO: 193826 - DNA, 25 bp, probe
ccagtcaaagtagtctctcccctgg

SEQ ID NO: 193827 - DNA, 25 bp, probe
ccatgatgcagaggctcgcttgtcc

SEQ ID NO: 193828 - DNA, 25 bp, probe
ccatcaaagcagacgtgtggtcgtt

SEQ ID NO: 193829 - DNA, 25 bp, probe
ccatcacagatgctgtgaaggtcgt

SEQ ID NO: 193830 - DNA, 25 bp, probe
ccatcaagcgcagggaagccacgtg

SEQ ID NO: 193831 - DNA, 25 bp, probe
ccatcgtctgcatgataagccacag

SEQ ID NO: 193832 - DNA, 25 bp, probe
ccatctggtgatgcttgagtgcaca

SEQ ID NO: 193833 - DNA, 25 bp, probe
ccatatcgatgaggtctggcccagc

SEQ ID NO: 193834 - DNA, 25 bp, probe
ccatatcgatgaggtctggcccagc

SEQ ID NO: 193835 - DNA, 25 bp, probe
ccatatcgatgaggtctggcccagc

SEQ ID NO: 193836 - DNA, 25 bp, probe
ccatatcgatgaggtctggcccagc

SEQ ID NO: 193837 - DNA, 25 bp, probe
ccatatcgatgaggtctggcccagc

SEQ ID NO: 193838 - DNA, 25 bp, probe
ccatttgcatcagggctggcctgca

SEQ ID NO: 193839 - DNA, 25 bp, probe
ccatgctggcacgagtgcgcgactg

SEQ ID NO: 193840 - DNA, 25 bp, probe
ccattggcaaagaggccggaggggc

SEQ ID NO: 193841 - DNA, 25 bp, probe
ccaggagagtgaggggccggacgag

SEQ ID NO: 193842 - DNA, 25 bp, probe
ccaggtagctgagggcatggcctac

SEQ ID NO: 193843 - DNA, 25 bp, probe
ccatggtactgtggggggccagggc

SEQ ID NO: 193844 - DNA, 25 bp, probe
ccatggtgactggtgaggggcctct

SEQ ID NO: 193845 - DNA, 25 bp, probe
ccatggtgactggtgaggggcctct

SEQ ID NO: 193846 - DNA, 25 bp, probe
ccatcggtgtgtaaggtggcctatt

SEQ ID NO: 193847 - DNA, 25 bp, probe
ccaaggttctggaggcccatttggg

SEQ ID NO: 193848 - DNA, 25 bp, probe
ccattggcttctgtgggccagtggg

SEQ ID NO: 193849 - DNA, 25 bp, probe
ccattgagttgagctggcctagcga

SEQ ID NO: 193850 - DNA, 25 bp, probe
ccatagagttggggcctctgacctg

SEQ ID NO: 193851 - DNA, 25 bp, probe
ccatagagttggggcctctgacctg

SEQ ID NO: 193852 - DNA, 25 bp, probe
ccatagagttggggcctctgacctg

SEQ ID NO: 193853 - DNA, 25 bp, probe
ccttggctgtgggcaggtagcacgc

SEQ ID NO: 193854 - DNA, 25 bp, probe
ccattggcaatgagcggttccgctg

SEQ ID NO: 193855 - DNA, 25 bp, probe
ccattgcccggaaggactcacggcg

SEQ ID NO: 193856 - DNA, 25 bp, probe
ccattgcccggaaggactcacggcg

SEQ ID NO: 193857 - DNA, 25 bp, probe
ccattgctcccggggactcaagagg

SEQ ID NO: 193858 - DNA, 25 bp, probe
ccatttcctcctgggcaacagagtg

SEQ ID NO: 193859 - DNA, 25 bp, probe
ccattcacctgggagtacactggtg

SEQ ID NO: 193860 - DNA, 25 bp, probe
ccatctaccagatcatgtacagctg

SEQ ID NO: 193861 - DNA, 25 bp, probe
ccatatgcccacaacattgctgagg

SEQ ID NO: 193862 - DNA, 25 bp, probe
ccatatgcccacaacattgctgagg

SEQ ID NO: 193863 - DNA, 25 bp, probe
ccatgacccactccatgttggtgta

SEQ ID NO: 193864 - DNA, 25 bp, probe
ccatctctcaatctcatgcttgagt

SEQ ID NO: 193865 - DNA, 25 bp, probe
ccatcatctacaacttcctcagtgg

SEQ ID NO: 193866 - DNA, 25 bp, probe
ccatcatacaagtttgacatcggga

SEQ ID NO: 193867 - DNA, 25 bp, probe
ccatcatccagggtctgatcatcga

SEQ ID NO: 193868 - DNA, 25 bp, probe
ccatctcacagggttattgtgaata

SEQ ID NO: 193869 - DNA, 25 bp, probe
ccattgaagtgcgctctttgcaatc

SEQ ID NO: 193870 - DNA, 25 bp, probe
ccatgtagagtggccaagcttccta

SEQ ID NO: 193871 - DNA, 25 bp, probe
ccataaagtcttttgctccgctgac

SEQ ID NO: 193872 - DNA, 25 bp, probe
ccatgctaagtctaacactcctggg

SEQ ID NO: 193873 - DNA, 25 bp, probe
ccatcatatagttcaaccatgattg

SEQ ID NO: 193874 - DNA, 25 bp, probe
ccatgcaatcacaccatgccatgtt

SEQ ID NO: 193875 - DNA, 25 bp, probe
ccaggattcatggtgcctctgttgg

SEQ ID NO: 193876 - DNA, 25 bp, probe
ccaggaagcagtgagtcggggacag

SEQ ID NO: 193877 - DNA, 25 bp, probe
gccaggtagggcaaaggggtgaagc

SEQ ID NO: 193878 - DNA, 25 bp, probe
ccaggtggttctgaaggtctcccag

SEQ ID NO: 193879 - DNA, 25 bp, probe
ccaggggtttcctgagctgaccaag

SEQ ID NO: 193880 - DNA, 25 bp, probe
ccaggtggtcacactgtggtaccgc

SEQ ID NO: 193881 - DNA, 25 bp, probe
ccatacttctaccctgtggtgaagg

SEQ ID NO: 193882 - DNA, 25 bp, probe
ccagggccagaccctggctggaagc

SEQ ID NO: 193883 - DNA, 25 bp, probe
ccagggccaactcattcgtgggaac

SEQ ID NO: 193884 - DNA, 25 bp, probe
ccagggagcaccgcaaggtcggaaa

SEQ ID NO: 193885 - DNA, 25 bp, probe
ccaggaggccagagcggtttgaaaa

SEQ ID NO: 193886 - DNA, 25 bp, probe
ccatcgaggtcagggcggtggtgat

SEQ ID NO: 193887 - DNA, 25 bp, probe
ccatcgacggcacctgcaattttgt

SEQ ID NO: 193888 - DNA, 25 bp, probe
ccatcgacggcacctgcaattttgt

SEQ ID NO: 193889 - DNA, 25 bp, probe
ccatcgtcggaaccattctggtggt

SEQ ID NO: 193890 - DNA, 25 bp, probe
ccatcttcgtgctagtcggggtgga

SEQ ID NO: 193891 - DNA, 25 bp, probe
ccatctttgtctctagcctggagaa

SEQ ID NO: 193892 - DNA, 25 bp, probe
ccatctttgtctctagcctggagaa

SEQ ID NO: 193893 - DNA, 25 bp, probe
ccacatttgacatttatgccggaat

SEQ ID NO: 193894 - DNA, 25 bp, probe
ccatttgtacatttcatcactcagt

SEQ ID NO: 193895 - DNA, 25 bp, probe
ccatcctcataatttacatcatcat

SEQ ID NO: 193896 - DNA, 25 bp, probe
ccaggccattaatgatgcacatcag

SEQ ID NO: 193897 - DNA, 25 bp, probe
ccaggccattaatgatgcacatcag

SEQ ID NO: 193898 - DNA, 25 bp, probe
ccattgcctatggaagctgcatctt

SEQ ID NO: 193899 - DNA, 25 bp, probe
ccattcctcatggacaaggctgtgt

SEQ ID NO: 193900 - DNA, 25 bp, probe
ccattcctcatggacaaggctgtgt

SEQ ID NO: 193901 - DNA, 25 bp, probe
ccatagcccagtacacaggctgtgg

SEQ ID NO: 193902 - DNA, 25 bp, probe
ccataggcacagtagcccttctggt

SEQ ID NO: 193903 - DNA, 25 bp, probe
ccatggtcggaacgccatactggat

SEQ ID NO: 193904 - DNA, 25 bp, probe
ccaggctgcggaccagacagatgct

SEQ ID NO: 193905 - DNA, 25 bp, probe
ccatcgctgtggaccgatacttgcg

SEQ ID NO: 193906 - DNA, 25 bp, probe
ccatcctctacaacatgacactgtg

SEQ ID NO: 193907 - DNA, 25 bp, probe
ccatcctatctcagctacaagtttc

SEQ ID NO: 193908 - DNA, 25 bp, probe
ccatcctatctcagctacaagtttc

SEQ ID NO: 193909 - DNA, 25 bp, probe
ccatgcctgtctctgttcagatgtg

SEQ ID NO: 193910 - DNA, 25 bp, probe
ccatatcatctctgctgatacgagg

SEQ ID NO: 193911 - DNA, 25 bp, probe
ccatatgcatctgtgtgtgtagagg

SEQ ID NO: 193912 - DNA, 25 bp, probe
ccatcagctctggctgtgtagggga

SEQ ID NO: 193913 - DNA, 25 bp, probe
ccatcccatggccatgtcacaggga

SEQ ID NO: 193914 - DNA, 25 bp, probe
ccatgcccagtgcctagaggctgtg

SEQ ID NO: 193915 - DNA, 25 bp, probe
ccatctcctgtccaatgacatgtgt

SEQ ID NO: 193916 - DNA, 25 bp, probe
ccatctctagataagtgtcatatat

SEQ ID NO: 193917 - DNA, 25 bp, probe
ccatctgatggactggtgtcctatg

SEQ ID NO: 193918 - DNA, 25 bp, probe
ccatctgcatggcgtacctcatgaa

SEQ ID NO: 193919 - DNA, 25 bp, probe
ccatctgctggcagagagccacgca

SEQ ID NO: 193920 - DNA, 25 bp, probe
ccatctgccctttgatgacaccaat

SEQ ID NO: 193921 - DNA, 25 bp, probe
ccatctgcacactcctgaaaaacag

SEQ ID NO: 193922 - DNA, 25 bp, probe
ccatctgcacactcctgaaaaacag

SEQ ID NO: 193923 - DNA, 25 bp, probe
ccatagcacagcactgctaaatact

SEQ ID NO: 193924 - DNA, 25 bp, probe
ccatagcagctgcacatgccaagca

SEQ ID NO: 193925 - DNA, 25 bp, probe
ccatatcactgcaacacctacaagt

SEQ ID NO: 193926 - DNA, 25 bp, probe
ccattcgctggatgcctccagagag

SEQ ID NO: 193927 - DNA, 25 bp, probe
ccatctcgagtgatgccatctcggg

SEQ ID NO: 193928 - DNA, 25 bp, probe
ccatgtccagatactgtctatttgg

SEQ ID NO: 193929 - DNA, 25 bp, probe
ccatttcaatgagtttgcaggcgtg

SEQ ID NO: 193930 - DNA, 25 bp, probe
ccatgttgcactgtttgcatgcgcc

SEQ ID NO: 193931 - DNA, 25 bp, probe
ccatgatggacgatcttgctcccag

SEQ ID NO: 193932 - DNA, 25 bp, probe
ccaggaactatgtctgtgcaagcct

SEQ ID NO: 193933 - DNA, 25 bp, probe
ccaggaacatctactcagcagacta

SEQ ID NO: 193934 - DNA, 25 bp, probe
ccatgctgaagcggctcatcgagaa

SEQ ID NO: 193935 - DNA, 25 bp, probe
ccatctcgggcaccatcatgaagat

SEQ ID NO: 193936 - DNA, 25 bp, probe
ccagtctgaataccacatacgctgc

SEQ ID NO: 193937 - DNA, 25 bp, probe
ccagtatatgtctcagcatccagga

SEQ ID NO: 193938 - DNA, 25 bp, probe
ccagtaatgctgctgcctgacagaa

SEQ ID NO: 193939 - DNA, 25 bp, probe
ccatgcaagtggcgactgcacagaa

SEQ ID NO: 193940 - DNA, 25 bp, probe
ccatcaacagagactgactgccaaa

SEQ ID NO: 193941 - DNA, 25 bp, probe
ccatcaacagagactgactgccaaa

SEQ ID NO: 193942 - DNA, 25 bp, probe
ccatcgaagatgccgacctcagcat

SEQ ID NO: 193943 - DNA, 25 bp, probe
ccatcgaagatgccgacctcagcat

SEQ ID NO: 193944 - DNA, 25 bp, probe
ccatccgtgtggacacgccacatta

SEQ ID NO: 193945 - DNA, 25 bp, probe
ccatcctggtgaccatcgtgatcct

SEQ ID NO: 193946 - DNA, 25 bp, probe
ccatcctggtgaccatcgtgatcct

SEQ ID NO: 193947 - DNA, 25 bp, probe
ccatcctggctaacacggtgaaacc

SEQ ID NO: 193948 - DNA, 25 bp, probe
ccatcctggctaacacggtgaaacc

SEQ ID NO: 193949 - DNA, 25 bp, probe
ccatcctggctaacacggtgaaacc

SEQ ID NO: 193950 - DNA, 25 bp, probe
ccatagctggtaggagagggaaggc

SEQ ID NO: 193951 - DNA, 25 bp, probe
ccatggggcgtggcaagggaatagc

SEQ ID NO: 193952 - DNA, 25 bp, probe
ccatggaggtggtcaacagcggctc

SEQ ID NO: 193953 - DNA, 25 bp, probe
ccatggaggtggtcaacagcggctc

SEQ ID NO: 193954 - DNA, 25 bp, probe
ccaggagggtccaatcatgaggcac

SEQ ID NO: 193955 - DNA, 25 bp, probe
ccaggatgccgagctacaggtaccg

SEQ ID NO: 193956 - DNA, 25 bp, probe
ccagggccggagttagagaggcctc

SEQ ID NO: 193957 - DNA, 25 bp, probe
ccagtggccaccatctatgcaaagt

SEQ ID NO: 193958 - DNA, 25 bp, probe
ccagttcaagccataatgcaagtcc

SEQ ID NO: 193959 - DNA, 25 bp, probe
ccagatgcccccataagtagtacct

SEQ ID NO: 193960 - DNA, 25 bp, probe
ccagatgatgctgccttctcagtag

SEQ ID NO: 193961 - DNA, 25 bp, probe
ccatgctgtgctctacttcattgag

SEQ ID NO: 193962 - DNA, 25 bp, probe
ccatgctgcatacctttctcatggg

SEQ ID NO: 193963 - DNA, 25 bp, probe
ccaggctagcttttctatggaccca

SEQ ID NO: 193964 - DNA, 25 bp, probe
ccaggggctgctgtaattaccgagc

SEQ ID NO: 193965 - DNA, 25 bp, probe
ccaggaggactctgcatttaccaag

SEQ ID NO: 193966 - DNA, 25 bp, probe
ccatggtaatcctgctcagtacgag

SEQ ID NO: 193967 - DNA, 25 bp, probe
ccatggatggtttcctccaaggaaa

SEQ ID NO: 193968 - DNA, 25 bp, probe
ccatggatggtttcctccaaggaaa

SEQ ID NO: 193969 - DNA, 25 bp, probe
ccagtggtcttctttccaacaggaa

SEQ ID NO: 193970 - DNA, 25 bp, probe
ccagtggtcttctttccaacaggaa

SEQ ID NO: 193971 - DNA, 25 bp, probe
ccatggttgcttttactattaataa

SEQ ID NO: 193972 - DNA, 25 bp, probe
ccatggttgcttttactattaataa

SEQ ID NO: 193973 - DNA, 25 bp, probe
ccatggcattgcctactcatgctat

SEQ ID NO: 193974 - DNA, 25 bp, probe
ccatctctctgcatgagctcatgat

SEQ ID NO: 193975 - DNA, 25 bp, probe
ccatctctctgcatgagctcatgat

SEQ ID NO: 193976 - DNA, 25 bp, probe
ccatttcgcctgactcataatatgg

SEQ ID NO: 193977 - DNA, 25 bp, probe
ccatttcacattaccataccatcag

SEQ ID NO: 193978 - DNA, 25 bp, probe
ccatggtcatcaaccacgaccacga

SEQ ID NO: 193979 - DNA, 25 bp, probe
ccaggcactgaaggaggcgtccgag

SEQ ID NO: 193980 - DNA, 25 bp, probe
ccatggcaccaaacgctggtcacaa

SEQ ID NO: 193981 - DNA, 25 bp, probe
ccatctgaggaaagccagttcacca

SEQ ID NO: 193982 - DNA, 25 bp, probe
ccatcaggacaaacaagctgctgcc

SEQ ID NO: 193983 - DNA, 25 bp, probe
ccatcaaatgcattgccaaggaggc

SEQ ID NO: 193984 - DNA, 25 bp, probe
ccatgccaatgcttgtaatggaggg

SEQ ID NO: 193985 - DNA, 25 bp, probe
ccaccaactggtgatggaaggttac

SEQ ID NO: 193986 - DNA, 25 bp, probe
ccaccaactggtgatggaaggttac

SEQ ID NO: 193987 - DNA, 25 bp, probe
ccaactaccgtttcacaaggattga

SEQ ID NO: 193988 - DNA, 25 bp, probe
ccagcctgaaagatacaggggatca

SEQ ID NO: 193989 - DNA, 25 bp, probe
ccaggcccaagaacacagccggaaa

SEQ ID NO: 193990 - DNA, 25 bp, probe
ccatgggtcacacccaccaaggaag

SEQ ID NO: 193991 - DNA, 25 bp, probe
ccatgggtcacacccaccaaggaag

SEQ ID NO: 193992 - DNA, 25 bp, probe
ccatgggaaacccagcttctggagg

SEQ ID NO: 193993 - DNA, 25 bp, probe
ccaggggcaaatacctgatctgcaa

SEQ ID NO: 193994 - DNA, 25 bp, probe
ccaggctaaactgccaacatgcaga

SEQ ID NO: 193995 - DNA, 25 bp, probe
ccagtttaatcttcacaatatccaa

SEQ ID NO: 193996 - DNA, 25 bp, probe
ccagtataagtagcacaattctcgt

SEQ ID NO: 193997 - DNA, 25 bp, probe
ccagtcattaaagtccagtattact

SEQ ID NO: 193998 - DNA, 25 bp, probe
gccaggttcaaggcccttagtacgt

SEQ ID NO: 193999 - DNA, 25 bp, probe
ccaacttagaggacttacagaaccg

SEQ ID NO: 194000 - DNA, 25 bp, probe
ccaccattaaggccctggtgtcccg

SEQ ID NO: 194001 - DNA, 25 bp, probe
ccacccacagggcagtggttccgtg

SEQ ID NO: 194002 - DNA, 25 bp, probe
gccccccaggaggggagctatttgg

SEQ ID NO: 194003 - DNA, 25 bp, probe
tgcccttcccggtgaattacgtggg

SEQ ID NO: 194004 - DNA, 25 bp, probe
gcaacttcgacgaggagttcaccgg

SEQ ID NO: 194005 - DNA, 25 bp, probe
ccatcttccaggagcgagatccctc

SEQ ID NO: 194006 - DNA, 25 bp, probe
ccatacccatcgtgtggtacgtcac

SEQ ID NO: 194007 - DNA, 25 bp, probe
ccaccgccactgtgtgaaactgtat

SEQ ID NO: 194008 - DNA, 25 bp, probe
ccatcagcccgttagctgtaacttg

SEQ ID NO: 194009 - DNA, 25 bp, probe
ccatctctcttgttagttaccttgt

SEQ ID NO: 194010 - DNA, 25 bp, probe
ccatctctcttgttagttaccttgt

SEQ ID NO: 194011 - DNA, 25 bp, probe
ccatccctggttcgagtatgtcttg

SEQ ID NO: 194012 - DNA, 25 bp, probe
ccataccgttactctgatgaattga

SEQ ID NO: 194013 - DNA, 25 bp, probe
ccatgcccgcataaaactgaaggtg

SEQ ID NO: 194014 - DNA, 25 bp, probe
ccatgccctgcaaagaggctgattg

SEQ ID NO: 194015 - DNA, 25 bp, probe
ccatggcctatgaccggtatgtggc

SEQ ID NO: 194016 - DNA, 25 bp, probe
ccatgccagcgacacctggatgttc

SEQ ID NO: 194017 - DNA, 25 bp, probe
ccatccagcaagacttcgtgatttt

SEQ ID NO: 194018 - DNA, 25 bp, probe
ccatcgatgaggtcttcggctttgt

SEQ ID NO: 194019 - DNA, 25 bp, probe
ccagtcagacgtctggagcttcggg

SEQ ID NO: 194020 - DNA, 25 bp, probe
ccaggggcagtgaagtgtttaggtg

SEQ ID NO: 194021 - DNA, 25 bp, probe
ccaggggagtcaaggccccgaggtg

SEQ ID NO: 194022 - DNA, 25 bp, probe
ccaggggagtcaaggccccgaggtg

SEQ ID NO: 194023 - DNA, 25 bp, probe
ccaggtggtatcaggcccctgagtt

SEQ ID NO: 194024 - DNA, 25 bp, probe
ccaagtagtaaagctccctgctctc

SEQ ID NO: 194025 - DNA, 25 bp, probe
ccaagtacattctaattaccagtat

SEQ ID NO: 194026 - DNA, 25 bp, probe
ccaggtaccccatgtacctttattg

SEQ ID NO: 194027 - DNA, 25 bp, probe
ccaaggtcaaccagtacccttacat

SEQ ID NO: 194028 - DNA, 25 bp, probe
ccaggggagacctgggacctggacg

SEQ ID NO: 194029 - DNA, 25 bp, probe
ccatcaggggagcggagccgcctgg

SEQ ID NO: 194030 - DNA, 25 bp, probe
ccatcaggggagcggagccgcctgg

SEQ ID NO: 194031 - DNA, 25 bp, probe
ccatccaaggaatggccactgctct

SEQ ID NO: 194032 - DNA, 25 bp, probe
ccatgtcaaggttaagtctttcgag

SEQ ID NO: 194033 - DNA, 25 bp, probe
ccagatccggaaaaactttgccaag

SEQ ID NO: 194034 - DNA, 25 bp, probe
ccaatcccggaaaggctaagccctg

SEQ ID NO: 194035 - DNA, 25 bp, probe
ccaacaccagggagaataagagccg

SEQ ID NO: 194036 - DNA, 25 bp, probe
ccagaccaaggtatgttaggaagaa

SEQ ID NO: 194037 - DNA, 25 bp, probe
ccagactccaaaactgtctacgcaa

SEQ ID NO: 194038 - DNA, 25 bp, probe
ccagactccaaaactgtctacgcaa

SEQ ID NO: 194039 - DNA, 25 bp, probe
ccaggcatccaatttgtaaaccaat

SEQ ID NO: 194040 - DNA, 25 bp, probe
ccagtgatttgtattaagacagcac

SEQ ID NO: 194041 - DNA, 25 bp, probe
ccaggtttgaccagcacaagccaga

SEQ ID NO: 194042 - DNA, 25 bp, probe
ccaggtcttagatgtccaaccaagg

SEQ ID NO: 194043 - DNA, 25 bp, probe
ccaggtgactagtcggaaactacac

SEQ ID NO: 194044 - DNA, 25 bp, probe
ccaggaatcaacttggttgccccac

SEQ ID NO: 194045 - DNA, 25 bp, probe
ccagtcataaaaatgtgttctttac

SEQ ID NO: 194046 - DNA, 25 bp, probe
ccagtaagtagaattatctcttcat

SEQ ID NO: 194047 - DNA, 25 bp, probe
ccagaagatctacaccaccttcatc

SEQ ID NO: 194048 - DNA, 25 bp, probe
ccaaaaaacctccaactgtctcaga

SEQ ID NO: 194049 - DNA, 25 bp, probe
ccaaaaaacctccaactgtctcaga

SEQ ID NO: 194050 - DNA, 25 bp, probe
ccaaaagaaaggccaagatttgcag

SEQ ID NO: 194051 - DNA, 25 bp, probe
ccataccgaactccgaagagtgtga

SEQ ID NO: 194052 - DNA, 25 bp, probe
ccaccccaagtctgtagtgggagtt

SEQ ID NO: 194053 - DNA, 25 bp, probe
ccatccacccaagggaaatggaagg

SEQ ID NO: 194054 - DNA, 25 bp, probe
ccagccctctcaagttaaacgaact

SEQ ID NO: 194055 - DNA, 25 bp, probe
ccagccctctcaagttaaacgaact

SEQ ID NO: 194056 - DNA, 25 bp, probe
ccagtcgttctggaccaaaggaaca

SEQ ID NO: 194057 - DNA, 25 bp, probe
ccagatcatgtttgagaccttcaac

SEQ ID NO: 194058 - DNA, 25 bp, probe
ccagatcatgtttgagaccttcaac

SEQ ID NO: 194059 - DNA, 25 bp, probe
ccatgattgatgatgaagccttaaa

SEQ ID NO: 194060 - DNA, 25 bp, probe
ccagatcgtgcacagagacataaag

SEQ ID NO: 194061 - DNA, 25 bp, probe
ccagatcgtggtgcagaaaggagac

SEQ ID NO: 194062 - DNA, 25 bp, probe
ccagatcgtggtgcagaaaggagac

SEQ ID NO: 194063 - DNA, 25 bp, probe
ccagggtggtggtgataggtataag

SEQ ID NO: 194064 - DNA, 25 bp, probe
ccagtgttagggtagcatgggatta

SEQ ID NO: 194065 - DNA, 25 bp, probe
ccaggctttggtggcagcatggaca

SEQ ID NO: 194066 - DNA, 25 bp, probe
ccaggctttggtggcagcatggaca

SEQ ID NO: 194067 - DNA, 25 bp, probe
ccatgagctgattttcctgaaacac

SEQ ID NO: 194068 - DNA, 25 bp, probe
ccatgggggtctttgaacacacctc

SEQ ID NO: 194069 - DNA, 25 bp, probe
ccatgggggtctttgaacacacctc

SEQ ID NO: 194070 - DNA, 25 bp, probe
ccatcgagggagtgctggaccaccc

SEQ ID NO: 194071 - DNA, 25 bp, probe
ccaggtgtggagtgggacagaagtc

SEQ ID NO: 194072 - DNA, 25 bp, probe
ccatggctgttacagggatcatgta

SEQ ID NO: 194073 - DNA, 25 bp, probe
ccatgcggcccagcgaggagcatgt

SEQ ID NO: 194074 - DNA, 25 bp, probe
ccatcacctccagggagatccagac

SEQ ID NO: 194075 - DNA, 25 bp, probe
ccatcctctggcacaagatgcacaa

SEQ ID NO: 194076 - DNA, 25 bp, probe
ccatcttgtggggccaggaccatgg

SEQ ID NO: 194077 - DNA, 25 bp, probe
gccactggaggagccagtgccctct

SEQ ID NO: 194078 - DNA, 25 bp, probe
ccatcttgaggatccagtcctcaga

SEQ ID NO: 194079 - DNA, 25 bp, probe
ccatgcttatgtcaccagtattggc

SEQ ID NO: 194080 - DNA, 25 bp, probe
ccatcttcagctctcagaaattgag

SEQ ID NO: 194081 - DNA, 25 bp, probe
ccactccatctcttacaagatcgag

SEQ ID NO: 194082 - DNA, 25 bp, probe
ccagggattcctgaagatcgcagac

SEQ ID NO: 194083 - DNA, 25 bp, probe
ccaggacttggtgcagttctcatga

SEQ ID NO: 194084 - DNA, 25 bp, probe
ccagatgagtcaataccgttccata

SEQ ID NO: 194085 - DNA, 25 bp, probe
ccagtgactagtccatgtcttcctg

SEQ ID NO: 194086 - DNA, 25 bp, probe
ccagtgactagtccatgtcttcctg

SEQ ID NO: 194087 - DNA, 25 bp, probe
ccagtgactagtccatgtcttcctg

SEQ ID NO: 194088 - DNA, 25 bp, probe
ccatgggcattgcaagtgccaccgt

SEQ ID NO: 194089 - DNA, 25 bp, probe
ccatggaagctgagaggccagaccc

SEQ ID NO: 194090 - DNA, 25 bp, probe
ccatgaggactggaagcgcctggcc

SEQ ID NO: 194091 - DNA, 25 bp, probe
ccatggagcgtggtagccacttcag

SEQ ID NO: 194092 - DNA, 25 bp, probe
ccatgggggagctgtccatgtacac

SEQ ID NO: 194093 - DNA, 25 bp, probe
ccagggtgggccaccgcatgaacat

SEQ ID NO: 194094 - DNA, 25 bp, probe
gccatgggatttcaggccaagaaca

SEQ ID NO: 194095 - DNA, 25 bp, probe
gccatgggatttcaggccaagaaca

SEQ ID NO: 194096 - DNA, 25 bp, probe
ccagggattttttgtcgcaatcata

SEQ ID NO: 194097 - DNA, 25 bp, probe
ccatggagcttgtgttctcagaatc

SEQ ID NO: 194098 - DNA, 25 bp, probe
ccatgaagttgggcttctgcttctc

SEQ ID NO: 194099 - DNA, 25 bp, probe
ccatgaggtgtccactttgatttcc

SEQ ID NO: 194100 - DNA, 25 bp, probe
ccatggagctgtgggctctgtgagc

SEQ ID NO: 194101 - DNA, 25 bp, probe
ccatgctgactgagtgactggagac

SEQ ID NO: 194102 - DNA, 25 bp, probe
ccatgcttcgcaaggactcgtgcgc

SEQ ID NO: 194103 - DNA, 25 bp, probe
ccatctacagaacagctgctggtgc

SEQ ID NO: 194104 - DNA, 25 bp, probe
ccatccatgcagtagaggcgctggg

SEQ ID NO: 194105 - DNA, 25 bp, probe
ccatctcagccattggggcagggac

SEQ ID NO: 194106 - DNA, 25 bp, probe
ccatctcagccattggggcagggac

SEQ ID NO: 194107 - DNA, 25 bp, probe
ccatccagccacggagggaggcacc

SEQ ID NO: 194108 - DNA, 25 bp, probe
ccatccaggcactgaaggaggcgtc

SEQ ID NO: 194109 - DNA, 25 bp, probe
gcttccgccttccaaggagccgtca

SEQ ID NO: 194110 - DNA, 25 bp, probe
gcctcaccctcccaagtagttggga

SEQ ID NO: 194111 - DNA, 25 bp, probe
ccacccactcctcagtgtttgtgga

SEQ ID NO: 194112 - DNA, 25 bp, probe
ccatggccccctgggttaagaggct

SEQ ID NO: 194113 - DNA, 25 bp, probe
ccatcctcccctggggtcaggagag

SEQ ID NO: 194114 - DNA, 25 bp, probe
ccatcctcccctggggtcaggagag

SEQ ID NO: 194115 - DNA, 25 bp, probe
ccatcctcccctggggtcaggagag

SEQ ID NO: 194116 - DNA, 25 bp, probe
ccatgccccgcagtcagtgttgggg

SEQ ID NO: 194117 - DNA, 25 bp, probe
ccatgccccgcagtcagtgttgggg

SEQ ID NO: 194118 - DNA, 25 bp, probe
ccatcctggtcccagtgttagggta

SEQ ID NO: 194119 - DNA, 25 bp, probe
ccatctctgttctgcaggtgagagg

SEQ ID NO: 194120 - DNA, 25 bp, probe
ccatctagttgctctgaggatgaag

SEQ ID NO: 194121 - DNA, 25 bp, probe
ccatccatattgtgtcagagtggga

SEQ ID NO: 194122 - DNA, 25 bp, probe
ccatcccgtgtcctcaagatggctt

SEQ ID NO: 194123 - DNA, 25 bp, probe
ccatcccctggctccagagatggtc

SEQ ID NO: 194124 - DNA, 25 bp, probe
ccatcccctggctccagagatggtc

SEQ ID NO: 194125 - DNA, 25 bp, probe
ccatccaactggtcccagagctgga

SEQ ID NO: 194126 - DNA, 25 bp, probe
ccatcctaaagatccagtccagaga

SEQ ID NO: 194127 - DNA, 25 bp, probe
ccatcctcaaagtgctggtcgaggc

SEQ ID NO: 194128 - DNA, 25 bp, probe
ccatcttccaggtggggtgaggcag

SEQ ID NO: 194129 - DNA, 25 bp, probe
ccatcctgccggatgagtgtgggtg

SEQ ID NO: 194130 - DNA, 25 bp, probe
ccatcctgcctgtaattttgcgtct

SEQ ID NO: 194131 - DNA, 25 bp, probe
ccatcatcgcgccaaattttgcgct

SEQ ID NO: 194132 - DNA, 25 bp, probe
ccatgatcctgctcaattccagtat

SEQ ID NO: 194133 - DNA, 25 bp, probe
ccagacctaacactgccttgttgga

SEQ ID NO: 194134 - DNA, 25 bp, probe
ccatggactatcactgtctggggga

SEQ ID NO: 194135 - DNA, 25 bp, probe
ccatggactatcactgtctggggga

SEQ ID NO: 194136 - DNA, 25 bp, probe
ccaggacttcaccgtcaagatcggg

SEQ ID NO: 194137 - DNA, 25 bp, probe
ccaggaactgaccagctcagcgagg

SEQ ID NO: 194138 - DNA, 25 bp, probe
ccaggaagttcaccgactgggcgta

SEQ ID NO: 194139 - DNA, 25 bp, probe
ccagaaaggtcacctgccttctagg

SEQ ID NO: 194140 - DNA, 25 bp, probe
ccatgaacaaattcctgcttgtccg

SEQ ID NO: 194141 - DNA, 25 bp, probe
ccatgaagaaattcgaatctcccaa

SEQ ID NO: 194142 - DNA, 25 bp, probe
gccagaagtttgtcaagtcaaccaa

SEQ ID NO: 194143 - DNA, 25 bp, probe
gccagaagtttgtcaagtcaaccaa

SEQ ID NO: 194144 - DNA, 25 bp, probe
ccagaaaattggcgacgacctcagt

SEQ ID NO: 194145 - DNA, 25 bp, probe
ccaaagaacggcctacatacccaga

SEQ ID NO: 194146 - DNA, 25 bp, probe
ccagaaacacgatctacatcacctg

SEQ ID NO: 194147 - DNA, 25 bp, probe
ccagaaaagcgtcccacatttcagc

SEQ ID NO: 194148 - DNA, 25 bp, probe
ccaggaaaggagccacaatgtgata

SEQ ID NO: 194149 - DNA, 25 bp, probe
ccaggagctggatgaacaaatatac

SEQ ID NO: 194150 - DNA, 25 bp, probe
ccagtggccaaggaaccttcaacga

SEQ ID NO: 194151 - DNA, 25 bp, probe
ccagtggccataaaagtattcaaaa

SEQ ID NO: 194152 - DNA, 25 bp, probe
ccagggacaggataactctaataaa

SEQ ID NO: 194153 - DNA, 25 bp, probe
ccagagatgaagagacacagtctag

SEQ ID NO: 194154 - DNA, 25 bp, probe
ccaggatttggaacaactccagccc

SEQ ID NO: 194155 - DNA, 25 bp, probe
ccaggagtgtgggccaacggcagtg

SEQ ID NO: 194156 - DNA, 25 bp, probe
ccaggagtctaacaatgcggcggca

SEQ ID NO: 194157 - DNA, 25 bp, probe
tcgagaggttttccgatccggtcga

SEQ ID NO: 194158 - DNA, 25 bp, probe
ccaggagtatttcctgtgccaggta

SEQ ID NO: 194159 - DNA, 25 bp, probe
ccagggcttactgctctgcaagccc

SEQ ID NO: 194160 - DNA, 25 bp, probe
ccaggctgtgctatccctgtacgcc

SEQ ID NO: 194161 - DNA, 25 bp, probe
ccagtttgctttccacttaagacaa

SEQ ID NO: 194162 - DNA, 25 bp, probe
ccagtttgtatttagctgccaaata

SEQ ID NO: 194163 - DNA, 25 bp, probe
ccagtccggatatcactccgatgac

SEQ ID NO: 194164 - DNA, 25 bp, probe
ccaccacggatacggtcactgaagt

SEQ ID NO: 194165 - DNA, 25 bp, probe
ccaccacggatacggtcactgaagt

SEQ ID NO: 194166 - DNA, 25 bp, probe
ccatccaggtttaaccctgcaagct

SEQ ID NO: 194167 - DNA, 25 bp, probe
ccatgccagggaatgtacgccggcc

SEQ ID NO: 194168 - DNA, 25 bp, probe
ccatgctggtggaggtcgcactgtg

SEQ ID NO: 194169 - DNA, 25 bp, probe
ccatgggctacatggtcgctctcat

SEQ ID NO: 194170 - DNA, 25 bp, probe
ccatgggctacatggtcgctctcat

SEQ ID NO: 194171 - DNA, 25 bp, probe
ccatgatggccatagatttgccttg

SEQ ID NO: 194172 - DNA, 25 bp, probe
ccatgaggctcactcattgcagatc

SEQ ID NO: 194173 - DNA, 25 bp, probe
ccatgcagtgtcttgctggcagatg

SEQ ID NO: 194174 - DNA, 25 bp, probe
ccatgagctggctgttctatctcac

SEQ ID NO: 194175 - DNA, 25 bp, probe
ccagtgctggcaagtgatgaatgta

SEQ ID NO: 194176 - DNA, 25 bp, probe
ccatgctgctggcgtctaagtgttt

SEQ ID NO: 194177 - DNA, 25 bp, probe
ccatgtcgtgggctatatctgcggt

SEQ ID NO: 194178 - DNA, 25 bp, probe
ccatctctgtggtgaagtcacaggt

SEQ ID NO: 194179 - DNA, 25 bp, probe
ccatgtctgggatgacttcacagcc

SEQ ID NO: 194180 - DNA, 25 bp, probe
ccatggctgggaacatgacccagcc

SEQ ID NO: 194181 - DNA, 25 bp, probe
ccatgagcatggcatagtccaccgt

SEQ ID NO: 194182 - DNA, 25 bp, probe
ccatgtgcatggaaatgtcctccaa

SEQ ID NO: 194183 - DNA, 25 bp, probe
ccatgtgcatgagcatcatccagct

SEQ ID NO: 194184 - DNA, 25 bp, probe
ccatgagcagtgccatgatccagcc

SEQ ID NO: 194185 - DNA, 25 bp, probe
ccatgagcagtgccatgatccagcc

SEQ ID NO: 194186 - DNA, 25 bp, probe
ccatgagtgtgctagcatcaatcgc

SEQ ID NO: 194187 - DNA, 25 bp, probe
ccatggtaggagtcaatctgccaca

SEQ ID NO: 194188 - DNA, 25 bp, probe
ccaggaaggagagatcccagctgcc

SEQ ID NO: 194189 - DNA, 25 bp, probe
ccatggccatggtgttacccatgac

SEQ ID NO: 194190 - DNA, 25 bp, probe
ccaggcgtggttactcacacctgta

SEQ ID NO: 194191 - DNA, 25 bp, probe
ccaggcgtggaagcatccactctct

SEQ ID NO: 194192 - DNA, 25 bp, probe
ccaggctgggaacatgctaggcacc

SEQ ID NO: 194193 - DNA, 25 bp, probe
ccagggggcaaggagaaagcaccga

SEQ ID NO: 194194 - DNA, 25 bp, probe
ccagagctggcctgaaaattactgg

SEQ ID NO: 194195 - DNA, 25 bp, probe
ccagggactctgcttctactactgg

SEQ ID NO: 194196 - DNA, 25 bp, probe
ccaggtacgctgcaaagcctttggg

SEQ ID NO: 194197 - DNA, 25 bp, probe
ccaggtgcacccaaactacttctgg

SEQ ID NO: 194198 - DNA, 25 bp, probe
ccaggtgcacccaaactacttctgg

SEQ ID NO: 194199 - DNA, 25 bp, probe
ccaggtcaaccatgacccttgcagg

SEQ ID NO: 194200 - DNA, 25 bp, probe
ccaggagcaaccatagccttgtcgt

SEQ ID NO: 194201 - DNA, 25 bp, probe
ccaggagcaaccatagccttgtcgt

SEQ ID NO: 194202 - DNA, 25 bp, probe
ccatccacaaccaccgctgatgtgg

SEQ ID NO: 194203 - DNA, 25 bp, probe
ccatgcccttacacgtgcgtgtgag

SEQ ID NO: 194204 - DNA, 25 bp, probe
ccatccttccctttggagatgctga

SEQ ID NO: 194205 - DNA, 25 bp, probe
ccatgcccatcaccatttggatagc

SEQ ID NO: 194206 - DNA, 25 bp, probe
ccatgagccatgcctttctgtatag

SEQ ID NO: 194207 - DNA, 25 bp, probe
ccatctcctgatttctctgaacaga

SEQ ID NO: 194208 - DNA, 25 bp, probe
ccatcctgtatgctgcgctgaacag

SEQ ID NO: 194209 - DNA, 25 bp, probe
ccatctttgatcgggtgctgacaga

SEQ ID NO: 194210 - DNA, 25 bp, probe
ccatctgttcagggtggctgcacga

SEQ ID NO: 194211 - DNA, 25 bp, probe
ccatgttggccaggctggtctcgaa

SEQ ID NO: 194212 - DNA, 25 bp, probe
ccatgttggccaggctggtctcgaa

SEQ ID NO: 194213 - DNA, 25 bp, probe
ccatgacgccctacatggacactga

SEQ ID NO: 194214 - DNA, 25 bp, probe
ccatgatctccaaacggccagagca

SEQ ID NO: 194215 - DNA, 25 bp, probe
ccatgacggccattgcggtggacag

SEQ ID NO: 194216 - DNA, 25 bp, probe
ccaggggatagtggtgtggatcagt

SEQ ID NO: 194217 - DNA, 25 bp, probe
ccaggggatagtggtgtggatcagt

SEQ ID NO: 194218 - DNA, 25 bp, probe
ccagacgaagtgacgttgagatcct

SEQ ID NO: 194219 - DNA, 25 bp, probe
ccaacttcagttattcagaaatttt

SEQ ID NO: 194220 - DNA, 25 bp, probe
ccaactccacttctggaactacttt

SEQ ID NO: 194221 - DNA, 25 bp, probe
gcctacaaaacacagtgaacgactt

SEQ ID NO: 194222 - DNA, 25 bp, probe
ccatgtcaagattcagctagtggcc

SEQ ID NO: 194223 - DNA, 25 bp, probe
ccatgtcattgatgccaacagccca

SEQ ID NO: 194224 - DNA, 25 bp, probe
ccagtgcttcttgcaaatccctggg

SEQ ID NO: 194225 - DNA, 25 bp, probe
ccatgtcttcctgcaacaggtgtga

SEQ ID NO: 194226 - DNA, 25 bp, probe
ccagtttgcagtggaacaggtgctc

SEQ ID NO: 194227 - DNA, 25 bp, probe
ccatgctctgggaaacactgggcac

SEQ ID NO: 194228 - DNA, 25 bp, probe
ccatgctgaggaacaacctagaagc

SEQ ID NO: 194229 - DNA, 25 bp, probe
ccatggatggatgacatcccagggc

SEQ ID NO: 194230 - DNA, 25 bp, probe
ccagaatggaaagtcccagtggtcc

SEQ ID NO: 194231 - DNA, 25 bp, probe
ccaggaggaagagcctttgtgcatt

SEQ ID NO: 194232 - DNA, 25 bp, probe
ccagggaaaagagctctcaattttt

SEQ ID NO: 194233 - DNA, 25 bp, probe
ccagaaaaacgagcctcagctggcg

SEQ ID NO: 194234 - DNA, 25 bp, probe
ccagagggaacacggcctactgagc

SEQ ID NO: 194235 - DNA, 25 bp, probe
ccagagggaacacggcctactgagc

SEQ ID NO: 194236 - DNA, 25 bp, probe
ccatgtaggaagagttctcctgagg

SEQ ID NO: 194237 - DNA, 25 bp, probe
ccagtgggactgtggtgacttctgc

SEQ ID NO: 194238 - DNA, 25 bp, probe
ccagtgtggactctgcactggctta

SEQ ID NO: 194239 - DNA, 25 bp, probe
ccaggtggactgcttggcagtgcta

SEQ ID NO: 194240 - DNA, 25 bp, probe
ccagagggccaggatttgaggctgc

SEQ ID NO: 194241 - DNA, 25 bp, probe
ccagagtggctctgatgtccacatt

SEQ ID NO: 194242 - DNA, 25 bp, probe
ccaggatggtaccattgctctttcc

SEQ ID NO: 194243 - DNA, 25 bp, probe
ccatggcagatcccgaagtcttttt

SEQ ID NO: 194244 - DNA, 25 bp, probe
ccatggatgatcctggggtctctgc

SEQ ID NO: 194245 - DNA, 25 bp, probe
ccaggatcatcaaggggttcgagtg

SEQ ID NO: 194246 - DNA, 25 bp, probe
ccatgtgcaccttggggttttgtaa

SEQ ID NO: 194247 - DNA, 25 bp, probe
ccatgtccctggtgaatgttgtcat

SEQ ID NO: 194248 - DNA, 25 bp, probe
ccaggcctctgcaaggctagtctgg

SEQ ID NO: 194249 - DNA, 25 bp, probe
gccaacctcggagatagtcgggcaa

SEQ ID NO: 194250 - DNA, 25 bp, probe
ccagattttggagtcatggtccggt

SEQ ID NO: 194251 - DNA, 25 bp, probe
ccagtttgtgtgattctgtcctact

SEQ ID NO: 194252 - DNA, 25 bp, probe
ccagtttgtgtgattctgtcctact

SEQ ID NO: 194253 - DNA, 25 bp, probe
ccagtctggtatattatttcataat

SEQ ID NO: 194254 - DNA, 25 bp, probe
ccatgtcgtgttggttactataaca

SEQ ID NO: 194255 - DNA, 25 bp, probe
ccatcccaatggcttatcttacact

SEQ ID NO: 194256 - DNA, 25 bp, probe
ccatcccaatggcttatcttacact

SEQ ID NO: 194257 - DNA, 25 bp, probe
ccatcctcatatcatcagtatttat

SEQ ID NO: 194258 - DNA, 25 bp, probe
ccatcctgctgttatgagttgcttt

SEQ ID NO: 194259 - DNA, 25 bp, probe
ccatcctcttcatgatgctctactt

SEQ ID NO: 194260 - DNA, 25 bp, probe
ccacctgcaacaaggctctgaaacc

SEQ ID NO: 194261 - DNA, 25 bp, probe
ccagtctattcaaggcattgagaat

SEQ ID NO: 194262 - DNA, 25 bp, probe
ccagtgtcccaaagcagtgcacaat

SEQ ID NO: 194263 - DNA, 25 bp, probe
ccagtgacggaaagggcatgatcag

SEQ ID NO: 194264 - DNA, 25 bp, probe
ccaggccgtggaagggcaacacaag

SEQ ID NO: 194265 - DNA, 25 bp, probe
ccaggcctacgaattggccgactac

SEQ ID NO: 194266 - DNA, 25 bp, probe
ccagaggctactatcccgagaaatc

SEQ ID NO: 194267 - DNA, 25 bp, probe
ccaggagcgagatccctccaaaatc

SEQ ID NO: 194268 - DNA, 25 bp, probe
ccaggacatgagtgtctgtccagac

SEQ ID NO: 194269 - DNA, 25 bp, probe
ccatggaccagtctgcattcgctgg

SEQ ID NO: 194270 - DNA, 25 bp, probe
ccatggagcggtcagccttcatgga

SEQ ID NO: 194271 - DNA, 25 bp, probe
ccatggtagggttcctgctaggata

SEQ ID NO: 194272 - DNA, 25 bp, probe
ccaggaagggcccctgtacgtgatc

SEQ ID NO: 194273 - DNA, 25 bp, probe
ccaggaagggcccctgtacgtgatc

SEQ ID NO: 194274 - DNA, 25 bp, probe
ccaggacagtgacatcttgttcgga

SEQ ID NO: 194275 - DNA, 25 bp, probe
ccaggagcgtgacactggtgatcgc

SEQ ID NO: 194276 - DNA, 25 bp, probe
ccaggggctgacaatgcgaggtcgc

SEQ ID NO: 194277 - DNA, 25 bp, probe
ccaggcaggatgagctggggttggg

SEQ ID NO: 194278 - DNA, 25 bp, probe
ccatcctgagagactcctggggtgg

SEQ ID NO: 194279 - DNA, 25 bp, probe
ccatcctgagagactcctggggtgg

SEQ ID NO: 194280 - DNA, 25 bp, probe
ccatgacatagtctgctctgggcgg

SEQ ID NO: 194281 - DNA, 25 bp, probe
ccatgttcagtgggctgtttgctag

SEQ ID NO: 194282 - DNA, 25 bp, probe
ccatgatgtcgtggttgttgatgtt

SEQ ID NO: 194283 - DNA, 25 bp, probe
ccatgtccttggtatgcctgatgtt

SEQ ID NO: 194284 - DNA, 25 bp, probe
ccagggctatgggagcagctttttt

SEQ ID NO: 194285 - DNA, 25 bp, probe
ccagggctatgggagcagctttttt

SEQ ID NO: 194286 - DNA, 25 bp, probe
ccagaattatgtcaggttggcttgt

SEQ ID NO: 194287 - DNA, 25 bp, probe
ccagagtgtgtatacccaggcttgt

SEQ ID NO: 194288 - DNA, 25 bp, probe
ccaggtgtgttttctccttttgttg

SEQ ID NO: 194289 - DNA, 25 bp, probe
ccagtagggatttttcgtctattgt

SEQ ID NO: 194290 - DNA, 25 bp, probe
ccagggttgtctttatattctttat

SEQ ID NO: 194291 - DNA, 25 bp, probe
ccagactttgtcatcaataacttaa

SEQ ID NO: 194292 - DNA, 25 bp, probe
ccaattctggccttactggaccata

SEQ ID NO: 194293 - DNA, 25 bp, probe
ccagacactgacctctactggttca

SEQ ID NO: 194294 - DNA, 25 bp, probe
ccagaatatgaccgtcagcgtggtc

SEQ ID NO: 194295 - DNA, 25 bp, probe
ccagaaagacgcactcctggaccac

SEQ ID NO: 194296 - DNA, 25 bp, probe
ccagggaactgaactcttgtggacc

SEQ ID NO: 194297 - DNA, 25 bp, probe
ccagggagacagacccttgctgggc

SEQ ID NO: 194298 - DNA, 25 bp, probe
ccagggaaagcatctctggctcacc

SEQ ID NO: 194299 - DNA, 25 bp, probe
ccaggccaaagtgctgctgattccc

SEQ ID NO: 194300 - DNA, 25 bp, probe
ccaggccgatgagttgcctgcctgc

SEQ ID NO: 194301 - DNA, 25 bp, probe
ccagagcacagatctgtttcgtgca

SEQ ID NO: 194302 - DNA, 25 bp, probe
ccaggacagagaccttcctggcctt

SEQ ID NO: 194303 - DNA, 25 bp, probe
ccaggacagagaccttcctggcctt

SEQ ID NO: 194304 - DNA, 25 bp, probe
ccatggccagaatatgaccgtcagc

SEQ ID NO: 194305 - DNA, 25 bp, probe
ccatggccgacaaggtcctgaagga

SEQ ID NO: 194306 - DNA, 25 bp, probe
ccatggccgacaaggtcctgaagga

SEQ ID NO: 194307 - DNA, 25 bp, probe
ccatgccccagaaggacctgagcag

SEQ ID NO: 194308 - DNA, 25 bp, probe
ccatccagcctgagcgacagtgaga

SEQ ID NO: 194309 - DNA, 25 bp, probe
ccatcctcctgcacaaggtgcagca

SEQ ID NO: 194310 - DNA, 25 bp, probe
gccttgctcccagtcaagtggatgc

SEQ ID NO: 194311 - DNA, 25 bp, probe
ccatgtccccagaaatgatggcagg

SEQ ID NO: 194312 - DNA, 25 bp, probe
ccagtaccacggcgtggaggccgac

SEQ ID NO: 194313 - DNA, 25 bp, probe
ccagtcccagggtggatctgtcctg

SEQ ID NO: 194314 - DNA, 25 bp, probe
ccagatcatccgtgggaacttccct

SEQ ID NO: 194315 - DNA, 25 bp, probe
ccaggctctagatggcaaagcccac

SEQ ID NO: 194316 - DNA, 25 bp, probe
ccaggcatcaagtggcttagcttgc

SEQ ID NO: 194317 - DNA, 25 bp, probe
ccaggctggatgtgactgtagctgt

SEQ ID NO: 194318 - DNA, 25 bp, probe
ccatgttggtagccactgctagata

SEQ ID NO: 194319 - DNA, 25 bp, probe
ccatggtggagacctgcgttatcac

SEQ ID NO: 194320 - DNA, 25 bp, probe
ccatgggcacgactgttgttacact

SEQ ID NO: 194321 - DNA, 25 bp, probe
ccatggtcctcactgattgttttct

SEQ ID NO: 194322 - DNA, 25 bp, probe
ccagatgtgcccatcacgttttttc

SEQ ID NO: 194323 - DNA, 25 bp, probe
ccagatagtcatcaactttttgttg

SEQ ID NO: 194324 - DNA, 25 bp, probe
ccagatagtcatcaactttttgttg

SEQ ID NO: 194325 - DNA, 25 bp, probe
ccaaattatccaactgttatactac

SEQ ID NO: 194326 - DNA, 25 bp, probe
ccaatttatccaagttctaacacat

SEQ ID NO: 194327 - DNA, 25 bp, probe
ccaaattgaccacacattaatgata

SEQ ID NO: 194328 - DNA, 25 bp, probe
ccagtttaacagcagaggacgatag

SEQ ID NO: 194329 - DNA, 25 bp, probe
ccagtttaacagcagaggacgatag

SEQ ID NO: 194330 - DNA, 25 bp, probe
ccatgtggtaaagggggtggcttgg

SEQ ID NO: 194331 - DNA, 25 bp, probe
ccagtgagaacatctggccgggctt

SEQ ID NO: 194332 - DNA, 25 bp, probe
ccatggcggacagcgccagcgagag

SEQ ID NO: 194333 - DNA, 25 bp, probe
ccatggcggacagcgccagcgagag

SEQ ID NO: 194334 - DNA, 25 bp, probe
ccatgcgggccacaagcacgatgag

SEQ ID NO: 194335 - DNA, 25 bp, probe
ccagagaacgcacaggctattagtc

SEQ ID NO: 194336 - DNA, 25 bp, probe
ccaggagcacctcaactatgtgact

SEQ ID NO: 194337 - DNA, 25 bp, probe
ccatgtactgcagaaactgaggact

SEQ ID NO: 194338 - DNA, 25 bp, probe
ccagtcagtgcttaaatgggctcct

SEQ ID NO: 194339 - DNA, 25 bp, probe
ccagtgacatcataaggcaggccct

SEQ ID NO: 194340 - DNA, 25 bp, probe
ccaggagcaagaggagcggagcaaa

SEQ ID NO: 194341 - DNA, 25 bp, probe
ccatgtggccagggacggcatgagc

SEQ ID NO: 194342 - DNA, 25 bp, probe
ccatgtgccaagttgcagggtgggg

SEQ ID NO: 194343 - DNA, 25 bp, probe
ccaggctagcaggatcaagggaggg

SEQ ID NO: 194344 - DNA, 25 bp, probe
ccaggccgacccaagggagtgtcag

SEQ ID NO: 194345 - DNA, 25 bp, probe
ccacccgagtcccagaggaagatcc

SEQ ID NO: 194346 - DNA, 25 bp, probe
ccagcaacagggaccataggaaggc

SEQ ID NO: 194347 - DNA, 25 bp, probe
ccagagcctggctcctggtaaagct

SEQ ID NO: 194348 - DNA, 25 bp, probe
ccaggccaggcatgactttgacaga

SEQ ID NO: 194349 - DNA, 25 bp, probe
ccatggactggatgctttataaatt

SEQ ID NO: 194350 - DNA, 25 bp, probe
ccatggagcgcgtgtttgactacag

SEQ ID NO: 194351 - DNA, 25 bp, probe
ccatggggtttgataatctgccagg

SEQ ID NO: 194352 - DNA, 25 bp, probe
ccagggatctttaatgcctctccag

SEQ ID NO: 194353 - DNA, 25 bp, probe
ccatggccatctttgaactcctgga

SEQ ID NO: 194354 - DNA, 25 bp, probe
ccatgagctctcttagacatcttgt

SEQ ID NO: 194355 - DNA, 25 bp, probe
ccatgagctctcttagacatcttgt

SEQ ID NO: 194356 - DNA, 25 bp, probe
ccagactctcaccacaatttttctg

SEQ ID NO: 194357 - DNA, 25 bp, probe
ccagacttgtcactgactttccttc

SEQ ID NO: 194358 - DNA, 25 bp, probe
ccatgacatttcagccgactactgg

SEQ ID NO: 194359 - DNA, 25 bp, probe
ccagaatgaacacgctccttacttg

SEQ ID NO: 194360 - DNA, 25 bp, probe
ccaggatggtctcgatctcctgact

SEQ ID NO: 194361 - DNA, 25 bp, probe
ccagtgggaatgatccctgacatct

SEQ ID NO: 194362 - DNA, 25 bp, probe
ccaggaatggatgtcgctaatcata

SEQ ID NO: 194363 - DNA, 25 bp, probe
ccatggtagtcagtatggctcaacc

SEQ ID NO: 194364 - DNA, 25 bp, probe
ccaggatcagattgcatgtgactct

SEQ ID NO: 194365 - DNA, 25 bp, probe
ccaggatcagattgcatgtgactct

SEQ ID NO: 194366 - DNA, 25 bp, probe
ccatccagcatgtgtgtgtctctat

SEQ ID NO: 194367 - DNA, 25 bp, probe
ccatgccagagttgtggctgtattt

SEQ ID NO: 194368 - DNA, 25 bp, probe
ccagcgagatcaaagttgtatatct

SEQ ID NO: 194369 - DNA, 25 bp, probe
ccaggtatccacattgtcattgccc

SEQ ID NO: 194370 - DNA, 25 bp, probe
ccaggttcaagcgattctcctgcct

SEQ ID NO: 194371 - DNA, 25 bp, probe
ccagagtcatcctcagttgacgcct

SEQ ID NO: 194372 - DNA, 25 bp, probe
ccagtgctaccagcaggtgggctgc

SEQ ID NO: 194373 - DNA, 25 bp, probe
ccagatgtcccggaggggactgagc

SEQ ID NO: 194374 - DNA, 25 bp, probe
ccagagacccggggatggattggcc

SEQ ID NO: 194375 - DNA, 25 bp, probe
ccaggcccacagcatggggcttggc

SEQ ID NO: 194376 - DNA, 25 bp, probe
ccatggaccacgcaggaagggccta

SEQ ID NO: 194377 - DNA, 25 bp, probe
ccatggtcccctggcagaaggaggt

SEQ ID NO: 194378 - DNA, 25 bp, probe
ccagtaccacactcatgaagaaaga

SEQ ID NO: 194379 - DNA, 25 bp, probe
ccagctacgtcctggaacacctgta

SEQ ID NO: 194380 - DNA, 25 bp, probe
ccaggacttgcctatggaaacccat

SEQ ID NO: 194381 - DNA, 25 bp, probe
ccagtgactaccgggtacagaccac

SEQ ID NO: 194382 - DNA, 25 bp, probe
ccagatgttacaacgggcaggagcc

SEQ ID NO: 194383 - DNA, 25 bp, probe
ccaggtattgccaaggtcaaggcca

SEQ ID NO: 194384 - DNA, 25 bp, probe
ccaggtagtgctgcttctgaagtta

SEQ ID NO: 194385 - DNA, 25 bp, probe
ccatgaggagctgcgcctctgagag

SEQ ID NO: 194386 - DNA, 25 bp, probe
ccatgagacagcgactggctcacag

SEQ ID NO: 194387 - DNA, 25 bp, probe
ccatgaggcatggagcagggcagag

SEQ ID NO: 194388 - DNA, 25 bp, probe
ccatgagaatgcggcactgacgggc

SEQ ID NO: 194389 - DNA, 25 bp, probe
ccatgaatatgcagactgcagggct

SEQ ID NO: 194390 - DNA, 25 bp, probe
ccatgaaaatcaccgagggcgacct

SEQ ID NO: 194391 - DNA, 25 bp, probe
ccatgaaaatcaccgagggcgacct

SEQ ID NO: 194392 - DNA, 25 bp, probe
ccatggagaacggcgtgggtggcaa

SEQ ID NO: 194393 - DNA, 25 bp, probe
ccaggatgaagggctgggtggccac

SEQ ID NO: 194394 - DNA, 25 bp, probe
ccaggatgaagggctgggtggccac

SEQ ID NO: 194395 - DNA, 25 bp, probe
ccagagacaagtgaaggtgtctgcc

SEQ ID NO: 194396 - DNA, 25 bp, probe
ccagaaaaatcgcaggattccagcc

SEQ ID NO: 194397 - DNA, 25 bp, probe
gccagaaaaatcgcaggattccagc

SEQ ID NO: 194398 - DNA, 25 bp, probe
gccagaaacaaggctcggtcaccgt

SEQ ID NO: 194399 - DNA, 25 bp, probe
ccagatgaactacctgtgggcaccg

SEQ ID NO: 194400 - DNA, 25 bp, probe
ccagtcaactacgcgaggcagaggc

SEQ ID NO: 194401 - DNA, 25 bp, probe
ccaggagagcgggctctgggcagcg

SEQ ID NO: 194402 - DNA, 25 bp, probe
ccatgctgggggaccgtggggagat

SEQ ID NO: 194403 - DNA, 25 bp, probe
ccaggtgcccgtctgatggggagat

SEQ ID NO: 194404 - DNA, 25 bp, probe
ccatgcaatccccttttggtagaat

SEQ ID NO: 194405 - DNA, 25 bp, probe
ccatgctagcctgctacttggtgaa

SEQ ID NO: 194406 - DNA, 25 bp, probe
ccagtcagccatggagagctgggga

SEQ ID NO: 194407 - DNA, 25 bp, probe
ccagtcagccatggagagctgggga

SEQ ID NO: 194408 - DNA, 25 bp, probe
ccatgtacctgccggagagtgtcag

SEQ ID NO: 194409 - DNA, 25 bp, probe
ccaggcccgctgggagggtacatgg

SEQ ID NO: 194410 - DNA, 25 bp, probe
ccaggcgccctgaggatggagactg

SEQ ID NO: 194411 - DNA, 25 bp, probe
ccaggagcccatttggagggcctgg

SEQ ID NO: 194412 - DNA, 25 bp, probe
ccaagttcctagtggagggctgagt

SEQ ID NO: 194413 - DNA, 25 bp, probe
ccaagttttcagtgccaaggggata

SEQ ID NO: 194414 - DNA, 25 bp, probe
ccagagtttttatgtagcagggaaa

SEQ ID NO: 194415 - DNA, 25 bp, probe
ccaggttgatatcacctacacggag

SEQ ID NO: 194416 - DNA, 25 bp, probe
ccacgttaaactgcccatctggaga

SEQ ID NO: 194417 - DNA, 25 bp, probe
ccacgctggaaatgctctttcctag

SEQ ID NO: 194418 - DNA, 25 bp, probe
ccatgtgctgtattaagtgctttat

SEQ ID NO: 194419 - DNA, 25 bp, probe
ccatgtgctgtattaagtgctttat

SEQ ID NO: 194420 - DNA, 25 bp, probe
ccatggccatcatgagcgtgctcta

SEQ ID NO: 194421 - DNA, 25 bp, probe
ccatgggcatcatgggcttctgctg

SEQ ID NO: 194422 - DNA, 25 bp, probe
ccatgtgcagcttactggccattgc

SEQ ID NO: 194423 - DNA, 25 bp, probe
ccatgatctctgaagctgggctgtc

SEQ ID NO: 194424 - DNA, 25 bp, probe
ccatgatctctgaagctgggctgtc

SEQ ID NO: 194425 - DNA, 25 bp, probe
ccatgatcatctacacagtgacttt

SEQ ID NO: 194426 - DNA, 25 bp, probe
ccatgtctctgagcattagatttct

SEQ ID NO: 194427 - DNA, 25 bp, probe
ccatgtctatgccctgtacattgta

SEQ ID NO: 194428 - DNA, 25 bp, probe
ccatgaggagcaccctgtcattgta

SEQ ID NO: 194429 - DNA, 25 bp, probe
ccaggtgaggctgctgtcatttctc

SEQ ID NO: 194430 - DNA, 25 bp, probe
ccagactgatgagcacatctctctg

SEQ ID NO: 194431 - DNA, 25 bp, probe
ccaggggatccagtatctctttgag

SEQ ID NO: 194432 - DNA, 25 bp, probe
ccagtggagcccgagtactttgagc

SEQ ID NO: 194433 - DNA, 25 bp, probe
ccagtggagtcttcgagacttggga

SEQ ID NO: 194434 - DNA, 25 bp, probe
ccagtggttccgcaagctggcggac

SEQ ID NO: 194435 - DNA, 25 bp, probe
ccagtggttccgcaagctggcggac

SEQ ID NO: 194436 - DNA, 25 bp, probe
ccatgggctacgcaacggtggtggc

SEQ ID NO: 194437 - DNA, 25 bp, probe
ccagggaacagttttgatgggtact

SEQ ID NO: 194438 - DNA, 25 bp, probe
ccagggaacagttttgatgggtact

SEQ ID NO: 194439 - DNA, 25 bp, probe
ccaggaacaagctaattgggagtcc

SEQ ID NO: 194440 - DNA, 25 bp, probe
ccaggaccaagcttaaggagaggag

SEQ ID NO: 194441 - DNA, 25 bp, probe
ccatgaaccatgcttacaaagaaag

SEQ ID NO: 194442 - DNA, 25 bp, probe
ccatgtgcccaggattatattagca

SEQ ID NO: 194443 - DNA, 25 bp, probe
ccatgtgctacgcactctgcaacaa

SEQ ID NO: 194444 - DNA, 25 bp, probe
ccatgtgctacgcactctgcaacaa

SEQ ID NO: 194445 - DNA, 25 bp, probe
ccatgtcagagtcacctgatgtcaa

SEQ ID NO: 194446 - DNA, 25 bp, probe
ccaggacgtcagttctgtccatgtg

SEQ ID NO: 194447 - DNA, 25 bp, probe
ccaggacgtttgcttacactggcct

SEQ ID NO: 194448 - DNA, 25 bp, probe
ccaggggtgcggcatctacaaggac

SEQ ID NO: 194449 - DNA, 25 bp, probe
ccagggggcaggcacttactggtaa

SEQ ID NO: 194450 - DNA, 25 bp, probe
ccaggtgaacggcatgttgatcatg

SEQ ID NO: 194451 - DNA, 25 bp, probe
ccaggtgaacggcatgttgatcatg

SEQ ID NO: 194452 - DNA, 25 bp, probe
ccagtgatgacggaggagtagccgg

SEQ ID NO: 194453 - DNA, 25 bp, probe
ccaggcagaaggagaggcccggtgc

SEQ ID NO: 194454 - DNA, 25 bp, probe
ccagggaggcgcagggacatggggc

SEQ ID NO: 194455 - DNA, 25 bp, probe
ccagggcaggggctgtgcctgggga

SEQ ID NO: 194456 - DNA, 25 bp, probe
ccatgggggtttagggctggaggag

SEQ ID NO: 194457 - DNA, 25 bp, probe
ccagatggggctgttcatcggggcc

SEQ ID NO: 194458 - DNA, 25 bp, probe
ccagttgtcctgaatttccggaggc

SEQ ID NO: 194459 - DNA, 25 bp, probe
ccagtttcaccagtattcaccgaat

SEQ ID NO: 194460 - DNA, 25 bp, probe
ccagttcccatctgttcaggcaaat

SEQ ID NO: 194461 - DNA, 25 bp, probe
ccagttcccatctgttcaggcaaat

SEQ ID NO: 194462 - DNA, 25 bp, probe
ccaggctcagtcctagttcaggatt

SEQ ID NO: 194463 - DNA, 25 bp, probe
ccagggcgttgttgtcgccagattc

SEQ ID NO: 194464 - DNA, 25 bp, probe
ccagaggttctgacttcgctaaagg

SEQ ID NO: 194465 - DNA, 25 bp, probe
ccaggagggcttcatcctcataatg

SEQ ID NO: 194466 - DNA, 25 bp, probe
ccacagccaggttttccctaagaag

SEQ ID NO: 194467 - DNA, 25 bp, probe
ccacagccaggttttccctaagaag

SEQ ID NO: 194468 - DNA, 25 bp, probe
ccagcagccgtttgatgattcctta

SEQ ID NO: 194469 - DNA, 25 bp, probe
ccatggccctcattaatgacacttg

SEQ ID NO: 194470 - DNA, 25 bp, probe
ccatggccctcattaatgacacttg

SEQ ID NO: 194471 - DNA, 25 bp, probe
ccatggcacccattgaaatcaggta

SEQ ID NO: 194472 - DNA, 25 bp, probe
ccatggaagcacacgagatcagagc

SEQ ID NO: 194473 - DNA, 25 bp, probe
ccaggagctgcagatcgatgacaat

SEQ ID NO: 194474 - DNA, 25 bp, probe
ccatggagtgcaggacgagctactg

SEQ ID NO: 194475 - DNA, 25 bp, probe
ccaggaggccagggaaagcatctct

SEQ ID NO: 194476 - DNA, 25 bp, probe
ccaggagtcactgagccaatgactt

SEQ ID NO: 194477 - DNA, 25 bp, probe
ccagcgtatcacaggcaaccagttg

SEQ ID NO: 194478 - DNA, 25 bp, probe
ccaggtcatcacggggacgcaggag

SEQ ID NO: 194479 - DNA, 25 bp, probe
ccaggactttgggaggctgaggcag

SEQ ID NO: 194480 - DNA, 25 bp, probe
ccaggcagattttggggtcaccttc

SEQ ID NO: 194481 - DNA, 25 bp, probe
ccaggcagattttggggtcaccttc

SEQ ID NO: 194482 - DNA, 25 bp, probe
ccaggcgttttctgagcatacctgg

SEQ ID NO: 194483 - DNA, 25 bp, probe
ccagggatgtgatccggcatccttg

SEQ ID NO: 194484 - DNA, 25 bp, probe
ccaggctatgtatcctttcggcatg

SEQ ID NO: 194485 - DNA, 25 bp, probe
ccaaggatgcccgctataccaatgg

SEQ ID NO: 194486 - DNA, 25 bp, probe
ccagggtctcccatagacagcctgg

SEQ ID NO: 194487 - DNA, 25 bp, probe
ccagggctgtcacctagagaggctc

SEQ ID NO: 194488 - DNA, 25 bp, probe
ccatgtggtcttctaggtgctggcc

SEQ ID NO: 194489 - DNA, 25 bp, probe
ccaggtgtttgctcagttgctgacc

SEQ ID NO: 194490 - DNA, 25 bp, probe
ccagtgatgtgtagcacccttgcac

SEQ ID NO: 194491 - DNA, 25 bp, probe
ccagtgatgtgtagcacccttgcac

SEQ ID NO: 194492 - DNA, 25 bp, probe
ccagtggagattgcagccttccaaa

SEQ ID NO: 194493 - DNA, 25 bp, probe
ccaggtgacattgcaggtggccatg

SEQ ID NO: 194494 - DNA, 25 bp, probe
ccaggagccaatcagaggcccatgc

SEQ ID NO: 194495 - DNA, 25 bp, probe
ccaggacatagcccagggctgccac

SEQ ID NO: 194496 - DNA, 25 bp, probe
ccaggcacactgctcagtgactcga

SEQ ID NO: 194497 - DNA, 25 bp, probe
ccaggcacactgctcagtgactcga

SEQ ID NO: 194498 - DNA, 25 bp, probe
ccagtacctctaaggactctagaaa

SEQ ID NO: 194499 - DNA, 25 bp, probe
ccagattcctcaagatggattcctg

SEQ ID NO: 194500 - DNA, 25 bp, probe
ccagattcctcaagatggattcctg

SEQ ID NO: 194501 - DNA, 25 bp, probe
gccaggcccctggatgaatatcctg

SEQ ID NO: 194502 - DNA, 25 bp, probe
ccagcccccttataagccaaaagct

SEQ ID NO: 194503 - DNA, 25 bp, probe
ccagacccctctgagtagctaagaa

SEQ ID NO: 194504 - DNA, 25 bp, probe
ccagaaaacttcattagctcaagaa

SEQ ID NO: 194505 - DNA, 25 bp, probe
ccagaaaacttcattagctcaagaa

SEQ ID NO: 194506 - DNA, 25 bp, probe
ccagaatgtcctctgcttggtcaag

SEQ ID NO: 194507 - DNA, 25 bp, probe
ccatggaatccctgctgattgtgca

SEQ ID NO: 194508 - DNA, 25 bp, probe
ccagtatgacccagctgcttggaga

SEQ ID NO: 194509 - DNA, 25 bp, probe
ccaagatagcccgcgaaggcgacac

SEQ ID NO: 194510 - DNA, 25 bp, probe
ccacgaagtcaaggccgagggctac

SEQ ID NO: 194511 - DNA, 25 bp, probe
ccacagaaacccccgagtgttgtgt

SEQ ID NO: 194512 - DNA, 25 bp, probe
ccatggcatgaaccctgccgatatt

SEQ ID NO: 194513 - DNA, 25 bp, probe
ccatggagcatccttctccgatagt

SEQ ID NO: 194514 - DNA, 25 bp, probe
ccatgggccctcacggagaggaagg

SEQ ID NO: 194515 - DNA, 25 bp, probe
ccaggaagccgcacggggtgaagcg

SEQ ID NO: 194516 - DNA, 25 bp, probe
ccaggacgggcccagaggctggggg

SEQ ID NO: 194517 - DNA, 25 bp, probe
ccaggggcttgcccaaggccaagag

SEQ ID NO: 194518 - DNA, 25 bp, probe
ccagggccttactgggcccagagca

SEQ ID NO: 194519 - DNA, 25 bp, probe
ccaagccctgtcttaaggcccaggg

SEQ ID NO: 194520 - DNA, 25 bp, probe
ccaggccctggctaatgggcccgag

SEQ ID NO: 194521 - DNA, 25 bp, probe
ccaggccctgggctaggggcagagc

SEQ ID NO: 194522 - DNA, 25 bp, probe
ccagggcacgtggttgagtgggggg

SEQ ID NO: 194523 - DNA, 25 bp, probe
ccagggcacggcgtgggaggggtag

SEQ ID NO: 194524 - DNA, 25 bp, probe
ccagggaccacgggcgaggacgtga

SEQ ID NO: 194525 - DNA, 25 bp, probe
ccagggaacatcccaggacgtcagt

SEQ ID NO: 194526 - DNA, 25 bp, probe
ccagggcacactgtcggagttctat

SEQ ID NO: 194527 - DNA, 25 bp, probe
ccaggtgcaagcagtccgaggctgc

SEQ ID NO: 194528 - DNA, 25 bp, probe
ccaggtgcaagcagtccgaggctgc

SEQ ID NO: 194529 - DNA, 25 bp, probe
ccagggccagcaactactctgtggc

SEQ ID NO: 194530 - DNA, 25 bp, probe
ccaggactcaggtaacctgcgtgct

SEQ ID NO: 194531 - DNA, 25 bp, probe
ccagtactgcacaaattcctaaggg

SEQ ID NO: 194532 - DNA, 25 bp, probe
ccagtcattactagtacctctgcgg

SEQ ID NO: 194533 - DNA, 25 bp, probe
ccagtcttaaaatccttgcacgttt

SEQ ID NO: 194534 - DNA, 25 bp, probe
ccaaccaagatatcccaggacgttt

SEQ ID NO: 194535 - DNA, 25 bp, probe
gccaggcctagatacgacaaacgtg

SEQ ID NO: 194536 - DNA, 25 bp, probe
gccaggcctagatacgacaaacgtg

SEQ ID NO: 194537 - DNA, 25 bp, probe
ccaggcccagaatcgaatccaatgt

SEQ ID NO: 194538 - DNA, 25 bp, probe
ccatggtcctgtttcgaatcactag

SEQ ID NO: 194539 - DNA, 25 bp, probe
ccaggcagccgtcatcgatgagatt

SEQ ID NO: 194540 - DNA, 25 bp, probe
ccatggccatggcaacatgctcagt

SEQ ID NO: 194541 - DNA, 25 bp, probe
ccatggagacggtacagctgaggaa

SEQ ID NO: 194542 - DNA, 25 bp, probe
ccaggagggagccatcctggctaac

SEQ ID NO: 194543 - DNA, 25 bp, probe
ccaggagtggagcctgcggcttaat

SEQ ID NO: 194544 - DNA, 25 bp, probe
ccaggctttaggcagcagcttgaag

SEQ ID NO: 194545 - DNA, 25 bp, probe
ccagccattttactgcagcagtctg

SEQ ID NO: 194546 - DNA, 25 bp, probe
ccaggctttgtacagagtgcttttc

SEQ ID NO: 194547 - DNA, 25 bp, probe
ccaggttgctgtgttgcagtgcatt

SEQ ID NO: 194548 - DNA, 25 bp, probe
ccagggcttgtgcttgcaggcacaa

SEQ ID NO: 194549 - DNA, 25 bp, probe
ccaggagcaagtcctgtgtggcaaa

SEQ ID NO: 194550 - DNA, 25 bp, probe
ccagggatggctccagttggggatc

SEQ ID NO: 194551 - DNA, 25 bp, probe
ccaggagatgtggaactcgggctgt

SEQ ID NO: 194552 - DNA, 25 bp, probe
ccaggcagatgggagggttgtgctt

SEQ ID NO: 194553 - DNA, 25 bp, probe
ccagagcctggctctgctttgtgct

SEQ ID NO: 194554 - DNA, 25 bp, probe
ccagatgccttctagattcactgtc

SEQ ID NO: 194555 - DNA, 25 bp, probe
ccagttacttgagtgtcactcagca

SEQ ID NO: 194556 - DNA, 25 bp, probe
ccaattcccatgtcagtcatccatg

SEQ ID NO: 194557 - DNA, 25 bp, probe
ccagtttagctggatgctcattcag

SEQ ID NO: 194558 - DNA, 25 bp, probe
ccactggaagcttgtgcacattcat

SEQ ID NO: 194559 - DNA, 25 bp, probe
ccagttgacatttggagtataggca

SEQ ID NO: 194560 - DNA, 25 bp, probe
ccagtcatactctattactaaagca

SEQ ID NO: 194561 - DNA, 25 bp, probe
ccagatatactacaactcaatgcaa

SEQ ID NO: 194562 - DNA, 25 bp, probe
ccaggttctcgtacagccatatgag

SEQ ID NO: 194563 - DNA, 25 bp, probe
ccagaatgctgcagttcagcacaag

SEQ ID NO: 194564 - DNA, 25 bp, probe
ccagtagagcttatacatatcaggt

SEQ ID NO: 194565 - DNA, 25 bp, probe
ccagatcaagctctgcgacttcggc

SEQ ID NO: 194566 - DNA, 25 bp, probe
ccagatcaagctctgcgacttcggc

SEQ ID NO: 194567 - DNA, 25 bp, probe
ccagtgccagtgattgtctctaact

SEQ ID NO: 194568 - DNA, 25 bp, probe
ccaggtagctggagctgatcataaa

SEQ ID NO: 194569 - DNA, 25 bp, probe
ccagtgtgaggtgagctgtaacaga

SEQ ID NO: 194570 - DNA, 25 bp, probe
ccagggtgagcagtacatgaacacc

SEQ ID NO: 194571 - DNA, 25 bp, probe
ccaggaggcagcctccgaaccatgc

SEQ ID NO: 194572 - DNA, 25 bp, probe
ccaggagcgatcgtttgcaacctgc

SEQ ID NO: 194573 - DNA, 25 bp, probe
ccagttggatcagtttgatagaatc

SEQ ID NO: 194574 - DNA, 25 bp, probe
gccagttggaagcattgctagcttc

SEQ ID NO: 194575 - DNA, 25 bp, probe
ccagtcttacatcatggctgacatg

SEQ ID NO: 194576 - DNA, 25 bp, probe
tccaggcctcctatggtaaagacga

SEQ ID NO: 194577 - DNA, 25 bp, probe
ccatggaacactatgtgtattaatc

SEQ ID NO: 194578 - DNA, 25 bp, probe
gccaggataacgaattggaaaagat

SEQ ID NO: 194579 - DNA, 25 bp, probe
ccaggataacgaattggaaaagatc

SEQ ID NO: 194580 - DNA, 25 bp, probe
ccatggcgagaagggtgtgcaagaa

SEQ ID NO: 194581 - DNA, 25 bp, probe
ccaggcaagaacgtgtagcaataaa

SEQ ID NO: 194582 - DNA, 25 bp, probe
ccatggcctgatgtttacagagaaa

SEQ ID NO: 194583 - DNA, 25 bp, probe
ccatggctgcagggtcttccatgaa

SEQ ID NO: 194584 - DNA, 25 bp, probe
ccaggccgagaggcttccacagaag

SEQ ID NO: 194585 - DNA, 25 bp, probe
ccaggcctgatgcagctactataaa

SEQ ID NO: 194586 - DNA, 25 bp, probe
ccatggccatgtcacagggatagat

SEQ ID NO: 194587 - DNA, 25 bp, probe
ccatggcctgcaaccagtggagatt

SEQ ID NO: 194588 - DNA, 25 bp, probe
ccaggcgctacagcaggagtgcatg

SEQ ID NO: 194589 - DNA, 25 bp, probe
ccaggctctagtgcaggaggagaag

SEQ ID NO: 194590 - DNA, 25 bp, probe
ccaggatccattgagacgtatgaac

SEQ ID NO: 194591 - DNA, 25 bp, probe
ccagaatccctccatgaattgatga

SEQ ID NO: 194592 - DNA, 25 bp, probe
ccagagaccctgtttaagagcatcc

SEQ ID NO: 194593 - DNA, 25 bp, probe
ccaggccccagaaacagagatcatc

SEQ ID NO: 194594 - DNA, 25 bp, probe
ccaggcaccgaaaatgctgatgtcc

SEQ ID NO: 194595 - DNA, 25 bp, probe
ccaatggcacccagattgcagttca

SEQ ID NO: 194596 - DNA, 25 bp, probe
ccagatgtcatctctggtcagagtt

SEQ ID NO: 194597 - DNA, 25 bp, probe
ccaggtcttccgatcagtggtgtct

SEQ ID NO: 194598 - DNA, 25 bp, probe
ccagaggcttctgtacagtcaggtc

SEQ ID NO: 194599 - DNA, 25 bp, probe
ccaggcgctttctatacttaatccc

SEQ ID NO: 194600 - DNA, 25 bp, probe
ccagtcagtttttctcttaagtgcc

SEQ ID NO: 194601 - DNA, 25 bp, probe
ccagggatgtcaaaccctgaagtga

SEQ ID NO: 194602 - DNA, 25 bp, probe
ccaggagaaccagctctgagacagg

SEQ ID NO: 194603 - DNA, 25 bp, probe
ccagaagaatcccttctagaaagca

SEQ ID NO: 194604 - DNA, 25 bp, probe
ccagtgtaatcccccaggagaacat

SEQ ID NO: 194605 - DNA, 25 bp, probe
ccagtgtaatcccccaggagaacat

SEQ ID NO: 194606 - DNA, 25 bp, probe
ccagagtcccaccctaatggataca

SEQ ID NO: 194607 - DNA, 25 bp, probe
ccagagtacccagctattaatagaa

SEQ ID NO: 194608 - DNA, 25 bp, probe
ccagcctgtccctgttgtaaggaag

SEQ ID NO: 194609 - DNA, 25 bp, probe
ccagccttacccattgactcaaggg

SEQ ID NO: 194610 - DNA, 25 bp, probe
ccagccttacccattgactcaaggg

SEQ ID NO: 194611 - DNA, 25 bp, probe
ccagtcctgtactttctttcaaggg

SEQ ID NO: 194612 - DNA, 25 bp, probe
ccagtcctgtactttctttcaaggg

SEQ ID NO: 194613 - DNA, 25 bp, probe
ccagtcctgtgaagccattttcagg

SEQ ID NO: 194614 - DNA, 25 bp, probe
ccagtgcctttaggtgagattcagg

SEQ ID NO: 194615 - DNA, 25 bp, probe
ccagtgtcaagaggaaaattcgaga

SEQ ID NO: 194616 - DNA, 25 bp, probe
ccagttcatcgacgagaacccagag

SEQ ID NO: 194617 - DNA, 25 bp, probe
ccaggatctgtctggaggctccagg

SEQ ID NO: 194618 - DNA, 25 bp, probe
ccaggactggcaggacaggtcatca

SEQ ID NO: 194619 - DNA, 25 bp, probe
ccaggactggcaggacaggtcatca

SEQ ID NO: 194620 - DNA, 25 bp, probe
ccaggccaggcagaagctgtgctct

SEQ ID NO: 194621 - DNA, 25 bp, probe
ccaggccaggcagaagctgtgctct

SEQ ID NO: 194622 - DNA, 25 bp, probe
ccaggccaggtggtactgctcctgg

SEQ ID NO: 194623 - DNA, 25 bp, probe
ccaggccaggtggtactgctcctgg

SEQ ID NO: 194624 - DNA, 25 bp, probe
ccagaccagtagtgaccaatcggga

SEQ ID NO: 194625 - DNA, 25 bp, probe
ccagaccagtagtgaccaatcggga

SEQ ID NO: 194626 - DNA, 25 bp, probe
ccagaccccagggacacgaagcaga

SEQ ID NO: 194627 - DNA, 25 bp, probe
ccagccaaccagaagagccctaagg

SEQ ID NO: 194628 - DNA, 25 bp, probe
ccagagcaagccatagacagcctgc

SEQ ID NO: 194629 - DNA, 25 bp, probe
ccaggcaagcacggaacaagctgag

SEQ ID NO: 194630 - DNA, 25 bp, probe
ccaggcagagaactgaagtactggg

SEQ ID NO: 194631 - DNA, 25 bp, probe
ccaggcagagctcggagcctcattg

SEQ ID NO: 194632 - DNA, 25 bp, probe
ccaggcacagtgccaggcagtaggg

SEQ ID NO: 194633 - DNA, 25 bp, probe
ccaggcactggacgtcacagagcag

SEQ ID NO: 194634 - DNA, 25 bp, probe
ccagttctggaggctccagtggctc

SEQ ID NO: 194635 - DNA, 25 bp, probe
ccagattctggctgtccactattgt

SEQ ID NO: 194636 - DNA, 25 bp, probe
ccaggtcatcagggacccattgttc

SEQ ID NO: 194637 - DNA, 25 bp, probe
ccagtggcacaggagactccaagga

SEQ ID NO: 194638 - DNA, 25 bp, probe
ccacggacagggatctcggtggggc

SEQ ID NO: 194639 - DNA, 25 bp, probe
ccacggacagggatctcggtggggc

SEQ ID NO: 194640 - DNA, 25 bp, probe
ccacctagaggtgttcgacgggcga

SEQ ID NO: 194641 - DNA, 25 bp, probe
ccacccaaatgtgtacacctgcggg

SEQ ID NO: 194642 - DNA, 25 bp, probe
ccaccccaggtacaactggcgggag

SEQ ID NO: 194643 - DNA, 25 bp, probe
tcctcttccggaacgagacggtgga

SEQ ID NO: 194644 - DNA, 25 bp, probe
tcgtccttcgtaacggtcagagtga

SEQ ID NO: 194645 - DNA, 25 bp, probe
tccccttcgtaagccaagctgtgtg

SEQ ID NO: 194646 - DNA, 25 bp, probe
ccaccttcaggaaaacggctgcggc

SEQ ID NO: 194647 - DNA, 25 bp, probe
ccaccttttcatattgaggctgcag

SEQ ID NO: 194648 - DNA, 25 bp, probe
ccaccctactttgtgcaggtcatac

SEQ ID NO: 194649 - DNA, 25 bp, probe
ccaccctactttgtgcaggtcatac

SEQ ID NO: 194650 - DNA, 25 bp, probe
ccaccaattttcactgcattttgca

SEQ ID NO: 194651 - DNA, 25 bp, probe
ccaccttaatacagctttgagctca

SEQ ID NO: 194652 - DNA, 25 bp, probe
ccacacttaatataattcgccactt

SEQ ID NO: 194653 - DNA, 25 bp, probe
ccagacctcagtgaaaatggccttg

SEQ ID NO: 194654 - DNA, 25 bp, probe
ccagaccggggaagaacacacagtg

SEQ ID NO: 194655 - DNA, 25 bp, probe
gccaggcgggctcaaggaaaggggg

SEQ ID NO: 194656 - DNA, 25 bp, probe
ccagcgagtggtcaaggatttttat

SEQ ID NO: 194657 - DNA, 25 bp, probe
ccagccagaccctaaggattcctgt

SEQ ID NO: 194658 - DNA, 25 bp, probe
ccagccagaccctaaggattcctgt

SEQ ID NO: 194659 - DNA, 25 bp, probe
ccaggagacccttgtggttgactag

SEQ ID NO: 194660 - DNA, 25 bp, probe
ccaggaaacacgctggctcatgcct

SEQ ID NO: 194661 - DNA, 25 bp, probe
ccaggctacaacaagctgtcctgca

SEQ ID NO: 194662 - DNA, 25 bp, probe
ccagagtactaaacagcttccttca

SEQ ID NO: 194663 - DNA, 25 bp, probe
ccagagtcctgatgcacatcttcca

SEQ ID NO: 194664 - DNA, 25 bp, probe
ccagaacttcttaatcttccatcct

SEQ ID NO: 194665 - DNA, 25 bp, probe
ccagaagctctagctttacccagct

SEQ ID NO: 194666 - DNA, 25 bp, probe
tcaagggctaattacctaaccagct

SEQ ID NO: 194667 - DNA, 25 bp, probe
tccagggcgggatcctgaacctgaa

SEQ ID NO: 194668 - DNA, 25 bp, probe
ccaaggggaagagcgacacctccag

SEQ ID NO: 194669 - DNA, 25 bp, probe
ccaaagggaatagagattctccagg

SEQ ID NO: 194670 - DNA, 25 bp, probe
ccaaccggctcaaggagttcctggg

SEQ ID NO: 194671 - DNA, 25 bp, probe
ccaaactggtctcaaactcctgggc

SEQ ID NO: 194672 - DNA, 25 bp, probe
ccagaagccggtcaagttccaggtt

SEQ ID NO: 194673 - DNA, 25 bp, probe
ccagatcacctggtggaggtaccgt

SEQ ID NO: 194674 - DNA, 25 bp, probe
ccagatcagccgcatcgagtatatc

SEQ ID NO: 194675 - DNA, 25 bp, probe
ccagatgacacctacaggttatcca

SEQ ID NO: 194676 - DNA, 25 bp, probe
ccagtgaccgcgaagctgtctacgc

SEQ ID NO: 194677 - DNA, 25 bp, probe
ccagtgtcaaggaggtgccagccgg

SEQ ID NO: 194678 - DNA, 25 bp, probe
ccactgtcaactatttcaccaagcg

SEQ ID NO: 194679 - DNA, 25 bp, probe
ccacttctagatgtttacccagcag

SEQ ID NO: 194680 - DNA, 25 bp, probe
ccagcttctgaaatatattccccca

SEQ ID NO: 194681 - DNA, 25 bp, probe
ccagctgtagaaaaccaaccaccac

SEQ ID NO: 194682 - DNA, 25 bp, probe
ccagctgtagaaaaccaaccaccac

SEQ ID NO: 194683 - DNA, 25 bp, probe
ccagttggagaccgtcaaccttcaa

SEQ ID NO: 194684 - DNA, 25 bp, probe
ccagcttcaagaggcgtaggtcctc

SEQ ID NO: 194685 - DNA, 25 bp, probe
ccagactcgagagggctgagcccct

SEQ ID NO: 194686 - DNA, 25 bp, probe
ccagacacgaattgtttgccacctc

SEQ ID NO: 194687 - DNA, 25 bp, probe
ccaaccattaaggtccacaccatct

SEQ ID NO: 194688 - DNA, 25 bp, probe
ccagacctaaagctacaaaacatcc

SEQ ID NO: 194689 - DNA, 25 bp, probe
ccagacctagagccaggagaaacca

SEQ ID NO: 194690 - DNA, 25 bp, probe
ccagccctaccgagtgaaggtcatt

SEQ ID NO: 194691 - DNA, 25 bp, probe
ccacccttcccaggtgattgtttag

SEQ ID NO: 194692 - DNA, 25 bp, probe
ccacaccttcctgcgtaatggagga

SEQ ID NO: 194693 - DNA, 25 bp, probe
ccagaccattccgcttcaaggcaga

SEQ ID NO: 194694 - DNA, 25 bp, probe
ccagaattccgcctcttaagggaca

SEQ ID NO: 194695 - DNA, 25 bp, probe
ccagtatctccccttttatgcaggg

SEQ ID NO: 194696 - DNA, 25 bp, probe
ccagtatctccccttttatgcaggg

SEQ ID NO: 194697 - DNA, 25 bp, probe
ccaggattgccactcctgtttcaga

SEQ ID NO: 194698 - DNA, 25 bp, probe
ccaggattgccactcctgtttcaga

SEQ ID NO: 194699 - DNA, 25 bp, probe
ccaggtggtctcctctgacttcaac

SEQ ID NO: 194700 - DNA, 25 bp, probe
ccagtgcgtttcccagaacgaacac

SEQ ID NO: 194701 - DNA, 25 bp, probe
ccagatgttcttcgtaataaaagca

SEQ ID NO: 194702 - DNA, 25 bp, probe
ccagagttttgtggttgagaaagaa

SEQ ID NO: 194703 - DNA, 25 bp, probe
ccaggacttgcttcatgcttgagaa

SEQ ID NO: 194704 - DNA, 25 bp, probe
ccagtgacttgctctgcgatgctgg

SEQ ID NO: 194705 - DNA, 25 bp, probe
ccaggacatcatcaccgtgggtgga

SEQ ID NO: 194706 - DNA, 25 bp, probe
ccagggcacttcgcattgtgaggtt

SEQ ID NO: 194707 - DNA, 25 bp, probe
ccagggcacttcgcattgtgaggtt

SEQ ID NO: 194708 - DNA, 25 bp, probe
ccactgagcactggccgaggtgatg

SEQ ID NO: 194709 - DNA, 25 bp, probe
ccagatgatcgtggtggatggggta

SEQ ID NO: 194710 - DNA, 25 bp, probe
ccaggtcgctgcggggatggtgtac

SEQ ID NO: 194711 - DNA, 25 bp, probe
ccaggatccatggcaggacggtgtg

SEQ ID NO: 194712 - DNA, 25 bp, probe
ccagtgccctgccatggacatatgg

SEQ ID NO: 194713 - DNA, 25 bp, probe
ccagatcctggccacaattgagctg

SEQ ID NO: 194714 - DNA, 25 bp, probe
ccagatcctggacccttgggtgtac

SEQ ID NO: 194715 - DNA, 25 bp, probe
ccagtgttggaattctttggtgtaa

SEQ ID NO: 194716 - DNA, 25 bp, probe
ccagctttggccatcgtggtagtaa

SEQ ID NO: 194717 - DNA, 25 bp, probe
ccagtactggccatctgatggactg

SEQ ID NO: 194718 - DNA, 25 bp, probe
ccagtcacggcttactgcaagagag

SEQ ID NO: 194719 - DNA, 25 bp, probe
ccagtgccctctcactggacagtgg

SEQ ID NO: 194720 - DNA, 25 bp, probe
ccagggtctgcccaaggaagttgct

SEQ ID NO: 194721 - DNA, 25 bp, probe
ccagggtctcgtcaggaggtgcctg

SEQ ID NO: 194722 - DNA, 25 bp, probe
ccagggtctccaaggagacgcctct

SEQ ID NO: 194723 - DNA, 25 bp, probe
ccagggtgtctctaggcatcaccac

SEQ ID NO: 194724 - DNA, 25 bp, probe
ccaggatggagtgagctgcacaccc

SEQ ID NO: 194725 - DNA, 25 bp, probe
ccaggagtagcgggcatctcagcct

SEQ ID NO: 194726 - DNA, 25 bp, probe
ccaggatgtaggacgcccactggct

SEQ ID NO: 194727 - DNA, 25 bp, probe
ccagcgtctacgacggcaagtacct

SEQ ID NO: 194728 - DNA, 25 bp, probe
ccacgtccatcgaggacttcagcga

SEQ ID NO: 194729 - DNA, 25 bp, probe
ccacgtccatcgaggacttcagcga

SEQ ID NO: 194730 - DNA, 25 bp, probe
ccacggcgtctcaggacgtggccaa

SEQ ID NO: 194731 - DNA, 25 bp, probe
ccacggcgtctcaggacgtggccaa

SEQ ID NO: 194732 - DNA, 25 bp, probe
ccagagagcccgaggaggtgtctca

SEQ ID NO: 194733 - DNA, 25 bp, probe
ccagggccatcgtgggtgatgacga

SEQ ID NO: 194734 - DNA, 25 bp, probe
ccagggccatctcttggagtgacaa

SEQ ID NO: 194735 - DNA, 25 bp, probe
ccagggccactgcttgaagaagaat

SEQ ID NO: 194736 - DNA, 25 bp, probe
gccatggtcccgcattggaattact

SEQ ID NO: 194737 - DNA, 25 bp, probe
ccaggtcctcagatgggaattgcac

SEQ ID NO: 194738 - DNA, 25 bp, probe
ccaggtgtctagaggcaacagtgtt

SEQ ID NO: 194739 - DNA, 25 bp, probe
ccagagtgtgggagctaatgggaat

SEQ ID NO: 194740 - DNA, 25 bp, probe
ccagagtgtggcccctaaaggagca

SEQ ID NO: 194741 - DNA, 25 bp, probe
ccaggtggacatccccatggagaac

SEQ ID NO: 194742 - DNA, 25 bp, probe
ccagttccacatcgtcaatggcgca

SEQ ID NO: 194743 - DNA, 25 bp, probe
ccagttccacatcgtcaatggcgca

SEQ ID NO: 194744 - DNA, 25 bp, probe
ccaggtccaagccatcaagtgcttt

SEQ ID NO: 194745 - DNA, 25 bp, probe
ccaggtcacagctctcatcaagctg

SEQ ID NO: 194746 - DNA, 25 bp, probe
ccagattacatgtatctgaggcagc

SEQ ID NO: 194747 - DNA, 25 bp, probe
ccagcaggcaattcataagtcagtc

SEQ ID NO: 194748 - DNA, 25 bp, probe
ccagctgcctatgtaaggccttcta

SEQ ID NO: 194749 - DNA, 25 bp, probe
ccagtctgattttgaagggttctcg

SEQ ID NO: 194750 - DNA, 25 bp, probe
ccagtcagagttcgaaggctttgag

SEQ ID NO: 194751 - DNA, 25 bp, probe
ccagttcgttggatggctcttgaaa

SEQ ID NO: 194752 - DNA, 25 bp, probe
gcacgttcagttacgggagtgggaa

SEQ ID NO: 194753 - DNA, 25 bp, probe
ccagtccagtctactggtgccggga

SEQ ID NO: 194754 - DNA, 25 bp, probe
ccagtgacgtctacagcttcgggat

SEQ ID NO: 194755 - DNA, 25 bp, probe
ccagggcttctttgtgtctgtgttc

SEQ ID NO: 194756 - DNA, 25 bp, probe
ccaggagggcttcgtgtatggacct

SEQ ID NO: 194757 - DNA, 25 bp, probe
ccaggagggcttcgtgtatggacct

SEQ ID NO: 194758 - DNA, 25 bp, probe
ccagtggggttggggtgagcaggct

SEQ ID NO: 194759 - DNA, 25 bp, probe
ccaggatgctggaaggggtgaggcg

SEQ ID NO: 194760 - DNA, 25 bp, probe
ccagttcggctccgaggtggagctg

SEQ ID NO: 194761 - DNA, 25 bp, probe
ccagtttgttcatgtcagtgagagc

SEQ ID NO: 194762 - DNA, 25 bp, probe
ccagtatgtcagttcagtcggaaca

SEQ ID NO: 194763 - DNA, 25 bp, probe
ccaccagtctgtgccacaagcaaag

SEQ ID NO: 194764 - DNA, 25 bp, probe
ccagcccttgacaaaattgtgaagt

SEQ ID NO: 194765 - DNA, 25 bp, probe
ccactccagatagaaaggtcattat

SEQ ID NO: 194766 - DNA, 25 bp, probe
gccacattcggagcagggttttcag

SEQ ID NO: 194767 - DNA, 25 bp, probe
gcgatcacccgaaagcctggtgtct

SEQ ID NO: 194768 - DNA, 25 bp, probe
tcgtacccgtaagctgaagtacctg

SEQ ID NO: 194769 - DNA, 25 bp, probe
ccaccgccggaaactgcaagttccg

SEQ ID NO: 194770 - DNA, 25 bp, probe
ccagcaggcacgttaactcgaattc

SEQ ID NO: 194771 - DNA, 25 bp, probe
ccagcaagcacagatgtacaggtat

SEQ ID NO: 194772 - DNA, 25 bp, probe
ccagcaagcattatatctcagtgta

SEQ ID NO: 194773 - DNA, 25 bp, probe
ccagaggctctaagcatttgatgct

SEQ ID NO: 194774 - DNA, 25 bp, probe
ccagaggctctaagcatttgatgct

SEQ ID NO: 194775 - DNA, 25 bp, probe
ccagagagcatctttgactgtgtct

SEQ ID NO: 194776 - DNA, 25 bp, probe
ccagagagcatgtggcaggcagtgg

SEQ ID NO: 194777 - DNA, 25 bp, probe
ccagacatgagcttgagcaggcagg

SEQ ID NO: 194778 - DNA, 25 bp, probe
ccagcacatccactggagatgctgg

SEQ ID NO: 194779 - DNA, 25 bp, probe
ccagaatcgaatccaatgtgccatc

SEQ ID NO: 194780 - DNA, 25 bp, probe
ccagattgcgctacagctaggccgc

SEQ ID NO: 194781 - DNA, 25 bp, probe
ccagtatgtgctgcagcgattccgc

SEQ ID NO: 194782 - DNA, 25 bp, probe
ccagcagtgtctccaggacatcttg

SEQ ID NO: 194783 - DNA, 25 bp, probe
ccagtgtgatgtcaggccattgtcc

SEQ ID NO: 194784 - DNA, 25 bp, probe
ccagtgacatgccagaggtcttctc

SEQ ID NO: 194785 - DNA, 25 bp, probe
ccagagaacgatttgtcttcattgg

SEQ ID NO: 194786 - DNA, 25 bp, probe
ccagggactggtggtcaagattggt

SEQ ID NO: 194787 - DNA, 25 bp, probe
ccaggtgttggtacatatgatgatt

SEQ ID NO: 194788 - DNA, 25 bp, probe
ccagtgcagtttctaagcatgtagc

SEQ ID NO: 194789 - DNA, 25 bp, probe
ccagtgctggtttaaacattcagca

SEQ ID NO: 194790 - DNA, 25 bp, probe
ccaggtgatgctgaacaaccccaaa

SEQ ID NO: 194791 - DNA, 25 bp, probe
ccaggtgagctgaagacaaaccact

SEQ ID NO: 194792 - DNA, 25 bp, probe
ccaggattcgaaccagcaagctcac

SEQ ID NO: 194793 - DNA, 25 bp, probe
ccagagagtgctcaccacagactac

SEQ ID NO: 194794 - DNA, 25 bp, probe
ccagaagatctcctggcaggcagcc

SEQ ID NO: 194795 - DNA, 25 bp, probe
tccgcatcgtccgtgacgacatgct

SEQ ID NO: 194796 - DNA, 25 bp, probe
ccagatcgacttgatcgtgcagctg

SEQ ID NO: 194797 - DNA, 25 bp, probe
ccagggacatgaagaggctcagctt

SEQ ID NO: 194798 - DNA, 25 bp, probe
ccagggagctgcaagagtgaggctc

SEQ ID NO: 194799 - DNA, 25 bp, probe
ccagatgttgtgacagaatgtagat

SEQ ID NO: 194800 - DNA, 25 bp, probe
ccagatgatctggtatgacatgacc

SEQ ID NO: 194801 - DNA, 25 bp, probe
ccagatgatctggtatgacatgacc

SEQ ID NO: 194802 - DNA, 25 bp, probe
ccagatactgtttgagctgtgcctc

SEQ ID NO: 194803 - DNA, 25 bp, probe
gccgaacgacgggagtcgctgcaga

SEQ ID NO: 194804 - DNA, 25 bp, probe
gcctcaacgacgagacctggtacat

SEQ ID NO: 194805 - DNA, 25 bp, probe
gcctgccaggggagacctgggacct

SEQ ID NO: 194806 - DNA, 25 bp, probe
gctaaagtgggtaggccttggccca

SEQ ID NO: 194807 - DNA, 25 bp, probe
ccagaatgggtgagagccttgagcc

SEQ ID NO: 194808 - DNA, 25 bp, probe
ccagggggacagcagcgctctgctg

SEQ ID NO: 194809 - DNA, 25 bp, probe
ccagcttgggaaatagcccttggtg

SEQ ID NO: 194810 - DNA, 25 bp, probe
ccagctctgagagacgggagtttgg

SEQ ID NO: 194811 - DNA, 25 bp, probe
ccagcttctgcagtgcattgttgat

SEQ ID NO: 194812 - DNA, 25 bp, probe
ccagcttccatctttgtgtatatct

SEQ ID NO: 194813 - DNA, 25 bp, probe
ccagctctgagttcatggatgttaa

SEQ ID NO: 194814 - DNA, 25 bp, probe
ccagctgatgaaggcatctgatgcc

SEQ ID NO: 194815 - DNA, 25 bp, probe
ccagtggagcaggctcagtcactcc

SEQ ID NO: 194816 - DNA, 25 bp, probe
ccagtgtgcagaccacaacctcaaa

SEQ ID NO: 194817 - DNA, 25 bp, probe
ccagtgtggatgaactactcctaca

SEQ ID NO: 194818 - DNA, 25 bp, probe
ccagaatggatgtactacactttat

SEQ ID NO: 194819 - DNA, 25 bp, probe
ccacctggtgaagacgctgtacatg

SEQ ID NO: 194820 - DNA, 25 bp, probe
ccacctggtaaaatcgcacaccaac

SEQ ID NO: 194821 - DNA, 25 bp, probe
gccgccggaaagcgtgccaatcaac

SEQ ID NO: 194822 - DNA, 25 bp, probe
ccagcagccgtaaggtggccaacca

SEQ ID NO: 194823 - DNA, 25 bp, probe
ccagcagccgtaaggtggccaacca

SEQ ID NO: 194824 - DNA, 25 bp, probe
ccagcagcacagccaaggtgcctgc

SEQ ID NO: 194825 - DNA, 25 bp, probe
ccagcagcacgtcgtaggattccat

SEQ ID NO: 194826 - DNA, 25 bp, probe
ccagagacagtacagaatccctgcc

SEQ ID NO: 194827 - DNA, 25 bp, probe
ccagagcctctaattaaccacgcac

SEQ ID NO: 194828 - DNA, 25 bp, probe
ccagagcctctaattaaccacgcac

SEQ ID NO: 194829 - DNA, 25 bp, probe
ccaagtgtaaaataccctcaccaca

SEQ ID NO: 194830 - DNA, 25 bp, probe
ccaagcggaaaataaactccaagca

SEQ ID NO: 194831 - DNA, 25 bp, probe
ccagcagcggacaaataaaactcgc

SEQ ID NO: 194832 - DNA, 25 bp, probe
ccagagagtggcaagcgaaaactag

SEQ ID NO: 194833 - DNA, 25 bp, probe
gccaggacgtcaggctgaccaacac

SEQ ID NO: 194834 - DNA, 25 bp, probe
ccagaacctgcaggcgaaccatatt

SEQ ID NO: 194835 - DNA, 25 bp, probe
ccagaaatggcagggacacttctct

SEQ ID NO: 194836 - DNA, 25 bp, probe
ccactgtgaggctggaatctcccat

SEQ ID NO: 194837 - DNA, 25 bp, probe
ccactgtgaggctggaatctcccat

SEQ ID NO: 194838 - DNA, 25 bp, probe
ccactgtgaagctgggttctcctgt

SEQ ID NO: 194839 - DNA, 25 bp, probe
ccagggaagggggtgctgcagcctg

SEQ ID NO: 194840 - DNA, 25 bp, probe
ccagggaagcgcctgggctcagggc

SEQ ID NO: 194841 - DNA, 25 bp, probe
ccagcaactaggcagggcctgggcc

SEQ ID NO: 194842 - DNA, 25 bp, probe
ccagcaatttgggaggccgaggcag

SEQ ID NO: 194843 - DNA, 25 bp, probe
ccagaacttgcgcaatgccaaccgg

SEQ ID NO: 194844 - DNA, 25 bp, probe
ccagaaattgctcgtatggccctag

SEQ ID NO: 194845 - DNA, 25 bp, probe
ccagaagagctttgctgggccctgg

SEQ ID NO: 194846 - DNA, 25 bp, probe
ccagaggactggggtgactcacggg

SEQ ID NO: 194847 - DNA, 25 bp, probe
ccagatacattccgtgtacatcacg

SEQ ID NO: 194848 - DNA, 25 bp, probe
ccagcatatttccgttgcagccaaa

SEQ ID NO: 194849 - DNA, 25 bp, probe
ccagatacgttgcattgtgccaaca

SEQ ID NO: 194850 - DNA, 25 bp, probe
ccagtgggcattggaggtgccaggg

SEQ ID NO: 194851 - DNA, 25 bp, probe
ccagtggctctgcctagagcccagg

SEQ ID NO: 194852 - DNA, 25 bp, probe
ccagatgcccttcaacctcatgaag

SEQ ID NO: 194853 - DNA, 25 bp, probe
ccagtccactgaaacaccctgagtg

SEQ ID NO: 194854 - DNA, 25 bp, probe
ccagtctaagtcccagtcattgagt

SEQ ID NO: 194855 - DNA, 25 bp, probe
ccagtctaagcagagagactgatgg

SEQ ID NO: 194856 - DNA, 25 bp, probe
ccagagaaagatgcaagacatgtag

SEQ ID NO: 194857 - DNA, 25 bp, probe
ccagaaaatgtgttgctagcctcag

SEQ ID NO: 194858 - DNA, 25 bp, probe
ccagaccaagtcattacccagtctc

SEQ ID NO: 194859 - DNA, 25 bp, probe
ccagaccaaacagaggcttcttcta

SEQ ID NO: 194860 - DNA, 25 bp, probe
ccagcctataatcctaagaacttct

SEQ ID NO: 194861 - DNA, 25 bp, probe
ccagctctaatacattccaactcgt

SEQ ID NO: 194862 - DNA, 25 bp, probe
ccagctctaatacattccaactcgt

SEQ ID NO: 194863 - DNA, 25 bp, probe
ccagctccacagtgttgccagagcc

SEQ ID NO: 194864 - DNA, 25 bp, probe
ccagctattcagtgaccaagggtcg

SEQ ID NO: 194865 - DNA, 25 bp, probe
ccagctattcagtgaccaagggtcg

SEQ ID NO: 194866 - DNA, 25 bp, probe
ccagatgccaaatatgccaaggtga

SEQ ID NO: 194867 - DNA, 25 bp, probe
ccagtgcacacatttcatcaccagg

SEQ ID NO: 194868 - DNA, 25 bp, probe
ccagtgcagacatggtcccaggagc

SEQ ID NO: 194869 - DNA, 25 bp, probe
ccagtgggaggggcccaagatctct

SEQ ID NO: 194870 - DNA, 25 bp, probe
ccagtcgctacagagcccaaatgct

SEQ ID NO: 194871 - DNA, 25 bp, probe
ccagtcgctacagagcccaaatgct

SEQ ID NO: 194872 - DNA, 25 bp, probe
ccagggctacaggatgccccgtgtg

SEQ ID NO: 194873 - DNA, 25 bp, probe
ccagggctacaggatgccccgtgtg

SEQ ID NO: 194874 - DNA, 25 bp, probe
ccagccagtgaagtatccccggggc

SEQ ID NO: 194875 - DNA, 25 bp, probe
ccagaagccatagacgagacgtagg

SEQ ID NO: 194876 - DNA, 25 bp, probe
ccagaagtgttggacgagagcttga

SEQ ID NO: 194877 - DNA, 25 bp, probe
ccagagcggtatctctggcaccaca

SEQ ID NO: 194878 - DNA, 25 bp, probe
ccagagcggtatctctggcaccaca

SEQ ID NO: 194879 - DNA, 25 bp, probe
ccagcagtggttcttgacatcacac

SEQ ID NO: 194880 - DNA, 25 bp, probe
ccagagtggtgggtggcacatgctt

SEQ ID NO: 194881 - DNA, 25 bp, probe
ccagtcttgctggcagtggaaagtc

SEQ ID NO: 194882 - DNA, 25 bp, probe
ccagtcttgctggcagtggaaagtc

SEQ ID NO: 194883 - DNA, 25 bp, probe
ccagtgccctgggggttcagaatat

SEQ ID NO: 194884 - DNA, 25 bp, probe
ccagtgccctgggggttcagaatat

SEQ ID NO: 194885 - DNA, 25 bp, probe
gtcagtccctggatgggtggttacc

SEQ ID NO: 194886 - DNA, 25 bp, probe
ccagcaccctggagcgagggtaccc

SEQ ID NO: 194887 - DNA, 25 bp, probe
ccagaaggctgaacgggaggtgagc

SEQ ID NO: 194888 - DNA, 25 bp, probe
ccaagaagtaccagaaggtggcctg

SEQ ID NO: 194889 - DNA, 25 bp, probe
ccacagtagaagcggtagaggcccg

SEQ ID NO: 194890 - DNA, 25 bp, probe
ccagagctggagggggtgggtccgg

SEQ ID NO: 194891 - DNA, 25 bp, probe
gccagacggaggctttaggacgctg

SEQ ID NO: 194892 - DNA, 25 bp, probe
gccagaccgatgtgtatttaaccag

SEQ ID NO: 194893 - DNA, 25 bp, probe
gccagaccgatgtgtatttaaccag

SEQ ID NO: 194894 - DNA, 25 bp, probe
ccagaccgatgtgtatttaaccagt

SEQ ID NO: 194895 - DNA, 25 bp, probe
ccagtcccgtttcatttagtcatgt

SEQ ID NO: 194896 - DNA, 25 bp, probe
ccagtcactccaggtttcatttttt

SEQ ID NO: 194897 - DNA, 25 bp, probe
tccaatccccagtttgtatttagct

SEQ ID NO: 194898 - DNA, 25 bp, probe
tccaatccccagtttgtatttagct

SEQ ID NO: 194899 - DNA, 25 bp, probe
ccacctgtccaattggttttacatc

SEQ ID NO: 194900 - DNA, 25 bp, probe
ccaccttccagatggttccatggag

SEQ ID NO: 194901 - DNA, 25 bp, probe
ccaacgtgtcagtggtggacctgac

SEQ ID NO: 194902 - DNA, 25 bp, probe
ccagcaccttcaaagggacacctac

SEQ ID NO: 194903 - DNA, 25 bp, probe
ccagggcaccaatgggacctgctac

SEQ ID NO: 194904 - DNA, 25 bp, probe
ccagggcgggatcctgaacctgaac

SEQ ID NO: 194905 - DNA, 25 bp, probe
ccagagacgggcccagaagactaaa

SEQ ID NO: 194906 - DNA, 25 bp, probe
gccagagaaggggccagggctaaaa

SEQ ID NO: 194907 - DNA, 25 bp, probe
ccagagacgggcgagcagattcaga

SEQ ID NO: 194908 - DNA, 25 bp, probe
ccagaggcgcagcaagagaccgatc

SEQ ID NO: 194909 - DNA, 25 bp, probe
ccagaggccactaagagacacaggg

SEQ ID NO: 194910 - DNA, 25 bp, probe
ccagctggtcacccagatgacatca

SEQ ID NO: 194911 - DNA, 25 bp, probe
ccagctggatcgccatctatgagaa

SEQ ID NO: 194912 - DNA, 25 bp, probe
ccagcatagcactcatcgcatgagg

SEQ ID NO: 194913 - DNA, 25 bp, probe
ccaatgctgcagagcagtcaggctg

SEQ ID NO: 194914 - DNA, 25 bp, probe
ccagaggagggcacaggctggctgc

SEQ ID NO: 194915 - DNA, 25 bp, probe
ccagagggagggccatgggccgagg

SEQ ID NO: 194916 - DNA, 25 bp, probe
ccagagggtttccatggggtaggag

SEQ ID NO: 194917 - DNA, 25 bp, probe
ccagcagtggctgatttgggggaga

SEQ ID NO: 194918 - DNA, 25 bp, probe
ccagcagtacgaatgcgtggcggag

SEQ ID NO: 194919 - DNA, 25 bp, probe
ccagatctcagtaaggtacggagta

SEQ ID NO: 194920 - DNA, 25 bp, probe
ccagactcaggcagggactggagtg

SEQ ID NO: 194921 - DNA, 25 bp, probe
ccagacctcagcgtgtgggctgaga

SEQ ID NO: 194922 - DNA, 25 bp, probe
ccagacactccagggatcagtagtt

SEQ ID NO: 194923 - DNA, 25 bp, probe
ccagagcgttaccctcaatagctat

SEQ ID NO: 194924 - DNA, 25 bp, probe
ccaagttagtcgctccttgctaacc

SEQ ID NO: 194925 - DNA, 25 bp, probe
ccaaattttgcgctcggtgcgatac

SEQ ID NO: 194926 - DNA, 25 bp, probe
ccagagtgttctgcgtgggtggtga

SEQ ID NO: 194927 - DNA, 25 bp, probe
ccagatgcaatgatccttgtggatg

SEQ ID NO: 194928 - DNA, 25 bp, probe
ccagtgcagtctactttgctgaggt

SEQ ID NO: 194929 - DNA, 25 bp, probe
ccagaatgtttccgtgctacacttt

SEQ ID NO: 194930 - DNA, 25 bp, probe
ccagaatgtgtcactgtcttacctt

SEQ ID NO: 194931 - DNA, 25 bp, probe
ccagaatgtgtcactgtcttacctt

SEQ ID NO: 194932 - DNA, 25 bp, probe
ccagaatgtgatctcttctttccac

SEQ ID NO: 194933 - DNA, 25 bp, probe
ccagaagtgcagcctttgttattgc

SEQ ID NO: 194934 - DNA, 25 bp, probe
ccagatggtgaccctgttgctgagt

SEQ ID NO: 194935 - DNA, 25 bp, probe
ccagtggagagatctggcctcagct

SEQ ID NO: 194936 - DNA, 25 bp, probe
ccagagtgaagaccattgcccgggg

SEQ ID NO: 194937 - DNA, 25 bp, probe
ccagatgccaagatcctgcctctgg

SEQ ID NO: 194938 - DNA, 25 bp, probe
ccagatgccgataaaggcccctggt

SEQ ID NO: 194939 - DNA, 25 bp, probe
ccagacacagatccagaggggccgc

SEQ ID NO: 194940 - DNA, 25 bp, probe
ccagaacgcagactgcaggggccgc

SEQ ID NO: 194941 - DNA, 25 bp, probe
ccagcaaggagatgcggcgggcctt

SEQ ID NO: 194942 - DNA, 25 bp, probe
ccagcaaggagttcaagcgcgcttt

SEQ ID NO: 194943 - DNA, 25 bp, probe
ccagcaacgcgaggaaggcctgtac

SEQ ID NO: 194944 - DNA, 25 bp, probe
ccaaatcggggattggtgagccagc

SEQ ID NO: 194945 - DNA, 25 bp, probe
ccagtgacggcaggaacgtggacaa

SEQ ID NO: 194946 - DNA, 25 bp, probe
ccagtgtcttccagcacggagacaa

SEQ ID NO: 194947 - DNA, 25 bp, probe
ccagctcctcccagaaggacaaggc

SEQ ID NO: 194948 - DNA, 25 bp, probe
ccagtccccctaagagagcacctgg

SEQ ID NO: 194949 - DNA, 25 bp, probe
ccagtccacaagttgaagagggcga

SEQ ID NO: 194950 - DNA, 25 bp, probe
ccagtacacatcgtatggggtgaca

SEQ ID NO: 194951 - DNA, 25 bp, probe
ccagtacatctacatggtaatggag

SEQ ID NO: 194952 - DNA, 25 bp, probe
ccagatacacccaaagtatcaggac

SEQ ID NO: 194953 - DNA, 25 bp, probe
ccagtgtcaccaggaacctcggaga

SEQ ID NO: 194954 - DNA, 25 bp, probe
ccagtatccagcgggaactcagggt

SEQ ID NO: 194955 - DNA, 25 bp, probe
ccagttgccagggcaagtcactgcg

SEQ ID NO: 194956 - DNA, 25 bp, probe
ccagattccaaggacctcacgatgg

SEQ ID NO: 194957 - DNA, 25 bp, probe
ccagtctcagcaagacatcctacaa

SEQ ID NO: 194958 - DNA, 25 bp, probe
ccagctctcagcaacttcatataag

SEQ ID NO: 194959 - DNA, 25 bp, probe
ccagtgcctgagactgtcagaagtt

SEQ ID NO: 194960 - DNA, 25 bp, probe
ccagatatctagcccacagagtttg

SEQ ID NO: 194961 - DNA, 25 bp, probe
ccagatttagcttactgagtttaaa

SEQ ID NO: 194962 - DNA, 25 bp, probe
ccagttattgcctaatacttatttc

SEQ ID NO: 194963 - DNA, 25 bp, probe
ccacttatccctatactagtaatca

SEQ ID NO: 194964 - DNA, 25 bp, probe
ccacctactgctcttactgcaggaa

SEQ ID NO: 194965 - DNA, 25 bp, probe
ccaccagtcacggcttactgcaaga

SEQ ID NO: 194966 - DNA, 25 bp, probe
ccaccccatactggatcctgaagaa

SEQ ID NO: 194967 - DNA, 25 bp, probe
ccaccgcctactggcaaggaagaac

SEQ ID NO: 194968 - DNA, 25 bp, probe
ccagttgcactattctgagggaaaa

SEQ ID NO: 194969 - DNA, 25 bp, probe
ccagcttgaacatctagaattccta

SEQ ID NO: 194970 - DNA, 25 bp, probe
ccacgtcatgtctctaaactgcggt

SEQ ID NO: 194971 - DNA, 25 bp, probe
ccagcgactgtctcagactgggcag

SEQ ID NO: 194972 - DNA, 25 bp, probe
ccagcgcctccaaaacggaggtctc

SEQ ID NO: 194973 - DNA, 25 bp, probe
ccagccaagccagggacttgttgtc

SEQ ID NO: 194974 - DNA, 25 bp, probe
ccactgaatcgctggactgtgaagt

SEQ ID NO: 194975 - DNA, 25 bp, probe
ccagctacatcctgggatggggttt

SEQ ID NO: 194976 - DNA, 25 bp, probe
ccagctatctataagggttgcgttg

SEQ ID NO: 194977 - DNA, 25 bp, probe
ccagttctactatggctgagttctg

SEQ ID NO: 194978 - DNA, 25 bp, probe
ccagttctcagcatagccgagatca

SEQ ID NO: 194979 - DNA, 25 bp, probe
ccagcttccagaatatccgcattga

SEQ ID NO: 194980 - DNA, 25 bp, probe
ccagtctccgagagcggattgagtt

SEQ ID NO: 194981 - DNA, 25 bp, probe
ccagttccagagacctgggggtgtg

SEQ ID NO: 194982 - DNA, 25 bp, probe
ccagaccgaggtctgagcgggtggg

SEQ ID NO: 194983 - DNA, 25 bp, probe
ccagtctcaggtccgagagcggggg

SEQ ID NO: 194984 - DNA, 25 bp, probe
ccagcttcagggccgagtacaaggc

SEQ ID NO: 194985 - DNA, 25 bp, probe
ccagcttcagggccgagtacaaggc

SEQ ID NO: 194986 - DNA, 25 bp, probe
ccagagctcagggacgcattcaaaa

SEQ ID NO: 194987 - DNA, 25 bp, probe
ccagagctcagggacgcattcaaaa

SEQ ID NO: 194988 - DNA, 25 bp, probe
ccagcagctcaccatggctttaaaa

SEQ ID NO: 194989 - DNA, 25 bp, probe
ccagcctaccacctatagacaaagc

SEQ ID NO: 194990 - DNA, 25 bp, probe
ccacttttcctttaggctaagactg

SEQ ID NO: 194991 - DNA, 25 bp, probe
ccacctatccctaacaggctgtaga

SEQ ID NO: 194992 - DNA, 25 bp, probe
ccagcactaccttcaacatcgtggg

SEQ ID NO: 194993 - DNA, 25 bp, probe
ccagatgctcccaaaatatcacgga

SEQ ID NO: 194994 - DNA, 25 bp, probe
ccagatcccatcacagtttggcgat

SEQ ID NO: 194995 - DNA, 25 bp, probe
ccagtctttcttgttatgacctcta

SEQ ID NO: 194996 - DNA, 25 bp, probe
ccagtccttcgtcaaagactgcctt

SEQ ID NO: 194997 - DNA, 25 bp, probe
ccagatccttcgagcaattgactat

SEQ ID NO: 194998 - DNA, 25 bp, probe
ccagttcaacgcagccaatgacatt

SEQ ID NO: 194999 - DNA, 25 bp, probe
ccagtaaaattttctatgacattcc

SEQ ID NO: 195000 - DNA, 25 bp, probe
ccaccaataatcatctcattgactt

SEQ ID NO: 195001 - DNA, 25 bp, probe
ccagttgtacctaatcacagactat

SEQ ID NO: 195002 - DNA, 25 bp, probe
ccagttgtgcacttttacaagccgc

SEQ ID NO: 195003 - DNA, 25 bp, probe
ccagctgttttttgaactagccctt

SEQ ID NO: 195004 - DNA, 25 bp, probe
ccaccctgttttcagctaaagccca

SEQ ID NO: 195005 - DNA, 25 bp, probe
ccaccgtgttttcatctttgttcac

SEQ ID NO: 195006 - DNA, 25 bp, probe
ccaccgtgttttcatctttgttcac

SEQ ID NO: 195007 - DNA, 25 bp, probe
ccagcttgtctttttactctttgct

SEQ ID NO: 195008 - DNA, 25 bp, probe
ccagaactttggtcacctgcttgtt

SEQ ID NO: 195009 - DNA, 25 bp, probe
ccagcacttttgaccaagtcctgct

SEQ ID NO: 195010 - DNA, 25 bp, probe
ccagatttttcactagcgtacatct

SEQ ID NO: 195011 - DNA, 25 bp, probe
ccagagcttttccttgcaggagcgt

SEQ ID NO: 195012 - DNA, 25 bp, probe
ccagactatatcgctccagagatcc

SEQ ID NO: 195013 - DNA, 25 bp, probe
ccagagctcttctctgtgcagagtc

SEQ ID NO: 195014 - DNA, 25 bp, probe
ccagagctgctcacggagaagtccg

SEQ ID NO: 195015 - DNA, 25 bp, probe
ccagagatgcgcacctagtgagccg

SEQ ID NO: 195016 - DNA, 25 bp, probe
ccagaacgcccactatgagagccaa

SEQ ID NO: 195017 - DNA, 25 bp, probe
ccagaagagccgcaaggaccagatc

SEQ ID NO: 195018 - DNA, 25 bp, probe
ccagaaactcatcaaatgaacagac

SEQ ID NO: 195019 - DNA, 25 bp, probe
ccagaaacatatgggctgataaacc

SEQ ID NO: 195020 - DNA, 25 bp, probe
gctagattttctgcggaaaagccgg

SEQ ID NO: 195021 - DNA, 25 bp, probe
gcgactttggcctggccaaagccga

SEQ ID NO: 195022 - DNA, 25 bp, probe
gctactttcccagtaaaaggcctga

SEQ ID NO: 195023 - DNA, 25 bp, probe
ccacctactccaagagtaagttctg

SEQ ID NO: 195024 - DNA, 25 bp, probe
ccacgaactacaactgaatcagtcc

SEQ ID NO: 195025 - DNA, 25 bp, probe
ccagccaactaccagaaattaccct

SEQ ID NO: 195026 - DNA, 25 bp, probe
ccagacagtccagattttctaccct

SEQ ID NO: 195027 - DNA, 25 bp, probe
ccagaagatcgagcagtgtgactac

SEQ ID NO: 195028 - DNA, 25 bp, probe
ccagcaagatgaaacagggcacccc

SEQ ID NO: 195029 - DNA, 25 bp, probe
ccaccaagatgagcagggcccttgc

SEQ ID NO: 195030 - DNA, 25 bp, probe
ccactgaatgaaactggagaagttg

SEQ ID NO: 195031 - DNA, 25 bp, probe
ccagctgtatggtcttgggaggact

SEQ ID NO: 195032 - DNA, 25 bp, probe
ccagctgtatggtcttgggaggact

SEQ ID NO: 195033 - DNA, 25 bp, probe
ccagagtcaaccttgggtgatgcct

SEQ ID NO: 195034 - DNA, 25 bp, probe
ccagagctcaaccagaagggataca

SEQ ID NO: 195035 - DNA, 25 bp, probe
ccagactcaaggagaggcagattca

SEQ ID NO: 195036 - DNA, 25 bp, probe
ccagatcacaaggggcaggagagtc

SEQ ID NO: 195037 - DNA, 25 bp, probe
ccagatcacaaggggcaggagagtc

SEQ ID NO: 195038 - DNA, 25 bp, probe
ccagtcaatgcatcggcagggaatg

SEQ ID NO: 195039 - DNA, 25 bp, probe
ccagctagagcttcggggggatgtg

SEQ ID NO: 195040 - DNA, 25 bp, probe
ccagctagagcttcggggggatgtg

SEQ ID NO: 195041 - DNA, 25 bp, probe
ccagctagagcttcggggggatgtg

SEQ ID NO: 195042 - DNA, 25 bp, probe
ccagcacccttcgttggaggagctg

SEQ ID NO: 195043 - DNA, 25 bp, probe
ccagcgtcacttctgctaaggaggg

SEQ ID NO: 195044 - DNA, 25 bp, probe
ccagcgacacctggatgttcggggt

SEQ ID NO: 195045 - DNA, 25 bp, probe
ccacgaccacattgagttggagtgt

SEQ ID NO: 195046 - DNA, 25 bp, probe
ccagcaaccatgatgaagtgaatgg

SEQ ID NO: 195047 - DNA, 25 bp, probe
ccagcaacatgagggaaataagcaa

SEQ ID NO: 195048 - DNA, 25 bp, probe
ccagagactctgggaaatggacaag

SEQ ID NO: 195049 - DNA, 25 bp, probe
ccagagacatctatgaaacggatta

SEQ ID NO: 195050 - DNA, 25 bp, probe
ccacgaccttctgtacggatttgct

SEQ ID NO: 195051 - DNA, 25 bp, probe
ccacagtcatttcttctaggttttc

SEQ ID NO: 195052 - DNA, 25 bp, probe
ccagcagaatttgccctacggtgtg

SEQ ID NO: 195053 - DNA, 25 bp, probe
ccagcagaatttgccctacggtgtg

SEQ ID NO: 195054 - DNA, 25 bp, probe
ccacgtttcagaccagcttctgggg

SEQ ID NO: 195055 - DNA, 25 bp, probe
ccactttgtcaagctcatttcctgg

SEQ ID NO: 195056 - DNA, 25 bp, probe
ccacttttcaagctctcttgttctg

SEQ ID NO: 195057 - DNA, 25 bp, probe
ccactttcaactcttgagtttttca

SEQ ID NO: 195058 - DNA, 25 bp, probe
ccagcattacagaaccttggttatt

SEQ ID NO: 195059 - DNA, 25 bp, probe
ccagcgatgtacgcactgtcagtta

SEQ ID NO: 195060 - DNA, 25 bp, probe
ccagctgtatgaggagagcttcagg

SEQ ID NO: 195061 - DNA, 25 bp, probe
ccagctgctaaaaggcctcggattc

SEQ ID NO: 195062 - DNA, 25 bp, probe
ccactgccaaagccgcttcatgaga

SEQ ID NO: 195063 - DNA, 25 bp, probe
ccagcctaccaggcaggtctgcaga

SEQ ID NO: 195064 - DNA, 25 bp, probe
ccacctaacactcgagttggcacca

SEQ ID NO: 195065 - DNA, 25 bp, probe
ccacctgacggtgatcttgggcaga

SEQ ID NO: 195066 - DNA, 25 bp, probe
ccagcctagaggtggcttctggcag

SEQ ID NO: 195067 - DNA, 25 bp, probe
ccagctcagaggcttggcatttgcc

SEQ ID NO: 195068 - DNA, 25 bp, probe
ccagccagaggccaatgctcagaga

SEQ ID NO: 195069 - DNA, 25 bp, probe
ccagcctgggcgacagagcgagact

SEQ ID NO: 195070 - DNA, 25 bp, probe
ccagcgaggggcagactggctctgg

SEQ ID NO: 195071 - DNA, 25 bp, probe
ccagaagggcccgttcagtgtggtg

SEQ ID NO: 195072 - DNA, 25 bp, probe
ccagacctgcccggaacagagggtg

SEQ ID NO: 195073 - DNA, 25 bp, probe
ccagacctgcccggaacagagggtg

SEQ ID NO: 195074 - DNA, 25 bp, probe
ccagatcctgaaagtgaccggggtg

SEQ ID NO: 195075 - DNA, 25 bp, probe
ccagatcatcgggggccgggaggtg

SEQ ID NO: 195076 - DNA, 25 bp, probe
ccagatctacggtttcgagggtgag

SEQ ID NO: 195077 - DNA, 25 bp, probe
ccagatctacggtttcgagggtgag

SEQ ID NO: 195078 - DNA, 25 bp, probe
ccagatctcggtgaacgtggaggac

SEQ ID NO: 195079 - DNA, 25 bp, probe
ccagaaccgctacacagcggaagag

SEQ ID NO: 195080 - DNA, 25 bp, probe
ccagagccccttctatggagataag

SEQ ID NO: 195081 - DNA, 25 bp, probe
ccagagccccttctatggagataag

SEQ ID NO: 195082 - DNA, 25 bp, probe
ccagactcctttcctctgaggaaga

SEQ ID NO: 195083 - DNA, 25 bp, probe
ccagaactgcattagccgctgagga

SEQ ID NO: 195084 - DNA, 25 bp, probe
ccagataagacccaagtgcccatgg

SEQ ID NO: 195085 - DNA, 25 bp, probe
ccagtatggagctgattgcccctgg

SEQ ID NO: 195086 - DNA, 25 bp, probe
ccagatagtgcctgaatcccagctc

SEQ ID NO: 195087 - DNA, 25 bp, probe
ccagatcaggccttggcctctgagc

SEQ ID NO: 195088 - DNA, 25 bp, probe
ccagacaggtcagtggtcaatgcct

SEQ ID NO: 195089 - DNA, 25 bp, probe
ccagcctggtatggagtccagtcta

SEQ ID NO: 195090 - DNA, 25 bp, probe
ccactgggttgggattatgctgctg

SEQ ID NO: 195091 - DNA, 25 bp, probe
ccaccgagtttgcggtgcgctctgg

SEQ ID NO: 195092 - DNA, 25 bp, probe
ccacgcattgtaagttggtccccgt

SEQ ID NO: 195093 - DNA, 25 bp, probe
ccagccacttgggttggttaaggtg

SEQ ID NO: 195094 - DNA, 25 bp, probe
ccactcggtgctgttgggtaggggc

SEQ ID NO: 195095 - DNA, 25 bp, probe
ccactcggtgctgttgggtaggggc

SEQ ID NO: 195096 - DNA, 25 bp, probe
ccactcggtgctgttgggtaggggc

SEQ ID NO: 195097 - DNA, 25 bp, probe
ccacctctgtgtgattggactcgtt

SEQ ID NO: 195098 - DNA, 25 bp, probe
ccactctcgttccattggtacaaat

SEQ ID NO: 195099 - DNA, 25 bp, probe
ccactctcgttccattggtacaaat

SEQ ID NO: 195100 - DNA, 25 bp, probe
ccactgtgagccctttggtgctaat

SEQ ID NO: 195101 - DNA, 25 bp, probe
ccagctgtgagatgctgcgctggcc

SEQ ID NO: 195102 - DNA, 25 bp, probe
ccagctgtgagatgctgcgctggcc

SEQ ID NO: 195103 - DNA, 25 bp, probe
ccagcaggtacagtgcctggtgcca

SEQ ID NO: 195104 - DNA, 25 bp, probe
ccagatggacgctttcatgcggcgc

SEQ ID NO: 195105 - DNA, 25 bp, probe
ccagaggagcagtactcaagccgca

SEQ ID NO: 195106 - DNA, 25 bp, probe
ccagaggatgaatatgatgtcctca

SEQ ID NO: 195107 - DNA, 25 bp, probe
ccagcagctgaaaccaattggctct

SEQ ID NO: 195108 - DNA, 25 bp, probe
ccactgtgaagaacaccatggtgtg

SEQ ID NO: 195109 - DNA, 25 bp, probe
ccagctttcactacaccatcatggt

SEQ ID NO: 195110 - DNA, 25 bp, probe
ccagctcctgcagtacgaatctgag

SEQ ID NO: 195111 - DNA, 25 bp, probe
ccagcaattgcccatcgagatctga

SEQ ID NO: 195112 - DNA, 25 bp, probe
ccaccatgtgcacgatgggctcagc

SEQ ID NO: 195113 - DNA, 25 bp, probe
ccagctcatgtccaatgtggatgca

SEQ ID NO: 195114 - DNA, 25 bp, probe
ccagcagagtcactttgacaatggg

SEQ ID NO: 195115 - DNA, 25 bp, probe
ccactggtccccaacaatgtgaggg

SEQ ID NO: 195116 - DNA, 25 bp, probe
ccacttcccaggtaagcaggaggag

SEQ ID NO: 195117 - DNA, 25 bp, probe
ccaagatcccggtcaagtggacagc

SEQ ID NO: 195118 - DNA, 25 bp, probe
ccagagatccttgatgcggtggagg

SEQ ID NO: 195119 - DNA, 25 bp, probe
ccagaggccttgccaggaggcctgc

SEQ ID NO: 195120 - DNA, 25 bp, probe
ccagaggccttcctggagggcatct

SEQ ID NO: 195121 - DNA, 25 bp, probe
ccaccggcttgcctggtggtttgca

SEQ ID NO: 195122 - DNA, 25 bp, probe
ccacgaagctaccttttgggatgat

SEQ ID NO: 195123 - DNA, 25 bp, probe
ccacgaagctaccttttgggatgat

SEQ ID NO: 195124 - DNA, 25 bp, probe
ccacgttctacgataagcattgtga

SEQ ID NO: 195125 - DNA, 25 bp, probe
ccagcggtccacattagagttgaaa

SEQ ID NO: 195126 - DNA, 25 bp, probe
ccagcggttctcaaacggtacacag

SEQ ID NO: 195127 - DNA, 25 bp, probe
ccagcggttctcaaacggtacacag

SEQ ID NO: 195128 - DNA, 25 bp, probe
ccagctgggtctgacaaggacccgt

SEQ ID NO: 195129 - DNA, 25 bp, probe
ccagctgaggtggcttcacagattc

SEQ ID NO: 195130 - DNA, 25 bp, probe
ccagcaggtgggctgcctgctgctc

SEQ ID NO: 195131 - DNA, 25 bp, probe
ccagagggcgtggagcgcatcgacg

SEQ ID NO: 195132 - DNA, 25 bp, probe
ccagaggtgagggcagcacacccgc

SEQ ID NO: 195133 - DNA, 25 bp, probe
ccagaggtgagggcagcacacccgc

SEQ ID NO: 195134 - DNA, 25 bp, probe
ccagagcaggtgcgcaggcacctcc

SEQ ID NO: 195135 - DNA, 25 bp, probe
ccagagcaggtgcgcaggcacctcc

SEQ ID NO: 195136 - DNA, 25 bp, probe
ccaccagggctccaggagcctcatc

SEQ ID NO: 195137 - DNA, 25 bp, probe
ccacttgtgtccatggagcatcctt

SEQ ID NO: 195138 - DNA, 25 bp, probe
ccacgctgtgtatcgcgtacctgat

SEQ ID NO: 195139 - DNA, 25 bp, probe
ccacgctgtgtatcgcgtacctgat

SEQ ID NO: 195140 - DNA, 25 bp, probe
ccacgctgtgtatcgcgtacctgat

SEQ ID NO: 195141 - DNA, 25 bp, probe
ccaccctttttggcaagctcagaag

SEQ ID NO: 195142 - DNA, 25 bp, probe
ccaaagtgtttacctaatcagtagg

SEQ ID NO: 195143 - DNA, 25 bp, probe
ccagaactcttttcttagaagggag

SEQ ID NO: 195144 - DNA, 25 bp, probe
ccagaacttcccgtatatgaatgat

SEQ ID NO: 195145 - DNA, 25 bp, probe
ccaacaaccctggatgaatgaatga

SEQ ID NO: 195146 - DNA, 25 bp, probe
ccaacaaccctggatgaatgaatga

SEQ ID NO: 195147 - DNA, 25 bp, probe
ccagaccacttctcagaaaatgcag

SEQ ID NO: 195148 - DNA, 25 bp, probe
ccaccaacttcatcagagagtagct

SEQ ID NO: 195149 - DNA, 25 bp, probe
ccacaacacccatccaaggaatggc

SEQ ID NO: 195150 - DNA, 25 bp, probe
ccagcaatactcagcccaagaattt

SEQ ID NO: 195151 - DNA, 25 bp, probe
ccagcaacctctacatccaggaatg

SEQ ID NO: 195152 - DNA, 25 bp, probe
ccagcagaccctgtccaggaggaag

SEQ ID NO: 195153 - DNA, 25 bp, probe
ccacgaccccgacgggggcaagatg

SEQ ID NO: 195154 - DNA, 25 bp, probe
ccaccagccccgagggcgaggtggt

SEQ ID NO: 195155 - DNA, 25 bp, probe
ccaccagccccgagggcgaggtggt

SEQ ID NO: 195156 - DNA, 25 bp, probe
ccacaccctccgaggcaaagggcag

SEQ ID NO: 195157 - DNA, 25 bp, probe
ccacccttcaggcgagcaactgggg

SEQ ID NO: 195158 - DNA, 25 bp, probe
ccactggcttaggcgggagcctggg

SEQ ID NO: 195159 - DNA, 25 bp, probe
ccacatccttagtcaaccagttgca

SEQ ID NO: 195160 - DNA, 25 bp, probe
ccactcactttgcaatagccgtgca

SEQ ID NO: 195161 - DNA, 25 bp, probe
ccaccctgtgtctgacgacagtgac

SEQ ID NO: 195162 - DNA, 25 bp, probe
ccaccactgggcaaacagaagaatt

SEQ ID NO: 195163 - DNA, 25 bp, probe
ccaccacgcccgacagtaaatatgt

SEQ ID NO: 195164 - DNA, 25 bp, probe
ccagcaccacctcatactaagaatt

SEQ ID NO: 195165 - DNA, 25 bp, probe
ccagcaccacctcatactaagaatt

SEQ ID NO: 195166 - DNA, 25 bp, probe
ccacctgccagtctcgtaagagatg

SEQ ID NO: 195167 - DNA, 25 bp, probe
ccagacgccaggctacgagatggac

SEQ ID NO: 195168 - DNA, 25 bp, probe
ccagaagccaggcacactgctcagt

SEQ ID NO: 195169 - DNA, 25 bp, probe
ccagaacacactccatcagcttagg

SEQ ID NO: 195170 - DNA, 25 bp, probe
ccagaagacccaggcagtgtaggcg

SEQ ID NO: 195171 - DNA, 25 bp, probe
ccagccagacacctgggtcttgagc

SEQ ID NO: 195172 - DNA, 25 bp, probe
ccagcatcgacatgtgggctgtggg

SEQ ID NO: 195173 - DNA, 25 bp, probe
ccagagctgccaaggtggcacaggg

SEQ ID NO: 195174 - DNA, 25 bp, probe
ccagagctgcctgcacttacaggcg

SEQ ID NO: 195175 - DNA, 25 bp, probe
ccagactccatggcaaaacaacata

SEQ ID NO: 195176 - DNA, 25 bp, probe
ccagactccatggcaaaacaacata

SEQ ID NO: 195177 - DNA, 25 bp, probe
ccagatgcaccggcagaaagcagat

SEQ ID NO: 195178 - DNA, 25 bp, probe
ccaccatcctgagcacatatcagct

SEQ ID NO: 195179 - DNA, 25 bp, probe
ccacgaagcatgttcagcattcagg

SEQ ID NO: 195180 - DNA, 25 bp, probe
ccacgattgtgacagcgtatgtgat

SEQ ID NO: 195181 - DNA, 25 bp, probe
ccagctggtgtgtgcaggacagttc

SEQ ID NO: 195182 - DNA, 25 bp, probe
ccagctggtgtgtgcaggacagttc

SEQ ID NO: 195183 - DNA, 25 bp, probe
ccagctggagctaggaacacttacc

SEQ ID NO: 195184 - DNA, 25 bp, probe
ccagctggccttcaccagctaatgt

SEQ ID NO: 195185 - DNA, 25 bp, probe
ccagcggcatcctcggggagatgct

SEQ ID NO: 195186 - DNA, 25 bp, probe
ccacgtgacagtgcctgggaatgta

SEQ ID NO: 195187 - DNA, 25 bp, probe
ccacgtccattgacttgtggtcagc

SEQ ID NO: 195188 - DNA, 25 bp, probe
ccacgcgaatctgtttgcgtccttc

SEQ ID NO: 195189 - DNA, 25 bp, probe
ccacgcaaagtgatgtatggtcttt

SEQ ID NO: 195190 - DNA, 25 bp, probe
ccacccatggtgatggatggtttgg

SEQ ID NO: 195191 - DNA, 25 bp, probe
ccagcacgtgggagtgatgtgttgg

SEQ ID NO: 195192 - DNA, 25 bp, probe
ccagctcctggcgataatgtgtgtc

SEQ ID NO: 195193 - DNA, 25 bp, probe
ccagagctcatggcgaagagacttg

SEQ ID NO: 195194 - DNA, 25 bp, probe
ccagcatctctatgccaagattctg

SEQ ID NO: 195195 - DNA, 25 bp, probe
ccagcccagaacgtcagaatcgtta

SEQ ID NO: 195196 - DNA, 25 bp, probe
ccacatccaaaagtccagacgtttc

SEQ ID NO: 195197 - DNA, 25 bp, probe
ccacatccaaaagtccagacgtttc

SEQ ID NO: 195198 - DNA, 25 bp, probe
ccagatgacaaccagacggacagtg

SEQ ID NO: 195199 - DNA, 25 bp, probe
ccagagaaacgacaccagcagagat

SEQ ID NO: 195200 - DNA, 25 bp, probe
ccagagaatccctaacccaagctgg

SEQ ID NO: 195201 - DNA, 25 bp, probe
ccagaagagcccttatgacccctgg

SEQ ID NO: 195202 - DNA, 25 bp, probe
ccagagcaagcgctgtaaaccctga

SEQ ID NO: 195203 - DNA, 25 bp, probe
ccagagcaagcgctgtaaaccctga

SEQ ID NO: 195204 - DNA, 25 bp, probe
ccagctcaagctgtacaaatttgta

SEQ ID NO: 195205 - DNA, 25 bp, probe
ccagctcacgtgtattctattttgc

SEQ ID NO: 195206 - DNA, 25 bp, probe
ccagcattcgatgcatttttataga

SEQ ID NO: 195207 - DNA, 25 bp, probe
ccagcattgctggttctatttaatg

SEQ ID NO: 195208 - DNA, 25 bp, probe
ccagctctctggttaaatgtagcgg

SEQ ID NO: 195209 - DNA, 25 bp, probe
ccagctccaagagtgccgggaggtg

SEQ ID NO: 195210 - DNA, 25 bp, probe
ccagcccagaattggccagtgaggc

SEQ ID NO: 195211 - DNA, 25 bp, probe
ccagctctgaggaggacagcgagga

SEQ ID NO: 195212 - DNA, 25 bp, probe
ccagcatcttggagcgtctgcagta

SEQ ID NO: 195213 - DNA, 25 bp, probe
ccagcacttgtcagggctgacatcc

SEQ ID NO: 195214 - DNA, 25 bp, probe
ccagcagtttctctgtgtacatgga

SEQ ID NO: 195215 - DNA, 25 bp, probe
ccagcaagacttcgtgatttttaac

SEQ ID NO: 195216 - DNA, 25 bp, probe
ccagcaagacttcgtgatttttaac

SEQ ID NO: 195217 - DNA, 25 bp, probe
ccagaaaccgattatcgtttacatc

SEQ ID NO: 195218 - DNA, 25 bp, probe
ccaagagaatcctgtcgtttaatgc

SEQ ID NO: 195219 - DNA, 25 bp, probe
ccaagtagtccaccttcatttaact

SEQ ID NO: 195220 - DNA, 25 bp, probe
ccagaatagtcttccaccagtaaaa

SEQ ID NO: 195221 - DNA, 25 bp, probe
ccagaaatgctgttctcaccagaat

SEQ ID NO: 195222 - DNA, 25 bp, probe
ccagagtatgtagccccagagatca

SEQ ID NO: 195223 - DNA, 25 bp, probe
ccagcatttataactcaccagagaa

SEQ ID NO: 195224 - DNA, 25 bp, probe
ccagaattttcactgcagccaggct

SEQ ID NO: 195225 - DNA, 25 bp, probe
ccagaattttcactgcagccaggct

SEQ ID NO: 195226 - DNA, 25 bp, probe
ccagacattgttgctgagacagcag

SEQ ID NO: 195227 - DNA, 25 bp, probe
ccagacagctctgcctgaaggagac

SEQ ID NO: 195228 - DNA, 25 bp, probe
ccagacagctctgcctgaaggagac

SEQ ID NO: 195229 - DNA, 25 bp, probe
ccagacagactgtgtgccaggagaa

SEQ ID NO: 195230 - DNA, 25 bp, probe
ccagcacagcacataggccgtgaga

SEQ ID NO: 195231 - DNA, 25 bp, probe
ccagcatcagccttagaacaagaac

SEQ ID NO: 195232 - DNA, 25 bp, probe
ccagcacctcgtagaggcgagccac

SEQ ID NO: 195233 - DNA, 25 bp, probe
ccagcacctcgcatgagatgaatgt

SEQ ID NO: 195234 - DNA, 25 bp, probe
ccagcactgtccagaggatatttcc

SEQ ID NO: 195235 - DNA, 25 bp, probe
ccagagcttggcagaagatgagttt

SEQ ID NO: 195236 - DNA, 25 bp, probe
ccagagatttccctgaggaggttcc

SEQ ID NO: 195237 - DNA, 25 bp, probe
ccagacatttttaaggtaattggct

SEQ ID NO: 195238 - DNA, 25 bp, probe
ccagcctttcttaccaatcaaggac

SEQ ID NO: 195239 - DNA, 25 bp, probe
ccagcctttcttaccaatcaaggac

SEQ ID NO: 195240 - DNA, 25 bp, probe
ccagctactttatgccagagacgga

SEQ ID NO: 195241 - DNA, 25 bp, probe
ccagctccttcaggaccgagcaaag

SEQ ID NO: 195242 - DNA, 25 bp, probe
ccagcatccgtgggtcacaggtaaa

SEQ ID NO: 195243 - DNA, 25 bp, probe
ccagcagctatctaagtcacaggtg

SEQ ID NO: 195244 - DNA, 25 bp, probe
ccagcagctatctaagtcacaggtg

SEQ ID NO: 195245 - DNA, 25 bp, probe
ccagcagccatcgaccatggatggt

SEQ ID NO: 195246 - DNA, 25 bp, probe
ccagcactgtccccatggagctggt

SEQ ID NO: 195247 - DNA, 25 bp, probe
ccagcctgtctgccgatatggatgg

SEQ ID NO: 195248 - DNA, 25 bp, probe
ccagcctgtctgccgatatggatgg

SEQ ID NO: 195249 - DNA, 25 bp, probe
ccagccttcgccaattcttggagag

SEQ ID NO: 195250 - DNA, 25 bp, probe
ccagccccatcaggttgttgtgaag

SEQ ID NO: 195251 - DNA, 25 bp, probe
ccacattcaagcagttggtcgaaga

SEQ ID NO: 195252 - DNA, 25 bp, probe
ccacatctctactcgtgaaccagga

SEQ ID NO: 195253 - DNA, 25 bp, probe
ccagctttcacaaaggaagcccatg

SEQ ID NO: 195254 - DNA, 25 bp, probe
ccagcatttcactacaggaccaaat

SEQ ID NO: 195255 - DNA, 25 bp, probe
ccactttccaatcacatccaaattc

SEQ ID NO: 195256 - DNA, 25 bp, probe
ccacttccaatacgacagccgaact

SEQ ID NO: 195257 - DNA, 25 bp, probe
ccagcttctaaacatacgccagacc

SEQ ID NO: 195258 - DNA, 25 bp, probe
ccacttctaagcacaaccagaggcc

SEQ ID NO: 195259 - DNA, 25 bp, probe
ccaattcaggacccacacgacggga

SEQ ID NO: 195260 - DNA, 25 bp, probe
ccaactcggaagtaagcccaagaga

SEQ ID NO: 195261 - DNA, 25 bp, probe
ccagccgggagtgaagccctgagga

SEQ ID NO: 195262 - DNA, 25 bp, probe
ccagccggcagagggaacacacggg

SEQ ID NO: 195263 - DNA, 25 bp, probe
ccaccggggagggacagtctggagg

SEQ ID NO: 195264 - DNA, 25 bp, probe
ccaccaaggaggcacaaggcggggc

SEQ ID NO: 195265 - DNA, 25 bp, probe
ccaccaaggaggcacaaggcggggc

SEQ ID NO: 195266 - DNA, 25 bp, probe
ccaccaaggggtactgcaggggaag

SEQ ID NO: 195267 - DNA, 25 bp, probe
ccaccaaggggtactgcaggggaag

SEQ ID NO: 195268 - DNA, 25 bp, probe
ccagccatgggggtttagggctgga

SEQ ID NO: 195269 - DNA, 25 bp, probe
ccaccagggggtgaattggcaagca

SEQ ID NO: 195270 - DNA, 25 bp, probe
gccgccaaggggagcaagtggaacc

SEQ ID NO: 195271 - DNA, 25 bp, probe
ccagccaagggtgcccagtggatgc

SEQ ID NO: 195272 - DNA, 25 bp, probe
ccagccctgggtaccaagatgaatg

SEQ ID NO: 195273 - DNA, 25 bp, probe
ccagcctgggtccccaagatgagtc

SEQ ID NO: 195274 - DNA, 25 bp, probe
ccagcctgggtccccaagatgagtc

SEQ ID NO: 195275 - DNA, 25 bp, probe
ccactgctcggtgacccagtgtgtg

SEQ ID NO: 195276 - DNA, 25 bp, probe
ccactctacctggcctgccaggagg

SEQ ID NO: 195277 - DNA, 25 bp, probe
ccaccaacgcggccagacggtgggc

SEQ ID NO: 195278 - DNA, 25 bp, probe
ccaccaacgcggccagacggtgggc

SEQ ID NO: 195279 - DNA, 25 bp, probe
ccaccaccacgacatcaaggatggg

SEQ ID NO: 195280 - DNA, 25 bp, probe
ccagccctcggatgcataagcaagg

SEQ ID NO: 195281 - DNA, 25 bp, probe
ccagcatcctttgccaaacacagtg

SEQ ID NO: 195282 - DNA, 25 bp, probe
ccagctcctttccctggaagaggaa

SEQ ID NO: 195283 - DNA, 25 bp, probe
ccactcccagtcagctgcaagggga

SEQ ID NO: 195284 - DNA, 25 bp, probe
ccagcattccgcggactgaagggca

SEQ ID NO: 195285 - DNA, 25 bp, probe
ccagctgagcggccagactttggac

SEQ ID NO: 195286 - DNA, 25 bp, probe
ccagctgcgccgggaaattgagatc

SEQ ID NO: 195287 - DNA, 25 bp, probe
ccaccagtcggtgagtgagcagatc

SEQ ID NO: 195288 - DNA, 25 bp, probe
ccaccaactagtcatgggcagtact

SEQ ID NO: 195289 - DNA, 25 bp, probe
ccaccagatcgacttgatcgtgcag

SEQ ID NO: 195290 - DNA, 25 bp, probe
ccaccagttacttgagtgtcactca

SEQ ID NO: 195291 - DNA, 25 bp, probe
ccagcactgtcatctagattttcca

SEQ ID NO: 195292 - DNA, 25 bp, probe
ccagcactgtgtgggaatgtccgcc

SEQ ID NO: 195293 - DNA, 25 bp, probe
ccagcatctgggggcaaggaaggct

SEQ ID NO: 195294 - DNA, 25 bp, probe
ccagcttgggggtcaggtaggtaga

SEQ ID NO: 195295 - DNA, 25 bp, probe
ccagctgtggggtccagacttgttg

SEQ ID NO: 195296 - DNA, 25 bp, probe
ccactgcaagacaacctggttatcg

SEQ ID NO: 195297 - DNA, 25 bp, probe
gccacgaaacagggctagtaacaaa

SEQ ID NO: 195298 - DNA, 25 bp, probe
ccactgaaacaccctgagtgagaca

SEQ ID NO: 195299 - DNA, 25 bp, probe
ccagctgctcaagcccatgaggcta

SEQ ID NO: 195300 - DNA, 25 bp, probe
ccagcagacaagatccagatggcca

SEQ ID NO: 195301 - DNA, 25 bp, probe
ccagagccaagaaacactttcagaa

SEQ ID NO: 195302 - DNA, 25 bp, probe
ccagcacggagctgacactgttcag

SEQ ID NO: 195303 - DNA, 25 bp, probe
ccagcacagtcacaaatttctctgt

SEQ ID NO: 195304 - DNA, 25 bp, probe
ccaccagccaatcaatgttcgtctc

SEQ ID NO: 195305 - DNA, 25 bp, probe
ccacgactcagtgaagtttctccag

SEQ ID NO: 195306 - DNA, 25 bp, probe
ccaatgactacctggtgacctcaca

SEQ ID NO: 195307 - DNA, 25 bp, probe
ccaagagtaagttctgctacctccc

SEQ ID NO: 195308 - DNA, 25 bp, probe
ccacatgcatgtgactcctcaaacc

SEQ ID NO: 195309 - DNA, 25 bp, probe
ccacagattctacttcgagaacctg

SEQ ID NO: 195310 - DNA, 25 bp, probe
ccaagattcttaataaataccagtt

SEQ ID NO: 195311 - DNA, 25 bp, probe
ccaagcattttgagattacccagga

SEQ ID NO: 195312 - DNA, 25 bp, probe
ccagacttcctgcgtgatatccaga

SEQ ID NO: 195313 - DNA, 25 bp, probe
ccagctggtcctgagtctactcagc

SEQ ID NO: 195314 - DNA, 25 bp, probe
ccagctggtcctgagtctactcagc

SEQ ID NO: 195315 - DNA, 25 bp, probe
ccagctggcctggaaggccaccgac

SEQ ID NO: 195316 - DNA, 25 bp, probe
ccagctggcctggaaggccaccgac

SEQ ID NO: 195317 - DNA, 25 bp, probe
ccagctgtgcctgagaggtactgcc

SEQ ID NO: 195318 - DNA, 25 bp, probe
ccactatgcgggtagactacgacca

SEQ ID NO: 195319 - DNA, 25 bp, probe
ccactatgcaacgtagaaacccctg

SEQ ID NO: 195320 - DNA, 25 bp, probe
ccaccagagacagtacagaatccct

SEQ ID NO: 195321 - DNA, 25 bp, probe
ccagccgatgaaggagcaaacgtct

SEQ ID NO: 195322 - DNA, 25 bp, probe
ccagcccatgaacaaattcctgctt

SEQ ID NO: 195323 - DNA, 25 bp, probe
ccagccctacacgaaaggacctgct

SEQ ID NO: 195324 - DNA, 25 bp, probe
ccagccattaataaaaggacgatct

SEQ ID NO: 195325 - DNA, 25 bp, probe
ccagccacatatcacaaacgactac

SEQ ID NO: 195326 - DNA, 25 bp, probe
ccagcccaatagaagtacagagcca

SEQ ID NO: 195327 - DNA, 25 bp, probe
ccacgccgaaaaatgaagtgcacaa

SEQ ID NO: 195328 - DNA, 25 bp, probe
gccaccctcaatataatcagcggac

SEQ ID NO: 195329 - DNA, 25 bp, probe
ccaccctgcaaaaaagcctgggcta

SEQ ID NO: 195330 - DNA, 25 bp, probe
ccaccatagaacgagcaaccttgac

SEQ ID NO: 195331 - DNA, 25 bp, probe
ccacctggaaccagatcctggaccc

SEQ ID NO: 195332 - DNA, 25 bp, probe
ccaccatggaagtcagttcctggct

SEQ ID NO: 195333 - DNA, 25 bp, probe
ccagcaccaacgagttcctgctgct

SEQ ID NO: 195334 - DNA, 25 bp, probe
ccacccaccgaggttcatttgattg

SEQ ID NO: 195335 - DNA, 25 bp, probe
ccacccacaaatgcttattagccta

SEQ ID NO: 195336 - DNA, 25 bp, probe
ccacgacccaatgtacttagacacg

SEQ ID NO: 195337 - DNA, 25 bp, probe
ccacccctcattgtgacttatgagg

SEQ ID NO: 195338 - DNA, 25 bp, probe
ccacccctacctggaatggaggctg

SEQ ID NO: 195339 - DNA, 25 bp, probe
ccacccctacctggaatggaggctg

SEQ ID NO: 195340 - DNA, 25 bp, probe
ccaccccttctctcagtggagagga

SEQ ID NO: 195341 - DNA, 25 bp, probe
ccaccctttacttcgtgatgagaaa

SEQ ID NO: 195342 - DNA, 25 bp, probe
ccaccactgatatcatggggagtaa

SEQ ID NO: 195343 - DNA, 25 bp, probe
ccactcagcatattaccaggggttt

SEQ ID NO: 195344 - DNA, 25 bp, probe
ccagccagataattgataactggtt

SEQ ID NO: 195345 - DNA, 25 bp, probe
ccagctggatgttcttaaagagttc

SEQ ID NO: 195346 - DNA, 25 bp, probe
ccactgtggggcttagacatgatga

SEQ ID NO: 195347 - DNA, 25 bp, probe
ccagcatggagcagacgagaagtca

SEQ ID NO: 195348 - DNA, 25 bp, probe
ccagctgaagcgcatcatggaagtg

SEQ ID NO: 195349 - DNA, 25 bp, probe
ccagctgtcactcatgcaacagcag

SEQ ID NO: 195350 - DNA, 25 bp, probe
ccagctgtcactcatgcaacagcag

SEQ ID NO: 195351 - DNA, 25 bp, probe
ccagcgtgcattcaaacgcactgct

SEQ ID NO: 195352 - DNA, 25 bp, probe
ccactgtcaatgaaatcctgacttt

SEQ ID NO: 195353 - DNA, 25 bp, probe
ccagctacaatggatttcctgtcat

SEQ ID NO: 195354 - DNA, 25 bp, probe
ccagctaaacatgcttcatcgtcgg

SEQ ID NO: 195355 - DNA, 25 bp, probe
ccagctcattgatgacttcaggatc

SEQ ID NO: 195356 - DNA, 25 bp, probe
ccagctttgcaggttatcagagatc

SEQ ID NO: 195357 - DNA, 25 bp, probe
ccagctactcgggaggctgaggcag

SEQ ID NO: 195358 - DNA, 25 bp, probe
ccagaagccgtggtgggaggacgag

SEQ ID NO: 195359 - DNA, 25 bp, probe
ccagaaccttgatggggtgagaagt

SEQ ID NO: 195360 - DNA, 25 bp, probe
ccagaaacatcctggtagctgaggg

SEQ ID NO: 195361 - DNA, 25 bp, probe
ccagaaatcccagcgcacctggggg

SEQ ID NO: 195362 - DNA, 25 bp, probe
ccagcaacatgtgccccagatctgg

SEQ ID NO: 195363 - DNA, 25 bp, probe
ccagcaaatcggtgcactgatcgct

SEQ ID NO: 195364 - DNA, 25 bp, probe
ccagcaactgggatgacgacagcct

SEQ ID NO: 195365 - DNA, 25 bp, probe
ccagcaactgggatgacgacagcct

SEQ ID NO: 195366 - DNA, 25 bp, probe
ccaccacagaagatgaggacctcaa

SEQ ID NO: 195367 - DNA, 25 bp, probe
ccagcacaaatcgaagcaggaattc

SEQ ID NO: 195368 - DNA, 25 bp, probe
ccaccatcctcttgacgagacattc

SEQ ID NO: 195369 - DNA, 25 bp, probe
ccaccagcctgttggcgaagttgct

SEQ ID NO: 195370 - DNA, 25 bp, probe
ccagccgttttggcaaactgctgct

SEQ ID NO: 195371 - DNA, 25 bp, probe
ccactgcctgtattggaaatcttgc

SEQ ID NO: 195372 - DNA, 25 bp, probe
ccactgctttacagaaacatccaag

SEQ ID NO: 195373 - DNA, 25 bp, probe
ccacctcctaagaacaacatggaag

SEQ ID NO: 195374 - DNA, 25 bp, probe
ccaagaccttacaaccacatttctg

SEQ ID NO: 195375 - DNA, 25 bp, probe
ccagctgactccactactaatttgc

SEQ ID NO: 195376 - DNA, 25 bp, probe
ccagcatgtttcacagagtaagcct

SEQ ID NO: 195377 - DNA, 25 bp, probe
ccagctttgtcaatcacccaagcac

SEQ ID NO: 195378 - DNA, 25 bp, probe
ccagctgtggtttcacttcaagcgc

SEQ ID NO: 195379 - DNA, 25 bp, probe
ccagctgggtagtcaggagagacat

SEQ ID NO: 195380 - DNA, 25 bp, probe
ccagctcagtgttttggtggaaaaa

SEQ ID NO: 195381 - DNA, 25 bp, probe
ccagctcaaattccgagtgcagaaa

SEQ ID NO: 195382 - DNA, 25 bp, probe
ccagcgcagcgcttgcaaagagcag

SEQ ID NO: 195383 - DNA, 25 bp, probe
ccagctgctgccttcatattgaagg

SEQ ID NO: 195384 - DNA, 25 bp, probe
ccagcattctcgaaattggaggact

SEQ ID NO: 195385 - DNA, 25 bp, probe
ccagcagtcctgaagttggcatgtg

SEQ ID NO: 195386 - DNA, 25 bp, probe
ccagcgtcttgacgggagcattggc

SEQ ID NO: 195387 - DNA, 25 bp, probe
ccagcagctcttgggaaggacttgc

SEQ ID NO: 195388 - DNA, 25 bp, probe
ccacctatgttttaggcatctgtga

SEQ ID NO: 195389 - DNA, 25 bp, probe
ccacctatgttttaggcatctgtga

SEQ ID NO: 195390 - DNA, 25 bp, probe
gccttcttaggcaaacgcctgcaaa

SEQ ID NO: 195391 - DNA, 25 bp, probe
gccttgtccagtctaccctggacaa

SEQ ID NO: 195392 - DNA, 25 bp, probe
gccttacccattgactcaaggggac

SEQ ID NO: 195393 - DNA, 25 bp, probe
gctcttgactacttggaactaggct

SEQ ID NO: 195394 - DNA, 25 bp, probe
gccaatgacgagttcggacgggatt

SEQ ID NO: 195395 - DNA, 25 bp, probe
ccactgcagggcttgctggagaggc

SEQ ID NO: 195396 - DNA, 25 bp, probe
ccagcgggcacttggagatgaggct

SEQ ID NO: 195397 - DNA, 25 bp, probe
ccagcgggcacttggagatgaggct

SEQ ID NO: 195398 - DNA, 25 bp, probe
ccagcgtgatcaccagcggtgggat

SEQ ID NO: 195399 - DNA, 25 bp, probe
ccagcttgtattggccatctggaat

SEQ ID NO: 195400 - DNA, 25 bp, probe
ccactatgatcacaccatcgagaac

SEQ ID NO: 195401 - DNA, 25 bp, probe
ccagcgattcattcccatcaatgga

SEQ ID NO: 195402 - DNA, 25 bp, probe
gccagccattaataaaaggacgatc

SEQ ID NO: 195403 - DNA, 25 bp, probe
ccaccgtgacattaaaggtgccaat

SEQ ID NO: 195404 - DNA, 25 bp, probe
ccagcttggactcatgaaggattaa

SEQ ID NO: 195405 - DNA, 25 bp, probe
ccagctcttactcttcaagttcaac

SEQ ID NO: 195406 - DNA, 25 bp, probe
ccagccttgactgactcaaagcaaa

SEQ ID NO: 195407 - DNA, 25 bp, probe
ccagccggcactgatgcattcagag

SEQ ID NO: 195408 - DNA, 25 bp, probe
ccagcaccgcgtgtgctttgagcac

SEQ ID NO: 195409 - DNA, 25 bp, probe
ccagcacgcagcgtaccttgaacag

SEQ ID NO: 195410 - DNA, 25 bp, probe
ccagcctgagttccttagacacagg

SEQ ID NO: 195411 - DNA, 25 bp, probe
ccacactagatctgttagaacctgg

SEQ ID NO: 195412 - DNA, 25 bp, probe
ccaccaagccggactatgacatccg

SEQ ID NO: 195413 - DNA, 25 bp, probe
ccaccaagccggactatgacatccg

SEQ ID NO: 195414 - DNA, 25 bp, probe
ccaccaagccggactatgacatccg

SEQ ID NO: 195415 - DNA, 25 bp, probe
ccagcgcacacgctgatttgaaccc

SEQ ID NO: 195416 - DNA, 25 bp, probe
ccagccacatcgcctgagattgaca

SEQ ID NO: 195417 - DNA, 25 bp, probe
ccagaatctgcgtctgagatctctc

SEQ ID NO: 195418 - DNA, 25 bp, probe
ccaccagctggaggacatgctgctc

SEQ ID NO: 195419 - DNA, 25 bp, probe
ccagcgtgtggagcagagctctccc

SEQ ID NO: 195420 - DNA, 25 bp, probe
ccagcgtgtggagcagagctctccc

SEQ ID NO: 195421 - DNA, 25 bp, probe
ccagctggggagaaggcgctacctg

SEQ ID NO: 195422 - DNA, 25 bp, probe
ccagctggggagaaggcgctacctg

SEQ ID NO: 195423 - DNA, 25 bp, probe
tctcagtaaggtacggagtaactgt

SEQ ID NO: 195424 - DNA, 25 bp, probe
gccagtacacttgcggagtacctgt

SEQ ID NO: 195425 - DNA, 25 bp, probe
ccaagtgcactttctaatgtttctg

SEQ ID NO: 195426 - DNA, 25 bp, probe
ccactgtttgcttcaacagtatatc

SEQ ID NO: 195427 - DNA, 25 bp, probe
ccagcttttatacacacgtatctca

SEQ ID NO: 195428 - DNA, 25 bp, probe
ccactttttctgtgaggtgcctgca

SEQ ID NO: 195429 - DNA, 25 bp, probe
ccactgtggttttaggcgcacactc

SEQ ID NO: 195430 - DNA, 25 bp, probe
ccactggctggtgtacgccaacagc

SEQ ID NO: 195431 - DNA, 25 bp, probe
ccagcaggattgagtcaccctgacg

SEQ ID NO: 195432 - DNA, 25 bp, probe
ccagcaggaagccctgcaaccagaa

SEQ ID NO: 195433 - DNA, 25 bp, probe
ccagccgaagcaccttccatgctgg

SEQ ID NO: 195434 - DNA, 25 bp, probe
ccagccagaacacctcggagctgaa

SEQ ID NO: 195435 - DNA, 25 bp, probe
ccagctagaaacttgtatgcctata

SEQ ID NO: 195436 - DNA, 25 bp, probe
ccagctggagagtgggagctctgag

SEQ ID NO: 195437 - DNA, 25 bp, probe
ccagcatggaggtcgacgtgcagga

SEQ ID NO: 195438 - DNA, 25 bp, probe
ccagcacggggccagaggaggaaca

SEQ ID NO: 195439 - DNA, 25 bp, probe
ccagcagagtggccagcaaggagca

SEQ ID NO: 195440 - DNA, 25 bp, probe
ccagcaagctgtgagagtgcaggcg

SEQ ID NO: 195441 - DNA, 25 bp, probe
ccagcaagctaaagcatggcggcca

SEQ ID NO: 195442 - DNA, 25 bp, probe
ccagcaagcaaatgggcggtccctc

SEQ ID NO: 195443 - DNA, 25 bp, probe
ccagccagcggattgggggtggccc

SEQ ID NO: 195444 - DNA, 25 bp, probe
ccagccagcggattgggggtggccc

SEQ ID NO: 195445 - DNA, 25 bp, probe
ccagccagcggattgggggtggccc

SEQ ID NO: 195446 - DNA, 25 bp, probe
ccagctgcagggccagggggtgcag

SEQ ID NO: 195447 - DNA, 25 bp, probe
ccagcacgggcacgaggccgtggtg

SEQ ID NO: 195448 - DNA, 25 bp, probe
ccagccggacaccggccgcattgag

SEQ ID NO: 195449 - DNA, 25 bp, probe
ccaccgagacagttggttttgcatg

SEQ ID NO: 195450 - DNA, 25 bp, probe
ccacctgaaagcctgagttatcttg

SEQ ID NO: 195451 - DNA, 25 bp, probe
ccagcccagggcctgagttagacta

SEQ ID NO: 195452 - DNA, 25 bp, probe
ccagcacccaggcctgggaagagct

SEQ ID NO: 195453 - DNA, 25 bp, probe
ccagctcgccagggatgtgggcaga

SEQ ID NO: 195454 - DNA, 25 bp, probe
ccagctcgcgcagagactggcgcag

SEQ ID NO: 195455 - DNA, 25 bp, probe
ccagctgaggtggagactcgcaagg

SEQ ID NO: 195456 - DNA, 25 bp, probe
ccagccatggtggagacctgcgtta

SEQ ID NO: 195457 - DNA, 25 bp, probe
ccagcgatgtgtggagctttgggat

SEQ ID NO: 195458 - DNA, 25 bp, probe
ccagctaatgttggattgttggcaa

SEQ ID NO: 195459 - DNA, 25 bp, probe
ccagctagagtcagccgtggacaca

SEQ ID NO: 195460 - DNA, 25 bp, probe
ccagctgaggacaggctggcgcctc

SEQ ID NO: 195461 - DNA, 25 bp, probe
ccagcagcagtgacacggagaccac

SEQ ID NO: 195462 - DNA, 25 bp, probe
ccagcagcagtgacacggagaccac

SEQ ID NO: 195463 - DNA, 25 bp, probe
ccagcaggaatgggtagcagccagc

SEQ ID NO: 195464 - DNA, 25 bp, probe
ccagccagaatggatgtactacact

SEQ ID NO: 195465 - DNA, 25 bp, probe
ccaccatggagcttgtgttctcaga

SEQ ID NO: 195466 - DNA, 25 bp, probe
ccagcagctggggcttttctagtgc

SEQ ID NO: 195467 - DNA, 25 bp, probe
ccagcagccgcggtaattccagctc

SEQ ID NO: 195468 - DNA, 25 bp, probe
ccagcctctgcggaatggatcacac

SEQ ID NO: 195469 - DNA, 25 bp, probe
ccagctctgcgcggcagaggaccag

SEQ ID NO: 195470 - DNA, 25 bp, probe
ccagccagagatgaagagacacagt

SEQ ID NO: 195471 - DNA, 25 bp, probe
gccactcaagtacatcagaccaatc

SEQ ID NO: 195472 - DNA, 25 bp, probe
gcgacacaaccaagtcatgcctttc

SEQ ID NO: 195473 - DNA, 25 bp, probe
gcgaaaacagccattgcctttttta

SEQ ID NO: 195474 - DNA, 25 bp, probe
ccaaaaaacttgctcttatcttctc

SEQ ID NO: 195475 - DNA, 25 bp, probe
ccaaactcaactctcaatctatttg

SEQ ID NO: 195476 - DNA, 25 bp, probe
ccaaaatcacatcctaatttttctg

SEQ ID NO: 195477 - DNA, 25 bp, probe
ccaccacacctggctaattttttgt

SEQ ID NO: 195478 - DNA, 25 bp, probe
ccacccttcgcagttactggttggt

SEQ ID NO: 195479 - DNA, 25 bp, probe
ccacccttcgcagttactggttggt

SEQ ID NO: 195480 - DNA, 25 bp, probe
ccaaacttcggttacggcatagcct

SEQ ID NO: 195481 - DNA, 25 bp, probe
ccaaacttcggttacggcatagcct

SEQ ID NO: 195482 - DNA, 25 bp, probe
ccaaaccttgttttgcaacatccca

SEQ ID NO: 195483 - DNA, 25 bp, probe
ccacacgcacttatcaggaacgcct

SEQ ID NO: 195484 - DNA, 25 bp, probe
ccagcaggccggatcggtactgtat

SEQ ID NO: 195485 - DNA, 25 bp, probe
ccagctggccggaaggagactgtgg

SEQ ID NO: 195486 - DNA, 25 bp, probe
ccactggccaggactctgagatcag

SEQ ID NO: 195487 - DNA, 25 bp, probe
ccagcttcctggactttctcagaag

SEQ ID NO: 195488 - DNA, 25 bp, probe
ccagcttcatttgttgctccgagag

SEQ ID NO: 195489 - DNA, 25 bp, probe
ccagcattttgggaggccgaggcgg

SEQ ID NO: 195490 - DNA, 25 bp, probe
ccagctgtttgtcaaggcgagtgag

SEQ ID NO: 195491 - DNA, 25 bp, probe
ccagctctctctatagcgacgagga

SEQ ID NO: 195492 - DNA, 25 bp, probe
ccacctacaactccgacagggataa

SEQ ID NO: 195493 - DNA, 25 bp, probe
ccaccaaagatccctgacaagcagt

SEQ ID NO: 195494 - DNA, 25 bp, probe
ccaccaaagatccctgacaagcagt

SEQ ID NO: 195495 - DNA, 25 bp, probe
ccaacaaaagtttcatgctacagct

SEQ ID NO: 195496 - DNA, 25 bp, probe
ccacctcaaatttatgatgcccagt

SEQ ID NO: 195497 - DNA, 25 bp, probe
ccactacaatttgatggctctgcat

SEQ ID NO: 195498 - DNA, 25 bp, probe
ccacttctattcctgaggtgcagcg

SEQ ID NO: 195499 - DNA, 25 bp, probe
ccaccattattaatctggccacagc

SEQ ID NO: 195500 - DNA, 25 bp, probe
ccagctctactttatgtcctgaagc

SEQ ID NO: 195501 - DNA, 25 bp, probe
ccagctctactttatgtcctgaagc

SEQ ID NO: 195502 - DNA, 25 bp, probe
ccagctcttcgatctgattgaaagc

SEQ ID NO: 195503 - DNA, 25 bp, probe
ccagcatttcgatcctcgtcaggtg

SEQ ID NO: 195504 - DNA, 25 bp, probe
ccacagcttcgacagccaatcaggt

SEQ ID NO: 195505 - DNA, 25 bp, probe
ccacagcttcgacagccaatcaggt

SEQ ID NO: 195506 - DNA, 25 bp, probe
ccagccactagggagccaatctgag

SEQ ID NO: 195507 - DNA, 25 bp, probe
ccagcggaatgggcagcgacacgcg

SEQ ID NO: 195508 - DNA, 25 bp, probe
ccagcgggaatggcagctgccacgc

SEQ ID NO: 195509 - DNA, 25 bp, probe
ccagctgggaatcacccacgttgtg

SEQ ID NO: 195510 - DNA, 25 bp, probe
ccagcgggaacgcacacaagtggtg

SEQ ID NO: 195511 - DNA, 25 bp, probe
ccacgcggaactgcctagttgggga

SEQ ID NO: 195512 - DNA, 25 bp, probe
ccaccaggaaatgcccactttagtg

SEQ ID NO: 195513 - DNA, 25 bp, probe
ccaccaggcccagctaatttttgta

SEQ ID NO: 195514 - DNA, 25 bp, probe
ccaccagggctgttcgaatttattc

SEQ ID NO: 195515 - DNA, 25 bp, probe
ccagcctgggtgtcaataattattt

SEQ ID NO: 195516 - DNA, 25 bp, probe
ccagcctaggcccttaatcttgctg

SEQ ID NO: 195517 - DNA, 25 bp, probe
ccacctgcaggggcttagtgtctgg

SEQ ID NO: 195518 - DNA, 25 bp, probe
ccacctggggactggcactgtggtg

SEQ ID NO: 195519 - DNA, 25 bp, probe
ccagcctggagtacagtggcacgat

SEQ ID NO: 195520 - DNA, 25 bp, probe
ccagcctggctgagggacaagatgg

SEQ ID NO: 195521 - DNA, 25 bp, probe
ccagccccagggcgatgtagcattt

SEQ ID NO: 195522 - DNA, 25 bp, probe
ccagcccacaggggtggccatattt

SEQ ID NO: 195523 - DNA, 25 bp, probe
ccagcccacaggggtggccatattt

SEQ ID NO: 195524 - DNA, 25 bp, probe
ccacccacagagggagggctttgga

SEQ ID NO: 195525 - DNA, 25 bp, probe
ccacactgaagtctaggggttgcga

SEQ ID NO: 195526 - DNA, 25 bp, probe
ccactgtcaatgattagatcgggtc

SEQ ID NO: 195527 - DNA, 25 bp, probe
ccacgtatcagggaaattgcaggtc

SEQ ID NO: 195528 - DNA, 25 bp, probe
ccaccttcagtcgcaagctgggtgc

SEQ ID NO: 195529 - DNA, 25 bp, probe
ccaccttcagtcgcaagctgggtgc

SEQ ID NO: 195530 - DNA, 25 bp, probe
ccaccccaggccaaagccagagtgg

SEQ ID NO: 195531 - DNA, 25 bp, probe
ccaccctgggctgggcccaggtgcg

SEQ ID NO: 195532 - DNA, 25 bp, probe
gccaccacgggtttggaagtttgct

SEQ ID NO: 195533 - DNA, 25 bp, probe
ccaccattcgttttcagttgtttgt

SEQ ID NO: 195534 - DNA, 25 bp, probe
ccaccattcgttttcagttgtttgt

SEQ ID NO: 195535 - DNA, 25 bp, probe
ccacctctgcgttgtttgtgtgttc

SEQ ID NO: 195536 - DNA, 25 bp, probe
ccacctctgcgttgtttgtgtgttc

SEQ ID NO: 195537 - DNA, 25 bp, probe
ccacctcactgtagtggtcctgttc

SEQ ID NO: 195538 - DNA, 25 bp, probe
ccaccatccgcgaggtggcggtgct

SEQ ID NO: 195539 - DNA, 25 bp, probe
ccagctacccgtacagtgaggacgc

SEQ ID NO: 195540 - DNA, 25 bp, probe
ccagctagctccatagggaagcctg

SEQ ID NO: 195541 - DNA, 25 bp, probe
ccagccagcctcagtggagaagctt

SEQ ID NO: 195542 - DNA, 25 bp, probe
ccaccgccctggggcgattgcagtt

SEQ ID NO: 195543 - DNA, 25 bp, probe
ccaccacgtctgagaccattcagta

SEQ ID NO: 195544 - DNA, 25 bp, probe
ccacgaactcgacaccaaagatgaa

SEQ ID NO: 195545 - DNA, 25 bp, probe
ccagctgaaccatcgccaaatagaa

SEQ ID NO: 195546 - DNA, 25 bp, probe
ccagcggactccgagcacaataaac

SEQ ID NO: 195547 - DNA, 25 bp, probe
ccagctgtggctccgaggaaaatca

SEQ ID NO: 195548 - DNA, 25 bp, probe
ccagctgctgatcgaagaaaagaaa

SEQ ID NO: 195549 - DNA, 25 bp, probe
ccacctgtcaaacaaagccagaagc

SEQ ID NO: 195550 - DNA, 25 bp, probe
ccaccagtcaacagcaaaggaatag

SEQ ID NO: 195551 - DNA, 25 bp, probe
ccaccgtgtactccagtgaggaagc

SEQ ID NO: 195552 - DNA, 25 bp, probe
ccagcgggaactcagggtgagcagc

SEQ ID NO: 195553 - DNA, 25 bp, probe
ccacgggaaagagctggggcaggag

SEQ ID NO: 195554 - DNA, 25 bp, probe
gccacgggaaagagctggggcagga

SEQ ID NO: 195555 - DNA, 25 bp, probe
ccacgggtctaggagcctgagaggt

SEQ ID NO: 195556 - DNA, 25 bp, probe
ccacggtggacttagctctgaggag

SEQ ID NO: 195557 - DNA, 25 bp, probe
ccacaggttgaagcagcccgaagac

SEQ ID NO: 195558 - DNA, 25 bp, probe
ccactttgtggagctgaccgaagat

SEQ ID NO: 195559 - DNA, 25 bp, probe
ccacctcttggtgtggtgcagggat

SEQ ID NO: 195560 - DNA, 25 bp, probe
ccagcctcttcctgggagatgcgta

SEQ ID NO: 195561 - DNA, 25 bp, probe
ccagcctcttcctgggagatgcgta

SEQ ID NO: 195562 - DNA, 25 bp, probe
ccagcctcttcctgggagatgcgta

SEQ ID NO: 195563 - DNA, 25 bp, probe
ccagcctcttcctgggagatgcgta

SEQ ID NO: 195564 - DNA, 25 bp, probe
ccagcctcttcctgggagatgcgta

SEQ ID NO: 195565 - DNA, 25 bp, probe
ccagcctcttcctgggagatgcgta

SEQ ID NO: 195566 - DNA, 25 bp, probe
ccagctcaccccttttgggtgtagg

SEQ ID NO: 195567 - DNA, 25 bp, probe
ccagctcattccaaccttgatgtgt

SEQ ID NO: 195568 - DNA, 25 bp, probe
ccagccatctacttcttggctggct

SEQ ID NO: 195569 - DNA, 25 bp, probe
ccaccatctcacattttgcttttaa

SEQ ID NO: 195570 - DNA, 25 bp, probe
ccaccatctcacattttgcttttaa

SEQ ID NO: 195571 - DNA, 25 bp, probe
ccactcaccactgttttatatctct

SEQ ID NO: 195572 - DNA, 25 bp, probe
ccactgaaggctgtgtttattcttt

SEQ ID NO: 195573 - DNA, 25 bp, probe
ccacagaaggctggtgggtttttga

SEQ ID NO: 195574 - DNA, 25 bp, probe
ccaagagcaagcgccgcttcttttt

SEQ ID NO: 195575 - DNA, 25 bp, probe
ccaagccaagcatccacttgtctgt

SEQ ID NO: 195576 - DNA, 25 bp, probe
ccaagccaaggaacagcaaccaagt

SEQ ID NO: 195577 - DNA, 25 bp, probe
ccaccaaacatgcaacgaacacagt

SEQ ID NO: 195578 - DNA, 25 bp, probe
ccacgagacagacaacatgaaccag

SEQ ID NO: 195579 - DNA, 25 bp, probe
ccaccagatataccactatggccac

SEQ ID NO: 195580 - DNA, 25 bp, probe
ccaccgagatatcaaagctgccaac

SEQ ID NO: 195581 - DNA, 25 bp, probe
ccaccgagatatcaaagctgccaac

SEQ ID NO: 195582 - DNA, 25 bp, probe
ccacctgaaagggatgattgccaac

SEQ ID NO: 195583 - DNA, 25 bp, probe
ccacttcgaagtggaggtctgccag

SEQ ID NO: 195584 - DNA, 25 bp, probe
ccactgtagccatggaggtgcggcc

SEQ ID NO: 195585 - DNA, 25 bp, probe
ccactgtagccatggaggtgcggcc

SEQ ID NO: 195586 - DNA, 25 bp, probe
ccactgttgctcttagaaggcccag

SEQ ID NO: 195587 - DNA, 25 bp, probe
ccaccttgctctgtgaagacggctg

SEQ ID NO: 195588 - DNA, 25 bp, probe
ccactgactccgaatgggactggct

SEQ ID NO: 195589 - DNA, 25 bp, probe
ccactgactccgaatgggactggct

SEQ ID NO: 195590 - DNA, 25 bp, probe
ccactgactcttcaaggacgtgccc

SEQ ID NO: 195591 - DNA, 25 bp, probe
ccacgaccgccgcaagatgcggccc

SEQ ID NO: 195592 - DNA, 25 bp, probe
ccacgaccgccgcaagatgcggccc

SEQ ID NO: 195593 - DNA, 25 bp, probe
ccacagcccgacgtggatcatcgac

SEQ ID NO: 195594 - DNA, 25 bp, probe
ccacagcccgacgtggatcatcgac

SEQ ID NO: 195595 - DNA, 25 bp, probe
ccacccacttcattacattctgatc

SEQ ID NO: 195596 - DNA, 25 bp, probe
ccagccccattattgagcatgaccc

SEQ ID NO: 195597 - DNA, 25 bp, probe
ccagctgctctaatgatggacagaa

SEQ ID NO: 195598 - DNA, 25 bp, probe
ccagctgctctaatgatggacagaa

SEQ ID NO: 195599 - DNA, 25 bp, probe
ccagctgcttatctgtctaacttgg

SEQ ID NO: 195600 - DNA, 25 bp, probe
ccagcctcattctatttaactttgc

SEQ ID NO: 195601 - DNA, 25 bp, probe
ccagcctcattctatttaactttgc

SEQ ID NO: 195602 - DNA, 25 bp, probe
ccaccctcacataatcaaactttat

SEQ ID NO: 195603 - DNA, 25 bp, probe
ccaccagccagcaagctaaagcatg

SEQ ID NO: 195604 - DNA, 25 bp, probe
ccagccagccaatctgaagatgtca

SEQ ID NO: 195605 - DNA, 25 bp, probe
ccaccagcacaaatcgaagcaggaa

SEQ ID NO: 195606 - DNA, 25 bp, probe
ccaccagcacaaatcgaagcaggaa

SEQ ID NO: 195607 - DNA, 25 bp, probe
ccaactgcaccaacgaactgtacat

SEQ ID NO: 195608 - DNA, 25 bp, probe
ccactctgcgccacaaaggttggat

SEQ ID NO: 195609 - DNA, 25 bp, probe
ccagccgtcgcttcaagagggtggt

SEQ ID NO: 195610 - DNA, 25 bp, probe
ccagccgtcgcttcaagagggtggt

SEQ ID NO: 195611 - DNA, 25 bp, probe
ccagccgtcggttcaagcgagtggt

SEQ ID NO: 195612 - DNA, 25 bp, probe
ccacctccgttgccatatgggtggt

SEQ ID NO: 195613 - DNA, 25 bp, probe
ccactcccctggcatatgtggagac

SEQ ID NO: 195614 - DNA, 25 bp, probe
ccacccagctctgagttcatggatg

SEQ ID NO: 195615 - DNA, 25 bp, probe
ccaccgactgctgaggtgtggggcg

SEQ ID NO: 195616 - DNA, 25 bp, probe
ccaactgaatatgagaggaacggga

SEQ ID NO: 195617 - DNA, 25 bp, probe
ccaccgcagaaggaaggcagggagg

SEQ ID NO: 195618 - DNA, 25 bp, probe
ccacccggagtgcatacatggagga

SEQ ID NO: 195619 - DNA, 25 bp, probe
ccacgcccagaacaacagttggcag

SEQ ID NO: 195620 - DNA, 25 bp, probe
ccacgcccgcaacaaggtgggctgg

SEQ ID NO: 195621 - DNA, 25 bp, probe
ccaccccacacactgaagcagtagc

SEQ ID NO: 195622 - DNA, 25 bp, probe
ccacgcagcccctagaaagtagtaa

SEQ ID NO: 195623 - DNA, 25 bp, probe
ccacctggccgcaaagacagcaagg

SEQ ID NO: 195624 - DNA, 25 bp, probe
ccagcctggacaacaagagcaaaac

SEQ ID NO: 195625 - DNA, 25 bp, probe
ccagcctgcccaacatagtgaaact

SEQ ID NO: 195626 - DNA, 25 bp, probe
ccagcctggccaacatggtgaaacc

SEQ ID NO: 195627 - DNA, 25 bp, probe
ccacctcagcgtgctggagaagacc

SEQ ID NO: 195628 - DNA, 25 bp, probe
ccacttactgacagaagcaggacgg

SEQ ID NO: 195629 - DNA, 25 bp, probe
ccaactactcaccagaagggggctt

SEQ ID NO: 195630 - DNA, 25 bp, probe
ccacctcatgtctaagaacggggac

SEQ ID NO: 195631 - DNA, 25 bp, probe
ccaaatcgtcttatattagggaatt

SEQ ID NO: 195632 - DNA, 25 bp, probe
ccaaacaacattatgttgggggata

SEQ ID NO: 195633 - DNA, 25 bp, probe
ccacacctacccatttgaggggatg

SEQ ID NO: 195634 - DNA, 25 bp, probe
ccacccaacgctgtcctggtggtat

SEQ ID NO: 195635 - DNA, 25 bp, probe
ccacacaaacgtttacttatcttat

SEQ ID NO: 195636 - DNA, 25 bp, probe
ccaacaatcaggctctcacagttgt

SEQ ID NO: 195637 - DNA, 25 bp, probe
ccagccaagcacagtctactgttgc

SEQ ID NO: 195638 - DNA, 25 bp, probe
ccagccaatcaatgttcgtctctgc

SEQ ID NO: 195639 - DNA, 25 bp, probe
ccactggtcacatgttccacattga

SEQ ID NO: 195640 - DNA, 25 bp, probe
ccacattggcagctgtgaccagatt

SEQ ID NO: 195641 - DNA, 25 bp, probe
ccagcgtgtctgctagactctattt

SEQ ID NO: 195642 - DNA, 25 bp, probe
ccagccttactttgctcttatatgt

SEQ ID NO: 195643 - DNA, 25 bp, probe
gccaccgtaaaactgcttcatttgg

SEQ ID NO: 195644 - DNA, 25 bp, probe
ccacctggccaatgtgcatttttgc

SEQ ID NO: 195645 - DNA, 25 bp, probe
ccacctgacttcagtctctttgatg

SEQ ID NO: 195646 - DNA, 25 bp, probe
ccaaccagttatactccttgagtta

SEQ ID NO: 195647 - DNA, 25 bp, probe
ccaagccctttagggctacagtctc

SEQ ID NO: 195648 - DNA, 25 bp, probe
ccacagctccatggtaggagtcaat

SEQ ID NO: 195649 - DNA, 25 bp, probe
ccacatgtctgtgtgtgtgcatgta

SEQ ID NO: 195650 - DNA, 25 bp, probe
ccacattcttaacattgcagcaatc

SEQ ID NO: 195651 - DNA, 25 bp, probe
ccacttttgctacgatgtggccctg

SEQ ID NO: 195652 - DNA, 25 bp, probe
ccacctttgctcgagaggttcagtg

SEQ ID NO: 195653 - DNA, 25 bp, probe
ccacctttgctcgagaggttcagtg

SEQ ID NO: 195654 - DNA, 25 bp, probe
ccaccttcatccgaaagttctacac

SEQ ID NO: 195655 - DNA, 25 bp, probe
ccaacctgacagctaggtatctagc

SEQ ID NO: 195656 - DNA, 25 bp, probe
ccaacctccaggtacaggtgctcac

SEQ ID NO: 195657 - DNA, 25 bp, probe
ccaccacccagagtaatagaacatc

SEQ ID NO: 195658 - DNA, 25 bp, probe
ccaaacccagggaaaagagctctca

SEQ ID NO: 195659 - DNA, 25 bp, probe
tcgaaacccctgtgatgaaacttac

SEQ ID NO: 195660 - DNA, 25 bp, probe
tcagaaaggccccctaaagacctgg

SEQ ID NO: 195661 - DNA, 25 bp, probe
ccacgacctcctcataaagaccgtg

SEQ ID NO: 195662 - DNA, 25 bp, probe
ccactgaactccaagataaagacac

SEQ ID NO: 195663 - DNA, 25 bp, probe
ccaccaacatccagaccaaaaagaa

SEQ ID NO: 195664 - DNA, 25 bp, probe
ccactcaaacctttcaacaaaaatg

SEQ ID NO: 195665 - DNA, 25 bp, probe
ccactcaaacctttcaacaaaaatg

SEQ ID NO: 195666 - DNA, 25 bp, probe
ccaccgaaggccccaacaggggatg

SEQ ID NO: 195667 - DNA, 25 bp, probe
ccaccatgaagtctggcaactcgga

SEQ ID NO: 195668 - DNA, 25 bp, probe
ccacgcagaatacctcgaaccaggc

SEQ ID NO: 195669 - DNA, 25 bp, probe
ccacagtacaagccttgaacatcgt

SEQ ID NO: 195670 - DNA, 25 bp, probe
ccaactacgaccgggacaagctctt

SEQ ID NO: 195671 - DNA, 25 bp, probe
ccaacagccgacacggtgagaccac

SEQ ID NO: 195672 - DNA, 25 bp, probe
ccactacccgcactgcggggacaaa

SEQ ID NO: 195673 - DNA, 25 bp, probe
ccactctccggctgggtagacagat

SEQ ID NO: 195674 - DNA, 25 bp, probe
ccacctggggctcaggtacacagtg

SEQ ID NO: 195675 - DNA, 25 bp, probe
ccacctgagggctgtggaacccagc

SEQ ID NO: 195676 - DNA, 25 bp, probe
ccacctcatggcttaaggagaccca

SEQ ID NO: 195677 - DNA, 25 bp, probe
gccacctaccacaagcaggtgtccc

SEQ ID NO: 195678 - DNA, 25 bp, probe
ccacccacatcatcgtggtgtccat

SEQ ID NO: 195679 - DNA, 25 bp, probe
ccacccgctagcagtggcgattcag

SEQ ID NO: 195680 - DNA, 25 bp, probe
ccacccgctagcagtggcgattcag

SEQ ID NO: 195681 - DNA, 25 bp, probe
ccacccgctagcagtggcgattcag

SEQ ID NO: 195682 - DNA, 25 bp, probe
ccaccatcctaaagatccagtccag

SEQ ID NO: 195683 - DNA, 25 bp, probe
ccaccacctcaaatttatgatgccc

SEQ ID NO: 195684 - DNA, 25 bp, probe
ccaccaccaataatcatctcattga

SEQ ID NO: 195685 - DNA, 25 bp, probe
ccacctcacagcacttcattatgca

SEQ ID NO: 195686 - DNA, 25 bp, probe
ccaccatactgctcataataacatt

SEQ ID NO: 195687 - DNA, 25 bp, probe
ccagcgactgctttcaaatactatt

SEQ ID NO: 195688 - DNA, 25 bp, probe
gccaagtttttctaacagtatttgt

SEQ ID NO: 195689 - DNA, 25 bp, probe
gccaagtttttctaacagtatttgt

SEQ ID NO: 195690 - DNA, 25 bp, probe
ccacgtgttttattcctgtatgttg

SEQ ID NO: 195691 - DNA, 25 bp, probe
ccaagtgtttaccactttctgttgg

SEQ ID NO: 195692 - DNA, 25 bp, probe
ccaaggcttcttcatcttcttggtc

SEQ ID NO: 195693 - DNA, 25 bp, probe
ccacagtcattagccttcttctgga

SEQ ID NO: 195694 - DNA, 25 bp, probe
ccactgatttacacaatctttaatg

SEQ ID NO: 195695 - DNA, 25 bp, probe
ccaccatttactcaacatttggagc

SEQ ID NO: 195696 - DNA, 25 bp, probe
ccaccaaattatccaactgttatac

SEQ ID NO: 195697 - DNA, 25 bp, probe
ccaccattttgtgcattcgttctac

SEQ ID NO: 195698 - DNA, 25 bp, probe
ccactcttgctctttcattagattt

SEQ ID NO: 195699 - DNA, 25 bp, probe
ccacttcttgatatgactgagattt

SEQ ID NO: 195700 - DNA, 25 bp, probe
ccactcaagctgaagctcctggact

SEQ ID NO: 195701 - DNA, 25 bp, probe
ccactcaaggaaacgcgtgcaccct

SEQ ID NO: 195702 - DNA, 25 bp, probe
ccacgcagaagccgaaggtgagccc

SEQ ID NO: 195703 - DNA, 25 bp, probe
ccacgctaggtgaacaggggctgcc

SEQ ID NO: 195704 - DNA, 25 bp, probe
ccacctggcggtccagaggagcacc

SEQ ID NO: 195705 - DNA, 25 bp, probe
ccacgcggcaggtagcacagtgcgc

SEQ ID NO: 195706 - DNA, 25 bp, probe
ccacgctgcgggagaagctgcacgc

SEQ ID NO: 195707 - DNA, 25 bp, probe
ccacgctgcgggagaagctgcacgc

SEQ ID NO: 195708 - DNA, 25 bp, probe
ccacggggcagggatacatctcgag

SEQ ID NO: 195709 - DNA, 25 bp, probe
ccacaagggcctctactgtcagggc

SEQ ID NO: 195710 - DNA, 25 bp, probe
ccaaattggcctctcaactcacagg

SEQ ID NO: 195711 - DNA, 25 bp, probe
ccaaattgactctctaaatctggtg

SEQ ID NO: 195712 - DNA, 25 bp, probe
ccaaagagaccatgaaagccggtat

SEQ ID NO: 195713 - DNA, 25 bp, probe
ccaaggggcgggtgaagctggtcat

SEQ ID NO: 195714 - DNA, 25 bp, probe
ccaagtcatgggagaagaggggtat

SEQ ID NO: 195715 - DNA, 25 bp, probe
ccaactcatgggataaaggggactc

SEQ ID NO: 195716 - DNA, 25 bp, probe
ccaacttggacaaacggcggagcct

SEQ ID NO: 195717 - DNA, 25 bp, probe
ccaactctcaaacacggaggtcatt

SEQ ID NO: 195718 - DNA, 25 bp, probe
ccaactctcaaacacggaggtcatt

SEQ ID NO: 195719 - DNA, 25 bp, probe
ccaactctcaaacacggaggtcatt

SEQ ID NO: 195720 - DNA, 25 bp, probe
ccaactccataccctcatgtaggta

SEQ ID NO: 195721 - DNA, 25 bp, probe
ccaaatcgagaccctctgacgactt

SEQ ID NO: 195722 - DNA, 25 bp, probe
gccagtcattgacagacggacttgt

SEQ ID NO: 195723 - DNA, 25 bp, probe
ccaacttggccgtcgaaagtgctgg

SEQ ID NO: 195724 - DNA, 25 bp, probe
ccaagtcggccattgaaaactcaag

SEQ ID NO: 195725 - DNA, 25 bp, probe
ccaagtggcacctgatttactctag

SEQ ID NO: 195726 - DNA, 25 bp, probe
ccaaggagctactgacattcctaag

SEQ ID NO: 195727 - DNA, 25 bp, probe
ccacaggagctgacaggtttttcaa

SEQ ID NO: 195728 - DNA, 25 bp, probe
ccacggcagtgtttttggtctgcca

SEQ ID NO: 195729 - DNA, 25 bp, probe
ccacgaagacattttcgggctcacg

SEQ ID NO: 195730 - DNA, 25 bp, probe
gccaatgcagagctggttcgggtcc

SEQ ID NO: 195731 - DNA, 25 bp, probe
ccaacaaggatggcttccgcagccg

SEQ ID NO: 195732 - DNA, 25 bp, probe
ccaaaagggcttcaatgcgaaggac

SEQ ID NO: 195733 - DNA, 25 bp, probe
ccaaaaggccttagtgagcgagtca

SEQ ID NO: 195734 - DNA, 25 bp, probe
ccaaatggaccctgtggggtatagc

SEQ ID NO: 195735 - DNA, 25 bp, probe
ccaactggtcggcttcagagtttcc

SEQ ID NO: 195736 - DNA, 25 bp, probe
ccaactaatcatcatcttcaagttt

SEQ ID NO: 195737 - DNA, 25 bp, probe
ccagcctacattcacttctaaagtc

SEQ ID NO: 195738 - DNA, 25 bp, probe
ccacgtacgctgatcttggcaaatc

SEQ ID NO: 195739 - DNA, 25 bp, probe
ccacgtacgctgatcttggcaaatc

SEQ ID NO: 195740 - DNA, 25 bp, probe
ccacgctgacaggtgtgcttgaaag

SEQ ID NO: 195741 - DNA, 25 bp, probe
ccacgtgtcagcagctgtggccaag

SEQ ID NO: 195742 - DNA, 25 bp, probe
ccacgtgtcagcagctgtggccaag

SEQ ID NO: 195743 - DNA, 25 bp, probe
ccacgggcatcatcatgtaccgctg

SEQ ID NO: 195744 - DNA, 25 bp, probe
ccacgggcatcatcatgtaccgctg

SEQ ID NO: 195745 - DNA, 25 bp, probe
ccacggagatctccatgtacacgct

SEQ ID NO: 195746 - DNA, 25 bp, probe
gccacttgattggtcagtacccaga

SEQ ID NO: 195747 - DNA, 25 bp, probe
ccacctggcatttggtacccaaggg

SEQ ID NO: 195748 - DNA, 25 bp, probe
ccacctatttatctgagcccacagg

SEQ ID NO: 195749 - DNA, 25 bp, probe
ccacctatttatctgagcccacagg

SEQ ID NO: 195750 - DNA, 25 bp, probe
ccaccatctctgccatgagtgagcc

SEQ ID NO: 195751 - DNA, 25 bp, probe
ccaccagcatcgacatgtgggctgt

SEQ ID NO: 195752 - DNA, 25 bp, probe
ccaccagcatcgacatgtgggctgt

SEQ ID NO: 195753 - DNA, 25 bp, probe
ccactggatggcaagggcacgctgc

SEQ ID NO: 195754 - DNA, 25 bp, probe
ccactggcgtcttcaccaccatgga

SEQ ID NO: 195755 - DNA, 25 bp, probe
ccactggctctcaacacatagtagg

SEQ ID NO: 195756 - DNA, 25 bp, probe
ccaccagctcttcgatctgattgaa

SEQ ID NO: 195757 - DNA, 25 bp, probe
ccaccagctcttcgatctgattgaa

SEQ ID NO: 195758 - DNA, 25 bp, probe
ccaactgctcttcacgaagtgactc

SEQ ID NO: 195759 - DNA, 25 bp, probe
gccaacgcttggaggaagatatcat

SEQ ID NO: 195760 - DNA, 25 bp, probe
gccaacgcttggaggaagatatcat

SEQ ID NO: 195761 - DNA, 25 bp, probe
ccacgagtttgcggtgaagattatg

SEQ ID NO: 195762 - DNA, 25 bp, probe
ccacgagttgctgaatggcagcttg

SEQ ID NO: 195763 - DNA, 25 bp, probe
ccacgatggtctgctctggagcatt

SEQ ID NO: 195764 - DNA, 25 bp, probe
ccacctatgtatggtcatggaatac

SEQ ID NO: 195765 - DNA, 25 bp, probe
ccagccaagtacacacgatgatagc

SEQ ID NO: 195766 - DNA, 25 bp, probe
ccaccctgattcatccgagatcagc

SEQ ID NO: 195767 - DNA, 25 bp, probe
ccacctctgtcacttccagtgaagt

SEQ ID NO: 195768 - DNA, 25 bp, probe
ccaccttctgcgatcactgtgggtc

SEQ ID NO: 195769 - DNA, 25 bp, probe
ccaccctgctggaccaaggtgcgga

SEQ ID NO: 195770 - DNA, 25 bp, probe
ccaccacttgtgtccatggagcatc

SEQ ID NO: 195771 - DNA, 25 bp, probe
ccaaactaaaaaagagcatcctcga

SEQ ID NO: 195772 - DNA, 25 bp, probe
tccaaagggaacgacattgccctgc

SEQ ID NO: 195773 - DNA, 25 bp, probe
ccaaagggaacgacattgccctgct

SEQ ID NO: 195774 - DNA, 25 bp, probe
ccaagaggagcttcaggacgccctg

SEQ ID NO: 195775 - DNA, 25 bp, probe
ccaagaggagcttcaggacgccctg

SEQ ID NO: 195776 - DNA, 25 bp, probe
ccaaggggctgagcgatccagggaa

SEQ ID NO: 195777 - DNA, 25 bp, probe
ccacagtggtgggggcccacgagga

SEQ ID NO: 195778 - DNA, 25 bp, probe
ccacggtgttgtgagtccacatgag

SEQ ID NO: 195779 - DNA, 25 bp, probe
ccaagctgatgagtttccttcctga

SEQ ID NO: 195780 - DNA, 25 bp, probe
ccaagtggtttccacatgctctgag

SEQ ID NO: 195781 - DNA, 25 bp, probe
gccatggggtttgcttgcttaggag

SEQ ID NO: 195782 - DNA, 25 bp, probe
gccatggggtttgcttgcttaggag

SEQ ID NO: 195783 - DNA, 25 bp, probe
gcgacgggtaatgcggcattgatgc

SEQ ID NO: 195784 - DNA, 25 bp, probe
ccacgggctacatcatatgctttgt

SEQ ID NO: 195785 - DNA, 25 bp, probe
ccacggcactccgcgagctgtatcg

SEQ ID NO: 195786 - DNA, 25 bp, probe
ccacggccctgaggcggatgtatgg

SEQ ID NO: 195787 - DNA, 25 bp, probe
ccacgacctctaagccgagagagga

SEQ ID NO: 195788 - DNA, 25 bp, probe
ccacgacctctaagccgagagagga

SEQ ID NO: 195789 - DNA, 25 bp, probe
ccactgatcccaaaggctgggagaa

SEQ ID NO: 195790 - DNA, 25 bp, probe
ccaccataaaacccttgagcacaac

SEQ ID NO: 195791 - DNA, 25 bp, probe
ccaccatggacaaatgcctatgaaa

SEQ ID NO: 195792 - DNA, 25 bp, probe
ccaccaggctcaagatgctggaggt

SEQ ID NO: 195793 - DNA, 25 bp, probe
ccaccagtccattgggcaggcagat

SEQ ID NO: 195794 - DNA, 25 bp, probe
ccacacagcccagaaggccagaaaa

SEQ ID NO: 195795 - DNA, 25 bp, probe
ccactagcccaggcacaggtcaaga

SEQ ID NO: 195796 - DNA, 25 bp, probe
ccacatggcctccaaggagtaagac

SEQ ID NO: 195797 - DNA, 25 bp, probe
ccactgcactctgcaaccagtgttg

SEQ ID NO: 195798 - DNA, 25 bp, probe
ccactgcactctgcaaccagtgttg

SEQ ID NO: 195799 - DNA, 25 bp, probe
ccaccacggacaactcagtgctgga

SEQ ID NO: 195800 - DNA, 25 bp, probe
ccaccacggacaactcagtgctgga

SEQ ID NO: 195801 - DNA, 25 bp, probe
ccaccacgcctaagtagtctcaagt

SEQ ID NO: 195802 - DNA, 25 bp, probe
ccacgcccttagatttctgcatgag

SEQ ID NO: 195803 - DNA, 25 bp, probe
ccacagtgcctattgatacttgggg

SEQ ID NO: 195804 - DNA, 25 bp, probe
ccacctgcaccttcaagctaggagg

SEQ ID NO: 195805 - DNA, 25 bp, probe
ccacctgccctgctacaggaagagt

SEQ ID NO: 195806 - DNA, 25 bp, probe
ccacctgccaggcctacgaattggc

SEQ ID NO: 195807 - DNA, 25 bp, probe
ccaactgaagtgccgactggaccgc

SEQ ID NO: 195808 - DNA, 25 bp, probe
tccattggaagtcccctgaaaggtc

SEQ ID NO: 195809 - DNA, 25 bp, probe
ccaccgaagggtactgaagagcctc

SEQ ID NO: 195810 - DNA, 25 bp, probe
ccaccgcaaatgcttctaggcggac

SEQ ID NO: 195811 - DNA, 25 bp, probe
ccaccgccatggcttccaaggtggt

SEQ ID NO: 195812 - DNA, 25 bp, probe
ccaccgccatggcttccaaggtggt

SEQ ID NO: 195813 - DNA, 25 bp, probe
ccacaccctgggttctgagaaactt

SEQ ID NO: 195814 - DNA, 25 bp, probe
ccacacccggtgtatccaataaagt

SEQ ID NO: 195815 - DNA, 25 bp, probe
ccacatccatcggcggatccaatgg

SEQ ID NO: 195816 - DNA, 25 bp, probe
ccaccacactgcaaggacacttgaa

SEQ ID NO: 195817 - DNA, 25 bp, probe
ccacctagctgtagcagacacgctg

SEQ ID NO: 195818 - DNA, 25 bp, probe
ccacccatgagatcaggctgcttga

SEQ ID NO: 195819 - DNA, 25 bp, probe
ccacctctgggaagctgagcatgtg

SEQ ID NO: 195820 - DNA, 25 bp, probe
ccaccggaggcaattgcactgtgta

SEQ ID NO: 195821 - DNA, 25 bp, probe
ccacgggtgtaagtgccatctggta

SEQ ID NO: 195822 - DNA, 25 bp, probe
ccactgtgggtgaagcgcctcagtt

SEQ ID NO: 195823 - DNA, 25 bp, probe
ccacgagggtgaatgcggctgacat

SEQ ID NO: 195824 - DNA, 25 bp, probe
ccacggagactgctgcacaggagaa

SEQ ID NO: 195825 - DNA, 25 bp, probe
ccacggaactgacgcagtcgcagat

SEQ ID NO: 195826 - DNA, 25 bp, probe
ccacggaactgacgcagtcgcagat

SEQ ID NO: 195827 - DNA, 25 bp, probe
ccacagtaattggtcatgtgatgca

SEQ ID NO: 195828 - DNA, 25 bp, probe
ccacattgatattctactggccatg

SEQ ID NO: 195829 - DNA, 25 bp, probe
ccacctctctgaatagtgtgtatgt

SEQ ID NO: 195830 - DNA, 25 bp, probe
ccactcctcgagtcagatggttctg

SEQ ID NO: 195831 - DNA, 25 bp, probe
ccacgtccagcagcgagagcttgtg

SEQ ID NO: 195832 - DNA, 25 bp, probe
ccacctcaccatggcagaggtgtgc

SEQ ID NO: 195833 - DNA, 25 bp, probe
ccacctcacacagctgctgcaggtg

SEQ ID NO: 195834 - DNA, 25 bp, probe
ccaccatgaccaacttcagctggct

SEQ ID NO: 195835 - DNA, 25 bp, probe
gcgacttaccaaaatcagccagttt

SEQ ID NO: 195836 - DNA, 25 bp, probe
gcgacttaccaaaatcagccagttt

SEQ ID NO: 195837 - DNA, 25 bp, probe
gcagacttaccgttaccacggacac

SEQ ID NO: 195838 - DNA, 25 bp, probe
gcagacttaccgttaccacggacac

SEQ ID NO: 195839 - DNA, 25 bp, probe
ccacttggagcggtacccggacagt

SEQ ID NO: 195840 - DNA, 25 bp, probe
gccagccaaaaggtaccccgatggc

SEQ ID NO: 195841 - DNA, 25 bp, probe
gccgacacggtgagaccaccgtgtg

SEQ ID NO: 195842 - DNA, 25 bp, probe
ccaacacagttgccaaacccattga

SEQ ID NO: 195843 - DNA, 25 bp, probe
ccaaagcagtgcacaattccgtggc

SEQ ID NO: 195844 - DNA, 25 bp, probe
ccaaagcagtgcatgctgtccctta

SEQ ID NO: 195845 - DNA, 25 bp, probe
ccaatggctggcagcttttcagcaa

SEQ ID NO: 195846 - DNA, 25 bp, probe
ccacgttggcagaatcatttacata

SEQ ID NO: 195847 - DNA, 25 bp, probe
ccacgtctgagaccattcagtacag

SEQ ID NO: 195848 - DNA, 25 bp, probe
ccactttgagtggatccagaagctg

SEQ ID NO: 195849 - DNA, 25 bp, probe
ccaccattcctggccacagaatgct

SEQ ID NO: 195850 - DNA, 25 bp, probe
ccaccattcctggccacagaatgct

SEQ ID NO: 195851 - DNA, 25 bp, probe
ccaccatattatgcatgcccacagg

SEQ ID NO: 195852 - DNA, 25 bp, probe
ccaccatattatgcatgcccacagg

SEQ ID NO: 195853 - DNA, 25 bp, probe
ccaccagattacaatcctgaaggga

SEQ ID NO: 195854 - DNA, 25 bp, probe
ccacccattgaagtctccttgggcc

SEQ ID NO: 195855 - DNA, 25 bp, probe
ccaccatttgaatctgggctggcac

SEQ ID NO: 195856 - DNA, 25 bp, probe
ccaccatttgagagctcaccttgca

SEQ ID NO: 195857 - DNA, 25 bp, probe
ccacgtttgtggacaccagtgtgaa

SEQ ID NO: 195858 - DNA, 25 bp, probe
ccacgtttgtggacaccagtgtgaa

SEQ ID NO: 195859 - DNA, 25 bp, probe
ccactttttgttgggcaatatgaaa

SEQ ID NO: 195860 - DNA, 25 bp, probe
ccactttttgttgggcaatatgaaa

SEQ ID NO: 195861 - DNA, 25 bp, probe
ccacattttcttatggcattaaaaa

SEQ ID NO: 195862 - DNA, 25 bp, probe
ccacttttccatggggattcagaaa

SEQ ID NO: 195863 - DNA, 25 bp, probe
ccactggtttcaggatactcatcag

SEQ ID NO: 195864 - DNA, 25 bp, probe
ccaccgtcattgtctgtgactgcta

SEQ ID NO: 195865 - DNA, 25 bp, probe
ccacggcttgtgtctgattccatat

SEQ ID NO: 195866 - DNA, 25 bp, probe
ccaagcctggtgtctataccaaagt

SEQ ID NO: 195867 - DNA, 25 bp, probe
ccaagtcagtggtcttaattgaaat

SEQ ID NO: 195868 - DNA, 25 bp, probe
ccacctccaggctctagatggcaaa

SEQ ID NO: 195869 - DNA, 25 bp, probe
ccacaggccaagttctaagacaaag

SEQ ID NO: 195870 - DNA, 25 bp, probe
ccaacgtcatcgttgccaacacaat

SEQ ID NO: 195871 - DNA, 25 bp, probe
ccaacggactgatttagaagagaac

SEQ ID NO: 195872 - DNA, 25 bp, probe
ccaccgggcatttggtgaagatcat

SEQ ID NO: 195873 - DNA, 25 bp, probe
ccacagctgggagagggaatgttcc

SEQ ID NO: 195874 - DNA, 25 bp, probe
ccacagggttctgagaacatttcac

SEQ ID NO: 195875 - DNA, 25 bp, probe
ccaaattacctcagaatatttccaa

SEQ ID NO: 195876 - DNA, 25 bp, probe
ccaagatatcccaggacgtttgctt

SEQ ID NO: 195877 - DNA, 25 bp, probe
ccaagttgcctcatctacaatttga

SEQ ID NO: 195878 - DNA, 25 bp, probe
ccaatatcccataggctaactttaa

SEQ ID NO: 195879 - DNA, 25 bp, probe
ccaaacccatcagcgcaatacttga

SEQ ID NO: 195880 - DNA, 25 bp, probe
ccaatcgccgcatacagctaacaaa

SEQ ID NO: 195881 - DNA, 25 bp, probe
ccaatcgccgcatacagctaacaaa

SEQ ID NO: 195882 - DNA, 25 bp, probe
ccaacttcaagtaagcggcaacaag

SEQ ID NO: 195883 - DNA, 25 bp, probe
ccacacctaaccagggaatcaggaa

SEQ ID NO: 195884 - DNA, 25 bp, probe
ccacacctaaccagggaatcaggaa

SEQ ID NO: 195885 - DNA, 25 bp, probe
ccaactccttcgtgggcacaaggtc

SEQ ID NO: 195886 - DNA, 25 bp, probe
ccacctccccgtaggagcagagagc

SEQ ID NO: 195887 - DNA, 25 bp, probe
ccacctccccgtaggagcagagagc

SEQ ID NO: 195888 - DNA, 25 bp, probe
ccacctcccggtgtatgcagtggtg

SEQ ID NO: 195889 - DNA, 25 bp, probe
gcccaaacctggtttgacagtcgtt

SEQ ID NO: 195890 - DNA, 25 bp, probe
gcctaaggccctttgtgtaaggtgt

SEQ ID NO: 195891 - DNA, 25 bp, probe
ccaacgtcatccacctggagggtgt

SEQ ID NO: 195892 - DNA, 25 bp, probe
ccaaagtctgccactacttggagtg

SEQ ID NO: 195893 - DNA, 25 bp, probe
tctaaagttccagaagccttcctga

SEQ ID NO: 195894 - DNA, 25 bp, probe
gctaacgcttccagaccgcggccta

SEQ ID NO: 195895 - DNA, 25 bp, probe
gctaagtctaacactcctgggagct

SEQ ID NO: 195896 - DNA, 25 bp, probe
gctaagtctaacactcctgggagct

SEQ ID NO: 195897 - DNA, 25 bp, probe
ccaaccacaacaactcggagcggtc

SEQ ID NO: 195898 - DNA, 25 bp, probe
ccaaccacaacaactcggagcggtc

SEQ ID NO: 195899 - DNA, 25 bp, probe
ccacaacgcagggactcctaggggc

SEQ ID NO: 195900 - DNA, 25 bp, probe
ccacagaccagatgtccactgagat

SEQ ID NO: 195901 - DNA, 25 bp, probe
ccaagaccactggtgctagctgcac

SEQ ID NO: 195902 - DNA, 25 bp, probe
ccacaaacactgcagagaccaggtg

SEQ ID NO: 195903 - DNA, 25 bp, probe
ccacaaatgccacagcagcgtcaga

SEQ ID NO: 195904 - DNA, 25 bp, probe
ccacaaatgccacagcagcgtcagg

SEQ ID NO: 195905 - DNA, 25 bp, probe
ccaccctgccatctgaggaaggggt

SEQ ID NO: 195906 - DNA, 25 bp, probe
ccactgcttcttgggaggagtggtg

SEQ ID NO: 195907 - DNA, 25 bp, probe
ccacgcattcttcaggagtgtggca

SEQ ID NO: 195908 - DNA, 25 bp, probe
ccacctgtcactcatggccaggaga

SEQ ID NO: 195909 - DNA, 25 bp, probe
ccacctgtgtccctgactcagggtg

SEQ ID NO: 195910 - DNA, 25 bp, probe
ccacctgtgtccctgactcagggtg

SEQ ID NO: 195911 - DNA, 25 bp, probe
ccaccgtgtgcacgcagtttgggct

SEQ ID NO: 195912 - DNA, 25 bp, probe
ccacggctggagcgtgcagagggct

SEQ ID NO: 195913 - DNA, 25 bp, probe
ccacggagggcgtctgcagagaggc

SEQ ID NO: 195914 - DNA, 25 bp, probe
ccactgctatgggcggctggaggag

SEQ ID NO: 195915 - DNA, 25 bp, probe
ccacttgtgctggggcaggagctga

SEQ ID NO: 195916 - DNA, 25 bp, probe
ccaccgctggctgggaggagtcgga

SEQ ID NO: 195917 - DNA, 25 bp, probe
ccacctctgcctaggcgagggagga

SEQ ID NO: 195918 - DNA, 25 bp, probe
ccacccccaatacgacaggaagact

SEQ ID NO: 195919 - DNA, 25 bp, probe
ccaccctcttcttgcgaaaggttct

SEQ ID NO: 195920 - DNA, 25 bp, probe
ccaccctcttcttgcgaaaggttct

SEQ ID NO: 195921 - DNA, 25 bp, probe
ccaccccagcccttaaaggcatgtt

SEQ ID NO: 195922 - DNA, 25 bp, probe
ccaccctatgacgaaaaagcagcta

SEQ ID NO: 195923 - DNA, 25 bp, probe
ccacggaaacagaactcgatgcact

SEQ ID NO: 195924 - DNA, 25 bp, probe
ccacagcctactggaagctctgacc

SEQ ID NO: 195925 - DNA, 25 bp, probe
ccacagcctactggaagctctgacc

SEQ ID NO: 195926 - DNA, 25 bp, probe
ccacgcaaacatgggtgctcttgga

SEQ ID NO: 195927 - DNA, 25 bp, probe
ccacctctgcaagggtgtgcctgga

SEQ ID NO: 195928 - DNA, 25 bp, probe
ccacgctctaagttgttgatctcta

SEQ ID NO: 195929 - DNA, 25 bp, probe
ccacctgatcagctggttattgcta

SEQ ID NO: 195930 - DNA, 25 bp, probe
ccactgctgtggaggtttctgtacc

SEQ ID NO: 195931 - DNA, 25 bp, probe
ccacaggggatgggatttctgattc

SEQ ID NO: 195932 - DNA, 25 bp, probe
ccacaggtgggcccatattctggtg

SEQ ID NO: 195933 - DNA, 25 bp, probe
ccacaggggtggccatatttgggca

SEQ ID NO: 195934 - DNA, 25 bp, probe
ccacggtgagggccgatgtctggga

SEQ ID NO: 195935 - DNA, 25 bp, probe
ccacggtgagggccgatgtctggga

SEQ ID NO: 195936 - DNA, 25 bp, probe
ccacgacgatgcggacgtgtgggcc

SEQ ID NO: 195937 - DNA, 25 bp, probe
ccacgacgatgcggacgtgtgggcc

SEQ ID NO: 195938 - DNA, 25 bp, probe
ccactgacttgtgatcctgtggcca

SEQ ID NO: 195939 - DNA, 25 bp, probe
ccactacatgtgtgacatccttccc

SEQ ID NO: 195940 - DNA, 25 bp, probe
ccactacatgtgtgacatccttccc

SEQ ID NO: 195941 - DNA, 25 bp, probe
ccacaatcttgctgacgtcttgact

SEQ ID NO: 195942 - DNA, 25 bp, probe
ccacacatctgttggacttttgtcc

SEQ ID NO: 195943 - DNA, 25 bp, probe
ccacacatctgttggacttttgtcc

SEQ ID NO: 195944 - DNA, 25 bp, probe
ccaaactgccttcgtttggtccagg

SEQ ID NO: 195945 - DNA, 25 bp, probe
ccaaagctcctggtggttgacatcc

SEQ ID NO: 195946 - DNA, 25 bp, probe
ccaacagcctctgtgagagatgccc

SEQ ID NO: 195947 - DNA, 25 bp, probe
ccaaatgcacctgtgcagctgcacc

SEQ ID NO: 195948 - DNA, 25 bp, probe
gccaagatacccttagtgaccaacg

SEQ ID NO: 195949 - DNA, 25 bp, probe
ccaagctgaattttaatgaccaacg

SEQ ID NO: 195950 - DNA, 25 bp, probe
ccaagctgaattttaatgaccaacg

SEQ ID NO: 195951 - DNA, 25 bp, probe
ccaacagatggttctcagacccgac

SEQ ID NO: 195952 - DNA, 25 bp, probe
ccaatagttgctttaatcccttcct

SEQ ID NO: 195953 - DNA, 25 bp, probe
gccaatagttgctttaatcccttcc

SEQ ID NO: 195954 - DNA, 25 bp, probe
gccaatagttgctttaatcccttcc

SEQ ID NO: 195955 - DNA, 25 bp, probe
gccaaagttctagagaccctgttcc

SEQ ID NO: 195956 - DNA, 25 bp, probe
gcctcagtgtatgggaaaccctttc

SEQ ID NO: 195957 - DNA, 25 bp, probe
ccacgatgccaaggcagaacccatt

SEQ ID NO: 195958 - DNA, 25 bp, probe
ccacgatgccaaggcagaacccatt

SEQ ID NO: 195959 - DNA, 25 bp, probe
gccaaggtcaaccagtacccttaca

SEQ ID NO: 195960 - DNA, 25 bp, probe
gccaggggcagacaaaaccctcaat

SEQ ID NO: 195961 - DNA, 25 bp, probe
ccactgctggaaaaaggaccctgaa

SEQ ID NO: 195962 - DNA, 25 bp, probe
ccactgctggaaaaaggaccctgaa

SEQ ID NO: 195963 - DNA, 25 bp, probe
gccaccgagaaacatgataaccaaa

SEQ ID NO: 195964 - DNA, 25 bp, probe
gccaccgagaaacatgataaccaaa

SEQ ID NO: 195965 - DNA, 25 bp, probe
ccaccgggagagatgctgagaaaaa

SEQ ID NO: 195966 - DNA, 25 bp, probe
ccaacccaagctctgcggaaatcaa

SEQ ID NO: 195967 - DNA, 25 bp, probe
ccaccctcaagtctgacgatgacac

SEQ ID NO: 195968 - DNA, 25 bp, probe
ccacgtgccaagactagctcagaaa

SEQ ID NO: 195969 - DNA, 25 bp, probe
ccacctggccatgtgacatcaataa

SEQ ID NO: 195970 - DNA, 25 bp, probe
ccacctggccatgtgacatcaataa

SEQ ID NO: 195971 - DNA, 25 bp, probe
ccacctggatcagttgtctcagctg

SEQ ID NO: 195972 - DNA, 25 bp, probe
ccaacgggcatgacttccagatgtt

SEQ ID NO: 195973 - DNA, 25 bp, probe
ccacactggcgaaccatctcaatgt

SEQ ID NO: 195974 - DNA, 25 bp, probe
ccacatgtgggactcctatctatat

SEQ ID NO: 195975 - DNA, 25 bp, probe
ccaaggaggactacgtcgatctagg

SEQ ID NO: 195976 - DNA, 25 bp, probe
ccaagccggagcacgaggatcaggg

SEQ ID NO: 195977 - DNA, 25 bp, probe
ccaccccgacagacactgtgaacgg

SEQ ID NO: 195978 - DNA, 25 bp, probe
ccaccctatgactaactggaagagg

SEQ ID NO: 195979 - DNA, 25 bp, probe
ccaaagtgatgatgtacgcggcaag

SEQ ID NO: 195980 - DNA, 25 bp, probe
ccaaagtgatgatgtacgcggcaag

SEQ ID NO: 195981 - DNA, 25 bp, probe
ccacaagcagattactgcacgggca

SEQ ID NO: 195982 - DNA, 25 bp, probe
ccactagcaatcaagccacaggcct

SEQ ID NO: 195983 - DNA, 25 bp, probe
ccacccaatcattctaaagcagcct

SEQ ID NO: 195984 - DNA, 25 bp, probe
ccacgcttgatctacttcaagagca

SEQ ID NO: 195985 - DNA, 25 bp, probe
ccacgcttgatctacttcaagagca

SEQ ID NO: 195986 - DNA, 25 bp, probe
ccacccatggcaaattccatggcac

SEQ ID NO: 195987 - DNA, 25 bp, probe
ccacgtcatggaacacctatggatc

SEQ ID NO: 195988 - DNA, 25 bp, probe
ccacttctggaactactttatctac

SEQ ID NO: 195989 - DNA, 25 bp, probe
ccacttctttcaatactatcttttc

SEQ ID NO: 195990 - DNA, 25 bp, probe
ccacttctttcaatactatcttttc

SEQ ID NO: 195991 - DNA, 25 bp, probe
ccactgtccctcaaacaatgtcatt

SEQ ID NO: 195992 - DNA, 25 bp, probe
ccactgtccctcaaacaatgtcatt

SEQ ID NO: 195993 - DNA, 25 bp, probe
ccactttccagcaagcacagatgta

SEQ ID NO: 195994 - DNA, 25 bp, probe
gccagctttgcaggttatcagagat

SEQ ID NO: 195995 - DNA, 25 bp, probe
ccacttctcagaaaatgcagcagac

SEQ ID NO: 195996 - DNA, 25 bp, probe
ccacttccgacaaatgggtctcaag

SEQ ID NO: 195997 - DNA, 25 bp, probe
ccaaccttgacaaatggcttccaat

SEQ ID NO: 195998 - DNA, 25 bp, probe
ccaaacttggcacatgtccttcacg

SEQ ID NO: 195999 - DNA, 25 bp, probe
ccaaacttggcacatgtccttcacg

SEQ ID NO: 196000 - DNA, 25 bp, probe
gccaaactgtacagtttcttcccca

SEQ ID NO: 196001 - DNA, 25 bp, probe
ccaagaacatccgagtttcttctct

SEQ ID NO: 196002 - DNA, 25 bp, probe
ccaagacactgggcttcaaatctcc

SEQ ID NO: 196003 - DNA, 25 bp, probe
ccaaacgctggtcacaacagcccac

SEQ ID NO: 196004 - DNA, 25 bp, probe
ccaaacgctggtcacaacagcccac

SEQ ID NO: 196005 - DNA, 25 bp, probe
ccacagcaagtgctaagacaccccc

SEQ ID NO: 196006 - DNA, 25 bp, probe
ccactctcagggtaacaatgcctca

SEQ ID NO: 196007 - DNA, 25 bp, probe
ccacttgcgtggagccaaggctcct

SEQ ID NO: 196008 - DNA, 25 bp, probe
ccacttgctttgagataaaacctga

SEQ ID NO: 196009 - DNA, 25 bp, probe
ccacttgctttgagataaaacctga

SEQ ID NO: 196010 - DNA, 25 bp, probe
gcccttgctttctgaaaatcaggta

SEQ ID NO: 196011 - DNA, 25 bp, probe
gccatctaccttgggatcaaacgga

SEQ ID NO: 196012 - DNA, 25 bp, probe
gccatctaccttgggatcaaacgga

SEQ ID NO: 196013 - DNA, 25 bp, probe
gccactaccctgggattaatcttgg

SEQ ID NO: 196014 - DNA, 25 bp, probe
gccactaccctgggattaatcttgg

SEQ ID NO: 196015 - DNA, 25 bp, probe
ccacttccctgggttagactgccag

SEQ ID NO: 196016 - DNA, 25 bp, probe
tccggtccattggccttaagtgtct

SEQ ID NO: 196017 - DNA, 25 bp, probe
gcgggtagttgcacggacaattcgg

SEQ ID NO: 196018 - DNA, 25 bp, probe
gcggtgaagttgaggcttataagtt

SEQ ID NO: 196019 - DNA, 25 bp, probe
gcggtgaagttgaggcttataagtt

SEQ ID NO: 196020 - DNA, 25 bp, probe
gcgggaagagtgaggactggaacaa

SEQ ID NO: 196021 - DNA, 25 bp, probe
gccgtgtggacgaagtttggcccaa

SEQ ID NO: 196022 - DNA, 25 bp, probe
gccagctttacgttctattagccca

SEQ ID NO: 196023 - DNA, 25 bp, probe
ccacttctcagcgattcacatgtag

SEQ ID NO: 196024 - DNA, 25 bp, probe
ccaattcctgtggtgacgtcagacc

SEQ ID NO: 196025 - DNA, 25 bp, probe
ccacactcctatggtcacagacttc

SEQ ID NO: 196026 - DNA, 25 bp, probe
ccactatagttcatcaagacttagc

SEQ ID NO: 196027 - DNA, 25 bp, probe
tctactctagttgaaactctgtaca

SEQ ID NO: 196028 - DNA, 25 bp, probe
tctatcctaaatgttcccttgaagt

SEQ ID NO: 196029 - DNA, 25 bp, probe
tctatcctaaatgttcccttgaagt

SEQ ID NO: 196030 - DNA, 25 bp, probe
tctctactaaatattagcggggtgt

SEQ ID NO: 196031 - DNA, 25 bp, probe
gcctgaccaaaaatatactgggttt

SEQ ID NO: 196032 - DNA, 25 bp, probe
gcctacctaacggaagggagcaatg

SEQ ID NO: 196033 - DNA, 25 bp, probe
tcctacccaactagaagggaaacag

SEQ ID NO: 196034 - DNA, 25 bp, probe
tccgaggtcgacacaaggtacttcg

SEQ ID NO: 196035 - DNA, 25 bp, probe
tccttcgtgggcacaaggtcctaca

SEQ ID NO: 196036 - DNA, 25 bp, probe
gcctttgttggagagaggttccgga

SEQ ID NO: 196037 - DNA, 25 bp, probe
gccaattttgtacacatggataccg

SEQ ID NO: 196038 - DNA, 25 bp, probe
ccactttgagtacgtcaagaatgag

SEQ ID NO: 196039 - DNA, 25 bp, probe
ccactgttgtatacgcttattgaga

SEQ ID NO: 196040 - DNA, 25 bp, probe
gcctccatttacagcttttagccag

SEQ ID NO: 196041 - DNA, 25 bp, probe
gcctttttagtcagtttcatgccat

SEQ ID NO: 196042 - DNA, 25 bp, probe
gcctatttatatcctggtacctgta

SEQ ID NO: 196043 - DNA, 25 bp, probe
ccacacttagtcctgatgtacttta

SEQ ID NO: 196044 - DNA, 25 bp, probe
ccactcctagctctttaactgtagg

SEQ ID NO: 196045 - DNA, 25 bp, probe
ccacccatgacctttttcactgtgg

SEQ ID NO: 196046 - DNA, 25 bp, probe
ccaaatcaagtctctccatcacttg

SEQ ID NO: 196047 - DNA, 25 bp, probe
ccacaccaggtcttccgatcagtgg

SEQ ID NO: 196048 - DNA, 25 bp, probe
ccacccatggtcttcagccatgtgg

SEQ ID NO: 196049 - DNA, 25 bp, probe
ccacatccaggaagtagtgcaggtg

SEQ ID NO: 196050 - DNA, 25 bp, probe
ccacatccaggaagtcctaggagct

SEQ ID NO: 196051 - DNA, 25 bp, probe
ccacatcatagtcagctcccgtggg

SEQ ID NO: 196052 - DNA, 25 bp, probe
ccaactataccactgcattgggacg

SEQ ID NO: 196053 - DNA, 25 bp, probe
ccaagcttgaccgcattggcaaagg

SEQ ID NO: 196054 - DNA, 25 bp, probe
ccaacttgctcatgaccgacaaggg

SEQ ID NO: 196055 - DNA, 25 bp, probe
ccaacttgctcatgaccgacaaggg

SEQ ID NO: 196056 - DNA, 25 bp, probe
gcctacctccaaccctgaaagttgg

SEQ ID NO: 196057 - DNA, 25 bp, probe
gcctaccctaagtttatagaatctg

SEQ ID NO: 196058 - DNA, 25 bp, probe
ccaatccctgaaagattaagccctg

SEQ ID NO: 196059 - DNA, 25 bp, probe
ccaatgtccaaaactgctaaccctc

SEQ ID NO: 196060 - DNA, 25 bp, probe
ccaagaagtgaatctcgaaccgcat

SEQ ID NO: 196061 - DNA, 25 bp, probe
ccaaagatttcatccggcacttgat

SEQ ID NO: 196062 - DNA, 25 bp, probe
ccaaaatttctaggtgtgccactgc

SEQ ID NO: 196063 - DNA, 25 bp, probe
ccacaaatctttccaactctacgga

SEQ ID NO: 196064 - DNA, 25 bp, probe
ccacaaatctttccaactctacgga

SEQ ID NO: 196065 - DNA, 25 bp, probe
ccacgttctcattggcaacatctac

SEQ ID NO: 196066 - DNA, 25 bp, probe
ccacagtacatacggaagtctccaa

SEQ ID NO: 196067 - DNA, 25 bp, probe
ccaagggctataccaagtccatcga

SEQ ID NO: 196068 - DNA, 25 bp, probe
ccacggagttcacaacacagcagca

SEQ ID NO: 196069 - DNA, 25 bp, probe
ccacggagttcacaacacagcagca

SEQ ID NO: 196070 - DNA, 25 bp, probe
ccacggaagggcaataccagcagca

SEQ ID NO: 196071 - DNA, 25 bp, probe
ccacggaagggcaataccagcagca

SEQ ID NO: 196072 - DNA, 25 bp, probe
ccacaacacaggtctaaactcagca

SEQ ID NO: 196073 - DNA, 25 bp, probe
ccacatgaaaggctattgcactaca

SEQ ID NO: 196074 - DNA, 25 bp, probe
ccacggcagaggggtgtgcaacaac

SEQ ID NO: 196075 - DNA, 25 bp, probe
ccacggagggcaggtccaaagcctt

SEQ ID NO: 196076 - DNA, 25 bp, probe
ccacgagaaggtggacccggccatt

SEQ ID NO: 196077 - DNA, 25 bp, probe
ccacgaggacgtggaggcgctggcc

SEQ ID NO: 196078 - DNA, 25 bp, probe
ccaacaggatcacagacctgggcct

SEQ ID NO: 196079 - DNA, 25 bp, probe
ccaactcgaagtcatccatggaccc

SEQ ID NO: 196080 - DNA, 25 bp, probe
ccaactccggtgagccatggagccc

SEQ ID NO: 196081 - DNA, 25 bp, probe
ccaaataagattccccattggctcc

SEQ ID NO: 196082 - DNA, 25 bp, probe
ccaaacaaaagcaggctagagccag

SEQ ID NO: 196083 - DNA, 25 bp, probe
ccaaggaataactggcgggcacagg

SEQ ID NO: 196084 - DNA, 25 bp, probe
gcgagggtaagggcggggcaactgc

SEQ ID NO: 196085 - DNA, 25 bp, probe
gcgaaggtaatagcaaggacaagaa

SEQ ID NO: 196086 - DNA, 25 bp, probe
ccaaagtcaacgcccaggactacaa

SEQ ID NO: 196087 - DNA, 25 bp, probe
ccaagcggagacgcaaggcctgtca

SEQ ID NO: 196088 - DNA, 25 bp, probe
ccaactgggagcctgaagtcctttt

SEQ ID NO: 196089 - DNA, 25 bp, probe
ccaactgggagcctgaagtcctttt

SEQ ID NO: 196090 - DNA, 25 bp, probe
ccaactgtacagatttgtttgttgt

SEQ ID NO: 196091 - DNA, 25 bp, probe
gccttcgtgaaggcttttgttcttt

SEQ ID NO: 196092 - DNA, 25 bp, probe
gccattcctgaagcgattggcttcg

SEQ ID NO: 196093 - DNA, 25 bp, probe
ccactgccaacgtgtcagtggtgga

SEQ ID NO: 196094 - DNA, 25 bp, probe
ccaacgaagcgtgatcagccgtgga

SEQ ID NO: 196095 - DNA, 25 bp, probe
ccaaatattcgtgacagcaggggca

SEQ ID NO: 196096 - DNA, 25 bp, probe
ccaacatcattcctgtgatcgagga

SEQ ID NO: 196097 - DNA, 25 bp, probe
ccaaatcagatcaagtcgggaactc

SEQ ID NO: 196098 - DNA, 25 bp, probe
ccaaaaaccagtcggcagaccacag

SEQ ID NO: 196099 - DNA, 25 bp, probe
ccaagaagacggctgcggagcctag

SEQ ID NO: 196100 - DNA, 25 bp, probe
ccaagcacgactggacgaggtccta

SEQ ID NO: 196101 - DNA, 25 bp, probe
ccaacacagtgctgtctggcggcac

SEQ ID NO: 196102 - DNA, 25 bp, probe
ccaacacagtgcttgattccaacca

SEQ ID NO: 196103 - DNA, 25 bp, probe
ccacagcagcggttgaacatcaagg

SEQ ID NO: 196104 - DNA, 25 bp, probe
ccacagcagcggttgaacatcaagg

SEQ ID NO: 196105 - DNA, 25 bp, probe
ccacagcagcggttgaacatcaagg

SEQ ID NO: 196106 - DNA, 25 bp, probe
ccacagcagcggttgaacatcaagg

SEQ ID NO: 196107 - DNA, 25 bp, probe
ccaatatgctagtaaacacaagagg

SEQ ID NO: 196108 - DNA, 25 bp, probe
ccaacatggcagctaacacatgaat

SEQ ID NO: 196109 - DNA, 25 bp, probe
ccaaatgagcaggtccaagacactt

SEQ ID NO: 196110 - DNA, 25 bp, probe
ccaaaggcatgctccagacataaat

SEQ ID NO: 196111 - DNA, 25 bp, probe
ccaaagacagctcctggccatatat

SEQ ID NO: 196112 - DNA, 25 bp, probe
ccacagaatatggcttggcctatgg

SEQ ID NO: 196113 - DNA, 25 bp, probe
ccacaactttgctgcctcaatggga

SEQ ID NO: 196114 - DNA, 25 bp, probe
ccacaatccattcatggccaagaag

SEQ ID NO: 196115 - DNA, 25 bp, probe
ccaaatccaatgctcctcacatatt

SEQ ID NO: 196116 - DNA, 25 bp, probe
ccaaatctagagcattgagcacttt

SEQ ID NO: 196117 - DNA, 25 bp, probe
ccaaatgcttagcagtgcccctgtg

SEQ ID NO: 196118 - DNA, 25 bp, probe
ccaaatgcttagcagtgcccctgtg

SEQ ID NO: 196119 - DNA, 25 bp, probe
ccaaatgatccgcgtcccgaatgct

SEQ ID NO: 196120 - DNA, 25 bp, probe
ccaaagccggtggacagcggaacat

SEQ ID NO: 196121 - DNA, 25 bp, probe
gccaaagcccttgactggcgagtca

SEQ ID NO: 196122 - DNA, 25 bp, probe
ccaaggtcctgtgcaaatagtgtca

SEQ ID NO: 196123 - DNA, 25 bp, probe
ccaaggccgtgtgtatgaacggcac

SEQ ID NO: 196124 - DNA, 25 bp, probe
ccaatggcgcggtgaggcaaggtga

SEQ ID NO: 196125 - DNA, 25 bp, probe
ccacttccagcttttgatcttgggg

SEQ ID NO: 196126 - DNA, 25 bp, probe
ccacttactgccttatgacctagga

SEQ ID NO: 196127 - DNA, 25 bp, probe
ccactttctggactggaccttagta

SEQ ID NO: 196128 - DNA, 25 bp, probe
ccactttctggactggaccttagta

SEQ ID NO: 196129 - DNA, 25 bp, probe
gccagcctttggaggcaccagtaaa

SEQ ID NO: 196130 - DNA, 25 bp, probe
gccagaatttggagtcccttgaatc

SEQ ID NO: 196131 - DNA, 25 bp, probe
ccaatccattggaagtcccctgaaa

SEQ ID NO: 196132 - DNA, 25 bp, probe
ccaatgccacagaggatcacccaga

SEQ ID NO: 196133 - DNA, 25 bp, probe
ccaatgccacagaggatcacccaga

SEQ ID NO: 196134 - DNA, 25 bp, probe
ccacattctgacttcagatccccaa

SEQ ID NO: 196135 - DNA, 25 bp, probe
ccacattctgacttcagatccccaa

SEQ ID NO: 196136 - DNA, 25 bp, probe
ccacatggctgacattagctctcac

SEQ ID NO: 196137 - DNA, 25 bp, probe
ccactgattacttcatgactgccac

SEQ ID NO: 196138 - DNA, 25 bp, probe
ccaatgttcacatctgcactcaagg

SEQ ID NO: 196139 - DNA, 25 bp, probe
ccaactgttatactaccagaaggct

SEQ ID NO: 196140 - DNA, 25 bp, probe
ccaacgtttgactacttacagagcg

SEQ ID NO: 196141 - DNA, 25 bp, probe
ccaacgtttgactacttacagagcg

SEQ ID NO: 196142 - DNA, 25 bp, probe
ccacaagttggaggtctaagtgacg

SEQ ID NO: 196143 - DNA, 25 bp, probe
gcccacaggggtggccatatttggg

SEQ ID NO: 196144 - DNA, 25 bp, probe
gcccacaggggtggccatatttggg

SEQ ID NO: 196145 - DNA, 25 bp, probe
gccaagggtggtgtccatttctggg

SEQ ID NO: 196146 - DNA, 25 bp, probe
ccaaggtgatgggcgtctgagtttc

SEQ ID NO: 196147 - DNA, 25 bp, probe
ccaaggtgatgggcgtctgagtttc

SEQ ID NO: 196148 - DNA, 25 bp, probe
gccaagttagagggccgagatgttg

SEQ ID NO: 196149 - DNA, 25 bp, probe
gccaatgtaggaacccaaaatgctt

SEQ ID NO: 196150 - DNA, 25 bp, probe
ccaatgtaggaacccaaaatgctta

SEQ ID NO: 196151 - DNA, 25 bp, probe
ccaagtgggcccggcaagattttag

SEQ ID NO: 196152 - DNA, 25 bp, probe
ccaagcaaggccgccaagttcttcc

SEQ ID NO: 196153 - DNA, 25 bp, probe
ccaagcggcagctggtgacactttt

SEQ ID NO: 196154 - DNA, 25 bp, probe
gccaacatcacgaggtgtaattttt

SEQ ID NO: 196155 - DNA, 25 bp, probe
ccaacatcacgaggtgtaattttta

SEQ ID NO: 196156 - DNA, 25 bp, probe
ccaactgcctaaggccctttgtgta

SEQ ID NO: 196157 - DNA, 25 bp, probe
ccaactgtttagggccctgatttgc

SEQ ID NO: 196158 - DNA, 25 bp, probe
ccaactgtttagggccctgatttgc

SEQ ID NO: 196159 - DNA, 25 bp, probe
ccaactgtttagggccctgatttgc

SEQ ID NO: 196160 - DNA, 25 bp, probe
ccaaatcatttgggagccccagtag

SEQ ID NO: 196161 - DNA, 25 bp, probe
ccaaacatatgatgggccccagtgg

SEQ ID NO: 196162 - DNA, 25 bp, probe
ccaaagacagtggtggtccggtgga

SEQ ID NO: 196163 - DNA, 25 bp, probe
ccaaagacagtggtggtccggtgga

SEQ ID NO: 196164 - DNA, 25 bp, probe
ccaaagacagtggtggtccggtgga

SEQ ID NO: 196165 - DNA, 25 bp, probe
ccaaatgtcagggttctgctcggct

SEQ ID NO: 196166 - DNA, 25 bp, probe
ccaacttgctggttatcgccgtgga

SEQ ID NO: 196167 - DNA, 25 bp, probe
ccaatcttggacctaccacttgaaa

SEQ ID NO: 196168 - DNA, 25 bp, probe
ccaatcctggaggtcatccattagg

SEQ ID NO: 196169 - DNA, 25 bp, probe
ccactccttggatttctcctggagc

SEQ ID NO: 196170 - DNA, 25 bp, probe
ccacaccagtggagtcttcgagact

SEQ ID NO: 196171 - DNA, 25 bp, probe
ccacatgccgtgttaagcattttac

SEQ ID NO: 196172 - DNA, 25 bp, probe
ccacaggcagctttaaccattaaaa

SEQ ID NO: 196173 - DNA, 25 bp, probe
ccaatggcattattaggtcttaaag

SEQ ID NO: 196174 - DNA, 25 bp, probe
ccaagacttatcagtctttatggag

SEQ ID NO: 196175 - DNA, 25 bp, probe
gctaagtagttcagttttgggaaag

SEQ ID NO: 196176 - DNA, 25 bp, probe
gcgaagaagtcctggtttgggaact

SEQ ID NO: 196177 - DNA, 25 bp, probe
gcggagtacctgttggtttgtcctg

SEQ ID NO: 196178 - DNA, 25 bp, probe
gcgctaaacctctggggttctggac

SEQ ID NO: 196179 - DNA, 25 bp, probe
gcgctaaacctctggggttctggac

SEQ ID NO: 196180 - DNA, 25 bp, probe
ccaacacaccccagggtgtgctgcc

SEQ ID NO: 196181 - DNA, 25 bp, probe
ccacacacaccatcatggtcctggt

SEQ ID NO: 196182 - DNA, 25 bp, probe
ccacaccacacgagcctcgtggtct

SEQ ID NO: 196183 - DNA, 25 bp, probe
ccacaccacacgagcctcgtggtct

SEQ ID NO: 196184 - DNA, 25 bp, probe
ccacatatcacaaacgactacggtc

SEQ ID NO: 196185 - DNA, 25 bp, probe
ccactgtcctccaaggctacaggac

SEQ ID NO: 196186 - DNA, 25 bp, probe
gccagctgtggctccgaggaaaatc

SEQ ID NO: 196187 - DNA, 25 bp, probe
ccacatgtggaagagaggagcggat

SEQ ID NO: 196188 - DNA, 25 bp, probe
ccactgcgaccacaagaaggatgat

SEQ ID NO: 196189 - DNA, 25 bp, probe
ccactgcgtccgcagagtggggctg

SEQ ID NO: 196190 - DNA, 25 bp, probe
ccactgtgggggcagagggagtggc

SEQ ID NO: 196191 - DNA, 25 bp, probe
ccacatgtctggcgggcaggcagag

SEQ ID NO: 196192 - DNA, 25 bp, probe
ccactgtgtggcagggggatggcag

SEQ ID NO: 196193 - DNA, 25 bp, probe
ccactgtgggctacggggacatgag

SEQ ID NO: 196194 - DNA, 25 bp, probe
ccaagatggccaaagcggtacaagg

SEQ ID NO: 196195 - DNA, 25 bp, probe
ccaagatggccaaagcggtacaagg

SEQ ID NO: 196196 - DNA, 25 bp, probe
ccacaatgtgatagaggtggctaca

SEQ ID NO: 196197 - DNA, 25 bp, probe
ccaaagctgtggtggtgctcacagg

SEQ ID NO: 196198 - DNA, 25 bp, probe
ccaactcattcgtgggaacagcgca

SEQ ID NO: 196199 - DNA, 25 bp, probe
ccacaacatccctggtgaacgtcgt

SEQ ID NO: 196200 - DNA, 25 bp, probe
ccacaacatccctggtgaacgtcgt

SEQ ID NO: 196201 - DNA, 25 bp, probe
ccacatccacccagggattagggtt

SEQ ID NO: 196202 - DNA, 25 bp, probe
ccacaccctccaggaagttcaggtc

SEQ ID NO: 196203 - DNA, 25 bp, probe
gccagaccccaagatggatatcgga

SEQ ID NO: 196204 - DNA, 25 bp, probe
ccaatccccagagcttggagtctgg

SEQ ID NO: 196205 - DNA, 25 bp, probe
ccaacattcctatctgtgggtgggc

SEQ ID NO: 196206 - DNA, 25 bp, probe
ccaagacataatgcactggggtacc

SEQ ID NO: 196207 - DNA, 25 bp, probe
ccaagacataatgcactggggtacc

SEQ ID NO: 196208 - DNA, 25 bp, probe
ccaagaacaatagctgggctcccaa

SEQ ID NO: 196209 - DNA, 25 bp, probe
ccaagaacaatagctgggctcccaa

SEQ ID NO: 196210 - DNA, 25 bp, probe
ccaagtaagaagtctgagtccctga

SEQ ID NO: 196211 - DNA, 25 bp, probe
ccaaaagagtagttgctttcctgga

SEQ ID NO: 196212 - DNA, 25 bp, probe
ccaagaaataaagtcttccctgaga

SEQ ID NO: 196213 - DNA, 25 bp, probe
gcctaacaaagacacttgcctgtgg

SEQ ID NO: 196214 - DNA, 25 bp, probe
ccaaggcagaaacacttttcagtgt

SEQ ID NO: 196215 - DNA, 25 bp, probe
ccaagggaagaaagcccattcatga

SEQ ID NO: 196216 - DNA, 25 bp, probe
ccaaggcaaagaatgaccgttcaaa

SEQ ID NO: 196217 - DNA, 25 bp, probe
ccaaggaaagtccagaagcttcagg

SEQ ID NO: 196218 - DNA, 25 bp, probe
ccaagtgataacttcgaagccatag

SEQ ID NO: 196219 - DNA, 25 bp, probe
ccaagctgataactactgacttcac

SEQ ID NO: 196220 - DNA, 25 bp, probe
ccaatgctgaaccccatgatttaca

SEQ ID NO: 196221 - DNA, 25 bp, probe
gccaattgcaactccagtgttgata

SEQ ID NO: 196222 - DNA, 25 bp, probe
ccactgctgacctcactggaattac

SEQ ID NO: 196223 - DNA, 25 bp, probe
ccaagctggccatcgtgggcattgc

SEQ ID NO: 196224 - DNA, 25 bp, probe
ccaagctggccatcgtgggcattgc

SEQ ID NO: 196225 - DNA, 25 bp, probe
ccaagtatgtctcctgtgtagtact

SEQ ID NO: 196226 - DNA, 25 bp, probe
ccacatgttcctcctgatcgaggac

SEQ ID NO: 196227 - DNA, 25 bp, probe
ccacactgtgcccatctacgagggg

SEQ ID NO: 196228 - DNA, 25 bp, probe
ccaaactgctctcctagggaatggg

SEQ ID NO: 196229 - DNA, 25 bp, probe
ccaaactgctctcctagggaatggg

SEQ ID NO: 196230 - DNA, 25 bp, probe
gcgaaactgagtcagagcggggcgt

SEQ ID NO: 196231 - DNA, 25 bp, probe
gccaaggccagtcagacggggcaga

SEQ ID NO: 196232 - DNA, 25 bp, probe
ccacagacaagacataggtagccgt

SEQ ID NO: 196233 - DNA, 25 bp, probe
ccacagacaggtaaaagctccaggt

SEQ ID NO: 196234 - DNA, 25 bp, probe
ccacagacaggtaatagccctagcc

SEQ ID NO: 196235 - DNA, 25 bp, probe
ccacagacaacttcatcagcacctg

SEQ ID NO: 196236 - DNA, 25 bp, probe
ccacagcatcaaggatgtgcacgcc

SEQ ID NO: 196237 - DNA, 25 bp, probe
ccactgcattgggacgtctgcactt

SEQ ID NO: 196238 - DNA, 25 bp, probe
ccacatgtataaaccctctctttta

SEQ ID NO: 196239 - DNA, 25 bp, probe
ccacttaatattctacatctcttgt

SEQ ID NO: 196240 - DNA, 25 bp, probe
gccctttatttacatgccactatta

SEQ ID NO: 196241 - DNA, 25 bp, probe
ccaactttttcacagcagattacca

SEQ ID NO: 196242 - DNA, 25 bp, probe
ccaagcctcttaaccatggcatcta

SEQ ID NO: 196243 - DNA, 25 bp, probe
ccaagaccttccccagagaaaagtg

SEQ ID NO: 196244 - DNA, 25 bp, probe
ccaagaggcttccactggggagaag

SEQ ID NO: 196245 - DNA, 25 bp, probe
ccaaggacctcacgatggtgctgaa

SEQ ID NO: 196246 - DNA, 25 bp, probe
ccaatggcctcctaatagcctaaca

SEQ ID NO: 196247 - DNA, 25 bp, probe
ccacagactctgacatcatgtagcc

SEQ ID NO: 196248 - DNA, 25 bp, probe
ccacagactctgacatcatgtagcc

SEQ ID NO: 196249 - DNA, 25 bp, probe
ccaatcacatctagcaccaagccag

SEQ ID NO: 196250 - DNA, 25 bp, probe
ccactccacgatgccaaggcagaac

SEQ ID NO: 196251 - DNA, 25 bp, probe
ccactccacgatgccaaggcagaac

SEQ ID NO: 196252 - DNA, 25 bp, probe
ccactctcagagtcctggatctgca

SEQ ID NO: 196253 - DNA, 25 bp, probe
ccactatcagtgtccagcgtgctgg

SEQ ID NO: 196254 - DNA, 25 bp, probe
ccaatttctgaccagagctgctgca

SEQ ID NO: 196255 - DNA, 25 bp, probe
ccacacgtggaccaagtcatgccgg

SEQ ID NO: 196256 - DNA, 25 bp, probe
ccaagccggactatgacatccgggc

SEQ ID NO: 196257 - DNA, 25 bp, probe
ccaaccacgttgggacagggaggtg

SEQ ID NO: 196258 - DNA, 25 bp, probe
ccacacccctgtgggtggcgggtgt

SEQ ID NO: 196259 - DNA, 25 bp, probe
ccaacaccctgaggttgtgtgtgga

SEQ ID NO: 196260 - DNA, 25 bp, probe
ccacacatccccagttgttggtttg

SEQ ID NO: 196261 - DNA, 25 bp, probe
ccaacatcctgcgtatatttgggat

SEQ ID NO: 196262 - DNA, 25 bp, probe
ccaacacacacagctatttatagta

SEQ ID NO: 196263 - DNA, 25 bp, probe
ccaaacccacctactatgttgacac

SEQ ID NO: 196264 - DNA, 25 bp, probe
ccaaagtcccagagatattgtgagc

SEQ ID NO: 196265 - DNA, 25 bp, probe
ccaaattgcctctggcatgaagtac

SEQ ID NO: 196266 - DNA, 25 bp, probe
ccaatatttcactgtcgacaagagg

SEQ ID NO: 196267 - DNA, 25 bp, probe
ccaaagttcacaatgtggccgagga

SEQ ID NO: 196268 - DNA, 25 bp, probe
ccaaagttcacaatgtggccgagga

SEQ ID NO: 196269 - DNA, 25 bp, probe
gccaccagttcgagggggcggagga

SEQ ID NO: 196270 - DNA, 25 bp, probe
gccaggggtggtggagggtgggaag

SEQ ID NO: 196271 - DNA, 25 bp, probe
ccaacggagttccagagtgtgagga

SEQ ID NO: 196272 - DNA, 25 bp, probe
ccacacgcaactgtctagtgggcca

SEQ ID NO: 196273 - DNA, 25 bp, probe
ccaaccaagcgtatgtgaagtgcct

SEQ ID NO: 196274 - DNA, 25 bp, probe
ccaactacgtggaggaagattattc

SEQ ID NO: 196275 - DNA, 25 bp, probe
ccacacgacgggaagacaagttcat

SEQ ID NO: 196276 - DNA, 25 bp, probe
ccacacgaaaagatattgccttgct

SEQ ID NO: 196277 - DNA, 25 bp, probe
ccacatggaccacgaatattctttc

SEQ ID NO: 196278 - DNA, 25 bp, probe
ccacttgacggctgtttctatgttt

SEQ ID NO: 196279 - DNA, 25 bp, probe
ccacttgacggctgtttctatgttt

SEQ ID NO: 196280 - DNA, 25 bp, probe
ccacttacagttgcttatatttttt

SEQ ID NO: 196281 - DNA, 25 bp, probe
gccaactaagttgtccttttctggt

SEQ ID NO: 196282 - DNA, 25 bp, probe
ccaacaaggtgaaccacttcttctg

SEQ ID NO: 196283 - DNA, 25 bp, probe
ccaaatggctaaactcactgtttgc

SEQ ID NO: 196284 - DNA, 25 bp, probe
ccaacaggtactcttctgtttgtgg

SEQ ID NO: 196285 - DNA, 25 bp, probe
gccaacaggtactcttctgtttgtg

SEQ ID NO: 196286 - DNA, 25 bp, probe
ccaatccattcctctatgctatttt

SEQ ID NO: 196287 - DNA, 25 bp, probe
ccacatccatggcctaggagctact

SEQ ID NO: 196288 - DNA, 25 bp, probe
ccacattctggggaagactattcca

SEQ ID NO: 196289 - DNA, 25 bp, probe
ccaatggtatgctggagagttactc

SEQ ID NO: 196290 - DNA, 25 bp, probe
ccaataatcatctcattgactttgt

SEQ ID NO: 196291 - DNA, 25 bp, probe
ccaattttcagacatgagctttgct

SEQ ID NO: 196292 - DNA, 25 bp, probe
ccacttatctcccatatgagagtgt

SEQ ID NO: 196293 - DNA, 25 bp, probe
gccaacactcctgatagctgaatgt

SEQ ID NO: 196294 - DNA, 25 bp, probe
ccaaacccgacaaggcagtgtccat

SEQ ID NO: 196295 - DNA, 25 bp, probe
ccacaactcccagcagacaagttct

SEQ ID NO: 196296 - DNA, 25 bp, probe
ccacaactcccagcagacaagttct

SEQ ID NO: 196297 - DNA, 25 bp, probe
ccacaactcccagcagacaagttct

SEQ ID NO: 196298 - DNA, 25 bp, probe
ccaaacacctagtcaatacagattt

SEQ ID NO: 196299 - DNA, 25 bp, probe
ccaaacacttggtaaatggcttgtg

SEQ ID NO: 196300 - DNA, 25 bp, probe
ccacacacactccttggaatgggtc

SEQ ID NO: 196301 - DNA, 25 bp, probe
ccacactcacctctaaaacagtcct

SEQ ID NO: 196302 - DNA, 25 bp, probe
ccaaccaccacgaaaaagacaacat

SEQ ID NO: 196303 - DNA, 25 bp, probe
ccaaccaccacgaaaaagacaacat

SEQ ID NO: 196304 - DNA, 25 bp, probe
ccacaggacgcccggaagactaaat

SEQ ID NO: 196305 - DNA, 25 bp, probe
ccacaggaggctcgggagcccacaa

SEQ ID NO: 196306 - DNA, 25 bp, probe
ccaagggatctgcttgatatcccaa

SEQ ID NO: 196307 - DNA, 25 bp, probe
ccaaggtgcatcgacattaacccac

SEQ ID NO: 196308 - DNA, 25 bp, probe
ccaagatggtgccttctaaccagcc

SEQ ID NO: 196309 - DNA, 25 bp, probe
ccaaatgggcttcccatggtcaccc

SEQ ID NO: 196310 - DNA, 25 bp, probe
ccaaggaacagcaaccaagtaccct

SEQ ID NO: 196311 - DNA, 25 bp, probe
ccacaggacatgcaaccagagatcg

SEQ ID NO: 196312 - DNA, 25 bp, probe
ccacaggacggtttatgagcacaca

SEQ ID NO: 196313 - DNA, 25 bp, probe
ccaactgacgagttctgatgaacca

SEQ ID NO: 196314 - DNA, 25 bp, probe
ccaacttctggctgtagagcaccca

SEQ ID NO: 196315 - DNA, 25 bp, probe
ccaacttctggctgtagagcaccca

SEQ ID NO: 196316 - DNA, 25 bp, probe
ccaaattctaccgtggaatgtccct

SEQ ID NO: 196317 - DNA, 25 bp, probe
ccacttgctctgtggtggggtcctt

SEQ ID NO: 196318 - DNA, 25 bp, probe
gccaatttcatgtgggggctcatcg

SEQ ID NO: 196319 - DNA, 25 bp, probe
ccacatcacagcatcagggggctca

SEQ ID NO: 196320 - DNA, 25 bp, probe
ccacaaatgccactcttgggccaag

SEQ ID NO: 196321 - DNA, 25 bp, probe
ccacagaggccttcatctctggcct

SEQ ID NO: 196322 - DNA, 25 bp, probe
ccacagaactcttgagcctgctggc

SEQ ID NO: 196323 - DNA, 25 bp, probe
ccaaatcactgaactttgctgagcc

SEQ ID NO: 196324 - DNA, 25 bp, probe
ccaaatcagtgaccatcgttgtcct

SEQ ID NO: 196325 - DNA, 25 bp, probe
gccaaaatggactcctatgctcgga

SEQ ID NO: 196326 - DNA, 25 bp, probe
ccaaagtgctcagaccttgtctagt

SEQ ID NO: 196327 - DNA, 25 bp, probe
ccaaagcagccaagaccctgtgcat

SEQ ID NO: 196328 - DNA, 25 bp, probe
ccacatcaggcctggccagctggat

SEQ ID NO: 196329 - DNA, 25 bp, probe
ccaacagtcatatggcctgtggggc

SEQ ID NO: 196330 - DNA, 25 bp, probe
tccaacctttttctgtgtctggcta

SEQ ID NO: 196331 - DNA, 25 bp, probe
tccaacctttttctgtgtctggcta

SEQ ID NO: 196332 - DNA, 25 bp, probe
ccaaccattcttacttggtggccat

SEQ ID NO: 196333 - DNA, 25 bp, probe
ccaactattttgaggatgttgagat

SEQ ID NO: 196334 - DNA, 25 bp, probe
gccaactattttgaggatgttgaga

SEQ ID NO: 196335 - DNA, 25 bp, probe
ccacaccttttccaggagttctgaa

SEQ ID NO: 196336 - DNA, 25 bp, probe
ccacaccttttccaggagttctgaa

SEQ ID NO: 196337 - DNA, 25 bp, probe
ccacaggcttgtttcatggtgttgc

SEQ ID NO: 196338 - DNA, 25 bp, probe
ccaatggctatgccctggggctggt

SEQ ID NO: 196339 - DNA, 25 bp, probe
ccaaggtggcacaggggcctgttca

SEQ ID NO: 196340 - DNA, 25 bp, probe
ccaaggtgtgctagcagtgggccct

SEQ ID NO: 196341 - DNA, 25 bp, probe
ccacaggctgtggggtgagaggccc

SEQ ID NO: 196342 - DNA, 25 bp, probe
ccacaacgtgcggacgcaggagccc

SEQ ID NO: 196343 - DNA, 25 bp, probe
ccacatctcagctggagccattgac

SEQ ID NO: 196344 - DNA, 25 bp, probe
ccacatctcagctggagccattgac

SEQ ID NO: 196345 - DNA, 25 bp, probe
ccacagcgctgatgtgtgccagtga

SEQ ID NO: 196346 - DNA, 25 bp, probe
ccacaagtctcaagcctcagtgcta

SEQ ID NO: 196347 - DNA, 25 bp, probe
ccacaggtcacaggactcatcgtag

SEQ ID NO: 196348 - DNA, 25 bp, probe
ccacaggaacaccttccgctgtgaa

SEQ ID NO: 196349 - DNA, 25 bp, probe
ccaatggatgacttctttcagtgtg

SEQ ID NO: 196350 - DNA, 25 bp, probe
ccaaagatgagtttgtatcatggag

SEQ ID NO: 196351 - DNA, 25 bp, probe
ccacagaggtggtttagatggctgg

SEQ ID NO: 196352 - DNA, 25 bp, probe
ccaagagcttggagtctagtgcagg

SEQ ID NO: 196353 - DNA, 25 bp, probe
ccaaacagtttgctctaggggaaga

SEQ ID NO: 196354 - DNA, 25 bp, probe
ccacaaattattcttacagaaagat

SEQ ID NO: 196355 - DNA, 25 bp, probe
ccaaactttgtgattcaggagaact

SEQ ID NO: 196356 - DNA, 25 bp, probe
gccaaggactttattcggaagcttc

SEQ ID NO: 196357 - DNA, 25 bp, probe
ccaaggaattctacctgcaggaatc

SEQ ID NO: 196358 - DNA, 25 bp, probe
ccaagtaatatattcttagtagata

SEQ ID NO: 196359 - DNA, 25 bp, probe
ccaaacatcatcaatctcttaggag

SEQ ID NO: 196360 - DNA, 25 bp, probe
gccagaaggacagcaggaaaggggg

SEQ ID NO: 196361 - DNA, 25 bp, probe
ccaaaggatcaggtgccaaaggtga

SEQ ID NO: 196362 - DNA, 25 bp, probe
ccaagagtgccaagtgcgaggggga

SEQ ID NO: 196363 - DNA, 25 bp, probe
ccaagacgccaatggagccctagaa

SEQ ID NO: 196364 - DNA, 25 bp, probe
ccaaggccgacaaggagccactgga

SEQ ID NO: 196365 - DNA, 25 bp, probe
ccacaagcacgacttggacctcatc

SEQ ID NO: 196366 - DNA, 25 bp, probe
ccaaagcactgtccagatactgctc

SEQ ID NO: 196367 - DNA, 25 bp, probe
gccaaaacttactcattgcttcacc

SEQ ID NO: 196368 - DNA, 25 bp, probe
gccaaaacttactcattgcttcacc

SEQ ID NO: 196369 - DNA, 25 bp, probe
ccaaaagggtcatcatctctgcccc

SEQ ID NO: 196370 - DNA, 25 bp, probe
gccaaaaaggacacctatgtcacca

SEQ ID NO: 196371 - DNA, 25 bp, probe
gccaaaaagactgtgcgtatgtagc

SEQ ID NO: 196372 - DNA, 25 bp, probe
ccaaagaggactctgcggctggtgc

SEQ ID NO: 196373 - DNA, 25 bp, probe
ccaagagaaaggatgcggctgagga

SEQ ID NO: 196374 - DNA, 25 bp, probe
ccaaagctacggatgagctgaagga

SEQ ID NO: 196375 - DNA, 25 bp, probe
ccaaagctattgaactactaacgtc

SEQ ID NO: 196376 - DNA, 25 bp, probe
ccaatacgattttctgttgcacctt

SEQ ID NO: 196377 - DNA, 25 bp, probe
gccaagcacagtctactgttgcaat

SEQ ID NO: 196378 - DNA, 25 bp, probe
gccaagcacagtctactgttgcaat

SEQ ID NO: 196379 - DNA, 25 bp, probe
gccaagaacagcaagccgatccaca

SEQ ID NO: 196380 - DNA, 25 bp, probe
gccaagaacagcaagccgatccaca

SEQ ID NO: 196381 - DNA, 25 bp, probe
gccaagaacagcaagccgatccaca

SEQ ID NO: 196382 - DNA, 25 bp, probe
ccacaggcgctcaatgcctactatc

SEQ ID NO: 196383 - DNA, 25 bp, probe
ccacagcagcgtcagatgctaatac

SEQ ID NO: 196384 - DNA, 25 bp, probe
ccaagagatctggctgagctccttc

SEQ ID NO: 196385 - DNA, 25 bp, probe
ccaagctgagagtctagcactcatt

SEQ ID NO: 196386 - DNA, 25 bp, probe
gccacattaaactcactgactacgg

SEQ ID NO: 196387 - DNA, 25 bp, probe
ccaaatataaacggtcaatcacagg

SEQ ID NO: 196388 - DNA, 25 bp, probe
ccaaaatcaacatcgtctaccagga

SEQ ID NO: 196389 - DNA, 25 bp, probe
ccaaagtcaagctggctcggcacat

SEQ ID NO: 196390 - DNA, 25 bp, probe
ccacacagctcccaggagctctgga

SEQ ID NO: 196391 - DNA, 25 bp, probe
ccacacatgtggaggcagcttgctg

SEQ ID NO: 196392 - DNA, 25 bp, probe
ccacagatggaattaacttcatggt

SEQ ID NO: 196393 - DNA, 25 bp, probe
ccacagatcgaatcaaagtcagagt

SEQ ID NO: 196394 - DNA, 25 bp, probe
ccaagtcgagaagaatccatgaact

SEQ ID NO: 196395 - DNA, 25 bp, probe
ccaagctcagcttagaagttcgaaa

SEQ ID NO: 196396 - DNA, 25 bp, probe
ccacagctgccttcagtgggtagaa

SEQ ID NO: 196397 - DNA, 25 bp, probe
ccacacgcactttatgagggagacc

SEQ ID NO: 196398 - DNA, 25 bp, probe
ccacacggctgttcgtggtggtcct

SEQ ID NO: 196399 - DNA, 25 bp, probe
ccacagcctgtttctgctgagtttc

SEQ ID NO: 196400 - DNA, 25 bp, probe
ccacacctgtgaggcgtgatgattg

SEQ ID NO: 196401 - DNA, 25 bp, probe
ccaagcattatgtgctgtgcgtggt

SEQ ID NO: 196402 - DNA, 25 bp, probe
ccaatctatatgtctttcggttatc

SEQ ID NO: 196403 - DNA, 25 bp, probe
ccaacttgtgttctcagtgcagttc

SEQ ID NO: 196404 - DNA, 25 bp, probe
ccaacgcctcgtttcaggcttgtga

SEQ ID NO: 196405 - DNA, 25 bp, probe
ccaacgcctcgtttcaggcttgtga

SEQ ID NO: 196406 - DNA, 25 bp, probe
ccaaacctggtatctcagctctgtg

SEQ ID NO: 196407 - DNA, 25 bp, probe
ccaaccctggtccagctgagggtgc

SEQ ID NO: 196408 - DNA, 25 bp, probe
ccacacccatggaactggaggccga

SEQ ID NO: 196409 - DNA, 25 bp, probe
ccacaatctcaagcactggggcctg

SEQ ID NO: 196410 - DNA, 25 bp, probe
ccaattgccaattacctgtgtcttg

SEQ ID NO: 196411 - DNA, 25 bp, probe
ccaatcatgtcatctacctgtaccg

SEQ ID NO: 196412 - DNA, 25 bp, probe
ccaatcatgtcatctacctgtaccg

SEQ ID NO: 196413 - DNA, 25 bp, probe
ccacacagtgcagaagcctgctccc

SEQ ID NO: 196414 - DNA, 25 bp, probe
ccacaagcagcggaagcctgaccgg

SEQ ID NO: 196415 - DNA, 25 bp, probe
ccacagacaggtaagcgctgaacag

SEQ ID NO: 196416 - DNA, 25 bp, probe
ccacagaatgggcatcgtccacaga

SEQ ID NO: 196417 - DNA, 25 bp, probe
ccaagcagggggacgttgccagagg

SEQ ID NO: 196418 - DNA, 25 bp, probe
ccaacggggagctgaatgcggacga

SEQ ID NO: 196419 - DNA, 25 bp, probe
gccaagggggactgcaagggacagg

SEQ ID NO: 196420 - DNA, 25 bp, probe
gctaagggtgggtgctcagaataag

SEQ ID NO: 196421 - DNA, 25 bp, probe
gccaagggtgaggtggccaaaacca

SEQ ID NO: 196422 - DNA, 25 bp, probe
gccacattggtagactcctaaaata

SEQ ID NO: 196423 - DNA, 25 bp, probe
gccacagggaagaacttgcaaaaca

SEQ ID NO: 196424 - DNA, 25 bp, probe
gccacaggccaagttctaagacaaa

SEQ ID NO: 196425 - DNA, 25 bp, probe
gctcagggcccacattaaggaaata

SEQ ID NO: 196426 - DNA, 25 bp, probe
ccaaccccaaaccatgcggagaatt

SEQ ID NO: 196427 - DNA, 25 bp, probe
ccaaccccaaaccatgcggagaatt

SEQ ID NO: 196428 - DNA, 25 bp, probe
ccaacacgacaagcactggagcaaa

SEQ ID NO: 196429 - DNA, 25 bp, probe
ccaacagggaaggctctgtccagaa

SEQ ID NO: 196430 - DNA, 25 bp, probe
ccaacagtgttaggcctggcacagt

SEQ ID NO: 196431 - DNA, 25 bp, probe
ccaacagtgttaggcctggcacagt

SEQ ID NO: 196432 - DNA, 25 bp, probe
ccaatatgattccacccatggcaaa

SEQ ID NO: 196433 - DNA, 25 bp, probe
ccaatatgattccacccatggcaaa

SEQ ID NO: 196434 - DNA, 25 bp, probe
ccaatctggtcgcctgggaaacaag

SEQ ID NO: 196435 - DNA, 25 bp, probe
tccaatctggtcgcctgggaaacaa

SEQ ID NO: 196436 - DNA, 25 bp, probe
ccaatctgcgtccacttaggaggcc

SEQ ID NO: 196437 - DNA, 25 bp, probe
ccaacatcgtgcgtctcattggtgt

SEQ ID NO: 196438 - DNA, 25 bp, probe
ccaacatgctgtgctccatagctgg

SEQ ID NO: 196439 - DNA, 25 bp, probe
ccaatcagctgtgtcgcacttaaac

SEQ ID NO: 196440 - DNA, 25 bp, probe
ccaacacgaacattccttccatagc

SEQ ID NO: 196441 - DNA, 25 bp, probe
ccacacacatcaagatattttccgg

SEQ ID NO: 196442 - DNA, 25 bp, probe
ccacactgccacaatgcaggtgtac

SEQ ID NO: 196443 - DNA, 25 bp, probe
gccacattcaaaggatggatggata

SEQ ID NO: 196444 - DNA, 25 bp, probe
ccacacctgaggctgttggcatcag

SEQ ID NO: 196445 - DNA, 25 bp, probe
ccaacgggtccttgctggacagact

SEQ ID NO: 196446 - DNA, 25 bp, probe
ccaatggggtctccagctgaaagcc

SEQ ID NO: 196447 - DNA, 25 bp, probe
gccaagaggtttctgcggaagtcac

SEQ ID NO: 196448 - DNA, 25 bp, probe
gccaaagagttttaccagaagtacg

SEQ ID NO: 196449 - DNA, 25 bp, probe
gccaaatgagaatatccccgagttg

SEQ ID NO: 196450 - DNA, 25 bp, probe
ccaagggggaaccccagcagctggg

SEQ ID NO: 196451 - DNA, 25 bp, probe
ccaagctgtgggagccccaggagag

SEQ ID NO: 196452 - DNA, 25 bp, probe
ccaatgctgggtgcagcccaaggca

SEQ ID NO: 196453 - DNA, 25 bp, probe
gccaatgctgggtgcagcccaaggc

SEQ ID NO: 196454 - DNA, 25 bp, probe
gccagcgctcagtctggcatgtcac

SEQ ID NO: 196455 - DNA, 25 bp, probe
ccacactgtgagcatgcagtacggc

SEQ ID NO: 196456 - DNA, 25 bp, probe
ccacactctgagaatgaccatcttc

SEQ ID NO: 196457 - DNA, 25 bp, probe
gccacagcctagatgggcagttttt

SEQ ID NO: 196458 - DNA, 25 bp, probe
gccaagcgaaacttggagctttgac

SEQ ID NO: 196459 - DNA, 25 bp, probe
gccaagggaggctgggactctatca

SEQ ID NO: 196460 - DNA, 25 bp, probe
ccaaagggcagtggggctggctacg

SEQ ID NO: 196461 - DNA, 25 bp, probe
ccaaagggcagtggggctggctacg

SEQ ID NO: 196462 - DNA, 25 bp, probe
ccaacatgggcaagggtggagaaca

SEQ ID NO: 196463 - DNA, 25 bp, probe
ccaaatagatgctgggttatgagaa

SEQ ID NO: 196464 - DNA, 25 bp, probe
ccaatggagagctgaatgttgatga

SEQ ID NO: 196465 - DNA, 25 bp, probe
ccaagggctgcatcactgttatagg

SEQ ID NO: 196466 - DNA, 25 bp, probe
ccaattggcatgactcctcttatga

SEQ ID NO: 196467 - DNA, 25 bp, probe
ccaaataatgtctcatctctatagt

SEQ ID NO: 196468 - DNA, 25 bp, probe
ccaacagaagtagcagcctctgggt

SEQ ID NO: 196469 - DNA, 25 bp, probe
ccaactcatcaggcagcgggtaggg

SEQ ID NO: 196470 - DNA, 25 bp, probe
ccaagcgcatcacgacaaggatatg

SEQ ID NO: 196471 - DNA, 25 bp, probe
ccaacctcagcaatcagcagacacg

SEQ ID NO: 196472 - DNA, 25 bp, probe
ccaagccgactttcatgagctgctg

SEQ ID NO: 196473 - DNA, 25 bp, probe
ccaatcaaggctaggaggctcgacc

SEQ ID NO: 196474 - DNA, 25 bp, probe
gccaaaaggccagaatgggtcccct

SEQ ID NO: 196475 - DNA, 25 bp, probe
ccaaagatggcccacacagggacca

SEQ ID NO: 196476 - DNA, 25 bp, probe
ccaaaaggctgcccaatctctgaga

SEQ ID NO: 196477 - DNA, 25 bp, probe
ccaatacagagcgctactcctggca

SEQ ID NO: 196478 - DNA, 25 bp, probe
gccaaccagagggtacctaggtctc

SEQ ID NO: 196479 - DNA, 25 bp, probe
gccaaccagagggtacctaggtctc

SEQ ID NO: 196480 - DNA, 25 bp, probe
gccaacaacattgtacatcgggacc

SEQ ID NO: 196481 - DNA, 25 bp, probe
gccaacaagtttgtgcaccgagatc

SEQ ID NO: 196482 - DNA, 25 bp, probe
gccaaaatgtcagagtcccaggaca

SEQ ID NO: 196483 - DNA, 25 bp, probe
ccaaggtgcacattttccacggaaa

SEQ ID NO: 196484 - DNA, 25 bp, probe
ccaaggtgaagcttatcccactggg

SEQ ID NO: 196485 - DNA, 25 bp, probe
gccaaggtgaagcttatcccactgg

SEQ ID NO: 196486 - DNA, 25 bp, probe
gccaaattggccgttagccacctgg

SEQ ID NO: 196487 - DNA, 25 bp, probe
ccaaattctcacctctattaagctg

SEQ ID NO: 196488 - DNA, 25 bp, probe
ccaaattctcgcctctattgagctg

SEQ ID NO: 196489 - DNA, 25 bp, probe
ccaaattctcgcctctattgagctg

SEQ ID NO: 196490 - DNA, 25 bp, probe
ccaaagtcattcctctcattggaga

SEQ ID NO: 196491 - DNA, 25 bp, probe
ccacaagactccctccagtgaggag

SEQ ID NO: 196492 - DNA, 25 bp, probe
ccacaaggctctgtccacttgtgcc

SEQ ID NO: 196493 - DNA, 25 bp, probe
ccaaaggcatggagtaccttcacaa

SEQ ID NO: 196494 - DNA, 25 bp, probe
ccacaactctactgtaccttcaata

SEQ ID NO: 196495 - DNA, 25 bp, probe
ccaagacttgactgtaactggaaca

SEQ ID NO: 196496 - DNA, 25 bp, probe
ccaagatttgcagaacttgtggaaa

SEQ ID NO: 196497 - DNA, 25 bp, probe
gccaagatttgcagaacttgtggaa

SEQ ID NO: 196498 - DNA, 25 bp, probe
ccaaatttgctttacatatgattgt

SEQ ID NO: 196499 - DNA, 25 bp, probe
ccaaatttgcatcacatacatttgt

SEQ ID NO: 196500 - DNA, 25 bp, probe
ccaactttgccagcttgattgcagc

SEQ ID NO: 196501 - DNA, 25 bp, probe
ccaagttggaagccttttgcagctc

SEQ ID NO: 196502 - DNA, 25 bp, probe
ccaacgctggagcagtatatctacc

SEQ ID NO: 196503 - DNA, 25 bp, probe
ccaacgctggagcagtatatctacc

SEQ ID NO: 196504 - DNA, 25 bp, probe
ccaactgcggggagcatgacacaac

SEQ ID NO: 196505 - DNA, 25 bp, probe
ccaagatgagggacaagcataagaa

SEQ ID NO: 196506 - DNA, 25 bp, probe
ccaagatggttggctctacaaatac

SEQ ID NO: 196507 - DNA, 25 bp, probe
ccaagctgtttgttctccacaatag

SEQ ID NO: 196508 - DNA, 25 bp, probe
ccaagctgtttgttctccacaatag

SEQ ID NO: 196509 - DNA, 25 bp, probe
ccaactggaatattctcactagata

SEQ ID NO: 196510 - DNA, 25 bp, probe
ccaactggaatattctcactagata

SEQ ID NO: 196511 - DNA, 25 bp, probe
ccaagcgggaattccagctgcagca

SEQ ID NO: 196512 - DNA, 25 bp, probe
ccaagctgtgcgttctggaccagct

SEQ ID NO: 196513 - DNA, 25 bp, probe
ccacaatgtgcgcctctgggatgag

SEQ ID NO: 196514 - DNA, 25 bp, probe
ccaagatcctgcctctggtgagagg

SEQ ID NO: 196515 - DNA, 25 bp, probe
ccaaatcccctcagcagagtgtgtt

SEQ ID NO: 196516 - DNA, 25 bp, probe
ccaaacccctgagaagctgctgaat

SEQ ID NO: 196517 - DNA, 25 bp, probe
ccaagaccgctcgggaaatgcagga

SEQ ID NO: 196518 - DNA, 25 bp, probe
ccaaccctctgctgctgaagaggcg

SEQ ID NO: 196519 - DNA, 25 bp, probe
ccaaccactgcgaccacaagaagga

SEQ ID NO: 196520 - DNA, 25 bp, probe
ccaacagcgaggagaacagcaacga

SEQ ID NO: 196521 - DNA, 25 bp, probe
ccaaactcaggaccagacagaccaa

SEQ ID NO: 196522 - DNA, 25 bp, probe
ccaaacaaacactggagatcaaaaa

SEQ ID NO: 196523 - DNA, 25 bp, probe
gccaaaccaaacagaagctcaatat

SEQ ID NO: 196524 - DNA, 25 bp, probe
gccaaaccaaacagaagctcaatat

SEQ ID NO: 196525 - DNA, 25 bp, probe
ccaacatcctaggcaaaacaacaat

SEQ ID NO: 196526 - DNA, 25 bp, probe
ccaacatccttggcagaacctggga

SEQ ID NO: 196527 - DNA, 25 bp, probe
ccaactcccggacatcacatgagag

SEQ ID NO: 196528 - DNA, 25 bp, probe
ccaaaagccgtgatgtgcaatgaag

SEQ ID NO: 196529 - DNA, 25 bp, probe
ccaaagctgccatgggtaaaagttg

SEQ ID NO: 196530 - DNA, 25 bp, probe
ccaaagctgccatgggtaaaagttg

SEQ ID NO: 196531 - DNA, 25 bp, probe
ccaaagtgccagggagaacagccag

SEQ ID NO: 196532 - DNA, 25 bp, probe
gccaatgggtcggacaacaagctca

SEQ ID NO: 196533 - DNA, 25 bp, probe
ccaattggatacgacaacttgcacg

SEQ ID NO: 196534 - DNA, 25 bp, probe
gccaagaggaacgacttctgtaagc

SEQ ID NO: 196535 - DNA, 25 bp, probe
ccaagaggaacgacttctgtaagct

SEQ ID NO: 196536 - DNA, 25 bp, probe
ccaaggcagaacccattcttgggtc

SEQ ID NO: 196537 - DNA, 25 bp, probe
ccaaggcagaacccattcttgggtc

SEQ ID NO: 196538 - DNA, 25 bp, probe
ccaaactgaataggcttgctcatgc

SEQ ID NO: 196539 - DNA, 25 bp, probe
ccaaactctatcggctgatgcagcg

SEQ ID NO: 196540 - DNA, 25 bp, probe
ccaaactgcaaaggctgtggtggct

SEQ ID NO: 196541 - DNA, 25 bp, probe
ccaagcagccaaagcagtgtcgacc

SEQ ID NO: 196542 - DNA, 25 bp, probe
ccaacatcgcagacacatgtgctgg

SEQ ID NO: 196543 - DNA, 25 bp, probe
ccaacctgtatgatggctgggggtg

SEQ ID NO: 196544 - DNA, 25 bp, probe
ccaacctgctgaagggcagaggtgg

SEQ ID NO: 196545 - DNA, 25 bp, probe
ccaaggtgctggaggaggcggcggc

SEQ ID NO: 196546 - DNA, 25 bp, probe
ccaagaggctgggagtgaccggaaa

SEQ ID NO: 196547 - DNA, 25 bp, probe
ccaagattgagcggagtgcctcgga

SEQ ID NO: 196548 - DNA, 25 bp, probe
ccaagcagtacccaggctttgcaga

SEQ ID NO: 196549 - DNA, 25 bp, probe
ctactggaaacctctccgagtactg

SEQ ID NO: 196550 - DNA, 25 bp, probe
ccaaggattgggtgctgctagaggg

SEQ ID NO: 196551 - DNA, 25 bp, probe
ccaaaattggggcgctcagagaagg

SEQ ID NO: 196552 - DNA, 25 bp, probe
ccaaaatgatggagctggccagaga

SEQ ID NO: 196553 - DNA, 25 bp, probe
ccaaaatgatggagctggccagaga

SEQ ID NO: 196554 - DNA, 25 bp, probe
ccaacaatgtgaggggtcctagcag

SEQ ID NO: 196555 - DNA, 25 bp, probe
gccaaaagctatgggtgggctcaga

SEQ ID NO: 196556 - DNA, 25 bp, probe
gccaaaagctcagaggcacagccaa

SEQ ID NO: 196557 - DNA, 25 bp, probe
gccaatacctcagaaccagcgattc

SEQ ID NO: 196558 - DNA, 25 bp, probe
gccacagacccccaggaaggatttc

SEQ ID NO: 196559 - DNA, 25 bp, probe
ccaagtccagcccagagcaaagcta

SEQ ID NO: 196560 - DNA, 25 bp, probe
ccaagtcaatcccaacaaagacata

SEQ ID NO: 196561 - DNA, 25 bp, probe
gccaagtcaatcccaacaaagacat

SEQ ID NO: 196562 - DNA, 25 bp, probe
ccaagatgtatcccagatgtatgag

SEQ ID NO: 196563 - DNA, 25 bp, probe
ccaagatgtatcccagatgtatgag

SEQ ID NO: 196564 - DNA, 25 bp, probe
ccaagattactgtcaatgtctatag

SEQ ID NO: 196565 - DNA, 25 bp, probe
ccaagtttcgccatgctggatgatg

SEQ ID NO: 196566 - DNA, 25 bp, probe
ccaagcttacgtacgcgtgcatgcg

SEQ ID NO: 196567 - DNA, 25 bp, probe
ccaatgcttcagatgggctgtgcac

SEQ ID NO: 196568 - DNA, 25 bp, probe
ccaagctcatcgcagatgcctggaa

SEQ ID NO: 196569 - DNA, 25 bp, probe
ccaagctgcatggcaagttctgtgg

SEQ ID NO: 196570 - DNA, 25 bp, probe
ccaactgcacgctattgctgtgccg

SEQ ID NO: 196571 - DNA, 25 bp, probe
ccaagctccagctgtttgtcaaggc

SEQ ID NO: 196572 - DNA, 25 bp, probe
ccaagttcaccgtatctgtgtcagg

SEQ ID NO: 196573 - DNA, 25 bp, probe
gccggttgacttctctgctagaaga

SEQ ID NO: 196574 - DNA, 25 bp, probe
ccaagtcgactatgccttagacaca

SEQ ID NO: 196575 - DNA, 25 bp, probe
gccaagtcgactatgccttagacac

SEQ ID NO: 196576 - DNA, 25 bp, probe
gccaagtcgactatgccttagacac

SEQ ID NO: 196577 - DNA, 25 bp, probe
ccaagcctgactatgacatccgagc

SEQ ID NO: 196578 - DNA, 25 bp, probe
ccaagactggctagaggccctgcac

SEQ ID NO: 196579 - DNA, 25 bp, probe
ccaagaatgtgccaagagtcccgcc

SEQ ID NO: 196580 - DNA, 25 bp, probe
ccaaaagtctgatgacctcggtccc

SEQ ID NO: 196581 - DNA, 25 bp, probe
ccaaagatgtcctgactttgccccc

SEQ ID NO: 196582 - DNA, 25 bp, probe
ccaaagatgtcctgactttgccccc

SEQ ID NO: 196583 - DNA, 25 bp, probe
ccaaaagtgccactatctacaaccc

SEQ ID NO: 196584 - DNA, 25 bp, probe
ccaaaagtgccactatctacaaccc

SEQ ID NO: 196585 - DNA, 25 bp, probe
ccaaacagaacagcactaccaccgg

SEQ ID NO: 196586 - DNA, 25 bp, probe
ccaaacagaacagcactaccaccgg

SEQ ID NO: 196587 - DNA, 25 bp, probe
gccaaacagaatgtaacacccctcc

SEQ ID NO: 196588 - DNA, 25 bp, probe
gccaacctattttgaagtaccacca

SEQ ID NO: 196589 - DNA, 25 bp, probe
gccaacctattttgaagtaccacca

SEQ ID NO: 196590 - DNA, 25 bp, probe
ccaagcctctgttaaagtcattgac

SEQ ID NO: 196591 - DNA, 25 bp, probe
ccaagccctgagagaagccttccag

SEQ ID NO: 196592 - DNA, 25 bp, probe
ccaatgccgtagatgaaccctacaa

SEQ ID NO: 196593 - DNA, 25 bp, probe
ccaactcaggcgcgaaaccagccaa

SEQ ID NO: 196594 - DNA, 25 bp, probe
ccaagctgaatgccgagaagccaca

SEQ ID NO: 196595 - DNA, 25 bp, probe
ccaactgcagcatctatgaaccgcc

SEQ ID NO: 196596 - DNA, 25 bp, probe
ccaactgcagcatctatgaaccgcc

SEQ ID NO: 196597 - DNA, 25 bp, probe
ccaactgatccagatgctacgctcc

SEQ ID NO: 196598 - DNA, 25 bp, probe
ccaagcagacgaggactacagccac

SEQ ID NO: 196599 - DNA, 25 bp, probe
ccaaccaacatggcagctaacacat

SEQ ID NO: 196600 - DNA, 25 bp, probe
ccaatcgcgagtgcgcaggaccagt

SEQ ID NO: 196601 - DNA, 25 bp, probe
ccaacgggcttatgcagaccagcaa

SEQ ID NO: 196602 - DNA, 25 bp, probe
gccaacgggatcagaggaccatcag

SEQ ID NO: 196603 - DNA, 25 bp, probe
gccacctgggtcactggaggaccaa

SEQ ID NO: 196604 - DNA, 25 bp, probe
gccaccccccaaggtgaagaactga

SEQ ID NO: 196605 - DNA, 25 bp, probe
gccaccccgaaaggatagcatacac

SEQ ID NO: 196606 - DNA, 25 bp, probe
gccaccccgaaaggatagcatacac

SEQ ID NO: 196607 - DNA, 25 bp, probe
gccaccctggaatcagaactgcaca

SEQ ID NO: 196608 - DNA, 25 bp, probe
ccaacctctgattcaactcattgac

SEQ ID NO: 196609 - DNA, 25 bp, probe
ccaacgacatcatgctactgcagct

SEQ ID NO: 196610 - DNA, 25 bp, probe
ccaacgagatgatgcgggagatccg

SEQ ID NO: 196611 - DNA, 25 bp, probe
ccaacgagatgatgcgggagatccg

SEQ ID NO: 196612 - DNA, 25 bp, probe
ccaagccagagattgcgggcagcaa

SEQ ID NO: 196613 - DNA, 25 bp, probe
ccaagccagagattgcgggcagcaa

SEQ ID NO: 196614 - DNA, 25 bp, probe
gccaagtcatggtcatgggaaaagc

SEQ ID NO: 196615 - DNA, 25 bp, probe
gccaagtcatggtcatgggaaaagc

SEQ ID NO: 196616 - DNA, 25 bp, probe
gccaaccagtactaccaaaaggctg

SEQ ID NO: 196617 - DNA, 25 bp, probe
ccaagacgtagatccatccaagact

SEQ ID NO: 196618 - DNA, 25 bp, probe
gccaagacgtagatccatccaagac

SEQ ID NO: 196619 - DNA, 25 bp, probe
ccaaacactcaactccatcgaatag

SEQ ID NO: 196620 - DNA, 25 bp, probe
ccaaacactcaactccatcgaatag

SEQ ID NO: 196621 - DNA, 25 bp, probe
ccaagacagacacgctgcagatcga

SEQ ID NO: 196622 - DNA, 25 bp, probe
ccaacatgcagaattgtgagctaaa

SEQ ID NO: 196623 - DNA, 25 bp, probe
gccaagatgcacatcgctattaaca

SEQ ID NO: 196624 - DNA, 25 bp, probe
gccaagatgcacatcgctattaaca

SEQ ID NO: 196625 - DNA, 25 bp, probe
gccaggacacagaccttttcagtat

SEQ ID NO: 196626 - DNA, 25 bp, probe
ccaaggaccgcagtccttcagtaac

SEQ ID NO: 196627 - DNA, 25 bp, probe
ccaaggaatagactccttcgtgatc

SEQ ID NO: 196628 - DNA, 25 bp, probe
gccaagtgcaattgacttccctttt

SEQ ID NO: 196629 - DNA, 25 bp, probe
ccaattacatctttgtccacgttta

SEQ ID NO: 196630 - DNA, 25 bp, probe
ccaattgaacctctccaaatgctcc

SEQ ID NO: 196631 - DNA, 25 bp, probe
ccaattaacaccaatgaatcaacca

SEQ ID NO: 196632 - DNA, 25 bp, probe
gcccattaactcaaatccaccaaat

SEQ ID NO: 196633 - DNA, 25 bp, probe
gcccattaactcaaatccaccaaat

SEQ ID NO: 196634 - DNA, 25 bp, probe
gccacagtaaactatttcactaaga

SEQ ID NO: 196635 - DNA, 25 bp, probe
ccaactataacattttactctcaaa

SEQ ID NO: 196636 - DNA, 25 bp, probe
ccaacatgttactgttactgataca

SEQ ID NO: 196637 - DNA, 25 bp, probe
gccagaccctaaggattcctgtagc

SEQ ID NO: 196638 - DNA, 25 bp, probe
gccagaccctaaggattcctgtagc

SEQ ID NO: 196639 - DNA, 25 bp, probe
gccaaaatcatagagcttgccttag

SEQ ID NO: 196640 - DNA, 25 bp, probe
ccaagaatcttggtttgccttccag

SEQ ID NO: 196641 - DNA, 25 bp, probe
ccaacatcctgtcttattttccaga

SEQ ID NO: 196642 - DNA, 25 bp, probe
ccaactccttggttatactctctaa

SEQ ID NO: 196643 - DNA, 25 bp, probe
ccaacttgttggtctgaattctcct

SEQ ID NO: 196644 - DNA, 25 bp, probe
gccacatttagggctatcacctcca

SEQ ID NO: 196645 - DNA, 25 bp, probe
gccacatttagggctatcacctcca

SEQ ID NO: 196646 - DNA, 25 bp, probe
gccctttggactgtcaggtccaagt

SEQ ID NO: 196647 - DNA, 25 bp, probe
gcccctgtgggttacggttcaggca

SEQ ID NO: 196648 - DNA, 25 bp, probe
gccaccgtggagaaagggtctagaa

SEQ ID NO: 196649 - DNA, 25 bp, probe
gcccttacgaaatggtgttcaagaa

SEQ ID NO: 196650 - DNA, 25 bp, probe
gccctgtacgggaggttcacaatca

SEQ ID NO: 196651 - DNA, 25 bp, probe
gccctgtacgggaggttcacaatca

SEQ ID NO: 196652 - DNA, 25 bp, probe
ccaattccaaggagttctcagaaca

SEQ ID NO: 196653 - DNA, 25 bp, probe
tccagtcccgggggtctgatatggc

SEQ ID NO: 196654 - DNA, 25 bp, probe
tccggacctgagactgagttttgtc

SEQ ID NO: 196655 - DNA, 25 bp, probe
gccaggcggtggagcagttttccgg

SEQ ID NO: 196656 - DNA, 25 bp, probe
tctcgaggaaagtggttgtccccgt

SEQ ID NO: 196657 - DNA, 25 bp, probe
tctgggagggtgcggtttccctcca

SEQ ID NO: 196658 - DNA, 25 bp, probe
gctggggagagtccggtttactgac

SEQ ID NO: 196659 - DNA, 25 bp, probe
gcggggaaacggacttagatctgac

SEQ ID NO: 196660 - DNA, 25 bp, probe
gcggttaataatgcctgtgaactaa

SEQ ID NO: 196661 - DNA, 25 bp, probe
gccagttacagtttgccttaactca

SEQ ID NO: 196662 - DNA, 25 bp, probe
gccataaactgtctcacctaaacaa

SEQ ID NO: 196663 - DNA, 25 bp, probe
gctgacaaacttatcccaaaacttt

SEQ ID NO: 196664 - DNA, 25 bp, probe
gctcttataattgcccgaaacactt

SEQ ID NO: 196665 - DNA, 25 bp, probe
gcgttcataactgtcctcaacaaca

SEQ ID NO: 196666 - DNA, 25 bp, probe
gcgttcaatcttgaccttgaagatg

SEQ ID NO: 196667 - DNA, 25 bp, probe
gctgttcgatttgagccagggaaac

SEQ ID NO: 196668 - DNA, 25 bp, probe
gttctctagttctacgggtttgatt

SEQ ID NO: 196669 - DNA, 25 bp, probe
gattattagaactcaaggttttcat

SEQ ID NO: 196670 - DNA, 25 bp, probe
gcgaagtaaagagaagggcttgcca

SEQ ID NO: 196671 - DNA, 25 bp, probe
gcgtcggtaaattaaggggtgatca

SEQ ID NO: 196672 - DNA, 25 bp, probe
gctgtgtagataagtaagaagtagt

SEQ ID NO: 196673 - DNA, 25 bp, probe
gcgttacgaagctcagaatctagaa

SEQ ID NO: 196674 - DNA, 25 bp, probe
gcagttaagtactcagggtggaagt

SEQ ID NO: 196675 - DNA, 25 bp, probe
gcgttgtagtacagaagttccactg

SEQ ID NO: 196676 - DNA, 25 bp, probe
gcgtgttaggaacgtcaaagaaagc

SEQ ID NO: 196677 - DNA, 25 bp, probe
gccggtttagagctcctagaagttg

SEQ ID NO: 196678 - DNA, 25 bp, probe
gcccgttaaaggcactagagttagt

SEQ ID NO: 196679 - DNA, 25 bp, probe
gccaagtataacctggtttcgttag

SEQ ID NO: 196680 - DNA, 25 bp, probe
gccaatctagaacgtggattccttc

SEQ ID NO: 196681 - DNA, 25 bp, probe
ccaagagagatgttgggatttcttc

SEQ ID NO: 196682 - DNA, 25 bp, probe
ccaacgagctggtgatctttgcttt

SEQ ID NO: 196683 - DNA, 25 bp, probe
ccaaccacagcctgtttctgctgag

SEQ ID NO: 196684 - DNA, 25 bp, probe
ccaaccacagcctgtttctgctgag

SEQ ID NO: 196685 - DNA, 25 bp, probe
gccaaccaaagcagtcattttaaaa

SEQ ID NO: 196686 - DNA, 25 bp, probe
gccaactcaactttcataatttaaa

SEQ ID NO: 196687 - DNA, 25 bp, probe
gcccctgccactttcaataaagacc

SEQ ID NO: 196688 - DNA, 25 bp, probe
gccacctccgttgccatatgggtgg

SEQ ID NO: 196689 - DNA, 25 bp, probe
gccattcatcggatccttcattggg

SEQ ID NO: 196690 - DNA, 25 bp, probe
gccaccatgaaaaccttctgtggga

SEQ ID NO: 196691 - DNA, 25 bp, probe
gccaccatgaaaaccttctgtggga

SEQ ID NO: 196692 - DNA, 25 bp, probe
ccaagctgtaaagtttgctttggac

SEQ ID NO: 196693 - DNA, 25 bp, probe
ccaagcatatggattttcttcatta

SEQ ID NO: 196694 - DNA, 25 bp, probe
ccaacttgtgaaatgcttcatgttt

SEQ ID NO: 196695 - DNA, 25 bp, probe
gccaactctgttatttatggtgtga

SEQ ID NO: 196696 - DNA, 25 bp, probe
gccaagtctattttaaagacgctca

SEQ ID NO: 196697 - DNA, 25 bp, probe
ccaaggcatatttctcctagaccct

SEQ ID NO: 196698 - DNA, 25 bp, probe
ccaaggagttcatctctaagcttct

SEQ ID NO: 196699 - DNA, 25 bp, probe
gccaaggagttcatctctaagcttc

SEQ ID NO: 196700 - DNA, 25 bp, probe
gccaatagtttcatcttccgaggcc

SEQ ID NO: 196701 - DNA, 25 bp, probe
gccaatgagtttctctactctcaaa

SEQ ID NO: 196702 - DNA, 25 bp, probe
ccaacgattctcgtcatgaccgaaa

SEQ ID NO: 196703 - DNA, 25 bp, probe
ccaactagtcatgggcagtactaac

SEQ ID NO: 196704 - DNA, 25 bp, probe
ccaactggtgatggaaggttacaag

SEQ ID NO: 196705 - DNA, 25 bp, probe
ccaactcgctgaggagagctgttca

SEQ ID NO: 196706 - DNA, 25 bp, probe
ccaaccagatgctgggcgatctcat

SEQ ID NO: 196707 - DNA, 25 bp, probe
ccaacgtctgcatgggagaccacaa

SEQ ID NO: 196708 - DNA, 25 bp, probe
gccaactctcgtagtggaactaata

SEQ ID NO: 196709 - DNA, 25 bp, probe
ccaagatccggtcatacatccacat

SEQ ID NO: 196710 - DNA, 25 bp, probe
ccaagagcacggctgaagactctaa

SEQ ID NO: 196711 - DNA, 25 bp, probe
ccaagcaaagccatatggagcatct

SEQ ID NO: 196712 - DNA, 25 bp, probe
ccaagatcagcgactttggcctctc

SEQ ID NO: 196713 - DNA, 25 bp, probe
ccaagaaccctggttgcttgctctg

SEQ ID NO: 196714 - DNA, 25 bp, probe
ccaagccatcaagtgctttctttcc

SEQ ID NO: 196715 - DNA, 25 bp, probe
ccaaggtaaccatgtctgtgtccac

SEQ ID NO: 196716 - DNA, 25 bp, probe
ccaagtgcttatccaactctgaatc

SEQ ID NO: 196717 - DNA, 25 bp, probe
ccaagtgcttatccaactctgaatc

SEQ ID NO: 196718 - DNA, 25 bp, probe
ccaagtgcctgtccaatactgggtt

SEQ ID NO: 196719 - DNA, 25 bp, probe
ccaattgggattttacatctggatt

SEQ ID NO: 196720 - DNA, 25 bp, probe
ccaatgctggtgttggtggcgctgg

SEQ ID NO: 196721 - DNA, 25 bp, probe
ccaagctgattctcagtggctggga

SEQ ID NO: 196722 - DNA, 25 bp, probe
ccaagtgatccttgactccgtggac

SEQ ID NO: 196723 - DNA, 25 bp, probe
gccaaggaagcttcaccagggtaaa

SEQ ID NO: 196724 - DNA, 25 bp, probe
gccaaggaagcttcaccagggtaaa

SEQ ID NO: 196725 - DNA, 25 bp, probe
gccactggagatatcccgtttcaag

SEQ ID NO: 196726 - DNA, 25 bp, probe
gccatcttggtactttaggttaatc

SEQ ID NO: 196727 - DNA, 25 bp, probe
gccatcctggttctatactgtgtag

SEQ ID NO: 196728 - DNA, 25 bp, probe
gccacctttgtgcttattggtatcc

SEQ ID NO: 196729 - DNA, 25 bp, probe
gccaccgttctacgatgtggttccc

SEQ ID NO: 196730 - DNA, 25 bp, probe
gcgtaacaaccgcattggcttcgcc

SEQ ID NO: 196731 - DNA, 25 bp, probe
gcgctggcaagcccgaatcggttta

SEQ ID NO: 196732 - DNA, 25 bp, probe
gccttgcaactctgaactgttgttt

SEQ ID NO: 196733 - DNA, 25 bp, probe
gcctgataactctgtacgaggcttc

SEQ ID NO: 196734 - DNA, 25 bp, probe
gcctcaataccttgtttaggatttc

SEQ ID NO: 196735 - DNA, 25 bp, probe
gcctcaataccttgtttaggatttc

SEQ ID NO: 196736 - DNA, 25 bp, probe
gccacaaagcacatttttggggatc

SEQ ID NO: 196737 - DNA, 25 bp, probe
gcccaggagcccatttggagggcct

SEQ ID NO: 196738 - DNA, 25 bp, probe
tccggaaccaccatgggtggccact

SEQ ID NO: 196739 - DNA, 25 bp, probe
gccaaattctaccgtggaatgtccc

SEQ ID NO: 196740 - DNA, 25 bp, probe
gccaaacccaagctggatcaggccc

SEQ ID NO: 196741 - DNA, 25 bp, probe
ccaagacacttattcatacatcagg

SEQ ID NO: 196742 - DNA, 25 bp, probe
ccaagcctctgcaagtcaacaagtg

SEQ ID NO: 196743 - DNA, 25 bp, probe
ccaagcctctgcaagtcaacaagtg

SEQ ID NO: 196744 - DNA, 25 bp, probe
ccaagcctctgcaagtcaacaagtg

SEQ ID NO: 196745 - DNA, 25 bp, probe
ccaagccttcaacagaagctgtgct

SEQ ID NO: 196746 - DNA, 25 bp, probe
gccaaattccaagagcagcaggtct

SEQ ID NO: 196747 - DNA, 25 bp, probe
gccaaagtcgggggagggcttcatc

SEQ ID NO: 196748 - DNA, 25 bp, probe
gccaaaagtggagcgaggatgattt

SEQ ID NO: 196749 - DNA, 25 bp, probe
gccaagaagcatgggagagaggcta

SEQ ID NO: 196750 - DNA, 25 bp, probe
gccaagactgcatctagaatcgctc

SEQ ID NO: 196751 - DNA, 25 bp, probe
gccaatgtccattgctagacataat

SEQ ID NO: 196752 - DNA, 25 bp, probe
gccaattccaagtcatatgcctagt

SEQ ID NO: 196753 - DNA, 25 bp, probe
gccaattccaagtcatatgcctagt

SEQ ID NO: 196754 - DNA, 25 bp, probe
gccaaggcctaactatgcctcgaac

SEQ ID NO: 196755 - DNA, 25 bp, probe
gccaaggcctaactatgcctcgaac

SEQ ID NO: 196756 - DNA, 25 bp, probe
ccaagacattaaatctgccatctca

SEQ ID NO: 196757 - DNA, 25 bp, probe
ccaagtttcaatggctgctctcgca

SEQ ID NO: 196758 - DNA, 25 bp, probe
ccaagtgtactgttggccgcagcat

SEQ ID NO: 196759 - DNA, 25 bp, probe
gccaaagtactgttggttcgattaa

SEQ ID NO: 196760 - DNA, 25 bp, probe
gccacgagtttgcggtgaagattat

SEQ ID NO: 196761 - DNA, 25 bp, probe
gccagggactggtggtcaagattgg

SEQ ID NO: 196762 - DNA, 25 bp, probe
ccaagaggcgtgagggcaaatctgg

SEQ ID NO: 196763 - DNA, 25 bp, probe
ccaactggcctatgaggcagaactg

SEQ ID NO: 196764 - DNA, 25 bp, probe
gccaagtgcctcaaagaccacaagg

SEQ ID NO: 196765 - DNA, 25 bp, probe
ccaattggctctggggcccaaggga

SEQ ID NO: 196766 - DNA, 25 bp, probe
ccaagtgtctctggggacctgaagc

SEQ ID NO: 196767 - DNA, 25 bp, probe
ccaagtgttgtctgagacctgggtc

SEQ ID NO: 196768 - DNA, 25 bp, probe
gccaagtgttgtctgagacctgggt

SEQ ID NO: 196769 - DNA, 25 bp, probe
gccacgactattcttggacttggga

SEQ ID NO: 196770 - DNA, 25 bp, probe
gccaataacattcttcgatctctgg

SEQ ID NO: 196771 - DNA, 25 bp, probe
ccaatgccaattcatctcagcaatc

SEQ ID NO: 196772 - DNA, 25 bp, probe
gccacacacatagggatcggccatc

SEQ ID NO: 196773 - DNA, 25 bp, probe
gccacacactacatcagtggctcaa

SEQ ID NO: 196774 - DNA, 25 bp, probe
ccaagcctattgacagggatcacac

SEQ ID NO: 196775 - DNA, 25 bp, probe
ccaagctgagcacgctcgtggaaac

SEQ ID NO: 196776 - DNA, 25 bp, probe
ccaaggagacgcctctgtgaagatc

SEQ ID NO: 196777 - DNA, 25 bp, probe
ccaagcaggaagttatctagcaagc

SEQ ID NO: 196778 - DNA, 25 bp, probe
gccaacttcaagtaagcggcaacaa

SEQ ID NO: 196779 - DNA, 25 bp, probe
gccaacttcaagtaagcggcaacaa

SEQ ID NO: 196780 - DNA, 25 bp, probe
gcgacaattaggagagccagaaaaa

SEQ ID NO: 196781 - DNA, 25 bp, probe
gccacatcttagcaagcaccaaaaa

SEQ ID NO: 196782 - DNA, 25 bp, probe
gccacatcttagcaagcaccaaaaa

SEQ ID NO: 196783 - DNA, 25 bp, probe
gccaggtaaagaaaccatggcataa

SEQ ID NO: 196784 - DNA, 25 bp, probe
gccaaggaacagcaaccaagtaccc

SEQ ID NO: 196785 - DNA, 25 bp, probe
gccagggaacataagaccgcaattc

SEQ ID NO: 196786 - DNA, 25 bp, probe
gccacgtaaacttgatccaacttta

SEQ ID NO: 196787 - DNA, 25 bp, probe
gccccttaacagcctagaactttgg

SEQ ID NO: 196788 - DNA, 25 bp, probe
gccacccctaaagagatcctttgat

SEQ ID NO: 196789 - DNA, 25 bp, probe
gccacccacccaactaatttttgtg

SEQ ID NO: 196790 - DNA, 25 bp, probe
gccaccaagcccagctaatttttgt

SEQ ID NO: 196791 - DNA, 25 bp, probe
gccaacaatgtctgggatttttatt

SEQ ID NO: 196792 - DNA, 25 bp, probe
gccacagaaggctggtgggtttttg

SEQ ID NO: 196793 - DNA, 25 bp, probe
gccactagggctcttgtgttttttt

SEQ ID NO: 196794 - DNA, 25 bp, probe
gccactcgccttcttagagttttat

SEQ ID NO: 196795 - DNA, 25 bp, probe
gccactcgccttcttagagttttat

SEQ ID NO: 196796 - DNA, 25 bp, probe
gccaacttctttttagacgatttca

SEQ ID NO: 196797 - DNA, 25 bp, probe
gccaacttctttttagacgatttca

SEQ ID NO: 196798 - DNA, 25 bp, probe
gccacagactttattcagagccttt

SEQ ID NO: 196799 - DNA, 25 bp, probe
gccacagtttggattgaacgcagac

SEQ ID NO: 196800 - DNA, 25 bp, probe
gccacctggtagcctagaacagcta

SEQ ID NO: 196801 - DNA, 25 bp, probe
gccacctggtagcctagaacagcta

SEQ ID NO: 196802 - DNA, 25 bp, probe
gccacactggaaagggaactgagag

SEQ ID NO: 196803 - DNA, 25 bp, probe
gccacaattcactgtcttttggagc

SEQ ID NO: 196804 - DNA, 25 bp, probe
ccaatgattgcctctgattcttgta

SEQ ID NO: 196805 - DNA, 25 bp, probe
ccaatgattgcctctgattcttgta

SEQ ID NO: 196806 - DNA, 25 bp, probe
ccaagacggatggcgtttgtgaatg

SEQ ID NO: 196807 - DNA, 25 bp, probe
ccaatacatgggaagctttgctgaa

SEQ ID NO: 196808 - DNA, 25 bp, probe
ccaatccagggcgggatcctgaacc

SEQ ID NO: 196809 - DNA, 25 bp, probe
ccaatcaaggactcagaactgaagg

SEQ ID NO: 196810 - DNA, 25 bp, probe
ccaatcccagaactcaggactggag

SEQ ID NO: 196811 - DNA, 25 bp, probe
ccaatcacagctcatgccgaggtgg

SEQ ID NO: 196812 - DNA, 25 bp, probe
ccaaccagcccgagattgtgcagct

SEQ ID NO: 196813 - DNA, 25 bp, probe
ccaaccagcccgagattgtgcagct

SEQ ID NO: 196814 - DNA, 25 bp, probe
gccagaccagacccggattgtggcc

SEQ ID NO: 196815 - DNA, 25 bp, probe
gccacagtagaagcggtagaggccc

SEQ ID NO: 196816 - DNA, 25 bp, probe
gccacagaacctgcggtagtacagc

SEQ ID NO: 196817 - DNA, 25 bp, probe
gccacagaacctgcggtagtacagc

SEQ ID NO: 196818 - DNA, 25 bp, probe
ccaagaccatcgtggtggtggcagc

SEQ ID NO: 196819 - DNA, 25 bp, probe
ccaagaccatcgtggtggtggcagc

SEQ ID NO: 196820 - DNA, 25 bp, probe
ccaagccctggatggtgtctggtcg

SEQ ID NO: 196821 - DNA, 25 bp, probe
gccacggccaagtggttgctggtct

SEQ ID NO: 196822 - DNA, 25 bp, probe
gccacatatcacaaacgactacggt

SEQ ID NO: 196823 - DNA, 25 bp, probe
ccaagtcaaagctgaatatcctgca

SEQ ID NO: 196824 - DNA, 25 bp, probe
ccaatggctaagtgaagatgacaat

SEQ ID NO: 196825 - DNA, 25 bp, probe
ccaaggccatgatgtcaagggccat

SEQ ID NO: 196826 - DNA, 25 bp, probe
ccaagcccgagtactgggtgctcat

SEQ ID NO: 196827 - DNA, 25 bp, probe
ccaagcgactagaccggagtgtctc

SEQ ID NO: 196828 - DNA, 25 bp, probe
gccaaggagctggtccgagggctcc

SEQ ID NO: 196829 - DNA, 25 bp, probe
ccaagatggcggacctggaggcggt

SEQ ID NO: 196830 - DNA, 25 bp, probe
ccaagtgcaaggacctgaagctgcg

SEQ ID NO: 196831 - DNA, 25 bp, probe
gccaagtgcagagaatgtgaagcct

SEQ ID NO: 196832 - DNA, 25 bp, probe
gccaaatatgccaaggtgaagctta

SEQ ID NO: 196833 - DNA, 25 bp, probe
gccaagatgccccaaggaattccgt

SEQ ID NO: 196834 - DNA, 25 bp, probe
gccaagatgccccaaggaattccgt

SEQ ID NO: 196835 - DNA, 25 bp, probe
ccaagacctgcgatggacttcacag

SEQ ID NO: 196836 - DNA, 25 bp, probe
ccaagacctgcgatggacttcacag

SEQ ID NO: 196837 - DNA, 25 bp, probe
ccaagcagccggctggactttcgga

SEQ ID NO: 196838 - DNA, 25 bp, probe
ccaaggctgacccgggtcattggtg

SEQ ID NO: 196839 - DNA, 25 bp, probe
ccaatggagccctagaaatatgtga

SEQ ID NO: 196840 - DNA, 25 bp, probe
ccaaggactctcatgcacttatcga

SEQ ID NO: 196841 - DNA, 25 bp, probe
gccaaggaccgcagtccttcagtaa

SEQ ID NO: 196842 - DNA, 25 bp, probe
gccaaacaccggcattttatgtact

SEQ ID NO: 196843 - DNA, 25 bp, probe
gccaacaacctgggcattgtgtttg

SEQ ID NO: 196844 - DNA, 25 bp, probe
gccaagaccctgggcattgttgtgg

SEQ ID NO: 196845 - DNA, 25 bp, probe
gccactgaccatgcacaattttgta

SEQ ID NO: 196846 - DNA, 25 bp, probe
ccaagacctctatatttgctctttt

SEQ ID NO: 196847 - DNA, 25 bp, probe
ccaagaggatcaatcacattagctc

SEQ ID NO: 196848 - DNA, 25 bp, probe
gccaagaggatcaatcacattagct

SEQ ID NO: 196849 - DNA, 25 bp, probe
ccaatgaggatctgctgcacctgct

SEQ ID NO: 196850 - DNA, 25 bp, probe
ccaagaaattcgacagcctcctgga

SEQ ID NO: 196851 - DNA, 25 bp, probe
gccaagaaattcgacagcctcctgg

SEQ ID NO: 196852 - DNA, 25 bp, probe
gccaagaaattcgacagcctcctgg

SEQ ID NO: 196853 - DNA, 25 bp, probe
ccaagagcaattgcagcagacccag

SEQ ID NO: 196854 - DNA, 25 bp, probe
ccaagatcaagagagccatcacctt

SEQ ID NO: 196855 - DNA, 25 bp, probe
gccaccaaaagtaactaccttcgag

SEQ ID NO: 196856 - DNA, 25 bp, probe
gccacaaaaaaacctaccttatatg

SEQ ID NO: 196857 - DNA, 25 bp, probe
gccacaaaaaaacctaccttatatg

SEQ ID NO: 196858 - DNA, 25 bp, probe
gccacaagttaagatgctactgttt

SEQ ID NO: 196859 - DNA, 25 bp, probe
gccacaagttcatccagcaagtcta

SEQ ID NO: 196860 - DNA, 25 bp, probe
gccacaagttcatccagcaagtcta

SEQ ID NO: 196861 - DNA, 25 bp, probe
gccaagaattcataagatagccatc

SEQ ID NO: 196862 - DNA, 25 bp, probe
gccaagtccacaaaatggagccacg

SEQ ID NO: 196863 - DNA, 25 bp, probe
gccacagttatcaagaatgggtcag

SEQ ID NO: 196864 - DNA, 25 bp, probe
gccatcagttcaggaatcgcggtac

SEQ ID NO: 196865 - DNA, 25 bp, probe
gccatcagttcaggaatcgcggtac

SEQ ID NO: 196866 - DNA, 25 bp, probe
ccaagatgctgggtatcgaatgtac

SEQ ID NO: 196867 - DNA, 25 bp, probe
ccaatgatgtgccttctccatatga

SEQ ID NO: 196868 - DNA, 25 bp, probe
ccaaggagcaatacatcgaagcatg

SEQ ID NO: 196869 - DNA, 25 bp, probe
ccaatggcagcagtgtcaacagacg

SEQ ID NO: 196870 - DNA, 25 bp, probe
ccaatctcagacactggcagtcagg

SEQ ID NO: 196871 - DNA, 25 bp, probe
gccaagacagacacgctgcagatcg

SEQ ID NO: 196872 - DNA, 25 bp, probe
gccaaacaagtgtcagccacactgt

SEQ ID NO: 196873 - DNA, 25 bp, probe
gccagaacaatggatcggcttcctt

SEQ ID NO: 196874 - DNA, 25 bp, probe
gccaataacatcgtctggctgctct

SEQ ID NO: 196875 - DNA, 25 bp, probe
gccaatgacattgacatgatctgcc

SEQ ID NO: 196876 - DNA, 25 bp, probe
gccaatgtgcatttttgcacatgct

SEQ ID NO: 196877 - DNA, 25 bp, probe
ccaattcagtgttgtgtatgtgtct

SEQ ID NO: 196878 - DNA, 25 bp, probe
gccacattcttggccttatctgact

SEQ ID NO: 196879 - DNA, 25 bp, probe
gccaatctgttagcagtcctgactt

SEQ ID NO: 196880 - DNA, 25 bp, probe
gccaatgccttagcactggagagct

SEQ ID NO: 196881 - DNA, 25 bp, probe
gccaagactgtggccgcaggaagct

SEQ ID NO: 196882 - DNA, 25 bp, probe
ccaagcaagtagcctccgagatgcg

SEQ ID NO: 196883 - DNA, 25 bp, probe
ccaagcaacaaagtcccgagcaatg

SEQ ID NO: 196884 - DNA, 25 bp, probe
ccaagaagcccatcatcggaatatt

SEQ ID NO: 196885 - DNA, 25 bp, probe
ccaagaagcccaaatagctcaagac

SEQ ID NO: 196886 - DNA, 25 bp, probe
gccacaaacccatctagtcatagag

SEQ ID NO: 196887 - DNA, 25 bp, probe
gccaaaaccaaacagatcagaacac

SEQ ID NO: 196888 - DNA, 25 bp, probe
ccaagaacgttcccaggcagaactc

SEQ ID NO: 196889 - DNA, 25 bp, probe
gccaagaacgttcccaggcagaact

SEQ ID NO: 196890 - DNA, 25 bp, probe
gccaagaacgttcccaggcagaact

SEQ ID NO: 196891 - DNA, 25 bp, probe
gccaaaactgattagctagtggaca

SEQ ID NO: 196892 - DNA, 25 bp, probe
gccaacgacgaggagtcagacgatg

SEQ ID NO: 196893 - DNA, 25 bp, probe
gccaacgacgaggagtcagacgatg

SEQ ID NO: 196894 - DNA, 25 bp, probe
gccaagccagggaattacatacatc

SEQ ID NO: 196895 - DNA, 25 bp, probe
gccaggccgtggaagggcaacacaa

SEQ ID NO: 196896 - DNA, 25 bp, probe
gccaggctttggtggcagcatggac

SEQ ID NO: 196897 - DNA, 25 bp, probe
gcatcagactctctaaggactggaa

SEQ ID NO: 196898 - DNA, 25 bp, probe
gccgaattcctcaaggctgtgcgag

SEQ ID NO: 196899 - DNA, 25 bp, probe
gccgaattcctcaaggctgtgcgag

SEQ ID NO: 196900 - DNA, 25 bp, probe
gccagagattggtccgaggttgaga

SEQ ID NO: 196901 - DNA, 25 bp, probe
gccaaatagaaccgcctttcagacc

SEQ ID NO: 196902 - DNA, 25 bp, probe
gccggaagaaggcttttgccacctg

SEQ ID NO: 196903 - DNA, 25 bp, probe
gccgcagaagaacgtggttagccac

SEQ ID NO: 196904 - DNA, 25 bp, probe
gcctgcgggaagcttttagggctta

SEQ ID NO: 196905 - DNA, 25 bp, probe
tactaggataacttttttgtgggtg

SEQ ID NO: 196906 - DNA, 25 bp, probe
tgcccgctttactttggttgggttg

SEQ ID NO: 196907 - DNA, 25 bp, probe
gcccctttaaggcgcggggcattgt

SEQ ID NO: 196908 - DNA, 25 bp, probe
gccactacattgaggaggggggagg

SEQ ID NO: 196909 - DNA, 25 bp, probe
gccacaccgtgcacgaagggggcac

SEQ ID NO: 196910 - DNA, 25 bp, probe
gccaccgcgtgcaaatgaaggggac

SEQ ID NO: 196911 - DNA, 25 bp, probe
gccaccgcgtgcaaatgaaggggac

SEQ ID NO: 196912 - DNA, 25 bp, probe
gccacccctggttacaggagtacca

SEQ ID NO: 196913 - DNA, 25 bp, probe
gccacccctggttacaggagtacca

SEQ ID NO: 196914 - DNA, 25 bp, probe
gccacccactgcattacaacatgct

SEQ ID NO: 196915 - DNA, 25 bp, probe
gccaaacactgcaggaaactcattc

SEQ ID NO: 196916 - DNA, 25 bp, probe
gctaatactcggggaaatgcttttg

SEQ ID NO: 196917 - DNA, 25 bp, probe
gccaataaaggcccagtgtctgttg

SEQ ID NO: 196918 - DNA, 25 bp, probe
gccaataaaggcccagtgtctgttg

SEQ ID NO: 196919 - DNA, 25 bp, probe
gccaataaagtacatgtttttccta

SEQ ID NO: 196920 - DNA, 25 bp, probe
gccaaaagagtagttgctttcctgg

SEQ ID NO: 196921 - DNA, 25 bp, probe
gccaatcataggcattttttcattc

SEQ ID NO: 196922 - DNA, 25 bp, probe
gccaatcataggcattttttcattc

SEQ ID NO: 196923 - DNA, 25 bp, probe
gccaatctgaagatgtcattcttat

SEQ ID NO: 196924 - DNA, 25 bp, probe
gccaatgacataccttgcttcttca

SEQ ID NO: 196925 - DNA, 25 bp, probe
gccaatgatggacattcagactcct

SEQ ID NO: 196926 - DNA, 25 bp, probe
gccaaggctgggtaagactcctcta

SEQ ID NO: 196927 - DNA, 25 bp, probe
ccaaggctgtgggcaaggtcatccc

SEQ ID NO: 196928 - DNA, 25 bp, probe
ccaaggctctaggcaaggccaggcg

SEQ ID NO: 196929 - DNA, 25 bp, probe
gccaaggctctaggcaaggccaggc

SEQ ID NO: 196930 - DNA, 25 bp, probe
gccacgttctacgataagcattgtg

SEQ ID NO: 196931 - DNA, 25 bp, probe
gccacagtcatcatcagagaagcag

SEQ ID NO: 196932 - DNA, 25 bp, probe
gccaacatatccgagctaatcagtc

SEQ ID NO: 196933 - DNA, 25 bp, probe
gccaacgacccttacacagttagaa

SEQ ID NO: 196934 - DNA, 25 bp, probe
gccaccaatccctgaaagattaagc

SEQ ID NO: 196935 - DNA, 25 bp, probe
gccaccagaacccaagaagattccg

SEQ ID NO: 196936 - DNA, 25 bp, probe
gccaccagacccctaaatcttggcc

SEQ ID NO: 196937 - DNA, 25 bp, probe
gccaccacgcctggctaattttttg

SEQ ID NO: 196938 - DNA, 25 bp, probe
gccactccaggggtacagtttttgg

SEQ ID NO: 196939 - DNA, 25 bp, probe
gccactccaggggtacagtttttgg

SEQ ID NO: 196940 - DNA, 25 bp, probe
gccacccaaggggaagcttcggagc

SEQ ID NO: 196941 - DNA, 25 bp, probe
gccacctcaccaaggaccttggaag

SEQ ID NO: 196942 - DNA, 25 bp, probe
gccaagtacctcggggggctgagag

SEQ ID NO: 196943 - DNA, 25 bp, probe
ccaagtgcccctgtgggatgggagg

SEQ ID NO: 196944 - DNA, 25 bp, probe
ccaagtgggcacggggagaggaagg

SEQ ID NO: 196945 - DNA, 25 bp, probe
ccaagggacagcaagtgagcagaga

SEQ ID NO: 196946 - DNA, 25 bp, probe
gccaagggcgcgcagtggatgaagc

SEQ ID NO: 196947 - DNA, 25 bp, probe
gccaagatgggcaaggcggagatcc

SEQ ID NO: 196948 - DNA, 25 bp, probe
gccaagcagaagccgaggagggccg

SEQ ID NO: 196949 - DNA, 25 bp, probe
gccaagcatggattaactgaggagc

SEQ ID NO: 196950 - DNA, 25 bp, probe
gccacaatgcgcgttgactacgagc

SEQ ID NO: 196951 - DNA, 25 bp, probe
gccaacatcagcattatctcggaca

SEQ ID NO: 196952 - DNA, 25 bp, probe
gccaacatcagcattatctcggaca

SEQ ID NO: 196953 - DNA, 25 bp, probe
gccaacgtcagtgaggcagatgaca

SEQ ID NO: 196954 - DNA, 25 bp, probe
gccaacgaagtcccggatgagcgct

SEQ ID NO: 196955 - DNA, 25 bp, probe
gccacctagcagacgtggggagcct

SEQ ID NO: 196956 - DNA, 25 bp, probe
gccacctagcagacgtggggagcct

SEQ ID NO: 196957 - DNA, 25 bp, probe
gccactccagagctgggggctaaaa

SEQ ID NO: 196958 - DNA, 25 bp, probe
gccaagccagggacttgttgtcaaa

SEQ ID NO: 196959 - DNA, 25 bp, probe
gccaagatcagatgtctctgtgttc

SEQ ID NO: 196960 - DNA, 25 bp, probe
gccatcagaacattgtgcggtgtgt

SEQ ID NO: 196961 - DNA, 25 bp, probe
cccatggatgctttctcaatcctag

SEQ ID NO: 196962 - DNA, 25 bp, probe
gccacaaacatgtcctgtgcttgtc

SEQ ID NO: 196963 - DNA, 25 bp, probe
gccacagccaatgatgtgccttctc

SEQ ID NO: 196964 - DNA, 25 bp, probe
gccacagcctggacatgaagttcac

SEQ ID NO: 196965 - DNA, 25 bp, probe
gccaatggtggtagacatgtgcatc

SEQ ID NO: 196966 - DNA, 25 bp, probe
gccaatgcaggcgatagcagggcca

SEQ ID NO: 196967 - DNA, 25 bp, probe
gccaatcaggcagcagcaatttcac

SEQ ID NO: 196968 - DNA, 25 bp, probe
gccaacttcagaagcagtttgcatc

SEQ ID NO: 196969 - DNA, 25 bp, probe
gccaaagtcatgatgaatctttccc

SEQ ID NO: 196970 - DNA, 25 bp, probe
tccaaagttggagcttctattgcca

SEQ ID NO: 196971 - DNA, 25 bp, probe
ccaagattgggaactgcccattctc

SEQ ID NO: 196972 - DNA, 25 bp, probe
ccaagttgaggtctgttctgtcctc

SEQ ID NO: 196973 - DNA, 25 bp, probe
gccaacttggagtcctttctgtttt

SEQ ID NO: 196974 - DNA, 25 bp, probe
gccacccaggtgatgttagtgtttt

SEQ ID NO: 196975 - DNA, 25 bp, probe
gccacggcagtgtttttggtctgcc

SEQ ID NO: 196976 - DNA, 25 bp, probe
gccactgaggctgtttgtggaccac

SEQ ID NO: 196977 - DNA, 25 bp, probe
gccaatatgtctgttaggggatact

SEQ ID NO: 196978 - DNA, 25 bp, probe
gccaagcattatgtgctgtgcgtgg

SEQ ID NO: 196979 - DNA, 25 bp, probe
gccaagctctgatcctgggaatttt

SEQ ID NO: 196980 - DNA, 25 bp, probe
gccaatcactgatccccaagtgttt

SEQ ID NO: 196981 - DNA, 25 bp, probe
gccaccattcaagcccaaagtgtgt

SEQ ID NO: 196982 - DNA, 25 bp, probe
gccaactggccagcccagaatatct

SEQ ID NO: 196983 - DNA, 25 bp, probe
gccaactcgaagtcatccatggacc

SEQ ID NO: 196984 - DNA, 25 bp, probe
gccactcctcaatgctcaatggctc

SEQ ID NO: 196985 - DNA, 25 bp, probe
gccactcctcaatgctcaatggctc

SEQ ID NO: 196986 - DNA, 25 bp, probe
gccaccgcaacgacatcatgttgct

SEQ ID NO: 196987 - DNA, 25 bp, probe
gccacactgaaccatatcgatgagg

SEQ ID NO: 196988 - DNA, 25 bp, probe
ccaagtgaagcgcatgcgcagcggg

SEQ ID NO: 196989 - DNA, 25 bp, probe
gccaagagaggatgcatctggggag

SEQ ID NO: 196990 - DNA, 25 bp, probe
gccaagcaagtagcctccgagatgc

SEQ ID NO: 196991 - DNA, 25 bp, probe
gccaagcaagtagcctccgagatgc

SEQ ID NO: 196992 - DNA, 25 bp, probe
ccaatacctactgctccaagtcaga

SEQ ID NO: 196993 - DNA, 25 bp, probe
ccaatatccttctcccaggaagcag

SEQ ID NO: 196994 - DNA, 25 bp, probe
ccaatatccttctcccaggaagcag

SEQ ID NO: 196995 - DNA, 25 bp, probe
ccaatatcttcatcccataggaaag

SEQ ID NO: 196996 - DNA, 25 bp, probe
ccaatatcttcatcccataggaaag

SEQ ID NO: 196997 - DNA, 25 bp, probe
gccaaactatcaagccctcaagaaa

SEQ ID NO: 196998 - DNA, 25 bp, probe
ccaaggctaatgtgctgactgagga

SEQ ID NO: 196999 - DNA, 25 bp, probe
gccaaggctaatgtgctgactgagg

SEQ ID NO: 197000 - DNA, 25 bp, probe
gccaaggctaatgtgctgactgagg

SEQ ID NO: 197001 - DNA, 25 bp, probe
ccaaggcaaagcagcttctgcagca

SEQ ID NO: 197002 - DNA, 25 bp, probe
gccaagccagattctggctgtccac

SEQ ID NO: 197003 - DNA, 25 bp, probe
gccaagcccagaagtggtccgcaag

SEQ ID NO: 197004 - DNA, 25 bp, probe
ccaatggtcatgggtggtcagccag

SEQ ID NO: 197005 - DNA, 25 bp, probe
gccaaggtcagcgactttggcctgg

SEQ ID NO: 197006 - DNA, 25 bp, probe
gccaaggacagctactctctggctc

SEQ ID NO: 197007 - DNA, 25 bp, probe
ccaagtgcaacttgcttcagtcatc

SEQ ID NO: 197008 - DNA, 25 bp, probe
ccaagtgacagcaatgctgtttcac

SEQ ID NO: 197009 - DNA, 25 bp, probe
gccaagcgagactagcagtcatcca

SEQ ID NO: 197010 - DNA, 25 bp, probe
ccaaggagccttcgaatccaggttc

SEQ ID NO: 197011 - DNA, 25 bp, probe
gccaaggagtttcatacagcggtgt

SEQ ID NO: 197012 - DNA, 25 bp, probe
gccaatggcctttggatcactgggg

SEQ ID NO: 197013 - DNA, 25 bp, probe
gccaatggcctttggatcactgggg

SEQ ID NO: 197014 - DNA, 25 bp, probe
gccaagtcagctggatggactctgg

SEQ ID NO: 197015 - DNA, 25 bp, probe
gccaactcactggtcaatgctgctg

SEQ ID NO: 197016 - DNA, 25 bp, probe
gccaactcactggtcaatgctgctg

SEQ ID NO: 197017 - DNA, 25 bp, probe
gccagagtcctgatgcacatcttcc

SEQ ID NO: 197018 - DNA, 25 bp, probe
gccagagtactaaacagcttccttc

SEQ ID NO: 197019 - DNA, 25 bp, probe
gccacagtacttcagagacccatgt

SEQ ID NO: 197020 - DNA, 25 bp, probe
gccacagcacctgggtatgacccag

SEQ ID NO: 197021 - DNA, 25 bp, probe
gccacatcgcctgagattgacaacg

SEQ ID NO: 197022 - DNA, 25 bp, probe
gccagccaatctgaagatgtcattc

SEQ ID NO: 197023 - DNA, 25 bp, probe
gccaccatgcctggctaattttggt

SEQ ID NO: 197024 - DNA, 25 bp, probe
gccaccagctccagagcttgactgg

SEQ ID NO: 197025 - DNA, 25 bp, probe
gccactacatccaggctgagaaggc

SEQ ID NO: 197026 - DNA, 25 bp, probe
gccaatatcatcaccaggaggagtg

SEQ ID NO: 197027 - DNA, 25 bp, probe
gccacatatgtcaaccgggagtcag

SEQ ID NO: 197028 - DNA, 25 bp, probe
gccacaagtcttccagaggatgctt

SEQ ID NO: 197029 - DNA, 25 bp, probe
gccaccaggatgtgaaggatgtcca

SEQ ID NO: 197030 - DNA, 25 bp, probe
gccaacagttgctgaagccaaagtc

SEQ ID NO: 197031 - DNA, 25 bp, probe
gccaagcccgaaggacctagagtca

SEQ ID NO: 197032 - DNA, 25 bp, probe
gccaagtcgggcggatcacaaggtc

SEQ ID NO: 197033 - DNA, 25 bp, probe
gccattaaggagcaattcaagtgtg

SEQ ID NO: 197034 - DNA, 25 bp, probe
gccaccactggacggagatcgagtt

SEQ ID NO: 197035 - DNA, 25 bp, probe
gccacctggcagcctggagattgag

SEQ ID NO: 197036 - DNA, 25 bp, probe
gccacctggcagcctggagattgag

SEQ ID NO: 197037 - DNA, 25 bp, probe
gccagccattgctcatagagatttg

SEQ ID NO: 197038 - DNA, 25 bp, probe
gccagccattgctcatagagatttg

SEQ ID NO: 197039 - DNA, 25 bp, probe
gccaccatgttgacataagttccta

SEQ ID NO: 197040 - DNA, 25 bp, probe
gccaccatgttacactggactctaa

SEQ ID NO: 197041 - DNA, 25 bp, probe
gccacctatgtatggtcatggaata

SEQ ID NO: 197042 - DNA, 25 bp, probe
gccaacagtgttaggcctggcacag

SEQ ID NO: 197043 - DNA, 25 bp, probe
gccaacagttttgagagagccatgt

SEQ ID NO: 197044 - DNA, 25 bp, probe
gccaaacttcctgctgaagctctgt

SEQ ID NO: 197045 - DNA, 25 bp, probe
gccaatcaacatgctggtgaaggtg

SEQ ID NO: 197046 - DNA, 25 bp, probe
gccaacatcctggttggggagcggc

SEQ ID NO: 197047 - DNA, 25 bp, probe
gccacagcagccagtgttggggctg

SEQ ID NO: 197048 - DNA, 25 bp, probe
gccacagcagccagtgttggggctg

SEQ ID NO: 197049 - DNA, 25 bp, probe
gccacagcaccagtgtgttggagga

SEQ ID NO: 197050 - DNA, 25 bp, probe
gccacaacataacggggagagcaat

SEQ ID NO: 197051 - DNA, 25 bp, probe
gcctcccaccagggggtgaattggc

SEQ ID NO: 197052 - DNA, 25 bp, probe
gcctcgagcggggagggtaatgtgc

SEQ ID NO: 197053 - DNA, 25 bp, probe
gccagcgggcgggaactgttatgat

SEQ ID NO: 197054 - DNA, 25 bp, probe
gccaagagatgcggaagacctttaa

SEQ ID NO: 197055 - DNA, 25 bp, probe
gccacagcggcagtgaggagcagct

SEQ ID NO: 197056 - DNA, 25 bp, probe
gccaagcagtcaagaccagctgggt

SEQ ID NO: 197057 - DNA, 25 bp, probe
ccaatcagtgtcatctcctgggtaa

SEQ ID NO: 197058 - DNA, 25 bp, probe
ccaatctaggaggctcctggcggaa

SEQ ID NO: 197059 - DNA, 25 bp, probe
ccaattgcggagcgtctgggatgca

SEQ ID NO: 197060 - DNA, 25 bp, probe
ccaatggggggtcgagctggatgag

SEQ ID NO: 197061 - DNA, 25 bp, probe
gccacaaagcggttaggctgtgagg

SEQ ID NO: 197062 - DNA, 25 bp, probe
gccaacggcgagctagaggtgaaga

SEQ ID NO: 197063 - DNA, 25 bp, probe
gctggagcccttgaaaggtgaaaag

SEQ ID NO: 197064 - DNA, 25 bp, probe
gccaggccccgcaaaagttgaaaca

SEQ ID NO: 197065 - DNA, 25 bp, probe
gccaggccccgcaaaagttgaaaca

SEQ ID NO: 197066 - DNA, 25 bp, probe
gccacaccgccgaaagacggcaaga

SEQ ID NO: 197067 - DNA, 25 bp, probe
gccaatcaggcaaagaccggaaaga

SEQ ID NO: 197068 - DNA, 25 bp, probe
gccacacatggtccagacactggaa

SEQ ID NO: 197069 - DNA, 25 bp, probe
gccgaagtgtccgcactgtaaagca

SEQ ID NO: 197070 - DNA, 25 bp, probe
gccagaatggtcgcaccttcaaagt

SEQ ID NO: 197071 - DNA, 25 bp, probe
gccagaatggtcgcaccttcaaagt

SEQ ID NO: 197072 - DNA, 25 bp, probe
gccaaatgggcacccctataacaga

SEQ ID NO: 197073 - DNA, 25 bp, probe
gccacagaggatcacccagaaacca

SEQ ID NO: 197074 - DNA, 25 bp, probe
gccacagaggatcacccagaaacca

SEQ ID NO: 197075 - DNA, 25 bp, probe
gccacagacagggagaaagacccca

SEQ ID NO: 197076 - DNA, 25 bp, probe
gccaaacagcagctagaatacgccc

SEQ ID NO: 197077 - DNA, 25 bp, probe
gccactatgcgggtagactacgacc

SEQ ID NO: 197078 - DNA, 25 bp, probe
gccacaattgaggataccccgagac

SEQ ID NO: 197079 - DNA, 25 bp, probe
gccaccttcatggcattcaaccggg

SEQ ID NO: 197080 - DNA, 25 bp, probe
gccacactcaactttgtacatcggg

SEQ ID NO: 197081 - DNA, 25 bp, probe
gccacgtctgacttgggaggcagag

SEQ ID NO: 197082 - DNA, 25 bp, probe
gccacgtctgacttgggaggcagag

SEQ ID NO: 197083 - DNA, 25 bp, probe
gccacacctcaatggagcagaagag

SEQ ID NO: 197084 - DNA, 25 bp, probe
gccaatctgcttaaaggcaaagtcc

SEQ ID NO: 197085 - DNA, 25 bp, probe
gccacatctgtgttgagcaggacag

SEQ ID NO: 197086 - DNA, 25 bp, probe
gccagatctggcctgtggatcagca

SEQ ID NO: 197087 - DNA, 25 bp, probe
gccacagcatcaaggatgtgcacgc

SEQ ID NO: 197088 - DNA, 25 bp, probe
gccaagcgcaaggtgacacgcatga

SEQ ID NO: 197089 - DNA, 25 bp, probe
gccaacatgtcactggacatcctca

SEQ ID NO: 197090 - DNA, 25 bp, probe
gccaagtatcagactgaccctcatg

SEQ ID NO: 197091 - DNA, 25 bp, probe
gccactccacagagatccctgtggg

SEQ ID NO: 197092 - DNA, 25 bp, probe
gccagctatcaactcgcgccctgga

SEQ ID NO: 197093 - DNA, 25 bp, probe
gccacatctaaatgctgccaatgag

SEQ ID NO: 197094 - DNA, 25 bp, probe
gccacacgcaactgtctagtgggcc

SEQ ID NO: 197095 - DNA, 25 bp, probe
gccaacgctgagtcaggctgagtgg

SEQ ID NO: 197096 - DNA, 25 bp, probe
gccaagcgccagtgaggactgctgg

SEQ ID NO: 197097 - DNA, 25 bp, probe
gccaaggctatgaagggacagctgc

SEQ ID NO: 197098 - DNA, 25 bp, probe
gccaagtgcgagggggacatcttca

SEQ ID NO: 197099 - DNA, 25 bp, probe
gccatgagggacagggtcttttttc

SEQ ID NO: 197100 - DNA, 25 bp, probe
gaattgggctttcggtgtttgtaat

SEQ ID NO: 197101 - DNA, 25 bp, probe
ggtagggcagtatgtttaagtccag

SEQ ID NO: 197102 - DNA, 25 bp, probe
gctgcaaggggaaaagtttacttca

SEQ ID NO: 197103 - DNA, 25 bp, probe
gccaacaggtagcatagctctgtac

SEQ ID NO: 197104 - DNA, 25 bp, probe
gccaaaggcatggagtaccttcaca

SEQ ID NO: 197105 - DNA, 25 bp, probe
gccagaagacatggaaactcttgag

SEQ ID NO: 197106 - DNA, 25 bp, probe
gccactgcagaagagaccctctgtg

SEQ ID NO: 197107 - DNA, 25 bp, probe
gccagtcattactagtacctctgcg

SEQ ID NO: 197108 - DNA, 25 bp, probe
gccagcatcttagacaaacatagct

SEQ ID NO: 197109 - DNA, 25 bp, probe
gccaatccgaagtcagcaatcttgc

SEQ ID NO: 197110 - DNA, 25 bp, probe
gccaatccgaagtcagcaatcttgc

SEQ ID NO: 197111 - DNA, 25 bp, probe
gccaattatacatcgtgacttgaac

SEQ ID NO: 197112 - DNA, 25 bp, probe
gccatacttccagcgaaatggtacc

SEQ ID NO: 197113 - DNA, 25 bp, probe
gccaagttcccaatcaagtggtccc

SEQ ID NO: 197114 - DNA, 25 bp, probe
gccaagttcccaatcaagtggtccc

SEQ ID NO: 197115 - DNA, 25 bp, probe
gccaagtacacctgcaaggctgtca

SEQ ID NO: 197116 - DNA, 25 bp, probe
gccaactaactctgcagatggggct

SEQ ID NO: 197117 - DNA, 25 bp, probe
gccaactacatccggggctatggtg

SEQ ID NO: 197118 - DNA, 25 bp, probe
gccaatctagtcctggaacaattgc

SEQ ID NO: 197119 - DNA, 25 bp, probe
ccaatctagtcctggaacaattgca

SEQ ID NO: 197120 - DNA, 25 bp, probe
gccacctaggactgaggacagagag

SEQ ID NO: 197121 - DNA, 25 bp, probe
gccacagctgggtttagctacggta

SEQ ID NO: 197122 - DNA, 25 bp, probe
gccacagctgggtttagctacggta

SEQ ID NO: 197123 - DNA, 25 bp, probe
gccacagttggtgtaccacgtggaa

SEQ ID NO: 197124 - DNA, 25 bp, probe
gccacgttggctgtagacaccaagg

SEQ ID NO: 197125 - DNA, 25 bp, probe
gccactttggagttgtctaccacgg

SEQ ID NO: 197126 - DNA, 25 bp, probe
gccatatttgggcagttcccagtcc

SEQ ID NO: 197127 - DNA, 25 bp, probe
gccaagtagtggcagccatccagca

SEQ ID NO: 197128 - DNA, 25 bp, probe
gccaagaagctgcaggccatgcgcg

SEQ ID NO: 197129 - DNA, 25 bp, probe
gccaaggagttcgtgaagctcaagt

SEQ ID NO: 197130 - DNA, 25 bp, probe
ccaatagagcttatacacatcaggt

SEQ ID NO: 197131 - DNA, 25 bp, probe
gccaactgacttaacaacattgctg

SEQ ID NO: 197132 - DNA, 25 bp, probe
gccacaagcagtctcaaagctctct

SEQ ID NO: 197133 - DNA, 25 bp, probe
gccagccaattaataaagcacttta

SEQ ID NO: 197134 - DNA, 25 bp, probe
gccaccaatgccaggaaacatctta

SEQ ID NO: 197135 - DNA, 25 bp, probe
gccaatcctgccagaaattcatttc

SEQ ID NO: 197136 - DNA, 25 bp, probe
gccaatctcttcataaatcttttct

SEQ ID NO: 197137 - DNA, 25 bp, probe
gccaaatctacttcacagacttttc

SEQ ID NO: 197138 - DNA, 25 bp, probe
gccaaatgttgctgacaaacttatc

SEQ ID NO: 197139 - DNA, 25 bp, probe
gccaaatatggccagacaaatctgg

SEQ ID NO: 197140 - DNA, 25 bp, probe
gccagaaatccgccaaatactagag

SEQ ID NO: 197141 - DNA, 25 bp, probe
gccagaaatccgccaaatactagag

SEQ ID NO: 197142 - DNA, 25 bp, probe
gccagaagatcgagcagtgtgacta

SEQ ID NO: 197143 - DNA, 25 bp, probe
gccaaagaccattgcagagatgagg

SEQ ID NO: 197144 - DNA, 25 bp, probe
gccaaagaccattgcagagatgagg

SEQ ID NO: 197145 - DNA, 25 bp, probe
gccaagcaactgtatgaagagctgg

SEQ ID NO: 197146 - DNA, 25 bp, probe
gccaagcctctgttaaagtcattga

SEQ ID NO: 197147 - DNA, 25 bp, probe
gccaatggcctcctaatagcctaac

SEQ ID NO: 197148 - DNA, 25 bp, probe
gccaatgtccatagtaaagcatcaa

SEQ ID NO: 197149 - DNA, 25 bp, probe
gccacatgttcaaagtacactgaac

SEQ ID NO: 197150 - DNA, 25 bp, probe
gccaagttcggacttcactacagag

SEQ ID NO: 197151 - DNA, 25 bp, probe
gccaaggccgctgttcagtgaagag

SEQ ID NO: 197152 - DNA, 25 bp, probe
gccaagacagcggccttagaaagca

SEQ ID NO: 197153 - DNA, 25 bp, probe
gccaagccacagcctttaaacgaga

SEQ ID NO: 197154 - DNA, 25 bp, probe
gccaggcccgttataaatgtatatt

SEQ ID NO: 197155 - DNA, 25 bp, probe
gccaggcccgttataaatgtatatt

SEQ ID NO: 197156 - DNA, 25 bp, probe
gccaggccttgcaaattgaaggtaa

SEQ ID NO: 197157 - DNA, 25 bp, probe
gccagtccctgaggacaaagggcaa

SEQ ID NO: 197158 - DNA, 25 bp, probe
gccactacttgggaacacaggaaaa

SEQ ID NO: 197159 - DNA, 25 bp, probe
gccactacttgggaacacaggaaaa

SEQ ID NO: 197160 - DNA, 25 bp, probe
gccaatactctcataaagcatgtgc

SEQ ID NO: 197161 - DNA, 25 bp, probe
gccagattcctcagcagatgaatgg

SEQ ID NO: 197162 - DNA, 25 bp, probe
gccaattttttcatgaatgtaagga

SEQ ID NO: 197163 - DNA, 25 bp, probe
gccaagttttctgcatacattaaga

SEQ ID NO: 197164 - DNA, 25 bp, probe
gccaagttttctgcatacattaaga

SEQ ID NO: 197165 - DNA, 25 bp, probe
gccaaggtcactccaataaaacaag

SEQ ID NO: 197166 - DNA, 25 bp, probe
gccaagcagtgcctgcctatgaaat

SEQ ID NO: 197167 - DNA, 25 bp, probe
gccaaagtgcatagtctgagctaaa

SEQ ID NO: 197168 - DNA, 25 bp, probe
gccaaagctggaatgctgagctatc

SEQ ID NO: 197169 - DNA, 25 bp, probe
gccaaagctggaatgctgagctatc

SEQ ID NO: 197170 - DNA, 25 bp, probe
gccaaggcgacaagtcaatattctg

SEQ ID NO: 197171 - DNA, 25 bp, probe
gccaaggccaagcccaagttcagca

SEQ ID NO: 197172 - DNA, 25 bp, probe
gccagagggaagtctcaggttgccc

SEQ ID NO: 197173 - DNA, 25 bp, probe
gccaaggcagaacccattcttgggt

SEQ ID NO: 197174 - DNA, 25 bp, probe
gccaaggcagaacccattcttgggt

SEQ ID NO: 197175 - DNA, 25 bp, probe
gccacaccaaatccctgtttttgtc

SEQ ID NO: 197176 - DNA, 25 bp, probe
gccacacctcgaactggttgtagtg

SEQ ID NO: 197177 - DNA, 25 bp, probe
gccagacactccagggatcagtagt

SEQ ID NO: 197178 - DNA, 25 bp, probe
gccaccatccacatgcaggtggtac

SEQ ID NO: 197179 - DNA, 25 bp, probe
gccaccatcatcggcgagtgggtaa

SEQ ID NO: 197180 - DNA, 25 bp, probe
gccaccatcatcggcgagtgggtaa

SEQ ID NO: 197181 - DNA, 25 bp, probe
gccaccactcatcgcaggatgagga

SEQ ID NO: 197182 - DNA, 25 bp, probe
gccagcacccgggagatggcgatgc

SEQ ID NO: 197183 - DNA, 25 bp, probe
gccaacgcacggggagaggctgtgg

SEQ ID NO: 197184 - DNA, 25 bp, probe
gccaacgaagcgtgatcagccgtgg

SEQ ID NO: 197185 - DNA, 25 bp, probe
gccaaggagacgtggctggcgcttc

SEQ ID NO: 197186 - DNA, 25 bp, probe
gccaagcggaccagagctgtgcagc

SEQ ID NO: 197187 - DNA, 25 bp, probe
gccaatccagcagtcattacttgtg

SEQ ID NO: 197188 - DNA, 25 bp, probe
gccaggccagcagatctgactagtc

SEQ ID NO: 197189 - DNA, 25 bp, probe
gccaggccagcagatctgactagtc

SEQ ID NO: 197190 - DNA, 25 bp, probe
gccaaggccgcattgctaagatgcc

SEQ ID NO: 197191 - DNA, 25 bp, probe
gccagggtcctgtgaagagccaaaa

SEQ ID NO: 197192 - DNA, 25 bp, probe
gccacgagtttttgcagtgaccaga

SEQ ID NO: 197193 - DNA, 25 bp, probe
gccactggtttcaggatactcatca

SEQ ID NO: 197194 - DNA, 25 bp, probe
gccaaggttgtcctggaggcagaca

SEQ ID NO: 197195 - DNA, 25 bp, probe
gccacggtgttggagtccgcagagc

SEQ ID NO: 197196 - DNA, 25 bp, probe
gccagcagagttgggtgtccagcag

SEQ ID NO: 197197 - DNA, 25 bp, probe
gccaagagcttggcggtcaaggcgg

SEQ ID NO: 197198 - DNA, 25 bp, probe
gccggctctatgcggtaaagcgttc

SEQ ID NO: 197199 - DNA, 25 bp, probe
gccacttctatgcatgaacaaaggt

SEQ ID NO: 197200 - DNA, 25 bp, probe
gccacgatctcactaaaggatttct

SEQ ID NO: 197201 - DNA, 25 bp, probe
gccactagtactgaaagcatttcta

SEQ ID NO: 197202 - DNA, 25 bp, probe
gccactttacgcaactcaatttctg

SEQ ID NO: 197203 - DNA, 25 bp, probe
gccagcgtctacgacggcaagtacc

SEQ ID NO: 197204 - DNA, 25 bp, probe
gccaagtggacgagacagaggagcc

SEQ ID NO: 197205 - DNA, 25 bp, probe
gccaatgtacacttggagaaggcac

SEQ ID NO: 197206 - DNA, 25 bp, probe
gccaatgtacacttggagaaggcac

SEQ ID NO: 197207 - DNA, 25 bp, probe
gccagatggacctgagtgtcggtca

SEQ ID NO: 197208 - DNA, 25 bp, probe
gccagggcaccaatgggacctgcta

SEQ ID NO: 197209 - DNA, 25 bp, probe
gccagcgtacacaatgagatattct

SEQ ID NO: 197210 - DNA, 25 bp, probe
gccaagtacacacgatgatagcttc

SEQ ID NO: 197211 - DNA, 25 bp, probe
gccaagtgcaacttgcttcagtcat

SEQ ID NO: 197212 - DNA, 25 bp, probe
gccaactaatagactctcagccatt

SEQ ID NO: 197213 - DNA, 25 bp, probe
gccaacaacagagctctcagctgca

SEQ ID NO: 197214 - DNA, 25 bp, probe
gccaatgatatggcagcttctacat

SEQ ID NO: 197215 - DNA, 25 bp, probe
gccagcagatcacatcattgcctac

SEQ ID NO: 197216 - DNA, 25 bp, probe
gccacagacaggtaagcgctgaaca

SEQ ID NO: 197217 - DNA, 25 bp, probe
gccacagacaggtaatagccctagc

SEQ ID NO: 197218 - DNA, 25 bp, probe
gccacagacaggtaaaagctccagg

SEQ ID NO: 197219 - DNA, 25 bp, probe
gccagagacgcggaacaattgagca

SEQ ID NO: 197220 - DNA, 25 bp, probe
gccacatggctggccaagcaattat

SEQ ID NO: 197221 - DNA, 25 bp, probe
gccacatggctggccaagcaattat

SEQ ID NO: 197222 - DNA, 25 bp, probe
gccacaggatggccaggcagattca

SEQ ID NO: 197223 - DNA, 25 bp, probe
gccagcgccatgctgaggcgcttcc

SEQ ID NO: 197224 - DNA, 25 bp, probe
gccagcgccatgctgaggcgcttcc

SEQ ID NO: 197225 - DNA, 25 bp, probe
gccagcccaggacaaagtcctctct

SEQ ID NO: 197226 - DNA, 25 bp, probe
gccagcccaggacaaagtcctctct

SEQ ID NO: 197227 - DNA, 25 bp, probe
gccagtccatggagcaaggcttccc

SEQ ID NO: 197228 - DNA, 25 bp, probe
gccatgtcaaggttaagtctttcga

SEQ ID NO: 197229 - DNA, 25 bp, probe
gccatatgtaggattaccttattaa

SEQ ID NO: 197230 - DNA, 25 bp, probe
gccacatgccgtgttaagcatttta

SEQ ID NO: 197231 - DNA, 25 bp, probe
gcctcctcgtgctggaagaattcaa

SEQ ID NO: 197232 - DNA, 25 bp, probe
gcctcctcgtgctggaagaattcaa

SEQ ID NO: 197233 - DNA, 25 bp, probe
gccacttcctcagcgaagaagtctg

SEQ ID NO: 197234 - DNA, 25 bp, probe
gccacaccatcttctaggacaagtc

SEQ ID NO: 197235 - DNA, 25 bp, probe
gccaactcattcgtgggaacagcgc

SEQ ID NO: 197236 - DNA, 25 bp, probe
gccaacatgaaaggggccatcacac

SEQ ID NO: 197237 - DNA, 25 bp, probe
gccaacatgaaaggggccatcacac

SEQ ID NO: 197238 - DNA, 25 bp, probe
gccactaaaatcctgggcatcattc

SEQ ID NO: 197239 - DNA, 25 bp, probe
gccacaaacagaattcgagacatac

SEQ ID NO: 197240 - DNA, 25 bp, probe
gccaaaaagtacagagacaacagga

SEQ ID NO: 197241 - DNA, 25 bp, probe
gccagaaaagtaccctaggaccagc

SEQ ID NO: 197242 - DNA, 25 bp, probe
gccaaaaattacaccagagagacag

SEQ ID NO: 197243 - DNA, 25 bp, probe
gccacaaaacatcctactggatgag

SEQ ID NO: 197244 - DNA, 25 bp, probe
gccacaataccaactaaacagacag

SEQ ID NO: 197245 - DNA, 25 bp, probe
gccatcgtttccatgacaacagaca

SEQ ID NO: 197246 - DNA, 25 bp, probe
gccacctttagcctcatcaatggaa

SEQ ID NO: 197247 - DNA, 25 bp, probe
gccacctttagcctcatcaatggaa

SEQ ID NO: 197248 - DNA, 25 bp, probe
gcctcctaatagcctaacagggctg

SEQ ID NO: 197249 - DNA, 25 bp, probe
gccaccaaatagcctaggaagtgcc

SEQ ID NO: 197250 - DNA, 25 bp, probe
gccacccagatgctgctagagaaac

SEQ ID NO: 197251 - DNA, 25 bp, probe
gccacccagatgctgctagagaaac

SEQ ID NO: 197252 - DNA, 25 bp, probe
gccaaccagttcatgagcaagcaac

SEQ ID NO: 197253 - DNA, 25 bp, probe
gccaaccagttcatgagcaagcaac

SEQ ID NO: 197254 - DNA, 25 bp, probe
gccaaacatgttgtcacacacacac

SEQ ID NO: 197255 - DNA, 25 bp, probe
gccaaacatgttgtcacacacacac

SEQ ID NO: 197256 - DNA, 25 bp, probe
gccataacctttaattgcagcaaaa

SEQ ID NO: 197257 - DNA, 25 bp, probe
gccaaacctttgtaccacagaatgt

SEQ ID NO: 197258 - DNA, 25 bp, probe
gccaaacctttgtaccacagaatgt

SEQ ID NO: 197259 - DNA, 25 bp, probe
gccacagacgccaggcaacaaaatg

SEQ ID NO: 197260 - DNA, 25 bp, probe
gccacacagcccagaaggccagaaa

SEQ ID NO: 197261 - DNA, 25 bp, probe
gccacagcagctttgtacacgaaga

SEQ ID NO: 197262 - DNA, 25 bp, probe
gccacagaatatattactgagcagc

SEQ ID NO: 197263 - DNA, 25 bp, probe
gccagagaatctgctgtactacagc

SEQ ID NO: 197264 - DNA, 25 bp, probe
gccaagcaactgaggaattagccat

SEQ ID NO: 197265 - DNA, 25 bp, probe
gccaagcagacgaggactacagcca

SEQ ID NO: 197266 - DNA, 25 bp, probe
gccaagtgacagagctgactcgcgg

SEQ ID NO: 197267 - DNA, 25 bp, probe
gccaggtagcaaatgctgtctccag

SEQ ID NO: 197268 - DNA, 25 bp, probe
gccaggtagcaaatgctgtctccag

SEQ ID NO: 197269 - DNA, 25 bp, probe
gccaagtatcaagctgatgctgtca

SEQ ID NO: 197270 - DNA, 25 bp, probe
gccaagtatcaagctgatgctgtca

SEQ ID NO: 197271 - DNA, 25 bp, probe
gccacattcatgtatgtcttgccca

SEQ ID NO: 197272 - DNA, 25 bp, probe
gccacatgtctgtgtgtgtgcatgt

SEQ ID NO: 197273 - DNA, 25 bp, probe
gccaagccatattgagttattttac

SEQ ID NO: 197274 - DNA, 25 bp, probe
gccaaaatattgcttatgtctctac

SEQ ID NO: 197275 - DNA, 25 bp, probe
gccaaaatattgcttatgtctctac

SEQ ID NO: 197276 - DNA, 25 bp, probe
gccactctatatgcactttgtttac

SEQ ID NO: 197277 - DNA, 25 bp, probe
gccttttatgggacttgctcttatg

SEQ ID NO: 197278 - DNA, 25 bp, probe
gcctcgtttttgactttgtccatta

SEQ ID NO: 197279 - DNA, 25 bp, probe
gcctcgtttttgactttgtccatta

SEQ ID NO: 197280 - DNA, 25 bp, probe
gccactattgttagtctcttgattc

SEQ ID NO: 197281 - DNA, 25 bp, probe
gccaacttgttggtctgaattctcc

SEQ ID NO: 197282 - DNA, 25 bp, probe
gccaagcttgtgagagctggttgct

SEQ ID NO: 197283 - DNA, 25 bp, probe
gccacgctggaaatgctctttccta

SEQ ID NO: 197284 - DNA, 25 bp, probe
gccactgttaagccatgtgttccaa

SEQ ID NO: 197285 - DNA, 25 bp, probe
gcccgataaagacggattctaagga

SEQ ID NO: 197286 - DNA, 25 bp, probe
gcccccgaaagcctgtttgaaggca

SEQ ID NO: 197287 - DNA, 25 bp, probe
gctcctacggagaggtcttcaaggt

SEQ ID NO: 197288 - DNA, 25 bp, probe
gctcctagggtacagtctactagtg

SEQ ID NO: 197289 - DNA, 25 bp, probe
gagttggaagtacagtttcaaggat

SEQ ID NO: 197290 - DNA, 25 bp, probe
gccttggcggtagagttccaaacca

SEQ ID NO: 197291 - DNA, 25 bp, probe
gccttggcccaaggatagctactga

SEQ ID NO: 197292 - DNA, 25 bp, probe
gctgttacccaaggtattttagata

SEQ ID NO: 197293 - DNA, 25 bp, probe
gctggcccaggaagaaattttagaa

SEQ ID NO: 197294 - DNA, 25 bp, probe
gctggcccaggaagaaattttagaa

SEQ ID NO: 197295 - DNA, 25 bp, probe
tgggcccggcaagattttagtaaag

SEQ ID NO: 197296 - DNA, 25 bp, probe
gtgtaccctgccagttcttttaggg

SEQ ID NO: 197297 - DNA, 25 bp, probe
gtgtaccctgccagttcttttaggg

SEQ ID NO: 197298 - DNA, 25 bp, probe
gaccaccctggcaccttaaataagg

SEQ ID NO: 197299 - DNA, 25 bp, probe
gacctttccagcaccgaaattcaag

SEQ ID NO: 197300 - DNA, 25 bp, probe
gcctttcgtatctccatgaaaacca

SEQ ID NO: 197301 - DNA, 25 bp, probe
gccacttcttactccagtagtaaat

SEQ ID NO: 197302 - DNA, 25 bp, probe
gaatctcatttcaccaaaattaaat

SEQ ID NO: 197303 - DNA, 25 bp, probe
gaaggtctacctgaaaattcaacat

SEQ ID NO: 197304 - DNA, 25 bp, probe
tggatggtttcctccaaggaaaccg

SEQ ID NO: 197305 - DNA, 25 bp, probe
tggatggtttcctccaaggaaaccg

SEQ ID NO: 197306 - DNA, 25 bp, probe
gctgttattccttacctagagaaac

SEQ ID NO: 197307 - DNA, 25 bp, probe
gcttaattgccctacaaagggttat

SEQ ID NO: 197308 - DNA, 25 bp, probe
gcttaattattctgaagggccgtga

SEQ ID NO: 197309 - DNA, 25 bp, probe
gccataattttaaaagttgctttga

SEQ ID NO: 197310 - DNA, 25 bp, probe
gccactatattttacacgtatctct

SEQ ID NO: 197311 - DNA, 25 bp, probe
gccacttgtaggtatcagtgtgatc

SEQ ID NO: 197312 - DNA, 25 bp, probe
gcgattttggaatcagtggctactt

SEQ ID NO: 197313 - DNA, 25 bp, probe
gcgttttggaatgcaatttgcacag

SEQ ID NO: 197314 - DNA, 25 bp, probe
gcgtgttaggaacaaggtgcaccat

SEQ ID NO: 197315 - DNA, 25 bp, probe
gctctgttgcaagagggggtccctc

SEQ ID NO: 197316 - DNA, 25 bp, probe
gccatgtggtaaagggggtggcttg

SEQ ID NO: 197317 - DNA, 25 bp, probe
gccaggactaagctggggtgctggg

SEQ ID NO: 197318 - DNA, 25 bp, probe
gccagctccagagtgggggggctgt

SEQ ID NO: 197319 - DNA, 25 bp, probe
gccagctaaggggtggggctgcggg

SEQ ID NO: 197320 - DNA, 25 bp, probe
gccaacaaggcggtgcagcggggct

SEQ ID NO: 197321 - DNA, 25 bp, probe
gccaacaaggcggtgcagcggggct

SEQ ID NO: 197322 - DNA, 25 bp, probe
gccaacaagcaggggctcttaggca

SEQ ID NO: 197323 - DNA, 25 bp, probe
gccaacaagcaggggctcttaggca

SEQ ID NO: 197324 - DNA, 25 bp, probe
gccaactacatgtgtccttagtcaa

SEQ ID NO: 197325 - DNA, 25 bp, probe
gccacctacctcattttagagcaca

SEQ ID NO: 197326 - DNA, 25 bp, probe
gccacctacctcattttagagcaca

SEQ ID NO: 197327 - DNA, 25 bp, probe
gccaacgtttgaatatttacagagc

SEQ ID NO: 197328 - DNA, 25 bp, probe
tccagtcagtttttctcttaagtgc

SEQ ID NO: 197329 - DNA, 25 bp, probe
gccattcaggttctcccaaagatga

SEQ ID NO: 197330 - DNA, 25 bp, probe
gccagttttaactccaattgatgag

SEQ ID NO: 197331 - DNA, 25 bp, probe
gccagtggtggaacttccttcgaga

SEQ ID NO: 197332 - DNA, 25 bp, probe
gccagagtgggagacccattggtca

SEQ ID NO: 197333 - DNA, 25 bp, probe
gccagcatttcgatcctcgtcaggt

SEQ ID NO: 197334 - DNA, 25 bp, probe
gccagactgtaagctgttggaggtc

SEQ ID NO: 197335 - DNA, 25 bp, probe
gccaggccttggatcttgagggtct

SEQ ID NO: 197336 - DNA, 25 bp, probe
gccagggctttgcttggaggctact

SEQ ID NO: 197337 - DNA, 25 bp, probe
gccagggctttgcttggaggctact

SEQ ID NO: 197338 - DNA, 25 bp, probe
gccagggctttgcttggaggctact

SEQ ID NO: 197339 - DNA, 25 bp, probe
gccaggaatttgctttgtttactgc

SEQ ID NO: 197340 - DNA, 25 bp, probe
gccaggcgctttctatacttaatcc

SEQ ID NO: 197341 - DNA, 25 bp, probe
gccagacttgttttgctatcttata

SEQ ID NO: 197342 - DNA, 25 bp, probe
gccaaatttgatatgttgcactgaa

SEQ ID NO: 197343 - DNA, 25 bp, probe
gccacaaagttgagacttctgaacg

SEQ ID NO: 197344 - DNA, 25 bp, probe
gccacaactgtcacgacattctgca

SEQ ID NO: 197345 - DNA, 25 bp, probe
gccacagtctccattgagatgactc

SEQ ID NO: 197346 - DNA, 25 bp, probe
gccacagtctccattgagatgactc

SEQ ID NO: 197347 - DNA, 25 bp, probe
gccaacatcaccatcattgagcacc

SEQ ID NO: 197348 - DNA, 25 bp, probe
gccaacattctggtgtctgacaccc

SEQ ID NO: 197349 - DNA, 25 bp, probe
gccacagcaagggaatcatgcacag

SEQ ID NO: 197350 - DNA, 25 bp, probe
gccagtcaaggcctgcatatgcaga

SEQ ID NO: 197351 - DNA, 25 bp, probe
gccagcatcaaccgcatctatggtt

SEQ ID NO: 197352 - DNA, 25 bp, probe
gccagcacaatctgccaaagttcta

SEQ ID NO: 197353 - DNA, 25 bp, probe
gccacctgagttccaaattttacca

SEQ ID NO: 197354 - DNA, 25 bp, probe
gccagggagttcgacattttctacc

SEQ ID NO: 197355 - DNA, 25 bp, probe
gcagcaggttaagaattttttccta

SEQ ID NO: 197356 - DNA, 25 bp, probe
gccagttattgaacaaacctttcct

SEQ ID NO: 197357 - DNA, 25 bp, probe
gccgattttgtagaacttggtgact

SEQ ID NO: 197358 - DNA, 25 bp, probe
gccagttttacagtgtacattggga

SEQ ID NO: 197359 - DNA, 25 bp, probe
gctaggtttcaacctgcgcattggg

SEQ ID NO: 197360 - DNA, 25 bp, probe
gccaggtgtgtccaaccgtaggagc

SEQ ID NO: 197361 - DNA, 25 bp, probe
gccaggtgtgtccaaccgtaggagc

SEQ ID NO: 197362 - DNA, 25 bp, probe
gccagggaatgaagcccgcgggagc

SEQ ID NO: 197363 - DNA, 25 bp, probe
gccagggaatgaagcccgcgggagc

SEQ ID NO: 197364 - DNA, 25 bp, probe
gccagaggtcagtggccgtgctgtg

SEQ ID NO: 197365 - DNA, 25 bp, probe
gccagaatatgaccgtcagcgtggt

SEQ ID NO: 197366 - DNA, 25 bp, probe
gccagccttgttttcaggtggtctg

SEQ ID NO: 197367 - DNA, 25 bp, probe
gccagcttctttttcgggaagtcca

SEQ ID NO: 197368 - DNA, 25 bp, probe
gccagtaaactcttttggatttgcc

SEQ ID NO: 197369 - DNA, 25 bp, probe
gccagtaaactcttttggatttgcc

SEQ ID NO: 197370 - DNA, 25 bp, probe
gccagaaaaattgccggattccagc

SEQ ID NO: 197371 - DNA, 25 bp, probe
gccataaacaagaaccaggtcccgc

SEQ ID NO: 197372 - DNA, 25 bp, probe
gccataagaaaatctagttcaactc

SEQ ID NO: 197373 - DNA, 25 bp, probe
gccacacaaacgtttacttatctta

SEQ ID NO: 197374 - DNA, 25 bp, probe
gccattgtaacgttttttactagag

SEQ ID NO: 197375 - DNA, 25 bp, probe
gccaggagacccttgtggttgacta

SEQ ID NO: 197376 - DNA, 25 bp, probe
gccaggagacccttgtggttgacta

SEQ ID NO: 197377 - DNA, 25 bp, probe
gccagtatgaccagggcgtcgatct

SEQ ID NO: 197378 - DNA, 25 bp, probe
gccagtatgaccagggcgtcgatct

SEQ ID NO: 197379 - DNA, 25 bp, probe
gccaaatgcacctgtgcagctgcac

SEQ ID NO: 197380 - DNA, 25 bp, probe
gccaaagcatcctggcaaagctgcc

SEQ ID NO: 197381 - DNA, 25 bp, probe
gccagctagctccatagggaagcct

SEQ ID NO: 197382 - DNA, 25 bp, probe
gccagatggtcacaccgaaggtatc

SEQ ID NO: 197383 - DNA, 25 bp, probe
gccagatggtcacaccgaaggtatc

SEQ ID NO: 197384 - DNA, 25 bp, probe
gccagaggccaatgctcagagaagt

SEQ ID NO: 197385 - DNA, 25 bp, probe
gccactgagcactggccgaggtgat

SEQ ID NO: 197386 - DNA, 25 bp, probe
gccactgagcactggccgaggtgat

SEQ ID NO: 197387 - DNA, 25 bp, probe
gccactgacagctggagcatctgga

SEQ ID NO: 197388 - DNA, 25 bp, probe
gccactgagaatttgaacgctgatt

SEQ ID NO: 197389 - DNA, 25 bp, probe
gccactgagaatttgaacgctgatt

SEQ ID NO: 197390 - DNA, 25 bp, probe
gccactgaggaccgaggactatgct

SEQ ID NO: 197391 - DNA, 25 bp, probe
gccactgcaggctgaaggcctgtga

SEQ ID NO: 197392 - DNA, 25 bp, probe
gccacaatgtgatagaggtggctac

SEQ ID NO: 197393 - DNA, 25 bp, probe
gccaaacgcaaaaggttgctaaccg

SEQ ID NO: 197394 - DNA, 25 bp, probe
gccaaacgcaaaaggttgctaaccg

SEQ ID NO: 197395 - DNA, 25 bp, probe
gccagattttaaaagttgccaacca

SEQ ID NO: 197396 - DNA, 25 bp, probe
gcccttctaaaaagttgaaattgca

SEQ ID NO: 197397 - DNA, 25 bp, probe
gccacctcaaaactttatgaacttc

SEQ ID NO: 197398 - DNA, 25 bp, probe
gccatcccaagctggttaaattcta

SEQ ID NO: 197399 - DNA, 25 bp, probe
gccatcccaagctggttaaattcta

SEQ ID NO: 197400 - DNA, 25 bp, probe
gccagcccaactttgctagaaaact

SEQ ID NO: 197401 - DNA, 25 bp, probe
gccacctgcaacaaggctctgaaac

SEQ ID NO: 197402 - DNA, 25 bp, probe
gcgctcatggatacagatggctctg

SEQ ID NO: 197403 - DNA, 25 bp, probe
gccacatggctgacattagctctca

SEQ ID NO: 197404 - DNA, 25 bp, probe
gccagagtgtgtatacccaggcttg

SEQ ID NO: 197405 - DNA, 25 bp, probe
gccatagagtttaacacaagtcctg

SEQ ID NO: 197406 - DNA, 25 bp, probe
gccagagcggtttgaaaacatcctg

SEQ ID NO: 197407 - DNA, 25 bp, probe
gccaggcgttttctgagcatacctg

SEQ ID NO: 197408 - DNA, 25 bp, probe
gccaccaaatctgtctagaatcctg

SEQ ID NO: 197409 - DNA, 25 bp, probe
gccagaaaatctcatcctagatcac

SEQ ID NO: 197410 - DNA, 25 bp, probe
gccagaacacctcggagctgaatac

SEQ ID NO: 197411 - DNA, 25 bp, probe
gccacaaccatggggtgtgcaacca

SEQ ID NO: 197412 - DNA, 25 bp, probe
gccagcagtccaagtagctggaccc

SEQ ID NO: 197413 - DNA, 25 bp, probe
gccacaggctgaagcagcctcgaac

SEQ ID NO: 197414 - DNA, 25 bp, probe
gccacagggagggatctgctgcaga

SEQ ID NO: 197415 - DNA, 25 bp, probe
gccacagggagggatctgctgcaga

SEQ ID NO: 197416 - DNA, 25 bp, probe
gccacagtaattggtcatgtgatgc

SEQ ID NO: 197417 - DNA, 25 bp, probe
gccacagctcagagatcagagtgac

SEQ ID NO: 197418 - DNA, 25 bp, probe
gccacagctcagagatcagagtgac

SEQ ID NO: 197419 - DNA, 25 bp, probe
gccactgccatgacgacacagtgcc

SEQ ID NO: 197420 - DNA, 25 bp, probe
gccactgccatgacgacacagtgcc

SEQ ID NO: 197421 - DNA, 25 bp, probe
gccagctgcctgaaggagcacgtgg

SEQ ID NO: 197422 - DNA, 25 bp, probe
gccagagccgtaagaatgcgccagt

SEQ ID NO: 197423 - DNA, 25 bp, probe
gccagagccgtaagaatgcgccagt

SEQ ID NO: 197424 - DNA, 25 bp, probe
gccatagatcggtggtcccgcatat

SEQ ID NO: 197425 - DNA, 25 bp, probe
gccacgctcaggtggctcctgagct

SEQ ID NO: 197426 - DNA, 25 bp, probe
gccagcctagaggtggcttctggca

SEQ ID NO: 197427 - DNA, 25 bp, probe
gccagctcagagctgatggtttggg

SEQ ID NO: 197428 - DNA, 25 bp, probe
gccacgcagatgccgattgctttgt

SEQ ID NO: 197429 - DNA, 25 bp, probe
gccactagatgggagcctgtatgct

SEQ ID NO: 197430 - DNA, 25 bp, probe
gccaaagtctgcaaccttgatgttc

SEQ ID NO: 197431 - DNA, 25 bp, probe
gccaaagtctgcagactgctttatt

SEQ ID NO: 197432 - DNA, 25 bp, probe
gccaaacctgtgtaggcattttata

SEQ ID NO: 197433 - DNA, 25 bp, probe
gccaaagcctgtgtgagaagttgct

SEQ ID NO: 197434 - DNA, 25 bp, probe
gccaaacgcttctgcaaatgctgtt

SEQ ID NO: 197435 - DNA, 25 bp, probe
gccataaacaactgaaagcttgctc

SEQ ID NO: 197436 - DNA, 25 bp, probe
gccatcacaccattaaaaagcctgt

SEQ ID NO: 197437 - DNA, 25 bp, probe
gccacatccttgtttaaaggctctc

SEQ ID NO: 197438 - DNA, 25 bp, probe
gccagctggatgttcttaaagagtt

SEQ ID NO: 197439 - DNA, 25 bp, probe
gccactgaatgaaactggagaagtt

SEQ ID NO: 197440 - DNA, 25 bp, probe
gccagttggagtgctggagactttg

SEQ ID NO: 197441 - DNA, 25 bp, probe
gcccgcttgactgtggagttttggc

SEQ ID NO: 197442 - DNA, 25 bp, probe
gcctactacactgtaggtttgcttc

SEQ ID NO: 197443 - DNA, 25 bp, probe
gccatgactcccgacataggctttg

SEQ ID NO: 197444 - DNA, 25 bp, probe
ggataatcctcggggactttgacta

SEQ ID NO: 197445 - DNA, 25 bp, probe
gctaaacctctggggttctggacca

SEQ ID NO: 197446 - DNA, 25 bp, probe
gctaaacctctggggttctggacca

SEQ ID NO: 197447 - DNA, 25 bp, probe
gccacaagccggaggaactggacga

SEQ ID NO: 197448 - DNA, 25 bp, probe
gccagaaccactccgaggacggagc

SEQ ID NO: 197449 - DNA, 25 bp, probe
gccagaagacccccagggatgtggt

SEQ ID NO: 197450 - DNA, 25 bp, probe
gccaggggcacagcctggtggtggt

SEQ ID NO: 197451 - DNA, 25 bp, probe
gccaggggcacagcctggtggtggt

SEQ ID NO: 197452 - DNA, 25 bp, probe
gccagggggagctgcacagggtggc

SEQ ID NO: 197453 - DNA, 25 bp, probe
gccagggggagctgcacagggtggc

SEQ ID NO: 197454 - DNA, 25 bp, probe
gccatgggggatcagtgcaggtatt

SEQ ID NO: 197455 - DNA, 25 bp, probe
gccaggggagtcagggttgtagcca

SEQ ID NO: 197456 - DNA, 25 bp, probe
gccagacccttcagtggtttatgcc

SEQ ID NO: 197457 - DNA, 25 bp, probe
gccagacccttcagtggtttatgcc

SEQ ID NO: 197458 - DNA, 25 bp, probe
gccatggctcctacggagaggtctt

SEQ ID NO: 197459 - DNA, 25 bp, probe
gccagtgtcacaaaaggaggtcagt

SEQ ID NO: 197460 - DNA, 25 bp, probe
gccactgtcaatgattagatcgggt

SEQ ID NO: 197461 - DNA, 25 bp, probe
gccacgtatcagggaaattgcaggt

SEQ ID NO: 197462 - DNA, 25 bp, probe
gcctttgaccggtacattgcaattt

SEQ ID NO: 197463 - DNA, 25 bp, probe
gccttgtacaagaaaaccgaatatt

SEQ ID NO: 197464 - DNA, 25 bp, probe
gccacttctaagcacaaccagaggc

SEQ ID NO: 197465 - DNA, 25 bp, probe
gccaggtccaggaacttcctatggc

SEQ ID NO: 197466 - DNA, 25 bp, probe
gccagggcctgggactaccaggcct

SEQ ID NO: 197467 - DNA, 25 bp, probe
gccagggcctgggactaccaggcct

SEQ ID NO: 197468 - DNA, 25 bp, probe
gccagtgtcctggtgaataacaagc

SEQ ID NO: 197469 - DNA, 25 bp, probe
gccagtgtggctgtgctctaaaatc

SEQ ID NO: 197470 - DNA, 25 bp, probe
gccatgttagcctggtcaagatgct

SEQ ID NO: 197471 - DNA, 25 bp, probe
gccagcttacctgcagtcaattcat

SEQ ID NO: 197472 - DNA, 25 bp, probe
gccatggtaacctgacactctcagg

SEQ ID NO: 197473 - DNA, 25 bp, probe
gccatggtaacctgacactctcagg

SEQ ID NO: 197474 - DNA, 25 bp, probe
gccatggtaccggggacttgggaga

SEQ ID NO: 197475 - DNA, 25 bp, probe
gccatggtaccggggacttgggaga

SEQ ID NO: 197476 - DNA, 25 bp, probe
gccaggtagacggggctgtttggtg

SEQ ID NO: 197477 - DNA, 25 bp, probe
gccggtggaccagactgactggtga

SEQ ID NO: 197478 - DNA, 25 bp, probe
gccttggcgtcccaaaatgctggga

SEQ ID NO: 197479 - DNA, 25 bp, probe
gcccgggccatcgccattgctgcgg

SEQ ID NO: 197480 - DNA, 25 bp, probe
gccaaaggccacgtctgacttggga

SEQ ID NO: 197481 - DNA, 25 bp, probe
gccaaaggccacgtctgacttggga

SEQ ID NO: 197482 - DNA, 25 bp, probe
gccaaagtcccagagatattgtgag

SEQ ID NO: 197483 - DNA, 25 bp, probe
gccacaggccccagttattgtgaaa

SEQ ID NO: 197484 - DNA, 25 bp, probe
gccacaggccccagttattgtgaaa

SEQ ID NO: 197485 - DNA, 25 bp, probe
gcccgattccctagtcatgaggtag

SEQ ID NO: 197486 - DNA, 25 bp, probe
gccacgaggacttcgtgcagtggga

SEQ ID NO: 197487 - DNA, 25 bp, probe
gccagcgacggcagcatggagggta

SEQ ID NO: 197488 - DNA, 25 bp, probe
gccacagacagcctacttgacggcc

SEQ ID NO: 197489 - DNA, 25 bp, probe
gccacagacagcctacttgacggcc

SEQ ID NO: 197490 - DNA, 25 bp, probe
gccaaatcagggactgctactccac

SEQ ID NO: 197491 - DNA, 25 bp, probe
gccacagagcaaggggctgaccaca

SEQ ID NO: 197492 - DNA, 25 bp, probe
gccacaagcagtgcaaggatcgcct

SEQ ID NO: 197493 - DNA, 25 bp, probe
gccactgctgcggaaagagtccatc

SEQ ID NO: 197494 - DNA, 25 bp, probe
gccagcatgagagaattgggcctcc

SEQ ID NO: 197495 - DNA, 25 bp, probe
gccagaaaaagttggtgcccctgaa

SEQ ID NO: 197496 - DNA, 25 bp, probe
gccagactataagctgtacccattg

SEQ ID NO: 197497 - DNA, 25 bp, probe
gccagacttgaagcatgtcaaaaag

SEQ ID NO: 197498 - DNA, 25 bp, probe
gccagccttgactgactcaaagcaa

SEQ ID NO: 197499 - DNA, 25 bp, probe
gccaggttacctacatgaactgcaa

SEQ ID NO: 197500 - DNA, 25 bp, probe
gccaggaacctgtcctaaggaacct

SEQ ID NO: 197501 - DNA, 25 bp, probe
gccagggttcatccctgtagtaccg

SEQ ID NO: 197502 - DNA, 25 bp, probe
gccagggtgctccctgggattcaca

SEQ ID NO: 197503 - DNA, 25 bp, probe
gccaggctgtcatccatggtgaaga

SEQ ID NO: 197504 - DNA, 25 bp, probe
gccagagattgcgggcagcaagaca

SEQ ID NO: 197505 - DNA, 25 bp, probe
gccagagattgcgggcagcaagaca

SEQ ID NO: 197506 - DNA, 25 bp, probe
gccagcaggatggcccacaagcaga

SEQ ID NO: 197507 - DNA, 25 bp, probe
gccagcaggatggcccacaagcaga

SEQ ID NO: 197508 - DNA, 25 bp, probe
gccagcaggaagccctgcaaccaga

SEQ ID NO: 197509 - DNA, 25 bp, probe
gccacaaacactgcagagaccaggt

SEQ ID NO: 197510 - DNA, 25 bp, probe
gccacacaatcagtggggcagccag

SEQ ID NO: 197511 - DNA, 25 bp, probe
gccacacaatcagtggggcagccag

SEQ ID NO: 197512 - DNA, 25 bp, probe
gccacagaatatggcttggcctatg

SEQ ID NO: 197513 - DNA, 25 bp, probe
gccacagaataccatatcccaagat

SEQ ID NO: 197514 - DNA, 25 bp, probe
gccacatgttcatatatcctaaatc

SEQ ID NO: 197515 - DNA, 25 bp, probe
gccacatgtggctaaattaaaatta

SEQ ID NO: 197516 - DNA, 25 bp, probe
gccactgtggggcttagacatgatg

SEQ ID NO: 197517 - DNA, 25 bp, probe
gccactggatgggatgtggaacatt

SEQ ID NO: 197518 - DNA, 25 bp, probe
gccacagagtggcataaaacaatgt

SEQ ID NO: 197519 - DNA, 25 bp, probe
gccacagagtggcataaaacaatgt

SEQ ID NO: 197520 - DNA, 25 bp, probe
gccacagagagccagtaccaacagc

SEQ ID NO: 197521 - DNA, 25 bp, probe
gccactgataccatacgaagagcca

SEQ ID NO: 197522 - DNA, 25 bp, probe
gccactgataccatacgaagagcca

SEQ ID NO: 197523 - DNA, 25 bp, probe
gccacgtcatgcagtatggaaacaa

SEQ ID NO: 197524 - DNA, 25 bp, probe
gccacgtcatgcagtatggaaacaa

SEQ ID NO: 197525 - DNA, 25 bp, probe
gccacggaccgttgcacaaaaagga

SEQ ID NO: 197526 - DNA, 25 bp, probe
gccacggggtttgcaatagcaacca

SEQ ID NO: 197527 - DNA, 25 bp, probe
gccagcgtcggttaaaacataagcc

SEQ ID NO: 197528 - DNA, 25 bp, probe
gccagcgtcggttaaaacataagcc

SEQ ID NO: 197529 - DNA, 25 bp, probe
gccacagtagcgtaacaataagaaa

SEQ ID NO: 197530 - DNA, 25 bp, probe
gccacttccagatagactacgatga

SEQ ID NO: 197531 - DNA, 25 bp, probe
gccactcccagacaagctgcaggag

SEQ ID NO: 197532 - DNA, 25 bp, probe
gccactgacaaggacctgtcggacc

SEQ ID NO: 197533 - DNA, 25 bp, probe
gccacgagaaggtggggcagcaccc

SEQ ID NO: 197534 - DNA, 25 bp, probe
gccaggtcaaggtgggggcaagctg

SEQ ID NO: 197535 - DNA, 25 bp, probe
gccagtgccaacttagagttaaacg

SEQ ID NO: 197536 - DNA, 25 bp, probe
gccagtgccaacttagagttaaacg

SEQ ID NO: 197537 - DNA, 25 bp, probe
gccagttatggctataggtgctaca

SEQ ID NO: 197538 - DNA, 25 bp, probe
gccactgtttgcttcaacagtatat

SEQ ID NO: 197539 - DNA, 25 bp, probe
gccactgattatacctctagtatag

SEQ ID NO: 197540 - DNA, 25 bp, probe
gccaccactgtgaaatttgccaagt

SEQ ID NO: 197541 - DNA, 25 bp, probe
gccaccactgtaaggaataaagctt

SEQ ID NO: 197542 - DNA, 25 bp, probe
gcctgccactgtcagggttaagcgg

SEQ ID NO: 197543 - DNA, 25 bp, probe
gccttccttgtcagagttatgctgc

SEQ ID NO: 197544 - DNA, 25 bp, probe
gcccttcttccacagcgtatgtggg

SEQ ID NO: 197545 - DNA, 25 bp, probe
gccctttacacgtgtgcttggtttt

SEQ ID NO: 197546 - DNA, 25 bp, probe
gccctttttcttttgctggatggtt

SEQ ID NO: 197547 - DNA, 25 bp, probe
gccctttttcttttgctggatggtt

SEQ ID NO: 197548 - DNA, 25 bp, probe
gccctaacgtgtaaactgaagcctg

SEQ ID NO: 197549 - DNA, 25 bp, probe
gccagtgaacttgtaaggaagcttg

SEQ ID NO: 197550 - DNA, 25 bp, probe
gccagtgaactttgtcacggagaca

SEQ ID NO: 197551 - DNA, 25 bp, probe
gccacgatccttgacagggtgagca

SEQ ID NO: 197552 - DNA, 25 bp, probe
gccacgcttttggacaaggctgtgc

SEQ ID NO: 197553 - DNA, 25 bp, probe
gccacttgtcttgaaaactgtgcaa

SEQ ID NO: 197554 - DNA, 25 bp, probe
gctgtttgtcgtgaaaagcttaatg

SEQ ID NO: 197555 - DNA, 25 bp, probe
gctgtttgtcttggtcttagtgttt

SEQ ID NO: 197556 - DNA, 25 bp, probe
gctgtttgtcttggtcttagtgttt

SEQ ID NO: 197557 - DNA, 25 bp, probe
gctgtgttaatgtgtttactttcca

SEQ ID NO: 197558 - DNA, 25 bp, probe
gcttaggtagcccttttcatttaca

SEQ ID NO: 197559 - DNA, 25 bp, probe
gccagagcctgagcgtttaatttat

SEQ ID NO: 197560 - DNA, 25 bp, probe
gccagaaaccacatttaatttcata

SEQ ID NO: 197561 - DNA, 25 bp, probe
gccataaaccttgttacatatgtat

SEQ ID NO: 197562 - DNA, 25 bp, probe
gccattaaacactagttcagtatgt

SEQ ID NO: 197563 - DNA, 25 bp, probe
gccactacctacttgtgtgattgtg

SEQ ID NO: 197564 - DNA, 25 bp, probe
gccatcaaccaagcctgtagtagta

SEQ ID NO: 197565 - DNA, 25 bp, probe
gccatgaacactactgcctgtagtc

SEQ ID NO: 197566 - DNA, 25 bp, probe
gccatgaagctgggcttcagtaggc

SEQ ID NO: 197567 - DNA, 25 bp, probe
gccagaagagtacatcagacagggg

SEQ ID NO: 197568 - DNA, 25 bp, probe
gccagcaggacccactgagaagggc

SEQ ID NO: 197569 - DNA, 25 bp, probe
gccatgctgggggcagtggaaggcc

SEQ ID NO: 197570 - DNA, 25 bp, probe
gccagtcagacggggcagacagccc

SEQ ID NO: 197571 - DNA, 25 bp, probe
gccaggcatgactttgacagactcc

SEQ ID NO: 197572 - DNA, 25 bp, probe
gccatggctaagcagaaactaccaa

SEQ ID NO: 197573 - DNA, 25 bp, probe
gccagcacgaagaaaaagccatcca

SEQ ID NO: 197574 - DNA, 25 bp, probe
gccagcacgaagaaaaagccatcca

SEQ ID NO: 197575 - DNA, 25 bp, probe
gccagccttatggaaagactcattc

SEQ ID NO: 197576 - DNA, 25 bp, probe
gccaccagtgagtaccagactttct

SEQ ID NO: 197577 - DNA, 25 bp, probe
gccaccaatagcttctgagtttttt

SEQ ID NO: 197578 - DNA, 25 bp, probe
gccacccaatgactggcgtatcttg

SEQ ID NO: 197579 - DNA, 25 bp, probe
gccagcctcaagagggctttcgagg

SEQ ID NO: 197580 - DNA, 25 bp, probe
gccacgtggatcaggtctgttcctg

SEQ ID NO: 197581 - DNA, 25 bp, probe
gccacgtggagaagggtgtgtttgt

SEQ ID NO: 197582 - DNA, 25 bp, probe
gccacagtggtgtcagggggacggg

SEQ ID NO: 197583 - DNA, 25 bp, probe
gccatgcgaggtcttggggagctgg

SEQ ID NO: 197584 - DNA, 25 bp, probe
gccatcagagaggcctggggggcgc

SEQ ID NO: 197585 - DNA, 25 bp, probe
gccatcagagaggcctggggggcgc

SEQ ID NO: 197586 - DNA, 25 bp, probe
gccaggcacaggttggggggctgcc

SEQ ID NO: 197587 - DNA, 25 bp, probe
gccaggaagtttgcgagggctgcac

SEQ ID NO: 197588 - DNA, 25 bp, probe
gccagagagagccttcacggacggc

SEQ ID NO: 197589 - DNA, 25 bp, probe
gccagagaggactcttgcgatcacg

SEQ ID NO: 197590 - DNA, 25 bp, probe
gccagaagcaattgcctatcgtaaa

SEQ ID NO: 197591 - DNA, 25 bp, probe
gccagtagcatatgcttgtctcaaa

SEQ ID NO: 197592 - DNA, 25 bp, probe
gccagatacaaccttgccatcgagg

SEQ ID NO: 197593 - DNA, 25 bp, probe
gccatcctcaaagtgctggtcgagg

SEQ ID NO: 197594 - DNA, 25 bp, probe
gccacccagaagactgtggatggcc

SEQ ID NO: 197595 - DNA, 25 bp, probe
gccatccggaagaggtggcaccggt

SEQ ID NO: 197596 - DNA, 25 bp, probe
gccaggcggacgaggagatgaccgg

SEQ ID NO: 197597 - DNA, 25 bp, probe
gccagtccagaagaggggtccgctg

SEQ ID NO: 197598 - DNA, 25 bp, probe
gccagtccagaagaggggtccgctg

SEQ ID NO: 197599 - DNA, 25 bp, probe
gctcagtaagaagattctcgcccct

SEQ ID NO: 197600 - DNA, 25 bp, probe
gccaccaaatatattctctgctcac

SEQ ID NO: 197601 - DNA, 25 bp, probe
gccactcagatgtatttcttcttct

SEQ ID NO: 197602 - DNA, 25 bp, probe
gccagctgcggagtcttctggctgc

SEQ ID NO: 197603 - DNA, 25 bp, probe
gccagctgcggagtcttctggctgc

SEQ ID NO: 197604 - DNA, 25 bp, probe
gccaccaggagctcactgagctgcc

SEQ ID NO: 197605 - DNA, 25 bp, probe
gccaccaggagctcactgagctgcc

SEQ ID NO: 197606 - DNA, 25 bp, probe
gccaccagctacgagagtagcctct

SEQ ID NO: 197607 - DNA, 25 bp, probe
gccaccagtatggagctgattgccc

SEQ ID NO: 197608 - DNA, 25 bp, probe
gccaccagattggatgggagccccc

SEQ ID NO: 197609 - DNA, 25 bp, probe
gccaccagattggatgggagccccc

SEQ ID NO: 197610 - DNA, 25 bp, probe
gccaccagattggatgggagccccc

SEQ ID NO: 197611 - DNA, 25 bp, probe
gccatacttgcggacgggtccgctg

SEQ ID NO: 197612 - DNA, 25 bp, probe
gccacctcttggtgtggtgcaggga

SEQ ID NO: 197613 - DNA, 25 bp, probe
gccagtttgtgagtggtggggagga

SEQ ID NO: 197614 - DNA, 25 bp, probe
gccactgtcactctttgtgggaggg

SEQ ID NO: 197615 - DNA, 25 bp, probe
gccactgtcactctttgtgggaggg

SEQ ID NO: 197616 - DNA, 25 bp, probe
gccactgtcactctttgtgggaggg

SEQ ID NO: 197617 - DNA, 25 bp, probe
gccacttcatttactgtctgctgga

SEQ ID NO: 197618 - DNA, 25 bp, probe
gccactcctgtttcagaggaagcag

SEQ ID NO: 197619 - DNA, 25 bp, probe
gccactcctgatggcatccaggtag

SEQ ID NO: 197620 - DNA, 25 bp, probe
gccagtttgggctccagtaatgctt

SEQ ID NO: 197621 - DNA, 25 bp, probe
gccagtttggagctcctggaaggta

SEQ ID NO: 197622 - DNA, 25 bp, probe
gccagtttagagctcctggacagta

SEQ ID NO: 197623 - DNA, 25 bp, probe
gccagccattaaaatcactgcgcaa

SEQ ID NO: 197624 - DNA, 25 bp, probe
gccactgattacttcatgactgcca

SEQ ID NO: 197625 - DNA, 25 bp, probe
gccactatctccattgaagctgaaa

SEQ ID NO: 197626 - DNA, 25 bp, probe
gccacttcccaggtaagcaggagga

SEQ ID NO: 197627 - DNA, 25 bp, probe
gccacttcccaggtaagcaggagga

SEQ ID NO: 197628 - DNA, 25 bp, probe
gccactgtcagggttaagcggcagg

SEQ ID NO: 197629 - DNA, 25 bp, probe
gccttctagtgagttccaggtcaat

SEQ ID NO: 197630 - DNA, 25 bp, probe
gccttctagtgagttccaggtcaat

SEQ ID NO: 197631 - DNA, 25 bp, probe
gccattcaaccagatccctggcaat

SEQ ID NO: 197632 - DNA, 25 bp, probe
gccattcaaccagatccctggcaat

SEQ ID NO: 197633 - DNA, 25 bp, probe
gccagttcaccaaatcttcatagac

SEQ ID NO: 197634 - DNA, 25 bp, probe
gccagttcaccaaatcttcatagac

SEQ ID NO: 197635 - DNA, 25 bp, probe
gccagtaattgcaccattaatgaca

SEQ ID NO: 197636 - DNA, 25 bp, probe
gccagtcccagaggtcatgtgagca

SEQ ID NO: 197637 - DNA, 25 bp, probe
gccaccagccagctgtgtggcacag

SEQ ID NO: 197638 - DNA, 25 bp, probe
gccatccgcaatcctttgagatatg

SEQ ID NO: 197639 - DNA, 25 bp, probe
gccacgtgcacaagctggagaggtg

SEQ ID NO: 197640 - DNA, 25 bp, probe
gccagagctcagtagcgggcatgga

SEQ ID NO: 197641 - DNA, 25 bp, probe
gccagcacatgcatcatctgtggca

SEQ ID NO: 197642 - DNA, 25 bp, probe
gccagcagctttacgctggctgctg

SEQ ID NO: 197643 - DNA, 25 bp, probe
gccagcgtgtggagcagagctctcc

SEQ ID NO: 197644 - DNA, 25 bp, probe
gccagcgtgtggagcagagctctcc

SEQ ID NO: 197645 - DNA, 25 bp, probe
gccactgtgtgaaactgtatctgcc

SEQ ID NO: 197646 - DNA, 25 bp, probe
gccactgtgaagcttgatttctgct

SEQ ID NO: 197647 - DNA, 25 bp, probe
gccaccatgaagattgataaccctc

SEQ ID NO: 197648 - DNA, 25 bp, probe
gccagtatgggaaggtgtacacctg

SEQ ID NO: 197649 - DNA, 25 bp, probe
gccagtcatgtgaagcgtttacagc

SEQ ID NO: 197650 - DNA, 25 bp, probe
gccactctgggtggttctaagccag

SEQ ID NO: 197651 - DNA, 25 bp, probe
gccagcctggtgaaggtgtcagagc

SEQ ID NO: 197652 - DNA, 25 bp, probe
gccagcctggtgaaggtgtcagagc

SEQ ID NO: 197653 - DNA, 25 bp, probe
gccacctggtgaagaagtgacctgc

SEQ ID NO: 197654 - DNA, 25 bp, probe
gccaccattgctaaaagtgcaacca

SEQ ID NO: 197655 - DNA, 25 bp, probe
gccaccattgctaaaagtgcaacca

SEQ ID NO: 197656 - DNA, 25 bp, probe
gccatcctttgtgaagctggaacac

SEQ ID NO: 197657 - DNA, 25 bp, probe
gccccttgctggcaagtggttctcc

SEQ ID NO: 197658 - DNA, 25 bp, probe
gccactcttgggccaaggctgtggt

SEQ ID NO: 197659 - DNA, 25 bp, probe
gccagctctttgggaagtcgacagt

SEQ ID NO: 197660 - DNA, 25 bp, probe
gccagctctttgggaagtcgacagt

SEQ ID NO: 197661 - DNA, 25 bp, probe
gccagctctttgggaagtcgacagt

SEQ ID NO: 197662 - DNA, 25 bp, probe
gccagctctgtcaggaaaggaggtg

SEQ ID NO: 197663 - DNA, 25 bp, probe
gccaccgagcggcagtacgagctgc

SEQ ID NO: 197664 - DNA, 25 bp, probe
gccatccgggagacaggacgggctc

SEQ ID NO: 197665 - DNA, 25 bp, probe
gccactcgcaggagcagggcagtgg

SEQ ID NO: 197666 - DNA, 25 bp, probe
gccaccacagctatgcagggcatgg

SEQ ID NO: 197667 - DNA, 25 bp, probe
gccaccaggctggaggcggagtggg

SEQ ID NO: 197668 - DNA, 25 bp, probe
gccaccagtgtcgagcaaggagaag

SEQ ID NO: 197669 - DNA, 25 bp, probe
gccaccctgtgcagaaatgagagaa

SEQ ID NO: 197670 - DNA, 25 bp, probe
gccaccactgggcaaacagaagaat

SEQ ID NO: 197671 - DNA, 25 bp, probe
gccacccggagtgcatacatggagg

SEQ ID NO: 197672 - DNA, 25 bp, probe
gccacggctggagcgtgcagagggc

SEQ ID NO: 197673 - DNA, 25 bp, probe
gccacctcttgtctgtcagaagagc

SEQ ID NO: 197674 - DNA, 25 bp, probe
gccactgtgcttggacttagaagaa

SEQ ID NO: 197675 - DNA, 25 bp, probe
gccatcgatcttgcaccaagactga

SEQ ID NO: 197676 - DNA, 25 bp, probe
gccagcaatgtcatcaccaggagga

SEQ ID NO: 197677 - DNA, 25 bp, probe
gccagcctgtgttgaacagctacca

SEQ ID NO: 197678 - DNA, 25 bp, probe
gccagcctgtgttgaacagctacca

SEQ ID NO: 197679 - DNA, 25 bp, probe
gccaccgggagagatgctgagaaaa

SEQ ID NO: 197680 - DNA, 25 bp, probe
gccacgggattgtaactggagcaga

SEQ ID NO: 197681 - DNA, 25 bp, probe
gccacggtgttgtgagtccacatga

SEQ ID NO: 197682 - DNA, 25 bp, probe
gccacgaggttaaagaagctgcatg

SEQ ID NO: 197683 - DNA, 25 bp, probe
gccaccaagatccacaagcaaggct

SEQ ID NO: 197684 - DNA, 25 bp, probe
gccaccaatggctttccaagggatc

SEQ ID NO: 197685 - DNA, 25 bp, probe
gccagacaaggctttacaggaagat

SEQ ID NO: 197686 - DNA, 25 bp, probe
gccagccaggcgggctcaaggaaag

SEQ ID NO: 197687 - DNA, 25 bp, probe
gccaccagcagcagtgacacggaga

SEQ ID NO: 197688 - DNA, 25 bp, probe
gccaccagcagcagtgacacggaga

SEQ ID NO: 197689 - DNA, 25 bp, probe
gccagccagagaaataccatgggag

SEQ ID NO: 197690 - DNA, 25 bp, probe
gccatgctgaggaacaacctagaag

SEQ ID NO: 197691 - DNA, 25 bp, probe
gccaggaggataccaacttgatagc

SEQ ID NO: 197692 - DNA, 25 bp, probe
gccaggggcaaatacctgatctgca

SEQ ID NO: 197693 - DNA, 25 bp, probe
gccaggcggaaggtgaccgtcctgg

SEQ ID NO: 197694 - DNA, 25 bp, probe
gccagagatggacgtgtaccagggc

SEQ ID NO: 197695 - DNA, 25 bp, probe
gccagccagtgcccgaggccaggaa

SEQ ID NO: 197696 - DNA, 25 bp, probe
gccaccagtggacctagcctggatg

SEQ ID NO: 197697 - DNA, 25 bp, probe
gccacctggaaccagatcctggacc

SEQ ID NO: 197698 - DNA, 25 bp, probe
gccacccgaggcgaagcgtggaagc

SEQ ID NO: 197699 - DNA, 25 bp, probe
gccaccccggtgcaggtggacgggg

SEQ ID NO: 197700 - DNA, 25 bp, probe
gccaccccggtgcaggtggacgggg

SEQ ID NO: 197701 - DNA, 25 bp, probe
gccaccccggtgcaggtggacgggg

SEQ ID NO: 197702 - DNA, 25 bp, probe
gccagcccaaggatgaggtggactg

SEQ ID NO: 197703 - DNA, 25 bp, probe
gccacccaccgtaatggtggagtgt

SEQ ID NO: 197704 - DNA, 25 bp, probe
gcccgtcaccctaagtatggatagg

SEQ ID NO: 197705 - DNA, 25 bp, probe
gcgacgcaatcagaaagtttgtagg

SEQ ID NO: 197706 - DNA, 25 bp, probe
gcgacgcaatcagaaagtttgtagg

SEQ ID NO: 197707 - DNA, 25 bp, probe
gctaggaacacttacccaggtagat

SEQ ID NO: 197708 - DNA, 25 bp, probe
gctaggaacacttacccaggtagat

SEQ ID NO: 197709 - DNA, 25 bp, probe
gccatggaagatcttcccatcgtct

SEQ ID NO: 197710 - DNA, 25 bp, probe
gccataaagaggatcgaccagtcag

SEQ ID NO: 197711 - DNA, 25 bp, probe
gccatagacgagacgtaggtagccg

SEQ ID NO: 197712 - DNA, 25 bp, probe
gccagggtgagcagtacatgaacac

SEQ ID NO: 197713 - DNA, 25 bp, probe
gccaccgtgatgaatgtactgacca

SEQ ID NO: 197714 - DNA, 25 bp, probe
gccagacggagagtgataccccagc

SEQ ID NO: 197715 - DNA, 25 bp, probe
gccttcatgggggtgaccccacgat

SEQ ID NO: 197716 - DNA, 25 bp, probe
gcctattgcaggcttttcctgactt

SEQ ID NO: 197717 - DNA, 25 bp, probe
gccatattacgacttagtgccctct

SEQ ID NO: 197718 - DNA, 25 bp, probe
gccatgattagacgttgactgcatc

SEQ ID NO: 197719 - DNA, 25 bp, probe
gccatgaatatgcagactgcagggc

SEQ ID NO: 197720 - DNA, 25 bp, probe
gccatgatctctcagattgcaggtc

SEQ ID NO: 197721 - DNA, 25 bp, probe
gccatgatctctcagattgcaggtc

SEQ ID NO: 197722 - DNA, 25 bp, probe
gccagtctttacagctgagcacatt

SEQ ID NO: 197723 - DNA, 25 bp, probe
gccagttatgattgcaaggaccacc

SEQ ID NO: 197724 - DNA, 25 bp, probe
gccagtcttgcaatcaggtcagaaa

SEQ ID NO: 197725 - DNA, 25 bp, probe
gccagtctgatcacgatcatagaaa

SEQ ID NO: 197726 - DNA, 25 bp, probe
gccatgagcaacagcatgatcaaca

SEQ ID NO: 197727 - DNA, 25 bp, probe
gccatgagtgacagccagaaccagt

SEQ ID NO: 197728 - DNA, 25 bp, probe
gccagaggacctaatgaacatgcag

SEQ ID NO: 197729 - DNA, 25 bp, probe
gccagagccacccaatgaacagtgc

SEQ ID NO: 197730 - DNA, 25 bp, probe
gccatcgccaagtaagaaagtgaag

SEQ ID NO: 197731 - DNA, 25 bp, probe
gccatcatccaggagatcgtcaagt

SEQ ID NO: 197732 - DNA, 25 bp, probe
gccatcatccaggagatcgtcaagt

SEQ ID NO: 197733 - DNA, 25 bp, probe
gccagcatccttggatcagtactga

SEQ ID NO: 197734 - DNA, 25 bp, probe
gccatcagcttcagatgtgctacca

SEQ ID NO: 197735 - DNA, 25 bp, probe
gccatcgaccatggatggtttcctc

SEQ ID NO: 197736 - DNA, 25 bp, probe
gccatcgaccatggatggtttcctc

SEQ ID NO: 197737 - DNA, 25 bp, probe
gcctcaggatgagctggatttcctc

SEQ ID NO: 197738 - DNA, 25 bp, probe
gactgtgggtgtaggttacctgcca

SEQ ID NO: 197739 - DNA, 25 bp, probe
gccttgggcgtaacgctatactgtc

SEQ ID NO: 197740 - DNA, 25 bp, probe
gccttgggaatctcgttgagcgttc

SEQ ID NO: 197741 - DNA, 25 bp, probe
gccgggattacagggtctgcggttc

SEQ ID NO: 197742 - DNA, 25 bp, probe
gccgggtgtacctgattctggaata

SEQ ID NO: 197743 - DNA, 25 bp, probe
gcgaaggatgatcgcccgataaaga

SEQ ID NO: 197744 - DNA, 25 bp, probe
gcctacgaattggccgactacagca

SEQ ID NO: 197745 - DNA, 25 bp, probe
gcctaaatactagtaacatatcagt

SEQ ID NO: 197746 - DNA, 25 bp, probe
gcctctttactgaccaactgaagta

SEQ ID NO: 197747 - DNA, 25 bp, probe
gctcttcgtgttacaaaccagtttc

SEQ ID NO: 197748 - DNA, 25 bp, probe
gccttccgtgatggaaaccacttcc

SEQ ID NO: 197749 - DNA, 25 bp, probe
gccttcttggagagtcaccaattca

SEQ ID NO: 197750 - DNA, 25 bp, probe
gcctcttttagaagtcagtggattg

SEQ ID NO: 197751 - DNA, 25 bp, probe
gcctcttttagaagtcagtggattg

SEQ ID NO: 197752 - DNA, 25 bp, probe
gccttgattttaagtcactgggttc

SEQ ID NO: 197753 - DNA, 25 bp, probe
gccttgtcatttgggtagttggatt

SEQ ID NO: 197754 - DNA, 25 bp, probe
gccaggtaattatgaaatttgtcta

SEQ ID NO: 197755 - DNA, 25 bp, probe
gccaggtagatagtagaggagattt

SEQ ID NO: 197756 - DNA, 25 bp, probe
gccaggtagatagtagaggagattt

SEQ ID NO: 197757 - DNA, 25 bp, probe
gccacctactccaagagtaagttct

SEQ ID NO: 197758 - DNA, 25 bp, probe
gccagcgctaccaggagtttgttca

SEQ ID NO: 197759 - DNA, 25 bp, probe
gccagcgctaccaggagtttgttca

SEQ ID NO: 197760 - DNA, 25 bp, probe
gccagcgacacctggatgttcgggg

SEQ ID NO: 197761 - DNA, 25 bp, probe
gccagtgacgtgtggagcttcggca

SEQ ID NO: 197762 - DNA, 25 bp, probe
gccaggcctatgttggaggacaaga

SEQ ID NO: 197763 - DNA, 25 bp, probe
gccaggtcttgctgttgtatcaagg

SEQ ID NO: 197764 - DNA, 25 bp, probe
gccagtgttggcggttcttagagca

SEQ ID NO: 197765 - DNA, 25 bp, probe
gccagtgggaagggctctcttgaca

SEQ ID NO: 197766 - DNA, 25 bp, probe
gccaggactgatgaggccatgcctg

SEQ ID NO: 197767 - DNA, 25 bp, probe
gccagagaggataagctgcccatct

SEQ ID NO: 197768 - DNA, 25 bp, probe
gccagaatggatgtactacacttta

SEQ ID NO: 197769 - DNA, 25 bp, probe
gccagctatgagtttgactctcctt

SEQ ID NO: 197770 - DNA, 25 bp, probe
gccagcaagaagatactgctgcccg

SEQ ID NO: 197771 - DNA, 25 bp, probe
gccatggagaagagcaaggccacgc

SEQ ID NO: 197772 - DNA, 25 bp, probe
gccatggaaacccaaggaagcgttg

SEQ ID NO: 197773 - DNA, 25 bp, probe
gccatggaaacccaaagaagctgtg

SEQ ID NO: 197774 - DNA, 25 bp, probe
gccaggccaacacaagtgacctatg

SEQ ID NO: 197775 - DNA, 25 bp, probe
gccagagcacataacgaagttttta

SEQ ID NO: 197776 - DNA, 25 bp, probe
gccaggacattaggaccacttgttg

SEQ ID NO: 197777 - DNA, 25 bp, probe
gccagcaacaatgtgaccgatatgt

SEQ ID NO: 197778 - DNA, 25 bp, probe
gccagcaacaatgtgaccgatatgt

SEQ ID NO: 197779 - DNA, 25 bp, probe
gccaggacacatttccactataatt

SEQ ID NO: 197780 - DNA, 25 bp, probe
gccagaccagattaaacttcatatg

SEQ ID NO: 197781 - DNA, 25 bp, probe
gccagacaacaataattgctgcatt

SEQ ID NO: 197782 - DNA, 25 bp, probe
gccagacaacacaatcaaagctcaa

SEQ ID NO: 197783 - DNA, 25 bp, probe
gccagacaacacaatcaaagctcaa

SEQ ID NO: 197784 - DNA, 25 bp, probe
gccagtgaactcttcaaagacaaga

SEQ ID NO: 197785 - DNA, 25 bp, probe
gccagtgaactcttcaaagacaaga

SEQ ID NO: 197786 - DNA, 25 bp, probe
gccagaaacatcttggtgaatcaaa

SEQ ID NO: 197787 - DNA, 25 bp, probe
gccagaaacatcctggtagctgagg

SEQ ID NO: 197788 - DNA, 25 bp, probe
gccagaagctcagggtgcatagtag

SEQ ID NO: 197789 - DNA, 25 bp, probe
gccagcaagcacgagcagtgtgaga

SEQ ID NO: 197790 - DNA, 25 bp, probe
gccagctgacaggacatcttacaag

SEQ ID NO: 197791 - DNA, 25 bp, probe
gccatggacgcagcagttacagcac

SEQ ID NO: 197792 - DNA, 25 bp, probe
gccagagcaagcgctgtaaaccctg

SEQ ID NO: 197793 - DNA, 25 bp, probe
gccagagcaagcgctgtaaaccctg

SEQ ID NO: 197794 - DNA, 25 bp, probe
gccagagcacctgcgtatgaatcta

SEQ ID NO: 197795 - DNA, 25 bp, probe
gccagaccctggctggaagccagaa

SEQ ID NO: 197796 - DNA, 25 bp, probe
gccttccggcgcataaagtcagcaa

SEQ ID NO: 197797 - DNA, 25 bp, probe
gccttccggcgcataaagtcagcaa

SEQ ID NO: 197798 - DNA, 25 bp, probe
gccttcccacagaaaaactgcaacg

SEQ ID NO: 197799 - DNA, 25 bp, probe
gccttccacatgctggtaaatgcca

SEQ ID NO: 197800 - DNA, 25 bp, probe
gcctttagctttatgtatatcctgg

SEQ ID NO: 197801 - DNA, 25 bp, probe
gccttgattgctcctagttatatac

SEQ ID NO: 197802 - DNA, 25 bp, probe
gccatctttcttaagattcctgaag

SEQ ID NO: 197803 - DNA, 25 bp, probe
gccaccatttatacctaccataaga

SEQ ID NO: 197804 - DNA, 25 bp, probe
gccaccatatcttacttcactgaag

SEQ ID NO: 197805 - DNA, 25 bp, probe
gccatcggtctagcatatcagtcac

SEQ ID NO: 197806 - DNA, 25 bp, probe
gccatcggtctagcatatcagtcac

SEQ ID NO: 197807 - DNA, 25 bp, probe
gccatctggcaggtggctacgacgc

SEQ ID NO: 197808 - DNA, 25 bp, probe
gccatctggcaggtggctacgacgc

SEQ ID NO: 197809 - DNA, 25 bp, probe
gccagcatggaaaggaaatagcagc

SEQ ID NO: 197810 - DNA, 25 bp, probe
gccagaggaaagaacagctatgccc

SEQ ID NO: 197811 - DNA, 25 bp, probe
gccagagccaagaaacactttcaga

SEQ ID NO: 197812 - DNA, 25 bp, probe
gccggcctgagaaacactatttgtg

SEQ ID NO: 197813 - DNA, 25 bp, probe
gccgtccgatgaggatcgtttttta

SEQ ID NO: 197814 - DNA, 25 bp, probe
gccagtctccgagagcggattgagt

SEQ ID NO: 197815 - DNA, 25 bp, probe
gccagtctccgagagcggattgagt

SEQ ID NO: 197816 - DNA, 25 bp, probe
gccagagctgcagagctagtgttcg

SEQ ID NO: 197817 - DNA, 25 bp, probe
gccagcagctgcggcaggagggtgt

SEQ ID NO: 197818 - DNA, 25 bp, probe
gccagctgctgagccgcagagaagt

SEQ ID NO: 197819 - DNA, 25 bp, probe
gccagcctggcaacagagcaagact

SEQ ID NO: 197820 - DNA, 25 bp, probe
gccagctctggtcaagatagcttgt

SEQ ID NO: 197821 - DNA, 25 bp, probe
gcctgtcatcgtcaacaacttcggc

SEQ ID NO: 197822 - DNA, 25 bp, probe
gccagactggtctcaaactcctggg

SEQ ID NO: 197823 - DNA, 25 bp, probe
gccaggctggtctcgaaatcctgac

SEQ ID NO: 197824 - DNA, 25 bp, probe
gccagactggacaggcaaagactgc

SEQ ID NO: 197825 - DNA, 25 bp, probe
gccagctgctggaatgggagaagac

SEQ ID NO: 197826 - DNA, 25 bp, probe
gccagatgctcaagatttggaaacc

SEQ ID NO: 197827 - DNA, 25 bp, probe
gccaggtcatcaccattggcaatga

SEQ ID NO: 197828 - DNA, 25 bp, probe
gccagcgtgcattcaaacgcactgc

SEQ ID NO: 197829 - DNA, 25 bp, probe
gccaggtgcacctaaaggctgaccc

SEQ ID NO: 197830 - DNA, 25 bp, probe
gccaggtgcacctaaaggctgaccc

SEQ ID NO: 197831 - DNA, 25 bp, probe
gccagggattaatggagatgcccac

SEQ ID NO: 197832 - DNA, 25 bp, probe
gccagggtctccaaggagacgcctc

SEQ ID NO: 197833 - DNA, 25 bp, probe
gccagctggttctcagacaggggtc

SEQ ID NO: 197834 - DNA, 25 bp, probe
gcctctgtgttcccgttagggacat

SEQ ID NO: 197835 - DNA, 25 bp, probe
gccatcctggtcccagtgttagggt

SEQ ID NO: 197836 - DNA, 25 bp, probe
gccattgtgttaaaggaaaggattt

SEQ ID NO: 197837 - DNA, 25 bp, probe
gctcttttctaatccaaagggtata

SEQ ID NO: 197838 - DNA, 25 bp, probe
gctattttacatatcccaagccctt

SEQ ID NO: 197839 - DNA, 25 bp, probe
tcacttttaccctcaagtccgattt

SEQ ID NO: 197840 - DNA, 25 bp, probe
tccttttaagcctccttgttttgat

SEQ ID NO: 197841 - DNA, 25 bp, probe
gccttttaactcaccaggttgcttg

SEQ ID NO: 197842 - DNA, 25 bp, probe
gcctttggaagtgaccggtctggtt

SEQ ID NO: 197843 - DNA, 25 bp, probe
gcttttgaaaggcggcgggaggcgg

SEQ ID NO: 197844 - DNA, 25 bp, probe
gcctttacaacgccagggggcggag

SEQ ID NO: 197845 - DNA, 25 bp, probe
gcctttaccaccgtggatgactggc

SEQ ID NO: 197846 - DNA, 25 bp, probe
gccagatgtcccggaggggactgag

SEQ ID NO: 197847 - DNA, 25 bp, probe
gccagtgtccctatgaagggatgac

SEQ ID NO: 197848 - DNA, 25 bp, probe
gccagtgtcctagcaaagctggatg

SEQ ID NO: 197849 - DNA, 25 bp, probe
gccagacatgcctgtcttagctgac

SEQ ID NO: 197850 - DNA, 25 bp, probe
gccagacatgcctgtcttagctgac

SEQ ID NO: 197851 - DNA, 25 bp, probe
gccagccccattattgagcatgacc

SEQ ID NO: 197852 - DNA, 25 bp, probe
gccagttgtgcacttttacaagccg

SEQ ID NO: 197853 - DNA, 25 bp, probe
gccagggccaatttctgaccagagc

SEQ ID NO: 197854 - DNA, 25 bp, probe
gccaggagtatttcctgtgccaggt

SEQ ID NO: 197855 - DNA, 25 bp, probe
gccaggcgtttggcctgggcaggtt

SEQ ID NO: 197856 - DNA, 25 bp, probe
gccagagggagggccatgggccgag

SEQ ID NO: 197857 - DNA, 25 bp, probe
gccagtgggcgggccatgagggaca

SEQ ID NO: 197858 - DNA, 25 bp, probe
gccagaggtggaggctcatctcagg

SEQ ID NO: 197859 - DNA, 25 bp, probe
gccatggagcggtcagccttcatgg

SEQ ID NO: 197860 - DNA, 25 bp, probe
gccatcaagctagcagactttggac

SEQ ID NO: 197861 - DNA, 25 bp, probe
gcctcagatgtttggagctttggag

SEQ ID NO: 197862 - DNA, 25 bp, probe
gccatgcagctgtcgtggagctgct

SEQ ID NO: 197863 - DNA, 25 bp, probe
gccatgctgcatacctttctcatgg

SEQ ID NO: 197864 - DNA, 25 bp, probe
gccatgctgcatacctttctcatgg

SEQ ID NO: 197865 - DNA, 25 bp, probe
gccagttaactttgcatcaggtcta

SEQ ID NO: 197866 - DNA, 25 bp, probe
gccatgtgtaagttgtaaggattgc

SEQ ID NO: 197867 - DNA, 25 bp, probe
gccatgtgtaagttgtaaggattgc

SEQ ID NO: 197868 - DNA, 25 bp, probe
gccttgccacaacctgaagtgattc

SEQ ID NO: 197869 - DNA, 25 bp, probe
gccttgccacaacctgaagtgattc

SEQ ID NO: 197870 - DNA, 25 bp, probe
gcctcccttcatgcatggaaattcc

SEQ ID NO: 197871 - DNA, 25 bp, probe
gcctcacttctcactgtaaacatta

SEQ ID NO: 197872 - DNA, 25 bp, probe
gccatactttgtctgaaaaattcct

SEQ ID NO: 197873 - DNA, 25 bp, probe
gcctaccttgctgccaacaagtttg

SEQ ID NO: 197874 - DNA, 25 bp, probe
gcctacaagagtcccaccaagaggg

SEQ ID NO: 197875 - DNA, 25 bp, probe
gccagaccatggagtcccagaaacc

SEQ ID NO: 197876 - DNA, 25 bp, probe
gccagagcaaggagtgccaaagtcc

SEQ ID NO: 197877 - DNA, 25 bp, probe
gccatacagggcacttgagaagtcc

SEQ ID NO: 197878 - DNA, 25 bp, probe
gccatagtgaactgcttgaaactct

SEQ ID NO: 197879 - DNA, 25 bp, probe
gccttggaacaatattgaattctct

SEQ ID NO: 197880 - DNA, 25 bp, probe
gccttacagaaatctccaggacctc

SEQ ID NO: 197881 - DNA, 25 bp, probe
gcctaaatacattcttcctggggtc

SEQ ID NO: 197882 - DNA, 25 bp, probe
gccatctccaacatctatccggaga

SEQ ID NO: 197883 - DNA, 25 bp, probe
gccatagagtacatcgatgccgtga

SEQ ID NO: 197884 - DNA, 25 bp, probe
gccatagagtacatcgatgccgtga

SEQ ID NO: 197885 - DNA, 25 bp, probe
gccataggcttcattgactgggtga

SEQ ID NO: 197886 - DNA, 25 bp, probe
gcctatcatttttctgtcgggctgc

SEQ ID NO: 197887 - DNA, 25 bp, probe
gcctatcatttttctgtcgggctgc

SEQ ID NO: 197888 - DNA, 25 bp, probe
gcgctgtattttgcagattatgggg

SEQ ID NO: 197889 - DNA, 25 bp, probe
gccatttattgggcagattttgtgg

SEQ ID NO: 197890 - DNA, 25 bp, probe
gcctttaaggacttcctgttggcgc

SEQ ID NO: 197891 - DNA, 25 bp, probe
gccagcacctaggacttcgagttgg

SEQ ID NO: 197892 - DNA, 25 bp, probe
gccagaacatttacttcaactctac

SEQ ID NO: 197893 - DNA, 25 bp, probe
gccgaacatgttgcttaccgcacca

SEQ ID NO: 197894 - DNA, 25 bp, probe
gccagagaatggtctttacctaaca

SEQ ID NO: 197895 - DNA, 25 bp, probe
gccagagccttaataaacgtccaca

SEQ ID NO: 197896 - DNA, 25 bp, probe
gccagagcttttggaatacctatca

SEQ ID NO: 197897 - DNA, 25 bp, probe
gccagcaggtccagaaacaatatca

SEQ ID NO: 197898 - DNA, 25 bp, probe
gccagggctgccatataacctgaca

SEQ ID NO: 197899 - DNA, 25 bp, probe
gccaggcctacgaattggccgacta

SEQ ID NO: 197900 - DNA, 25 bp, probe
gccttcaaacgaaatggctcggcca

SEQ ID NO: 197901 - DNA, 25 bp, probe
gccatgaaagtcctaaggaaggcca

SEQ ID NO: 197902 - DNA, 25 bp, probe
gccatgaaagtcctaaggaaggcca

SEQ ID NO: 197903 - DNA, 25 bp, probe
gcctatggtgtcccagtaaagccaa

SEQ ID NO: 197904 - DNA, 25 bp, probe
gcctttgcacctccatggaaacgaa

SEQ ID NO: 197905 - DNA, 25 bp, probe
gccatgttcgacttcagcgagaagc

SEQ ID NO: 197906 - DNA, 25 bp, probe
gccatgaacgcctttggagacatga

SEQ ID NO: 197907 - DNA, 25 bp, probe
gccagagtctccacatgtggaagag

SEQ ID NO: 197908 - DNA, 25 bp, probe
gccagatgattccctgtgggacaag

SEQ ID NO: 197909 - DNA, 25 bp, probe
gccagatgagtgctctgtggaccac

SEQ ID NO: 197910 - DNA, 25 bp, probe
gccagatgagtgctctgtggaccca

SEQ ID NO: 197911 - DNA, 25 bp, probe
gccagagcaggtgcgcaggcacctc

SEQ ID NO: 197912 - DNA, 25 bp, probe
gccagaggctgtgtagaggctcctg

SEQ ID NO: 197913 - DNA, 25 bp, probe
gccaggtttgattgtgaagtccgca

SEQ ID NO: 197914 - DNA, 25 bp, probe
gccatgcctttctgtatagtacaca

SEQ ID NO: 197915 - DNA, 25 bp, probe
gccagagttgaatgttattatccag

SEQ ID NO: 197916 - DNA, 25 bp, probe
gccagagttgaatgttattatccag

SEQ ID NO: 197917 - DNA, 25 bp, probe
gccaggttgctgtgttgcagtgcat

SEQ ID NO: 197918 - DNA, 25 bp, probe
gccagcactttctttctgatgatgc

SEQ ID NO: 197919 - DNA, 25 bp, probe
gccagcactttctttctgatgatgc

SEQ ID NO: 197920 - DNA, 25 bp, probe
gccaggctttgatatctgtgatgtg

SEQ ID NO: 197921 - DNA, 25 bp, probe
gccaggctttgatatctgtgatgtg

SEQ ID NO: 197922 - DNA, 25 bp, probe
gccagagccacgtgcatctcgtgga

SEQ ID NO: 197923 - DNA, 25 bp, probe
gccagcacccaaagtatcattgtga

SEQ ID NO: 197924 - DNA, 25 bp, probe
gccagactggcacagttttctgaga

SEQ ID NO: 197925 - DNA, 25 bp, probe
gccagtctgaggttatgtttctgag

SEQ ID NO: 197926 - DNA, 25 bp, probe
gccatcttgaggattccttctgctg

SEQ ID NO: 197927 - DNA, 25 bp, probe
gccttgctgaagacagctttttctg

SEQ ID NO: 197928 - DNA, 25 bp, probe
gcctctggctagtcagtttttcata

SEQ ID NO: 197929 - DNA, 25 bp, probe
gccttggttgatttggttttactgt

SEQ ID NO: 197930 - DNA, 25 bp, probe
gttccgtttactctgtttacacatt

SEQ ID NO: 197931 - DNA, 25 bp, probe
tcccccttctacatttcttagacta

SEQ ID NO: 197932 - DNA, 25 bp, probe
taccaccattttatgtttaggccca

SEQ ID NO: 197933 - DNA, 25 bp, probe
gaacccgtcactattttagattcct

SEQ ID NO: 197934 - DNA, 25 bp, probe
gaacccccctttgtattatagtcat

SEQ ID NO: 197935 - DNA, 25 bp, probe
gaacccccctttgtattatagtcat

SEQ ID NO: 197936 - DNA, 25 bp, probe
gaacccccaggtgtgtattctgttg

SEQ ID NO: 197937 - DNA, 25 bp, probe
gaacttctctactcctgtagttttg

SEQ ID NO: 197938 - DNA, 25 bp, probe
gaatttcctggctcaggctactttc

SEQ ID NO: 197939 - DNA, 25 bp, probe
gcaaagtccaggtccatttagtttt

SEQ ID NO: 197940 - DNA, 25 bp, probe
taaactactgtacatactagtgttc

SEQ ID NO: 197941 - DNA, 25 bp, probe
gaaggtacatttctttcgtgttcaa

SEQ ID NO: 197942 - DNA, 25 bp, probe
tggggaacttacttttccttgatag

SEQ ID NO: 197943 - DNA, 25 bp, probe
gagggatttaactgccctctttcgg

SEQ ID NO: 197944 - DNA, 25 bp, probe
gctggtttttacaccttgatttcga

SEQ ID NO: 197945 - DNA, 25 bp, probe
gcttttgtttacaccgtggaattga

SEQ ID NO: 197946 - DNA, 25 bp, probe
gcgtattgttaagaccgtggaggca

SEQ ID NO: 197947 - DNA, 25 bp, probe
gctgaattttaatgaccaacgggaa

SEQ ID NO: 197948 - DNA, 25 bp, probe
gctgaattttaatgaccaacgggaa

SEQ ID NO: 197949 - DNA, 25 bp, probe
gccataatttgaataactctacgag

SEQ ID NO: 197950 - DNA, 25 bp, probe
gcctgaatggagataacttccgaac

SEQ ID NO: 197951 - DNA, 25 bp, probe
gcctggtgatggtgaacttctacaa

SEQ ID NO: 197952 - DNA, 25 bp, probe
gccagatgttaggagaactactaaa

SEQ ID NO: 197953 - DNA, 25 bp, probe
gccagagatgaagagacacagtcta

SEQ ID NO: 197954 - DNA, 25 bp, probe
gccaggagatacaaccagcactttc

SEQ ID NO: 197955 - DNA, 25 bp, probe
gccaggagtgcatcaacgtgcttct

SEQ ID NO: 197956 - DNA, 25 bp, probe
gccagtcactgctgcaaggtggcct

SEQ ID NO: 197957 - DNA, 25 bp, probe
gccagtcactgctgcaaggtggcct

SEQ ID NO: 197958 - DNA, 25 bp, probe
gccagaacgcagactgcaggggccg

SEQ ID NO: 197959 - DNA, 25 bp, probe
gccagaactgagcgctgtggggagc

SEQ ID NO: 197960 - DNA, 25 bp, probe
gccagagactggaagcgtaggtacg

SEQ ID NO: 197961 - DNA, 25 bp, probe
gccagacactgaaagccatgaagaa

SEQ ID NO: 197962 - DNA, 25 bp, probe
gccagatcctgagggccagctatga

SEQ ID NO: 197963 - DNA, 25 bp, probe
gccagttggggaccagcatcatgaa

SEQ ID NO: 197964 - DNA, 25 bp, probe
gccatgtctggccagataaattaag

SEQ ID NO: 197965 - DNA, 25 bp, probe
gccatgcttggatactcacattagg

SEQ ID NO: 197966 - DNA, 25 bp, probe
gccatgcttggatactcacattagg

SEQ ID NO: 197967 - DNA, 25 bp, probe
gcctttgtgatctcacctgttggaa

SEQ ID NO: 197968 - DNA, 25 bp, probe
gcctatttaagcccctcttgagagg

SEQ ID NO: 197969 - DNA, 25 bp, probe
gccagtttacactgcctcttagcag

SEQ ID NO: 197970 - DNA, 25 bp, probe
gccagatatttacagcccattaact

SEQ ID NO: 197971 - DNA, 25 bp, probe
gccagattattacgacacgccacta

SEQ ID NO: 197972 - DNA, 25 bp, probe
gccagactatacaagacaccagcag

SEQ ID NO: 197973 - DNA, 25 bp, probe
gccaggttaaaacccagaggcaccg

SEQ ID NO: 197974 - DNA, 25 bp, probe
gccaggtccagatacacctgcaggc

SEQ ID NO: 197975 - DNA, 25 bp, probe
gccagtgggcagggaatcctggagc

SEQ ID NO: 197976 - DNA, 25 bp, probe
gccagtggctggaagagatgccttg

SEQ ID NO: 197977 - DNA, 25 bp, probe
gccagggtgtgaagggacttacctc

SEQ ID NO: 197978 - DNA, 25 bp, probe
gccagggtgtgaagggacttacctc

SEQ ID NO: 197979 - DNA, 25 bp, probe
gccagagggctaaagtacctgcacc

SEQ ID NO: 197980 - DNA, 25 bp, probe
gccagggcttacctgtacactgact

SEQ ID NO: 197981 - DNA, 25 bp, probe
gccagggtggtcttgatctcctgac

SEQ ID NO: 197982 - DNA, 25 bp, probe
gccaggatggtctcgatctcctgac

SEQ ID NO: 197983 - DNA, 25 bp, probe
gccagtgatggtagtctgtgccttg

SEQ ID NO: 197984 - DNA, 25 bp, probe
gccaggatgggtagctagcccatgt

SEQ ID NO: 197985 - DNA, 25 bp, probe
gccatggactggttcatagccgtct

SEQ ID NO: 197986 - DNA, 25 bp, probe
gccataattctgttctatgccacct

SEQ ID NO: 197987 - DNA, 25 bp, probe
gccatccatgaagccaatgtcacct

SEQ ID NO: 197988 - DNA, 25 bp, probe
gccagttgccagggcaagtcactgc

SEQ ID NO: 197989 - DNA, 25 bp, probe
gccagttccggggcaggactgtaaa

SEQ ID NO: 197990 - DNA, 25 bp, probe
gccagttccaagcctaggtttcaag

SEQ ID NO: 197991 - DNA, 25 bp, probe
gccattgtacaaatccagttttaca

SEQ ID NO: 197992 - DNA, 25 bp, probe
gccagatgtagaatccctgttgttt

SEQ ID NO: 197993 - DNA, 25 bp, probe
gccagactatcaggcccatttgtct

SEQ ID NO: 197994 - DNA, 25 bp, probe
gcctgacgactcgtgctatttttcc

SEQ ID NO: 197995 - DNA, 25 bp, probe
gccagatttcttgtatttattccac

SEQ ID NO: 197996 - DNA, 25 bp, probe
gccagatttcttgtatttattccac

SEQ ID NO: 197997 - DNA, 25 bp, probe
gccagttcatttgctgttgctgttc

SEQ ID NO: 197998 - DNA, 25 bp, probe
gccatagagcaattcctttgctttc

SEQ ID NO: 197999 - DNA, 25 bp, probe
gccaggagaactgctccatgttggc

SEQ ID NO: 198000 - DNA, 25 bp, probe
gccaggtgaacggtgcctgggtgca

SEQ ID NO: 198001 - DNA, 25 bp, probe
gccaggtgaacggtgcctgggtgca

SEQ ID NO: 198002 - DNA, 25 bp, probe
gccatgggataaagatgcctgggag

SEQ ID NO: 198003 - DNA, 25 bp, probe
gccatggtgagggtgtgttgggatg

SEQ ID NO: 198004 - DNA, 25 bp, probe
gccagacggtggatgtgatggcaga

SEQ ID NO: 198005 - DNA, 25 bp, probe
gccagatgtggttattgtgatggaa

SEQ ID NO: 198006 - DNA, 25 bp, probe
gccagatgagtttatcatgtcagtg

SEQ ID NO: 198007 - DNA, 25 bp, probe
gccagtgacttcccatgtagagtgg

SEQ ID NO: 198008 - DNA, 25 bp, probe
gccaggagtacgccgtcaagatcat

SEQ ID NO: 198009 - DNA, 25 bp, probe
gccagggtcaaaaagcaagatcaac

SEQ ID NO: 198010 - DNA, 25 bp, probe
gccagggtcaaaaagcaagatcaac

SEQ ID NO: 198011 - DNA, 25 bp, probe
gccagtcatacaaattaaaatcata

SEQ ID NO: 198012 - DNA, 25 bp, probe
gccatgtctcactgtttaaataaaa

SEQ ID NO: 198013 - DNA, 25 bp, probe
gccatgtctcactgtttaaataaaa

SEQ ID NO: 198014 - DNA, 25 bp, probe
gcctcttcccaatttaaacaactca

SEQ ID NO: 198015 - DNA, 25 bp, probe
gccatcaacccggtgatttacaatc

SEQ ID NO: 198016 - DNA, 25 bp, probe
gccttcaccaggggctgctgtaatt

SEQ ID NO: 198017 - DNA, 25 bp, probe
gccatgtccacaagatttggtaatt

SEQ ID NO: 198018 - DNA, 25 bp, probe
gccttactaatgattttgcagctct

SEQ ID NO: 198019 - DNA, 25 bp, probe
gccttactaatgattttgcagctct

SEQ ID NO: 198020 - DNA, 25 bp, probe
gccattctcataagtgttttgaact

SEQ ID NO: 198021 - DNA, 25 bp, probe
gcctgttcagacatccgattcaata

SEQ ID NO: 198022 - DNA, 25 bp, probe
gccatggtaatcctgctcagtacga

SEQ ID NO: 198023 - DNA, 25 bp, probe
gccagatggaagtgctcgatcgcta

SEQ ID NO: 198024 - DNA, 25 bp, probe
gccagatggaagtgctcgatcgcta

SEQ ID NO: 198025 - DNA, 25 bp, probe
gccagaggagaacctcatgaggaca

SEQ ID NO: 198026 - DNA, 25 bp, probe
gccagaggagaacctcatgaggaca

SEQ ID NO: 198027 - DNA, 25 bp, probe
gccaggagaggacttccctgcagca

SEQ ID NO: 198028 - DNA, 25 bp, probe
gccaggatggtcttgatctcctgac

SEQ ID NO: 198029 - DNA, 25 bp, probe
gccatggagcgtggtagccacttca

SEQ ID NO: 198030 - DNA, 25 bp, probe
gccaggcggatggtgagcaatggta

SEQ ID NO: 198031 - DNA, 25 bp, probe
gccagtggctgtcagcagcaatggc

SEQ ID NO: 198032 - DNA, 25 bp, probe
gccagggctgccctgagaagctgct

SEQ ID NO: 198033 - DNA, 25 bp, probe
gccagggtgcacaggagctgagctt

SEQ ID NO: 198034 - DNA, 25 bp, probe
gccagattctaaaacatgctgcagc

SEQ ID NO: 198035 - DNA, 25 bp, probe
gccagattctaaaacatgctgcagc

SEQ ID NO: 198036 - DNA, 25 bp, probe
gccagagacaaaacagctgtgcagc

SEQ ID NO: 198037 - DNA, 25 bp, probe
gccagagacaaaacagctgtgcagc

SEQ ID NO: 198038 - DNA, 25 bp, probe
gccatctatagatacactggatcat

SEQ ID NO: 198039 - DNA, 25 bp, probe
gccatctcaatgacaaactagccaa

SEQ ID NO: 198040 - DNA, 25 bp, probe
gccatatcatattcaacgtaccatt

SEQ ID NO: 198041 - DNA, 25 bp, probe
gccatcatgtcttaccagtgacgct

SEQ ID NO: 198042 - DNA, 25 bp, probe
gccatctttgacctaggcatgtctc

SEQ ID NO: 198043 - DNA, 25 bp, probe
gccatctttgaactcctggactata

SEQ ID NO: 198044 - DNA, 25 bp, probe
gccttgggttattatggaatgatag

SEQ ID NO: 198045 - DNA, 25 bp, probe
gccagtgggcttgtttgcagactgg

SEQ ID NO: 198046 - DNA, 25 bp, probe
gccagggactctgttcaaactgcgc

SEQ ID NO: 198047 - DNA, 25 bp, probe
gccagggactctgttcaaactgcgc

SEQ ID NO: 198048 - DNA, 25 bp, probe
gccaggtactctgctcatagaaatc

SEQ ID NO: 198049 - DNA, 25 bp, probe
gccaggaactatgtctgtgcaagcc

SEQ ID NO: 198050 - DNA, 25 bp, probe
gccaggaactatgtctgtgcaagcc

SEQ ID NO: 198051 - DNA, 25 bp, probe
gccttatgtttgggcatgtaactcc

SEQ ID NO: 198052 - DNA, 25 bp, probe
gccttatgagggtcctctacttcag

SEQ ID NO: 198053 - DNA, 25 bp, probe
gcctatgtaaggccttctagtttgt

SEQ ID NO: 198054 - DNA, 25 bp, probe
gcctatgtaaggccttctagtttgt

SEQ ID NO: 198055 - DNA, 25 bp, probe
gcctatgtaaggccttctagtttgt

SEQ ID NO: 198056 - DNA, 25 bp, probe
gcctatgttagggcctttgcccagg

SEQ ID NO: 198057 - DNA, 25 bp, probe
gccagtgttggggctgctggcatcc

SEQ ID NO: 198058 - DNA, 25 bp, probe
gccagtatcggaacatcggcactgc

SEQ ID NO: 198059 - DNA, 25 bp, probe
gccattacgggagcacagcatgtgc

SEQ ID NO: 198060 - DNA, 25 bp, probe
gccaggtagcgcgcaactgctggct

SEQ ID NO: 198061 - DNA, 25 bp, probe
gccagtggagacggaatctgccgct

SEQ ID NO: 198062 - DNA, 25 bp, probe
gccagggagaaggttcttcgctcag

SEQ ID NO: 198063 - DNA, 25 bp, probe
gccaggtgaggtctctctaagtcag

SEQ ID NO: 198064 - DNA, 25 bp, probe
gccagtggagtggtccatgctaagt

SEQ ID NO: 198065 - DNA, 25 bp, probe
gccattgagttggccatccttcgat

SEQ ID NO: 198066 - DNA, 25 bp, probe
gccattgaagtgcgctctttgcaat

SEQ ID NO: 198067 - DNA, 25 bp, probe
gccttgtagctaagtctttctgcaa

SEQ ID NO: 198068 - DNA, 25 bp, probe
gccttgggtatcagctctgtgataa

SEQ ID NO: 198069 - DNA, 25 bp, probe
gcctaggggccttatcagtgtgaaa

SEQ ID NO: 198070 - DNA, 25 bp, probe
gccatagttggacattcattgctga

SEQ ID NO: 198071 - DNA, 25 bp, probe
gccatacagggaggttcattgtgat

SEQ ID NO: 198072 - DNA, 25 bp, probe
gccattactggtggatctcactgtt

SEQ ID NO: 198073 - DNA, 25 bp, probe
gccataaccatgagcactactctac

SEQ ID NO: 198074 - DNA, 25 bp, probe
gccatgaaccatatatcgacctaat

SEQ ID NO: 198075 - DNA, 25 bp, probe
gcctctaccattagtaagtctgatt

SEQ ID NO: 198076 - DNA, 25 bp, probe
gccattactcaattgataaacattt

SEQ ID NO: 198077 - DNA, 25 bp, probe
gccttggcatcatcgtatgcaaaat

SEQ ID NO: 198078 - DNA, 25 bp, probe
gccttggcatcatcgtatgcaaaat

SEQ ID NO: 198079 - DNA, 25 bp, probe
gccttgctcattgctatcagcatct

SEQ ID NO: 198080 - DNA, 25 bp, probe
gccttgtcatttgacaaccgaggag

SEQ ID NO: 198081 - DNA, 25 bp, probe
gccagtactcgggacagactaaggg

SEQ ID NO: 198082 - DNA, 25 bp, probe
gccgtttcgtggcgttgaagcgcgt

SEQ ID NO: 198083 - DNA, 25 bp, probe
gccagtctgtgctggggttgttggc

SEQ ID NO: 198084 - DNA, 25 bp, probe
gccagtctgtgctggggttgttggc

SEQ ID NO: 198085 - DNA, 25 bp, probe
gccagtttggagtggtcagctgggc

SEQ ID NO: 198086 - DNA, 25 bp, probe
gccagtttggagtggtcagctgggc

SEQ ID NO: 198087 - DNA, 25 bp, probe
gccagttatcgatgggatggatgga

SEQ ID NO: 198088 - DNA, 25 bp, probe
gccattttcgaaggagcagtgtgac

SEQ ID NO: 198089 - DNA, 25 bp, probe
gccattttactgcagcagtctgtga

SEQ ID NO: 198090 - DNA, 25 bp, probe
gcctcgcgaacgccgggctggatta

SEQ ID NO: 198091 - DNA, 25 bp, probe
gcgtgggaatccaggcagtggtttt

SEQ ID NO: 198092 - DNA, 25 bp, probe
gcacttggaattgtactgggttttc

SEQ ID NO: 198093 - DNA, 25 bp, probe
gcctcggagattgtggggggccggc

SEQ ID NO: 198094 - DNA, 25 bp, probe
gcctcggagattgtggggggccggc

SEQ ID NO: 198095 - DNA, 25 bp, probe
gcccgaagtcatcctgggtatgggc

SEQ ID NO: 198096 - DNA, 25 bp, probe
gccaggcacagtgccaggcagtagg

SEQ ID NO: 198097 - DNA, 25 bp, probe
gccagggcagtgctagtgagctggg

SEQ ID NO: 198098 - DNA, 25 bp, probe
gccagggagttctaagacgccagct

SEQ ID NO: 198099 - DNA, 25 bp, probe
gccagggacatacaaagcctcagtg

SEQ ID NO: 198100 - DNA, 25 bp, probe
gcccggaccagatacattccgtgta

SEQ ID NO: 198101 - DNA, 25 bp, probe
gcctaggaaagataccgaagattag

SEQ ID NO: 198102 - DNA, 25 bp, probe
gccctgggcaaacaccacaagtgtg

SEQ ID NO: 198103 - DNA, 25 bp, probe
gcaacgggaaactgtacatcgtgat

SEQ ID NO: 198104 - DNA, 25 bp, probe
gcctcggtggaagtggtcaacgtat

SEQ ID NO: 198105 - DNA, 25 bp, probe
gcctcggtggaagtggtcaacgtat

SEQ ID NO: 198106 - DNA, 25 bp, probe
gcctccaggtgtacgttaacctgac

SEQ ID NO: 198107 - DNA, 25 bp, probe
gccttctgggctactttataatcaa

SEQ ID NO: 198108 - DNA, 25 bp, probe
gccttggtcactactttagagccac

SEQ ID NO: 198109 - DNA, 25 bp, probe
gccattttcttccattgtgagacca

SEQ ID NO: 198110 - DNA, 25 bp, probe
gccatttcactatccgtggaggcag

SEQ ID NO: 198111 - DNA, 25 bp, probe
gccatttgaccatctcgggaagtga

SEQ ID NO: 198112 - DNA, 25 bp, probe
gccagtgtgacctggcgggagtgga

SEQ ID NO: 198113 - DNA, 25 bp, probe
gccagtgctaccagcaggtgggctg

SEQ ID NO: 198114 - DNA, 25 bp, probe
gccagtgctaccagcaggtgggctg

SEQ ID NO: 198115 - DNA, 25 bp, probe
gccagtgatgacggaggagtagccg

SEQ ID NO: 198116 - DNA, 25 bp, probe
gccagtgagttcgctaatgagctcg

SEQ ID NO: 198117 - DNA, 25 bp, probe
gccagtgagttcgctaatgagctcg

SEQ ID NO: 198118 - DNA, 25 bp, probe
gccagtggttccgcaagctggcgga

SEQ ID NO: 198119 - DNA, 25 bp, probe
gccagtggttccgcaagctggcgga

SEQ ID NO: 198120 - DNA, 25 bp, probe
gcacggagtccgtccagttgtcgga

SEQ ID NO: 198121 - DNA, 25 bp, probe
gcctgtaatcccagcactttgggag

SEQ ID NO: 198122 - DNA, 25 bp, probe
gcctatacacccagcactttggaag

SEQ ID NO: 198123 - DNA, 25 bp, probe
gccttaaccctaggcgtggaagaga

SEQ ID NO: 198124 - DNA, 25 bp, probe
gccttaaccctaggcgtggaagaga

SEQ ID NO: 198125 - DNA, 25 bp, probe
gcctgtaactctgagggggggcacc

SEQ ID NO: 198126 - DNA, 25 bp, probe
gccttagatccgggggagaggccca

SEQ ID NO: 198127 - DNA, 25 bp, probe
gccttagatccagaggagaggccca

SEQ ID NO: 198128 - DNA, 25 bp, probe
gcctgaataggagtagtaaagcctc

SEQ ID NO: 198129 - DNA, 25 bp, probe
gcctaaagcaagggtaccgccacat

SEQ ID NO: 198130 - DNA, 25 bp, probe
gcctgaaagtaaagacatgccccca

SEQ ID NO: 198131 - DNA, 25 bp, probe
gcctctaagataacagacatgcagc

SEQ ID NO: 198132 - DNA, 25 bp, probe
gccatgaagcagtacgaatgcagcc

SEQ ID NO: 198133 - DNA, 25 bp, probe
gccatggacatctcagagggccgct

SEQ ID NO: 198134 - DNA, 25 bp, probe
gccatggacatatggggccttggcg

SEQ ID NO: 198135 - DNA, 25 bp, probe
gccaggactgggctgcccaggagcc

SEQ ID NO: 198136 - DNA, 25 bp, probe
gccaggcctggaagtccaagggact

SEQ ID NO: 198137 - DNA, 25 bp, probe
gccaggtttgatttcagaaggaagt

SEQ ID NO: 198138 - DNA, 25 bp, probe
gccaggttttccctaagaagatgtt

SEQ ID NO: 198139 - DNA, 25 bp, probe
gccaggttttccctaagaagatgtt

SEQ ID NO: 198140 - DNA, 25 bp, probe
gccagggcttctgcctgaagatgga

SEQ ID NO: 198141 - DNA, 25 bp, probe
gccatgcactctatccgggagatgg

SEQ ID NO: 198142 - DNA, 25 bp, probe
gccatgcactctatccgggagatgg

SEQ ID NO: 198143 - DNA, 25 bp, probe
gccataatgctgctcgcaggaaatg

SEQ ID NO: 198144 - DNA, 25 bp, probe
gccatgaagcagttacagaaacaga

SEQ ID NO: 198145 - DNA, 25 bp, probe
gccatgtacatggtcaacaaccgta

SEQ ID NO: 198146 - DNA, 25 bp, probe
gccatgtacatggtcaacaaccgta

SEQ ID NO: 198147 - DNA, 25 bp, probe
gccttcaagcgtcagaccgagtgca

SEQ ID NO: 198148 - DNA, 25 bp, probe
gccttcaagcgtcagaccgagtgca

SEQ ID NO: 198149 - DNA, 25 bp, probe
gccttagatctctcgccgccaatgc

SEQ ID NO: 198150 - DNA, 25 bp, probe
gccttcaatcactggactccatggc

SEQ ID NO: 198151 - DNA, 25 bp, probe
gccattgagtccctgaactacagtg

SEQ ID NO: 198152 - DNA, 25 bp, probe
gccttggacatggaggcctgacagc

SEQ ID NO: 198153 - DNA, 25 bp, probe
gccttggaaatcaagcttaccccaa

SEQ ID NO: 198154 - DNA, 25 bp, probe
gccttggaaagaggttcccatccct

SEQ ID NO: 198155 - DNA, 25 bp, probe
gccttggataatgctgttgcctcat

SEQ ID NO: 198156 - DNA, 25 bp, probe
gccttggatgaacttgcttcacttc

SEQ ID NO: 198157 - DNA, 25 bp, probe
gccatgttggggcatcttgactatc

SEQ ID NO: 198158 - DNA, 25 bp, probe
gcctgttggctgccttactacattg

SEQ ID NO: 198159 - DNA, 25 bp, probe
gccttctacagctattactgaatta

SEQ ID NO: 198160 - DNA, 25 bp, probe
gcctttgaacttcattgcaaacacc

SEQ ID NO: 198161 - DNA, 25 bp, probe
gcctttcagacccagaatcaaatcc

SEQ ID NO: 198162 - DNA, 25 bp, probe
gccatttcgcctgactcataatatg

SEQ ID NO: 198163 - DNA, 25 bp, probe
gccatttctccttctctataaatag

SEQ ID NO: 198164 - DNA, 25 bp, probe
gcctcttactgttctctcagataat

SEQ ID NO: 198165 - DNA, 25 bp, probe
gccatttccagttatcgagccaata

SEQ ID NO: 198166 - DNA, 25 bp, probe
gccttctcggctcttgacacttagc

SEQ ID NO: 198167 - DNA, 25 bp, probe
gccttgctagagtaattgaagataa

SEQ ID NO: 198168 - DNA, 25 bp, probe
gccatgtgtaggagtctgggcacaa

SEQ ID NO: 198169 - DNA, 25 bp, probe
gccatgcctccgaaagagggccagg

SEQ ID NO: 198170 - DNA, 25 bp, probe
gccatgaccttgcataggggtaggc

SEQ ID NO: 198171 - DNA, 25 bp, probe
gccaggccaagccaagcagggggcc

SEQ ID NO: 198172 - DNA, 25 bp, probe
gccatgccacaaggtgggggaggcc

SEQ ID NO: 198173 - DNA, 25 bp, probe
gccagggagcatgtcggtggaggcc

SEQ ID NO: 198174 - DNA, 25 bp, probe
gccagggacatcatcaagggtgagg

SEQ ID NO: 198175 - DNA, 25 bp, probe
gccagtggctacatatgggtagcaa

SEQ ID NO: 198176 - DNA, 25 bp, probe
gccaggatggacatcttgtgtaata

SEQ ID NO: 198177 - DNA, 25 bp, probe
gccatggtggagacctgcgttatca

SEQ ID NO: 198178 - DNA, 25 bp, probe
gccattcatgtgtatcctggtatca

SEQ ID NO: 198179 - DNA, 25 bp, probe
gcgtctgcagtactgcactcaggac

SEQ ID NO: 198180 - DNA, 25 bp, probe
gccttagtgagcgagtcatggatta

SEQ ID NO: 198181 - DNA, 25 bp, probe
gccttcagtcctcagcaggactcag

SEQ ID NO: 198182 - DNA, 25 bp, probe
gccttcaccgctagggtactcggtg

SEQ ID NO: 198183 - DNA, 25 bp, probe
gcagttttccttgagatacctgttt

SEQ ID NO: 198184 - DNA, 25 bp, probe
gccctttgcccataatatcaacttt

SEQ ID NO: 198185 - DNA, 25 bp, probe
gacccttgtccacaattgtagtttc

SEQ ID NO: 198186 - DNA, 25 bp, probe
gcctcctttgtgcaaattaaatttg

SEQ ID NO: 198187 - DNA, 25 bp, probe
gccttcttgtctgacaacttcaaga

SEQ ID NO: 198188 - DNA, 25 bp, probe
gccatgtttgcctctaaattaagac

SEQ ID NO: 198189 - DNA, 25 bp, probe
gccaggatggcgaggaactcaataa

SEQ ID NO: 198190 - DNA, 25 bp, probe
gccggaggctttacacaccaaagaa

SEQ ID NO: 198191 - DNA, 25 bp, probe
gccagggacattttcaagacacaga

SEQ ID NO: 198192 - DNA, 25 bp, probe
gccttgggctgtgtcaacagcagcc

SEQ ID NO: 198193 - DNA, 25 bp, probe
gccatgttgagctacttcaagccgc

SEQ ID NO: 198194 - DNA, 25 bp, probe
gctctttggtttacaactcgaaagg

SEQ ID NO: 198195 - DNA, 25 bp, probe
gcctttggtatcagcaattttaaca

SEQ ID NO: 198196 - DNA, 25 bp, probe
gccttatctaacaaacatttttcca

SEQ ID NO: 198197 - DNA, 25 bp, probe
gccatctactggataaacttgcttc

SEQ ID NO: 198198 - DNA, 25 bp, probe
gccattactccaaagtgacttctat

SEQ ID NO: 198199 - DNA, 25 bp, probe
gccattatttcttcagttttctttt

SEQ ID NO: 198200 - DNA, 25 bp, probe
gcctattgatttaagctttcctgtt

SEQ ID NO: 198201 - DNA, 25 bp, probe
gcccattggtggatgtttttgttag

SEQ ID NO: 198202 - DNA, 25 bp, probe
gccatgcaatggtgtctgtgtaatt

SEQ ID NO: 198203 - DNA, 25 bp, probe
gccatgaaggcaggcatgctgattc

SEQ ID NO: 198204 - DNA, 25 bp, probe
gccaggtgcacagtgtgcatctgac

SEQ ID NO: 198205 - DNA, 25 bp, probe
gccatggctgcattgaatgatatac

SEQ ID NO: 198206 - DNA, 25 bp, probe
gccatgctggcggagaatcatagca

SEQ ID NO: 198207 - DNA, 25 bp, probe
gccatggccatggcaacatgctcag

SEQ ID NO: 198208 - DNA, 25 bp, probe
gccatgtacacctacatgctgccac

SEQ ID NO: 198209 - DNA, 25 bp, probe
gccattgacactgatcactcaggcc

SEQ ID NO: 198210 - DNA, 25 bp, probe
gccattacaccaatgcttcagatgg

SEQ ID NO: 198211 - DNA, 25 bp, probe
gccatgtcacaggcaagttcacagc

SEQ ID NO: 198212 - DNA, 25 bp, probe
gccatgccagagagatttcggtctc

SEQ ID NO: 198213 - DNA, 25 bp, probe
gccatccagcaagacttcgtgattt

SEQ ID NO: 198214 - DNA, 25 bp, probe
gccatccagcaagacttcgtgattt

SEQ ID NO: 198215 - DNA, 25 bp, probe
gccattcgtagctgaatatgtgatt

SEQ ID NO: 198216 - DNA, 25 bp, probe
gccaggcagtagggatccagatatt

SEQ ID NO: 198217 - DNA, 25 bp, probe
gccatgtcactagaagcgcagttta

SEQ ID NO: 198218 - DNA, 25 bp, probe
gcctctactacgtcaggcagaattc

SEQ ID NO: 198219 - DNA, 25 bp, probe
gcctcgaaactgtgacgatgaagtg

SEQ ID NO: 198220 - DNA, 25 bp, probe
gccatcaaatgaccaaacgaaagag

SEQ ID NO: 198221 - DNA, 25 bp, probe
gccatcaaatgaccaaacgaaagag

SEQ ID NO: 198222 - DNA, 25 bp, probe
gccatcaagtcactaagtcgcatca

SEQ ID NO: 198223 - DNA, 25 bp, probe
gccatccagtgagaagacctgctcc

SEQ ID NO: 198224 - DNA, 25 bp, probe
gccatgcctggagacatatcactca

SEQ ID NO: 198225 - DNA, 25 bp, probe
gcgatgccgggatcaaagtctgttc

SEQ ID NO: 198226 - DNA, 25 bp, probe
gccatgtggggatccacacctggtc

SEQ ID NO: 198227 - DNA, 25 bp, probe
gccttggggagtccacaggctcccc

SEQ ID NO: 198228 - DNA, 25 bp, probe
gccttagaggagcccacggctaaga

SEQ ID NO: 198229 - DNA, 25 bp, probe
gccttgagagtgacccaaagatgag

SEQ ID NO: 198230 - DNA, 25 bp, probe
gccttagttctttcatctagatgga

SEQ ID NO: 198231 - DNA, 25 bp, probe
gccctacccttctattcagggaaca

SEQ ID NO: 198232 - DNA, 25 bp, probe
gcccagtcccgtcattctgggctag

SEQ ID NO: 198233 - DNA, 25 bp, probe
gcccagggtcgtctttgtgtatggg

SEQ ID NO: 198234 - DNA, 25 bp, probe
gcccagggtcgtctttgtgtatggg

SEQ ID NO: 198235 - DNA, 25 bp, probe
gcctagggtcccatattgggtcaag

SEQ ID NO: 198236 - DNA, 25 bp, probe
gccttaagtcccagatcttgcttaa

SEQ ID NO: 198237 - DNA, 25 bp, probe
gccttcaaaaacattgcctccaaaa

SEQ ID NO: 198238 - DNA, 25 bp, probe
gccttcaaaaatattgcttccaaaa

SEQ ID NO: 198239 - DNA, 25 bp, probe
gccttcaaaaatgtgctgcctagaa

SEQ ID NO: 198240 - DNA, 25 bp, probe
gccattaaaatggaccggtataagg

SEQ ID NO: 198241 - DNA, 25 bp, probe
gccatttaactagcactttataagc

SEQ ID NO: 198242 - DNA, 25 bp, probe
gccatcttgcaaactacactttaaa

SEQ ID NO: 198243 - DNA, 25 bp, probe
gccatttggagagtacttctgccag

SEQ ID NO: 198244 - DNA, 25 bp, probe
gccttgtggagaaatcctgcccaga

SEQ ID NO: 198245 - DNA, 25 bp, probe
gccttgtgtgggcagttgccagctg

SEQ ID NO: 198246 - DNA, 25 bp, probe
gcctttgctgtacaggatcccaatg

SEQ ID NO: 198247 - DNA, 25 bp, probe
gccattatcatgtatgttggaccca

SEQ ID NO: 198248 - DNA, 25 bp, probe
gccattaataaaaggacgatctgcc

SEQ ID NO: 198249 - DNA, 25 bp, probe
gcctataatcctaagaacttctcca

SEQ ID NO: 198250 - DNA, 25 bp, probe
gcctccattcctagagggctaataa

SEQ ID NO: 198251 - DNA, 25 bp, probe
gcctttctcccaagctggtggataa

SEQ ID NO: 198252 - DNA, 25 bp, probe
gccattatcatcctcgtgcgaggga

SEQ ID NO: 198253 - DNA, 25 bp, probe
gccattatcatcctcgtgcgaggga

SEQ ID NO: 198254 - DNA, 25 bp, probe
gccatattcatcttgatcctaggga

SEQ ID NO: 198255 - DNA, 25 bp, probe
gccatattcatcttgatcctaggga

SEQ ID NO: 198256 - DNA, 25 bp, probe
gccatcaaatgcattgccaaggagg

SEQ ID NO: 198257 - DNA, 25 bp, probe
gccttcagcagcatgatgccaggct

SEQ ID NO: 198258 - DNA, 25 bp, probe
gccatgtggccagggacggcatgag

SEQ ID NO: 198259 - DNA, 25 bp, probe
gcctttccacgggcaggatgaggag

SEQ ID NO: 198260 - DNA, 25 bp, probe
gcctttccacgagcttgaggggaaa

SEQ ID NO: 198261 - DNA, 25 bp, probe
gccatgttgcccaggttggtgtgga

SEQ ID NO: 198262 - DNA, 25 bp, probe
gccatgtgttccaaggcattttagc

SEQ ID NO: 198263 - DNA, 25 bp, probe
gccatgtgttccaaggcattttagc

SEQ ID NO: 198264 - DNA, 25 bp, probe
gccatgtatatccgaggctttgggc

SEQ ID NO: 198265 - DNA, 25 bp, probe
gccttcttcgaggagttctggcgcc

SEQ ID NO: 198266 - DNA, 25 bp, probe
gccttctcggaggtgatcctggcag

SEQ ID NO: 198267 - DNA, 25 bp, probe
gccatttctgtgtttgacctacatg

SEQ ID NO: 198268 - DNA, 25 bp, probe
gcctccatttagctggccaatcagc

SEQ ID NO: 198269 - DNA, 25 bp, probe
gcctccatttagctggccaatcagc

SEQ ID NO: 198270 - DNA, 25 bp, probe
gccttcaaatacttggcacattccc

SEQ ID NO: 198271 - DNA, 25 bp, probe
gcctatggaatagtttcctgtcctg

SEQ ID NO: 198272 - DNA, 25 bp, probe
gccatcttagatttctttgttcctg

SEQ ID NO: 198273 - DNA, 25 bp, probe
gccatgctacagttagtcttgtccc

SEQ ID NO: 198274 - DNA, 25 bp, probe
gcctcatggggtggttctaggactg

SEQ ID NO: 198275 - DNA, 25 bp, probe
gccatgcctggtcgtttccaggagc

SEQ ID NO: 198276 - DNA, 25 bp, probe
gccatcactcttttttgtgaggagc

SEQ ID NO: 198277 - DNA, 25 bp, probe
gccatcagctctggctgtgtagggg

SEQ ID NO: 198278 - DNA, 25 bp, probe
gccatggtgcgctttgtagtgctgg

SEQ ID NO: 198279 - DNA, 25 bp, probe
gccattatggctgtgatagcctttc

SEQ ID NO: 198280 - DNA, 25 bp, probe
gccatctgatggactggtgtcctat

SEQ ID NO: 198281 - DNA, 25 bp, probe
gccatcgagctgagtgtgatcatcc

SEQ ID NO: 198282 - DNA, 25 bp, probe
gccatctggtggctggacccagagc

SEQ ID NO: 198283 - DNA, 25 bp, probe
gccattcgtgaggtggactcctcag

SEQ ID NO: 198284 - DNA, 25 bp, probe
gccattgcagtgattaatcccaagg

SEQ ID NO: 198285 - DNA, 25 bp, probe
gcctccaggttttacatcccagagg

SEQ ID NO: 198286 - DNA, 25 bp, probe
gccccacgttttgtgaccactgtgg

SEQ ID NO: 198287 - DNA, 25 bp, probe
gccccacttttgagtacttgcagag

SEQ ID NO: 198288 - DNA, 25 bp, probe
gccatctccttccttttaacggagg

SEQ ID NO: 198289 - DNA, 25 bp, probe
gctccttgctggtttttaacttggg

SEQ ID NO: 198290 - DNA, 25 bp, probe
gctcccgtggaagattaaagggctg

SEQ ID NO: 198291 - DNA, 25 bp, probe
gcctgccgtggcaaggactaagggc

SEQ ID NO: 198292 - DNA, 25 bp, probe
gccatctcttggagtgacaaagctg

SEQ ID NO: 198293 - DNA, 25 bp, probe
gccatcgctggtgtgctaacaattg

SEQ ID NO: 198294 - DNA, 25 bp, probe
gccattcttgtcctaaagcaattga

SEQ ID NO: 198295 - DNA, 25 bp, probe
gccattcttttaaatatttgtgact

SEQ ID NO: 198296 - DNA, 25 bp, probe
gcctttcgtgaacacattcttggta

SEQ ID NO: 198297 - DNA, 25 bp, probe
gcctcttgtgtaactaatttgtggt

SEQ ID NO: 198298 - DNA, 25 bp, probe
gccgcatttatcatcatagtttttt

SEQ ID NO: 198299 - DNA, 25 bp, probe
gccgcatttatcatcatagtttttt

SEQ ID NO: 198300 - DNA, 25 bp, probe
gccttttctccaataatgtgccttt

SEQ ID NO: 198301 - DNA, 25 bp, probe
gccttctgggaaatgtagtcttttg

SEQ ID NO: 198302 - DNA, 25 bp, probe
gccttcagggacaaatagctcgatt

SEQ ID NO: 198303 - DNA, 25 bp, probe
gcctttatggaccacatacggatct

SEQ ID NO: 198304 - DNA, 25 bp, probe
gccattaaggcattcactaaggtta

SEQ ID NO: 198305 - DNA, 25 bp, probe
gccatcaagacgctcaagtcgggct

SEQ ID NO: 198306 - DNA, 25 bp, probe
gccatacagacccgaagtgaggagt

SEQ ID NO: 198307 - DNA, 25 bp, probe
gccatcccatctgagaacaaggaga

SEQ ID NO: 198308 - DNA, 25 bp, probe
gccatcccatctgagaacaaggaga

SEQ ID NO: 198309 - DNA, 25 bp, probe
gcctcaccacggaccaaagggagtc

SEQ ID NO: 198310 - DNA, 25 bp, probe
gcctcaggactgcaccttagggcag

SEQ ID NO: 198311 - DNA, 25 bp, probe
gcctctctgtctgaacttgggcaag

SEQ ID NO: 198312 - DNA, 25 bp, probe
gcctcggtgatgcacaccatggtca

SEQ ID NO: 198313 - DNA, 25 bp, probe
gccatgcagaggtgacaacagggac

SEQ ID NO: 198314 - DNA, 25 bp, probe
gccatgcagaggtgacaacagggac

SEQ ID NO: 198315 - DNA, 25 bp, probe
gccatggaggtggtcaacagcggct

SEQ ID NO: 198316 - DNA, 25 bp, probe
gccatggagacggtacagctgagga

SEQ ID NO: 198317 - DNA, 25 bp, probe
gccatcggcaagctctactatgaga

SEQ ID NO: 198318 - DNA, 25 bp, probe
gccatcaatgaccccttcattgacc

SEQ ID NO: 198319 - DNA, 25 bp, probe
gcctgcaggatgcctactgcacatt

SEQ ID NO: 198320 - DNA, 25 bp, probe
gcctcaagctttacacagctgtcct

SEQ ID NO: 198321 - DNA, 25 bp, probe
gcctcaagctttacacagctgtcct

SEQ ID NO: 198322 - DNA, 25 bp, probe
gccatgtacttgaactactgtcgtg

SEQ ID NO: 198323 - DNA, 25 bp, probe
gccgtcagccgaactttgttatgga

SEQ ID NO: 198324 - DNA, 25 bp, probe
gccttcagacgaccttttgtatgat

SEQ ID NO: 198325 - DNA, 25 bp, probe
gccatgtagaccacgctttaaagaa

SEQ ID NO: 198326 - DNA, 25 bp, probe
gccatgtagaccacgctttaaagaa

SEQ ID NO: 198327 - DNA, 25 bp, probe
gccttaacctccctattcagaaagc

SEQ ID NO: 198328 - DNA, 25 bp, probe
gccttatacatctggtcttacaaag

SEQ ID NO: 198329 - DNA, 25 bp, probe
gccttgtaattcgacagctctacag

SEQ ID NO: 198330 - DNA, 25 bp, probe
gccttgtaattcgacagctctacag

SEQ ID NO: 198331 - DNA, 25 bp, probe
gccttgtgaagtcagcacctatgcc

SEQ ID NO: 198332 - DNA, 25 bp, probe
gcctatgtggaggccaaccagatgc

SEQ ID NO: 198333 - DNA, 25 bp, probe
gccatatggagcatctacccagact

SEQ ID NO: 198334 - DNA, 25 bp, probe
gccatagagagatccttccagaata

SEQ ID NO: 198335 - DNA, 25 bp, probe
gccatccagagaccctgtttaagag

SEQ ID NO: 198336 - DNA, 25 bp, probe
gccatgcctatcaccatttgtatag

SEQ ID NO: 198337 - DNA, 25 bp, probe
gccatagcccatgccttttgagggc

SEQ ID NO: 198338 - DNA, 25 bp, probe
gcctttgccattggcttctgtgggc

SEQ ID NO: 198339 - DNA, 25 bp, probe
gccatttccattgttgagtgaagcg

SEQ ID NO: 198340 - DNA, 25 bp, probe
gccatttccattgttgagtgaagcg

SEQ ID NO: 198341 - DNA, 25 bp, probe
gccatgtcccttgtcagcaatgagg

SEQ ID NO: 198342 - DNA, 25 bp, probe
gccttgcctcctttaagatgtggag

SEQ ID NO: 198343 - DNA, 25 bp, probe
gccttgcctcctttaagatgtggag

SEQ ID NO: 198344 - DNA, 25 bp, probe
gcctcagcctcccaagtatttggga

SEQ ID NO: 198345 - DNA, 25 bp, probe
gctggccagtcagtcgaaattttgg

SEQ ID NO: 198346 - DNA, 25 bp, probe
gcgggagaagcttacctttctggag

SEQ ID NO: 198347 - DNA, 25 bp, probe
gcgaaccatatttacctatacggag

SEQ ID NO: 198348 - DNA, 25 bp, probe
gctgtacccagtttctaaactggag

SEQ ID NO: 198349 - DNA, 25 bp, probe
gctgtacccagtttctaaactggag

SEQ ID NO: 198350 - DNA, 25 bp, probe
gcctatcgggcttaccagaactggg

SEQ ID NO: 198351 - DNA, 25 bp, probe
gcctatcgggcttaccagaactggg

SEQ ID NO: 198352 - DNA, 25 bp, probe
gcctacgaggacgtggcgggtggag

SEQ ID NO: 198353 - DNA, 25 bp, probe
gccatactgagggccatgggtgggg

SEQ ID NO: 198354 - DNA, 25 bp, probe
gccatcaccgagcgcttgatgtgcg

SEQ ID NO: 198355 - DNA, 25 bp, probe
gccatcatcgcgccaaattttgcgc

SEQ ID NO: 198356 - DNA, 25 bp, probe
gcctctctggcaggaactctgatgc

SEQ ID NO: 198357 - DNA, 25 bp, probe
gccatctgtctgccgaaggctagca

SEQ ID NO: 198358 - DNA, 25 bp, probe
gccatgctgactgagtgactggaga

SEQ ID NO: 198359 - DNA, 25 bp, probe
gccatgtgcctaactgagaggaacc

SEQ ID NO: 198360 - DNA, 25 bp, probe
gccatctgctactactacatggcca

SEQ ID NO: 198361 - DNA, 25 bp, probe
gccttcaactggaacgaccagcgct

SEQ ID NO: 198362 - DNA, 25 bp, probe
gccttaatttgaaagcagacgacgg

SEQ ID NO: 198363 - DNA, 25 bp, probe
gccattagatctagacaagaacata

SEQ ID NO: 198364 - DNA, 25 bp, probe
gccattcaaccaaagcagacatcta

SEQ ID NO: 198365 - DNA, 25 bp, probe
gccatgacaagaacaaagccactga

SEQ ID NO: 198366 - DNA, 25 bp, probe
gccatgctggaaaataatactgctg

SEQ ID NO: 198367 - DNA, 25 bp, probe
gccatctggaaaagcatcttcctgt

SEQ ID NO: 198368 - DNA, 25 bp, probe
gccatctggaaaagcatcttcctgt

SEQ ID NO: 198369 - DNA, 25 bp, probe
gccatctggcattgaagctgcttat

SEQ ID NO: 198370 - DNA, 25 bp, probe
gccatcggcttggagcgctatgagg

SEQ ID NO: 198371 - DNA, 25 bp, probe
gccatctctgttctgcaggtgagag

SEQ ID NO: 198372 - DNA, 25 bp, probe
gccttctggtttggtgtcaacagct

SEQ ID NO: 198373 - DNA, 25 bp, probe
gccttcgaatagtgctgtccatagc

SEQ ID NO: 198374 - DNA, 25 bp, probe
gccttcgaatccaggttcaagccat

SEQ ID NO: 198375 - DNA, 25 bp, probe
gccttcgaatccaggttcaagccat

SEQ ID NO: 198376 - DNA, 25 bp, probe
gccttcgaatccaggttcaagccat

SEQ ID NO: 198377 - DNA, 25 bp, probe
gcctcggaatccaaggtgtagggcc

SEQ ID NO: 198378 - DNA, 25 bp, probe
gcctcgaacttcagtgtgatcgggg

SEQ ID NO: 198379 - DNA, 25 bp, probe
gcctcgaacttcagtgtgatcgggg

SEQ ID NO: 198380 - DNA, 25 bp, probe
gccttgttttcaggtggtctggagg

SEQ ID NO: 198381 - DNA, 25 bp, probe
gcctcccttcgatggggaggacgag

SEQ ID NO: 198382 - DNA, 25 bp, probe
gcctccggaccattccggagcagcc

SEQ ID NO: 198383 - DNA, 25 bp, probe
gccttaggactgttacagctgagca

SEQ ID NO: 198384 - DNA, 25 bp, probe
gccatttgtacatttcatcactcag

SEQ ID NO: 198385 - DNA, 25 bp, probe
gccatttgtacatttcatcactcag

SEQ ID NO: 198386 - DNA, 25 bp, probe
gccttagctccatttatagcacctc

SEQ ID NO: 198387 - DNA, 25 bp, probe
gcctttggccattgttgtcagcctg

SEQ ID NO: 198388 - DNA, 25 bp, probe
gcctctttccaagttgtatggtgtg

SEQ ID NO: 198389 - DNA, 25 bp, probe
gcctctttccaagttgtatggtgtg

SEQ ID NO: 198390 - DNA, 25 bp, probe
gcctcttcttcatgttcattgggtt

SEQ ID NO: 198391 - DNA, 25 bp, probe
gcctcttcttcatgttcattgggtt

SEQ ID NO: 198392 - DNA, 25 bp, probe
gccttcatttgtgttctttagcttt

SEQ ID NO: 198393 - DNA, 25 bp, probe
gcctaacagggctgtgtttatttat

SEQ ID NO: 198394 - DNA, 25 bp, probe
gcctaaagtggctatagttactgat

SEQ ID NO: 198395 - DNA, 25 bp, probe
gcctaaagtggctatagttactgat

SEQ ID NO: 198396 - DNA, 25 bp, probe
gcctcacaagtgcgaagtctggtaa

SEQ ID NO: 198397 - DNA, 25 bp, probe
gcctcacaagtgcgaagtctggtaa

SEQ ID NO: 198398 - DNA, 25 bp, probe
gccattgaggagcagtggtcgggaa

SEQ ID NO: 198399 - DNA, 25 bp, probe
gccattgaggagcagtggtcgggaa

SEQ ID NO: 198400 - DNA, 25 bp, probe
gccattgcttggggggattatggaa

SEQ ID NO: 198401 - DNA, 25 bp, probe
gccatttctggcttatggtttggca

SEQ ID NO: 198402 - DNA, 25 bp, probe
gcctgttgtgactttgcttttgggg

SEQ ID NO: 198403 - DNA, 25 bp, probe
gcctgttgtgactttgcttttgggg

SEQ ID NO: 198404 - DNA, 25 bp, probe
gcctgacttacaatatgcctgttat

SEQ ID NO: 198405 - DNA, 25 bp, probe
gcctgcaagaaaagtgccgatttac

SEQ ID NO: 198406 - DNA, 25 bp, probe
gcctccaagtatactctcaaatgta

SEQ ID NO: 198407 - DNA, 25 bp, probe
gccataagaatatcttcaacttgct

SEQ ID NO: 198408 - DNA, 25 bp, probe
gccatagaaagtcttgcagaccgag

SEQ ID NO: 198409 - DNA, 25 bp, probe
gccatagcaggagttattaaccagc

SEQ ID NO: 198410 - DNA, 25 bp, probe
gccataaggcaagatcctacccgga

SEQ ID NO: 198411 - DNA, 25 bp, probe
gcctcatgaaccagacgtaccgaga

SEQ ID NO: 198412 - DNA, 25 bp, probe
gcctcatgaaccagacgtaccgaga

SEQ ID NO: 198413 - DNA, 25 bp, probe
gccttaacacagctctatacctaga

SEQ ID NO: 198414 - DNA, 25 bp, probe
gccttcaagaacttcttttctaggc

SEQ ID NO: 198415 - DNA, 25 bp, probe
gccttcaagaacttcttttctaggc

SEQ ID NO: 198416 - DNA, 25 bp, probe
gcctcataaaactctgcaaatctaa

SEQ ID NO: 198417 - DNA, 25 bp, probe
gcctcataaaactctgcaaatctaa

SEQ ID NO: 198418 - DNA, 25 bp, probe
tcctaagtgaaaactggatatccca

SEQ ID NO: 198419 - DNA, 25 bp, probe
gccttgcgtacctcatgaaatacca

SEQ ID NO: 198420 - DNA, 25 bp, probe
gccttcttatccctagatgaaaaac

SEQ ID NO: 198421 - DNA, 25 bp, probe
gccttgttgactccaaagccaaaac

SEQ ID NO: 198422 - DNA, 25 bp, probe
gccttgactgactcaaagcaaaaaa

SEQ ID NO: 198423 - DNA, 25 bp, probe
gcctaacgaccacaagactatcaag

SEQ ID NO: 198424 - DNA, 25 bp, probe
gcctaacagaacaggaggtatcaaa

SEQ ID NO: 198425 - DNA, 25 bp, probe
gccataacagcatctcggaggccaa

SEQ ID NO: 198426 - DNA, 25 bp, probe
gccatcaagaaagtattgcaggaca

SEQ ID NO: 198427 - DNA, 25 bp, probe
gccatcgagaacaaggtggagagca

SEQ ID NO: 198428 - DNA, 25 bp, probe
gccatcccagcccagtgtggatgaa

SEQ ID NO: 198429 - DNA, 25 bp, probe
gccatcccagcccagtgtggatgaa

SEQ ID NO: 198430 - DNA, 25 bp, probe
gccatcctgcagcgagatgaggatg

SEQ ID NO: 198431 - DNA, 25 bp, probe
gccatctgcaggccaagaagaagtt

SEQ ID NO: 198432 - DNA, 25 bp, probe
gcctatgcccgtgaagaatttaccc

SEQ ID NO: 198433 - DNA, 25 bp, probe
gcctatgcccgtgaagaatttaccc

SEQ ID NO: 198434 - DNA, 25 bp, probe
gccattccgagtgaagaaaaccacc

SEQ ID NO: 198435 - DNA, 25 bp, probe
gccattccgagtgaagaaaaccacc

SEQ ID NO: 198436 - DNA, 25 bp, probe
gccatacccagggatgagcaacccc

SEQ ID NO: 198437 - DNA, 25 bp, probe
gccattggccatggccatggcaaca

SEQ ID NO: 198438 - DNA, 25 bp, probe
gccttgcttctaccatgagcagaga

SEQ ID NO: 198439 - DNA, 25 bp, probe
gcctcagcttgcaaccatggtaacg

SEQ ID NO: 198440 - DNA, 25 bp, probe
gcctccctctaccacgtatatgagg

SEQ ID NO: 198441 - DNA, 25 bp, probe
gcctccctctaccacgtatatgagg

SEQ ID NO: 198442 - DNA, 25 bp, probe
gcctcccagctacatcctgggatgg

SEQ ID NO: 198443 - DNA, 25 bp, probe
gccttgacagttcatcttcaggtgt

SEQ ID NO: 198444 - DNA, 25 bp, probe
gccattggcaattccatgttccagg

SEQ ID NO: 198445 - DNA, 25 bp, probe
gcctgctccaacggagttccagagt

SEQ ID NO: 198446 - DNA, 25 bp, probe
gccatcttcaaggtgggagacgact

SEQ ID NO: 198447 - DNA, 25 bp, probe
gccatctacgaggagaaggaggcct

SEQ ID NO: 198448 - DNA, 25 bp, probe
gccattgagtagcaaagccacgctc

SEQ ID NO: 198449 - DNA, 25 bp, probe
gcctacagtcagaaaaccatcgcct

SEQ ID NO: 198450 - DNA, 25 bp, probe
gcctactgacaaaacctattcttca

SEQ ID NO: 198451 - DNA, 25 bp, probe
gccttctagattcactgtcttttga

SEQ ID NO: 198452 - DNA, 25 bp, probe
gccttctcctatcacggatttgtac

SEQ ID NO: 198453 - DNA, 25 bp, probe
gccttcccttttgagatagtgtaga

SEQ ID NO: 198454 - DNA, 25 bp, probe
gccatagctgccttttaggatgagg

SEQ ID NO: 198455 - DNA, 25 bp, probe
gccatagcccagtacacaggctgtg

SEQ ID NO: 198456 - DNA, 25 bp, probe
gccatacgtattacagcagaagtgc

SEQ ID NO: 198457 - DNA, 25 bp, probe
gccatcagtgtggtcacagcagaag

SEQ ID NO: 198458 - DNA, 25 bp, probe
gcctccagctgtgcctgagaggtac

SEQ ID NO: 198459 - DNA, 25 bp, probe
gcctgtcttgctgtctagggatgga

SEQ ID NO: 198460 - DNA, 25 bp, probe
gccttctctcatgatctaagtcttg

SEQ ID NO: 198461 - DNA, 25 bp, probe
gccttctctcatgatctaagtcttg

SEQ ID NO: 198462 - DNA, 25 bp, probe
gccatttctcagctataaattgcgc

SEQ ID NO: 198463 - DNA, 25 bp, probe
gccattcttcatggtcaggaaggcc

SEQ ID NO: 198464 - DNA, 25 bp, probe
gccattttcagggatggaaagcttg

SEQ ID NO: 198465 - DNA, 25 bp, probe
gccatcatttgtggcaaagaatgag

SEQ ID NO: 198466 - DNA, 25 bp, probe
gccatcaacatcacaaataatgaaa

SEQ ID NO: 198467 - DNA, 25 bp, probe
gccatcaacatcacaaataatgaaa

SEQ ID NO: 198468 - DNA, 25 bp, probe
gcctaggcatctctttggctgaaca

SEQ ID NO: 198469 - DNA, 25 bp, probe
gcctaggcatctctttggctgaaca

SEQ ID NO: 198470 - DNA, 25 bp, probe
gccattgagatccgctctgtggaga

SEQ ID NO: 198471 - DNA, 25 bp, probe
gccattgcgcctctggatggtgagg

SEQ ID NO: 198472 - DNA, 25 bp, probe
gccttgccctgcagggatggggctc

SEQ ID NO: 198473 - DNA, 25 bp, probe
gccccacctgcaggggcttagtgtc

SEQ ID NO: 198474 - DNA, 25 bp, probe
gcctccacccatgtgtcataagagt

SEQ ID NO: 198475 - DNA, 25 bp, probe
gccttctccctgaactcagacaggt

SEQ ID NO: 198476 - DNA, 25 bp, probe
gcctttggcctttctgaacagtgtc

SEQ ID NO: 198477 - DNA, 25 bp, probe
gctctatttggctcctaacagttgc

SEQ ID NO: 198478 - DNA, 25 bp, probe
gctctatttggctcctaacagttgc

SEQ ID NO: 198479 - DNA, 25 bp, probe
gccttttggctataaccagtctcag

SEQ ID NO: 198480 - DNA, 25 bp, probe
gccttcggcgccttaaggatgttct

SEQ ID NO: 198481 - DNA, 25 bp, probe
gcctttgggccaggaggaatctgtt

SEQ ID NO: 198482 - DNA, 25 bp, probe
gcctttggatcactgggggcactga

SEQ ID NO: 198483 - DNA, 25 bp, probe
gcctttggatcactgggggcactga

SEQ ID NO: 198484 - DNA, 25 bp, probe
gccttgtggcaactggcggagcaga

SEQ ID NO: 198485 - DNA, 25 bp, probe
gccttgtggcaactggcggagcaga

SEQ ID NO: 198486 - DNA, 25 bp, probe
gccttgtccagacgaagtgacgttg

SEQ ID NO: 198487 - DNA, 25 bp, probe
gccttctccatatgaagtcagaggt

SEQ ID NO: 198488 - DNA, 25 bp, probe
gccttcgccatgtacatggtcaaca

SEQ ID NO: 198489 - DNA, 25 bp, probe
gcctctcccaacttggacaaacggc

SEQ ID NO: 198490 - DNA, 25 bp, probe
gcctctttgagtgcggacaagaagg

SEQ ID NO: 198491 - DNA, 25 bp, probe
gcctctttttcccggcaatgatgtc

SEQ ID NO: 198492 - DNA, 25 bp, probe
gcctctttttcccggcaatgatgtc

SEQ ID NO: 198493 - DNA, 25 bp, probe
gccttggtttcactggggagagcta

SEQ ID NO: 198494 - DNA, 25 bp, probe
gcctttcttacatggggaccaacat

SEQ ID NO: 198495 - DNA, 25 bp, probe
gccttgtttgaccgggtgtacacac

SEQ ID NO: 198496 - DNA, 25 bp, probe
gccttgtttgaccgggtgtacacac

SEQ ID NO: 198497 - DNA, 25 bp, probe
gccttgtttgaccgagtctacactc

SEQ ID NO: 198498 - DNA, 25 bp, probe
gccttggactagcaatttatgcttc

SEQ ID NO: 198499 - DNA, 25 bp, probe
gccttagcactacggacattttggg

SEQ ID NO: 198500 - DNA, 25 bp, probe
gccttagcactggagagctttttgc

SEQ ID NO: 198501 - DNA, 25 bp, probe
gccttagactcttgccatattttca

SEQ ID NO: 198502 - DNA, 25 bp, probe
gccttgaattaaccatgcatttaat

SEQ ID NO: 198503 - DNA, 25 bp, probe
gcctaggatttgtacagcatttggt

SEQ ID NO: 198504 - DNA, 25 bp, probe
gccatagctgttgtgctcagcttct

SEQ ID NO: 198505 - DNA, 25 bp, probe
gcctatgtggctgatggcaccatgt

SEQ ID NO: 198506 - DNA, 25 bp, probe
gcctatgtggctgatggcaccatgt

SEQ ID NO: 198507 - DNA, 25 bp, probe
gccttgctgacaacttgcacaatgt

SEQ ID NO: 198508 - DNA, 25 bp, probe
gccttcctcattttcaacatgttct

SEQ ID NO: 198509 - DNA, 25 bp, probe
gcctgagcttgcatttgaaattgac

SEQ ID NO: 198510 - DNA, 25 bp, probe
gcctgagcttgcatttgaaattgac

SEQ ID NO: 198511 - DNA, 25 bp, probe
gcctactagagtctgaacagctgta

SEQ ID NO: 198512 - DNA, 25 bp, probe
gcctaccaggtgaagccacagtgga

SEQ ID NO: 198513 - DNA, 25 bp, probe
gcctagggagtttccaaatggacct

SEQ ID NO: 198514 - DNA, 25 bp, probe
gcctagtgtattcaacagaaggact

SEQ ID NO: 198515 - DNA, 25 bp, probe
gcctagtgtattcaacagaaggact

SEQ ID NO: 198516 - DNA, 25 bp, probe
gcctcaatgctaactaaaaagctgc

SEQ ID NO: 198517 - DNA, 25 bp, probe
gcctttgcaatcatgaacaacaggt

SEQ ID NO: 198518 - DNA, 25 bp, probe
gccttaactcatagacatcaatcag

SEQ ID NO: 198519 - DNA, 25 bp, probe
gccataaacacaattgcatacatag

SEQ ID NO: 198520 - DNA, 25 bp, probe
gccatacatatcattgcatgaacta

SEQ ID NO: 198521 - DNA, 25 bp, probe
gcctacatacagctattcacatcat

SEQ ID NO: 198522 - DNA, 25 bp, probe
gccattgccacgaagatggcgcaat

SEQ ID NO: 198523 - DNA, 25 bp, probe
gccttgccattcattggcaggatga

SEQ ID NO: 198524 - DNA, 25 bp, probe
gccttcacttctacaggaggggaag

SEQ ID NO: 198525 - DNA, 25 bp, probe
gcctcatttcttacagacggggaaa

SEQ ID NO: 198526 - DNA, 25 bp, probe
gcctctttcgtcacagcggttgagg

SEQ ID NO: 198527 - DNA, 25 bp, probe
gcctctttcgtcacagcggttgagg

SEQ ID NO: 198528 - DNA, 25 bp, probe
gcactttgggacaccgaggtgggca

SEQ ID NO: 198529 - DNA, 25 bp, probe
gcctgagacaaaacccgaggggaca

SEQ ID NO: 198530 - DNA, 25 bp, probe
gctctatgaaaagctgccccagggc

SEQ ID NO: 198531 - DNA, 25 bp, probe
gcctgagaaacggctaccacatcca

SEQ ID NO: 198532 - DNA, 25 bp, probe
gcctggataatgcttccgccttcca

SEQ ID NO: 198533 - DNA, 25 bp, probe
gccgtgaaagatgtcccaggatcca

SEQ ID NO: 198534 - DNA, 25 bp, probe
gccttgacaagaaccatcaagttcc

SEQ ID NO: 198535 - DNA, 25 bp, probe
gccttgacatttaatcacaggttac

SEQ ID NO: 198536 - DNA, 25 bp, probe
gccattgacctgtttacacgttcat

SEQ ID NO: 198537 - DNA, 25 bp, probe
gccattaccattttccatgggacta

SEQ ID NO: 198538 - DNA, 25 bp, probe
gcctgtccctgttgtaaggaagcca

SEQ ID NO: 198539 - DNA, 25 bp, probe
gcctgaccctaaaaagaaagccaca

SEQ ID NO: 198540 - DNA, 25 bp, probe
gcctgaccctaaaaagaaagccaca

SEQ ID NO: 198541 - DNA, 25 bp, probe
gccttactcttatcttaaagccagc

SEQ ID NO: 198542 - DNA, 25 bp, probe
gccttacctggacatgtatcagatg

SEQ ID NO: 198543 - DNA, 25 bp, probe
gccttcccgagaggcgtgatgcagg

SEQ ID NO: 198544 - DNA, 25 bp, probe
gccttacacaaaggggatcataaag

SEQ ID NO: 198545 - DNA, 25 bp, probe
gccttgaaaaaactggagtcagaag

SEQ ID NO: 198546 - DNA, 25 bp, probe
gccttgctatttcagtgggtataat

SEQ ID NO: 198547 - DNA, 25 bp, probe
gccttgctatttcagtgggtataat

SEQ ID NO: 198548 - DNA, 25 bp, probe
gcctaggtttcaagaggccttataa

SEQ ID NO: 198549 - DNA, 25 bp, probe
gccgagggttcacgatgaccgtgta

SEQ ID NO: 198550 - DNA, 25 bp, probe
gcctgggcgttaacagcctttggag

SEQ ID NO: 198551 - DNA, 25 bp, probe
gccttgggtggaccaggcttccaag

SEQ ID NO: 198552 - DNA, 25 bp, probe
gccttcggggtgaaggtccacacgt

SEQ ID NO: 198553 - DNA, 25 bp, probe
gccttcgggaagaggcttcctgggc

SEQ ID NO: 198554 - DNA, 25 bp, probe
gccttcgggaagaggcttcctgggc

SEQ ID NO: 198555 - DNA, 25 bp, probe
gccttagggaagctggcctgagagg

SEQ ID NO: 198556 - DNA, 25 bp, probe
gccttaggttctgatgacctagtga

SEQ ID NO: 198557 - DNA, 25 bp, probe
gcctttgttattgcatacattatgg

SEQ ID NO: 198558 - DNA, 25 bp, probe
gcctgagcatttattaagcttcttg

SEQ ID NO: 198559 - DNA, 25 bp, probe
gccatatcatccacatcgactttgg

SEQ ID NO: 198560 - DNA, 25 bp, probe
gccatatatcatctacttcttgttg

SEQ ID NO: 198561 - DNA, 25 bp, probe
gccattatctctttctttgtgtgtt

SEQ ID NO: 198562 - DNA, 25 bp, probe
gcctttctgtaaaattggatgccta

SEQ ID NO: 198563 - DNA, 25 bp, probe
gcctatacgaaatatggttcctttt

SEQ ID NO: 198564 - DNA, 25 bp, probe
gcctttcagaaattgccagtgtcct

SEQ ID NO: 198565 - DNA, 25 bp, probe
gccttgtgcagacaatgctgtgctt

SEQ ID NO: 198566 - DNA, 25 bp, probe
gccattgatgaaggcaagctggtgg

SEQ ID NO: 198567 - DNA, 25 bp, probe
gccttgtgattaaatgtgagtgagc

SEQ ID NO: 198568 - DNA, 25 bp, probe
gccttgtgattaaatgtgagtgagc

SEQ ID NO: 198569 - DNA, 25 bp, probe
gccttgtcatgagcctgatgaatgg

SEQ ID NO: 198570 - DNA, 25 bp, probe
gccattgccatgaaccggcagctgg

SEQ ID NO: 198571 - DNA, 25 bp, probe
gccattgctctgagtcagaagctgg

SEQ ID NO: 198572 - DNA, 25 bp, probe
gccttcatctgcagtaacgggggga

SEQ ID NO: 198573 - DNA, 25 bp, probe
gcctcatcattgctgtcttcgtggc

SEQ ID NO: 198574 - DNA, 25 bp, probe
acattctagttgttcagtgtaacct

SEQ ID NO: 198575 - DNA, 25 bp, probe
gcctacttgtaatttctaactcctt

SEQ ID NO: 198576 - DNA, 25 bp, probe
gccattctgttagattgctaactat

SEQ ID NO: 198577 - DNA, 25 bp, probe
gcctttttaggcactagagatatag

SEQ ID NO: 198578 - DNA, 25 bp, probe
gccttcttattgcttttatgatata

SEQ ID NO: 198579 - DNA, 25 bp, probe
gccattcccactcttttacagaatc

SEQ ID NO: 198580 - DNA, 25 bp, probe
gccattaccacacacttgtacagat

SEQ ID NO: 198581 - DNA, 25 bp, probe
gccattccgaaatctgtgtaatcaa

SEQ ID NO: 198582 - DNA, 25 bp, probe
gccattccgaaatctgtgtaatcaa

SEQ ID NO: 198583 - DNA, 25 bp, probe
gccttgccacattaaattgataaca

SEQ ID NO: 198584 - DNA, 25 bp, probe
gccttgtctatggcctttatcaaca

SEQ ID NO: 198585 - DNA, 25 bp, probe
gccttgtctatggcctttatcaaca

SEQ ID NO: 198586 - DNA, 25 bp, probe
gccttgcatcaagggctttatcaaa

SEQ ID NO: 198587 - DNA, 25 bp, probe
gccattgccaacagctgcatgaacc

SEQ ID NO: 198588 - DNA, 25 bp, probe
gccattctccaaagctgctgatgtc

SEQ ID NO: 198589 - DNA, 25 bp, probe
gccttcaacagaagctgtgctgcca

SEQ ID NO: 198590 - DNA, 25 bp, probe
gccttcagcacaccaatggtgtcaa

SEQ ID NO: 198591 - DNA, 25 bp, probe
gccttcgcaacaaagaggtcaaggg

SEQ ID NO: 198592 - DNA, 25 bp, probe
gcctaaagactggagaatctggggg

SEQ ID NO: 198593 - DNA, 25 bp, probe
gcctcaatgatgactgtggacctgc

SEQ ID NO: 198594 - DNA, 25 bp, probe
gcctaatctggcctgtggcgttaat

SEQ ID NO: 198595 - DNA, 25 bp, probe
gccattctgctggtcttggcagtgt

SEQ ID NO: 198596 - DNA, 25 bp, probe
gccttgctgtggatggagagcgtgc

SEQ ID NO: 198597 - DNA, 25 bp, probe
gccttgctgtggatggagagcgtgc

SEQ ID NO: 198598 - DNA, 25 bp, probe
gcctcggggttgcagggctgcaaag

SEQ ID NO: 198599 - DNA, 25 bp, probe
gcctcagggtgaagggggtcccttg

SEQ ID NO: 198600 - DNA, 25 bp, probe
gcctcagagttgcaagatggttcct

SEQ ID NO: 198601 - DNA, 25 bp, probe
gcctcagagttgcaagatggttcct

SEQ ID NO: 198602 - DNA, 25 bp, probe
gcctagaaggcggcagctggaccac

SEQ ID NO: 198603 - DNA, 25 bp, probe
gcctagtcaggcctacattgatcta

SEQ ID NO: 198604 - DNA, 25 bp, probe
gcctatcctgtggtccatttcatac

SEQ ID NO: 198605 - DNA, 25 bp, probe
gccttcatttgcttcatatttgctt

SEQ ID NO: 198606 - DNA, 25 bp, probe
gcctatatctatgaaatttgctgtt

SEQ ID NO: 198607 - DNA, 25 bp, probe
gcctatgttttgtgagctgccatgt

SEQ ID NO: 198608 - DNA, 25 bp, probe
gcctagttttgtacatggatctcat

SEQ ID NO: 198609 - DNA, 25 bp, probe
gcctagttttgtacatggatctcat

SEQ ID NO: 198610 - DNA, 25 bp, probe
gcctttttttcatttagccattgca

SEQ ID NO: 198611 - DNA, 25 bp, probe
gccttttttctacgaatgcactaca

SEQ ID NO: 198612 - DNA, 25 bp, probe
gccttattcttcacaaagcatccct

SEQ ID NO: 198613 - DNA, 25 bp, probe
gcctttgatcattcaccaaacaaaa

SEQ ID NO: 198614 - DNA, 25 bp, probe
gccttttctgacctcatataacaca

SEQ ID NO: 198615 - DNA, 25 bp, probe
gcgcggttctatgttaaagccactt

SEQ ID NO: 198616 - DNA, 25 bp, probe
gcctacatgttatctccaaagccac

SEQ ID NO: 198617 - DNA, 25 bp, probe
gcctacatgttatctccaaagccac

SEQ ID NO: 198618 - DNA, 25 bp, probe
gcctgaatctacactggaagccaac

SEQ ID NO: 198619 - DNA, 25 bp, probe
gcctacattcacttctaaagtctat

SEQ ID NO: 198620 - DNA, 25 bp, probe
gcctagcttgagggcttaagtcctt

SEQ ID NO: 198621 - DNA, 25 bp, probe
gcctagcttgagggcttaagtcctt

SEQ ID NO: 198622 - DNA, 25 bp, probe
gcctatgcttggagtcataagtgtt

SEQ ID NO: 198623 - DNA, 25 bp, probe
gcctttctggcatgcagccaggtgt

SEQ ID NO: 198624 - DNA, 25 bp, probe
gcctctactggcgctgccaaggctg

SEQ ID NO: 198625 - DNA, 25 bp, probe
gccattgactggtgctgccatggcc

SEQ ID NO: 198626 - DNA, 25 bp, probe
gccttgttgatgtggacatgagcca

SEQ ID NO: 198627 - DNA, 25 bp, probe
gccttgtagatgtggagggctgcaa

SEQ ID NO: 198628 - DNA, 25 bp, probe
gccttggcatggtgtgggggcacat

SEQ ID NO: 198629 - DNA, 25 bp, probe
gccattgagcggtgtattggagtca

SEQ ID NO: 198630 - DNA, 25 bp, probe
gccttcactgtagctattggggcag

SEQ ID NO: 198631 - DNA, 25 bp, probe
gccttcatatttgccattgtgtccg

SEQ ID NO: 198632 - DNA, 25 bp, probe
gccttcaaagtacctcttatcacag

SEQ ID NO: 198633 - DNA, 25 bp, probe
gcctcatcattagcaactttatata

SEQ ID NO: 198634 - DNA, 25 bp, probe
gcctcatcattagcaactttatata

SEQ ID NO: 198635 - DNA, 25 bp, probe
gcctcacgtaattcatgctttttaa

SEQ ID NO: 198636 - DNA, 25 bp, probe
gcctgagggcaatcattctgtttaa

SEQ ID NO: 198637 - DNA, 25 bp, probe
gcctattggcaagatcgcatgtttt

SEQ ID NO: 198638 - DNA, 25 bp, probe
gcctcttgtaacgtggcacctttat

SEQ ID NO: 198639 - DNA, 25 bp, probe
gcctgccttcaattttgatccttta

SEQ ID NO: 198640 - DNA, 25 bp, probe
gcctcctaaaattctagccatttgt

SEQ ID NO: 198641 - DNA, 25 bp, probe
gcctggaaaacttccaacttgtgtt

SEQ ID NO: 198642 - DNA, 25 bp, probe
gcctgtcaccaatcccaaatttgat

SEQ ID NO: 198643 - DNA, 25 bp, probe
gccttcaccaaaatctctgaagggg

SEQ ID NO: 198644 - DNA, 25 bp, probe
gcctttgcatcagactctctaagga

SEQ ID NO: 198645 - DNA, 25 bp, probe
gcctatgtcactgcaattttcagga

SEQ ID NO: 198646 - DNA, 25 bp, probe
gcctataatcccagctactcaggag

SEQ ID NO: 198647 - DNA, 25 bp, probe
gcctgtaatcccagctactcgggag

SEQ ID NO: 198648 - DNA, 25 bp, probe
gcctgtaatccccaaactttgaagg

SEQ ID NO: 198649 - DNA, 25 bp, probe
gccttacatactgggagaatttgta

SEQ ID NO: 198650 - DNA, 25 bp, probe
gcctttgcccatggggacatctatg

SEQ ID NO: 198651 - DNA, 25 bp, probe
gcctttgagaatggccgagcactgg

SEQ ID NO: 198652 - DNA, 25 bp, probe
gccttatgatcgagcagtggactgg

SEQ ID NO: 198653 - DNA, 25 bp, probe
gccttatgatcgagcagtggactgg

SEQ ID NO: 198654 - DNA, 25 bp, probe
gccttgtatcagctgatgctggact

SEQ ID NO: 198655 - DNA, 25 bp, probe
gccttctgctcagctgatgatggac

SEQ ID NO: 198656 - DNA, 25 bp, probe
gccttcgctatgatggagcacacct

SEQ ID NO: 198657 - DNA, 25 bp, probe
gccttcgtcatcagcaacatcggcc

SEQ ID NO: 198658 - DNA, 25 bp, probe
gccttcgtcatcagcaacatcggcc

SEQ ID NO: 198659 - DNA, 25 bp, probe
gcctttgatagacccacttgggcct

SEQ ID NO: 198660 - DNA, 25 bp, probe
gctgtttaaggtcttgggaggcttt

SEQ ID NO: 198661 - DNA, 25 bp, probe
gcggcttaagggcgatgcctgggtt

SEQ ID NO: 198662 - DNA, 25 bp, probe
gccgctggaacgtggacactgggcc

SEQ ID NO: 198663 - DNA, 25 bp, probe
gccgcggaataataagccgggatct

SEQ ID NO: 198664 - DNA, 25 bp, probe
gcctcaggaaggcaaagccgggtga

SEQ ID NO: 198665 - DNA, 25 bp, probe
gcctccagacagctaatactcgggg

SEQ ID NO: 198666 - DNA, 25 bp, probe
gcctgagaaatgcaatacccggggt

SEQ ID NO: 198667 - DNA, 25 bp, probe
gcctagaacagctaagaccacaggg

SEQ ID NO: 198668 - DNA, 25 bp, probe
gcctatggagcaaacgtcaactgtg

SEQ ID NO: 198669 - DNA, 25 bp, probe
gcctcgatggcaaacggaagcctgt

SEQ ID NO: 198670 - DNA, 25 bp, probe
gcctcgatggcaaacggaagcctgt

SEQ ID NO: 198671 - DNA, 25 bp, probe
gcctcgtggctaaaggctcctttgg

SEQ ID NO: 198672 - DNA, 25 bp, probe
gcctcttgagtagcttggtttatag

SEQ ID NO: 198673 - DNA, 25 bp, probe
gccgctggctgaactttgggttcat

SEQ ID NO: 198674 - DNA, 25 bp, probe
gccgctggctgaactttgggttcat

SEQ ID NO: 198675 - DNA, 25 bp, probe
gccttagcaaagggtggtgtttgaa

SEQ ID NO: 198676 - DNA, 25 bp, probe
gctcttagaaagggctggggttagc

SEQ ID NO: 198677 - DNA, 25 bp, probe
gcctgtagaatagcctgtggccttt

SEQ ID NO: 198678 - DNA, 25 bp, probe
gcctctaaaagaaatgctgttgctt

SEQ ID NO: 198679 - DNA, 25 bp, probe
gcctctgtcaaagacctgtcagtat

SEQ ID NO: 198680 - DNA, 25 bp, probe
gcctcgtaccaatcatcttgggaca

SEQ ID NO: 198681 - DNA, 25 bp, probe
gacttggacccaaactgggcgacta

SEQ ID NO: 198682 - DNA, 25 bp, probe
gccttgtaactcacaatgggcgcct

SEQ ID NO: 198683 - DNA, 25 bp, probe
gcctggagaaccgctacgaggcgct

SEQ ID NO: 198684 - DNA, 25 bp, probe
gcctggagaaccgctacgaggcgct

SEQ ID NO: 198685 - DNA, 25 bp, probe
gccggaagcggggctgttggcggct

SEQ ID NO: 198686 - DNA, 25 bp, probe
gctacaaatgcccctttttgtggtc

SEQ ID NO: 198687 - DNA, 25 bp, probe
gcccaacaacggcttttgggaacag

SEQ ID NO: 198688 - DNA, 25 bp, probe
gcccgaaagggattctactgggaca

SEQ ID NO: 198689 - DNA, 25 bp, probe
gccccaaacctcttcatattgaaga

SEQ ID NO: 198690 - DNA, 25 bp, probe
gccccccaactctaatgggacgaat

SEQ ID NO: 198691 - DNA, 25 bp, probe
gcctcccccagcacagatgaggagc

SEQ ID NO: 198692 - DNA, 25 bp, probe
gcctcactgctggagcggggaaacc

SEQ ID NO: 198693 - DNA, 25 bp, probe
gcctcactgctggagcggggaaacc

SEQ ID NO: 198694 - DNA, 25 bp, probe
gcctcctccatcagggtgaggctcc

SEQ ID NO: 198695 - DNA, 25 bp, probe
gcctccgaaagagggccaggtccta

SEQ ID NO: 198696 - DNA, 25 bp, probe
gcctccactgaatagagccgcgtac

SEQ ID NO: 198697 - DNA, 25 bp, probe
gcctagtctgcataatatcccagtg

SEQ ID NO: 198698 - DNA, 25 bp, probe
gcctagtctgcataatatcccagtg

SEQ ID NO: 198699 - DNA, 25 bp, probe
gcctctttgcaaaggacctcagggg

SEQ ID NO: 198700 - DNA, 25 bp, probe
gcctctttgcaaaggacctcagggg

SEQ ID NO: 198701 - DNA, 25 bp, probe
gccttctccacaaggaccagaggca

SEQ ID NO: 198702 - DNA, 25 bp, probe
gcctgcctagcccaggatgaagggc

SEQ ID NO: 198703 - DNA, 25 bp, probe
gcctgcctagcccaggatgaagggc

SEQ ID NO: 198704 - DNA, 25 bp, probe
gcctcctacccattgccaagagagg

SEQ ID NO: 198705 - DNA, 25 bp, probe
gcctcttttctttcagacagagaag

SEQ ID NO: 198706 - DNA, 25 bp, probe
gcctttttgtattgcaatcgaaatg

SEQ ID NO: 198707 - DNA, 25 bp, probe
gccttacggtcatgatgtctgcaaa

SEQ ID NO: 198708 - DNA, 25 bp, probe
gcctattggcagaaggaggtgcgac

SEQ ID NO: 198709 - DNA, 25 bp, probe
gcctattggcagaaggaggtgcgac

SEQ ID NO: 198710 - DNA, 25 bp, probe
gcctttgggatgctggtcagctgac

SEQ ID NO: 198711 - DNA, 25 bp, probe
gcctttgagttcatgctgtcggatc

SEQ ID NO: 198712 - DNA, 25 bp, probe
gccttaagtgtctagagcatctgtt

SEQ ID NO: 198713 - DNA, 25 bp, probe
gcctctaagcgtgctgacatcagat

SEQ ID NO: 198714 - DNA, 25 bp, probe
gcctaaatcagcgtcaacatgcagt

SEQ ID NO: 198715 - DNA, 25 bp, probe
gcctaaatcagcgtcaacatgcagt

SEQ ID NO: 198716 - DNA, 25 bp, probe
gcctaagacctgcaacatgagggga

SEQ ID NO: 198717 - DNA, 25 bp, probe
gcctaagtctaaggactccatggga

SEQ ID NO: 198718 - DNA, 25 bp, probe
gcctacagtggttcatatcccatgg

SEQ ID NO: 198719 - DNA, 25 bp, probe
gccttcaggagaatctacacgcatg

SEQ ID NO: 198720 - DNA, 25 bp, probe
gcctacatggaacgcatgaactaca

SEQ ID NO: 198721 - DNA, 25 bp, probe
gccttcctgagacctgcaatatgaa

SEQ ID NO: 198722 - DNA, 25 bp, probe
gccttagctgggacgcatagctaat

SEQ ID NO: 198723 - DNA, 25 bp, probe
gccttaggaggagtcacagcataca

SEQ ID NO: 198724 - DNA, 25 bp, probe
gccttaggaggagtcacagcataca

SEQ ID NO: 198725 - DNA, 25 bp, probe
gcctttcagatgcggcagacataca

SEQ ID NO: 198726 - DNA, 25 bp, probe
gcctctatgccctgcagagcaataa

SEQ ID NO: 198727 - DNA, 25 bp, probe
gccttttcttggggcatataagcta

SEQ ID NO: 198728 - DNA, 25 bp, probe
gcctttcctgggaggatcaagctag

SEQ ID NO: 198729 - DNA, 25 bp, probe
gcctttcctgggaggatcaagctag

SEQ ID NO: 198730 - DNA, 25 bp, probe
gcctttcctgggtgacaatgatgct

SEQ ID NO: 198731 - DNA, 25 bp, probe
gcctttctcggaactgaactgaact

SEQ ID NO: 198732 - DNA, 25 bp, probe
gccttcttctggaagctggagctaa

SEQ ID NO: 198733 - DNA, 25 bp, probe
gcctcttagtggctgcttgtgcaaa

SEQ ID NO: 198734 - DNA, 25 bp, probe
gccttccaggagcaggtggacaagc

SEQ ID NO: 198735 - DNA, 25 bp, probe
gccttcggtgtgctgatgtgggaag

SEQ ID NO: 198736 - DNA, 25 bp, probe
gcctttggagtgacgctgtgggaac

SEQ ID NO: 198737 - DNA, 25 bp, probe
gcctcctgaactacctgagggagat

SEQ ID NO: 198738 - DNA, 25 bp, probe
gcctcatgctaagactcagtgggga

SEQ ID NO: 198739 - DNA, 25 bp, probe
gcctcagaaatcttccagggacaaa

SEQ ID NO: 198740 - DNA, 25 bp, probe
gcctgcagaaacttcgaggggctga

SEQ ID NO: 198741 - DNA, 25 bp, probe
gcctggaagacctgccaggcctggg

SEQ ID NO: 198742 - DNA, 25 bp, probe
gcctggaaaccttgcctgagtttag

SEQ ID NO: 198743 - DNA, 25 bp, probe
gcctagagaaccttgtgatgatgtc

SEQ ID NO: 198744 - DNA, 25 bp, probe
gcctcgccacaggcctgtggatggc

SEQ ID NO: 198745 - DNA, 25 bp, probe
gcctcaggccagctgtttcatggcc

SEQ ID NO: 198746 - DNA, 25 bp, probe
gcctcaggcccactaatgatcctgc

SEQ ID NO: 198747 - DNA, 25 bp, probe
gccccgctacatagttcacctgggg

SEQ ID NO: 198748 - DNA, 25 bp, probe
gcccatccttttctgaactggtgtc

SEQ ID NO: 198749 - DNA, 25 bp, probe
gccccagatttagcttactgagttt

SEQ ID NO: 198750 - DNA, 25 bp, probe
gccccagatttagcttactgagttt

SEQ ID NO: 198751 - DNA, 25 bp, probe
gcctccagttgttggaatagccaat

SEQ ID NO: 198752 - DNA, 25 bp, probe
gcctctcaggtgtctgtaaaggaga

SEQ ID NO: 198753 - DNA, 25 bp, probe
gcgcttccggcacttaaaaaagact

SEQ ID NO: 198754 - DNA, 25 bp, probe
gcgttggcccacgtagcaaaaagat

SEQ ID NO: 198755 - DNA, 25 bp, probe
gcgttggcccacgtagcaaaaagat

SEQ ID NO: 198756 - DNA, 25 bp, probe
gcgtagcagccctcacaaaaaggcc

SEQ ID NO: 198757 - DNA, 25 bp, probe
gcctgaatcgcagcccaaacagggc

SEQ ID NO: 198758 - DNA, 25 bp, probe
gcctcaatgacaggttccgtctggg

SEQ ID NO: 198759 - DNA, 25 bp, probe
gcctattgacagggatcacactggg

SEQ ID NO: 198760 - DNA, 25 bp, probe
gccttatgagaggccatcatttgcc

SEQ ID NO: 198761 - DNA, 25 bp, probe
gccttataaggctagcatgatttag

SEQ ID NO: 198762 - DNA, 25 bp, probe
gcctcttatggtgatgcttattctg

SEQ ID NO: 198763 - DNA, 25 bp, probe
gcctctgtaatcaaatgcttgtact

SEQ ID NO: 198764 - DNA, 25 bp, probe
gcctcatctataacatgcatttgtc

SEQ ID NO: 198765 - DNA, 25 bp, probe
gcctcatctggaaatagttccgttt

SEQ ID NO: 198766 - DNA, 25 bp, probe
gcctcatctggaaatagttccgttt

SEQ ID NO: 198767 - DNA, 25 bp, probe
gcctatatgtgtattgtatactttt

SEQ ID NO: 198768 - DNA, 25 bp, probe
gccttaggactttgtttgtgttcca

SEQ ID NO: 198769 - DNA, 25 bp, probe
gccttaggactttgtttgtgttcca

SEQ ID NO: 198770 - DNA, 25 bp, probe
gcccggacaagttttgcttattcca

SEQ ID NO: 198771 - DNA, 25 bp, probe
gcccggacaagttttgcttattcca

SEQ ID NO: 198772 - DNA, 25 bp, probe
gccggagcccagatttcaggattgc

SEQ ID NO: 198773 - DNA, 25 bp, probe
gccggagagccggaaccggagtcgc

SEQ ID NO: 198774 - DNA, 25 bp, probe
gcctgtggacccgaaaggagggcag

SEQ ID NO: 198775 - DNA, 25 bp, probe
gccgtgatgacctgagacaagatgc

SEQ ID NO: 198776 - DNA, 25 bp, probe
gccgtacaccagctatagcgtgcag

SEQ ID NO: 198777 - DNA, 25 bp, probe
gccttagcagtgggtatgaggtgtg

SEQ ID NO: 198778 - DNA, 25 bp, probe
gccttcagaatgctcctgagtggtg

SEQ ID NO: 198779 - DNA, 25 bp, probe
gccttcagaatgctcctgagtggtg

SEQ ID NO: 198780 - DNA, 25 bp, probe
gcctgtcagtaaccctgacagaggg

SEQ ID NO: 198781 - DNA, 25 bp, probe
gcctgctgtgtacaccaaggtggtg

SEQ ID NO: 198782 - DNA, 25 bp, probe
gcctgtatgcctgggccaagggatt

SEQ ID NO: 198783 - DNA, 25 bp, probe
gcctctatctcggagaccaggacat

SEQ ID NO: 198784 - DNA, 25 bp, probe
gcctctatctcggagaccaggacat

SEQ ID NO: 198785 - DNA, 25 bp, probe
gcctctatctcggagaccaggacat

SEQ ID NO: 198786 - DNA, 25 bp, probe
gcctacatcgcacagtgccaggaca

SEQ ID NO: 198787 - DNA, 25 bp, probe
gcctcaactcactagatgccaatga

SEQ ID NO: 198788 - DNA, 25 bp, probe
gcctcaatgtgaatcagaccctacc

SEQ ID NO: 198789 - DNA, 25 bp, probe
gcctgcacaggttaaccgtcagact

SEQ ID NO: 198790 - DNA, 25 bp, probe
gcctgataggtttagggtacactca

SEQ ID NO: 198791 - DNA, 25 bp, probe
gcctgattggactgggttatactca

SEQ ID NO: 198792 - DNA, 25 bp, probe
gcctgggggcacctggaaaattcag

SEQ ID NO: 198793 - DNA, 25 bp, probe
gccgtcaaggaccaggcatggaaat

SEQ ID NO: 198794 - DNA, 25 bp, probe
gccttacaggaacagctagatatat

SEQ ID NO: 198795 - DNA, 25 bp, probe
gccttaagctgatcctgcggagaac

SEQ ID NO: 198796 - DNA, 25 bp, probe
gccttagtgtctacttgcaggaccc

SEQ ID NO: 198797 - DNA, 25 bp, probe
gccttactggcaatgcttccacagc

SEQ ID NO: 198798 - DNA, 25 bp, probe
gcctccttggcaatgcatttgatgg

SEQ ID NO: 198799 - DNA, 25 bp, probe
gcccctagtgctattctgtgttgaa

SEQ ID NO: 198800 - DNA, 25 bp, probe
gctcttcaagttcttcttctggatc

SEQ ID NO: 198801 - DNA, 25 bp, probe
gccttacagtatctggctttgtact

SEQ ID NO: 198802 - DNA, 25 bp, probe
gccttacagtatctggctttgtact

SEQ ID NO: 198803 - DNA, 25 bp, probe
gcctaacagcataattgccttttcc

SEQ ID NO: 198804 - DNA, 25 bp, probe
gcctacatgaacaattactccattc

SEQ ID NO: 198805 - DNA, 25 bp, probe
gcctcaagcaaggataccgccatgt

SEQ ID NO: 198806 - DNA, 25 bp, probe
gcctcaagataaaactctgtcattc

SEQ ID NO: 198807 - DNA, 25 bp, probe
gcctctaaacctactctgtattcaa

SEQ ID NO: 198808 - DNA, 25 bp, probe
gcctctaaacctactctgtattcaa

SEQ ID NO: 198809 - DNA, 25 bp, probe
gccttatggaacactctgagactcg

SEQ ID NO: 198810 - DNA, 25 bp, probe
gcctttagagtgaccctgcagagtc

SEQ ID NO: 198811 - DNA, 25 bp, probe
gcctatgtcatggaactgcccaaac

SEQ ID NO: 198812 - DNA, 25 bp, probe
gcctttctgcagatgtccctaaggt

SEQ ID NO: 198813 - DNA, 25 bp, probe
gcctttctgcagatgtccctaaggt

SEQ ID NO: 198814 - DNA, 25 bp, probe
gcctgattatctcttacacgaacgt

SEQ ID NO: 198815 - DNA, 25 bp, probe
gcgctgagtcctgtgcaacatggaa

SEQ ID NO: 198816 - DNA, 25 bp, probe
gccggttctctgcacattggaactt

SEQ ID NO: 198817 - DNA, 25 bp, probe
gccttacttcatcacactgggcact

SEQ ID NO: 198818 - DNA, 25 bp, probe
gccttaattctcgaacagttgactg

SEQ ID NO: 198819 - DNA, 25 bp, probe
gccttatcacactcacacagttgac

SEQ ID NO: 198820 - DNA, 25 bp, probe
gccttatcacactcacacagttgac

SEQ ID NO: 198821 - DNA, 25 bp, probe
gcctcctacagcttgaccgtgaggc

SEQ ID NO: 198822 - DNA, 25 bp, probe
gcctctcaacattgtcatcaccgag

SEQ ID NO: 198823 - DNA, 25 bp, probe
gcctcataggcaatgctcagcttct

SEQ ID NO: 198824 - DNA, 25 bp, probe
gcctgcaagtcagtccaggatgcta

SEQ ID NO: 198825 - DNA, 25 bp, probe
gcctatcagaaccacaggatcaccc

SEQ ID NO: 198826 - DNA, 25 bp, probe
gcctgaagaccttcagtctgacccc

SEQ ID NO: 198827 - DNA, 25 bp, probe
gcctgaagatcacaggggccatccc

SEQ ID NO: 198828 - DNA, 25 bp, probe
gcctccatccagtatggcggacatc

SEQ ID NO: 198829 - DNA, 25 bp, probe
gcctcttcctgtagagttactcagc

SEQ ID NO: 198830 - DNA, 25 bp, probe
gcctcttcctgtagagttactcagc

SEQ ID NO: 198831 - DNA, 25 bp, probe
gcctttcctattgagcaaccagctc

SEQ ID NO: 198832 - DNA, 25 bp, probe
gcctttggtgaatacatgagccagc

SEQ ID NO: 198833 - DNA, 25 bp, probe
gcctatcgtaaattcacatcagcaa

SEQ ID NO: 198834 - DNA, 25 bp, probe
gcctagtctacagtactgacagaaa

SEQ ID NO: 198835 - DNA, 25 bp, probe
gcctgagattgacaacgccctacag

SEQ ID NO: 198836 - DNA, 25 bp, probe
gcctcagtggagaagcttcctctac

SEQ ID NO: 198837 - DNA, 25 bp, probe
gcctcaacgtgaagcttttctggga

SEQ ID NO: 198838 - DNA, 25 bp, probe
gcctcaacgtgaagcttttctggga

SEQ ID NO: 198839 - DNA, 25 bp, probe
gcctcattatgatcagcttgtatgt

SEQ ID NO: 198840 - DNA, 25 bp, probe
gcctcatggatgaagacattgctca

SEQ ID NO: 198841 - DNA, 25 bp, probe
gcctcatggatgaagacattgctca

SEQ ID NO: 198842 - DNA, 25 bp, probe
gcctcacaatgatgcagtcagccac

SEQ ID NO: 198843 - DNA, 25 bp, probe
gcctgcctgacaaggtcagcatcat

SEQ ID NO: 198844 - DNA, 25 bp, probe
gcctttgacttggtgaatatccatc

SEQ ID NO: 198845 - DNA, 25 bp, probe
gcctgtgggttcggaaagcccatcc

SEQ ID NO: 198846 - DNA, 25 bp, probe
gcctgcgggaggtgaaagtctccgt

SEQ ID NO: 198847 - DNA, 25 bp, probe
gcctgcgggaggtgaaagtctccgt

SEQ ID NO: 198848 - DNA, 25 bp, probe
tcccgtcgacgtagaacctcgaggt

SEQ ID NO: 198849 - DNA, 25 bp, probe
tcccgtcgacgtagaacctcgaggt

SEQ ID NO: 198850 - DNA, 25 bp, probe
gcctcgtagggtagaaaccaatatt

SEQ ID NO: 198851 - DNA, 25 bp, probe
gcacggtcaaaattattaccaatat

SEQ ID NO: 198852 - DNA, 25 bp, probe
gccgccaaagagttttaccagaagt

SEQ ID NO: 198853 - DNA, 25 bp, probe
gccgcacacaaacaatgcaaacggg

SEQ ID NO: 198854 - DNA, 25 bp, probe
gcctccagtagacgacaagaacgag

SEQ ID NO: 198855 - DNA, 25 bp, probe
gcctccagtagacgacaagaacgag

SEQ ID NO: 198856 - DNA, 25 bp, probe
gcctcctgagaaggacaggcaaagg

SEQ ID NO: 198857 - DNA, 25 bp, probe
gccggctatgtcggaagacgacgag

SEQ ID NO: 198858 - DNA, 25 bp, probe
gcctacctgatgatgaagaaacggg

SEQ ID NO: 198859 - DNA, 25 bp, probe
gcctacctgcacagcaagagcatcg

SEQ ID NO: 198860 - DNA, 25 bp, probe
gcctacctcttagacatgttgtgag

SEQ ID NO: 198861 - DNA, 25 bp, probe
gcctacctcttagacatgttgtgag

SEQ ID NO: 198862 - DNA, 25 bp, probe
gcctaccttcaagcagctggtggag

SEQ ID NO: 198863 - DNA, 25 bp, probe
gcctaccttcaagcagctggtggag

SEQ ID NO: 198864 - DNA, 25 bp, probe
gcctactcttctgtcagtggcttat

SEQ ID NO: 198865 - DNA, 25 bp, probe
gcctactcttctgtcagtggcttat

SEQ ID NO: 198866 - DNA, 25 bp, probe
gcctggatcctcagtagtgtctttg

SEQ ID NO: 198867 - DNA, 25 bp, probe
gcctaatcttcttcactgtgtattt

SEQ ID NO: 198868 - DNA, 25 bp, probe
gcctttttgtcacctcaatatttac

SEQ ID NO: 198869 - DNA, 25 bp, probe
gcctttttgtcacctcaatatttac

SEQ ID NO: 198870 - DNA, 25 bp, probe
gccggttctggccgtacatgttaag

SEQ ID NO: 198871 - DNA, 25 bp, probe
gccgagttcctgcggatgatgggat

SEQ ID NO: 198872 - DNA, 25 bp, probe
gcctctcctgccggaggaagggcat

SEQ ID NO: 198873 - DNA, 25 bp, probe
gcctctcctgcatggggagggtagg

SEQ ID NO: 198874 - DNA, 25 bp, probe
gcctcgtctaggtggcagagggagg

SEQ ID NO: 198875 - DNA, 25 bp, probe
gccgcgatgggtcaggtagggggga

SEQ ID NO: 198876 - DNA, 25 bp, probe
gccgccgcggaataataagccggga

SEQ ID NO: 198877 - DNA, 25 bp, probe
gccggggcgagacaacattccgttg

SEQ ID NO: 198878 - DNA, 25 bp, probe
gcctgatggggaacctaccatccgt

SEQ ID NO: 198879 - DNA, 25 bp, probe
gcctgcagagagtatagaatacaca

SEQ ID NO: 198880 - DNA, 25 bp, probe
gcctgcgcaaggtgacacacgagtc

SEQ ID NO: 198881 - DNA, 25 bp, probe
gcctgagacgcggagacatggctgg

SEQ ID NO: 198882 - DNA, 25 bp, probe
gcctgcgaccaggatccattgagac

SEQ ID NO: 198883 - DNA, 25 bp, probe
gcctcataatcgccttctgtgagac

SEQ ID NO: 198884 - DNA, 25 bp, probe
gcctcaagatggctctgtgtagggc

SEQ ID NO: 198885 - DNA, 25 bp, probe
gcctaagaggcgtgctgtgggcgct

SEQ ID NO: 198886 - DNA, 25 bp, probe
gcctacagagcgtatagcctggtgc

SEQ ID NO: 198887 - DNA, 25 bp, probe
gcctacagtgtggaagacttccaac

SEQ ID NO: 198888 - DNA, 25 bp, probe
gcctcacagttgtttgtttacaaag

SEQ ID NO: 198889 - DNA, 25 bp, probe
gcctcacagtcgatgactttgaaat

SEQ ID NO: 198890 - DNA, 25 bp, probe
gcctacagcagcgggactttgcaac

SEQ ID NO: 198891 - DNA, 25 bp, probe
gcctcaaagcgtggaattgctgccc

SEQ ID NO: 198892 - DNA, 25 bp, probe
gcctaaatcatgtgcagatggttct

SEQ ID NO: 198893 - DNA, 25 bp, probe
gcctaacacatgcggtcacttttgg

SEQ ID NO: 198894 - DNA, 25 bp, probe
gcctcatccctacaacaatgtttat

SEQ ID NO: 198895 - DNA, 25 bp, probe
gcctcatccctacaacaatgtttat

SEQ ID NO: 198896 - DNA, 25 bp, probe
gcctcaccctgaggacatcagcagt

SEQ ID NO: 198897 - DNA, 25 bp, probe
gcctgacggccaggtcatcaccatt

SEQ ID NO: 198898 - DNA, 25 bp, probe
gcctatcggagctatgtgctgcacc

SEQ ID NO: 198899 - DNA, 25 bp, probe
gcctcagatcgatttgctgctacca

SEQ ID NO: 198900 - DNA, 25 bp, probe
gcctcatgtcagtttatgcttctag

SEQ ID NO: 198901 - DNA, 25 bp, probe
gcctcagcatacttcttgctgcttt

SEQ ID NO: 198902 - DNA, 25 bp, probe
gcctcactctcgatcgtgttataac

SEQ ID NO: 198903 - DNA, 25 bp, probe
gcctcactctcgatcgtgttataac

SEQ ID NO: 198904 - DNA, 25 bp, probe
gcctcagcctgaagtcgtgatctgc

SEQ ID NO: 198905 - DNA, 25 bp, probe
gcctagccaagacgtggcattcatc

SEQ ID NO: 198906 - DNA, 25 bp, probe
gcctatccattactgggcaatagag

SEQ ID NO: 198907 - DNA, 25 bp, probe
gcctatccattactgggcaatagag

SEQ ID NO: 198908 - DNA, 25 bp, probe
gcctcaccatcctggaagtggcatg

SEQ ID NO: 198909 - DNA, 25 bp, probe
gcctcagcctcctgagtagctggga

SEQ ID NO: 198910 - DNA, 25 bp, probe
gcctcaggtcgtggagaacatggat

SEQ ID NO: 198911 - DNA, 25 bp, probe
gcctcagtgtagtggaagtgataat

SEQ ID NO: 198912 - DNA, 25 bp, probe
gcctcagatgctataggtcagtgaa

SEQ ID NO: 198913 - DNA, 25 bp, probe
gcctcagatgctataggtcagtgaa

SEQ ID NO: 198914 - DNA, 25 bp, probe
gcctcatcctctacaatgatggtga

SEQ ID NO: 198915 - DNA, 25 bp, probe
gcctaccattccctcatggatgaat

SEQ ID NO: 198916 - DNA, 25 bp, probe
gcctatctgcattccaaaggaatca

SEQ ID NO: 198917 - DNA, 25 bp, probe
gcctactgcaggcccatgggaattt

SEQ ID NO: 198918 - DNA, 25 bp, probe
gcctcagtgagggcactgggactgg

SEQ ID NO: 198919 - DNA, 25 bp, probe
gcctcatgatgggcccatgtgtgac

SEQ ID NO: 198920 - DNA, 25 bp, probe
gcctcatgatgggcccatgtgtgac

SEQ ID NO: 198921 - DNA, 25 bp, probe
gcctcagtcatgacgcaactgcggc

SEQ ID NO: 198922 - DNA, 25 bp, probe
gcctcagtcatgacgcaactgcggc

SEQ ID NO: 198923 - DNA, 25 bp, probe
gcctgcgacatgaccatagaggaga

SEQ ID NO: 198924 - DNA, 25 bp, probe
gcctagcctatgtctggcagatgag

SEQ ID NO: 198925 - DNA, 25 bp, probe
gcctatgctacaatcggcagatgga

SEQ ID NO: 198926 - DNA, 25 bp, probe
gcctatgcaactttaatgagaaccc

SEQ ID NO: 198927 - DNA, 25 bp, probe
gcctgtgtacatcgtcacggaactc

SEQ ID NO: 198928 - DNA, 25 bp, probe
gcctgtagacttgccatggtgacac

SEQ ID NO: 198929 - DNA, 25 bp, probe
gcctaaggctctgagcaggtcccag

SEQ ID NO: 198930 - DNA, 25 bp, probe
gcctaatagcaggcaagaggatcca

SEQ ID NO: 198931 - DNA, 25 bp, probe
gcctactgagcggacagaatgatgc

SEQ ID NO: 198932 - DNA, 25 bp, probe
gcctcacatagcttacaagccagct

SEQ ID NO: 198933 - DNA, 25 bp, probe
gcctctctcagcaaaaagccagttg

SEQ ID NO: 198934 - DNA, 25 bp, probe
gcctctcacacacatagattaatgg

SEQ ID NO: 198935 - DNA, 25 bp, probe
gcctgacacaatggtagctctgaag

SEQ ID NO: 198936 - DNA, 25 bp, probe
gcctactgtatgcatgagttgagtt

SEQ ID NO: 198937 - DNA, 25 bp, probe
gcctactttggccatgttagcctgg

SEQ ID NO: 198938 - DNA, 25 bp, probe
gcctagcttgcgtgcttgaggaagg

SEQ ID NO: 198939 - DNA, 25 bp, probe
gcctgcacttactggtcggaagaga

SEQ ID NO: 198940 - DNA, 25 bp, probe
gcctcctaatgacgcggctcaaaag

SEQ ID NO: 198941 - DNA, 25 bp, probe
gcctcgccatcgtgggtaaaatcgg

SEQ ID NO: 198942 - DNA, 25 bp, probe
gcctcgatacgctggaaaaagtgcg

SEQ ID NO: 198943 - DNA, 25 bp, probe
gcctgcgaccttgggagaaaagggc

SEQ ID NO: 198944 - DNA, 25 bp, probe
gcccagtcgttctggaccaaaggaa

SEQ ID NO: 198945 - DNA, 25 bp, probe
gcctagtagttccctgtcacaaagg

SEQ ID NO: 198946 - DNA, 25 bp, probe
gcctgagcctttgcgtgtcgcaaag

SEQ ID NO: 198947 - DNA, 25 bp, probe
gcctaagctactgagtccgagaact

SEQ ID NO: 198948 - DNA, 25 bp, probe
gcctgatattccagaacctggaaca

SEQ ID NO: 198949 - DNA, 25 bp, probe
gcctgattcaactgtagcctgtaat

SEQ ID NO: 198950 - DNA, 25 bp, probe
gcctgttaaatggatcgccatagaa

SEQ ID NO: 198951 - DNA, 25 bp, probe
gcctctcctagacttgacctagaat

SEQ ID NO: 198952 - DNA, 25 bp, probe
gcctctcctgagatgattacataat

SEQ ID NO: 198953 - DNA, 25 bp, probe
gcctcttctacaactatagcatgct

SEQ ID NO: 198954 - DNA, 25 bp, probe
gcctcttttcagtagtgagcagcat

SEQ ID NO: 198955 - DNA, 25 bp, probe
gcctgattttcaggaaggctctttc

SEQ ID NO: 198956 - DNA, 25 bp, probe
gcctaatttcatgtatcttgtaatc

SEQ ID NO: 198957 - DNA, 25 bp, probe
gcctaatttcatgtatcttgtaatc

SEQ ID NO: 198958 - DNA, 25 bp, probe
gcctataaccatgttctatattctt

SEQ ID NO: 198959 - DNA, 25 bp, probe
gcctatacctcattttctacatgtc

SEQ ID NO: 198960 - DNA, 25 bp, probe
gcctaaccgcagaaatgtgatcagt

SEQ ID NO: 198961 - DNA, 25 bp, probe
gcctcagactcccataatggtatga

SEQ ID NO: 198962 - DNA, 25 bp, probe
gcctctgccatctgcaaagttcagc

SEQ ID NO: 198963 - DNA, 25 bp, probe
gccggcaaccgaaactagcagcaaa

SEQ ID NO: 198964 - DNA, 25 bp, probe
gccgaaaacgagacaattgaaaagt

SEQ ID NO: 198965 - DNA, 25 bp, probe
gcctaaatttgggcagattgtcaac

SEQ ID NO: 198966 - DNA, 25 bp, probe
gcctaatcatttgggagatggctcg

SEQ ID NO: 198967 - DNA, 25 bp, probe
gcctactcatgctattgggttcttg

SEQ ID NO: 198968 - DNA, 25 bp, probe
gcctagtagaatatggacttggaaa

SEQ ID NO: 198969 - DNA, 25 bp, probe
gcctatggagaagttcaacttgctg

SEQ ID NO: 198970 - DNA, 25 bp, probe
gcctatcggaagttcacttctgcta

SEQ ID NO: 198971 - DNA, 25 bp, probe
gcctacatggtgattctcttgtcca

SEQ ID NO: 198972 - DNA, 25 bp, probe
gcctacatggtgattctcttgtcca

SEQ ID NO: 198973 - DNA, 25 bp, probe
gcctacgcgaaaatctgtgacccag

SEQ ID NO: 198974 - DNA, 25 bp, probe
gcctacgcgaaaatctgtgacccag

SEQ ID NO: 198975 - DNA, 25 bp, probe
gcctacgcgaaaatctgtgacccag

SEQ ID NO: 198976 - DNA, 25 bp, probe
gcctacgcgaaaatctgtgacccag

SEQ ID NO: 198977 - DNA, 25 bp, probe
gcctcctgaaagcatcatgtaccgg

SEQ ID NO: 198978 - DNA, 25 bp, probe
gcctcctgaaagcatcatgtaccgg

SEQ ID NO: 198979 - DNA, 25 bp, probe
gcctcctgaaagcatcatgtaccgg

SEQ ID NO: 198980 - DNA, 25 bp, probe
gcctccaagagactatcagttcctt

SEQ ID NO: 198981 - DNA, 25 bp, probe
gcctgtcagagcttgattagaagcc

SEQ ID NO: 198982 - DNA, 25 bp, probe
gcctaagatgttttggcaactctag

SEQ ID NO: 198983 - DNA, 25 bp, probe
gcctaagtgatattacagccacctc

SEQ ID NO: 198984 - DNA, 25 bp, probe
gcctgggcagatgatgccagcaccc

SEQ ID NO: 198985 - DNA, 25 bp, probe
gcctcttcatggaagatagatgccc

SEQ ID NO: 198986 - DNA, 25 bp, probe
gcctcttcatggaagatagatgccc

SEQ ID NO: 198987 - DNA, 25 bp, probe
gcctcatgtctgctaaaacagccat

SEQ ID NO: 198988 - DNA, 25 bp, probe
gcctcatttggtgatcagtcagtca

SEQ ID NO: 198989 - DNA, 25 bp, probe
gcctgaatgagggctatgccaagta

SEQ ID NO: 198990 - DNA, 25 bp, probe
gcctgcaacaggctggccaacaagg

SEQ ID NO: 198991 - DNA, 25 bp, probe
gcctcagcaaggatgtgtacaacag

SEQ ID NO: 198992 - DNA, 25 bp, probe
gcctagagaaggctgtgagccaagg

SEQ ID NO: 198993 - DNA, 25 bp, probe
gcctcgagaagggcatgggcgattc

SEQ ID NO: 198994 - DNA, 25 bp, probe
gcctcggggcaggtgagcaggatgc

SEQ ID NO: 198995 - DNA, 25 bp, probe
gcctcggggcaggtgagcaggatgc

SEQ ID NO: 198996 - DNA, 25 bp, probe
gcctcggggcaggtgagcaggatgc

SEQ ID NO: 198997 - DNA, 25 bp, probe
gcctcggggcgggagagaggccacc

SEQ ID NO: 198998 - DNA, 25 bp, probe
gcctcaggtggggcgcaggagagcc

SEQ ID NO: 198999 - DNA, 25 bp, probe
gcctcaggtggggcgcaggagagcc

SEQ ID NO: 199000 - DNA, 25 bp, probe
gcctcaggctggggcagcattgaac

SEQ ID NO: 199001 - DNA, 25 bp, probe
gcctcaggctggggcagcatcgaac

SEQ ID NO: 199002 - DNA, 25 bp, probe
gcctcaggtgcatgccatgctcaga

SEQ ID NO: 199003 - DNA, 25 bp, probe
gcctgcatggagtacagcagcatgg

SEQ ID NO: 199004 - DNA, 25 bp, probe
gcctgcaggagaagtcgcagtgcgc

SEQ ID NO: 199005 - DNA, 25 bp, probe
gcctagctcagatgatgcgggagtg

SEQ ID NO: 199006 - DNA, 25 bp, probe
gctctatgcctttgtaggggtcaag

SEQ ID NO: 199007 - DNA, 25 bp, probe
gcctgtcctaagtgagggtctgcgg

SEQ ID NO: 199008 - DNA, 25 bp, probe
gcctgcccttggtggtcaggatggg

SEQ ID NO: 199009 - DNA, 25 bp, probe
gcctgagctcttggatgtggtcagc

SEQ ID NO: 199010 - DNA, 25 bp, probe
gcctggctcttgagaggtcccagtc

SEQ ID NO: 199011 - DNA, 25 bp, probe
gcctggctcttgagaggtcccagtc

SEQ ID NO: 199012 - DNA, 25 bp, probe
gccgagctctatgaaaagctgcccc

SEQ ID NO: 199013 - DNA, 25 bp, probe
gccggactacaacaagatctccttt

SEQ ID NO: 199014 - DNA, 25 bp, probe
gccggactacaacaagatctccttt

SEQ ID NO: 199015 - DNA, 25 bp, probe
gcctggatccaataatttacttttt

SEQ ID NO: 199016 - DNA, 25 bp, probe
gccggatccagagaacttcctgtgt

SEQ ID NO: 199017 - DNA, 25 bp, probe
gcctggatacaattaaccattttat

SEQ ID NO: 199018 - DNA, 25 bp, probe
gcctggccaaaatcaacatcgtcta

SEQ ID NO: 199019 - DNA, 25 bp, probe
gctcaacctacttacagtcacgtta

SEQ ID NO: 199020 - DNA, 25 bp, probe
gccgaccatcaccaagcaggaagtt

SEQ ID NO: 199021 - DNA, 25 bp, probe
gcctgaattacgagcagaaagatcc

SEQ ID NO: 199022 - DNA, 25 bp, probe
gcctgcaagtctccattcagaagcg

SEQ ID NO: 199023 - DNA, 25 bp, probe
gcctcgcatatatcttcagagagta

SEQ ID NO: 199024 - DNA, 25 bp, probe
gcctcgcatatatcttcagagagta

SEQ ID NO: 199025 - DNA, 25 bp, probe
gcctctgtgattggcccaggaggaa

SEQ ID NO: 199026 - DNA, 25 bp, probe
gcctggaattcgccaataggcggac

SEQ ID NO: 199027 - DNA, 25 bp, probe
gccggtcatttgaatgagacctgga

SEQ ID NO: 199028 - DNA, 25 bp, probe
gcctctgtccttggcagagaccttg

SEQ ID NO: 199029 - DNA, 25 bp, probe
gcctcttcctggccatggagaaggg

SEQ ID NO: 199030 - DNA, 25 bp, probe
gcctcttcctggccatggagaaggg

SEQ ID NO: 199031 - DNA, 25 bp, probe
gcctcttcctggccatggagaaggg

SEQ ID NO: 199032 - DNA, 25 bp, probe
gcctcaacttggccattcagaatgg

SEQ ID NO: 199033 - DNA, 25 bp, probe
gcctgcaagcttgcatgctctgaaa

SEQ ID NO: 199034 - DNA, 25 bp, probe
gcctgaactgggccattgatcagac

SEQ ID NO: 199035 - DNA, 25 bp, probe
gcctgaagcagggcagcatgtcccc

SEQ ID NO: 199036 - DNA, 25 bp, probe
gcctgcagggatgcatgtgtccccg

SEQ ID NO: 199037 - DNA, 25 bp, probe
gcctcgggatccagtgaagccagaa

SEQ ID NO: 199038 - DNA, 25 bp, probe
gcctctggtctgccaggtgaacggt

SEQ ID NO: 199039 - DNA, 25 bp, probe
gcctctggtctgccaggtgaacggt

SEQ ID NO: 199040 - DNA, 25 bp, probe
gcctgcttgtctggcggagaaagcc

SEQ ID NO: 199041 - DNA, 25 bp, probe
gcctccttctgggagacatcatagt

SEQ ID NO: 199042 - DNA, 25 bp, probe
gcctgcttttggagtcctattgtcg

SEQ ID NO: 199043 - DNA, 25 bp, probe
gcctgcaattggccaacttctttgc

SEQ ID NO: 199044 - DNA, 25 bp, probe
gcctgcaattggccaacttctttgc

SEQ ID NO: 199045 - DNA, 25 bp, probe
gcctctatctgtccaattattattt

SEQ ID NO: 199046 - DNA, 25 bp, probe
gcctctacttccatcagatatatgt

SEQ ID NO: 199047 - DNA, 25 bp, probe
gcctccgttcctagctggaatgatc

SEQ ID NO: 199048 - DNA, 25 bp, probe
gcctccgttcctagctggaatgatc

SEQ ID NO: 199049 - DNA, 25 bp, probe
gcctcacctaataggctgggagact

SEQ ID NO: 199050 - DNA, 25 bp, probe
gcctctcagcaaaatgggagggacg

SEQ ID NO: 199051 - DNA, 25 bp, probe
gcctctccagcaactgggatgacga

SEQ ID NO: 199052 - DNA, 25 bp, probe
gcctgctcaccatctcagtgagggg

SEQ ID NO: 199053 - DNA, 25 bp, probe
gcctgctcaccatctcagtgagggg

SEQ ID NO: 199054 - DNA, 25 bp, probe
gcctgcatagcacaccttagatgtg

SEQ ID NO: 199055 - DNA, 25 bp, probe
gcctgttgctgggccttagatccag

SEQ ID NO: 199056 - DNA, 25 bp, probe
gcctgcattgtacccactaattgca

SEQ ID NO: 199057 - DNA, 25 bp, probe
gcctgcattgtacccactaattgca

SEQ ID NO: 199058 - DNA, 25 bp, probe
gcctcagtgtcatactgtatttcag

SEQ ID NO: 199059 - DNA, 25 bp, probe
gcctgcagtgtggaaagtttgacgc

SEQ ID NO: 199060 - DNA, 25 bp, probe
gcctgcatggtgggagctggttgaa

SEQ ID NO: 199061 - DNA, 25 bp, probe
gcctctgtgttggtgtggatcctaa

SEQ ID NO: 199062 - DNA, 25 bp, probe
gcctctgtgttggtgtggatcctaa

SEQ ID NO: 199063 - DNA, 25 bp, probe
gcctctgtttctgcatttgtataat

SEQ ID NO: 199064 - DNA, 25 bp, probe
gcctctttcctgttgttgttaatga

SEQ ID NO: 199065 - DNA, 25 bp, probe
gccgatttttgaatgtgattttaaa

SEQ ID NO: 199066 - DNA, 25 bp, probe
gccgatttttgaatgtgattttaaa

SEQ ID NO: 199067 - DNA, 25 bp, probe
gcctggattttgatctgtatttgaa

SEQ ID NO: 199068 - DNA, 25 bp, probe
gcctgggtttgactgtgcttaccaa

SEQ ID NO: 199069 - DNA, 25 bp, probe
gcctgggtttgactgtgcttaccaa

SEQ ID NO: 199070 - DNA, 25 bp, probe
gcctcggtcatgaagggcttcacct

SEQ ID NO: 199071 - DNA, 25 bp, probe
gcctcgagtccgaggtatgacgcgg

SEQ ID NO: 199072 - DNA, 25 bp, probe
gcctccggctctcagagcataatcc

SEQ ID NO: 199073 - DNA, 25 bp, probe
gcctcatgcacctttcaaaacatcc

SEQ ID NO: 199074 - DNA, 25 bp, probe
gcctctgtctatttcaatatagaac

SEQ ID NO: 199075 - DNA, 25 bp, probe
gcctctgtccatttcaagggtgact

SEQ ID NO: 199076 - DNA, 25 bp, probe
gcctctgctaagctcaaggcgtgag

SEQ ID NO: 199077 - DNA, 25 bp, probe
gcctcttagcagcctaaagcaaggg

SEQ ID NO: 199078 - DNA, 25 bp, probe
gcctgcttagatgataaaatgaggc

SEQ ID NO: 199079 - DNA, 25 bp, probe
gcccctctgttgaacaaatggcccc

SEQ ID NO: 199080 - DNA, 25 bp, probe
gcctcccagaatggaaagtcccagt

SEQ ID NO: 199081 - DNA, 25 bp, probe
gcctcccagtgtttaagtggctcat

SEQ ID NO: 199082 - DNA, 25 bp, probe
gcctgtccgtctttgtcaataacat

SEQ ID NO: 199083 - DNA, 25 bp, probe
gcctgcaccaggggtgcacaataaa

SEQ ID NO: 199084 - DNA, 25 bp, probe
gcctgcccagactgatgagcacatc

SEQ ID NO: 199085 - DNA, 25 bp, probe
gcctcagtgcaatggcagtcagcat

SEQ ID NO: 199086 - DNA, 25 bp, probe
gcctgagtcacagtgtgctgtcaca

SEQ ID NO: 199087 - DNA, 25 bp, probe
gcctgagtcacagtgtgctgtcaca

SEQ ID NO: 199088 - DNA, 25 bp, probe
gcctgtgctgtgactcgagtcacac

SEQ ID NO: 199089 - DNA, 25 bp, probe
gcctggattatctgcactcagagcg

SEQ ID NO: 199090 - DNA, 25 bp, probe
gcctggattatctgcactcagagcg

SEQ ID NO: 199091 - DNA, 25 bp, probe
tccggatttcagacctcggtttggc

SEQ ID NO: 199092 - DNA, 25 bp, probe
tccggatttcagacctcggtttggc

SEQ ID NO: 199093 - DNA, 25 bp, probe
gccgtgtttatgcctcacgggcttg

SEQ ID NO: 199094 - DNA, 25 bp, probe
gccggactatgacatccgggccgac

SEQ ID NO: 199095 - DNA, 25 bp, probe
gccggactatgacatccgggccgac

SEQ ID NO: 199096 - DNA, 25 bp, probe
gccggactatgacatccgggccgac

SEQ ID NO: 199097 - DNA, 25 bp, probe
gccggactatgacatccgggccgac

SEQ ID NO: 199098 - DNA, 25 bp, probe
gcctggagtctacaccaaggtctac

SEQ ID NO: 199099 - DNA, 25 bp, probe
gcctggattctacatacaagtatat

SEQ ID NO: 199100 - DNA, 25 bp, probe
gcctgagaccaactatctaggaaat

SEQ ID NO: 199101 - DNA, 25 bp, probe
gcctgagaccaactatctaggaaat

SEQ ID NO: 199102 - DNA, 25 bp, probe
gcctgaacacagttttcaggactct

SEQ ID NO: 199103 - DNA, 25 bp, probe
gcctgattctacttttgaaaattac

SEQ ID NO: 199104 - DNA, 25 bp, probe
gcctgcactcttatttcactaaaga

SEQ ID NO: 199105 - DNA, 25 bp, probe
gcctgcggcttaatttgactcaaca

SEQ ID NO: 199106 - DNA, 25 bp, probe
gccggactctttgtgataaacactg

SEQ ID NO: 199107 - DNA, 25 bp, probe
gccggactctttgtgataaacactg

SEQ ID NO: 199108 - DNA, 25 bp, probe
gccggccctggttagtgaagtacgg

SEQ ID NO: 199109 - DNA, 25 bp, probe
gccggccgtggaagggggacacgtg

SEQ ID NO: 199110 - DNA, 25 bp, probe
gcctgggacggaagatcgggagcgg

SEQ ID NO: 199111 - DNA, 25 bp, probe
gccgagctacaggtaccggcgacgg

SEQ ID NO: 199112 - DNA, 25 bp, probe
gctagggaagtttcagggtacgctg

SEQ ID NO: 199113 - DNA, 25 bp, probe
gccgggaagaaatggggccacgagg

SEQ ID NO: 199114 - DNA, 25 bp, probe
tccgggtgaaagtgaggccggggcg

SEQ ID NO: 199115 - DNA, 25 bp, probe
gccgggtgaagcctgtgacccggga

SEQ ID NO: 199116 - DNA, 25 bp, probe
gcctgggggattatgtgcctgggga

SEQ ID NO: 199117 - DNA, 25 bp, probe
tcctttggggtgtggcctaggaagt

SEQ ID NO: 199118 - DNA, 25 bp, probe
gctctttgggggaggccacggagcc

SEQ ID NO: 199119 - DNA, 25 bp, probe
gctctttgggggaggccacggagcc

SEQ ID NO: 199120 - DNA, 25 bp, probe
gccggtgggaggtgcatggcatcgg

SEQ ID NO: 199121 - DNA, 25 bp, probe
gcctggtctggacacagtgcccgtg

SEQ ID NO: 199122 - DNA, 25 bp, probe
gcctgctgagatcataccaggccct

SEQ ID NO: 199123 - DNA, 25 bp, probe
gcctggacatgatgcctaagtcctt

SEQ ID NO: 199124 - DNA, 25 bp, probe
gcctggagcactgcatcgagtttgt

SEQ ID NO: 199125 - DNA, 25 bp, probe
gccgtggctgtgccaaactcattga

SEQ ID NO: 199126 - DNA, 25 bp, probe
gcctggaatgtaaatcagctgtgtg

SEQ ID NO: 199127 - DNA, 25 bp, probe
gcctgcgggcctaacatgttgtgcc

SEQ ID NO: 199128 - DNA, 25 bp, probe
gcctctatgctacaagatttgtcca

SEQ ID NO: 199129 - DNA, 25 bp, probe
gcctcttctaaaagctactgagctc

SEQ ID NO: 199130 - DNA, 25 bp, probe
gcctctataaaaacgtcgcacatgc

SEQ ID NO: 199131 - DNA, 25 bp, probe
gcctctataaaaacgtcgcacatgc

SEQ ID NO: 199132 - DNA, 25 bp, probe
gcctctgtgaagatctctgggctcc

SEQ ID NO: 199133 - DNA, 25 bp, probe
gcctctgtgaagatctctgggctcc

SEQ ID NO: 199134 - DNA, 25 bp, probe
gcctctgaggaaaactatgtgcccg

SEQ ID NO: 199135 - DNA, 25 bp, probe
gcctgctagggaataccagcgcttc

SEQ ID NO: 199136 - DNA, 25 bp, probe
gcctgcttcggtgactcaggtggac

SEQ ID NO: 199137 - DNA, 25 bp, probe
gcctgctggctgagtacacgggggc

SEQ ID NO: 199138 - DNA, 25 bp, probe
gcctctctgctgatgacatacgtgg

SEQ ID NO: 199139 - DNA, 25 bp, probe
gccgtctctgaggagtacctcgacc

SEQ ID NO: 199140 - DNA, 25 bp, probe
gccgtctctgaggagtacctcgacc

SEQ ID NO: 199141 - DNA, 25 bp, probe
gctcagtcttctgaactccagggac

SEQ ID NO: 199142 - DNA, 25 bp, probe
gctcagttcttggaggtcaagggca

SEQ ID NO: 199143 - DNA, 25 bp, probe
gcctgttttgggatcacaaacagga

SEQ ID NO: 199144 - DNA, 25 bp, probe
gcctctaactggctgtacagaaaag

SEQ ID NO: 199145 - DNA, 25 bp, probe
gcgctttactggcacttcaggaaca

SEQ ID NO: 199146 - DNA, 25 bp, probe
gcctcccaagggactgaagtataca

SEQ ID NO: 199147 - DNA, 25 bp, probe
gcctcccaagtagctagactacagg

SEQ ID NO: 199148 - DNA, 25 bp, probe
gccccaaacaaacctagctaactgc

SEQ ID NO: 199149 - DNA, 25 bp, probe
gccccaaacaaacctagctaactgc

SEQ ID NO: 199150 - DNA, 25 bp, probe
gcctccaaacaaacactggagatca

SEQ ID NO: 199151 - DNA, 25 bp, probe
gcctcgatacacgggacgttgagca

SEQ ID NO: 199152 - DNA, 25 bp, probe
gcctccacaccagtggagtcttcga

SEQ ID NO: 199153 - DNA, 25 bp, probe
gcctgcacttacaggcgtttcgagc

SEQ ID NO: 199154 - DNA, 25 bp, probe
gcctgactataagggcagcttccct

SEQ ID NO: 199155 - DNA, 25 bp, probe
gcctgctcaaagcggcaggctccct

SEQ ID NO: 199156 - DNA, 25 bp, probe
gcctctccaagatggaggacccggg

SEQ ID NO: 199157 - DNA, 25 bp, probe
gcaccttcaaagggacacctacggc

SEQ ID NO: 199158 - DNA, 25 bp, probe
gcccaagtaactggaccctgttggc

SEQ ID NO: 199159 - DNA, 25 bp, probe
gcctgaagttttgacttctgctttc

SEQ ID NO: 199160 - DNA, 25 bp, probe
gcctgaagttcttaagctgtcatta

SEQ ID NO: 199161 - DNA, 25 bp, probe
gctccaaggcttcaaggctttgcaa

SEQ ID NO: 199162 - DNA, 25 bp, probe
gccggagagtgtcagaactcttctg

SEQ ID NO: 199163 - DNA, 25 bp, probe
gccggacgagtgggaggtgtctcga

SEQ ID NO: 199164 - DNA, 25 bp, probe
gccggactggacggagtgtgagctc

SEQ ID NO: 199165 - DNA, 25 bp, probe
gcctgagactgtcagaagttgacct

SEQ ID NO: 199166 - DNA, 25 bp, probe
gcctggactggcgagatttttgctc

SEQ ID NO: 199167 - DNA, 25 bp, probe
gcctggactggcgagatttttgctc

SEQ ID NO: 199168 - DNA, 25 bp, probe
gcctgcgacagatgaggtatcttct

SEQ ID NO: 199169 - DNA, 25 bp, probe
gcctgcagtgcgtgaagtacattca

SEQ ID NO: 199170 - DNA, 25 bp, probe
gcctgagctcgacaagttgcatcaa

SEQ ID NO: 199171 - DNA, 25 bp, probe
gcctgcacttctcaagttgtcatgt

SEQ ID NO: 199172 - DNA, 25 bp, probe
gcctgggtcttagcattgatcagtg

SEQ ID NO: 199173 - DNA, 25 bp, probe
gcctgggtcttagcattgatcagtg

SEQ ID NO: 199174 - DNA, 25 bp, probe
gccgaggacactttctggctagtgg

SEQ ID NO: 199175 - DNA, 25 bp, probe
gccggggtagcttcgctaaggtgaa

SEQ ID NO: 199176 - DNA, 25 bp, probe
gcacgacggttttcctagactgtcg

SEQ ID NO: 199177 - DNA, 25 bp, probe
gccgaagagcttatttagcctacag

SEQ ID NO: 199178 - DNA, 25 bp, probe
gccggagagtatgtccaacctgaca

SEQ ID NO: 199179 - DNA, 25 bp, probe
gcctgggcaaacataattactgccg

SEQ ID NO: 199180 - DNA, 25 bp, probe
gccgaggagaacttcaaaacctttg

SEQ ID NO: 199181 - DNA, 25 bp, probe
gcgggtgggaaccaaacaccttcag

SEQ ID NO: 199182 - DNA, 25 bp, probe
gcgggtgggaaccaaacaccttcag

SEQ ID NO: 199183 - DNA, 25 bp, probe
gcgaggcttgggaggaaaccgccgc

SEQ ID NO: 199184 - DNA, 25 bp, probe
gccctttcggttcaagaagagccag

SEQ ID NO: 199185 - DNA, 25 bp, probe
gccgatttgggaaccaagctattcc

SEQ ID NO: 199186 - DNA, 25 bp, probe
gcctgtctttgtcacaaaatttcat

SEQ ID NO: 199187 - DNA, 25 bp, probe
gcctgtccaagggctcaagactttc

SEQ ID NO: 199188 - DNA, 25 bp, probe
gcctgcaccaaagtctcaagctttg

SEQ ID NO: 199189 - DNA, 25 bp, probe
gctccaccaacaggctaaatttggg

SEQ ID NO: 199190 - DNA, 25 bp, probe
gcctctgccaaaggatgtgatatat

SEQ ID NO: 199191 - DNA, 25 bp, probe
gcctctctcaggagtatcttacctg

SEQ ID NO: 199192 - DNA, 25 bp, probe
gcctcatcaaggagacctaccagct

SEQ ID NO: 199193 - DNA, 25 bp, probe
gcctcatcaaggagacctaccagct

SEQ ID NO: 199194 - DNA, 25 bp, probe
gcctgagcagggagattataacagc

SEQ ID NO: 199195 - DNA, 25 bp, probe
gcctggcacggagtttgtgcagaag

SEQ ID NO: 199196 - DNA, 25 bp, probe
gcctggtatggagtccagtctaagc

SEQ ID NO: 199197 - DNA, 25 bp, probe
gcctgttgaggagccaattaaattt

SEQ ID NO: 199198 - DNA, 25 bp, probe
gcctggtacaggaacataaaaagct

SEQ ID NO: 199199 - DNA, 25 bp, probe
gccgtgctccatgaactcaaacacc

SEQ ID NO: 199200 - DNA, 25 bp, probe
gccgatgtctgggaacttgggacgc

SEQ ID NO: 199201 - DNA, 25 bp, probe
gcctgatgtaggtaaagctgggatc

SEQ ID NO: 199202 - DNA, 25 bp, probe
gcctgatgggtgtttacttgttctt

SEQ ID NO: 199203 - DNA, 25 bp, probe
gcctgatgggtgtttacttgttctt

SEQ ID NO: 199204 - DNA, 25 bp, probe
gcctgagtttgagtgtcctggttgt

SEQ ID NO: 199205 - DNA, 25 bp, probe
gcctggattgaaatgtccctggttt

SEQ ID NO: 199206 - DNA, 25 bp, probe
gccgtttgataattcatccgtggtt

SEQ ID NO: 199207 - DNA, 25 bp, probe
gcctgtgggaacctctcagggtggt

SEQ ID NO: 199208 - DNA, 25 bp, probe
gcctctgaaaagctgctcggggttt

SEQ ID NO: 199209 - DNA, 25 bp, probe
gcctgagacaaaacctgaggggttg

SEQ ID NO: 199210 - DNA, 25 bp, probe
gcctgtgatccctagcttgagggga

SEQ ID NO: 199211 - DNA, 25 bp, probe
gcctgcgatccacagacgaggagga

SEQ ID NO: 199212 - DNA, 25 bp, probe
gccgactacagcaacctacgggaga

SEQ ID NO: 199213 - DNA, 25 bp, probe
gcctcctatccaaagctacggatga

SEQ ID NO: 199214 - DNA, 25 bp, probe
gcctcccatcagaatggaacgagtt

SEQ ID NO: 199215 - DNA, 25 bp, probe
gcctctcgatgtaggatgaaccgtt

SEQ ID NO: 199216 - DNA, 25 bp, probe
gcctccaagatttcagaagccaagt

SEQ ID NO: 199217 - DNA, 25 bp, probe
gcctctccagtttctgaggccagag

SEQ ID NO: 199218 - DNA, 25 bp, probe
gcctcgcctgtatggggagcaggga

SEQ ID NO: 199219 - DNA, 25 bp, probe
gcctcgcctgtatggggagcaggga

SEQ ID NO: 199220 - DNA, 25 bp, probe
gcctcccgctgcggaatgggcgggt

SEQ ID NO: 199221 - DNA, 25 bp, probe
gcctgctacttggtgaaggagcggg

SEQ ID NO: 199222 - DNA, 25 bp, probe
gcctctcaccgcagaagagggagaa

SEQ ID NO: 199223 - DNA, 25 bp, probe
gcctctcaccatcatgaaaaggaaa

SEQ ID NO: 199224 - DNA, 25 bp, probe
gccgtgacctcattaacttggccaa

SEQ ID NO: 199225 - DNA, 25 bp, probe
gcctgtggcctttgcaatttgttaa

SEQ ID NO: 199226 - DNA, 25 bp, probe
gcgatcgctgccaggatatacgtaa

SEQ ID NO: 199227 - DNA, 25 bp, probe
gcctctgtgccatggatgattcttt

SEQ ID NO: 199228 - DNA, 25 bp, probe
gcctgcggccaacatgatggctggg

SEQ ID NO: 199229 - DNA, 25 bp, probe
gcctccccatagggaatctgggggt

SEQ ID NO: 199230 - DNA, 25 bp, probe
gcctccccatagggaatctgggggt

SEQ ID NO: 199231 - DNA, 25 bp, probe
gccccagccaaggaacctaaagtgg

SEQ ID NO: 199232 - DNA, 25 bp, probe
gccggaacagggtgtgccaaagtcg

SEQ ID NO: 199233 - DNA, 25 bp, probe
gcctgtgaatggcgtgagcccataa

SEQ ID NO: 199234 - DNA, 25 bp, probe
gcctgtgaatggcgtgagcccataa

SEQ ID NO: 199235 - DNA, 25 bp, probe
gccggagatgagccgaggcttgctc

SEQ ID NO: 199236 - DNA, 25 bp, probe
gccggagtgcttcgaggacggctcg

SEQ ID NO: 199237 - DNA, 25 bp, probe
gcgtggtttatgaggcagtggccgg

SEQ ID NO: 199238 - DNA, 25 bp, probe
gccggttgttgctggagtggtgggc

SEQ ID NO: 199239 - DNA, 25 bp, probe
gccgggtgttgtatgtgtggtgact

SEQ ID NO: 199240 - DNA, 25 bp, probe
gccgaggtaaatacagtgaagtatt

SEQ ID NO: 199241 - DNA, 25 bp, probe
gccggcttaaagggtggatttctga

SEQ ID NO: 199242 - DNA, 25 bp, probe
gccggaaaaagccgggggcctgcat

SEQ ID NO: 199243 - DNA, 25 bp, probe
gccggaaaaagccgggggcctgcat

SEQ ID NO: 199244 - DNA, 25 bp, probe
gccggaaatacatcagggagaatct

SEQ ID NO: 199245 - DNA, 25 bp, probe
gccggaaatacatcagggagaatct

SEQ ID NO: 199246 - DNA, 25 bp, probe
gccgtactatgccacgagggtgaat

SEQ ID NO: 199247 - DNA, 25 bp, probe
gcctgtctaatgaacaggtgttgaa

SEQ ID NO: 199248 - DNA, 25 bp, probe
gcctctcaaagtgctggaattacag

SEQ ID NO: 199249 - DNA, 25 bp, probe
ttcccaattgggattttacatctgg

SEQ ID NO: 199250 - DNA, 25 bp, probe
gccccaggagggagccatcctggct

SEQ ID NO: 199251 - DNA, 25 bp, probe
gccccaagagcggcttcctggggcc

SEQ ID NO: 199252 - DNA, 25 bp, probe
gcacgtaaacgcggttctaggagcc

SEQ ID NO: 199253 - DNA, 25 bp, probe
gccggaaactgcaagttccgacgcc

SEQ ID NO: 199254 - DNA, 25 bp, probe
gcctgtataactatttccatgatgc

SEQ ID NO: 199255 - DNA, 25 bp, probe
gcctgcgaaagccttttggtgactt

SEQ ID NO: 199256 - DNA, 25 bp, probe
gcctgcgctatgagcttcttgagga

SEQ ID NO: 199257 - DNA, 25 bp, probe
gcctgcgctatgagcttcttgagga

SEQ ID NO: 199258 - DNA, 25 bp, probe
gcctccttggaggctctggagacaa

SEQ ID NO: 199259 - DNA, 25 bp, probe
gcctgactttgatcatcaggagcct

SEQ ID NO: 199260 - DNA, 25 bp, probe
gcctccttcagagattcagagcctg

SEQ ID NO: 199261 - DNA, 25 bp, probe
gcctcctgcttataacaagccatca

SEQ ID NO: 199262 - DNA, 25 bp, probe
gcctgcgtgtcataaactgaactac

SEQ ID NO: 199263 - DNA, 25 bp, probe
gcctgcagattataactctcaaata

SEQ ID NO: 199264 - DNA, 25 bp, probe
gcctgcaggttgtaagtgcccacta

SEQ ID NO: 199265 - DNA, 25 bp, probe
gcctgctggggatggtgccagctgt

SEQ ID NO: 199266 - DNA, 25 bp, probe
gcctcctggagtcgtgttcagggaa

SEQ ID NO: 199267 - DNA, 25 bp, probe
gcctctcgagggctggatcagcagc

SEQ ID NO: 199268 - DNA, 25 bp, probe
gcctcccaggagaataacatgcaag

SEQ ID NO: 199269 - DNA, 25 bp, probe
gcctcccaggagaataacatgcaag

SEQ ID NO: 199270 - DNA, 25 bp, probe
gcctctgaaagacataacataagca

SEQ ID NO: 199271 - DNA, 25 bp, probe
gcctgctacacatacaacactgaaa

SEQ ID NO: 199272 - DNA, 25 bp, probe
gcctgctacacatacaacactgaaa

SEQ ID NO: 199273 - DNA, 25 bp, probe
gcctgtgctctcaagacaaactgaa

SEQ ID NO: 199274 - DNA, 25 bp, probe
gctctttccaaatggactagactac

SEQ ID NO: 199275 - DNA, 25 bp, probe
gccggatccaactggaatattctca

SEQ ID NO: 199276 - DNA, 25 bp, probe
gccgttagcgactgcgacgttcgat

SEQ ID NO: 199277 - DNA, 25 bp, probe
gcctgtttgctgtcattctgagcag

SEQ ID NO: 199278 - DNA, 25 bp, probe
gccgtggttgcattttagaagactt

SEQ ID NO: 199279 - DNA, 25 bp, probe
gccgtggttgcattttagaagactt

SEQ ID NO: 199280 - DNA, 25 bp, probe
gcccaggttcttgatcggatgtttc

SEQ ID NO: 199281 - DNA, 25 bp, probe
gcccaagaatttgtcaggaggtgac

SEQ ID NO: 199282 - DNA, 25 bp, probe
gccccagtttatcttgcgggatgag

SEQ ID NO: 199283 - DNA, 25 bp, probe
gccccagtttatcttgcgggatgag

SEQ ID NO: 199284 - DNA, 25 bp, probe
gcccaaggagtaccctcctaataag

SEQ ID NO: 199285 - DNA, 25 bp, probe
gccgcaaggagagctactccgtata

SEQ ID NO: 199286 - DNA, 25 bp, probe
gcctgatgagtatgctctaaaagaa

SEQ ID NO: 199287 - DNA, 25 bp, probe
gcctggcagctctgatcaggaaagt

SEQ ID NO: 199288 - DNA, 25 bp, probe
gcctgtgcccagtacagaaaggtgt

SEQ ID NO: 199289 - DNA, 25 bp, probe
gcctgcatcatggagattccaaagg

SEQ ID NO: 199290 - DNA, 25 bp, probe
gcctcctcgagaagccaacagagca

SEQ ID NO: 199291 - DNA, 25 bp, probe
gcctcgctgcagcaagagaacaagg

SEQ ID NO: 199292 - DNA, 25 bp, probe
gcctcctggtgactgatggacgagt

SEQ ID NO: 199293 - DNA, 25 bp, probe
gcctgccaggtggctgagggcatga

SEQ ID NO: 199294 - DNA, 25 bp, probe
gcctgccaggtggctgagggcatga

SEQ ID NO: 199295 - DNA, 25 bp, probe
gcctccagctcttggaggcagcagt

SEQ ID NO: 199296 - DNA, 25 bp, probe
gcctccctcgcagtggcagaggcat

SEQ ID NO: 199297 - DNA, 25 bp, probe
gcctccctagattggctgagagccc

SEQ ID NO: 199298 - DNA, 25 bp, probe
gcctcccaagtagctgggcatgcgc

SEQ ID NO: 199299 - DNA, 25 bp, probe
gcctcccgagtagctgggattacag

SEQ ID NO: 199300 - DNA, 25 bp, probe
gcccctcgagattttggaattcgtg

SEQ ID NO: 199301 - DNA, 25 bp, probe
gcccctcgagattttggaattcgtg

SEQ ID NO: 199302 - DNA, 25 bp, probe
gcctcccgagcagctgggattacag

SEQ ID NO: 199303 - DNA, 25 bp, probe
gcctcccaagcagctgggactacag

SEQ ID NO: 199304 - DNA, 25 bp, probe
gcctccagagtagctgggaccgcag

SEQ ID NO: 199305 - DNA, 25 bp, probe
gcctgcaaactcgggtggaccaaat

SEQ ID NO: 199306 - DNA, 25 bp, probe
gcctgcaaactcgggtggaccaaat

SEQ ID NO: 199307 - DNA, 25 bp, probe
gcctgcagtactgccgcttaaagaa

SEQ ID NO: 199308 - DNA, 25 bp, probe
gcctgaagaccacgcgtctgaagga

SEQ ID NO: 199309 - DNA, 25 bp, probe
gcctgacaaccactggtctgtaggg

SEQ ID NO: 199310 - DNA, 25 bp, probe
gcctgcataccttgttgttgttgtt

SEQ ID NO: 199311 - DNA, 25 bp, probe
gcctgcaagctttggatttcctgca

SEQ ID NO: 199312 - DNA, 25 bp, probe
gccgcaccttgtcatgtaccatcaa

SEQ ID NO: 199313 - DNA, 25 bp, probe
gccgcaccttgtcatgtaccatcaa

SEQ ID NO: 199314 - DNA, 25 bp, probe
gccccaattatccaatagtctaata

SEQ ID NO: 199315 - DNA, 25 bp, probe
gccccagatttactaaatcaatctg

SEQ ID NO: 199316 - DNA, 25 bp, probe
gcctccagttttcaaaggccaggcc

SEQ ID NO: 199317 - DNA, 25 bp, probe
gctcccagttacagaaaggccaagt

SEQ ID NO: 199318 - DNA, 25 bp, probe
gctgcccactgtaaaaaaccgaaat

SEQ ID NO: 199319 - DNA, 25 bp, probe
gcccacctgtcaaacaaagccagaa

SEQ ID NO: 199320 - DNA, 25 bp, probe
gcgaacatcttcatataaactcaag

SEQ ID NO: 199321 - DNA, 25 bp, probe
gcgcagttcctcatcaaaaccaagt

SEQ ID NO: 199322 - DNA, 25 bp, probe
gcctggatcttacaaaatcacagag

SEQ ID NO: 199323 - DNA, 25 bp, probe
gcctgcgatctcagtgacaatgatc

SEQ ID NO: 199324 - DNA, 25 bp, probe
gcctgcatatgcagaatgacgatgc

SEQ ID NO: 199325 - DNA, 25 bp, probe
gcctgctgtgcaaggaggcttgctg

SEQ ID NO: 199326 - DNA, 25 bp, probe
gcctgtgtagcagtgagacatcatg

SEQ ID NO: 199327 - DNA, 25 bp, probe
gccgtgatgtgcaatgaagcatctc

SEQ ID NO: 199328 - DNA, 25 bp, probe
gcatcagctacgtcaacagctgcct

SEQ ID NO: 199329 - DNA, 25 bp, probe
gcctgctatcgagcatgagcaccta

SEQ ID NO: 199330 - DNA, 25 bp, probe
gcctgtgactgaggctagaagctgc

SEQ ID NO: 199331 - DNA, 25 bp, probe
gcctgtggagaggtaaagctggctt

SEQ ID NO: 199332 - DNA, 25 bp, probe
gcctgccgtggtgataatgtttctt

SEQ ID NO: 199333 - DNA, 25 bp, probe
gcctccagtcataaaaatgtgttct

SEQ ID NO: 199334 - DNA, 25 bp, probe
gcctgccggctgcaagaagtgtcac

SEQ ID NO: 199335 - DNA, 25 bp, probe
gcctggtgtcatcgacacaagtcca

SEQ ID NO: 199336 - DNA, 25 bp, probe
gcctggtacaagggaatgtcacaag

SEQ ID NO: 199337 - DNA, 25 bp, probe
gccggacaacattgggatgctcaaa

SEQ ID NO: 199338 - DNA, 25 bp, probe
gccgggcaccatgtggggcaagatc

SEQ ID NO: 199339 - DNA, 25 bp, probe
gccggagacctcaagccggcagaca

SEQ ID NO: 199340 - DNA, 25 bp, probe
gcctggtaccgcgaggagagcgaca

SEQ ID NO: 199341 - DNA, 25 bp, probe
gcctggtaccgcgaggagagcgaca

SEQ ID NO: 199342 - DNA, 25 bp, probe
gcctggaaccaggcggagaaccggc

SEQ ID NO: 199343 - DNA, 25 bp, probe
gcctgtggaactccgggatacgtgg

SEQ ID NO: 199344 - DNA, 25 bp, probe
gcctgtgggagcggctggaatttgt

SEQ ID NO: 199345 - DNA, 25 bp, probe
gcctgggctaatgctcaaagctgtg

SEQ ID NO: 199346 - DNA, 25 bp, probe
gcctgggtttacaaaagattagtgg

SEQ ID NO: 199347 - DNA, 25 bp, probe
gctgtgggtttccaaccaggggaag

SEQ ID NO: 199348 - DNA, 25 bp, probe
gcctggcttatagaaccaaggaaag

SEQ ID NO: 199349 - DNA, 25 bp, probe
gcctggcttatagaaccaaggaaag

SEQ ID NO: 199350 - DNA, 25 bp, probe
gcctgtgttcagtggcacctagagg

SEQ ID NO: 199351 - DNA, 25 bp, probe
gcctgaggtctgatggcctctaata

SEQ ID NO: 199352 - DNA, 25 bp, probe
gcctgaggctgcaggacccagaatc

SEQ ID NO: 199353 - DNA, 25 bp, probe
gcctgaagtgatcacatcccagttc

SEQ ID NO: 199354 - DNA, 25 bp, probe
gcctggcagaatcacagtctcacat

SEQ ID NO: 199355 - DNA, 25 bp, probe
gcctggaagagatcggtacagaccc

SEQ ID NO: 199356 - DNA, 25 bp, probe
gcctcctagaagtggaacagactga

SEQ ID NO: 199357 - DNA, 25 bp, probe
gcctgcgggacagagtgagaccctg

SEQ ID NO: 199358 - DNA, 25 bp, probe
gcctgctggaacggaaagagaccag

SEQ ID NO: 199359 - DNA, 25 bp, probe
gcctgggcaagagaacaagatcctg

SEQ ID NO: 199360 - DNA, 25 bp, probe
gcctgtggaggacgaggcggaacgc

SEQ ID NO: 199361 - DNA, 25 bp, probe
gcctgtgtggggtggagccaaacaa

SEQ ID NO: 199362 - DNA, 25 bp, probe
gcctgtggggactgaacctggaaga

SEQ ID NO: 199363 - DNA, 25 bp, probe
gcctgtgcgggatgaggagtcggaa

SEQ ID NO: 199364 - DNA, 25 bp, probe
gcctgtatgtggtgtggggcgtgga

SEQ ID NO: 199365 - DNA, 25 bp, probe
gcctgtatgtggtgtggggcgtgga

SEQ ID NO: 199366 - DNA, 25 bp, probe
gccgatttggacttggcagtcgaga

SEQ ID NO: 199367 - DNA, 25 bp, probe
gccgtattggccaggctgatttcaa

SEQ ID NO: 199368 - DNA, 25 bp, probe
gccggagggccaatggctctgttgc

SEQ ID NO: 199369 - DNA, 25 bp, probe
gcctgaggcggccaattatcgtgtc

SEQ ID NO: 199370 - DNA, 25 bp, probe
gcctgaggcggccaattatcgtgtc

SEQ ID NO: 199371 - DNA, 25 bp, probe
gcctgaagtacacattctctgtgga

SEQ ID NO: 199372 - DNA, 25 bp, probe
gcctggaaacgattttctgtatgat

SEQ ID NO: 199373 - DNA, 25 bp, probe
gcctgatggaaggtgtttttgtcat

SEQ ID NO: 199374 - DNA, 25 bp, probe
gcctgtgatgggctcttcaaggtct

SEQ ID NO: 199375 - DNA, 25 bp, probe
gcctgagagagcgatgtcctcgagg

SEQ ID NO: 199376 - DNA, 25 bp, probe
gcctgagaggccatctgcatatgaa

SEQ ID NO: 199377 - DNA, 25 bp, probe
gcctgccagaacatgctgtttgaga

SEQ ID NO: 199378 - DNA, 25 bp, probe
gcctgtgacagaattcgctgttaag

SEQ ID NO: 199379 - DNA, 25 bp, probe
gcctgatgaagagtcttactgtaag

SEQ ID NO: 199380 - DNA, 25 bp, probe
gcctgtgatggcatctggaatgtga

SEQ ID NO: 199381 - DNA, 25 bp, probe
gcgatgatcattatcgaactgtgta

SEQ ID NO: 199382 - DNA, 25 bp, probe
gcctgcatatattatcgtactggta

SEQ ID NO: 199383 - DNA, 25 bp, probe
gcctgcatatattatcgtactggta

SEQ ID NO: 199384 - DNA, 25 bp, probe
gcctgtgaatgctgagtgagcgagt

SEQ ID NO: 199385 - DNA, 25 bp, probe
gcctgtgacatgcaggttctgggcc

SEQ ID NO: 199386 - DNA, 25 bp, probe
gcctgccagtgaaggtcactggact

SEQ ID NO: 199387 - DNA, 25 bp, probe
gcctccatctcatgtatcatctgga

SEQ ID NO: 199388 - DNA, 25 bp, probe
gcctgtcagctccagattcatcagg

SEQ ID NO: 199389 - DNA, 25 bp, probe
gcctgctcgctcaggtgcatatgga

SEQ ID NO: 199390 - DNA, 25 bp, probe
gcctgctcatgtgaggctgttgctc

SEQ ID NO: 199391 - DNA, 25 bp, probe
gcctgcaatgcaaaggccttgcacc

SEQ ID NO: 199392 - DNA, 25 bp, probe
gcctgcaatgccaggccatgtgccc

SEQ ID NO: 199393 - DNA, 25 bp, probe
gcctgcaatgccaggccatgtgccc

SEQ ID NO: 199394 - DNA, 25 bp, probe
gcctgcaatgccaggccatgtgccc

SEQ ID NO: 199395 - DNA, 25 bp, probe
gcctgcactgcgggggatgtgatgc

SEQ ID NO: 199396 - DNA, 25 bp, probe
gcctgtctgccgatatggatggcgc

SEQ ID NO: 199397 - DNA, 25 bp, probe
gcctgttgctgccaggagacttggg

SEQ ID NO: 199398 - DNA, 25 bp, probe
gccgtatggagacagcactgccagg

SEQ ID NO: 199399 - DNA, 25 bp, probe
gcctgtgttgaacagctaccagttc

SEQ ID NO: 199400 - DNA, 25 bp, probe
gcctgtgtatgaagaattgtcccct

SEQ ID NO: 199401 - DNA, 25 bp, probe
gcctggctgaaggagcatctgtccc

SEQ ID NO: 199402 - DNA, 25 bp, probe
gccgtctcaagaagtgcttccgggt

SEQ ID NO: 199403 - DNA, 25 bp, probe
gcctgtatcaagaacatcttcgggg

SEQ ID NO: 199404 - DNA, 25 bp, probe
gcctgatgtaggtaaagctgggatc

SEQ ID NO: 199405 - DNA, 25 bp, probe
gcctgatggaaatatagctgagagc

SEQ ID NO: 199406 - DNA, 25 bp, probe
gcctgcagtgatccattgtagcgaa

SEQ ID NO: 199407 - DNA, 25 bp, probe
gcctgcagctggattacgcaacagt

SEQ ID NO: 199408 - DNA, 25 bp, probe
gcctgtgctgacatttccatcaatg

SEQ ID NO: 199409 - DNA, 25 bp, probe
gcctgtgctgacatttccatcaatg

SEQ ID NO: 199410 - DNA, 25 bp, probe
gcctgtggagtgaactgccacaagc

SEQ ID NO: 199411 - DNA, 25 bp, probe
gcctggggtgtacaccgactacatc

SEQ ID NO: 199412 - DNA, 25 bp, probe
gcctggggtgtaagacttcaagcca

SEQ ID NO: 199413 - DNA, 25 bp, probe
gcctgtggtctcattactagcaagt

SEQ ID NO: 199414 - DNA, 25 bp, probe
gcctgatgttccattcaacaccaag

SEQ ID NO: 199415 - DNA, 25 bp, probe
gccctttgctattctcagatgactc

SEQ ID NO: 199416 - DNA, 25 bp, probe
gccctcttgcagatcttctgaacta

SEQ ID NO: 199417 - DNA, 25 bp, probe
gcccccatcattgtttacatcaaga

SEQ ID NO: 199418 - DNA, 25 bp, probe
gcccccatcattgtttacatcaaga

SEQ ID NO: 199419 - DNA, 25 bp, probe
gcccgttaccttttaattgcatgaa

SEQ ID NO: 199420 - DNA, 25 bp, probe
gccccttagctcatacggaatggac

SEQ ID NO: 199421 - DNA, 25 bp, probe
gccccttagctcatacggaatggac

SEQ ID NO: 199422 - DNA, 25 bp, probe
gccccttgcttctaagggatccaga

SEQ ID NO: 199423 - DNA, 25 bp, probe
gcctgctcttcttcgaaaactacga

SEQ ID NO: 199424 - DNA, 25 bp, probe
gccgtcactgtgtgcaacaacaacc

SEQ ID NO: 199425 - DNA, 25 bp, probe
gccgtcactgtgtgcaacaacaacc

SEQ ID NO: 199426 - DNA, 25 bp, probe
gcctgtgcacgccaggcaaggccaa

SEQ ID NO: 199427 - DNA, 25 bp, probe
gccgcccaccagtaatggtgacata

SEQ ID NO: 199428 - DNA, 25 bp, probe
gcctggtcaccacaattagagcttg

SEQ ID NO: 199429 - DNA, 25 bp, probe
gcctgagctcaccagcaaacagaag

SEQ ID NO: 199430 - DNA, 25 bp, probe
gcctggtcactgtagaagatgagca

SEQ ID NO: 199431 - DNA, 25 bp, probe
gcctggtcactgtagaagatgagca

SEQ ID NO: 199432 - DNA, 25 bp, probe
gcctggatcattcagaaggatgctt

SEQ ID NO: 199433 - DNA, 25 bp, probe
gcctggatcattcagaaggatgctt

SEQ ID NO: 199434 - DNA, 25 bp, probe
gcctggtgtctgctgtaaatgtttg

SEQ ID NO: 199435 - DNA, 25 bp, probe
gccgaggctgcgtgtaaagatgtat

SEQ ID NO: 199436 - DNA, 25 bp, probe
gccgaggctgcgtgtaaagatgtat

SEQ ID NO: 199437 - DNA, 25 bp, probe
gcctggagggtattaaagagacaca

SEQ ID NO: 199438 - DNA, 25 bp, probe
gcctggcagggtgtatccgaggaag

SEQ ID NO: 199439 - DNA, 25 bp, probe
gcctgctggggtgatgcagggagga

SEQ ID NO: 199440 - DNA, 25 bp, probe
gccgaggaggctgacgatgagtgga

SEQ ID NO: 199441 - DNA, 25 bp, probe
gccgtggcggaggaagtgaatgcca

SEQ ID NO: 199442 - DNA, 25 bp, probe
gccgtggtggcagatgatggtatca

SEQ ID NO: 199443 - DNA, 25 bp, probe
gccgggcatggtggctcatgcctat

SEQ ID NO: 199444 - DNA, 25 bp, probe
gcctgaagatggagctgcagcctgc

SEQ ID NO: 199445 - DNA, 25 bp, probe
gccgaaatggtcaacgccatgcacc

SEQ ID NO: 199446 - DNA, 25 bp, probe
gccgagattttgaagtggatgcccg

SEQ ID NO: 199447 - DNA, 25 bp, probe
gccggagcttggaagtcatacccga

SEQ ID NO: 199448 - DNA, 25 bp, probe
gccggactctggacaatgacatcct

SEQ ID NO: 199449 - DNA, 25 bp, probe
gccggtggtggactatgaacactgc

SEQ ID NO: 199450 - DNA, 25 bp, probe
gcctgagtcgtgggggatggactca

SEQ ID NO: 199451 - DNA, 25 bp, probe
gcctgaaagctgggagcgtgggctc

SEQ ID NO: 199452 - DNA, 25 bp, probe
gcctgaaagcacttagcgggcgcgc

SEQ ID NO: 199453 - DNA, 25 bp, probe
gcctgaagacagtgtgtgcggcaag

SEQ ID NO: 199454 - DNA, 25 bp, probe
gcctgaagacagtgtgtgcggcaag

SEQ ID NO: 199455 - DNA, 25 bp, probe
gcctgctccaagttggtcagctgaa

SEQ ID NO: 199456 - DNA, 25 bp, probe
gcctgctgaatgcttgagtccatgg

SEQ ID NO: 199457 - DNA, 25 bp, probe
gcctgcaagatggattggccgcatt

SEQ ID NO: 199458 - DNA, 25 bp, probe
gcctgaagatctgggcggccattga

SEQ ID NO: 199459 - DNA, 25 bp, probe
gcctgaagatctgggcggccattga

SEQ ID NO: 199460 - DNA, 25 bp, probe
gcctgtagtctgatgacgatagcaa

SEQ ID NO: 199461 - DNA, 25 bp, probe
gcctgtcgtcgtgactgtcagtatt

SEQ ID NO: 199462 - DNA, 25 bp, probe
gcctgttatctgtggcgtttcatct

SEQ ID NO: 199463 - DNA, 25 bp, probe
gcctggtcaccagggctgcttttaa

SEQ ID NO: 199464 - DNA, 25 bp, probe
gcctggccacaatggtgcttgggaa

SEQ ID NO: 199465 - DNA, 25 bp, probe
gcctggatgcggtggtgcattgtgg

SEQ ID NO: 199466 - DNA, 25 bp, probe
gcctggcatcagtttaggccttggc

SEQ ID NO: 199467 - DNA, 25 bp, probe
gcctgcaccatgttttgaggttgag

SEQ ID NO: 199468 - DNA, 25 bp, probe
gccgcgctctgttttgggaataaac

SEQ ID NO: 199469 - DNA, 25 bp, probe
gcctggcctgtctatatttttaaaa

SEQ ID NO: 199470 - DNA, 25 bp, probe
gcctggccagctggatgttcttaaa

SEQ ID NO: 199471 - DNA, 25 bp, probe
gcctgggcagtggatggccgtgaat

SEQ ID NO: 199472 - DNA, 25 bp, probe
gcctgtgaagtggatggcacccgag

SEQ ID NO: 199473 - DNA, 25 bp, probe
gcctggtagagccaggcacccagtg

SEQ ID NO: 199474 - DNA, 25 bp, probe
gcctggtccagttggagaccgtcaa

SEQ ID NO: 199475 - DNA, 25 bp, probe
gccggctggcagaggcgaactgtag

SEQ ID NO: 199476 - DNA, 25 bp, probe
gcctgcagtggaaagtgtatagtgt

SEQ ID NO: 199477 - DNA, 25 bp, probe
gcctgcagtggaaagtgtatagtgt

SEQ ID NO: 199478 - DNA, 25 bp, probe
gcctgcaggtgggacttagaggatg

SEQ ID NO: 199479 - DNA, 25 bp, probe
gcctgaggagtggcaggaaagaggg

SEQ ID NO: 199480 - DNA, 25 bp, probe
gcctgggcttcgggagagcagaggg

SEQ ID NO: 199481 - DNA, 25 bp, probe
gcctgagtctagcctgggagccagg

SEQ ID NO: 199482 - DNA, 25 bp, probe
gcctgagtctagcctgggagccagg

SEQ ID NO: 199483 - DNA, 25 bp, probe
gcctgagaacagccagggtgcacag

SEQ ID NO: 199484 - DNA, 25 bp, probe
gcctgcagtacatagagcgtgacgg

SEQ ID NO: 199485 - DNA, 25 bp, probe
gcctgagtggctcagatgggatccc

SEQ ID NO: 199486 - DNA, 25 bp, probe
gcctggctggccaagagaggcccaa

SEQ ID NO: 199487 - DNA, 25 bp, probe
gcgcattgagatccatggggtgccc

SEQ ID NO: 199488 - DNA, 25 bp, probe
gccgatgagatcctgtggggccagc

SEQ ID NO: 199489 - DNA, 25 bp, probe
gccgtggctctgatgctgagcgaag

SEQ ID NO: 199490 - DNA, 25 bp, probe
gccggctgcatctttgcagagctgg

SEQ ID NO: 199491 - DNA, 25 bp, probe
gccggctgcatctttgcagagctgg

SEQ ID NO: 199492 - DNA, 25 bp, probe
gccggctgcgcaagtgcaaggaggc

SEQ ID NO: 199493 - DNA, 25 bp, probe
gcctgtctacaggccaaggatggca

SEQ ID NO: 199494 - DNA, 25 bp, probe
gccgtccacctcaaagagggctcag

SEQ ID NO: 199495 - DNA, 25 bp, probe
gccgtccacctcaaagagggctcag

SEQ ID NO: 199496 - DNA, 25 bp, probe
gccgactcaggcgagaaggtgtcgc

SEQ ID NO: 199497 - DNA, 25 bp, probe
gcctgtcgcgaggagaagggcctgg

SEQ ID NO: 199498 - DNA, 25 bp, probe
gcctgtccggaacgggaggctgaaa

SEQ ID NO: 199499 - DNA, 25 bp, probe
gcctgtcactggcataggaaggcca

SEQ ID NO: 199500 - DNA, 25 bp, probe
gcctgtcaagtgcgagccacaggaa

SEQ ID NO: 199501 - DNA, 25 bp, probe
gcctgactcagggaggcgagcacgc

SEQ ID NO: 199502 - DNA, 25 bp, probe
gcctgaccactgggtgtggacggtg

SEQ ID NO: 199503 - DNA, 25 bp, probe
gcctgagcccaggaggtggaaactg

SEQ ID NO: 199504 - DNA, 25 bp, probe
gccggcccaaggatcggaagcatcg

SEQ ID NO: 199505 - DNA, 25 bp, probe
gcccaccgaagggtactgaagagcc

SEQ ID NO: 199506 - DNA, 25 bp, probe
gcccccaagagtgtagggggccttg

SEQ ID NO: 199507 - DNA, 25 bp, probe
gcccccaccagggtcagggggcctg

SEQ ID NO: 199508 - DNA, 25 bp, probe
gccgccgacgggggaggagggcgtg

SEQ ID NO: 199509 - DNA, 25 bp, probe
gccgccacctttgagaagaagacgg

SEQ ID NO: 199510 - DNA, 25 bp, probe
gcctgacaccttcaatgaagcaaag

SEQ ID NO: 199511 - DNA, 25 bp, probe
gcctgacaccttcaatgaagcaaag

SEQ ID NO: 199512 - DNA, 25 bp, probe
gcctgaacccgtccattcagaaagc

SEQ ID NO: 199513 - DNA, 25 bp, probe
gcctgaacccgtccattcagaaagc

SEQ ID NO: 199514 - DNA, 25 bp, probe
gcctgcaactacgggcatctagaaa

SEQ ID NO: 199515 - DNA, 25 bp, probe
gcctgtacatcggcaacttcaaaga

SEQ ID NO: 199516 - DNA, 25 bp, probe
gccgttcatcgaggtcaacatcatt

SEQ ID NO: 199517 - DNA, 25 bp, probe
gccgttcatcgaggtcaacatcatt

SEQ ID NO: 199518 - DNA, 25 bp, probe
gccgcttctacaggatcaaccgagc

SEQ ID NO: 199519 - DNA, 25 bp, probe
gccgctgtctctaaaatagcttggc

SEQ ID NO: 199520 - DNA, 25 bp, probe
gccgtgtcattatgcaaagcctctg

SEQ ID NO: 199521 - DNA, 25 bp, probe
gcctgttgtctgttgaactgcactc

SEQ ID NO: 199522 - DNA, 25 bp, probe
gcctgtttgtgatgatcagctcagc

SEQ ID NO: 199523 - DNA, 25 bp, probe
gccgtattctcatgatcccagataa

SEQ ID NO: 199524 - DNA, 25 bp, probe
gccgtattctcatgatcccagataa

SEQ ID NO: 199525 - DNA, 25 bp, probe
gccccaactgaggacccaatattgg

SEQ ID NO: 199526 - DNA, 25 bp, probe
gcccaaactgagtacaacttaaagt

SEQ ID NO: 199527 - DNA, 25 bp, probe
gccctgacaaactacggcttctacg

SEQ ID NO: 199528 - DNA, 25 bp, probe
gccctgaaacaggaatggggcaaag

SEQ ID NO: 199529 - DNA, 25 bp, probe
gccgctgagagggggctgggaaaag

SEQ ID NO: 199530 - DNA, 25 bp, probe
gccgtagagctgtggctaagggcaa

SEQ ID NO: 199531 - DNA, 25 bp, probe
gcctggagagcgtgagctatgacag

SEQ ID NO: 199532 - DNA, 25 bp, probe
gcctgggcagccatgaatgtagcgc

SEQ ID NO: 199533 - DNA, 25 bp, probe
gcctggataccaatgaggtgaccca

SEQ ID NO: 199534 - DNA, 25 bp, probe
gcctgggcagtacgggtgaccgagt

SEQ ID NO: 199535 - DNA, 25 bp, probe
gcctgtccaatactgggttcagctg

SEQ ID NO: 199536 - DNA, 25 bp, probe
gcctgtgctcagttgagtggttcac

SEQ ID NO: 199537 - DNA, 25 bp, probe
gccgcactcagttatggcttctacg

SEQ ID NO: 199538 - DNA, 25 bp, probe
gccggccagtcattggtaccaatgc

SEQ ID NO: 199539 - DNA, 25 bp, probe
gcctggccaacatggtgaaaccccg

SEQ ID NO: 199540 - DNA, 25 bp, probe
gcctgggcaacacagtgagactcca

SEQ ID NO: 199541 - DNA, 25 bp, probe
gcctgggtgacagagtgagactcca

SEQ ID NO: 199542 - DNA, 25 bp, probe
ggtcgttaccagagatttacccatc

SEQ ID NO: 199543 - DNA, 25 bp, probe
gcgatgcgggtagtattgttcccgt

SEQ ID NO: 199544 - DNA, 25 bp, probe
gcgatgcggcggcgttattcccatg

SEQ ID NO: 199545 - DNA, 25 bp, probe
gcgttgcagaggcatttttccttcg

SEQ ID NO: 199546 - DNA, 25 bp, probe
gcctgagcagggatttttgccttga

SEQ ID NO: 199547 - DNA, 25 bp, probe
gccggagaggatttggtccctcaac

SEQ ID NO: 199548 - DNA, 25 bp, probe
gcctgagaggggaagcggccctaag

SEQ ID NO: 199549 - DNA, 25 bp, probe
gcctggtggggaagacgcccattga

SEQ ID NO: 199550 - DNA, 25 bp, probe
gccgctgctgggagagatcccctgg

SEQ ID NO: 199551 - DNA, 25 bp, probe
gccgtctgctggagtatacaccaac

SEQ ID NO: 199552 - DNA, 25 bp, probe
gccgtctgctggagtatacaccaac

SEQ ID NO: 199553 - DNA, 25 bp, probe
gcctgttctgggcatttcatgtcaa

SEQ ID NO: 199554 - DNA, 25 bp, probe
gccgttccactgcagtaatgtcaat

SEQ ID NO: 199555 - DNA, 25 bp, probe
gcctggattccagcagtgaatgcta

SEQ ID NO: 199556 - DNA, 25 bp, probe
gcctggaactgcatcagtgactgaa

SEQ ID NO: 199557 - DNA, 25 bp, probe
gcctgtgaagaccttggcagcgacg

SEQ ID NO: 199558 - DNA, 25 bp, probe
gcctggaggccgtggccgagatgac

SEQ ID NO: 199559 - DNA, 25 bp, probe
gccggagacaagtgaccaagatgct

SEQ ID NO: 199560 - DNA, 25 bp, probe
gcctgggcctggtagagccaggcac

SEQ ID NO: 199561 - DNA, 25 bp, probe
gcctggccctgggaacagcaggctc

SEQ ID NO: 199562 - DNA, 25 bp, probe
gcctggccctgggaacagcaggctc

SEQ ID NO: 199563 - DNA, 25 bp, probe
gcctggccctgggaacagcaggctc

SEQ ID NO: 199564 - DNA, 25 bp, probe
gcctggccctgggaacagcaggctc

SEQ ID NO: 199565 - DNA, 25 bp, probe
gcctggccctgggaacagcaggctc

SEQ ID NO: 199566 - DNA, 25 bp, probe
gcctgaggctcacggtacagaggcc

SEQ ID NO: 199567 - DNA, 25 bp, probe
gccgaggcgaagcgcaagatggccc

SEQ ID NO: 199568 - DNA, 25 bp, probe
gcctggggaagggcaggccagccag

SEQ ID NO: 199569 - DNA, 25 bp, probe
gcctgtgtgtaaggctgcaggctga

SEQ ID NO: 199570 - DNA, 25 bp, probe
gcctggtgaatcaatgatggtgtga

SEQ ID NO: 199571 - DNA, 25 bp, probe
gcctgggctacactgtggttgacga

SEQ ID NO: 199572 - DNA, 25 bp, probe
gccgtgcctacagtgtggaagactt

SEQ ID NO: 199573 - DNA, 25 bp, probe
gccctgacccagaggaagcctctat

SEQ ID NO: 199574 - DNA, 25 bp, probe
gccctgacccagaggaagcctctat

SEQ ID NO: 199575 - DNA, 25 bp, probe
gcgacttcttcgatagttacctgca

SEQ ID NO: 199576 - DNA, 25 bp, probe
gccctttctttatctgtacagtcat

SEQ ID NO: 199577 - DNA, 25 bp, probe
gcccatttaccattgacgtaccaat

SEQ ID NO: 199578 - DNA, 25 bp, probe
gccgtttacaatagactgaatcctt

SEQ ID NO: 199579 - DNA, 25 bp, probe
gcctgtttaaatccagcaagccctt

SEQ ID NO: 199580 - DNA, 25 bp, probe
gcctgtttaaatccagcaagccctt

SEQ ID NO: 199581 - DNA, 25 bp, probe
gccgttatcaggaccatgcggccga

SEQ ID NO: 199582 - DNA, 25 bp, probe
gccgtgttcaggctcatggagcagt

SEQ ID NO: 199583 - DNA, 25 bp, probe
gcctggttatggaggggcagcttct

SEQ ID NO: 199584 - DNA, 25 bp, probe
gccggcctagagaagggcgtttgct

SEQ ID NO: 199585 - DNA, 25 bp, probe
gccggcttcgtgaaggagttctccc

SEQ ID NO: 199586 - DNA, 25 bp, probe
gccggcttcgcgggcgacgatgccc

SEQ ID NO: 199587 - DNA, 25 bp, probe
gccgattgtctggatgtggaagagc

SEQ ID NO: 199588 - DNA, 25 bp, probe
gccgattgttgacttgctagatgtc

SEQ ID NO: 199589 - DNA, 25 bp, probe
gccgattgttgacttgctagatgtc

SEQ ID NO: 199590 - DNA, 25 bp, probe
gcctgggcttgagctgcagaatgac

SEQ ID NO: 199591 - DNA, 25 bp, probe
gcctgtgtttgagcagcgaggagtc

SEQ ID NO: 199592 - DNA, 25 bp, probe
gcctgtgtttgagcagcgaggagtc

SEQ ID NO: 199593 - DNA, 25 bp, probe
gcctgtgtttacctgagttggctga

SEQ ID NO: 199594 - DNA, 25 bp, probe
gcctgggtgtaaccatggtggtgtg

SEQ ID NO: 199595 - DNA, 25 bp, probe
gcctgggccaggcatgatgtgtggg

SEQ ID NO: 199596 - DNA, 25 bp, probe
gcctggcggtgggcatggtgaagga

SEQ ID NO: 199597 - DNA, 25 bp, probe
gcctggcggtgggcatggtgaagga

SEQ ID NO: 199598 - DNA, 25 bp, probe
gcctggagagctcctatttcaagga

SEQ ID NO: 199599 - DNA, 25 bp, probe
gcctggagagctcctatttcaagga

SEQ ID NO: 199600 - DNA, 25 bp, probe
gcctggagagctcctatttcaagga

SEQ ID NO: 199601 - DNA, 25 bp, probe
gcctgtggatcttccattaccaaga

SEQ ID NO: 199602 - DNA, 25 bp, probe
gcctgtggatcttccattaccaaga

SEQ ID NO: 199603 - DNA, 25 bp, probe
gccggaagctgattgcattcccaaa

SEQ ID NO: 199604 - DNA, 25 bp, probe
gccggaactgagaccatcagccata

SEQ ID NO: 199605 - DNA, 25 bp, probe
gccccaattggtggacatggcagcc

SEQ ID NO: 199606 - DNA, 25 bp, probe
gccccacagtgaccagtaaagtcca

SEQ ID NO: 199607 - DNA, 25 bp, probe
gccgcacacgggtgtcacaatgttg

SEQ ID NO: 199608 - DNA, 25 bp, probe
gcactacggggtatacagttgtgaa

SEQ ID NO: 199609 - DNA, 25 bp, probe
gccggacagggacatacgttgtgat

SEQ ID NO: 199610 - DNA, 25 bp, probe
gccggacagggacgttcattgtgat

SEQ ID NO: 199611 - DNA, 25 bp, probe
gccctgaatgcggacacgtcagttt

SEQ ID NO: 199612 - DNA, 25 bp, probe
gccctgaatgcggacacgtcagttt

SEQ ID NO: 199613 - DNA, 25 bp, probe
gcccggaccatgttcaggcagattc

SEQ ID NO: 199614 - DNA, 25 bp, probe
gccggctacctatttggcagtgacg

SEQ ID NO: 199615 - DNA, 25 bp, probe
gcctggctgcaacattgtgaccata

SEQ ID NO: 199616 - DNA, 25 bp, probe
gcctggcctacctgatgatgaagaa

SEQ ID NO: 199617 - DNA, 25 bp, probe
gctcggcaccaactaagaaaaaaag

SEQ ID NO: 199618 - DNA, 25 bp, probe
gctcggcaccaactaagaaaaaaag

SEQ ID NO: 199619 - DNA, 25 bp, probe
gccgtcagcacaccaaagagataaa

SEQ ID NO: 199620 - DNA, 25 bp, probe
gccgtagactgtcccgaaaatatta

SEQ ID NO: 199621 - DNA, 25 bp, probe
gccctagagcttctggatttcaact

SEQ ID NO: 199622 - DNA, 25 bp, probe
gctctttgaccctgaatttgaccta

SEQ ID NO: 199623 - DNA, 25 bp, probe
gctcgtaactcctttattgtactta

SEQ ID NO: 199624 - DNA, 25 bp, probe
gctcgtaactcctttattgtactta

SEQ ID NO: 199625 - DNA, 25 bp, probe
gccgtgaacctcgttttgagattaa

SEQ ID NO: 199626 - DNA, 25 bp, probe
gccgcatgaaccggatgtctcggca

SEQ ID NO: 199627 - DNA, 25 bp, probe
gccgctgagaagggttgatcctgca

SEQ ID NO: 199628 - DNA, 25 bp, probe
gcctgtggagggagtgacttgcact

SEQ ID NO: 199629 - DNA, 25 bp, probe
gccgtccaggagagtgcatttgaag

SEQ ID NO: 199630 - DNA, 25 bp, probe
gcctgttgagggcttcaattgagaa

SEQ ID NO: 199631 - DNA, 25 bp, probe
gcctggtagtgggggccattgagaa

SEQ ID NO: 199632 - DNA, 25 bp, probe
gcggagtacttggaagcctattgga

SEQ ID NO: 199633 - DNA, 25 bp, probe
gcggagtacttggaagcctattgga

SEQ ID NO: 199634 - DNA, 25 bp, probe
gccggtacttggaagccacaggctc

SEQ ID NO: 199635 - DNA, 25 bp, probe
gccgggaaattgagatccaggctca

SEQ ID NO: 199636 - DNA, 25 bp, probe
gccggagaacgtcttcatcagcgtg

SEQ ID NO: 199637 - DNA, 25 bp, probe
gccggagaccgtatcatattcgctc

SEQ ID NO: 199638 - DNA, 25 bp, probe
gcctggagacatatcactcaatttc

SEQ ID NO: 199639 - DNA, 25 bp, probe
gctaaagccacaaacccatctagtc

SEQ ID NO: 199640 - DNA, 25 bp, probe
gctatggtcaggagacccttagcca

SEQ ID NO: 199641 - DNA, 25 bp, probe
gctcttctacgtgatgaccctgagc

SEQ ID NO: 199642 - DNA, 25 bp, probe
gcgcttctactcagataactcggtc

SEQ ID NO: 199643 - DNA, 25 bp, probe
gcgctgtccttcatgaacattgtgg

SEQ ID NO: 199644 - DNA, 25 bp, probe
gccgcccatataattcacttgggca

SEQ ID NO: 199645 - DNA, 25 bp, probe
gccgccttcaaatacttggcacatt

SEQ ID NO: 199646 - DNA, 25 bp, probe
gccccttaaatatcttgtctacatt

SEQ ID NO: 199647 - DNA, 25 bp, probe
gcctggctaaaattgtgcttgtctt

SEQ ID NO: 199648 - DNA, 25 bp, probe
gcctgtctaaaatgcatcgtcactt

SEQ ID NO: 199649 - DNA, 25 bp, probe
gccgtctcaacaacaggcatcacct

SEQ ID NO: 199650 - DNA, 25 bp, probe
gccgtctcaacaacaggcatcacct

SEQ ID NO: 199651 - DNA, 25 bp, probe
gcctggtcaagatgctgaccagcca

SEQ ID NO: 199652 - DNA, 25 bp, probe
gcctgtctcatatgtctatccaaca

SEQ ID NO: 199653 - DNA, 25 bp, probe
gcctgtcatctgttacagcacctac

SEQ ID NO: 199654 - DNA, 25 bp, probe
gccggaggatgttcagcacctctgc

SEQ ID NO: 199655 - DNA, 25 bp, probe
gccggaggatgttcagcacctctgc

SEQ ID NO: 199656 - DNA, 25 bp, probe
gccggaggatgttcagcacctctgc

SEQ ID NO: 199657 - DNA, 25 bp, probe
gcctggagtacagtggcacgatctc

SEQ ID NO: 199658 - DNA, 25 bp, probe
gcctggagtacagtggcacgatctc

SEQ ID NO: 199659 - DNA, 25 bp, probe
gcctggcagtacttgaactagacgc

SEQ ID NO: 199660 - DNA, 25 bp, probe
gccggcagatatgtttcaagacgct

SEQ ID NO: 199661 - DNA, 25 bp, probe
gccggcagatatgtttcaagacgct

SEQ ID NO: 199662 - DNA, 25 bp, probe
gccggcagatatgtttcaagacgct

SEQ ID NO: 199663 - DNA, 25 bp, probe
gccggcagatatgtttcaagacgct

SEQ ID NO: 199664 - DNA, 25 bp, probe
gcctggagtgtggtgcttaatccgc

SEQ ID NO: 199665 - DNA, 25 bp, probe
gcctggagtgtggtgcttaatccgc

SEQ ID NO: 199666 - DNA, 25 bp, probe
gcctggaggtgttcttcaatgattg

SEQ ID NO: 199667 - DNA, 25 bp, probe
gcctggacaggatcttcacagcgta

SEQ ID NO: 199668 - DNA, 25 bp, probe
gccggatcaagagcctgcaaactcg

SEQ ID NO: 199669 - DNA, 25 bp, probe
gccggatcaagagcctgcaaactcg

SEQ ID NO: 199670 - DNA, 25 bp, probe
gccggaaagcgtgccaatcaacatg

SEQ ID NO: 199671 - DNA, 25 bp, probe
gcctggactaggactcccataaatc

SEQ ID NO: 199672 - DNA, 25 bp, probe
gcctggaaagtgacccgaagatacg

SEQ ID NO: 199673 - DNA, 25 bp, probe
gcctggtaagtggctttttgtactg

SEQ ID NO: 199674 - DNA, 25 bp, probe
gcctggctaagtgggtttctgacca

SEQ ID NO: 199675 - DNA, 25 bp, probe
gcctggctaagtgggtttctgacca

SEQ ID NO: 199676 - DNA, 25 bp, probe
gcctggtaagttgccttgtgattcc

SEQ ID NO: 199677 - DNA, 25 bp, probe
gccggtcaagttccaggttgatatc

SEQ ID NO: 199678 - DNA, 25 bp, probe
gcctggtcaatgctctaagtgaaga

SEQ ID NO: 199679 - DNA, 25 bp, probe
gcctggccaaagccgagcggaaggg

SEQ ID NO: 199680 - DNA, 25 bp, probe
gcctggccaaagccgagcggaaggg

SEQ ID NO: 199681 - DNA, 25 bp, probe
gcctggcgagcagggcggtgggaag

SEQ ID NO: 199682 - DNA, 25 bp, probe
gcctggggcaggggggtcaaggaga

SEQ ID NO: 199683 - DNA, 25 bp, probe
gcctggggcaggggggtcaaggaga

SEQ ID NO: 199684 - DNA, 25 bp, probe
gccgtggaagggcaacacaaggaca

SEQ ID NO: 199685 - DNA, 25 bp, probe
gccgggactggacacaagccagggc

SEQ ID NO: 199686 - DNA, 25 bp, probe
gcccgttggagacaagctccaggcc

SEQ ID NO: 199687 - DNA, 25 bp, probe
gctcctgggaaacaagccgcattcc

SEQ ID NO: 199688 - DNA, 25 bp, probe
gcccaggagaacttcaagtccttca

SEQ ID NO: 199689 - DNA, 25 bp, probe
gccgtggacttggggtcagagactg

SEQ ID NO: 199690 - DNA, 25 bp, probe
gcgcgtggagttcaagtccgacaac

SEQ ID NO: 199691 - DNA, 25 bp, probe
gcgcgtggagttcaagtccgacaac

SEQ ID NO: 199692 - DNA, 25 bp, probe
gcgcgtggagttcaagtccgacaac

SEQ ID NO: 199693 - DNA, 25 bp, probe
gcgcgtggagttcaagtccgacaac

SEQ ID NO: 199694 - DNA, 25 bp, probe
gccctgggtttaatgtcaaatcaag

SEQ ID NO: 199695 - DNA, 25 bp, probe
gccctagtagtctttgtcacaacta

SEQ ID NO: 199696 - DNA, 25 bp, probe
gccccaaagtaacgacacacactac

SEQ ID NO: 199697 - DNA, 25 bp, probe
gccccaaagtaacgacacacactac

SEQ ID NO: 199698 - DNA, 25 bp, probe
gccgcagagaagtgacggttcctac

SEQ ID NO: 199699 - DNA, 25 bp, probe
gccgcaaggtggggctgtttcccac

SEQ ID NO: 199700 - DNA, 25 bp, probe
gcccaacgattctcgtcatgaccga

SEQ ID NO: 199701 - DNA, 25 bp, probe
gcctggagccagtctacttgatgac

SEQ ID NO: 199702 - DNA, 25 bp, probe
gcctgtggcgtgaacaccatggcca

SEQ ID NO: 199703 - DNA, 25 bp, probe
gcgcagtacgtttctccagagctgc

SEQ ID NO: 199704 - DNA, 25 bp, probe
gccgctattgcaagatgcccaagga

SEQ ID NO: 199705 - DNA, 25 bp, probe
gccgtatcagacgaggccaaagact

SEQ ID NO: 199706 - DNA, 25 bp, probe
gcccaattgccaaactaaagacatc

SEQ ID NO: 199707 - DNA, 25 bp, probe
gcccaattgccaaactaaagacatc

SEQ ID NO: 199708 - DNA, 25 bp, probe
gcccactttagtgtctacaatcagc

SEQ ID NO: 199709 - DNA, 25 bp, probe
gcccctttatctgtacatagtgact

SEQ ID NO: 199710 - DNA, 25 bp, probe
gccgagttcttctacaactggtact

SEQ ID NO: 199711 - DNA, 25 bp, probe
gcccagaacgtcagaatcgttagtc

SEQ ID NO: 199712 - DNA, 25 bp, probe
gcccccaagtaagaagtctgagtcc

SEQ ID NO: 199713 - DNA, 25 bp, probe
gccctgaaactaaacaagcttggta

SEQ ID NO: 199714 - DNA, 25 bp, probe
gccctgaaactaaacaagcttggta

SEQ ID NO: 199715 - DNA, 25 bp, probe
gcgactcaaactaacaatggcttca

SEQ ID NO: 199716 - DNA, 25 bp, probe
gcgactcaaactaacaatggcttca

SEQ ID NO: 199717 - DNA, 25 bp, probe
gcccctgagatcctacagggcctga

SEQ ID NO: 199718 - DNA, 25 bp, probe
gcccctgactgatggcaggaatcca

SEQ ID NO: 199719 - DNA, 25 bp, probe
gcccctgactgatggcaggaatcca

SEQ ID NO: 199720 - DNA, 25 bp, probe
gccccagaaggaggcacgattcaag

SEQ ID NO: 199721 - DNA, 25 bp, probe
gcccccaggaaggacttgtctctgg

SEQ ID NO: 199722 - DNA, 25 bp, probe
gccccgcaaaaccaagggctctggc

SEQ ID NO: 199723 - DNA, 25 bp, probe
gcccccgacaagatagttgctatgt

SEQ ID NO: 199724 - DNA, 25 bp, probe
gcccccaagttgatatttctatttc

SEQ ID NO: 199725 - DNA, 25 bp, probe
gcccttaatcttgctgttattttcc

SEQ ID NO: 199726 - DNA, 25 bp, probe
gccctatcatatttacttcattctc

SEQ ID NO: 199727 - DNA, 25 bp, probe
gccccatgatttttctttggtcagt

SEQ ID NO: 199728 - DNA, 25 bp, probe
gccgtctgttatgcctttgtatttt

SEQ ID NO: 199729 - DNA, 25 bp, probe
gccgtcggtgggcacttgttatttt

SEQ ID NO: 199730 - DNA, 25 bp, probe
gccgtcggtgggcacttgttatttt

SEQ ID NO: 199731 - DNA, 25 bp, probe
gccccggtggcacagtttgtaaact

SEQ ID NO: 199732 - DNA, 25 bp, probe
gccccggtggcacagtttgtaaact

SEQ ID NO: 199733 - DNA, 25 bp, probe
gcccggaaggcgtggttgtgaaagc

SEQ ID NO: 199734 - DNA, 25 bp, probe
gctccctgacggggggtgaagaaag

SEQ ID NO: 199735 - DNA, 25 bp, probe
tccacccggcactggggaagtcaag

SEQ ID NO: 199736 - DNA, 25 bp, probe
gccccatcgccaaaggatggaagta

SEQ ID NO: 199737 - DNA, 25 bp, probe
gccgctgcacaggtatggggtgggt

SEQ ID NO: 199738 - DNA, 25 bp, probe
gccgacaacgtcactgtgatggtgg

SEQ ID NO: 199739 - DNA, 25 bp, probe
gccgacaacgtcactgtgatggtgg

SEQ ID NO: 199740 - DNA, 25 bp, probe
gccgacctggtctcggagatggagg

SEQ ID NO: 199741 - DNA, 25 bp, probe
gccgacctggtctcggagatggagg

SEQ ID NO: 199742 - DNA, 25 bp, probe
gccgagatgttgatccgaataggag

SEQ ID NO: 199743 - DNA, 25 bp, probe
gccgaggacttcacaatcaagctga

SEQ ID NO: 199744 - DNA, 25 bp, probe
gccgaggacttcacaatcaagctga

SEQ ID NO: 199745 - DNA, 25 bp, probe
gccgaggtctgcgtcgaagacagaa

SEQ ID NO: 199746 - DNA, 25 bp, probe
gccgaggtctgcgtcgaagacagaa

SEQ ID NO: 199747 - DNA, 25 bp, probe
gccggtgtttgcggacatcagcaaa

SEQ ID NO: 199748 - DNA, 25 bp, probe
gccggctggttgtgtaaaaccctgc

SEQ ID NO: 199749 - DNA, 25 bp, probe
gcccctggggatttataaactcatc

SEQ ID NO: 199750 - DNA, 25 bp, probe
gccctggggttcttcagagaacacc

SEQ ID NO: 199751 - DNA, 25 bp, probe
gccgtttgatgattccttagaacac

SEQ ID NO: 199752 - DNA, 25 bp, probe
gccctttagaatggcttgtcccatc

SEQ ID NO: 199753 - DNA, 25 bp, probe
gcccgtgtagaaggcgtgtttgcag

SEQ ID NO: 199754 - DNA, 25 bp, probe
gccccatcaagacgtggtgatttgg

SEQ ID NO: 199755 - DNA, 25 bp, probe
gccgtcatcacaacaggtatttctg

SEQ ID NO: 199756 - DNA, 25 bp, probe
gcgcttctgcacacagtatatcatc

SEQ ID NO: 199757 - DNA, 25 bp, probe
gcgcttctgcacacagtatatcatc

SEQ ID NO: 199758 - DNA, 25 bp, probe
gccctctgagatggcgtatctatcg

SEQ ID NO: 199759 - DNA, 25 bp, probe
gccccattaggccatttacataccc

SEQ ID NO: 199760 - DNA, 25 bp, probe
gccccagtagagcttatacatatca

SEQ ID NO: 199761 - DNA, 25 bp, probe
gccccaatagagcttatacacatca

SEQ ID NO: 199762 - DNA, 25 bp, probe
gccccgaagcagctaatgtaataag

SEQ ID NO: 199763 - DNA, 25 bp, probe
gcccggaagctggagtttaacaagg

SEQ ID NO: 199764 - DNA, 25 bp, probe
gcccggcagaggacagtaaaagcaa

SEQ ID NO: 199765 - DNA, 25 bp, probe
gccgggagggctccattgaggagaa

SEQ ID NO: 199766 - DNA, 25 bp, probe
gccgtggagaaccccgagtattgac

SEQ ID NO: 199767 - DNA, 25 bp, probe
gccgtggagaaggggtaccgcatgg

SEQ ID NO: 199768 - DNA, 25 bp, probe
gccgagcggaaggggctagactcaa

SEQ ID NO: 199769 - DNA, 25 bp, probe
gccgagcggaaggggctagactcaa

SEQ ID NO: 199770 - DNA, 25 bp, probe
gccgggatgacatggaatcgttaga

SEQ ID NO: 199771 - DNA, 25 bp, probe
gccgcttgtgaataaactgttcttc

SEQ ID NO: 199772 - DNA, 25 bp, probe
gctctcgatggacaatgaacggcct

SEQ ID NO: 199773 - DNA, 25 bp, probe
gcccgggaggaggatccgggctttg

SEQ ID NO: 199774 - DNA, 25 bp, probe
gccgcaggaagacggtcctggtgct

SEQ ID NO: 199775 - DNA, 25 bp, probe
gccgcagggcagggggactgggcgg

SEQ ID NO: 199776 - DNA, 25 bp, probe
gccgatgtgccgggaagacgattag

SEQ ID NO: 199777 - DNA, 25 bp, probe
gcctggctcctggtaaagctgttgg

SEQ ID NO: 199778 - DNA, 25 bp, probe
gcctggctgccgaggatagtggtgg

SEQ ID NO: 199779 - DNA, 25 bp, probe
gccgacgccgccggaaagcgtgcca

SEQ ID NO: 199780 - DNA, 25 bp, probe
gccggtgcgctgctgaaaacgattc

SEQ ID NO: 199781 - DNA, 25 bp, probe
gcctggagcctactaaatgctcaat

SEQ ID NO: 199782 - DNA, 25 bp, probe
gcctggcccataatgtgaacataag

SEQ ID NO: 199783 - DNA, 25 bp, probe
gcctggcccataatgtgaacataag

SEQ ID NO: 199784 - DNA, 25 bp, probe
gccggcccagcaagatgaaacaggg

SEQ ID NO: 199785 - DNA, 25 bp, probe
gccgccgcacaggatgagagcaaca

SEQ ID NO: 199786 - DNA, 25 bp, probe
gccgcctgcatagcatatattaggc

SEQ ID NO: 199787 - DNA, 25 bp, probe
gccgaccatctggatcacatcaagg

SEQ ID NO: 199788 - DNA, 25 bp, probe
gccgcacactatgagcaacatgcag

SEQ ID NO: 199789 - DNA, 25 bp, probe
gccccagatctgcacaattgatgtc

SEQ ID NO: 199790 - DNA, 25 bp, probe
gccccagatctgcacaattgatgtc

SEQ ID NO: 199791 - DNA, 25 bp, probe
gccccagtgcctagatgcatggctg

SEQ ID NO: 199792 - DNA, 25 bp, probe
gcccgtggctcaggagcatggtcgg

SEQ ID NO: 199793 - DNA, 25 bp, probe
gcccgctgactagcagctggactga

SEQ ID NO: 199794 - DNA, 25 bp, probe
gccccagcggaatgggcagcgacac

SEQ ID NO: 199795 - DNA, 25 bp, probe
gccccagccgcgggaggctggaagg

SEQ ID NO: 199796 - DNA, 25 bp, probe
gccccagccgcgggaggctggaagg

SEQ ID NO: 199797 - DNA, 25 bp, probe
gccccccgggaatgatggaagactt

SEQ ID NO: 199798 - DNA, 25 bp, probe
gccgcctcggggcgggagagaggcc

SEQ ID NO: 199799 - DNA, 25 bp, probe
gcccctcataggaggcccaggaggg

SEQ ID NO: 199800 - DNA, 25 bp, probe
gcccgtcaaatggatggctcccgaa

SEQ ID NO: 199801 - DNA, 25 bp, probe
gcccgacactatgttgtctgcggca

SEQ ID NO: 199802 - DNA, 25 bp, probe
gccgtgtccaatcattatggagcca

SEQ ID NO: 199803 - DNA, 25 bp, probe
gccggatggactctaatgcagggac

SEQ ID NO: 199804 - DNA, 25 bp, probe
gccggatggactctaatgcagggac

SEQ ID NO: 199805 - DNA, 25 bp, probe
gcctggcaggactccagatgaggac

SEQ ID NO: 199806 - DNA, 25 bp, probe
gccggcgtccaagggatgacgactc

SEQ ID NO: 199807 - DNA, 25 bp, probe
gccggagggcaagggatgccagtaa

SEQ ID NO: 199808 - DNA, 25 bp, probe
gccggatggaaagaggctgccccat

SEQ ID NO: 199809 - DNA, 25 bp, probe
gccggagagatatacagtctgcctt

SEQ ID NO: 199810 - DNA, 25 bp, probe
gccggagagatatacagtctgcctt

SEQ ID NO: 199811 - DNA, 25 bp, probe
gccggaggcactgacagttgccagg

SEQ ID NO: 199812 - DNA, 25 bp, probe
gccgtaccactggcatcgtgatgga

SEQ ID NO: 199813 - DNA, 25 bp, probe
gcccggacacggacaggattgacag

SEQ ID NO: 199814 - DNA, 25 bp, probe
gccggcagtccttaaggaagagcag

SEQ ID NO: 199815 - DNA, 25 bp, probe
gccccagtactggtagagaagcctc

SEQ ID NO: 199816 - DNA, 25 bp, probe
gccccgtggctgataaggacacttc

SEQ ID NO: 199817 - DNA, 25 bp, probe
gccccctgactgatagcatttcaga

SEQ ID NO: 199818 - DNA, 25 bp, probe
gccccacattcttaaattatcacag

SEQ ID NO: 199819 - DNA, 25 bp, probe
gccgctaagactgcaagccttacac

SEQ ID NO: 199820 - DNA, 25 bp, probe
gccgaaagcaccactgctttacaga

SEQ ID NO: 199821 - DNA, 25 bp, probe
gccgcactactctttgatgtattac

SEQ ID NO: 199822 - DNA, 25 bp, probe
gccgcagctgccagatggagttcga

SEQ ID NO: 199823 - DNA, 25 bp, probe
gccgcattgctaagatgcctgttaa

SEQ ID NO: 199824 - DNA, 25 bp, probe
gccctctgcttgcaatcatggtgta

SEQ ID NO: 199825 - DNA, 25 bp, probe
gcccttcttcaggactctgggctgg

SEQ ID NO: 199826 - DNA, 25 bp, probe
gccctgtcttactgtcattcgaaga

SEQ ID NO: 199827 - DNA, 25 bp, probe
gccctggctaaagctactgtgaaag

SEQ ID NO: 199828 - DNA, 25 bp, probe
gcccgagctgaagacgagcgcggga

SEQ ID NO: 199829 - DNA, 25 bp, probe
gcccctgctggaggggcaccatgtg

SEQ ID NO: 199830 - DNA, 25 bp, probe
gcccggcaggagactgactacgtgc

SEQ ID NO: 199831 - DNA, 25 bp, probe
gcccgagtgggacgattacttggac

SEQ ID NO: 199832 - DNA, 25 bp, probe
gcccgagtgggatgattactcggac

SEQ ID NO: 199833 - DNA, 25 bp, probe
gccggtatacagagattttcatgga

SEQ ID NO: 199834 - DNA, 25 bp, probe
gccggtaacagctgaccttattgtg

SEQ ID NO: 199835 - DNA, 25 bp, probe
gccctgtccagagcgagttaatgtg

SEQ ID NO: 199836 - DNA, 25 bp, probe
gccctgtccagagcgagttaatgtg

SEQ ID NO: 199837 - DNA, 25 bp, probe
gccctgtctgaagcagagccaaaag

SEQ ID NO: 199838 - DNA, 25 bp, probe
gccgtgtcctatgaggacagggagg

SEQ ID NO: 199839 - DNA, 25 bp, probe
gccctgtcttaaggcccagggggag

SEQ ID NO: 199840 - DNA, 25 bp, probe
gcccagacaccaaggaccggtggcg

SEQ ID NO: 199841 - DNA, 25 bp, probe
gccgagaaggaagtcccgtatgagg

SEQ ID NO: 199842 - DNA, 25 bp, probe
gccctatgggaagtctgtcgattgg

SEQ ID NO: 199843 - DNA, 25 bp, probe
gccctggaggaagttgtggggagat

SEQ ID NO: 199844 - DNA, 25 bp, probe
gccctgcgggagattaaggctctgc

SEQ ID NO: 199845 - DNA, 25 bp, probe
gcccctggggtttgcagggtgctgc

SEQ ID NO: 199846 - DNA, 25 bp, probe
gcccctaggccttctgaggaggcga

SEQ ID NO: 199847 - DNA, 25 bp, probe
gccccagagtccacgtggaggaaaa

SEQ ID NO: 199848 - DNA, 25 bp, probe
gccccagagtccacgtggaggaaaa

SEQ ID NO: 199849 - DNA, 25 bp, probe
gccccaggaactgagtccagagaag

SEQ ID NO: 199850 - DNA, 25 bp, probe
gcccctgggacaatgacccagaaga

SEQ ID NO: 199851 - DNA, 25 bp, probe
gcccttgtgggactcccaacacaag

SEQ ID NO: 199852 - DNA, 25 bp, probe
gccgaggtgggcagccacgagaagg

SEQ ID NO: 199853 - DNA, 25 bp, probe
gccgaggtgggaggatcattggatc

SEQ ID NO: 199854 - DNA, 25 bp, probe
gccggcagctgaaaaagttggatga

SEQ ID NO: 199855 - DNA, 25 bp, probe
gcacggcatcgtcaccaactgggac

SEQ ID NO: 199856 - DNA, 25 bp, probe
gccggagcagtgaaccagcacgggg

SEQ ID NO: 199857 - DNA, 25 bp, probe
gccggcgggaacgagagcgccggca

SEQ ID NO: 199858 - DNA, 25 bp, probe
gccggaggtggtgacggactggcac

SEQ ID NO: 199859 - DNA, 25 bp, probe
gccgtacttggaggacctgcacggc

SEQ ID NO: 199860 - DNA, 25 bp, probe
gccgcatgagctggggaatccagca

SEQ ID NO: 199861 - DNA, 25 bp, probe
gccgctgacttgttgacactgcgag

SEQ ID NO: 199862 - DNA, 25 bp, probe
gcccccacagataacatcagctgag

SEQ ID NO: 199863 - DNA, 25 bp, probe
ctcccaagtgggcacggggagagga

SEQ ID NO: 199864 - DNA, 25 bp, probe
gccccaactagatcagcaggagcta

SEQ ID NO: 199865 - DNA, 25 bp, probe
gccgccaatgcttgttcaggcacgc

SEQ ID NO: 199866 - DNA, 25 bp, probe
gccccctgcattgtacgacaggact

SEQ ID NO: 199867 - DNA, 25 bp, probe
gccccctgctgtgtaacaatgtggc

SEQ ID NO: 199868 - DNA, 25 bp, probe
gcccccaactgttagtcaattgagc

SEQ ID NO: 199869 - DNA, 25 bp, probe
gcccctagaaagtagtaagctgtga

SEQ ID NO: 199870 - DNA, 25 bp, probe
gcccctctacgtggggacagcagga

SEQ ID NO: 199871 - DNA, 25 bp, probe
gcccgttcccaggggacacagagga

SEQ ID NO: 199872 - DNA, 25 bp, probe
gcccgttcccaggggacacagagga

SEQ ID NO: 199873 - DNA, 25 bp, probe
gccggttcctactttggactgagag

SEQ ID NO: 199874 - DNA, 25 bp, probe
gccgttacctgtgtgtggaccagag

SEQ ID NO: 199875 - DNA, 25 bp, probe
gccgttctctcgtgggagacgcagg

SEQ ID NO: 199876 - DNA, 25 bp, probe
gccgatgtctctctgaaggagacag

SEQ ID NO: 199877 - DNA, 25 bp, probe
gccccagctctggatgaaggcaaaa

SEQ ID NO: 199878 - DNA, 25 bp, probe
gccccgcttgcaagagctggaaaaa

SEQ ID NO: 199879 - DNA, 25 bp, probe
gcccttttcaaaggagatctatgga

SEQ ID NO: 199880 - DNA, 25 bp, probe
gcccttcttcatcgttaacattgtg

SEQ ID NO: 199881 - DNA, 25 bp, probe
gcccttcctcacatcaacaagtaaa

SEQ ID NO: 199882 - DNA, 25 bp, probe
gcccttgacgacccagatcaagata

SEQ ID NO: 199883 - DNA, 25 bp, probe
gccgcttgacaaagactactacgtg

SEQ ID NO: 199884 - DNA, 25 bp, probe
gcccttcagccaggagtatttcctg

SEQ ID NO: 199885 - DNA, 25 bp, probe
gcccttactgaggaaaaacgtgtct

SEQ ID NO: 199886 - DNA, 25 bp, probe
gccctatactgggggacatcccgat

SEQ ID NO: 199887 - DNA, 25 bp, probe
gccccattccagagcgaatcctggg

SEQ ID NO: 199888 - DNA, 25 bp, probe
gccctattctagaggatacttgaat

SEQ ID NO: 199889 - DNA, 25 bp, probe
gcgcctttcttaaagtttggcaata

SEQ ID NO: 199890 - DNA, 25 bp, probe
gcccttgtcattgaggttagggaca

SEQ ID NO: 199891 - DNA, 25 bp, probe
gcccttggcttcattgtttgtggac

SEQ ID NO: 199892 - DNA, 25 bp, probe
gcccttggcttcattgtttgtggac

SEQ ID NO: 199893 - DNA, 25 bp, probe
gccctgctgcgaaagttcttggtgg

SEQ ID NO: 199894 - DNA, 25 bp, probe
gccgctgtgaccaagtatgccggcg

SEQ ID NO: 199895 - DNA, 25 bp, probe
gccgctgggacaagagacgctggcg

SEQ ID NO: 199896 - DNA, 25 bp, probe
gccgctgggacaagagacgctggcg

SEQ ID NO: 199897 - DNA, 25 bp, probe
gccgtcgcttcaagagggtggtgga

SEQ ID NO: 199898 - DNA, 25 bp, probe
gccgtcgcttcaagagggtggtgga

SEQ ID NO: 199899 - DNA, 25 bp, probe
gccgtcggttcaagcgagtggtgga

SEQ ID NO: 199900 - DNA, 25 bp, probe
gccgccagtgatgacggaggagtag

SEQ ID NO: 199901 - DNA, 25 bp, probe
gccgctcggaaacacatggacaagg

SEQ ID NO: 199902 - DNA, 25 bp, probe
gccccagggcacataagagcaaagg

SEQ ID NO: 199903 - DNA, 25 bp, probe
gccggaggacacccatgaagctaat

SEQ ID NO: 199904 - DNA, 25 bp, probe
gccggacgcgagcagatgaacgaac

SEQ ID NO: 199905 - DNA, 25 bp, probe
gccggagtgtggaagatgacaagga

SEQ ID NO: 199906 - DNA, 25 bp, probe
gccgggctggtctttgacatggccc

SEQ ID NO: 199907 - DNA, 25 bp, probe
gccgtgtgggacgagtggaggccgc

SEQ ID NO: 199908 - DNA, 25 bp, probe
gccgggagactgccagtggagacgg

SEQ ID NO: 199909 - DNA, 25 bp, probe
gccggtggacagcggaacatatgag

SEQ ID NO: 199910 - DNA, 25 bp, probe
gccctggggccctgaaatggggtgg

SEQ ID NO: 199911 - DNA, 25 bp, probe
gccctggggccctgaaatggggtgg

SEQ ID NO: 199912 - DNA, 25 bp, probe
gcaccaggggtgcacaataaagggg

SEQ ID NO: 199913 - DNA, 25 bp, probe
gctcctgaaggtcaaaccggaggag

SEQ ID NO: 199914 - DNA, 25 bp, probe
gcccgaggctctcaaacacgggaag

SEQ ID NO: 199915 - DNA, 25 bp, probe
gcccgagccatcctggaagaacagg

SEQ ID NO: 199916 - DNA, 25 bp, probe
gcccgagccatcctggaagaacagg

SEQ ID NO: 199917 - DNA, 25 bp, probe
gccggagaaggtgctcaggagcagg

SEQ ID NO: 199918 - DNA, 25 bp, probe
gccgtgagatgagcacccagggagt

SEQ ID NO: 199919 - DNA, 25 bp, probe
gccgctgcatgatcaacctcatgga

SEQ ID NO: 199920 - DNA, 25 bp, probe
gccggtggacagtcctgatgacaca

SEQ ID NO: 199921 - DNA, 25 bp, probe
gccctgtggaccacgaggacatctc

SEQ ID NO: 199922 - DNA, 25 bp, probe
gccctgtggaccacgaggacatctc

SEQ ID NO: 199923 - DNA, 25 bp, probe
gccgctggacactcggagggatatg

SEQ ID NO: 199924 - DNA, 25 bp, probe
gccgtggacacagctaagacttctg

SEQ ID NO: 199925 - DNA, 25 bp, probe
gccgtggcacagaccgaggtcattg

SEQ ID NO: 199926 - DNA, 25 bp, probe
gccgtgagtcaggcctgggttggcc

SEQ ID NO: 199927 - DNA, 25 bp, probe
gccgtggctatggttggaggtcagc

SEQ ID NO: 199928 - DNA, 25 bp, probe
gcacggcgtgggaggggtagtcgaa

SEQ ID NO: 199929 - DNA, 25 bp, probe
gctgcacctggggggagggtaggga

SEQ ID NO: 199930 - DNA, 25 bp, probe
gcccctgtgtcggggggcgagggag

SEQ ID NO: 199931 - DNA, 25 bp, probe
gcccctgtgggatgggaggagtgag

SEQ ID NO: 199932 - DNA, 25 bp, probe
gccccgtggagatgtggaatggggg

SEQ ID NO: 199933 - DNA, 25 bp, probe
gccgacgggagtaagccctggtggt

SEQ ID NO: 199934 - DNA, 25 bp, probe
gccgacgggagtaagccctggtggt

SEQ ID NO: 199935 - DNA, 25 bp, probe
gccgacggccagaagatctcctggc

SEQ ID NO: 199936 - DNA, 25 bp, probe
gccgcaaggaccagatccagcggct

SEQ ID NO: 199937 - DNA, 25 bp, probe
gccgaaaaatgaagtgcacaagagc

SEQ ID NO: 199938 - DNA, 25 bp, probe
gccgagtaaagtgtgatcattactg

SEQ ID NO: 199939 - DNA, 25 bp, probe
gccgaggttatgataacatctactg

SEQ ID NO: 199940 - DNA, 25 bp, probe
gccgtttcttgccgcaagacgtcgc

SEQ ID NO: 199941 - DNA, 25 bp, probe
gccgaagtcttcagcaagaggattc

SEQ ID NO: 199942 - DNA, 25 bp, probe
gccccaatctcacttgaagatggtt

SEQ ID NO: 199943 - DNA, 25 bp, probe
gccgcagaactcttcgaatctggag

SEQ ID NO: 199944 - DNA, 25 bp, probe
gccgatgaagaatttgcaatgggaa

SEQ ID NO: 199945 - DNA, 25 bp, probe
gccgatgatgaggaccgaagtgatt

SEQ ID NO: 199946 - DNA, 25 bp, probe
gccgatatgtgagacgaatgatggc

SEQ ID NO: 199947 - DNA, 25 bp, probe
gccgatagcgctcacgcaagcatgg

SEQ ID NO: 199948 - DNA, 25 bp, probe
gccgcacatcatcagcgcgcaagag

SEQ ID NO: 199949 - DNA, 25 bp, probe
gccgtagcatgattgcgctcatgga

SEQ ID NO: 199950 - DNA, 25 bp, probe
gccgtcaagaatggcctgaggtccc

SEQ ID NO: 199951 - DNA, 25 bp, probe
gccccatgcaaaggcacgtggtttc

SEQ ID NO: 199952 - DNA, 25 bp, probe
gccctagccaggtactgagggttgc

SEQ ID NO: 199953 - DNA, 25 bp, probe
gccctacaggactctagtggttgtc

SEQ ID NO: 199954 - DNA, 25 bp, probe
gccccaggcgtctctactgggggct

SEQ ID NO: 199955 - DNA, 25 bp, probe
gccccaggcgtctctactgggggct

SEQ ID NO: 199956 - DNA, 25 bp, probe
gccccagaggtcctaagtggaggac

SEQ ID NO: 199957 - DNA, 25 bp, probe
gcccctgagattgtacgcgagatga

SEQ ID NO: 199958 - DNA, 25 bp, probe
gcgccactgaatgaaactggagaag

SEQ ID NO: 199959 - DNA, 25 bp, probe
gccgcctggtgatacagcatgagga

SEQ ID NO: 199960 - DNA, 25 bp, probe
gccgcctgcctgtgaagtggatggc

SEQ ID NO: 199961 - DNA, 25 bp, probe
gccgcctgcctgtgaagtggatggc

SEQ ID NO: 199962 - DNA, 25 bp, probe
gccgacgtcatgggcataggtgacc

SEQ ID NO: 199963 - DNA, 25 bp, probe
gccgaggctatgggcaaggtcatcc

SEQ ID NO: 199964 - DNA, 25 bp, probe
gccgggcatgatggtggtggcctgt

SEQ ID NO: 199965 - DNA, 25 bp, probe
gccgtgatggtgatgtgtgctgtct

SEQ ID NO: 199966 - DNA, 25 bp, probe
gccgtcagagtgctgtcttatgtga

SEQ ID NO: 199967 - DNA, 25 bp, probe
gccgtcatcgtgagcatctttgggc

SEQ ID NO: 199968 - DNA, 25 bp, probe
gccgtcatcgtgagcatctttgggc

SEQ ID NO: 199969 - DNA, 25 bp, probe
gccgaggaggctgacgatgagtgga

SEQ ID NO: 199970 - DNA, 25 bp, probe
gccgctggaggatccggaaagagtt

SEQ ID NO: 199971 - DNA, 25 bp, probe
gccgctggaggatccggaaagagtt

SEQ ID NO: 199972 - DNA, 25 bp, probe
gccgctgagggcacaaggaattagt

SEQ ID NO: 199973 - DNA, 25 bp, probe
gccgctgagggcacaaggaattagt

SEQ ID NO: 199974 - DNA, 25 bp, probe
gccctcaggtcacaaagaatttaga

SEQ ID NO: 199975 - DNA, 25 bp, probe
gccctaggtggaatccagaactttc

SEQ ID NO: 199976 - DNA, 25 bp, probe
gccccagggtgatctcgaagtatct

SEQ ID NO: 199977 - DNA, 25 bp, probe
gagtccgaggtagccttcaatcact

SEQ ID NO: 199978 - DNA, 25 bp, probe
gcgtcgaatggtttccttcatgacc

SEQ ID NO: 199979 - DNA, 25 bp, probe
gccctgaattgttctcaaacaaacc

SEQ ID NO: 199980 - DNA, 25 bp, probe
gccctgaattgttctcaaacaaacc

SEQ ID NO: 199981 - DNA, 25 bp, probe
gcgacttagtgttctaaataataac

SEQ ID NO: 199982 - DNA, 25 bp, probe
gcccctagctttgaaaagcaacagc

SEQ ID NO: 199983 - DNA, 25 bp, probe
gcccctacgtctgaataaaagcaat

SEQ ID NO: 199984 - DNA, 25 bp, probe
gccccagaccctgaggaaatccaat

SEQ ID NO: 199985 - DNA, 25 bp, probe
gccccagaccctgaggaaatccaat

SEQ ID NO: 199986 - DNA, 25 bp, probe
gcccctaactcataaagcaatcaaa

SEQ ID NO: 199987 - DNA, 25 bp, probe
gcccctctactccaagaagtacatt

SEQ ID NO: 199988 - DNA, 25 bp, probe
gcccctctactccaagaagtacatt

SEQ ID NO: 199989 - DNA, 25 bp, probe
gcccctcatacattgataaattggt

SEQ ID NO: 199990 - DNA, 25 bp, probe
gccccagctgacatggaaatacagt

SEQ ID NO: 199991 - DNA, 25 bp, probe
gccccagcatggactcaagggacag

SEQ ID NO: 199992 - DNA, 25 bp, probe
gccgccaacgatgcaagtgtgactg

SEQ ID NO: 199993 - DNA, 25 bp, probe
gccgaggacgaggcatcggggctgg

SEQ ID NO: 199994 - DNA, 25 bp, probe
gccgacaaggagccactggaaatgg

SEQ ID NO: 199995 - DNA, 25 bp, probe
gccccaagtggaacgagacaagcag

SEQ ID NO: 199996 - DNA, 25 bp, probe
gccccagagggaccagacacaggtc

SEQ ID NO: 199997 - DNA, 25 bp, probe
gccctcaaaggaacagacaatcttg

SEQ ID NO: 199998 - DNA, 25 bp, probe
gcccctaagtcaacttagcattttc

SEQ ID NO: 199999 - DNA, 25 bp, probe
gcccagtatcatacgttgatagttt

SEQ ID NO: 200000 - DNA, 25 bp, probe
gcccggatcattggagagaagtctt

SEQ ID NO: 200001 - DNA, 25 bp, probe
gcccgggcagtcggagacaggatca

SEQ ID NO: 200002 - DNA, 25 bp, probe
gcccgggcagtcggagacaggatca

SEQ ID NO: 200003 - DNA, 25 bp, probe
gccccgtgagtggacatgacaggga

SEQ ID NO: 200004 - DNA, 25 bp, probe
gcccacgaactcgacaccaaagatg

SEQ ID NO: 200005 - DNA, 25 bp, probe
gcccacgaattctatgccaaagata

SEQ ID NO: 200006 - DNA, 25 bp, probe
gccgtgcggttggtggacagcatga

SEQ ID NO: 200007 - DNA, 25 bp, probe
gccgaggtgctcggtggagtcatgg

SEQ ID NO: 200008 - DNA, 25 bp, probe
gccgagcgtgtctgtggactataac

SEQ ID NO: 200009 - DNA, 25 bp, probe
gccgagcctgtggagtgaactgcca

SEQ ID NO: 200010 - DNA, 25 bp, probe
gccgaggagatcaaggtccagccat

SEQ ID NO: 200011 - DNA, 25 bp, probe
gccgagaagctgcgtgtggcagcgt

SEQ ID NO: 200012 - DNA, 25 bp, probe
gccgtgaagtcaggacttgccgtct

SEQ ID NO: 200013 - DNA, 25 bp, probe
gccctgatagtagcatgtttctgtt

SEQ ID NO: 200014 - DNA, 25 bp, probe
gcccgtaacagcattgtcatcatct

SEQ ID NO: 200015 - DNA, 25 bp, probe
gccgcaacagcaggggcgatatcct

SEQ ID NO: 200016 - DNA, 25 bp, probe
gccgaaagcagggcatcatgtcctt

SEQ ID NO: 200017 - DNA, 25 bp, probe
gccccagacagtccagtggacatct

SEQ ID NO: 200018 - DNA, 25 bp, probe
gcccctctcaggtcagaagacatgc

SEQ ID NO: 200019 - DNA, 25 bp, probe
gccgccattgctctgagtcagaagc

SEQ ID NO: 200020 - DNA, 25 bp, probe
gccgcagaacatcctactgcatgaa

SEQ ID NO: 200021 - DNA, 25 bp, probe
gccgagatgactggctacgtggtga

SEQ ID NO: 200022 - DNA, 25 bp, probe
gcccagataccggcgggctgtgact

SEQ ID NO: 200023 - DNA, 25 bp, probe
gcccctgacagggctggcttgtact

SEQ ID NO: 200024 - DNA, 25 bp, probe
gcccctaatgttatgactgatcact

SEQ ID NO: 200025 - DNA, 25 bp, probe
gccgctctagaggatccaagcttac

SEQ ID NO: 200026 - DNA, 25 bp, probe
gccgcatcatcaatggatccgactg

SEQ ID NO: 200027 - DNA, 25 bp, probe
gccgctacaaggacagcttcgcggc

SEQ ID NO: 200028 - DNA, 25 bp, probe
gccctgcaagaggctggcttcttgg

SEQ ID NO: 200029 - DNA, 25 bp, probe
tcctaagaaggcacctctctgggtt

SEQ ID NO: 200030 - DNA, 25 bp, probe
gctaaagccaggattgtgttgggtt

SEQ ID NO: 200031 - DNA, 25 bp, probe
gctaggtaccaaattgtgaaagttt

SEQ ID NO: 200032 - DNA, 25 bp, probe
gccgagtactgaacattgtcaacgt

SEQ ID NO: 200033 - DNA, 25 bp, probe
gccgagtactgaacattgtcaacgt

SEQ ID NO: 200034 - DNA, 25 bp, probe
gcccgtatgtgcgtgcatgtgtata

SEQ ID NO: 200035 - DNA, 25 bp, probe
gccctgtattgagtgagctgaaact

SEQ ID NO: 200036 - DNA, 25 bp, probe
gccctctaggcagggtgtacagcta

SEQ ID NO: 200037 - DNA, 25 bp, probe
gcccatctacgaggggtatgccctc

SEQ ID NO: 200038 - DNA, 25 bp, probe
gccccaaagaggtgtacgatgtcat

SEQ ID NO: 200039 - DNA, 25 bp, probe
gccccaaagtggatgtctggttcat

SEQ ID NO: 200040 - DNA, 25 bp, probe
gccgccctaatgtgtggggtgttca

SEQ ID NO: 200041 - DNA, 25 bp, probe
gccgccctaatgtgtggggtgttca

SEQ ID NO: 200042 - DNA, 25 bp, probe
gccgcccgagatatgagggagcttt

SEQ ID NO: 200043 - DNA, 25 bp, probe
gccgccgccaagatggcggacctgg

SEQ ID NO: 200044 - DNA, 25 bp, probe
gccccccaggtaggcggagagcagt

SEQ ID NO: 200045 - DNA, 25 bp, probe
gcccccgaagctctgcagaagaagc

SEQ ID NO: 200046 - DNA, 25 bp, probe
gcccccagcaacagggaccatagga

SEQ ID NO: 200047 - DNA, 25 bp, probe
gcccagtactacgggtacctgtgga

SEQ ID NO: 200048 - DNA, 25 bp, probe
gccgcaaaggcagcaggctaccgga

SEQ ID NO: 200049 - DNA, 25 bp, probe
gcccctcaggcagagatggaccagg

SEQ ID NO: 200050 - DNA, 25 bp, probe
gccccatagtgctcaggaggcagca

SEQ ID NO: 200051 - DNA, 25 bp, probe
gcccttactgccggaagggcatcgt

SEQ ID NO: 200052 - DNA, 25 bp, probe
gcccgagcaccgtgtcgggcaggtc

SEQ ID NO: 200053 - DNA, 25 bp, probe
gcccgagcaccgtgtcgggcaggtc

SEQ ID NO: 200054 - DNA, 25 bp, probe
gcccgatctccactgttgggtgggt

SEQ ID NO: 200055 - DNA, 25 bp, probe
gccccgcagtcagtgttggggggct

SEQ ID NO: 200056 - DNA, 25 bp, probe
gccgctcgagcatgcatctagaggg

SEQ ID NO: 200057 - DNA, 25 bp, probe
gccctccatgcagtgcaaacacagg

SEQ ID NO: 200058 - DNA, 25 bp, probe
gccctccgcagccgaaagcagggca

SEQ ID NO: 200059 - DNA, 25 bp, probe
gccctccgcagccgaaagcagggca

SEQ ID NO: 200060 - DNA, 25 bp, probe
gccctccgcagccgaaagcagggca

SEQ ID NO: 200061 - DNA, 25 bp, probe
gccccctgcagagcggagaggaaag

SEQ ID NO: 200062 - DNA, 25 bp, probe
gccccctgcagagcggagaggaaag

SEQ ID NO: 200063 - DNA, 25 bp, probe
gccccagcaagagcacaagaggaag

SEQ ID NO: 200064 - DNA, 25 bp, probe
gccccagcaagagcacaagaggaag

SEQ ID NO: 200065 - DNA, 25 bp, probe
gccccagctcagcgacaagaaacgc

SEQ ID NO: 200066 - DNA, 25 bp, probe
gccgaagccatgctggcggagaatc

SEQ ID NO: 200067 - DNA, 25 bp, probe
gccgactactggtcactgggaatcc

SEQ ID NO: 200068 - DNA, 25 bp, probe
gccccaaatgagtccttgtgaacca

SEQ ID NO: 200069 - DNA, 25 bp, probe
gccctaatccagttcctggaacagg

SEQ ID NO: 200070 - DNA, 25 bp, probe
gcccccaaagtaacatggaaactgg

SEQ ID NO: 200071 - DNA, 25 bp, probe
gctccaccggggagggacagtctgg

SEQ ID NO: 200072 - DNA, 25 bp, probe
gctccaccggggagggacagtctgg

SEQ ID NO: 200073 - DNA, 25 bp, probe
gcatccaccccggatgggaaagcca

SEQ ID NO: 200074 - DNA, 25 bp, probe
gcatccaccccggatgggaaagcca

SEQ ID NO: 200075 - DNA, 25 bp, probe
gcccccgcacagcatgaaataaaaa

SEQ ID NO: 200076 - DNA, 25 bp, probe
gccccctgtctgaagaaacagaagc

SEQ ID NO: 200077 - DNA, 25 bp, probe
gcccccatttgcggactagtggaga

SEQ ID NO: 200078 - DNA, 25 bp, probe
gccctcctctgtcaacatcaaagag

SEQ ID NO: 200079 - DNA, 25 bp, probe
gcgcgtttgcggcaaccgcaagaag

SEQ ID NO: 200080 - DNA, 25 bp, probe
gctggattactacaaccacaacctg

SEQ ID NO: 200081 - DNA, 25 bp, probe
gccgcattacaacaagcgctcgacc

SEQ ID NO: 200082 - DNA, 25 bp, probe
gcccttcaaagttatgatgactgcc

SEQ ID NO: 200083 - DNA, 25 bp, probe
gccctccttcagtgagattgccagc

SEQ ID NO: 200084 - DNA, 25 bp, probe
gccctttctgcacaaaaccagcaat

SEQ ID NO: 200085 - DNA, 25 bp, probe
gccctttgatgacaccaatctcaaa

SEQ ID NO: 200086 - DNA, 25 bp, probe
gcccttttaggagcaattccatcca

SEQ ID NO: 200087 - DNA, 25 bp, probe
gccctgatttaaagccaagtccaca

SEQ ID NO: 200088 - DNA, 25 bp, probe
gccccaaatacaagcacaaatctaa

SEQ ID NO: 200089 - DNA, 25 bp, probe
gccccaaatacaagcacaaatctaa

SEQ ID NO: 200090 - DNA, 25 bp, probe
gccgcgcacagagcataaagaatct

SEQ ID NO: 200091 - DNA, 25 bp, probe
gccgcgcacagagcataaagaatct

SEQ ID NO: 200092 - DNA, 25 bp, probe
gccgctagaggcctgaggatgagct

SEQ ID NO: 200093 - DNA, 25 bp, probe
gccgctcagactccgaggatgagtg

SEQ ID NO: 200094 - DNA, 25 bp, probe
gccgcggagcacagagtgatttgga

SEQ ID NO: 200095 - DNA, 25 bp, probe
gccgcggagcacagagtgatttgga

SEQ ID NO: 200096 - DNA, 25 bp, probe
gcgtgtgaacgcatgtggtaaggtg

SEQ ID NO: 200097 - DNA, 25 bp, probe
gcgtaggaagccgggtgggggtgag

SEQ ID NO: 200098 - DNA, 25 bp, probe
gccccagaagccgtggtgggaggac

SEQ ID NO: 200099 - DNA, 25 bp, probe
gcccctgaactgctgttgggaacca

SEQ ID NO: 200100 - DNA, 25 bp, probe
gcccctgaaagcatcttcgacaagg

SEQ ID NO: 200101 - DNA, 25 bp, probe
gcccctgagaggatcaacccagagc

SEQ ID NO: 200102 - DNA, 25 bp, probe
gcccctggaagattaaaccagcctt

SEQ ID NO: 200103 - DNA, 25 bp, probe
gcccccgaaagaagatagccaccca

SEQ ID NO: 200104 - DNA, 25 bp, probe
gcccccgaaagaagatagccaccca

SEQ ID NO: 200105 - DNA, 25 bp, probe
gcagctctgacccaaatttagtccc

SEQ ID NO: 200106 - DNA, 25 bp, probe
gcgcttacccagaattcttgttcac

SEQ ID NO: 200107 - DNA, 25 bp, probe
gcgagctgacgctggttttgtgtac

SEQ ID NO: 200108 - DNA, 25 bp, probe
gcccatcaagcatggtttttgcaag

SEQ ID NO: 200109 - DNA, 25 bp, probe
gcccctatgggttttttgcacatga

SEQ ID NO: 200110 - DNA, 25 bp, probe
gcccctatgggttttttgcacatga

SEQ ID NO: 200111 - DNA, 25 bp, probe
gccccttgggatatatttggcaacc

SEQ ID NO: 200112 - DNA, 25 bp, probe
gcccctgtggagatttcctgtgaga

SEQ ID NO: 200113 - DNA, 25 bp, probe
gcccaagtgtgactgactaccttga

SEQ ID NO: 200114 - DNA, 25 bp, probe
gcccaatttgtggtctaccttcagc

SEQ ID NO: 200115 - DNA, 25 bp, probe
gcccattgtttggttgccagtcata

SEQ ID NO: 200116 - DNA, 25 bp, probe
gccctatgacttgtatgacaactcc

SEQ ID NO: 200117 - DNA, 25 bp, probe
gccctagccctagatagatagccct

SEQ ID NO: 200118 - DNA, 25 bp, probe
gccctgaccctaaataatacatttt

SEQ ID NO: 200119 - DNA, 25 bp, probe
gccctggacctaagtgacatcaact

SEQ ID NO: 200120 - DNA, 25 bp, probe
gccgctcagaccaaggcgcagagca

SEQ ID NO: 200121 - DNA, 25 bp, probe
gccgctcagaccaaggcgcagagca

SEQ ID NO: 200122 - DNA, 25 bp, probe
gccgctcatgactatacgctaagag

SEQ ID NO: 200123 - DNA, 25 bp, probe
gcccttgtatctttgcagtcattgt

SEQ ID NO: 200124 - DNA, 25 bp, probe
gcccttgctttgtatgcaaccttag

SEQ ID NO: 200125 - DNA, 25 bp, probe
gcccagttcggctacaacctggagt

SEQ ID NO: 200126 - DNA, 25 bp, probe
gcccatttctggtaagagcctgaag

SEQ ID NO: 200127 - DNA, 25 bp, probe
gcccgttgaggatgaggccgctaga

SEQ ID NO: 200128 - DNA, 25 bp, probe
gccgcagttaagggggcacaggctg

SEQ ID NO: 200129 - DNA, 25 bp, probe
gcccaggtaactgggccagcagcct

SEQ ID NO: 200130 - DNA, 25 bp, probe
gccctggttcacagagggcacgtga

SEQ ID NO: 200131 - DNA, 25 bp, probe
gcccggattcgcagcagtggaactg

SEQ ID NO: 200132 - DNA, 25 bp, probe
gcccgagcccaggtgaggagaagct

SEQ ID NO: 200133 - DNA, 25 bp, probe
gccgctaggcacgtggaggaggagc

SEQ ID NO: 200134 - DNA, 25 bp, probe
gccctaccacctggtgaagacgctg

SEQ ID NO: 200135 - DNA, 25 bp, probe
gccctaccacctggtgaagacgctg

SEQ ID NO: 200136 - DNA, 25 bp, probe
gcccgacgtggcttctgaaacgtgc

SEQ ID NO: 200137 - DNA, 25 bp, probe
gcccgacgtgaatgcagagaactgt

SEQ ID NO: 200138 - DNA, 25 bp, probe
gcgccagagtgctgacgccttactg

SEQ ID NO: 200139 - DNA, 25 bp, probe
gcccagatgtacgagctctttagcg

SEQ ID NO: 200140 - DNA, 25 bp, probe
gcccatgtctactattttgccagtg

SEQ ID NO: 200141 - DNA, 25 bp, probe
gcccatttaaatgtgagcggaattc

SEQ ID NO: 200142 - DNA, 25 bp, probe
gccctttccagagagcacggataac

SEQ ID NO: 200143 - DNA, 25 bp, probe
gccctaccgagtgaaggtcattgac

SEQ ID NO: 200144 - DNA, 25 bp, probe
gcccaacgggtacagcgtgctgggc

SEQ ID NO: 200145 - DNA, 25 bp, probe
gccccactgggttgaagcagatgtg

SEQ ID NO: 200146 - DNA, 25 bp, probe
gccgccctggagggacatcagtgct

SEQ ID NO: 200147 - DNA, 25 bp, probe
gcgccacttcgagggaatcagcgcc

SEQ ID NO: 200148 - DNA, 25 bp, probe
gcgccacttcgagggaatcagcgcc

SEQ ID NO: 200149 - DNA, 25 bp, probe
gccccttctatggagataagatgaa

SEQ ID NO: 200150 - DNA, 25 bp, probe
gccccatctctctttctaatgagaa

SEQ ID NO: 200151 - DNA, 25 bp, probe
gccccatcactgtgttcaatagtgt

SEQ ID NO: 200152 - DNA, 25 bp, probe
gccccacctatctttggtatatgat

SEQ ID NO: 200153 - DNA, 25 bp, probe
gcccctctctacatctgggaatgca

SEQ ID NO: 200154 - DNA, 25 bp, probe
gcccctcctactgcagtgaggtgac

SEQ ID NO: 200155 - DNA, 25 bp, probe
gccccggtcactgcaaggggatgct

SEQ ID NO: 200156 - DNA, 25 bp, probe
gccccggcataaggattggaggact

SEQ ID NO: 200157 - DNA, 25 bp, probe
gccctggtgctacgtggtgaaggac

SEQ ID NO: 200158 - DNA, 25 bp, probe
gccctgggtaccaagatgaatgtgg

SEQ ID NO: 200159 - DNA, 25 bp, probe
gccgcagaggtaactgaggagaggg

SEQ ID NO: 200160 - DNA, 25 bp, probe
gcccaagtgataacttcgaagccat

SEQ ID NO: 200161 - DNA, 25 bp, probe
gccctaggaacctcgaagctgttct

SEQ ID NO: 200162 - DNA, 25 bp, probe
gccctggtgacacaacgagcacttt

SEQ ID NO: 200163 - DNA, 25 bp, probe
gcccatgaataatacacgacctgtt

SEQ ID NO: 200164 - DNA, 25 bp, probe
gcccatgattacgtcatccagacta

SEQ ID NO: 200165 - DNA, 25 bp, probe
gcccatgattacgtcatccagacta

SEQ ID NO: 200166 - DNA, 25 bp, probe
gcccatgtcaatgtctccatggata

SEQ ID NO: 200167 - DNA, 25 bp, probe
gccgctgccagaagtgcgtctggaa

SEQ ID NO: 200168 - DNA, 25 bp, probe
gccgctataggacgcttcggaatgt

SEQ ID NO: 200169 - DNA, 25 bp, probe
gcccttgggagccacgggattgtaa

SEQ ID NO: 200170 - DNA, 25 bp, probe
gcccttgaggacctggcttttggca

SEQ ID NO: 200171 - DNA, 25 bp, probe
gccctcaagattgtggactttggca

SEQ ID NO: 200172 - DNA, 25 bp, probe
gccctaatgtgtggggtgttcatcc

SEQ ID NO: 200173 - DNA, 25 bp, probe
gccctacatggatgtggtcgtctcc

SEQ ID NO: 200174 - DNA, 25 bp, probe
gccctactgctttttagcagtcctg

SEQ ID NO: 200175 - DNA, 25 bp, probe
gccctactgctttttagcagtcctg

SEQ ID NO: 200176 - DNA, 25 bp, probe
gcccccagcaaactctagcaatagc

SEQ ID NO: 200177 - DNA, 25 bp, probe
gccccctgcacaagtgtgacatcta

SEQ ID NO: 200178 - DNA, 25 bp, probe
gcgtccaccacattgactactataa

SEQ ID NO: 200179 - DNA, 25 bp, probe
gcgtccaccacattgactactataa

SEQ ID NO: 200180 - DNA, 25 bp, probe
gcccgcaaagctcgcgctacaaaac

SEQ ID NO: 200181 - DNA, 25 bp, probe
gcccgcaactgtggccgagaaagca

SEQ ID NO: 200182 - DNA, 25 bp, probe
gcccgcatattaggcgcagataaaa

SEQ ID NO: 200183 - DNA, 25 bp, probe
gcccgcataaaactgaaggtggaga

SEQ ID NO: 200184 - DNA, 25 bp, probe
gcgatcagcaaacattctagtgggg

SEQ ID NO: 200185 - DNA, 25 bp, probe
gccctgacatcatcattcttgtggg

SEQ ID NO: 200186 - DNA, 25 bp, probe
gccctgacatcatcattcttgtggg

SEQ ID NO: 200187 - DNA, 25 bp, probe
gcccgccaatactctcataaagcat

SEQ ID NO: 200188 - DNA, 25 bp, probe
gccctgcacaagtaccttaagcacc

SEQ ID NO: 200189 - DNA, 25 bp, probe
gccctgcacaagtaccttaagcacc

SEQ ID NO: 200190 - DNA, 25 bp, probe
gccctccaaagagccttcagaatgc

SEQ ID NO: 200191 - DNA, 25 bp, probe
gccctccaaagagccttcagaatgc

SEQ ID NO: 200192 - DNA, 25 bp, probe
gccctcatcatgggggtcttaaccc

SEQ ID NO: 200193 - DNA, 25 bp, probe
gccccacaggacggtttatgagcac

SEQ ID NO: 200194 - DNA, 25 bp, probe
gcccccctgcatcttttatagcagt

SEQ ID NO: 200195 - DNA, 25 bp, probe
gccccaccttttcatattgaggctg

SEQ ID NO: 200196 - DNA, 25 bp, probe
gcccctttttgtgacattaccaatt

SEQ ID NO: 200197 - DNA, 25 bp, probe
gcccctttgtttcaattgtccaatt

SEQ ID NO: 200198 - DNA, 25 bp, probe
gcccctgaagttctcgatgattcca

SEQ ID NO: 200199 - DNA, 25 bp, probe
gcccctgaagttctcgatgattcca

SEQ ID NO: 200200 - DNA, 25 bp, probe
gctacgagaacttcaccgataacca

SEQ ID NO: 200201 - DNA, 25 bp, probe
gctacgagaacttcaccgataacca

SEQ ID NO: 200202 - DNA, 25 bp, probe
gcttctggaccttgaccttcagaac

SEQ ID NO: 200203 - DNA, 25 bp, probe
gcttctggaccttgaccttcagaac

SEQ ID NO: 200204 - DNA, 25 bp, probe
gccctggcaacattgaagttcgatc

SEQ ID NO: 200205 - DNA, 25 bp, probe
gccctggcaacattgaagttcgatc

SEQ ID NO: 200206 - DNA, 25 bp, probe
gccctcatgaacatgaactgtggca

SEQ ID NO: 200207 - DNA, 25 bp, probe
gccctctgcaacagaaccttcagga

SEQ ID NO: 200208 - DNA, 25 bp, probe
gcccttgaaataaaccttagctgcc

SEQ ID NO: 200209 - DNA, 25 bp, probe
gctccctaaaaccatgcctaagtac

SEQ ID NO: 200210 - DNA, 25 bp, probe
gccctcatagggagatccaaagtcc

SEQ ID NO: 200211 - DNA, 25 bp, probe
gccccataataccaagctccaagtc

SEQ ID NO: 200212 - DNA, 25 bp, probe
gccccataataccaagctccaagtc

SEQ ID NO: 200213 - DNA, 25 bp, probe
gccctctcaatgatcaactctaaca

SEQ ID NO: 200214 - DNA, 25 bp, probe
gccctgctggtgaacaatgcctacc

SEQ ID NO: 200215 - DNA, 25 bp, probe
gccctgctggtgaacaatgcctacc

SEQ ID NO: 200216 - DNA, 25 bp, probe
gccccaggagaaccagctctgagac

SEQ ID NO: 200217 - DNA, 25 bp, probe
gcccggtagatgcacaccttgtgcc

SEQ ID NO: 200218 - DNA, 25 bp, probe
gcccggtagatgcacaccttgtgcc

SEQ ID NO: 200219 - DNA, 25 bp, probe
gcccggtagatgcacaccttgtgcc

SEQ ID NO: 200220 - DNA, 25 bp, probe
gcccggtagatgcacaccttgtgcc

SEQ ID NO: 200221 - DNA, 25 bp, probe
gcccaagtggcaaacacgtggccta

SEQ ID NO: 200222 - DNA, 25 bp, probe
gccccagtgtgggacctatgggctc

SEQ ID NO: 200223 - DNA, 25 bp, probe
gcccgttagctgtaacttggagctc

SEQ ID NO: 200224 - DNA, 25 bp, probe
gcccggtttgtgatcctgagagtct

SEQ ID NO: 200225 - DNA, 25 bp, probe
gcccgggtggagctcatggagcagt

SEQ ID NO: 200226 - DNA, 25 bp, probe
gcccgacgaggactttgtgctagtc

SEQ ID NO: 200227 - DNA, 25 bp, probe
gcccgacgaggactttgtgctagtc

SEQ ID NO: 200228 - DNA, 25 bp, probe
gcccgacgaggactttgtgctagtc

SEQ ID NO: 200229 - DNA, 25 bp, probe
gccccagtgaattcaggtgggcaga

SEQ ID NO: 200230 - DNA, 25 bp, probe
gccccagtggatttgtggagcctgg

SEQ ID NO: 200231 - DNA, 25 bp, probe
gccccagggcagtctggaggcttag

SEQ ID NO: 200232 - DNA, 25 bp, probe
gcgctccggaatccggattgcccag

SEQ ID NO: 200233 - DNA, 25 bp, probe
gccccctgtatctggattgtaatgt

SEQ ID NO: 200234 - DNA, 25 bp, probe
gccccctgtatctggattgtaatgt

SEQ ID NO: 200235 - DNA, 25 bp, probe
gcccgttggtctatgattgacaagt

SEQ ID NO: 200236 - DNA, 25 bp, probe
gcccgtaggttaagaggtcagcatt

SEQ ID NO: 200237 - DNA, 25 bp, probe
gcccagtttgttcatgtcagtgaga

SEQ ID NO: 200238 - DNA, 25 bp, probe
gcccgcgaacatcttgatcagtgag

SEQ ID NO: 200239 - DNA, 25 bp, probe
gcccctgaatcatgggcacggaggg

SEQ ID NO: 200240 - DNA, 25 bp, probe
gccgccatctacgaggagaaggagg

SEQ ID NO: 200241 - DNA, 25 bp, probe
gccgccatctacgaggagaaggagg

SEQ ID NO: 200242 - DNA, 25 bp, probe
gccccactgagccggggagagtggg

SEQ ID NO: 200243 - DNA, 25 bp, probe
gcccccagcacggggccagaggagg

SEQ ID NO: 200244 - DNA, 25 bp, probe
gcccggaaggatttccagagggagg

SEQ ID NO: 200245 - DNA, 25 bp, probe
gccctggagttgtcttcacgggagc

SEQ ID NO: 200246 - DNA, 25 bp, probe
gccctggaatgtgcattcctgccac

SEQ ID NO: 200247 - DNA, 25 bp, probe
gccctggagggacatcagtgcttcc

SEQ ID NO: 200248 - DNA, 25 bp, probe
gccctgggtggatacttgaacccca

SEQ ID NO: 200249 - DNA, 25 bp, probe
gccctgaggcttgaagcttgaaggc

SEQ ID NO: 200250 - DNA, 25 bp, probe
gccctgcagagcaataacactatat

SEQ ID NO: 200251 - DNA, 25 bp, probe
gccccaggagcaggaacatgccatg

SEQ ID NO: 200252 - DNA, 25 bp, probe
gccccaggaaggaaatgatgcagct

SEQ ID NO: 200253 - DNA, 25 bp, probe
gccccaaggaggaagatcacagagc

SEQ ID NO: 200254 - DNA, 25 bp, probe
gccccataggaagtagtagaagcgg

SEQ ID NO: 200255 - DNA, 25 bp, probe
gccccatcaggttgttgtgaagagc

SEQ ID NO: 200256 - DNA, 25 bp, probe
gccccaagcaatctctgtgcaaagc

SEQ ID NO: 200257 - DNA, 25 bp, probe
gccccaatgatactcctgaagagat

SEQ ID NO: 200258 - DNA, 25 bp, probe
gccccagagatccttcaggagatgt

SEQ ID NO: 200259 - DNA, 25 bp, probe
gccccagagatccttcaggagatgt

SEQ ID NO: 200260 - DNA, 25 bp, probe
gccccagagtgcctgaaggagtata

SEQ ID NO: 200261 - DNA, 25 bp, probe
gccccagagctcttggagcagaaac

SEQ ID NO: 200262 - DNA, 25 bp, probe
gccccagagctcatggcgaagagac

SEQ ID NO: 200263 - DNA, 25 bp, probe
gccccagagctcatggcgaagagac

SEQ ID NO: 200264 - DNA, 25 bp, probe
gcccctcagactggggaagagtcca

SEQ ID NO: 200265 - DNA, 25 bp, probe
gcccctcagacagctggcatgagag

SEQ ID NO: 200266 - DNA, 25 bp, probe
gcccgcctgcaagatggattggccg

SEQ ID NO: 200267 - DNA, 25 bp, probe
gccccgctgcgagcatgatgaagtc

SEQ ID NO: 200268 - DNA, 25 bp, probe
gccctctcgaacatgcaaagatcct

SEQ ID NO: 200269 - DNA, 25 bp, probe
gccctcagggacagtgaggtcccag

SEQ ID NO: 200270 - DNA, 25 bp, probe
gccccaggagagaggcaaggccgac

SEQ ID NO: 200271 - DNA, 25 bp, probe
gcccaagctcagcttagaagttcga

SEQ ID NO: 200272 - DNA, 25 bp, probe
gccctagcattaattgaaagtggaa

SEQ ID NO: 200273 - DNA, 25 bp, probe
gcccagtttcatggctaaagtggat

SEQ ID NO: 200274 - DNA, 25 bp, probe
gcccagtttcatggctaaagtggat

SEQ ID NO: 200275 - DNA, 25 bp, probe
gcccgtcttcggagaggcgagagcc

SEQ ID NO: 200276 - DNA, 25 bp, probe
gcccgtcttgccagaaatgctgttc

SEQ ID NO: 200277 - DNA, 25 bp, probe
gcccacctcaccatggcagaggtgt

SEQ ID NO: 200278 - DNA, 25 bp, probe
gcccaggctgagcattctcagacct

SEQ ID NO: 200279 - DNA, 25 bp, probe
gcccaggctaaactgccaacatgca

SEQ ID NO: 200280 - DNA, 25 bp, probe
gccccctaaagagtcaagcatctaa

SEQ ID NO: 200281 - DNA, 25 bp, probe
gccccccaactgtgaatctgtaaat

SEQ ID NO: 200282 - DNA, 25 bp, probe
gcccttccaaatcagcaatcttcag

SEQ ID NO: 200283 - DNA, 25 bp, probe
gccctgtggcatcattacaagtgtc

SEQ ID NO: 200284 - DNA, 25 bp, probe
gccctgatggctcacgaaagcggcc

SEQ ID NO: 200285 - DNA, 25 bp, probe
gcccctgagcccagagaagctggaa

SEQ ID NO: 200286 - DNA, 25 bp, probe
gcccctgagcccagagaagctggaa

SEQ ID NO: 200287 - DNA, 25 bp, probe
gcccctgagtccagggatgctgcgg

SEQ ID NO: 200288 - DNA, 25 bp, probe
gccccattgtccagatgggcactgc

SEQ ID NO: 200289 - DNA, 25 bp, probe
gccccattgtccagatgggcactgc

SEQ ID NO: 200290 - DNA, 25 bp, probe
gccctacttccaggatggatgcatc

SEQ ID NO: 200291 - DNA, 25 bp, probe
gccctccttcgatgtgcaggtgggc

SEQ ID NO: 200292 - DNA, 25 bp, probe
gccctccttcgatgtgcaggtgggc

SEQ ID NO: 200293 - DNA, 25 bp, probe
gcgcccttcttatgttaggaggcct

SEQ ID NO: 200294 - DNA, 25 bp, probe
gcgcccttcttatgttaggaggcct

SEQ ID NO: 200295 - DNA, 25 bp, probe
gccccatcggtgtgtaaggtggcct

SEQ ID NO: 200296 - DNA, 25 bp, probe
gccccatccaggtggaatttgtctc

SEQ ID NO: 200297 - DNA, 25 bp, probe
gccctcgacaggtggaacatgttac

SEQ ID NO: 200298 - DNA, 25 bp, probe
gccctctacctgctgagcaagagtt

SEQ ID NO: 200299 - DNA, 25 bp, probe
gccctctacctgctgagcaagagtt

SEQ ID NO: 200300 - DNA, 25 bp, probe
gcccctcaccagcaagaggcatgat

SEQ ID NO: 200301 - DNA, 25 bp, probe
gccccattctagaactgcattcaga

SEQ ID NO: 200302 - DNA, 25 bp, probe
gccccattcataagatgtctgctgc

SEQ ID NO: 200303 - DNA, 25 bp, probe
gccccatgctcgtgatgtatgttgc

SEQ ID NO: 200304 - DNA, 25 bp, probe
gccccatgctcgtgatgtatgttgc

SEQ ID NO: 200305 - DNA, 25 bp, probe
gccctctcatccttgatgtcatagt

SEQ ID NO: 200306 - DNA, 25 bp, probe
gcgactgcgacgttcgatcttgcat

SEQ ID NO: 200307 - DNA, 25 bp, probe
gcgactggatcttgctaacattcat

SEQ ID NO: 200308 - DNA, 25 bp, probe
gcgaaggtattctaatctgattttg

SEQ ID NO: 200309 - DNA, 25 bp, probe
gcccgagctgttttatctgcatttt

SEQ ID NO: 200310 - DNA, 25 bp, probe
gcccgatggtaggattcagttctgt

SEQ ID NO: 200311 - DNA, 25 bp, probe
gcccgtatgatattattcacattat

SEQ ID NO: 200312 - DNA, 25 bp, probe
gcccaggattatattagcattattt

SEQ ID NO: 200313 - DNA, 25 bp, probe
gcccagttgtaacaatgctgctgtc

SEQ ID NO: 200314 - DNA, 25 bp, probe
gcccagttgtaacaatgctgctgtc

SEQ ID NO: 200315 - DNA, 25 bp, probe
gcccacttggctacagagcagtctt

SEQ ID NO: 200316 - DNA, 25 bp, probe
gcccatcttacaatcaacacctgtc

SEQ ID NO: 200317 - DNA, 25 bp, probe
gcccatcttacaatcaacacctgtc

SEQ ID NO: 200318 - DNA, 25 bp, probe
gccctgctgtaacaatacctcatgt

SEQ ID NO: 200319 - DNA, 25 bp, probe
gccctgggcaatgagatggtctgca

SEQ ID NO: 200320 - DNA, 25 bp, probe
gccctagtgcaacaggcattgctga

SEQ ID NO: 200321 - DNA, 25 bp, probe
gccctggatcaaccagatcctgcag

SEQ ID NO: 200322 - DNA, 25 bp, probe
gccctggatcaaccagatcctgcag

SEQ ID NO: 200323 - DNA, 25 bp, probe
gccctgcagaccactgagactgagg

SEQ ID NO: 200324 - DNA, 25 bp, probe
gccctgctggttgctggattatggg

SEQ ID NO: 200325 - DNA, 25 bp, probe
gcccctgtgtgtgctcagtgccatg

SEQ ID NO: 200326 - DNA, 25 bp, probe
gccctctgcttgactgtatattatg

SEQ ID NO: 200327 - DNA, 25 bp, probe
gcccatctgtcattatgttactgtc

SEQ ID NO: 200328 - DNA, 25 bp, probe
gcccatcagatccagatgttacaac

SEQ ID NO: 200329 - DNA, 25 bp, probe
gcccatcattgtcatgatcaccaac

SEQ ID NO: 200330 - DNA, 25 bp, probe
gcccaaattgctttgcagataagcc

SEQ ID NO: 200331 - DNA, 25 bp, probe
gcccaaactgccttcgtttggtcca

SEQ ID NO: 200332 - DNA, 25 bp, probe
gcccaaacagcctcagttaactgca

SEQ ID NO: 200333 - DNA, 25 bp, probe
gctctaaacagttacttgtacccct

SEQ ID NO: 200334 - DNA, 25 bp, probe
gcgtcataaagtccagcttgtctcc

SEQ ID NO: 200335 - DNA, 25 bp, probe
gcacctacaaccgcaaatatgccca

SEQ ID NO: 200336 - DNA, 25 bp, probe
gccctacaaccagaagagtgacatc

SEQ ID NO: 200337 - DNA, 25 bp, probe
gccctacaaccagaagagtgacatc

SEQ ID NO: 200338 - DNA, 25 bp, probe
gccctactggaacacagcagagtct

SEQ ID NO: 200339 - DNA, 25 bp, probe
gcccaactttttcacagcagattac

SEQ ID NO: 200340 - DNA, 25 bp, probe
gcccaaatttataggacagaaactt

SEQ ID NO: 200341 - DNA, 25 bp, probe
gccctgaggttctggcaaaaatctc

SEQ ID NO: 200342 - DNA, 25 bp, probe
gcgccttggggctagcgagaaagat

SEQ ID NO: 200343 - DNA, 25 bp, probe
gcccctgaggccctgagagagaaga

SEQ ID NO: 200344 - DNA, 25 bp, probe
gcccctgaggccctgagagagaagg

SEQ ID NO: 200345 - DNA, 25 bp, probe
gccctcagagaccctgcagaagtac

SEQ ID NO: 200346 - DNA, 25 bp, probe
gccctcagagaccctgcagaagtac

SEQ ID NO: 200347 - DNA, 25 bp, probe
gccctctgagaggttggaagctcta

SEQ ID NO: 200348 - DNA, 25 bp, probe
gcccctgaagttgtgaactatgatt

SEQ ID NO: 200349 - DNA, 25 bp, probe
gcccctgaagcttgcagtgtgcact

SEQ ID NO: 200350 - DNA, 25 bp, probe
gcccctgaagatgcagctgtggccc

SEQ ID NO: 200351 - DNA, 25 bp, probe
gcccctgaacgaggaatggcactca

SEQ ID NO: 200352 - DNA, 25 bp, probe
gcccctgaacgaggaatggcactca

SEQ ID NO: 200353 - DNA, 25 bp, probe
gcccctagaagaggatggccagcca

SEQ ID NO: 200354 - DNA, 25 bp, probe
gcccctagaagtggctttcaccacc

SEQ ID NO: 200355 - DNA, 25 bp, probe
gcccattaacagtgctttgaaccca

SEQ ID NO: 200356 - DNA, 25 bp, probe
gcccattaacagtgctttgaaccca

SEQ ID NO: 200357 - DNA, 25 bp, probe
gcccctaatgcaaagctctttacct

SEQ ID NO: 200358 - DNA, 25 bp, probe
gcccagtattgaaggcctcatcttc

SEQ ID NO: 200359 - DNA, 25 bp, probe
gcccagtattgaaggcctcatcttc

SEQ ID NO: 200360 - DNA, 25 bp, probe
gcccatatcaggacagtggctcctt

SEQ ID NO: 200361 - DNA, 25 bp, probe
gccctgccatggacatatggggcct

SEQ ID NO: 200362 - DNA, 25 bp, probe
gccctgcatgcagccattgggggaa

SEQ ID NO: 200363 - DNA, 25 bp, probe
gccctggcatcccaaaggggcaacg

SEQ ID NO: 200364 - DNA, 25 bp, probe
gccctggccctgtgcagggaaaggg

SEQ ID NO: 200365 - DNA, 25 bp, probe
gccccgcccatgctgagggaagggg

SEQ ID NO: 200366 - DNA, 25 bp, probe
gcgccttccccgagtggaaggcgcc

SEQ ID NO: 200367 - DNA, 25 bp, probe
gccctgctccccagtggggaggtga

SEQ ID NO: 200368 - DNA, 25 bp, probe
gcccttcctgccaggggaggtgaag

SEQ ID NO: 200369 - DNA, 25 bp, probe
gccccctctgcatgtgggtagagga

SEQ ID NO: 200370 - DNA, 25 bp, probe
gccccctgccagttgaagtgagaga

SEQ ID NO: 200371 - DNA, 25 bp, probe
gctctacctccatttagggatttgc

SEQ ID NO: 200372 - DNA, 25 bp, probe
gcccaaggaattcagaagagcttgc

SEQ ID NO: 200373 - DNA, 25 bp, probe
gccctgggagtcttaaaagcagtgc

SEQ ID NO: 200374 - DNA, 25 bp, probe
gcccgggacatctacaaagacccca

SEQ ID NO: 200375 - DNA, 25 bp, probe
gcccggcgagaattcgaggagaccc

SEQ ID NO: 200376 - DNA, 25 bp, probe
gcgacgggtgatgctcaaggaaatc

SEQ ID NO: 200377 - DNA, 25 bp, probe
gcccaggagctcgccaatggaattc

SEQ ID NO: 200378 - DNA, 25 bp, probe
gcccgggatcaggccaagaggatca

SEQ ID NO: 200379 - DNA, 25 bp, probe
gcccgctgggagggtacatggatga

SEQ ID NO: 200380 - DNA, 25 bp, probe
gccctgatccggggtgactggaacc

SEQ ID NO: 200381 - DNA, 25 bp, probe
gccctgatccggggtgactggaacc

SEQ ID NO: 200382 - DNA, 25 bp, probe
gccctgatccggggtgactggaacc

SEQ ID NO: 200383 - DNA, 25 bp, probe
gccctggcctggtgtgtatagacca

SEQ ID NO: 200384 - DNA, 25 bp, probe
gcccggcaaggtagtggaagactgg

SEQ ID NO: 200385 - DNA, 25 bp, probe
gcccagtcaacgcttaaacaagtgc

SEQ ID NO: 200386 - DNA, 25 bp, probe
gccctgtcacaacaccaacagaagt

SEQ ID NO: 200387 - DNA, 25 bp, probe
gccctggcctaggactccagagaag

SEQ ID NO: 200388 - DNA, 25 bp, probe
gccctgtgccatcggttcaaagaga

SEQ ID NO: 200389 - DNA, 25 bp, probe
gcccagtggagtgttcagtctggaa

SEQ ID NO: 200390 - DNA, 25 bp, probe
gcccagaccagaagttagttcaatg

SEQ ID NO: 200391 - DNA, 25 bp, probe
gcccagaatcgaatccaatgtgcca

SEQ ID NO: 200392 - DNA, 25 bp, probe
gcccgaatcctgactacagttcagt

SEQ ID NO: 200393 - DNA, 25 bp, probe
gcccgaatcctgactacagttcagt

SEQ ID NO: 200394 - DNA, 25 bp, probe
gccctgtgataggatctaacttcag

SEQ ID NO: 200395 - DNA, 25 bp, probe
gcccctgagagcgatcctaggtagg

SEQ ID NO: 200396 - DNA, 25 bp, probe
gcccctgcagaaatgcaccgagtat

SEQ ID NO: 200397 - DNA, 25 bp, probe
gcccagggaatgaactctagttttc

SEQ ID NO: 200398 - DNA, 25 bp, probe
gcccagggaatgaactctagttttc

SEQ ID NO: 200399 - DNA, 25 bp, probe
gcccagggcctgagttagactattt

SEQ ID NO: 200400 - DNA, 25 bp, probe
gcccagggcctgagttagactattt

SEQ ID NO: 200401 - DNA, 25 bp, probe
gcccatgagggcactgtttattatt

SEQ ID NO: 200402 - DNA, 25 bp, probe
gccctggaggcaatctgtttgagac

SEQ ID NO: 200403 - DNA, 25 bp, probe
gccctgttcgcatcagtggcgatga

SEQ ID NO: 200404 - DNA, 25 bp, probe
gcccttatctcaaagtccgtggctg

SEQ ID NO: 200405 - DNA, 25 bp, probe
gcccattgaccccaggggtgtgctg

SEQ ID NO: 200406 - DNA, 25 bp, probe
gcccatcacccagagggccatgtgt

SEQ ID NO: 200407 - DNA, 25 bp, probe
gcgcttctctcgtcggcggacttgt

SEQ ID NO: 200408 - DNA, 25 bp, probe
gcgcataataaggggaagactttaa

SEQ ID NO: 200409 - DNA, 25 bp, probe
gctgcaaaacccgaaaccgttacat

SEQ ID NO: 200410 - DNA, 25 bp, probe
ggacgaaccttgaaaactttatgct

SEQ ID NO: 200411 - DNA, 25 bp, probe
gaacgaatgtcacaacttgtacttt

SEQ ID NO: 200412 - DNA, 25 bp, probe
gcccgaaatcgtagtgcttgtactt

SEQ ID NO: 200413 - DNA, 25 bp, probe
gcccaagaacatgatgctttgtgag

SEQ ID NO: 200414 - DNA, 25 bp, probe
gcccacaactgcagtgttggggaaa

SEQ ID NO: 200415 - DNA, 25 bp, probe
gcccacaacgtgcggacgcaggagc

SEQ ID NO: 200416 - DNA, 25 bp, probe
gcccactaggatctggggcctacag

SEQ ID NO: 200417 - DNA, 25 bp, probe
gcccccatgtgggtgtggcagttac

SEQ ID NO: 200418 - DNA, 25 bp, probe
gcccccattacactggatgatgatt

SEQ ID NO: 200419 - DNA, 25 bp, probe
gcccccattacactggatgatgatt

SEQ ID NO: 200420 - DNA, 25 bp, probe
gcccaagattactgtcaatgtctat

SEQ ID NO: 200421 - DNA, 25 bp, probe
gccctagcattactagatgcagttt

SEQ ID NO: 200422 - DNA, 25 bp, probe
gccctcactctcctatagagattgt

SEQ ID NO: 200423 - DNA, 25 bp, probe
gcccctgatgcccgatcagataatg

SEQ ID NO: 200424 - DNA, 25 bp, probe
gcccaatgtggccaacggaagtttt

SEQ ID NO: 200425 - DNA, 25 bp, probe
gcgccaagaaatgccggaagttcct

SEQ ID NO: 200426 - DNA, 25 bp, probe
gcccaagacaggggccgcaggcttc

SEQ ID NO: 200427 - DNA, 25 bp, probe
gcccggccaaggacactgatgggtc

SEQ ID NO: 200428 - DNA, 25 bp, probe
gcccgggagaggaccgagctggagg

SEQ ID NO: 200429 - DNA, 25 bp, probe
gccccgagagggcgagaccagaggg

SEQ ID NO: 200430 - DNA, 25 bp, probe
gcccttgcgagggttggtctcgagg

SEQ ID NO: 200431 - DNA, 25 bp, probe
gccctgtgcaaaccttggctcagga

SEQ ID NO: 200432 - DNA, 25 bp, probe
gcccttcaatatccatggagtctct

SEQ ID NO: 200433 - DNA, 25 bp, probe
gccctgtacataaccagcaagctct

SEQ ID NO: 200434 - DNA, 25 bp, probe
gcgcgtgctgacagcactccagagt

SEQ ID NO: 200435 - DNA, 25 bp, probe
gcgcgtgctgacagcactccagagt

SEQ ID NO: 200436 - DNA, 25 bp, probe
gcgcattgcttttgacctcaagctg

SEQ ID NO: 200437 - DNA, 25 bp, probe
gcgcagtgtggttagcttgaccttt

SEQ ID NO: 200438 - DNA, 25 bp, probe
gcgcagatagagacaatcttacccg

SEQ ID NO: 200439 - DNA, 25 bp, probe
gcgcgtcaagcagactttctcttgc

SEQ ID NO: 200440 - DNA, 25 bp, probe
gcgcgtcaagcagactttctcttgc

SEQ ID NO: 200441 - DNA, 25 bp, probe
gcccaacaactatcagttctgctga

SEQ ID NO: 200442 - DNA, 25 bp, probe
gcccccacactgaaatgaagctggc

SEQ ID NO: 200443 - DNA, 25 bp, probe
gccccccatgtcttgatgaatgcat

SEQ ID NO: 200444 - DNA, 25 bp, probe
gccccgcctgtcagaagatgaacat

SEQ ID NO: 200445 - DNA, 25 bp, probe
gcccaccgactaccaagtgaacatc

SEQ ID NO: 200446 - DNA, 25 bp, probe
gcccacagcagactaaaattacttc

SEQ ID NO: 200447 - DNA, 25 bp, probe
gcccaacatagtgaaactccgtctc

SEQ ID NO: 200448 - DNA, 25 bp, probe
gcccaaatcacctgtacttggtcat

SEQ ID NO: 200449 - DNA, 25 bp, probe
gcccataagcacatcagtacttttc

SEQ ID NO: 200450 - DNA, 25 bp, probe
gcccattcacacaatcaggagctaa

SEQ ID NO: 200451 - DNA, 25 bp, probe
gcccatctcaacttactcattaaag

SEQ ID NO: 200452 - DNA, 25 bp, probe
gcccatcactaatatccagtgtaaa

SEQ ID NO: 200453 - DNA, 25 bp, probe
gcccatctctgagcaactttgtctg

SEQ ID NO: 200454 - DNA, 25 bp, probe
gccctgcagctagcaagtcttgtgt

SEQ ID NO: 200455 - DNA, 25 bp, probe
gccctgcagtacaacgactatggct

SEQ ID NO: 200456 - DNA, 25 bp, probe
gccctgagtgaacccattgaggcgg

SEQ ID NO: 200457 - DNA, 25 bp, probe
gccctcttggagcgcaagaggctgc

SEQ ID NO: 200458 - DNA, 25 bp, probe
gcccttctgtggagacaatgtcatc

SEQ ID NO: 200459 - DNA, 25 bp, probe
gcccttctgtggagacaatgtcatc

SEQ ID NO: 200460 - DNA, 25 bp, probe
gccctgcacgggagacaggtctgtc

SEQ ID NO: 200461 - DNA, 25 bp, probe
gccctgcacgggagacaggtctgtc

SEQ ID NO: 200462 - DNA, 25 bp, probe
gcccttcagacgagatcctgtttca

SEQ ID NO: 200463 - DNA, 25 bp, probe
gccctcagcgtcgaggaccagattg

SEQ ID NO: 200464 - DNA, 25 bp, probe
gccctcatggccaacgacgaggagt

SEQ ID NO: 200465 - DNA, 25 bp, probe
gccctcatggccaacgacgaggagt

SEQ ID NO: 200466 - DNA, 25 bp, probe
gccctgtgcgctaaggccagagaga

SEQ ID NO: 200467 - DNA, 25 bp, probe
gcccaggcggacacacagaagatgg

SEQ ID NO: 200468 - DNA, 25 bp, probe
gcccaggcggacacacagaagatgg

SEQ ID NO: 200469 - DNA, 25 bp, probe
gcccaggcggacacacagaagatgg

SEQ ID NO: 200470 - DNA, 25 bp, probe
gcccggtgcaggaacacgagacagg

SEQ ID NO: 200471 - DNA, 25 bp, probe
gcccgctggagtgctaggtggaggc

SEQ ID NO: 200472 - DNA, 25 bp, probe
gcccgcaaggccgaagaggtgcagg

SEQ ID NO: 200473 - DNA, 25 bp, probe
gcccccaagcagactagatgggagg

SEQ ID NO: 200474 - DNA, 25 bp, probe
gcccccaagcagactagatgggagg

SEQ ID NO: 200475 - DNA, 25 bp, probe
gccctgcaaagaggctgattgagga

SEQ ID NO: 200476 - DNA, 25 bp, probe
gcccgcaaaggggcgctgaggcaga

SEQ ID NO: 200477 - DNA, 25 bp, probe
gcccgcaaaggggcgctgaggcaga

SEQ ID NO: 200478 - DNA, 25 bp, probe
gcccggaatgtgctggtcggagaga

SEQ ID NO: 200479 - DNA, 25 bp, probe
gcccggtggtggtgtcaaaagcata

SEQ ID NO: 200480 - DNA, 25 bp, probe
gcccggtggaagtccatctgacaac

SEQ ID NO: 200481 - DNA, 25 bp, probe
gcccggtggagaggtcatttctgac

SEQ ID NO: 200482 - DNA, 25 bp, probe
gccctagtgggtatctcttagactt

SEQ ID NO: 200483 - DNA, 25 bp, probe
gccctagtgggtatctcttagactt

SEQ ID NO: 200484 - DNA, 25 bp, probe
gccctaggggtgctcatctatgaga

SEQ ID NO: 200485 - DNA, 25 bp, probe
gccctggtgggtcccagccagggca

SEQ ID NO: 200486 - DNA, 25 bp, probe
gccctggcgatgggccagaggcggg

SEQ ID NO: 200487 - DNA, 25 bp, probe
gcccttggtggtcaggatgggtggg

SEQ ID NO: 200488 - DNA, 25 bp, probe
gccctgcgggtcacaggagggaggg

SEQ ID NO: 200489 - DNA, 25 bp, probe
gccctaaggtgcacatgctgaggaa

SEQ ID NO: 200490 - DNA, 25 bp, probe
gccctgactggtacaccgtgggcac

SEQ ID NO: 200491 - DNA, 25 bp, probe
gccctgactggtacaccgtgggcac

SEQ ID NO: 200492 - DNA, 25 bp, probe
gcgctagagaggatcaaggggccac

SEQ ID NO: 200493 - DNA, 25 bp, probe
gcgcatggcagcagcgtgaaccggc

SEQ ID NO: 200494 - DNA, 25 bp, probe
gcgctgccatcagtgtggtcacagc

SEQ ID NO: 200495 - DNA, 25 bp, probe
gcgcatccccgtgggatcaagagag

SEQ ID NO: 200496 - DNA, 25 bp, probe
gcgcaccgccgagttaaagaggaga

SEQ ID NO: 200497 - DNA, 25 bp, probe
gcgccggcagctgaaaaagttggat

SEQ ID NO: 200498 - DNA, 25 bp, probe
gcccttcctctgtaaaagtgtcaca

SEQ ID NO: 200499 - DNA, 25 bp, probe
gcccttcctcctgatggagtgtgca

SEQ ID NO: 200500 - DNA, 25 bp, probe
gcccttcctcctgatggagtgtgca

SEQ ID NO: 200501 - DNA, 25 bp, probe
gcccttttttgcaggcgatgctgac

SEQ ID NO: 200502 - DNA, 25 bp, probe
gcccttttttgcaggcgatgctgac

SEQ ID NO: 200503 - DNA, 25 bp, probe
gcccttttttgcaggcgatgctgac

SEQ ID NO: 200504 - DNA, 25 bp, probe
gcccttttttgcaggcgatgctgac

SEQ ID NO: 200505 - DNA, 25 bp, probe
gcccttttttgcaggcgatgctgac

SEQ ID NO: 200506 - DNA, 25 bp, probe
gccctgcatttctggggcaggaaca

SEQ ID NO: 200507 - DNA, 25 bp, probe
gccctgatcttctgacgttgcagaa

SEQ ID NO: 200508 - DNA, 25 bp, probe
gccctgtctctatgcctgttgacag

SEQ ID NO: 200509 - DNA, 25 bp, probe
gcccgtcactgttgccaaatgggaa

SEQ ID NO: 200510 - DNA, 25 bp, probe
gcccttacttcagcaaaggagaagg

SEQ ID NO: 200511 - DNA, 25 bp, probe
gccctggacttcgagcaagagatgg

SEQ ID NO: 200512 - DNA, 25 bp, probe
gccctggagatgacggactgtgatg

SEQ ID NO: 200513 - DNA, 25 bp, probe
gccctgggtgaacagcagtgaggct

SEQ ID NO: 200514 - DNA, 25 bp, probe
gcccggagctggcggagatgagccg

SEQ ID NO: 200515 - DNA, 25 bp, probe
gcccgagattgccggggtgtctggg

SEQ ID NO: 200516 - DNA, 25 bp, probe
gcccgagatatgagggagctttcgc

SEQ ID NO: 200517 - DNA, 25 bp, probe
gccctagatgagctaggatgcttcc

SEQ ID NO: 200518 - DNA, 25 bp, probe
gcccttggaggcaggcatgattgtc

SEQ ID NO: 200519 - DNA, 25 bp, probe
gccctggtgggcatgtcatgtgtct

SEQ ID NO: 200520 - DNA, 25 bp, probe
gccctgctgctggggttgattttga

SEQ ID NO: 200521 - DNA, 25 bp, probe
gccctgtgctgtgatgttgagagct

SEQ ID NO: 200522 - DNA, 25 bp, probe
gcccgtgcatgaatgagggcagctg

SEQ ID NO: 200523 - DNA, 25 bp, probe
gcccagtgcatggtggccagaggtg

SEQ ID NO: 200524 - DNA, 25 bp, probe
gcccgaggcttagtcagcagggctc

SEQ ID NO: 200525 - DNA, 25 bp, probe
gcccgaggcttagtcagcagggctc

SEQ ID NO: 200526 - DNA, 25 bp, probe
gccctagccattggtgcacaggatg

SEQ ID NO: 200527 - DNA, 25 bp, probe
gccctcaacttcctgcacgagaggg

SEQ ID NO: 200528 - DNA, 25 bp, probe
gccctgcagttctctcgagagaggg

SEQ ID NO: 200529 - DNA, 25 bp, probe
gcccttgcaatctccagcaaaaggt

SEQ ID NO: 200530 - DNA, 25 bp, probe
gccctacaacaacctgaagcacaag

SEQ ID NO: 200531 - DNA, 25 bp, probe
gccctacaacaacctgaagcacaag

SEQ ID NO: 200532 - DNA, 25 bp, probe
gccctacaacaacctgaagcacaag

SEQ ID NO: 200533 - DNA, 25 bp, probe
gccctagctaagtcactgaaaggaa

SEQ ID NO: 200534 - DNA, 25 bp, probe
gcccaagatagcccgcgaaggcgac

SEQ ID NO: 200535 - DNA, 25 bp, probe
gccctctgatgaggccagcgagagc

SEQ ID NO: 200536 - DNA, 25 bp, probe
gccctgtgcaggctgcatggcagaa

SEQ ID NO: 200537 - DNA, 25 bp, probe
gccctgtgcaggctgaaaaccatga

SEQ ID NO: 200538 - DNA, 25 bp, probe
gccctggaggctgcaacatacctca

SEQ ID NO: 200539 - DNA, 25 bp, probe
gccctggggatgccagtaactttga

SEQ ID NO: 200540 - DNA, 25 bp, probe
gccctgcgcatgctgaaataactgg

SEQ ID NO: 200541 - DNA, 25 bp, probe
gcccatggctgggaacatgacccag

SEQ ID NO: 200542 - DNA, 25 bp, probe
gccctgacgctatgacacacagcgc

SEQ ID NO: 200543 - DNA, 25 bp, probe
gccctggctctgtcaggcagaacag

SEQ ID NO: 200544 - DNA, 25 bp, probe
gccctatgcgctgtggagacacaca

SEQ ID NO: 200545 - DNA, 25 bp, probe
gccctatgcactgttagcatgagaa

SEQ ID NO: 200546 - DNA, 25 bp, probe
gcgcgctacactgactggctcagcg

SEQ ID NO: 200547 - DNA, 25 bp, probe
gcgagtacgaccgtgctgtgaagga

SEQ ID NO: 200548 - DNA, 25 bp, probe
gccctctggacctgtgtagggcctc

SEQ ID NO: 200549 - DNA, 25 bp, probe
gccctctggacctgtgtagggcctc

SEQ ID NO: 200550 - DNA, 25 bp, probe
gcgcgtcggaaggtttagcgagccc

SEQ ID NO: 200551 - DNA, 25 bp, probe
gctttcaggaccacagtccaagccc

SEQ ID NO: 200552 - DNA, 25 bp, probe
gcagggaataccacagtcattagcc

SEQ ID NO: 200553 - DNA, 25 bp, probe
gcgggattaccagtccaagttggcc

SEQ ID NO: 200554 - DNA, 25 bp, probe
ggggtaggcctcagtgagtcggccg

SEQ ID NO: 200555 - DNA, 25 bp, probe
ggggtaggcctcagtgagtcggccg

SEQ ID NO: 200556 - DNA, 25 bp, probe
gcgaaggggcccatgggttgggctg

SEQ ID NO: 200557 - DNA, 25 bp, probe
gcagaagtgggttagtcggttggtg

SEQ ID NO: 200558 - DNA, 25 bp, probe
gcagaacgggaaaggcgagtcaggg

SEQ ID NO: 200559 - DNA, 25 bp, probe
gcagaacgggaaaggcgagtcaggg

SEQ ID NO: 200560 - DNA, 25 bp, probe
gcgaacgcgggaggaggtcagcagg

SEQ ID NO: 200561 - DNA, 25 bp, probe
gcgagaagagggtggagccgggctt

SEQ ID NO: 200562 - DNA, 25 bp, probe
gcgagagaatggctccaacctggcc

SEQ ID NO: 200563 - DNA, 25 bp, probe
gggaaattacatgaggcctgggcct

SEQ ID NO: 200564 - DNA, 25 bp, probe
gcaggaacctttgtccattggggtt

SEQ ID NO: 200565 - DNA, 25 bp, probe
gcaggaagcccatttaccattgacg

SEQ ID NO: 200566 - DNA, 25 bp, probe
gcgaacacactattggagacttacc

SEQ ID NO: 200567 - DNA, 25 bp, probe
gcccatcaccatttggatagcttat

SEQ ID NO: 200568 - DNA, 25 bp, probe
gcccagaccatgattgaacataata

SEQ ID NO: 200569 - DNA, 25 bp, probe
gcgctgcgaccgctgtcagaaaaag

SEQ ID NO: 200570 - DNA, 25 bp, probe
gcggtgaagacggtcaacgagtcag

SEQ ID NO: 200571 - DNA, 25 bp, probe
gcgggaacgcacacaagtggtgcag

SEQ ID NO: 200572 - DNA, 25 bp, probe
gcgcaaaactcagccacaatgggat

SEQ ID NO: 200573 - DNA, 25 bp, probe
gcgcagtacctggccacttatggcc

SEQ ID NO: 200574 - DNA, 25 bp, probe
gcccatatcttggtcactctgaagc

SEQ ID NO: 200575 - DNA, 25 bp, probe
gccctgatgctggttatttgcatac

SEQ ID NO: 200576 - DNA, 25 bp, probe
gccctgcctgaatcagtagatactt

SEQ ID NO: 200577 - DNA, 25 bp, probe
gccctctctacttcagtgatgaggc

SEQ ID NO: 200578 - DNA, 25 bp, probe
gccctgtctgcagtcagaggaggac

SEQ ID NO: 200579 - DNA, 25 bp, probe
gccctcatgctggtcatggagatgg

SEQ ID NO: 200580 - DNA, 25 bp, probe
gccctagggcttagagcatggacct

SEQ ID NO: 200581 - DNA, 25 bp, probe
gccctagagagtttgcaatctacct

SEQ ID NO: 200582 - DNA, 25 bp, probe
gccctagagagtttgcaatctacct

SEQ ID NO: 200583 - DNA, 25 bp, probe
gcccaagaagtgtacatcctgacca

SEQ ID NO: 200584 - DNA, 25 bp, probe
gcccaggaactgtactcttggtttt

SEQ ID NO: 200585 - DNA, 25 bp, probe
gcccaggactttaccaatggctgtg

SEQ ID NO: 200586 - DNA, 25 bp, probe
gcccaggactttaccaatggctgtg

SEQ ID NO: 200587 - DNA, 25 bp, probe
gcccaccagtaatcctgatggtgat

SEQ ID NO: 200588 - DNA, 25 bp, probe
gcccagctattaccacacttggggt

SEQ ID NO: 200589 - DNA, 25 bp, probe
gcccaatcattacgcactgcagtgc

SEQ ID NO: 200590 - DNA, 25 bp, probe
gcccaatcatttgcaatgccctaat

SEQ ID NO: 200591 - DNA, 25 bp, probe
gcccaagattatttggcagccaagt

SEQ ID NO: 200592 - DNA, 25 bp, probe
gccctgaagcttgctgagaggccag

SEQ ID NO: 200593 - DNA, 25 bp, probe
gcccagaactcttcttgggccatgg

SEQ ID NO: 200594 - DNA, 25 bp, probe
gcccagaacatttcactggacagcc

SEQ ID NO: 200595 - DNA, 25 bp, probe
gcccaagaacatcacgtgcatttgc

SEQ ID NO: 200596 - DNA, 25 bp, probe
gccctggaacgcaagaggatttctg

SEQ ID NO: 200597 - DNA, 25 bp, probe
gtcctgggactgagggttactccag

SEQ ID NO: 200598 - DNA, 25 bp, probe
gttctgggttggaggcttattccat

SEQ ID NO: 200599 - DNA, 25 bp, probe
gccctgtggctttgacggttattgc

SEQ ID NO: 200600 - DNA, 25 bp, probe
gccctgggcttgcagggtatctatc

SEQ ID NO: 200601 - DNA, 25 bp, probe
gccctttattgacatggttctatat

SEQ ID NO: 200602 - DNA, 25 bp, probe
gcccttgcatggaaaactgtttatt

SEQ ID NO: 200603 - DNA, 25 bp, probe
gccctatctggattctacttattta

SEQ ID NO: 200604 - DNA, 25 bp, probe
gcgccttcaagaacttcttttctag

SEQ ID NO: 200605 - DNA, 25 bp, probe
gcgccttaatatatccctttgtgga

SEQ ID NO: 200606 - DNA, 25 bp, probe
gcgccttaatatatccctttgtgga

SEQ ID NO: 200607 - DNA, 25 bp, probe
gcgctcttaataactcccaatgtaa

SEQ ID NO: 200608 - DNA, 25 bp, probe
gcccattacatatctaggcaactaa

SEQ ID NO: 200609 - DNA, 25 bp, probe
gcccattgagacactgatcagagac

SEQ ID NO: 200610 - DNA, 25 bp, probe
gcccttggatcagctctcagggttc

SEQ ID NO: 200611 - DNA, 25 bp, probe
gcgcccaagctcagcttagaagttc

SEQ ID NO: 200612 - DNA, 25 bp, probe
gcgcccagatccggaaaaactttgc

SEQ ID NO: 200613 - DNA, 25 bp, probe
gcgccctgtccagaaccaaaaagaa

SEQ ID NO: 200614 - DNA, 25 bp, probe
gcgccctgtacataaccagcaagct

SEQ ID NO: 200615 - DNA, 25 bp, probe
gctgcccttcaatactttcaagttc

SEQ ID NO: 200616 - DNA, 25 bp, probe
gcccacaaaaatgttgtcaagattt

SEQ ID NO: 200617 - DNA, 25 bp, probe
gccctcagaacaatccgattcacgt

SEQ ID NO: 200618 - DNA, 25 bp, probe
gccctcaagagctccgtggaggtgt

SEQ ID NO: 200619 - DNA, 25 bp, probe
gccctgaagagaccagcaagggggc

SEQ ID NO: 200620 - DNA, 25 bp, probe
gcccaaagaggtggcgagtgaaggc

SEQ ID NO: 200621 - DNA, 25 bp, probe
gctccagaagggtgcccagtcaggc

SEQ ID NO: 200622 - DNA, 25 bp, probe
gcccagaagtggtccgcaagatggg

SEQ ID NO: 200623 - DNA, 25 bp, probe
gcccagaggggagcagcaggcaggg

SEQ ID NO: 200624 - DNA, 25 bp, probe
gcgcaccaggagcaaaaggcggttc

SEQ ID NO: 200625 - DNA, 25 bp, probe
gcccaaaacatatataggggttcca

SEQ ID NO: 200626 - DNA, 25 bp, probe
gcccaccaactggtgatggaaggtt

SEQ ID NO: 200627 - DNA, 25 bp, probe
gcccactccatctggtagaagggaa

SEQ ID NO: 200628 - DNA, 25 bp, probe
gcccactccatctggtagaagggaa

SEQ ID NO: 200629 - DNA, 25 bp, probe
gccctgcttggctgagtcacaaggg

SEQ ID NO: 200630 - DNA, 25 bp, probe
gccctctatggtcttcaacaaggag

SEQ ID NO: 200631 - DNA, 25 bp, probe
gcccactacattctcaaacaagagg

SEQ ID NO: 200632 - DNA, 25 bp, probe
gcccagctagttaaagaatgcaaag

SEQ ID NO: 200633 - DNA, 25 bp, probe
gcccagcgacggagcatgaaaaagc

SEQ ID NO: 200634 - DNA, 25 bp, probe
gcccacgggaggacaagcaataact

SEQ ID NO: 200635 - DNA, 25 bp, probe
gcgcagggggagggcaacatcaaaa

SEQ ID NO: 200636 - DNA, 25 bp, probe
gcggggtgagagggattcctaatca

SEQ ID NO: 200637 - DNA, 25 bp, probe
gcgaggagaaggttgtcacctatga

SEQ ID NO: 200638 - DNA, 25 bp, probe
gcgcacttaagattgcttaccgcat

SEQ ID NO: 200639 - DNA, 25 bp, probe
gcgcctgtataactatttccatgat

SEQ ID NO: 200640 - DNA, 25 bp, probe
gcccttcaaatgcaattcaatgctg

SEQ ID NO: 200641 - DNA, 25 bp, probe
gcccacccagtgtaatgtcactgct

SEQ ID NO: 200642 - DNA, 25 bp, probe
gcccacccagtgtaatgtcactgct

SEQ ID NO: 200643 - DNA, 25 bp, probe
gcccaactcttgaagtccattgctg

SEQ ID NO: 200644 - DNA, 25 bp, probe
gccctactatgggatggcccatgag

SEQ ID NO: 200645 - DNA, 25 bp, probe
gccctgactcagagggccagagtga

SEQ ID NO: 200646 - DNA, 25 bp, probe
gccctgttcatgtgggagaatgtca

SEQ ID NO: 200647 - DNA, 25 bp, probe
gccctgttcatgtgggagaatgtca

SEQ ID NO: 200648 - DNA, 25 bp, probe
gcccatgcttcaccatggcgagaag

SEQ ID NO: 200649 - DNA, 25 bp, probe
gcccatgtcctgccaaggagagaag

SEQ ID NO: 200650 - DNA, 25 bp, probe
gcccatgtcctgccaaggagagaag

SEQ ID NO: 200651 - DNA, 25 bp, probe
gcccagtactggccatctgatggac

SEQ ID NO: 200652 - DNA, 25 bp, probe
gcccagtactggccatctgatggac

SEQ ID NO: 200653 - DNA, 25 bp, probe
gccctctacgagacagtgatgtatg

SEQ ID NO: 200654 - DNA, 25 bp, probe
gcccatctacatcgtcatggagctt

SEQ ID NO: 200655 - DNA, 25 bp, probe
gccctcacagtggtatgtgctgctg

SEQ ID NO: 200656 - DNA, 25 bp, probe
gccctcacagtggtatgtgctgctg

SEQ ID NO: 200657 - DNA, 25 bp, probe
gccctcagaatggagagtctccccc

SEQ ID NO: 200658 - DNA, 25 bp, probe
gcgcagtagccggaaatgctcccgg

SEQ ID NO: 200659 - DNA, 25 bp, probe
gctagaacccaaggtcttcctgggg

SEQ ID NO: 200660 - DNA, 25 bp, probe
gctagaacccaaggtcttcctgggg

SEQ ID NO: 200661 - DNA, 25 bp, probe
gcatcagaaccctccttgaatcggg

SEQ ID NO: 200662 - DNA, 25 bp, probe
gcatcagaaccctccttgaatcggg

SEQ ID NO: 200663 - DNA, 25 bp, probe
gcatataccctctcggggacattaa

SEQ ID NO: 200664 - DNA, 25 bp, probe
gcatataccctctcggggacattaa

SEQ ID NO: 200665 - DNA, 25 bp, probe
gctgataaacccggggtgacctcat

SEQ ID NO: 200666 - DNA, 25 bp, probe
gcgagaaacttcgtaggctggcctc

SEQ ID NO: 200667 - DNA, 25 bp, probe
gcggagaacacccttggtggcttat

SEQ ID NO: 200668 - DNA, 25 bp, probe
gcgacagaaaacctcaagggctttc

SEQ ID NO: 200669 - DNA, 25 bp, probe
gcagaggggaggcgaaaggcgttca

SEQ ID NO: 200670 - DNA, 25 bp, probe
gcaggagccggacaaaaggccggtg

SEQ ID NO: 200671 - DNA, 25 bp, probe
gctcgggaaatgcaggaaggccggg

SEQ ID NO: 200672 - DNA, 25 bp, probe
gcccagggagtgtgggggccgtggc

SEQ ID NO: 200673 - DNA, 25 bp, probe
gcccaaggaacatgtcgggaggggg

SEQ ID NO: 200674 - DNA, 25 bp, probe
gcccaaaagatcaggggtggagggg

SEQ ID NO: 200675 - DNA, 25 bp, probe
gcccagaggatcacggggctgcgag

SEQ ID NO: 200676 - DNA, 25 bp, probe
gcccagaggatcacggggctgcgag

SEQ ID NO: 200677 - DNA, 25 bp, probe
gcccttagatgtccggggctgcacg

SEQ ID NO: 200678 - DNA, 25 bp, probe
gcccttagatgtccggggctgcacg

SEQ ID NO: 200679 - DNA, 25 bp, probe
gccctccagtgtactgagggtactg

SEQ ID NO: 200680 - DNA, 25 bp, probe
gccctcccaggagtggaggggctgg

SEQ ID NO: 200681 - DNA, 25 bp, probe
gccctcaccgagtatgtgcgggcgc

SEQ ID NO: 200682 - DNA, 25 bp, probe
gccctctgcctgggcagtggggagg

SEQ ID NO: 200683 - DNA, 25 bp, probe
gccctctgcctgggcagtggggagg

SEQ ID NO: 200684 - DNA, 25 bp, probe
gccctctgcagaagcgtggggtggg

SEQ ID NO: 200685 - DNA, 25 bp, probe
gccctctcacagaggatgggtgagg

SEQ ID NO: 200686 - DNA, 25 bp, probe
gccctctcacgacggagatctgggc

SEQ ID NO: 200687 - DNA, 25 bp, probe
gccctctcacgacggagatctgggc

SEQ ID NO: 200688 - DNA, 25 bp, probe
gccctgctccatcagagagagctgc

SEQ ID NO: 200689 - DNA, 25 bp, probe
gccctttcatgctagcaggaagact

SEQ ID NO: 200690 - DNA, 25 bp, probe
gccctttcatgctagcaggaagact

SEQ ID NO: 200691 - DNA, 25 bp, probe
gccctactctctacaggactggata

SEQ ID NO: 200692 - DNA, 25 bp, probe
gctctaaaatctcacgactggctca

SEQ ID NO: 200693 - DNA, 25 bp, probe
gcccaaatagctcaagacacagtag

SEQ ID NO: 200694 - DNA, 25 bp, probe
gcccaaatctgtctgaccgcaatac

SEQ ID NO: 200695 - DNA, 25 bp, probe
gcccaaagtgaagtcacccagagac

SEQ ID NO: 200696 - DNA, 25 bp, probe
gcccagaagtaagtcctcatgaagc

SEQ ID NO: 200697 - DNA, 25 bp, probe
gcccagaagtaagtcctcatgaagc

SEQ ID NO: 200698 - DNA, 25 bp, probe
gcccagacagtcatgactagcagaa

SEQ ID NO: 200699 - DNA, 25 bp, probe
gcccagccagatttttcaaacaata

SEQ ID NO: 200700 - DNA, 25 bp, probe
gcccagccgttttggcaaactgctg

SEQ ID NO: 200701 - DNA, 25 bp, probe
gccctcacgtatgaggagaagccgc

SEQ ID NO: 200702 - DNA, 25 bp, probe
gcccaacgtctgcatgggagaccac

SEQ ID NO: 200703 - DNA, 25 bp, probe
gccctacgccatgctgaggaacaac

SEQ ID NO: 200704 - DNA, 25 bp, probe
gccctacgccatgctgaggaacaac

SEQ ID NO: 200705 - DNA, 25 bp, probe
gccctccaatatgctagtaaacaca

SEQ ID NO: 200706 - DNA, 25 bp, probe
gcccaagaaattcagctgacaagac

SEQ ID NO: 200707 - DNA, 25 bp, probe
gccctcataaaccaatgtggcaaga

SEQ ID NO: 200708 - DNA, 25 bp, probe
gcccttcagaaggaacgcagcgaga

SEQ ID NO: 200709 - DNA, 25 bp, probe
gcgcctctcaagaaaacgctggaga

SEQ ID NO: 200710 - DNA, 25 bp, probe
gccctctgcaaaagatgaggtggcc

SEQ ID NO: 200711 - DNA, 25 bp, probe
gccctctgcaaaagatgaggtggcc

SEQ ID NO: 200712 - DNA, 25 bp, probe
gcccatcaagaaagtcatggtggcc

SEQ ID NO: 200713 - DNA, 25 bp, probe
gcccagccaagacttcagtgttgac

SEQ ID NO: 200714 - DNA, 25 bp, probe
gcccagcactgccaaactggactac

SEQ ID NO: 200715 - DNA, 25 bp, probe
gcccatgccattaaggcattcacta

SEQ ID NO: 200716 - DNA, 25 bp, probe
gcccatccatcttatgaggatccca

SEQ ID NO: 200717 - DNA, 25 bp, probe
gccctatcatgtgaagttccgctca

SEQ ID NO: 200718 - DNA, 25 bp, probe
gcccaagcattttgagattacccag

SEQ ID NO: 200719 - DNA, 25 bp, probe
gcccaactttgctagaaaactatgc

SEQ ID NO: 200720 - DNA, 25 bp, probe
gcccaactttgctagaaaactatgc

SEQ ID NO: 200721 - DNA, 25 bp, probe
gcccacaacttgccaaaacagatat

SEQ ID NO: 200722 - DNA, 25 bp, probe
gcccagtggttgcaatgaaagacta

SEQ ID NO: 200723 - DNA, 25 bp, probe
gcccttggcactggaagaattcagc

SEQ ID NO: 200724 - DNA, 25 bp, probe
gcccatctagcactttggaaatcag

SEQ ID NO: 200725 - DNA, 25 bp, probe
gcgtattacaatccggcagaaaggg

SEQ ID NO: 200726 - DNA, 25 bp, probe
gcgctttaagtgtgctgggcagagg

SEQ ID NO: 200727 - DNA, 25 bp, probe
gcccttggacatggcctgggagacg

SEQ ID NO: 200728 - DNA, 25 bp, probe
gcccttggacatggcctgggagacg

SEQ ID NO: 200729 - DNA, 25 bp, probe
gcgcttcggaaacctcaggaacggg

SEQ ID NO: 200730 - DNA, 25 bp, probe
gcgcaggcggcagaagccaagtgac

SEQ ID NO: 200731 - DNA, 25 bp, probe
gcgcaggcgctcggagaagaaaatc

SEQ ID NO: 200732 - DNA, 25 bp, probe
gcgcataggcgcacatgaagcaaaa

SEQ ID NO: 200733 - DNA, 25 bp, probe
gcgcataggcgcacatgaagcaaaa

SEQ ID NO: 200734 - DNA, 25 bp, probe
gcgattctgcagccacaaagttgag

SEQ ID NO: 200735 - DNA, 25 bp, probe
gcgattccctcgtcaatttgggttg

SEQ ID NO: 200736 - DNA, 25 bp, probe
gcgattccctcgtcaatttgggttg

SEQ ID NO: 200737 - DNA, 25 bp, probe
gcgggcccagtggagtttggggagg

SEQ ID NO: 200738 - DNA, 25 bp, probe
gcgtatcccactgcctatggtggga

SEQ ID NO: 200739 - DNA, 25 bp, probe
gcgttcccagtcatttcagtgagaa

SEQ ID NO: 200740 - DNA, 25 bp, probe
gcgttatctcagcttcttcaggcgg

SEQ ID NO: 200741 - DNA, 25 bp, probe
gcgaatatgatacggtctccggcct

SEQ ID NO: 200742 - DNA, 25 bp, probe
gccctacataggattctcagtgctc

SEQ ID NO: 200743 - DNA, 25 bp, probe
gctcctactttgattcttttcaaga

SEQ ID NO: 200744 - DNA, 25 bp, probe
gctcctactttgattcttttcaaga

SEQ ID NO: 200745 - DNA, 25 bp, probe
gctccatgactctctttttgtaaaa

SEQ ID NO: 200746 - DNA, 25 bp, probe
gcccagatactgcttgtttggagac

SEQ ID NO: 200747 - DNA, 25 bp, probe
gcccatggcactctatgttctaaga

SEQ ID NO: 200748 - DNA, 25 bp, probe
gcccaggacatgagtgtctgtccag

SEQ ID NO: 200749 - DNA, 25 bp, probe
gccctatgagtttgagctcgtgccg

SEQ ID NO: 200750 - DNA, 25 bp, probe
gcccttgatgctttacatagagagg

SEQ ID NO: 200751 - DNA, 25 bp, probe
gcccatctcttctgacatggaagag

SEQ ID NO: 200752 - DNA, 25 bp, probe
gcacgtttattccacggtagaggga

SEQ ID NO: 200753 - DNA, 25 bp, probe
gcccttgtattccataacatgctga

SEQ ID NO: 200754 - DNA, 25 bp, probe
gcccttgtattccataacatgctga

SEQ ID NO: 200755 - DNA, 25 bp, probe
gcccttttgtcctcatcatgagtga

SEQ ID NO: 200756 - DNA, 25 bp, probe
gcccttgttgctgtagatgtgcgtg

SEQ ID NO: 200757 - DNA, 25 bp, probe
gcccattttgtggattgtgtcctat

SEQ ID NO: 200758 - DNA, 25 bp, probe
gcccaattcagtgttgtgtatgtgt

SEQ ID NO: 200759 - DNA, 25 bp, probe
gcccatattcataatgctttgggag

SEQ ID NO: 200760 - DNA, 25 bp, probe
gcccaagtttatggcctggagagcg

SEQ ID NO: 200761 - DNA, 25 bp, probe
gcccaagtttatggcctggagagcg

SEQ ID NO: 200762 - DNA, 25 bp, probe
gcccattgctttaggcctggagact

SEQ ID NO: 200763 - DNA, 25 bp, probe
gcccatttacatcgtcacggagtac

SEQ ID NO: 200764 - DNA, 25 bp, probe
gcccattaccagcaatcaggaaagc

SEQ ID NO: 200765 - DNA, 25 bp, probe
gcccagaagccacagacaagacata

SEQ ID NO: 200766 - DNA, 25 bp, probe
gcccagaagccatagacgagacgta

SEQ ID NO: 200767 - DNA, 25 bp, probe
gcccagaagccatagacgagacgta

SEQ ID NO: 200768 - DNA, 25 bp, probe
gcccatgaagcccaagatgctgggt

SEQ ID NO: 200769 - DNA, 25 bp, probe
gcccagaccccttatatgaagtaat

SEQ ID NO: 200770 - DNA, 25 bp, probe
gcccagctccctgtgattgagaata

SEQ ID NO: 200771 - DNA, 25 bp, probe
gcccagctccctgtgattgagaata

SEQ ID NO: 200772 - DNA, 25 bp, probe
gcccatctggccgccattgaaagat

SEQ ID NO: 200773 - DNA, 25 bp, probe
gctcttgaagcccccaagtaagaag

SEQ ID NO: 200774 - DNA, 25 bp, probe
gctcattgccacagtacaagctaag

SEQ ID NO: 200775 - DNA, 25 bp, probe
gcgagtggactaacaacagctgtag

SEQ ID NO: 200776 - DNA, 25 bp, probe
gcgccggagtggcatgaagctgtag

SEQ ID NO: 200777 - DNA, 25 bp, probe
gcgccgtgctgtaaataagcccagt

SEQ ID NO: 200778 - DNA, 25 bp, probe
gcccagctgcctatgtaaggccttc

SEQ ID NO: 200779 - DNA, 25 bp, probe
gcccagctgtcaaggtcaggcaagt

SEQ ID NO: 200780 - DNA, 25 bp, probe
gcccagatttgaggcctgacagcag

SEQ ID NO: 200781 - DNA, 25 bp, probe
gcccagtatctgaaggtggagcagc

SEQ ID NO: 200782 - DNA, 25 bp, probe
gcccagggcagatgcaggggagatc

SEQ ID NO: 200783 - DNA, 25 bp, probe
gcccaaccagattcggaggatcatg

SEQ ID NO: 200784 - DNA, 25 bp, probe
gcccatgaccaagccgctggtgggc

SEQ ID NO: 200785 - DNA, 25 bp, probe
gcccaccttcaagcagctggtggag

SEQ ID NO: 200786 - DNA, 25 bp, probe
gcccactgtgtggcagggggatggc

SEQ ID NO: 200787 - DNA, 25 bp, probe
gcccagcttgctattgcgtggtgtc

SEQ ID NO: 200788 - DNA, 25 bp, probe
gcccacagtcttctgagttgtgcta

SEQ ID NO: 200789 - DNA, 25 bp, probe
gcccacagtcttctgagttgtgcta

SEQ ID NO: 200790 - DNA, 25 bp, probe
gcccatcaggtctttctgtgtgtgc

SEQ ID NO: 200791 - DNA, 25 bp, probe
gcccatcatggttaattctgtccaa

SEQ ID NO: 200792 - DNA, 25 bp, probe
gcccatgatggccatagatttgcct

SEQ ID NO: 200793 - DNA, 25 bp, probe
gcccatgaacaaattcctgcttgtc

SEQ ID NO: 200794 - DNA, 25 bp, probe
gcccatgaacaaattcctgcttgtc

SEQ ID NO: 200795 - DNA, 25 bp, probe
gcccagcccagaattggccagtgag

SEQ ID NO: 200796 - DNA, 25 bp, probe
gcccatccgagtctgtgtagcagac

SEQ ID NO: 200797 - DNA, 25 bp, probe
gcccatccgagtctgtgtagcagac

SEQ ID NO: 200798 - DNA, 25 bp, probe
gcccatctccgttgctatggatgca

SEQ ID NO: 200799 - DNA, 25 bp, probe
gcccatctgcagcgatgcagctggg

SEQ ID NO: 200800 - DNA, 25 bp, probe
gcccttcagcatggtcaggacggtg

SEQ ID NO: 200801 - DNA, 25 bp, probe
gcgccccaggcaccagggcgtgatg

SEQ ID NO: 200802 - DNA, 25 bp, probe
gcgccgctcaggtggagcgctatgt

SEQ ID NO: 200803 - DNA, 25 bp, probe
gcccactcatcgcagggctcatgat

SEQ ID NO: 200804 - DNA, 25 bp, probe
gcgacagcatcctgacggttgatgt

SEQ ID NO: 200805 - DNA, 25 bp, probe
gcgacagcagcctgactgacaaggc

SEQ ID NO: 200806 - DNA, 25 bp, probe
gcccagcagcacatcacatgaacaa

SEQ ID NO: 200807 - DNA, 25 bp, probe
gcgcaacagcagcctgcagctggat

SEQ ID NO: 200808 - DNA, 25 bp, probe
gcgcagacctcaatgcgtgagtcca

SEQ ID NO: 200809 - DNA, 25 bp, probe
gcgaggtcgcaactgagatctccat

SEQ ID NO: 200810 - DNA, 25 bp, probe
gcgcaagatccaccgagatatcaaa

SEQ ID NO: 200811 - DNA, 25 bp, probe
gcgcaagatccaccgagatatcaaa

SEQ ID NO: 200812 - DNA, 25 bp, probe
gcccatatcatctctgctgatacga

SEQ ID NO: 200813 - DNA, 25 bp, probe
gcccacatcatagagctgctaggca

SEQ ID NO: 200814 - DNA, 25 bp, probe
gcgcccagcatagcacgtaggcggt

SEQ ID NO: 200815 - DNA, 25 bp, probe
gcgcctcgcgaacgccgggctggat

SEQ ID NO: 200816 - DNA, 25 bp, probe
gcgcctgacaaacaccatggtgtgt

SEQ ID NO: 200817 - DNA, 25 bp, probe
gcgcctgacaaacaccatggtgtgt

SEQ ID NO: 200818 - DNA, 25 bp, probe
gcgcctggcctataccagtattttc

SEQ ID NO: 200819 - DNA, 25 bp, probe
gcccttgcctgaaaaactatgactt

SEQ ID NO: 200820 - DNA, 25 bp, probe
gcccttgcctcataatagatgtggt

SEQ ID NO: 200821 - DNA, 25 bp, probe
gccctttctaacctatgtgcataat

SEQ ID NO: 200822 - DNA, 25 bp, probe
gcccattttctaggcattgtgaata

SEQ ID NO: 200823 - DNA, 25 bp, probe
gcccagttggatcagtttgatagaa

SEQ ID NO: 200824 - DNA, 25 bp, probe
gcccagcttggaaggtattatagtt

SEQ ID NO: 200825 - DNA, 25 bp, probe
gcccagccatgggggtttagggctg

SEQ ID NO: 200826 - DNA, 25 bp, probe
gcccatgcctgggaaggtgatagac

SEQ ID NO: 200827 - DNA, 25 bp, probe
gcccacctctggtagaaaagaaaga

SEQ ID NO: 200828 - DNA, 25 bp, probe
gcccacacttgggagcaaaagattc

SEQ ID NO: 200829 - DNA, 25 bp, probe
gcccagcctgggtgtcaataattat

SEQ ID NO: 200830 - DNA, 25 bp, probe
gcccagagggtgggtgccaattcca

SEQ ID NO: 200831 - DNA, 25 bp, probe
gcgactaggttggtccgaatcatcc

SEQ ID NO: 200832 - DNA, 25 bp, probe
gcgattccagttcactcagaatcag

SEQ ID NO: 200833 - DNA, 25 bp, probe
gcgtatcacaggcaaccagttggcc

SEQ ID NO: 200834 - DNA, 25 bp, probe
gcgtcaacaggtaacacttccgctg

SEQ ID NO: 200835 - DNA, 25 bp, probe
gcgtatagagagatcacgttccgtg

SEQ ID NO: 200836 - DNA, 25 bp, probe
gcccaggacagagaccttcctggcc

SEQ ID NO: 200837 - DNA, 25 bp, probe
gcccaggacagagaccttcctggcc

SEQ ID NO: 200838 - DNA, 25 bp, probe
gcccagagagaagagccccactctc

SEQ ID NO: 200839 - DNA, 25 bp, probe
gctgtataaacaaagcccccatttt

SEQ ID NO: 200840 - DNA, 25 bp, probe
gcgcttgaaggacatcatccaccgt

SEQ ID NO: 200841 - DNA, 25 bp, probe
gcgttacataatcattaccacgggt

SEQ ID NO: 200842 - DNA, 25 bp, probe
gcgctttctatacttaatcccatgt

SEQ ID NO: 200843 - DNA, 25 bp, probe
gcgcttagttatcacaaggcctgca

SEQ ID NO: 200844 - DNA, 25 bp, probe
gcgctttgaagaacgcaacgcccat

SEQ ID NO: 200845 - DNA, 25 bp, probe
gcccagtggatgatcctactgctcc

SEQ ID NO: 200846 - DNA, 25 bp, probe
gcccaaggacatagccaagctggtc

SEQ ID NO: 200847 - DNA, 25 bp, probe
gcccaggcgacaaaagtgctaggat

SEQ ID NO: 200848 - DNA, 25 bp, probe
gcccaggcgacaaaagtgctaggat

SEQ ID NO: 200849 - DNA, 25 bp, probe
gcgccgggaaattgagatccaggct

SEQ ID NO: 200850 - DNA, 25 bp, probe
gcgcctgggagagcacaacctgcgc

SEQ ID NO: 200851 - DNA, 25 bp, probe
gcgccaaggacagctactctctggc

SEQ ID NO: 200852 - DNA, 25 bp, probe
tcgccaagggcgttttcaacgccta

SEQ ID NO: 200853 - DNA, 25 bp, probe
gcccacgcgggaagttcaaagtaca

SEQ ID NO: 200854 - DNA, 25 bp, probe
gcccacgctggacattgtcgcaagt

SEQ ID NO: 200855 - DNA, 25 bp, probe
gcgacacctggatgttcggggtgac

SEQ ID NO: 200856 - DNA, 25 bp, probe
gctccaggtggaactggtggggttc

SEQ ID NO: 200857 - DNA, 25 bp, probe
gcccaggctggagggcagtggcacg

SEQ ID NO: 200858 - DNA, 25 bp, probe
gcccaggctggagtgcagtggtgcg

SEQ ID NO: 200859 - DNA, 25 bp, probe
gcccaggcagcgggtgtgtggagat

SEQ ID NO: 200860 - DNA, 25 bp, probe
gcccaggggatgctgctgatgtgca

SEQ ID NO: 200861 - DNA, 25 bp, probe
gcccaggggatgctgctgatgtgca

SEQ ID NO: 200862 - DNA, 25 bp, probe
gcgccacggtcaacatggatggcac

SEQ ID NO: 200863 - DNA, 25 bp, probe
gcccagagggacctggtgagcctag

SEQ ID NO: 200864 - DNA, 25 bp, probe
gcccaggggctgggagtggttagcc

SEQ ID NO: 200865 - DNA, 25 bp, probe
gcgccagtgggtggaggagttcttc

SEQ ID NO: 200866 - DNA, 25 bp, probe
gcccaggatgaatgggagatccccc

SEQ ID NO: 200867 - DNA, 25 bp, probe
gcccagggatgctggaggtccacag

SEQ ID NO: 200868 - DNA, 25 bp, probe
gcccagtgggcattggaggtgccag

SEQ ID NO: 200869 - DNA, 25 bp, probe
gcccagtgggcattggaggtgccag

SEQ ID NO: 200870 - DNA, 25 bp, probe
gcccagaggccactaagagacacag

SEQ ID NO: 200871 - DNA, 25 bp, probe
gcccatcgactctacatagaaccga

SEQ ID NO: 200872 - DNA, 25 bp, probe
gcccatcgactctacatagaaccga

SEQ ID NO: 200873 - DNA, 25 bp, probe
gcccaaactccaaagaatctatggc

SEQ ID NO: 200874 - DNA, 25 bp, probe
gcccaacctcagagtgaaggcaggg

SEQ ID NO: 200875 - DNA, 25 bp, probe
gcccaaactcaatgccacagggagg

SEQ ID NO: 200876 - DNA, 25 bp, probe
gcccaaactcaatgccacagggagg

SEQ ID NO: 200877 - DNA, 25 bp, probe
gcccaggaccagtaaccaaggagaa

SEQ ID NO: 200878 - DNA, 25 bp, probe
gcccatgaactccataggccattaa

SEQ ID NO: 200879 - DNA, 25 bp, probe
gctcctgaactcgatgatgaccgtg

SEQ ID NO: 200880 - DNA, 25 bp, probe
gcccagatactggatatatcactat

SEQ ID NO: 200881 - DNA, 25 bp, probe
gcccagatgagctctatgacattat

SEQ ID NO: 200882 - DNA, 25 bp, probe
gcccagatgagctctatgacattat

SEQ ID NO: 200883 - DNA, 25 bp, probe
gcccagaagactgtacttcaattcc

SEQ ID NO: 200884 - DNA, 25 bp, probe
gcccagaggagctctacaacatcat

SEQ ID NO: 200885 - DNA, 25 bp, probe
gcccacaggacagtgctgacagaca

SEQ ID NO: 200886 - DNA, 25 bp, probe
gcccagagcagacctgcatatctga

SEQ ID NO: 200887 - DNA, 25 bp, probe
gcccaaggtgtcctatgtgaaagcc

SEQ ID NO: 200888 - DNA, 25 bp, probe
gcccaaggtgtcctatgtgaaagcc

SEQ ID NO: 200889 - DNA, 25 bp, probe
gcgccgagtggacttttgcaaagac

SEQ ID NO: 200890 - DNA, 25 bp, probe
gcgaccctggagcacttgagggacc

SEQ ID NO: 200891 - DNA, 25 bp, probe
gcgtcacctgtgagacggggtggcc

SEQ ID NO: 200892 - DNA, 25 bp, probe
gcgtcacttctgctaaggagggacc

SEQ ID NO: 200893 - DNA, 25 bp, probe
gcgaagcttctgtggagagcaacga

SEQ ID NO: 200894 - DNA, 25 bp, probe
gcccagcctgcttattgaagataca

SEQ ID NO: 200895 - DNA, 25 bp, probe
gcccagcagtggttcttgacatcac

SEQ ID NO: 200896 - DNA, 25 bp, probe
gcccagcagtggttcttgacatcac

SEQ ID NO: 200897 - DNA, 25 bp, probe
gcccagcaggaactcttcaatgagc

SEQ ID NO: 200898 - DNA, 25 bp, probe
gcccagcaggaactcttcaatgagc

SEQ ID NO: 200899 - DNA, 25 bp, probe
gcccagcgcagcgcttgcaaagagc

SEQ ID NO: 200900 - DNA, 25 bp, probe
gcgctgccgcgcagcttgaacgact

SEQ ID NO: 200901 - DNA, 25 bp, probe
gcgaccaggatccattgagacgtat

SEQ ID NO: 200902 - DNA, 25 bp, probe
gcccaaggtcgtaagcaagctactg

SEQ ID NO: 200903 - DNA, 25 bp, probe
gcccaaggtcgtaagcaagctactg

SEQ ID NO: 200904 - DNA, 25 bp, probe
gcgctctagaggataacaagcatac

SEQ ID NO: 200905 - DNA, 25 bp, probe
gcccaggtgtacaaagcatacgcca

SEQ ID NO: 200906 - DNA, 25 bp, probe
gcccagttgtgtccacagtactggc

SEQ ID NO: 200907 - DNA, 25 bp, probe
gcgccgtattcgggggagcggcagc

SEQ ID NO: 200908 - DNA, 25 bp, probe
gcccaggtctcctgggcatctggcc

SEQ ID NO: 200909 - DNA, 25 bp, probe
gcccaggtcccaggggagaggttgg

SEQ ID NO: 200910 - DNA, 25 bp, probe
gcgccgtgtcctatgaggacaggga

SEQ ID NO: 200911 - DNA, 25 bp, probe
gctggacctccgagagctggagggg

SEQ ID NO: 200912 - DNA, 25 bp, probe
gcgaacccaaatgcagcagatgcac

SEQ ID NO: 200913 - DNA, 25 bp, probe
gcgctgaccagcagtacgaatgcgt

SEQ ID NO: 200914 - DNA, 25 bp, probe
gcgcgtctcatcaaggacgatgagt

SEQ ID NO: 200915 - DNA, 25 bp, probe
gcgctcttcacaggaagaaggcccg

SEQ ID NO: 200916 - DNA, 25 bp, probe
gcgcctcattcccaagagagcgcgg

SEQ ID NO: 200917 - DNA, 25 bp, probe
gcgcctttctgccggacgcgagcag

SEQ ID NO: 200918 - DNA, 25 bp, probe
gcgacctgttgcacatgagcgaggc

SEQ ID NO: 200919 - DNA, 25 bp, probe
gcgacctggcacagtgccagacccc

SEQ ID NO: 200920 - DNA, 25 bp, probe
gcgaggagtgccaggtaagccgcga

SEQ ID NO: 200921 - DNA, 25 bp, probe
gcgaggagtgccaggtaagccgcga

SEQ ID NO: 200922 - DNA, 25 bp, probe
gcggggtactcggtggagcacccgc

SEQ ID NO: 200923 - DNA, 25 bp, probe
gagacggtacagctgaggaacccgc

SEQ ID NO: 200924 - DNA, 25 bp, probe
gaattccatagacaagtggtcccga

SEQ ID NO: 200925 - DNA, 25 bp, probe
gaataagccagaaaagtaccctagg

SEQ ID NO: 200926 - DNA, 25 bp, probe
gctgaaccccatgatttacagccta

SEQ ID NO: 200927 - DNA, 25 bp, probe
gcggatcccgattctataaggccaa

SEQ ID NO: 200928 - DNA, 25 bp, probe
gcgggcacacgctcttacagtcgat

SEQ ID NO: 200929 - DNA, 25 bp, probe
gcgagaaatgcagacctaagcttat

SEQ ID NO: 200930 - DNA, 25 bp, probe
gcgcagttgaggacacctaggttca

SEQ ID NO: 200931 - DNA, 25 bp, probe
gcgccttgagtcaaggccacttttc

SEQ ID NO: 200932 - DNA, 25 bp, probe
gcccactgcttccaggagaggtttc

SEQ ID NO: 200933 - DNA, 25 bp, probe
gcgcacacttgatgaaggtgttttc

SEQ ID NO: 200934 - DNA, 25 bp, probe
gcgcacacttgatgaaggtgttttc

SEQ ID NO: 200935 - DNA, 25 bp, probe
gcgacctgaaaggcattggtttatg

SEQ ID NO: 200936 - DNA, 25 bp, probe
gcgagccatgttctttggtttctga

SEQ ID NO: 200937 - DNA, 25 bp, probe
gcgcccagtgcacatgttgaatttt

SEQ ID NO: 200938 - DNA, 25 bp, probe
gcgacttggcaatatttattgctgt

SEQ ID NO: 200939 - DNA, 25 bp, probe
gcgactaatgcaatccattcctctc

SEQ ID NO: 200940 - DNA, 25 bp, probe
gcgcggatcatgatgccaacctctt

SEQ ID NO: 200941 - DNA, 25 bp, probe
gcgccgctgctgggagagatcccct

SEQ ID NO: 200942 - DNA, 25 bp, probe
gcgcactgcgtggcgaatgtaaacg

SEQ ID NO: 200943 - DNA, 25 bp, probe
gcgcactgctgttcagataggggac

SEQ ID NO: 200944 - DNA, 25 bp, probe
gcgctggcgtaagcatggggtcttt

SEQ ID NO: 200945 - DNA, 25 bp, probe
gcgcagccgcatgaaccggatgtct

SEQ ID NO: 200946 - DNA, 25 bp, probe
gcgcgcgcctgtaatcccagctact

SEQ ID NO: 200947 - DNA, 25 bp, probe
gcgcgcctgtaatcccagctactcg

SEQ ID NO: 200948 - DNA, 25 bp, probe
gctcaacgtcactctgaacgactct

SEQ ID NO: 200949 - DNA, 25 bp, probe
gctcaacgtcactctgaacgactct

SEQ ID NO: 200950 - DNA, 25 bp, probe
gctccacgtagctgtaacttcacat

SEQ ID NO: 200951 - DNA, 25 bp, probe
gcccactgaaagacaaacttgcata

SEQ ID NO: 200952 - DNA, 25 bp, probe
gcccactgaaagacaaacttgcata

SEQ ID NO: 200953 - DNA, 25 bp, probe
gcccaggcacaggtcaagagctacc

SEQ ID NO: 200954 - DNA, 25 bp, probe
gcccagcagaagctcaagcagcgca

SEQ ID NO: 200955 - DNA, 25 bp, probe
gcccagcagtatgtcatgaccagcc

SEQ ID NO: 200956 - DNA, 25 bp, probe
gcccagcatgttcccaaatctgtgc

SEQ ID NO: 200957 - DNA, 25 bp, probe
gcccagtgatgttcaacaagctatg

SEQ ID NO: 200958 - DNA, 25 bp, probe
gcccagtgtggcctacaagatatgg

SEQ ID NO: 200959 - DNA, 25 bp, probe
gcccagtgtggcctacaagatatgg

SEQ ID NO: 200960 - DNA, 25 bp, probe
gcccagattgcgctacagctaggcc

SEQ ID NO: 200961 - DNA, 25 bp, probe
gcccagaggagcagtactcaagccg

SEQ ID NO: 200962 - DNA, 25 bp, probe
gcccagaggagcagtactcaagccg

SEQ ID NO: 200963 - DNA, 25 bp, probe
gcccagcagaagcattatctttgcc

SEQ ID NO: 200964 - DNA, 25 bp, probe
gcccaagaggagacttttgccatgc

SEQ ID NO: 200965 - DNA, 25 bp, probe
gcccagagaagatctgtttccctgt

SEQ ID NO: 200966 - DNA, 25 bp, probe
gcgctcaataaacgtgtttctcctt

SEQ ID NO: 200967 - DNA, 25 bp, probe
gcgctcaataaacgtgtttctcctt

SEQ ID NO: 200968 - DNA, 25 bp, probe
gcccacaaaagccaggactctctgt

SEQ ID NO: 200969 - DNA, 25 bp, probe
gctccaccgaagcggaattctccat

SEQ ID NO: 200970 - DNA, 25 bp, probe
gcgcctccaaaacggaggtctcatc

SEQ ID NO: 200971 - DNA, 25 bp, probe
gcgcctccaaaacggaggtctcatc

SEQ ID NO: 200972 - DNA, 25 bp, probe
gcgccccaggaaaaagagagctcca

SEQ ID NO: 200973 - DNA, 25 bp, probe
gcgccctgggacttgagaagagttc

SEQ ID NO: 200974 - DNA, 25 bp, probe
gcgccctgtgtggcttggatgagag

SEQ ID NO: 200975 - DNA, 25 bp, probe
gcgactatgtgcttttggaagaggt

SEQ ID NO: 200976 - DNA, 25 bp, probe
gcgactttggtcagaaaggcctgga

SEQ ID NO: 200977 - DNA, 25 bp, probe
gcgtccttcgtgctgaaagccagct

SEQ ID NO: 200978 - DNA, 25 bp, probe
gcgacaccaggtttgagaagccacg

SEQ ID NO: 200979 - DNA, 25 bp, probe
gcgacaccaggtttgagaagccacg

SEQ ID NO: 200980 - DNA, 25 bp, probe
gcgacaccaggtttgagaagccacg

SEQ ID NO: 200981 - DNA, 25 bp, probe
gcgacctcaagtgcgaaaacgtgct

SEQ ID NO: 200982 - DNA, 25 bp, probe
gcccacaaaccccaaaagcgtgtga

SEQ ID NO: 200983 - DNA, 25 bp, probe
gcccagctgaacccaggttaggggc

SEQ ID NO: 200984 - DNA, 25 bp, probe
gcccagtaagcgccaggtggtggca

SEQ ID NO: 200985 - DNA, 25 bp, probe
gcccactgcgtccgcagagtggggc

SEQ ID NO: 200986 - DNA, 25 bp, probe
gcccaatctgtcccagaagacgcta

SEQ ID NO: 200987 - DNA, 25 bp, probe
gcgccagatggtggaggaatacact

SEQ ID NO: 200988 - DNA, 25 bp, probe
gcgcgagggcaggacatcaatacac

SEQ ID NO: 200989 - DNA, 25 bp, probe
gcgggagtagcaggtccgcatcatc

SEQ ID NO: 200990 - DNA, 25 bp, probe
gcgcgcaagagggcagaccgataga

SEQ ID NO: 200991 - DNA, 25 bp, probe
gcccaagatcagcaaccattcaaat

SEQ ID NO: 200992 - DNA, 25 bp, probe
gcccagagctcagggacgcattcaa

SEQ ID NO: 200993 - DNA, 25 bp, probe
gcccagagctcagggacgcattcaa

SEQ ID NO: 200994 - DNA, 25 bp, probe
gcccagactgatgagcacatctctc

SEQ ID NO: 200995 - DNA, 25 bp, probe
gcccagccagatgagtgctctgtgg

SEQ ID NO: 200996 - DNA, 25 bp, probe
gcccagaagctcaaggctgcagtga

SEQ ID NO: 200997 - DNA, 25 bp, probe
gcgacaatagctaaagtgaggcctg

SEQ ID NO: 200998 - DNA, 25 bp, probe
gcgaataagtgcaagcgaagctctc

SEQ ID NO: 200999 - DNA, 25 bp, probe
gcgttacagcgcaacagcagcctgc

SEQ ID NO: 201000 - DNA, 25 bp, probe
gctgtctactccaagaaaccaacgc

SEQ ID NO: 201001 - DNA, 25 bp, probe
gcgtcggccggagatgagccgaggc

SEQ ID NO: 201002 - DNA, 25 bp, probe
gcgtctgtgggacgaagaccgggca

SEQ ID NO: 201003 - DNA, 25 bp, probe
gcgtctgtgggacgaagaccgggca

SEQ ID NO: 201004 - DNA, 25 bp, probe
gcgtatcttgccagtaaccagtgag

SEQ ID NO: 201005 - DNA, 25 bp, probe
gcgaaccatctcaatgtaagggtgg

SEQ ID NO: 201006 - DNA, 25 bp, probe
gcgaaccatctcaatgtaagggtgg

SEQ ID NO: 201007 - DNA, 25 bp, probe
gcgagatccctccaaaatcaagtgg

SEQ ID NO: 201008 - DNA, 25 bp, probe
gcgagatccctccaaaatcaagtgg

SEQ ID NO: 201009 - DNA, 25 bp, probe
gctccacgccgaaaaatgaagtgca

SEQ ID NO: 201010 - DNA, 25 bp, probe
gctccacgccgaaaaatgaagtgca

SEQ ID NO: 201011 - DNA, 25 bp, probe
gcgcacctccacaacgaatgaaatg

SEQ ID NO: 201012 - DNA, 25 bp, probe
gcgcagcttgaacgactaaagcaga

SEQ ID NO: 201013 - DNA, 25 bp, probe
gcggcttggaagatttacagaggga

SEQ ID NO: 201014 - DNA, 25 bp, probe
gcggctttaaatgctgtccagaggt

SEQ ID NO: 201015 - DNA, 25 bp, probe
gcaggtttccctgcagtatgagaaa

SEQ ID NO: 201016 - DNA, 25 bp, probe
gcgtctgttcacccaaggttgacaa

SEQ ID NO: 201017 - DNA, 25 bp, probe
gcgccttccaggagcaggtggacaa

SEQ ID NO: 201018 - DNA, 25 bp, probe
gcgccataacagcatctcggaggcc

SEQ ID NO: 201019 - DNA, 25 bp, probe
gcccaactgcagcatctatgaaccg

SEQ ID NO: 201020 - DNA, 25 bp, probe
gcccaatgtatgatctattacggtc

SEQ ID NO: 201021 - DNA, 25 bp, probe
gcccagctgtatggtcttgggagga

SEQ ID NO: 201022 - DNA, 25 bp, probe
gcccagctgtatggtcttgggagga

SEQ ID NO: 201023 - DNA, 25 bp, probe
gcccagtgtagttgtgtggcgtgaa

SEQ ID NO: 201024 - DNA, 25 bp, probe
gcccaagtttgagtttgctgtgaag

SEQ ID NO: 201025 - DNA, 25 bp, probe
gcccacggctaagaggctgctgaaa

SEQ ID NO: 201026 - DNA, 25 bp, probe
gcccagagatcttacgaggcttgcc

SEQ ID NO: 201027 - DNA, 25 bp, probe
gcccagagatcttacgaggcttgcc

SEQ ID NO: 201028 - DNA, 25 bp, probe
gcgccggattattgctgcaactggc

SEQ ID NO: 201029 - DNA, 25 bp, probe
gcgccagaagcaattgcctatcgta

SEQ ID NO: 201030 - DNA, 25 bp, probe
gctctagatggcaaagcccacttag

SEQ ID NO: 201031 - DNA, 25 bp, probe
gcgctggtgtgcaacacgctcagcg

SEQ ID NO: 201032 - DNA, 25 bp, probe
gcgctgctggtcagtcgtggagcgc

SEQ ID NO: 201033 - DNA, 25 bp, probe
gcggggcaaagtgagggccatccaa

SEQ ID NO: 201034 - DNA, 25 bp, probe
gcgtggtggacgacaacgggttcaa

SEQ ID NO: 201035 - DNA, 25 bp, probe
gcgtggtggacgacaacgggttcaa

SEQ ID NO: 201036 - DNA, 25 bp, probe
gcgttggagacgcctgttaggatct

SEQ ID NO: 201037 - DNA, 25 bp, probe
gcgctgggagtcctcatgtttgaga

SEQ ID NO: 201038 - DNA, 25 bp, probe
gcgcctgtaatcccagctactcggg

SEQ ID NO: 201039 - DNA, 25 bp, probe
gcgttatgtagctcaggaccttggc

SEQ ID NO: 201040 - DNA, 25 bp, probe
gcggctcgtacacagggacttggcc

SEQ ID NO: 201041 - DNA, 25 bp, probe
gcggccgttactagtggatccgagc

SEQ ID NO: 201042 - DNA, 25 bp, probe
gcggttgttataggtggcaccaggc

SEQ ID NO: 201043 - DNA, 25 bp, probe
gcggtatgtctagattgacccttga

SEQ ID NO: 201044 - DNA, 25 bp, probe
gcaggcgaaccatatttacctatac

SEQ ID NO: 201045 - DNA, 25 bp, probe
gcgggaccagcagaatttgccctac

SEQ ID NO: 201046 - DNA, 25 bp, probe
gcgggaccagcagaatttgccctac

SEQ ID NO: 201047 - DNA, 25 bp, probe
gcgcgaaaccagccaattctgctgc

SEQ ID NO: 201048 - DNA, 25 bp, probe
gcccaaatgtcagggttctgctcgg

SEQ ID NO: 201049 - DNA, 25 bp, probe
gcccaagatggaggtgtttcaggaa

SEQ ID NO: 201050 - DNA, 25 bp, probe
gcgctaccaggagtttgttcaggaa

SEQ ID NO: 201051 - DNA, 25 bp, probe
gcgctaccaggagtttgttcaggaa

SEQ ID NO: 201052 - DNA, 25 bp, probe
gcccagcctggagtacagtggcacg

SEQ ID NO: 201053 - DNA, 25 bp, probe
gcccaaatctagagcattgagcact

SEQ ID NO: 201054 - DNA, 25 bp, probe
gcccaaatccttagatctggcatgt

SEQ ID NO: 201055 - DNA, 25 bp, probe
gcccaaatccttagatctggcatgt

SEQ ID NO: 201056 - DNA, 25 bp, probe
gcccacatgtcctgatcatatgctt

SEQ ID NO: 201057 - DNA, 25 bp, probe
gcccagctgccttgtatcagctgat

SEQ ID NO: 201058 - DNA, 25 bp, probe
gcgccgctcatgactatacgctaag

SEQ ID NO: 201059 - DNA, 25 bp, probe
gcgccagcaagaagatactgctgcc

SEQ ID NO: 201060 - DNA, 25 bp, probe
gcccaccaatggtgctgcatggcac

SEQ ID NO: 201061 - DNA, 25 bp, probe
gcccaccgtgagggctgagtgctgc

SEQ ID NO: 201062 - DNA, 25 bp, probe
gcccagccgtgggcttaggagagag

SEQ ID NO: 201063 - DNA, 25 bp, probe
gcccacctatgggcgtaggcggggc

SEQ ID NO: 201064 - DNA, 25 bp, probe
gcccacctatgggcgtaggcggggc

SEQ ID NO: 201065 - DNA, 25 bp, probe
gcgcctacgaggacgtggcgggtgg

SEQ ID NO: 201066 - DNA, 25 bp, probe
gcgcttagtaggtcggaggaagtgg

SEQ ID NO: 201067 - DNA, 25 bp, probe
gcgcgaggtcgattgggaaggaggg

SEQ ID NO: 201068 - DNA, 25 bp, probe
gcccagagtgtgggagctaatggga

SEQ ID NO: 201069 - DNA, 25 bp, probe
gcgccaggtgtgggtgtacacaggc

SEQ ID NO: 201070 - DNA, 25 bp, probe
gcgctagatttggggctcagaaggc

SEQ ID NO: 201071 - DNA, 25 bp, probe
gcgaggcatttggagagcaagggtt

SEQ ID NO: 201072 - DNA, 25 bp, probe
gcgcaggccttgctggaaggctatt

SEQ ID NO: 201073 - DNA, 25 bp, probe
gcgatgactcggctggtcaacattc

SEQ ID NO: 201074 - DNA, 25 bp, probe
gcgcatgcacaaccttgatgataac

SEQ ID NO: 201075 - DNA, 25 bp, probe
gcgcatgcacaaccttgatgataac

SEQ ID NO: 201076 - DNA, 25 bp, probe
gcgccatcaaaatggtccagtacag

SEQ ID NO: 201077 - DNA, 25 bp, probe
gcccagccagaatggatgtactaca

SEQ ID NO: 201078 - DNA, 25 bp, probe
gcccagcgaagcaggagtagctgcc

SEQ ID NO: 201079 - DNA, 25 bp, probe
gcccagcgaagcaggagtagctgcc

SEQ ID NO: 201080 - DNA, 25 bp, probe
gcgccctggagcaggagaagctgca

SEQ ID NO: 201081 - DNA, 25 bp, probe
gctggccgtgccggtgaaagtgacc

SEQ ID NO: 201082 - DNA, 25 bp, probe
gcgaccgctgtcagaaaaagatccg

SEQ ID NO: 201083 - DNA, 25 bp, probe
gcgccaccatgtcgggagacaaact

SEQ ID NO: 201084 - DNA, 25 bp, probe
gcccaacgatccggagaaaaacacg

SEQ ID NO: 201085 - DNA, 25 bp, probe
gcccaacgatccggagaaaaacacg

SEQ ID NO: 201086 - DNA, 25 bp, probe
gcccaaccaacatggcagctaacac

SEQ ID NO: 201087 - DNA, 25 bp, probe
gcccaaccaacatggcagctaacac

SEQ ID NO: 201088 - DNA, 25 bp, probe
gcccaaccaacatggcagctaacac

SEQ ID NO: 201089 - DNA, 25 bp, probe
gctccaaaccacagagtgggaacaa

SEQ ID NO: 201090 - DNA, 25 bp, probe
gctccaaaccacagagtgggaacaa

SEQ ID NO: 201091 - DNA, 25 bp, probe
gcccaaggccagaatgacgggaaca

SEQ ID NO: 201092 - DNA, 25 bp, probe
gcccaaggaagttgctcatgggagc

SEQ ID NO: 201093 - DNA, 25 bp, probe
gcccagcagtattgctcacgggggc

SEQ ID NO: 201094 - DNA, 25 bp, probe
gctagccagttctctagggaacttg

SEQ ID NO: 201095 - DNA, 25 bp, probe
gctagccagttctctagggaacttg

SEQ ID NO: 201096 - DNA, 25 bp, probe
gctcaccctgtcactgagggttttg

SEQ ID NO: 201097 - DNA, 25 bp, probe
gcgattcctgccaagtagggtttag

SEQ ID NO: 201098 - DNA, 25 bp, probe
gcgacttcgccaagggcgttttcaa

SEQ ID NO: 201099 - DNA, 25 bp, probe
gcgaccacgctaagggcgaattcca

SEQ ID NO: 201100 - DNA, 25 bp, probe
gcgcaacacctttagggagattctc

SEQ ID NO: 201101 - DNA, 25 bp, probe
gcgcaacacctttagggagattctc

SEQ ID NO: 201102 - DNA, 25 bp, probe
gcccacaccctctctgagagatact

SEQ ID NO: 201103 - DNA, 25 bp, probe
gcccacaccctctctgagagatact

SEQ ID NO: 201104 - DNA, 25 bp, probe
gcccaaccctgactcagagaatgag

SEQ ID NO: 201105 - DNA, 25 bp, probe
gcccaaccctgtcctgagaaaggac

SEQ ID NO: 201106 - DNA, 25 bp, probe
gcccacctcaggcactggaaatgag

SEQ ID NO: 201107 - DNA, 25 bp, probe
gcccagcccagggcctgagttagac

SEQ ID NO: 201108 - DNA, 25 bp, probe
gcccagccaagtgcagagaatgtga

SEQ ID NO: 201109 - DNA, 25 bp, probe
gcccacacagcgtgcatgatgggtg

SEQ ID NO: 201110 - DNA, 25 bp, probe
gcccacaacatcagcagcagtggtg

SEQ ID NO: 201111 - DNA, 25 bp, probe
gcgccaccatccacatgcaggtggt

SEQ ID NO: 201112 - DNA, 25 bp, probe
gcgccaccatccacatgcaggtggt

SEQ ID NO: 201113 - DNA, 25 bp, probe
gcccacactgcagagcatcacgtgg

SEQ ID NO: 201114 - DNA, 25 bp, probe
gcccacactgctggacatggacatg

SEQ ID NO: 201115 - DNA, 25 bp, probe
gcgacagcagtgatagcagtgacag

SEQ ID NO: 201116 - DNA, 25 bp, probe
gcgagcgctggaaggccatcaatgc

SEQ ID NO: 201117 - DNA, 25 bp, probe
gcgcctgctggaagatgccgattag

SEQ ID NO: 201118 - DNA, 25 bp, probe
gcgcctctggatggtgaggagctca

SEQ ID NO: 201119 - DNA, 25 bp, probe
gcgttcaggcaggtgacgtgtggaa

SEQ ID NO: 201120 - DNA, 25 bp, probe
gcgattccggtatggctggtgcaaa

SEQ ID NO: 201121 - DNA, 25 bp, probe
gcgtctaagtgtttgggaagcaaca

SEQ ID NO: 201122 - DNA, 25 bp, probe
gcagttgggtgggttaacgccaagc

SEQ ID NO: 201123 - DNA, 25 bp, probe
gctgttggtggggtcagggtccaag

SEQ ID NO: 201124 - DNA, 25 bp, probe
gcgcttcgtggtgtatgaggaagac

SEQ ID NO: 201125 - DNA, 25 bp, probe
gcgcttcgagggaatatgcgaagct

SEQ ID NO: 201126 - DNA, 25 bp, probe
gcgctgggagcagtttgcagcagag

SEQ ID NO: 201127 - DNA, 25 bp, probe
gcagtgatggggattacaggggagg

SEQ ID NO: 201128 - DNA, 25 bp, probe
gcgcactggaggagtacgtgaggag

SEQ ID NO: 201129 - DNA, 25 bp, probe
gcgactgcacagaatggctgacttg

SEQ ID NO: 201130 - DNA, 25 bp, probe
gcgagctgcatgagaagtacatgct

SEQ ID NO: 201131 - DNA, 25 bp, probe
gcgatgcctgggtttacaaaagatt

SEQ ID NO: 201132 - DNA, 25 bp, probe
gcggcactggtcatggaaaacgaat

SEQ ID NO: 201133 - DNA, 25 bp, probe
gcgagggcgtttggagaggaggagt

SEQ ID NO: 201134 - DNA, 25 bp, probe
gcgcgggcgttggaagaactggagt

SEQ ID NO: 201135 - DNA, 25 bp, probe
gcgcagtggtccgggacaactggca

SEQ ID NO: 201136 - DNA, 25 bp, probe
gcggggctctccagaacatcatccc

SEQ ID NO: 201137 - DNA, 25 bp, probe
gcgactggctcaacaattaccacct

SEQ ID NO: 201138 - DNA, 25 bp, probe
gcgacatggacatccagtaccacgg

SEQ ID NO: 201139 - DNA, 25 bp, probe
gcgacaggcaactatggcaactacc

SEQ ID NO: 201140 - DNA, 25 bp, probe
gcgaccacaagaaggatgattcaac

SEQ ID NO: 201141 - DNA, 25 bp, probe
gcgagcccattttgtggattgtgtc

SEQ ID NO: 201142 - DNA, 25 bp, probe
gcgatccaagtttgacatgattgtg

SEQ ID NO: 201143 - DNA, 25 bp, probe
gcgattcttctcagacatgtcttct

SEQ ID NO: 201144 - DNA, 25 bp, probe
gcgatctcagtgacaatgatctgct

SEQ ID NO: 201145 - DNA, 25 bp, probe
gcgctctcagtcagatactgcgcaa

SEQ ID NO: 201146 - DNA, 25 bp, probe
gcgctcctgacataccatgagaatg

SEQ ID NO: 201147 - DNA, 25 bp, probe
gcgtgctggactattcaggaataag

SEQ ID NO: 201148 - DNA, 25 bp, probe
gcgctctgacatactttcatgtggt

SEQ ID NO: 201149 - DNA, 25 bp, probe
gcgcatctgccaggtggtctggcgc

SEQ ID NO: 201150 - DNA, 25 bp, probe
gcgcatcatggaagtggtgggcaca

SEQ ID NO: 201151 - DNA, 25 bp, probe
gcgtcgatgtagatgtgagagccac

SEQ ID NO: 201152 - DNA, 25 bp, probe
gcgcatcagtgttctctgaggtcct

SEQ ID NO: 201153 - DNA, 25 bp, probe
gcgcatcagtgttctctgaggtcct

SEQ ID NO: 201154 - DNA, 25 bp, probe
gcgcagtgagtcttcggagctgttg

SEQ ID NO: 201155 - DNA, 25 bp, probe
gcgcctggtcaccagggctgctttt

SEQ ID NO: 201156 - DNA, 25 bp, probe
gcgcctggtcaccagggctgctttt

SEQ ID NO: 201157 - DNA, 25 bp, probe
gcgccagagctgcagagctagtgtt

SEQ ID NO: 201158 - DNA, 25 bp, probe
gcgcgagatcgacgtgctggagcgg

SEQ ID NO: 201159 - DNA, 25 bp, probe
gcgcgagatcgacgtgctggagcgg

SEQ ID NO: 201160 - DNA, 25 bp, probe
gcgcaagaagcagatcgacgtggcc

SEQ ID NO: 201161 - DNA, 25 bp, probe
gcgaagcaggagtagctgccgggcc

SEQ ID NO: 201162 - DNA, 25 bp, probe
gcgaagcaggagtagctgccgggcc

SEQ ID NO: 201163 - DNA, 25 bp, probe
gctacaccatggtgtcggtggccta

SEQ ID NO: 201164 - DNA, 25 bp, probe
gcccaatgctggtgttggtggcgct

SEQ ID NO: 201165 - DNA, 25 bp, probe
gcccaatctggagccagagggcagg

SEQ ID NO: 201166 - DNA, 25 bp, probe
gcccaatcagggtgcaaggagcaag

SEQ ID NO: 201167 - DNA, 25 bp, probe
gcccaacaagaagtaatggcagaca

SEQ ID NO: 201168 - DNA, 25 bp, probe
gcccaagtaaagtgaccatgccagt

SEQ ID NO: 201169 - DNA, 25 bp, probe
gcccaagctgaatgccgagaagcca

SEQ ID NO: 201170 - DNA, 25 bp, probe
gcccaagtgaaggccagagtgagga

SEQ ID NO: 201171 - DNA, 25 bp, probe
gcccaagtgaagcgcatgcgcagcg

SEQ ID NO: 201172 - DNA, 25 bp, probe
gcccaagctgcaggtggagctggag

SEQ ID NO: 201173 - DNA, 25 bp, probe
gcgccaagcgcaaggtgacacgcat

SEQ ID NO: 201174 - DNA, 25 bp, probe
gcgccaagacagaggagcacaccac

SEQ ID NO: 201175 - DNA, 25 bp, probe
gcgccaagggaaggtcaccatcaag

SEQ ID NO: 201176 - DNA, 25 bp, probe
gctcggagcggaaggtgacgcgcat

SEQ ID NO: 201177 - DNA, 25 bp, probe
gcgcgcaggatgggggtgactgccc

SEQ ID NO: 201178 - DNA, 25 bp, probe
gcgcgcgccagcaagaagatactgc

SEQ ID NO: 201179 - DNA, 25 bp, probe
gcgctgcggatcaagaagacactac

SEQ ID NO: 201180 - DNA, 25 bp, probe
gcgctggcgttacagcgcaacagca

SEQ ID NO: 201181 - DNA, 25 bp, probe
gcgcgttgactacgagcagatcaag

SEQ ID NO: 201182 - DNA, 25 bp, probe
gcgcgttgactacgagcagatcaag

SEQ ID NO: 201183 - DNA, 25 bp, probe
gcgtatctactaggaggagccaggg

SEQ ID NO: 201184 - DNA, 25 bp, probe
gcgtatctcagcagaagaggccctg

SEQ ID NO: 201185 - DNA, 25 bp, probe
gcgtatctcagcagaagaggccctg

SEQ ID NO: 201186 - DNA, 25 bp, probe
gcgtactgacaggtggaccaacgga

SEQ ID NO: 201187 - DNA, 25 bp, probe
gcgctcacgcaagcatggttaacgt

SEQ ID NO: 201188 - DNA, 25 bp, probe
gcgtatcgcaagggtttgacacggc

SEQ ID NO: 201189 - DNA, 25 bp, probe
gcgtttgcaagcagaattttcagac

SEQ ID NO: 201190 - DNA, 25 bp, probe
gcgtccctagcagtgaactatttct

SEQ ID NO: 201191 - DNA, 25 bp, probe
gcgtccctagcagtgaactatttct

SEQ ID NO: 201192 - DNA, 25 bp, probe
gcgactgctttcaaatactattttc

SEQ ID NO: 201193 - DNA, 25 bp, probe
gcgtcaggtactactaatattattc

SEQ ID NO: 201194 - DNA, 25 bp, probe
gcgtaggtggctgtcaaattattgt

SEQ ID NO: 201195 - DNA, 25 bp, probe
gcaggacgggcccaaagttatttat

SEQ ID NO: 201196 - DNA, 25 bp, probe
gcgcgatgccgggatcaaagtctgt

SEQ ID NO: 201197 - DNA, 25 bp, probe
gcgcgacagtgtagaaagtggctgt

SEQ ID NO: 201198 - DNA, 25 bp, probe
gcgggaggtagacatgtagcagtaa

SEQ ID NO: 201199 - DNA, 25 bp, probe
gcgggaggtagacatgtagcagtaa

SEQ ID NO: 201200 - DNA, 25 bp, probe
gcgaaggaataaaagtatcatcaca

SEQ ID NO: 201201 - DNA, 25 bp, probe
gcgaagtttaactgtgcatctgaac

SEQ ID NO: 201202 - DNA, 25 bp, probe
gcgggcgggaactgttatgatcacc

SEQ ID NO: 201203 - DNA, 25 bp, probe
gagtttgggaactgcaataacctgg

SEQ ID NO: 201204 - DNA, 25 bp, probe
gcgtttgcggcaaccgcaagaagcc

SEQ ID NO: 201205 - DNA, 25 bp, probe
gcgcctggggttcagagatgagacc

SEQ ID NO: 201206 - DNA, 25 bp, probe
gcgcctggggttcagagatgagacc

SEQ ID NO: 201207 - DNA, 25 bp, probe
gcgcctgaggtgctggaggacaatg

SEQ ID NO: 201208 - DNA, 25 bp, probe
gcgcctgaggtgctggaggacaatg

SEQ ID NO: 201209 - DNA, 25 bp, probe
gcgccaatggcgcggtgaggcaagg

SEQ ID NO: 201210 - DNA, 25 bp, probe
gcgcaacgccgaggcgaagcgcaag

SEQ ID NO: 201211 - DNA, 25 bp, probe
gcgaaggacgcgcaaatgcagcaag

SEQ ID NO: 201212 - DNA, 25 bp, probe
gcgacatcatgcaccgagacaagca

SEQ ID NO: 201213 - DNA, 25 bp, probe
gcgatcttctgccatggatgaaaac

SEQ ID NO: 201214 - DNA, 25 bp, probe
gcgatgtacgcactgtcagttacac

SEQ ID NO: 201215 - DNA, 25 bp, probe
gcgtctacgacggcaagtacctgcc

SEQ ID NO: 201216 - DNA, 25 bp, probe
gcgtctactgatggagtggggcgcg

SEQ ID NO: 201217 - DNA, 25 bp, probe
gcgcctctgcgaggagttctggggc

SEQ ID NO: 201218 - DNA, 25 bp, probe
gcgcgcttcgagggaatatgcgaag

SEQ ID NO: 201219 - DNA, 25 bp, probe
gcgtcttcagcatcagcatgttgga

SEQ ID NO: 201220 - DNA, 25 bp, probe
gcgtcttcagcatcagcatgttgga

SEQ ID NO: 201221 - DNA, 25 bp, probe
gcgctactgcactgagatctttgac

SEQ ID NO: 201222 - DNA, 25 bp, probe
gcgccagctcaacaggctggagacc

SEQ ID NO: 201223 - DNA, 25 bp, probe
gcgccaggcggacgaggagatgacc

SEQ ID NO: 201224 - DNA, 25 bp, probe
gcgccacggtgagcggaatggccgc

SEQ ID NO: 201225 - DNA, 25 bp, probe
gcgccacggtgagcggaatggccgc

SEQ ID NO: 201226 - DNA, 25 bp, probe
gcgacagtggggggcccatggtcgc

SEQ ID NO: 201227 - DNA, 25 bp, probe
gcgaaattcagggcccaatagggct

SEQ ID NO: 201228 - DNA, 25 bp, probe
gcgagaattgaagcaccctaatgtg

SEQ ID NO: 201229 - DNA, 25 bp, probe
gcgagaattctgagatcctccagaa

SEQ ID NO: 201230 - DNA, 25 bp, probe
gcgcgatgcattcgaagatctccgc

SEQ ID NO: 201231 - DNA, 25 bp, probe
gcgcgatgcattcgaagatctccgc

SEQ ID NO: 201232 - DNA, 25 bp, probe
gcgcagcatgcaagagctcagcacg

SEQ ID NO: 201233 - DNA, 25 bp, probe
gcgtgtgaaccttttgtgttgtcag

SEQ ID NO: 201234 - DNA, 25 bp, probe
gcgtatgtatcaattctagtcttcc

SEQ ID NO: 201235 - DNA, 25 bp, probe
gcgtatgtatcaattctagtcttcc

SEQ ID NO: 201236 - DNA, 25 bp, probe
gcgtatttctgagttatgcctgtat

SEQ ID NO: 201237 - DNA, 25 bp, probe
gcgctatttgtagttacttttgctt

SEQ ID NO: 201238 - DNA, 25 bp, probe
gcgtttgtgaatggaaatttttctc

SEQ ID NO: 201239 - DNA, 25 bp, probe
gcgcccttcaattgacaactttttg

SEQ ID NO: 201240 - DNA, 25 bp, probe
gcgcccttcaattgacaactttttg

SEQ ID NO: 201241 - DNA, 25 bp, probe
gcgcctatctcattcagaatatttt

SEQ ID NO: 201242 - DNA, 25 bp, probe
gcgtccatctgattggaattttcct

SEQ ID NO: 201243 - DNA, 25 bp, probe
gcgttcgctgaaaggcatcggtgcc

SEQ ID NO: 201244 - DNA, 25 bp, probe
gcgttcctgaagtggccgaggttaa

SEQ ID NO: 201245 - DNA, 25 bp, probe
gcgttctcgaagtggctgtaggact

SEQ ID NO: 201246 - DNA, 25 bp, probe
gcggttctcaaacggtacacagact

SEQ ID NO: 201247 - DNA, 25 bp, probe
gcggttctcaaacggtacacagact

SEQ ID NO: 201248 - DNA, 25 bp, probe
gcgtttggacaacaggcacacaatc

SEQ ID NO: 201249 - DNA, 25 bp, probe
gctgttatgaacaccagaaaggtca

SEQ ID NO: 201250 - DNA, 25 bp, probe
gagtacgaaccggccaagaggttct

SEQ ID NO: 201251 - DNA, 25 bp, probe
gctgtacccccagtaaagagctttc

SEQ ID NO: 201252 - DNA, 25 bp, probe
gctgtacccccagtaaagagctttc

SEQ ID NO: 201253 - DNA, 25 bp, probe
gctgtacccccagtaaagagctttc

SEQ ID NO: 201254 - DNA, 25 bp, probe
gcggaaaccctggaaaagcagcttt

SEQ ID NO: 201255 - DNA, 25 bp, probe
gcggaaaccctggaaaagcagcttt

SEQ ID NO: 201256 - DNA, 25 bp, probe
gctcgaaagccctatacttagcgtt

SEQ ID NO: 201257 - DNA, 25 bp, probe
gctggtgaagtacaccttcaggctt

SEQ ID NO: 201258 - DNA, 25 bp, probe
gcgctggaagaaaaacttcattgct

SEQ ID NO: 201259 - DNA, 25 bp, probe
gcgctgatgacacacagaacgcccc

SEQ ID NO: 201260 - DNA, 25 bp, probe
gcgctgatgaccccggacaccgacg

SEQ ID NO: 201261 - DNA, 25 bp, probe
gcgtgaaccggcggacacgcagtgg

SEQ ID NO: 201262 - DNA, 25 bp, probe
gctagggctagagcagacccgggta

SEQ ID NO: 201263 - DNA, 25 bp, probe
gctggggactggacaatttggggta

SEQ ID NO: 201264 - DNA, 25 bp, probe
gcgctgggaagggacataggggttt

SEQ ID NO: 201265 - DNA, 25 bp, probe
gcggccgaagacctcaagggtggct

SEQ ID NO: 201266 - DNA, 25 bp, probe
gcgtcctcaatgtccttaagagggt

SEQ ID NO: 201267 - DNA, 25 bp, probe
gcgttgtatgtggcctcacacagag

SEQ ID NO: 201268 - DNA, 25 bp, probe
gcgttgcttggtgcacagattgctg

SEQ ID NO: 201269 - DNA, 25 bp, probe
gcgttcgcagttgcagcgattgcaa

SEQ ID NO: 201270 - DNA, 25 bp, probe
gcgcctcacagtcgatgactttgaa

SEQ ID NO: 201271 - DNA, 25 bp, probe
gcgccatcagcatcgtatgtgagat

SEQ ID NO: 201272 - DNA, 25 bp, probe
gcgctcacatcggcagcttatagat

SEQ ID NO: 201273 - DNA, 25 bp, probe
gcgcatcacgacaaggatatgatgt

SEQ ID NO: 201274 - DNA, 25 bp, probe
gcgacagtgtagcgtcatgttagag

SEQ ID NO: 201275 - DNA, 25 bp, probe
gcgggtgaagctggtcatcttcgtc

SEQ ID NO: 201276 - DNA, 25 bp, probe
gcgaggtaatcatctgcatttggct

SEQ ID NO: 201277 - DNA, 25 bp, probe
gcgagacaacattccgttggcagct

SEQ ID NO: 201278 - DNA, 25 bp, probe
gcgagtcaagcattggtcttggcaa

SEQ ID NO: 201279 - DNA, 25 bp, probe
gcggttagcattggatttgctgttc

SEQ ID NO: 201280 - DNA, 25 bp, probe
gcggtccacattagagttgaaattt

SEQ ID NO: 201281 - DNA, 25 bp, probe
gcggtcagtttggagtggtccattt

SEQ ID NO: 201282 - DNA, 25 bp, probe
gcggtcagtttggagtggtccattt

SEQ ID NO: 201283 - DNA, 25 bp, probe
gcggccatatttccggccaagcatt

SEQ ID NO: 201284 - DNA, 25 bp, probe
gctgtggcatattacctgtaacatg

SEQ ID NO: 201285 - DNA, 25 bp, probe
gcgcgactgagaaccgtgacatcag

SEQ ID NO: 201286 - DNA, 25 bp, probe
gcgccacaaatgactctggacacag

SEQ ID NO: 201287 - DNA, 25 bp, probe
gcgctaaggatgactctggtcagag

SEQ ID NO: 201288 - DNA, 25 bp, probe
gcgtcagaccgagtgcatggtagag

SEQ ID NO: 201289 - DNA, 25 bp, probe
gcgatagaattggcgcatgcgtatg

SEQ ID NO: 201290 - DNA, 25 bp, probe
gcgaagctataggctcttgttggat

SEQ ID NO: 201291 - DNA, 25 bp, probe
gcgaacatactggctcttaggagag

SEQ ID NO: 201292 - DNA, 25 bp, probe
gcgaacatactggctcttaggagag

SEQ ID NO: 201293 - DNA, 25 bp, probe
gcgaccatgacttctgctaaaaagc

SEQ ID NO: 201294 - DNA, 25 bp, probe
gcgaccatcgtcatgttaacaaact

SEQ ID NO: 201295 - DNA, 25 bp, probe
ggacttaatcggttgaccctactgt

SEQ ID NO: 201296 - DNA, 25 bp, probe
gcgactagaccggagtgtctcctac

SEQ ID NO: 201297 - DNA, 25 bp, probe
gcgagctaagcccaaggtgtacatc

SEQ ID NO: 201298 - DNA, 25 bp, probe
gcgagttgacccagctgctcaactc

SEQ ID NO: 201299 - DNA, 25 bp, probe
gcggtaattccagctccaatagcgt

SEQ ID NO: 201300 - DNA, 25 bp, probe
gcggtaattccagctccaatagcgt

SEQ ID NO: 201301 - DNA, 25 bp, probe
gcgttagagtgccgccttagacgga

SEQ ID NO: 201302 - DNA, 25 bp, probe
gcgagtgaaggcaccatgctgaagc

SEQ ID NO: 201303 - DNA, 25 bp, probe
gcgtgatcaaagccacactctgggc

SEQ ID NO: 201304 - DNA, 25 bp, probe
gcgtgatcaaagccacactctgggc

SEQ ID NO: 201305 - DNA, 25 bp, probe
gcggataacaggcttcatggagctc

SEQ ID NO: 201306 - DNA, 25 bp, probe
gcggataacaggcttcatggagctc

SEQ ID NO: 201307 - DNA, 25 bp, probe
tcggaatccaaggtgtagggcccgg

SEQ ID NO: 201308 - DNA, 25 bp, probe
ctcgtcgtggactgggatgtgcacc

SEQ ID NO: 201309 - DNA, 25 bp, probe
gctggggctaaagtttggggtagag

SEQ ID NO: 201310 - DNA, 25 bp, probe
gcgaggggagaggtgggggaggagg

SEQ ID NO: 201311 - DNA, 25 bp, probe
gcggggggaggaggaggagggactg

SEQ ID NO: 201312 - DNA, 25 bp, probe
gcgtggcggagatcggggagggcgc

SEQ ID NO: 201313 - DNA, 25 bp, probe
gcgtggcgaatgtaaacgtccgcgc

SEQ ID NO: 201314 - DNA, 25 bp, probe
gcgtggcgaatgtaaacgtccgcgc

SEQ ID NO: 201315 - DNA, 25 bp, probe
gcgctgtgtactgtaaggacgtgct

SEQ ID NO: 201316 - DNA, 25 bp, probe
gcgctcggagcggaaggtgacgcgc

SEQ ID NO: 201317 - DNA, 25 bp, probe
gcgccggagtgcttcgaggacggct

SEQ ID NO: 201318 - DNA, 25 bp, probe
gcgccgcctgtgagcggcggcgagc

SEQ ID NO: 201319 - DNA, 25 bp, probe
gcgccgagcgagcaggagcggcggc

SEQ ID NO: 201320 - DNA, 25 bp, probe
gcgctcaagcggcaggcgcaggagg

SEQ ID NO: 201321 - DNA, 25 bp, probe
gcgctcaagcggcaggcgcaggagg

SEQ ID NO: 201322 - DNA, 25 bp, probe
gcgcgccgcagggaggcgcggagga

SEQ ID NO: 201323 - DNA, 25 bp, probe
gcgccctgaggatggagactggtga

SEQ ID NO: 201324 - DNA, 25 bp, probe
gcgcctggaggacgggacagatgga

SEQ ID NO: 201325 - DNA, 25 bp, probe
gcgcggtgaggcaaggtgacgatgg

SEQ ID NO: 201326 - DNA, 25 bp, probe
gcgcacgtgggaatggcagactccg

SEQ ID NO: 201327 - DNA, 25 bp, probe
gcgagtggtggaaggcgcagtccct

SEQ ID NO: 201328 - DNA, 25 bp, probe
gccacaaacatgtcctgtgcttgtc

SEQ ID NO: 201329 - DNA, 25 bp, probe
gcggcatttggtcgggcagccgcac

SEQ ID NO: 201330 - DNA, 25 bp, probe
gcgctactttgagggcgagttcaca

SEQ ID NO: 201331 - DNA, 25 bp, probe
gctggccatttagaggaattctagg

SEQ ID NO: 201332 - DNA, 25 bp, probe
gcgtcaatcctacgggatcatttaa

SEQ ID NO: 201333 - DNA, 25 bp, probe
gcgtcaacacgttcggcagttatga

SEQ ID NO: 201334 - DNA, 25 bp, probe
gcgtaacgctatactgtctgctgtt

SEQ ID NO: 201335 - DNA, 25 bp, probe
gcgtaacgctatactgtctgctgtt

SEQ ID NO: 201336 - DNA, 25 bp, probe
gcgatagtcgttttcttgcaaatga

SEQ ID NO: 201337 - DNA, 25 bp, probe
gcgacgttttatgctgctgaaatca

SEQ ID NO: 201338 - DNA, 25 bp, probe
gcgaggccaaacagcagctagaata

SEQ ID NO: 201339 - DNA, 25 bp, probe
gcgagcccagcagcttagatactaa

SEQ ID NO: 201340 - DNA, 25 bp, probe
gcgagcacaccaggctaagatttct

SEQ ID NO: 201341 - DNA, 25 bp, probe
gcggccccttgatagttcacaagag

SEQ ID NO: 201342 - DNA, 25 bp, probe
gcgggagccctgaaactaaacaagc

SEQ ID NO: 201343 - DNA, 25 bp, probe
gcgtgtggcccaaaagtcaaaagag

SEQ ID NO: 201344 - DNA, 25 bp, probe
gcgtatacaaagctattcataaaga

SEQ ID NO: 201345 - DNA, 25 bp, probe
gcgaaaccaagctgactcacaagaa

SEQ ID NO: 201346 - DNA, 25 bp, probe
gcgacctcgaagtaactcttggcaa

SEQ ID NO: 201347 - DNA, 25 bp, probe
gcgacctcgaagtaactcttggcaa

SEQ ID NO: 201348 - DNA, 25 bp, probe
gcgacctacaagaacctgggacaga

SEQ ID NO: 201349 - DNA, 25 bp, probe
gcgacctacaagaacctgggacaga

SEQ ID NO: 201350 - DNA, 25 bp, probe
gcgaaccacaggatggggccaaaag

SEQ ID NO: 201351 - DNA, 25 bp, probe
gcgaaccacaggatggggccaaaag

SEQ ID NO: 201352 - DNA, 25 bp, probe
gcgagaaccgtgagtggagctcttg

SEQ ID NO: 201353 - DNA, 25 bp, probe
gcgagatgagccctgaagagattct

SEQ ID NO: 201354 - DNA, 25 bp, probe
gcgattacgcttcagagataccaat

SEQ ID NO: 201355 - DNA, 25 bp, probe
gcggtaccatgatagaatactgcaa

SEQ ID NO: 201356 - DNA, 25 bp, probe
gcggtaccatgatagaatactgcaa

SEQ ID NO: 201357 - DNA, 25 bp, probe
gcgcttcaccatcaagataacacaa

SEQ ID NO: 201358 - DNA, 25 bp, probe
gcgcttcaccatcaagataacacaa

SEQ ID NO: 201359 - DNA, 25 bp, probe
gcgttcatccataccaacaaagtca

SEQ ID NO: 201360 - DNA, 25 bp, probe
gcgctttctcttggcaatcagaagg

SEQ ID NO: 201361 - DNA, 25 bp, probe
gcgcattttgcattccatatgaaaa

SEQ ID NO: 201362 - DNA, 25 bp, probe
gcgcacacaatcttcctggagaata

SEQ ID NO: 201363 - DNA, 25 bp, probe
gcgacagataatgcctgaggaaatg

SEQ ID NO: 201364 - DNA, 25 bp, probe
gcgatcagcatcaccaacggtgaag

SEQ ID NO: 201365 - DNA, 25 bp, probe
gcgctggccgtggaacggtgacggc

SEQ ID NO: 201366 - DNA, 25 bp, probe
gcgcatcttcgaaaacggctacgac

SEQ ID NO: 201367 - DNA, 25 bp, probe
gcgcatcttcgaaaacggctacgac

SEQ ID NO: 201368 - DNA, 25 bp, probe
gcgacttgccaagacagtgctggtg

SEQ ID NO: 201369 - DNA, 25 bp, probe
gcgacttgccaagacagtgctggtg

SEQ ID NO: 201370 - DNA, 25 bp, probe
gcgagccatggctcttcatggctga

SEQ ID NO: 201371 - DNA, 25 bp, probe
gcgcacagggctttgttagcagaga

SEQ ID NO: 201372 - DNA, 25 bp, probe
gcgcacactggactcttgaggaaga

SEQ ID NO: 201373 - DNA, 25 bp, probe
gcgcacactggactcttgaggaaga

SEQ ID NO: 201374 - DNA, 25 bp, probe
gcgaatccctcctgagggagatgct

SEQ ID NO: 201375 - DNA, 25 bp, probe
gcgaggcccaccgtgaggtaatgaa

SEQ ID NO: 201376 - DNA, 25 bp, probe
gcgagagccccacatgaggaagaac

SEQ ID NO: 201377 - DNA, 25 bp, probe
gcgataacagtcatgtggagatgaa

SEQ ID NO: 201378 - DNA, 25 bp, probe
gcgaaatcatggttgtagtgatctt

SEQ ID NO: 201379 - DNA, 25 bp, probe
gcaggaacatgagggtcagcgacgt

SEQ ID NO: 201380 - DNA, 25 bp, probe
gcaggaacatgagggtcagcgacgt

SEQ ID NO: 201381 - DNA, 25 bp, probe
gcgcagcattatcctgtgtcaggac

SEQ ID NO: 201382 - DNA, 25 bp, probe
gcgagcagctaatgttctggtctcc

SEQ ID NO: 201383 - DNA, 25 bp, probe
gcgcaatgccataaatttcttcatc

SEQ ID NO: 201384 - DNA, 25 bp, probe
gcgctcagttgctaagtatttcata

SEQ ID NO: 201385 - DNA, 25 bp, probe
gcgctcagttgctaagtatttcata

SEQ ID NO: 201386 - DNA, 25 bp, probe
gcgctatgcccaggagaacttcaag

SEQ ID NO: 201387 - DNA, 25 bp, probe
gcgctatggtcaggagacccttagc

SEQ ID NO: 201388 - DNA, 25 bp, probe
gcgcgggtgtgggagcacactttgc

SEQ ID NO: 201389 - DNA, 25 bp, probe
gcgcgtggtgtgcaacgagcgcttc

SEQ ID NO: 201390 - DNA, 25 bp, probe
gcgcgtgactggttgagcgggcagg

SEQ ID NO: 201391 - DNA, 25 bp, probe
gcggaactgcgcttaaaacagcgga

SEQ ID NO: 201392 - DNA, 25 bp, probe
gcgggattagcttcaacaatcgacg

SEQ ID NO: 201393 - DNA, 25 bp, probe
gcgtcaatctggaccacacagacga

SEQ ID NO: 201394 - DNA, 25 bp, probe
gcgagcctcggtgaacatgatggtt

SEQ ID NO: 201395 - DNA, 25 bp, probe
gcggcttcggtgggtattttctgcc

SEQ ID NO: 201396 - DNA, 25 bp, probe
gcagttactggttggtgttcttccc

SEQ ID NO: 201397 - DNA, 25 bp, probe
gcagttactggttggtgttcttccc

SEQ ID NO: 201398 - DNA, 25 bp, probe
gcgtttctttgccgatttttgaatg

SEQ ID NO: 201399 - DNA, 25 bp, probe
gcgtttctttgccgatttttgaatg

SEQ ID NO: 201400 - DNA, 25 bp, probe
gcgtttcttgatgggacatttagca

SEQ ID NO: 201401 - DNA, 25 bp, probe
gcgtttcttttgcatgactgtggcc

SEQ ID NO: 201402 - DNA, 25 bp, probe
gcgtttcttttgcatgactgtggcc

SEQ ID NO: 201403 - DNA, 25 bp, probe
gcgcattatccaattatagaggtac

SEQ ID NO: 201404 - DNA, 25 bp, probe
gcgcattatccaattatagaggtac

SEQ ID NO: 201405 - DNA, 25 bp, probe
gcgcaagatcaccttaatggtgatg

SEQ ID NO: 201406 - DNA, 25 bp, probe
gcgcagatgacagatgccaatggga

SEQ ID NO: 201407 - DNA, 25 bp, probe
gcgtcatactctaccatatggtggc

SEQ ID NO: 201408 - DNA, 25 bp, probe
gcgtgatcctgtacatcatggtctg

SEQ ID NO: 201409 - DNA, 25 bp, probe
gcgctgatgttgactgcagggcttc

SEQ ID NO: 201410 - DNA, 25 bp, probe
gcgctgatgtgtgccagtgagtatg

SEQ ID NO: 201411 - DNA, 25 bp, probe
gcgctgacagccgtggctgaggagg

SEQ ID NO: 201412 - DNA, 25 bp, probe
gcgctacagcaggagtgcatgaggc

SEQ ID NO: 201413 - DNA, 25 bp, probe
gcgaacagctgccagagcgagctgc

SEQ ID NO: 201414 - DNA, 25 bp, probe
gcgctcacagtgcagatgaagagtt

SEQ ID NO: 201415 - DNA, 25 bp, probe
gcgacctgctctttgagaagcttgg

SEQ ID NO: 201416 - DNA, 25 bp, probe
gcgacgatgcttatgtacagctgga

SEQ ID NO: 201417 - DNA, 25 bp, probe
gcggcggctttggtgactctagata

SEQ ID NO: 201418 - DNA, 25 bp, probe
gcgtgccctttgcttgatatagact

SEQ ID NO: 201419 - DNA, 25 bp, probe
gcgaggcctgttctgtaagcgcaac

SEQ ID NO: 201420 - DNA, 25 bp, probe
gcgacgcgctggcgttacagcgcaa

SEQ ID NO: 201421 - DNA, 25 bp, probe
gcgacggcaagtggcagaacgtgca

SEQ ID NO: 201422 - DNA, 25 bp, probe
gcgaggacacacgcagagtgccgac

SEQ ID NO: 201423 - DNA, 25 bp, probe
gcgggctctacagcggctgaatgag

SEQ ID NO: 201424 - DNA, 25 bp, probe
gcgtcctgtgactctgggagaggtg

SEQ ID NO: 201425 - DNA, 25 bp, probe
gcgtcctgtgactctgggagaggtg

SEQ ID NO: 201426 - DNA, 25 bp, probe
gcgtcgtgtcacagtggacagatgg

SEQ ID NO: 201427 - DNA, 25 bp, probe
gcgagcagggcggtgggaagctggt

SEQ ID NO: 201428 - DNA, 25 bp, probe
gcgagctgggcacatgaagcaggtc

SEQ ID NO: 201429 - DNA, 25 bp, probe
gcgacgtggctcgagaagcattcat

SEQ ID NO: 201430 - DNA, 25 bp, probe
gcgacgtggtgaagatctgtgactt

SEQ ID NO: 201431 - DNA, 25 bp, probe
gcgacaggcagtccatgatcctagt

SEQ ID NO: 201432 - DNA, 25 bp, probe
gctaatgagattgttcctcactcct

SEQ ID NO: 201433 - DNA, 25 bp, probe
gcgacaggtgctgttcctatagcat

SEQ ID NO: 201434 - DNA, 25 bp, probe
gcgacaggtgctgttcctatagcat

SEQ ID NO: 201435 - DNA, 25 bp, probe
gcgaaaggttgtatgtgatcagaag

SEQ ID NO: 201436 - DNA, 25 bp, probe
gcgaatcagcgcttgatttggcaaa

SEQ ID NO: 201437 - DNA, 25 bp, probe
gcgacagatgaggtatcttctgcag

SEQ ID NO: 201438 - DNA, 25 bp, probe
gcgcaagatgagaagacgctccagc

SEQ ID NO: 201439 - DNA, 25 bp, probe
gcgcaatgccaaggacacagcacac

SEQ ID NO: 201440 - DNA, 25 bp, probe
gcgtgagctacagagggcaccatgt

SEQ ID NO: 201441 - DNA, 25 bp, probe
gcgtgagctacagagggcaccatgt

SEQ ID NO: 201442 - DNA, 25 bp, probe
gcgctagccaggtagagagacacag

SEQ ID NO: 201443 - DNA, 25 bp, probe
gcgagatgctcgtgtgcagagagca

SEQ ID NO: 201444 - DNA, 25 bp, probe
gcgagactcagcttgtagctgacta

SEQ ID NO: 201445 - DNA, 25 bp, probe
gcgtcagatcagtgatcctattcag

SEQ ID NO: 201446 - DNA, 25 bp, probe
gcgtagaagactacttttcccgacg

SEQ ID NO: 201447 - DNA, 25 bp, probe
gcgtagaagactacttttcccgacg

SEQ ID NO: 201448 - DNA, 25 bp, probe
gcgtgaaggattactgctttgcccg

SEQ ID NO: 201449 - DNA, 25 bp, probe
gcgagaggcgagatcagtatctgca

SEQ ID NO: 201450 - DNA, 25 bp, probe
gcgacagccgagaagcagaaacacg

SEQ ID NO: 201451 - DNA, 25 bp, probe
gcgtgcagtagagagcaaagatggc

SEQ ID NO: 201452 - DNA, 25 bp, probe
gcgacatgaccatagaggagatgga

SEQ ID NO: 201453 - DNA, 25 bp, probe
gcgacccagaaatggcagggacact

SEQ ID NO: 201454 - DNA, 25 bp, probe
gcgatcccgaacgaggacggattcc

SEQ ID NO: 201455 - DNA, 25 bp, probe
gcgaggcctgaagcattactggttc

SEQ ID NO: 201456 - DNA, 25 bp, probe
gctgaaccaatagcaaacttccttt

SEQ ID NO: 201457 - DNA, 25 bp, probe
gctgaaccaatagcaaacttccttt

SEQ ID NO: 201458 - DNA, 25 bp, probe
gctggatccaacacaaacagttccc

SEQ ID NO: 201459 - DNA, 25 bp, probe
gcgagtgccttatccaagaattccc

SEQ ID NO: 201460 - DNA, 25 bp, probe
gcgagtgccttatccaagaattccc

SEQ ID NO: 201461 - DNA, 25 bp, probe
gcgatgactttatttgcggagcatt

SEQ ID NO: 201462 - DNA, 25 bp, probe
gcgatgtgctttatggcaggcgcaa

SEQ ID NO: 201463 - DNA, 25 bp, probe
gcgtgttttgggcgtgctagaggtg

SEQ ID NO: 201464 - DNA, 25 bp, probe
gcgtgggtggcatgagttgaagaag

SEQ ID NO: 201465 - DNA, 25 bp, probe
gcgattggctccaggccattaaaat

SEQ ID NO: 201466 - DNA, 25 bp, probe
gcgagtggcttcgggccatcaaaat

SEQ ID NO: 201467 - DNA, 25 bp, probe
gcgttgactacgagcagatcaagat

SEQ ID NO: 201468 - DNA, 25 bp, probe
gcggtagtacagcagacagcaaatg

SEQ ID NO: 201469 - DNA, 25 bp, probe
gcggtagtacagcagacagcaaatg

SEQ ID NO: 201470 - DNA, 25 bp, probe
gcgaaagtgacggatgagcagtaag

SEQ ID NO: 201471 - DNA, 25 bp, probe
gcgttcagctgctggggcagtgata

SEQ ID NO: 201472 - DNA, 25 bp, probe
gcgattcacatgtagctttcaggct

SEQ ID NO: 201473 - DNA, 25 bp, probe
gcgatctcatcaaggtgacgccctc

SEQ ID NO: 201474 - DNA, 25 bp, probe
gcgttgcagaggactgaccctgcta

SEQ ID NO: 201475 - DNA, 25 bp, probe
gcgttgcagaggactgaccctgcta

SEQ ID NO: 201476 - DNA, 25 bp, probe
gcgtggagaaataacacccaaatct

SEQ ID NO: 201477 - DNA, 25 bp, probe
gctgtaaaacatctgaacctaacat

SEQ ID NO: 201478 - DNA, 25 bp, probe
gctgttaaagtgatgaacgctcgta

SEQ ID NO: 201479 - DNA, 25 bp, probe
gctgttaaagtgatgaacgctcgta

SEQ ID NO: 201480 - DNA, 25 bp, probe
gcgatcttaaatgtgacaacatctt

SEQ ID NO: 201481 - DNA, 25 bp, probe
gctcattttcaattccaaactctta

SEQ ID NO: 201482 - DNA, 25 bp, probe
gcttccttagagtccaaatccttta

SEQ ID NO: 201483 - DNA, 25 bp, probe
gctgatcctgggatcctatgtccgc

SEQ ID NO: 201484 - DNA, 25 bp, probe
gcgatgtctgggaacccagctgcct

SEQ ID NO: 201485 - DNA, 25 bp, probe
gcgcagaaggagaacggcatctact

SEQ ID NO: 201486 - DNA, 25 bp, probe
gcgcaaggtgacacgcatgatcctc

SEQ ID NO: 201487 - DNA, 25 bp, probe
gcgcaaggtgacacacgagtcgccc

SEQ ID NO: 201488 - DNA, 25 bp, probe
gcgcaggaggaggccaagggcgcgc

SEQ ID NO: 201489 - DNA, 25 bp, probe
gcgacgaggaggagttgcgcgcgct

SEQ ID NO: 201490 - DNA, 25 bp, probe
gcgacgaggaggagttgcgcgcgct

SEQ ID NO: 201491 - DNA, 25 bp, probe
gcgagcaaggggatatcgcccagcc

SEQ ID NO: 201492 - DNA, 25 bp, probe
gcggcctcggaaaagctggcacagt

SEQ ID NO: 201493 - DNA, 25 bp, probe
gcgagaccagaggggacggaagcat

SEQ ID NO: 201494 - DNA, 25 bp, probe
gcggatcacctgaggtcgggagttc

SEQ ID NO: 201495 - DNA, 25 bp, probe
gctggaatcggaagaactggggttc

SEQ ID NO: 201496 - DNA, 25 bp, probe
gctggttgctggattatgggtggtt

SEQ ID NO: 201497 - DNA, 25 bp, probe
ttgaggttggttttagggttgctag

SEQ ID NO: 201498 - DNA, 25 bp, probe
tctgaggtcgggaattcgggaccgg

SEQ ID NO: 201499 - DNA, 25 bp, probe
gctggactcggtctttgaggagccg

SEQ ID NO: 201500 - DNA, 25 bp, probe
gcgaactggtgacctgtaggccatg

SEQ ID NO: 201501 - DNA, 25 bp, probe
gcggactggtacgcacatggaccgc

SEQ ID NO: 201502 - DNA, 25 bp, probe
gcggactggtacgcacatggaccgc

SEQ ID NO: 201503 - DNA, 25 bp, probe
gcggaaggtgacgcgcatggtgttg

SEQ ID NO: 201504 - DNA, 25 bp, probe
gcgaagggtgaagccatgtgtagca

SEQ ID NO: 201505 - DNA, 25 bp, probe
gcgggtgttggtgatttgtagccct

SEQ ID NO: 201506 - DNA, 25 bp, probe
gcgggatgtacgacattttgtgact

SEQ ID NO: 201507 - DNA, 25 bp, probe
gcgggtgccatacccagggatgagc

SEQ ID NO: 201508 - DNA, 25 bp, probe
gcgggagtctcagccgaagagagct

SEQ ID NO: 201509 - DNA, 25 bp, probe
gcgtggagacaatcaagacaaggaa

SEQ ID NO: 201510 - DNA, 25 bp, probe
gcgtgcatggagatcccaatacgga

SEQ ID NO: 201511 - DNA, 25 bp, probe
gcgtgattgaccctttaactgtatc

SEQ ID NO: 201512 - DNA, 25 bp, probe
gcggattacacgttgaaaggattgc

SEQ ID NO: 201513 - DNA, 25 bp, probe
gcgggaatcacctgaaacagcttcc

SEQ ID NO: 201514 - DNA, 25 bp, probe
gcggaaattccacgacatccggatc

SEQ ID NO: 201515 - DNA, 25 bp, probe
gcggaggatccaggaagctacggag

SEQ ID NO: 201516 - DNA, 25 bp, probe
gcggcggatcccgattctataaggc

SEQ ID NO: 201517 - DNA, 25 bp, probe
gcgtggtggcacacacctagtagtc

SEQ ID NO: 201518 - DNA, 25 bp, probe
gcgggtgtgctcacttacattatgc

SEQ ID NO: 201519 - DNA, 25 bp, probe
gcgggtgtgctcacttacattatgc

SEQ ID NO: 201520 - DNA, 25 bp, probe
gcgaggtgtattccatggacatgtt

SEQ ID NO: 201521 - DNA, 25 bp, probe
gcgaggatgatttcactaggcattt

SEQ ID NO: 201522 - DNA, 25 bp, probe
gcgagcgcgacttcgtgaagatctt

SEQ ID NO: 201523 - DNA, 25 bp, probe
gcgagcgcgacttcgtgaagatctt

SEQ ID NO: 201524 - DNA, 25 bp, probe
gcgattgcgcaatgccataaatttc

SEQ ID NO: 201525 - DNA, 25 bp, probe
gcgatgttgactgcacaggtaatac

SEQ ID NO: 201526 - DNA, 25 bp, probe
gcgagctgtacttatcggtgaatca

SEQ ID NO: 201527 - DNA, 25 bp, probe
gcgagctgtacttatcggtgaatca

SEQ ID NO: 201528 - DNA, 25 bp, probe
gctcagagtacctcgggaatgaact

SEQ ID NO: 201529 - DNA, 25 bp, probe
gcgaggtagccggtgtgcggtgaac

SEQ ID NO: 201530 - DNA, 25 bp, probe
gcgagggagcggctggggtgaagca

SEQ ID NO: 201531 - DNA, 25 bp, probe
gctgaggcaacgagtgggaggttca

SEQ ID NO: 201532 - DNA, 25 bp, probe
gcgggccctgtacgaggggtatgca

SEQ ID NO: 201533 - DNA, 25 bp, probe
gcggatcactgtgtagggggacagc

SEQ ID NO: 201534 - DNA, 25 bp, probe
gcggatcactgtgtagggggacagc

SEQ ID NO: 201535 - DNA, 25 bp, probe
gcgggcggatttggggagggccctg

SEQ ID NO: 201536 - DNA, 25 bp, probe
gcgttgtggaattgggaagggcacc

SEQ ID NO: 201537 - DNA, 25 bp, probe
gcgtgtgagggttggcactaggccc

SEQ ID NO: 201538 - DNA, 25 bp, probe
tctgggagggtctcacggaactagt

SEQ ID NO: 201539 - DNA, 25 bp, probe
gcggccaggtgtttacaccaacgtg

SEQ ID NO: 201540 - DNA, 25 bp, probe
gcggccaggtgtttacaccaacgtg

SEQ ID NO: 201541 - DNA, 25 bp, probe
gcgagtgcagaggttttcacacaac

SEQ ID NO: 201542 - DNA, 25 bp, probe
gcgagtgcagaggttttcacacaac

SEQ ID NO: 201543 - DNA, 25 bp, probe
gcgagtcagggagttaaacagcagc

SEQ ID NO: 201544 - DNA, 25 bp, probe
gcgagtggtggagaccatccaggca

SEQ ID NO: 201545 - DNA, 25 bp, probe
gctgaagtaccagacctgctagaga

SEQ ID NO: 201546 - DNA, 25 bp, probe
gctggagtacccagcctatcaggtg

SEQ ID NO: 201547 - DNA, 25 bp, probe
gctgtgggtccctggaaagggggag

SEQ ID NO: 201548 - DNA, 25 bp, probe
gcggcttgtccctaggaagaggcga

SEQ ID NO: 201549 - DNA, 25 bp, probe
gctggacttccgcaggaaggtgaac

SEQ ID NO: 201550 - DNA, 25 bp, probe
gcggactccaaggggttgcaggaac

SEQ ID NO: 201551 - DNA, 25 bp, probe
gcgagaaacataggaaagtgggaac

SEQ ID NO: 201552 - DNA, 25 bp, probe
gcgagagtcagatgcagacgcagtg

SEQ ID NO: 201553 - DNA, 25 bp, probe
gcgagaatgcaacatgcagcacagc

SEQ ID NO: 201554 - DNA, 25 bp, probe
gcgatcatggaactagatgacgctt

SEQ ID NO: 201555 - DNA, 25 bp, probe
gcgattgtgacagagaggctgccca

SEQ ID NO: 201556 - DNA, 25 bp, probe
gcgactgatagattggggtctggca

SEQ ID NO: 201557 - DNA, 25 bp, probe
gcgactgagaaccgtgacatcagcg

SEQ ID NO: 201558 - DNA, 25 bp, probe
gcggctgaaagccggcagcacgaac

SEQ ID NO: 201559 - DNA, 25 bp, probe
gcggctgaatttcggcacctgcaat

SEQ ID NO: 201560 - DNA, 25 bp, probe
gcgggcagtatctgcagaactccac

SEQ ID NO: 201561 - DNA, 25 bp, probe
gcgaagtgtacttggtgaccaccct

SEQ ID NO: 201562 - DNA, 25 bp, probe
gcgaactgtagagtgcagggacccc

SEQ ID NO: 201563 - DNA, 25 bp, probe
gcgacaagtagttcatgagtattcc

SEQ ID NO: 201564 - DNA, 25 bp, probe
gcgtgaagtacattcagggactcca

SEQ ID NO: 201565 - DNA, 25 bp, probe
gctgggtgccaaaagtgggccaaat

SEQ ID NO: 201566 - DNA, 25 bp, probe
gctgggcatccgcaccgtagccatc

SEQ ID NO: 201567 - DNA, 25 bp, probe
gcgggcaacgagaagctaaccatgc

SEQ ID NO: 201568 - DNA, 25 bp, probe
gcggtagaggaaggctatcgtctgc

SEQ ID NO: 201569 - DNA, 25 bp, probe
gcggtgccagtctagagcttctgga

SEQ ID NO: 201570 - DNA, 25 bp, probe
gcgtgtctgcagtcaaggattcttc

SEQ ID NO: 201571 - DNA, 25 bp, probe
gcgtgtctgcagtcaaggattcttc

SEQ ID NO: 201572 - DNA, 25 bp, probe
gcgtccgcatgctaatcgcttttta

SEQ ID NO: 201573 - DNA, 25 bp, probe
gcgtccgggaatttaattctattat

SEQ ID NO: 201574 - DNA, 25 bp, probe
gcgtccgggaatttaattctattat

SEQ ID NO: 201575 - DNA, 25 bp, probe
gcggccaggacaacctgaattctat

SEQ ID NO: 201576 - DNA, 25 bp, probe
gcggccaggacaacctgaattctat

SEQ ID NO: 201577 - DNA, 25 bp, probe
gcggctcaggcactgagactaccgc

SEQ ID NO: 201578 - DNA, 25 bp, probe
gcgtgctgataatggatcaactcct

SEQ ID NO: 201579 - DNA, 25 bp, probe
gcgtgctgataatggatcaactcct

SEQ ID NO: 201580 - DNA, 25 bp, probe
gctgtcagaaaaagatccggatcta

SEQ ID NO: 201581 - DNA, 25 bp, probe
gctgtcgattaagaccggagcttgt

SEQ ID NO: 201582 - DNA, 25 bp, probe
gctgtggtatactcactgggttttc

SEQ ID NO: 201583 - DNA, 25 bp, probe
gctggcgaagaagtcctggtttggg

SEQ ID NO: 201584 - DNA, 25 bp, probe
gctggcgaagaagtcctggtttggg

SEQ ID NO: 201585 - DNA, 25 bp, probe
gctggctacaactaccaagcttttg

SEQ ID NO: 201586 - DNA, 25 bp, probe
gctggcacaaactcttggtttcttc

SEQ ID NO: 201587 - DNA, 25 bp, probe
gctggataccacctggaggttttcc

SEQ ID NO: 201588 - DNA, 25 bp, probe
gctggatcccctggtgtattatttt

SEQ ID NO: 201589 - DNA, 25 bp, probe
gcgaggtggcctacatgtttatttt

SEQ ID NO: 201590 - DNA, 25 bp, probe
gcggaattccatgcagtgtcttgct

SEQ ID NO: 201591 - DNA, 25 bp, probe
gcgggatctccttagagaattgatg

SEQ ID NO: 201592 - DNA, 25 bp, probe
gcgtggtctacgtcatagaattctc

SEQ ID NO: 201593 - DNA, 25 bp, probe
gctcatggacttcccaacagattcc

SEQ ID NO: 201594 - DNA, 25 bp, probe
gcgatgatcactttaaacaattccg

SEQ ID NO: 201595 - DNA, 25 bp, probe
gcgactcctgatgaagcacaactcc

SEQ ID NO: 201596 - DNA, 25 bp, probe
gcgactcctgatgaagcacaactcc

SEQ ID NO: 201597 - DNA, 25 bp, probe
gcgacatccgtgctgatcacaatac

SEQ ID NO: 201598 - DNA, 25 bp, probe
gcggatatcggggacatccatagcc

SEQ ID NO: 201599 - DNA, 25 bp, probe
gcggaaggggctagactcaagccgg

SEQ ID NO: 201600 - DNA, 25 bp, probe
gctgaagaggggtttctaacctggg

SEQ ID NO: 201601 - DNA, 25 bp, probe
gctctaatgggtttttttgccttgg

SEQ ID NO: 201602 - DNA, 25 bp, probe
gctggaaggggactattttcgtcag

SEQ ID NO: 201603 - DNA, 25 bp, probe
gcgagggggagatttctttagacaa

SEQ ID NO: 201604 - DNA, 25 bp, probe
gcgagtggtcaaggatttttataaa

SEQ ID NO: 201605 - DNA, 25 bp, probe
gcgagatgacatgactgtctgtgtt

SEQ ID NO: 201606 - DNA, 25 bp, probe
gcgacagcagcaggagcgtcatggc

SEQ ID NO: 201607 - DNA, 25 bp, probe
gcgtcagcactgcacaggatgtcat

SEQ ID NO: 201608 - DNA, 25 bp, probe
gcgatacatcacgcatgagagtgac

SEQ ID NO: 201609 - DNA, 25 bp, probe
gcgtccagcactgatgtgtctacct

SEQ ID NO: 201610 - DNA, 25 bp, probe
gcgtcctggatgatttctacacagc

SEQ ID NO: 201611 - DNA, 25 bp, probe
gcgtcctggatgatttctacacagc

SEQ ID NO: 201612 - DNA, 25 bp, probe
gcgtggtgtatgataacaacagcag

SEQ ID NO: 201613 - DNA, 25 bp, probe
gcgtgcgagtggactaacaacagct

SEQ ID NO: 201614 - DNA, 25 bp, probe
gcgtggtcaggttacaaatggctag

SEQ ID NO: 201615 - DNA, 25 bp, probe
gcgaggtgaggttgtcatgtcagcg

SEQ ID NO: 201616 - DNA, 25 bp, probe
gcgaggtgaggttgtcatgtcagcg

SEQ ID NO: 201617 - DNA, 25 bp, probe
gcgaggtggagctctcagagagcga

SEQ ID NO: 201618 - DNA, 25 bp, probe
gcgaggtgagcttcctcaattgctc

SEQ ID NO: 201619 - DNA, 25 bp, probe
gcgagggcaggacatcaatacactg

SEQ ID NO: 201620 - DNA, 25 bp, probe
gcggttgcagactgctcaaaccatt

SEQ ID NO: 201621 - DNA, 25 bp, probe
gcggttgagcctggcagagtaccat

SEQ ID NO: 201622 - DNA, 25 bp, probe
gcggttgagcctggcagagtaccat

SEQ ID NO: 201623 - DNA, 25 bp, probe
gcggcactgacgggcaagtgacttc

SEQ ID NO: 201624 - DNA, 25 bp, probe
gcgagcactacctcagaatgacgac

SEQ ID NO: 201625 - DNA, 25 bp, probe
gcggcacacagcggagagcgaacgc

SEQ ID NO: 201626 - DNA, 25 bp, probe
gcgtgacactggtgatcgcatacat

SEQ ID NO: 201627 - DNA, 25 bp, probe
gcgtgacactggtgatcgcatacat

SEQ ID NO: 201628 - DNA, 25 bp, probe
gcgagatagggcagatcactctcaa

SEQ ID NO: 201629 - DNA, 25 bp, probe
gcgatgaaggtggcaaagtgctgct

SEQ ID NO: 201630 - DNA, 25 bp, probe
gcgggcagtgcggaagatgctgctg

SEQ ID NO: 201631 - DNA, 25 bp, probe
gcgaggagtcagaaagcagtgggga

SEQ ID NO: 201632 - DNA, 25 bp, probe
gcgaggagccataatgtgcatatgt

SEQ ID NO: 201633 - DNA, 25 bp, probe
gcgtggcagccatgctggcctgtgc

SEQ ID NO: 201634 - DNA, 25 bp, probe
gcgaggcaggcatgagtgcctggct

SEQ ID NO: 201635 - DNA, 25 bp, probe
gcgaggccagcctagaggtggcttc

SEQ ID NO: 201636 - DNA, 25 bp, probe
gcgaggcaaggctacaggtgcatca

SEQ ID NO: 201637 - DNA, 25 bp, probe
gcgatggacagactcacaacctgaa

SEQ ID NO: 201638 - DNA, 25 bp, probe
gcggcagacatacaacacctgtact

SEQ ID NO: 201639 - DNA, 25 bp, probe
gcgagaacatattaaactgcttatt

SEQ ID NO: 201640 - DNA, 25 bp, probe
gcgaggagctgcgcaaactgttggt

SEQ ID NO: 201641 - DNA, 25 bp, probe
gcgtggagctggaggactggctttg

SEQ ID NO: 201642 - DNA, 25 bp, probe
gcgtgtgacagtaagctaacctttg

SEQ ID NO: 201643 - DNA, 25 bp, probe
gcggcatgaagctccaggaacttta

SEQ ID NO: 201644 - DNA, 25 bp, probe
gctgaggaacaacctagaagctttg

SEQ ID NO: 201645 - DNA, 25 bp, probe
gcgtggcaagggaatagcgacttag

SEQ ID NO: 201646 - DNA, 25 bp, probe
gctgtggcaacggacaaaactctgg

SEQ ID NO: 201647 - DNA, 25 bp, probe
gcgatacgaccatcaacagagactg

SEQ ID NO: 201648 - DNA, 25 bp, probe
gcgatacgaccatcaacagagactg

SEQ ID NO: 201649 - DNA, 25 bp, probe
gcgttatcacctgcaacagaacgtc

SEQ ID NO: 201650 - DNA, 25 bp, probe
gcgtgttacttacaaagaggtgctc

SEQ ID NO: 201651 - DNA, 25 bp, probe
gcgtgttacttacaaagaggtgctc

SEQ ID NO: 201652 - DNA, 25 bp, probe
gctggttaaattctatggagtgtgt

SEQ ID NO: 201653 - DNA, 25 bp, probe
gctggttaaattctatggagtgtgt

SEQ ID NO: 201654 - DNA, 25 bp, probe
gcgtgtttgactacagtgagtactg

SEQ ID NO: 201655 - DNA, 25 bp, probe
gcggtctcagaggtcagggatggtc

SEQ ID NO: 201656 - DNA, 25 bp, probe
gctggagtcaagatagcggggccct

SEQ ID NO: 201657 - DNA, 25 bp, probe
gcgagaccaaggaagccaggccgcc

SEQ ID NO: 201658 - DNA, 25 bp, probe
gctgagaaaaacccaagaccgctcg

SEQ ID NO: 201659 - DNA, 25 bp, probe
gctggaaacaacttggagaccacct

SEQ ID NO: 201660 - DNA, 25 bp, probe
gctggtcttaactttaggtaactct

SEQ ID NO: 201661 - DNA, 25 bp, probe
gctggtcttaactttaggtaactct

SEQ ID NO: 201662 - DNA, 25 bp, probe
gctggcgtctaagtgtttgggaagc

SEQ ID NO: 201663 - DNA, 25 bp, probe
gctggggccacaactttggtgaaga

SEQ ID NO: 201664 - DNA, 25 bp, probe
gctggggccacaactttggtgaaga

SEQ ID NO: 201665 - DNA, 25 bp, probe
gctggatgcagtgaaccttgagaaa

SEQ ID NO: 201666 - DNA, 25 bp, probe
gcggctgcagatgaaccagacgctg

SEQ ID NO: 201667 - DNA, 25 bp, probe
gcgggagtccaagatcatccatgtg

SEQ ID NO: 201668 - DNA, 25 bp, probe
gcgggaggtgaaagtctccgtggtg

SEQ ID NO: 201669 - DNA, 25 bp, probe
gcgggaggtgaaagtctccgtggtg

SEQ ID NO: 201670 - DNA, 25 bp, probe
gcgagctgaggtagtcgtccaggtg

SEQ ID NO: 201671 - DNA, 25 bp, probe
gcgggggttgtcataaactgtaaca

SEQ ID NO: 201672 - DNA, 25 bp, probe
gcgtggggttataaaaactatcgag

SEQ ID NO: 201673 - DNA, 25 bp, probe
gcgtggggttataaaaactatcgag

SEQ ID NO: 201674 - DNA, 25 bp, probe
gcggatggttttccaaaactccaga

SEQ ID NO: 201675 - DNA, 25 bp, probe
gcggtggttcattcctttcagccat

SEQ ID NO: 201676 - DNA, 25 bp, probe
gcggctgtttcatctttatcatcag

SEQ ID NO: 201677 - DNA, 25 bp, probe
tctggctttgggaactaactcggtc

SEQ ID NO: 201678 - DNA, 25 bp, probe
gctcctttgggacccagatcatcgg

SEQ ID NO: 201679 - DNA, 25 bp, probe
gctggctttgtttgacggaacgtgt

SEQ ID NO: 201680 - DNA, 25 bp, probe
gctggctttgtttgacggaacgtgt

SEQ ID NO: 201681 - DNA, 25 bp, probe
gcggatttatgtttcagtgtactgg

SEQ ID NO: 201682 - DNA, 25 bp, probe
gctggcagtcttgaaattgtcactc

SEQ ID NO: 201683 - DNA, 25 bp, probe
gctgggtggttaaagttcaccatag

SEQ ID NO: 201684 - DNA, 25 bp, probe
gctggttttctggatggttcccaga

SEQ ID NO: 201685 - DNA, 25 bp, probe
gctggtttacgccgctttctgacac

SEQ ID NO: 201686 - DNA, 25 bp, probe
gctggttaacgtgtttgctgagcag

SEQ ID NO: 201687 - DNA, 25 bp, probe
gctggttacacctttgggcaagata

SEQ ID NO: 201688 - DNA, 25 bp, probe
gcgttaacagcctttggagtcgcaa

SEQ ID NO: 201689 - DNA, 25 bp, probe
gcgtgacgagatccttcgtggggaa

SEQ ID NO: 201690 - DNA, 25 bp, probe
gcgtgacgagatccttcgtggggaa

SEQ ID NO: 201691 - DNA, 25 bp, probe
gcgagaagatggctctcttggaaaa

SEQ ID NO: 201692 - DNA, 25 bp, probe
gctggagatgatcttcgtcaggata

SEQ ID NO: 201693 - DNA, 25 bp, probe
gctggagatgatcttcgtcaggata

SEQ ID NO: 201694 - DNA, 25 bp, probe
gcggatgatgtacttctctcagtac

SEQ ID NO: 201695 - DNA, 25 bp, probe
gcgaggctgcaaatttcatcatgaa

SEQ ID NO: 201696 - DNA, 25 bp, probe
gcgaggctgcaaatttcatcatgaa

SEQ ID NO: 201697 - DNA, 25 bp, probe
gcgtagaaatgatttgcatgatggc

SEQ ID NO: 201698 - DNA, 25 bp, probe
gcggccaacatgatggctgggctga

SEQ ID NO: 201699 - DNA, 25 bp, probe
gcgggccacaagcacgatgagtgaa

SEQ ID NO: 201700 - DNA, 25 bp, probe
gcgggtcgaccgggagaggaaggtg

SEQ ID NO: 201701 - DNA, 25 bp, probe
gcgggacgagaccctacaggagagg

SEQ ID NO: 201702 - DNA, 25 bp, probe
gcgggacgagaccctacaggagagg

SEQ ID NO: 201703 - DNA, 25 bp, probe
gcgggagtggagtggaagaagaggg

SEQ ID NO: 201704 - DNA, 25 bp, probe
gcgggagtggagtggaagaagaggg

SEQ ID NO: 201705 - DNA, 25 bp, probe
gcgggagtggagtggaagaagaggg

SEQ ID NO: 201706 - DNA, 25 bp, probe
gcgatgaggggactttagaagaggt

SEQ ID NO: 201707 - DNA, 25 bp, probe
gcggggctggagatcatcagaaaag

SEQ ID NO: 201708 - DNA, 25 bp, probe
gcgggagctggagcttcaggaagct

SEQ ID NO: 201709 - DNA, 25 bp, probe
gcgagaacttcaactaagtgtactc

SEQ ID NO: 201710 - DNA, 25 bp, probe
gcggaacttgcaatcctcagtttgt

SEQ ID NO: 201711 - DNA, 25 bp, probe
gcgtacatgtagatttcaattgtct

SEQ ID NO: 201712 - DNA, 25 bp, probe
gcgtcgctggatttattcacttgtg

SEQ ID NO: 201713 - DNA, 25 bp, probe
gcgtgcactaacttcatgatgaccc

SEQ ID NO: 201714 - DNA, 25 bp, probe
gcgtgcattatcaacatcatattca

SEQ ID NO: 201715 - DNA, 25 bp, probe
gcgtgcattcaaacgcactgctctg

SEQ ID NO: 201716 - DNA, 25 bp, probe
gcgtctacagcaacgagctgcaggt

SEQ ID NO: 201717 - DNA, 25 bp, probe
gcgtcagcggcaagctgtggaggat

SEQ ID NO: 201718 - DNA, 25 bp, probe
gcgtctcagacatgttgagaatcat

SEQ ID NO: 201719 - DNA, 25 bp, probe
gcgtctcagacatgttgagaatcat

SEQ ID NO: 201720 - DNA, 25 bp, probe
gcggtcgacatttcagaaatcaagc

SEQ ID NO: 201721 - DNA, 25 bp, probe
gcggtcgacatttcagaaatcaagc

SEQ ID NO: 201722 - DNA, 25 bp, probe
gcgtcaggaatttcagccaatagga

SEQ ID NO: 201723 - DNA, 25 bp, probe
gcggcggcaatcgtgcgcaatgaag

SEQ ID NO: 201724 - DNA, 25 bp, probe
gcgatgttccaggggcagagaaagg

SEQ ID NO: 201725 - DNA, 25 bp, probe
gcgatgtgtccaatcggagacaaaa

SEQ ID NO: 201726 - DNA, 25 bp, probe
gcgaggtacaagctgagatcaagaa

SEQ ID NO: 201727 - DNA, 25 bp, probe
gcgagttcattacagagctgcaaga

SEQ ID NO: 201728 - DNA, 25 bp, probe
gctggcttttgacagaggcagtaaa

SEQ ID NO: 201729 - DNA, 25 bp, probe
gaggctaaatgagaacgaacaaaaa

SEQ ID NO: 201730 - DNA, 25 bp, probe
gcggatcaagaagacactacaaaaa

SEQ ID NO: 201731 - DNA, 25 bp, probe
gcggccaagataggaccttgggcca

SEQ ID NO: 201732 - DNA, 25 bp, probe
gcgtgctaagtcagaaaaggtgcga

SEQ ID NO: 201733 - DNA, 25 bp, probe
gcggctgaagaagaaaggtggcgag

SEQ ID NO: 201734 - DNA, 25 bp, probe
gcgggagcaatagcgagggtcgtga

SEQ ID NO: 201735 - DNA, 25 bp, probe
gcgagggagaactaatgccgacgtg

SEQ ID NO: 201736 - DNA, 25 bp, probe
gcgagggagaactaatgccgacgtg

SEQ ID NO: 201737 - DNA, 25 bp, probe
gctgacggaaattgtcacccacggc

SEQ ID NO: 201738 - DNA, 25 bp, probe
gctgacggaaattgtcacccacggc

SEQ ID NO: 201739 - DNA, 25 bp, probe
gctgtgtaacaatgtggcccacggc

SEQ ID NO: 201740 - DNA, 25 bp, probe
gctggattactgtgcttccaacgtc

SEQ ID NO: 201741 - DNA, 25 bp, probe
gctggattactgtgcttccaacgtc

SEQ ID NO: 201742 - DNA, 25 bp, probe
gctggagaaggccgctttaacttct

SEQ ID NO: 201743 - DNA, 25 bp, probe
gctggaaatggcttctttaaactgt

SEQ ID NO: 201744 - DNA, 25 bp, probe
gctggtaatgcaacctttgaaactt

SEQ ID NO: 201745 - DNA, 25 bp, probe
gctggctacaattcccttgaatcag

SEQ ID NO: 201746 - DNA, 25 bp, probe
gcgggcacacagtgcaatgtgaaag

SEQ ID NO: 201747 - DNA, 25 bp, probe
gcgggcacacagtgcaatgtgaaag

SEQ ID NO: 201748 - DNA, 25 bp, probe
gcgatgagcaacctgaaagtgagag

SEQ ID NO: 201749 - DNA, 25 bp, probe
gcgtgatatgcacctgcaacggaga

SEQ ID NO: 201750 - DNA, 25 bp, probe
gcgtatgtgatgactgtgacggggc

SEQ ID NO: 201751 - DNA, 25 bp, probe
gcgtatgggacacaagggagctctg

SEQ ID NO: 201752 - DNA, 25 bp, probe
gcgtgatcgtgatggaagaggacct

SEQ ID NO: 201753 - DNA, 25 bp, probe
gcgtgatcgtgatggaagaggacct

SEQ ID NO: 201754 - DNA, 25 bp, probe
gcgtgagctatgacagtgaaccgaa

SEQ ID NO: 201755 - DNA, 25 bp, probe
gcgtgtgctcacgtgtgtatgcacg

SEQ ID NO: 201756 - DNA, 25 bp, probe
gcgtgcacatatgggtgctggcaga

SEQ ID NO: 201757 - DNA, 25 bp, probe
gcgtgccaatcaacatgctggtgaa

SEQ ID NO: 201758 - DNA, 25 bp, probe
gcgatgcactactcggtgtgaatga

SEQ ID NO: 201759 - DNA, 25 bp, probe
gcgatcctgatggtccgggagatga

SEQ ID NO: 201760 - DNA, 25 bp, probe
gcgatgtctggagctttggagtgtt

SEQ ID NO: 201761 - DNA, 25 bp, probe
gcgatgtctggagctatggggtcac

SEQ ID NO: 201762 - DNA, 25 bp, probe
gcgatgtctggagctatggggtcac

SEQ ID NO: 201763 - DNA, 25 bp, probe
gcgtctctgagtgtagcagggccag

SEQ ID NO: 201764 - DNA, 25 bp, probe
gcgtgctgcgggatcagcaacgcta

SEQ ID NO: 201765 - DNA, 25 bp, probe
gcggcagcagggatgagcccttgga

SEQ ID NO: 201766 - DNA, 25 bp, probe
gcggcacaaggatgctcgccggaag

SEQ ID NO: 201767 - DNA, 25 bp, probe
gcgatcaggagggagctagcactgg

SEQ ID NO: 201768 - DNA, 25 bp, probe
gcgtgcagagctgtagtatcagcta

SEQ ID NO: 201769 - DNA, 25 bp, probe
gcggcggcagagtggaagtacgttg

SEQ ID NO: 201770 - DNA, 25 bp, probe
gcggcggcagagtggaagtacgttg

SEQ ID NO: 201771 - DNA, 25 bp, probe
gctccggcgggtggagactttggga

SEQ ID NO: 201772 - DNA, 25 bp, probe
gctcgggcaggggagaacattccgg

SEQ ID NO: 201773 - DNA, 25 bp, probe
gctgcggggggtgaaacacctgcac

SEQ ID NO: 201774 - DNA, 25 bp, probe
gctggttccggaagaaacatcctcc

SEQ ID NO: 201775 - DNA, 25 bp, probe
gctggttccggaagaaacatcctcc

SEQ ID NO: 201776 - DNA, 25 bp, probe
gctggattacgcaacagtaaatcct

SEQ ID NO: 201777 - DNA, 25 bp, probe
gcggggccagaagtgatgagaacct

SEQ ID NO: 201778 - DNA, 25 bp, probe
gcggggccagaagtgatgagaacct

SEQ ID NO: 201779 - DNA, 25 bp, probe
gcgggagctcaaagggatgtgggcg

SEQ ID NO: 201780 - DNA, 25 bp, probe
gctgtatgccatgaaggtattgacg

SEQ ID NO: 201781 - DNA, 25 bp, probe
gcgatatcctctgacgtatcatctt

SEQ ID NO: 201782 - DNA, 25 bp, probe
gctgaatcctctaatctatagcctg

SEQ ID NO: 201783 - DNA, 25 bp, probe
gcgattcatcatatatcattggatt

SEQ ID NO: 201784 - DNA, 25 bp, probe
gctgttctaactacagtgctcaata

SEQ ID NO: 201785 - DNA, 25 bp, probe
gcgtcccacctgacagtacataaag

SEQ ID NO: 201786 - DNA, 25 bp, probe
gcgtctcccctgtcaatgagaatca

SEQ ID NO: 201787 - DNA, 25 bp, probe
gcgtctcccctgtcaatgagaatca

SEQ ID NO: 201788 - DNA, 25 bp, probe
gctgtttgcctttcgtgaacacatt

SEQ ID NO: 201789 - DNA, 25 bp, probe
gctgtttgcctttcgtgaacacatt

SEQ ID NO: 201790 - DNA, 25 bp, probe
gcgtgttgcactgcatagtgaacct

SEQ ID NO: 201791 - DNA, 25 bp, probe
gcgtgtgtgacactgatgagtttca

SEQ ID NO: 201792 - DNA, 25 bp, probe
gcgtgtgtgacactgatgagtttca

SEQ ID NO: 201793 - DNA, 25 bp, probe
gcggggatatttttgtgtctacacc

SEQ ID NO: 201794 - DNA, 25 bp, probe
gcggcggaatcacaggctgattacc

SEQ ID NO: 201795 - DNA, 25 bp, probe
gcggagcctgaacagcagcagttcc

SEQ ID NO: 201796 - DNA, 25 bp, probe
gcggagcctgaacagcagcagttcc

SEQ ID NO: 201797 - DNA, 25 bp, probe
gcggagcatctgaagttgcagtctt

SEQ ID NO: 201798 - DNA, 25 bp, probe
gcgtgatgcaggggtgtgaggccca

SEQ ID NO: 201799 - DNA, 25 bp, probe
gcgtgagatccagatggactcccca

SEQ ID NO: 201800 - DNA, 25 bp, probe
gcgtgagatccagatggactcccca

SEQ ID NO: 201801 - DNA, 25 bp, probe
gcgtggcaccatggcaggattccac

SEQ ID NO: 201802 - DNA, 25 bp, probe
gcgtggatatctgtgtatatgcccg

SEQ ID NO: 201803 - DNA, 25 bp, probe
gctggtgtactactttagcgccgag

SEQ ID NO: 201804 - DNA, 25 bp, probe
gctggttcgaaaattaggccgaggt

SEQ ID NO: 201805 - DNA, 25 bp, probe
gctggttcgaaaattaggccgaggt

SEQ ID NO: 201806 - DNA, 25 bp, probe
gctggtccgaggagaacccaatgtt

SEQ ID NO: 201807 - DNA, 25 bp, probe
ggtggcattgggagggtacgatttg

SEQ ID NO: 201808 - DNA, 25 bp, probe
gcggttatgggatgggtcactgcct

SEQ ID NO: 201809 - DNA, 25 bp, probe
gcggtagactggtgggcacttggag

SEQ ID NO: 201810 - DNA, 25 bp, probe
gctaataattggtgggcttgctgtg

SEQ ID NO: 201811 - DNA, 25 bp, probe
gctaaattctagtgacccatgtgtc

SEQ ID NO: 201812 - DNA, 25 bp, probe
gctgaaaacctatgacaccagcttc

SEQ ID NO: 201813 - DNA, 25 bp, probe
gctaaaagccttggtcactacttta

SEQ ID NO: 201814 - DNA, 25 bp, probe
gctcgagagggctggtccttattta

SEQ ID NO: 201815 - DNA, 25 bp, probe
gctctagggaagcagtgcgtgtgaa

SEQ ID NO: 201816 - DNA, 25 bp, probe
gctgtcggaaagcgacgtggtgaag

SEQ ID NO: 201817 - DNA, 25 bp, probe
gcgtcgaggaccagattgtcgcatc

SEQ ID NO: 201818 - DNA, 25 bp, probe
gcggtgggaagctggtgctcagctc

SEQ ID NO: 201819 - DNA, 25 bp, probe
gcgggtggatcacttgaggtcagga

SEQ ID NO: 201820 - DNA, 25 bp, probe
gcggtgtgtcatcctgtgaggactg

SEQ ID NO: 201821 - DNA, 25 bp, probe
gcgtattgcctcagtggaggcgctc

SEQ ID NO: 201822 - DNA, 25 bp, probe
gcgtattgcctcagtggaggcgctc

SEQ ID NO: 201823 - DNA, 25 bp, probe
gcgtatcagcgtaagaggtggctgt

SEQ ID NO: 201824 - DNA, 25 bp, probe
gcggatgcggtatgaaggcgtggtg

SEQ ID NO: 201825 - DNA, 25 bp, probe
gcgggcgttggaagaactggagtct

SEQ ID NO: 201826 - DNA, 25 bp, probe
gcgggtggtgggccaaggaggagct

SEQ ID NO: 201827 - DNA, 25 bp, probe
gcgtgggaggggtagtcgaagagct

SEQ ID NO: 201828 - DNA, 25 bp, probe
gcgggcaaggccgaagtcagcgagt

SEQ ID NO: 201829 - DNA, 25 bp, probe
gcgggacgtgcttgaagccatcaag

SEQ ID NO: 201830 - DNA, 25 bp, probe
gctgggagttctagaaccacttcct

SEQ ID NO: 201831 - DNA, 25 bp, probe
gcggtagagttccaaaccattcact

SEQ ID NO: 201832 - DNA, 25 bp, probe
gctggtgggttgcaagaaatttctc

SEQ ID NO: 201833 - DNA, 25 bp, probe
gctggtgggagttttaaaagttcat

SEQ ID NO: 201834 - DNA, 25 bp, probe
gcgggggagtcatttaatacttcat

SEQ ID NO: 201835 - DNA, 25 bp, probe
gcggaggggtggaaaatcagttgtt

SEQ ID NO: 201836 - DNA, 25 bp, probe
gcggagggtggagtaactgcaattc

SEQ ID NO: 201837 - DNA, 25 bp, probe
gcggagggtggagtaactgcaattc

SEQ ID NO: 201838 - DNA, 25 bp, probe
gcggaggagccggttgactattacg

SEQ ID NO: 201839 - DNA, 25 bp, probe
gcggcaggatctgaactcgctttac

SEQ ID NO: 201840 - DNA, 25 bp, probe
gcggtggacaggtatatggctatta

SEQ ID NO: 201841 - DNA, 25 bp, probe
gcgtgggcagaggaatgtgggctat

SEQ ID NO: 201842 - DNA, 25 bp, probe
gcgtggtgcggcaatgctgggagaa

SEQ ID NO: 201843 - DNA, 25 bp, probe
gcggctgtgggaggctgtgaagagg

SEQ ID NO: 201844 - DNA, 25 bp, probe
gcggatggggaaatggcagaagcca

SEQ ID NO: 201845 - DNA, 25 bp, probe
gctagaacgggaacgaagacgcaca

SEQ ID NO: 201846 - DNA, 25 bp, probe
gcgggggccgaaggatagcaagacc

SEQ ID NO: 201847 - DNA, 25 bp, probe
gcgggggccgaaggatagcaagacc

SEQ ID NO: 201848 - DNA, 25 bp, probe
gcggtgggaaaaggtgtcaggcacc

SEQ ID NO: 201849 - DNA, 25 bp, probe
gcggaggaagtagctggacaggccc

SEQ ID NO: 201850 - DNA, 25 bp, probe
gctggaagcaggagccggacaaaag

SEQ ID NO: 201851 - DNA, 25 bp, probe
gctcgcagaaggacgtcctaaacaa

SEQ ID NO: 201852 - DNA, 25 bp, probe
gctggcaactgacttgtcattaaaa

SEQ ID NO: 201853 - DNA, 25 bp, probe
gcgtcaagcagactttctcttgcct

SEQ ID NO: 201854 - DNA, 25 bp, probe
gcgtcaagcagactttctcttgcct

SEQ ID NO: 201855 - DNA, 25 bp, probe
gcggcaaggaattgtttggtcagtt

SEQ ID NO: 201856 - DNA, 25 bp, probe
gcggcaaggaattgtttggtcagtt

SEQ ID NO: 201857 - DNA, 25 bp, probe
gcggccattgagagctttgtctcag

SEQ ID NO: 201858 - DNA, 25 bp, probe
gcggccattgagagctttgtctcag

SEQ ID NO: 201859 - DNA, 25 bp, probe
gcggagttggtacttttgctataca

SEQ ID NO: 201860 - DNA, 25 bp, probe
gcgggatctcgtatctttaaaaagc

SEQ ID NO: 201861 - DNA, 25 bp, probe
gcggaactgcctagttggggaaaat

SEQ ID NO: 201862 - DNA, 25 bp, probe
gcagacaaggcccgttacgaaagag

SEQ ID NO: 201863 - DNA, 25 bp, probe
gcagaaggggagcttacccagggcc

SEQ ID NO: 201864 - DNA, 25 bp, probe
gcaggagaagggctttctccacatg

SEQ ID NO: 201865 - DNA, 25 bp, probe
gcaggagaagggctttctccacatg

SEQ ID NO: 201866 - DNA, 25 bp, probe
gcggaggtggtggcatctactccgt

SEQ ID NO: 201867 - DNA, 25 bp, probe
gcggtgagtggggatcgtgccgctg

SEQ ID NO: 201868 - DNA, 25 bp, probe
gcggtgcattggagacgtccgttgt

SEQ ID NO: 201869 - DNA, 25 bp, probe
gcggtgcattggagacgtccgttgt

SEQ ID NO: 201870 - DNA, 25 bp, probe
gctgggcattggtgacgtccaggtt

SEQ ID NO: 201871 - DNA, 25 bp, probe
gcgtttgaggtagttgtgcctgacc

SEQ ID NO: 201872 - DNA, 25 bp, probe
gctgggtacgtgactatccctaata

SEQ ID NO: 201873 - DNA, 25 bp, probe
gctgggtacgtgactatccctaata

SEQ ID NO: 201874 - DNA, 25 bp, probe
gcggtctagtttaatcccatgttga

SEQ ID NO: 201875 - DNA, 25 bp, probe
gcggcttatgttctgaatttgttta

SEQ ID NO: 201876 - DNA, 25 bp, probe
gcggcttatgttctgaatttgttta

SEQ ID NO: 201877 - DNA, 25 bp, probe
gcttattggttttggttttgactca

SEQ ID NO: 201878 - DNA, 25 bp, probe
gctggacggtataaggccttttcca

SEQ ID NO: 201879 - DNA, 25 bp, probe
gcggtttccaaggtgcacattttcc

SEQ ID NO: 201880 - DNA, 25 bp, probe
gcagttgttccagggagcttctacc

SEQ ID NO: 201881 - DNA, 25 bp, probe
gcgtatgtcatcaacgggggtgaca

SEQ ID NO: 201882 - DNA, 25 bp, probe
gcgtcatgttcaaggagccggtgga

SEQ ID NO: 201883 - DNA, 25 bp, probe
gcgtatccagaaggagcaccgtgtg

SEQ ID NO: 201884 - DNA, 25 bp, probe
gcgtcccgaaggaagctcatggagt

SEQ ID NO: 201885 - DNA, 25 bp, probe
gcgtcctgcagaatgggagctaccg

SEQ ID NO: 201886 - DNA, 25 bp, probe
gcgtcctgagacagcgaggacctgc

SEQ ID NO: 201887 - DNA, 25 bp, probe
gcgtccgagagtgctcggcaggact

SEQ ID NO: 201888 - DNA, 25 bp, probe
gcgtcctcaaggcatctggagggct

SEQ ID NO: 201889 - DNA, 25 bp, probe
gcgtcctcaaggcatctggagggct

SEQ ID NO: 201890 - DNA, 25 bp, probe
gcgtgccccaaggatgagggggttg

SEQ ID NO: 201891 - DNA, 25 bp, probe
gcgtgccccaaggatgagggggttg

SEQ ID NO: 201892 - DNA, 25 bp, probe
gcggtatccagaggtgagggaggcc

SEQ ID NO: 201893 - DNA, 25 bp, probe
gcggtacctcgccgagggtgagacg

SEQ ID NO: 201894 - DNA, 25 bp, probe
gcgggagatccgcaaggtgctggac

SEQ ID NO: 201895 - DNA, 25 bp, probe
gcgggagatccgcaaggtgctggac

SEQ ID NO: 201896 - DNA, 25 bp, probe
gcgggaagactgccaatatgtctgt

SEQ ID NO: 201897 - DNA, 25 bp, probe
gcgggacagagtgagaccctgtctg

SEQ ID NO: 201898 - DNA, 25 bp, probe
gcggcaaggaggagaccctggtggg

SEQ ID NO: 201899 - DNA, 25 bp, probe
gcggcaaggaggagaccctggtggg

SEQ ID NO: 201900 - DNA, 25 bp, probe
gctggaaggggtccagcctcgttgg

SEQ ID NO: 201901 - DNA, 25 bp, probe
gctggacgagggcagtgcctcggtg

SEQ ID NO: 201902 - DNA, 25 bp, probe
gcggcacgagggaaattgagcggag

SEQ ID NO: 201903 - DNA, 25 bp, probe
gcggaccgtggtgattgtggtgagc

SEQ ID NO: 201904 - DNA, 25 bp, probe
gttcccgttgcgcagttgaggacac

SEQ ID NO: 201905 - DNA, 25 bp, probe
gagcttccgggccgagtacaaggcc

SEQ ID NO: 201906 - DNA, 25 bp, probe
gcggtcacgggatggatagccggcc

SEQ ID NO: 201907 - DNA, 25 bp, probe
gcgtgtcctgggtggagatgaagaa

SEQ ID NO: 201908 - DNA, 25 bp, probe
gcgtcccagggaccaagagaaagaa

SEQ ID NO: 201909 - DNA, 25 bp, probe
gctgaccacgccgaatccggaagaa

SEQ ID NO: 201910 - DNA, 25 bp, probe
gcggctctcgccaaaaggaaggaga

SEQ ID NO: 201911 - DNA, 25 bp, probe
gcgtgccgagccagcaagaggaagg

SEQ ID NO: 201912 - DNA, 25 bp, probe
gctggcctggaccgcaatgggaggc

SEQ ID NO: 201913 - DNA, 25 bp, probe
gctgacttggacccaaactgggcga

SEQ ID NO: 201914 - DNA, 25 bp, probe
gctgaattgtgatcctacctttgaa

SEQ ID NO: 201915 - DNA, 25 bp, probe
gctgcaacattgtgaccatagttta

SEQ ID NO: 201916 - DNA, 25 bp, probe
gctggaatggttgtatatgctctga

SEQ ID NO: 201917 - DNA, 25 bp, probe
gctgtggaggttgatattattaata

SEQ ID NO: 201918 - DNA, 25 bp, probe
gctgtagaagtgagtttgtaaatat

SEQ ID NO: 201919 - DNA, 25 bp, probe
gctgataatttgaccgtttataagt

SEQ ID NO: 201920 - DNA, 25 bp, probe
gctgaactttctcagtcctgatttt

SEQ ID NO: 201921 - DNA, 25 bp, probe
gctgaacgtgtttggacctaatggt

SEQ ID NO: 201922 - DNA, 25 bp, probe
gcgtgaccatcgaggatccaaagtg

SEQ ID NO: 201923 - DNA, 25 bp, probe
gcaggaacatatgggaaccaacgtc

SEQ ID NO: 201924 - DNA, 25 bp, probe
gcggaaaataaactccaagcagcca

SEQ ID NO: 201925 - DNA, 25 bp, probe
gcggagaattagagttcagctcagc

SEQ ID NO: 201926 - DNA, 25 bp, probe
gcggagaattagagttcagctcagc

SEQ ID NO: 201927 - DNA, 25 bp, probe
gctgaaaatttacctatccatatgc

SEQ ID NO: 201928 - DNA, 25 bp, probe
gctgacctttctccaaatgaactgc

SEQ ID NO: 201929 - DNA, 25 bp, probe
gctgtttgttctccacaataggctc

SEQ ID NO: 201930 - DNA, 25 bp, probe
gcgtcttcatgagctccagagaggc

SEQ ID NO: 201931 - DNA, 25 bp, probe
gcgtctgagatctctctgcatagag

SEQ ID NO: 201932 - DNA, 25 bp, probe
gcgtcctgagcactttgcaagagag

SEQ ID NO: 201933 - DNA, 25 bp, probe
gcgtcttacacagtgtcaacaatca

SEQ ID NO: 201934 - DNA, 25 bp, probe
gcgtctgaaggagtacaccatcaag

SEQ ID NO: 201935 - DNA, 25 bp, probe
gcgtctggaaaaagccctcaggctg

SEQ ID NO: 201936 - DNA, 25 bp, probe
gcgtctggacagtgaggcctctgtc

SEQ ID NO: 201937 - DNA, 25 bp, probe
gcgtctgaggctcagaccctgctgt

SEQ ID NO: 201938 - DNA, 25 bp, probe
gctcctgagaatcaacccaactgaa

SEQ ID NO: 201939 - DNA, 25 bp, probe
gctcctgagaatcaacccaactgaa

SEQ ID NO: 201940 - DNA, 25 bp, probe
gctccgagagtgtttctccaaggtt

SEQ ID NO: 201941 - DNA, 25 bp, probe
gctgtctggttgtgtcccaagaggt

SEQ ID NO: 201942 - DNA, 25 bp, probe
gcgtctgggtgtggagctccaagac

SEQ ID NO: 201943 - DNA, 25 bp, probe
gcgtgtgggaatccaccctgagaca

SEQ ID NO: 201944 - DNA, 25 bp, probe
gctggtggggcagcaccgtgaagac

SEQ ID NO: 201945 - DNA, 25 bp, probe
gctggaaggagcgcccagaggaccg

SEQ ID NO: 201946 - DNA, 25 bp, probe
gctgggagggccaagtaggggccct

SEQ ID NO: 201947 - DNA, 25 bp, probe
gctgggaagggacataggggtttct

SEQ ID NO: 201948 - DNA, 25 bp, probe
gcgtggaagggagaagcgacgcccc

SEQ ID NO: 201949 - DNA, 25 bp, probe
gcgtgcggaggaacctgagctacac

SEQ ID NO: 201950 - DNA, 25 bp, probe
gcgtggcggtgaagacggtcaacga

SEQ ID NO: 201951 - DNA, 25 bp, probe
gcgtggcggtgaagacggtcaacga

SEQ ID NO: 201952 - DNA, 25 bp, probe
gcgggcatggaaggaagtgtacacc

SEQ ID NO: 201953 - DNA, 25 bp, probe
gcgtgcgtgtaactgtagtgtagtc

SEQ ID NO: 201954 - DNA, 25 bp, probe
gcgtgcggagcatctgaagttgcag

SEQ ID NO: 201955 - DNA, 25 bp, probe
gcgtgcggagcatctgaagttgcag

SEQ ID NO: 201956 - DNA, 25 bp, probe
gctggggcaggagcaaggctgagtt

SEQ ID NO: 201957 - DNA, 25 bp, probe
gcgggagcagtgcacagagctgtgg

SEQ ID NO: 201958 - DNA, 25 bp, probe
gcggcagagcagggcctggtgtgga

SEQ ID NO: 201959 - DNA, 25 bp, probe
gcggtatgaaggcgtggtggacatc

SEQ ID NO: 201960 - DNA, 25 bp, probe
gcgggagggtgacgtggtgaggatc

SEQ ID NO: 201961 - DNA, 25 bp, probe
gcgggagggtgacgtggtgaggatc

SEQ ID NO: 201962 - DNA, 25 bp, probe
gcgggaggttgatggcgagtggtgc

SEQ ID NO: 201963 - DNA, 25 bp, probe
gcggttgaggtctctggagctgagg

SEQ ID NO: 201964 - DNA, 25 bp, probe
gcggttgaggtctctggagctgagg

SEQ ID NO: 201965 - DNA, 25 bp, probe
gcggttgagtgcgatggctgtgagg

SEQ ID NO: 201966 - DNA, 25 bp, probe
gctggtattgtctgtgattgggtct

SEQ ID NO: 201967 - DNA, 25 bp, probe
gcggccaatgtctggcagtgggcac

SEQ ID NO: 201968 - DNA, 25 bp, probe
gctggacatttgtggcagtgctgaa

SEQ ID NO: 201969 - DNA, 25 bp, probe
gcggccaatggtggtagacatgtgc

SEQ ID NO: 201970 - DNA, 25 bp, probe
gcggccaatggtggtagacatgtgc

SEQ ID NO: 201971 - DNA, 25 bp, probe
gcggcaaattgtgcttggctgccaa

SEQ ID NO: 201972 - DNA, 25 bp, probe
gcgggacaagattcttggtgccacc

SEQ ID NO: 201973 - DNA, 25 bp, probe
gcggaaacatattcttgcagcccat

SEQ ID NO: 201974 - DNA, 25 bp, probe
gcggagaatcatagcacttcggtgc

SEQ ID NO: 201975 - DNA, 25 bp, probe
gcggcagtatctgacctcagaggca

SEQ ID NO: 201976 - DNA, 25 bp, probe
gctggcgtctacagcaacgagctgc

SEQ ID NO: 201977 - DNA, 25 bp, probe
gcggcaccaacatcatcattggctc

SEQ ID NO: 201978 - DNA, 25 bp, probe
gcggccaccactgaatatgtgcaga

SEQ ID NO: 201979 - DNA, 25 bp, probe
gcggctgcacctgcaaagatgggca

SEQ ID NO: 201980 - DNA, 25 bp, probe
gcggctgcacctgcaaagatgggca

SEQ ID NO: 201981 - DNA, 25 bp, probe
gcgggcgctctagaggataacaagc

SEQ ID NO: 201982 - DNA, 25 bp, probe
gctgcccggctagaaatcaacgtgc

SEQ ID NO: 201983 - DNA, 25 bp, probe
gctggagacctacaaactgaagtgc

SEQ ID NO: 201984 - DNA, 25 bp, probe
gcggactccgagcacaataaactca

SEQ ID NO: 201985 - DNA, 25 bp, probe
gcaggcgctcggagaagaaaatcac

SEQ ID NO: 201986 - DNA, 25 bp, probe
gcggcgttggtcaaagcggagacca

SEQ ID NO: 201987 - DNA, 25 bp, probe
gcggcattggcgataccaggaattc

SEQ ID NO: 201988 - DNA, 25 bp, probe
gcggccgctcgaaagggcgaattct

SEQ ID NO: 201989 - DNA, 25 bp, probe
gcggacctcggatggggagagactg

SEQ ID NO: 201990 - DNA, 25 bp, probe
gcggccctgggcagggggtgatgtg

SEQ ID NO: 201991 - DNA, 25 bp, probe
gcgggagcagggagggtgtgattga

SEQ ID NO: 201992 - DNA, 25 bp, probe
gcgtggagcaggcggtggggagaga

SEQ ID NO: 201993 - DNA, 25 bp, probe
gctgagagggggctgggaaaagcag

SEQ ID NO: 201994 - DNA, 25 bp, probe
gctggagcgggtgggaaccaaacac

SEQ ID NO: 201995 - DNA, 25 bp, probe
gctggacgaaagcctgaacaaaaac

SEQ ID NO: 201996 - DNA, 25 bp, probe
gcggacatcagctggtcaaacaaac

SEQ ID NO: 201997 - DNA, 25 bp, probe
gcaggacttcccttataaagcaaaa

SEQ ID NO: 201998 - DNA, 25 bp, probe
gcaggtttcccaaaactagctgaaa

SEQ ID NO: 201999 - DNA, 25 bp, probe
gctgtttttcctcatacaagtaaac

SEQ ID NO: 202000 - DNA, 25 bp, probe
gctggtttttctctgagcacaaagt

SEQ ID NO: 202001 - DNA, 25 bp, probe
gctggtttttctctgagcacaaagt

SEQ ID NO: 202002 - DNA, 25 bp, probe
gctgaccttttctgaagccataaga

SEQ ID NO: 202003 - DNA, 25 bp, probe
gctgaatcctattcctaaggacaag

SEQ ID NO: 202004 - DNA, 25 bp, probe
gctgaatcctattcctaaggacaag

SEQ ID NO: 202005 - DNA, 25 bp, probe
gctgaattccatcccaaagtcaaac

SEQ ID NO: 202006 - DNA, 25 bp, probe
gctgagataccgcaacaggccgaac

SEQ ID NO: 202007 - DNA, 25 bp, probe
gctgagataccgcaacaggccgaac

SEQ ID NO: 202008 - DNA, 25 bp, probe
gcggtcgcgcggatcatgatgccaa

SEQ ID NO: 202009 - DNA, 25 bp, probe
gcggaggctgggatctagcgagaga

SEQ ID NO: 202010 - DNA, 25 bp, probe
gcggaggctgggatctagcgagaga

SEQ ID NO: 202011 - DNA, 25 bp, probe
gcggcattgtgggcttaggcgaaac

SEQ ID NO: 202012 - DNA, 25 bp, probe
gcggtctgtggggaagacgacagca

SEQ ID NO: 202013 - DNA, 25 bp, probe
gctgcgtttggacaacaggcacaca

SEQ ID NO: 202014 - DNA, 25 bp, probe
gctggtttccagaagagggatacat

SEQ ID NO: 202015 - DNA, 25 bp, probe
gctggtaaaagctagaggagacaca

SEQ ID NO: 202016 - DNA, 25 bp, probe
gcggctacgaggccaaggtgtacag

SEQ ID NO: 202017 - DNA, 25 bp, probe
gctggatactgccgatctactggct

SEQ ID NO: 202018 - DNA, 25 bp, probe
gcggcacctcatcgacaactgtgcc

SEQ ID NO: 202019 - DNA, 25 bp, probe
gcgtgaccatgtcgacgagctggac

SEQ ID NO: 202020 - DNA, 25 bp, probe
gctggcaccattttagtgctggccc

SEQ ID NO: 202021 - DNA, 25 bp, probe
gctggcaccattttagtgctggccc

SEQ ID NO: 202022 - DNA, 25 bp, probe
gctgtcaccagcacttttgaccaag

SEQ ID NO: 202023 - DNA, 25 bp, probe
gctgtcattgtgattttcgacctca

SEQ ID NO: 202024 - DNA, 25 bp, probe
gctgtgctggctgtgtttggaaacc

SEQ ID NO: 202025 - DNA, 25 bp, probe
gcggctggaacgattggagatcccg

SEQ ID NO: 202026 - DNA, 25 bp, probe
gcggcggacgggtgcagagaatccc

SEQ ID NO: 202027 - DNA, 25 bp, probe
gcggcggtgggaaaaggtgtcaggc

SEQ ID NO: 202028 - DNA, 25 bp, probe
gcggcgagtggtggaaggcgcagtc

SEQ ID NO: 202029 - DNA, 25 bp, probe
gcgggtgctggatttaggcagcccc

SEQ ID NO: 202030 - DNA, 25 bp, probe
gcgggctggtgttctaagagccccc

SEQ ID NO: 202031 - DNA, 25 bp, probe
gcgtggtcctttgcaagagcgcaga

SEQ ID NO: 202032 - DNA, 25 bp, probe
gcgggtccttctggatcaggagtgt

SEQ ID NO: 202033 - DNA, 25 bp, probe
gcggttgttattggtggtgatgttc

SEQ ID NO: 202034 - DNA, 25 bp, probe
gcgtggttggaaggtgggttctgcg

SEQ ID NO: 202035 - DNA, 25 bp, probe
gcggaacggttgggggttcagcagc

SEQ ID NO: 202036 - DNA, 25 bp, probe
gctggaagggttcattgtgttagcc

SEQ ID NO: 202037 - DNA, 25 bp, probe
gctgggtggcagtgtacttttggct

SEQ ID NO: 202038 - DNA, 25 bp, probe
gctgtttgagaacttcacttacgcg

SEQ ID NO: 202039 - DNA, 25 bp, probe
gctgttttataccaacatgtacgga

SEQ ID NO: 202040 - DNA, 25 bp, probe
gctcttatcctgtggtagtaccgca

SEQ ID NO: 202041 - DNA, 25 bp, probe
gcgtgatatccagagttctttccac

SEQ ID NO: 202042 - DNA, 25 bp, probe
gcgtgatatccgttgatgtgttgtc

SEQ ID NO: 202043 - DNA, 25 bp, probe
gcggttcattgactatgaatatgct

SEQ ID NO: 202044 - DNA, 25 bp, probe
gcgggccctgatgatgatgaagttt

SEQ ID NO: 202045 - DNA, 25 bp, probe
gctggtccactgcaagatgggcgtc

SEQ ID NO: 202046 - DNA, 25 bp, probe
gcggtctctgctggaagcagtgagc

SEQ ID NO: 202047 - DNA, 25 bp, probe
gctggtctctgctgaaggttgtaag

SEQ ID NO: 202048 - DNA, 25 bp, probe
gctggtgtccctaaggttgtacaga

SEQ ID NO: 202049 - DNA, 25 bp, probe
gctgtttgcccttaggccagtacac

SEQ ID NO: 202050 - DNA, 25 bp, probe
gctggttccacttcaatgacagtac

SEQ ID NO: 202051 - DNA, 25 bp, probe
gctggccttcagcagcatgatgcca

SEQ ID NO: 202052 - DNA, 25 bp, probe
gcggcaagtgaggatgcagtccagc

SEQ ID NO: 202053 - DNA, 25 bp, probe
gcggccgctagactagtctagagaa

SEQ ID NO: 202054 - DNA, 25 bp, probe
gcggcacctggagctgaaagagaag

SEQ ID NO: 202055 - DNA, 25 bp, probe
gcggcagaggaaggatacaatgaaa

SEQ ID NO: 202056 - DNA, 25 bp, probe
gcgtggatcgagtgtagctgtgaaa

SEQ ID NO: 202057 - DNA, 25 bp, probe
gcgtggatcgagtgtagctgtgaaa

SEQ ID NO: 202058 - DNA, 25 bp, probe
gcgggcctggaaggagcattgcaga

SEQ ID NO: 202059 - DNA, 25 bp, probe
gcgtggcaggagaggaatgctgaga

SEQ ID NO: 202060 - DNA, 25 bp, probe
gcgggctgtcacagagattgcggaa

SEQ ID NO: 202061 - DNA, 25 bp, probe
gcgggctgtcacagagattgcggaa

SEQ ID NO: 202062 - DNA, 25 bp, probe
gcgtggctaccaggagagcaggtga

SEQ ID NO: 202063 - DNA, 25 bp, probe
gcgggaactcagggtgagcagctgg

SEQ ID NO: 202064 - DNA, 25 bp, probe
gcgggcatcatccggatgctggagt

SEQ ID NO: 202065 - DNA, 25 bp, probe
gcggagtgctgctggatgtgacagg

SEQ ID NO: 202066 - DNA, 25 bp, probe
gcggcggtgtgggagacaaggccag

SEQ ID NO: 202067 - DNA, 25 bp, probe
gcgtggtggctggagaccataacct

SEQ ID NO: 202068 - DNA, 25 bp, probe
gcgtggggtgtacctgtgagagcac

SEQ ID NO: 202069 - DNA, 25 bp, probe
gcggcaaggttacctgtagctcctt

SEQ ID NO: 202070 - DNA, 25 bp, probe
gcggaagaaccacatgtactcctgc

SEQ ID NO: 202071 - DNA, 25 bp, probe
gcggcaagaacactatttaccctca

SEQ ID NO: 202072 - DNA, 25 bp, probe
gctacaagtactggttctcccagcc

SEQ ID NO: 202073 - DNA, 25 bp, probe
gctgaaaatcgcggctttgaccaac

SEQ ID NO: 202074 - DNA, 25 bp, probe
gctggacacccgcatgtgtaacaac

SEQ ID NO: 202075 - DNA, 25 bp, probe
gctggtcacccagatgacatcagaa

SEQ ID NO: 202076 - DNA, 25 bp, probe
gctggacaaatcgcccatcagatac

SEQ ID NO: 202077 - DNA, 25 bp, probe
gcggatgaagacgcacggcagaacc

SEQ ID NO: 202078 - DNA, 25 bp, probe
gcggactaggtggcagaggccaacc

SEQ ID NO: 202079 - DNA, 25 bp, probe
gcggagcatcgagaggaggccagat

SEQ ID NO: 202080 - DNA, 25 bp, probe
gctggaacggaaagagaccagagca

SEQ ID NO: 202081 - DNA, 25 bp, probe
gcggatccgaaggagaatccagcca

SEQ ID NO: 202082 - DNA, 25 bp, probe
gcggatccgaaggagaatccagcca

SEQ ID NO: 202083 - DNA, 25 bp, probe
gcggctcaagaactaatgatccagc

SEQ ID NO: 202084 - DNA, 25 bp, probe
gcggtgcacatgtttatcgaccggc

SEQ ID NO: 202085 - DNA, 25 bp, probe
gcggtgcacatgtttatcgaccggc

SEQ ID NO: 202086 - DNA, 25 bp, probe
gctggtgcaatgttttcttgttcct

SEQ ID NO: 202087 - DNA, 25 bp, probe
gctggtagctgtactattttcactc

SEQ ID NO: 202088 - DNA, 25 bp, probe
gctggtactatttatgtaacacttt

SEQ ID NO: 202089 - DNA, 25 bp, probe
gctggcattcaacatgtggaaagct

SEQ ID NO: 202090 - DNA, 25 bp, probe
gctggcattcaacatgtggaaagct

SEQ ID NO: 202091 - DNA, 25 bp, probe
gcagggtagacgtggccaagtcggt

SEQ ID NO: 202092 - DNA, 25 bp, probe
gcgggtagactacgaccaggtgaag

SEQ ID NO: 202093 - DNA, 25 bp, probe
gctgggtctgacaaggacccgtgtc

SEQ ID NO: 202094 - DNA, 25 bp, probe
gctgttgtatcaagggacacggtgt

SEQ ID NO: 202095 - DNA, 25 bp, probe
gctgtgactgaaaggacccaggagt

SEQ ID NO: 202096 - DNA, 25 bp, probe
gctgtgactgaaatgtatccctcgt

SEQ ID NO: 202097 - DNA, 25 bp, probe
gctgggtcagaaatacaaccactct

SEQ ID NO: 202098 - DNA, 25 bp, probe
gctgggtttgattcaaagcccttac

SEQ ID NO: 202099 - DNA, 25 bp, probe
gctggccttgtatcaatagtgtcat

SEQ ID NO: 202100 - DNA, 25 bp, probe
gctgggcatttttcagattggacct

SEQ ID NO: 202101 - DNA, 25 bp, probe
gctgggatctttgagcttgtggagg

SEQ ID NO: 202102 - DNA, 25 bp, probe
gctgtggttcggaagtctaagcagg

SEQ ID NO: 202103 - DNA, 25 bp, probe
gctgtggttcggaagtctaagcagg

SEQ ID NO: 202104 - DNA, 25 bp, probe
gctgggaacccaagtccaagcatac

SEQ ID NO: 202105 - DNA, 25 bp, probe
gctggggaacaatgttcacagatac

SEQ ID NO: 202106 - DNA, 25 bp, probe
gctgggggatcctgggaggatcctg

SEQ ID NO: 202107 - DNA, 25 bp, probe
gcggggtacacaagaggggatgagt

SEQ ID NO: 202108 - DNA, 25 bp, probe
gcggggtgcaccgagtgaggaggag

SEQ ID NO: 202109 - DNA, 25 bp, probe
gcggtggcagcaccaggtgggacag

SEQ ID NO: 202110 - DNA, 25 bp, probe
gcggtcacatatccaggtagctatc

SEQ ID NO: 202111 - DNA, 25 bp, probe
gcggtcacatatccaggtagctatc

SEQ ID NO: 202112 - DNA, 25 bp, probe
gcggtcagtgcagcgagaggatatg

SEQ ID NO: 202113 - DNA, 25 bp, probe
gcggtcagtgcagcgagaggatatg

SEQ ID NO: 202114 - DNA, 25 bp, probe
gcgggcattgatgccacagctgagg

SEQ ID NO: 202115 - DNA, 25 bp, probe
gctgtggtctgaccctgacaaggac

SEQ ID NO: 202116 - DNA, 25 bp, probe
gctgggcctgaccaaaaatatactg

SEQ ID NO: 202117 - DNA, 25 bp, probe
gctgtgacccagaataaaactaata

SEQ ID NO: 202118 - DNA, 25 bp, probe
tcttggccaagaaaaaaattcaaag

SEQ ID NO: 202119 - DNA, 25 bp, probe
tcttgtaaagtataactttttcaga

SEQ ID NO: 202120 - DNA, 25 bp, probe
gctagtaaaggagactttctcttca

SEQ ID NO: 202121 - DNA, 25 bp, probe
gctggatcaaaggaccatttccttt

SEQ ID NO: 202122 - DNA, 25 bp, probe
gctgtggacaggcaccaatttcttt

SEQ ID NO: 202123 - DNA, 25 bp, probe
gctgtggacaggcaccaatttcttt

SEQ ID NO: 202124 - DNA, 25 bp, probe
gcggagcaaggctccaatgtccctc

SEQ ID NO: 202125 - DNA, 25 bp, probe
gcggagcaaggctccaatgtccctc

SEQ ID NO: 202126 - DNA, 25 bp, probe
gcggcagagatcgccaacatgtcac

SEQ ID NO: 202127 - DNA, 25 bp, probe
gcggatggacaatagccagatacct

SEQ ID NO: 202128 - DNA, 25 bp, probe
gctggtggagaagggcgccaaccct

SEQ ID NO: 202129 - DNA, 25 bp, probe
gctgggaggaagggatgggccccgc

SEQ ID NO: 202130 - DNA, 25 bp, probe
gctgggggagttcctgaggacccac

SEQ ID NO: 202131 - DNA, 25 bp, probe
gctgggggacaaccaagagccccca

SEQ ID NO: 202132 - DNA, 25 bp, probe
gctggggaaacggataggcttctac

SEQ ID NO: 202133 - DNA, 25 bp, probe
gcggggagaggagtacgggttcagc

SEQ ID NO: 202134 - DNA, 25 bp, probe
gctgggttgggagtagggtgtccca

SEQ ID NO: 202135 - DNA, 25 bp, probe
gctcgtttgagggattggggtggac

SEQ ID NO: 202136 - DNA, 25 bp, probe
gctggcctcggagattgtggggggc

SEQ ID NO: 202137 - DNA, 25 bp, probe
gctggcctcggagattgtggggggc

SEQ ID NO: 202138 - DNA, 25 bp, probe
gctggaccggcaggagtttgtctgc

SEQ ID NO: 202139 - DNA, 25 bp, probe
gctggaccagctgccagattattac

SEQ ID NO: 202140 - DNA, 25 bp, probe
gcggacagctgcttacatgttcatc

SEQ ID NO: 202141 - DNA, 25 bp, probe
gctggaatgctgggtatgctctgtg

SEQ ID NO: 202142 - DNA, 25 bp, probe
gctgctaaatgtaaatgccttctca

SEQ ID NO: 202143 - DNA, 25 bp, probe
gctgtaaacttaactgttctttgcc

SEQ ID NO: 202144 - DNA, 25 bp, probe
gctgtgaaaacgcactttctttccc

SEQ ID NO: 202145 - DNA, 25 bp, probe
gctggagaacctccactttcatgtg

SEQ ID NO: 202146 - DNA, 25 bp, probe
gcggagaggcgaaactgagtcagag

SEQ ID NO: 202147 - DNA, 25 bp, probe
gcgggagagagaaagcgaggagggg

SEQ ID NO: 202148 - DNA, 25 bp, probe
gcgggaggatggagcagtgagcggg

SEQ ID NO: 202149 - DNA, 25 bp, probe
gcggtgaggcaggggagtctgcttg

SEQ ID NO: 202150 - DNA, 25 bp, probe
gcggcatcctcggggagatgctggt

SEQ ID NO: 202151 - DNA, 25 bp, probe
gctggtccatcggagtgattgccta

SEQ ID NO: 202152 - DNA, 25 bp, probe
gctggtctcaagtggtatcctcacc

SEQ ID NO: 202153 - DNA, 25 bp, probe
gcggcctacagagcgtatagcctgg

SEQ ID NO: 202154 - DNA, 25 bp, probe
gctggtgtacggcttgtacctggag

SEQ ID NO: 202155 - DNA, 25 bp, probe
gggcttacctgtacactgacttgag

SEQ ID NO: 202156 - DNA, 25 bp, probe
gcgggatgacttgtgcagaactcta

SEQ ID NO: 202157 - DNA, 25 bp, probe
gcggcgcagagcctttgggaataaa

SEQ ID NO: 202158 - DNA, 25 bp, probe
gctggcggaggcattggggacgaga

SEQ ID NO: 202159 - DNA, 25 bp, probe
gctggtcaggaaactcgggtctgga

SEQ ID NO: 202160 - DNA, 25 bp, probe
gcggcaatgggaagctggagtttga

SEQ ID NO: 202161 - DNA, 25 bp, probe
gctggatccggcaatgtgaagcttt

SEQ ID NO: 202162 - DNA, 25 bp, probe
gctgactgccgagtactgaacattg

SEQ ID NO: 202163 - DNA, 25 bp, probe
gctgagcgacgagcacgttcaattc

SEQ ID NO: 202164 - DNA, 25 bp, probe
gctggctgtggagtactatgtgccg

SEQ ID NO: 202165 - DNA, 25 bp, probe
gctggctgtggagtactatgtgccg

SEQ ID NO: 202166 - DNA, 25 bp, probe
gcggcctggagcaacatgtggctct

SEQ ID NO: 202167 - DNA, 25 bp, probe
gcggcctggagcaacatgtggctct

SEQ ID NO: 202168 - DNA, 25 bp, probe
gcggcacggagaaagggctggtcac

SEQ ID NO: 202169 - DNA, 25 bp, probe
gcggacgagagtttggcgcatgcgc

SEQ ID NO: 202170 - DNA, 25 bp, probe
gcggagctacgttttgcagggctca

SEQ ID NO: 202171 - DNA, 25 bp, probe
gctgggcaactttttcctgaatgag

SEQ ID NO: 202172 - DNA, 25 bp, probe
gcggacaatcattttgtacggatca

SEQ ID NO: 202173 - DNA, 25 bp, probe
gcggtgaagattatggaagtgacag

SEQ ID NO: 202174 - DNA, 25 bp, probe
gcggggatgacgatgccaagtacac

SEQ ID NO: 202175 - DNA, 25 bp, probe
gcggagaatgaccattgcccagagc

SEQ ID NO: 202176 - DNA, 25 bp, probe
gctgtggagtactatgtgccggaga

SEQ ID NO: 202177 - DNA, 25 bp, probe
gctgtggagtactatgtgccggaga

SEQ ID NO: 202178 - DNA, 25 bp, probe
gctgggagtggttagccggaatact

SEQ ID NO: 202179 - DNA, 25 bp, probe
gctgggagagggtgttgagttcact

SEQ ID NO: 202180 - DNA, 25 bp, probe
gctggcgagggactcgttaccatca

SEQ ID NO: 202181 - DNA, 25 bp, probe
gcggggagggtaatgtgcaccacag

SEQ ID NO: 202182 - DNA, 25 bp, probe
gcggggggtgaaacacctgcacgac

SEQ ID NO: 202183 - DNA, 25 bp, probe
gcggaggaagtgaatgccatcctca

SEQ ID NO: 202184 - DNA, 25 bp, probe
gcggcaggaaagtctgcctcacgca

SEQ ID NO: 202185 - DNA, 25 bp, probe
gctgtcatggcatatgaccgctacc

SEQ ID NO: 202186 - DNA, 25 bp, probe
gctgtcatgtgaatccctcaatacc

SEQ ID NO: 202187 - DNA, 25 bp, probe
gctggaaacatcactgcgtactgga

SEQ ID NO: 202188 - DNA, 25 bp, probe
gctgtaccacagagccgggtgtgaa

SEQ ID NO: 202189 - DNA, 25 bp, probe
gctgtaccacagagccgggtgtgaa

SEQ ID NO: 202190 - DNA, 25 bp, probe
gctgtaagacagggacggggcggcc

SEQ ID NO: 202191 - DNA, 25 bp, probe
gctgggagaaggccagcgggcgggc

SEQ ID NO: 202192 - DNA, 25 bp, probe
gcggtggaagaggaggctgggcagg

SEQ ID NO: 202193 - DNA, 25 bp, probe
gcggtggaagaggaggctgggcagg

SEQ ID NO: 202194 - DNA, 25 bp, probe
gctggaaaagcggaggttggagcca

SEQ ID NO: 202195 - DNA, 25 bp, probe
gctggagaacgccgagatctacgac

SEQ ID NO: 202196 - DNA, 25 bp, probe
gctggaacgattggagatcccgcct

SEQ ID NO: 202197 - DNA, 25 bp, probe
gctcagtcaagattggagacctcgg

SEQ ID NO: 202198 - DNA, 25 bp, probe
gctgttcggattgagaactcttcag

SEQ ID NO: 202199 - DNA, 25 bp, probe
gctgtacgacagtgaggaccttagg

SEQ ID NO: 202200 - DNA, 25 bp, probe
gctggagcttcagcgagggcttcta

SEQ ID NO: 202201 - DNA, 25 bp, probe
gctggaaggcactggtgatgtccca

SEQ ID NO: 202202 - DNA, 25 bp, probe
gctggaaggacattcaggtacccgg

SEQ ID NO: 202203 - DNA, 25 bp, probe
gctggaggggcaccatgtgtgagcc

SEQ ID NO: 202204 - DNA, 25 bp, probe
gctggaggggcaccatgtgtgagcc

SEQ ID NO: 202205 - DNA, 25 bp, probe
gcggagacctggactggagacgcgg

SEQ ID NO: 202206 - DNA, 25 bp, probe
gcggtgcacgcgctttaagtgtgct

SEQ ID NO: 202207 - DNA, 25 bp, probe
gcggagcaccatctgtttcagaggg

SEQ ID NO: 202208 - DNA, 25 bp, probe
gctgtgtagccacctatgttttagg

SEQ ID NO: 202209 - DNA, 25 bp, probe
gctgtgtagccacctatgttttagg

SEQ ID NO: 202210 - DNA, 25 bp, probe
gctggtaactgctttgcttcttgag

SEQ ID NO: 202211 - DNA, 25 bp, probe
gctggtaactgctttgcttcttgag

SEQ ID NO: 202212 - DNA, 25 bp, probe
gctggaagaaaaacttcattgctgt

SEQ ID NO: 202213 - DNA, 25 bp, probe
gctggagtaacaacacccattttgg

SEQ ID NO: 202214 - DNA, 25 bp, probe
gctggtgggatatccaccctttgag

SEQ ID NO: 202215 - DNA, 25 bp, probe
gctggtggagcagacaaccctgcac

SEQ ID NO: 202216 - DNA, 25 bp, probe
gcggacaaataaaactcgctgactt

SEQ ID NO: 202217 - DNA, 25 bp, probe
gcggccttagaaagcaacctgcctg

SEQ ID NO: 202218 - DNA, 25 bp, probe
gctggccttgactttgaagcaatcc

SEQ ID NO: 202219 - DNA, 25 bp, probe
gctggcacttattgcaatttaacac

SEQ ID NO: 202220 - DNA, 25 bp, probe
gctggtttaaacattcagcaccaaa

SEQ ID NO: 202221 - DNA, 25 bp, probe
gctggtttgagacctattctgacca

SEQ ID NO: 202222 - DNA, 25 bp, probe
gctggcataacatactatttgaata

SEQ ID NO: 202223 - DNA, 25 bp, probe
gctggaaatagatctcatttttagg

SEQ ID NO: 202224 - DNA, 25 bp, probe
gcggaatgacaaggtgttttttgcc

SEQ ID NO: 202225 - DNA, 25 bp, probe
gctgtgcaagtcactggttttttat

SEQ ID NO: 202226 - DNA, 25 bp, probe
gctgccagatgcgggcttttttttt

SEQ ID NO: 202227 - DNA, 25 bp, probe
gctggcagtggttgtaattctgttt

SEQ ID NO: 202228 - DNA, 25 bp, probe
gctgggtacatattaagtggcttgt

SEQ ID NO: 202229 - DNA, 25 bp, probe
gctgtggatactgtaaagggtgttt

SEQ ID NO: 202230 - DNA, 25 bp, probe
gctgatgttcctggtaaaagttttt

SEQ ID NO: 202231 - DNA, 25 bp, probe
gctgatgttcctggtaaaagttttt

SEQ ID NO: 202232 - DNA, 25 bp, probe
gctgatgttcctggtaaaagttttt

SEQ ID NO: 202233 - DNA, 25 bp, probe
gctggtctcgtggtaaaactgttaa

SEQ ID NO: 202234 - DNA, 25 bp, probe
gctgtcccagtcctagaaatcctgg

SEQ ID NO: 202235 - DNA, 25 bp, probe
gctgtcaccactaccagtatgattt

SEQ ID NO: 202236 - DNA, 25 bp, probe
gctggatgctacacggttatatatg

SEQ ID NO: 202237 - DNA, 25 bp, probe
gctgagtacctggaggtttactggc

SEQ ID NO: 202238 - DNA, 25 bp, probe
gctgattatccggtggctttagccg

SEQ ID NO: 202239 - DNA, 25 bp, probe
gctgtaatcgtttgcttgttcaggg

SEQ ID NO: 202240 - DNA, 25 bp, probe
gctgtaatcagttatgccgtatagg

SEQ ID NO: 202241 - DNA, 25 bp, probe
gctggattctgttcagcctttaaaa

SEQ ID NO: 202242 - DNA, 25 bp, probe
gctgtgcgtgctgacagttttgcaa

SEQ ID NO: 202243 - DNA, 25 bp, probe
gctggcaacaggacagtttccctac

SEQ ID NO: 202244 - DNA, 25 bp, probe
gctggcaacaggacagtttccctac

SEQ ID NO: 202245 - DNA, 25 bp, probe
gctggcaacaggacagtttccctac

SEQ ID NO: 202246 - DNA, 25 bp, probe
gctggatgccacacagatggtctcc

SEQ ID NO: 202247 - DNA, 25 bp, probe
gctggcatcgacccaatggagcaac

SEQ ID NO: 202248 - DNA, 25 bp, probe
gctgtctctgacataaggagtgcct

SEQ ID NO: 202249 - DNA, 25 bp, probe
gctgtccagccttaatagacttctc

SEQ ID NO: 202250 - DNA, 25 bp, probe
gctggcagacctgattcaacaactc

SEQ ID NO: 202251 - DNA, 25 bp, probe
gctggctggtgggttgcaagaaatt

SEQ ID NO: 202252 - DNA, 25 bp, probe
gctggctcctgggaacgagaactac

SEQ ID NO: 202253 - DNA, 25 bp, probe
gctggtcctggagacagaagttcac

SEQ ID NO: 202254 - DNA, 25 bp, probe
gctggtcctggagacagaagttcac

SEQ ID NO: 202255 - DNA, 25 bp, probe
gctggggctgaaggtcagaagtaat

SEQ ID NO: 202256 - DNA, 25 bp, probe
gctgagggcacaaggaattagtaac

SEQ ID NO: 202257 - DNA, 25 bp, probe
gctggtggccttgaacttccagacg

SEQ ID NO: 202258 - DNA, 25 bp, probe
gctggtggccatcaaatgcattgcc

SEQ ID NO: 202259 - DNA, 25 bp, probe
gctggtggcctatatgatctgccta

SEQ ID NO: 202260 - DNA, 25 bp, probe
gctggcagatgcccaacgggcacta

SEQ ID NO: 202261 - DNA, 25 bp, probe
gctggcagatgcccaacgggcacta

SEQ ID NO: 202262 - DNA, 25 bp, probe
gctggaatcgccacatgaagagcga

SEQ ID NO: 202263 - DNA, 25 bp, probe
gctgagaatcccatcagctgagggc

SEQ ID NO: 202264 - DNA, 25 bp, probe
gctggcagcattgcaatagtgaggc

SEQ ID NO: 202265 - DNA, 25 bp, probe
gcggcagcgctggagaagctagaga

SEQ ID NO: 202266 - DNA, 25 bp, probe
gcggctggcgtgcaagatcgcagac

SEQ ID NO: 202267 - DNA, 25 bp, probe
gcggaggcattggggacgagatcga

SEQ ID NO: 202268 - DNA, 25 bp, probe
gcggagcctgtggaggacgaggcgg

SEQ ID NO: 202269 - DNA, 25 bp, probe
gctggagccgggagtctgagcagcg

SEQ ID NO: 202270 - DNA, 25 bp, probe
gctggcgccatgatgagtgtggacg

SEQ ID NO: 202271 - DNA, 25 bp, probe
gcggctgcagagcgagtgcaagatg

SEQ ID NO: 202272 - DNA, 25 bp, probe
gctggcgagatgctcgtgtgcagag

SEQ ID NO: 202273 - DNA, 25 bp, probe
gctgacgatgaccacgctcatggtc

SEQ ID NO: 202274 - DNA, 25 bp, probe
gctggagctggaatcccattgatct

SEQ ID NO: 202275 - DNA, 25 bp, probe
gcggcctggatggcgacatgttcaa

SEQ ID NO: 202276 - DNA, 25 bp, probe
gctggcctttgaacactatatcaat

SEQ ID NO: 202277 - DNA, 25 bp, probe
gctggacctaaaatcaatgatcgag

SEQ ID NO: 202278 - DNA, 25 bp, probe
gctgagaccaaaacaactgtccagc

SEQ ID NO: 202279 - DNA, 25 bp, probe
gctgtggccaggtataactttgccg

SEQ ID NO: 202280 - DNA, 25 bp, probe
gctgtgcgaagtttaactgtgcatc

SEQ ID NO: 202281 - DNA, 25 bp, probe
gctggctgaactttgggttcatttg

SEQ ID NO: 202282 - DNA, 25 bp, probe
gctggcgtaagcatggggtctttgt

SEQ ID NO: 202283 - DNA, 25 bp, probe
gctgtgtgtcaagatggtggtcatg

SEQ ID NO: 202284 - DNA, 25 bp, probe
gctgtgtgtcaagatggtggtcatg

SEQ ID NO: 202285 - DNA, 25 bp, probe
gctgtcttatgtgaagtggatcgag

SEQ ID NO: 202286 - DNA, 25 bp, probe
gctgttttccaggagatggagccag

SEQ ID NO: 202287 - DNA, 25 bp, probe
gctggtatacgggaatgctggcaag

SEQ ID NO: 202288 - DNA, 25 bp, probe
gctgggtatcgaatgtacaggaaga

SEQ ID NO: 202289 - DNA, 25 bp, probe
gctggcctactgtcagttcaagcaa

SEQ ID NO: 202290 - DNA, 25 bp, probe
gctggtgtaagccagttccagcaca

SEQ ID NO: 202291 - DNA, 25 bp, probe
gctggcatttgagctggtctggagc

SEQ ID NO: 202292 - DNA, 25 bp, probe
gctgtctttgagttgtggtggacgc

SEQ ID NO: 202293 - DNA, 25 bp, probe
gctgtctttgagttgtggtggacgc

SEQ ID NO: 202294 - DNA, 25 bp, probe
gctgtctttgagttgtggtggacgc

SEQ ID NO: 202295 - DNA, 25 bp, probe
gctgactttggaatgagcaggaacc

SEQ ID NO: 202296 - DNA, 25 bp, probe
gcggacctggaaggcgagatgagcc

SEQ ID NO: 202297 - DNA, 25 bp, probe
gctggaccaaggacgtggatgaccc

SEQ ID NO: 202298 - DNA, 25 bp, probe
gcggcccactgcattgtgggacacc

SEQ ID NO: 202299 - DNA, 25 bp, probe
gctggcctagcgatggagggacact

SEQ ID NO: 202300 - DNA, 25 bp, probe
gcggcccagtggctgagaggagccg

SEQ ID NO: 202301 - DNA, 25 bp, probe
gcggcactactgcaggagaggagct

SEQ ID NO: 202302 - DNA, 25 bp, probe
gctggaagactcactgacggagctc

SEQ ID NO: 202303 - DNA, 25 bp, probe
gctggaagactcactgacggagctc

SEQ ID NO: 202304 - DNA, 25 bp, probe
gctggaggaagcactaggatgttca

SEQ ID NO: 202305 - DNA, 25 bp, probe
gctgaagggatagctaggtctgcag

SEQ ID NO: 202306 - DNA, 25 bp, probe
gctgaaggtcagaagtaatcctgag

SEQ ID NO: 202307 - DNA, 25 bp, probe
gctgaaattcgtgagtcacctggag

SEQ ID NO: 202308 - DNA, 25 bp, probe
gcggcaatgtttgagcggcacatag

SEQ ID NO: 202309 - DNA, 25 bp, probe
gctgtcgggactgagcaggcaatgg

SEQ ID NO: 202310 - DNA, 25 bp, probe
gctgtccctagtgggcacgagtggc

SEQ ID NO: 202311 - DNA, 25 bp, probe
gctgtgtcccagaggaaagtgcgtc

SEQ ID NO: 202312 - DNA, 25 bp, probe
gctggctacacatttggacaagaca

SEQ ID NO: 202313 - DNA, 25 bp, probe
gctggctcacattatttatttcaca

SEQ ID NO: 202314 - DNA, 25 bp, probe
gctggctcacattatttatttcaca

SEQ ID NO: 202315 - DNA, 25 bp, probe
gctgtggactggatcttcagtcaca

SEQ ID NO: 202316 - DNA, 25 bp, probe
gcattggatctgctgggtcaattcc

SEQ ID NO: 202317 - DNA, 25 bp, probe
gcattggatctgctgggtcaattcc

SEQ ID NO: 202318 - DNA, 25 bp, probe
gctggcgttttggaatgcaatttgc

SEQ ID NO: 202319 - DNA, 25 bp, probe
gctggtattttgccacagagtcctc

SEQ ID NO: 202320 - DNA, 25 bp, probe
gctggatgttcttaaagagttccac

SEQ ID NO: 202321 - DNA, 25 bp, probe
gctggttgactgttacaaacccaca

SEQ ID NO: 202322 - DNA, 25 bp, probe
gctagtgttctgtctaaaaaccaga

SEQ ID NO: 202323 - DNA, 25 bp, probe
gtactttaggttaatccctcaagca

SEQ ID NO: 202324 - DNA, 25 bp, probe
gctactatattgcttttgtcccaaa

SEQ ID NO: 202325 - DNA, 25 bp, probe
gctgacttgaagcattttgacccag

SEQ ID NO: 202326 - DNA, 25 bp, probe
gctggctttgagcattgggactcca

SEQ ID NO: 202327 - DNA, 25 bp, probe
gctggcattggacgttcagggaccc

SEQ ID NO: 202328 - DNA, 25 bp, probe
gctggacagaggtttctgggagacc

SEQ ID NO: 202329 - DNA, 25 bp, probe
gcggcagagattgctgacgggatgg

SEQ ID NO: 202330 - DNA, 25 bp, probe
gctggagttcatggctccggagatg

SEQ ID NO: 202331 - DNA, 25 bp, probe
gctggagttcatggctccggagatg

SEQ ID NO: 202332 - DNA, 25 bp, probe
gctggagaatcatttcctggaatct

SEQ ID NO: 202333 - DNA, 25 bp, probe
gctgaggaatttgcaacgagagatt

SEQ ID NO: 202334 - DNA, 25 bp, probe
gctggggacattgctatgcaaatgt

SEQ ID NO: 202335 - DNA, 25 bp, probe
gctggaggactggctttgctgccag

SEQ ID NO: 202336 - DNA, 25 bp, probe
gctgtgcaaaatgggcttgccctgg

SEQ ID NO: 202337 - DNA, 25 bp, probe
gcggcataatgaagggtgaagcatg

SEQ ID NO: 202338 - DNA, 25 bp, probe
gcggcacagatgatggggagcggag

SEQ ID NO: 202339 - DNA, 25 bp, probe
gctggacatcatgctggacgtgcag

SEQ ID NO: 202340 - DNA, 25 bp, probe
gctggacctgcaatctatgcttcag

SEQ ID NO: 202341 - DNA, 25 bp, probe
gctggaaggcaccatggttagaggg

SEQ ID NO: 202342 - DNA, 25 bp, probe
gctggaagtgcccataggaaataga

SEQ ID NO: 202343 - DNA, 25 bp, probe
gctggaaggccgagagaattctgaa

SEQ ID NO: 202344 - DNA, 25 bp, probe
gcggaagtcgcggtatgcagaactg

SEQ ID NO: 202345 - DNA, 25 bp, probe
gctggaatttgtggctgatgaaggc

SEQ ID NO: 202346 - DNA, 25 bp, probe
gctggaacttgtggttgaggcaggg

SEQ ID NO: 202347 - DNA, 25 bp, probe
gctgttcactttggcattagtgatt

SEQ ID NO: 202348 - DNA, 25 bp, probe
gctgttcactttggcattagtgatt

SEQ ID NO: 202349 - DNA, 25 bp, probe
gctgtatctttagcatttcttacta

SEQ ID NO: 202350 - DNA, 25 bp, probe
gctggcctgtaatttttctttcaag

SEQ ID NO: 202351 - DNA, 25 bp, probe
gctccctgaagtcttacagctctaa

SEQ ID NO: 202352 - DNA, 25 bp, probe
gctggatggttcctttatgcagctt

SEQ ID NO: 202353 - DNA, 25 bp, probe
gctggagagattcctgttgttgcta

SEQ ID NO: 202354 - DNA, 25 bp, probe
gctggaaagtatcctgcatgacgat

SEQ ID NO: 202355 - DNA, 25 bp, probe
gctggaaagtatcctgcatgacgat

SEQ ID NO: 202356 - DNA, 25 bp, probe
gctggagagttactctgcaaagttc

SEQ ID NO: 202357 - DNA, 25 bp, probe
gctggcacattttcttgcagaacat

SEQ ID NO: 202358 - DNA, 25 bp, probe
gctgctgactaatcttcatcaccac

SEQ ID NO: 202359 - DNA, 25 bp, probe
gctgtattcaaagcagatcaccatt

SEQ ID NO: 202360 - DNA, 25 bp, probe
gctgtggtaacagagtcctcgctgt

SEQ ID NO: 202361 - DNA, 25 bp, probe
gctggggcaacacgcagtactatgg

SEQ ID NO: 202362 - DNA, 25 bp, probe
gctggtgcatgatgacgaggatatt

SEQ ID NO: 202363 - DNA, 25 bp, probe
gctggccatcgagctgagtgtgatc

SEQ ID NO: 202364 - DNA, 25 bp, probe
gctggccacatgtcactgatggtca

SEQ ID NO: 202365 - DNA, 25 bp, probe
gctggccacatgtcactgatggtca

SEQ ID NO: 202366 - DNA, 25 bp, probe
gctggccacatgtcactgatggtca

SEQ ID NO: 202367 - DNA, 25 bp, probe
gctggccaagtgctctgagatcacc

SEQ ID NO: 202368 - DNA, 25 bp, probe
gctggcaccaatatcataataggca

SEQ ID NO: 202369 - DNA, 25 bp, probe
gctggcaccaatatcataataggca

SEQ ID NO: 202370 - DNA, 25 bp, probe
gctggcacgagcttccagaaaagcg

SEQ ID NO: 202371 - DNA, 25 bp, probe
gctggcagtggaactaagaaagccc

SEQ ID NO: 202372 - DNA, 25 bp, probe
gctggaatgggagaagactatcctt

SEQ ID NO: 202373 - DNA, 25 bp, probe
gctggacgggacggcagacgatgcc

SEQ ID NO: 202374 - DNA, 25 bp, probe
gctggacgggacggcagacgatgcc

SEQ ID NO: 202375 - DNA, 25 bp, probe
gctggacgtggtgcacaacgagagg

SEQ ID NO: 202376 - DNA, 25 bp, probe
gctgagcctggacttccaccaggca

SEQ ID NO: 202377 - DNA, 25 bp, probe
gctgatccagatgttatgctcctgc

SEQ ID NO: 202378 - DNA, 25 bp, probe
gctgatccagatgttatgctcctgc

SEQ ID NO: 202379 - DNA, 25 bp, probe
gctgtgccaggcgtttggcctgggc

SEQ ID NO: 202380 - DNA, 25 bp, probe
gctgtccagagtgtccagcttgttc

SEQ ID NO: 202381 - DNA, 25 bp, probe
gctgcctaggatgttctgggctaat

SEQ ID NO: 202382 - DNA, 25 bp, probe
gctggtatgttgtatctcgagagta

SEQ ID NO: 202383 - DNA, 25 bp, probe
gctgtggatgttttccaggttgcaa

SEQ ID NO: 202384 - DNA, 25 bp, probe
gctgggagatgtgtcctggaatgaa

SEQ ID NO: 202385 - DNA, 25 bp, probe
gctggggggaccctggagaatgcag

SEQ ID NO: 202386 - DNA, 25 bp, probe
gctgggagaggaggggtaggaaggc

SEQ ID NO: 202387 - DNA, 25 bp, probe
gctggaagtgagtggcccaccagag

SEQ ID NO: 202388 - DNA, 25 bp, probe
gctggaagttcaggatgccaccacc

SEQ ID NO: 202389 - DNA, 25 bp, probe
gctggcaagatttgagttaaactca

SEQ ID NO: 202390 - DNA, 25 bp, probe
gctggagatgttcgactggaacctg

SEQ ID NO: 202391 - DNA, 25 bp, probe
gctggagcagtgaagaggaaaccct

SEQ ID NO: 202392 - DNA, 25 bp, probe
gctggattgagcaatgagcagagcc

SEQ ID NO: 202393 - DNA, 25 bp, probe
gctgtatgagacctatcagagcagc

SEQ ID NO: 202394 - DNA, 25 bp, probe
gctggcctgcatggagtacagcagc

SEQ ID NO: 202395 - DNA, 25 bp, probe
gctggcctgcatcatggagattcca

SEQ ID NO: 202396 - DNA, 25 bp, probe
gcggcccagcgaggagcatgtggcc

SEQ ID NO: 202397 - DNA, 25 bp, probe
gctggcctgtgcccaggctggagct

SEQ ID NO: 202398 - DNA, 25 bp, probe
gctggagcttcgcagcgtggagtgg

SEQ ID NO: 202399 - DNA, 25 bp, probe
gctggcctgttgtaggtggtaggga

SEQ ID NO: 202400 - DNA, 25 bp, probe
gctggcgcgggatgaggacgggcca

SEQ ID NO: 202401 - DNA, 25 bp, probe
gcggcgggatgctgaagagagggca

SEQ ID NO: 202402 - DNA, 25 bp, probe
gcggcgggatgctgaagagagggca

SEQ ID NO: 202403 - DNA, 25 bp, probe
gctggccagagagaaacaggcggca

SEQ ID NO: 202404 - DNA, 25 bp, probe
gctggacaagttcattcacgtggca

SEQ ID NO: 202405 - DNA, 25 bp, probe
gctggaacagttactcacctgtggc

SEQ ID NO: 202406 - DNA, 25 bp, probe
gctggaatgatctgactgcacctcc

SEQ ID NO: 202407 - DNA, 25 bp, probe
gctggaatgatctgactgcacctcc

SEQ ID NO: 202408 - DNA, 25 bp, probe
gctggagtgcagtggcgcaatctca

SEQ ID NO: 202409 - DNA, 25 bp, probe
gctgtgatgtcgctgtcaggatcat

SEQ ID NO: 202410 - DNA, 25 bp, probe
gctggattcatgcagccagctttgc

SEQ ID NO: 202411 - DNA, 25 bp, probe
gctggactttgagcgcagcttgcgg

SEQ ID NO: 202412 - DNA, 25 bp, probe
gctggacttccagagacatggctca

SEQ ID NO: 202413 - DNA, 25 bp, probe
gctggactgcaggcacaaagaccca

SEQ ID NO: 202414 - DNA, 25 bp, probe
gctggcattgccctcaacgaccact

SEQ ID NO: 202415 - DNA, 25 bp, probe
gctggagtacagaccacagcaccac

SEQ ID NO: 202416 - DNA, 25 bp, probe
gctggaagccagaacgcagactgca

SEQ ID NO: 202417 - DNA, 25 bp, probe
gctggaagtcagaggggcatggcga

SEQ ID NO: 202418 - DNA, 25 bp, probe
gctggacgtccaggatggagtgagc

SEQ ID NO: 202419 - DNA, 25 bp, probe
gctggaatcccattgatcttctagc

SEQ ID NO: 202420 - DNA, 25 bp, probe
gctggacaccaatttctgttttaaa

SEQ ID NO: 202421 - DNA, 25 bp, probe
gctggccttcagatgtctgtgattt

SEQ ID NO: 202422 - DNA, 25 bp, probe
gctggctctcattggtatcatgttg

SEQ ID NO: 202423 - DNA, 25 bp, probe
gctggcttcttggtcaatcttgact

SEQ ID NO: 202424 - DNA, 25 bp, probe
gctggctctgtttgatgctatttat

SEQ ID NO: 202425 - DNA, 25 bp, probe
gctggagccgcttgtgaataaactg

SEQ ID NO: 202426 - DNA, 25 bp, probe
gctggatcaggtgggaaaagaagtg

SEQ ID NO: 202427 - DNA, 25 bp, probe
gctggaagcctgccgaaaacaggag

SEQ ID NO: 202428 - DNA, 25 bp, probe
gctgtaccagtgccagggacacagg

SEQ ID NO: 202429 - DNA, 25 bp, probe
gctggccgatgtacagggacacacc

SEQ ID NO: 202430 - DNA, 25 bp, probe
gctggcttgatgatcattgttccac

SEQ ID NO: 202431 - DNA, 25 bp, probe
gctggcttgacatgctgtattccac

SEQ ID NO: 202432 - DNA, 25 bp, probe
gctggctgagactctgtgatcatga

SEQ ID NO: 202433 - DNA, 25 bp, probe
gctggcatgagaaagcagatgagcg

SEQ ID NO: 202434 - DNA, 25 bp, probe
gctggctgcacaacagacatttgta

SEQ ID NO: 202435 - DNA, 25 bp, probe
gctgtgatcacgagccattgtcatt

SEQ ID NO: 202436 - DNA, 25 bp, probe
gctggatcagagtgacttgtcagac

SEQ ID NO: 202437 - DNA, 25 bp, probe
gctgcacgcaggacaggtgcttcag

SEQ ID NO: 202438 - DNA, 25 bp, probe
gctggctgagctccggagcattaat

SEQ ID NO: 202439 - DNA, 25 bp, probe
gctggggcttctagagttcaagatc

SEQ ID NO: 202440 - DNA, 25 bp, probe
gctggggttgttggcctgaagatgc

SEQ ID NO: 202441 - DNA, 25 bp, probe
gctggttggggtggcttagcagatc

SEQ ID NO: 202442 - DNA, 25 bp, probe
gctggcttggtggatggtcacgatg

SEQ ID NO: 202443 - DNA, 25 bp, probe
gctggttgtggactatgccacctgc

SEQ ID NO: 202444 - DNA, 25 bp, probe
gctggctggggagtacatcatcctg

SEQ ID NO: 202445 - DNA, 25 bp, probe
gctggtgcgggagtagcaggtccgc

SEQ ID NO: 202446 - DNA, 25 bp, probe
gctggtgcgggagtagcaggtccgc

SEQ ID NO: 202447 - DNA, 25 bp, probe
gctggtagggaaagactctgcacct

SEQ ID NO: 202448 - DNA, 25 bp, probe
gctgtctagggatggacttggttcc

SEQ ID NO: 202449 - DNA, 25 bp, probe
gctggccggaaggagactgtggttt

SEQ ID NO: 202450 - DNA, 25 bp, probe
gctggcaggggacatgacctggctg

SEQ ID NO: 202451 - DNA, 25 bp, probe
gctggcggagaatcatagcacttcg

SEQ ID NO: 202452 - DNA, 25 bp, probe
gctgaggaggaatcttacttctcca

SEQ ID NO: 202453 - DNA, 25 bp, probe
gctcagggaaagctggactactaaa

SEQ ID NO: 202454 - DNA, 25 bp, probe
gcttccaaacagctgggtttaaata

SEQ ID NO: 202455 - DNA, 25 bp, probe
gcttccaaacagctgggtttaaata

SEQ ID NO: 202456 - DNA, 25 bp, probe
gctgtctttacatggggttttcaat

SEQ ID NO: 202457 - DNA, 25 bp, probe
gctgtatgttacaggtgtgtttgtg

SEQ ID NO: 202458 - DNA, 25 bp, probe
gctggagtgtgatgggctcgatctt

SEQ ID NO: 202459 - DNA, 25 bp, probe
gctggaagctaatggcctgttgctc

SEQ ID NO: 202460 - DNA, 25 bp, probe
gctgtgcaatgccttaggactttgt

SEQ ID NO: 202461 - DNA, 25 bp, probe
gctgtgcaatgccttaggactttgt

SEQ ID NO: 202462 - DNA, 25 bp, probe
gctgtgtactgtaaggacgtgctgg

SEQ ID NO: 202463 - DNA, 25 bp, probe
gctgggcctttattgacatgctaga

SEQ ID NO: 202464 - DNA, 25 bp, probe
gctggcgcctgggcaaagtgctatg

SEQ ID NO: 202465 - DNA, 25 bp, probe
gctgtgtgccgggaacacccggagg

SEQ ID NO: 202466 - DNA, 25 bp, probe
gctggatgcactggacaagcacctc

SEQ ID NO: 202467 - DNA, 25 bp, probe
gctggatgcactggacaagcacctc

SEQ ID NO: 202468 - DNA, 25 bp, probe
gctggatgagatggacaatgctgcc

SEQ ID NO: 202469 - DNA, 25 bp, probe
gctggatggtggaagcagttcactt

SEQ ID NO: 202470 - DNA, 25 bp, probe
gctggatggtggaagcagttcactt

SEQ ID NO: 202471 - DNA, 25 bp, probe
gctggtgggcaatggtgtggtctgc

SEQ ID NO: 202472 - DNA, 25 bp, probe
gctggtaggggcactgtgtgcactg

SEQ ID NO: 202473 - DNA, 25 bp, probe
gctggagggggactttgtgctcatg

SEQ ID NO: 202474 - DNA, 25 bp, probe
gctggagaagaggacttcaggaatt

SEQ ID NO: 202475 - DNA, 25 bp, probe
gctggacaaggccacatagagtgtt

SEQ ID NO: 202476 - DNA, 25 bp, probe
gctggacaaggccacatagagtgtt

SEQ ID NO: 202477 - DNA, 25 bp, probe
gctggcaagagtcggcacaatgagg

SEQ ID NO: 202478 - DNA, 25 bp, probe
gctggcagtgatggggccaagattg

SEQ ID NO: 202479 - DNA, 25 bp, probe
gctggcgagtggggtgagtgctctg

SEQ ID NO: 202480 - DNA, 25 bp, probe
gctggctacggaagctcagtgctgt

SEQ ID NO: 202481 - DNA, 25 bp, probe
gctggctatgggagtctgagtgtgc

SEQ ID NO: 202482 - DNA, 25 bp, probe
gctggctatgggagcctggaggccg

SEQ ID NO: 202483 - DNA, 25 bp, probe
gctggactcaggaagccggagtcgc

SEQ ID NO: 202484 - DNA, 25 bp, probe
gctgaggccttgaagacggggacac

SEQ ID NO: 202485 - DNA, 25 bp, probe
gctggtggttctggacatggaggag

SEQ ID NO: 202486 - DNA, 25 bp, probe
gctggtggaacaagccgaggcagag

SEQ ID NO: 202487 - DNA, 25 bp, probe
gctgggggatgggcctgagtgagag

SEQ ID NO: 202488 - DNA, 25 bp, probe
gctggcagaaggacccaggtgagcg

SEQ ID NO: 202489 - DNA, 25 bp, probe
gctggctggatggtgagtcacttga

SEQ ID NO: 202490 - DNA, 25 bp, probe
gctggctatgagcaggtcaccaatg

SEQ ID NO: 202491 - DNA, 25 bp, probe
gctgtgcctgagaggtactgcctct

SEQ ID NO: 202492 - DNA, 25 bp, probe
gctgtactgagaggggtcaggctgc

SEQ ID NO: 202493 - DNA, 25 bp, probe
gctgagtcagatctgggtctgccgc

SEQ ID NO: 202494 - DNA, 25 bp, probe
gctggtcatgagattgtgttgtcct

SEQ ID NO: 202495 - DNA, 25 bp, probe
gctggtcatgagattgtgttgtcct

SEQ ID NO: 202496 - DNA, 25 bp, probe
gctgtgttagtttcgttgtcagaac

SEQ ID NO: 202497 - DNA, 25 bp, probe
gctgttttttttaatgtcaacacca

SEQ ID NO: 202498 - DNA, 25 bp, probe
gctgaggtttttttcagtatgaacc

SEQ ID NO: 202499 - DNA, 25 bp, probe
gctgtgcagtcttttgttactggga

SEQ ID NO: 202500 - DNA, 25 bp, probe
gctgtgcagtcttttgttactggga

SEQ ID NO: 202501 - DNA, 25 bp, probe
gctgtcaggagtattctgactggaa

SEQ ID NO: 202502 - DNA, 25 bp, probe
gctgtgggagtgcactgtgctctgg

SEQ ID NO: 202503 - DNA, 25 bp, probe
gctggggcagaggatgttgtaccgg

SEQ ID NO: 202504 - DNA, 25 bp, probe
gctggaggacaatgactatggccgg

SEQ ID NO: 202505 - DNA, 25 bp, probe
gctggtgaacaatgcctaccgggga

SEQ ID NO: 202506 - DNA, 25 bp, probe
gctggtgaacaatgcctaccgggga

SEQ ID NO: 202507 - DNA, 25 bp, probe
gctggtgaacaatgcctaccgggga

SEQ ID NO: 202508 - DNA, 25 bp, probe
gctgctggaaaaaccgtccggagga

SEQ ID NO: 202509 - DNA, 25 bp, probe
gctgtgttagtttcgttgtcagaac

SEQ ID NO: 202510 - DNA, 25 bp, probe
gctggtttatgttctaggaactctt

SEQ ID NO: 202511 - DNA, 25 bp, probe
gctggttaagtttagctgacccttc

SEQ ID NO: 202512 - DNA, 25 bp, probe
gctggatgctaacttgatactaacc

SEQ ID NO: 202513 - DNA, 25 bp, probe
gctggagctagacgtggacaagcgc

SEQ ID NO: 202514 - DNA, 25 bp, probe
gctgggtatgctctgtgacaaggct

SEQ ID NO: 202515 - DNA, 25 bp, probe
gctccagtttttaacgatggttcca

SEQ ID NO: 202516 - DNA, 25 bp, probe
gctccagtttttaacgatggttcca

SEQ ID NO: 202517 - DNA, 25 bp, probe
gctcaagttcttgaccgaatcttcc

SEQ ID NO: 202518 - DNA, 25 bp, probe
gcagaagttcggcaccttatttctc

SEQ ID NO: 202519 - DNA, 25 bp, probe
gctgtgtcttgggaacctgtgatta

SEQ ID NO: 202520 - DNA, 25 bp, probe
gctgtttctagtgaccctgagatgt

SEQ ID NO: 202521 - DNA, 25 bp, probe
gctgtttctggagagccacacattt

SEQ ID NO: 202522 - DNA, 25 bp, probe
gctgtttctgaaagtagccccattc

SEQ ID NO: 202523 - DNA, 25 bp, probe
gctgtttatgcatagataatctctc

SEQ ID NO: 202524 - DNA, 25 bp, probe
gctgtcattagcagtagaacctctg

SEQ ID NO: 202525 - DNA, 25 bp, probe
gctggatgtgacaggtggaccattc

SEQ ID NO: 202526 - DNA, 25 bp, probe
gctgggcttcctaggcagaaattca

SEQ ID NO: 202527 - DNA, 25 bp, probe
gctgggctccagttacaaaagtatc

SEQ ID NO: 202528 - DNA, 25 bp, probe
gctgggctccagttacaaaagtatc

SEQ ID NO: 202529 - DNA, 25 bp, probe
gctgtacctgcgtctaaaaaggccc

SEQ ID NO: 202530 - DNA, 25 bp, probe
gctgtactacgacaatgagaagtgc

SEQ ID NO: 202531 - DNA, 25 bp, probe
gctgtttcctagctaggagcaggct

SEQ ID NO: 202532 - DNA, 25 bp, probe
gctgtatgtctcgtggtaggactgt

SEQ ID NO: 202533 - DNA, 25 bp, probe
gctggatgtcttgggagagtatctt

SEQ ID NO: 202534 - DNA, 25 bp, probe
gctggcagttcggctagatttctgt

SEQ ID NO: 202535 - DNA, 25 bp, probe
gctgaagttagcctactcttctgtc

SEQ ID NO: 202536 - DNA, 25 bp, probe
gctgggcttagatcattcctcagtg

SEQ ID NO: 202537 - DNA, 25 bp, probe
gctggatgcccagggattcctgaag

SEQ ID NO: 202538 - DNA, 25 bp, probe
gctggatcaccaaggagtccaagga

SEQ ID NO: 202539 - DNA, 25 bp, probe
gctgtggagccaaggcggctccagg

SEQ ID NO: 202540 - DNA, 25 bp, probe
gctggagacacaggacgcgctgtac

SEQ ID NO: 202541 - DNA, 25 bp, probe
gctgggatacggtgattgctagttg

SEQ ID NO: 202542 - DNA, 25 bp, probe
gtcacttacggatgagtctgaaggc

SEQ ID NO: 202543 - DNA, 25 bp, probe
gtcacttacggatgagtctgaaggc

SEQ ID NO: 202544 - DNA, 25 bp, probe
gcaccttaaggaaggtaaaagccat

SEQ ID NO: 202545 - DNA, 25 bp, probe
gctctcctagggaatggggaaaggc

SEQ ID NO: 202546 - DNA, 25 bp, probe
gctctcctagggaatggggaaaggc

SEQ ID NO: 202547 - DNA, 25 bp, probe
gctctcctagggaatggggaaaggc

SEQ ID NO: 202548 - DNA, 25 bp, probe
gctggcaccagtcagcggggagaag

SEQ ID NO: 202549 - DNA, 25 bp, probe
gctggtcctggggacgctggagaag

SEQ ID NO: 202550 - DNA, 25 bp, probe
gctggttctaccaacgtgacaggtg

SEQ ID NO: 202551 - DNA, 25 bp, probe
gctggttataccacactagaggctg

SEQ ID NO: 202552 - DNA, 25 bp, probe
gctggtaacaacagcactttacagt

SEQ ID NO: 202553 - DNA, 25 bp, probe
gctaagccaaacatcattttaagtc

SEQ ID NO: 202554 - DNA, 25 bp, probe
gctaagccaaacatcattttaagtc

SEQ ID NO: 202555 - DNA, 25 bp, probe
gctgactgccaataacattcttcga

SEQ ID NO: 202556 - DNA, 25 bp, probe
gctgacctacgataattatacgacg

SEQ ID NO: 202557 - DNA, 25 bp, probe
gctgacctacgataattatacgacg

SEQ ID NO: 202558 - DNA, 25 bp, probe
gctgacctacgataattatacgacg

SEQ ID NO: 202559 - DNA, 25 bp, probe
gctgatagtatgctaatatcctaaa

SEQ ID NO: 202560 - DNA, 25 bp, probe
gctgatagtatgctaatatcctaaa

SEQ ID NO: 202561 - DNA, 25 bp, probe
gctgaagtatgtttgaactctccag

SEQ ID NO: 202562 - DNA, 25 bp, probe
gctgaaagacattatgacaccgcca

SEQ ID NO: 202563 - DNA, 25 bp, probe
gctgtcaggactaataattcatgcc

SEQ ID NO: 202564 - DNA, 25 bp, probe
gctgtaggactcttgaattcctagg

SEQ ID NO: 202565 - DNA, 25 bp, probe
gctgtaggagcctggtcatctctac

SEQ ID NO: 202566 - DNA, 25 bp, probe
gctgtaggagaatccaattgtacct

SEQ ID NO: 202567 - DNA, 25 bp, probe
gctgatactgtgtgaacaattgtac

SEQ ID NO: 202568 - DNA, 25 bp, probe
gctgattttgaagtgctccatgatg

SEQ ID NO: 202569 - DNA, 25 bp, probe
gctgtgttcatattctgtctagtgt

SEQ ID NO: 202570 - DNA, 25 bp, probe
gctgtttctatgttttatgggaccc

SEQ ID NO: 202571 - DNA, 25 bp, probe
gctgttcttgcatggttcaaaccac

SEQ ID NO: 202572 - DNA, 25 bp, probe
gctgtgctcagaagggctatcatca

SEQ ID NO: 202573 - DNA, 25 bp, probe
gctgtgctcagcagtgctgggccag

SEQ ID NO: 202574 - DNA, 25 bp, probe
gctggacaatctgcatgggcatcac

SEQ ID NO: 202575 - DNA, 25 bp, probe
gctggtagcgctggaggcgctgcac

SEQ ID NO: 202576 - DNA, 25 bp, probe
gctggtggtgcaggacatcgagcaa

SEQ ID NO: 202577 - DNA, 25 bp, probe
gctggtctgtgcagacacagcactg

SEQ ID NO: 202578 - DNA, 25 bp, probe
gctgtgtgctggagacactcggagc

SEQ ID NO: 202579 - DNA, 25 bp, probe
gctgtgtgctggagacactcggagc

SEQ ID NO: 202580 - DNA, 25 bp, probe
gctgtgctggaaggagcgcccagag

SEQ ID NO: 202581 - DNA, 25 bp, probe
gctggacgcgaacagctgccagagc

SEQ ID NO: 202582 - DNA, 25 bp, probe
gctggacgcgaacagctgccagagc

SEQ ID NO: 202583 - DNA, 25 bp, probe
gctgagaagtgaagacctccaacca

SEQ ID NO: 202584 - DNA, 25 bp, probe
gctggaggagatgatcctggagtcc

SEQ ID NO: 202585 - DNA, 25 bp, probe
gctggaggagcccagacaggagtgt

SEQ ID NO: 202586 - DNA, 25 bp, probe
gctggaggagctggagaacgccttc

SEQ ID NO: 202587 - DNA, 25 bp, probe
gctggaggagttggaccacactgtg

SEQ ID NO: 202588 - DNA, 25 bp, probe
gctggtgagagtgtggctacctctg

SEQ ID NO: 202589 - DNA, 25 bp, probe
gctgggaaggctagacttcctcagc

SEQ ID NO: 202590 - DNA, 25 bp, probe
gctgaggagaggtcgaatttactgc

SEQ ID NO: 202591 - DNA, 25 bp, probe
gctgaggaggacggacgttactctg

SEQ ID NO: 202592 - DNA, 25 bp, probe
gctgaggaggacggacgttactctg

SEQ ID NO: 202593 - DNA, 25 bp, probe
gttggagcgaatggaagttgggtga

SEQ ID NO: 202594 - DNA, 25 bp, probe
gctgggagcggaggtcaggtgggga

SEQ ID NO: 202595 - DNA, 25 bp, probe
gctggagtgcagtagcatgatcagg

SEQ ID NO: 202596 - DNA, 25 bp, probe
gctggagtgcagtgatgtgatcttg

SEQ ID NO: 202597 - DNA, 25 bp, probe
gctgtagatgtgcgtgcagtctggc

SEQ ID NO: 202598 - DNA, 25 bp, probe
gctgtagatgtgcgtgcagtctggc

SEQ ID NO: 202599 - DNA, 25 bp, probe
gctgtgagagtgcaggcggggggtg

SEQ ID NO: 202600 - DNA, 25 bp, probe
gctgttgagtccgggcggagggtgg

SEQ ID NO: 202601 - DNA, 25 bp, probe
gctgttgagtccgggcggagggtgg

SEQ ID NO: 202602 - DNA, 25 bp, probe
gctggtgaagccaagcgggagggga

SEQ ID NO: 202603 - DNA, 25 bp, probe
gctggtgaagccaagcgggagggga

SEQ ID NO: 202604 - DNA, 25 bp, probe
gctggtgaagcacagggagagtggg

SEQ ID NO: 202605 - DNA, 25 bp, probe
gctggatctacaagtgggaggatcg

SEQ ID NO: 202606 - DNA, 25 bp, probe
gctggattcctgattgcctggattc

SEQ ID NO: 202607 - DNA, 25 bp, probe
gctggattcctgattgcctggattc

SEQ ID NO: 202608 - DNA, 25 bp, probe
gctggttcctgtgatgagcctgatt

SEQ ID NO: 202609 - DNA, 25 bp, probe
gctggtgacggagcatgcgcagctg

SEQ ID NO: 202610 - DNA, 25 bp, probe
gctggtgacggagcatgcgcagctg

SEQ ID NO: 202611 - DNA, 25 bp, probe
gctgggatcatggaacttgcactgc

SEQ ID NO: 202612 - DNA, 25 bp, probe
gctgggtgcacaagcacttcacgga

SEQ ID NO: 202613 - DNA, 25 bp, probe
gctggtgtccacgttctgcaaggac

SEQ ID NO: 202614 - DNA, 25 bp, probe
gctggtgtccagtagtatgaaggcc

SEQ ID NO: 202615 - DNA, 25 bp, probe
gctgggcctgcacagtcttgaggcc

SEQ ID NO: 202616 - DNA, 25 bp, probe
gctggtcccatgttgtttagtggag

SEQ ID NO: 202617 - DNA, 25 bp, probe
gctggtcccatggatgatcctgggg

SEQ ID NO: 202618 - DNA, 25 bp, probe
gctggtctctatgaatatgctgggg

SEQ ID NO: 202619 - DNA, 25 bp, probe
gctggacctcattaaagtgcatgga

SEQ ID NO: 202620 - DNA, 25 bp, probe
gctggaccgctataggctgcagaag

SEQ ID NO: 202621 - DNA, 25 bp, probe
gctggagacctaggcagtctgcaaa

SEQ ID NO: 202622 - DNA, 25 bp, probe
gctggagaccacgggaggaagcatc

SEQ ID NO: 202623 - DNA, 25 bp, probe
gctgaagacgagcgcgggaaatctc

SEQ ID NO: 202624 - DNA, 25 bp, probe
gctgaggcacggtacggggacctca

SEQ ID NO: 202625 - DNA, 25 bp, probe
gctgtggatgggtggggagcaaatc

SEQ ID NO: 202626 - DNA, 25 bp, probe
gctgcggtggttgtgtgggaaactt

SEQ ID NO: 202627 - DNA, 25 bp, probe
gctgggtgtttgtgtgggataaata

SEQ ID NO: 202628 - DNA, 25 bp, probe
gctgggtctattttgtggggccagt

SEQ ID NO: 202629 - DNA, 25 bp, probe
gctgggtctattttgtggggccagt

SEQ ID NO: 202630 - DNA, 25 bp, probe
gctgtgtggcattgtgagttggggc

SEQ ID NO: 202631 - DNA, 25 bp, probe
gctgtgatgtatggagtgttggctg

SEQ ID NO: 202632 - DNA, 25 bp, probe
gctgtggtgcatggcagcggaggcc

SEQ ID NO: 202633 - DNA, 25 bp, probe
gctggtggaagggcgagaccaacgg

SEQ ID NO: 202634 - DNA, 25 bp, probe
gctggtacaaggggcagcccaagac

SEQ ID NO: 202635 - DNA, 25 bp, probe
gctggagaaaggcgcagacctcaat

SEQ ID NO: 202636 - DNA, 25 bp, probe
gctgaagaacaaccgcaggtcgaat

SEQ ID NO: 202637 - DNA, 25 bp, probe
gctgatacgtaacccaagtagtctg

SEQ ID NO: 202638 - DNA, 25 bp, probe
gctgattcaaccttgccacagtagc

SEQ ID NO: 202639 - DNA, 25 bp, probe
gctcatcctacctgttaggagcagg

SEQ ID NO: 202640 - DNA, 25 bp, probe
gctcatcctacctgttaggagcagg

SEQ ID NO: 202641 - DNA, 25 bp, probe
gctcagttgttctgttgcaaggcgg

SEQ ID NO: 202642 - DNA, 25 bp, probe
gctggtttggcaaggagcctggcga

SEQ ID NO: 202643 - DNA, 25 bp, probe
gctgagttgttaaccagtcgggagc

SEQ ID NO: 202644 - DNA, 25 bp, probe
gctcagtctttaacaagggctagaa

SEQ ID NO: 202645 - DNA, 25 bp, probe
gctcagattatgctaaagtggccaa

SEQ ID NO: 202646 - DNA, 25 bp, probe
gctgcttctgggcataagtcctgca

SEQ ID NO: 202647 - DNA, 25 bp, probe
gctgttcttgtgctcaattgaaaag

SEQ ID NO: 202648 - DNA, 25 bp, probe
gctgctcccgtcgtagtaagaagac

SEQ ID NO: 202649 - DNA, 25 bp, probe
gctacctggtaatgaaggaatacac

SEQ ID NO: 202650 - DNA, 25 bp, probe
gctgattgtgcagaacaaaggacaa

SEQ ID NO: 202651 - DNA, 25 bp, probe
gctgttgggagaatttaggatcttg

SEQ ID NO: 202652 - DNA, 25 bp, probe
gctgttgggagaatttaggatcttg

SEQ ID NO: 202653 - DNA, 25 bp, probe
gctgtgtacgagaaaatgtggtctt

SEQ ID NO: 202654 - DNA, 25 bp, probe
gctgtgctacgaggacgagggtgtc

SEQ ID NO: 202655 - DNA, 25 bp, probe
gctgtcatcaccatgacgacggtgg

SEQ ID NO: 202656 - DNA, 25 bp, probe
gctgtcatcaccatgacgacggtgg

SEQ ID NO: 202657 - DNA, 25 bp, probe
gctgtcccctagtgagggactgtgt

SEQ ID NO: 202658 - DNA, 25 bp, probe
gctgtccccaacagctggggtggca

SEQ ID NO: 202659 - DNA, 25 bp, probe
gctgtcagtctagaaatgggagtcg

SEQ ID NO: 202660 - DNA, 25 bp, probe
gctgtgcccaaggacaagtgggtgc

SEQ ID NO: 202661 - DNA, 25 bp, probe
gctgtccaacactataaagagtaca

SEQ ID NO: 202662 - DNA, 25 bp, probe
gctgtccaacactataaagagtaca

SEQ ID NO: 202663 - DNA, 25 bp, probe
gctgacaggacccttgaaggtcact

SEQ ID NO: 202664 - DNA, 25 bp, probe
gctggggacaggaaccaagtccttt

SEQ ID NO: 202665 - DNA, 25 bp, probe
gctggagggcatgggaaaagtccag

SEQ ID NO: 202666 - DNA, 25 bp, probe
gctggaggagggcaagaccgcctgc

SEQ ID NO: 202667 - DNA, 25 bp, probe
gctggagggtggtagagaccacaag

SEQ ID NO: 202668 - DNA, 25 bp, probe
gctggatggggctcgagaggcagcc

SEQ ID NO: 202669 - DNA, 25 bp, probe
gctggatctgctgtttgaagcgcag

SEQ ID NO: 202670 - DNA, 25 bp, probe
gctgtgttggccttcgaagggtggc

SEQ ID NO: 202671 - DNA, 25 bp, probe
gctgggtgtgactcagtaaagtgga

SEQ ID NO: 202672 - DNA, 25 bp, probe
gctgggtgtggtcatgtacgagatg

SEQ ID NO: 202673 - DNA, 25 bp, probe
gctgggtgtgcgacttggacaaggc

SEQ ID NO: 202674 - DNA, 25 bp, probe
gctgtggatgtcgactcggggaaca

SEQ ID NO: 202675 - DNA, 25 bp, probe
gctgtggtggcggctggtttaaaag

SEQ ID NO: 202676 - DNA, 25 bp, probe
gctggttggtgtagtgctattaaaa

SEQ ID NO: 202677 - DNA, 25 bp, probe
gctggatcgtgtgcatgttggtaaa

SEQ ID NO: 202678 - DNA, 25 bp, probe
gctgcttaatgtgctttaaaagaga

SEQ ID NO: 202679 - DNA, 25 bp, probe
gctgattccagggatgatttaagga

SEQ ID NO: 202680 - DNA, 25 bp, probe
gctgcttctggtgatactttgggtg

SEQ ID NO: 202681 - DNA, 25 bp, probe
gctggtgcttgttgtacctatgggt

SEQ ID NO: 202682 - DNA, 25 bp, probe
gctgggcaagttcactacagcaagt

SEQ ID NO: 202683 - DNA, 25 bp, probe
gctgggcaagttcactacagcaagt

SEQ ID NO: 202684 - DNA, 25 bp, probe
gctgggcaagttcactacagcaagt

SEQ ID NO: 202685 - DNA, 25 bp, probe
gctgggcacgttgagtgaatctcag

SEQ ID NO: 202686 - DNA, 25 bp, probe
gctgtggacgttcagatgcagagca

SEQ ID NO: 202687 - DNA, 25 bp, probe
gctgcaggaccctctgacaaagaag

SEQ ID NO: 202688 - DNA, 25 bp, probe
gctgcaggaccctctgacaaagaag

SEQ ID NO: 202689 - DNA, 25 bp, probe
gctgcaggactttgacctaatcaga

SEQ ID NO: 202690 - DNA, 25 bp, probe
gctgtgattctttgacctgccagct

SEQ ID NO: 202691 - DNA, 25 bp, probe
gctgtgattcttcgaaatctcaaag

SEQ ID NO: 202692 - DNA, 25 bp, probe
gctggatccattccaaatatgagga

SEQ ID NO: 202693 - DNA, 25 bp, probe
gctgcatattgcacccacataggta

SEQ ID NO: 202694 - DNA, 25 bp, probe
gctgtatttggagatcatgggctga

SEQ ID NO: 202695 - DNA, 25 bp, probe
gctgtggttgcagccacaggggcaa

SEQ ID NO: 202696 - DNA, 25 bp, probe
gctgggggcagggcagcacagggaa

SEQ ID NO: 202697 - DNA, 25 bp, probe
gctgggtatccggcagaatgggcat

SEQ ID NO: 202698 - DNA, 25 bp, probe
gctggtttctgaggctgagatggag

SEQ ID NO: 202699 - DNA, 25 bp, probe
gctgggatgttgcaggagctggcat

SEQ ID NO: 202700 - DNA, 25 bp, probe
gctgggcaattggcgggcatggagg

SEQ ID NO: 202701 - DNA, 25 bp, probe
gctggtgaacagtccaggagcagac

SEQ ID NO: 202702 - DNA, 25 bp, probe
gctggggacacggcagtgatgctgc

SEQ ID NO: 202703 - DNA, 25 bp, probe
gctggggacacggcagtgatgctgc

SEQ ID NO: 202704 - DNA, 25 bp, probe
gctgggaggcggcagaatgcagcca

SEQ ID NO: 202705 - DNA, 25 bp, probe
gctggggtgctggcagagggaacca

SEQ ID NO: 202706 - DNA, 25 bp, probe
gctggggtgctggcagagggaacca

SEQ ID NO: 202707 - DNA, 25 bp, probe
gctggggtgctggcagagggaacca

SEQ ID NO: 202708 - DNA, 25 bp, probe
gctggggctgcagaagggaccctgc

SEQ ID NO: 202709 - DNA, 25 bp, probe
tcggggtcaccaacagtacccatca

SEQ ID NO: 202710 - DNA, 25 bp, probe
gctgaaggaaccaacagtccacctc

SEQ ID NO: 202711 - DNA, 25 bp, probe
gctgaagaggagccaggacctcccg

SEQ ID NO: 202712 - DNA, 25 bp, probe
gctgtgaacgtgctgaacctcactc

SEQ ID NO: 202713 - DNA, 25 bp, probe
gctgtgctacgtcaacagcaccatc

SEQ ID NO: 202714 - DNA, 25 bp, probe
gctgatccagctgggaatcacccac

SEQ ID NO: 202715 - DNA, 25 bp, probe
gctgaccacagcctgatattccaga

SEQ ID NO: 202716 - DNA, 25 bp, probe
gctgagcccaggctaaactgccaac

SEQ ID NO: 202717 - DNA, 25 bp, probe
gctgacccagatcctgaaagtgacc

SEQ ID NO: 202718 - DNA, 25 bp, probe
gctgagcttcgccctggaagaagcc

SEQ ID NO: 202719 - DNA, 25 bp, probe
gctcgcaaccaggtgcgcaagaagc

SEQ ID NO: 202720 - DNA, 25 bp, probe
gctgtaatacagacggcaatgcaat

SEQ ID NO: 202721 - DNA, 25 bp, probe
gctgttcgacaagagcttgaattcg

SEQ ID NO: 202722 - DNA, 25 bp, probe
gctggtcaccaaaagcttgatatga

SEQ ID NO: 202723 - DNA, 25 bp, probe
gctggtcctcaaagagggatcttca

SEQ ID NO: 202724 - DNA, 25 bp, probe
gctggtcattaacagggacatgcct

SEQ ID NO: 202725 - DNA, 25 bp, probe
gctggtcattaacagggacatgcct

SEQ ID NO: 202726 - DNA, 25 bp, probe
gctggttctatttaatggacatgag

SEQ ID NO: 202727 - DNA, 25 bp, probe
gctggttgccacatcttagcaagca

SEQ ID NO: 202728 - DNA, 25 bp, probe
gctggttgccacatcttagcaagca

SEQ ID NO: 202729 - DNA, 25 bp, probe
gctgttatgctgtttcctagctagg

SEQ ID NO: 202730 - DNA, 25 bp, probe
gctgcttcagatttggcctaaactg

SEQ ID NO: 202731 - DNA, 25 bp, probe
gctgtcacactaggagggaaagctg

SEQ ID NO: 202732 - DNA, 25 bp, probe
gctgtgccagtatcggaacatcggc

SEQ ID NO: 202733 - DNA, 25 bp, probe
gctgtaatgtctccaggaagcctac

SEQ ID NO: 202734 - DNA, 25 bp, probe
gctgtacatgtcagtagaagatttt

SEQ ID NO: 202735 - DNA, 25 bp, probe
gctgtgctttaggtctggactttgt

SEQ ID NO: 202736 - DNA, 25 bp, probe
gctgtctttgtcaaccatacgtttt

SEQ ID NO: 202737 - DNA, 25 bp, probe
gctgtctttgtcaaccatacgtttt

SEQ ID NO: 202738 - DNA, 25 bp, probe
gctgttctatctcacgagacctttg

SEQ ID NO: 202739 - DNA, 25 bp, probe
gctcggcttttgactggaccgagtg

SEQ ID NO: 202740 - DNA, 25 bp, probe
gctgggttgggaagtgacacgtctg

SEQ ID NO: 202741 - DNA, 25 bp, probe
gctgggttgggaagtgacacgtctg

SEQ ID NO: 202742 - DNA, 25 bp, probe
gctgaggggcggaagatgaagattt

SEQ ID NO: 202743 - DNA, 25 bp, probe
gctgggggcagaataggtagtattt

SEQ ID NO: 202744 - DNA, 25 bp, probe
gctggtggagagatcaggggtttgg

SEQ ID NO: 202745 - DNA, 25 bp, probe
gctggtggcgtgctaatggatgtta

SEQ ID NO: 202746 - DNA, 25 bp, probe
gctggtggcgtgctaatggatgtta

SEQ ID NO: 202747 - DNA, 25 bp, probe
gctggtggagatcatcaaggtgctg

SEQ ID NO: 202748 - DNA, 25 bp, probe
gctggtgaagatggcatcgccagtc

SEQ ID NO: 202749 - DNA, 25 bp, probe
gctgggcacatgaagcaggtcaatg

SEQ ID NO: 202750 - DNA, 25 bp, probe
gctgaggatgatcatgagcggcaac

SEQ ID NO: 202751 - DNA, 25 bp, probe
gctggtgcagatcatcaagaagacg

SEQ ID NO: 202752 - DNA, 25 bp, probe
gctgattgaagccatcaacaatggg

SEQ ID NO: 202753 - DNA, 25 bp, probe
gctggtgtggcgtccagcactgatg

SEQ ID NO: 202754 - DNA, 25 bp, probe
gctggtgtgtacttagctcagatac

SEQ ID NO: 202755 - DNA, 25 bp, probe
gctgatgcgagcactacctcagaat

SEQ ID NO: 202756 - DNA, 25 bp, probe
gctgatgggaactgcaacgtcatta

SEQ ID NO: 202757 - DNA, 25 bp, probe
gctgtggaatggtgcccagctctat

SEQ ID NO: 202758 - DNA, 25 bp, probe
gctgtgggcaggtagcacgcctgct

SEQ ID NO: 202759 - DNA, 25 bp, probe
gctgatgatccgaataactacctgt

SEQ ID NO: 202760 - DNA, 25 bp, probe
gctgtagactgtaaactcctcgtga

SEQ ID NO: 202761 - DNA, 25 bp, probe
gctgtagacattatatacccttggc

SEQ ID NO: 202762 - DNA, 25 bp, probe
gctggtaaagcaattcctccttgtc

SEQ ID NO: 202763 - DNA, 25 bp, probe
gctggtcaaatcagaacacttcttc

SEQ ID NO: 202764 - DNA, 25 bp, probe
gctgtgaaatacctgcatgacctgg

SEQ ID NO: 202765 - DNA, 25 bp, probe
gctgtgatagtctgtgtgcacaatg

SEQ ID NO: 202766 - DNA, 25 bp, probe
gctgttagttggatgccactacacc

SEQ ID NO: 202767 - DNA, 25 bp, probe
gctcgaagggagagccagctccccc

SEQ ID NO: 202768 - DNA, 25 bp, probe
gctgcagaggaggctggaccagtcc

SEQ ID NO: 202769 - DNA, 25 bp, probe
gctgggagagacaagtcacagcgcc

SEQ ID NO: 202770 - DNA, 25 bp, probe
gctgtggagaaatgatgctattgct

SEQ ID NO: 202771 - DNA, 25 bp, probe
gctgtggagaaatgatgctattgct

SEQ ID NO: 202772 - DNA, 25 bp, probe
gctcttgatgtttggcttattgctt

SEQ ID NO: 202773 - DNA, 25 bp, probe
gctgttgttgtctgactgtggctat

SEQ ID NO: 202774 - DNA, 25 bp, probe
gctgtgtgtggaggaacgtggctat

SEQ ID NO: 202775 - DNA, 25 bp, probe
gctgaggggtgtcacgtggtgcaaa

SEQ ID NO: 202776 - DNA, 25 bp, probe
gctgtagggactcatcttgcatggc

SEQ ID NO: 202777 - DNA, 25 bp, probe
gctgtgagccagtattcatttaaga

SEQ ID NO: 202778 - DNA, 25 bp, probe
gctgtgaccagattatctttatggt

SEQ ID NO: 202779 - DNA, 25 bp, probe
gctgtgcaccaggcagattttgggg

SEQ ID NO: 202780 - DNA, 25 bp, probe
gctgatcaccgtctagttgggaaag

SEQ ID NO: 202781 - DNA, 25 bp, probe
gctccctcgctgcgatctattgaaa

SEQ ID NO: 202782 - DNA, 25 bp, probe
gctgaacatctcaggtgccatgtaa

SEQ ID NO: 202783 - DNA, 25 bp, probe
gctgaaatctcagggcactcaaatg

SEQ ID NO: 202784 - DNA, 25 bp, probe
gctgtactattttcactcagaagca

SEQ ID NO: 202785 - DNA, 25 bp, probe
gctgctttgagcattacgagaaggg

SEQ ID NO: 202786 - DNA, 25 bp, probe
gctgctttgagcattacgagaaggg

SEQ ID NO: 202787 - DNA, 25 bp, probe
gctgctttggcgagatcagtatcct

SEQ ID NO: 202788 - DNA, 25 bp, probe
gctgctaaagtcagtagtatcgttt

SEQ ID NO: 202789 - DNA, 25 bp, probe
gctgtaaatgtgctgtagttttcta

SEQ ID NO: 202790 - DNA, 25 bp, probe
gctgaataatgtacgggacttccta

SEQ ID NO: 202791 - DNA, 25 bp, probe
gctgaccaactgacgtatgtttccc

SEQ ID NO: 202792 - DNA, 25 bp, probe
gctgttggaatgagtatgtgattct

SEQ ID NO: 202793 - DNA, 25 bp, probe
gctggtgtaccagttatctgttgct

SEQ ID NO: 202794 - DNA, 25 bp, probe
gctgttgaacccagagctgattcgg

SEQ ID NO: 202795 - DNA, 25 bp, probe
gctgttgaacccagagctgattcgg

SEQ ID NO: 202796 - DNA, 25 bp, probe
gctgaggagacctctgagttcctgg

SEQ ID NO: 202797 - DNA, 25 bp, probe
gctgggagaactttgtggtgctggg

SEQ ID NO: 202798 - DNA, 25 bp, probe
gctgagggagagttctctaggttgg

SEQ ID NO: 202799 - DNA, 25 bp, probe
gctgagggagagttctctaggttgg

SEQ ID NO: 202800 - DNA, 25 bp, probe
gctgatgtgaagttttccgtggctg

SEQ ID NO: 202801 - DNA, 25 bp, probe
gctgaggacaggcttgcctggactt

SEQ ID NO: 202802 - DNA, 25 bp, probe
gctgagaccgtccttgttgaagcag

SEQ ID NO: 202803 - DNA, 25 bp, probe
gctgtccaggtcctttagtcagcgt

SEQ ID NO: 202804 - DNA, 25 bp, probe
gctgtcacatgactcattgagtagt

SEQ ID NO: 202805 - DNA, 25 bp, probe
gctgtccatggtagtcagtatggct

SEQ ID NO: 202806 - DNA, 25 bp, probe
gctgtcactgcggactaggtggcag

SEQ ID NO: 202807 - DNA, 25 bp, probe
gctgtagctgatgcctggggagagg

SEQ ID NO: 202808 - DNA, 25 bp, probe
gctgtgcagctgagcgagttgctga

SEQ ID NO: 202809 - DNA, 25 bp, probe
gctgtgccttggctgttgtatttga

SEQ ID NO: 202810 - DNA, 25 bp, probe
gctgttttgtgactgttacattgtg

SEQ ID NO: 202811 - DNA, 25 bp, probe
gctgtggctcgtttgagggattggg

SEQ ID NO: 202812 - DNA, 25 bp, probe
gctgatcgtggaaatgtggaactgg

SEQ ID NO: 202813 - DNA, 25 bp, probe
gctgatcgtggaaatgtggaactgg

SEQ ID NO: 202814 - DNA, 25 bp, probe
gctggggccatggatgggacaggag

SEQ ID NO: 202815 - DNA, 25 bp, probe
gctggtggcaagcgtggagcaggag

SEQ ID NO: 202816 - DNA, 25 bp, probe
gctgattggcggattggagatgcca

SEQ ID NO: 202817 - DNA, 25 bp, probe
gctgtcggcaggattgctgggctgc

SEQ ID NO: 202818 - DNA, 25 bp, probe
gctggggcaggagctgatgggtgca

SEQ ID NO: 202819 - DNA, 25 bp, probe
gctggtggaggagttgatggtcaaa

SEQ ID NO: 202820 - DNA, 25 bp, probe
gctggggagtagtggatgtctgcaa

SEQ ID NO: 202821 - DNA, 25 bp, probe
gctggggagtagtggatgtctgcaa

SEQ ID NO: 202822 - DNA, 25 bp, probe
gctgatgtggagtggaaatttgcaa

SEQ ID NO: 202823 - DNA, 25 bp, probe
gctgtgtggatggaggaagctgtcc

SEQ ID NO: 202824 - DNA, 25 bp, probe
gctgtttgattatgcagagcatgac

SEQ ID NO: 202825 - DNA, 25 bp, probe
gctgtttgattatgcagagcatgac

SEQ ID NO: 202826 - DNA, 25 bp, probe
gctgtcctgcacaagatcaagcacc

SEQ ID NO: 202827 - DNA, 25 bp, probe
gctgatttgccaagatgcacatcgc

SEQ ID NO: 202828 - DNA, 25 bp, probe
gctgatttgccaagatgcacatcgc

SEQ ID NO: 202829 - DNA, 25 bp, probe
gctgtgtgctgcaattgtccaggcg

SEQ ID NO: 202830 - DNA, 25 bp, probe
gctgggaacatgacccagcctgaaa

SEQ ID NO: 202831 - DNA, 25 bp, probe
gctgggaaacagcctagctctgata

SEQ ID NO: 202832 - DNA, 25 bp, probe
gctgggaaacagcctagctctgata

SEQ ID NO: 202833 - DNA, 25 bp, probe
gctgcaacaaccagtagctcatggg

SEQ ID NO: 202834 - DNA, 25 bp, probe
gctgaccaagccagagattgcgggc

SEQ ID NO: 202835 - DNA, 25 bp, probe
gctgaccaagccagagattgcgggc

SEQ ID NO: 202836 - DNA, 25 bp, probe
gctgtagccctcagaagaccaggca

SEQ ID NO: 202837 - DNA, 25 bp, probe
gctgtagccctcagaagaccaggca

SEQ ID NO: 202838 - DNA, 25 bp, probe
gctgatacctccagatatgagctca

SEQ ID NO: 202839 - DNA, 25 bp, probe
gctggggctgccaagcatgagagaa

SEQ ID NO: 202840 - DNA, 25 bp, probe
gctgggcacgcccagtgagaacatc

SEQ ID NO: 202841 - DNA, 25 bp, probe
gctgggagtgaccggaaacatcaaa

SEQ ID NO: 202842 - DNA, 25 bp, probe
gctgtggagtgaggccagtaagctc

SEQ ID NO: 202843 - DNA, 25 bp, probe
gctgggggaggtggctaatctcagg

SEQ ID NO: 202844 - DNA, 25 bp, probe
gctgagggagagctgcttaatgtgc

SEQ ID NO: 202845 - DNA, 25 bp, probe
gctgaggatacagctcttctcagtg

SEQ ID NO: 202846 - DNA, 25 bp, probe
gctcgatgtaagccattcctgcagc

SEQ ID NO: 202847 - DNA, 25 bp, probe
gctcgatgtaagccattcctgcagc

SEQ ID NO: 202848 - DNA, 25 bp, probe
gctgtgcaataaccttcctagtacc

SEQ ID NO: 202849 - DNA, 25 bp, probe
gctgagaatattctccctttagcag

SEQ ID NO: 202850 - DNA, 25 bp, probe
gctgtgaaattatccatctcttacc

SEQ ID NO: 202851 - DNA, 25 bp, probe
gctgaaaacataacccactctgtcc

SEQ ID NO: 202852 - DNA, 25 bp, probe
gctgaaaacataacccactctgtcc

SEQ ID NO: 202853 - DNA, 25 bp, probe
gctgttaagcaaatgcggcgctctg

SEQ ID NO: 202854 - DNA, 25 bp, probe
gctgtaataaagccggtgcgctgct

SEQ ID NO: 202855 - DNA, 25 bp, probe
gctgggattacaggcgtgagccgcc

SEQ ID NO: 202856 - DNA, 25 bp, probe
gctgggattacaggtgtgcaccacc

SEQ ID NO: 202857 - DNA, 25 bp, probe
gctgggattacaggtgtgagccatc

SEQ ID NO: 202858 - DNA, 25 bp, probe
gctgggattacaggtgtgagccatc

SEQ ID NO: 202859 - DNA, 25 bp, probe
gctactattatcccagtgacgcatc

SEQ ID NO: 202860 - DNA, 25 bp, probe
gctgacttgttgacactgcgagcac

SEQ ID NO: 202861 - DNA, 25 bp, probe
gctacttttcagcctcaagctttac

SEQ ID NO: 202862 - DNA, 25 bp, probe
gctgatcaatttcatcttccttttc

SEQ ID NO: 202863 - DNA, 25 bp, probe
gctgatatacttcactcacttttct

SEQ ID NO: 202864 - DNA, 25 bp, probe
gctaatactagtatattttttacca

SEQ ID NO: 202865 - DNA, 25 bp, probe
gctgatgatgactattttttttttt

SEQ ID NO: 202866 - DNA, 25 bp, probe
gctgggcagtttttctgtattttat

SEQ ID NO: 202867 - DNA, 25 bp, probe
gctgggcagtttttctgtattttat

SEQ ID NO: 202868 - DNA, 25 bp, probe
gctgagcggcttatgttctgaattt

SEQ ID NO: 202869 - DNA, 25 bp, probe
gctgagcagcgtgtttggtgcgtgt

SEQ ID NO: 202870 - DNA, 25 bp, probe
gctgcagatttcctgtgtggggttc

SEQ ID NO: 202871 - DNA, 25 bp, probe
gctgatgtctatgcatttgggactg

SEQ ID NO: 202872 - DNA, 25 bp, probe
gctgtccatttaatgggaatctgct

SEQ ID NO: 202873 - DNA, 25 bp, probe
gctgtctgcattttcttggagaaat

SEQ ID NO: 202874 - DNA, 25 bp, probe
gctgtcactgtctcattaaatatac

SEQ ID NO: 202875 - DNA, 25 bp, probe
gctgtgcctgtatgactggtatacc

SEQ ID NO: 202876 - DNA, 25 bp, probe
gctgtggatgaacaccgtgaacctc

SEQ ID NO: 202877 - DNA, 25 bp, probe
gctgtggtgcggcacatgaggaaac

SEQ ID NO: 202878 - DNA, 25 bp, probe
gctgtgtgtcggacacctggaaggt

SEQ ID NO: 202879 - DNA, 25 bp, probe
gctgtgttccatacagccttggact

SEQ ID NO: 202880 - DNA, 25 bp, probe
gctgttcttatcaatgcactgggca

SEQ ID NO: 202881 - DNA, 25 bp, probe
gctgtgtccatccatcaggtgaaga

SEQ ID NO: 202882 - DNA, 25 bp, probe
gctgtgcaactggagctggtgacaa

SEQ ID NO: 202883 - DNA, 25 bp, probe
gctgtgcagaaggatcgtgcccatg

SEQ ID NO: 202884 - DNA, 25 bp, probe
gctgtgcagaaggatcgtgcccatg

SEQ ID NO: 202885 - DNA, 25 bp, probe
gctgagaagggttgatcctgcatct

SEQ ID NO: 202886 - DNA, 25 bp, probe
gctgcagaagttaacatccccagat

SEQ ID NO: 202887 - DNA, 25 bp, probe
gctgcagaagttaacatccccagat

SEQ ID NO: 202888 - DNA, 25 bp, probe
gctgcaaagttaattcacccacact

SEQ ID NO: 202889 - DNA, 25 bp, probe
gctgcacgaggttttcacctatggc

SEQ ID NO: 202890 - DNA, 25 bp, probe
gctcacagcgtttctatcaacttac

SEQ ID NO: 202891 - DNA, 25 bp, probe
gctcacagcgtttctatcaacttac

SEQ ID NO: 202892 - DNA, 25 bp, probe
gctatcacatctatatccaagttac

SEQ ID NO: 202893 - DNA, 25 bp, probe
gctacgtcaagttctcaatggctac

SEQ ID NO: 202894 - DNA, 25 bp, probe
gctgaagttttgtctcttggtccac

SEQ ID NO: 202895 - DNA, 25 bp, probe
gctgacgttcttgcttttggcgccc

SEQ ID NO: 202896 - DNA, 25 bp, probe
gctgactgtttcattcactgtgcac

SEQ ID NO: 202897 - DNA, 25 bp, probe
gctgactggctcgaaggccatggca

SEQ ID NO: 202898 - DNA, 25 bp, probe
gctgactggctcgaaggccatggca

SEQ ID NO: 202899 - DNA, 25 bp, probe
gctgaaatgcaggaagtggtggcaa

SEQ ID NO: 202900 - DNA, 25 bp, probe
gctgaatatcctgcaggagggccat

SEQ ID NO: 202901 - DNA, 25 bp, probe
gctgaagtcagctcggagggcaact

SEQ ID NO: 202902 - DNA, 25 bp, probe
gctgaagccagctgtggatggggca

SEQ ID NO: 202903 - DNA, 25 bp, probe
gctgaagcgcatcatggaagtggtg

SEQ ID NO: 202904 - DNA, 25 bp, probe
gctgggcacagtgggcaatgggctg

SEQ ID NO: 202905 - DNA, 25 bp, probe
gctgggaagtgctaggcagggctgc

SEQ ID NO: 202906 - DNA, 25 bp, probe
gctgggagctgggagagaggcttcc

SEQ ID NO: 202907 - DNA, 25 bp, probe
gctgggcgtgaggggagacatccgc

SEQ ID NO: 202908 - DNA, 25 bp, probe
gctgaggcctggggatgtgaacaac

SEQ ID NO: 202909 - DNA, 25 bp, probe
gctgaggcagaagaatggcatgaac

SEQ ID NO: 202910 - DNA, 25 bp, probe
gctgatcgcagatctctatggatat

SEQ ID NO: 202911 - DNA, 25 bp, probe
gctgattgcacttgagctctgtggt

SEQ ID NO: 202912 - DNA, 25 bp, probe
gctgttccagtactgcatcatggcc

SEQ ID NO: 202913 - DNA, 25 bp, probe
gctgatcctgaatggcacaggccaa

SEQ ID NO: 202914 - DNA, 25 bp, probe
gctgatcctgaatggcacaggccaa

SEQ ID NO: 202915 - DNA, 25 bp, probe
gctgacgggaatggcactgtcccag

SEQ ID NO: 202916 - DNA, 25 bp, probe
gctgaagcggaatatctccccaaag

SEQ ID NO: 202917 - DNA, 25 bp, probe
gctgggcggagactgtctcctcaag

SEQ ID NO: 202918 - DNA, 25 bp, probe
gctgggcggagactgtctcctcaag

SEQ ID NO: 202919 - DNA, 25 bp, probe
gctcgggtgcagagttcaccctgtg

SEQ ID NO: 202920 - DNA, 25 bp, probe
gctgctggtgggatatccacccttt

SEQ ID NO: 202921 - DNA, 25 bp, probe
gctgtgggggctcatgacacagcct

SEQ ID NO: 202922 - DNA, 25 bp, probe
gctgtgaggagactgctgagaccaa

SEQ ID NO: 202923 - DNA, 25 bp, probe
gctgtgggagatcgtgaccctaggg

SEQ ID NO: 202924 - DNA, 25 bp, probe
gctgtggtgaccatgacaactgtgg

SEQ ID NO: 202925 - DNA, 25 bp, probe
gctgtggtgcacgtgaaccaggagg

SEQ ID NO: 202926 - DNA, 25 bp, probe
gctgtgtcgcacttaaactggagaa

SEQ ID NO: 202927 - DNA, 25 bp, probe
gctgtgttgccacaaacactgcaga

SEQ ID NO: 202928 - DNA, 25 bp, probe
gctgcggatcaagaagacactacaa

SEQ ID NO: 202929 - DNA, 25 bp, probe
gctgtacaagagcaggctttacaag

SEQ ID NO: 202930 - DNA, 25 bp, probe
gctgtagaagatggcacttataacc

SEQ ID NO: 202931 - DNA, 25 bp, probe
gctgaagataggaaccattcaactt

SEQ ID NO: 202932 - DNA, 25 bp, probe
gctgctatttggaatctttaactta

SEQ ID NO: 202933 - DNA, 25 bp, probe
gctgttatatggaatgtctgtaaat

SEQ ID NO: 202934 - DNA, 25 bp, probe
gctgtgtacaggatgtaatattacc

SEQ ID NO: 202935 - DNA, 25 bp, probe
gctgtgtgacggctgcctgaagttc

SEQ ID NO: 202936 - DNA, 25 bp, probe
gcaggcttagtcgtggctactgttc

SEQ ID NO: 202937 - DNA, 25 bp, probe
gctagttagtgccatggcacactgc

SEQ ID NO: 202938 - DNA, 25 bp, probe
gctgactgtagggctgggcagctgg

SEQ ID NO: 202939 - DNA, 25 bp, probe
gctgagctgtaacatgtggacttca

SEQ ID NO: 202940 - DNA, 25 bp, probe
gctgggcttcattagtgaggctgac

SEQ ID NO: 202941 - DNA, 25 bp, probe
gctgggcatgaacaatgaggtgatg

SEQ ID NO: 202942 - DNA, 25 bp, probe
gctgggcatgaacaatgaggtgatg

SEQ ID NO: 202943 - DNA, 25 bp, probe
gctgccggatcacaatgggctcggg

SEQ ID NO: 202944 - DNA, 25 bp, probe
gctgaagttcgtcatggatggcggg

SEQ ID NO: 202945 - DNA, 25 bp, probe
gctgaagtccttccagaccagggac

SEQ ID NO: 202946 - DNA, 25 bp, probe
gctgaagtccttccagaccagggac

SEQ ID NO: 202947 - DNA, 25 bp, probe
gctgaagtccttccagaccagggac

SEQ ID NO: 202948 - DNA, 25 bp, probe
gctgagttcaattccacaccagctg

SEQ ID NO: 202949 - DNA, 25 bp, probe
gctgtgtgtgacatagacaccaggg

SEQ ID NO: 202950 - DNA, 25 bp, probe
gctgtgcggcacaataaagccacgg

SEQ ID NO: 202951 - DNA, 25 bp, probe
gctgtgtgcccattaccagcaatca

SEQ ID NO: 202952 - DNA, 25 bp, probe
gctgtgtgactcaaaccaaatcact

SEQ ID NO: 202953 - DNA, 25 bp, probe
gctgtgtgacatcatagtcctctac

SEQ ID NO: 202954 - DNA, 25 bp, probe
gctgtctgcacttttgttcatgctc

SEQ ID NO: 202955 - DNA, 25 bp, probe
gctgtgcagcttgctgctttcagct

SEQ ID NO: 202956 - DNA, 25 bp, probe
gctgtgcaggctttgcatctgtggc

SEQ ID NO: 202957 - DNA, 25 bp, probe
gctgtatggattagcatcagtgaag

SEQ ID NO: 202958 - DNA, 25 bp, probe
gctgtatggattagcatcagtgaag

SEQ ID NO: 202959 - DNA, 25 bp, probe
gctgaatgcgtccatcacggaaaca

SEQ ID NO: 202960 - DNA, 25 bp, probe
gctcaatggtccccacgaaatgacc

SEQ ID NO: 202961 - DNA, 25 bp, probe
gctcaagttccagcctgagcaaccc

SEQ ID NO: 202962 - DNA, 25 bp, probe
gctccattcctatccatggaatccg

SEQ ID NO: 202963 - DNA, 25 bp, probe
gctgccttcagaataccgcaattta

SEQ ID NO: 202964 - DNA, 25 bp, probe
gctgcgctccggaatccggattgcc

SEQ ID NO: 202965 - DNA, 25 bp, probe
gctgcgctccggaatccggattgcc

SEQ ID NO: 202966 - DNA, 25 bp, probe
gctgcgctccggaatccggattgcc

SEQ ID NO: 202967 - DNA, 25 bp, probe
gctgtgcccctgaatcatgggcacg

SEQ ID NO: 202968 - DNA, 25 bp, probe
gctgtgccctcttgatgtggtgagg

SEQ ID NO: 202969 - DNA, 25 bp, probe
gctgtcacttcttgggcatgtggtt

SEQ ID NO: 202970 - DNA, 25 bp, probe
gctgtcaggatcatgccctgtggca

SEQ ID NO: 202971 - DNA, 25 bp, probe
gctgctcggacactcagaccgagca

SEQ ID NO: 202972 - DNA, 25 bp, probe
gctgctcggacactcagaccgagca

SEQ ID NO: 202973 - DNA, 25 bp, probe
gctgaaggagcatctgtcccagctg

SEQ ID NO: 202974 - DNA, 25 bp, probe
gctgaaggagcatctgtcccagctg

SEQ ID NO: 202975 - DNA, 25 bp, probe
gctgaacgggaggtgagccgcatgg

SEQ ID NO: 202976 - DNA, 25 bp, probe
gctgaaaggtgtggggtcagcgggg

SEQ ID NO: 202977 - DNA, 25 bp, probe
gctgaagattttaggcctcgtggct

SEQ ID NO: 202978 - DNA, 25 bp, probe
gctgatagcactctcgagttctgag

SEQ ID NO: 202979 - DNA, 25 bp, probe
gctgtgagcaatctgcagtctactg

SEQ ID NO: 202980 - DNA, 25 bp, probe
gctgtgagagtcattgtctacgcaa

SEQ ID NO: 202981 - DNA, 25 bp, probe
gctgtagagtccttggcaaatcaca

SEQ ID NO: 202982 - DNA, 25 bp, probe
gctgtcaagttcctccatgataaca

SEQ ID NO: 202983 - DNA, 25 bp, probe
gctgcatcggttcctggcagaggat

SEQ ID NO: 202984 - DNA, 25 bp, probe
gctgtctactctgtggagcacgatg

SEQ ID NO: 202985 - DNA, 25 bp, probe
gctgtcagatttgtgcaagccctgc

SEQ ID NO: 202986 - DNA, 25 bp, probe
gctgtccttggcggaacagcagctg

SEQ ID NO: 202987 - DNA, 25 bp, probe
gctgtccctggggattatcctgttc

SEQ ID NO: 202988 - DNA, 25 bp, probe
gctccctgtggtggatttcacttac

SEQ ID NO: 202989 - DNA, 25 bp, probe
gctccctgtggtggatttcacttac

SEQ ID NO: 202990 - DNA, 25 bp, probe
gctgacgtgtacagattgtggttac

SEQ ID NO: 202991 - DNA, 25 bp, probe
gctgatagagtctgtgttggtcttc

SEQ ID NO: 202992 - DNA, 25 bp, probe
gctgtagatgactacttgggccatc

SEQ ID NO: 202993 - DNA, 25 bp, probe
gctgtcacagaccagcttcagggcc

SEQ ID NO: 202994 - DNA, 25 bp, probe
gctgtcacagaccagcttcagggcc

SEQ ID NO: 202995 - DNA, 25 bp, probe
gctgtcacagaccagcttcagggcc

SEQ ID NO: 202996 - DNA, 25 bp, probe
gctgtacaacgaggtgcagctcccg

SEQ ID NO: 202997 - DNA, 25 bp, probe
gctgaaaaccacggagctccatggc

SEQ ID NO: 202998 - DNA, 25 bp, probe
gctgagatagagcaccgtgccctgg

SEQ ID NO: 202999 - DNA, 25 bp, probe
gctgagggaacaccagtgctctgtc

SEQ ID NO: 203000 - DNA, 25 bp, probe
gctgaggaacaatggcatctctgtc

SEQ ID NO: 203001 - DNA, 25 bp, probe
gctgagcgaagctataggctcttgt

SEQ ID NO: 203002 - DNA, 25 bp, probe
gctgattcaacagtgcatggcctat

SEQ ID NO: 203003 - DNA, 25 bp, probe
gctgatgtgcagagacatccctttt

SEQ ID NO: 203004 - DNA, 25 bp, probe
gctgtgtgatatatgccacaatgtt

SEQ ID NO: 203005 - DNA, 25 bp, probe
gctgtgtgaggattgtcaacatgca

SEQ ID NO: 203006 - DNA, 25 bp, probe
gctgtgctggaaattcatgaagagg

SEQ ID NO: 203007 - DNA, 25 bp, probe
gctgtgctggaaattcatgaagagg

SEQ ID NO: 203008 - DNA, 25 bp, probe
gctgtgctgggcatgaacaatgagg

SEQ ID NO: 203009 - DNA, 25 bp, probe
gctgtgctgggcatgaacaatgagg

SEQ ID NO: 203010 - DNA, 25 bp, probe
gctgtaggctgcctgcgacagatga

SEQ ID NO: 203011 - DNA, 25 bp, probe
gctgtgacctgatgccaaatgagaa

SEQ ID NO: 203012 - DNA, 25 bp, probe
gctgtgcctcgatggcaaacggaag

SEQ ID NO: 203013 - DNA, 25 bp, probe
gctgtccctggagcaaacggagcaa

SEQ ID NO: 203014 - DNA, 25 bp, probe
gctgtccgcggttcaacacggagtc

SEQ ID NO: 203015 - DNA, 25 bp, probe
gctgtaggtggttttgccagagaat

SEQ ID NO: 203016 - DNA, 25 bp, probe
gcagttaggttatttcaattgacaa

SEQ ID NO: 203017 - DNA, 25 bp, probe
gctttagggtcctgcttcatgacaa

SEQ ID NO: 203018 - DNA, 25 bp, probe
gctgtcatagggtccctttgtcagc

SEQ ID NO: 203019 - DNA, 25 bp, probe
gctgtcatagggtccctttgtcagc

SEQ ID NO: 203020 - DNA, 25 bp, probe
gctgaaacaagcttcctcatgatgt

SEQ ID NO: 203021 - DNA, 25 bp, probe
gctgtaacccagtgattatgatgta

SEQ ID NO: 203022 - DNA, 25 bp, probe
gctgagaaaccctgatgtaaagatc

SEQ ID NO: 203023 - DNA, 25 bp, probe
gctgtgaagatgtcccggtagcaaa

SEQ ID NO: 203024 - DNA, 25 bp, probe
gctgatgagaaagccaggaagctga

SEQ ID NO: 203025 - DNA, 25 bp, probe
gctgaagaggcggaagaaagctcgg

SEQ ID NO: 203026 - DNA, 25 bp, probe
gctgaatgagaccacggagacccag

SEQ ID NO: 203027 - DNA, 25 bp, probe
gctgacaggcctagagtggaaccca

SEQ ID NO: 203028 - DNA, 25 bp, probe
gctgtatggtcttgggaggactcca

SEQ ID NO: 203029 - DNA, 25 bp, probe
gctgtatggtcttgggaggactcca

SEQ ID NO: 203030 - DNA, 25 bp, probe
gctgtatccctgttgtgaggttcct

SEQ ID NO: 203031 - DNA, 25 bp, probe
gctgttcagccttctagagagttac

SEQ ID NO: 203032 - DNA, 25 bp, probe
gctgttcagccttctagagagttac

SEQ ID NO: 203033 - DNA, 25 bp, probe
gctgttctgtgtacataaagtcatc

SEQ ID NO: 203034 - DNA, 25 bp, probe
gctgttcctgctgcagatcaaggac

SEQ ID NO: 203035 - DNA, 25 bp, probe
gctgttcctgcagtagaatgggggc

SEQ ID NO: 203036 - DNA, 25 bp, probe
gctgtccccagcaagtgtaggagtg

SEQ ID NO: 203037 - DNA, 25 bp, probe
gctgttcgcctcaaggcggcaaggt

SEQ ID NO: 203038 - DNA, 25 bp, probe
gctgtccttctgcaccgaaatggaa

SEQ ID NO: 203039 - DNA, 25 bp, probe
gctgtcctcctgcacaaatatggaa

SEQ ID NO: 203040 - DNA, 25 bp, probe
gctgtccgcttctagaaagagtgca

SEQ ID NO: 203041 - DNA, 25 bp, probe
gctgtccgcttctagaaagagtgca

SEQ ID NO: 203042 - DNA, 25 bp, probe
gctgtccgcttctagaaagagtgca

SEQ ID NO: 203043 - DNA, 25 bp, probe
gctgtcatgcggtttccaaggtgca

SEQ ID NO: 203044 - DNA, 25 bp, probe
gctgtatgaggagagcttcaggccc

SEQ ID NO: 203045 - DNA, 25 bp, probe
gctgtgcaaggaggcttgctggacc

SEQ ID NO: 203046 - DNA, 25 bp, probe
gctgtgaacgaggactgtgagctca

SEQ ID NO: 203047 - DNA, 25 bp, probe
gctgagaccagggtcttatctctct

SEQ ID NO: 203048 - DNA, 25 bp, probe
gctgagagtctagcactcattttct

SEQ ID NO: 203049 - DNA, 25 bp, probe
gctgagagtctagcactcattttct

SEQ ID NO: 203050 - DNA, 25 bp, probe
gctcagacctgagccattttgtcag

SEQ ID NO: 203051 - DNA, 25 bp, probe
gctgcaacgcgggcaaagttaagac

SEQ ID NO: 203052 - DNA, 25 bp, probe
gctgcaaccctgagaagttacttca

SEQ ID NO: 203053 - DNA, 25 bp, probe
gctcagacatccttggatcgtccac

SEQ ID NO: 203054 - DNA, 25 bp, probe
gctgatggcaccatgtgtggtccag

SEQ ID NO: 203055 - DNA, 25 bp, probe
gctgatggcaccatgtgtggtccag

SEQ ID NO: 203056 - DNA, 25 bp, probe
gctgagtcaggctgagtggactgag

SEQ ID NO: 203057 - DNA, 25 bp, probe
gctgtatcatggcagagatgctgac

SEQ ID NO: 203058 - DNA, 25 bp, probe
gctgactagcagctggactgatttt

SEQ ID NO: 203059 - DNA, 25 bp, probe
gctgacttgctagtgagcttgcttt

SEQ ID NO: 203060 - DNA, 25 bp, probe
gctgacttgctagtgagcttgcttt

SEQ ID NO: 203061 - DNA, 25 bp, probe
gctgatgatctttatggctactttc

SEQ ID NO: 203062 - DNA, 25 bp, probe
gctgatgatctttatggctactttc

SEQ ID NO: 203063 - DNA, 25 bp, probe
gctgaatcctgctatggtaccattc

SEQ ID NO: 203064 - DNA, 25 bp, probe
gctgagacgtctaggaacacaccag

SEQ ID NO: 203065 - DNA, 25 bp, probe
gctgagcacgctcgtggaaaccaca

SEQ ID NO: 203066 - DNA, 25 bp, probe
gctgaccactgcatggggatccaac

SEQ ID NO: 203067 - DNA, 25 bp, probe
gctgactcggaaggaggtctacatc

SEQ ID NO: 203068 - DNA, 25 bp, probe
gctgcatcacggcggagttgtacac

SEQ ID NO: 203069 - DNA, 25 bp, probe
gctccttggcagggatttgtgacac

SEQ ID NO: 203070 - DNA, 25 bp, probe
gctgcgtgtggcagcgttggtggcc

SEQ ID NO: 203071 - DNA, 25 bp, probe
gctgcatggttaaaatagcggcctg

SEQ ID NO: 203072 - DNA, 25 bp, probe
gctgaggcaagaagaatactggcgg

SEQ ID NO: 203073 - DNA, 25 bp, probe
gctgatgataaaaggaagatgccct

SEQ ID NO: 203074 - DNA, 25 bp, probe
gctgtctagcaagggattgtagcac

SEQ ID NO: 203075 - DNA, 25 bp, probe
gctgcatcatgggggagctgttgaa

SEQ ID NO: 203076 - DNA, 25 bp, probe
gctgcatcatgggggagctgttgaa

SEQ ID NO: 203077 - DNA, 25 bp, probe
gctgagcattggttactcctgcaga

SEQ ID NO: 203078 - DNA, 25 bp, probe
gctgaaggagtggaccctgatgctg

SEQ ID NO: 203079 - DNA, 25 bp, probe
gctgaaggagggtcaccgcatggac

SEQ ID NO: 203080 - DNA, 25 bp, probe
gctgtctggcggcaccaccatgtac

SEQ ID NO: 203081 - DNA, 25 bp, probe
gctgtagatgggcttcacatctgta

SEQ ID NO: 203082 - DNA, 25 bp, probe
gctgtagatgagggctatcgactgc

SEQ ID NO: 203083 - DNA, 25 bp, probe
gctgatgagtgttgggactgactcc

SEQ ID NO: 203084 - DNA, 25 bp, probe
gctgcactggtgttgtgagatgcct

SEQ ID NO: 203085 - DNA, 25 bp, probe
gctgcactgcatggctggagtgagc

SEQ ID NO: 203086 - DNA, 25 bp, probe
gctgatgctcagctgctggagaaga

SEQ ID NO: 203087 - DNA, 25 bp, probe
gctgatgctcagctgctggagaaga

SEQ ID NO: 203088 - DNA, 25 bp, probe
gctgatgctcagctgctggagaaga

SEQ ID NO: 203089 - DNA, 25 bp, probe
gctgacatagtggatggacagatgg

SEQ ID NO: 203090 - DNA, 25 bp, probe
gctgactgaggagggcacgactcct

SEQ ID NO: 203091 - DNA, 25 bp, probe
gctgactgaggagggcacgactcct

SEQ ID NO: 203092 - DNA, 25 bp, probe
gctgatcatgggcggcaggatctga

SEQ ID NO: 203093 - DNA, 25 bp, probe
gctgatctactactggaggattaag

SEQ ID NO: 203094 - DNA, 25 bp, probe
gctgattgcctgatgggtgtttact

SEQ ID NO: 203095 - DNA, 25 bp, probe
gctgattgcctgatgggtgtttact

SEQ ID NO: 203096 - DNA, 25 bp, probe
gctgtcctctgaaggcggttgttta

SEQ ID NO: 203097 - DNA, 25 bp, probe
gctgtcacctagagaggctcacttg

SEQ ID NO: 203098 - DNA, 25 bp, probe
gctgaccctggtagaggtcatcatc

SEQ ID NO: 203099 - DNA, 25 bp, probe
gctgtacatcagctatgggccagct

SEQ ID NO: 203100 - DNA, 25 bp, probe
gctgtacatcagctatgggccagct

SEQ ID NO: 203101 - DNA, 25 bp, probe
gctgtaacagttggaggcagcagtg

SEQ ID NO: 203102 - DNA, 25 bp, probe
gctgtcaacatccacactaggcagg

SEQ ID NO: 203103 - DNA, 25 bp, probe
gctgtcactcatgcaacagcagccg

SEQ ID NO: 203104 - DNA, 25 bp, probe
gctgtcactcatgcaacagcagccg

SEQ ID NO: 203105 - DNA, 25 bp, probe
gctgcaactggcaaacctgccgacg

SEQ ID NO: 203106 - DNA, 25 bp, probe
gctgatcttgacaaacctgccaggg

SEQ ID NO: 203107 - DNA, 25 bp, probe
gctgagcattctcagaccttcatgg

SEQ ID NO: 203108 - DNA, 25 bp, probe
gctgagtcgatggagacacttcccg

SEQ ID NO: 203109 - DNA, 25 bp, probe
gctgcagtgcgtgaacgtgtcggtg

SEQ ID NO: 203110 - DNA, 25 bp, probe
gctgagtccgaggaggtgtcggtgt

SEQ ID NO: 203111 - DNA, 25 bp, probe
gctgagttagtgacagggtggcagt

SEQ ID NO: 203112 - DNA, 25 bp, probe
gctgagcgtggtccacggaggcagc

SEQ ID NO: 203113 - DNA, 25 bp, probe
gctccagtgggcaggggtagctagc

SEQ ID NO: 203114 - DNA, 25 bp, probe
tccctatggggtcaggtatgtgagc

SEQ ID NO: 203115 - DNA, 25 bp, probe
gggccagtctggcccggaatgtagc

SEQ ID NO: 203116 - DNA, 25 bp, probe
gctgagggtggaggccggattgtac

SEQ ID NO: 203117 - DNA, 25 bp, probe
gctagaggatgtcggctcgagtttc

SEQ ID NO: 203118 - DNA, 25 bp, probe
gctagaggatgtcggctcgagtttc

SEQ ID NO: 203119 - DNA, 25 bp, probe
gctgagactagtcatgtctctcttt

SEQ ID NO: 203120 - DNA, 25 bp, probe
gctgcagtcatgaagccagatgctc

SEQ ID NO: 203121 - DNA, 25 bp, probe
gctgagtctgattgctgcagcctgg

SEQ ID NO: 203122 - DNA, 25 bp, probe
gctgagcagctttgcattgccaggc

SEQ ID NO: 203123 - DNA, 25 bp, probe
gctcgatgcagtgcttgccaggagc

SEQ ID NO: 203124 - DNA, 25 bp, probe
gctgaagtggcagttccagcggctg

SEQ ID NO: 203125 - DNA, 25 bp, probe
gctgaggtggagactcgcaaggtgg

SEQ ID NO: 203126 - DNA, 25 bp, probe
gctgagctgtatggtccagcagggg

SEQ ID NO: 203127 - DNA, 25 bp, probe
gctgctgcttcaggtgacctataga

SEQ ID NO: 203128 - DNA, 25 bp, probe
gctgctcaacaggatggccatcaaa

SEQ ID NO: 203129 - DNA, 25 bp, probe
gctgctcagtcgggagccagcagcg

SEQ ID NO: 203130 - DNA, 25 bp, probe
gctgctcagtcgggagccagcagcg

SEQ ID NO: 203131 - DNA, 25 bp, probe
gctgacagcctgcaagcttgcatgc

SEQ ID NO: 203132 - DNA, 25 bp, probe
gctgacgagatgcaggatgtgatgc

SEQ ID NO: 203133 - DNA, 25 bp, probe
gctgacctgtgcgattgctgtagcg

SEQ ID NO: 203134 - DNA, 25 bp, probe
gctgagcttgcaggatttgtgatcc

SEQ ID NO: 203135 - DNA, 25 bp, probe
gctgatgagtataattttgtccgtt

SEQ ID NO: 203136 - DNA, 25 bp, probe
gctgacatgtatagttttggcctca

SEQ ID NO: 203137 - DNA, 25 bp, probe
gctgacagtctcagtttgccagtct

SEQ ID NO: 203138 - DNA, 25 bp, probe
gctgttgctctgatgtttgctcagt

SEQ ID NO: 203139 - DNA, 25 bp, probe
gctgattgactttggctgtgccagg

SEQ ID NO: 203140 - DNA, 25 bp, probe
gctgaggagcttggacttgcacttg

SEQ ID NO: 203141 - DNA, 25 bp, probe
gctgcaggacgtggctttgcaagtc

SEQ ID NO: 203142 - DNA, 25 bp, probe
gctgaagcactgggcttccacaggc

SEQ ID NO: 203143 - DNA, 25 bp, probe
gctgaagcagcccgcatattaggcg

SEQ ID NO: 203144 - DNA, 25 bp, probe
gctgaagcagcccgcatattaggcg

SEQ ID NO: 203145 - DNA, 25 bp, probe
gctgttgcagcaggctttccggcag

SEQ ID NO: 203146 - DNA, 25 bp, probe
gctgctggagaaggacccggagaag

SEQ ID NO: 203147 - DNA, 25 bp, probe
gctgttccggcattactatgtcatg

SEQ ID NO: 203148 - DNA, 25 bp, probe
gctgctgaccctggtagaggtcatc

SEQ ID NO: 203149 - DNA, 25 bp, probe
gcttgcaaccatggtaacgtttctg

SEQ ID NO: 203150 - DNA, 25 bp, probe
gcttggatgcctgtaaggatcccgg

SEQ ID NO: 203151 - DNA, 25 bp, probe
gctgttgtcctggtatctgcagatc

SEQ ID NO: 203152 - DNA, 25 bp, probe
gctgtttcactggttatgcggcgga

SEQ ID NO: 203153 - DNA, 25 bp, probe
gctgaagaactgggtatgaggctgg

SEQ ID NO: 203154 - DNA, 25 bp, probe
gctgaagagtctgggtagcttgttt

SEQ ID NO: 203155 - DNA, 25 bp, probe
gctgaagcagtggattaaccttttc

SEQ ID NO: 203156 - DNA, 25 bp, probe
gctgaagtttgttgacccttttcta

SEQ ID NO: 203157 - DNA, 25 bp, probe
gctgaagtttgctagatttataatg

SEQ ID NO: 203158 - DNA, 25 bp, probe
gctgtaatctatgaattctaagtga

SEQ ID NO: 203159 - DNA, 25 bp, probe
gctgattatcattactttcaaatta

SEQ ID NO: 203160 - DNA, 25 bp, probe
gctgttcatgtacttttcattcatt

SEQ ID NO: 203161 - DNA, 25 bp, probe
gctgattattttagtctattttaga

SEQ ID NO: 203162 - DNA, 25 bp, probe
gctgttatattctctgtatctttac

SEQ ID NO: 203163 - DNA, 25 bp, probe
gctgttatattctctgtatctttac

SEQ ID NO: 203164 - DNA, 25 bp, probe
gctgtattaatcacgcgatgttgac

SEQ ID NO: 203165 - DNA, 25 bp, probe
gctgatttacatacctgcagtggtt

SEQ ID NO: 203166 - DNA, 25 bp, probe
gctgttaagatgatcaaggagggct

SEQ ID NO: 203167 - DNA, 25 bp, probe
gctgtttgagagcatccaggagggc

SEQ ID NO: 203168 - DNA, 25 bp, probe
gctgtttgagagatctcatgcgcta

SEQ ID NO: 203169 - DNA, 25 bp, probe
gctgtttgagagatctcatgcgcta

SEQ ID NO: 203170 - DNA, 25 bp, probe
gctgtttgatggatgctacttctat

SEQ ID NO: 203171 - DNA, 25 bp, probe
gctgtttgatggatgctacttctat

SEQ ID NO: 203172 - DNA, 25 bp, probe
gctgcctttttagtcagtttcatgc

SEQ ID NO: 203173 - DNA, 25 bp, probe
gctgcaggtttgttagagtctgttc

SEQ ID NO: 203174 - DNA, 25 bp, probe
gctgcagggttgctgaacttcatgg

SEQ ID NO: 203175 - DNA, 25 bp, probe
gctcgtgtgcttagaaacctcaccc

SEQ ID NO: 203176 - DNA, 25 bp, probe
gctgaggctctgagaactggtactc

SEQ ID NO: 203177 - DNA, 25 bp, probe
gctgatgggcgtggagacggttgtg

SEQ ID NO: 203178 - DNA, 25 bp, probe
gctgagaggccggagaccgtatcat

SEQ ID NO: 203179 - DNA, 25 bp, probe
gctgagaggccagagagacctgagt

SEQ ID NO: 203180 - DNA, 25 bp, probe
gctgaaggacagcatgacacctcct

SEQ ID NO: 203181 - DNA, 25 bp, probe
gctgagattacagattctcttccag

SEQ ID NO: 203182 - DNA, 25 bp, probe
gctgagattgcaaacatgtccttag

SEQ ID NO: 203183 - DNA, 25 bp, probe
gctgcagatcgaggactttctggag

SEQ ID NO: 203184 - DNA, 25 bp, probe
gctgcctcagaaatcttccagggac

SEQ ID NO: 203185 - DNA, 25 bp, probe
gctcctccagaagtgcccggagaag

SEQ ID NO: 203186 - DNA, 25 bp, probe
gctcctccagaagtgcccggagaag

SEQ ID NO: 203187 - DNA, 25 bp, probe
gctcctccagaagtgcccggagaag

SEQ ID NO: 203188 - DNA, 25 bp, probe
gctccccagagatttccctgaggag

SEQ ID NO: 203189 - DNA, 25 bp, probe
gctcgtcaaagatcccaagcggaga

SEQ ID NO: 203190 - DNA, 25 bp, probe
gctcccatagtatccaagacaaagg

SEQ ID NO: 203191 - DNA, 25 bp, probe
gctcccaaatttcaaattttggcac

SEQ ID NO: 203192 - DNA, 25 bp, probe
gctcccaaatttcaaattttggcac

SEQ ID NO: 203193 - DNA, 25 bp, probe
gctcccagaaaacagaagtttctac

SEQ ID NO: 203194 - DNA, 25 bp, probe
gctctccagataatcactagccaga

SEQ ID NO: 203195 - DNA, 25 bp, probe
gctgatccagtaacctcggagacgg

SEQ ID NO: 203196 - DNA, 25 bp, probe
gctgaccgcgcagccgcatgaaccg

SEQ ID NO: 203197 - DNA, 25 bp, probe
gctgaccccagtgaagacaccagat

SEQ ID NO: 203198 - DNA, 25 bp, probe
gctgccccgaggaagacaacaaaga

SEQ ID NO: 203199 - DNA, 25 bp, probe
gctaggctaagtcaacaacagaata

SEQ ID NO: 203200 - DNA, 25 bp, probe
gctgagtgcaaactggacaccaaga

SEQ ID NO: 203201 - DNA, 25 bp, probe
gctgttgctggactgaggaccacac

SEQ ID NO: 203202 - DNA, 25 bp, probe
gctgctaggaagagcgactcaaact

SEQ ID NO: 203203 - DNA, 25 bp, probe
gctgctaggaagagcgactcaaact

SEQ ID NO: 203204 - DNA, 25 bp, probe
gctgaaggaaagcccccttatgctg

SEQ ID NO: 203205 - DNA, 25 bp, probe
gctgaagagcaagggacctagtctc

SEQ ID NO: 203206 - DNA, 25 bp, probe
gctgaccagccagggggctgagttg

SEQ ID NO: 203207 - DNA, 25 bp, probe
gctgaccccaatacttgcagaggtg

SEQ ID NO: 203208 - DNA, 25 bp, probe
gctgattccccagtttagagggcca

SEQ ID NO: 203209 - DNA, 25 bp, probe
gctgattccccagtttagagggcca

SEQ ID NO: 203210 - DNA, 25 bp, probe
gctcttccatccttgaaaaggacct

SEQ ID NO: 203211 - DNA, 25 bp, probe
gctccttgctaaccggtgagtgacc

SEQ ID NO: 203212 - DNA, 25 bp, probe
gctgcctttccacagctataatgga

SEQ ID NO: 203213 - DNA, 25 bp, probe
gctgcatttctcccaagtgtaaaat

SEQ ID NO: 203214 - DNA, 25 bp, probe
gctgtattccacgaggcattgagaa

SEQ ID NO: 203215 - DNA, 25 bp, probe
gctgtatcaccaggtgacattgcag

SEQ ID NO: 203216 - DNA, 25 bp, probe
gctgttgcccaggctggagtgcagt

SEQ ID NO: 203217 - DNA, 25 bp, probe
gctgtttgaagcgcagcaggtgcat

SEQ ID NO: 203218 - DNA, 25 bp, probe
gctgagtgtgtacagcagcgcctgg

SEQ ID NO: 203219 - DNA, 25 bp, probe
gctgcaaagtgacaactgcactgaa

SEQ ID NO: 203220 - DNA, 25 bp, probe
gctgataatggatcaactcctatgc

SEQ ID NO: 203221 - DNA, 25 bp, probe
gctgataatggatcaactcctatgc

SEQ ID NO: 203222 - DNA, 25 bp, probe
gctgaagatggtgaactcatttcct

SEQ ID NO: 203223 - DNA, 25 bp, probe
gctgaagatgagatagaggacattc

SEQ ID NO: 203224 - DNA, 25 bp, probe
gctgacaatcagttaaacacaccgg

SEQ ID NO: 203225 - DNA, 25 bp, probe
gctaagaagttcaccagccctgagc

SEQ ID NO: 203226 - DNA, 25 bp, probe
gctgaaggagttcagctgccagcct

SEQ ID NO: 203227 - DNA, 25 bp, probe
gctgaagacagctttttctgagaca

SEQ ID NO: 203228 - DNA, 25 bp, probe
gctgatagaagcttccctggagaga

SEQ ID NO: 203229 - DNA, 25 bp, probe
gctgatgaagggagctcaggagagc

SEQ ID NO: 203230 - DNA, 25 bp, probe
gctgatgaaaagctccatgtcacag

SEQ ID NO: 203231 - DNA, 25 bp, probe
gctgctgaataacggcttctgggtc

SEQ ID NO: 203232 - DNA, 25 bp, probe
gctgaggtaagctgcttcgggggac

SEQ ID NO: 203233 - DNA, 25 bp, probe
gctgagcggaagggtgagagggagg

SEQ ID NO: 203234 - DNA, 25 bp, probe
gctgacggaagcctgtgactggtgg

SEQ ID NO: 203235 - DNA, 25 bp, probe
gctgacaggtgtgcttgaaagggaa

SEQ ID NO: 203236 - DNA, 25 bp, probe
gctgaagctcttcttgaatgggagc

SEQ ID NO: 203237 - DNA, 25 bp, probe
gctgacatctgtgtttcaagtgggg

SEQ ID NO: 203238 - DNA, 25 bp, probe
gctgacctgcgagtgtgacaagagg

SEQ ID NO: 203239 - DNA, 25 bp, probe
gctgcattgtgggtgatgacgtagg

SEQ ID NO: 203240 - DNA, 25 bp, probe
gctgttgtgcacgtcagggacgctg

SEQ ID NO: 203241 - DNA, 25 bp, probe
gctgcttgagccacacgtgcaagcg

SEQ ID NO: 203242 - DNA, 25 bp, probe
gctgcttgagccacacgtgcaagcg

SEQ ID NO: 203243 - DNA, 25 bp, probe
gctgttcactcatccaggaactggg

SEQ ID NO: 203244 - DNA, 25 bp, probe
gctgttcagctctcacatgaatatc

SEQ ID NO: 203245 - DNA, 25 bp, probe
gctgttcattctggcaatgatttgg

SEQ ID NO: 203246 - DNA, 25 bp, probe
gctgatcccacttgcaatgacttgg

SEQ ID NO: 203247 - DNA, 25 bp, probe
gctgatcccacttgcaatgacttgg

SEQ ID NO: 203248 - DNA, 25 bp, probe
gctgatgcccagaacatttcactgg

SEQ ID NO: 203249 - DNA, 25 bp, probe
gctgaccacagtgttctcaggcagc

SEQ ID NO: 203250 - DNA, 25 bp, probe
gctgaccaacaacctactggacgac

SEQ ID NO: 203251 - DNA, 25 bp, probe
gctgaccaacaatagccagacaccc

SEQ ID NO: 203252 - DNA, 25 bp, probe
gctcagccaccaaaagtaactacct

SEQ ID NO: 203253 - DNA, 25 bp, probe
gctcacgcaagcatggttaacgtcc

SEQ ID NO: 203254 - DNA, 25 bp, probe
gctccagcaaggagttcaagcgcgc

SEQ ID NO: 203255 - DNA, 25 bp, probe
gctgaagacgagagtgaccgcgctg

SEQ ID NO: 203256 - DNA, 25 bp, probe
gctgagtacgtcgtggagtccactg

SEQ ID NO: 203257 - DNA, 25 bp, probe
gctgcagtacaatctggagctggcc

SEQ ID NO: 203258 - DNA, 25 bp, probe
gctgatgtacgagatgatggctgga

SEQ ID NO: 203259 - DNA, 25 bp, probe
gctgacggctgctcattgtgcagga

SEQ ID NO: 203260 - DNA, 25 bp, probe
gctgcagaggcatccatctggcaga

SEQ ID NO: 203261 - DNA, 25 bp, probe
gctgaagcctcagtcatgacgcaac

SEQ ID NO: 203262 - DNA, 25 bp, probe
gctgatgagctccaacataacagaa

SEQ ID NO: 203263 - DNA, 25 bp, probe
gctgagcagctcaccaatcaggact

SEQ ID NO: 203264 - DNA, 25 bp, probe
gctgcagcagctttcgaatcagacc

SEQ ID NO: 203265 - DNA, 25 bp, probe
gctgcagcagctttcgaatcagacc

SEQ ID NO: 203266 - DNA, 25 bp, probe
gctgcaggctttcagctgagcagcc

SEQ ID NO: 203267 - DNA, 25 bp, probe
gctgcaggctttcagctgagcagcc

SEQ ID NO: 203268 - DNA, 25 bp, probe
gctgaggctgtacattgagcagaaa

SEQ ID NO: 203269 - DNA, 25 bp, probe
gctgatgtggacctagagagtgaga

SEQ ID NO: 203270 - DNA, 25 bp, probe
gctgatgtgaatgcgcaggatgcgg

SEQ ID NO: 203271 - DNA, 25 bp, probe
gctgatgctgcggaccaggacaagc

SEQ ID NO: 203272 - DNA, 25 bp, probe
gctgcaggccaagatggcatccatg

SEQ ID NO: 203273 - DNA, 25 bp, probe
gctgcaggtgaagatgcgcaaacgc

SEQ ID NO: 203274 - DNA, 25 bp, probe
gctgcgctgtgaaaaggaggccgtg

SEQ ID NO: 203275 - DNA, 25 bp, probe
gctgagctggaaagggaggagtgtc

SEQ ID NO: 203276 - DNA, 25 bp, probe
gctgagccagccaggagggaagatc

SEQ ID NO: 203277 - DNA, 25 bp, probe
gctgaccgtcggcatggagaacagg

SEQ ID NO: 203278 - DNA, 25 bp, probe
gctgaccgtcggcatggagaacagg

SEQ ID NO: 203279 - DNA, 25 bp, probe
gctgagcagccctacgttgaaaagg

SEQ ID NO: 203280 - DNA, 25 bp, probe
gctgagagctcagatttagaaagct

SEQ ID NO: 203281 - DNA, 25 bp, probe
gctgcaggctcagtactttttatga

SEQ ID NO: 203282 - DNA, 25 bp, probe
gctgcaattcaggatcttttttata

SEQ ID NO: 203283 - DNA, 25 bp, probe
gctgcaattcaggatcttttttata

SEQ ID NO: 203284 - DNA, 25 bp, probe
gctgcttcaaggtcttttctagctg

SEQ ID NO: 203285 - DNA, 25 bp, probe
gctgctctcctgtaactttctagga

SEQ ID NO: 203286 - DNA, 25 bp, probe
gctgccctcagacaagttcaaggac

SEQ ID NO: 203287 - DNA, 25 bp, probe
gctgccgcttgacaaagactactac

SEQ ID NO: 203288 - DNA, 25 bp, probe
gctgagcttcgtcaaagaattcaaa

SEQ ID NO: 203289 - DNA, 25 bp, probe
gctgctcttggttctataaactaga

SEQ ID NO: 203290 - DNA, 25 bp, probe
gctgctcttggttctataaactaga

SEQ ID NO: 203291 - DNA, 25 bp, probe
gtgccttaattcagaacaccaaaag

SEQ ID NO: 203292 - DNA, 25 bp, probe
gctctttcctagctaaccctagata

SEQ ID NO: 203293 - DNA, 25 bp, probe
gctcctcttcaagtaaacgccaagt

SEQ ID NO: 203294 - DNA, 25 bp, probe
gctgctccccaagagacacggggca

SEQ ID NO: 203295 - DNA, 25 bp, probe
gctgctccccaagagacacggggca

SEQ ID NO: 203296 - DNA, 25 bp, probe
gctgcaccccaagaggcgtgagggc

SEQ ID NO: 203297 - DNA, 25 bp, probe
gctgcaccccctcaaggtgaagagc

SEQ ID NO: 203298 - DNA, 25 bp, probe
gctgagccacccaacaagttgtggg

SEQ ID NO: 203299 - DNA, 25 bp, probe
gctcaacaaccaaaacaagttctga

SEQ ID NO: 203300 - DNA, 25 bp, probe
gctccgtaccctaaaatgtcactga

SEQ ID NO: 203301 - DNA, 25 bp, probe
gctccgtaccctaaaatgtcactga

SEQ ID NO: 203302 - DNA, 25 bp, probe
gctgccggactacaacaagatctcc

SEQ ID NO: 203303 - DNA, 25 bp, probe
gctgctttactctggaatagtctca

SEQ ID NO: 203304 - DNA, 25 bp, probe
gctgcttttgctctggaactttgct

SEQ ID NO: 203305 - DNA, 25 bp, probe
gctgcttttgggaggacttcattga

SEQ ID NO: 203306 - DNA, 25 bp, probe
gctcatttggggaggtgtacaaggg

SEQ ID NO: 203307 - DNA, 25 bp, probe
gctgatgttcccctatgggtacaaa

SEQ ID NO: 203308 - DNA, 25 bp, probe
gctagttgcgtcccagggaccaaga

SEQ ID NO: 203309 - DNA, 25 bp, probe
gctagttgcgtcccagggaccaaga

SEQ ID NO: 203310 - DNA, 25 bp, probe
gctagcttttctatggacccagaat

SEQ ID NO: 203311 - DNA, 25 bp, probe
gctacatattctgctttgaaccgta

SEQ ID NO: 203312 - DNA, 25 bp, probe
gctgagaattctcctttagacagtg

SEQ ID NO: 203313 - DNA, 25 bp, probe
gctgagaatgatccctactcaaaat

SEQ ID NO: 203314 - DNA, 25 bp, probe
gctgaaagtctctatgttaaaacct

SEQ ID NO: 203315 - DNA, 25 bp, probe
gctgaaagtctctatgttaaaacct

SEQ ID NO: 203316 - DNA, 25 bp, probe
gctgcatagcagatcttgtaaaata

SEQ ID NO: 203317 - DNA, 25 bp, probe
gctgcatagcagatcttgtaaaata

SEQ ID NO: 203318 - DNA, 25 bp, probe
gctgcatgatcaacctcatggataa

SEQ ID NO: 203319 - DNA, 25 bp, probe
gctgcagcatttacatctgccctaa

SEQ ID NO: 203320 - DNA, 25 bp, probe
gctgcactactacctgcaggcacaa

SEQ ID NO: 203321 - DNA, 25 bp, probe
gctgcactactacctgcaggcacaa

SEQ ID NO: 203322 - DNA, 25 bp, probe
gctgcgtatccagaaggagcaccgt

SEQ ID NO: 203323 - DNA, 25 bp, probe
gctgcgtcctgcagaatgggagcta

SEQ ID NO: 203324 - DNA, 25 bp, probe
gctcgatgactgtgaactgggcatt

SEQ ID NO: 203325 - DNA, 25 bp, probe
gctgcagaactgaagagactaggcg

SEQ ID NO: 203326 - DNA, 25 bp, probe
gctgcggagcctagcagactcaggc

SEQ ID NO: 203327 - DNA, 25 bp, probe
gctgcggagcctagcagactcaggc

SEQ ID NO: 203328 - DNA, 25 bp, probe
gctgcatggagcctggaactgcatc

SEQ ID NO: 203329 - DNA, 25 bp, probe
gctgcatggagcctggaactgcatc

SEQ ID NO: 203330 - DNA, 25 bp, probe
gctgcatggccttctcaaagatcag

SEQ ID NO: 203331 - DNA, 25 bp, probe
gctgcatcttcatctatatcaagcc

SEQ ID NO: 203332 - DNA, 25 bp, probe
gctgcatcttcatctatatcaagcc

SEQ ID NO: 203333 - DNA, 25 bp, probe
gctgcacacgctgctgcatatgaag

SEQ ID NO: 203334 - DNA, 25 bp, probe
gctgcacacgctgctgcatatgaag

SEQ ID NO: 203335 - DNA, 25 bp, probe
gctgacctctccaatatggagattg

SEQ ID NO: 203336 - DNA, 25 bp, probe
gctgacctctctaatatggagatcg

SEQ ID NO: 203337 - DNA, 25 bp, probe
gctgacctttgcaaaggctgccgag

SEQ ID NO: 203338 - DNA, 25 bp, probe
gctgacctttgcaaaggctgccgag

SEQ ID NO: 203339 - DNA, 25 bp, probe
gctgatgacatcagataaggctgaa

SEQ ID NO: 203340 - DNA, 25 bp, probe
gctgcagagcatccgaaagcggcat

SEQ ID NO: 203341 - DNA, 25 bp, probe
gctcacagaccgtcaagtatgctcc

SEQ ID NO: 203342 - DNA, 25 bp, probe
gctgcagttcagcacaagatatgtg

SEQ ID NO: 203343 - DNA, 25 bp, probe
gctgcggtcggagagcgaggagaag

SEQ ID NO: 203344 - DNA, 25 bp, probe
gctcgtggtggtgcaggggacaaga

SEQ ID NO: 203345 - DNA, 25 bp, probe
gctcgggacgccccgaggaagcagc

SEQ ID NO: 203346 - DNA, 25 bp, probe
gctgctgggcacgcccagtgagaac

SEQ ID NO: 203347 - DNA, 25 bp, probe
gctgctgggcacgcccagtgagaac

SEQ ID NO: 203348 - DNA, 25 bp, probe
gctgagggcatggcctacatggaac

SEQ ID NO: 203349 - DNA, 25 bp, probe
gctgcaatggtggcctaatggatta

SEQ ID NO: 203350 - DNA, 25 bp, probe
gctgcagatttgtgtagagttctaa

SEQ ID NO: 203351 - DNA, 25 bp, probe
gctgcactcgtggaggaagttctac

SEQ ID NO: 203352 - DNA, 25 bp, probe
gctgcactggtggaagaagcgatct

SEQ ID NO: 203353 - DNA, 25 bp, probe
gctgcacgagctgcggatagcgagg

SEQ ID NO: 203354 - DNA, 25 bp, probe
gctgcacagggtggcagtcacggag

SEQ ID NO: 203355 - DNA, 25 bp, probe
gctgcacagggtggcagtcacggag

SEQ ID NO: 203356 - DNA, 25 bp, probe
gctgacagcaggtgtgctcctgtgg

SEQ ID NO: 203357 - DNA, 25 bp, probe
gctgacagcaggtgtgctcctgtgg

SEQ ID NO: 203358 - DNA, 25 bp, probe
gctgaagaggagcgccagatggtgg

SEQ ID NO: 203359 - DNA, 25 bp, probe
gctgaagcaaagtgcccatggtggc

SEQ ID NO: 203360 - DNA, 25 bp, probe
gctgaaaccaattggctctggggcc

SEQ ID NO: 203361 - DNA, 25 bp, probe
gctgctacaccatggtgtcggtggc

SEQ ID NO: 203362 - DNA, 25 bp, probe
gctgacagcccatgggcattaaggc

SEQ ID NO: 203363 - DNA, 25 bp, probe
gctgaaccagaagggctacaatgtc

SEQ ID NO: 203364 - DNA, 25 bp, probe
gctgaactctattatggggaatgga

SEQ ID NO: 203365 - DNA, 25 bp, probe
gctgactctatgagatggggaacaa

SEQ ID NO: 203366 - DNA, 25 bp, probe
gctgacctatcagtatcggcagaac

SEQ ID NO: 203367 - DNA, 25 bp, probe
gctgcacgttgactcagccgagtac

SEQ ID NO: 203368 - DNA, 25 bp, probe
gctgcacgcattactgcctagagga

SEQ ID NO: 203369 - DNA, 25 bp, probe
gctccctgtacggtggatggcaccg

SEQ ID NO: 203370 - DNA, 25 bp, probe
gctcccgtggggagatcaagctctg

SEQ ID NO: 203371 - DNA, 25 bp, probe
gctgcttcggggggtgagcaaactt

SEQ ID NO: 203372 - DNA, 25 bp, probe
gctgccctggctgaaggagaaactc

SEQ ID NO: 203373 - DNA, 25 bp, probe
gctccctgggaatgtgacttgagcc

SEQ ID NO: 203374 - DNA, 25 bp, probe
gctcccgtggcctgtagaatagcct

SEQ ID NO: 203375 - DNA, 25 bp, probe
gctcccgggttccatcaaaagagga

SEQ ID NO: 203376 - DNA, 25 bp, probe
gctccgctgacctacgataattata

SEQ ID NO: 203377 - DNA, 25 bp, probe
gctccgctgacctacgataattata

SEQ ID NO: 203378 - DNA, 25 bp, probe
gctccgctgacctacgataattata

SEQ ID NO: 203379 - DNA, 25 bp, probe
gctccagtaactacagtggcattag

SEQ ID NO: 203380 - DNA, 25 bp, probe
gctgctcatgtacctggcagtgggt

SEQ ID NO: 203381 - DNA, 25 bp, probe
gctgcattgtcacgtgtgtgtggag

SEQ ID NO: 203382 - DNA, 25 bp, probe
gctgctgatgtctatgcatttggga

SEQ ID NO: 203383 - DNA, 25 bp, probe
gctgcatcatccttgcaggtggggg

SEQ ID NO: 203384 - DNA, 25 bp, probe
gctgagcaccaggggatgagtggag

SEQ ID NO: 203385 - DNA, 25 bp, probe
gctgcgcaccaggagcaaaaggcgg

SEQ ID NO: 203386 - DNA, 25 bp, probe
gctgccaaggtggcacaggggcctg

SEQ ID NO: 203387 - DNA, 25 bp, probe
gctgaaaggtacctgccaggcacag

SEQ ID NO: 203388 - DNA, 25 bp, probe
gctgagataagagcctggcaaccag

SEQ ID NO: 203389 - DNA, 25 bp, probe
gctgaatatatgaccacgctcaccc

SEQ ID NO: 203390 - DNA, 25 bp, probe
gctgaatatagcaacatatgcatct

SEQ ID NO: 203391 - DNA, 25 bp, probe
gctgaatatagcaacatatgcatct

SEQ ID NO: 203392 - DNA, 25 bp, probe
gctgagcagtgaacctgagcatcat

SEQ ID NO: 203393 - DNA, 25 bp, probe
gctgcaggtgcatctctggacatgc

SEQ ID NO: 203394 - DNA, 25 bp, probe
gctgcagggcatagcatctggcatg

SEQ ID NO: 203395 - DNA, 25 bp, probe
gctgagtgcagctgagcggctgtat

SEQ ID NO: 203396 - DNA, 25 bp, probe
gctgatggagcacgagcagacggac

SEQ ID NO: 203397 - DNA, 25 bp, probe
gctgctgagccgcagagaagtgacg

SEQ ID NO: 203398 - DNA, 25 bp, probe
gctgctggacggtataaggcctttt

SEQ ID NO: 203399 - DNA, 25 bp, probe
gctgctgtgcaagacattagccctt

SEQ ID NO: 203400 - DNA, 25 bp, probe
gctgcttccaggtatctacactgtt

SEQ ID NO: 203401 - DNA, 25 bp, probe
gctgctgctcagatctaaaacttct

SEQ ID NO: 203402 - DNA, 25 bp, probe
gctgctgttgaagaatatattgtca

SEQ ID NO: 203403 - DNA, 25 bp, probe
gctgctgtaataagaactgcaaatc

SEQ ID NO: 203404 - DNA, 25 bp, probe
gctgcttcagtgagaattccctcgt

SEQ ID NO: 203405 - DNA, 25 bp, probe
gctgctcaaggacgacatctactcc

SEQ ID NO: 203406 - DNA, 25 bp, probe
gctgctcaaggacgacatctactcc

SEQ ID NO: 203407 - DNA, 25 bp, probe
gctgctcaaggacgacatctactcc

SEQ ID NO: 203408 - DNA, 25 bp, probe
gctgctgatgtgcagagacatccct

SEQ ID NO: 203409 - DNA, 25 bp, probe
gctgctgatgtgcagagacatccct

SEQ ID NO: 203410 - DNA, 25 bp, probe
gctgcagtgagccaagttcacacca

SEQ ID NO: 203411 - DNA, 25 bp, probe
gctgcagtgtggggctgaccccaat

SEQ ID NO: 203412 - DNA, 25 bp, probe
gctgagtgttgatgtactccatgaa

SEQ ID NO: 203413 - DNA, 25 bp, probe
gctgagggtgcaagccccgagaaat

SEQ ID NO: 203414 - DNA, 25 bp, probe
gctgaagggacagccctgggtctag

SEQ ID NO: 203415 - DNA, 25 bp, probe
gctgaagggacagccctgggtctag

SEQ ID NO: 203416 - DNA, 25 bp, probe
gctaaaggtgaactttggtactccg

SEQ ID NO: 203417 - DNA, 25 bp, probe
gctaaaggtgaactttggtactccg

SEQ ID NO: 203418 - DNA, 25 bp, probe
gctaccaagtgaagatttgggtacc

SEQ ID NO: 203419 - DNA, 25 bp, probe
gctacacagtgggtggtttggagac

SEQ ID NO: 203420 - DNA, 25 bp, probe
gctgacttgattgtgccatttagag

SEQ ID NO: 203421 - DNA, 25 bp, probe
gctgaaacatccacacattgtagag

SEQ ID NO: 203422 - DNA, 25 bp, probe
gctgacaaatttcatatgtgtagca

SEQ ID NO: 203423 - DNA, 25 bp, probe
gctgcatcaagacccatttggcaag

SEQ ID NO: 203424 - DNA, 25 bp, probe
gctgcatcaagacccatttggcaag

SEQ ID NO: 203425 - DNA, 25 bp, probe
gctgcatgccaaggcgcatggggtc

SEQ ID NO: 203426 - DNA, 25 bp, probe
gctgcatggcaagttctgtggttct

SEQ ID NO: 203427 - DNA, 25 bp, probe
gctgcatggcaagttctgtggttct

SEQ ID NO: 203428 - DNA, 25 bp, probe
gctgcatggcaagttctgtggttct

SEQ ID NO: 203429 - DNA, 25 bp, probe
gctgcatggcaagttctgtggttct

SEQ ID NO: 203430 - DNA, 25 bp, probe
gctgcatggcaagttctgtggttct

SEQ ID NO: 203431 - DNA, 25 bp, probe
gctgctgaaatcattcttggtctgc

SEQ ID NO: 203432 - DNA, 25 bp, probe
gctctatcaccttactagtttgcag

SEQ ID NO: 203433 - DNA, 25 bp, probe
gctctatcaccttactagtttgcag

SEQ ID NO: 203434 - DNA, 25 bp, probe
gctctggaactttgcttttagcagg

SEQ ID NO: 203435 - DNA, 25 bp, probe
gctgcggaccgtggtgattgtggtg

SEQ ID NO: 203436 - DNA, 25 bp, probe
gctgcggaccgtggtgattgtggtg

SEQ ID NO: 203437 - DNA, 25 bp, probe
gctgcaggacccagaatcagagtag

SEQ ID NO: 203438 - DNA, 25 bp, probe
gctgcaggaatggcttacatcgagc

SEQ ID NO: 203439 - DNA, 25 bp, probe
gctgcaggaatggcttacatcgagc

SEQ ID NO: 203440 - DNA, 25 bp, probe
gctcaggcaagtatcagatggaccc

SEQ ID NO: 203441 - DNA, 25 bp, probe
gctgcatggcaggtcttaaggaagc

SEQ ID NO: 203442 - DNA, 25 bp, probe
gctgctgccgtgtcattatgcaaag

SEQ ID NO: 203443 - DNA, 25 bp, probe
gctgcagccaggttggcatcaaaag

SEQ ID NO: 203444 - DNA, 25 bp, probe
gctgacctggttggatcaaatgcag

SEQ ID NO: 203445 - DNA, 25 bp, probe
gcatgggtggctacgtaaagatggc

SEQ ID NO: 203446 - DNA, 25 bp, probe
gctgctggtggtactgtttcaggac

SEQ ID NO: 203447 - DNA, 25 bp, probe
gctctgttggtgggtttaggagtta

SEQ ID NO: 203448 - DNA, 25 bp, probe
gctgcttttctgagtgttgatgggg

SEQ ID NO: 203449 - DNA, 25 bp, probe
gctgctggcgtctaagtgtttggga

SEQ ID NO: 203450 - DNA, 25 bp, probe
gctgctggcgtctaagtgtttggga

SEQ ID NO: 203451 - DNA, 25 bp, probe
gctgctgcagctgaaatcggattcg

SEQ ID NO: 203452 - DNA, 25 bp, probe
gctgacgctggttttgtgtacagtg

SEQ ID NO: 203453 - DNA, 25 bp, probe
gctgaagcgacattgttggtcaaga

SEQ ID NO: 203454 - DNA, 25 bp, probe
gctgaacggcgtgcattatcaacat

SEQ ID NO: 203455 - DNA, 25 bp, probe
gctgctacgggcgtctggagaagct

SEQ ID NO: 203456 - DNA, 25 bp, probe
gctgctacaggagctgagagaccct

SEQ ID NO: 203457 - DNA, 25 bp, probe
gctgaagatagagctggagacctac

SEQ ID NO: 203458 - DNA, 25 bp, probe
gctaaaaggcctcggattctgtcac

SEQ ID NO: 203459 - DNA, 25 bp, probe
gctcctaagtcagggtgttatgtcc

SEQ ID NO: 203460 - DNA, 25 bp, probe
gctcctaagtcagggtgttatgtcc

SEQ ID NO: 203461 - DNA, 25 bp, probe
gctgccagggcctggtctttgttgc

SEQ ID NO: 203462 - DNA, 25 bp, probe
gctgccaagaggaacgacttctgta

SEQ ID NO: 203463 - DNA, 25 bp, probe
gctgccaagaggaacgacttctgta

SEQ ID NO: 203464 - DNA, 25 bp, probe
gctgcagcaagagaacaaggtgctg

SEQ ID NO: 203465 - DNA, 25 bp, probe
gctgcagcagccttcaacaaagatg

SEQ ID NO: 203466 - DNA, 25 bp, probe
gctgcagtgcactatagagtcaagt

SEQ ID NO: 203467 - DNA, 25 bp, probe
gctgcctcatgctaagactcagtgg

SEQ ID NO: 203468 - DNA, 25 bp, probe
gctgctctcaagtgcattcatgtgg

SEQ ID NO: 203469 - DNA, 25 bp, probe
gctgactacagatgtgtgagggaac

SEQ ID NO: 203470 - DNA, 25 bp, probe
gctgaccaaaagtctggacaaatca

SEQ ID NO: 203471 - DNA, 25 bp, probe
gctgaccaaaagtctggacaaatca

SEQ ID NO: 203472 - DNA, 25 bp, probe
gctgctaaaaattctggacagagta

SEQ ID NO: 203473 - DNA, 25 bp, probe
gctgctcgaaactgcatgttgcgag

SEQ ID NO: 203474 - DNA, 25 bp, probe
gctgcccacaactgcagtgttgggg

SEQ ID NO: 203475 - DNA, 25 bp, probe
gctgcccatcatcttaatgtttgga

SEQ ID NO: 203476 - DNA, 25 bp, probe
gctgcttctatgtttcatagttggg

SEQ ID NO: 203477 - DNA, 25 bp, probe
gctgctgtttgattatgcagagcat

SEQ ID NO: 203478 - DNA, 25 bp, probe
gctgctgtttgattatgcagagcat

SEQ ID NO: 203479 - DNA, 25 bp, probe
gctgctgtttcatgtggactgaata

SEQ ID NO: 203480 - DNA, 25 bp, probe
gctctgagttcatggatgttaattg

SEQ ID NO: 203481 - DNA, 25 bp, probe
gctctgttgtcacaggatgtttctg

SEQ ID NO: 203482 - DNA, 25 bp, probe
gctgcttctacacatgtggtactct

SEQ ID NO: 203483 - DNA, 25 bp, probe
gctttcaagcagcagtcgacatgta

SEQ ID NO: 203484 - DNA, 25 bp, probe
gctagtcatggagaatgcaggcagt

SEQ ID NO: 203485 - DNA, 25 bp, probe
gctacatcatgaagcattacaggat

SEQ ID NO: 203486 - DNA, 25 bp, probe
gctgacattgaacttggctgcggca

SEQ ID NO: 203487 - DNA, 25 bp, probe
gctgccatataacctgacaggaaca

SEQ ID NO: 203488 - DNA, 25 bp, probe
gctctcttcatccagtaagttcata

SEQ ID NO: 203489 - DNA, 25 bp, probe
gctgcacgtatgcagtatcctatct

SEQ ID NO: 203490 - DNA, 25 bp, probe
gctcgcgcttcatttccctcattgt

SEQ ID NO: 203491 - DNA, 25 bp, probe
gcatccaccaattttcactgcattt

SEQ ID NO: 203492 - DNA, 25 bp, probe
gctccacatcaataaacatgacact

SEQ ID NO: 203493 - DNA, 25 bp, probe
gctgcacctctatgtcaggattacc

SEQ ID NO: 203494 - DNA, 25 bp, probe
gctgcccgtcaaatggatggctccc

SEQ ID NO: 203495 - DNA, 25 bp, probe
gctgcacccatctgcggatggtact

SEQ ID NO: 203496 - DNA, 25 bp, probe
gctgcacccatctgcggatggtact

SEQ ID NO: 203497 - DNA, 25 bp, probe
gctcatcccacatgactgtggtgtc

SEQ ID NO: 203498 - DNA, 25 bp, probe
gctgcccccataactggcagcattc

SEQ ID NO: 203499 - DNA, 25 bp, probe
gctgacgccttactggcaatgcttc

SEQ ID NO: 203500 - DNA, 25 bp, probe
gctgaccgcatgaagtggattgcat

SEQ ID NO: 203501 - DNA, 25 bp, probe
gctgacctctgatatggcatatgtc

SEQ ID NO: 203502 - DNA, 25 bp, probe
gctgacctctgatatggcatatgtc

SEQ ID NO: 203503 - DNA, 25 bp, probe
gctgacagtgcttctacacatttca

SEQ ID NO: 203504 - DNA, 25 bp, probe
gctgcatagctgtattatagcctta

SEQ ID NO: 203505 - DNA, 25 bp, probe
gctgcaacagtatattgcatgctct

SEQ ID NO: 203506 - DNA, 25 bp, probe
gctgcaaggtataattgatggattc

SEQ ID NO: 203507 - DNA, 25 bp, probe
gctgccaactattttgaggatgttg

SEQ ID NO: 203508 - DNA, 25 bp, probe
gctcgcaaatctttgatacggccgg

SEQ ID NO: 203509 - DNA, 25 bp, probe
gctccagcaatcttcttacgtcagc

SEQ ID NO: 203510 - DNA, 25 bp, probe
gctccagcaatcttcttacgtcagc

SEQ ID NO: 203511 - DNA, 25 bp, probe
gctcctcattgtacttcagcgtaaa

SEQ ID NO: 203512 - DNA, 25 bp, probe
gctgctggcacgagcttccagaaaa

SEQ ID NO: 203513 - DNA, 25 bp, probe
gctctggctggaagtgcttaaaata

SEQ ID NO: 203514 - DNA, 25 bp, probe
gctgccgctggaggatccggaaaga

SEQ ID NO: 203515 - DNA, 25 bp, probe
gctgccgctggaggatccggaaaga

SEQ ID NO: 203516 - DNA, 25 bp, probe
gctgctggcatggagtacctggaga

SEQ ID NO: 203517 - DNA, 25 bp, probe
gctgctgcctattgtagatctggga

SEQ ID NO: 203518 - DNA, 25 bp, probe
gctgctgcctattgtagatctggga

SEQ ID NO: 203519 - DNA, 25 bp, probe
gctgctgcagctaggaatgatgtga

SEQ ID NO: 203520 - DNA, 25 bp, probe
gctgctgcagctaggaatgatgtga

SEQ ID NO: 203521 - DNA, 25 bp, probe
gctgcagagcgagtgcaagatggcc

SEQ ID NO: 203522 - DNA, 25 bp, probe
gctgcagagagagatcatgtggcca

SEQ ID NO: 203523 - DNA, 25 bp, probe
gctgcagagagagatcatgtggcca

SEQ ID NO: 203524 - DNA, 25 bp, probe
gctgcagagagagatcatgtggcca

SEQ ID NO: 203525 - DNA, 25 bp, probe
gctcaggagcatggtcgggcaaatc

SEQ ID NO: 203526 - DNA, 25 bp, probe
gctgcagggctcctatgggacagca

SEQ ID NO: 203527 - DNA, 25 bp, probe
gctgcaaagcctttgggacctgtgc

SEQ ID NO: 203528 - DNA, 25 bp, probe
gctgaaacaacctgcagactgtgtg

SEQ ID NO: 203529 - DNA, 25 bp, probe
gctacgtcgccctggacttcgagca

SEQ ID NO: 203530 - DNA, 25 bp, probe
gctccgattcccctggagtgtgaag

SEQ ID NO: 203531 - DNA, 25 bp, probe
gctccgattcccctggagtgtgaag

SEQ ID NO: 203532 - DNA, 25 bp, probe
gctccgattcccctggagtgtgaag

SEQ ID NO: 203533 - DNA, 25 bp, probe
gctccgattcccctggagtgtgaag

SEQ ID NO: 203534 - DNA, 25 bp, probe
gctccgattcccctggagtgtgaag

SEQ ID NO: 203535 - DNA, 25 bp, probe
gctccaagatcccggtcaagtggac

SEQ ID NO: 203536 - DNA, 25 bp, probe
gctcctggacatgcggtactgaggt

SEQ ID NO: 203537 - DNA, 25 bp, probe
gctcctgtagctgcattatttcttg

SEQ ID NO: 203538 - DNA, 25 bp, probe
gctgccatttctggcttatggtttg

SEQ ID NO: 203539 - DNA, 25 bp, probe
gctctgatttccgtgacatggcttt

SEQ ID NO: 203540 - DNA, 25 bp, probe
gctctcaaacacgggaagttcacca

SEQ ID NO: 203541 - DNA, 25 bp, probe
gctgcccaacgggaaatttgtacat

SEQ ID NO: 203542 - DNA, 25 bp, probe
gctgcccaacgggaggatggcttca

SEQ ID NO: 203543 - DNA, 25 bp, probe
gctgcccacaagcatgaggcaggct

SEQ ID NO: 203544 - DNA, 25 bp, probe
gctgactccaagctgcatggcaagt

SEQ ID NO: 203545 - DNA, 25 bp, probe
gctgactccaagctgcatggcaagt

SEQ ID NO: 203546 - DNA, 25 bp, probe
gctgactccaagctgcatggcaagt

SEQ ID NO: 203547 - DNA, 25 bp, probe
gctgactccaagctgcatggcaagt

SEQ ID NO: 203548 - DNA, 25 bp, probe
gctgactccaagctgcatggcaagt

SEQ ID NO: 203549 - DNA, 25 bp, probe
gctgacatcacaaggtgctggcact

SEQ ID NO: 203550 - DNA, 25 bp, probe
gctcctgcagcagggctgctgggtc

SEQ ID NO: 203551 - DNA, 25 bp, probe
gctcctgagagccctgaaggtttta

SEQ ID NO: 203552 - DNA, 25 bp, probe
gctcattaagaagtgcagcaggtta

SEQ ID NO: 203553 - DNA, 25 bp, probe
gctctggccagaaatacagttctcc

SEQ ID NO: 203554 - DNA, 25 bp, probe
gctgctcgcaggaaatggcatttta

SEQ ID NO: 203555 - DNA, 25 bp, probe
gctgcagctgaggaaagagcactct

SEQ ID NO: 203556 - DNA, 25 bp, probe
gctgcagctgaggaaagagcactct

SEQ ID NO: 203557 - DNA, 25 bp, probe
gctcctgggaacgagaactactgat

SEQ ID NO: 203558 - DNA, 25 bp, probe
gctctccggaaggaattctggtttc

SEQ ID NO: 203559 - DNA, 25 bp, probe
gctcccgagcgagcaagctcagttt

SEQ ID NO: 203560 - DNA, 25 bp, probe
gctgcttagggagcaaccaggtgac

SEQ ID NO: 203561 - DNA, 25 bp, probe
gcttgtgaggccggaatccgggctc

SEQ ID NO: 203562 - DNA, 25 bp, probe
gcttgtaggctttaacgtgggcagc

SEQ ID NO: 203563 - DNA, 25 bp, probe
gcttgtaggctttaacgtgggcagc

SEQ ID NO: 203564 - DNA, 25 bp, probe
gctcttcgtgcgagaacctgagaag

SEQ ID NO: 203565 - DNA, 25 bp, probe
gctctttgaagagaagcactactac

SEQ ID NO: 203566 - DNA, 25 bp, probe
gctctttgaagagaagcactactac

SEQ ID NO: 203567 - DNA, 25 bp, probe
gctctttaagagctctattaattgc

SEQ ID NO: 203568 - DNA, 25 bp, probe
gctgcttgtagacatgttaatatag

SEQ ID NO: 203569 - DNA, 25 bp, probe
gctgcattgtaagagttctgtcatg

SEQ ID NO: 203570 - DNA, 25 bp, probe
gctgccggagaacgtcttcatcagc

SEQ ID NO: 203571 - DNA, 25 bp, probe
gctcctagaagactgttgggatgca

SEQ ID NO: 203572 - DNA, 25 bp, probe
gctcctgagcaatttattagtcaag

SEQ ID NO: 203573 - DNA, 25 bp, probe
gctgcctgacaccttcaatgaagca

SEQ ID NO: 203574 - DNA, 25 bp, probe
gctccttatcctggacatgaatgta

SEQ ID NO: 203575 - DNA, 25 bp, probe
gctccttatcctggacatgaatgta

SEQ ID NO: 203576 - DNA, 25 bp, probe
gctgcagtatgtagtcgaagaataa

SEQ ID NO: 203577 - DNA, 25 bp, probe
gctgcaggtggagctggagcaagaa

SEQ ID NO: 203578 - DNA, 25 bp, probe
gctgcggcagggtctggaagcatga

SEQ ID NO: 203579 - DNA, 25 bp, probe
gctgcggcagggtctggaagcatga

SEQ ID NO: 203580 - DNA, 25 bp, probe
gctgcaggaggttatcggcagtgga

SEQ ID NO: 203581 - DNA, 25 bp, probe
gctgcacggatgggtcgagagcgga

SEQ ID NO: 203582 - DNA, 25 bp, probe
gctgctcaggaggaactggacggag

SEQ ID NO: 203583 - DNA, 25 bp, probe
gctgccaggaacaagaagtcagaga

SEQ ID NO: 203584 - DNA, 25 bp, probe
gctaaggaactactagataaccagt

SEQ ID NO: 203585 - DNA, 25 bp, probe
gctcaaaggccttaagtacatccac

SEQ ID NO: 203586 - DNA, 25 bp, probe
gctagctagtaaaaaggacgaccca

SEQ ID NO: 203587 - DNA, 25 bp, probe
gctagtaaacacaagaggacaggtt

SEQ ID NO: 203588 - DNA, 25 bp, probe
gctcggaaacacatggacaaggtgg

SEQ ID NO: 203589 - DNA, 25 bp, probe
gctcaggaaccacaggactctgggg

SEQ ID NO: 203590 - DNA, 25 bp, probe
gctctgaacaaacactgaatcatgt

SEQ ID NO: 203591 - DNA, 25 bp, probe
gctctgtccgcaaaaccaaatctgg

SEQ ID NO: 203592 - DNA, 25 bp, probe
gctgctgtccgaggtgcagctgcaa

SEQ ID NO: 203593 - DNA, 25 bp, probe
gctctgcctcacaatgatgcagtca

SEQ ID NO: 203594 - DNA, 25 bp, probe
gctgcacggccaagagagtcacaat

SEQ ID NO: 203595 - DNA, 25 bp, probe
gctgccatgttgatagtatcacaga

SEQ ID NO: 203596 - DNA, 25 bp, probe
gctgcatcatctatgtgtaacatca

SEQ ID NO: 203597 - DNA, 25 bp, probe
gctgctctaaagtccagactatgga

SEQ ID NO: 203598 - DNA, 25 bp, probe
gctgctctcggagcagggtgatgtg

SEQ ID NO: 203599 - DNA, 25 bp, probe
gctgctcatcgactacgggcagctc

SEQ ID NO: 203600 - DNA, 25 bp, probe
gctgcctagtgctaacgggcatgac

SEQ ID NO: 203601 - DNA, 25 bp, probe
gctgcccagtattgaaggcctcatc

SEQ ID NO: 203602 - DNA, 25 bp, probe
gctgcccagtattgaaggcctcatc

SEQ ID NO: 203603 - DNA, 25 bp, probe
gctgcccagatttgaggcctgacag

SEQ ID NO: 203604 - DNA, 25 bp, probe
gctgctctcagggcaagagccagaa

SEQ ID NO: 203605 - DNA, 25 bp, probe
gctgccacgaccaagtgacagcaat

SEQ ID NO: 203606 - DNA, 25 bp, probe
gctgctgcctgacagaaacacacac

SEQ ID NO: 203607 - DNA, 25 bp, probe
gctgctgcctgacagctgttaattc

SEQ ID NO: 203608 - DNA, 25 bp, probe
gctgaagcgcactgctgttcagata

SEQ ID NO: 203609 - DNA, 25 bp, probe
gctgaagcgcaggtcaattaagaag

SEQ ID NO: 203610 - DNA, 25 bp, probe
gctgccgcagaggtaactgaggaga

SEQ ID NO: 203611 - DNA, 25 bp, probe
gctccagaaggtcaccagagagctt

SEQ ID NO: 203612 - DNA, 25 bp, probe
gctagagaaggaacaaacagggtca

SEQ ID NO: 203613 - DNA, 25 bp, probe
gctagagaaggaacaaacagggtca

SEQ ID NO: 203614 - DNA, 25 bp, probe
gctcaggagggtaaggccagggtgt

SEQ ID NO: 203615 - DNA, 25 bp, probe
gctcagagtctgggtaccccaggct

SEQ ID NO: 203616 - DNA, 25 bp, probe
gctcagagtctgggtaccccaggct

SEQ ID NO: 203617 - DNA, 25 bp, probe
gctccagattctcaaaccagaggct

SEQ ID NO: 203618 - DNA, 25 bp, probe
gctccagattctcaaaccagaggct

SEQ ID NO: 203619 - DNA, 25 bp, probe
gctccagattctcaaaccagaggct

SEQ ID NO: 203620 - DNA, 25 bp, probe
gctgccagagttgaacagaaagctg

SEQ ID NO: 203621 - DNA, 25 bp, probe
gctgctccgattcaggaggaagcgg

SEQ ID NO: 203622 - DNA, 25 bp, probe
gctgctccgattcaggaggaagcgg

SEQ ID NO: 203623 - DNA, 25 bp, probe
gctccaagttcaaggaggtcaagaa

SEQ ID NO: 203624 - DNA, 25 bp, probe
gctccggaatccggattgcccaggg

SEQ ID NO: 203625 - DNA, 25 bp, probe
gctgcccggaaggatttccagaggg

SEQ ID NO: 203626 - DNA, 25 bp, probe
gctctggggaaagtcgtcgcaaggc

SEQ ID NO: 203627 - DNA, 25 bp, probe
gctcgcggtgatgtttgtagcctac

SEQ ID NO: 203628 - DNA, 25 bp, probe
gctcgcggtgatgtttgtagcctac

SEQ ID NO: 203629 - DNA, 25 bp, probe
gctgctgaagtatgtttgaactctc

SEQ ID NO: 203630 - DNA, 25 bp, probe
gctgcaaatgtatgcttggacccta

SEQ ID NO: 203631 - DNA, 25 bp, probe
gctgctaataattggtgggcttgct

SEQ ID NO: 203632 - DNA, 25 bp, probe
gctgctaaaaggcctcggattctgt

SEQ ID NO: 203633 - DNA, 25 bp, probe
gctctgaaaaagacaccgtttcttg

SEQ ID NO: 203634 - DNA, 25 bp, probe
gcttaaaaaggctcatccattcttt

SEQ ID NO: 203635 - DNA, 25 bp, probe
gctcctaatgacacttgaccttgtt

SEQ ID NO: 203636 - DNA, 25 bp, probe
gctcattaaggctctacaacttgga

SEQ ID NO: 203637 - DNA, 25 bp, probe
gctcatccgggctggaattcttggt

SEQ ID NO: 203638 - DNA, 25 bp, probe
gctcccagggaactgaactcttgtg

SEQ ID NO: 203639 - DNA, 25 bp, probe
gctgccgcaggaagacggtcctggt

SEQ ID NO: 203640 - DNA, 25 bp, probe
gctgcctcatgtaacaacgtccaag

SEQ ID NO: 203641 - DNA, 25 bp, probe
gctgcctgcacttacaggcgtttcg

SEQ ID NO: 203642 - DNA, 25 bp, probe
gctcctgagtctccagatgttgttc

SEQ ID NO: 203643 - DNA, 25 bp, probe
gctcctagccatagagcttcctttc

SEQ ID NO: 203644 - DNA, 25 bp, probe
gctgcctatgtaaggccttctagtt

SEQ ID NO: 203645 - DNA, 25 bp, probe
gctgccttgtgaagtgtctctttga

SEQ ID NO: 203646 - DNA, 25 bp, probe
gctgctttggttaatctcttctaaa

SEQ ID NO: 203647 - DNA, 25 bp, probe
gctgcattctggctgagatgctctc

SEQ ID NO: 203648 - DNA, 25 bp, probe
gctgcacattgtctcagagccagta

SEQ ID NO: 203649 - DNA, 25 bp, probe
gctgctgcagtgggtcaagacggat

SEQ ID NO: 203650 - DNA, 25 bp, probe
gctgccactgcaggctgaaggcctg

SEQ ID NO: 203651 - DNA, 25 bp, probe
gctgctccatgaggtgctgaacggg

SEQ ID NO: 203652 - DNA, 25 bp, probe
gctgccctgggtgaacagcagtgag

SEQ ID NO: 203653 - DNA, 25 bp, probe
gctgcaaggggtggactgtgggatg

SEQ ID NO: 203654 - DNA, 25 bp, probe
gctgaaggggcttggtgtttgtaag

SEQ ID NO: 203655 - DNA, 25 bp, probe
gctgaaggggcttggtgtttgtaag

SEQ ID NO: 203656 - DNA, 25 bp, probe
gcatggtagggtcccttcttaacag

SEQ ID NO: 203657 - DNA, 25 bp, probe
gctgcttagaggtaccttctatcag

SEQ ID NO: 203658 - DNA, 25 bp, probe
gctgctcaacaagacctcttgacag

SEQ ID NO: 203659 - DNA, 25 bp, probe
gctgctcagatctaaaacttctgaa

SEQ ID NO: 203660 - DNA, 25 bp, probe
gctctcgactcaagaaggttaacat

SEQ ID NO: 203661 - DNA, 25 bp, probe
gctctggacatatgagggcctacaa

SEQ ID NO: 203662 - DNA, 25 bp, probe
gctgctggacaacgacaggctggtc

SEQ ID NO: 203663 - DNA, 25 bp, probe
gctgcagtgggtcaagacggatcag

SEQ ID NO: 203664 - DNA, 25 bp, probe
gctgcgtggaggtggactcggagac

SEQ ID NO: 203665 - DNA, 25 bp, probe
gctcgggggccagagatcagggccc

SEQ ID NO: 203666 - DNA, 25 bp, probe
gctcccgtcgtagtaagaagaccac

SEQ ID NO: 203667 - DNA, 25 bp, probe
gctgcccaggtgatgaaaacagaac

SEQ ID NO: 203668 - DNA, 25 bp, probe
gctgccccactttgggaaggaagat

SEQ ID NO: 203669 - DNA, 25 bp, probe
gctgccccaattggtggacatggca

SEQ ID NO: 203670 - DNA, 25 bp, probe
gctgcccactgctttgatgggcttc

SEQ ID NO: 203671 - DNA, 25 bp, probe
gctgcaccatttttgtaggcctgca

SEQ ID NO: 203672 - DNA, 25 bp, probe
gctcctcctgataatgtagacctga

SEQ ID NO: 203673 - DNA, 25 bp, probe
gctcctcctgataatgtagacctga

SEQ ID NO: 203674 - DNA, 25 bp, probe
gctcctctatggttgtaatgttgac

SEQ ID NO: 203675 - DNA, 25 bp, probe
gctcctccaccatggaagtcagttc

SEQ ID NO: 203676 - DNA, 25 bp, probe
gctcccctcggagaagagctgttca

SEQ ID NO: 203677 - DNA, 25 bp, probe
gctgcaccctcagaagaggggttga

SEQ ID NO: 203678 - DNA, 25 bp, probe
gctgccgaggcagaaaacggtgtat

SEQ ID NO: 203679 - DNA, 25 bp, probe
gctcacagggctgaaaggggctttt

SEQ ID NO: 203680 - DNA, 25 bp, probe
gctccaggttctgaagaaggccttc

SEQ ID NO: 203681 - DNA, 25 bp, probe
gctccaggtattgccaaggtcaagg

SEQ ID NO: 203682 - DNA, 25 bp, probe
gctcttgaggaagcccaggctcgga

SEQ ID NO: 203683 - DNA, 25 bp, probe
gctctgggaaacactgggcacgaga

SEQ ID NO: 203684 - DNA, 25 bp, probe
gctgctgcgagaagacatccaggcc

SEQ ID NO: 203685 - DNA, 25 bp, probe
gctgcagcaagcagaccttcgcatc

SEQ ID NO: 203686 - DNA, 25 bp, probe
gctgcagaagggaccctgcgtgcag

SEQ ID NO: 203687 - DNA, 25 bp, probe
gctgcagaagggaccctgcgtgcag

SEQ ID NO: 203688 - DNA, 25 bp, probe
gctgcagacggacccgtggatgagt

SEQ ID NO: 203689 - DNA, 25 bp, probe
gctgcaacaccaccacagaagatga

SEQ ID NO: 203690 - DNA, 25 bp, probe
gctcacaatcctgcatcaaggctga

SEQ ID NO: 203691 - DNA, 25 bp, probe
gctccaggccatgctggaggtaccc

SEQ ID NO: 203692 - DNA, 25 bp, probe
gctcagggcctgatggggaacctac

SEQ ID NO: 203693 - DNA, 25 bp, probe
gctcagagaagtgcagggggagcct

SEQ ID NO: 203694 - DNA, 25 bp, probe
gctgcacaaactcagccggaggcgt

SEQ ID NO: 203695 - DNA, 25 bp, probe
gctgctataactgaggatgaggccg

SEQ ID NO: 203696 - DNA, 25 bp, probe
gctgctaacacttgggaggggctgc

SEQ ID NO: 203697 - DNA, 25 bp, probe
gctgcatcccactgtgggtggagag

SEQ ID NO: 203698 - DNA, 25 bp, probe
gctgcacagacccgtgaggggagga

SEQ ID NO: 203699 - DNA, 25 bp, probe
gctgctacccagctggggtgggtga

SEQ ID NO: 203700 - DNA, 25 bp, probe
gctgctacccagctggggtgggtga

SEQ ID NO: 203701 - DNA, 25 bp, probe
gctgctacccagctggggtgggtga

SEQ ID NO: 203702 - DNA, 25 bp, probe
gctcaaccccagggtggttttcagg

SEQ ID NO: 203703 - DNA, 25 bp, probe
gctcagaccggtgggctaggtttca

SEQ ID NO: 203704 - DNA, 25 bp, probe
gctcgcccgagtgggatgattactc

SEQ ID NO: 203705 - DNA, 25 bp, probe
gctgctgtgcactggttgtgatcta

SEQ ID NO: 203706 - DNA, 25 bp, probe
gctgctgtgcaggggtgtggagtag

SEQ ID NO: 203707 - DNA, 25 bp, probe
gctctgtgagaggtggggcagtcaa

SEQ ID NO: 203708 - DNA, 25 bp, probe
gctgcgagagactggtctgtgtgaa

SEQ ID NO: 203709 - DNA, 25 bp, probe
gctgcagggagctgaattcgtgcca

SEQ ID NO: 203710 - DNA, 25 bp, probe
gctgcagctgaaatcggattcgtcc

SEQ ID NO: 203711 - DNA, 25 bp, probe
gctgcgctgaacagagacttccgca

SEQ ID NO: 203712 - DNA, 25 bp, probe
gctgcctagcaaatgagattttgca

SEQ ID NO: 203713 - DNA, 25 bp, probe
gctgcctagcaaatgagattttgca

SEQ ID NO: 203714 - DNA, 25 bp, probe
gctgcactggcaataagtatgtggc

SEQ ID NO: 203715 - DNA, 25 bp, probe
gctgccttgtatcagctgatgctgg

SEQ ID NO: 203716 - DNA, 25 bp, probe
gctgctttcaagtacatgcatggtg

SEQ ID NO: 203717 - DNA, 25 bp, probe
gctgctttcaagtacatgcatggtg

SEQ ID NO: 203718 - DNA, 25 bp, probe
gctctctatcagttaatgctggatt

SEQ ID NO: 203719 - DNA, 25 bp, probe
gctgcgttgatgtaattgctggatt

SEQ ID NO: 203720 - DNA, 25 bp, probe
gctgctttgatatataggacattga

SEQ ID NO: 203721 - DNA, 25 bp, probe
gctgctggtgaattgattcgacctg

SEQ ID NO: 203722 - DNA, 25 bp, probe
gctgcattgtgtatggtgccaccta

SEQ ID NO: 203723 - DNA, 25 bp, probe
gctgcatcttctatgagatggccac

SEQ ID NO: 203724 - DNA, 25 bp, probe
gctgcagcagatcatgcgagggtac

SEQ ID NO: 203725 - DNA, 25 bp, probe
gctgcaggcatgcatgaagccctga

SEQ ID NO: 203726 - DNA, 25 bp, probe
gctcatgccatactgagggccatgg

SEQ ID NO: 203727 - DNA, 25 bp, probe
gctgcagctcattccggaggtgcag

SEQ ID NO: 203728 - DNA, 25 bp, probe
gctgcatgccaaggggaagagcgac

SEQ ID NO: 203729 - DNA, 25 bp, probe
gctgctggaatgggagaagactatc

SEQ ID NO: 203730 - DNA, 25 bp, probe
gctgctggaatgggagaagactatc

SEQ ID NO: 203731 - DNA, 25 bp, probe
gctgctggaatgggagaagactatc

SEQ ID NO: 203732 - DNA, 25 bp, probe
gctgctgtgaatctgaaagacttga

SEQ ID NO: 203733 - DNA, 25 bp, probe
gctctcgttttgtcaggcagctatg

SEQ ID NO: 203734 - DNA, 25 bp, probe
gctgctcgttgctgtaggagctgct

SEQ ID NO: 203735 - DNA, 25 bp, probe
gctgccgtgtcattatgcaaagcct

SEQ ID NO: 203736 - DNA, 25 bp, probe
gctgcaccatgtgtgtgaccagcct

SEQ ID NO: 203737 - DNA, 25 bp, probe
gctgcaccatgtgtgtgaccagcct

SEQ ID NO: 203738 - DNA, 25 bp, probe
gctgccatcagtgtggtcacagcag

SEQ ID NO: 203739 - DNA, 25 bp, probe
gctgctcaacattctggatgccaga

SEQ ID NO: 203740 - DNA, 25 bp, probe
gctgctcaagcacctgaagcacgag

SEQ ID NO: 203741 - DNA, 25 bp, probe
gctgctcaagcacctgaagcacgag

SEQ ID NO: 203742 - DNA, 25 bp, probe
gctgctcatagacccaagagtcaga

SEQ ID NO: 203743 - DNA, 25 bp, probe
gctgctcatagacccaagagtcaga

SEQ ID NO: 203744 - DNA, 25 bp, probe
gctgcttagctgccaggcagatgtc

SEQ ID NO: 203745 - DNA, 25 bp, probe
gctgcttcctggaaagcttcatgtt

SEQ ID NO: 203746 - DNA, 25 bp, probe
gctgcttttgagaaatttgtgaaca

SEQ ID NO: 203747 - DNA, 25 bp, probe
gctgcttttgagaaatttgtgaaca

SEQ ID NO: 203748 - DNA, 25 bp, probe
gctgcgctttgaggaagtcccagat

SEQ ID NO: 203749 - DNA, 25 bp, probe
gctgcatgttttggaagacctcaag

SEQ ID NO: 203750 - DNA, 25 bp, probe
gctgcagatcttgtgacagaaacag

SEQ ID NO: 203751 - DNA, 25 bp, probe
gctgcagacgtttgccagcaactgg

SEQ ID NO: 203752 - DNA, 25 bp, probe
gctcagactggcagtcgaccgatgc

SEQ ID NO: 203753 - DNA, 25 bp, probe
gctccagctgtttgtcaaggcgagt

SEQ ID NO: 203754 - DNA, 25 bp, probe
gctcggtgttgactgacaagcggga

SEQ ID NO: 203755 - DNA, 25 bp, probe
gctctggggtcggaactggagtgca

SEQ ID NO: 203756 - DNA, 25 bp, probe
gctctggtgggaggaaggcgagtcc

SEQ ID NO: 203757 - DNA, 25 bp, probe
gctcggcttggattattctgcaggt

SEQ ID NO: 203758 - DNA, 25 bp, probe
gctcggcttggattattctgcaggt

SEQ ID NO: 203759 - DNA, 25 bp, probe
gctcggctgctggacattgacgaga

SEQ ID NO: 203760 - DNA, 25 bp, probe
gctcagggtgcatagtaggagagac

SEQ ID NO: 203761 - DNA, 25 bp, probe
gctgcaggtgtgcgtcaaggactac

SEQ ID NO: 203762 - DNA, 25 bp, probe
gctgcaggtgtgcgtcaaggactac

SEQ ID NO: 203763 - DNA, 25 bp, probe
gctcggatcagctgctacaggagct

SEQ ID NO: 203764 - DNA, 25 bp, probe
gctctgcttatctagctacacggga

SEQ ID NO: 203765 - DNA, 25 bp, probe
gctctgcttatctagctacacggga

SEQ ID NO: 203766 - DNA, 25 bp, probe
gctgctgtagatgactacttgggcc

SEQ ID NO: 203767 - DNA, 25 bp, probe
gctcatggcgaagagacttgggccc

SEQ ID NO: 203768 - DNA, 25 bp, probe
gctccccaagagacacggggcatcc

SEQ ID NO: 203769 - DNA, 25 bp, probe
gctcccacggagaccgtgggcttgg

SEQ ID NO: 203770 - DNA, 25 bp, probe
gctcctacaggtcggtgggggtgga

SEQ ID NO: 203771 - DNA, 25 bp, probe
gctgccccgggtggtgagcgggcag

SEQ ID NO: 203772 - DNA, 25 bp, probe
gctgcctgccccacttgaaggcagg

SEQ ID NO: 203773 - DNA, 25 bp, probe
gctccagccttaatttgaaagcaga

SEQ ID NO: 203774 - DNA, 25 bp, probe
gctcctgccatttctcattggaagg

SEQ ID NO: 203775 - DNA, 25 bp, probe
gctgctggcacattttcttgcagaa

SEQ ID NO: 203776 - DNA, 25 bp, probe
gctgctgcagaatattttccaagct

SEQ ID NO: 203777 - DNA, 25 bp, probe
gctgcaggaagaatgccttccagga

SEQ ID NO: 203778 - DNA, 25 bp, probe
gctgcaggaagtggattaccactga

SEQ ID NO: 203779 - DNA, 25 bp, probe
gctgctgtgagatggaattccagga

SEQ ID NO: 203780 - DNA, 25 bp, probe
gctcatgaatttggccatgccctgg

SEQ ID NO: 203781 - DNA, 25 bp, probe
gctctggagttctacacacctgagg

SEQ ID NO: 203782 - DNA, 25 bp, probe
gctctggatcctcacagtcatggag

SEQ ID NO: 203783 - DNA, 25 bp, probe
gctctggacaggcactatctgggtt

SEQ ID NO: 203784 - DNA, 25 bp, probe
gctgctggaagactcactgacggag

SEQ ID NO: 203785 - DNA, 25 bp, probe
gctgctacaagagatgtctgcttaa

SEQ ID NO: 203786 - DNA, 25 bp, probe
gctccacagcctcagcttgggagaa

SEQ ID NO: 203787 - DNA, 25 bp, probe
gctccacacctaaccagggaatcag

SEQ ID NO: 203788 - DNA, 25 bp, probe
gctccacacctaaccagggaatcag

SEQ ID NO: 203789 - DNA, 25 bp, probe
gcatgcccaacgatccggagaaaaa

SEQ ID NO: 203790 - DNA, 25 bp, probe
gcatgcccaacgatccggagaaaaa

SEQ ID NO: 203791 - DNA, 25 bp, probe
gctgcggatagcgaggctgcggcag

SEQ ID NO: 203792 - DNA, 25 bp, probe
gctcaggaaggctgtcagacaggct

SEQ ID NO: 203793 - DNA, 25 bp, probe
gcagaaaggctgtggaaagctgtat

SEQ ID NO: 203794 - DNA, 25 bp, probe
gctgctactttgtgcaagaactttg

SEQ ID NO: 203795 - DNA, 25 bp, probe
gctgcttctttggccaagtagtggc

SEQ ID NO: 203796 - DNA, 25 bp, probe
gctgctggttataccacactagagg

SEQ ID NO: 203797 - DNA, 25 bp, probe
gctgctgttctaacctcagtaatgc

SEQ ID NO: 203798 - DNA, 25 bp, probe
gctgctgtctagatcttcttgaatg

SEQ ID NO: 203799 - DNA, 25 bp, probe
gctgctttgtttctttgcaatgcat

SEQ ID NO: 203800 - DNA, 25 bp, probe
gctgctttgtttctttgcaatgcat

SEQ ID NO: 203801 - DNA, 25 bp, probe
gctcgattattccctgtacaatatt

SEQ ID NO: 203802 - DNA, 25 bp, probe
gctgctaaattcccaatgtattgat

SEQ ID NO: 203803 - DNA, 25 bp, probe
gctctaatacattccaactcgtata

SEQ ID NO: 203804 - DNA, 25 bp, probe
gctgctgaaacaacaaataggaatt

SEQ ID NO: 203805 - DNA, 25 bp, probe
gctctaaaagaatatggcgtcatgc

SEQ ID NO: 203806 - DNA, 25 bp, probe
gctgcgagaagacatccaggccacg

SEQ ID NO: 203807 - DNA, 25 bp, probe
gctgctaggcagtattccaaggcac

SEQ ID NO: 203808 - DNA, 25 bp, probe
gctctgattgagtttgccacagtaa

SEQ ID NO: 203809 - DNA, 25 bp, probe
gctctgattgagtttgccacagtaa

SEQ ID NO: 203810 - DNA, 25 bp, probe
gctctgcatgtggtaacttgtgtta

SEQ ID NO: 203811 - DNA, 25 bp, probe
gctcgctttctatgtagtttggtaa

SEQ ID NO: 203812 - DNA, 25 bp, probe
gctcgctttctatgtagtttggtaa

SEQ ID NO: 203813 - DNA, 25 bp, probe
gctcctgtgctttttatttctggct

SEQ ID NO: 203814 - DNA, 25 bp, probe
gctgctgcattattttattttattt

SEQ ID NO: 203815 - DNA, 25 bp, probe
gctgctgctgttacccaaggtattt

SEQ ID NO: 203816 - DNA, 25 bp, probe
gctgctgagtgaggcccagaggatc

SEQ ID NO: 203817 - DNA, 25 bp, probe
gctctggggcccaagggattgtttg

SEQ ID NO: 203818 - DNA, 25 bp, probe
gttggtgacctaaaggcttgttagt

SEQ ID NO: 203819 - DNA, 25 bp, probe
gcttgtacaaccgaaatccggtact

SEQ ID NO: 203820 - DNA, 25 bp, probe
gcttgtacaaccgaaatccggtact

SEQ ID NO: 203821 - DNA, 25 bp, probe
gcattgtacccactaattgcattgg

SEQ ID NO: 203822 - DNA, 25 bp, probe
gcattgtacccactaattgcattgg

SEQ ID NO: 203823 - DNA, 25 bp, probe
gctgctgaaagccgaaattgcctgg

SEQ ID NO: 203824 - DNA, 25 bp, probe
gctctgaaacccgaggatgccaagc

SEQ ID NO: 203825 - DNA, 25 bp, probe
gctgctacacaggagaaggaccaca

SEQ ID NO: 203826 - DNA, 25 bp, probe
gctcgactgctggcagaaggaccca

SEQ ID NO: 203827 - DNA, 25 bp, probe
gctgcgccgggaaattgagatccag

SEQ ID NO: 203828 - DNA, 25 bp, probe
gctcctgggtgtgtcagaggccagc

SEQ ID NO: 203829 - DNA, 25 bp, probe
gctcctgggtgtgtcagaggccagc

SEQ ID NO: 203830 - DNA, 25 bp, probe
gctccaggggggcaggtgtagagtt

SEQ ID NO: 203831 - DNA, 25 bp, probe
gctccgctgtgggggtggggaaatg

SEQ ID NO: 203832 - DNA, 25 bp, probe
gctccgtggaccttctggaggaagg

SEQ ID NO: 203833 - DNA, 25 bp, probe
gctaccttgaacttcagcggtacgc

SEQ ID NO: 203834 - DNA, 25 bp, probe
ggacaggtttgggaaccatcaggtc

SEQ ID NO: 203835 - DNA, 25 bp, probe
gctacaccgagacaagcgctaacgt

SEQ ID NO: 203836 - DNA, 25 bp, probe
gctacaccgagacaagcgctaacgt

SEQ ID NO: 203837 - DNA, 25 bp, probe
gctccagtcggagaatccagaaagg

SEQ ID NO: 203838 - DNA, 25 bp, probe
gctcctgtggagtgaccccaaggag

SEQ ID NO: 203839 - DNA, 25 bp, probe
gctcctgtggagtgaccccaaggag

SEQ ID NO: 203840 - DNA, 25 bp, probe
gctcttccagatgaggcccaaaaca

SEQ ID NO: 203841 - DNA, 25 bp, probe
gctcttctatagtgtcacctaaatt

SEQ ID NO: 203842 - DNA, 25 bp, probe
gctctttaatgatggcacctttcag

SEQ ID NO: 203843 - DNA, 25 bp, probe
gctcttacctcatagaccttcaagg

SEQ ID NO: 203844 - DNA, 25 bp, probe
gctcttacctcatagaccttcaagg

SEQ ID NO: 203845 - DNA, 25 bp, probe
gctcaaacctcattctatccatgac

SEQ ID NO: 203846 - DNA, 25 bp, probe
gctcaaacctcattctatccatgac

SEQ ID NO: 203847 - DNA, 25 bp, probe
gctcacagtcctcatttactggatt

SEQ ID NO: 203848 - DNA, 25 bp, probe
gctcgcctccctttgaaatggatgg

SEQ ID NO: 203849 - DNA, 25 bp, probe
gctccccttctatggatatgtgtgc

SEQ ID NO: 203850 - DNA, 25 bp, probe
gctcctccgacatagtgctagtgtc

SEQ ID NO: 203851 - DNA, 25 bp, probe
gctccttcggcatggtgtatgaggg

SEQ ID NO: 203852 - DNA, 25 bp, probe
gctgctctactcctagggcagatag

SEQ ID NO: 203853 - DNA, 25 bp, probe
gctgctctactcctagggcagatag

SEQ ID NO: 203854 - DNA, 25 bp, probe
gctgctgtcctcaacatggaggaat

SEQ ID NO: 203855 - DNA, 25 bp, probe
gctgctccagtaactacagtggcat

SEQ ID NO: 203856 - DNA, 25 bp, probe
gctgcccagtatctgaaggtggagc

SEQ ID NO: 203857 - DNA, 25 bp, probe
gctccatagctaaagcaacttagac

SEQ ID NO: 203858 - DNA, 25 bp, probe
gctccaagctagcagcagcaatcct

SEQ ID NO: 203859 - DNA, 25 bp, probe
gctgctaagtaccaagctatctttg

SEQ ID NO: 203860 - DNA, 25 bp, probe
gctgctaagtaccaagctatctttg

SEQ ID NO: 203861 - DNA, 25 bp, probe
gctgccacatgttcaaagtacactg

SEQ ID NO: 203862 - DNA, 25 bp, probe
gctgccctcttaaaccagcagtttc

SEQ ID NO: 203863 - DNA, 25 bp, probe
gctcacgcctgtaatcccagcactt

SEQ ID NO: 203864 - DNA, 25 bp, probe
gctctcggtgttgacatccaccggg

SEQ ID NO: 203865 - DNA, 25 bp, probe
gctctggggtgtcaccaagcaaggc

SEQ ID NO: 203866 - DNA, 25 bp, probe
gctctggaaatcctcaccaaagccc

SEQ ID NO: 203867 - DNA, 25 bp, probe
gctctgtgagacgttccgcaaacgc

SEQ ID NO: 203868 - DNA, 25 bp, probe
gctcttagaaggcccagaaagtctt

SEQ ID NO: 203869 - DNA, 25 bp, probe
gctccaaaacgaaacaagagatttt

SEQ ID NO: 203870 - DNA, 25 bp, probe
gctcctggcaactacttcaaggttt

SEQ ID NO: 203871 - DNA, 25 bp, probe
gctccaggaactttaatgagtgttt

SEQ ID NO: 203872 - DNA, 25 bp, probe
gctccatgacaagtggtacagggtg

SEQ ID NO: 203873 - DNA, 25 bp, probe
gctcaagtcgggctacacggagaag

SEQ ID NO: 203874 - DNA, 25 bp, probe
gctccccagggcttacgtgggaaga

SEQ ID NO: 203875 - DNA, 25 bp, probe
gctccaacggagttccagagtgtga

SEQ ID NO: 203876 - DNA, 25 bp, probe
gctgcgcacaggagcgaccaaggga

SEQ ID NO: 203877 - DNA, 25 bp, probe
gctgcgcacaggagcgaccaaggga

SEQ ID NO: 203878 - DNA, 25 bp, probe
gctgccacgtggagaagggtgtgtt

SEQ ID NO: 203879 - DNA, 25 bp, probe
gctcctgggtgcagagcgtggttgt

SEQ ID NO: 203880 - DNA, 25 bp, probe
gctcctgcgggcagggaagtcttct

SEQ ID NO: 203881 - DNA, 25 bp, probe
gctcccagagctctaggaactcttc

SEQ ID NO: 203882 - DNA, 25 bp, probe
gctgcccgagctttgcagacatagc

SEQ ID NO: 203883 - DNA, 25 bp, probe
gctgctcaggcagtttggactacag

SEQ ID NO: 203884 - DNA, 25 bp, probe
gctgctcatgacgctctggttgagc

SEQ ID NO: 203885 - DNA, 25 bp, probe
gctgctcatccgaaatggctctgag

SEQ ID NO: 203886 - DNA, 25 bp, probe
gctgcctgcctgacaaggtcagcat

SEQ ID NO: 203887 - DNA, 25 bp, probe
gctgcccagctgtcaaggtcaggca

SEQ ID NO: 203888 - DNA, 25 bp, probe
gctgcccacatgcaaggaccagcat

SEQ ID NO: 203889 - DNA, 25 bp, probe
gctgccgcactggaaggagacgcac

SEQ ID NO: 203890 - DNA, 25 bp, probe
gctgcccactgcaaaaaaccgaatc

SEQ ID NO: 203891 - DNA, 25 bp, probe
gctgccaccgtgtataaatcctggt

SEQ ID NO: 203892 - DNA, 25 bp, probe
gctccagacgcgttaagcgcattgg

SEQ ID NO: 203893 - DNA, 25 bp, probe
gctgccagacggtggatgtgatggc

SEQ ID NO: 203894 - DNA, 25 bp, probe
gctctctgactgctttggatagtct

SEQ ID NO: 203895 - DNA, 25 bp, probe
gctgctctacgagatgctggttggc

SEQ ID NO: 203896 - DNA, 25 bp, probe
gctgctctacgagatgctggtgggt

SEQ ID NO: 203897 - DNA, 25 bp, probe
gctgctctacgagatgctggtgggt

SEQ ID NO: 203898 - DNA, 25 bp, probe
gctccttcagcatcatctggcagga

SEQ ID NO: 203899 - DNA, 25 bp, probe
gctccatctccagttctggaggctc

SEQ ID NO: 203900 - DNA, 25 bp, probe
gctccagctggagctaggaacactt

SEQ ID NO: 203901 - DNA, 25 bp, probe
gctccagctggagctaggaacactt

SEQ ID NO: 203902 - DNA, 25 bp, probe
gctgccacagacactacatgaacac

SEQ ID NO: 203903 - DNA, 25 bp, probe
gctgcccaagcattttgagattacc

SEQ ID NO: 203904 - DNA, 25 bp, probe
gctgcctccagttgttggaatagcc

SEQ ID NO: 203905 - DNA, 25 bp, probe
gctgccacctgttttgctagaaaca

SEQ ID NO: 203906 - DNA, 25 bp, probe
gctgcgacctctgttcgagaagaag

SEQ ID NO: 203907 - DNA, 25 bp, probe
gctgcgtgtcctgggtggagatgaa

SEQ ID NO: 203908 - DNA, 25 bp, probe
gctgctgtcacactaggagggaaag

SEQ ID NO: 203909 - DNA, 25 bp, probe
gctgctctccattaggagacaatga

SEQ ID NO: 203910 - DNA, 25 bp, probe
gctgcctctgcatgtgttcaacagc

SEQ ID NO: 203911 - DNA, 25 bp, probe
gctgccactgaacctggcaaaggct

SEQ ID NO: 203912 - DNA, 25 bp, probe
gctctgattcactgtgtcaaaggct

SEQ ID NO: 203913 - DNA, 25 bp, probe
gctgctgttctgtgtacataaagtc

SEQ ID NO: 203914 - DNA, 25 bp, probe
gctctgtcttctttagcaaaatatc

SEQ ID NO: 203915 - DNA, 25 bp, probe
gctgcccttctgtggagacaatgtc

SEQ ID NO: 203916 - DNA, 25 bp, probe
gctgcccttctgtggagacaatgtc

SEQ ID NO: 203917 - DNA, 25 bp, probe
gctgcccactgcatcaggaacaaaa

SEQ ID NO: 203918 - DNA, 25 bp, probe
gctgcccattgcctaaagaagaata

SEQ ID NO: 203919 - DNA, 25 bp, probe
gctctcactttcaagaagcaataga

SEQ ID NO: 203920 - DNA, 25 bp, probe
gctctacgctactgccatgataata

SEQ ID NO: 203921 - DNA, 25 bp, probe
gctgctgactgccaataacattctt

SEQ ID NO: 203922 - DNA, 25 bp, probe
gctctatctggaaaatattctcggg

SEQ ID NO: 203923 - DNA, 25 bp, probe
gctcatagggtatcaatatctctta

SEQ ID NO: 203924 - DNA, 25 bp, probe
gctccagttggaacactttcctgag

SEQ ID NO: 203925 - DNA, 25 bp, probe
gctccagttacaaaagtatcccaca

SEQ ID NO: 203926 - DNA, 25 bp, probe
gctccagttacaaaagtatcccaca

SEQ ID NO: 203927 - DNA, 25 bp, probe
gctccagtcttccgacaaactaaca

SEQ ID NO: 203928 - DNA, 25 bp, probe
gctgccattcattccaacaaaaaaa

SEQ ID NO: 203929 - DNA, 25 bp, probe
gctgccttcttggggattcaaaaac

SEQ ID NO: 203930 - DNA, 25 bp, probe
gctctttccgacgcattcggaattc

SEQ ID NO: 203931 - DNA, 25 bp, probe
gctctttccaacgctgtaaaaagga

SEQ ID NO: 203932 - DNA, 25 bp, probe
gctccccaagacacatcctaaaagg

SEQ ID NO: 203933 - DNA, 25 bp, probe
gctccctcaaactctgcttgaagag

SEQ ID NO: 203934 - DNA, 25 bp, probe
gctgccccgtttcttgtgaagaaat

SEQ ID NO: 203935 - DNA, 25 bp, probe
gctgccccgtttcttgtgaagaaat

SEQ ID NO: 203936 - DNA, 25 bp, probe
gctcagccccctaagatttgaaaca

SEQ ID NO: 203937 - DNA, 25 bp, probe
gctcaccacgccatgaaattcaatc

SEQ ID NO: 203938 - DNA, 25 bp, probe
gctcctacctagaagacataatact

SEQ ID NO: 203939 - DNA, 25 bp, probe
gctctctatccaaaataaagatcac

SEQ ID NO: 203940 - DNA, 25 bp, probe
gctctcttatcccaattcaagaccc

SEQ ID NO: 203941 - DNA, 25 bp, probe
gctctcttatcccaattcaagaccc

SEQ ID NO: 203942 - DNA, 25 bp, probe
gctgccatattacgacttagtgccc

SEQ ID NO: 203943 - DNA, 25 bp, probe
gctctctttaggtctgaactggctg

SEQ ID NO: 203944 - DNA, 25 bp, probe
gctcctttaggactgggtggatgga

SEQ ID NO: 203945 - DNA, 25 bp, probe
gctccttgaagtggtggggctagaa

SEQ ID NO: 203946 - DNA, 25 bp, probe
gctaactacagtgtggccctaaatt

SEQ ID NO: 203947 - DNA, 25 bp, probe
gcaaattccaccaggccattaatga

SEQ ID NO: 203948 - DNA, 25 bp, probe
gcaaattccaccaggccattaatga

SEQ ID NO: 203949 - DNA, 25 bp, probe
gaaaatctaccgagaagtacaaata

SEQ ID NO: 203950 - DNA, 25 bp, probe
gtaaattaacttcaaaactcacaag

SEQ ID NO: 203951 - DNA, 25 bp, probe
gtaaattaacttcaaaactcacaag

SEQ ID NO: 203952 - DNA, 25 bp, probe
gtaaattaacttcaaaactcacaag

SEQ ID NO: 203953 - DNA, 25 bp, probe
gtaacattcgacctggaaaacggca

SEQ ID NO: 203954 - DNA, 25 bp, probe
gtaacattcgacctggaaaacggca

SEQ ID NO: 203955 - DNA, 25 bp, probe
gctaaattactgcaggaagcaaaag

SEQ ID NO: 203956 - DNA, 25 bp, probe
gctatgaactccttgaagaaaaatc

SEQ ID NO: 203957 - DNA, 25 bp, probe
gctcagaagctcaatatgcaaaaga

SEQ ID NO: 203958 - DNA, 25 bp, probe
gctcaaagctgtgcagcatcagcaa

SEQ ID NO: 203959 - DNA, 25 bp, probe
gctgccagagcgagctgcatgagaa

SEQ ID NO: 203960 - DNA, 25 bp, probe
gctgcgcatggaacagtatgccaat

SEQ ID NO: 203961 - DNA, 25 bp, probe
gctcagatggcttcctgagccctgt

SEQ ID NO: 203962 - DNA, 25 bp, probe
gctgcgagtgttcctgagagttgaa

SEQ ID NO: 203963 - DNA, 25 bp, probe
gctgcgggctgtcacagagattgcg

SEQ ID NO: 203964 - DNA, 25 bp, probe
gctgcgggctgtcacagagattgcg

SEQ ID NO: 203965 - DNA, 25 bp, probe
gctgcgaggccaaacagcagctaga

SEQ ID NO: 203966 - DNA, 25 bp, probe
gctgcgtggcatggaagcacacata

SEQ ID NO: 203967 - DNA, 25 bp, probe
gctgcgtggcatggaagcacacata

SEQ ID NO: 203968 - DNA, 25 bp, probe
gctgctgtccatggtagtcagtatg

SEQ ID NO: 203969 - DNA, 25 bp, probe
gctgctgttcatgtacttttcattc

SEQ ID NO: 203970 - DNA, 25 bp, probe
gctctgttagcacttttttctttga

SEQ ID NO: 203971 - DNA, 25 bp, probe
gctctcctagagcttgttgagttct

SEQ ID NO: 203972 - DNA, 25 bp, probe
gctccacactagatctgttagaacc

SEQ ID NO: 203973 - DNA, 25 bp, probe
gctacaactaccaagcttttgacat

SEQ ID NO: 203974 - DNA, 25 bp, probe
gctaagtttccaagcagtaaactac

SEQ ID NO: 203975 - DNA, 25 bp, probe
gctcaggattttctcgcatccaaat

SEQ ID NO: 203976 - DNA, 25 bp, probe
gctgcggctttaaatgctgtccaga

SEQ ID NO: 203977 - DNA, 25 bp, probe
gctctggaacgacatgtggcgcaaa

SEQ ID NO: 203978 - DNA, 25 bp, probe
gctctggagagcaacaatgcttggc

SEQ ID NO: 203979 - DNA, 25 bp, probe
gctctggagagcaacaatgcttggc

SEQ ID NO: 203980 - DNA, 25 bp, probe
gctctggatcaggtctaccattgct

SEQ ID NO: 203981 - DNA, 25 bp, probe
gctctggatcaggtctaccattgct

SEQ ID NO: 203982 - DNA, 25 bp, probe
gctctgtgtagggcctgagcttgct

SEQ ID NO: 203983 - DNA, 25 bp, probe
gctccagtggggccatgattggttt

SEQ ID NO: 203984 - DNA, 25 bp, probe
gctccagtggggccatgattggttt

SEQ ID NO: 203985 - DNA, 25 bp, probe
gctccgaaggctccagtgtgaatct

SEQ ID NO: 203986 - DNA, 25 bp, probe
gctccagagatcctccaggaaatgc

SEQ ID NO: 203987 - DNA, 25 bp, probe
gctgccatggtggttaggaatgtga

SEQ ID NO: 203988 - DNA, 25 bp, probe
gctgccagcctgtgttgaacagcta

SEQ ID NO: 203989 - DNA, 25 bp, probe
gctcctggtgacatgggacacaagc

SEQ ID NO: 203990 - DNA, 25 bp, probe
gctcctggtgccctgaagagaccag

SEQ ID NO: 203991 - DNA, 25 bp, probe
gctcctggtgccctgaagagaccag

SEQ ID NO: 203992 - DNA, 25 bp, probe
gctgccggcgggaacgagagcgccg

SEQ ID NO: 203993 - DNA, 25 bp, probe
gctgccggcgggaacgagagcgccg

SEQ ID NO: 203994 - DNA, 25 bp, probe
gctgccagatggagttcgaggaggg

SEQ ID NO: 203995 - DNA, 25 bp, probe
gctctcagagcgtgttctgcctgag

SEQ ID NO: 203996 - DNA, 25 bp, probe
gctctgcagcagcacattgggtaag

SEQ ID NO: 203997 - DNA, 25 bp, probe
gctccaaggacatgtcttaatgctt

SEQ ID NO: 203998 - DNA, 25 bp, probe
gctcctgaggaatgtctgggaagtt

SEQ ID NO: 203999 - DNA, 25 bp, probe
gctgcccagggcagatgcaggggag

SEQ ID NO: 204000 - DNA, 25 bp, probe
gctgcccaggcagcgtggaggggaa

SEQ ID NO: 204001 - DNA, 25 bp, probe
gctcccgacagacgggagcagggca

SEQ ID NO: 204002 - DNA, 25 bp, probe
gctgcccgggagggtgggtgcagac

SEQ ID NO: 204003 - DNA, 25 bp, probe
gctgccccgcgagtgggagaacaac

SEQ ID NO: 204004 - DNA, 25 bp, probe
gctgcctccaagtcatgggagaaga

SEQ ID NO: 204005 - DNA, 25 bp, probe
gctgcctcctagaagtggaacagac

SEQ ID NO: 204006 - DNA, 25 bp, probe
gctgccatcctcacagctgaaatct

SEQ ID NO: 204007 - DNA, 25 bp, probe
gctgcctactgtcctgtgaagagcc

SEQ ID NO: 204008 - DNA, 25 bp, probe
gctctctactggctgagcaaaagct

SEQ ID NO: 204009 - DNA, 25 bp, probe
gctctctcattcttggagtgaaagg

SEQ ID NO: 204010 - DNA, 25 bp, probe
gctctcttgtgacgtgcactgtgaa

SEQ ID NO: 204011 - DNA, 25 bp, probe
gctctggttgagctcagtggagcca

SEQ ID NO: 204012 - DNA, 25 bp, probe
gctctgagttggcaagccaagcccc

SEQ ID NO: 204013 - DNA, 25 bp, probe
gctcaacctgggtcagatcacaacc

SEQ ID NO: 204014 - DNA, 25 bp, probe
gctcaacctgggtcagatcacaacc

SEQ ID NO: 204015 - DNA, 25 bp, probe
gctctatgacagcgacgccaagaca

SEQ ID NO: 204016 - DNA, 25 bp, probe
gctctcagagagcgaggacgacacc

SEQ ID NO: 204017 - DNA, 25 bp, probe
gctgccaatgggtcggacaacaagc

SEQ ID NO: 204018 - DNA, 25 bp, probe
gctgccaatgggtcggacaacaagc

SEQ ID NO: 204019 - DNA, 25 bp, probe
gctccaacggctgatgaaaaagctg

SEQ ID NO: 204020 - DNA, 25 bp, probe
gctctatccagggtcataaaaaagg

SEQ ID NO: 204021 - DNA, 25 bp, probe
gctctccaaggcctttgcaaagtag

SEQ ID NO: 204022 - DNA, 25 bp, probe
gctgcccaaggacatagccaagctg

SEQ ID NO: 204023 - DNA, 25 bp, probe
gctgcccaagaacatcacgtgcatt

SEQ ID NO: 204024 - DNA, 25 bp, probe
gctcctatgggacagcagcggatgt

SEQ ID NO: 204025 - DNA, 25 bp, probe
gctccgcacggagaacgagctgcat

SEQ ID NO: 204026 - DNA, 25 bp, probe
gctcctgtgggagatactgagccgc

SEQ ID NO: 204027 - DNA, 25 bp, probe
gctccatttatagcacctcagacat

SEQ ID NO: 204028 - DNA, 25 bp, probe
gctgccagattattacgacacgcca

SEQ ID NO: 204029 - DNA, 25 bp, probe
gctgccatgtgaagaccagatcatc

SEQ ID NO: 204030 - DNA, 25 bp, probe
gctgccatgtccacaagatttggta

SEQ ID NO: 204031 - DNA, 25 bp, probe
gctgccatgtccacaagatttggta

SEQ ID NO: 204032 - DNA, 25 bp, probe
gctctctgtgaccccaatttgagtt

SEQ ID NO: 204033 - DNA, 25 bp, probe
gctcgaaagggcgaattctgcagat

SEQ ID NO: 204034 - DNA, 25 bp, probe
gctctggagataccagcaactttga

SEQ ID NO: 204035 - DNA, 25 bp, probe
gctctgtggtagagacagctactta

SEQ ID NO: 204036 - DNA, 25 bp, probe
gctcattgcccgatgaacttttgtt

SEQ ID NO: 204037 - DNA, 25 bp, probe
gctcctcactgcagtggattttttg

SEQ ID NO: 204038 - DNA, 25 bp, probe
gctcgcctcaggaatgggctgtttt

SEQ ID NO: 204039 - DNA, 25 bp, probe
gctctgtgctgggatcatggaactt

SEQ ID NO: 204040 - DNA, 25 bp, probe
gctctgggcagccacagaaaagctg

SEQ ID NO: 204041 - DNA, 25 bp, probe
gctctggccatgtcacaggcaagtt

SEQ ID NO: 204042 - DNA, 25 bp, probe
gctcttcgtgtactggaagatctac

SEQ ID NO: 204043 - DNA, 25 bp, probe
gctctatctggtgtttgagttcctc

SEQ ID NO: 204044 - DNA, 25 bp, probe
gctctacgtggcctttagctttatg

SEQ ID NO: 204045 - DNA, 25 bp, probe
gctctacgtggcctttagctttatg

SEQ ID NO: 204046 - DNA, 25 bp, probe
gctctgatatggcttttagcattta

SEQ ID NO: 204047 - DNA, 25 bp, probe
gctcgtatggtaagcatcatagttt

SEQ ID NO: 204048 - DNA, 25 bp, probe
gctcgtgcttaagattgatgatttc

SEQ ID NO: 204049 - DNA, 25 bp, probe
gctaggcttacagcattgcggatta

SEQ ID NO: 204050 - DNA, 25 bp, probe
gctaggcttacagcattgcggatta

SEQ ID NO: 204051 - DNA, 25 bp, probe
gcttgtttacccaccagattacaat

SEQ ID NO: 204052 - DNA, 25 bp, probe
gaattttacaccagacggttagaca

SEQ ID NO: 204053 - DNA, 25 bp, probe
gaattttacaccagacggttagaca

SEQ ID NO: 204054 - DNA, 25 bp, probe
gaatttttgcccagtcgttctggac

SEQ ID NO: 204055 - DNA, 25 bp, probe
gaatcttgtctcactagtttttcct

SEQ ID NO: 204056 - DNA, 25 bp, probe
gcaaattttaagcagctggtttcca

SEQ ID NO: 204057 - DNA, 25 bp, probe
gctatatcatttgaggttttctaca

SEQ ID NO: 204058 - DNA, 25 bp, probe
gctatttttggttttgtccttcact

SEQ ID NO: 204059 - DNA, 25 bp, probe
gctcctttatccaatttgtacttga

SEQ ID NO: 204060 - DNA, 25 bp, probe
gctccatttcttaatttctttattt

SEQ ID NO: 204061 - DNA, 25 bp, probe
gctgccacattgatttttctataat

SEQ ID NO: 204062 - DNA, 25 bp, probe
gctgccaatgagtttctctactctc

SEQ ID NO: 204063 - DNA, 25 bp, probe
gctgccattggcaattccatgttcc

SEQ ID NO: 204064 - DNA, 25 bp, probe
gctgcctctgtaaattcatgtattc

SEQ ID NO: 204065 - DNA, 25 bp, probe
gctgcctctgtctatttcaatatag

SEQ ID NO: 204066 - DNA, 25 bp, probe
gctccatggctcttcattcaaaagg

SEQ ID NO: 204067 - DNA, 25 bp, probe
gctccatgagctcttatgccagaac

SEQ ID NO: 204068 - DNA, 25 bp, probe
gctcttgacatcttttccatgatca

SEQ ID NO: 204069 - DNA, 25 bp, probe
gctctgtcagccttactatatactg

SEQ ID NO: 204070 - DNA, 25 bp, probe
gctcctaccactactctgaggtgga

SEQ ID NO: 204071 - DNA, 25 bp, probe
gctcctaccactactctgaggtgga

SEQ ID NO: 204072 - DNA, 25 bp, probe
gcaccgagacttacactgggggaac

SEQ ID NO: 204073 - DNA, 25 bp, probe
gagggtcctattgtttgggacacag

SEQ ID NO: 204074 - DNA, 25 bp, probe
gaaggactccttgatttgcgttgac

SEQ ID NO: 204075 - DNA, 25 bp, probe
gctaggaaccttggtcttcttattt

SEQ ID NO: 204076 - DNA, 25 bp, probe
gctaggaaccttggtcttcttattt

SEQ ID NO: 204077 - DNA, 25 bp, probe
gctcaaacaccagggttaccttgat

SEQ ID NO: 204078 - DNA, 25 bp, probe
gctacaaaatctggggtacagcgta

SEQ ID NO: 204079 - DNA, 25 bp, probe
gctctcagaaccttggggaaggtgg

SEQ ID NO: 204080 - DNA, 25 bp, probe
gctctcaaattcttcctggagaggt

SEQ ID NO: 204081 - DNA, 25 bp, probe
gctccaatatcttcatcccatagga

SEQ ID NO: 204082 - DNA, 25 bp, probe
gctccaatatcttcatcccatagga

SEQ ID NO: 204083 - DNA, 25 bp, probe
gctccaatctgcgtccacttaggag

SEQ ID NO: 204084 - DNA, 25 bp, probe
gctcccaatccctatttgagaaaca

SEQ ID NO: 204085 - DNA, 25 bp, probe
gctctttgaccgtattgtggaaaaa

SEQ ID NO: 204086 - DNA, 25 bp, probe
gctctttagccctttgtggttaatc

SEQ ID NO: 204087 - DNA, 25 bp, probe
gcttgagccccgctattggtataat

SEQ ID NO: 204088 - DNA, 25 bp, probe
gctctgacccaaatttagtcccaga

SEQ ID NO: 204089 - DNA, 25 bp, probe
gctctggcccagaaagtgattcatt

SEQ ID NO: 204090 - DNA, 25 bp, probe
gctcggcggcaaaggtgctgacatc

SEQ ID NO: 204091 - DNA, 25 bp, probe
gctcagggagaagggcgctagtgcc

SEQ ID NO: 204092 - DNA, 25 bp, probe
gctcaagggagtgtgcccagagccc

SEQ ID NO: 204093 - DNA, 25 bp, probe
gctcatacggaatggacagccgacc

SEQ ID NO: 204094 - DNA, 25 bp, probe
gctctagggttgctggagcctgagt

SEQ ID NO: 204095 - DNA, 25 bp, probe
gctccaaggcttttgagacacaagg

SEQ ID NO: 204096 - DNA, 25 bp, probe
gctgccaacaagtttgtgcaccgag

SEQ ID NO: 204097 - DNA, 25 bp, probe
gctcacactcagtgtttgcactctg

SEQ ID NO: 204098 - DNA, 25 bp, probe
gctccataagaactgtgctgacttg

SEQ ID NO: 204099 - DNA, 25 bp, probe
gctccaaactattgttatcgttgtg

SEQ ID NO: 204100 - DNA, 25 bp, probe
gctctaatcacaatattaactgttt

SEQ ID NO: 204101 - DNA, 25 bp, probe
gctctgaacaaaagcttttctttcc

SEQ ID NO: 204102 - DNA, 25 bp, probe
gctcggagaagaacctgcactttgt

SEQ ID NO: 204103 - DNA, 25 bp, probe
gctccagagaacacaccagctattt

SEQ ID NO: 204104 - DNA, 25 bp, probe
gctccagaactctatccactgtatt

SEQ ID NO: 204105 - DNA, 25 bp, probe
gctcttaaccattccagtctattac

SEQ ID NO: 204106 - DNA, 25 bp, probe
gctctctacacctctatatattata

SEQ ID NO: 204107 - DNA, 25 bp, probe
gctttgacccaaatattcgtgacag

SEQ ID NO: 204108 - DNA, 25 bp, probe
gcttttcctaataaacgtggagaat

SEQ ID NO: 204109 - DNA, 25 bp, probe
gctctcctcctgtttaaaaggaagc

SEQ ID NO: 204110 - DNA, 25 bp, probe
gctctacttcattgagtaaaatcga

SEQ ID NO: 204111 - DNA, 25 bp, probe
gctctactcctagggcagatagatt

SEQ ID NO: 204112 - DNA, 25 bp, probe
gctctactcctagggcagatagatt

SEQ ID NO: 204113 - DNA, 25 bp, probe
gctcaactgctcccgtggaagatta

SEQ ID NO: 204114 - DNA, 25 bp, probe
gctcatagccatggcctttgacaga

SEQ ID NO: 204115 - DNA, 25 bp, probe
gctcataccaagtctctgtggatga

SEQ ID NO: 204116 - DNA, 25 bp, probe
gctctgacatactttcatgtggtag

SEQ ID NO: 204117 - DNA, 25 bp, probe
gctcatgactcctgtagggaagttt

SEQ ID NO: 204118 - DNA, 25 bp, probe
gctatgacccggaaagtgagacttt

SEQ ID NO: 204119 - DNA, 25 bp, probe
gctccacctctgggaagctgagcat

SEQ ID NO: 204120 - DNA, 25 bp, probe
gctccacccatactggatctagcat

SEQ ID NO: 204121 - DNA, 25 bp, probe
gctctgacaggcatggtactagatt

SEQ ID NO: 204122 - DNA, 25 bp, probe
gctcgaagcacaggagagaccagtc

SEQ ID NO: 204123 - DNA, 25 bp, probe
gctccaatacatgggaagctttgct

SEQ ID NO: 204124 - DNA, 25 bp, probe
gctgccagtcaagtggacagcccct

SEQ ID NO: 204125 - DNA, 25 bp, probe
gctgccagtcaagtggacagcccct

SEQ ID NO: 204126 - DNA, 25 bp, probe
gctccagctcatatgctgacagctc

SEQ ID NO: 204127 - DNA, 25 bp, probe
gctcaggtgcatatggacctgctgc

SEQ ID NO: 204128 - DNA, 25 bp, probe
gctcttcgattatgactgctgcagt

SEQ ID NO: 204129 - DNA, 25 bp, probe
gctcttcgattatgactgctgcagt

SEQ ID NO: 204130 - DNA, 25 bp, probe
gctctcacatgaatatcgacattac

SEQ ID NO: 204131 - DNA, 25 bp, probe
gctccatcatcaaatggccaatcta

SEQ ID NO: 204132 - DNA, 25 bp, probe
gctccagcatgaaaatccttctcac

SEQ ID NO: 204133 - DNA, 25 bp, probe
gctccagctgatccagatgttatgc

SEQ ID NO: 204134 - DNA, 25 bp, probe
gctccagctgatccagatgttatgc

SEQ ID NO: 204135 - DNA, 25 bp, probe
gctgccaatgcactcgatcttgtca

SEQ ID NO: 204136 - DNA, 25 bp, probe
gctgccaatgcactcgatcttgtca

SEQ ID NO: 204137 - DNA, 25 bp, probe
gctgccaacattctggtgtctgaca

SEQ ID NO: 204138 - DNA, 25 bp, probe
gctccagaattccttgtctctgaat

SEQ ID NO: 204139 - DNA, 25 bp, probe
gctccagacataaatagctcactgc

SEQ ID NO: 204140 - DNA, 25 bp, probe
gctccaactgatccagatgctacgc

SEQ ID NO: 204141 - DNA, 25 bp, probe
gctccaactgatccagatgctacgc

SEQ ID NO: 204142 - DNA, 25 bp, probe
gctccacatcgatgagatcctcagc

SEQ ID NO: 204143 - DNA, 25 bp, probe
gctccaaggagatgcttccagcttc

SEQ ID NO: 204144 - DNA, 25 bp, probe
gctcctagtgagtatctttgtggtc

SEQ ID NO: 204145 - DNA, 25 bp, probe
gctcctagtgagtatctttgtggtc

SEQ ID NO: 204146 - DNA, 25 bp, probe
gctccataaatgtcaccttgggggc

SEQ ID NO: 204147 - DNA, 25 bp, probe
gctccatcagtaagactcttgaggg

SEQ ID NO: 204148 - DNA, 25 bp, probe
gctccagcagtggctgatttggggg

SEQ ID NO: 204149 - DNA, 25 bp, probe
gctccacagtggacactatggccca

SEQ ID NO: 204150 - DNA, 25 bp, probe
gctctgcaacatcgagcctgatgag

SEQ ID NO: 204151 - DNA, 25 bp, probe
gctctgattataatgccagtgaatg

SEQ ID NO: 204152 - DNA, 25 bp, probe
gctctgatgtttgctcagtgcaagg

SEQ ID NO: 204153 - DNA, 25 bp, probe
gctcaagttgtggctcaagcaaggc

SEQ ID NO: 204154 - DNA, 25 bp, probe
gctcagttttcccagcaacagatgc

SEQ ID NO: 204155 - DNA, 25 bp, probe
gctcagttgctgacccaaaagtgct

SEQ ID NO: 204156 - DNA, 25 bp, probe
gctcggtctattgtaatgcagattg

SEQ ID NO: 204157 - DNA, 25 bp, probe
gctcgagtcttaggttactgtcatc

SEQ ID NO: 204158 - DNA, 25 bp, probe
gctcagagcagcaggtgttacccaa

SEQ ID NO: 204159 - DNA, 25 bp, probe
gctctgatgctgagaggcttgcctc

SEQ ID NO: 204160 - DNA, 25 bp, probe
gctcatgagcgtctgtggagccatc

SEQ ID NO: 204161 - DNA, 25 bp, probe
gctcatgacgctctggttgagctca

SEQ ID NO: 204162 - DNA, 25 bp, probe
gctcataagtacttgtgtcatccag

SEQ ID NO: 204163 - DNA, 25 bp, probe
gctccttgaagcttgtgataacatg

SEQ ID NO: 204164 - DNA, 25 bp, probe
gctccttgaagcttgtgataacatg

SEQ ID NO: 204165 - DNA, 25 bp, probe
gctcctgtgccagttgggaacatta

SEQ ID NO: 204166 - DNA, 25 bp, probe
gctccttcaacaaggcgacgagtga

SEQ ID NO: 204167 - DNA, 25 bp, probe
gctccttcaacaaggcgacgagtga

SEQ ID NO: 204168 - DNA, 25 bp, probe
gctccttagccatgagctcaaggga

SEQ ID NO: 204169 - DNA, 25 bp, probe
gctccctagaagaagctcaaaggat

SEQ ID NO: 204170 - DNA, 25 bp, probe
gctccctagaatctcctggaatgct

SEQ ID NO: 204171 - DNA, 25 bp, probe
gctccggagcctgtccaggaagttc

SEQ ID NO: 204172 - DNA, 25 bp, probe
gctccgcaggacgctcaaggaggtg

SEQ ID NO: 204173 - DNA, 25 bp, probe
gctaaaggcctgggaatggagaata

SEQ ID NO: 204174 - DNA, 25 bp, probe
gctcagaatgccccggaaggaagtc

SEQ ID NO: 204175 - DNA, 25 bp, probe
gctcagaatgccccggaaggaagtc

SEQ ID NO: 204176 - DNA, 25 bp, probe
gctagattgcacccagaaagctgta

SEQ ID NO: 204177 - DNA, 25 bp, probe
gctctgtgtctctgagaaggctgct

SEQ ID NO: 204178 - DNA, 25 bp, probe
gctctgggtcacagaggagcatgcc

SEQ ID NO: 204179 - DNA, 25 bp, probe
gctctgtggtccatgagacagcgac

SEQ ID NO: 204180 - DNA, 25 bp, probe
gctccgcttcacatgcagaagtgac

SEQ ID NO: 204181 - DNA, 25 bp, probe
gctcccctgacactgaagaggatcc

SEQ ID NO: 204182 - DNA, 25 bp, probe
gctccactggacttgaacatcgacc

SEQ ID NO: 204183 - DNA, 25 bp, probe
gctccacagagagctgcaacaccac

SEQ ID NO: 204184 - DNA, 25 bp, probe
gctccagagatggtcacatgaccca

SEQ ID NO: 204185 - DNA, 25 bp, probe
gctccgagagcagcttgagcacatc

SEQ ID NO: 204186 - DNA, 25 bp, probe
gctccagagtcagagtgccaagcca

SEQ ID NO: 204187 - DNA, 25 bp, probe
gctccatggtaggagtcaatctgcc

SEQ ID NO: 204188 - DNA, 25 bp, probe
gctcctcaaatggatcatcaagtcc

SEQ ID NO: 204189 - DNA, 25 bp, probe
gctcctcaatgacgtgtacagttta

SEQ ID NO: 204190 - DNA, 25 bp, probe
gctcatcaaatgtgcttcagagatt

SEQ ID NO: 204191 - DNA, 25 bp, probe
gctctcgacagattcttcttgtgtc

SEQ ID NO: 204192 - DNA, 25 bp, probe
gcatcatggtcacatttgcattgtt

SEQ ID NO: 204193 - DNA, 25 bp, probe
gcatcatggtcacatttgcattgtt

SEQ ID NO: 204194 - DNA, 25 bp, probe
gcatcatggtcacatttgcattgtt

SEQ ID NO: 204195 - DNA, 25 bp, probe
gctcaggtgacaactctcattctgt

SEQ ID NO: 204196 - DNA, 25 bp, probe
gctcaggtgacaactctcattctgt

SEQ ID NO: 204197 - DNA, 25 bp, probe
gctcacggagaagtccgcctgtaag

SEQ ID NO: 204198 - DNA, 25 bp, probe
gctatgggaagaacatggcctggaa

SEQ ID NO: 204199 - DNA, 25 bp, probe
gctctgaggagtaaggacctgcgac

SEQ ID NO: 204200 - DNA, 25 bp, probe
gctctgagccagttcagtacctgga

SEQ ID NO: 204201 - DNA, 25 bp, probe
gctctgagccagttcagtacctgga

SEQ ID NO: 204202 - DNA, 25 bp, probe
gctctgagccagttcagtacctgga

SEQ ID NO: 204203 - DNA, 25 bp, probe
gctcagggaggtcgtccttgatgca

SEQ ID NO: 204204 - DNA, 25 bp, probe
gctcaggaaggttatgtcatctatt

SEQ ID NO: 204205 - DNA, 25 bp, probe
gctcctagaagttggtcatgctaat

SEQ ID NO: 204206 - DNA, 25 bp, probe
gctctctagacatgtggtctgttgg

SEQ ID NO: 204207 - DNA, 25 bp, probe
gctcttgacacttagccgctgtctc

SEQ ID NO: 204208 - DNA, 25 bp, probe
gctctgagacaggaagctcctgccc

SEQ ID NO: 204209 - DNA, 25 bp, probe
gctctggacgtgaagtctcgggcaa

SEQ ID NO: 204210 - DNA, 25 bp, probe
gctctgtgggtgacttccggaagag

SEQ ID NO: 204211 - DNA, 25 bp, probe
gctcctgggcgtcatcatagaggaa

SEQ ID NO: 204212 - DNA, 25 bp, probe
gctccagaacttctgaagagaagag

SEQ ID NO: 204213 - DNA, 25 bp, probe
gctccagtacttccagcaaggaaat

SEQ ID NO: 204214 - DNA, 25 bp, probe
gctcgattacttcctacaggagcac

SEQ ID NO: 204215 - DNA, 25 bp, probe
gctcgtctactgcctcaagagaaac

SEQ ID NO: 204216 - DNA, 25 bp, probe
gctcatgactatacgctaagagaac

SEQ ID NO: 204217 - DNA, 25 bp, probe
gctcatgacatggtgcttataaaga

SEQ ID NO: 204218 - DNA, 25 bp, probe
gctcgacagcgtttctgagaaaagc

SEQ ID NO: 204219 - DNA, 25 bp, probe
gctctatacgcttttggtcggacga

SEQ ID NO: 204220 - DNA, 25 bp, probe
gctctcccacttttggatcagtaaa

SEQ ID NO: 204221 - DNA, 25 bp, probe
gctcccaagtttagttcaggaagct

SEQ ID NO: 204222 - DNA, 25 bp, probe
gcaccgaggcctatgttagggcctt

SEQ ID NO: 204223 - DNA, 25 bp, probe
tccacaagggctaatttattcccct

SEQ ID NO: 204224 - DNA, 25 bp, probe
tccacaagggctaatttattcccct

SEQ ID NO: 204225 - DNA, 25 bp, probe
gctacaacccatgattattttcctg

SEQ ID NO: 204226 - DNA, 25 bp, probe
gctaaggcctcctataaacattttc

SEQ ID NO: 204227 - DNA, 25 bp, probe
gctaaggcccacaaaagccaggact

SEQ ID NO: 204228 - DNA, 25 bp, probe
gctacagacgaagcaaaggctggtt

SEQ ID NO: 204229 - DNA, 25 bp, probe
gcttaccgcattgaacggctggagt

SEQ ID NO: 204230 - DNA, 25 bp, probe
gctaacccagtaacccagtgggaag

SEQ ID NO: 204231 - DNA, 25 bp, probe
gctccccacgataagcaccagtggg

SEQ ID NO: 204232 - DNA, 25 bp, probe
gctcacggcttaaagcccaagctct

SEQ ID NO: 204233 - DNA, 25 bp, probe
gctcacatggctttggaacaagacc

SEQ ID NO: 204234 - DNA, 25 bp, probe
gctcacatggctttggaacaagacc

SEQ ID NO: 204235 - DNA, 25 bp, probe
gctcttcagcatttccaacaggatc

SEQ ID NO: 204236 - DNA, 25 bp, probe
gctcttcggcatggccaagattgac

SEQ ID NO: 204237 - DNA, 25 bp, probe
gctctgatctggtggatcagactga

SEQ ID NO: 204238 - DNA, 25 bp, probe
gctctcattgtgtgactcagtgctg

SEQ ID NO: 204239 - DNA, 25 bp, probe
gctcatcattgctaagatgcgcatg

SEQ ID NO: 204240 - DNA, 25 bp, probe
gctccatgatgccaatgcaggtgga

SEQ ID NO: 204241 - DNA, 25 bp, probe
gctctgagagctctgagggagaagc

SEQ ID NO: 204242 - DNA, 25 bp, probe
gctctggtggcactgtgggagacac

SEQ ID NO: 204243 - DNA, 25 bp, probe
gctctggcaagctataggagagaat

SEQ ID NO: 204244 - DNA, 25 bp, probe
gctcggctatctggggagcagattt

SEQ ID NO: 204245 - DNA, 25 bp, probe
gctcatggctcagaggaacagatct

SEQ ID NO: 204246 - DNA, 25 bp, probe
gctcacagctcgtatggtaagcatc

SEQ ID NO: 204247 - DNA, 25 bp, probe
gctaagcagctgtatgccatgaagg

SEQ ID NO: 204248 - DNA, 25 bp, probe
gctaagcagctgtatgccatgaagg

SEQ ID NO: 204249 - DNA, 25 bp, probe
gctctgcagcagaagtctcaggagg

SEQ ID NO: 204250 - DNA, 25 bp, probe
gctcctgacataccatgagaatgcg

SEQ ID NO: 204251 - DNA, 25 bp, probe
gctcatcgaccgctataagcgctgg

SEQ ID NO: 204252 - DNA, 25 bp, probe
gctcggagcctcattgagacagggg

SEQ ID NO: 204253 - DNA, 25 bp, probe
gctccgatcccactagtgagaggtg

SEQ ID NO: 204254 - DNA, 25 bp, probe
gctcatagatcagcaaaccggggcc

SEQ ID NO: 204255 - DNA, 25 bp, probe
gctaagtctggaggacacggggtcc

SEQ ID NO: 204256 - DNA, 25 bp, probe
gctaagtctggaggacacggggtcc

SEQ ID NO: 204257 - DNA, 25 bp, probe
gctacgtgtggggaacaagtaccgc

SEQ ID NO: 204258 - DNA, 25 bp, probe
gctacgattggctgaagtaccagac

SEQ ID NO: 204259 - DNA, 25 bp, probe
gctcccattggctgaagacactgaa

SEQ ID NO: 204260 - DNA, 25 bp, probe
gctccgtgctgtgaggaacaagaag

SEQ ID NO: 204261 - DNA, 25 bp, probe
gctcctggttcatggaagccataga

SEQ ID NO: 204262 - DNA, 25 bp, probe
gctcctggttcatggaagccataga

SEQ ID NO: 204263 - DNA, 25 bp, probe
gctcagggaccagaaccacaagcaa

SEQ ID NO: 204264 - DNA, 25 bp, probe
gctcgtggaaaccacactcaaagag

SEQ ID NO: 204265 - DNA, 25 bp, probe
gctcgtgaaagcacataccactaag

SEQ ID NO: 204266 - DNA, 25 bp, probe
gctccggaatgcatcaactactaca

SEQ ID NO: 204267 - DNA, 25 bp, probe
gctccgaggaaaatcactcctacac

SEQ ID NO: 204268 - DNA, 25 bp, probe
gctcgcaaggaagtccaggccgaga

SEQ ID NO: 204269 - DNA, 25 bp, probe
gctcgcaaggaagtccaggccgaga

SEQ ID NO: 204270 - DNA, 25 bp, probe
gctcagaaagggcccaggctttgac

SEQ ID NO: 204271 - DNA, 25 bp, probe
gctaagaagagggacacctttaaag

SEQ ID NO: 204272 - DNA, 25 bp, probe
gctaagaaaatggcaatcctcatct

SEQ ID NO: 204273 - DNA, 25 bp, probe
gccccaactagatcagcaggagcta

SEQ ID NO: 204274 - DNA, 25 bp, probe
gctaagaagaatggcggcaccctct

SEQ ID NO: 204275 - DNA, 25 bp, probe
gctaagtgggtttctgaccattttc

SEQ ID NO: 204276 - DNA, 25 bp, probe
gctaagtgggtttctgaccattttc

SEQ ID NO: 204277 - DNA, 25 bp, probe
gctagcaaggtaacctggcctttgt

SEQ ID NO: 204278 - DNA, 25 bp, probe
gctagcaaggtaacctggcctttgt

SEQ ID NO: 204279 - DNA, 25 bp, probe
gctactccgtatacgtgtacaaggt

SEQ ID NO: 204280 - DNA, 25 bp, probe
gctcctgccgtgaaagatgtcccag

SEQ ID NO: 204281 - DNA, 25 bp, probe
gctcttgacaatgactattccctga

SEQ ID NO: 204282 - DNA, 25 bp, probe
gctcctgatcaatttcgtatttctg

SEQ ID NO: 204283 - DNA, 25 bp, probe
gctctgcttgtatttgtgatatttc

SEQ ID NO: 204284 - DNA, 25 bp, probe
gctctgcttgtatttgtgatatttc

SEQ ID NO: 204285 - DNA, 25 bp, probe
gctctttggcagtctatatgtttgt

SEQ ID NO: 204286 - DNA, 25 bp, probe
gctctgtttgagtcaacatttagtg

SEQ ID NO: 204287 - DNA, 25 bp, probe
gctcatggtacattcaagatttgtg

SEQ ID NO: 204288 - DNA, 25 bp, probe
gcttcctacctcaagatcttggcaa

SEQ ID NO: 204289 - DNA, 25 bp, probe
gctcgaccacctcaacattggagac

SEQ ID NO: 204290 - DNA, 25 bp, probe
gctccctcatcagcgaacagtgggt

SEQ ID NO: 204291 - DNA, 25 bp, probe
gctcaactccaccatgaagctggtg

SEQ ID NO: 204292 - DNA, 25 bp, probe
gctaggcctccgaagactgtttgag

SEQ ID NO: 204293 - DNA, 25 bp, probe
gctaaggccagagagatcttggtag

SEQ ID NO: 204294 - DNA, 25 bp, probe
gctaagggctgtgagcttatgttac

SEQ ID NO: 204295 - DNA, 25 bp, probe
gctcgagaccttgactgttttgagg

SEQ ID NO: 204296 - DNA, 25 bp, probe
gctcgagtacttgtctgtggagggg

SEQ ID NO: 204297 - DNA, 25 bp, probe
gctcgagtacttgtctgtggagggg

SEQ ID NO: 204298 - DNA, 25 bp, probe
gctcctgaacttcttgtgggagata

SEQ ID NO: 204299 - DNA, 25 bp, probe
gctaggaacattctgctgtcggaaa

SEQ ID NO: 204300 - DNA, 25 bp, probe
gctaggaaacagaacgtgggcagag

SEQ ID NO: 204301 - DNA, 25 bp, probe
gctagggtatagtggctggtgaggc

SEQ ID NO: 204302 - DNA, 25 bp, probe
gctcatgggcaatggggtgtggcac

SEQ ID NO: 204303 - DNA, 25 bp, probe
gctccggggtggcagtgaggaccac

SEQ ID NO: 204304 - DNA, 25 bp, probe
gctccggggtggcagtgaggaccac

SEQ ID NO: 204305 - DNA, 25 bp, probe
gctccggagatggtgaagggagaac

SEQ ID NO: 204306 - DNA, 25 bp, probe
gctccgggtctccggggagacagca

SEQ ID NO: 204307 - DNA, 25 bp, probe
gctacgggatctcagtggaggacaa

SEQ ID NO: 204308 - DNA, 25 bp, probe
gctacgggatctcagtggaggacaa

SEQ ID NO: 204309 - DNA, 25 bp, probe
gctacgaggagctggaggagaatta

SEQ ID NO: 204310 - DNA, 25 bp, probe
gtcacagtctactcggggaagtaca

SEQ ID NO: 204311 - DNA, 25 bp, probe
gctcctgtcgaatgggtgggaaaca

SEQ ID NO: 204312 - DNA, 25 bp, probe
gctccctcgagttgtggtgtgaaga

SEQ ID NO: 204313 - DNA, 25 bp, probe
gctccccgaggtgggagcggcgttg

SEQ ID NO: 204314 - DNA, 25 bp, probe
gctcccctgagagccatgcagggcg

SEQ ID NO: 204315 - DNA, 25 bp, probe
gctccccgcaatgctgatggggctg

SEQ ID NO: 204316 - DNA, 25 bp, probe
gctctcggccctggagatggggggc

SEQ ID NO: 204317 - DNA, 25 bp, probe
gctctcggccctggagatggggggc

SEQ ID NO: 204318 - DNA, 25 bp, probe
gctcccgcctcatgagcaaggagag

SEQ ID NO: 204319 - DNA, 25 bp, probe
gctcaaggcctttgccagggagagg

SEQ ID NO: 204320 - DNA, 25 bp, probe
gctcaaggtcaatgacacccctggc

SEQ ID NO: 204321 - DNA, 25 bp, probe
gctagaggtgaagatccgcgactgg

SEQ ID NO: 204322 - DNA, 25 bp, probe
gctcatggagtatgttccgggctgt

SEQ ID NO: 204323 - DNA, 25 bp, probe
gctcacggttggacttggtgtcagt

SEQ ID NO: 204324 - DNA, 25 bp, probe
gctcctggatggtttaggctgtgag

SEQ ID NO: 204325 - DNA, 25 bp, probe
gctcctggatggtttaggctgtgag

SEQ ID NO: 204326 - DNA, 25 bp, probe
gctactcagtagtcttaggtgggaa

SEQ ID NO: 204327 - DNA, 25 bp, probe
gctactcagtagtcttaggtgggaa

SEQ ID NO: 204328 - DNA, 25 bp, probe
gctacacggttatatatgtggggag

SEQ ID NO: 204329 - DNA, 25 bp, probe
gcttcggcctaatcatttgggagat

SEQ ID NO: 204330 - DNA, 25 bp, probe
gctttggatttgtgcctaaggaata

SEQ ID NO: 204331 - DNA, 25 bp, probe
gcttgaggattttggcttctagtaa

SEQ ID NO: 204332 - DNA, 25 bp, probe
gcattgagaacttcccttgcaaatt

SEQ ID NO: 204333 - DNA, 25 bp, probe
gctaaaaccttccatgtcaagattc

SEQ ID NO: 204334 - DNA, 25 bp, probe
gctcaacaacctggcggagaaagcc

SEQ ID NO: 204335 - DNA, 25 bp, probe
gctacaaacgtgtggagaaatcgga

SEQ ID NO: 204336 - DNA, 25 bp, probe
gctacgggcgtctggagaagctggg

SEQ ID NO: 204337 - DNA, 25 bp, probe
gctcaaagggcaatcgggaaggagc

SEQ ID NO: 204338 - DNA, 25 bp, probe
gctctgaaggtgatcaggctgcagg

SEQ ID NO: 204339 - DNA, 25 bp, probe
gctctgaaggtgatcaggctgcagg

SEQ ID NO: 204340 - DNA, 25 bp, probe
gctctgaccgaaacagcgctgggtc

SEQ ID NO: 204341 - DNA, 25 bp, probe
gctcgaccttgatagcatggggccc

SEQ ID NO: 204342 - DNA, 25 bp, probe
gctcgaccttgatagcatggggccc

SEQ ID NO: 204343 - DNA, 25 bp, probe
gctcgtcctatgttgatgcaggagt

SEQ ID NO: 204344 - DNA, 25 bp, probe
gctctgtctctcaagctgagtgggt

SEQ ID NO: 204345 - DNA, 25 bp, probe
gctctgtgcgccaatggcgcggtga

SEQ ID NO: 204346 - DNA, 25 bp, probe
gctctgttgctgaggctggagtgca

SEQ ID NO: 204347 - DNA, 25 bp, probe
gctcgtgtgtggcctgtggcaatga

SEQ ID NO: 204348 - DNA, 25 bp, probe
gctcagaggcttggcatttgccata

SEQ ID NO: 204349 - DNA, 25 bp, probe
gctcagcatgacttgaatgtcttca

SEQ ID NO: 204350 - DNA, 25 bp, probe
gctcagcatagggtcactttgccat

SEQ ID NO: 204351 - DNA, 25 bp, probe
gctcagcatagggtcactttgccat

SEQ ID NO: 204352 - DNA, 25 bp, probe
gctcagcgagactcagcttgtagct

SEQ ID NO: 204353 - DNA, 25 bp, probe
gcatcgcggtcagcactgactactg

SEQ ID NO: 204354 - DNA, 25 bp, probe
gctctcaggctgaaatctggcatca

SEQ ID NO: 204355 - DNA, 25 bp, probe
gctctcagggagaactgcttcccct

SEQ ID NO: 204356 - DNA, 25 bp, probe
gctcattggtggaaatgcctcctct

SEQ ID NO: 204357 - DNA, 25 bp, probe
gctctatgcggtaaagcgttccatg

SEQ ID NO: 204358 - DNA, 25 bp, probe
gctcttagaatgtaagcgttcacga

SEQ ID NO: 204359 - DNA, 25 bp, probe
gctctttgcaatccagggttctgga

SEQ ID NO: 204360 - DNA, 25 bp, probe
gctccgctccacagggattctggag

SEQ ID NO: 204361 - DNA, 25 bp, probe
gctacaatcggcagatggaactagg

SEQ ID NO: 204362 - DNA, 25 bp, probe
gctacaatcggcagatggaactagg

SEQ ID NO: 204363 - DNA, 25 bp, probe
gctacaatgcggagttacactcccg

SEQ ID NO: 204364 - DNA, 25 bp, probe
gctagcgttgagacgactcacaacc

SEQ ID NO: 204365 - DNA, 25 bp, probe
gctacatttacacatctagcagtca

SEQ ID NO: 204366 - DNA, 25 bp, probe
gctacatttacacatctagcagtca

SEQ ID NO: 204367 - DNA, 25 bp, probe
gcttagttatcacaaggcctgcact

SEQ ID NO: 204368 - DNA, 25 bp, probe
gctctggtattctcaaggcttgcat

SEQ ID NO: 204369 - DNA, 25 bp, probe
gctctggtattctcaaggcttgcat

SEQ ID NO: 204370 - DNA, 25 bp, probe
gctctggtaggtactaatggtgatt

SEQ ID NO: 204371 - DNA, 25 bp, probe
gctctggagaggctgtggctgggat

SEQ ID NO: 204372 - DNA, 25 bp, probe
gctctggagaggctgtggctgggat

SEQ ID NO: 204373 - DNA, 25 bp, probe
gctcgagggagactgatcccctgac

SEQ ID NO: 204374 - DNA, 25 bp, probe
gctctagtggcaagtctgcaacctg

SEQ ID NO: 204375 - DNA, 25 bp, probe
gctcatggtggctgtgtacacccgc

SEQ ID NO: 204376 - DNA, 25 bp, probe
gctcatggtggctgtgtacacccgc

SEQ ID NO: 204377 - DNA, 25 bp, probe
gctctggagcattgggtgaacacac

SEQ ID NO: 204378 - DNA, 25 bp, probe
gctctggagctatgaaaggccccac

SEQ ID NO: 204379 - DNA, 25 bp, probe
gctctgaagctaggacagctggctg

SEQ ID NO: 204380 - DNA, 25 bp, probe
gctctgaagctaggacagctggctg

SEQ ID NO: 204381 - DNA, 25 bp, probe
gctctccagtagcacagatgtctgc

SEQ ID NO: 204382 - DNA, 25 bp, probe
gctcttgcactgtgacagagctgcc

SEQ ID NO: 204383 - DNA, 25 bp, probe
gctctgtgcactcggagcaggtctt

SEQ ID NO: 204384 - DNA, 25 bp, probe
gctctgatcaggggtgctggttttg

SEQ ID NO: 204385 - DNA, 25 bp, probe
gctcatagggagccagcttttaacg

SEQ ID NO: 204386 - DNA, 25 bp, probe
gctcttcgtagtgcgtcttacacag

SEQ ID NO: 204387 - DNA, 25 bp, probe
gctcttagcttggccaggcctagct

SEQ ID NO: 204388 - DNA, 25 bp, probe
gctaatcagcttgcaaggagatagg

SEQ ID NO: 204389 - DNA, 25 bp, probe
gctaacatgctttgtgctggcttag

SEQ ID NO: 204390 - DNA, 25 bp, probe
gctcgacatgtgcttgcatttctag

SEQ ID NO: 204391 - DNA, 25 bp, probe
gctaagatttgcacatttctaggta

SEQ ID NO: 204392 - DNA, 25 bp, probe
gctaatgtttgagacgatggcagga

SEQ ID NO: 204393 - DNA, 25 bp, probe
gctaatgtactacgtagggcttcta

SEQ ID NO: 204394 - DNA, 25 bp, probe
gctcaggtacacagtggggtctctc

SEQ ID NO: 204395 - DNA, 25 bp, probe
gctcaagaatcctctggggttcatc

SEQ ID NO: 204396 - DNA, 25 bp, probe
gctaagtcaggaaatggggtatgca

SEQ ID NO: 204397 - DNA, 25 bp, probe
gctaagcaaggatttgaagttgtga

SEQ ID NO: 204398 - DNA, 25 bp, probe
gctaagcagtagtcgtcaagttgca

SEQ ID NO: 204399 - DNA, 25 bp, probe
gctcccagttgaggtgcgacaggca

SEQ ID NO: 204400 - DNA, 25 bp, probe
gctcaccgacgagcaggtcatcgag

SEQ ID NO: 204401 - DNA, 25 bp, probe
gctcatccccacgcacgatgagcag

SEQ ID NO: 204402 - DNA, 25 bp, probe
gctacagagcccaaatgcttagcag

SEQ ID NO: 204403 - DNA, 25 bp, probe
gctctcagagcataatccttggcag

SEQ ID NO: 204404 - DNA, 25 bp, probe
gctctgcaagaatatcatctatgac

SEQ ID NO: 204405 - DNA, 25 bp, probe
gctctgggcatctaattccaaccac

SEQ ID NO: 204406 - DNA, 25 bp, probe
gctaggcccaaatcacaagtacagt

SEQ ID NO: 204407 - DNA, 25 bp, probe
gctaggcccaagacctagttaccca

SEQ ID NO: 204408 - DNA, 25 bp, probe
gctaggccgagggccttgggagctg

SEQ ID NO: 204409 - DNA, 25 bp, probe
gctctgccacgaggacgtggaggcg

SEQ ID NO: 204410 - DNA, 25 bp, probe
gctctgccacggacatctggggagc

SEQ ID NO: 204411 - DNA, 25 bp, probe
gctctgccacggacatctggggagc

SEQ ID NO: 204412 - DNA, 25 bp, probe
gctctgccacggacatctggggagc

SEQ ID NO: 204413 - DNA, 25 bp, probe
gctcgccacaaatatgggtactgcg

SEQ ID NO: 204414 - DNA, 25 bp, probe
gctcccacataattgcagtttctct

SEQ ID NO: 204415 - DNA, 25 bp, probe
gctacacacaaaccagtatcgctca

SEQ ID NO: 204416 - DNA, 25 bp, probe
gctaaacaccgttcttcagctctaa

SEQ ID NO: 204417 - DNA, 25 bp, probe
gctctgagaactggtactctcagtg

SEQ ID NO: 204418 - DNA, 25 bp, probe
gctctgaggtctggtacagcaatgg

SEQ ID NO: 204419 - DNA, 25 bp, probe
gctctgaggtctggtacagcaatgg

SEQ ID NO: 204420 - DNA, 25 bp, probe
gctctggagttcctggcagataagg

SEQ ID NO: 204421 - DNA, 25 bp, probe
gctcggaagtgcggctgccgaatgg

SEQ ID NO: 204422 - DNA, 25 bp, probe
gctcagaaagatgactgccatgaag

SEQ ID NO: 204423 - DNA, 25 bp, probe
gctctgacaagaagtctgccaccaa

SEQ ID NO: 204424 - DNA, 25 bp, probe
gctagaaacaagacgacctacaata

SEQ ID NO: 204425 - DNA, 25 bp, probe
gctaaaacattacagttgccaagga

SEQ ID NO: 204426 - DNA, 25 bp, probe
gctaaaccaggagaagcccaaggta

SEQ ID NO: 204427 - DNA, 25 bp, probe
gctaacacacatgcaacaaaaaagg

SEQ ID NO: 204428 - DNA, 25 bp, probe
gctcacacaacagtttcaacaaaca

SEQ ID NO: 204429 - DNA, 25 bp, probe
gctcaacaagacctcttgacagacc

SEQ ID NO: 204430 - DNA, 25 bp, probe
gctcaacaggtgaccttacaggctc

SEQ ID NO: 204431 - DNA, 25 bp, probe
gctaatgaggctacagaaacaggcc

SEQ ID NO: 204432 - DNA, 25 bp, probe
gctaatgattccagaaacacgatct

SEQ ID NO: 204433 - DNA, 25 bp, probe
gcttcagattttcataaacgactta

SEQ ID NO: 204434 - DNA, 25 bp, probe
gctcttatttctacagttaccctgc

SEQ ID NO: 204435 - DNA, 25 bp, probe
gctcttatttctacagttaccctgc

SEQ ID NO: 204436 - DNA, 25 bp, probe
gctttctggttctagtaatcctggg

SEQ ID NO: 204437 - DNA, 25 bp, probe
gctttctggttctagtaatcctggg

SEQ ID NO: 204438 - DNA, 25 bp, probe
gctttgtttggatgtaatttagggt

SEQ ID NO: 204439 - DNA, 25 bp, probe
gcagttctgattcaagtaactttac

SEQ ID NO: 204440 - DNA, 25 bp, probe
gcttactgaacgccaaaacttccac

SEQ ID NO: 204441 - DNA, 25 bp, probe
gcttttacatagcaaacttttcact

SEQ ID NO: 204442 - DNA, 25 bp, probe
gctctactcagatggaaattggttg

SEQ ID NO: 204443 - DNA, 25 bp, probe
gctcaaccagaagggatacagtgtg

SEQ ID NO: 204444 - DNA, 25 bp, probe
gctcaacctgaaggccatggtggag

SEQ ID NO: 204445 - DNA, 25 bp, probe
gctctagactaacgccactgatggc

SEQ ID NO: 204446 - DNA, 25 bp, probe
gctctggattactgccacagcaagg

SEQ ID NO: 204447 - DNA, 25 bp, probe
gctctgcgagaacttcccagaggag

SEQ ID NO: 204448 - DNA, 25 bp, probe
gctctcaggtacatcctggcaggat

SEQ ID NO: 204449 - DNA, 25 bp, probe
gctcagcttgtatccattgactgga

SEQ ID NO: 204450 - DNA, 25 bp, probe
gctcagcttgtatccattgactgga

SEQ ID NO: 204451 - DNA, 25 bp, probe
gctcacgtgtattctattttgcgtt

SEQ ID NO: 204452 - DNA, 25 bp, probe
gctaagttctgttttttggatattt

SEQ ID NO: 204453 - DNA, 25 bp, probe
gctcatgactttcttttgtaaatat

SEQ ID NO: 204454 - DNA, 25 bp, probe
gctctgcgttccattggcttgaaat

SEQ ID NO: 204455 - DNA, 25 bp, probe
gctctggtacctatggtcgtgtata

SEQ ID NO: 204456 - DNA, 25 bp, probe
gctctggtacctatggtcgtgtata

SEQ ID NO: 204457 - DNA, 25 bp, probe
gctcttgaacctgctggaaatggta

SEQ ID NO: 204458 - DNA, 25 bp, probe
gctcttcctactgtacatattgggg

SEQ ID NO: 204459 - DNA, 25 bp, probe
gctcttcctactgtacatattgggg

SEQ ID NO: 204460 - DNA, 25 bp, probe
gctcttgttagcactttgatgaggg

SEQ ID NO: 204461 - DNA, 25 bp, probe
gctctttcattagatttgctgggct

SEQ ID NO: 204462 - DNA, 25 bp, probe
gctcattaacaccttttgtgcacct

SEQ ID NO: 204463 - DNA, 25 bp, probe
gctcttcacatcccattgggactcc

SEQ ID NO: 204464 - DNA, 25 bp, probe
gctctacagcagcaagaggagtcca

SEQ ID NO: 204465 - DNA, 25 bp, probe
gctctccgctgtaaaggagtccccc

SEQ ID NO: 204466 - DNA, 25 bp, probe
gctctcctcagtggcatacagaacc

SEQ ID NO: 204467 - DNA, 25 bp, probe
gctctccgatgtggcagtcagtaac

SEQ ID NO: 204468 - DNA, 25 bp, probe
gctctcggagcagggtgatgtgaag

SEQ ID NO: 204469 - DNA, 25 bp, probe
gctctcggagcagggtgatgtgaag

SEQ ID NO: 204470 - DNA, 25 bp, probe
gctctggtggcagcgttgagaaggg

SEQ ID NO: 204471 - DNA, 25 bp, probe
gctctggggcggcataatgaagggt

SEQ ID NO: 204472 - DNA, 25 bp, probe
gctcactggggacaaatatcgacgt

SEQ ID NO: 204473 - DNA, 25 bp, probe
gctcactggggacaaatatcgacgt

SEQ ID NO: 204474 - DNA, 25 bp, probe
gctcacgggctacaagttccagccc

SEQ ID NO: 204475 - DNA, 25 bp, probe
gctcagagggtacaagctccagaac

SEQ ID NO: 204476 - DNA, 25 bp, probe
gctctgtgggggaacacactagaga

SEQ ID NO: 204477 - DNA, 25 bp, probe
gctttggggggacaggccagaatga

SEQ ID NO: 204478 - DNA, 25 bp, probe
gctttggggaaggccaccccaatct

SEQ ID NO: 204479 - DNA, 25 bp, probe
gctttggggaaggccaccccaatct

SEQ ID NO: 204480 - DNA, 25 bp, probe
gctttggggaaggccaccccaatct

SEQ ID NO: 204481 - DNA, 25 bp, probe
gctttggaggtaaaaccatccctca

SEQ ID NO: 204482 - DNA, 25 bp, probe
gctcttggagcagaaaccctacggg

SEQ ID NO: 204483 - DNA, 25 bp, probe
gctctgatgaagataccaccccagc

SEQ ID NO: 204484 - DNA, 25 bp, probe
gctcatgagatggtatcagccaccc

SEQ ID NO: 204485 - DNA, 25 bp, probe
gctcatcaaggcctatggcatccgc

SEQ ID NO: 204486 - DNA, 25 bp, probe
gctcatcaaggcctatggcatccgc

SEQ ID NO: 204487 - DNA, 25 bp, probe
gctcaagcaactcaagcatcccaac

SEQ ID NO: 204488 - DNA, 25 bp, probe
gctcaagcacctgaagcacgagaac

SEQ ID NO: 204489 - DNA, 25 bp, probe
gctcagatccgtgaggtggagcaga

SEQ ID NO: 204490 - DNA, 25 bp, probe
gctcagactccgaggatgagtgcag

SEQ ID NO: 204491 - DNA, 25 bp, probe
gctagaactggatggtgagcgagta

SEQ ID NO: 204492 - DNA, 25 bp, probe
gctcagatcctggatttgcagggag

SEQ ID NO: 204493 - DNA, 25 bp, probe
gctcttcattattttcagctggagg

SEQ ID NO: 204494 - DNA, 25 bp, probe
gctcttcattattttcagctggagg

SEQ ID NO: 204495 - DNA, 25 bp, probe
gctctactttatgtcctgaagctga

SEQ ID NO: 204496 - DNA, 25 bp, probe
gctctagccttagttgccactagga

SEQ ID NO: 204497 - DNA, 25 bp, probe
gcttacctgtacactgacttgagac

SEQ ID NO: 204498 - DNA, 25 bp, probe
gcttaccttatcgcattcatgtcag

SEQ ID NO: 204499 - DNA, 25 bp, probe
gctacaagctctaacacttcttatg

SEQ ID NO: 204500 - DNA, 25 bp, probe
gctacaagctctaacacttcttatg

SEQ ID NO: 204501 - DNA, 25 bp, probe
gctaaccagttaccacacatctatg

SEQ ID NO: 204502 - DNA, 25 bp, probe
gctaaccagttaccacacatctatg

SEQ ID NO: 204503 - DNA, 25 bp, probe
gctaactagtttggcacagaaatgg

SEQ ID NO: 204504 - DNA, 25 bp, probe
gctacatctacttctaccagagagt

SEQ ID NO: 204505 - DNA, 25 bp, probe
gctcactgcgtggattaccagaaga

SEQ ID NO: 204506 - DNA, 25 bp, probe
gctcttctgtgctttccacaaataa

SEQ ID NO: 204507 - DNA, 25 bp, probe
gctcttcgatacttacacaaggaga

SEQ ID NO: 204508 - DNA, 25 bp, probe
gctctactgcaatttggacaaggga

SEQ ID NO: 204509 - DNA, 25 bp, probe
gctcatccgaaatggctctgaggtg

SEQ ID NO: 204510 - DNA, 25 bp, probe
gctacttcaatcttgttcggggacc

SEQ ID NO: 204511 - DNA, 25 bp, probe
gctatttcccttgctagtgtgcaga

SEQ ID NO: 204512 - DNA, 25 bp, probe
gctacttcccactgtatgggggaga

SEQ ID NO: 204513 - DNA, 25 bp, probe
gctagtacctgctttgttggggtat

SEQ ID NO: 204514 - DNA, 25 bp, probe
gctattcctttgctgttgactggtg

SEQ ID NO: 204515 - DNA, 25 bp, probe
gctatgacagcctgggcttactgga

SEQ ID NO: 204516 - DNA, 25 bp, probe
gctatgacagcctgggcttactgga

SEQ ID NO: 204517 - DNA, 25 bp, probe
gcttgtcacccacgggaaagtggtg

SEQ ID NO: 204518 - DNA, 25 bp, probe
gcttggacccctggaaactggtctc

SEQ ID NO: 204519 - DNA, 25 bp, probe
gcttccccacgggaacattattcct

SEQ ID NO: 204520 - DNA, 25 bp, probe
gaatccttctctgggaaatctactc

SEQ ID NO: 204521 - DNA, 25 bp, probe
gaatccttctctgggaaatctactc

SEQ ID NO: 204522 - DNA, 25 bp, probe
gctttgcttcttgagtagagccacc

SEQ ID NO: 204523 - DNA, 25 bp, probe
gctttgcttcttgagtagagccacc

SEQ ID NO: 204524 - DNA, 25 bp, probe
gctagctcctcttcaagtaaacgcc

SEQ ID NO: 204525 - DNA, 25 bp, probe
gctcagcccatttcaactgggcagg

SEQ ID NO: 204526 - DNA, 25 bp, probe
gctagctgccttagaacgggcactt

SEQ ID NO: 204527 - DNA, 25 bp, probe
gctagctgccttagaacgggcactt

SEQ ID NO: 204528 - DNA, 25 bp, probe
gctacactgtttaaaagtgccctta

SEQ ID NO: 204529 - DNA, 25 bp, probe
gctacagttatggataagacccgag

SEQ ID NO: 204530 - DNA, 25 bp, probe
gctaagactgatgtcagaggcccca

SEQ ID NO: 204531 - DNA, 25 bp, probe
gctacagactggagaagcccctgaa

SEQ ID NO: 204532 - DNA, 25 bp, probe
gctacgagatggtaccgagctcctg

SEQ ID NO: 204533 - DNA, 25 bp, probe
gctacgagatggtaccgagctcctg

SEQ ID NO: 204534 - DNA, 25 bp, probe
gctcaagatagcggactttggcctg

SEQ ID NO: 204535 - DNA, 25 bp, probe
gctcagaaacagcagtggtgcggtg

SEQ ID NO: 204536 - DNA, 25 bp, probe
gctcaagaagcagctggtgctccgg

SEQ ID NO: 204537 - DNA, 25 bp, probe
gctcaattccagtatgtaccctctg

SEQ ID NO: 204538 - DNA, 25 bp, probe
gctcatgatcttttatgttgcaccc

SEQ ID NO: 204539 - DNA, 25 bp, probe
gctcagatcttggcttctgttactc

SEQ ID NO: 204540 - DNA, 25 bp, probe
gctagctctgagccagttcagtacc

SEQ ID NO: 204541 - DNA, 25 bp, probe
gctagctctgagccagttcagtacc

SEQ ID NO: 204542 - DNA, 25 bp, probe
gctagctctgagccagttcagtacc

SEQ ID NO: 204543 - DNA, 25 bp, probe
gctctgtgctgcacgtatgcagtat

SEQ ID NO: 204544 - DNA, 25 bp, probe
gctcagtgccatgcgttcgctgaaa

SEQ ID NO: 204545 - DNA, 25 bp, probe
gctcaatcacaggggtctatagaat

SEQ ID NO: 204546 - DNA, 25 bp, probe
gctcttcacgaagtgactccaagac

SEQ ID NO: 204547 - DNA, 25 bp, probe
gctcatctcctaagtagctcttcag

SEQ ID NO: 204548 - DNA, 25 bp, probe
gctcattgcctgtgtggcacaatgg

SEQ ID NO: 204549 - DNA, 25 bp, probe
gctcattcgccaggtggacaagtgg

SEQ ID NO: 204550 - DNA, 25 bp, probe
gctctgtccacatgtgggacagggc

SEQ ID NO: 204551 - DNA, 25 bp, probe
gctctcttacattgctgaggacgag

SEQ ID NO: 204552 - DNA, 25 bp, probe
gctctgtttgtgtctgaggaggaga

SEQ ID NO: 204553 - DNA, 25 bp, probe
gctctgtttgtgtctgaggaggaga

SEQ ID NO: 204554 - DNA, 25 bp, probe
gctcattttctgccgatgaagaatt

SEQ ID NO: 204555 - DNA, 25 bp, probe
gctcattatccagtctgtgccaact

SEQ ID NO: 204556 - DNA, 25 bp, probe
gctctacatccagatctgtaagatt

SEQ ID NO: 204557 - DNA, 25 bp, probe
gctcatacccaaagcattacagaga

SEQ ID NO: 204558 - DNA, 25 bp, probe
gctaagcccaaggtgtacatcatac

SEQ ID NO: 204559 - DNA, 25 bp, probe
gctaagcaagcattgtctgtgccat

SEQ ID NO: 204560 - DNA, 25 bp, probe
gctcactccagatgacgatgacatt

SEQ ID NO: 204561 - DNA, 25 bp, probe
gctcacttcagttcaagaaattgtt

SEQ ID NO: 204562 - DNA, 25 bp, probe
gctcactatcaagacagcgtttgtc

SEQ ID NO: 204563 - DNA, 25 bp, probe
gctactgacacgtaaggtttcccaa

SEQ ID NO: 204564 - DNA, 25 bp, probe
gcttctgacgccaaatgggcttccc

SEQ ID NO: 204565 - DNA, 25 bp, probe
gcttctgacgccaaatgggcttccc

SEQ ID NO: 204566 - DNA, 25 bp, probe
gctttgacattacagtggcatacca

SEQ ID NO: 204567 - DNA, 25 bp, probe
gcttatacatatcaggttgcaacca

SEQ ID NO: 204568 - DNA, 25 bp, probe
gctcttaatttctgtcatatacata

SEQ ID NO: 204569 - DNA, 25 bp, probe
gctcaaacttcctggtaactcaagg

SEQ ID NO: 204570 - DNA, 25 bp, probe
gctaccaggaactctttgaccaagg

SEQ ID NO: 204571 - DNA, 25 bp, probe
gctacccgaactatgttggaaattt

SEQ ID NO: 204572 - DNA, 25 bp, probe
gtaccccaatttacttgccattact

SEQ ID NO: 204573 - DNA, 25 bp, probe
gtaccccaatttacttgccattact

SEQ ID NO: 204574 - DNA, 25 bp, probe
gctacccaaattgcctctggcatga

SEQ ID NO: 204575 - DNA, 25 bp, probe
gctacccaaattgcctctggcatga

SEQ ID NO: 204576 - DNA, 25 bp, probe
gctacccaaattgcctctggcatga

SEQ ID NO: 204577 - DNA, 25 bp, probe
gctacaggcacagatgcaccctggc

SEQ ID NO: 204578 - DNA, 25 bp, probe
gctaccacagcatcatgaccgtgag

SEQ ID NO: 204579 - DNA, 25 bp, probe
gctcagcttcagtcaacaccgagac

SEQ ID NO: 204580 - DNA, 25 bp, probe
gctcagctttcggatgcgggagccc

SEQ ID NO: 204581 - DNA, 25 bp, probe
gctcacttgctactagcaggcgact

SEQ ID NO: 204582 - DNA, 25 bp, probe
gctcactttagcagacagcgtccac

SEQ ID NO: 204583 - DNA, 25 bp, probe
gctcacagtgacaggccacttcaaa

SEQ ID NO: 204584 - DNA, 25 bp, probe
gctcagcattaggaacgcctgtaaa

SEQ ID NO: 204585 - DNA, 25 bp, probe
gcatacttcaacaaggactttcaaa

SEQ ID NO: 204586 - DNA, 25 bp, probe
gcattataaccccggtgctctaaaa

SEQ ID NO: 204587 - DNA, 25 bp, probe
gcattataaccccggtgctctaaaa

SEQ ID NO: 204588 - DNA, 25 bp, probe
gtcttaccagtgctggtttaaacat

SEQ ID NO: 204589 - DNA, 25 bp, probe
gttgaatccagtccaggtaactaaa

SEQ ID NO: 204590 - DNA, 25 bp, probe
gttgaatccagtccaggtaactaaa

SEQ ID NO: 204591 - DNA, 25 bp, probe
gctaattcgagtcatggctaattta

SEQ ID NO: 204592 - DNA, 25 bp, probe
gctaactgatagacgtgttaaattc

SEQ ID NO: 204593 - DNA, 25 bp, probe
gctacagtgtattggtttaattgtc

SEQ ID NO: 204594 - DNA, 25 bp, probe
gctatggtgttcgctttaatggttt

SEQ ID NO: 204595 - DNA, 25 bp, probe
gctctctggcttaagtttagaagtt

SEQ ID NO: 204596 - DNA, 25 bp, probe
gctctctgttgtacactttcaatca

SEQ ID NO: 204597 - DNA, 25 bp, probe
gctcttgtggtaggtggataacacc

SEQ ID NO: 204598 - DNA, 25 bp, probe
gctcagcttagaagttcgaaaactc

SEQ ID NO: 204599 - DNA, 25 bp, probe
gcatcacttaggtattcgtttttct

SEQ ID NO: 204600 - DNA, 25 bp, probe
gcatcacttaggtattcgtttttct

SEQ ID NO: 204601 - DNA, 25 bp, probe
gctcttgggtgcaaacttgttttct

SEQ ID NO: 204602 - DNA, 25 bp, probe
gctcttggtgtgatcacatatgctt

SEQ ID NO: 204603 - DNA, 25 bp, probe
gctcttggaagcgaatcatgcatgc

SEQ ID NO: 204604 - DNA, 25 bp, probe
gctcttggaagcgaatcatgcatgc

SEQ ID NO: 204605 - DNA, 25 bp, probe
gctcattccaactaatcatcatctt

SEQ ID NO: 204606 - DNA, 25 bp, probe
gctcattccaggtttcattcctaat

SEQ ID NO: 204607 - DNA, 25 bp, probe
gctcatttaatagatattcactgaa

SEQ ID NO: 204608 - DNA, 25 bp, probe
gctcaatctacagtttattcatata

SEQ ID NO: 204609 - DNA, 25 bp, probe
gctcaatctacagtttattcatata

SEQ ID NO: 204610 - DNA, 25 bp, probe
gctacagctctagttcattgtgata

SEQ ID NO: 204611 - DNA, 25 bp, probe
gctaagcctgatctcctgtaaaaac

SEQ ID NO: 204612 - DNA, 25 bp, probe
gctaagcctgatctcctgtaaaaac

SEQ ID NO: 204613 - DNA, 25 bp, probe
gctaatccttatttcttctaaattt

SEQ ID NO: 204614 - DNA, 25 bp, probe
gctagtgctttttccttattataat

SEQ ID NO: 204615 - DNA, 25 bp, probe
gctagtgctttttccttattataat

SEQ ID NO: 204616 - DNA, 25 bp, probe
gctcttgctattaacgttatttgta

SEQ ID NO: 204617 - DNA, 25 bp, probe
gctcagtggttcatcgtgttggctg

SEQ ID NO: 204618 - DNA, 25 bp, probe
gctcagtggttcatcgtgttggctg

SEQ ID NO: 204619 - DNA, 25 bp, probe
gctcagtggccaactctggcctgag

SEQ ID NO: 204620 - DNA, 25 bp, probe
gctactgtgcagaccacatggctct

SEQ ID NO: 204621 - DNA, 25 bp, probe
gctactgtgcagaccacatggctct

SEQ ID NO: 204622 - DNA, 25 bp, probe
gctacatgctagactgcgctattca

SEQ ID NO: 204623 - DNA, 25 bp, probe
gctacatgctagactgcgctattca

SEQ ID NO: 204624 - DNA, 25 bp, probe
gctacagctaggccgcatgctggaa

SEQ ID NO: 204625 - DNA, 25 bp, probe
gctacaggacgcgctggcgagatgc

SEQ ID NO: 204626 - DNA, 25 bp, probe
gctagcgcagacggtcatgaccagc

SEQ ID NO: 204627 - DNA, 25 bp, probe
gctcatcgaggccgtcaacaacggt

SEQ ID NO: 204628 - DNA, 25 bp, probe
gctcatcgaggccgtcaacaacggt

SEQ ID NO: 204629 - DNA, 25 bp, probe
gctcatcgaggccgtcaacaacggt

SEQ ID NO: 204630 - DNA, 25 bp, probe
gctcatcgaggccgtcaacaacggt

SEQ ID NO: 204631 - DNA, 25 bp, probe
gctcagcaggcacggtcaaaagggc

SEQ ID NO: 204632 - DNA, 25 bp, probe
gctcaaagagggacacaggatggac

SEQ ID NO: 204633 - DNA, 25 bp, probe
gttgcagggggatctggggactacc

SEQ ID NO: 204634 - DNA, 25 bp, probe
gttgcagggggatctggggactacc

SEQ ID NO: 204635 - DNA, 25 bp, probe
gcttaagggcgatgcctgggtttac

SEQ ID NO: 204636 - DNA, 25 bp, probe
gcatttacgaaatccaggagtttta

SEQ ID NO: 204637 - DNA, 25 bp, probe
gctctctaccaactaccatgaggct

SEQ ID NO: 204638 - DNA, 25 bp, probe
gctcttcaccaactgtcagaaggca

SEQ ID NO: 204639 - DNA, 25 bp, probe
gctcacctacaacctagagaagaag

SEQ ID NO: 204640 - DNA, 25 bp, probe
gctcacccaagaccatcggaagtga

SEQ ID NO: 204641 - DNA, 25 bp, probe
gctaagcgacgaccacagtaagatc

SEQ ID NO: 204642 - DNA, 25 bp, probe
gctacttacagacagcatgctcaac

SEQ ID NO: 204643 - DNA, 25 bp, probe
gctcacatctaagtccaagtgcaag

SEQ ID NO: 204644 - DNA, 25 bp, probe
gctcatcttagaccacagactgact

SEQ ID NO: 204645 - DNA, 25 bp, probe
gctcatcttgtgcccactgatggca

SEQ ID NO: 204646 - DNA, 25 bp, probe
gctcattgagtggctgtgtggagaa

SEQ ID NO: 204647 - DNA, 25 bp, probe
gctcttatagagcctgtgtgaaagg

SEQ ID NO: 204648 - DNA, 25 bp, probe
gctcttatagagcctgtgtgaaagg

SEQ ID NO: 204649 - DNA, 25 bp, probe
gctcttgatagaaactgagaagcag

SEQ ID NO: 204650 - DNA, 25 bp, probe
gctctcagtcagatactgcgcaaga

SEQ ID NO: 204651 - DNA, 25 bp, probe
gctaactcatggaactgcagacaga

SEQ ID NO: 204652 - DNA, 25 bp, probe
gctaactcatggaactgcagacaga

SEQ ID NO: 204653 - DNA, 25 bp, probe
gctctactcttgctcagcggagagg

SEQ ID NO: 204654 - DNA, 25 bp, probe
gctctcaatcctcgtatagcgtatg

SEQ ID NO: 204655 - DNA, 25 bp, probe
gctctcactcactgataatgcttat

SEQ ID NO: 204656 - DNA, 25 bp, probe
gctctacttcttctatgatgtcatc

SEQ ID NO: 204657 - DNA, 25 bp, probe
gctaaatactgtacatagatgtatc

SEQ ID NO: 204658 - DNA, 25 bp, probe
gctcatcaaactctcagcatatgga

SEQ ID NO: 204659 - DNA, 25 bp, probe
gctcagctaacgctcaacagctaca

SEQ ID NO: 204660 - DNA, 25 bp, probe
gctacgatactccgagaagtactgg

SEQ ID NO: 204661 - DNA, 25 bp, probe
gctacattgacgagacacttactgg

SEQ ID NO: 204662 - DNA, 25 bp, probe
gctacattgacgagacacttactgg

SEQ ID NO: 204663 - DNA, 25 bp, probe
gcatccttaacaagaactagcgctg

SEQ ID NO: 204664 - DNA, 25 bp, probe
gcatcctggtaacctactaggtgct

SEQ ID NO: 204665 - DNA, 25 bp, probe
gcatcctggtaacctactaggtgct

SEQ ID NO: 204666 - DNA, 25 bp, probe
gctcttgtgtaatctacttgacatc

SEQ ID NO: 204667 - DNA, 25 bp, probe
gctcttgtgtaatctacttgacatc

SEQ ID NO: 204668 - DNA, 25 bp, probe
gctctttcgaatccacagtgttatc

SEQ ID NO: 204669 - DNA, 25 bp, probe
gctcactactagaacacattttatt

SEQ ID NO: 204670 - DNA, 25 bp, probe
gctcactactagaacacattttatt

SEQ ID NO: 204671 - DNA, 25 bp, probe
gctcacagaaggaccacatttatat

SEQ ID NO: 204672 - DNA, 25 bp, probe
gctacagcgtggacaaatctctcag

SEQ ID NO: 204673 - DNA, 25 bp, probe
gctctacaccagagagtgctgccat

SEQ ID NO: 204674 - DNA, 25 bp, probe
gctcttcaccgaaatgttgtattct

SEQ ID NO: 204675 - DNA, 25 bp, probe
gctcttactgcaggaagtttatctg

SEQ ID NO: 204676 - DNA, 25 bp, probe
gctctacctggctagagtttcttct

SEQ ID NO: 204677 - DNA, 25 bp, probe
gctcatgactctgcaaggcagtcct

SEQ ID NO: 204678 - DNA, 25 bp, probe
gctcatcctcatggaagagatccgc

SEQ ID NO: 204679 - DNA, 25 bp, probe
gctcatctacagtaaggacagtctc

SEQ ID NO: 204680 - DNA, 25 bp, probe
gctttgacaaaatgactggctcctg

SEQ ID NO: 204681 - DNA, 25 bp, probe
gctaagaacaacaagaagcctcccc

SEQ ID NO: 204682 - DNA, 25 bp, probe
gctacagcaaaccaaacagcccagc

SEQ ID NO: 204683 - DNA, 25 bp, probe
gctaacatagaccagtctgattttg

SEQ ID NO: 204684 - DNA, 25 bp, probe
gctaaatatggtcgttactattttc

SEQ ID NO: 204685 - DNA, 25 bp, probe
gctaaacagtatattacctctgtat

SEQ ID NO: 204686 - DNA, 25 bp, probe
gctacccagtaaaaatccactattt

SEQ ID NO: 204687 - DNA, 25 bp, probe
gctagcccgatggtaggattcagtt

SEQ ID NO: 204688 - DNA, 25 bp, probe
gctcagtcctagttcaggatttgga

SEQ ID NO: 204689 - DNA, 25 bp, probe
gctcagctcctatgttggtattaac

SEQ ID NO: 204690 - DNA, 25 bp, probe
gcacctcttccgaatgggttttcta

SEQ ID NO: 204691 - DNA, 25 bp, probe
gcagcttttttgacggtatttccta

SEQ ID NO: 204692 - DNA, 25 bp, probe
gacttatttttctgggtctcttaat

SEQ ID NO: 204693 - DNA, 25 bp, probe
gcagttttttgcattcgagttttaa

SEQ ID NO: 204694 - DNA, 25 bp, probe
gcagttttttgcattcgagttttaa

SEQ ID NO: 204695 - DNA, 25 bp, probe
gctctatttttactgtctggtattt

SEQ ID NO: 204696 - DNA, 25 bp, probe
gctatgggtttgctttggtgttgtt

SEQ ID NO: 204697 - DNA, 25 bp, probe
gctacttctcgacatttggtttgtt

SEQ ID NO: 204698 - DNA, 25 bp, probe
gctactttttcactttggatttgtt

SEQ ID NO: 204699 - DNA, 25 bp, probe
gctcagctactgatttttgtgattt

SEQ ID NO: 204700 - DNA, 25 bp, probe
gctacattcagttcttgtgtcgttt

SEQ ID NO: 204701 - DNA, 25 bp, probe
gctacatatggccatcttgacagtg

SEQ ID NO: 204702 - DNA, 25 bp, probe
gcatagttggagtctctgactgttt

SEQ ID NO: 204703 - DNA, 25 bp, probe
gctcagcctggtcaagactgttgtc

SEQ ID NO: 204704 - DNA, 25 bp, probe
gctcagccggatcctgatgatcagt

SEQ ID NO: 204705 - DNA, 25 bp, probe
gctcagggagtgaaatgtgcagatt

SEQ ID NO: 204706 - DNA, 25 bp, probe
gctcatcgagatgatatattgctac

SEQ ID NO: 204707 - DNA, 25 bp, probe
gctcatcatcagtcttaatattcag

SEQ ID NO: 204708 - DNA, 25 bp, probe
gctcttcagttttccattctgtggc

SEQ ID NO: 204709 - DNA, 25 bp, probe
gctcttcagttttccattctgtggc

SEQ ID NO: 204710 - DNA, 25 bp, probe
gctcttagctgagtgtcccgcgggg

SEQ ID NO: 204711 - DNA, 25 bp, probe
gcttttctgaattacctggggagtc

SEQ ID NO: 204712 - DNA, 25 bp, probe
gcaggttatgagatccttggggtcc

SEQ ID NO: 204713 - DNA, 25 bp, probe
gcagatcgaaagttgcctcggggat

SEQ ID NO: 204714 - DNA, 25 bp, probe
gctactgcaaagctgtccgttgtat

SEQ ID NO: 204715 - DNA, 25 bp, probe
gctacatgacaacgtttcgacattt

SEQ ID NO: 204716 - DNA, 25 bp, probe
gctaaaaattgctctggccttatct

SEQ ID NO: 204717 - DNA, 25 bp, probe
gctcaaaatctagaagagtctattg

SEQ ID NO: 204718 - DNA, 25 bp, probe
gctcaagaatccaaaatgggtctgt

SEQ ID NO: 204719 - DNA, 25 bp, probe
gctcagaggtttaacatgggttgct

SEQ ID NO: 204720 - DNA, 25 bp, probe
gctcaacatcgtcaacgtggtgtgc

SEQ ID NO: 204721 - DNA, 25 bp, probe
gctcaacatcgtcaacgtggtgtgc

SEQ ID NO: 204722 - DNA, 25 bp, probe
gctcatgaccgacaagggttgtgtg

SEQ ID NO: 204723 - DNA, 25 bp, probe
gctcttctccccaggtgtgttgggg

SEQ ID NO: 204724 - DNA, 25 bp, probe
gcttctcccctgttggggctaagga

SEQ ID NO: 204725 - DNA, 25 bp, probe
gctttcgcccagtttcatggctaaa

SEQ ID NO: 204726 - DNA, 25 bp, probe
gctttcgcccagtttcatggctaaa

SEQ ID NO: 204727 - DNA, 25 bp, probe
gctttcgccaggcctgcctggaaac

SEQ ID NO: 204728 - DNA, 25 bp, probe
gctttcgccaggcctgcctggaaac

SEQ ID NO: 204729 - DNA, 25 bp, probe
gctatgaacgaggccagtggggaac

SEQ ID NO: 204730 - DNA, 25 bp, probe
gctcagcaaggagtgcgtggggcct

SEQ ID NO: 204731 - DNA, 25 bp, probe
gctcaacgtgacggtggtgacgtcc

SEQ ID NO: 204732 - DNA, 25 bp, probe
gctcaacgtgacggtggtgacgtcc

SEQ ID NO: 204733 - DNA, 25 bp, probe
gctaaggatgactctggtcagagat

SEQ ID NO: 204734 - DNA, 25 bp, probe
gctacaaaacatcctactcaatgag

SEQ ID NO: 204735 - DNA, 25 bp, probe
gctacaacaagctgtcctgcaagtc

SEQ ID NO: 204736 - DNA, 25 bp, probe
gctaacaaaacggcgatggatgtca

SEQ ID NO: 204737 - DNA, 25 bp, probe
gctaacaaaacggcgatggatgtca

SEQ ID NO: 204738 - DNA, 25 bp, probe
gctaaaacaattgatgcaggttgca

SEQ ID NO: 204739 - DNA, 25 bp, probe
gctaaaccagcatttctgtgtttga

SEQ ID NO: 204740 - DNA, 25 bp, probe
gctaattttgtaacgatgatcttga

SEQ ID NO: 204741 - DNA, 25 bp, probe
gctaattacctaaccagcttgtatt

SEQ ID NO: 204742 - DNA, 25 bp, probe
gctattattcttacaccctgtgtaa

SEQ ID NO: 204743 - DNA, 25 bp, probe
gctcttgcagttcaatcctctggaa

SEQ ID NO: 204744 - DNA, 25 bp, probe
gctcttggttgcacatgttatgaaa

SEQ ID NO: 204745 - DNA, 25 bp, probe
gctcttggagtgctcatgtttgaag

SEQ ID NO: 204746 - DNA, 25 bp, probe
gctttggtgtggttttactagaaat

SEQ ID NO: 204747 - DNA, 25 bp, probe
gctactgtgagtctttaaatggaaa

SEQ ID NO: 204748 - DNA, 25 bp, probe
gctactgtgagtctttaaatggaaa

SEQ ID NO: 204749 - DNA, 25 bp, probe
gctactgtgagtctttaaatggaaa

SEQ ID NO: 204750 - DNA, 25 bp, probe
gctatttcagtgggtataatttaaa

SEQ ID NO: 204751 - DNA, 25 bp, probe
gctacttcagtaatgtctatattat

SEQ ID NO: 204752 - DNA, 25 bp, probe
gctactgtttgcaatgtcttattaa

SEQ ID NO: 204753 - DNA, 25 bp, probe
gctagaatatagatccctttaagaa

SEQ ID NO: 204754 - DNA, 25 bp, probe
gctaaatgtaaatgccttctcaaat

SEQ ID NO: 204755 - DNA, 25 bp, probe
gctaaataaaggctgctgttctaag

SEQ ID NO: 204756 - DNA, 25 bp, probe
gctatgaaaagagtgatggttcctg

SEQ ID NO: 204757 - DNA, 25 bp, probe
gctcagcaatagggtgcagttttcc

SEQ ID NO: 204758 - DNA, 25 bp, probe
gctcataccaacgtgttttatcccg

SEQ ID NO: 204759 - DNA, 25 bp, probe
gctcatgacacagcctgtttcaacc

SEQ ID NO: 204760 - DNA, 25 bp, probe
gctcaacgacatcgtgattctccag

SEQ ID NO: 204761 - DNA, 25 bp, probe
gctcacactgtatggaacccacatc

SEQ ID NO: 204762 - DNA, 25 bp, probe
gctaagtgctctggggcacaccaaa

SEQ ID NO: 204763 - DNA, 25 bp, probe
gctaagtgctctggggcacaccaaa

SEQ ID NO: 204764 - DNA, 25 bp, probe
gctcatttcctggtatgacaacgaa

SEQ ID NO: 204765 - DNA, 25 bp, probe
gctcatcttccgggagattcatgcc

SEQ ID NO: 204766 - DNA, 25 bp, probe
gctcatcttccgggagattcatgcc

SEQ ID NO: 204767 - DNA, 25 bp, probe
gctcatctgagtgacggatatgtga

SEQ ID NO: 204768 - DNA, 25 bp, probe
gctatcgagcatgagcacctaaatc

SEQ ID NO: 204769 - DNA, 25 bp, probe
gctattgcatgattagccccctatc

SEQ ID NO: 204770 - DNA, 25 bp, probe
gctattgcatgattagccccctatc

SEQ ID NO: 204771 - DNA, 25 bp, probe
gctattgcatgattagccccctatc

SEQ ID NO: 204772 - DNA, 25 bp, probe
gctcattgctatcagcatcttctct

SEQ ID NO: 204773 - DNA, 25 bp, probe
gctaatgctcagagatcttttttca

SEQ ID NO: 204774 - DNA, 25 bp, probe
gctaatgtgcagggatattgcctta

SEQ ID NO: 204775 - DNA, 25 bp, probe
gctaatgtgcagggatattgcctta

SEQ ID NO: 204776 - DNA, 25 bp, probe
gctcaaagcatgtcagtttccttaa

SEQ ID NO: 204777 - DNA, 25 bp, probe
gctaaagacacagtgcttacttacc

SEQ ID NO: 204778 - DNA, 25 bp, probe
gctaatgcaacatccatttttcacc

SEQ ID NO: 204779 - DNA, 25 bp, probe
gctacatttagtaactcatttcacc

SEQ ID NO: 204780 - DNA, 25 bp, probe
gctcatcaattacgaattcaagctg

SEQ ID NO: 204781 - DNA, 25 bp, probe
gctcatcaattacgaattcaagctg

SEQ ID NO: 204782 - DNA, 25 bp, probe
gctcacagactacggcatgtgcaag

SEQ ID NO: 204783 - DNA, 25 bp, probe
gctaagcacgggccatatgaataac

SEQ ID NO: 204784 - DNA, 25 bp, probe
gctactgacgtacccatcaggacag

SEQ ID NO: 204785 - DNA, 25 bp, probe
gctactgacgtacccatcaggacag

SEQ ID NO: 204786 - DNA, 25 bp, probe
gctcactcagagcagcgtatcggta

SEQ ID NO: 204787 - DNA, 25 bp, probe
gctcagcagcaggagtcagctacga

SEQ ID NO: 204788 - DNA, 25 bp, probe
gctcagcagcaggagtcagctacga

SEQ ID NO: 204789 - DNA, 25 bp, probe
gctcagcagatggatatcacctcat

SEQ ID NO: 204790 - DNA, 25 bp, probe
gctcagcagatggatatcacctcat

SEQ ID NO: 204791 - DNA, 25 bp, probe
gctcaagatggtaatcagccacaac

SEQ ID NO: 204792 - DNA, 25 bp, probe
gctcaggtggctcctgagctcaccc

SEQ ID NO: 204793 - DNA, 25 bp, probe
gctcaggtggatctaaaactcaaga

SEQ ID NO: 204794 - DNA, 25 bp, probe
gctaatgtgctgttttaaagtataa

SEQ ID NO: 204795 - DNA, 25 bp, probe
gctatgaattactctatatagtatc

SEQ ID NO: 204796 - DNA, 25 bp, probe
gctaagactgcctgtctcatatgtc

SEQ ID NO: 204797 - DNA, 25 bp, probe
gctaaggtggcattgtctcatggct

SEQ ID NO: 204798 - DNA, 25 bp, probe
gctagagtttcttctcatcagagca

SEQ ID NO: 204799 - DNA, 25 bp, probe
gctcatggtcttcgagtatatgcgg

SEQ ID NO: 204800 - DNA, 25 bp, probe
gctcatgtttgaagatgatggcagg

SEQ ID NO: 204801 - DNA, 25 bp, probe
gctcagatgatgcgggagtgctggt

SEQ ID NO: 204802 - DNA, 25 bp, probe
gctcaatgtcaccgtggtgaccttc

SEQ ID NO: 204803 - DNA, 25 bp, probe
gctagagtcagccgtggacacagct

SEQ ID NO: 204804 - DNA, 25 bp, probe
gctagtgtcagcagtgggatacctg

SEQ ID NO: 204805 - DNA, 25 bp, probe
gctagtgtcagcagtgggatacctg

SEQ ID NO: 204806 - DNA, 25 bp, probe
gctatgaggcagtggtgagacacgt

SEQ ID NO: 204807 - DNA, 25 bp, probe
gctcatgaaagaatgctggcaacaa

SEQ ID NO: 204808 - DNA, 25 bp, probe
gctcatgaaagaatgctggcaacaa

SEQ ID NO: 204809 - DNA, 25 bp, probe
gctagcaggaagactgaaagcaagg

SEQ ID NO: 204810 - DNA, 25 bp, probe
gctcacagggaacaagacacggctg

SEQ ID NO: 204811 - DNA, 25 bp, probe
gctacagcgaaagaactacagagtg

SEQ ID NO: 204812 - DNA, 25 bp, probe
gcatatgcctggtaccaaaaaagga

SEQ ID NO: 204813 - DNA, 25 bp, probe
gctagtgattgacccagcaaaaaga

SEQ ID NO: 204814 - DNA, 25 bp, probe
gctattatgcaacagatcagggaaa

SEQ ID NO: 204815 - DNA, 25 bp, probe
gctcacttacattatgctcagtgga

SEQ ID NO: 204816 - DNA, 25 bp, probe
gctactttgccattaaggcagacta

SEQ ID NO: 204817 - DNA, 25 bp, probe
gctagctagatggaattattgagac

SEQ ID NO: 204818 - DNA, 25 bp, probe
gctcactgagcaggctttatctgga

SEQ ID NO: 204819 - DNA, 25 bp, probe
gctcactggcatggccttccgtgtc

SEQ ID NO: 204820 - DNA, 25 bp, probe
gctcaggagatggcctcattcctcc

SEQ ID NO: 204821 - DNA, 25 bp, probe
gctcaggggcagctcatagagtccc

SEQ ID NO: 204822 - DNA, 25 bp, probe
gctcaaggtgcatttcaaactccag

SEQ ID NO: 204823 - DNA, 25 bp, probe
gctaagtggcaggtccaatcccatt

SEQ ID NO: 204824 - DNA, 25 bp, probe
gctaagtgctgacacatcattccca

SEQ ID NO: 204825 - DNA, 25 bp, probe
gctaagtgctgacacatcattccca

SEQ ID NO: 204826 - DNA, 25 bp, probe
gctaatggcgatcatctttgccacc

SEQ ID NO: 204827 - DNA, 25 bp, probe
gctactggctgagattaaggcaggc

SEQ ID NO: 204828 - DNA, 25 bp, probe
gctcacaagcttgatctaagactgg

SEQ ID NO: 204829 - DNA, 25 bp, probe
gctacaagcgctggcgtaagcatgg

SEQ ID NO: 204830 - DNA, 25 bp, probe
gctacaatcgctctctagacatgtg

SEQ ID NO: 204831 - DNA, 25 bp, probe
gctacatttgtgctttctgcagtga

SEQ ID NO: 204832 - DNA, 25 bp, probe
gctaatagctggttcaactgcagga

SEQ ID NO: 204833 - DNA, 25 bp, probe
gctcaatagattgctcaaatcaggt

SEQ ID NO: 204834 - DNA, 25 bp, probe
gctcagatggaatgctttacatggt

SEQ ID NO: 204835 - DNA, 25 bp, probe
gctcagtggaagacccttcaagatt

SEQ ID NO: 204836 - DNA, 25 bp, probe
gctcagtggaagacccttcaagatt

SEQ ID NO: 204837 - DNA, 25 bp, probe
gctcatgggaaaattgtgatcaaaa

SEQ ID NO: 204838 - DNA, 25 bp, probe
gctcagagcgagccagcttttgaga

SEQ ID NO: 204839 - DNA, 25 bp, probe
gctatcaggagacctactcttgggc

SEQ ID NO: 204840 - DNA, 25 bp, probe
gcttgagcctgaccatacacttagg

SEQ ID NO: 204841 - DNA, 25 bp, probe
gctagatgcagagaacccttaggtt

SEQ ID NO: 204842 - DNA, 25 bp, probe
gcttgggaaatagcccttggtgtgg

SEQ ID NO: 204843 - DNA, 25 bp, probe
gcttttgaaaacatttccatgttag

SEQ ID NO: 204844 - DNA, 25 bp, probe
gcttttgacaggtagttttgggtca

SEQ ID NO: 204845 - DNA, 25 bp, probe
gctatttggaagtgattgaaggggc

SEQ ID NO: 204846 - DNA, 25 bp, probe
gctttataaatttgttcaaagggca

SEQ ID NO: 204847 - DNA, 25 bp, probe
gctttacaggaagattctgaaaggc

SEQ ID NO: 204848 - DNA, 25 bp, probe
gcttgaggctggagcccttgaaagg

SEQ ID NO: 204849 - DNA, 25 bp, probe
gcttaggctggggattctggatgca

SEQ ID NO: 204850 - DNA, 25 bp, probe
gctacggatggatatgtcaggaatg

SEQ ID NO: 204851 - DNA, 25 bp, probe
gctactggcgttttgtgtggatcat

SEQ ID NO: 204852 - DNA, 25 bp, probe
gctactggcgttttgtgtggatcat

SEQ ID NO: 204853 - DNA, 25 bp, probe
gctatttggacttttgggacaccca

SEQ ID NO: 204854 - DNA, 25 bp, probe
gctatttggacttttgggacaccca

SEQ ID NO: 204855 - DNA, 25 bp, probe
tcgatttgagccagggaaacctcca

SEQ ID NO: 204856 - DNA, 25 bp, probe
gctttaggctactggaaacctctcc

SEQ ID NO: 204857 - DNA, 25 bp, probe
gcttatttgtaatgtaaaccaccat

SEQ ID NO: 204858 - DNA, 25 bp, probe
gctaacctttgatgctataactacg

SEQ ID NO: 204859 - DNA, 25 bp, probe
gctagggatcttgatttgaaaacga

SEQ ID NO: 204860 - DNA, 25 bp, probe
gctatgggtttatttcttagaacat

SEQ ID NO: 204861 - DNA, 25 bp, probe
gctatggaggtgattttgtggccct

SEQ ID NO: 204862 - DNA, 25 bp, probe
gctatggaggtgattttgtggccct

SEQ ID NO: 204863 - DNA, 25 bp, probe
gctactgaagtttattttaccattg

SEQ ID NO: 204864 - DNA, 25 bp, probe
gctactgaagcatccagtctttcgt

SEQ ID NO: 204865 - DNA, 25 bp, probe
gctactgacctacttgactttggag

SEQ ID NO: 204866 - DNA, 25 bp, probe
gctactgacctacttgactttggag

SEQ ID NO: 204867 - DNA, 25 bp, probe
gctacgagctgcaggagaccctggg

SEQ ID NO: 204868 - DNA, 25 bp, probe
gcttccgctgccaggacgaaagcga

SEQ ID NO: 204869 - DNA, 25 bp, probe
gctaccgctcgcaggactatggcgg

SEQ ID NO: 204870 - DNA, 25 bp, probe
gctaccgctcgcaggactatggcgg

SEQ ID NO: 204871 - DNA, 25 bp, probe
gctcactcccgaggaagtggtgcag

SEQ ID NO: 204872 - DNA, 25 bp, probe
gctaccgcaagatagcagctggccg

SEQ ID NO: 204873 - DNA, 25 bp, probe
gctcaccaagaatatgcacttgcac

SEQ ID NO: 204874 - DNA, 25 bp, probe
gcatcaccacaagcacaacttgaag

SEQ ID NO: 204875 - DNA, 25 bp, probe
gctactctcaacgagttcccagagg

SEQ ID NO: 204876 - DNA, 25 bp, probe
gctagccatgaaccatttcctggac

SEQ ID NO: 204877 - DNA, 25 bp, probe
gctagcctgctacttggtgaaggag

SEQ ID NO: 204878 - DNA, 25 bp, probe
gctaatgtgtaaatggcaaaggtgt

SEQ ID NO: 204879 - DNA, 25 bp, probe
gctttgcatatcaagttgccaaagg

SEQ ID NO: 204880 - DNA, 25 bp, probe
gctattatgccaggttctgaaaaga

SEQ ID NO: 204881 - DNA, 25 bp, probe
gctttttgcaatatgctggggaaag

SEQ ID NO: 204882 - DNA, 25 bp, probe
gctttttctaggtatctgaaaaggt

SEQ ID NO: 204883 - DNA, 25 bp, probe
gcttattcacaagacccaaaaggca

SEQ ID NO: 204884 - DNA, 25 bp, probe
gctacttcaagtatcctcagaaatg

SEQ ID NO: 204885 - DNA, 25 bp, probe
gctattacatagtttatccagtaaa

SEQ ID NO: 204886 - DNA, 25 bp, probe
gctaacctagaggccaccgagaaac

SEQ ID NO: 204887 - DNA, 25 bp, probe
gctacctgtaggggcctggggaaag

SEQ ID NO: 204888 - DNA, 25 bp, probe
gctacttgcaaggctgaggcgggag

SEQ ID NO: 204889 - DNA, 25 bp, probe
gctactgacattcctaagagtggag

SEQ ID NO: 204890 - DNA, 25 bp, probe
gctaactctgtcctgaagagtggga

SEQ ID NO: 204891 - DNA, 25 bp, probe
gctcaccatctcagtgaggggcagg

SEQ ID NO: 204892 - DNA, 25 bp, probe
gctacgcaacggtggtggcgtgggc

SEQ ID NO: 204893 - DNA, 25 bp, probe
gctacaaccaggaggtgggccagac

SEQ ID NO: 204894 - DNA, 25 bp, probe
gctactccaaggtgaaggtggccac

SEQ ID NO: 204895 - DNA, 25 bp, probe
gctactccaaggtgaaggtggccac

SEQ ID NO: 204896 - DNA, 25 bp, probe
gctaccgcaacctgaactgtgaggc

SEQ ID NO: 204897 - DNA, 25 bp, probe
gctcacccagagactggaatgtggc

SEQ ID NO: 204898 - DNA, 25 bp, probe
gctcaccgtgagcaggtagaagcca

SEQ ID NO: 204899 - DNA, 25 bp, probe
gctcaccgtgagcaggtagaagcca

SEQ ID NO: 204900 - DNA, 25 bp, probe
gctcactggtgcaaagagaagatca

SEQ ID NO: 204901 - DNA, 25 bp, probe
gctcactgtgagcaatgtgctgaaa

SEQ ID NO: 204902 - DNA, 25 bp, probe
gctcagtctgaggcaaggctgtgga

SEQ ID NO: 204903 - DNA, 25 bp, probe
gctttgctgaccaaatgcctggtac

SEQ ID NO: 204904 - DNA, 25 bp, probe
gcttttggccatctgactaaactgg

SEQ ID NO: 204905 - DNA, 25 bp, probe
gcttttggccatctgactaaactgg

SEQ ID NO: 204906 - DNA, 25 bp, probe
gctttgggcactcccaataatgaag

SEQ ID NO: 204907 - DNA, 25 bp, probe
gctttgtggacatccctaagcagga

SEQ ID NO: 204908 - DNA, 25 bp, probe
gctaaaggacaaacctctcagcagc

SEQ ID NO: 204909 - DNA, 25 bp, probe
gctaaaggacaaacctctcagcagc

SEQ ID NO: 204910 - DNA, 25 bp, probe
gctaagggactctatccattgagca

SEQ ID NO: 204911 - DNA, 25 bp, probe
gctaagggactctatccattgagca

SEQ ID NO: 204912 - DNA, 25 bp, probe
gctacagggaagcctccactggctt

SEQ ID NO: 204913 - DNA, 25 bp, probe
gctagcagggaataccacagtcatt

SEQ ID NO: 204914 - DNA, 25 bp, probe
gctaggcagtgaattcacccacctt

SEQ ID NO: 204915 - DNA, 25 bp, probe
gctaggcagtattccaaggcacttt

SEQ ID NO: 204916 - DNA, 25 bp, probe
gctagacgctataccgtggactctc

SEQ ID NO: 204917 - DNA, 25 bp, probe
gctaaccctagatatggcagctctt

SEQ ID NO: 204918 - DNA, 25 bp, probe
gcttacatccttaaaggcaccatct

SEQ ID NO: 204919 - DNA, 25 bp, probe
gctaatcataataaaattcaaccat

SEQ ID NO: 204920 - DNA, 25 bp, probe
gctactacaaattcaacttactgca

SEQ ID NO: 204921 - DNA, 25 bp, probe
gctactgagctcatttcacttactg

SEQ ID NO: 204922 - DNA, 25 bp, probe
gctttggttaatacatctttcccta

SEQ ID NO: 204923 - DNA, 25 bp, probe
gctatggtttaattatatttgcttt

SEQ ID NO: 204924 - DNA, 25 bp, probe
gcttccttgaaacatttttgtgcta

SEQ ID NO: 204925 - DNA, 25 bp, probe
gcagttcttcaaaaactttgcgaca

SEQ ID NO: 204926 - DNA, 25 bp, probe
gcagttcttcaaaaactttgcgaca

SEQ ID NO: 204927 - DNA, 25 bp, probe
gctttttccaggacaattctggaag

SEQ ID NO: 204928 - DNA, 25 bp, probe
gcttaattcccgagatggagcttgg

SEQ ID NO: 204929 - DNA, 25 bp, probe
gcttactttctggaagtagtgggca

SEQ ID NO: 204930 - DNA, 25 bp, probe
gcttactttctggaagtagtgggca

SEQ ID NO: 204931 - DNA, 25 bp, probe
gcttcaccttcttaacaaggcacct

SEQ ID NO: 204932 - DNA, 25 bp, probe
gcataatccctttaacaagcctaaa

SEQ ID NO: 204933 - DNA, 25 bp, probe
gctacacctctgattacaattctga

SEQ ID NO: 204934 - DNA, 25 bp, probe
gctacacctctgattacaattctga

SEQ ID NO: 204935 - DNA, 25 bp, probe
gctaccttcattttgggaattggag

SEQ ID NO: 204936 - DNA, 25 bp, probe
gctaccccaatgtgtgagctgatgg

SEQ ID NO: 204937 - DNA, 25 bp, probe
gctacccagctggggtgggtgaggc

SEQ ID NO: 204938 - DNA, 25 bp, probe
gctacccagctggggtgggtgaggc

SEQ ID NO: 204939 - DNA, 25 bp, probe
gctacccagctggggtgggtgaggc

SEQ ID NO: 204940 - DNA, 25 bp, probe
gctcaaccaatggagagctgaatgt

SEQ ID NO: 204941 - DNA, 25 bp, probe
gctcaaaccattcgtctgatatcta

SEQ ID NO: 204942 - DNA, 25 bp, probe
gctcactcaggcatgctggtattct

SEQ ID NO: 204943 - DNA, 25 bp, probe
gctcaccatggctttaaaacatgct

SEQ ID NO: 204944 - DNA, 25 bp, probe
gctatgctggacattaacaagatca

SEQ ID NO: 204945 - DNA, 25 bp, probe
gctataggaagtaaggatgatggca

SEQ ID NO: 204946 - DNA, 25 bp, probe
gctaaggatttgaagctggcagact

SEQ ID NO: 204947 - DNA, 25 bp, probe
gctcaagagctggcggaggggcatt

SEQ ID NO: 204948 - DNA, 25 bp, probe
gctaatgtgctgactgaggagggca

SEQ ID NO: 204949 - DNA, 25 bp, probe
gctacagtgtgaatgtggacgaaga

SEQ ID NO: 204950 - DNA, 25 bp, probe
gctacgtgctgagtggggctgggaa

SEQ ID NO: 204951 - DNA, 25 bp, probe
gctacgagctgcctgacggccaggt

SEQ ID NO: 204952 - DNA, 25 bp, probe
gctacagcaggagtgcatgaggcaa

SEQ ID NO: 204953 - DNA, 25 bp, probe
gctcaagcggcaggcgcaggaggag

SEQ ID NO: 204954 - DNA, 25 bp, probe
gctcaacaggaccaaggatgcagag

SEQ ID NO: 204955 - DNA, 25 bp, probe
gctcaacaggaccaaggatgcagag

SEQ ID NO: 204956 - DNA, 25 bp, probe
gctcacacagagtcagcactgggga

SEQ ID NO: 204957 - DNA, 25 bp, probe
gctcaccagatctcaggcaggaaag

SEQ ID NO: 204958 - DNA, 25 bp, probe
gctaccacatccaaggaaggcagca

SEQ ID NO: 204959 - DNA, 25 bp, probe
gctattcaatagcagtgacgcgctc

SEQ ID NO: 204960 - DNA, 25 bp, probe
gctcacgcagtacattgacgggcag

SEQ ID NO: 204961 - DNA, 25 bp, probe
gctcacgcagtacattgacgggcag

SEQ ID NO: 204962 - DNA, 25 bp, probe
gctcacgcagtacattgacgggcag

SEQ ID NO: 204963 - DNA, 25 bp, probe
gctcacgcagtacattgacgggcag

SEQ ID NO: 204964 - DNA, 25 bp, probe
gctcacgcagtacattgacgggcag

SEQ ID NO: 204965 - DNA, 25 bp, probe
gctatccagattattaacagggttc

SEQ ID NO: 204966 - DNA, 25 bp, probe
gcttctatgtttcatagttggggtc

SEQ ID NO: 204967 - DNA, 25 bp, probe
gcttcaaggtatcacgtcatggggc

SEQ ID NO: 204968 - DNA, 25 bp, probe
gcttagggataggtccttgggtcaa

SEQ ID NO: 204969 - DNA, 25 bp, probe
gttggcccagaagtctttagttaag

SEQ ID NO: 204970 - DNA, 25 bp, probe
gttggcccagaagtctttagttaag

SEQ ID NO: 204971 - DNA, 25 bp, probe
gctttgcaccttatcatttcagttt

SEQ ID NO: 204972 - DNA, 25 bp, probe
gcttacacctcactgtggtgtcact

SEQ ID NO: 204973 - DNA, 25 bp, probe
gcttacacctcactgtggtgtcact

SEQ ID NO: 204974 - DNA, 25 bp, probe
gcttatgcccagttaggatttcttg

SEQ ID NO: 204975 - DNA, 25 bp, probe
gcttaccaatgagtggtttttgagc

SEQ ID NO: 204976 - DNA, 25 bp, probe
gcttggtcctcagtgggttgttgag

SEQ ID NO: 204977 - DNA, 25 bp, probe
gctatgggcctaaattgggctctag

SEQ ID NO: 204978 - DNA, 25 bp, probe
gctagaccctcaaactgggtgggtt

SEQ ID NO: 204979 - DNA, 25 bp, probe
gctagaccctcaaactgggtgggtt

SEQ ID NO: 204980 - DNA, 25 bp, probe
gctacctcctaaactatagtggctg

SEQ ID NO: 204981 - DNA, 25 bp, probe
gctacgtgctcatcattgctaagat

SEQ ID NO: 204982 - DNA, 25 bp, probe
gctactgttgcattgcaaggaagct

SEQ ID NO: 204983 - DNA, 25 bp, probe
gctcactcttgctgcagaggaagca

SEQ ID NO: 204984 - DNA, 25 bp, probe
gctcactcttgctgcagaggaagca

SEQ ID NO: 204985 - DNA, 25 bp, probe
gctactggtggcggaggaagcagct

SEQ ID NO: 204986 - DNA, 25 bp, probe
gctacctgggcgaaaggagagcgga

SEQ ID NO: 204987 - DNA, 25 bp, probe
gctcactgagctgggtgtaggaggg

SEQ ID NO: 204988 - DNA, 25 bp, probe
gctatcagagcaaggcgctatggtc

SEQ ID NO: 204989 - DNA, 25 bp, probe
gctatgagcatgggcgcttctggcc

SEQ ID NO: 204990 - DNA, 25 bp, probe
gctataattcagtcacgtggccata

SEQ ID NO: 204991 - DNA, 25 bp, probe
gcatagctttcacaagtctcctaga

SEQ ID NO: 204992 - DNA, 25 bp, probe
gctatttctcagacattgttcccaa

SEQ ID NO: 204993 - DNA, 25 bp, probe
gcttactttgagtgatcctccaact

SEQ ID NO: 204994 - DNA, 25 bp, probe
gctaacttaatgtcagaaaccaatg

SEQ ID NO: 204995 - DNA, 25 bp, probe
gctacacttttggcagcaatcagca

SEQ ID NO: 204996 - DNA, 25 bp, probe
gctacatccattggctgtcaacagc

SEQ ID NO: 204997 - DNA, 25 bp, probe
gctcacatccaagctgtgcttagct

SEQ ID NO: 204998 - DNA, 25 bp, probe
gctcactctccatggtgtctgagtg

SEQ ID NO: 204999 - DNA, 25 bp, probe
gcatctactggtttgtgctctactg

SEQ ID NO: 205000 - DNA, 25 bp, probe
gcttccatggtagtgtccatttggg

SEQ ID NO: 205001 - DNA, 25 bp, probe
gctacgcataggggtccatactggg

SEQ ID NO: 205002 - DNA, 25 bp, probe
gctacagtagagtggccaaaggatg

SEQ ID NO: 205003 - DNA, 25 bp, probe
gcatacagctaacaaaacggcgatg

SEQ ID NO: 205004 - DNA, 25 bp, probe
gcatacagctaacaaaacggcgatg

SEQ ID NO: 205005 - DNA, 25 bp, probe
gctacttatataacagaattggcaa

SEQ ID NO: 205006 - DNA, 25 bp, probe
gctacatttacatggaactggcatt

SEQ ID NO: 205007 - DNA, 25 bp, probe
gcttctgtttcatggaacctatgtt

SEQ ID NO: 205008 - DNA, 25 bp, probe
gctttgtttgacggaacgtgttctt

SEQ ID NO: 205009 - DNA, 25 bp, probe
gctttgtttgacggaacgtgttctt

SEQ ID NO: 205010 - DNA, 25 bp, probe
gctttaaggagctgaacgtgtttgg

SEQ ID NO: 205011 - DNA, 25 bp, probe
gctttgggaactaactcggtcattg

SEQ ID NO: 205012 - DNA, 25 bp, probe
gctttggcaagagtgtacctggtcc

SEQ ID NO: 205013 - DNA, 25 bp, probe
gctatggagacatggttccgactac

SEQ ID NO: 205014 - DNA, 25 bp, probe
gctatggtagcatttttcaccttca

SEQ ID NO: 205015 - DNA, 25 bp, probe
gcatatggaatctttctaaccctag

SEQ ID NO: 205016 - DNA, 25 bp, probe
gctttagatgacatttagccctaag

SEQ ID NO: 205017 - DNA, 25 bp, probe
gctttctatacttaatcccatgtca

SEQ ID NO: 205018 - DNA, 25 bp, probe
gcttttaagttatggcaattatgaa

SEQ ID NO: 205019 - DNA, 25 bp, probe
gctacctggagtccaagcgctttat

SEQ ID NO: 205020 - DNA, 25 bp, probe
gctatccagatagtcatcaactttt

SEQ ID NO: 205021 - DNA, 25 bp, probe
gctatccagatagtcatcaactttt

SEQ ID NO: 205022 - DNA, 25 bp, probe
gctttcagatccatcggtttatact

SEQ ID NO: 205023 - DNA, 25 bp, probe
gctttgtgagccaggtatttacagc

SEQ ID NO: 205024 - DNA, 25 bp, probe
gcttttctggctgactattactcag

SEQ ID NO: 205025 - DNA, 25 bp, probe
gcttcattcggcgctttaacaagga

SEQ ID NO: 205026 - DNA, 25 bp, probe
gctaattcttgccgcatttcaaaga

SEQ ID NO: 205027 - DNA, 25 bp, probe
gctaattcttgccgcatttcaaaga

SEQ ID NO: 205028 - DNA, 25 bp, probe
gctcaaatatccagtgtctcaacaa

SEQ ID NO: 205029 - DNA, 25 bp, probe
gctaagtattatcctgcttccagac

SEQ ID NO: 205030 - DNA, 25 bp, probe
gctaataattatccctctgtcagag

SEQ ID NO: 205031 - DNA, 25 bp, probe
gctataaattgcgctctcagctgtg

SEQ ID NO: 205032 - DNA, 25 bp, probe
gctaaactgtctgattatgcatggt

SEQ ID NO: 205033 - DNA, 25 bp, probe
gctaataattctgttcctggctgcc

SEQ ID NO: 205034 - DNA, 25 bp, probe
gctacaaggacagcttcgcggctgc

SEQ ID NO: 205035 - DNA, 25 bp, probe
gctacgagagtagcctctgacgctg

SEQ ID NO: 205036 - DNA, 25 bp, probe
gctacacgggaccctgatgactcag

SEQ ID NO: 205037 - DNA, 25 bp, probe
gctacacgggaccctgatgactcag

SEQ ID NO: 205038 - DNA, 25 bp, probe
gctatcgcagggagatgctggccca

SEQ ID NO: 205039 - DNA, 25 bp, probe
gctactcgggaagctgaggcagaag

SEQ ID NO: 205040 - DNA, 25 bp, probe
gctagcctggctgcagcagctacga

SEQ ID NO: 205041 - DNA, 25 bp, probe
gctagccggatggactctaatgcag

SEQ ID NO: 205042 - DNA, 25 bp, probe
gctagccggatggactctaatgcag

SEQ ID NO: 205043 - DNA, 25 bp, probe
gctaggggcaggatctcattcaggc

SEQ ID NO: 205044 - DNA, 25 bp, probe
gctaggggcaggatctcattcaggc

SEQ ID NO: 205045 - DNA, 25 bp, probe
gctagggggcgttatttatggacca

SEQ ID NO: 205046 - DNA, 25 bp, probe
gctaggtggtgccctgattgttggc

SEQ ID NO: 205047 - DNA, 25 bp, probe
gctatgctagggcttggctgtaggt

SEQ ID NO: 205048 - DNA, 25 bp, probe
gctatgcacagagcgggtgcttgag

SEQ ID NO: 205049 - DNA, 25 bp, probe
gctatgccaatgagacctgctgtga

SEQ ID NO: 205050 - DNA, 25 bp, probe
gctagcagcagaattcattgtcgga

SEQ ID NO: 205051 - DNA, 25 bp, probe
gctacagcaaccgatattgtggggg

SEQ ID NO: 205052 - DNA, 25 bp, probe
gctacagcaaccaagattgtcattg

SEQ ID NO: 205053 - DNA, 25 bp, probe
gctacactatctaacatctggctgt

SEQ ID NO: 205054 - DNA, 25 bp, probe
gctacatttctaagagcttggtgta

SEQ ID NO: 205055 - DNA, 25 bp, probe
gctacatttctaagagcttggtgta

SEQ ID NO: 205056 - DNA, 25 bp, probe
gctactcttgtcagacaatggctat

SEQ ID NO: 205057 - DNA, 25 bp, probe
gctacttcttcgaacagtgatgctg

SEQ ID NO: 205058 - DNA, 25 bp, probe
gctactacttcgtgcacgagctgtg

SEQ ID NO: 205059 - DNA, 25 bp, probe
gctacaacttcatccgaagcatggc

SEQ ID NO: 205060 - DNA, 25 bp, probe
gctagaacagtctcttgaggcacag

SEQ ID NO: 205061 - DNA, 25 bp, probe
gctaaagtgaggcctgcttcacaac

SEQ ID NO: 205062 - DNA, 25 bp, probe
gctaccggaggggagctctttgatc

SEQ ID NO: 205063 - DNA, 25 bp, probe
gctaccggatgggggacttcgagct

SEQ ID NO: 205064 - DNA, 25 bp, probe
gtaccggaagttcactacagagagt

SEQ ID NO: 205065 - DNA, 25 bp, probe
gtaccggaagttcactacagagagt

SEQ ID NO: 205066 - DNA, 25 bp, probe
gtaccggaagttcactacagagagt

SEQ ID NO: 205067 - DNA, 25 bp, probe
gtaccggaagttcactacagagagt

SEQ ID NO: 205068 - DNA, 25 bp, probe
gtacgggaggttcacaatcaagtct

SEQ ID NO: 205069 - DNA, 25 bp, probe
gtacgggaggttcacaatcaagtct

SEQ ID NO: 205070 - DNA, 25 bp, probe
tgcttcggggggtgagcaaactttt

SEQ ID NO: 205071 - DNA, 25 bp, probe
tttcccacttggcgaaggactttat

SEQ ID NO: 205072 - DNA, 25 bp, probe
gtatttcactcctgtaaggactttt

SEQ ID NO: 205073 - DNA, 25 bp, probe
gtatttcactcctgtaaggactttt

SEQ ID NO: 205074 - DNA, 25 bp, probe
gcagaattcattgtcggaaggaaat

SEQ ID NO: 205075 - DNA, 25 bp, probe
tcttgatagttaccggaacgaaata

SEQ ID NO: 205076 - DNA, 25 bp, probe
gcttgagtcttaccgtaattgataa

SEQ ID NO: 205077 - DNA, 25 bp, probe
gcttcagtctttacgttagttgcaa

SEQ ID NO: 205078 - DNA, 25 bp, probe
gctttgtattttggttagctatgca

SEQ ID NO: 205079 - DNA, 25 bp, probe
gctttgtaatctggaccgttctgat

SEQ ID NO: 205080 - DNA, 25 bp, probe
gctttggaatcagacatccttctgg

SEQ ID NO: 205081 - DNA, 25 bp, probe
gctttggaatcagacatccttctgg

SEQ ID NO: 205082 - DNA, 25 bp, probe
gctatttctacagccactacttggg

SEQ ID NO: 205083 - DNA, 25 bp, probe
gctatttctacagccactacttggg

SEQ ID NO: 205084 - DNA, 25 bp, probe
gctattttatagtcgtgccatgttg

SEQ ID NO: 205085 - DNA, 25 bp, probe
gctttccaaatctggcagatgttta

SEQ ID NO: 205086 - DNA, 25 bp, probe
gcttcagcacaagatccggagtttt

SEQ ID NO: 205087 - DNA, 25 bp, probe
gcttccaaactttatggatgttttc

SEQ ID NO: 205088 - DNA, 25 bp, probe
gctatcgtgcaaattattggatttt

SEQ ID NO: 205089 - DNA, 25 bp, probe
gctactgtaacattgatatttattt

SEQ ID NO: 205090 - DNA, 25 bp, probe
gctactttaacctatgataattatt

SEQ ID NO: 205091 - DNA, 25 bp, probe
gctacttgttacctctattttttgt

SEQ ID NO: 205092 - DNA, 25 bp, probe
gctacatctgttacttttgttggtg

SEQ ID NO: 205093 - DNA, 25 bp, probe
gctaatctgaccgttctattgtgtg

SEQ ID NO: 205094 - DNA, 25 bp, probe
gctaatctgaccgttctattgtgtg

SEQ ID NO: 205095 - DNA, 25 bp, probe
gctataggacgcttcggaatgtggg

SEQ ID NO: 205096 - DNA, 25 bp, probe
gctataggacgcttcggaatgtggg

SEQ ID NO: 205097 - DNA, 25 bp, probe
gcttcaggccccaggactgtggggg

SEQ ID NO: 205098 - DNA, 25 bp, probe
gcttcaggccccaggactgtggggg

SEQ ID NO: 205099 - DNA, 25 bp, probe
gctttaaaaccacagctgggcaggg

SEQ ID NO: 205100 - DNA, 25 bp, probe
gctttgaaaacataacgacccaggc

SEQ ID NO: 205101 - DNA, 25 bp, probe
gctttacacaccaaagaagccggcg

SEQ ID NO: 205102 - DNA, 25 bp, probe
gcttctggaaacaggacagccgggg

SEQ ID NO: 205103 - DNA, 25 bp, probe
gcttctgggggaaggcagtccggca

SEQ ID NO: 205104 - DNA, 25 bp, probe
gcattttgtgggtggagggccagag

SEQ ID NO: 205105 - DNA, 25 bp, probe
gcacctcgggtcttgaggttcctga

SEQ ID NO: 205106 - DNA, 25 bp, probe
gcaccacggcgtttttttacaacat

SEQ ID NO: 205107 - DNA, 25 bp, probe
gaaacggcttagttctaaagagact

SEQ ID NO: 205108 - DNA, 25 bp, probe
gctaaaggctttgtctgcagaagga

SEQ ID NO: 205109 - DNA, 25 bp, probe
gctatagggtttgctctgacaattt

SEQ ID NO: 205110 - DNA, 25 bp, probe
gctatagggtttgctctgacaattt

SEQ ID NO: 205111 - DNA, 25 bp, probe
gctatgggagtctgagtgtgcacaa

SEQ ID NO: 205112 - DNA, 25 bp, probe
gctatgggagcctggaggccgtggc

SEQ ID NO: 205113 - DNA, 25 bp, probe
gctagaagagccgaggaaccaggac

SEQ ID NO: 205114 - DNA, 25 bp, probe
gctagtcggggtggagcacgagaac

SEQ ID NO: 205115 - DNA, 25 bp, probe
gctagtcaggcgggacagacggccc

SEQ ID NO: 205116 - DNA, 25 bp, probe
gctaggcaggcctgtagacttgcca

SEQ ID NO: 205117 - DNA, 25 bp, probe
gcaggctgggaaggctagacttcct

SEQ ID NO: 205118 - DNA, 25 bp, probe
gcagcgggagaagcttacctttctg

SEQ ID NO: 205119 - DNA, 25 bp, probe
gagggaagaacctgaccattccacc

SEQ ID NO: 205120 - DNA, 25 bp, probe
gacgtgaagaccaaggacctttact

SEQ ID NO: 205121 - DNA, 25 bp, probe
gacttggtttcaagggccttgccct

SEQ ID NO: 205122 - DNA, 25 bp, probe
gctttggccttaaaggcgctgtcac

SEQ ID NO: 205123 - DNA, 25 bp, probe
gcttcggaccttacaacgtgtccca

SEQ ID NO: 205124 - DNA, 25 bp, probe
gcttcggaccttacaacgtgtccca

SEQ ID NO: 205125 - DNA, 25 bp, probe
gcttcaggacgtgacaggctgttct

SEQ ID NO: 205126 - DNA, 25 bp, probe
gcttatggtccgaaagttgatatct

SEQ ID NO: 205127 - DNA, 25 bp, probe
gcttatggccctaaagtcgacatat

SEQ ID NO: 205128 - DNA, 25 bp, probe
gctttggccgctgagggcacaagga

SEQ ID NO: 205129 - DNA, 25 bp, probe
gctattggtggtgcaggaagaagca

SEQ ID NO: 205130 - DNA, 25 bp, probe
gctagatattggtctgggaggcaac

SEQ ID NO: 205131 - DNA, 25 bp, probe
gctatgtatcctttcggcatgtgga

SEQ ID NO: 205132 - DNA, 25 bp, probe
gctatgtcatttccatcttctggaa

SEQ ID NO: 205133 - DNA, 25 bp, probe
gctattgcattatcatctccaagct

SEQ ID NO: 205134 - DNA, 25 bp, probe
gctattgcaagatgcccaaggattg

SEQ ID NO: 205135 - DNA, 25 bp, probe
gctaggctgagatgcaccaagtaca

SEQ ID NO: 205136 - DNA, 25 bp, probe
gctaactagctgaccacagactcca

SEQ ID NO: 205137 - DNA, 25 bp, probe
gctaacatagtgctacttcatgaca

SEQ ID NO: 205138 - DNA, 25 bp, probe
gctactagcaggcgacttaggaaat

SEQ ID NO: 205139 - DNA, 25 bp, probe
gctactgatgggaatgattaaggga

SEQ ID NO: 205140 - DNA, 25 bp, probe
gctactcatccccagagaaagagga

SEQ ID NO: 205141 - DNA, 25 bp, probe
gctactcactcacggagccaaagtc

SEQ ID NO: 205142 - DNA, 25 bp, probe
gctatgacagtctgctacgcaaaac

SEQ ID NO: 205143 - DNA, 25 bp, probe
gctatcacaggctcagggcaaagaa

SEQ ID NO: 205144 - DNA, 25 bp, probe
gctatcacaggctcagggcaaagaa

SEQ ID NO: 205145 - DNA, 25 bp, probe
gcttagtgcccagggcccaagagac

SEQ ID NO: 205146 - DNA, 25 bp, probe
gcttgggccggagggcaagggatgc

SEQ ID NO: 205147 - DNA, 25 bp, probe
gcttcggaggaacccagagcggagg

SEQ ID NO: 205148 - DNA, 25 bp, probe
gctttggaggcagtttcgagtgggc

SEQ ID NO: 205149 - DNA, 25 bp, probe
gctatttcaggattcttcgaggagt

SEQ ID NO: 205150 - DNA, 25 bp, probe
gctttctcttggcaatcagaaggct

SEQ ID NO: 205151 - DNA, 25 bp, probe
gctattcccaggcagggagggaaac

SEQ ID NO: 205152 - DNA, 25 bp, probe
gctagagcttcggggggatgtggaa

SEQ ID NO: 205153 - DNA, 25 bp, probe
gcatagaccgggctgggtctgcagc

SEQ ID NO: 205154 - DNA, 25 bp, probe
gcatagacatcgagggggcctggcc

SEQ ID NO: 205155 - DNA, 25 bp, probe
gcttgaacttttgggacgtggcgtt

SEQ ID NO: 205156 - DNA, 25 bp, probe
gctaacaccttcagtagcgtggctc

SEQ ID NO: 205157 - DNA, 25 bp, probe
gctacctatttggcagtgacgtggt

SEQ ID NO: 205158 - DNA, 25 bp, probe
gctaccttttgggatgattgctcga

SEQ ID NO: 205159 - DNA, 25 bp, probe
gctaccttttgggatgattgctcga

SEQ ID NO: 205160 - DNA, 25 bp, probe
gctaccattttggctgtttggatcc

SEQ ID NO: 205161 - DNA, 25 bp, probe
gctaccttttcatgctggggatcta

SEQ ID NO: 205162 - DNA, 25 bp, probe
gctacacctgtttggctacgaatcc

SEQ ID NO: 205163 - DNA, 25 bp, probe
gctagcccatgtttagatccaggtc

SEQ ID NO: 205164 - DNA, 25 bp, probe
gctaggctatttaaactccctcatc

SEQ ID NO: 205165 - DNA, 25 bp, probe
gctactctgtttaaatctgccactt

SEQ ID NO: 205166 - DNA, 25 bp, probe
gctactctgtttaaatctgccactt

SEQ ID NO: 205167 - DNA, 25 bp, probe
gcttcggttattgtcatccattgtg

SEQ ID NO: 205168 - DNA, 25 bp, probe
gctttgagtatatcaacccattatt

SEQ ID NO: 205169 - DNA, 25 bp, probe
gctactatctaatcatcacccgaag

SEQ ID NO: 205170 - DNA, 25 bp, probe
gctagatcactgtaacatagtccga

SEQ ID NO: 205171 - DNA, 25 bp, probe
gctactcggataagcagggcctgag

SEQ ID NO: 205172 - DNA, 25 bp, probe
gctaccaggagagcaggtgacacag

SEQ ID NO: 205173 - DNA, 25 bp, probe
gctaaaggagagaagtttgtcatgc

SEQ ID NO: 205174 - DNA, 25 bp, probe
gctacaagaagcctggatgttctac

SEQ ID NO: 205175 - DNA, 25 bp, probe
gctactggccagatgagggtgcctc

SEQ ID NO: 205176 - DNA, 25 bp, probe
gctattcccagctgctgatgttccc

SEQ ID NO: 205177 - DNA, 25 bp, probe
gctattcccagctgctgatgttccc

SEQ ID NO: 205178 - DNA, 25 bp, probe
gctacttcaagctcatgtttgaccg

SEQ ID NO: 205179 - DNA, 25 bp, probe
gctactttcacttcagagtgtcatg

SEQ ID NO: 205180 - DNA, 25 bp, probe
gctagtgttgccaatgcagagctgg

SEQ ID NO: 205181 - DNA, 25 bp, probe
gctagtgttgccaatgcagagctgg

SEQ ID NO: 205182 - DNA, 25 bp, probe
gctagctttgccatgtcatctggaa

SEQ ID NO: 205183 - DNA, 25 bp, probe
gcataatatcccagtgcctgagacc

SEQ ID NO: 205184 - DNA, 25 bp, probe
gcataatatcccagtgcctgagacc

SEQ ID NO: 205185 - DNA, 25 bp, probe
gctagtgtccaaaatgcgtgacatg

SEQ ID NO: 205186 - DNA, 25 bp, probe
gctatggacggaaatcagatatctg

SEQ ID NO: 205187 - DNA, 25 bp, probe
gctagagtgcgccaagatgcagaac

SEQ ID NO: 205188 - DNA, 25 bp, probe
gctacagcccagaagccagacatgc

SEQ ID NO: 205189 - DNA, 25 bp, probe
gctacaccatggagcagagccatcc

SEQ ID NO: 205190 - DNA, 25 bp, probe
gctatgcccaggagaacttcaagtc

SEQ ID NO: 205191 - DNA, 25 bp, probe
gctatgcttagtgccaatagtaagt

SEQ ID NO: 205192 - DNA, 25 bp, probe
gctatcttattccaaaactacatct

SEQ ID NO: 205193 - DNA, 25 bp, probe
gctatctatggccctgcaaaaatat

SEQ ID NO: 205194 - DNA, 25 bp, probe
gctatacatggtagccagttgaatt

SEQ ID NO: 205195 - DNA, 25 bp, probe
gctatatcatggccacatccttaac

SEQ ID NO: 205196 - DNA, 25 bp, probe
gctatgatatgtaacaagtcacaca

SEQ ID NO: 205197 - DNA, 25 bp, probe
gctataagtgcatgtggtcaacaca

SEQ ID NO: 205198 - DNA, 25 bp, probe
gctatgacagtgagtgggaacaaaa

SEQ ID NO: 205199 - DNA, 25 bp, probe
gctacctgatggccatggagaagag

SEQ ID NO: 205200 - DNA, 25 bp, probe
gcttactagcactttgagaatgagt

SEQ ID NO: 205201 - DNA, 25 bp, probe
gcttagagacccagaattgagatcc

SEQ ID NO: 205202 - DNA, 25 bp, probe
gcttcagggccgagtacaaggccag

SEQ ID NO: 205203 - DNA, 25 bp, probe
gcttccggccaagaacagcaaacag

SEQ ID NO: 205204 - DNA, 25 bp, probe
gctaaatccaaagacaaaagtcaga

SEQ ID NO: 205205 - DNA, 25 bp, probe
gctaaatctaaacagcagaaaatcc

SEQ ID NO: 205206 - DNA, 25 bp, probe
gctacaacttaactggcattacaat

SEQ ID NO: 205207 - DNA, 25 bp, probe
gctacctttaagtcgcataactcta

SEQ ID NO: 205208 - DNA, 25 bp, probe
gctactttatagctgcgtatcacgc

SEQ ID NO: 205209 - DNA, 25 bp, probe
gcttctttaaactgtgagcacgcag

SEQ ID NO: 205210 - DNA, 25 bp, probe
gcttcgtgttcgactatgagtacga

SEQ ID NO: 205211 - DNA, 25 bp, probe
gctatgcgttatggaattgaatcca

SEQ ID NO: 205212 - DNA, 25 bp, probe
gctacgtgtgactagtgcttaccat

SEQ ID NO: 205213 - DNA, 25 bp, probe
gctaccttcagctattatgccaggt

SEQ ID NO: 205214 - DNA, 25 bp, probe
gctactacatccttgtagccttgaa

SEQ ID NO: 205215 - DNA, 25 bp, probe
gctagcaaccctaataggtgatgca

SEQ ID NO: 205216 - DNA, 25 bp, probe
gctactccacagagatcgggatcag

SEQ ID NO: 205217 - DNA, 25 bp, probe
gctactccacagagatcgggatcag

SEQ ID NO: 205218 - DNA, 25 bp, probe
gctactccaggggctgaggtgacag

SEQ ID NO: 205219 - DNA, 25 bp, probe
gctactttgagggcgagttcacagg

SEQ ID NO: 205220 - DNA, 25 bp, probe
gctactttgagggcgagttcacagg

SEQ ID NO: 205221 - DNA, 25 bp, probe
gctactttgagggcgagttcacagg

SEQ ID NO: 205222 - DNA, 25 bp, probe
gcttcgtctgggacgcgttcataac

SEQ ID NO: 205223 - DNA, 25 bp, probe
gctactgtcattcagcgtgcttata

SEQ ID NO: 205224 - DNA, 25 bp, probe
gctttgtcctgttgctggttaacat

SEQ ID NO: 205225 - DNA, 25 bp, probe
gctataatccagtggtgccttacat

SEQ ID NO: 205226 - DNA, 25 bp, probe
gcttaatccgctggtgaccggttac

SEQ ID NO: 205227 - DNA, 25 bp, probe
gcttaatccgctggtgaccggttac

SEQ ID NO: 205228 - DNA, 25 bp, probe
gttaaccttggtgacaagtatcaca

SEQ ID NO: 205229 - DNA, 25 bp, probe
gcttaccgatctgtctgtcaaaacc

SEQ ID NO: 205230 - DNA, 25 bp, probe
gcattagccagggttgttcatcagg

SEQ ID NO: 205231 - DNA, 25 bp, probe
gcttacctggctttttatattgcat

SEQ ID NO: 205232 - DNA, 25 bp, probe
gctttcttctcctgttgaaatgtaa

SEQ ID NO: 205233 - DNA, 25 bp, probe
gctttcttctcctgttgaaatgtaa

SEQ ID NO: 205234 - DNA, 25 bp, probe
gcttctgttcatttcgtttaattaa

SEQ ID NO: 205235 - DNA, 25 bp, probe
gcacttgtgcctgttttaaattaaa

SEQ ID NO: 205236 - DNA, 25 bp, probe
gcatttgtgtcggttaaaaattcga

SEQ ID NO: 205237 - DNA, 25 bp, probe
gctttgtgctggcttagaaagtggg

SEQ ID NO: 205238 - DNA, 25 bp, probe
gctttccgggttcatgtgagttagt

SEQ ID NO: 205239 - DNA, 25 bp, probe
gctttccactggagtctgggatttg

SEQ ID NO: 205240 - DNA, 25 bp, probe
gcttttcctgggctctgtgagcctt

SEQ ID NO: 205241 - DNA, 25 bp, probe
gctttattctcaccttgtggggcat

SEQ ID NO: 205242 - DNA, 25 bp, probe
gctttttgctgtgattgcgcacgtg

SEQ ID NO: 205243 - DNA, 25 bp, probe
gctagttttgctgatggagcgatgt

SEQ ID NO: 205244 - DNA, 25 bp, probe
gctacctgcttgaaatgagacaaaa

SEQ ID NO: 205245 - DNA, 25 bp, probe
gctacctgttaaagaatcatctgga

SEQ ID NO: 205246 - DNA, 25 bp, probe
gctattcgtcctaaaacactggagt

SEQ ID NO: 205247 - DNA, 25 bp, probe
gcttacaagcctaagaatctttaga

SEQ ID NO: 205248 - DNA, 25 bp, probe
gcttattagcctaaaatggcctgaa

SEQ ID NO: 205249 - DNA, 25 bp, probe
tgcttttaggttgaaggcaaaacca

SEQ ID NO: 205250 - DNA, 25 bp, probe
gcaaatttgagttccaatccaaaac

SEQ ID NO: 205251 - DNA, 25 bp, probe
gcttttctgtttgcttccaagaact

SEQ ID NO: 205252 - DNA, 25 bp, probe
gctttgttgtcctgatatggcaaaa

SEQ ID NO: 205253 - DNA, 25 bp, probe
gctttgttgtcctgatatggcaaaa

SEQ ID NO: 205254 - DNA, 25 bp, probe
gctttgtttactgctagtatattag

SEQ ID NO: 205255 - DNA, 25 bp, probe
gctttggttcactctgaatctgatg

SEQ ID NO: 205256 - DNA, 25 bp, probe
gctttggttcactctgaatctgatg

SEQ ID NO: 205257 - DNA, 25 bp, probe
gctttgggtctctactgtatgaact

SEQ ID NO: 205258 - DNA, 25 bp, probe
gctatttgtgtcaatacccgaaatg

SEQ ID NO: 205259 - DNA, 25 bp, probe
gctatcttggaaaagtccagattag

SEQ ID NO: 205260 - DNA, 25 bp, probe
gctacttggtgaaggagcgggcttt

SEQ ID NO: 205261 - DNA, 25 bp, probe
gctacttgggaggctgagatgggag

SEQ ID NO: 205262 - DNA, 25 bp, probe
gctacttgggaggctgagacaggag

SEQ ID NO: 205263 - DNA, 25 bp, probe
gctacagtgggaacaggctcaggac

SEQ ID NO: 205264 - DNA, 25 bp, probe
gctacagggccaaacgctgagccac

SEQ ID NO: 205265 - DNA, 25 bp, probe
gctacagaggccacacatggtccag

SEQ ID NO: 205266 - DNA, 25 bp, probe
gctacagagggcaccatgtggctca

SEQ ID NO: 205267 - DNA, 25 bp, probe
gctacagatgggatcaagggctcca

SEQ ID NO: 205268 - DNA, 25 bp, probe
gctactgaaaggacgagaggcccca

SEQ ID NO: 205269 - DNA, 25 bp, probe
gctactgaaaggacgagaggcccca

SEQ ID NO: 205270 - DNA, 25 bp, probe
gctatagcagaagccgacaggccac

SEQ ID NO: 205271 - DNA, 25 bp, probe
gcttacgaagtggctgagaggggca

SEQ ID NO: 205272 - DNA, 25 bp, probe
gcttccggagctacgggaggtcgtc

SEQ ID NO: 205273 - DNA, 25 bp, probe
gcttccaggacaacggggcctgtgg

SEQ ID NO: 205274 - DNA, 25 bp, probe
gcttctaggatccaagtttccttat

SEQ ID NO: 205275 - DNA, 25 bp, probe
gctttagagaaacatttctctcttg

SEQ ID NO: 205276 - DNA, 25 bp, probe
gcatttagcagaactcccttcctgc

SEQ ID NO: 205277 - DNA, 25 bp, probe
gcttaaagcagattcccattaaatg

SEQ ID NO: 205278 - DNA, 25 bp, probe
tgtttccaggaaaccctttattcag

SEQ ID NO: 205279 - DNA, 25 bp, probe
ggtccgaggagaacccaatgtttcg

SEQ ID NO: 205280 - DNA, 25 bp, probe
gaattctaggaaccccagactacct

SEQ ID NO: 205281 - DNA, 25 bp, probe
gctttctaggattccaccaagtccc

SEQ ID NO: 205282 - DNA, 25 bp, probe
gctttctaggattccaccaagtccc

SEQ ID NO: 205283 - DNA, 25 bp, probe
gcttttaggctacacagcaacccaa

SEQ ID NO: 205284 - DNA, 25 bp, probe
gcttttgatgtctccaagtagtcca

SEQ ID NO: 205285 - DNA, 25 bp, probe
gcttttcgtcttcagtgtcttaatg

SEQ ID NO: 205286 - DNA, 25 bp, probe
gctttacagtgcatggaatctccat

SEQ ID NO: 205287 - DNA, 25 bp, probe
gctattaagtcattctgaatctttg

SEQ ID NO: 205288 - DNA, 25 bp, probe
gctactgcaggtgatcaagaagacg

SEQ ID NO: 205289 - DNA, 25 bp, probe
gctagccagtgtctgcatgagaaga

SEQ ID NO: 205290 - DNA, 25 bp, probe
gctactcctgggtcatgagaaggcc

SEQ ID NO: 205291 - DNA, 25 bp, probe
gcttacgtgggaagagccaggcatg

SEQ ID NO: 205292 - DNA, 25 bp, probe
gcttcatctagggtgggcctgttgg

SEQ ID NO: 205293 - DNA, 25 bp, probe
gcttcatctagggtgggcctgttgg

SEQ ID NO: 205294 - DNA, 25 bp, probe
gctttgctctagggaagcagtgcgt

SEQ ID NO: 205295 - DNA, 25 bp, probe
gctttgtcatcagtggtggaggcag

SEQ ID NO: 205296 - DNA, 25 bp, probe
gctttgattcagtcggaatggcgct

SEQ ID NO: 205297 - DNA, 25 bp, probe
gctttgaaaggccaatatcccatag

SEQ ID NO: 205298 - DNA, 25 bp, probe
gctttgaaccgtaatcagtcaccag

SEQ ID NO: 205299 - DNA, 25 bp, probe
gctttaagcaatcactcattaccac

SEQ ID NO: 205300 - DNA, 25 bp, probe
gctttaagcaatcactcattaccac

SEQ ID NO: 205301 - DNA, 25 bp, probe
gctttaagactgatgaatgctacca

SEQ ID NO: 205302 - DNA, 25 bp, probe
gctactggaaagaaattgttcacaa

SEQ ID NO: 205303 - DNA, 25 bp, probe
gctactggaaagaaattgttcacaa

SEQ ID NO: 205304 - DNA, 25 bp, probe
gctttgctaaagacacagtgcttac

SEQ ID NO: 205305 - DNA, 25 bp, probe
gcttcctggaagactactttaccgc

SEQ ID NO: 205306 - DNA, 25 bp, probe
gcttcctggaagactactttaccgc

SEQ ID NO: 205307 - DNA, 25 bp, probe
gcttccaggaacatgtcttcaagcg

SEQ ID NO: 205308 - DNA, 25 bp, probe
gctaccacgaagacattttcgggct

SEQ ID NO: 205309 - DNA, 25 bp, probe
gctacgccatggttttgtttaggat

SEQ ID NO: 205310 - DNA, 25 bp, probe
gctacgctgtggtttattcttaagt

SEQ ID NO: 205311 - DNA, 25 bp, probe
gcttccttggatgtcattgcttaaa

SEQ ID NO: 205312 - DNA, 25 bp, probe
gctatctctgtggggtctattttat

SEQ ID NO: 205313 - DNA, 25 bp, probe
gctatcatcctggggacgtttgctg

SEQ ID NO: 205314 - DNA, 25 bp, probe
gctatcatcctggggacgtttgctg

SEQ ID NO: 205315 - DNA, 25 bp, probe
gcttcacacggcagacgccggtgga

SEQ ID NO: 205316 - DNA, 25 bp, probe
gcttcacacggcagacgccggtgga

SEQ ID NO: 205317 - DNA, 25 bp, probe
gcttcacacggcagacgccggtgga

SEQ ID NO: 205318 - DNA, 25 bp, probe
gcttacctaaaagccggctgggcaa

SEQ ID NO: 205319 - DNA, 25 bp, probe
gcttaataaaaaaccccgcagagag

SEQ ID NO: 205320 - DNA, 25 bp, probe
gcttaataaaaaaccccgcagagag

SEQ ID NO: 205321 - DNA, 25 bp, probe
gagtaataagggctcttccggaagg

SEQ ID NO: 205322 - DNA, 25 bp, probe
gagtaataagggctcttccggaagg

SEQ ID NO: 205323 - DNA, 25 bp, probe
gcaataaaacggatcaacttggaaa

SEQ ID NO: 205324 - DNA, 25 bp, probe
gctaccaaacacattctcctttgaa

SEQ ID NO: 205325 - DNA, 25 bp, probe
gctaccagcaggtgggctgcctgct

SEQ ID NO: 205326 - DNA, 25 bp, probe
gctaccagcaggtgggctgcctgct

SEQ ID NO: 205327 - DNA, 25 bp, probe
gctagccagttactggtcatgcctg

SEQ ID NO: 205328 - DNA, 25 bp, probe
gctaccattctaatgcatgtattcg

SEQ ID NO: 205329 - DNA, 25 bp, probe
gctatccattgtgtcatatttactc

SEQ ID NO: 205330 - DNA, 25 bp, probe
gcttccgttttcaagattggtctag

SEQ ID NO: 205331 - DNA, 25 bp, probe
gcttccgttttcaagattggtctag

SEQ ID NO: 205332 - DNA, 25 bp, probe
gcttttgctttcacaatttgtctta

SEQ ID NO: 205333 - DNA, 25 bp, probe
gctttgcttttagccagtgctttct

SEQ ID NO: 205334 - DNA, 25 bp, probe
gctattgcacttcagccaaatgttt

SEQ ID NO: 205335 - DNA, 25 bp, probe
gctaccctcttttgaagatgttctc

SEQ ID NO: 205336 - DNA, 25 bp, probe
gctagtttctttctatgtgttctca

SEQ ID NO: 205337 - DNA, 25 bp, probe
gctagtttctttctatgtgttctca

SEQ ID NO: 205338 - DNA, 25 bp, probe
gctagctgttgctctggtatttcct

SEQ ID NO: 205339 - DNA, 25 bp, probe
gctagcagtggcgattcaggttctc

SEQ ID NO: 205340 - DNA, 25 bp, probe
gctagcgtgtgccaggcagatcctc

SEQ ID NO: 205341 - DNA, 25 bp, probe
gctagagatgtgcaaggatgtctgt

SEQ ID NO: 205342 - DNA, 25 bp, probe
gctagaggcctgaggatgagctgga

SEQ ID NO: 205343 - DNA, 25 bp, probe
gctatgggccttggcagtgcaggag

SEQ ID NO: 205344 - DNA, 25 bp, probe
gctataggctgcagaaggcggggtt

SEQ ID NO: 205345 - DNA, 25 bp, probe
gctataagcgctggaagtcagaggg

SEQ ID NO: 205346 - DNA, 25 bp, probe
gctatatagactgtacttatgtgtg

SEQ ID NO: 205347 - DNA, 25 bp, probe
gcttctcgaatggagtctaatggtc

SEQ ID NO: 205348 - DNA, 25 bp, probe
gcttctggagtcagactggctgtgt

SEQ ID NO: 205349 - DNA, 25 bp, probe
gctagcgtggacatagccctgtgat

SEQ ID NO: 205350 - DNA, 25 bp, probe
gcttggttgactaaccttgtcctaa

SEQ ID NO: 205351 - DNA, 25 bp, probe
gcattggtagacaccggtgcatcct

SEQ ID NO: 205352 - DNA, 25 bp, probe
gctttgtcaactcagctgggaacat

SEQ ID NO: 205353 - DNA, 25 bp, probe
gctttgtcaaggatgtagccaacat

SEQ ID NO: 205354 - DNA, 25 bp, probe
gctttctagaatatttgcctaattg

SEQ ID NO: 205355 - DNA, 25 bp, probe
gcttgtttatttattcatttattta

SEQ ID NO: 205356 - DNA, 25 bp, probe
gctttgttagtttttcatgtgtaat

SEQ ID NO: 205357 - DNA, 25 bp, probe
gctttcagtttttgtggcagtggga

SEQ ID NO: 205358 - DNA, 25 bp, probe
gctttcagtttttgtggcagtggga

SEQ ID NO: 205359 - DNA, 25 bp, probe
gctatacctgatattggtgaggtga

SEQ ID NO: 205360 - DNA, 25 bp, probe
gctatacctgatattggtgaggtga

SEQ ID NO: 205361 - DNA, 25 bp, probe
gctagtcatgttcttggttctgtct

SEQ ID NO: 205362 - DNA, 25 bp, probe
gctattcatgtttcacttgctttgt

SEQ ID NO: 205363 - DNA, 25 bp, probe
gctttgcaggaaactctcattcgtg

SEQ ID NO: 205364 - DNA, 25 bp, probe
gctttcacaataaattcgctccgtg

SEQ ID NO: 205365 - DNA, 25 bp, probe
gctttcgaatcagacctgccaaggt

SEQ ID NO: 205366 - DNA, 25 bp, probe
gctttcgaatcagacctgccaaggt

SEQ ID NO: 205367 - DNA, 25 bp, probe
gctattccaatctacaactggaaga

SEQ ID NO: 205368 - DNA, 25 bp, probe
gcttttctctctggcgactggaaag

SEQ ID NO: 205369 - DNA, 25 bp, probe
gcttttctctctggcgactggaaag

SEQ ID NO: 205370 - DNA, 25 bp, probe
gctttcctgtagctactgtgcagac

SEQ ID NO: 205371 - DNA, 25 bp, probe
gctttcctgtagctactgtgcagac

SEQ ID NO: 205372 - DNA, 25 bp, probe
gctttgtgctgtggcttagccggag

SEQ ID NO: 205373 - DNA, 25 bp, probe
gcttatgtgctattttaccaacgtc

SEQ ID NO: 205374 - DNA, 25 bp, probe
gcttttctgattctactattggcaa

SEQ ID NO: 205375 - DNA, 25 bp, probe
gcttttggagtcctattgtcgtgca

SEQ ID NO: 205376 - DNA, 25 bp, probe
gctttattagttccactgttgctca

SEQ ID NO: 205377 - DNA, 25 bp, probe
gctttctgacactttcacttttgca

SEQ ID NO: 205378 - DNA, 25 bp, probe
gctagatgcgaatttgtctttttga

SEQ ID NO: 205379 - DNA, 25 bp, probe
gctagaaacttgtatgcctatatta

SEQ ID NO: 205380 - DNA, 25 bp, probe
gctagaaacttgtatgcctatatta

SEQ ID NO: 205381 - DNA, 25 bp, probe
gctagcaaccatactatatccttaa

SEQ ID NO: 205382 - DNA, 25 bp, probe
gctagctacctaggcttgtctatag

SEQ ID NO: 205383 - DNA, 25 bp, probe
gctaggactgtgggcttttagcagc

SEQ ID NO: 205384 - DNA, 25 bp, probe
gctagaactgtgagcttcgttgatg

SEQ ID NO: 205385 - DNA, 25 bp, probe
gctagcacaccaaactcttgtctat

SEQ ID NO: 205386 - DNA, 25 bp, probe
gctatggaactattcttagtcatat

SEQ ID NO: 205387 - DNA, 25 bp, probe
gctatggtaccattctaatgtatgt

SEQ ID NO: 205388 - DNA, 25 bp, probe
gctatttactgctcttattgttaag

SEQ ID NO: 205389 - DNA, 25 bp, probe
gcttttactggtttgatttcactgg

SEQ ID NO: 205390 - DNA, 25 bp, probe
gcatttttgcatctgacattttacc

SEQ ID NO: 205391 - DNA, 25 bp, probe
gctttatgtgaactatgatattgta

SEQ ID NO: 205392 - DNA, 25 bp, probe
gctatgttggaaatgtgcaaccact

SEQ ID NO: 205393 - DNA, 25 bp, probe
gcttttgggagcagctcatccacta

SEQ ID NO: 205394 - DNA, 25 bp, probe
gctttgggaacagtctgtccttaca

SEQ ID NO: 205395 - DNA, 25 bp, probe
gctagcaaacaaatggcttacttac

SEQ ID NO: 205396 - DNA, 25 bp, probe
gctagcaaacaaatggcttacttac

SEQ ID NO: 205397 - DNA, 25 bp, probe
gctatgcaaactctctcattaaccc

SEQ ID NO: 205398 - DNA, 25 bp, probe
gcttgcaccagcacctatgtgaatg

SEQ ID NO: 205399 - DNA, 25 bp, probe
gcttcaccaggagaatgtgcaactt

SEQ ID NO: 205400 - DNA, 25 bp, probe
gcttcacctagaaacagattacagg

SEQ ID NO: 205401 - DNA, 25 bp, probe
gcttagcttggtcagcactaaagaa

SEQ ID NO: 205402 - DNA, 25 bp, probe
gcttgatttgtttagactgaaggaa

SEQ ID NO: 205403 - DNA, 25 bp, probe
gcttgatgttttgaagtccttgaac

SEQ ID NO: 205404 - DNA, 25 bp, probe
gcttgcttttctgaattacctgggg

SEQ ID NO: 205405 - DNA, 25 bp, probe
gctagtggtcttgcacatttgcaca

SEQ ID NO: 205406 - DNA, 25 bp, probe
gctagctggccttgtagcttggaag

SEQ ID NO: 205407 - DNA, 25 bp, probe
gctatgctgatgttagtactgggaa

SEQ ID NO: 205408 - DNA, 25 bp, probe
gctttgatgactttcagtgtgctgc

SEQ ID NO: 205409 - DNA, 25 bp, probe
gctatttcaataacagatggtgctg

SEQ ID NO: 205410 - DNA, 25 bp, probe
gcttttatcaagagatctgatgctg

SEQ ID NO: 205411 - DNA, 25 bp, probe
gcttttaagcaggcgtttgatgaaa

SEQ ID NO: 205412 - DNA, 25 bp, probe
gctttggacattaggtctttgacaa

SEQ ID NO: 205413 - DNA, 25 bp, probe
gctttgagacgtcagcctttaagct

SEQ ID NO: 205414 - DNA, 25 bp, probe
gctttgggcttctatgacttttatg

SEQ ID NO: 205415 - DNA, 25 bp, probe
gcttctgaggtacattttgaatgac

SEQ ID NO: 205416 - DNA, 25 bp, probe
gctttggggactatgttgttggcac

SEQ ID NO: 205417 - DNA, 25 bp, probe
gcttcggtgggtattttctgcctaa

SEQ ID NO: 205418 - DNA, 25 bp, probe
gcttcaaaagggatcgggctccttt

SEQ ID NO: 205419 - DNA, 25 bp, probe
gcttcaaaagggatcgggctccttt

SEQ ID NO: 205420 - DNA, 25 bp, probe
gcttcaaacgcggtgtcagaggccc

SEQ ID NO: 205421 - DNA, 25 bp, probe
gcttacaaggcgcttaagagaccta

SEQ ID NO: 205422 - DNA, 25 bp, probe
gcattaaagacgactcggaggacct

SEQ ID NO: 205423 - DNA, 25 bp, probe
gcttctagcagctgttcgggaggac

SEQ ID NO: 205424 - DNA, 25 bp, probe
gcttccaggggttctggcgggagtc

SEQ ID NO: 205425 - DNA, 25 bp, probe
gctaccaggagtttgttcaggaagt

SEQ ID NO: 205426 - DNA, 25 bp, probe
gctaccaggagtttgttcaggaagt

SEQ ID NO: 205427 - DNA, 25 bp, probe
gctaggcatggtgtcttcacaggag

SEQ ID NO: 205428 - DNA, 25 bp, probe
gcttgcgtggctgtttcatgaccgc

SEQ ID NO: 205429 - DNA, 25 bp, probe
gcttggaggctactcccaagcctac

SEQ ID NO: 205430 - DNA, 25 bp, probe
gcttggaggctactcccaagcctac

SEQ ID NO: 205431 - DNA, 25 bp, probe
gcttggaggctactcccaagcctac

SEQ ID NO: 205432 - DNA, 25 bp, probe
gcttagaggatctcccaaggatgaa

SEQ ID NO: 205433 - DNA, 25 bp, probe
gcttgaaggacatcatccaccgtga

SEQ ID NO: 205434 - DNA, 25 bp, probe
gcttcaattgagaactccactccca

SEQ ID NO: 205435 - DNA, 25 bp, probe
gctatcatcactggctactacatcc

SEQ ID NO: 205436 - DNA, 25 bp, probe
gctatcatcactggctactacatcc

SEQ ID NO: 205437 - DNA, 25 bp, probe
gctagcatatttggcagcttattgc

SEQ ID NO: 205438 - DNA, 25 bp, probe
gctagctcaggatgacattgatggc

SEQ ID NO: 205439 - DNA, 25 bp, probe
gctagtgagctggaccagtgaggcc

SEQ ID NO: 205440 - DNA, 25 bp, probe
gctagtgagctggaccagtgaggcc

SEQ ID NO: 205441 - DNA, 25 bp, probe
gctatgtgacttgcatcgtggagac

SEQ ID NO: 205442 - DNA, 25 bp, probe
gctatgtgcttggcgtgtgggaatc

SEQ ID NO: 205443 - DNA, 25 bp, probe
gctttgctcgagctgtgcggaacca

SEQ ID NO: 205444 - DNA, 25 bp, probe
gcttatctcagagggtctgggcctc

SEQ ID NO: 205445 - DNA, 25 bp, probe
gctattcactgatggtcaggagcct

SEQ ID NO: 205446 - DNA, 25 bp, probe
gctattcactgatggtcaggagcct

SEQ ID NO: 205447 - DNA, 25 bp, probe
gctataaccagtctcagcaagacat

SEQ ID NO: 205448 - DNA, 25 bp, probe
gctatcgttcaacttcaaaacatgt

SEQ ID NO: 205449 - DNA, 25 bp, probe
gctatcgttcaacttcaaaacatgt

SEQ ID NO: 205450 - DNA, 25 bp, probe
gctatccttcagatccaatcaaggg

SEQ ID NO: 205451 - DNA, 25 bp, probe
gctattcttcaactccaagaagaag

SEQ ID NO: 205452 - DNA, 25 bp, probe
gctattgcttcatacacatgtggac

SEQ ID NO: 205453 - DNA, 25 bp, probe
gctattgcttcatacacatgtggac

SEQ ID NO: 205454 - DNA, 25 bp, probe
gctattgcctaaatcagcgtcaaca

SEQ ID NO: 205455 - DNA, 25 bp, probe
gctattgcctaaatcagcgtcaaca

SEQ ID NO: 205456 - DNA, 25 bp, probe
gcatattgcacccacataggtaact

SEQ ID NO: 205457 - DNA, 25 bp, probe
gctattcagtgaccaagggtcgcat

SEQ ID NO: 205458 - DNA, 25 bp, probe
gctattcagtgaccaagggtcgcat

SEQ ID NO: 205459 - DNA, 25 bp, probe
gcatattggtgctagaaaaggcagc

SEQ ID NO: 205460 - DNA, 25 bp, probe
gctataggtgctacaaaaacacagc

SEQ ID NO: 205461 - DNA, 25 bp, probe
gcttagaagttcgaaaactcagcaa

SEQ ID NO: 205462 - DNA, 25 bp, probe
gcttaagtccatgcatgggactcca

SEQ ID NO: 205463 - DNA, 25 bp, probe
gcttaagctctagtttggacttagg

SEQ ID NO: 205464 - DNA, 25 bp, probe
gcttagagccagtatttatactttg

SEQ ID NO: 205465 - DNA, 25 bp, probe
gcttcaactattatttgtcaggtcc

SEQ ID NO: 205466 - DNA, 25 bp, probe
gcttacatttaacattgatcaggta

SEQ ID NO: 205467 - DNA, 25 bp, probe
gcttgagacctagcaatcagtcagg

SEQ ID NO: 205468 - DNA, 25 bp, probe
gcttgagacctagcaatcagtcagg

SEQ ID NO: 205469 - DNA, 25 bp, probe
gctttggattgtgcattcctaggca

SEQ ID NO: 205470 - DNA, 25 bp, probe
gctttggattgtgcattcctaggca

SEQ ID NO: 205471 - DNA, 25 bp, probe
gcttcaagttgccacattcaaagga

SEQ ID NO: 205472 - DNA, 25 bp, probe
gcttaggaatgccctttatggaaag

SEQ ID NO: 205473 - DNA, 25 bp, probe
gctttggaatcgtcctctgggaaat

SEQ ID NO: 205474 - DNA, 25 bp, probe
gctttgggagtgaccttcagaaaat

SEQ ID NO: 205475 - DNA, 25 bp, probe
gcttgggtgagactgtttacaaaaa

SEQ ID NO: 205476 - DNA, 25 bp, probe
gcttggaggggttcttaaattatat

SEQ ID NO: 205477 - DNA, 25 bp, probe
gcttggaaaagcactgtagtttgtc

SEQ ID NO: 205478 - DNA, 25 bp, probe
gcttagaaggcctcagccatgcttg

SEQ ID NO: 205479 - DNA, 25 bp, probe
gcttagaaggcctcagccatgcttg

SEQ ID NO: 205480 - DNA, 25 bp, probe
gcttaaaagttcgggctcatggagg

SEQ ID NO: 205481 - DNA, 25 bp, probe
gcttgagtacgaaccggccaagagg

SEQ ID NO: 205482 - DNA, 25 bp, probe
gctttaactgagactccgaccagct

SEQ ID NO: 205483 - DNA, 25 bp, probe
gctttaactgagactccgaccagct

SEQ ID NO: 205484 - DNA, 25 bp, probe
gcttctaaacatacgccagaccagg

SEQ ID NO: 205485 - DNA, 25 bp, probe
gctttactccttgatcatgtccagg

SEQ ID NO: 205486 - DNA, 25 bp, probe
gctttagctggggttctgtcacagg

SEQ ID NO: 205487 - DNA, 25 bp, probe
gctttagctggggttctgtcacagg

SEQ ID NO: 205488 - DNA, 25 bp, probe
gctttagagtacttgcacggcaagg

SEQ ID NO: 205489 - DNA, 25 bp, probe
gctatggggctatgtgcacttgaag

SEQ ID NO: 205490 - DNA, 25 bp, probe
gcatttgggctcagccttggacatg

SEQ ID NO: 205491 - DNA, 25 bp, probe
gctttgggatcatcctgcaggagat

SEQ ID NO: 205492 - DNA, 25 bp, probe
gcattttgagattacccaggagaca

SEQ ID NO: 205493 - DNA, 25 bp, probe
gcttttgatcattcaccgaacaaaa

SEQ ID NO: 205494 - DNA, 25 bp, probe
gctttagattacccctatacacaag

SEQ ID NO: 205495 - DNA, 25 bp, probe
gcttctgaggtatcctttagccaaa

SEQ ID NO: 205496 - DNA, 25 bp, probe
gcttcctggtaaactataacaaact

SEQ ID NO: 205497 - DNA, 25 bp, probe
gttctcggtactatagggcaccaga

SEQ ID NO: 205498 - DNA, 25 bp, probe
gctttcgattcgttaagagagcaac

SEQ ID NO: 205499 - DNA, 25 bp, probe
gctttcgattcgttaagagagcaac

SEQ ID NO: 205500 - DNA, 25 bp, probe
gctatggtgacttttagggagcaca

SEQ ID NO: 205501 - DNA, 25 bp, probe
gcttgcgggttttgtgaaggcaatg

SEQ ID NO: 205502 - DNA, 25 bp, probe
gctatgctgggcaattctggcaatc

SEQ ID NO: 205503 - DNA, 25 bp, probe
gctatggctgtggtatcaagactct

SEQ ID NO: 205504 - DNA, 25 bp, probe
gctttgcaggccatatagcctctgc

SEQ ID NO: 205505 - DNA, 25 bp, probe
gctttggcgccaggagatgccattg

SEQ ID NO: 205506 - DNA, 25 bp, probe
gcttcccgcaaggacatgctggatg

SEQ ID NO: 205507 - DNA, 25 bp, probe
gaacatcgccgacaacgggggtctc

SEQ ID NO: 205508 - DNA, 25 bp, probe
gaacatcgccgacaacgggggtctc

SEQ ID NO: 205509 - DNA, 25 bp, probe
gaatagcccgaggaccgggctgggg

SEQ ID NO: 205510 - DNA, 25 bp, probe
gcaaaggccgggtgttggccggagt

SEQ ID NO: 205511 - DNA, 25 bp, probe
gcaaatgccaaaaggttttctcgga

SEQ ID NO: 205512 - DNA, 25 bp, probe
gcatacccaaacaaagatgttctcg

SEQ ID NO: 205513 - DNA, 25 bp, probe
gcatccccaagcagaaaggcaacca

SEQ ID NO: 205514 - DNA, 25 bp, probe
gcttgcctacagaggaaaggatcca

SEQ ID NO: 205515 - DNA, 25 bp, probe
gctaggctgtagatggaagatggtc

SEQ ID NO: 205516 - DNA, 25 bp, probe
gcttggcctagagtggcaaatggaa

SEQ ID NO: 205517 - DNA, 25 bp, probe
gcttggcctagagtggcaaatggaa

SEQ ID NO: 205518 - DNA, 25 bp, probe
gctttcctatggtcctgaagaaaaa

SEQ ID NO: 205519 - DNA, 25 bp, probe
gctttcctatggtcctgaagaaaaa

SEQ ID NO: 205520 - DNA, 25 bp, probe
gcttttctatggacccagaattaac

SEQ ID NO: 205521 - DNA, 25 bp, probe
gcttccattttcaccaatactagag

SEQ ID NO: 205522 - DNA, 25 bp, probe
gcttccactttaacaaaacctgaat

SEQ ID NO: 205523 - DNA, 25 bp, probe
gctttccaacttcaagaccacagaa

SEQ ID NO: 205524 - DNA, 25 bp, probe
gcttgcccaattgccaaactaaaga

SEQ ID NO: 205525 - DNA, 25 bp, probe
gcttcctcaaggagccagttaaaaa

SEQ ID NO: 205526 - DNA, 25 bp, probe
gcttcccaagggggacttgtggaca

SEQ ID NO: 205527 - DNA, 25 bp, probe
gcttcaccagggtaaagttgggccg

SEQ ID NO: 205528 - DNA, 25 bp, probe
gcttcaccagggtaaagttgggccg

SEQ ID NO: 205529 - DNA, 25 bp, probe
gcttccacttggtgggtaaggcctg

SEQ ID NO: 205530 - DNA, 25 bp, probe
gctatccaattccctggtgatcaac

SEQ ID NO: 205531 - DNA, 25 bp, probe
gctatcatcacctccatgggatttc

SEQ ID NO: 205532 - DNA, 25 bp, probe
gcatccaagccatatatggacgttc

SEQ ID NO: 205533 - DNA, 25 bp, probe
gcttcatagccatgctggagacgtg

SEQ ID NO: 205534 - DNA, 25 bp, probe
gctttgctgcacagcaggacctgtg

SEQ ID NO: 205535 - DNA, 25 bp, probe
gctttgctgcacagcaggacctgtg

SEQ ID NO: 205536 - DNA, 25 bp, probe
gctttgctgaaagggtctgcggttg

SEQ ID NO: 205537 - DNA, 25 bp, probe
gcttgtcttagagggcttttctttg

SEQ ID NO: 205538 - DNA, 25 bp, probe
gcacttggtaggcagagttactcgt

SEQ ID NO: 205539 - DNA, 25 bp, probe
gctttggaagatctggtgtagctcc

SEQ ID NO: 205540 - DNA, 25 bp, probe
gctatgggatcgtcatgtgggaagt

SEQ ID NO: 205541 - DNA, 25 bp, probe
gctatggaatcgttatgtgggaagt

SEQ ID NO: 205542 - DNA, 25 bp, probe
gctttggagtgttgatgtgggaagc

SEQ ID NO: 205543 - DNA, 25 bp, probe
gctttcggctgtctcgggacaggaa

SEQ ID NO: 205544 - DNA, 25 bp, probe
gctttcggctgtctcgggacaggaa

SEQ ID NO: 205545 - DNA, 25 bp, probe
gcttttggtgagctccgagaccaac

SEQ ID NO: 205546 - DNA, 25 bp, probe
gcactttggtagcttttacactgaa

SEQ ID NO: 205547 - DNA, 25 bp, probe
gcactttggtagcttttacactgaa

SEQ ID NO: 205548 - DNA, 25 bp, probe
gctttggggagcctttttcattagg

SEQ ID NO: 205549 - DNA, 25 bp, probe
gctttgggtgagatatctttgcaca

SEQ ID NO: 205550 - DNA, 25 bp, probe
gctatggggtgtatgaatatgtcaa

SEQ ID NO: 205551 - DNA, 25 bp, probe
gcttctggggctgtgaaacgctcac

SEQ ID NO: 205552 - DNA, 25 bp, probe
gcttcacctggagcatgaaaaccac

SEQ ID NO: 205553 - DNA, 25 bp, probe
gcttccctaagcataaagatgtgcc

SEQ ID NO: 205554 - DNA, 25 bp, probe
gctttcctgacacctggaactgtgc

SEQ ID NO: 205555 - DNA, 25 bp, probe
gctattccacaaagccacaactggc

SEQ ID NO: 205556 - DNA, 25 bp, probe
gctatgattcaccaaaacaacttgt

SEQ ID NO: 205557 - DNA, 25 bp, probe
gctatattcctgacaaaagttccat

SEQ ID NO: 205558 - DNA, 25 bp, probe
gctatcttccttaaagatttctgag

SEQ ID NO: 205559 - DNA, 25 bp, probe
gctatatttcttactaatgcaattg

SEQ ID NO: 205560 - DNA, 25 bp, probe
gctttgtttctttgcaatgcattgt

SEQ ID NO: 205561 - DNA, 25 bp, probe
gctttgtctttgacatggacgtttg

SEQ ID NO: 205562 - DNA, 25 bp, probe
gcttcctcagtaacatttctgttct

SEQ ID NO: 205563 - DNA, 25 bp, probe
gcttcctgcggagacttcaggtgct

SEQ ID NO: 205564 - DNA, 25 bp, probe
gctatctcctaattacttggtggct

SEQ ID NO: 205565 - DNA, 25 bp, probe
gctttcttaattgcatcatttggta

SEQ ID NO: 205566 - DNA, 25 bp, probe
gctttttaacgattatggtggtggc

SEQ ID NO: 205567 - DNA, 25 bp, probe
gcttctctttgaaaaagcgttggag

SEQ ID NO: 205568 - DNA, 25 bp, probe
gcttctctttgaaaaagcgttggag

SEQ ID NO: 205569 - DNA, 25 bp, probe
gcttcccgtgcaaaaagggtcacgc

SEQ ID NO: 205570 - DNA, 25 bp, probe
gcttctccaccaaataagggctttt

SEQ ID NO: 205571 - DNA, 25 bp, probe
gcttcatgccactgaatacgttgaa

SEQ ID NO: 205572 - DNA, 25 bp, probe
gcttcatgcctcgggctagagttct

SEQ ID NO: 205573 - DNA, 25 bp, probe
gctattcttcgtcgtgagatgtttg

SEQ ID NO: 205574 - DNA, 25 bp, probe
gctattcaattaggggagtctggac

SEQ ID NO: 205575 - DNA, 25 bp, probe
cgccactgtgtgaaactgtatctgc

SEQ ID NO: 205576 - DNA, 25 bp, probe
gctatcctttaccagagttggaagt

SEQ ID NO: 205577 - DNA, 25 bp, probe
gcttccactctgaggtgtgggaacg

SEQ ID NO: 205578 - DNA, 25 bp, probe
gctttcaattgcagtggacaggtac

SEQ ID NO: 205579 - DNA, 25 bp, probe
gcagttaactggggtatcagctgaa

SEQ ID NO: 205580 - DNA, 25 bp, probe
gctatctgcataggttggttcactg

SEQ ID NO: 205581 - DNA, 25 bp, probe
gctatctgcataggttggttcactg

SEQ ID NO: 205582 - DNA, 25 bp, probe
gctatctgctgagtgtgctaaatac

SEQ ID NO: 205583 - DNA, 25 bp, probe
gctatggtgatcttctcaactatct

SEQ ID NO: 205584 - DNA, 25 bp, probe
gctatgagctgttcttcaagacaag

SEQ ID NO: 205585 - DNA, 25 bp, probe
gctatgacgcactttacagatgaat

SEQ ID NO: 205586 - DNA, 25 bp, probe
gctatgacgcacttttcatgtctgt

SEQ ID NO: 205587 - DNA, 25 bp, probe
gcttactgccgttccactgcagtaa

SEQ ID NO: 205588 - DNA, 25 bp, probe
gctatacctccttagcactgagaat

SEQ ID NO: 205589 - DNA, 25 bp, probe
gcttcagtcatcctgaacctgagtt

SEQ ID NO: 205590 - DNA, 25 bp, probe
gcttatgcagaccagcaagctgtga

SEQ ID NO: 205591 - DNA, 25 bp, probe
gctatatgcctccagaagtgttgga

SEQ ID NO: 205592 - DNA, 25 bp, probe
gctatctcacaccagaacagtttga

SEQ ID NO: 205593 - DNA, 25 bp, probe
gcttcccaagaaatagttgatgaat

SEQ ID NO: 205594 - DNA, 25 bp, probe
gcttccaagaacttaaggcagacaa

SEQ ID NO: 205595 - DNA, 25 bp, probe
gctttctgatcaacaaaactgagca

SEQ ID NO: 205596 - DNA, 25 bp, probe
gctttatcttcaagaacaagcagca

SEQ ID NO: 205597 - DNA, 25 bp, probe
gcttatatttaggaacatatgctca

SEQ ID NO: 205598 - DNA, 25 bp, probe
gcttatgttacaggcaactgagcca

SEQ ID NO: 205599 - DNA, 25 bp, probe
gctttgcttggaggctactcccaag

SEQ ID NO: 205600 - DNA, 25 bp, probe
gctttgcttggaggctactcccaag

SEQ ID NO: 205601 - DNA, 25 bp, probe
gctttgcttggaggctactcccaag

SEQ ID NO: 205602 - DNA, 25 bp, probe
gcataactaggggtcacgggagagc

SEQ ID NO: 205603 - DNA, 25 bp, probe
gcttcccaggggaacgaggagatct

SEQ ID NO: 205604 - DNA, 25 bp, probe
gcttccacaggcaaaactcagtaga

SEQ ID NO: 205605 - DNA, 25 bp, probe
gctattacatgtggtaactcagagg

SEQ ID NO: 205606 - DNA, 25 bp, probe
gcttttcatgtagaactcagcagtt

SEQ ID NO: 205607 - DNA, 25 bp, probe
gcttttcaataggaatcattcttct

SEQ ID NO: 205608 - DNA, 25 bp, probe
gctttgtacagagtgcttttctgtt

SEQ ID NO: 205609 - DNA, 25 bp, probe
gctttgtatgcactttgtttttttc

SEQ ID NO: 205610 - DNA, 25 bp, probe
gctattttggctttgtttcattttt

SEQ ID NO: 205611 - DNA, 25 bp, probe
gcttgtattgttgtggcttccttcg

SEQ ID NO: 205612 - DNA, 25 bp, probe
gcttgagttgttgtcgttttttgtt

SEQ ID NO: 205613 - DNA, 25 bp, probe
gctatgagtttgactctcctttctg

SEQ ID NO: 205614 - DNA, 25 bp, probe
gcattgattttgatcctttactaca

SEQ ID NO: 205615 - DNA, 25 bp, probe
gcattgaatccgctgatctactact

SEQ ID NO: 205616 - DNA, 25 bp, probe
gcttgacccatgctggaagctaatg

SEQ ID NO: 205617 - DNA, 25 bp, probe
gctatgcctccatttcagagagctt

SEQ ID NO: 205618 - DNA, 25 bp, probe
gcttgcctcctagtatcgatgcagt

SEQ ID NO: 205619 - DNA, 25 bp, probe
gctatcctttcacttgtgatgtgtg

SEQ ID NO: 205620 - DNA, 25 bp, probe
gcttcatgcttatgttggctgtgct

SEQ ID NO: 205621 - DNA, 25 bp, probe
gctatcatttgctgtggagatcgtc

SEQ ID NO: 205622 - DNA, 25 bp, probe
gctatgctttggggggacaggccag

SEQ ID NO: 205623 - DNA, 25 bp, probe
gctttttggctggggagagacgtac

SEQ ID NO: 205624 - DNA, 25 bp, probe
gctttttggctggggagagacgtac

SEQ ID NO: 205625 - DNA, 25 bp, probe
gctttgtgtccagccggggctgtaa

SEQ ID NO: 205626 - DNA, 25 bp, probe
gcttgggggacagctggcagggaaa

SEQ ID NO: 205627 - DNA, 25 bp, probe
gcttgtggaggtggtcggcaatgga

SEQ ID NO: 205628 - DNA, 25 bp, probe
gcttcattagtgaggctgaccagag

SEQ ID NO: 205629 - DNA, 25 bp, probe
gcttgtagttccagctactcaggag

SEQ ID NO: 205630 - DNA, 25 bp, probe
gctttatgccttcaatactcgcaag

SEQ ID NO: 205631 - DNA, 25 bp, probe
gctttctggtgtatattctccatac

SEQ ID NO: 205632 - DNA, 25 bp, probe
gctttctacaggacatcttcaccac

SEQ ID NO: 205633 - DNA, 25 bp, probe
gctttccaaagctacattgacgaga

SEQ ID NO: 205634 - DNA, 25 bp, probe
gctttgccattagatctagacaaga

SEQ ID NO: 205635 - DNA, 25 bp, probe
gctttgcagaaagctttgagctctg

SEQ ID NO: 205636 - DNA, 25 bp, probe
gctattcgtaagttctgtgcagttt

SEQ ID NO: 205637 - DNA, 25 bp, probe
gctattcgtaagttctgtgcagttt

SEQ ID NO: 205638 - DNA, 25 bp, probe
gcttttgtagcatgtttgactttcc

SEQ ID NO: 205639 - DNA, 25 bp, probe
gctttttggaggttctaatcatttc

SEQ ID NO: 205640 - DNA, 25 bp, probe
gctttggggatacttctaaattttg

SEQ ID NO: 205641 - DNA, 25 bp, probe
gctttcctggaatttccaaagcttt

SEQ ID NO: 205642 - DNA, 25 bp, probe
gcttcccgggataaactgagcctgt

SEQ ID NO: 205643 - DNA, 25 bp, probe
gcttctcgggtgaagaactgccgtt

SEQ ID NO: 205644 - DNA, 25 bp, probe
gcttctggggtaaattccaagcttc

SEQ ID NO: 205645 - DNA, 25 bp, probe
gcttgtggcggattcctcaccaagc

SEQ ID NO: 205646 - DNA, 25 bp, probe
gcttgtggcggattcctcaccaagc

SEQ ID NO: 205647 - DNA, 25 bp, probe
gcttgtggcggattcctcaccaagc

SEQ ID NO: 205648 - DNA, 25 bp, probe
gctttggcgagatcagtatccttaa

SEQ ID NO: 205649 - DNA, 25 bp, probe
gctttggaatattttatcctgtatt

SEQ ID NO: 205650 - DNA, 25 bp, probe
gctttggaatattttatcctgtatt

SEQ ID NO: 205651 - DNA, 25 bp, probe
gcttcaagtaagttattccgtattg

SEQ ID NO: 205652 - DNA, 25 bp, probe
gcttatcctaaggctgtccacgtac

SEQ ID NO: 205653 - DNA, 25 bp, probe
gcttgtttaagtttacacagctagt

SEQ ID NO: 205654 - DNA, 25 bp, probe
gcttgtattagtcccaagccacaga

SEQ ID NO: 205655 - DNA, 25 bp, probe
gcttggaacagtacacatgcaccac

SEQ ID NO: 205656 - DNA, 25 bp, probe
gcttttgaatgtacacagcgaacca

SEQ ID NO: 205657 - DNA, 25 bp, probe
gcttttgactggaccgagtgactac

SEQ ID NO: 205658 - DNA, 25 bp, probe
gcttcatcgtcggtccgggctgcca

SEQ ID NO: 205659 - DNA, 25 bp, probe
gcttacaggatgctcctgcagggcc

SEQ ID NO: 205660 - DNA, 25 bp, probe
gttgacagtaaatgatagtgatggc

SEQ ID NO: 205661 - DNA, 25 bp, probe
gcttagtgccaatagtaagtggcta

SEQ ID NO: 205662 - DNA, 25 bp, probe
gcttttgcctcccagtaaatagaaa

SEQ ID NO: 205663 - DNA, 25 bp, probe
gcttcgtcctccatgacaacaagca

SEQ ID NO: 205664 - DNA, 25 bp, probe
gcttagcccaaactgagtacaactt

SEQ ID NO: 205665 - DNA, 25 bp, probe
gcttaccatccaagaggctacaaga

SEQ ID NO: 205666 - DNA, 25 bp, probe
gcttctacaccaaagtgctcaacta

SEQ ID NO: 205667 - DNA, 25 bp, probe
gctttcctcaaaacttcagacatag

SEQ ID NO: 205668 - DNA, 25 bp, probe
gctttcgacgaaacatctctgcaaa

SEQ ID NO: 205669 - DNA, 25 bp, probe
gctttccactgagatctactggata

SEQ ID NO: 205670 - DNA, 25 bp, probe
gctttgctccttgttagtggctgca

SEQ ID NO: 205671 - DNA, 25 bp, probe
gctttgctccttgttagtggctgca

SEQ ID NO: 205672 - DNA, 25 bp, probe
gctttcccacatggaaggtggctgc

SEQ ID NO: 205673 - DNA, 25 bp, probe
gctattggttcagcaagagaggcag

SEQ ID NO: 205674 - DNA, 25 bp, probe
gcttgggatacagaagaggccatgt

SEQ ID NO: 205675 - DNA, 25 bp, probe
gctttcagaaaccaagagatccaga

SEQ ID NO: 205676 - DNA, 25 bp, probe
gctttcatgacgaagaatccccaca

SEQ ID NO: 205677 - DNA, 25 bp, probe
gctttgagaggcaactttgcccctg

SEQ ID NO: 205678 - DNA, 25 bp, probe
gctttgtgaggcagtcttgttctta

SEQ ID NO: 205679 - DNA, 25 bp, probe
gctttgtaatgcagtttgtgacatt

SEQ ID NO: 205680 - DNA, 25 bp, probe
gcttttaatgcgggagctgcgattt

SEQ ID NO: 205681 - DNA, 25 bp, probe
gcttttggagcgggcaggggactca

SEQ ID NO: 205682 - DNA, 25 bp, probe
gctatttggggcgtcagggtggtgc

SEQ ID NO: 205683 - DNA, 25 bp, probe
gctttgttggggtatggttggctcg

SEQ ID NO: 205684 - DNA, 25 bp, probe
gcttttggggtctatgtcattggtt

SEQ ID NO: 205685 - DNA, 25 bp, probe
gcttttggggtctatgtcattggtt

SEQ ID NO: 205686 - DNA, 25 bp, probe
gctattctcgggtcatcaatattga

SEQ ID NO: 205687 - DNA, 25 bp, probe
gctattctcagatgactctgtgttt

SEQ ID NO: 205688 - DNA, 25 bp, probe
gcttcttgcagttaatctcgttatt

SEQ ID NO: 205689 - DNA, 25 bp, probe
gcattgttgatgaggattcgcccgt

SEQ ID NO: 205690 - DNA, 25 bp, probe
gcttatagatcaagtttggctccct

SEQ ID NO: 205691 - DNA, 25 bp, probe
gcttatagatcaagtttggctccct

SEQ ID NO: 205692 - DNA, 25 bp, probe
gcttctatgacttttatggcccgct

SEQ ID NO: 205693 - DNA, 25 bp, probe
gcattctcgaaattggaggactcct

SEQ ID NO: 205694 - DNA, 25 bp, probe
gcattctcgaaattggaggactcct

SEQ ID NO: 205695 - DNA, 25 bp, probe
gcatcttcgaaaacggctacgaccc

SEQ ID NO: 205696 - DNA, 25 bp, probe
gcatcttcgaaaacggctacgaccc

SEQ ID NO: 205697 - DNA, 25 bp, probe
gcattaccaacaacgtcattgggca

SEQ ID NO: 205698 - DNA, 25 bp, probe
gcttgaccagtcacgttgggagaag

SEQ ID NO: 205699 - DNA, 25 bp, probe
gcttatactcaatgctttcagcagc

SEQ ID NO: 205700 - DNA, 25 bp, probe
gcttttctctgtccacagtcaatgc

SEQ ID NO: 205701 - DNA, 25 bp, probe
gcttttctctgtccacagtcaatgc

SEQ ID NO: 205702 - DNA, 25 bp, probe
gcttttggcgcccacagtgatgatg

SEQ ID NO: 205703 - DNA, 25 bp, probe
gcttttggcgcccacagtgatgatg

SEQ ID NO: 205704 - DNA, 25 bp, probe
gctttcatgggaccagacgtgatgc

SEQ ID NO: 205705 - DNA, 25 bp, probe
gctttcatgggaccagacgtgatgc

SEQ ID NO: 205706 - DNA, 25 bp, probe
gcttcgagggaatatgcgaagctgc

SEQ ID NO: 205707 - DNA, 25 bp, probe
gctttcgggagtggtcagactgtcg

SEQ ID NO: 205708 - DNA, 25 bp, probe
gctattgaaggggcagtgatgactg

SEQ ID NO: 205709 - DNA, 25 bp, probe
gctattgaaggggcagtgatgactg

SEQ ID NO: 205710 - DNA, 25 bp, probe
gctttgccactgcctggttgagtgg

SEQ ID NO: 205711 - DNA, 25 bp, probe
gcttatgtctctacatggtattgta

SEQ ID NO: 205712 - DNA, 25 bp, probe
gcttatgtctctacatggtattgta

SEQ ID NO: 205713 - DNA, 25 bp, probe
gcttattcactgaaagcagaactac

SEQ ID NO: 205714 - DNA, 25 bp, probe
gcttattcattatagctattcgtcc

SEQ ID NO: 205715 - DNA, 25 bp, probe
gcttattcttttagtctgtttgcct

SEQ ID NO: 205716 - DNA, 25 bp, probe
gcttagtaattgtgtctggaatgac

SEQ ID NO: 205717 - DNA, 25 bp, probe
gcttaaaaatagctgctaatctgtc

SEQ ID NO: 205718 - DNA, 25 bp, probe
gcttccaagcattactttaacctcc

SEQ ID NO: 205719 - DNA, 25 bp, probe
gcattcccaaagctcttaattctcc

SEQ ID NO: 205720 - DNA, 25 bp, probe
gctttcacaatttgtcttacaattg

SEQ ID NO: 205721 - DNA, 25 bp, probe
gctttactcatcagtcttaagtatg

SEQ ID NO: 205722 - DNA, 25 bp, probe
gcttaattcttgcttcctatgctag

SEQ ID NO: 205723 - DNA, 25 bp, probe
gctttggtcttcttccaatgatgct

SEQ ID NO: 205724 - DNA, 25 bp, probe
gcttctggtttgtcttatattctgg

SEQ ID NO: 205725 - DNA, 25 bp, probe
gcttttcatgtttcaacttttgcgg

SEQ ID NO: 205726 - DNA, 25 bp, probe
gcttttcatgtttcaacttttgcgg

SEQ ID NO: 205727 - DNA, 25 bp, probe
gcttctccaggttcagacttatatg

SEQ ID NO: 205728 - DNA, 25 bp, probe
gcttctactggcacaatttattatt

SEQ ID NO: 205729 - DNA, 25 bp, probe
gctttgattgtagaatcatttttgt

SEQ ID NO: 205730 - DNA, 25 bp, probe
gcttccaattagtattcttttatat

SEQ ID NO: 205731 - DNA, 25 bp, probe
gcttccaattagtattcttttatat

SEQ ID NO: 205732 - DNA, 25 bp, probe
gcttttattcagcatcctttatctg

SEQ ID NO: 205733 - DNA, 25 bp, probe
gctttaatcccactagctattgctt

SEQ ID NO: 205734 - DNA, 25 bp, probe
gcttcaaacacccaaattgtcttcc

SEQ ID NO: 205735 - DNA, 25 bp, probe
gcttcaaacacccaaattgtcttcc

SEQ ID NO: 205736 - DNA, 25 bp, probe
gcttacagcagccctcaaatttgga

SEQ ID NO: 205737 - DNA, 25 bp, probe
gctttcacagagttaaaaggctgaa

SEQ ID NO: 205738 - DNA, 25 bp, probe
gcttccaaaattgccaatgagctaa

SEQ ID NO: 205739 - DNA, 25 bp, probe
gactccaaaactgtctacgcaaagg

SEQ ID NO: 205740 - DNA, 25 bp, probe
gactccaaaactgtctacgcaaagg

SEQ ID NO: 205741 - DNA, 25 bp, probe
gattcccaacctgggattccagaag

SEQ ID NO: 205742 - DNA, 25 bp, probe
gcatgtccaaacgaagtaacaaaag

SEQ ID NO: 205743 - DNA, 25 bp, probe
gcacccctataacagaacaaatcgc

SEQ ID NO: 205744 - DNA, 25 bp, probe
gcatccaacttataatatctcccat

SEQ ID NO: 205745 - DNA, 25 bp, probe
gcatccaatttgtaaaccaattatg

SEQ ID NO: 205746 - DNA, 25 bp, probe
gcatccaagacttatcagtctttat

SEQ ID NO: 205747 - DNA, 25 bp, probe
gcatacaaaccttgcatactattat

SEQ ID NO: 205748 - DNA, 25 bp, probe
gcataaacaccttgaatttgatttt

SEQ ID NO: 205749 - DNA, 25 bp, probe
gcattaaagctctagaaacgcaatc

SEQ ID NO: 205750 - DNA, 25 bp, probe
gcattactaatctgaaaaagtgctc

SEQ ID NO: 205751 - DNA, 25 bp, probe
gcttcacacctcaggaaagatgtga

SEQ ID NO: 205752 - DNA, 25 bp, probe
gcttcctcagcctccaaagtggagc

SEQ ID NO: 205753 - DNA, 25 bp, probe
gcatactttctctctaggagggagc

SEQ ID NO: 205754 - DNA, 25 bp, probe
gcttcttacctgtcagaggaggtga

SEQ ID NO: 205755 - DNA, 25 bp, probe
gcttcttacctgtcagaggaggtga

SEQ ID NO: 205756 - DNA, 25 bp, probe
gcttctgggcctgatggagaggaga

SEQ ID NO: 205757 - DNA, 25 bp, probe
gcttcagtgctgctcctgagagagt

SEQ ID NO: 205758 - DNA, 25 bp, probe
gcttcagatgagtcctatgggagct

SEQ ID NO: 205759 - DNA, 25 bp, probe
gcttgttgtacctatgggtctggtt

SEQ ID NO: 205760 - DNA, 25 bp, probe
gcttttgataagtgtggtttctgtt

SEQ ID NO: 205761 - DNA, 25 bp, probe
gcttttgataagtgtggtttctgtt

SEQ ID NO: 205762 - DNA, 25 bp, probe
gctttttccactttgagtttgctta

SEQ ID NO: 205763 - DNA, 25 bp, probe
gctttgtgttgcgttttgtgtctct

SEQ ID NO: 205764 - DNA, 25 bp, probe
gcttctgtgtatctaggtggacctc

SEQ ID NO: 205765 - DNA, 25 bp, probe
gcttctgtgtatctaggtggacctc

SEQ ID NO: 205766 - DNA, 25 bp, probe
gcttctggtagtaaggagcacaaag

SEQ ID NO: 205767 - DNA, 25 bp, probe
gctttggtattatgagtgcaaatca

SEQ ID NO: 205768 - DNA, 25 bp, probe
gctttgcattgaatttgggataact

SEQ ID NO: 205769 - DNA, 25 bp, probe
gctttgattgaatgtggaatgaagt

SEQ ID NO: 205770 - DNA, 25 bp, probe
gctttattgacatctggcaggccat

SEQ ID NO: 205771 - DNA, 25 bp, probe
gctttcatctaattctggcaggacc

SEQ ID NO: 205772 - DNA, 25 bp, probe
gcttgagccagaatctcaggacccc

SEQ ID NO: 205773 - DNA, 25 bp, probe
gcttatgctcaaacacagagttcac

SEQ ID NO: 205774 - DNA, 25 bp, probe
gcttatgctcaaacacagagttcac

SEQ ID NO: 205775 - DNA, 25 bp, probe
gctttctcatgaagtagcatttccc

SEQ ID NO: 205776 - DNA, 25 bp, probe
gctttgtgcataaggacttggctgc

SEQ ID NO: 205777 - DNA, 25 bp, probe
gctttgagctcagcatgacttgaat

SEQ ID NO: 205778 - DNA, 25 bp, probe
gctttgatcgcgcatgacaagaaaa

SEQ ID NO: 205779 - DNA, 25 bp, probe
gctttgccgctgggacaagagacgc

SEQ ID NO: 205780 - DNA, 25 bp, probe
gctttgccgctgggacaagagacgc

SEQ ID NO: 205781 - DNA, 25 bp, probe
gcattagccgctgaggagagccacc

SEQ ID NO: 205782 - DNA, 25 bp, probe
gcttagcatcgtgctggagcggatg

SEQ ID NO: 205783 - DNA, 25 bp, probe
gcttcagatgggctgtgcacacggt

SEQ ID NO: 205784 - DNA, 25 bp, probe
gcttagaggcggctccaagagcccc

SEQ ID NO: 205785 - DNA, 25 bp, probe
gcttctaagggatccagagacctgc

SEQ ID NO: 205786 - DNA, 25 bp, probe
gctttaggggaccatgaagagactc

SEQ ID NO: 205787 - DNA, 25 bp, probe
gctttttgggaccatcactgagagt

SEQ ID NO: 205788 - DNA, 25 bp, probe
gcttttcgattggccagcgatgggt

SEQ ID NO: 205789 - DNA, 25 bp, probe
gcttttcagcagtggactgcagggg

SEQ ID NO: 205790 - DNA, 25 bp, probe
gcttgtgctcggtggggagggacag

SEQ ID NO: 205791 - DNA, 25 bp, probe
gcttgtgctcggtggggagggacag

SEQ ID NO: 205792 - DNA, 25 bp, probe
gcttagccggaggggacgtggccaa

SEQ ID NO: 205793 - DNA, 25 bp, probe
gcttacggtcatctggacgttctgc

SEQ ID NO: 205794 - DNA, 25 bp, probe
gcttacggtcatctggacgttctgc

SEQ ID NO: 205795 - DNA, 25 bp, probe
gcttccaggtatctacactgttagt

SEQ ID NO: 205796 - DNA, 25 bp, probe
gcttccagtattcattgatttattt

SEQ ID NO: 205797 - DNA, 25 bp, probe
gctttcggagtggtatttcttttcg

SEQ ID NO: 205798 - DNA, 25 bp, probe
gcttcgcagggggatttgttttgtg

SEQ ID NO: 205799 - DNA, 25 bp, probe
gcttccatagtggagacttgctttt

SEQ ID NO: 205800 - DNA, 25 bp, probe
gcttccagatgtagagactccttcc

SEQ ID NO: 205801 - DNA, 25 bp, probe
gcttcaagattaaggccctgaggct

SEQ ID NO: 205802 - DNA, 25 bp, probe
gcttcatgtttgaaagctcgccggg

SEQ ID NO: 205803 - DNA, 25 bp, probe
gcttctgcctgaaaagtcccaagga

SEQ ID NO: 205804 - DNA, 25 bp, probe
gcttctggctggtgagttcacccga

SEQ ID NO: 205805 - DNA, 25 bp, probe
gcttcaggaagctgagcttaccctc

SEQ ID NO: 205806 - DNA, 25 bp, probe
gcttgggaatttttttctccatcaa

SEQ ID NO: 205807 - DNA, 25 bp, probe
gcttacccagaattcttgttcacaa

SEQ ID NO: 205808 - DNA, 25 bp, probe
gcttcattccaatctattgcttcac

SEQ ID NO: 205809 - DNA, 25 bp, probe
gcttctcggaatgcatgttgttcag

SEQ ID NO: 205810 - DNA, 25 bp, probe
gcttatgcaggattccaggttatat

SEQ ID NO: 205811 - DNA, 25 bp, probe
gcttaaagaatgccctttatgatgc

SEQ ID NO: 205812 - DNA, 25 bp, probe
gctttgacaagtggcctttcatgac

SEQ ID NO: 205813 - DNA, 25 bp, probe
gctttgagaagctcagctgccttcc

SEQ ID NO: 205814 - DNA, 25 bp, probe
gctttgagaagctcagctgccttcc

SEQ ID NO: 205815 - DNA, 25 bp, probe
gcttgatggaagtgggccagtcctg

SEQ ID NO: 205816 - DNA, 25 bp, probe
gcttcttgaacatgggctggacctg

SEQ ID NO: 205817 - DNA, 25 bp, probe
gcttctctcccatggagctaatgtc

SEQ ID NO: 205818 - DNA, 25 bp, probe
gcttctctcccatggagctaatgtc

SEQ ID NO: 205819 - DNA, 25 bp, probe
gcttcttcaggcggtagctgattct

SEQ ID NO: 205820 - DNA, 25 bp, probe
gcttatttgctgggtacgtgactat

SEQ ID NO: 205821 - DNA, 25 bp, probe
gcttatttgctgggtacgtgactat

SEQ ID NO: 205822 - DNA, 25 bp, probe
gcttattccttggtatggtgacagt

SEQ ID NO: 205823 - DNA, 25 bp, probe
gcatctttacagtactataataagt

SEQ ID NO: 205824 - DNA, 25 bp, probe
gctttgctccgaacaaatagtaaat

SEQ ID NO: 205825 - DNA, 25 bp, probe
gctttgctccctagaagaagctcaa

SEQ ID NO: 205826 - DNA, 25 bp, probe
gctttcccagcatggagcgcaggaa

SEQ ID NO: 205827 - DNA, 25 bp, probe
gctttcccagcatggagcgcaggaa

SEQ ID NO: 205828 - DNA, 25 bp, probe
gcttctacgcgctagagaggatcaa

SEQ ID NO: 205829 - DNA, 25 bp, probe
gcttcttcggctcggagcccaagat

SEQ ID NO: 205830 - DNA, 25 bp, probe
gcttttcctcaagagcccaatgcat

SEQ ID NO: 205831 - DNA, 25 bp, probe
gcatctttactaggagacgccaata

SEQ ID NO: 205832 - DNA, 25 bp, probe
gcatttggtcgggcagccgcacact

SEQ ID NO: 205833 - DNA, 25 bp, probe
gcattgatcagtgacacacctctcc

SEQ ID NO: 205834 - DNA, 25 bp, probe
gcattgatcagtgacacacctctcc

SEQ ID NO: 205835 - DNA, 25 bp, probe
gcttacagtgcatcacaactgaaga

SEQ ID NO: 205836 - DNA, 25 bp, probe
gcagtacaattcgcaagaaaaaagc

SEQ ID NO: 205837 - DNA, 25 bp, probe
gcatagacaaaggccttaacaaacg

SEQ ID NO: 205838 - DNA, 25 bp, probe
gttgactaaccttgtcctaatacgc

SEQ ID NO: 205839 - DNA, 25 bp, probe
gcttggaacaccatgtcctgaattc

SEQ ID NO: 205840 - DNA, 25 bp, probe
gcttcagcaccacacttacgaagtg

SEQ ID NO: 205841 - DNA, 25 bp, probe
gcttcgtacacaacttccaggagag

SEQ ID NO: 205842 - DNA, 25 bp, probe
gcttgtgtacaaacccagattgaag

SEQ ID NO: 205843 - DNA, 25 bp, probe
gcattagctaaaaccttccatgtca

SEQ ID NO: 205844 - DNA, 25 bp, probe
gcattcctaagaagtccccaggtca

SEQ ID NO: 205845 - DNA, 25 bp, probe
gcattcctaagaagtccccaggtca

SEQ ID NO: 205846 - DNA, 25 bp, probe
gcttcttagcaaagtcctcaatggt

SEQ ID NO: 205847 - DNA, 25 bp, probe
gcttctgggcataagtcctgcaagg

SEQ ID NO: 205848 - DNA, 25 bp, probe
gcttttggattgttctaacatagct

SEQ ID NO: 205849 - DNA, 25 bp, probe
gcatatggagtatgaatgcccctac

SEQ ID NO: 205850 - DNA, 25 bp, probe
gcttgcaggtgactgatgatgctct

SEQ ID NO: 205851 - DNA, 25 bp, probe
gcttgcctggacatgatgcctaagt

SEQ ID NO: 205852 - DNA, 25 bp, probe
gcttgccctcacagtggtatgtgct

SEQ ID NO: 205853 - DNA, 25 bp, probe
gcttgccctcacagtggtatgtgct

SEQ ID NO: 205854 - DNA, 25 bp, probe
gcttgccctcacagtggtatgtgct

SEQ ID NO: 205855 - DNA, 25 bp, probe
gcatattcttcccagtggttttttc

SEQ ID NO: 205856 - DNA, 25 bp, probe
gcttttcttctactggcttgtaatt

SEQ ID NO: 205857 - DNA, 25 bp, probe
gcttttctggcttctaccatgaaat

SEQ ID NO: 205858 - DNA, 25 bp, probe
gactatccttcatctacctaaaaag

SEQ ID NO: 205859 - DNA, 25 bp, probe
gcattttttaacctcctaagtatca

SEQ ID NO: 205860 - DNA, 25 bp, probe
gcacttttttggcggctaaatcatc

SEQ ID NO: 205861 - DNA, 25 bp, probe
gcacttttttggcggctaaatcatc

SEQ ID NO: 205862 - DNA, 25 bp, probe
gctttctgattgttggggtaaatag

SEQ ID NO: 205863 - DNA, 25 bp, probe
gctttctgattgttggggtaaatag

SEQ ID NO: 205864 - DNA, 25 bp, probe
gcttgtactgctttgttgaataaat

SEQ ID NO: 205865 - DNA, 25 bp, probe
gcttacagcattttcttcacgaaac

SEQ ID NO: 205866 - DNA, 25 bp, probe
gcttaagctattggttcctaaaaat

SEQ ID NO: 205867 - DNA, 25 bp, probe
gcattaccttctgttccttatgata

SEQ ID NO: 205868 - DNA, 25 bp, probe
gcttaccatcctgtctaccagatga

SEQ ID NO: 205869 - DNA, 25 bp, probe
gctttccatcacttattacaatttt

SEQ ID NO: 205870 - DNA, 25 bp, probe
gcttatccaactctgaatctttttt

SEQ ID NO: 205871 - DNA, 25 bp, probe
gcttatccaactctgaatctttttt

SEQ ID NO: 205872 - DNA, 25 bp, probe
gcttgggcaactctgtgatccagtc

SEQ ID NO: 205873 - DNA, 25 bp, probe
gcattcattctatgagggtccagat

SEQ ID NO: 205874 - DNA, 25 bp, probe
gcttacttctggactggtcagcagt

SEQ ID NO: 205875 - DNA, 25 bp, probe
gcttttgttggctggacactgtttt

SEQ ID NO: 205876 - DNA, 25 bp, probe
gcttcgttaggctggagggcatgtt

SEQ ID NO: 205877 - DNA, 25 bp, probe
gcttttccttgcaggagcgtcagtt

SEQ ID NO: 205878 - DNA, 25 bp, probe
gcttttccattctgggtgttttcag

SEQ ID NO: 205879 - DNA, 25 bp, probe
gcttttccacactcggtgtgtgcat

SEQ ID NO: 205880 - DNA, 25 bp, probe
gcttttccagaccagctggggtgag

SEQ ID NO: 205881 - DNA, 25 bp, probe
gcttctcctagacagggctgagtgg

SEQ ID NO: 205882 - DNA, 25 bp, probe
gcttcgagaagtcataggcagagtg

SEQ ID NO: 205883 - DNA, 25 bp, probe
gcttagatgataaaatgaggcagaa

SEQ ID NO: 205884 - DNA, 25 bp, probe
gctttatgatatcaaagactcattg

SEQ ID NO: 205885 - DNA, 25 bp, probe
gctttatgtcagtatgaatgatctt

SEQ ID NO: 205886 - DNA, 25 bp, probe
gcttttgtcagatggagtgccggtc

SEQ ID NO: 205887 - DNA, 25 bp, probe
gctttttggatgtcaaggcgctgtt

SEQ ID NO: 205888 - DNA, 25 bp, probe
gctttcttgggttaatccatgttca

SEQ ID NO: 205889 - DNA, 25 bp, probe
gcttttctgggtacctctggttagc

SEQ ID NO: 205890 - DNA, 25 bp, probe
gctttacatggaatcatcagccttg

SEQ ID NO: 205891 - DNA, 25 bp, probe
gctttaatggtttccaggctgatga

SEQ ID NO: 205892 - DNA, 25 bp, probe
gcttacagatttcatcctggccatt

SEQ ID NO: 205893 - DNA, 25 bp, probe
gcttacaattgtcatgtctagattt

SEQ ID NO: 205894 - DNA, 25 bp, probe
gcattactattaactctgcatagac

SEQ ID NO: 205895 - DNA, 25 bp, probe
gctttctgtactcttgcaaacaggg

SEQ ID NO: 205896 - DNA, 25 bp, probe
gcttttgacactatataaaccgccc

SEQ ID NO: 205897 - DNA, 25 bp, probe
gcttttcaaattgtcaaattcactt

SEQ ID NO: 205898 - DNA, 25 bp, probe
gcttagttaattggctcagaatttt

SEQ ID NO: 205899 - DNA, 25 bp, probe
gcttctatttttggccaaatgagaa

SEQ ID NO: 205900 - DNA, 25 bp, probe
gcttctattccttccaatgagagat

SEQ ID NO: 205901 - DNA, 25 bp, probe
gcttctattccttccaatgagagat

SEQ ID NO: 205902 - DNA, 25 bp, probe
gcttgctggacctaaaatcaatgat

SEQ ID NO: 205903 - DNA, 25 bp, probe
gcttcggcagtatcacaagaagatt

SEQ ID NO: 205904 - DNA, 25 bp, probe
gcttcggcagtatcacaagaagatt

SEQ ID NO: 205905 - DNA, 25 bp, probe
gcttggcgcgtctcatcaaggacga

SEQ ID NO: 205906 - DNA, 25 bp, probe
gcttagggagcaaccaggtgacgaa

SEQ ID NO: 205907 - DNA, 25 bp, probe
gcttgaaggagcacaaagccctcaa

SEQ ID NO: 205908 - DNA, 25 bp, probe
gcttcaagaggcgtaggtcctccaa

SEQ ID NO: 205909 - DNA, 25 bp, probe
gcttcaagagggtggtggagaccat

SEQ ID NO: 205910 - DNA, 25 bp, probe
gcttccaggtattcggtgtcagtcc

SEQ ID NO: 205911 - DNA, 25 bp, probe
gcttccacagaagcagggacactgc

SEQ ID NO: 205912 - DNA, 25 bp, probe
gcttccacagaagcagggacactgc

SEQ ID NO: 205913 - DNA, 25 bp, probe
gcttccaagacgccaatggagccct

SEQ ID NO: 205914 - DNA, 25 bp, probe
gcttcacgagaggccacagggcctg

SEQ ID NO: 205915 - DNA, 25 bp, probe
gcttcacagaggaccccaaattgtg

SEQ ID NO: 205916 - DNA, 25 bp, probe
gcttccagagacagctccaggagtt

SEQ ID NO: 205917 - DNA, 25 bp, probe
gcttccagagacagctccaggagtt

SEQ ID NO: 205918 - DNA, 25 bp, probe
gcttccagagacagctccaggagtt

SEQ ID NO: 205919 - DNA, 25 bp, probe
gcttacagctacagtcacatccagc

SEQ ID NO: 205920 - DNA, 25 bp, probe
gcttaccatactggacagcacagac

SEQ ID NO: 205921 - DNA, 25 bp, probe
gcttgcttctacctggcaaaacgtc

SEQ ID NO: 205922 - DNA, 25 bp, probe
gctttacttcctccagaatattccg

SEQ ID NO: 205923 - DNA, 25 bp, probe
gctttacttcctccagaatattccg

SEQ ID NO: 205924 - DNA, 25 bp, probe
gctttcactctggtgaaactgttcc

SEQ ID NO: 205925 - DNA, 25 bp, probe
gcatttccctgcagctaatgctttc

SEQ ID NO: 205926 - DNA, 25 bp, probe
gcttatccgatgtgctacatgagat

SEQ ID NO: 205927 - DNA, 25 bp, probe
gcttacctgcagtcaattcattgat

SEQ ID NO: 205928 - DNA, 25 bp, probe
gcttcatcctcataatgtcagagtg

SEQ ID NO: 205929 - DNA, 25 bp, probe
gcttcccatgggcattgcaagtgcc

SEQ ID NO: 205930 - DNA, 25 bp, probe
gcttcagcgtggtgcggcaatgctg

SEQ ID NO: 205931 - DNA, 25 bp, probe
gcttcatctgtggaatcggcagtga

SEQ ID NO: 205932 - DNA, 25 bp, probe
gcttcttggtcaatcttgactagat

SEQ ID NO: 205933 - DNA, 25 bp, probe
gctttttgtcactatctgtcaagac

SEQ ID NO: 205934 - DNA, 25 bp, probe
gcttgttctgcagcttattcaagtg

SEQ ID NO: 205935 - DNA, 25 bp, probe
gctttattgagcctgcagttacatt

SEQ ID NO: 205936 - DNA, 25 bp, probe
gcttatcttacactggatcaccaac

SEQ ID NO: 205937 - DNA, 25 bp, probe
gcttattgccaccaagatccacaag

SEQ ID NO: 205938 - DNA, 25 bp, probe
gctttatccagtgatgatgtccaac

SEQ ID NO: 205939 - DNA, 25 bp, probe
gctttatccagtgatgatgtccaac

SEQ ID NO: 205940 - DNA, 25 bp, probe
gcttctaccagagattttcctctcc

SEQ ID NO: 205941 - DNA, 25 bp, probe
gcttgccctagagagtttgcaatct

SEQ ID NO: 205942 - DNA, 25 bp, probe
gcttccaggagcgatcgtttgcaac

SEQ ID NO: 205943 - DNA, 25 bp, probe
gcttccaccaagtgtttgaaaacac

SEQ ID NO: 205944 - DNA, 25 bp, probe
gcttccaccaagtgtttgaaaacac

SEQ ID NO: 205945 - DNA, 25 bp, probe
gcttctaccaagttatttctcaacc

SEQ ID NO: 205946 - DNA, 25 bp, probe
gcttctaccaagttatttctcaacc

SEQ ID NO: 205947 - DNA, 25 bp, probe
gcttgacaccggttatttttcatca

SEQ ID NO: 205948 - DNA, 25 bp, probe
gcttgaattcggagtgatttaccac

SEQ ID NO: 205949 - DNA, 25 bp, probe
gcttagattgcagtacatgagttta

SEQ ID NO: 205950 - DNA, 25 bp, probe
gcttagattgcagtacatgagttta

SEQ ID NO: 205951 - DNA, 25 bp, probe
gcattcagagtagcaacttttcaac

SEQ ID NO: 205952 - DNA, 25 bp, probe
gcttagctcttcgatacttacacaa

SEQ ID NO: 205953 - DNA, 25 bp, probe
gcttggcttttcaaacatacacaat

SEQ ID NO: 205954 - DNA, 25 bp, probe
gcttggcatttgccatatcatcatc

SEQ ID NO: 205955 - DNA, 25 bp, probe
gcttgacatgctgtattccacgagg

SEQ ID NO: 205956 - DNA, 25 bp, probe
gcttgaattttaacagcacgctgat

SEQ ID NO: 205957 - DNA, 25 bp, probe
gcttccatttgtaatcaagttatac

SEQ ID NO: 205958 - DNA, 25 bp, probe
gcttctcatgggatcaaaattgtca

SEQ ID NO: 205959 - DNA, 25 bp, probe
gcttgcttaggagtagttgtttcag

SEQ ID NO: 205960 - DNA, 25 bp, probe
gcttcttactgataattttgctgga

SEQ ID NO: 205961 - DNA, 25 bp, probe
gcatttaactggttatttcttgcca

SEQ ID NO: 205962 - DNA, 25 bp, probe
gcatttaatacctttttcttcacta

SEQ ID NO: 205963 - DNA, 25 bp, probe
gcatttaaactcctcttgctatcca

SEQ ID NO: 205964 - DNA, 25 bp, probe
gcattgtaacctttgcactgtctca

SEQ ID NO: 205965 - DNA, 25 bp, probe
gcttctaccatgaaatcctggccat

SEQ ID NO: 205966 - DNA, 25 bp, probe
gcttctatcttgaaatccatctggt

SEQ ID NO: 205967 - DNA, 25 bp, probe
gcttcaatcttcaagaactttgtca

SEQ ID NO: 205968 - DNA, 25 bp, probe
gcttatatgtatttgaacttttttg

SEQ ID NO: 205969 - DNA, 25 bp, probe
gcttgcatagttgccaccattttgt

SEQ ID NO: 205970 - DNA, 25 bp, probe
gcttcatttagagtacagattttat

SEQ ID NO: 205971 - DNA, 25 bp, probe
gagacttttcgtgaaatttgttggt

SEQ ID NO: 205972 - DNA, 25 bp, probe
gtagaggttggtgaaatttggtgag

SEQ ID NO: 205973 - DNA, 25 bp, probe
gtagaggttggtgaaatttggtgag

SEQ ID NO: 205974 - DNA, 25 bp, probe
gcttgggttggtcaaatgtcttgtg

SEQ ID NO: 205975 - DNA, 25 bp, probe
gcttgtggatttatagtagttcagt

SEQ ID NO: 205976 - DNA, 25 bp, probe
gcttgtggatttctatgttatgccg

SEQ ID NO: 205977 - DNA, 25 bp, probe
gcttcttgttcttcaatgttatata

SEQ ID NO: 205978 - DNA, 25 bp, probe
gcttttatttactatgcacttagac

SEQ ID NO: 205979 - DNA, 25 bp, probe
gctttttgtaagtatgcatcttacc

SEQ ID NO: 205980 - DNA, 25 bp, probe
gcttgttgctgctatagtttttaac

SEQ ID NO: 205981 - DNA, 25 bp, probe
gcttgttgccctagcattaattgaa

SEQ ID NO: 205982 - DNA, 25 bp, probe
gcttcttgcctttattagtgctgac

SEQ ID NO: 205983 - DNA, 25 bp, probe
gcttcaatgactccaatatttgctt

SEQ ID NO: 205984 - DNA, 25 bp, probe
gcttcataaacctatttctgactgc

SEQ ID NO: 205985 - DNA, 25 bp, probe
gcttctacattctgttcattgaggc

SEQ ID NO: 205986 - DNA, 25 bp, probe
gcttcctaggcttgattcatggagg

SEQ ID NO: 205987 - DNA, 25 bp, probe
gcttcctggactttctcagaaggtg

SEQ ID NO: 205988 - DNA, 25 bp, probe
gcttcctggactttctcagaaggtg

SEQ ID NO: 205989 - DNA, 25 bp, probe
gcttgcccagagatcttacgaggct

SEQ ID NO: 205990 - DNA, 25 bp, probe
gcatttggaatgatctttctggagc

SEQ ID NO: 205991 - DNA, 25 bp, probe
gcatttggaatgatctttctggagc

SEQ ID NO: 205992 - DNA, 25 bp, probe
gcatttggaagacttatttttctgg

SEQ ID NO: 205993 - DNA, 25 bp, probe
gcatttagtccaatgtctttttaag

SEQ ID NO: 205994 - DNA, 25 bp, probe
gcttcatttctcaatttcttgttta

SEQ ID NO: 205995 - DNA, 25 bp, probe
gcttaagtccttatgctgtgttagt

SEQ ID NO: 205996 - DNA, 25 bp, probe
gcttaagtccttatgctgtgttagt

SEQ ID NO: 205997 - DNA, 25 bp, probe
gcttaagtccttagctgcggtgcta

SEQ ID NO: 205998 - DNA, 25 bp, probe
gcttagctgcgcatttgcggggctg

SEQ ID NO: 205999 - DNA, 25 bp, probe
gcttgatgtggtcttgggtggagca

SEQ ID NO: 206000 - DNA, 25 bp, probe
gcttgtcttagatgttggtggtgca

SEQ ID NO: 206001 - DNA, 25 bp, probe
gcttatctgtctaacttggctggtg

SEQ ID NO: 206002 - DNA, 25 bp, probe
gcttagttctcttttgatgtaggtt

SEQ ID NO: 206003 - DNA, 25 bp, probe
gcttctcttctttattgcactagga

SEQ ID NO: 206004 - DNA, 25 bp, probe
gcttctttcatcttactagtatggc

SEQ ID NO: 206005 - DNA, 25 bp, probe
gcatttcgatcctcgtcaggtgcag

SEQ ID NO: 206006 - DNA, 25 bp, probe
gcattggcgggtcccgcagggagcg

SEQ ID NO: 206007 - DNA, 25 bp, probe
gcttggtgtctgcacccaggaaggg

SEQ ID NO: 206008 - DNA, 25 bp, probe
gcttggtgtctgcacccaggaaggg

SEQ ID NO: 206009 - DNA, 25 bp, probe
gcttggattcatcagtctcggaacc

SEQ ID NO: 206010 - DNA, 25 bp, probe
gcttatgtcaccagtattggcagac

SEQ ID NO: 206011 - DNA, 25 bp, probe
gcttatgtgccaatttagtggaaaa

SEQ ID NO: 206012 - DNA, 25 bp, probe
gcataattgccttttcctatgtaaa

SEQ ID NO: 206013 - DNA, 25 bp, probe
gcatttctggggattgcttataaca

SEQ ID NO: 206014 - DNA, 25 bp, probe
gcttttgtggtgattctcctcatag

SEQ ID NO: 206015 - DNA, 25 bp, probe
gcttctgatatgcagttttccttaa

SEQ ID NO: 206016 - DNA, 25 bp, probe
gcttcatgggaattcatttcactct

SEQ ID NO: 206017 - DNA, 25 bp, probe
gcttgaggtatattcattcaatgtc

SEQ ID NO: 206018 - DNA, 25 bp, probe
gcttgactattattaccacatacga

SEQ ID NO: 206019 - DNA, 25 bp, probe
gcttaaagaacatcacacatccaga

SEQ ID NO: 206020 - DNA, 25 bp, probe
gcttatgaaggaaaagccatagcag

SEQ ID NO: 206021 - DNA, 25 bp, probe
gcttataaggataatgctgctttca

SEQ ID NO: 206022 - DNA, 25 bp, probe
gcttataaggataatgctgctttca

SEQ ID NO: 206023 - DNA, 25 bp, probe
gcttcagagatataagctgctttag

SEQ ID NO: 206024 - DNA, 25 bp, probe
gcttcagagataccaatgggcattg

SEQ ID NO: 206025 - DNA, 25 bp, probe
gcttgagcaccgcatcggctgcatt

SEQ ID NO: 206026 - DNA, 25 bp, probe
gcttcacatcactgagcactcattt

SEQ ID NO: 206027 - DNA, 25 bp, probe
gcttcacatcactgagcactcattt

SEQ ID NO: 206028 - DNA, 25 bp, probe
gcttctgcatactgtgttatgttac

SEQ ID NO: 206029 - DNA, 25 bp, probe
gcttctgcatactgtgttatgttac

SEQ ID NO: 206030 - DNA, 25 bp, probe
gcttgccaagatggttgaatcccaa

SEQ ID NO: 206031 - DNA, 25 bp, probe
gcataccggatacagatacccaaaa

SEQ ID NO: 206032 - DNA, 25 bp, probe
gcttctggtaacaaatatcgctaaa

SEQ ID NO: 206033 - DNA, 25 bp, probe
gcttcatgacaagggagtttctaaa

SEQ ID NO: 206034 - DNA, 25 bp, probe
gcttctgaactcgggtttcttagta

SEQ ID NO: 206035 - DNA, 25 bp, probe
gcttctgaaatcattattagctata

SEQ ID NO: 206036 - DNA, 25 bp, probe
gcttctacacatttcatctaattta

SEQ ID NO: 206037 - DNA, 25 bp, probe
gcttctacaatctgatataaatctg

SEQ ID NO: 206038 - DNA, 25 bp, probe
gcttccacaacatgtctgatgatac

SEQ ID NO: 206039 - DNA, 25 bp, probe
gcattccttacttgcactgttactc

SEQ ID NO: 206040 - DNA, 25 bp, probe
gcttggtttataggcgcatgccacc

SEQ ID NO: 206041 - DNA, 25 bp, probe
gcattgtgtttgggccgacactgct

SEQ ID NO: 206042 - DNA, 25 bp, probe
gcttgtttacaaattgatcctgctg

SEQ ID NO: 206043 - DNA, 25 bp, probe
gcttgtttacagcactactctgtgc

SEQ ID NO: 206044 - DNA, 25 bp, probe
gcttgtctttcagcatcggtagtgc

SEQ ID NO: 206045 - DNA, 25 bp, probe
gcttgttttcccatggagaagatga

SEQ ID NO: 206046 - DNA, 25 bp, probe
gcttgttttcccatggagaagatga

SEQ ID NO: 206047 - DNA, 25 bp, probe
gcattttcattcattttaaggaaag

SEQ ID NO: 206048 - DNA, 25 bp, probe
gcattttcattatttgggtaggtga

SEQ ID NO: 206049 - DNA, 25 bp, probe
gcatatttattacatcggggcaaat

SEQ ID NO: 206050 - DNA, 25 bp, probe
gcagagttttttttccgtgaaagat

SEQ ID NO: 206051 - DNA, 25 bp, probe
gcattgtccttttagtgccttaatt

SEQ ID NO: 206052 - DNA, 25 bp, probe
gcttgagggcttaagtccttatgct

SEQ ID NO: 206053 - DNA, 25 bp, probe
gcttggtgctttcagtttttgtggc

SEQ ID NO: 206054 - DNA, 25 bp, probe
gcttggtgctttcagtttttgtggc

SEQ ID NO: 206055 - DNA, 25 bp, probe
gcttgtggctttgttgtgtttgatc

SEQ ID NO: 206056 - DNA, 25 bp, probe
gcttggagctgaatgtttcttgttg

SEQ ID NO: 206057 - DNA, 25 bp, probe
gcatcagtggcgatgactttatttg

SEQ ID NO: 206058 - DNA, 25 bp, probe
gcatcatggaggatttagtacccaa

SEQ ID NO: 206059 - DNA, 25 bp, probe
gcttggaggagcagtcaaagacatc

SEQ ID NO: 206060 - DNA, 25 bp, probe
gcttgtgaagactgctccaagtcct

SEQ ID NO: 206061 - DNA, 25 bp, probe
gcttggagacagtctgacccagtgc

SEQ ID NO: 206062 - DNA, 25 bp, probe
gcttgcaggatttgtgatcccagtg

SEQ ID NO: 206063 - DNA, 25 bp, probe
gcttaagattgatgatttcgtgaaa

SEQ ID NO: 206064 - DNA, 25 bp, probe
gcttaagatggtgccttcgtgaagg

SEQ ID NO: 206065 - DNA, 25 bp, probe
gcttaaggtcatgcagcttagctaa

SEQ ID NO: 206066 - DNA, 25 bp, probe
gcttcactggccagagcttagtcac

SEQ ID NO: 206067 - DNA, 25 bp, probe
gcttcctggctaatgagattttgca

SEQ ID NO: 206068 - DNA, 25 bp, probe
gcttctggtctaatatgtactcgaa

SEQ ID NO: 206069 - DNA, 25 bp, probe
gcttctggtctaatatgtactcgaa

SEQ ID NO: 206070 - DNA, 25 bp, probe
gcttctgtggtgcattctacagcga

SEQ ID NO: 206071 - DNA, 25 bp, probe
gcttgatctgggcattccagagaga

SEQ ID NO: 206072 - DNA, 25 bp, probe
gcttgcacgcggccttggcagcagc

SEQ ID NO: 206073 - DNA, 25 bp, probe
gcttcaccctgaggtgagcatcatc

SEQ ID NO: 206074 - DNA, 25 bp, probe
gcttcacactctgcattacagtctg

SEQ ID NO: 206075 - DNA, 25 bp, probe
gcattgctagcttccatgtgaaact

SEQ ID NO: 206076 - DNA, 25 bp, probe
gcttgctgagaggccagagagacct

SEQ ID NO: 206077 - DNA, 25 bp, probe
gcttgttacattggcacagagccat

SEQ ID NO: 206078 - DNA, 25 bp, probe
gcttgcatttctagcgagctggcgt

SEQ ID NO: 206079 - DNA, 25 bp, probe
gcttgccatgtgtaggagtctgggc

SEQ ID NO: 206080 - DNA, 25 bp, probe
gcttggtggtcagagacgggtcatc

SEQ ID NO: 206081 - DNA, 25 bp, probe
gcttggtggtcagagacgggtcatc

SEQ ID NO: 206082 - DNA, 25 bp, probe
gcttgcagggtatctatcgggtcag

SEQ ID NO: 206083 - DNA, 25 bp, probe
gcttgcagggtatctatcgggtcag

SEQ ID NO: 206084 - DNA, 25 bp, probe
gcttcagaaatatgccatcgcggct

SEQ ID NO: 206085 - DNA, 25 bp, probe
gcttcagaaatatgccatcgcggct

SEQ ID NO: 206086 - DNA, 25 bp, probe
gcttcagatgataaccacagcctgg

SEQ ID NO: 206087 - DNA, 25 bp, probe
gcttcagcaatcagctcaatacagt

SEQ ID NO: 206088 - DNA, 25 bp, probe
gcttcagcaatcagctcaatacagt

SEQ ID NO: 206089 - DNA, 25 bp, probe
gcttcacttcaggtcacaatgcaac

SEQ ID NO: 206090 - DNA, 25 bp, probe
gcttcacttcaggtcacaatgcaac

SEQ ID NO: 206091 - DNA, 25 bp, probe
gcttcatctggcattccaaatacca

SEQ ID NO: 206092 - DNA, 25 bp, probe
gcttcaaggcttccactgcaaaaca

SEQ ID NO: 206093 - DNA, 25 bp, probe
gcttacacctccaactgcaaaaatg

SEQ ID NO: 206094 - DNA, 25 bp, probe
gcttcatcaccagctatctcgaaga

SEQ ID NO: 206095 - DNA, 25 bp, probe
gcttcatcaccagctatctcgaaga

SEQ ID NO: 206096 - DNA, 25 bp, probe
gcttcatcaagcgctacgagacgct

SEQ ID NO: 206097 - DNA, 25 bp, probe
gcatctagaatcgctcaaacacctg

SEQ ID NO: 206098 - DNA, 25 bp, probe
gcatctagaatcgctcaaacacctg

SEQ ID NO: 206099 - DNA, 25 bp, probe
gcatctagaatcgctcaaacacctg

SEQ ID NO: 206100 - DNA, 25 bp, probe
gcttcaaacagccgcaaaactcaat

SEQ ID NO: 206101 - DNA, 25 bp, probe
gcttcagacacatgcagtcaaactc

SEQ ID NO: 206102 - DNA, 25 bp, probe
gcatctaatgaaggcagtacaacgc

SEQ ID NO: 206103 - DNA, 25 bp, probe
gcttcatgaataagcagttccaagc

SEQ ID NO: 206104 - DNA, 25 bp, probe
gcttcatgaataagcagttccaagc

SEQ ID NO: 206105 - DNA, 25 bp, probe
gcttcatgaccaaagcagtcccaga

SEQ ID NO: 206106 - DNA, 25 bp, probe
gcttcatgaccaaagcagtcccaga

SEQ ID NO: 206107 - DNA, 25 bp, probe
gcttcaagaacattgcgtcgcgcat

SEQ ID NO: 206108 - DNA, 25 bp, probe
gcttcaagcaggtacttctctgtgc

SEQ ID NO: 206109 - DNA, 25 bp, probe
gcttcaagtcactaatcacctgatc

SEQ ID NO: 206110 - DNA, 25 bp, probe
gcttcaagtcactaatcacctgatc

SEQ ID NO: 206111 - DNA, 25 bp, probe
gcttcatgatgaaccctacactgac

SEQ ID NO: 206112 - DNA, 25 bp, probe
gcttcatgtagaccctcatcagaga

SEQ ID NO: 206113 - DNA, 25 bp, probe
gcttgcgcaaagtcatggatagaat

SEQ ID NO: 206114 - DNA, 25 bp, probe
gcagaggaaaggggaataatcttag

SEQ ID NO: 206115 - DNA, 25 bp, probe
gcatgatgggaaaggtattagattt

SEQ ID NO: 206116 - DNA, 25 bp, probe
gcttgggaacatctcacgagctttc

SEQ ID NO: 206117 - DNA, 25 bp, probe
gaatcgtgggcacaacggcttacat

SEQ ID NO: 206118 - DNA, 25 bp, probe
gactcaggggctcacaaggtaccat

SEQ ID NO: 206119 - DNA, 25 bp, probe
gcatccgtgggtcacaggtaaagca

SEQ ID NO: 206120 - DNA, 25 bp, probe
gcttccaggcctcctatggtaaaga

SEQ ID NO: 206121 - DNA, 25 bp, probe
gaattcaaacttcatcggaaatatc

SEQ ID NO: 206122 - DNA, 25 bp, probe
gacttaacacttcttacgcaatgct

SEQ ID NO: 206123 - DNA, 25 bp, probe
gcacttaaacgtgttgtggaatgat

SEQ ID NO: 206124 - DNA, 25 bp, probe
gcatctctaaaggtgatttggaaag

SEQ ID NO: 206125 - DNA, 25 bp, probe
gcattgcgttgtggaattgggaagg

SEQ ID NO: 206126 - DNA, 25 bp, probe
gcttggacatgtggagtttgggctg

SEQ ID NO: 206127 - DNA, 25 bp, probe
gcttggcttctgtgtatctaggtgg

SEQ ID NO: 206128 - DNA, 25 bp, probe
gcttggcttctgtgtatctaggtgg

SEQ ID NO: 206129 - DNA, 25 bp, probe
gcttctcttattcgtgttaggtgcc

SEQ ID NO: 206130 - DNA, 25 bp, probe
gcttcattggaccgtttagaatgct

SEQ ID NO: 206131 - DNA, 25 bp, probe
gcttcatcgtaactgcttctagaga

SEQ ID NO: 206132 - DNA, 25 bp, probe
gcttcatcgtaactgcttctagaga

SEQ ID NO: 206133 - DNA, 25 bp, probe
gcttccgtaagcatgtgtgggcaaa

SEQ ID NO: 206134 - DNA, 25 bp, probe
gcttccgtaagcatgtgtgggcaaa

SEQ ID NO: 206135 - DNA, 25 bp, probe
gcttctggtgatactttgggtgcat

SEQ ID NO: 206136 - DNA, 25 bp, probe
gcttcgggatcctaatgtgggcagt

SEQ ID NO: 206137 - DNA, 25 bp, probe
gcttggctgagtcacaaggggcagt

SEQ ID NO: 206138 - DNA, 25 bp, probe
gcttggtcaaggtgagcggcacaga

SEQ ID NO: 206139 - DNA, 25 bp, probe
gcattggtcaggatagaggcaaaat

SEQ ID NO: 206140 - DNA, 25 bp, probe
gcattctgtcaggtgtcgggacacc

SEQ ID NO: 206141 - DNA, 25 bp, probe
gcttcattgaggctgcaagagcaca

SEQ ID NO: 206142 - DNA, 25 bp, probe
gcttgttgagagctgagccatgcac

SEQ ID NO: 206143 - DNA, 25 bp, probe
gcttctgctgctccaggagcatcca

SEQ ID NO: 206144 - DNA, 25 bp, probe
gcttcaatgcgaaggacgcgcaaat

SEQ ID NO: 206145 - DNA, 25 bp, probe
gcttgaggctgcaggacccagaatc

SEQ ID NO: 206146 - DNA, 25 bp, probe
gcttctggccagggatcctgggtct

SEQ ID NO: 206147 - DNA, 25 bp, probe
gttttccgggacgagtttgatctgg

SEQ ID NO: 206148 - DNA, 25 bp, probe
gcaaattccgggagcagtttaaggc

SEQ ID NO: 206149 - DNA, 25 bp, probe
gcaaaaccgattatgtttcgagggg

SEQ ID NO: 206150 - DNA, 25 bp, probe
gcaaaaccgattatgtttcgagggg

SEQ ID NO: 206151 - DNA, 25 bp, probe
gcaaacccgcagagtttaggctggt

SEQ ID NO: 206152 - DNA, 25 bp, probe
gcatactccgggaaaaaaagtggtg

SEQ ID NO: 206153 - DNA, 25 bp, probe
gcatcaccatctgtaaaaggaaggg

SEQ ID NO: 206154 - DNA, 25 bp, probe
gcatcaccatctgtaaaaggaaggg

SEQ ID NO: 206155 - DNA, 25 bp, probe
gcatgcccctgagcactacagggtg

SEQ ID NO: 206156 - DNA, 25 bp, probe
gcatctacctgaacatccagaggcg

SEQ ID NO: 206157 - DNA, 25 bp, probe
gcattaccggtcgatgcaacgagtg

SEQ ID NO: 206158 - DNA, 25 bp, probe
gcttccatccaggcactgaaggagg

SEQ ID NO: 206159 - DNA, 25 bp, probe
gcttcacatcctgcctaagaggcac

SEQ ID NO: 206160 - DNA, 25 bp, probe
gcttcccagcttcacaataaacggc

SEQ ID NO: 206161 - DNA, 25 bp, probe
gcattaccagccccaaagtaacgac

SEQ ID NO: 206162 - DNA, 25 bp, probe
gcattaccagccccaaagtaacgac

SEQ ID NO: 206163 - DNA, 25 bp, probe
gcagaccgagtctacacaagtaaaa

SEQ ID NO: 206164 - DNA, 25 bp, probe
gcaacactctgtctcaaaaaaaaaa

SEQ ID NO: 206165 - DNA, 25 bp, probe
gcattttgcattccatatgaaaaaa

SEQ ID NO: 206166 - DNA, 25 bp, probe
gcatcttccttaaagcacaaagaga

SEQ ID NO: 206167 - DNA, 25 bp, probe
gcaccctgctttaagaaaatgaacc

SEQ ID NO: 206168 - DNA, 25 bp, probe
gcatgacctctacattgaaaacaac

SEQ ID NO: 206169 - DNA, 25 bp, probe
gcatatccctgaaactgacacagta

SEQ ID NO: 206170 - DNA, 25 bp, probe
gcatatccctgaaactgacacagta

SEQ ID NO: 206171 - DNA, 25 bp, probe
gcatctaccaagaaacagcactgta

SEQ ID NO: 206172 - DNA, 25 bp, probe
gcttcttcaagcgcagcgtgcggag

SEQ ID NO: 206173 - DNA, 25 bp, probe
gcttcttcaatggagaggtgcgctc

SEQ ID NO: 206174 - DNA, 25 bp, probe
gcttctgtacagtcaggtctgctct

SEQ ID NO: 206175 - DNA, 25 bp, probe
gcttctatgtaattggcttccttct

SEQ ID NO: 206176 - DNA, 25 bp, probe
gcttccagaaaagcgtcccacattt

SEQ ID NO: 206177 - DNA, 25 bp, probe
gttgggaaaatatggctcctcctta

SEQ ID NO: 206178 - DNA, 25 bp, probe
gttgggaaaatatggctcctcctta

SEQ ID NO: 206179 - DNA, 25 bp, probe
gcatcagggaaacttaggctgctag

SEQ ID NO: 206180 - DNA, 25 bp, probe
gcataggagaagggtcgggccagcc

SEQ ID NO: 206181 - DNA, 25 bp, probe
gcataggagaagggtcgggccagcc

SEQ ID NO: 206182 - DNA, 25 bp, probe
gcttgaagagtttggctgggccagt

SEQ ID NO: 206183 - DNA, 25 bp, probe
gcattacgagaagggcagcgtgcca

SEQ ID NO: 206184 - DNA, 25 bp, probe
gcattatccaattatagaggtacaa

SEQ ID NO: 206185 - DNA, 25 bp, probe
gcattgcaggcttagtcgtggctac

SEQ ID NO: 206186 - DNA, 25 bp, probe
gcattatgcacgtgtctgggtatct

SEQ ID NO: 206187 - DNA, 25 bp, probe
gcatttctgcgctttgtggtttatg

SEQ ID NO: 206188 - DNA, 25 bp, probe
gcattttgtctctttgtatcttcag

SEQ ID NO: 206189 - DNA, 25 bp, probe
gcttcatgtcctcttgatgacattc

SEQ ID NO: 206190 - DNA, 25 bp, probe
gcttcatgtcctcttgatgacattc

SEQ ID NO: 206191 - DNA, 25 bp, probe
gcatccatgtccaccatagaatttg

SEQ ID NO: 206192 - DNA, 25 bp, probe
gcatgtacccacccaaaatgattat

SEQ ID NO: 206193 - DNA, 25 bp, probe
gcatgtacccacccaaaatgattat

SEQ ID NO: 206194 - DNA, 25 bp, probe
gcttgattccaaccagacacgaatt

SEQ ID NO: 206195 - DNA, 25 bp, probe
gcttcattgccagaacacattatat

SEQ ID NO: 206196 - DNA, 25 bp, probe
gcttcttctcaggcatgaacatgta

SEQ ID NO: 206197 - DNA, 25 bp, probe
gcttcttctcaggaatacagttttc

SEQ ID NO: 206198 - DNA, 25 bp, probe
gcattgggtctgggatgaagtattt

SEQ ID NO: 206199 - DNA, 25 bp, probe
gcatttggttgagagggttattgga

SEQ ID NO: 206200 - DNA, 25 bp, probe
gcatttggttgagagggttattgga

SEQ ID NO: 206201 - DNA, 25 bp, probe
gcatccggttactgggcaatttcta

SEQ ID NO: 206202 - DNA, 25 bp, probe
gcatcgccgtcaaaagggcttatta

SEQ ID NO: 206203 - DNA, 25 bp, probe
gcattgccctcaacgaccactttgt

SEQ ID NO: 206204 - DNA, 25 bp, probe
gcattacccaaggtcgtgttttgga

SEQ ID NO: 206205 - DNA, 25 bp, probe
gcatcttccctagaaatttttgtga

SEQ ID NO: 206206 - DNA, 25 bp, probe
gcattccacttaaggaagttttgga

SEQ ID NO: 206207 - DNA, 25 bp, probe
gcattccatttctggaagtgacttt

SEQ ID NO: 206208 - DNA, 25 bp, probe
gcattccacacctaagaactagttt

SEQ ID NO: 206209 - DNA, 25 bp, probe
gcttccacagaaactgaatgctagt

SEQ ID NO: 206210 - DNA, 25 bp, probe
gcttcccatgatctctgaagctggg

SEQ ID NO: 206211 - DNA, 25 bp, probe
gcttgtccatctggtctaaggtggc

SEQ ID NO: 206212 - DNA, 25 bp, probe
gcttcccattccaggggatgagcta

SEQ ID NO: 206213 - DNA, 25 bp, probe
gcttcctcttcaacagggagctgag

SEQ ID NO: 206214 - DNA, 25 bp, probe
gcttcctcttcaacagggagctgag

SEQ ID NO: 206215 - DNA, 25 bp, probe
gcttcctcattgttaaggcagcaga

SEQ ID NO: 206216 - DNA, 25 bp, probe
gcttctgccttgctgaagacagctt

SEQ ID NO: 206217 - DNA, 25 bp, probe
gcttctactgtacaggacactggcc

SEQ ID NO: 206218 - DNA, 25 bp, probe
gcttgttctgttgagtggcacttgc

SEQ ID NO: 206219 - DNA, 25 bp, probe
gcttcgacgtgtgtgtcatggctta

SEQ ID NO: 206220 - DNA, 25 bp, probe
gcttcgtcagtgacgtcatcgcgct

SEQ ID NO: 206221 - DNA, 25 bp, probe
gcttcgtggatccagatatcctgca

SEQ ID NO: 206222 - DNA, 25 bp, probe
gcttcgtggatccagatatcctgca

SEQ ID NO: 206223 - DNA, 25 bp, probe
gcttcagtgacaaacatatcctttc

SEQ ID NO: 206224 - DNA, 25 bp, probe
gcttgcaatgaacttttccattgtc

SEQ ID NO: 206225 - DNA, 25 bp, probe
gcttctatgaatatttccatgtatt

SEQ ID NO: 206226 - DNA, 25 bp, probe
gcttctcttactatactcatacatt

SEQ ID NO: 206227 - DNA, 25 bp, probe
gcttctcttggtgtccatacatatg

SEQ ID NO: 206228 - DNA, 25 bp, probe
gcttcattgggagttcctagcaagt

SEQ ID NO: 206229 - DNA, 25 bp, probe
gcttcattgggagttcctagcaagt

SEQ ID NO: 206230 - DNA, 25 bp, probe
gcttcatggagcagcttcgtacata

SEQ ID NO: 206231 - DNA, 25 bp, probe
gcttgctgtagcacttggaatagaa

SEQ ID NO: 206232 - DNA, 25 bp, probe
gcttgctaaggacgcatggggaaaa

SEQ ID NO: 206233 - DNA, 25 bp, probe
gcttgtcaagggccattaccacaca

SEQ ID NO: 206234 - DNA, 25 bp, probe
gcttccacagcgtaaatacacccac

SEQ ID NO: 206235 - DNA, 25 bp, probe
gcattccagggatattgactgtaca

SEQ ID NO: 206236 - DNA, 25 bp, probe
gcttctgcagtgcattgttgatgag

SEQ ID NO: 206237 - DNA, 25 bp, probe
gcttctgcagcaaattctgacaaat

SEQ ID NO: 206238 - DNA, 25 bp, probe
gcattctgcagtatgctctgcctgc

SEQ ID NO: 206239 - DNA, 25 bp, probe
gcatttctgtaaactgcctgtccat

SEQ ID NO: 206240 - DNA, 25 bp, probe
gcattacaacaagcgctcgaccatc

SEQ ID NO: 206241 - DNA, 25 bp, probe
gcatttccaacaggatcacagacct

SEQ ID NO: 206242 - DNA, 25 bp, probe
gcattccaaatagatactacctgca

SEQ ID NO: 206243 - DNA, 25 bp, probe
gcatacgcatgactacattacaacg

SEQ ID NO: 206244 - DNA, 25 bp, probe
gcttccatgatgcacagtatctgct

SEQ ID NO: 206245 - DNA, 25 bp, probe
gcttccaatgatggcagtcatctcc

SEQ ID NO: 206246 - DNA, 25 bp, probe
gcttgatgcacacagactcatccgc

SEQ ID NO: 206247 - DNA, 25 bp, probe
gcttgctgaagttcactgcccagcc

SEQ ID NO: 206248 - DNA, 25 bp, probe
gcttgaccatgttgcactgtttgca

SEQ ID NO: 206249 - DNA, 25 bp, probe
gcattgccctatgcactgttagcat

SEQ ID NO: 206250 - DNA, 25 bp, probe
gcttggcactttgtggcaagatttt

SEQ ID NO: 206251 - DNA, 25 bp, probe
gcttggatttgctctcgaaaatgtt

SEQ ID NO: 206252 - DNA, 25 bp, probe
gcattttcattcttgccgaaatagt

SEQ ID NO: 206253 - DNA, 25 bp, probe
gcatttacatctgccctaatcagag

SEQ ID NO: 206254 - DNA, 25 bp, probe
gcttctacacatgtggtactctgag

SEQ ID NO: 206255 - DNA, 25 bp, probe
gcttgtcaacaagtttactctccgt

SEQ ID NO: 206256 - DNA, 25 bp, probe
gcttgtcaaatactctccattgcat

SEQ ID NO: 206257 - DNA, 25 bp, probe
gcttgtctttacatgcatgcttgca

SEQ ID NO: 206258 - DNA, 25 bp, probe
gcttcttttacgctctgatgcattc

SEQ ID NO: 206259 - DNA, 25 bp, probe
gcttgtgttctcagaatctgatgct

SEQ ID NO: 206260 - DNA, 25 bp, probe
gcttctttgcccaaaatgcagtgcc

SEQ ID NO: 206261 - DNA, 25 bp, probe
gcttctttgcccaaaatgcagtgcc

SEQ ID NO: 206262 - DNA, 25 bp, probe
gcttctttggccaagtagtggcagc

SEQ ID NO: 206263 - DNA, 25 bp, probe
gcttgtttgtgcatgagtagggctt

SEQ ID NO: 206264 - DNA, 25 bp, probe
gcttgtattggccatctggaatatg

SEQ ID NO: 206265 - DNA, 25 bp, probe
gcttgtcttgggctggacatataat

SEQ ID NO: 206266 - DNA, 25 bp, probe
gcttcttgtggtctggactgaactt

SEQ ID NO: 206267 - DNA, 25 bp, probe
gcttcattgtttgtggaccagccag

SEQ ID NO: 206268 - DNA, 25 bp, probe
gcttcattgtttgtggaccagccag

SEQ ID NO: 206269 - DNA, 25 bp, probe
gcttcctgtttcttagtccgaatgt

SEQ ID NO: 206270 - DNA, 25 bp, probe
gcattcacttttgctattccaatct

SEQ ID NO: 206271 - DNA, 25 bp, probe
gcttggcttggtgcttgtacaactg

SEQ ID NO: 206272 - DNA, 25 bp, probe
gcttggctctttgtgtgtaacacct

SEQ ID NO: 206273 - DNA, 25 bp, probe
gcatctgggtttgtttacagcaatt

SEQ ID NO: 206274 - DNA, 25 bp, probe
gcatttggtacacacttgaccttct

SEQ ID NO: 206275 - DNA, 25 bp, probe
gcatttggtacacacttgaccttct

SEQ ID NO: 206276 - DNA, 25 bp, probe
gcatttttacgtacttgagcttttt

SEQ ID NO: 206277 - DNA, 25 bp, probe
gcattgtttgcaggggttaagtttt

SEQ ID NO: 206278 - DNA, 25 bp, probe
gcttggtctgactgagcctaaagtt

SEQ ID NO: 206279 - DNA, 25 bp, probe
gcttgttggcctagactgctcaaag

SEQ ID NO: 206280 - DNA, 25 bp, probe
gcattgtgggtgatgacgtaggaca

SEQ ID NO: 206281 - DNA, 25 bp, probe
gcttctgcggtgaggcaggggagtc

SEQ ID NO: 206282 - DNA, 25 bp, probe
gcttcttgggaggagtggtgggtgc

SEQ ID NO: 206283 - DNA, 25 bp, probe
gcttcttgggaggagtggtgggtgc

SEQ ID NO: 206284 - DNA, 25 bp, probe
gcttctgggggggtgatctcagagc

SEQ ID NO: 206285 - DNA, 25 bp, probe
gcttctgggggggtgatctcagagc

SEQ ID NO: 206286 - DNA, 25 bp, probe
gcattctcccggaataatctcagga

SEQ ID NO: 206287 - DNA, 25 bp, probe
gcatctctgctgtggtagatttcgg

SEQ ID NO: 206288 - DNA, 25 bp, probe
gcttgcatgctctgaaagatttttt

SEQ ID NO: 206289 - DNA, 25 bp, probe
gcttgcaatgctataaatctttttc

SEQ ID NO: 206290 - DNA, 25 bp, probe
gcttgacactgtagaattttgttac

SEQ ID NO: 206291 - DNA, 25 bp, probe
gcatctgccctgtgaagtttgtttt

SEQ ID NO: 206292 - DNA, 25 bp, probe
gcttccctcttaagctaagactgat

SEQ ID NO: 206293 - DNA, 25 bp, probe
gcttggcccattaactcaaatccac

SEQ ID NO: 206294 - DNA, 25 bp, probe
gcttggcccattaactcaaatccac

SEQ ID NO: 206295 - DNA, 25 bp, probe
gcttgatcaactgaaccagtatgcc

SEQ ID NO: 206296 - DNA, 25 bp, probe
gcttgaaacaggtacacgggccagg

SEQ ID NO: 206297 - DNA, 25 bp, probe
gcttggcagagagatagccgggctc

SEQ ID NO: 206298 - DNA, 25 bp, probe
gcttggcagaagatgagtttgtgta

SEQ ID NO: 206299 - DNA, 25 bp, probe
gcttgagcagcagcttggtgaagcg

SEQ ID NO: 206300 - DNA, 25 bp, probe
gcttgcagatgctttcggtagagaa

SEQ ID NO: 206301 - DNA, 25 bp, probe
gcttccatctgcctctcagaaaaac

SEQ ID NO: 206302 - DNA, 25 bp, probe
gcttccaactgaatatgagaggaac

SEQ ID NO: 206303 - DNA, 25 bp, probe
gcattacaaccaaacagtggatatc

SEQ ID NO: 206304 - DNA, 25 bp, probe
gcttgcagaaccagacagagaaccc

SEQ ID NO: 206305 - DNA, 25 bp, probe
gcttctagcccaggactcagaacac

SEQ ID NO: 206306 - DNA, 25 bp, probe
gcttctctgacaggtagtcatgaaa

SEQ ID NO: 206307 - DNA, 25 bp, probe
gcttgctcaacaggtgaccttacag

SEQ ID NO: 206308 - DNA, 25 bp, probe
gcatagtccaccgtgacattaaagg

SEQ ID NO: 206309 - DNA, 25 bp, probe
gcattgccccttgggatatatttgg

SEQ ID NO: 206310 - DNA, 25 bp, probe
gcttgtccctgtggaagtatcttgg

SEQ ID NO: 206311 - DNA, 25 bp, probe
gcatataaccatgggaagtttgcgg

SEQ ID NO: 206312 - DNA, 25 bp, probe
gcattaaggcaaagtagttccagtg

SEQ ID NO: 206313 - DNA, 25 bp, probe
gcattaagtaaagtgaagtccagct

SEQ ID NO: 206314 - DNA, 25 bp, probe
gcttgagagaagtgtcactcccagc

SEQ ID NO: 206315 - DNA, 25 bp, probe
gcttgatgtaactaggactcctcct

SEQ ID NO: 206316 - DNA, 25 bp, probe
gcttgatgtaactaggactcctcct

SEQ ID NO: 206317 - DNA, 25 bp, probe
gcattttaactacactgcatggcct

SEQ ID NO: 206318 - DNA, 25 bp, probe
gcatttataatttgctggttgccct

SEQ ID NO: 206319 - DNA, 25 bp, probe
gcatttacgtttctctgatgctccc

SEQ ID NO: 206320 - DNA, 25 bp, probe
gcttgtactgttttgctggatgccg

SEQ ID NO: 206321 - DNA, 25 bp, probe
gcttgaaatggacatctgtgatggg

SEQ ID NO: 206322 - DNA, 25 bp, probe
gcttgcaggatgggtcactggacta

SEQ ID NO: 206323 - DNA, 25 bp, probe
gcttgcaggatgggtcactggacta

SEQ ID NO: 206324 - DNA, 25 bp, probe
gcttgcgtgctgggacagctaggct

SEQ ID NO: 206325 - DNA, 25 bp, probe
gcttctccatcactgaactgcagag

SEQ ID NO: 206326 - DNA, 25 bp, probe
gcttgcctcatgtcaaactgaaata

SEQ ID NO: 206327 - DNA, 25 bp, probe
gcatcagccttagaacaagaacctt

SEQ ID NO: 206328 - DNA, 25 bp, probe
gcaggcctgcaagaaaagtgccgat

SEQ ID NO: 206329 - DNA, 25 bp, probe
gcatctccgccaggctaaaagcctt

SEQ ID NO: 206330 - DNA, 25 bp, probe
gcatcctctgtcattttaacctcag

SEQ ID NO: 206331 - DNA, 25 bp, probe
gcatcccctgaggaattcaaccaca

SEQ ID NO: 206332 - DNA, 25 bp, probe
gcatcctgcaaggtgaaacgactca

SEQ ID NO: 206333 - DNA, 25 bp, probe
gcatacatcgagcggaagaactaca

SEQ ID NO: 206334 - DNA, 25 bp, probe
gcataagaaggaggcggaactgacg

SEQ ID NO: 206335 - DNA, 25 bp, probe
gcattaacggatggggcacgtgccc

SEQ ID NO: 206336 - DNA, 25 bp, probe
gcttggaaggctggagcttcggacc

SEQ ID NO: 206337 - DNA, 25 bp, probe
gcattgatacagaaaaggtcctctc

SEQ ID NO: 206338 - DNA, 25 bp, probe
gcttgttaagaaagagtttccctat

SEQ ID NO: 206339 - DNA, 25 bp, probe
gcttgctattagtaacagtttctgc

SEQ ID NO: 206340 - DNA, 25 bp, probe
gcttggattattctgcaggttcatc

SEQ ID NO: 206341 - DNA, 25 bp, probe
gcttgggagattcatgcgatgtgtc

SEQ ID NO: 206342 - DNA, 25 bp, probe
gcttgtcggtatcatggtggtgtcg

SEQ ID NO: 206343 - DNA, 25 bp, probe
gcttctgagggatgcaggtggctgt

SEQ ID NO: 206344 - DNA, 25 bp, probe
gcttcgggagagcagagggtgctca

SEQ ID NO: 206345 - DNA, 25 bp, probe
gcttcgggagagcagagggtgctca

SEQ ID NO: 206346 - DNA, 25 bp, probe
gcatcatggaggtacgcggagggct

SEQ ID NO: 206347 - DNA, 25 bp, probe
gcttgaggatgatccggaagcagct

SEQ ID NO: 206348 - DNA, 25 bp, probe
gcttcggcatcatcatgtgggaggt

SEQ ID NO: 206349 - DNA, 25 bp, probe
gcttggtgcacagattgctgaaact

SEQ ID NO: 206350 - DNA, 25 bp, probe
gcttggtgccagccatggtggagac

SEQ ID NO: 206351 - DNA, 25 bp, probe
gcactggaccccatgatggaacggg

SEQ ID NO: 206352 - DNA, 25 bp, probe
gcagtggaccccattaataatcctg

SEQ ID NO: 206353 - DNA, 25 bp, probe
gcagtggaccccattaataatcctg

SEQ ID NO: 206354 - DNA, 25 bp, probe
gcaggactaacctttgagaaatcct

SEQ ID NO: 206355 - DNA, 25 bp, probe
gcagtaaaaactatccagcaacatt

SEQ ID NO: 206356 - DNA, 25 bp, probe
gcagctagaaaaactcttagaaagt

SEQ ID NO: 206357 - DNA, 25 bp, probe
gcattaggaaatgctgttaacctgg

SEQ ID NO: 206358 - DNA, 25 bp, probe
gcttggctgaattactgttaccctc

SEQ ID NO: 206359 - DNA, 25 bp, probe
gcttggaggacttgtttgacctctg

SEQ ID NO: 206360 - DNA, 25 bp, probe
gcttgaggccaggagtttgagacta

SEQ ID NO: 206361 - DNA, 25 bp, probe
gcttgctggacgtgctcttgaagcc

SEQ ID NO: 206362 - DNA, 25 bp, probe
gcttgctggacgtgctcttgaagcc

SEQ ID NO: 206363 - DNA, 25 bp, probe
gcttgatggatgttctgctcaatga

SEQ ID NO: 206364 - DNA, 25 bp, probe
gcttctgagcagtcttgtaatattg

SEQ ID NO: 206365 - DNA, 25 bp, probe
gcttctgagcagtcttgtaatattg

SEQ ID NO: 206366 - DNA, 25 bp, probe
gcatttacgtgctttatatgatttt

SEQ ID NO: 206367 - DNA, 25 bp, probe
gcttgatcacgttatttcttccttt

SEQ ID NO: 206368 - DNA, 25 bp, probe
gcatttgcccaatattttacattgt

SEQ ID NO: 206369 - DNA, 25 bp, probe
gcatcccccaaattattctgaaggt

SEQ ID NO: 206370 - DNA, 25 bp, probe
gcatcctgtccttgatatttttagc

SEQ ID NO: 206371 - DNA, 25 bp, probe
gcttgcttatcttaatttgatcttg

SEQ ID NO: 206372 - DNA, 25 bp, probe
gcatctttattttattttattttga

SEQ ID NO: 206373 - DNA, 25 bp, probe
gcatcttgaacatactttttttcca

SEQ ID NO: 206374 - DNA, 25 bp, probe
gcatcttgaacatactttttttcca

SEQ ID NO: 206375 - DNA, 25 bp, probe
gcattgtaaatagtctttgttgtac

SEQ ID NO: 206376 - DNA, 25 bp, probe
gcatggcatgaacagtttagcttaa

SEQ ID NO: 206377 - DNA, 25 bp, probe
gcatggcacagaaggtttccaaaac

SEQ ID NO: 206378 - DNA, 25 bp, probe
gcatggcacagaaggtttccaaaac

SEQ ID NO: 206379 - DNA, 25 bp, probe
gcatgagctcaaagggggaacaaaa

SEQ ID NO: 206380 - DNA, 25 bp, probe
gcatgagctcaaagggggaacaaaa

SEQ ID NO: 206381 - DNA, 25 bp, probe
gcaggccgatttgggaaccaagcta

SEQ ID NO: 206382 - DNA, 25 bp, probe
gcattcctgatctgggtaccaatat

SEQ ID NO: 206383 - DNA, 25 bp, probe
gcatcacagttctggaaaccaagat

SEQ ID NO: 206384 - DNA, 25 bp, probe
gcatcacagttctggaaaccaagat

SEQ ID NO: 206385 - DNA, 25 bp, probe
gcatgcacaaccttgatgataacca

SEQ ID NO: 206386 - DNA, 25 bp, probe
gcatgcacaaccttgatgataacca

SEQ ID NO: 206387 - DNA, 25 bp, probe
gcatcacaaactcgaaccaaagtcg

SEQ ID NO: 206388 - DNA, 25 bp, probe
gcatcacaaaccaagacctcaagcc

SEQ ID NO: 206389 - DNA, 25 bp, probe
gcatgccaacccggagactgaagtg

SEQ ID NO: 206390 - DNA, 25 bp, probe
gcatctaagcccaggacatgagtgt

SEQ ID NO: 206391 - DNA, 25 bp, probe
gcattcaaacgcactgctctgagag

SEQ ID NO: 206392 - DNA, 25 bp, probe
gcttccagactcagcagctgctaga

SEQ ID NO: 206393 - DNA, 25 bp, probe
gcttccagcttcaagaggcgtaggt

SEQ ID NO: 206394 - DNA, 25 bp, probe
gcttccagcttcaagaggcgtaggt

SEQ ID NO: 206395 - DNA, 25 bp, probe
gcatatcaacttgaggccaggagtt

SEQ ID NO: 206396 - DNA, 25 bp, probe
gcatacacacgggctgtggactggt

SEQ ID NO: 206397 - DNA, 25 bp, probe
gcatagcactcatcgcatgaggaca

SEQ ID NO: 206398 - DNA, 25 bp, probe
gcatagagacagacagcgaagagat

SEQ ID NO: 206399 - DNA, 25 bp, probe
gcattctacagcgagaggcgagatc

SEQ ID NO: 206400 - DNA, 25 bp, probe
gcattctagcacaacaagatgaaat

SEQ ID NO: 206401 - DNA, 25 bp, probe
gcattttcactccagagacaaatcc

SEQ ID NO: 206402 - DNA, 25 bp, probe
gcatttaattggcagcacaagatcc

SEQ ID NO: 206403 - DNA, 25 bp, probe
gcatttttctggggggatgtccatt

SEQ ID NO: 206404 - DNA, 25 bp, probe
gcattcaattcacgggaggaggtca

SEQ ID NO: 206405 - DNA, 25 bp, probe
gcattcagttatttgcagaagggaa

SEQ ID NO: 206406 - DNA, 25 bp, probe
gcattcgttatacggaagatgatga

SEQ ID NO: 206407 - DNA, 25 bp, probe
gcattccgctcaaaggtcactgaga

SEQ ID NO: 206408 - DNA, 25 bp, probe
gcattccgctcaaaggtcactgaga

SEQ ID NO: 206409 - DNA, 25 bp, probe
gcattccagccaaaatgacggacag

SEQ ID NO: 206410 - DNA, 25 bp, probe
gcatagcccattatagacaggtcaa

SEQ ID NO: 206411 - DNA, 25 bp, probe
gcataggcctgtaatcgtagcgctt

SEQ ID NO: 206412 - DNA, 25 bp, probe
gcttggccttatggaggagctgctc

SEQ ID NO: 206413 - DNA, 25 bp, probe
gcttgaccgcattggcaaaggctca

SEQ ID NO: 206414 - DNA, 25 bp, probe
gcttgagccaaactgcaaaggctgt

SEQ ID NO: 206415 - DNA, 25 bp, probe
gcttgagcagtaaagaaggcactat

SEQ ID NO: 206416 - DNA, 25 bp, probe
gcttgactggatggagacaggacca

SEQ ID NO: 206417 - DNA, 25 bp, probe
gcttcctggtcttatcatggacaat

SEQ ID NO: 206418 - DNA, 25 bp, probe
gcttcctgggctctgcagagcaaac

SEQ ID NO: 206419 - DNA, 25 bp, probe
gcatctcgttggtggagctggcaac

SEQ ID NO: 206420 - DNA, 25 bp, probe
gcatctcgttggtggagctggcaac

SEQ ID NO: 206421 - DNA, 25 bp, probe
gcatcatccttgcaggtgggggttg

SEQ ID NO: 206422 - DNA, 25 bp, probe
gcattctctggttggaggacagagt

SEQ ID NO: 206423 - DNA, 25 bp, probe
gcttgcctgtgttgagagaatagaa

SEQ ID NO: 206424 - DNA, 25 bp, probe
gcttgccttgtaatcaacagagaga

SEQ ID NO: 206425 - DNA, 25 bp, probe
gcttgccttgtaatcaacagagaga

SEQ ID NO: 206426 - DNA, 25 bp, probe
gcattggtcgaaacaaagatcaagc

SEQ ID NO: 206427 - DNA, 25 bp, probe
gcatcttgtctgcagaaaatatccc

SEQ ID NO: 206428 - DNA, 25 bp, probe
gcatcagtgtggcaaatagtttcca

SEQ ID NO: 206429 - DNA, 25 bp, probe
gcatcagggggaaatggaatgcccc

SEQ ID NO: 206430 - DNA, 25 bp, probe
gcatcatgaactggtgacggggccc

SEQ ID NO: 206431 - DNA, 25 bp, probe
gcatcatgaccgtgaggaaggccct

SEQ ID NO: 206432 - DNA, 25 bp, probe
gcatcatgaccgtgaggaaggccct

SEQ ID NO: 206433 - DNA, 25 bp, probe
gcattacgggtgttgaaggtgtctt

SEQ ID NO: 206434 - DNA, 25 bp, probe
gcttgacaggggctatgggtttgct

SEQ ID NO: 206435 - DNA, 25 bp, probe
gcattacgtgggcattgtcttttta

SEQ ID NO: 206436 - DNA, 25 bp, probe
gcattacgtgggcattgtcttttta

SEQ ID NO: 206437 - DNA, 25 bp, probe
gcattacagaaccttggttattgtt

SEQ ID NO: 206438 - DNA, 25 bp, probe
gcatgctaagggcaaggcttacttg

SEQ ID NO: 206439 - DNA, 25 bp, probe
gcatccacagtacaagccttgaaca

SEQ ID NO: 206440 - DNA, 25 bp, probe
gcattcgagacagaaccttgttatt

SEQ ID NO: 206441 - DNA, 25 bp, probe
gcttgcggccaggacaacctgaatt

SEQ ID NO: 206442 - DNA, 25 bp, probe
gcttgggcctgagtagggcagagag

SEQ ID NO: 206443 - DNA, 25 bp, probe
gcttggagtctagtgcagggaccgt

SEQ ID NO: 206444 - DNA, 25 bp, probe
gcattggacgttcagggaccctgat

SEQ ID NO: 206445 - DNA, 25 bp, probe
gcattgagatccatggggtgcccgc

SEQ ID NO: 206446 - DNA, 25 bp, probe
gcattatcatctccttggtgtgcct

SEQ ID NO: 206447 - DNA, 25 bp, probe
gcatttacttcttgcagctggcttc

SEQ ID NO: 206448 - DNA, 25 bp, probe
gcatttacttcttgcagctggcttc

SEQ ID NO: 206449 - DNA, 25 bp, probe
gcatctatacttacctgagacctag

SEQ ID NO: 206450 - DNA, 25 bp, probe
gcatttacaagtgctgcaagttagt

SEQ ID NO: 206451 - DNA, 25 bp, probe
gcttgtacaactgtgcggccaagat

SEQ ID NO: 206452 - DNA, 25 bp, probe
gcaggtatcaacattggggaagaga

SEQ ID NO: 206453 - DNA, 25 bp, probe
gcaagttagtagttgagcctgacca

SEQ ID NO: 206454 - DNA, 25 bp, probe
gcaagaaatccgagacctgcacctc

SEQ ID NO: 206455 - DNA, 25 bp, probe
gcaagaagcccgggatctacacccg

SEQ ID NO: 206456 - DNA, 25 bp, probe
gcaagaagcccgggatctacacccg

SEQ ID NO: 206457 - DNA, 25 bp, probe
gcattatttgaccggatctacaccc

SEQ ID NO: 206458 - DNA, 25 bp, probe
gcatgtattttccttgtaaacacca

SEQ ID NO: 206459 - DNA, 25 bp, probe
gcatgtattttccttgtaaacacca

SEQ ID NO: 206460 - DNA, 25 bp, probe
gcatgtttccctcttgtgaaggcac

SEQ ID NO: 206461 - DNA, 25 bp, probe
gcattttacacacattggaggagtc

SEQ ID NO: 206462 - DNA, 25 bp, probe
gcttcctaacatccttggactgaga

SEQ ID NO: 206463 - DNA, 25 bp, probe
gcatttgctaactcatggaactgca

SEQ ID NO: 206464 - DNA, 25 bp, probe
gcatttgctaactcatggaactgca

SEQ ID NO: 206465 - DNA, 25 bp, probe
gcatttccacactctgagaatgacc

SEQ ID NO: 206466 - DNA, 25 bp, probe
gcatttagcacatactacacattca

SEQ ID NO: 206467 - DNA, 25 bp, probe
gcatagtaacgagcagaccttgcag

SEQ ID NO: 206468 - DNA, 25 bp, probe
gcatagtaacgagcagaccttgcag

SEQ ID NO: 206469 - DNA, 25 bp, probe
gcatagtaacgagcagaccttgcag

SEQ ID NO: 206470 - DNA, 25 bp, probe
gcattgagtagggccggccagtgca

SEQ ID NO: 206471 - DNA, 25 bp, probe
gcattggaggttgctgacctgtgcg

SEQ ID NO: 206472 - DNA, 25 bp, probe
gcttgatgatgtcacctaccatggc

SEQ ID NO: 206473 - DNA, 25 bp, probe
gcttgatgatgtcacctaccatggc

SEQ ID NO: 206474 - DNA, 25 bp, probe
gcttgagatatttcctcagcctgaa

SEQ ID NO: 206475 - DNA, 25 bp, probe
gcttgagaattgccctcagtgaaca

SEQ ID NO: 206476 - DNA, 25 bp, probe
gtcgaagattcgtagaggaacaatt

SEQ ID NO: 206477 - DNA, 25 bp, probe
gcttggagaccgtcatggtgaaaat

SEQ ID NO: 206478 - DNA, 25 bp, probe
gcttggcaacacgacttgaaataaa

SEQ ID NO: 206479 - DNA, 25 bp, probe
gcttggcaacacgacttgaaataaa

SEQ ID NO: 206480 - DNA, 25 bp, probe
gcttggcattcaattcctgcagaaa

SEQ ID NO: 206481 - DNA, 25 bp, probe
gcttggcttgaaggcaatcatggag

SEQ ID NO: 206482 - DNA, 25 bp, probe
gcttggtgcttgtacaactgtgcgg

SEQ ID NO: 206483 - DNA, 25 bp, probe
gcttgacagctttgaaactgataaa

SEQ ID NO: 206484 - DNA, 25 bp, probe
gcattcggctgcaaataacagaaaa

SEQ ID NO: 206485 - DNA, 25 bp, probe
gcattcggcgtatacctaaggagag

SEQ ID NO: 206486 - DNA, 25 bp, probe
gcattcggcgttatctggaaagtgg

SEQ ID NO: 206487 - DNA, 25 bp, probe
gcatagctaggtcatttggaaactg

SEQ ID NO: 206488 - DNA, 25 bp, probe
gcatcactggagacctactgcaaac

SEQ ID NO: 206489 - DNA, 25 bp, probe
gcattctggccaccatattatgcat

SEQ ID NO: 206490 - DNA, 25 bp, probe
gcatttgccacttcatttactgtct

SEQ ID NO: 206491 - DNA, 25 bp, probe
gcttgtgcacattcattttttgatg

SEQ ID NO: 206492 - DNA, 25 bp, probe
gcttgtgcacattcattttttgatg

SEQ ID NO: 206493 - DNA, 25 bp, probe
gcttgtcatttaattttggccactt

SEQ ID NO: 206494 - DNA, 25 bp, probe
gcatttgatctcttcattttggcca

SEQ ID NO: 206495 - DNA, 25 bp, probe
gcatatcagttttattactgcacca

SEQ ID NO: 206496 - DNA, 25 bp, probe
gcaaaggttcaacagctgctacaag

SEQ ID NO: 206497 - DNA, 25 bp, probe
gcaaatagtgtcaaaagtaaattaa

SEQ ID NO: 206498 - DNA, 25 bp, probe
gcaccagggacaataaggattttta

SEQ ID NO: 206499 - DNA, 25 bp, probe
gcaccaaagcccacagaggagttaa

SEQ ID NO: 206500 - DNA, 25 bp, probe
gcacgagaacccaaagggaatagag

SEQ ID NO: 206501 - DNA, 25 bp, probe
gcacggcttcccaggggaacgagga

SEQ ID NO: 206502 - DNA, 25 bp, probe
gaaggtctccgtgtgggaaagccct

SEQ ID NO: 206503 - DNA, 25 bp, probe
gaagggccggataaggaagaactat

SEQ ID NO: 206504 - DNA, 25 bp, probe
gaaggtccgtggaaccagaacattt

SEQ ID NO: 206505 - DNA, 25 bp, probe
gcataagggaatatcaccagaagca

SEQ ID NO: 206506 - DNA, 25 bp, probe
gcataagtttacagcctacaggacg

SEQ ID NO: 206507 - DNA, 25 bp, probe
gcataagctgatcaccgtctagttg

SEQ ID NO: 206508 - DNA, 25 bp, probe
gcatagaatgtccacctactttcag

SEQ ID NO: 206509 - DNA, 25 bp, probe
gcagaaggaagcactacagttcgta

SEQ ID NO: 206510 - DNA, 25 bp, probe
gcaagaggtacttttacctggctcc

SEQ ID NO: 206511 - DNA, 25 bp, probe
gaagagtttggctgggccagttccc

SEQ ID NO: 206512 - DNA, 25 bp, probe
gaagagtttggctgggccagttccc

SEQ ID NO: 206513 - DNA, 25 bp, probe
gaaggagttggctggactggttgtt

SEQ ID NO: 206514 - DNA, 25 bp, probe
gaaggagttggctggactggttgtt

SEQ ID NO: 206515 - DNA, 25 bp, probe
gcagaaactttcgctggatggtttt

SEQ ID NO: 206516 - DNA, 25 bp, probe
gcataaaccttgcttgtgatgttaa

SEQ ID NO: 206517 - DNA, 25 bp, probe
gcatacccctggtttgcaggtaaca

SEQ ID NO: 206518 - DNA, 25 bp, probe
gcaggctaccggacggcaggttata

SEQ ID NO: 206519 - DNA, 25 bp, probe
gcatactcccagtcgggagtgtggt

SEQ ID NO: 206520 - DNA, 25 bp, probe
gcatgactcctcttatgagggatgg

SEQ ID NO: 206521 - DNA, 25 bp, probe
gcatagcacaccttagatgtggtat

SEQ ID NO: 206522 - DNA, 25 bp, probe
gcatagcacaccttagatgtggtat

SEQ ID NO: 206523 - DNA, 25 bp, probe
gcattgacatccttccatgatgttt

SEQ ID NO: 206524 - DNA, 25 bp, probe
gcttggatctagacagcatctgttc

SEQ ID NO: 206525 - DNA, 25 bp, probe
gcttgacctgagagctctgtctgat

SEQ ID NO: 206526 - DNA, 25 bp, probe
gcttgactgtggagttttggcttca

SEQ ID NO: 206527 - DNA, 25 bp, probe
gcattgaagtggaatttttggtata

SEQ ID NO: 206528 - DNA, 25 bp, probe
gcttgtcctggttattgtcggtatc

SEQ ID NO: 206529 - DNA, 25 bp, probe
gcataggttggttcactgccgagtg

SEQ ID NO: 206530 - DNA, 25 bp, probe
gcataggttggttcactgccgagtg

SEQ ID NO: 206531 - DNA, 25 bp, probe
gcattgtgtatggtgccacctagag

SEQ ID NO: 206532 - DNA, 25 bp, probe
gcatcgagtatatccactccaagaa

SEQ ID NO: 206533 - DNA, 25 bp, probe
gcatggagttaagatccctcacagg

SEQ ID NO: 206534 - DNA, 25 bp, probe
gaatagttactttacaacacggtct

SEQ ID NO: 206535 - DNA, 25 bp, probe
gaatagttactttacaacacggtct

SEQ ID NO: 206536 - DNA, 25 bp, probe
gcataatttacttggacaacttcgt

SEQ ID NO: 206537 - DNA, 25 bp, probe
gcaagcgttagttccaaagttcagt

SEQ ID NO: 206538 - DNA, 25 bp, probe
gcttggttctgtgaacaagcttcag

SEQ ID NO: 206539 - DNA, 25 bp, probe
gcttggtgtcctgggaagacatcca

SEQ ID NO: 206540 - DNA, 25 bp, probe
gcataggtgaccgctgtgagaacaa

SEQ ID NO: 206541 - DNA, 25 bp, probe
gcattgtctgagctgagggaaaatt

SEQ ID NO: 206542 - DNA, 25 bp, probe
gcttgcacgggttgtaggaaatgtc

SEQ ID NO: 206543 - DNA, 25 bp, probe
gcaggccgcggttgtagaaaggtca

SEQ ID NO: 206544 - DNA, 25 bp, probe
gcagacccgggtaagtaaaggcaga

SEQ ID NO: 206545 - DNA, 25 bp, probe
gcatgccaaggggttaatgaaacaa

SEQ ID NO: 206546 - DNA, 25 bp, probe
gcatgccaaggggaagagcgacacc

SEQ ID NO: 206547 - DNA, 25 bp, probe
gcatcccagaggcaaggggacctgc

SEQ ID NO: 206548 - DNA, 25 bp, probe
gcatcccggggacggggaggcaacg

SEQ ID NO: 206549 - DNA, 25 bp, probe
gcatcccggggacggggaggcaacg

SEQ ID NO: 206550 - DNA, 25 bp, probe
gcattccgcggactgaagggcagga

SEQ ID NO: 206551 - DNA, 25 bp, probe
gcattcttaggcatacaggggaaat

SEQ ID NO: 206552 - DNA, 25 bp, probe
gcattcttaggcatacaggggaaat

SEQ ID NO: 206553 - DNA, 25 bp, probe
gcattaatgaggcctacgggtacca

SEQ ID NO: 206554 - DNA, 25 bp, probe
gcattgaggatgggtaccggttgcc

SEQ ID NO: 206555 - DNA, 25 bp, probe
gcattatgtggactgaaccgacttt

SEQ ID NO: 206556 - DNA, 25 bp, probe
gcattagtctgacagtacaatgttt

SEQ ID NO: 206557 - DNA, 25 bp, probe
gcattctgcttacagctacagtcac

SEQ ID NO: 206558 - DNA, 25 bp, probe
gcatctccctgatagaccaatcagc

SEQ ID NO: 206559 - DNA, 25 bp, probe
gcattcctcacagatcaccataagg

SEQ ID NO: 206560 - DNA, 25 bp, probe
gcatctcctccaaataccagatact

SEQ ID NO: 206561 - DNA, 25 bp, probe
gcatccatatttgtacacataacca

SEQ ID NO: 206562 - DNA, 25 bp, probe
gcacctctggctgttacattaccat

SEQ ID NO: 206563 - DNA, 25 bp, probe
gcacctctggctgttacattaccat

SEQ ID NO: 206564 - DNA, 25 bp, probe
gcacctctggctgttacattaccat

SEQ ID NO: 206565 - DNA, 25 bp, probe
gcatctcatcattgcatgttttatg

SEQ ID NO: 206566 - DNA, 25 bp, probe
gcatctgatgccttcatctgttcag

SEQ ID NO: 206567 - DNA, 25 bp, probe
gcattgcacaatatagatctcagtc

SEQ ID NO: 206568 - DNA, 25 bp, probe
gcattcctcgagagatctcgtggga

SEQ ID NO: 206569 - DNA, 25 bp, probe
gcattatctcggacacatcttgtga

SEQ ID NO: 206570 - DNA, 25 bp, probe
gcattgatcattgaactgctgggga

SEQ ID NO: 206571 - DNA, 25 bp, probe
gcttgtattccatctgctgtagcaa

SEQ ID NO: 206572 - DNA, 25 bp, probe
gcaggatattccgcatttacaatgc

SEQ ID NO: 206573 - DNA, 25 bp, probe
gcttgtaatccagcatgtttcacag

SEQ ID NO: 206574 - DNA, 25 bp, probe
gcttgtaatccagcatgtttcacag

SEQ ID NO: 206575 - DNA, 25 bp, probe
gcttgtaatccagcatgtttcacag

SEQ ID NO: 206576 - DNA, 25 bp, probe
gcattgggaccagtcatttcctaag

SEQ ID NO: 206577 - DNA, 25 bp, probe
gcattagatttctcatttgccaata

SEQ ID NO: 206578 - DNA, 25 bp, probe
gcatttgactgaggccagtttctat

SEQ ID NO: 206579 - DNA, 25 bp, probe
gcatttgtcaatgacagtttctttt

SEQ ID NO: 206580 - DNA, 25 bp, probe
gcattgtgccaacatcagcattatc

SEQ ID NO: 206581 - DNA, 25 bp, probe
gcatttcgcgatggacagactcaca

SEQ ID NO: 206582 - DNA, 25 bp, probe
gcattacaggatgacagcagccgag

SEQ ID NO: 206583 - DNA, 25 bp, probe
gcattcaagtacatagtgtcaggaa

SEQ ID NO: 206584 - DNA, 25 bp, probe
gcatatcaaagatcttgttactgaa

SEQ ID NO: 206585 - DNA, 25 bp, probe
gcattgcacatatagtctgctttct

SEQ ID NO: 206586 - DNA, 25 bp, probe
gcattgcagtatggtgtggtgtttg

SEQ ID NO: 206587 - DNA, 25 bp, probe
gcttggcaatgctggtggctttgat

SEQ ID NO: 206588 - DNA, 25 bp, probe
gcttggactcatgaaggattaaaaa

SEQ ID NO: 206589 - DNA, 25 bp, probe
gcatagagtttgcaaagattataaa

SEQ ID NO: 206590 - DNA, 25 bp, probe
gcatagcgtttaattaaatctctaa

SEQ ID NO: 206591 - DNA, 25 bp, probe
gcatagcagttctttagccatacat

SEQ ID NO: 206592 - DNA, 25 bp, probe
gcatagcttgtctttacatgcatgc

SEQ ID NO: 206593 - DNA, 25 bp, probe
gcatcatgcaattcttctttgcctg

SEQ ID NO: 206594 - DNA, 25 bp, probe
gcatcatgcaattcttctttgcctg

SEQ ID NO: 206595 - DNA, 25 bp, probe
gcatcatcttatcatatattccttc

SEQ ID NO: 206596 - DNA, 25 bp, probe
gcatatctcattcattacgatttat

SEQ ID NO: 206597 - DNA, 25 bp, probe
gcatcattcatctccatttatttct

SEQ ID NO: 206598 - DNA, 25 bp, probe
gcatctcctttcttattataagctg

SEQ ID NO: 206599 - DNA, 25 bp, probe
gcatctcctttcttattataagctg

SEQ ID NO: 206600 - DNA, 25 bp, probe
gcacatccgtagttatgctaaatga

SEQ ID NO: 206601 - DNA, 25 bp, probe
gcatcctcgggcttgggagaatgac

SEQ ID NO: 206602 - DNA, 25 bp, probe
gcatgccttacctggacatgtatca

SEQ ID NO: 206603 - DNA, 25 bp, probe
gcatcctttatctgtgacttcatgc

SEQ ID NO: 206604 - DNA, 25 bp, probe
gcatccatacttctgtttttgcttc

SEQ ID NO: 206605 - DNA, 25 bp, probe
gcatccatacttctgtttttgcttc

SEQ ID NO: 206606 - DNA, 25 bp, probe
gcatccattgttctgttcattcatt

SEQ ID NO: 206607 - DNA, 25 bp, probe
gcatcaatattgtcactgccgattt

SEQ ID NO: 206608 - DNA, 25 bp, probe
gcatcatcgatgagagctacaattt

SEQ ID NO: 206609 - DNA, 25 bp, probe
gcatcacgacaaggatatgatgtcc

SEQ ID NO: 206610 - DNA, 25 bp, probe
gcatcacgatgattgagttggccat

SEQ ID NO: 206611 - DNA, 25 bp, probe
gcatcggctgcattgtggtggataa

SEQ ID NO: 206612 - DNA, 25 bp, probe
gcatcggctgcattgtggtggataa

SEQ ID NO: 206613 - DNA, 25 bp, probe
gcttgtgtgatggtggtgagcttca

SEQ ID NO: 206614 - DNA, 25 bp, probe
gcttgtgtgatggtggtgagcttca

SEQ ID NO: 206615 - DNA, 25 bp, probe
gcttgtgtgtatttgatggctctaa

SEQ ID NO: 206616 - DNA, 25 bp, probe
gcttgtgctgctattggaacagaga

SEQ ID NO: 206617 - DNA, 25 bp, probe
gcatattgtctgattaaacacaaac

SEQ ID NO: 206618 - DNA, 25 bp, probe
gcataatttgtattgaaatgaaacc

SEQ ID NO: 206619 - DNA, 25 bp, probe
gcattgacttgggtgaagatgacat

SEQ ID NO: 206620 - DNA, 25 bp, probe
gcattgctgactgtgtatataggat

SEQ ID NO: 206621 - DNA, 25 bp, probe
gcattgtatggctttataaatgata

SEQ ID NO: 206622 - DNA, 25 bp, probe
gcttgttgagttcttatcatcatct

SEQ ID NO: 206623 - DNA, 25 bp, probe
gcttgtggatgtttcttgatgtgca

SEQ ID NO: 206624 - DNA, 25 bp, probe
gcttggctgttcgatttgagccagg

SEQ ID NO: 206625 - DNA, 25 bp, probe
gcataactgcttctcctagacaggg

SEQ ID NO: 206626 - DNA, 25 bp, probe
gcataactgcttctcctagacaggg

SEQ ID NO: 206627 - DNA, 25 bp, probe
gcatacaagtgggtccatcagccgc

SEQ ID NO: 206628 - DNA, 25 bp, probe
gcattagcggagtgcgcatggcctg

SEQ ID NO: 206629 - DNA, 25 bp, probe
gcatttgttagatcacatcgccgat

SEQ ID NO: 206630 - DNA, 25 bp, probe
gcatttactagattctagcaccgct

SEQ ID NO: 206631 - DNA, 25 bp, probe
gcattttcaaatttatccccgtaat

SEQ ID NO: 206632 - DNA, 25 bp, probe
gcatatctttttttcattttcgtaa

SEQ ID NO: 206633 - DNA, 25 bp, probe
gcatttgttatttctacttatctta

SEQ ID NO: 206634 - DNA, 25 bp, probe
gcatttgaataattgtcttgtactt

SEQ ID NO: 206635 - DNA, 25 bp, probe
gcattgaagatttcgctttgtttct

SEQ ID NO: 206636 - DNA, 25 bp, probe
gcattgaacatttcttatgattttt

SEQ ID NO: 206637 - DNA, 25 bp, probe
gcattgattcattaattgatgcctt

SEQ ID NO: 206638 - DNA, 25 bp, probe
gcatctttgcttacagtgcatcaca

SEQ ID NO: 206639 - DNA, 25 bp, probe
gcatttttttcactgcattctagtt

SEQ ID NO: 206640 - DNA, 25 bp, probe
gcattgtttcccctataattgtgct

SEQ ID NO: 206641 - DNA, 25 bp, probe
gcattgtttcccctataattgtgct

SEQ ID NO: 206642 - DNA, 25 bp, probe
gcatgctttttcattaaatttgtaa

SEQ ID NO: 206643 - DNA, 25 bp, probe
gcatcgtctcctatggaaagtcgtc

SEQ ID NO: 206644 - DNA, 25 bp, probe
gcatcgtatcctatggacggtcgga

SEQ ID NO: 206645 - DNA, 25 bp, probe
gcatcgtatcctatggacggtcgga

SEQ ID NO: 206646 - DNA, 25 bp, probe
gcattgtctcctatggacgaaacaa

SEQ ID NO: 206647 - DNA, 25 bp, probe
gcattgtcattagatgtccagaaaa

SEQ ID NO: 206648 - DNA, 25 bp, probe
gcattggatttgctgttcgacaaga

SEQ ID NO: 206649 - DNA, 25 bp, probe
gcattggatttgctgttcgacaaga

SEQ ID NO: 206650 - DNA, 25 bp, probe
gcatcaagtcttctgatctcagata

SEQ ID NO: 206651 - DNA, 25 bp, probe
gcatctgttcttctattagtgaatg

SEQ ID NO: 206652 - DNA, 25 bp, probe
gcatctactgttgtcacggctatat

SEQ ID NO: 206653 - DNA, 25 bp, probe
gcatgcaacaaggttaccgccacat

SEQ ID NO: 206654 - DNA, 25 bp, probe
gcatatattaggctcacacagtaca

SEQ ID NO: 206655 - DNA, 25 bp, probe
gcttgtccaggaatctacatttcaa

SEQ ID NO: 206656 - DNA, 25 bp, probe
gcattgtccggagatacctactcag

SEQ ID NO: 206657 - DNA, 25 bp, probe
gcattttacgaattcaccttccgaa

SEQ ID NO: 206658 - DNA, 25 bp, probe
gcatttgaaaaacttcactgcccag

SEQ ID NO: 206659 - DNA, 25 bp, probe
gagttaaacacagatgaccccaccg

SEQ ID NO: 206660 - DNA, 25 bp, probe
gaattcaaaattgagctctaggccc

SEQ ID NO: 206661 - DNA, 25 bp, probe
gcatttaaaaatcagcatctgggcc

SEQ ID NO: 206662 - DNA, 25 bp, probe
gcattagacagatgacggctgctcg

SEQ ID NO: 206663 - DNA, 25 bp, probe
gcattagacagatgacggctgctcg

SEQ ID NO: 206664 - DNA, 25 bp, probe
gcattgagaatgttgtccttgtggt

SEQ ID NO: 206665 - DNA, 25 bp, probe
gcattgcagaaggtgttcctttctc

SEQ ID NO: 206666 - DNA, 25 bp, probe
gcattgcagaaggtgttcctttctc

SEQ ID NO: 206667 - DNA, 25 bp, probe
gcatccatgaagatgttccagattc

SEQ ID NO: 206668 - DNA, 25 bp, probe
gcatcaaagcagacatcgtccatgc

SEQ ID NO: 206669 - DNA, 25 bp, probe
gcatcacgcgagacagtgacacacc

SEQ ID NO: 206670 - DNA, 25 bp, probe
gcatcacgcgagacagtgacacacc

SEQ ID NO: 206671 - DNA, 25 bp, probe
gcatccagccggctggcaatacttc

SEQ ID NO: 206672 - DNA, 25 bp, probe
gcatctggaaacctgccaatacttg

SEQ ID NO: 206673 - DNA, 25 bp, probe
gcatcattataaggcttaattgtgg

SEQ ID NO: 206674 - DNA, 25 bp, probe
gcatttgatcactggtcagattgta

SEQ ID NO: 206675 - DNA, 25 bp, probe
gcatttatcagctgtggcatattac

SEQ ID NO: 206676 - DNA, 25 bp, probe
gcattcctcaatagttgcttgaacc

SEQ ID NO: 206677 - DNA, 25 bp, probe
gcatgtcctctatgaaatgttaccg

SEQ ID NO: 206678 - DNA, 25 bp, probe
gcatatggtctttggcaagcttcag

SEQ ID NO: 206679 - DNA, 25 bp, probe
gcatggaaatcgtgcacgcttcatc

SEQ ID NO: 206680 - DNA, 25 bp, probe
gcaggaaataacctcactatcccgg

SEQ ID NO: 206681 - DNA, 25 bp, probe
gcatagttaaactccagaccctgcc

SEQ ID NO: 206682 - DNA, 25 bp, probe
gcatttttatactcagaactgtccc

SEQ ID NO: 206683 - DNA, 25 bp, probe
gcatcttttatagcagtgggtgtcc

SEQ ID NO: 206684 - DNA, 25 bp, probe
gcatcaaaggtcacgtgcggttcat

SEQ ID NO: 206685 - DNA, 25 bp, probe
gcagacaggagtcactgtaggttca

SEQ ID NO: 206686 - DNA, 25 bp, probe
gcagatccaagttttgcggggtcta

SEQ ID NO: 206687 - DNA, 25 bp, probe
gcatgagtaattttatgccgggaaa

SEQ ID NO: 206688 - DNA, 25 bp, probe
gcatgagtaattttatgccgggaaa

SEQ ID NO: 206689 - DNA, 25 bp, probe
gcatagtccaggtggactgtgagaa

SEQ ID NO: 206690 - DNA, 25 bp, probe
gcatagtaggagagacctgtgcaaa

SEQ ID NO: 206691 - DNA, 25 bp, probe
gcatcgtccgtgacgacatgctgtg

SEQ ID NO: 206692 - DNA, 25 bp, probe
gcatccgcctggataatgcttccgc

SEQ ID NO: 206693 - DNA, 25 bp, probe
gcatcacctgcattgttaatgctac

SEQ ID NO: 206694 - DNA, 25 bp, probe
gcatatgcctacttgtaatttctaa

SEQ ID NO: 206695 - DNA, 25 bp, probe
gcatcatccagctttttttgttagc

SEQ ID NO: 206696 - DNA, 25 bp, probe
gcatcatccagctttttttgttagc

SEQ ID NO: 206697 - DNA, 25 bp, probe
gcatctcacacgactttagtttggc

SEQ ID NO: 206698 - DNA, 25 bp, probe
gcatcagatacagttttcctattgg

SEQ ID NO: 206699 - DNA, 25 bp, probe
gcatcagatacagttttcctattgg

SEQ ID NO: 206700 - DNA, 25 bp, probe
gcatagaagatctcctcttggtggg

SEQ ID NO: 206701 - DNA, 25 bp, probe
gcattgcaaggaccctctgatggga

SEQ ID NO: 206702 - DNA, 25 bp, probe
gcattccagagagacagctgatgca

SEQ ID NO: 206703 - DNA, 25 bp, probe
gcatgatcctgacctcactttgatc

SEQ ID NO: 206704 - DNA, 25 bp, probe
gcatcatcactagctagttttctag

SEQ ID NO: 206705 - DNA, 25 bp, probe
gcatatcactgacctgggatctttg

SEQ ID NO: 206706 - DNA, 25 bp, probe
gcatatttatgcttaggtcttttca

SEQ ID NO: 206707 - DNA, 25 bp, probe
gcatatttatgcttaggtcttttca

SEQ ID NO: 206708 - DNA, 25 bp, probe
gcatttagcatatcgtggttctgta

SEQ ID NO: 206709 - DNA, 25 bp, probe
gcattataacagtcgtgtacacagt

SEQ ID NO: 206710 - DNA, 25 bp, probe
gcattataacagtcgtgtacacagt

SEQ ID NO: 206711 - DNA, 25 bp, probe
gcatcatcatacagaggtgaaccgt

SEQ ID NO: 206712 - DNA, 25 bp, probe
gcattcaacatgtggaaagcttgtc

SEQ ID NO: 206713 - DNA, 25 bp, probe
gcattgcaatagtgaggcagacttt

SEQ ID NO: 206714 - DNA, 25 bp, probe
gcatctgcaaagtctgagcaggttt

SEQ ID NO: 206715 - DNA, 25 bp, probe
gcatcatgcatcttactgaaggtaa

SEQ ID NO: 206716 - DNA, 25 bp, probe
gcatcatgctgcacctgtacgtgcg

SEQ ID NO: 206717 - DNA, 25 bp, probe
gcatcaactggcaggacgtggtcca

SEQ ID NO: 206718 - DNA, 25 bp, probe
gcatcaactggcaggacgtggtcca

SEQ ID NO: 206719 - DNA, 25 bp, probe
gcatcaactggcaggacgtggtcca

SEQ ID NO: 206720 - DNA, 25 bp, probe
gcatccactgcgggtgactggaggc

SEQ ID NO: 206721 - DNA, 25 bp, probe
gcatctgcacagcaagctgtcggtg

SEQ ID NO: 206722 - DNA, 25 bp, probe
gcatctctatgccaagattctgcat

SEQ ID NO: 206723 - DNA, 25 bp, probe
gcatcatgtacaggaaattcacgac

SEQ ID NO: 206724 - DNA, 25 bp, probe
gcatcattcacaggtaaccgcgggg

SEQ ID NO: 206725 - DNA, 25 bp, probe
gcatttcaacagccaactctgctgt

SEQ ID NO: 206726 - DNA, 25 bp, probe
gcagaataaatgccatcgagcctgt

SEQ ID NO: 206727 - DNA, 25 bp, probe
gcagctaagaagcccagacgagtag

SEQ ID NO: 206728 - DNA, 25 bp, probe
gcactatgtgaccacccggaaaggg

SEQ ID NO: 206729 - DNA, 25 bp, probe
gcactatgtgaccacccggaaaggg

SEQ ID NO: 206730 - DNA, 25 bp, probe
gcagcattggactcccggaagaact

SEQ ID NO: 206731 - DNA, 25 bp, probe
gcatcttgcagcttttcgggaagaa

SEQ ID NO: 206732 - DNA, 25 bp, probe
gcatcttgcagcttttcgggaagaa

SEQ ID NO: 206733 - DNA, 25 bp, probe
gcatttgcacacatatgcagggaaa

SEQ ID NO: 206734 - DNA, 25 bp, probe
gcatattatgcagctctggggacaa

SEQ ID NO: 206735 - DNA, 25 bp, probe
gcattatgtgctgtgcgtggtgacc

SEQ ID NO: 206736 - DNA, 25 bp, probe
gcattgtgtggctggttgtttcctg

SEQ ID NO: 206737 - DNA, 25 bp, probe
gcacttgcttcaggcaattgacccc

SEQ ID NO: 206738 - DNA, 25 bp, probe
gcacttgcttcaggcaattgacccc

SEQ ID NO: 206739 - DNA, 25 bp, probe
gcactttgaaggtttgatagctcgc

SEQ ID NO: 206740 - DNA, 25 bp, probe
gcattttggatgccatttgattgta

SEQ ID NO: 206741 - DNA, 25 bp, probe
gcatttgctttcctctgagattcta

SEQ ID NO: 206742 - DNA, 25 bp, probe
gcatttgcatttgctctttcatctc

SEQ ID NO: 206743 - DNA, 25 bp, probe
gcatttgagtttatatctctcatgc

SEQ ID NO: 206744 - DNA, 25 bp, probe
gcattagtggtttgagtgtctagca

SEQ ID NO: 206745 - DNA, 25 bp, probe
gcatttaggccatgctgtgctctac

SEQ ID NO: 206746 - DNA, 25 bp, probe
gcatttaggccatgctgtgctctac

SEQ ID NO: 206747 - DNA, 25 bp, probe
gcattgtacaccgggatctcaagcc

SEQ ID NO: 206748 - DNA, 25 bp, probe
gcattgtaatccttgtgaccacacc

SEQ ID NO: 206749 - DNA, 25 bp, probe
gcatctatactccaagcgactagac

SEQ ID NO: 206750 - DNA, 25 bp, probe
gcatttattgagaacagcattgaga

SEQ ID NO: 206751 - DNA, 25 bp, probe
gcatttattgagaacagcattgaga

SEQ ID NO: 206752 - DNA, 25 bp, probe
gcatcttgattaactcaatgcagaa

SEQ ID NO: 206753 - DNA, 25 bp, probe
gcattcgatgcatttttatagaaac

SEQ ID NO: 206754 - DNA, 25 bp, probe
gcatcttgcgcatctttaagctgac

SEQ ID NO: 206755 - DNA, 25 bp, probe
gcatttggctactgcaaagctgtcc

SEQ ID NO: 206756 - DNA, 25 bp, probe
gcatttggctactgcaaagctgtcc

SEQ ID NO: 206757 - DNA, 25 bp, probe
gcatttggtacccaagggaagctgg

SEQ ID NO: 206758 - DNA, 25 bp, probe
gcatttgggcactgtaggaaaagag

SEQ ID NO: 206759 - DNA, 25 bp, probe
gcatttagtcacatttggtagacaa

SEQ ID NO: 206760 - DNA, 25 bp, probe
gcattaagacacccttggattagca

SEQ ID NO: 206761 - DNA, 25 bp, probe
gcatcaaaacaggtgccatggtaac

SEQ ID NO: 206762 - DNA, 25 bp, probe
gcatcaaaacaggtgccatggtaac

SEQ ID NO: 206763 - DNA, 25 bp, probe
gcatcaatcaacgcacatcggaaca

SEQ ID NO: 206764 - DNA, 25 bp, probe
gcatcaaggagcagcagtttgaaca

SEQ ID NO: 206765 - DNA, 25 bp, probe
gcatcaaggagcagcagtttgaaca

SEQ ID NO: 206766 - DNA, 25 bp, probe
gcatccgtgatgctcagtgttcaaa

SEQ ID NO: 206767 - DNA, 25 bp, probe
gcattccatgagctgattttcctga

SEQ ID NO: 206768 - DNA, 25 bp, probe
gcattcctgccactggtttcaggat

SEQ ID NO: 206769 - DNA, 25 bp, probe
gcattcctgccactggtttcaggat

SEQ ID NO: 206770 - DNA, 25 bp, probe
gcattctcccacttttgatggatat

SEQ ID NO: 206771 - DNA, 25 bp, probe
gcatgtcccgagtgcttgaggatga

SEQ ID NO: 206772 - DNA, 25 bp, probe
gcattacgcaacttggtgaggagca

SEQ ID NO: 206773 - DNA, 25 bp, probe
gcatctgttcaaagtcgtagggctt

SEQ ID NO: 206774 - DNA, 25 bp, probe
gcatagtctagaggctggaggggct

SEQ ID NO: 206775 - DNA, 25 bp, probe
gcatagagcaactgcattgagggac

SEQ ID NO: 206776 - DNA, 25 bp, probe
gcattgagaatgtacctgaagagct

SEQ ID NO: 206777 - DNA, 25 bp, probe
gcattgtaagagttctgtcatgcag

SEQ ID NO: 206778 - DNA, 25 bp, probe
gcatttgctatgtgccgtcagcacc

SEQ ID NO: 206779 - DNA, 25 bp, probe
gcattctctatgaagctgcacccac

SEQ ID NO: 206780 - DNA, 25 bp, probe
gcattctctatgaagctgcacccac

SEQ ID NO: 206781 - DNA, 25 bp, probe
gcattctctatgaagctgcacccac

SEQ ID NO: 206782 - DNA, 25 bp, probe
gcatcttctatgagatggccacagg

SEQ ID NO: 206783 - DNA, 25 bp, probe
gcattatctctgagtccaccagaag

SEQ ID NO: 206784 - DNA, 25 bp, probe
gcattctggctgagatgctctctaa

SEQ ID NO: 206785 - DNA, 25 bp, probe
gcatcctggcatagcagatgacttc

SEQ ID NO: 206786 - DNA, 25 bp, probe
gcatccttgcattggtgagcacctt

SEQ ID NO: 206787 - DNA, 25 bp, probe
gcatgacctttggtacatgcctgtt

SEQ ID NO: 206788 - DNA, 25 bp, probe
gcataagttctattttggctggtgt

SEQ ID NO: 206789 - DNA, 25 bp, probe
gcatgaaagctggatcttttggggt

SEQ ID NO: 206790 - DNA, 25 bp, probe
gcatgtaatggtatcttaaagtgtg

SEQ ID NO: 206791 - DNA, 25 bp, probe
gcatgtaatggtatcttaaagtgtg

SEQ ID NO: 206792 - DNA, 25 bp, probe
gcatgttcattgcaacttaaaagcg

SEQ ID NO: 206793 - DNA, 25 bp, probe
gcatgtcatttgcacacaaaaataa

SEQ ID NO: 206794 - DNA, 25 bp, probe
gcatggaaatgtcctccaacaataa

SEQ ID NO: 206795 - DNA, 25 bp, probe
gcattgccaagtgccataaccatga

SEQ ID NO: 206796 - DNA, 25 bp, probe
gcaggccatcaaacctcaacgaatt

SEQ ID NO: 206797 - DNA, 25 bp, probe
gcattcactaagccctacataggat

SEQ ID NO: 206798 - DNA, 25 bp, probe
gcattcaattatcttcatgaaggag

SEQ ID NO: 206799 - DNA, 25 bp, probe
gcatctctgtcctcttgattaagag

SEQ ID NO: 206800 - DNA, 25 bp, probe
gcatcacatttctgtcatatggata

SEQ ID NO: 206801 - DNA, 25 bp, probe
gcatcacatttctgtcatatggata

SEQ ID NO: 206802 - DNA, 25 bp, probe
gcataacactgctgctcatttaaaa

SEQ ID NO: 206803 - DNA, 25 bp, probe
gcatcaacacttttattcttaagca

SEQ ID NO: 206804 - DNA, 25 bp, probe
gcatcaactggttcttactctactg

SEQ ID NO: 206805 - DNA, 25 bp, probe
gcatcaccttttcctgaacttgtga

SEQ ID NO: 206806 - DNA, 25 bp, probe
gcatcaccttaggcagggaagtgta

SEQ ID NO: 206807 - DNA, 25 bp, probe
gcataccttaaagctatagttctct

SEQ ID NO: 206808 - DNA, 25 bp, probe
gcatacctggaaaatgcttctgtcc

SEQ ID NO: 206809 - DNA, 25 bp, probe
gcatcaactagaataatctacattg

SEQ ID NO: 206810 - DNA, 25 bp, probe
gcatcaccttgaaagcagtagcatc

SEQ ID NO: 206811 - DNA, 25 bp, probe
gcatcaccttgaaagcagtagcatc

SEQ ID NO: 206812 - DNA, 25 bp, probe
gcatgacttctgggagcacttgctc

SEQ ID NO: 206813 - DNA, 25 bp, probe
gcatgactttgacagactccaggct

SEQ ID NO: 206814 - DNA, 25 bp, probe
gcatacattcgaaagaccctagcct

SEQ ID NO: 206815 - DNA, 25 bp, probe
gcatactacataatataatccatac

SEQ ID NO: 206816 - DNA, 25 bp, probe
gcatagtaaataaaaccttctctcc

SEQ ID NO: 206817 - DNA, 25 bp, probe
gcatagtaaataaaaccttctctcc

SEQ ID NO: 206818 - DNA, 25 bp, probe
gcatcagtgaagaacgttactcttt

SEQ ID NO: 206819 - DNA, 25 bp, probe
gcatcaatgataaaggttagccatc

SEQ ID NO: 206820 - DNA, 25 bp, probe
gcatcatggaagtggtgggcacacc

SEQ ID NO: 206821 - DNA, 25 bp, probe
gcatataaaagactggctggaccga

SEQ ID NO: 206822 - DNA, 25 bp, probe
gcatataaaagactggctggaccga

SEQ ID NO: 206823 - DNA, 25 bp, probe
gcatatgtatgatagtgtgcatgtg

SEQ ID NO: 206824 - DNA, 25 bp, probe
gcattatattaggtgctgcagaaat

SEQ ID NO: 206825 - DNA, 25 bp, probe
gcattatattaggtgctgcagaaat

SEQ ID NO: 206826 - DNA, 25 bp, probe
gcatcttcatgaagggcgcgacccg

SEQ ID NO: 206827 - DNA, 25 bp, probe
gcatgttcattagcgagctgctccc

SEQ ID NO: 206828 - DNA, 25 bp, probe
gcatttctgcaagcgttgcctggat

SEQ ID NO: 206829 - DNA, 25 bp, probe
gcattatggcaattccttgcctgtg

SEQ ID NO: 206830 - DNA, 25 bp, probe
gcattcaggtgatcagcaggactgt

SEQ ID NO: 206831 - DNA, 25 bp, probe
gcattcagtttgtcaatgaagtgat

SEQ ID NO: 206832 - DNA, 25 bp, probe
gcactgctgttcagataggggacgg

SEQ ID NO: 206833 - DNA, 25 bp, probe
gcactgctgttcagataggggacgg

SEQ ID NO: 206834 - DNA, 25 bp, probe
gcaccattccagtcaagggcaaagg

SEQ ID NO: 206835 - DNA, 25 bp, probe
gcatacatctcatccacaggggaag

SEQ ID NO: 206836 - DNA, 25 bp, probe
gcatcatgtccttcctagagggcaa

SEQ ID NO: 206837 - DNA, 25 bp, probe
gcatcatgtccttcctagagggcaa

SEQ ID NO: 206838 - DNA, 25 bp, probe
gcatcagtgttctctgaggtcctgt

SEQ ID NO: 206839 - DNA, 25 bp, probe
gcatcagtgttctctgaggtcctgt

SEQ ID NO: 206840 - DNA, 25 bp, probe
gcatcagcgacctacaagaacctgg

SEQ ID NO: 206841 - DNA, 25 bp, probe
gcatcagcgacctacaagaacctgg

SEQ ID NO: 206842 - DNA, 25 bp, probe
gcatcttaccaatgatgtaacggtt

SEQ ID NO: 206843 - DNA, 25 bp, probe
gcacttaaactgtacttcagggatt

SEQ ID NO: 206844 - DNA, 25 bp, probe
gcacttccgactggaaaccgagtga

SEQ ID NO: 206845 - DNA, 25 bp, probe
gcatttcactacaggaccaaatgga

SEQ ID NO: 206846 - DNA, 25 bp, probe
gcatcttactcctgaaccttagaca

SEQ ID NO: 206847 - DNA, 25 bp, probe
gcatattcattcatggaccactgtt

SEQ ID NO: 206848 - DNA, 25 bp, probe
gcatttcatatcagtgaggattctg

SEQ ID NO: 206849 - DNA, 25 bp, probe
gcattttattcgtcattacctggca

SEQ ID NO: 206850 - DNA, 25 bp, probe
gcattttatgtactttgtccttcag

SEQ ID NO: 206851 - DNA, 25 bp, probe
gcatttattgtgataagtacattgt

SEQ ID NO: 206852 - DNA, 25 bp, probe
gcatcctatatccagtaagtagaat

SEQ ID NO: 206853 - DNA, 25 bp, probe
gcatctatgtcacagctaaggagca

SEQ ID NO: 206854 - DNA, 25 bp, probe
gcatccagtctgtgctatcagagca

SEQ ID NO: 206855 - DNA, 25 bp, probe
gcattttcttcacttgcaggcaaac

SEQ ID NO: 206856 - DNA, 25 bp, probe
gcattttcttcacgaaacaaatccc

SEQ ID NO: 206857 - DNA, 25 bp, probe
gcatttctcccaagtgtaaaatacc

SEQ ID NO: 206858 - DNA, 25 bp, probe
gcatttcccagctgtgtaaaaacaa

SEQ ID NO: 206859 - DNA, 25 bp, probe
gcattatccgccttttatctaaaca

SEQ ID NO: 206860 - DNA, 25 bp, probe
gcattttgtgacttttgtcgaaagc

SEQ ID NO: 206861 - DNA, 25 bp, probe
gcataagtggcaggattttcggaag

SEQ ID NO: 206862 - DNA, 25 bp, probe
gcataagtggcaggattttcggaag

SEQ ID NO: 206863 - DNA, 25 bp, probe
gcatcaccatggtgatcttctccca

SEQ ID NO: 206864 - DNA, 25 bp, probe
gcatcaccatggtgatcttctccca

SEQ ID NO: 206865 - DNA, 25 bp, probe
gcatagcctatgtacatctttacca

SEQ ID NO: 206866 - DNA, 25 bp, probe
gcatagcctatgtacatctttacca

SEQ ID NO: 206867 - DNA, 25 bp, probe
gcatcagtgtggtagcttgctcaac

SEQ ID NO: 206868 - DNA, 25 bp, probe
gcatatttggcaagcagttcatcac

SEQ ID NO: 206869 - DNA, 25 bp, probe
gcatatgcttgacagctttgaaact

SEQ ID NO: 206870 - DNA, 25 bp, probe
gcatctgctggagggtggtagagac

SEQ ID NO: 206871 - DNA, 25 bp, probe
gcatttgacaagatgattcgcaagc

SEQ ID NO: 206872 - DNA, 25 bp, probe
gcattatcaacatcatattcagccc

SEQ ID NO: 206873 - DNA, 25 bp, probe
gcattacagtctgaattgagtgctg

SEQ ID NO: 206874 - DNA, 25 bp, probe
gcatttcagctttaagtgatagtgg

SEQ ID NO: 206875 - DNA, 25 bp, probe
gcatttattttgcctgtgcatagga

SEQ ID NO: 206876 - DNA, 25 bp, probe
gcagttggtgttgcttatgaggaag

SEQ ID NO: 206877 - DNA, 25 bp, probe
gcaggacgttagactgttgggacag

SEQ ID NO: 206878 - DNA, 25 bp, probe
gcaggacgttagactgttgggacag

SEQ ID NO: 206879 - DNA, 25 bp, probe
gcaggcacgttaactcgaattctca

SEQ ID NO: 206880 - DNA, 25 bp, probe
gcaggagcaattataaaatcttcaa

SEQ ID NO: 206881 - DNA, 25 bp, probe
gcaggagcaattataaaatcttcaa

SEQ ID NO: 206882 - DNA, 25 bp, probe
gcatccacaactacaaatcactacc

SEQ ID NO: 206883 - DNA, 25 bp, probe
gcatgcccaatcttagagactctcc

SEQ ID NO: 206884 - DNA, 25 bp, probe
gcatcctgcgtggtgaggagctcac

SEQ ID NO: 206885 - DNA, 25 bp, probe
gcatcctgggctacactgagcacca

SEQ ID NO: 206886 - DNA, 25 bp, probe
gcatggtggcgcaagcctgtaatcc

SEQ ID NO: 206887 - DNA, 25 bp, probe
gcaggacgcctacctgatgaagctg

SEQ ID NO: 206888 - DNA, 25 bp, probe
gcatgggcatccgcctggataatgc

SEQ ID NO: 206889 - DNA, 25 bp, probe
gcatgatgggacgcgtggtcaaggt

SEQ ID NO: 206890 - DNA, 25 bp, probe
gcatgatgggacgcgtggtcaaggt

SEQ ID NO: 206891 - DNA, 25 bp, probe
gcaggtatactctggttacaggttt

SEQ ID NO: 206892 - DNA, 25 bp, probe
gcatctttgactgtgtctacacggt

SEQ ID NO: 206893 - DNA, 25 bp, probe
gcatatttgaatatgatctcccata

SEQ ID NO: 206894 - DNA, 25 bp, probe
gcatatttgaatatgatctcccata

SEQ ID NO: 206895 - DNA, 25 bp, probe
gcatatgttacaattctctcactta

SEQ ID NO: 206896 - DNA, 25 bp, probe
gcatatgtgtcagtggggctctctg

SEQ ID NO: 206897 - DNA, 25 bp, probe
gcatatgtgtcagtggggctctctg

SEQ ID NO: 206898 - DNA, 25 bp, probe
gcatctgggagcgagagggcatctt

SEQ ID NO: 206899 - DNA, 25 bp, probe
gcatccagtgacggcaggaacgtgg

SEQ ID NO: 206900 - DNA, 25 bp, probe
gcatcgatcataaagcgggaggtag

SEQ ID NO: 206901 - DNA, 25 bp, probe
gcatcgtcctttgggtatggttgct

SEQ ID NO: 206902 - DNA, 25 bp, probe
gcatctgactctcttttgaggtccc

SEQ ID NO: 206903 - DNA, 25 bp, probe
gcatgtgaacatctaggggagtacc

SEQ ID NO: 206904 - DNA, 25 bp, probe
gcaggaactggcagggatagtcact

SEQ ID NO: 206905 - DNA, 25 bp, probe
gcaggaagttatctagcaagccgct

SEQ ID NO: 206906 - DNA, 25 bp, probe
gcaggaagttatctagcaagccgct

SEQ ID NO: 206907 - DNA, 25 bp, probe
gcagggagttacaggagaccccgag

SEQ ID NO: 206908 - DNA, 25 bp, probe
gcagtcggttggagcgagcatcccc

SEQ ID NO: 206909 - DNA, 25 bp, probe
gcagtctctatgtgttagtgccccc

SEQ ID NO: 206910 - DNA, 25 bp, probe
gcagtacatttgttttgcccagcca

SEQ ID NO: 206911 - DNA, 25 bp, probe
gcaggtttattttttccagcacata

SEQ ID NO: 206912 - DNA, 25 bp, probe
gcagagtttgttgactttacctcac

SEQ ID NO: 206913 - DNA, 25 bp, probe
gcagagtttgttgactttacctcac

SEQ ID NO: 206914 - DNA, 25 bp, probe
gcagagtttgttgactttacctcac

SEQ ID NO: 206915 - DNA, 25 bp, probe
gcagtgtttgaacagcattgtaaaa

SEQ ID NO: 206916 - DNA, 25 bp, probe
gcatgtgctttggggaccggtatta

SEQ ID NO: 206917 - DNA, 25 bp, probe
gcatctctttggctgaacatcgaga

SEQ ID NO: 206918 - DNA, 25 bp, probe
gcatacttcttgctgctttcaggac

SEQ ID NO: 206919 - DNA, 25 bp, probe
gcatgacgcttgggtgtttagcgag

SEQ ID NO: 206920 - DNA, 25 bp, probe
gcatcacgcagggacgtgagttgga

SEQ ID NO: 206921 - DNA, 25 bp, probe
gcatcaccatggtactgtggggggc

SEQ ID NO: 206922 - DNA, 25 bp, probe
gcatccatgcgggagttggggttgc

SEQ ID NO: 206923 - DNA, 25 bp, probe
gcatcctgtggtgtccatgaggtac

SEQ ID NO: 206924 - DNA, 25 bp, probe
gcatccttgagtttgctcacagtgc

SEQ ID NO: 206925 - DNA, 25 bp, probe
gcatcctgagacagttgcacagtgc

SEQ ID NO: 206926 - DNA, 25 bp, probe
gcatcacggccttcatggatggtgc

SEQ ID NO: 206927 - DNA, 25 bp, probe
gcatcagcatgggcttagagctggc

SEQ ID NO: 206928 - DNA, 25 bp, probe
gcatgcatgaagccctgaagcttgc

SEQ ID NO: 206929 - DNA, 25 bp, probe
gcatcatgtaccggaagttcactac

SEQ ID NO: 206930 - DNA, 25 bp, probe
gcatcttctccaggaggttcacagc

SEQ ID NO: 206931 - DNA, 25 bp, probe
gcatttccatcagtgaagaatcaac

SEQ ID NO: 206932 - DNA, 25 bp, probe
gcatttatgccattaagcgatcaaa

SEQ ID NO: 206933 - DNA, 25 bp, probe
gcatttcccacttggcgaaggactt

SEQ ID NO: 206934 - DNA, 25 bp, probe
gcatattaccaggggtttggccatt

SEQ ID NO: 206935 - DNA, 25 bp, probe
gcatatgtgcacaagcagggttggg

SEQ ID NO: 206936 - DNA, 25 bp, probe
gcatatgtgcacaagcagggttggg

SEQ ID NO: 206937 - DNA, 25 bp, probe
gcatatgtgcacaagcagggttggg

SEQ ID NO: 206938 - DNA, 25 bp, probe
gcatcagtgacttagggctaggaac

SEQ ID NO: 206939 - DNA, 25 bp, probe
gcatcgttgtttttgaatgtagcac

SEQ ID NO: 206940 - DNA, 25 bp, probe
gcatcgtatgtttaaagtgtgagaa

SEQ ID NO: 206941 - DNA, 25 bp, probe
gcatcttagacaaacatagctggaa

SEQ ID NO: 206942 - DNA, 25 bp, probe
gcatacatgcaactaccaacatgga

SEQ ID NO: 206943 - DNA, 25 bp, probe
gcatacatgagtccatccatcagtc

SEQ ID NO: 206944 - DNA, 25 bp, probe
gcatacatcatgaccgtcactgact

SEQ ID NO: 206945 - DNA, 25 bp, probe
gactcgagtcacactcaagggaact

SEQ ID NO: 206946 - DNA, 25 bp, probe
gcatgaacaacctcagctccatgaa

SEQ ID NO: 206947 - DNA, 25 bp, probe
gcatgcaagagctcagcacgatcca

SEQ ID NO: 206948 - DNA, 25 bp, probe
gcatctctggcatgccactgtttat

SEQ ID NO: 206949 - DNA, 25 bp, probe
gcatcatcatacctgtccttttgat

SEQ ID NO: 206950 - DNA, 25 bp, probe
gcatacattgctagtcacattttta

SEQ ID NO: 206951 - DNA, 25 bp, probe
gcatacatcttaaatcttttcaatt

SEQ ID NO: 206952 - DNA, 25 bp, probe
gcatagcctccaagtatactctcaa

SEQ ID NO: 206953 - DNA, 25 bp, probe
gcatactctccaggattgtccacaa

SEQ ID NO: 206954 - DNA, 25 bp, probe
gcatatatcttcagagagtacacca

SEQ ID NO: 206955 - DNA, 25 bp, probe
gcatatatcttcagagagtacacca

SEQ ID NO: 206956 - DNA, 25 bp, probe
gcatcttcgacaaggtgtacaccac

SEQ ID NO: 206957 - DNA, 25 bp, probe
gcatctccagaaagatttcatcatc

SEQ ID NO: 206958 - DNA, 25 bp, probe
gcatctcaaaattattctgccctcc

SEQ ID NO: 206959 - DNA, 25 bp, probe
gcataaaaagatacctggtctgcct

SEQ ID NO: 206960 - DNA, 25 bp, probe
gcatcaaggacatggccgggctgct

SEQ ID NO: 206961 - DNA, 25 bp, probe
gcatgcaaggccagtcgtggtgcac

SEQ ID NO: 206962 - DNA, 25 bp, probe
gcatcatggctgtgagacactggtc

SEQ ID NO: 206963 - DNA, 25 bp, probe
gcatcaggcgaggccacactgaaga

SEQ ID NO: 206964 - DNA, 25 bp, probe
gcatttgctgagtacacctagagag

SEQ ID NO: 206965 - DNA, 25 bp, probe
gcatgcattctagcacaacaagatg

SEQ ID NO: 206966 - DNA, 25 bp, probe
gcatgccctggcaacattgaagttc

SEQ ID NO: 206967 - DNA, 25 bp, probe
gcatgccctggcaacattgaagttc

SEQ ID NO: 206968 - DNA, 25 bp, probe
gcatccctggtgtgtaagattgctg

SEQ ID NO: 206969 - DNA, 25 bp, probe
gcatcaccacggtgctgacgatgac

SEQ ID NO: 206970 - DNA, 25 bp, probe
gcataagcaaggtcagctcccagac

SEQ ID NO: 206971 - DNA, 25 bp, probe
gcatcaagccagaggccagtcagat

SEQ ID NO: 206972 - DNA, 25 bp, probe
gcatgaaggcagacaagggtcgcac

SEQ ID NO: 206973 - DNA, 25 bp, probe
gcatgaaggcagacaagggtcgcac

SEQ ID NO: 206974 - DNA, 25 bp, probe
gcatgaagaaggaagccgtccagaa

SEQ ID NO: 206975 - DNA, 25 bp, probe
gcatgttccagagtcagaacctgta

SEQ ID NO: 206976 - DNA, 25 bp, probe
gcatggttccaaagaaccttaaagg

SEQ ID NO: 206977 - DNA, 25 bp, probe
gcaggttctaagaagactcttcccg

SEQ ID NO: 206978 - DNA, 25 bp, probe
gcaggtttagtttactcaatctccc

SEQ ID NO: 206979 - DNA, 25 bp, probe
gcatgtgttgtacaataccagatca

SEQ ID NO: 206980 - DNA, 25 bp, probe
gcagtttcatacaactgggagtctg

SEQ ID NO: 206981 - DNA, 25 bp, probe
gcacctgttaaacttggaggctttg

SEQ ID NO: 206982 - DNA, 25 bp, probe
gcatttgtataatggggctggtagg

SEQ ID NO: 206983 - DNA, 25 bp, probe
gcatttgtaacggggtcaccacagc

SEQ ID NO: 206984 - DNA, 25 bp, probe
gcatttgtaacggggtcaccacagc

SEQ ID NO: 206985 - DNA, 25 bp, probe
gcagtctggaaaccaggtaccgatg

SEQ ID NO: 206986 - DNA, 25 bp, probe
gcatctctggagaaacagttgggct

SEQ ID NO: 206987 - DNA, 25 bp, probe
gcatttggcgtgaccatgtgggaaa

SEQ ID NO: 206988 - DNA, 25 bp, probe
gcatttgtgaggcccatggttgaga

SEQ ID NO: 206989 - DNA, 25 bp, probe
gcatattctcaggtctctgtgtgta

SEQ ID NO: 206990 - DNA, 25 bp, probe
gcatctggttggtctttattgagca

SEQ ID NO: 206991 - DNA, 25 bp, probe
gcatctggttggtctttattgagca

SEQ ID NO: 206992 - DNA, 25 bp, probe
gcactgagggggattacaagctcct

SEQ ID NO: 206993 - DNA, 25 bp, probe
gcactgagggggattacaagctcct

SEQ ID NO: 206994 - DNA, 25 bp, probe
gcaggaatgggtccctacagcagcc

SEQ ID NO: 206995 - DNA, 25 bp, probe
gcaggaggagaaccgcgacctgcgc

SEQ ID NO: 206996 - DNA, 25 bp, probe
gcagtgggtgaagctgtaccgcgga

SEQ ID NO: 206997 - DNA, 25 bp, probe
gcatcgaggtaaagtttcacctgga

SEQ ID NO: 206998 - DNA, 25 bp, probe
gcatcgaggtaaagtttcacctgga

SEQ ID NO: 206999 - DNA, 25 bp, probe
gcatcacggcggagttgtacacggg

SEQ ID NO: 207000 - DNA, 25 bp, probe
gcatcatgggggagctgttgaatgg

SEQ ID NO: 207001 - DNA, 25 bp, probe
gcatcatgggggagctgttgaatgg

SEQ ID NO: 207002 - DNA, 25 bp, probe
gcatctggcggagtacttggaagcc

SEQ ID NO: 207003 - DNA, 25 bp, probe
gcatcaggccagaccacgggaggcc

SEQ ID NO: 207004 - DNA, 25 bp, probe
gcatcggacagtgttgatggaggtc

SEQ ID NO: 207005 - DNA, 25 bp, probe
gcagggactgggattcgaggacttc

SEQ ID NO: 207006 - DNA, 25 bp, probe
gcaggcccatgggaatttggtgaat

SEQ ID NO: 207007 - DNA, 25 bp, probe
gcaggcccagaactcttcttgggcc

SEQ ID NO: 207008 - DNA, 25 bp, probe
gcaggcccagaactcttcttgggcc

SEQ ID NO: 207009 - DNA, 25 bp, probe
gcatacaccaaacttatcagaggag

SEQ ID NO: 207010 - DNA, 25 bp, probe
gcatcctcctatttttcatgagtgg

SEQ ID NO: 207011 - DNA, 25 bp, probe
gcatcctctccaaagttggagcttc

SEQ ID NO: 207012 - DNA, 25 bp, probe
gcatccctagaaagccatgtgcagc

SEQ ID NO: 207013 - DNA, 25 bp, probe
gcatctttggacatcaatgtccttg

SEQ ID NO: 207014 - DNA, 25 bp, probe
gcatatttggcagcttattgcttcg

SEQ ID NO: 207015 - DNA, 25 bp, probe
gcatagttgccaccattttgtgcat

SEQ ID NO: 207016 - DNA, 25 bp, probe
gcatggtcgcccatgattttactgt

SEQ ID NO: 207017 - DNA, 25 bp, probe
gcaggttccgatgttattagatgtt

SEQ ID NO: 207018 - DNA, 25 bp, probe
gcaggaccaagaggtgaatttagtc

SEQ ID NO: 207019 - DNA, 25 bp, probe
gcaggaccaagaggtgaatttagtc

SEQ ID NO: 207020 - DNA, 25 bp, probe
gcaggccccgtggagaattgattcc

SEQ ID NO: 207021 - DNA, 25 bp, probe
gcaggctttccggcagaacgcatcc

SEQ ID NO: 207022 - DNA, 25 bp, probe
gcaggctttatctggaacgtcacct

SEQ ID NO: 207023 - DNA, 25 bp, probe
gcaggctttatctggaacgtcacct

SEQ ID NO: 207024 - DNA, 25 bp, probe
gcaggcagtccttgggaagcctagg

SEQ ID NO: 207025 - DNA, 25 bp, probe
gcaggcgacttaggaaataatgatg

SEQ ID NO: 207026 - DNA, 25 bp, probe
gcacgcaagttgacaaaattgtggc

SEQ ID NO: 207027 - DNA, 25 bp, probe
gcatctatgttcccaagagtttgac

SEQ ID NO: 207028 - DNA, 25 bp, probe
gcatctatgttcccaagagtttgac

SEQ ID NO: 207029 - DNA, 25 bp, probe
gcactgatttcgaccaggttcgttc

SEQ ID NO: 207030 - DNA, 25 bp, probe
gcactgtggacacccagttcatcga

SEQ ID NO: 207031 - DNA, 25 bp, probe
gcatgctggagtacccagcctatca

SEQ ID NO: 207032 - DNA, 25 bp, probe
gcatgaggtccatcagagctctgat

SEQ ID NO: 207033 - DNA, 25 bp, probe
gcatgaggtccatcagagctctgat

SEQ ID NO: 207034 - DNA, 25 bp, probe
gcatgaggtcagaccaggatttgca

SEQ ID NO: 207035 - DNA, 25 bp, probe
gcatggacaagcccagtaactgcac

SEQ ID NO: 207036 - DNA, 25 bp, probe
gcatgaaatcactgagctcacggcc

SEQ ID NO: 207037 - DNA, 25 bp, probe
gcatcagcaaaaatgactcagggcc

SEQ ID NO: 207038 - DNA, 25 bp, probe
gcatcactaagtggacaagggccag

SEQ ID NO: 207039 - DNA, 25 bp, probe
gcaaattcagtgcaaaggcggcttg

SEQ ID NO: 207040 - DNA, 25 bp, probe
gcagttaagtgtcaagcaacctcta

SEQ ID NO: 207041 - DNA, 25 bp, probe
gcagcttttcgggaagaaggttgac

SEQ ID NO: 207042 - DNA, 25 bp, probe
gcagcttttcgggaagaaggttgac

SEQ ID NO: 207043 - DNA, 25 bp, probe
gcaggcttttggggatgactggggg

SEQ ID NO: 207044 - DNA, 25 bp, probe
gcaggtgagattaggggttgggaag

SEQ ID NO: 207045 - DNA, 25 bp, probe
gcaggaaattggggtgttgggacct

SEQ ID NO: 207046 - DNA, 25 bp, probe
gcaggaaggccgggttgtgaggggt

SEQ ID NO: 207047 - DNA, 25 bp, probe
gcaggaaggccgggttgtgaggggt

SEQ ID NO: 207048 - DNA, 25 bp, probe
gcagggtgaggctggactttggggg

SEQ ID NO: 207049 - DNA, 25 bp, probe
gcaggggccatgtggtaaagggggt

SEQ ID NO: 207050 - DNA, 25 bp, probe
tccagggcacggcgtgggaggggta

SEQ ID NO: 207051 - DNA, 25 bp, probe
gcactggtccggtttgtggtggaag

SEQ ID NO: 207052 - DNA, 25 bp, probe
gcatctgcttcggagactcaggtgg

SEQ ID NO: 207053 - DNA, 25 bp, probe
gcatctctttgcaagaatcagccag

SEQ ID NO: 207054 - DNA, 25 bp, probe
gcatctctttgcaagaatcagccag

SEQ ID NO: 207055 - DNA, 25 bp, probe
gcatcacgtggcaaatgattgagca

SEQ ID NO: 207056 - DNA, 25 bp, probe
gcatcacctggcagatgatcgagca

SEQ ID NO: 207057 - DNA, 25 bp, probe
gcatgatggcatgccgtgatcagaa

SEQ ID NO: 207058 - DNA, 25 bp, probe
gcatcggcatctgcagtgatgagtg

SEQ ID NO: 207059 - DNA, 25 bp, probe
gcatcctgacggttgatgtggcctg

SEQ ID NO: 207060 - DNA, 25 bp, probe
gcagactgggttaggtccctgttcc

SEQ ID NO: 207061 - DNA, 25 bp, probe
gcaggtctggttcggggtcagattc

SEQ ID NO: 207062 - DNA, 25 bp, probe
gcaggtaggcttctaagcctagtcc

SEQ ID NO: 207063 - DNA, 25 bp, probe
gcaggtaggtcattaacaccacttc

SEQ ID NO: 207064 - DNA, 25 bp, probe
gcaggtgtgcgtgcacacccacacc

SEQ ID NO: 207065 - DNA, 25 bp, probe
gcatggtggttgggacccagtggca

SEQ ID NO: 207066 - DNA, 25 bp, probe
gcatgcgtggggtgtacctgtgaga

SEQ ID NO: 207067 - DNA, 25 bp, probe
gcatcagggggctcagagtctgggt

SEQ ID NO: 207068 - DNA, 25 bp, probe
gcatcagggggctcagagtctgggt

SEQ ID NO: 207069 - DNA, 25 bp, probe
gcatcgagaggaggccagatgtccc

SEQ ID NO: 207070 - DNA, 25 bp, probe
gcatcagaattggcaccaagacccc

SEQ ID NO: 207071 - DNA, 25 bp, probe
gcatgaactatttcgaaagcccttc

SEQ ID NO: 207072 - DNA, 25 bp, probe
gcagggctatttctacagccactac

SEQ ID NO: 207073 - DNA, 25 bp, probe
gcagggctatttctacagccactac

SEQ ID NO: 207074 - DNA, 25 bp, probe
gcaggagtttgtctgcctcaagttc

SEQ ID NO: 207075 - DNA, 25 bp, probe
gcaggagaaagcagtcttccagttc

SEQ ID NO: 207076 - DNA, 25 bp, probe
gcaggagacacttacgtgtccactt

SEQ ID NO: 207077 - DNA, 25 bp, probe
gcaggaagctcagactggttgagtt

SEQ ID NO: 207078 - DNA, 25 bp, probe
gagcgcaagtactccgtgtggatcg

SEQ ID NO: 207079 - DNA, 25 bp, probe
gcagacggtcatgaccagccgaatc

SEQ ID NO: 207080 - DNA, 25 bp, probe
gcagtgatggttgccaggacgaatt

SEQ ID NO: 207081 - DNA, 25 bp, probe
gcagtgatggttgccaggacgaatt

SEQ ID NO: 207082 - DNA, 25 bp, probe
gcaggagagtttcagggacaattac

SEQ ID NO: 207083 - DNA, 25 bp, probe
gcatgtgcaattctctaggggccat

SEQ ID NO: 207084 - DNA, 25 bp, probe
gcatgataaatgattagactaccag

SEQ ID NO: 207085 - DNA, 25 bp, probe
gcatgataaatgattagactaccag

SEQ ID NO: 207086 - DNA, 25 bp, probe
gcatgataacttcacagaggaagca

SEQ ID NO: 207087 - DNA, 25 bp, probe
gcatgataacttcacagaggaagca

SEQ ID NO: 207088 - DNA, 25 bp, probe
gcagtgaaccttgagaaaatctacc

SEQ ID NO: 207089 - DNA, 25 bp, probe
gcagagaacccttaggtttccagcg

SEQ ID NO: 207090 - DNA, 25 bp, probe
gcaggtaacccttggtctgtaagca

SEQ ID NO: 207091 - DNA, 25 bp, probe
gaagtagttcccttcagttcaaatc

SEQ ID NO: 207092 - DNA, 25 bp, probe
gaagtagttcccttcagttcaaatc

SEQ ID NO: 207093 - DNA, 25 bp, probe
gcacgaatgggcggatttttaaatc

SEQ ID NO: 207094 - DNA, 25 bp, probe
gcaggaagggggacctggccagaac

SEQ ID NO: 207095 - DNA, 25 bp, probe
gcaggaagtggtcttggtgccagcc

SEQ ID NO: 207096 - DNA, 25 bp, probe
gcaggaatggaaacttgaggtcact

SEQ ID NO: 207097 - DNA, 25 bp, probe
gcagtaattacagcattgcaggaaa

SEQ ID NO: 207098 - DNA, 25 bp, probe
gcatctcctctaaggccatgggaat

SEQ ID NO: 207099 - DNA, 25 bp, probe
tgcactagtctccatttctgggaag

SEQ ID NO: 207100 - DNA, 25 bp, probe
gcatcccttcatcgtggatttaatt

SEQ ID NO: 207101 - DNA, 25 bp, probe
gcagccactaccctgggattaatct

SEQ ID NO: 207102 - DNA, 25 bp, probe
gcagaacataccgggtggtccctgg

SEQ ID NO: 207103 - DNA, 25 bp, probe
gcagaacataccgggtggtccctgg

SEQ ID NO: 207104 - DNA, 25 bp, probe
gcagaccatgaaagggcgtctccct

SEQ ID NO: 207105 - DNA, 25 bp, probe
gcatgcagccattgggggaatcccc

SEQ ID NO: 207106 - DNA, 25 bp, probe
gcatgaggctgagggcaagaccccc

SEQ ID NO: 207107 - DNA, 25 bp, probe
gcatacggatgcctggcaaccttgc

SEQ ID NO: 207108 - DNA, 25 bp, probe
gcatcaagtgttcgagtccctgagc

SEQ ID NO: 207109 - DNA, 25 bp, probe
gcatcaagtgttcgagtccctgagc

SEQ ID NO: 207110 - DNA, 25 bp, probe
gcatcaagtgtgcggagacaggcgg

SEQ ID NO: 207111 - DNA, 25 bp, probe
gcatgcaatcgctctgaatggcagt

SEQ ID NO: 207112 - DNA, 25 bp, probe
gcatgctttgatccgaattcttcgc

SEQ ID NO: 207113 - DNA, 25 bp, probe
gcatcttggtccgatactctgagag

SEQ ID NO: 207114 - DNA, 25 bp, probe
gcatgcattttacacacattggagg

SEQ ID NO: 207115 - DNA, 25 bp, probe
gcatctagtgtactgagcctgcggt

SEQ ID NO: 207116 - DNA, 25 bp, probe
gcatctggcatgaactacctcagta

SEQ ID NO: 207117 - DNA, 25 bp, probe
gcatggacagtcactcttgcactat

SEQ ID NO: 207118 - DNA, 25 bp, probe
gcatggacagtcactcttgcactat

SEQ ID NO: 207119 - DNA, 25 bp, probe
gcatggtcgtgaaagctctcctaat

SEQ ID NO: 207120 - DNA, 25 bp, probe
gcatgggcaccaaagtcctttgatg

SEQ ID NO: 207121 - DNA, 25 bp, probe
gcatcggcagggaatgaagctttga

SEQ ID NO: 207122 - DNA, 25 bp, probe
gcatcgtggagacagggcatttgag

SEQ ID NO: 207123 - DNA, 25 bp, probe
gcatcgtggagacagggcatttgag

SEQ ID NO: 207124 - DNA, 25 bp, probe
gcaggcctaggatggtgctgtctag

SEQ ID NO: 207125 - DNA, 25 bp, probe
gcatcgcagatgggggttctttcag

SEQ ID NO: 207126 - DNA, 25 bp, probe
gcatcaaggagggcttctccttcca

SEQ ID NO: 207127 - DNA, 25 bp, probe
gcatcaaggagggcttctccttcca

SEQ ID NO: 207128 - DNA, 25 bp, probe
gcatcaagtactcatttgcctttga

SEQ ID NO: 207129 - DNA, 25 bp, probe
gcatcaagtactcatttgcctttga

SEQ ID NO: 207130 - DNA, 25 bp, probe
gcatctagaaccttgttgcctgtgt

SEQ ID NO: 207131 - DNA, 25 bp, probe
gcatcctgcagggcattgtgtcctg

SEQ ID NO: 207132 - DNA, 25 bp, probe
gcatcaatgcacatcttggtattga

SEQ ID NO: 207133 - DNA, 25 bp, probe
gcatcaatcgcatttatggattcta

SEQ ID NO: 207134 - DNA, 25 bp, probe
gcatcaatcgcatttatggattcta

SEQ ID NO: 207135 - DNA, 25 bp, probe
gcatacattgagcgcatgaattcca

SEQ ID NO: 207136 - DNA, 25 bp, probe
gcatacatgtgagagctatttcttt

SEQ ID NO: 207137 - DNA, 25 bp, probe
gcatgagcatcatccagcttttttt

SEQ ID NO: 207138 - DNA, 25 bp, probe
gcatgcagcacagaactttgaacct

SEQ ID NO: 207139 - DNA, 25 bp, probe
gcatccccaacactgtgtggacaat

SEQ ID NO: 207140 - DNA, 25 bp, probe
gaatccccctgtaatggaccagttc

SEQ ID NO: 207141 - DNA, 25 bp, probe
gaatacccaggtggagtgaaaattg

SEQ ID NO: 207142 - DNA, 25 bp, probe
gcaaactcgggtggaccaaattgtg

SEQ ID NO: 207143 - DNA, 25 bp, probe
gcaaactcgggtggaccaaattgtg

SEQ ID NO: 207144 - DNA, 25 bp, probe
gcagacgacggactgagaccaaact

SEQ ID NO: 207145 - DNA, 25 bp, probe
gcatgaccggaaaggccaagacccg

SEQ ID NO: 207146 - DNA, 25 bp, probe
gcatacacgctggtgggccaatgaa

SEQ ID NO: 207147 - DNA, 25 bp, probe
gcataaggacttggctgcgcgtaac

SEQ ID NO: 207148 - DNA, 25 bp, probe
gcagagggaactgtgagtgtctaag

SEQ ID NO: 207149 - DNA, 25 bp, probe
gcagataggaagtggaggttcaagc

SEQ ID NO: 207150 - DNA, 25 bp, probe
gcagatttcctgtgtggggttcagc

SEQ ID NO: 207151 - DNA, 25 bp, probe
gcaagtcgtctgtgggaagtttctg

SEQ ID NO: 207152 - DNA, 25 bp, probe
gcaagtcgtctgtgggaagtttctg

SEQ ID NO: 207153 - DNA, 25 bp, probe
gcagggctgttggtgggaagttttc

SEQ ID NO: 207154 - DNA, 25 bp, probe
gcagggtagcccagtgcaaggttca

SEQ ID NO: 207155 - DNA, 25 bp, probe
gcagggacaaccaccaggtgtcaaa

SEQ ID NO: 207156 - DNA, 25 bp, probe
gcagggatcgttacccgaactgcat

SEQ ID NO: 207157 - DNA, 25 bp, probe
gcatggtgttcactacctcgaagtc

SEQ ID NO: 207158 - DNA, 25 bp, probe
gcatcattgttcacagcccagaatg

SEQ ID NO: 207159 - DNA, 25 bp, probe
gcatgcataataagtcacagccaaa

SEQ ID NO: 207160 - DNA, 25 bp, probe
gcatgctcttctctcacatggagaa

SEQ ID NO: 207161 - DNA, 25 bp, probe
gcatgctcttctctcacatggagaa

SEQ ID NO: 207162 - DNA, 25 bp, probe
gcatcctatgcctcagctggatgga

SEQ ID NO: 207163 - DNA, 25 bp, probe
gcatcgctcagatccgtggtgagat

SEQ ID NO: 207164 - DNA, 25 bp, probe
gcatcgccagcatttcgatcctcgt

SEQ ID NO: 207165 - DNA, 25 bp, probe
gcatctgaagttgcagtcttgcgtg

SEQ ID NO: 207166 - DNA, 25 bp, probe
gcatctgaagttgcagtcttgcgtg

SEQ ID NO: 207167 - DNA, 25 bp, probe
gcatctggagttggggcacagcgag

SEQ ID NO: 207168 - DNA, 25 bp, probe
gcatcgcagaatggcgaggacgcca

SEQ ID NO: 207169 - DNA, 25 bp, probe
gcatcgcggatgaagacgcacggca

SEQ ID NO: 207170 - DNA, 25 bp, probe
gcatcgcggatgaagacgcacggca

SEQ ID NO: 207171 - DNA, 25 bp, probe
gcatccagtggaagaaccacgatca

SEQ ID NO: 207172 - DNA, 25 bp, probe
gcatgccagggacccaatcaagcat

SEQ ID NO: 207173 - DNA, 25 bp, probe
gcatgcacaggagctccaagggctc

SEQ ID NO: 207174 - DNA, 25 bp, probe
gcatgcacaggagctccaagggctc

SEQ ID NO: 207175 - DNA, 25 bp, probe
gcatccaggagagccacaaggctag

SEQ ID NO: 207176 - DNA, 25 bp, probe
gcatccaatggaactcaaagcctac

SEQ ID NO: 207177 - DNA, 25 bp, probe
gcatccaataactcagaaccatcca

SEQ ID NO: 207178 - DNA, 25 bp, probe
gcatggcgtacctcatgaagaccaa

SEQ ID NO: 207179 - DNA, 25 bp, probe
gcatggcctacatggaacgcatgaa

SEQ ID NO: 207180 - DNA, 25 bp, probe
gcaggcccagatagataaggagagt

SEQ ID NO: 207181 - DNA, 25 bp, probe
gcagcccaaaagatcaggggtggag

SEQ ID NO: 207182 - DNA, 25 bp, probe
gcacccctgggttcaggggtgcgcc

SEQ ID NO: 207183 - DNA, 25 bp, probe
gcatctcccgtcatccagggagacc

SEQ ID NO: 207184 - DNA, 25 bp, probe
gcatcaacacaatttccaggggacc

SEQ ID NO: 207185 - DNA, 25 bp, probe
gcatccacctaaacaagtggcgact

SEQ ID NO: 207186 - DNA, 25 bp, probe
gcatccacctatgtaacaaggcacc

SEQ ID NO: 207187 - DNA, 25 bp, probe
gcatccaccaaggaggcacaaggcg

SEQ ID NO: 207188 - DNA, 25 bp, probe
gcatccccagtgacggaaagggcat

SEQ ID NO: 207189 - DNA, 25 bp, probe
gcatcccttggaggcagcagtgggg

SEQ ID NO: 207190 - DNA, 25 bp, probe
gcatccacttcggattcagtgggtg

SEQ ID NO: 207191 - DNA, 25 bp, probe
gcatgaacttgtgggatggtggggt

SEQ ID NO: 207192 - DNA, 25 bp, probe
gcaggactgggggaactggagtgtc

SEQ ID NO: 207193 - DNA, 25 bp, probe
gcaggaggaatgcctttcagggtgt

SEQ ID NO: 207194 - DNA, 25 bp, probe
gcatggagaattccgcttcggtgga

SEQ ID NO: 207195 - DNA, 25 bp, probe
gcatctgagagataagcttcggcag

SEQ ID NO: 207196 - DNA, 25 bp, probe
gcatctgagagataagcttcggcag

SEQ ID NO: 207197 - DNA, 25 bp, probe
gcatcagcaagacaatgacactgga

SEQ ID NO: 207198 - DNA, 25 bp, probe
gcatgctgaccacaatggacagtag

SEQ ID NO: 207199 - DNA, 25 bp, probe
gcatctgcacaaaggtggacatgtt

SEQ ID NO: 207200 - DNA, 25 bp, probe
gcatgctcagtgaagcctagacatt

SEQ ID NO: 207201 - DNA, 25 bp, probe
gcatgctcagtgaagcctagacatt

SEQ ID NO: 207202 - DNA, 25 bp, probe
gcatgcgcagtgggctgctaacact

SEQ ID NO: 207203 - DNA, 25 bp, probe
gcatcgcagatgtgtgtgagtccat

SEQ ID NO: 207204 - DNA, 25 bp, probe
gcatcagcaggaattgctgtgtccc

SEQ ID NO: 207205 - DNA, 25 bp, probe
gcatgcacaaacatgtgtgtacatg

SEQ ID NO: 207206 - DNA, 25 bp, probe
gcatcccaacattgtgcatatgctt

SEQ ID NO: 207207 - DNA, 25 bp, probe
gcatcccagacttgctgaatcggaa

SEQ ID NO: 207208 - DNA, 25 bp, probe
gcatcccagaactgaacagtgtggt

SEQ ID NO: 207209 - DNA, 25 bp, probe
gcatctctgcagaaagccaacaggt

SEQ ID NO: 207210 - DNA, 25 bp, probe
gcaggctgaaaaccatgacaccttc

SEQ ID NO: 207211 - DNA, 25 bp, probe
gcagtctacaacttcaccaaatttg

SEQ ID NO: 207212 - DNA, 25 bp, probe
gcagtctacaacttcaccaaatttg

SEQ ID NO: 207213 - DNA, 25 bp, probe
gcagtgctaaacatccctagcatgc

SEQ ID NO: 207214 - DNA, 25 bp, probe
gcaggctggaccactggtccttact

SEQ ID NO: 207215 - DNA, 25 bp, probe
gcaggtgtgttaactattgccttac

SEQ ID NO: 207216 - DNA, 25 bp, probe
gcagttggatgagacacacccttac

SEQ ID NO: 207217 - DNA, 25 bp, probe
gcagttgaggacacctaggttcacg

SEQ ID NO: 207218 - DNA, 25 bp, probe
gcatggtgggacacacctgtggtcc

SEQ ID NO: 207219 - DNA, 25 bp, probe
gcaggctggaccagcaactgcgggg

SEQ ID NO: 207220 - DNA, 25 bp, probe
gcaggcacggtcaaaagggcaagtg

SEQ ID NO: 207221 - DNA, 25 bp, probe
gcaggcacagtttgatgaagggcta

SEQ ID NO: 207222 - DNA, 25 bp, probe
gcatggcaagttctgtggttctgag

SEQ ID NO: 207223 - DNA, 25 bp, probe
gcatggcaagttctgtggttctgag

SEQ ID NO: 207224 - DNA, 25 bp, probe
gcatggcaagttctgtggttctgag

SEQ ID NO: 207225 - DNA, 25 bp, probe
gcatggcaagttctgtggttctgag

SEQ ID NO: 207226 - DNA, 25 bp, probe
gcatggcaagttctgtggttctgag

SEQ ID NO: 207227 - DNA, 25 bp, probe
gcatggtccttgtgatggtattact

SEQ ID NO: 207228 - DNA, 25 bp, probe
gcatcagtactttgtatgggatatt

SEQ ID NO: 207229 - DNA, 25 bp, probe
gcatcagtggctactgggtggactc

SEQ ID NO: 207230 - DNA, 25 bp, probe
gcatgcaggtgctcatggacctgcc

SEQ ID NO: 207231 - DNA, 25 bp, probe
gcagaggtaccacgaagctaccttt

SEQ ID NO: 207232 - DNA, 25 bp, probe
gcagaggtaccacgaagctaccttt

SEQ ID NO: 207233 - DNA, 25 bp, probe
gcaggctgaattgtgatcctacctt

SEQ ID NO: 207234 - DNA, 25 bp, probe
gcaggctcatgtactgctacgtacc

SEQ ID NO: 207235 - DNA, 25 bp, probe
gcatgatgctcaccttcaatgctga

SEQ ID NO: 207236 - DNA, 25 bp, probe
gcatgaacagcctcatggatgaaga

SEQ ID NO: 207237 - DNA, 25 bp, probe
gcatgtacagtcactggaaactgct

SEQ ID NO: 207238 - DNA, 25 bp, probe
gcagtacgtttctccagagctgctc

SEQ ID NO: 207239 - DNA, 25 bp, probe
gcaggcctgtagacttgccatggtg

SEQ ID NO: 207240 - DNA, 25 bp, probe
gcatcgcgtgatatccgttgatgtg

SEQ ID NO: 207241 - DNA, 25 bp, probe
gcatccttccacactgtgtatgtga

SEQ ID NO: 207242 - DNA, 25 bp, probe
gcatcagtttaggccttggcttgat

SEQ ID NO: 207243 - DNA, 25 bp, probe
gcatgcagtttgtccattgtgacag

SEQ ID NO: 207244 - DNA, 25 bp, probe
gcatctgattcttgttgctgtacaa

SEQ ID NO: 207245 - DNA, 25 bp, probe
gcatctataatgtcagcttatccta

SEQ ID NO: 207246 - DNA, 25 bp, probe
gcatctagaatgtacatcacatttt

SEQ ID NO: 207247 - DNA, 25 bp, probe
gcatctggcacaataaacattctct

SEQ ID NO: 207248 - DNA, 25 bp, probe
gcatcatggacaagaacgcagcact

SEQ ID NO: 207249 - DNA, 25 bp, probe
gcatcatggacaagaacgcagcact

SEQ ID NO: 207250 - DNA, 25 bp, probe
gcatgcggcagcagagaaagcacat

SEQ ID NO: 207251 - DNA, 25 bp, probe
gcatgctggagaatgagagaccaca

SEQ ID NO: 207252 - DNA, 25 bp, probe
gcatgcagggaattgctattgctaa

SEQ ID NO: 207253 - DNA, 25 bp, probe
gcatgctgggcaatttcactgtgcc

SEQ ID NO: 207254 - DNA, 25 bp, probe
gcatcatgagtattttactagagat

SEQ ID NO: 207255 - DNA, 25 bp, probe
gcatgctggcacatttattacaata

SEQ ID NO: 207256 - DNA, 25 bp, probe
gcatgggcacttatgaggacaaagt

SEQ ID NO: 207257 - DNA, 25 bp, probe
gcatctggcttagctgaagaccaag

SEQ ID NO: 207258 - DNA, 25 bp, probe
gcatctggcttagctgaagaccaag

SEQ ID NO: 207259 - DNA, 25 bp, probe
gcatcgctgtgtagtgtgaaagaaa

SEQ ID NO: 207260 - DNA, 25 bp, probe
gcatgcagttgggttcaaatgccaa

SEQ ID NO: 207261 - DNA, 25 bp, probe
gcatctggagggccatcttggcaca

SEQ ID NO: 207262 - DNA, 25 bp, probe
gcatcatgggggatttggcacaaaa

SEQ ID NO: 207263 - DNA, 25 bp, probe
gcatcgaggggtgcttagccccagg

SEQ ID NO: 207264 - DNA, 25 bp, probe
gcaggtggggtacttacctgtgagg

SEQ ID NO: 207265 - DNA, 25 bp, probe
gcaccgagggaacaactcgagcttt

SEQ ID NO: 207266 - DNA, 25 bp, probe
gcaccgagggaacaactcgagcttt

SEQ ID NO: 207267 - DNA, 25 bp, probe
gggcaaaggagagcaaacaactttc

SEQ ID NO: 207268 - DNA, 25 bp, probe
gcatgggaaaagtccagaaacctgt

SEQ ID NO: 207269 - DNA, 25 bp, probe
gcaggggaacagcaagctaccctga

SEQ ID NO: 207270 - DNA, 25 bp, probe
gcagtgggtactcgtcagcaaaaat

SEQ ID NO: 207271 - DNA, 25 bp, probe
gcatgggttgaacttccaaaatata

SEQ ID NO: 207272 - DNA, 25 bp, probe
gcaggttttcagatctaggatttga

SEQ ID NO: 207273 - DNA, 25 bp, probe
gcagtaacttgggtccagtatttac

SEQ ID NO: 207274 - DNA, 25 bp, probe
gcagttagagtaggtgaatttgttt

SEQ ID NO: 207275 - DNA, 25 bp, probe
gcatgtgtatataagcctcacattt

SEQ ID NO: 207276 - DNA, 25 bp, probe
gcatgtgattccagattcctgcggt

SEQ ID NO: 207277 - DNA, 25 bp, probe
gcagtgtgtacaaagtcagccgcct

SEQ ID NO: 207278 - DNA, 25 bp, probe
gcaggttccatgaaaacagcccttt

SEQ ID NO: 207279 - DNA, 25 bp, probe
gcatgtggtcctggaaatcccttat

SEQ ID NO: 207280 - DNA, 25 bp, probe
gcatgtttgttgtatacttccttat

SEQ ID NO: 207281 - DNA, 25 bp, probe
gcatgtttctaattgacttactggg

SEQ ID NO: 207282 - DNA, 25 bp, probe
gcagtattttcattatcgctacggg

SEQ ID NO: 207283 - DNA, 25 bp, probe
gcatcttcttttttagggcacagga

SEQ ID NO: 207284 - DNA, 25 bp, probe
tacttctatttgtggggaaccttca

SEQ ID NO: 207285 - DNA, 25 bp, probe
gacctgtaattgtgggaaaactata

SEQ ID NO: 207286 - DNA, 25 bp, probe
gaccggtattatcgggaaccatttg

SEQ ID NO: 207287 - DNA, 25 bp, probe
gcagggttttggttggagacccttg

SEQ ID NO: 207288 - DNA, 25 bp, probe
gcagtcttttgttactgggacactt

SEQ ID NO: 207289 - DNA, 25 bp, probe
gcagtcttttgttactgggacactt

SEQ ID NO: 207290 - DNA, 25 bp, probe
gcagtgatttatttcctgggttcat

SEQ ID NO: 207291 - DNA, 25 bp, probe
gcaggaaaagttgatggtattcatt

SEQ ID NO: 207292 - DNA, 25 bp, probe
gcaggcaagaggatccaggtcctat

SEQ ID NO: 207293 - DNA, 25 bp, probe
gcaggccaaggagtacctgtaccac

SEQ ID NO: 207294 - DNA, 25 bp, probe
gcaggtggtggaggagccgtcaccc

SEQ ID NO: 207295 - DNA, 25 bp, probe
gcagttccaggagatgcctacaccg

SEQ ID NO: 207296 - DNA, 25 bp, probe
gcagtgtccaggcaatgcgaaccca

SEQ ID NO: 207297 - DNA, 25 bp, probe
gcaggttagcatcaggaggacccag

SEQ ID NO: 207298 - DNA, 25 bp, probe
gcaggcattactaaaagaaccacca

SEQ ID NO: 207299 - DNA, 25 bp, probe
gcagacctactaaaacatgaggccc

SEQ ID NO: 207300 - DNA, 25 bp, probe
gcaatactgtaaaaaagcggccgcg

SEQ ID NO: 207301 - DNA, 25 bp, probe
gcaaagctgccacccaaggggaagc

SEQ ID NO: 207302 - DNA, 25 bp, probe
gcagacgatgccacgacggtggaca

SEQ ID NO: 207303 - DNA, 25 bp, probe
gcagacgatgccacgacggtggaca

SEQ ID NO: 207304 - DNA, 25 bp, probe
gcatgtggagcgattccggtatggc

SEQ ID NO: 207305 - DNA, 25 bp, probe
gcaggaggagttctcgcgtgatggg

SEQ ID NO: 207306 - DNA, 25 bp, probe
gcagcaaaaagtccccgctgggtgc

SEQ ID NO: 207307 - DNA, 25 bp, probe
gcagcaaaaagtccccgctgggtgc

SEQ ID NO: 207308 - DNA, 25 bp, probe
gcagcagggaaggcccaactggttc

SEQ ID NO: 207309 - DNA, 25 bp, probe
gcaggaggaggtgccaacagtgtta

SEQ ID NO: 207310 - DNA, 25 bp, probe
gcaggaggaggtgccaacagtgtta

SEQ ID NO: 207311 - DNA, 25 bp, probe
gcatgcagaagctgtgcccagaagg

SEQ ID NO: 207312 - DNA, 25 bp, probe
gcatgcgagtgctcatttcaggatg

SEQ ID NO: 207313 - DNA, 25 bp, probe
gcatctgatgtcgacaatgtgaaag

SEQ ID NO: 207314 - DNA, 25 bp, probe
gcatctgactgcaataatgtgctaa

SEQ ID NO: 207315 - DNA, 25 bp, probe
gcatgagcacctaaatcactataac

SEQ ID NO: 207316 - DNA, 25 bp, probe
gcatggttttgaggcacattatccc

SEQ ID NO: 207317 - DNA, 25 bp, probe
gcatggttttgaggcacattatccc

SEQ ID NO: 207318 - DNA, 25 bp, probe
gcaggtatttaagcaatctcatcca

SEQ ID NO: 207319 - DNA, 25 bp, probe
gcaggtttgtaatgcaaaaggctga

SEQ ID NO: 207320 - DNA, 25 bp, probe
gcagtatttgtacctccagaatggc

SEQ ID NO: 207321 - DNA, 25 bp, probe
gcagtagttgatgccctgcagcttt

SEQ ID NO: 207322 - DNA, 25 bp, probe
gcaggagaagctgcacctcaggttc

SEQ ID NO: 207323 - DNA, 25 bp, probe
gcaggagaagctgcacctcaggttc

SEQ ID NO: 207324 - DNA, 25 bp, probe
gcaggcagggctgactctaggtgcc

SEQ ID NO: 207325 - DNA, 25 bp, probe
gcaggggagtaataagggctcttcc

SEQ ID NO: 207326 - DNA, 25 bp, probe
gcaggggagtaataagggctcttcc

SEQ ID NO: 207327 - DNA, 25 bp, probe
gcaggggtgtccagaatctgcgtct

SEQ ID NO: 207328 - DNA, 25 bp, probe
gcagggggatttgttttgtgttttg

SEQ ID NO: 207329 - DNA, 25 bp, probe
gcatgcgacgtgttgggatttttgg

SEQ ID NO: 207330 - DNA, 25 bp, probe
gcaggacctatttggagcattacga

SEQ ID NO: 207331 - DNA, 25 bp, probe
gcagagacctacttcaactacaagt

SEQ ID NO: 207332 - DNA, 25 bp, probe
gcagagaccaaattgcaaaactatg

SEQ ID NO: 207333 - DNA, 25 bp, probe
gcatgagaccaaagtctccacactc

SEQ ID NO: 207334 - DNA, 25 bp, probe
gcatgagatcctttgctctatgacc

SEQ ID NO: 207335 - DNA, 25 bp, probe
gcatgaaccgttattgatccgaatg

SEQ ID NO: 207336 - DNA, 25 bp, probe
gcatgaaactttgtagcatcgggct

SEQ ID NO: 207337 - DNA, 25 bp, probe
gcatgaaacttttatctgatagtca

SEQ ID NO: 207338 - DNA, 25 bp, probe
gcagaggagctcattactaggatat

SEQ ID NO: 207339 - DNA, 25 bp, probe
gcagtgagaggccttcctagttagg

SEQ ID NO: 207340 - DNA, 25 bp, probe
gcagtccaggccacctgagttatct

SEQ ID NO: 207341 - DNA, 25 bp, probe
gaattctgagccagcactttctttc

SEQ ID NO: 207342 - DNA, 25 bp, probe
gaattctgagccagcactttctttc

SEQ ID NO: 207343 - DNA, 25 bp, probe
gaattgggcctcctgatattctttc

SEQ ID NO: 207344 - DNA, 25 bp, probe
gaatgagcccctgggttttcacttt

SEQ ID NO: 207345 - DNA, 25 bp, probe
gaatactatcttgggtttaccgtat

SEQ ID NO: 207346 - DNA, 25 bp, probe
gaatagtgtcctggggttccatgaa

SEQ ID NO: 207347 - DNA, 25 bp, probe
gcaaagttacgcaaaggacctgata

SEQ ID NO: 207348 - DNA, 25 bp, probe
gcagaatttccccagaaacctgtaa

SEQ ID NO: 207349 - DNA, 25 bp, probe
gcagacaaccctgcacaagactcat

SEQ ID NO: 207350 - DNA, 25 bp, probe
gcatgacacaaccgaatacaaactc

SEQ ID NO: 207351 - DNA, 25 bp, probe
gcatgattcaccaagcagtactaca

SEQ ID NO: 207352 - DNA, 25 bp, probe
gcatgattcaatactgaacactatc

SEQ ID NO: 207353 - DNA, 25 bp, probe
gcatgattcaatactgaacactatc

SEQ ID NO: 207354 - DNA, 25 bp, probe
gcatcgccatatccgagagcagcta

SEQ ID NO: 207355 - DNA, 25 bp, probe
gcatcgccatgagcaacagcatgat

SEQ ID NO: 207356 - DNA, 25 bp, probe
gcatgccagatggtcacaccgaagg

SEQ ID NO: 207357 - DNA, 25 bp, probe
gcatgccagatggtcacaccgaagg

SEQ ID NO: 207358 - DNA, 25 bp, probe
gcatgcgcagctggtgcagatcatc

SEQ ID NO: 207359 - DNA, 25 bp, probe
gcatgcgctgcagataactcatagg

SEQ ID NO: 207360 - DNA, 25 bp, probe
gcatgccacagaggaatctctcatg

SEQ ID NO: 207361 - DNA, 25 bp, probe
gcatgatgacgaggatattgactgg

SEQ ID NO: 207362 - DNA, 25 bp, probe
gcatgctacagttattaatctggac

SEQ ID NO: 207363 - DNA, 25 bp, probe
gcatgtacaaaagtaccatagcaca

SEQ ID NO: 207364 - DNA, 25 bp, probe
gcaggactcaacgatactctggaca

SEQ ID NO: 207365 - DNA, 25 bp, probe
gcatgaaccacagaagctgcatggt

SEQ ID NO: 207366 - DNA, 25 bp, probe
gcatgaagccctgaagcttgctgag

SEQ ID NO: 207367 - DNA, 25 bp, probe
gcatgatggggtaaagcttagcaga

SEQ ID NO: 207368 - DNA, 25 bp, probe
gcatgaggacagagaccaaagcagc

SEQ ID NO: 207369 - DNA, 25 bp, probe
gcatctggcacgtggccaggagcca

SEQ ID NO: 207370 - DNA, 25 bp, probe
gcatctgtgcagcaggattcggagc

SEQ ID NO: 207371 - DNA, 25 bp, probe
gcatgcgctagccaggtagagagac

SEQ ID NO: 207372 - DNA, 25 bp, probe
gcatgcggaggcctgtgcagggaca

SEQ ID NO: 207373 - DNA, 25 bp, probe
gcatgcggaggcctgtgcagggaca

SEQ ID NO: 207374 - DNA, 25 bp, probe
gcaggtgaggctcggcttggattat

SEQ ID NO: 207375 - DNA, 25 bp, probe
gcatcgtgaggcaggtgctgcacgg

SEQ ID NO: 207376 - DNA, 25 bp, probe
gcatcgagggccgaggtcacggcca

SEQ ID NO: 207377 - DNA, 25 bp, probe
gcatcgtgggtggagaggacgccga

SEQ ID NO: 207378 - DNA, 25 bp, probe
gcatcgtgcggggcaaaatgaggag

SEQ ID NO: 207379 - DNA, 25 bp, probe
gcatcgtgagggccagagacaggaa

SEQ ID NO: 207380 - DNA, 25 bp, probe
gcatcgtgaggttcattgtctccaa

SEQ ID NO: 207381 - DNA, 25 bp, probe
gcatcgtgaggttcattgtctccaa

SEQ ID NO: 207382 - DNA, 25 bp, probe
gcatctgattgagacatggtgtaca

SEQ ID NO: 207383 - DNA, 25 bp, probe
gcatgctgtatgttacaggtgtgtt

SEQ ID NO: 207384 - DNA, 25 bp, probe
gcatctgaatatgaagagtctgttt

SEQ ID NO: 207385 - DNA, 25 bp, probe
gcatctgtaaatttggactgttttc

SEQ ID NO: 207386 - DNA, 25 bp, probe
gcatgtgtaaggagaacgtcttccc

SEQ ID NO: 207387 - DNA, 25 bp, probe
gcatgtgtaaggaaggattacggcc

SEQ ID NO: 207388 - DNA, 25 bp, probe
gcatggtattggaataactcacagg

SEQ ID NO: 207389 - DNA, 25 bp, probe
gcagtcttaggaacagcaccataaa

SEQ ID NO: 207390 - DNA, 25 bp, probe
gcaggctgtagaccgcagagccaag

SEQ ID NO: 207391 - DNA, 25 bp, probe
gcaggcgcagagtcctatagaacag

SEQ ID NO: 207392 - DNA, 25 bp, probe
gcaggcggaggacattagagacatc

SEQ ID NO: 207393 - DNA, 25 bp, probe
gcaggggagtgatgcttcaggacgt

SEQ ID NO: 207394 - DNA, 25 bp, probe
gcaggttggtgattcagtccgacct

SEQ ID NO: 207395 - DNA, 25 bp, probe
gaggggggagtcccttgaactactg

SEQ ID NO: 207396 - DNA, 25 bp, probe
gaaggtggccgtgaattaagtgatt

SEQ ID NO: 207397 - DNA, 25 bp, probe
gaagtaggacttgtagtagagctgc

SEQ ID NO: 207398 - DNA, 25 bp, probe
gcaggtcgaattgttcgtgaaggct

SEQ ID NO: 207399 - DNA, 25 bp, probe
gcaggtcccagagtttggtacaggc

SEQ ID NO: 207400 - DNA, 25 bp, probe
gcaggtcccagagtttggtacaggc

SEQ ID NO: 207401 - DNA, 25 bp, probe
gcaggatgcccacgtcatcctgaac

SEQ ID NO: 207402 - DNA, 25 bp, probe
gcatgaggcccacgagttctccaac

SEQ ID NO: 207403 - DNA, 25 bp, probe
gcaggggtcgtgggtctcacgatgc

SEQ ID NO: 207404 - DNA, 25 bp, probe
gcagaaggtcgatgtgtctaccagg

SEQ ID NO: 207405 - DNA, 25 bp, probe
gcatgacaagctcgtgaggctctac

SEQ ID NO: 207406 - DNA, 25 bp, probe
gcatgacaagctcgtgaggctctac

SEQ ID NO: 207407 - DNA, 25 bp, probe
gcatgtccctgaagaggtgctagct

SEQ ID NO: 207408 - DNA, 25 bp, probe
gcatgatcctcagtatgagaatcta

SEQ ID NO: 207409 - DNA, 25 bp, probe
gcatgctcaccagccatgtatgcat

SEQ ID NO: 207410 - DNA, 25 bp, probe
gcatgtgctccagcaagtctgagtc

SEQ ID NO: 207411 - DNA, 25 bp, probe
gcatgtgttcaacagcctggaagac

SEQ ID NO: 207412 - DNA, 25 bp, probe
gcaggttatcagagatcaaagattg

SEQ ID NO: 207413 - DNA, 25 bp, probe
gcagggctaaggcatataggatttt

SEQ ID NO: 207414 - DNA, 25 bp, probe
gcagctggtaaacggaatggtgcca

SEQ ID NO: 207415 - DNA, 25 bp, probe
gcactgttaataactctcagcaggc

SEQ ID NO: 207416 - DNA, 25 bp, probe
gcactgtgcttagtgacccagagcc

SEQ ID NO: 207417 - DNA, 25 bp, probe
gcatgggcttagagctggcatgacc

SEQ ID NO: 207418 - DNA, 25 bp, probe
gcatgggcttagagctggcatgacc

SEQ ID NO: 207419 - DNA, 25 bp, probe
gcatggagattatacagacaaagca

SEQ ID NO: 207420 - DNA, 25 bp, probe
gcatggcttttctacacacactaga

SEQ ID NO: 207421 - DNA, 25 bp, probe
gcatgtattgtttgagcaacttgga

SEQ ID NO: 207422 - DNA, 25 bp, probe
gcatgttggtgggtggtcactgaga

SEQ ID NO: 207423 - DNA, 25 bp, probe
gcatgaagggggcagtcaccatcac

SEQ ID NO: 207424 - DNA, 25 bp, probe
gcatgaagggggcagtcaccatcac

SEQ ID NO: 207425 - DNA, 25 bp, probe
gcatgaagctgtagggactcatctt

SEQ ID NO: 207426 - DNA, 25 bp, probe
gcatgcacgttcagacagctgcatt

SEQ ID NO: 207427 - DNA, 25 bp, probe
gcatgacgcattgtggcgtgctgga

SEQ ID NO: 207428 - DNA, 25 bp, probe
gcatgggcattacgggtgttgaagg

SEQ ID NO: 207429 - DNA, 25 bp, probe
gcagtggactggtggtgcttggggg

SEQ ID NO: 207430 - DNA, 25 bp, probe
gcagtggactggtggtgcttggggg

SEQ ID NO: 207431 - DNA, 25 bp, probe
gcaggcaacgcctaggctttgtgga

SEQ ID NO: 207432 - DNA, 25 bp, probe
gcaggaacgcactctgttgctatgg

SEQ ID NO: 207433 - DNA, 25 bp, probe
gcaggacaaatcccggctgaatgag

SEQ ID NO: 207434 - DNA, 25 bp, probe
gcaggactcatatccaggctcaaat

SEQ ID NO: 207435 - DNA, 25 bp, probe
gcaggcccagaagtctggctcagga

SEQ ID NO: 207436 - DNA, 25 bp, probe
gcaggacacaatgctgtggacaggc

SEQ ID NO: 207437 - DNA, 25 bp, probe
gcaggattcaaccttgtgtactggg

SEQ ID NO: 207438 - DNA, 25 bp, probe
gcaggatgttcactctatttattgg

SEQ ID NO: 207439 - DNA, 25 bp, probe
gcaggagctggcattattgttactg

SEQ ID NO: 207440 - DNA, 25 bp, probe
gcaggagctggcattattgttactg

SEQ ID NO: 207441 - DNA, 25 bp, probe
gcagaaggtgttcctttctcacagt

SEQ ID NO: 207442 - DNA, 25 bp, probe
gcagaaggtgttcctttctcacagt

SEQ ID NO: 207443 - DNA, 25 bp, probe
gcatgaagcttttacttacttgggg

SEQ ID NO: 207444 - DNA, 25 bp, probe
gcatgaacccatccactgatatttg

SEQ ID NO: 207445 - DNA, 25 bp, probe
gcatgaacccatccactgatatttg

SEQ ID NO: 207446 - DNA, 25 bp, probe
gcatgaaccctgccgatattgagtc

SEQ ID NO: 207447 - DNA, 25 bp, probe
gcatgaaccctgccgatattgagtc

SEQ ID NO: 207448 - DNA, 25 bp, probe
gcatgatcaactcgccggtaggtaa

SEQ ID NO: 207449 - DNA, 25 bp, probe
gcatgatcaactcgccggtaggtaa

SEQ ID NO: 207450 - DNA, 25 bp, probe
gcagtaacggggggacctatactga

SEQ ID NO: 207451 - DNA, 25 bp, probe
gcaggaaggacggggaccttctgtg

SEQ ID NO: 207452 - DNA, 25 bp, probe
gcaggaaggatcaggatggggtctt

SEQ ID NO: 207453 - DNA, 25 bp, probe
gcagtcaagaaactaagccgtcctt

SEQ ID NO: 207454 - DNA, 25 bp, probe
gcagataagagaattacccctctaa

SEQ ID NO: 207455 - DNA, 25 bp, probe
gcaggaaacatttgacaccgtcgac

SEQ ID NO: 207456 - DNA, 25 bp, probe
gcatgaagaagcatggtatgcccat

SEQ ID NO: 207457 - DNA, 25 bp, probe
gcatgaaaacttggtgaatctcttg

SEQ ID NO: 207458 - DNA, 25 bp, probe
gcagggaacatgtcggagtccttca

SEQ ID NO: 207459 - DNA, 25 bp, probe
gcagggaacatgtcggagtccttca

SEQ ID NO: 207460 - DNA, 25 bp, probe
gcatggtggccagaggtgtcaccca

SEQ ID NO: 207461 - DNA, 25 bp, probe
gcatggtggccagtgggattgcggc

SEQ ID NO: 207462 - DNA, 25 bp, probe
gcatgagctgatgacactggatggc

SEQ ID NO: 207463 - DNA, 25 bp, probe
gcatgagctgatcagcctgtgccac

SEQ ID NO: 207464 - DNA, 25 bp, probe
gcatgtgctgagtagcgcagagcta

SEQ ID NO: 207465 - DNA, 25 bp, probe
gcagtgatcaatggctctcagcatc

SEQ ID NO: 207466 - DNA, 25 bp, probe
gcagtgatcaatggctctcagcatc

SEQ ID NO: 207467 - DNA, 25 bp, probe
gcatggatcagagctgcctgtcagc

SEQ ID NO: 207468 - DNA, 25 bp, probe
gcatggagcaatctcgcagtgcagt

SEQ ID NO: 207469 - DNA, 25 bp, probe
gcatggagcctggaactgcatcagt

SEQ ID NO: 207470 - DNA, 25 bp, probe
gcatgtgactctgaagctgacgaac

SEQ ID NO: 207471 - DNA, 25 bp, probe
gcatgtgactctgaagctgacgaac

SEQ ID NO: 207472 - DNA, 25 bp, probe
gcatggccctccaacttggaatagg

SEQ ID NO: 207473 - DNA, 25 bp, probe
gcagagattcccaacctgggattcc

SEQ ID NO: 207474 - DNA, 25 bp, probe
gcatgagttcctgccggagagatat

SEQ ID NO: 207475 - DNA, 25 bp, probe
gcatgagttcctgccggagagatat

SEQ ID NO: 207476 - DNA, 25 bp, probe
gcaggttcactgttagccagaatct

SEQ ID NO: 207477 - DNA, 25 bp, probe
gcaggattactttgatggcaatctg

SEQ ID NO: 207478 - DNA, 25 bp, probe
gcatggcaggtcttaaggaagctgc

SEQ ID NO: 207479 - DNA, 25 bp, probe
gcatgggcacatcaagaaggcactc

SEQ ID NO: 207480 - DNA, 25 bp, probe
gaagggatggtgaaaccgaagctcg

SEQ ID NO: 207481 - DNA, 25 bp, probe
gcactacaaagtaaaccctgaattc

SEQ ID NO: 207482 - DNA, 25 bp, probe
gcaggaaaagctgacacccagacaa

SEQ ID NO: 207483 - DNA, 25 bp, probe
gcaggagaatcacttgaacccagga

SEQ ID NO: 207484 - DNA, 25 bp, probe
gcagagaaacacggaaactaggaag

SEQ ID NO: 207485 - DNA, 25 bp, probe
gcagagaaagcctgtacccgaggga

SEQ ID NO: 207486 - DNA, 25 bp, probe
gcagtgcaaagcagttggtccgagg

SEQ ID NO: 207487 - DNA, 25 bp, probe
gcagctgaaatcggattcgtcccgc

SEQ ID NO: 207488 - DNA, 25 bp, probe
gcagctgaaatcggattcgtcccgc

SEQ ID NO: 207489 - DNA, 25 bp, probe
gcagcagaagtgggttagtcggttg

SEQ ID NO: 207490 - DNA, 25 bp, probe
gcagcagaagtgggttagtcggttg

SEQ ID NO: 207491 - DNA, 25 bp, probe
gcaggtagctgatgctaagttggtt

SEQ ID NO: 207492 - DNA, 25 bp, probe
gcagaaactgaagaagcacggttaa

SEQ ID NO: 207493 - DNA, 25 bp, probe
gcagaagccgaaggtgagccctttc

SEQ ID NO: 207494 - DNA, 25 bp, probe
gcagggcacaagaggagcaggttcc

SEQ ID NO: 207495 - DNA, 25 bp, probe
gcaggcgcaaactcgattttctacg

SEQ ID NO: 207496 - DNA, 25 bp, probe
gcaggtggaaaaccttttctacctg

SEQ ID NO: 207497 - DNA, 25 bp, probe
gcaggtccaagacacttattcatac

SEQ ID NO: 207498 - DNA, 25 bp, probe
gcaggtccatcctgacctggtatgg

SEQ ID NO: 207499 - DNA, 25 bp, probe
gcaggacacacctgaggtggatgaa

SEQ ID NO: 207500 - DNA, 25 bp, probe
gcaggagaagaaaggttggagcaga

SEQ ID NO: 207501 - DNA, 25 bp, probe
gcatgagaacaaacaggggtagggg

SEQ ID NO: 207502 - DNA, 25 bp, probe
gcagaacaaaaggcaaggtggggct

SEQ ID NO: 207503 - DNA, 25 bp, probe
gcagactgctcaaaccattcgtctg

SEQ ID NO: 207504 - DNA, 25 bp, probe
gcagacgtcagaatccgttcctgag

SEQ ID NO: 207505 - DNA, 25 bp, probe
gcatgactgtggtgccgtacttgga

SEQ ID NO: 207506 - DNA, 25 bp, probe
gcatgattcttcttggtctactgtg

SEQ ID NO: 207507 - DNA, 25 bp, probe
gcatgtctgcatgaaggtctacctg

SEQ ID NO: 207508 - DNA, 25 bp, probe
gcagtatgctgctgtggttagaagc

SEQ ID NO: 207509 - DNA, 25 bp, probe
gcagtatgctgctgtggttagaagc

SEQ ID NO: 207510 - DNA, 25 bp, probe
gcatgctattccattttgcagccag

SEQ ID NO: 207511 - DNA, 25 bp, probe
gcatgctattccattttgcagccag

SEQ ID NO: 207512 - DNA, 25 bp, probe
gcatgaacccatatatgagagcctg

SEQ ID NO: 207513 - DNA, 25 bp, probe
gcagcaactctatggtagggggaga

SEQ ID NO: 207514 - DNA, 25 bp, probe
gcaggtaccaagcctcagggtgaag

SEQ ID NO: 207515 - DNA, 25 bp, probe
gcagggacaaagatgagtggtgaaa

SEQ ID NO: 207516 - DNA, 25 bp, probe
gcaggggacaagaggctgtgggtgc

SEQ ID NO: 207517 - DNA, 25 bp, probe
gcagtggcagacgcaaggctttctg

SEQ ID NO: 207518 - DNA, 25 bp, probe
gcagttagactccaaagactctgtg

SEQ ID NO: 207519 - DNA, 25 bp, probe
gcagtgggactttgaaaacttgttt

SEQ ID NO: 207520 - DNA, 25 bp, probe
gcatgtggtgaaatcaaaatcactg

SEQ ID NO: 207521 - DNA, 25 bp, probe
gcatggcagaatcatcaaatctcat

SEQ ID NO: 207522 - DNA, 25 bp, probe
gcatgctcgagtcatcagccatgtg

SEQ ID NO: 207523 - DNA, 25 bp, probe
gcatgctcgagtcatcagccatgtg

SEQ ID NO: 207524 - DNA, 25 bp, probe
gcatgcttggattcatcagtctcgg

SEQ ID NO: 207525 - DNA, 25 bp, probe
gcatgttcagcattcaggtgatcag

SEQ ID NO: 207526 - DNA, 25 bp, probe
gcatgtgatggctcaggctgaagaa

SEQ ID NO: 207527 - DNA, 25 bp, probe
gcatgtgcagtcacgggagctcagc

SEQ ID NO: 207528 - DNA, 25 bp, probe
gcatggagtacctggcagagcagaa

SEQ ID NO: 207529 - DNA, 25 bp, probe
gcagggatactcagggacagggcat

SEQ ID NO: 207530 - DNA, 25 bp, probe
gcatgtatgtactcaggttcagggc

SEQ ID NO: 207531 - DNA, 25 bp, probe
gcatgatatgtactatagtgattct

SEQ ID NO: 207532 - DNA, 25 bp, probe
gcatgatttattagtttctctccac

SEQ ID NO: 207533 - DNA, 25 bp, probe
gcatgatttattagtttctctccac

SEQ ID NO: 207534 - DNA, 25 bp, probe
gcatgaattgatgagcttgttcgct

SEQ ID NO: 207535 - DNA, 25 bp, probe
gcatgagttgagttgcttctgaggt

SEQ ID NO: 207536 - DNA, 25 bp, probe
gcaggctggcattgtgagctggggt

SEQ ID NO: 207537 - DNA, 25 bp, probe
gcaggcctgcacctgatgtggaggt

SEQ ID NO: 207538 - DNA, 25 bp, probe
gcaggctatgccctgggtgtgggac

SEQ ID NO: 207539 - DNA, 25 bp, probe
gcaggctgcggcagggtctggaagc

SEQ ID NO: 207540 - DNA, 25 bp, probe
gcaggggcttagtgtctggacaggg

SEQ ID NO: 207541 - DNA, 25 bp, probe
gcaggggcccagggctgggacatga

SEQ ID NO: 207542 - DNA, 25 bp, probe
gcagggtccactgggagggaagctc

SEQ ID NO: 207543 - DNA, 25 bp, probe
gcagtggctgatttgggggagaaac

SEQ ID NO: 207544 - DNA, 25 bp, probe
gcatgtgtgttgtgtgctcacgtgc

SEQ ID NO: 207545 - DNA, 25 bp, probe
gcatgctggtaggggcactgtgtgc

SEQ ID NO: 207546 - DNA, 25 bp, probe
gcatggctggagtgagccgttccgc

SEQ ID NO: 207547 - DNA, 25 bp, probe
gcatggctggagtgagccgttccgc

SEQ ID NO: 207548 - DNA, 25 bp, probe
gcaggcaggattgggcttttctggc

SEQ ID NO: 207549 - DNA, 25 bp, probe
gcagtggcgattcaggttctcttgc

SEQ ID NO: 207550 - DNA, 25 bp, probe
gcagtggcttacagcattttcttca

SEQ ID NO: 207551 - DNA, 25 bp, probe
gcatgtggtttggcaattttttcaa

SEQ ID NO: 207552 - DNA, 25 bp, probe
gcagtggttttgtactgttgttgct

SEQ ID NO: 207553 - DNA, 25 bp, probe
gcagtgggtcaagacggatcaggct

SEQ ID NO: 207554 - DNA, 25 bp, probe
gcaggggtgaaggagcgggttctag

SEQ ID NO: 207555 - DNA, 25 bp, probe
gcaggagttacagacactggtttct

SEQ ID NO: 207556 - DNA, 25 bp, probe
gcagaccctgtaaatcctggttatc

SEQ ID NO: 207557 - DNA, 25 bp, probe
gcaggccactgattacttcatgact

SEQ ID NO: 207558 - DNA, 25 bp, probe
gcagcagctgcaatgtacaccatag

SEQ ID NO: 207559 - DNA, 25 bp, probe
gcagcagctgcaatgtacaccatag

SEQ ID NO: 207560 - DNA, 25 bp, probe
gcaggcatgcatgaagccctgaagc

SEQ ID NO: 207561 - DNA, 25 bp, probe
gcatgacctggaaccctgatgagaa

SEQ ID NO: 207562 - DNA, 25 bp, probe
gcaggcgtggatggcatcttataaa

SEQ ID NO: 207563 - DNA, 25 bp, probe
gcaggctggttggcataatatgtaa

SEQ ID NO: 207564 - DNA, 25 bp, probe
gcatggggcttggctccaagttcaa

SEQ ID NO: 207565 - DNA, 25 bp, probe
gcatgggtcctggatcacagaactc

SEQ ID NO: 207566 - DNA, 25 bp, probe
gcatgggtggtcgtgaggtgactga

SEQ ID NO: 207567 - DNA, 25 bp, probe
gcagggtgggggaggactcacaata

SEQ ID NO: 207568 - DNA, 25 bp, probe
gcagggtcgggaagggacatgccag

SEQ ID NO: 207569 - DNA, 25 bp, probe
gcagggggaggatggtaatcacagc

SEQ ID NO: 207570 - DNA, 25 bp, probe
gcagaggcggatgaacctactaccc

SEQ ID NO: 207571 - DNA, 25 bp, probe
gcaggtgagcgaaagaactcaggac

SEQ ID NO: 207572 - DNA, 25 bp, probe
gcaggtaggaaacctctcagaggca

SEQ ID NO: 207573 - DNA, 25 bp, probe
gcaggcgcaggaggaggccaagggc

SEQ ID NO: 207574 - DNA, 25 bp, probe
gcagggcaggaaacgccaagaactg

SEQ ID NO: 207575 - DNA, 25 bp, probe
gcagggcaggaaacgccaagaactg

SEQ ID NO: 207576 - DNA, 25 bp, probe
gcagggcactgaaagcccaggacca

SEQ ID NO: 207577 - DNA, 25 bp, probe
gcatgagatccatacaccacaggac

SEQ ID NO: 207578 - DNA, 25 bp, probe
gcatgatggagctgaccaacgtgca

SEQ ID NO: 207579 - DNA, 25 bp, probe
gcatgaggagtcgacagaaggtgaa

SEQ ID NO: 207580 - DNA, 25 bp, probe
gcatggagcagcctcgaaactgtga

SEQ ID NO: 207581 - DNA, 25 bp, probe
gcatggcatgcacgttcagacagct

SEQ ID NO: 207582 - DNA, 25 bp, probe
gcatgatcatgcttgtctagaacac

SEQ ID NO: 207583 - DNA, 25 bp, probe
gcatgatcatgcttgtctagaacac

SEQ ID NO: 207584 - DNA, 25 bp, probe
gcatgagcacattgtcaagttctat

SEQ ID NO: 207585 - DNA, 25 bp, probe
gcatgagatgaaccgcagtgcccat

SEQ ID NO: 207586 - DNA, 25 bp, probe
gcaggtgcatcgccagcatttcgat

SEQ ID NO: 207587 - DNA, 25 bp, probe
gcaggtcagcacgttgctgtcgatt

SEQ ID NO: 207588 - DNA, 25 bp, probe
gcatgaaccccattctgtatgtttt

SEQ ID NO: 207589 - DNA, 25 bp, probe
gcagtatccctcatcttatgtaagt

SEQ ID NO: 207590 - DNA, 25 bp, probe
gcaggattccacatttcatagaata

SEQ ID NO: 207591 - DNA, 25 bp, probe
gcagaattcgccatgtacttgaact

SEQ ID NO: 207592 - DNA, 25 bp, probe
gcatgatttagcgaggtggcctaca

SEQ ID NO: 207593 - DNA, 25 bp, probe
gcatgatgttgtcggaggaatctcc

SEQ ID NO: 207594 - DNA, 25 bp, probe
gcatgtgggatgtatttgaagcacc

SEQ ID NO: 207595 - DNA, 25 bp, probe
gcatgtccagagatgtctacagcac

SEQ ID NO: 207596 - DNA, 25 bp, probe
gcatgtgccaagattctactcttgt

SEQ ID NO: 207597 - DNA, 25 bp, probe
gcaggagacagagatccccttgcat

SEQ ID NO: 207598 - DNA, 25 bp, probe
gcaggagacagagatccccttgcat

SEQ ID NO: 207599 - DNA, 25 bp, probe
gcaggaagacggtcctggtgctcat

SEQ ID NO: 207600 - DNA, 25 bp, probe
gcatgatggacaaaggcctggcgtc

SEQ ID NO: 207601 - DNA, 25 bp, probe
gcatgagagaattgggcctcctgat

SEQ ID NO: 207602 - DNA, 25 bp, probe
gcatgagtgtcaggggtcccagaag

SEQ ID NO: 207603 - DNA, 25 bp, probe
gcagttgtcatgctgaaccgcattg

SEQ ID NO: 207604 - DNA, 25 bp, probe
gcacgatgttggaatccgacttggg

SEQ ID NO: 207605 - DNA, 25 bp, probe
gacgtgttaaattcagacgtactgg

SEQ ID NO: 207606 - DNA, 25 bp, probe
gaccgttgtaaatcaaaactgggtg

SEQ ID NO: 207607 - DNA, 25 bp, probe
gcaccctttaacaccaccagatggg

SEQ ID NO: 207608 - DNA, 25 bp, probe
gcacttttacaagccgcaaaggcag

SEQ ID NO: 207609 - DNA, 25 bp, probe
gcaccttggggaggccacaataggc

SEQ ID NO: 207610 - DNA, 25 bp, probe
gaccttggggtctcttgatgggatc

SEQ ID NO: 207611 - DNA, 25 bp, probe
tacctggaggtttactggcgggcca

SEQ ID NO: 207612 - DNA, 25 bp, probe
gcaccaggggtttcctgagctgacc

SEQ ID NO: 207613 - DNA, 25 bp, probe
gcatgtggcagcataccacacagca

SEQ ID NO: 207614 - DNA, 25 bp, probe
gcatgtggcagcataccacacagca

SEQ ID NO: 207615 - DNA, 25 bp, probe
gcatggcggtgtgggcagcacagag

SEQ ID NO: 207616 - DNA, 25 bp, probe
gcatggagctgtttgagagatctca

SEQ ID NO: 207617 - DNA, 25 bp, probe
gcatggccttcttggagagtcacca

SEQ ID NO: 207618 - DNA, 25 bp, probe
gcagggatctccagaagtgcagcct

SEQ ID NO: 207619 - DNA, 25 bp, probe
gcagagctacccagtgagaggcctt

SEQ ID NO: 207620 - DNA, 25 bp, probe
gcaggcatataccaaggggtggctt

SEQ ID NO: 207621 - DNA, 25 bp, probe
gcatgttagaactgaggtgggctag

SEQ ID NO: 207622 - DNA, 25 bp, probe
gcaggccgaagcggaggaagcccag

SEQ ID NO: 207623 - DNA, 25 bp, probe
gcaggcacaaaaggggatggccgtg

SEQ ID NO: 207624 - DNA, 25 bp, probe
gcaggagaaggcgcaggtggccctc

SEQ ID NO: 207625 - DNA, 25 bp, probe
gcaggcaaggagaggcgtggacacc

SEQ ID NO: 207626 - DNA, 25 bp, probe
gcatggaggaggactgctcgtgtga

SEQ ID NO: 207627 - DNA, 25 bp, probe
gcatgtgaaagcctctctggctgta

SEQ ID NO: 207628 - DNA, 25 bp, probe
gcatggcaatcgctctgtctcttct

SEQ ID NO: 207629 - DNA, 25 bp, probe
gcatgtagatagcatttatttctgt

SEQ ID NO: 207630 - DNA, 25 bp, probe
gcatgtgaatgacactcgtttcccc

SEQ ID NO: 207631 - DNA, 25 bp, probe
gcatgtgaatgacactcgtttcccc

SEQ ID NO: 207632 - DNA, 25 bp, probe
gcaggacagatggacaggttcctcc

SEQ ID NO: 207633 - DNA, 25 bp, probe
gcaggacagatggacaggttcctcc

SEQ ID NO: 207634 - DNA, 25 bp, probe
gcatggacaatgagaggcggccgca

SEQ ID NO: 207635 - DNA, 25 bp, probe
gcatggacaatgagaggcggccgca

SEQ ID NO: 207636 - DNA, 25 bp, probe
gcatggcagggcagtggctagcccg

SEQ ID NO: 207637 - DNA, 25 bp, probe
gcatgtgcacagcttctggtaacaa

SEQ ID NO: 207638 - DNA, 25 bp, probe
gcaggcggcttgcctggaacagata

SEQ ID NO: 207639 - DNA, 25 bp, probe
gcaggcggcttgcctggaacagata

SEQ ID NO: 207640 - DNA, 25 bp, probe
gcagggtcttccatgaagaatctcc

SEQ ID NO: 207641 - DNA, 25 bp, probe
gcatggtgacatctttggaaattca

SEQ ID NO: 207642 - DNA, 25 bp, probe
gcaggcgatcattatttcgaagttc

SEQ ID NO: 207643 - DNA, 25 bp, probe
gcaggcgatcattatttcgaagttc

SEQ ID NO: 207644 - DNA, 25 bp, probe
gcagtccaaagaaatggatcagttg

SEQ ID NO: 207645 - DNA, 25 bp, probe
gcagtctactagattgtgatccctt

SEQ ID NO: 207646 - DNA, 25 bp, probe
gcatgttcccaaatctgtgctggac

SEQ ID NO: 207647 - DNA, 25 bp, probe
gcatgtgaccacaaatgcttgcttg

SEQ ID NO: 207648 - DNA, 25 bp, probe
gcatgtcccacaccattttttcatg

SEQ ID NO: 207649 - DNA, 25 bp, probe
gcatggcttcacactgtttgtgtag

SEQ ID NO: 207650 - DNA, 25 bp, probe
gcatggtctaaatctttgtgtactt

SEQ ID NO: 207651 - DNA, 25 bp, probe
gcagttctgaactttttagtatttt

SEQ ID NO: 207652 - DNA, 25 bp, probe
gcagatctgtgagcaatgtttccta

SEQ ID NO: 207653 - DNA, 25 bp, probe
gcatgatctggtccaattttggctt

SEQ ID NO: 207654 - DNA, 25 bp, probe
gcatggcatggtccttgtgatggta

SEQ ID NO: 207655 - DNA, 25 bp, probe
gcatggctgcctatgcttggagtca

SEQ ID NO: 207656 - DNA, 25 bp, probe
gcatggctggccaactggcagacac

SEQ ID NO: 207657 - DNA, 25 bp, probe
gcatggagcgcaggaaggcgatctc

SEQ ID NO: 207658 - DNA, 25 bp, probe
gcatggagtgcaggtgtgggctcta

SEQ ID NO: 207659 - DNA, 25 bp, probe
gcaggtgtgcagccgtaggttaaag

SEQ ID NO: 207660 - DNA, 25 bp, probe
gcaggctctctggcttaagtttaga

SEQ ID NO: 207661 - DNA, 25 bp, probe
gcagtcgtctccatgacaactgtag

SEQ ID NO: 207662 - DNA, 25 bp, probe
gcagtggtccgggacaactggcacg

SEQ ID NO: 207663 - DNA, 25 bp, probe
gcagtgtacctgtgaagacagctac

SEQ ID NO: 207664 - DNA, 25 bp, probe
gcaggacagccggcagaaagcagtg

SEQ ID NO: 207665 - DNA, 25 bp, probe
gcaggaaacgccaagaactgctggc

SEQ ID NO: 207666 - DNA, 25 bp, probe
gcaggaacgtggacaagactcgcag

SEQ ID NO: 207667 - DNA, 25 bp, probe
gcaggacacgggccagatgcaccgg

SEQ ID NO: 207668 - DNA, 25 bp, probe
gcaggacaggtcatcagatactcag

SEQ ID NO: 207669 - DNA, 25 bp, probe
gcaggacaggtcatcagatactcag

SEQ ID NO: 207670 - DNA, 25 bp, probe
gcaggaaggtgaacaagtgctaccg

SEQ ID NO: 207671 - DNA, 25 bp, probe
gcatgggacaagaacatatgctgtc

SEQ ID NO: 207672 - DNA, 25 bp, probe
gcatgggaaatcgaattcctgctgt

SEQ ID NO: 207673 - DNA, 25 bp, probe
gcatggcgaactgggatatagatgg

SEQ ID NO: 207674 - DNA, 25 bp, probe
gcaggctgtcacatgactcattgag

SEQ ID NO: 207675 - DNA, 25 bp, probe
gcaggctcaccagtgattgctgctg

SEQ ID NO: 207676 - DNA, 25 bp, probe
gcaggctcacgcggaacagttggcc

SEQ ID NO: 207677 - DNA, 25 bp, probe
gcaggtcatcgagaacgcgggggag

SEQ ID NO: 207678 - DNA, 25 bp, probe
gcaggaagcgttaacgtgacgggag

SEQ ID NO: 207679 - DNA, 25 bp, probe
gcagtgaagtgtttaggtgaaggac

SEQ ID NO: 207680 - DNA, 25 bp, probe
gcaggggcggtccagaggaggtgcc

SEQ ID NO: 207681 - DNA, 25 bp, probe
gcaggggcggtccagaggaggtgcc

SEQ ID NO: 207682 - DNA, 25 bp, probe
gcaggaggagggcggcagtggcctc

SEQ ID NO: 207683 - DNA, 25 bp, probe
gcaggaggagggcggcagtggcctc

SEQ ID NO: 207684 - DNA, 25 bp, probe
gcaggcagggggaggatggtaatca

SEQ ID NO: 207685 - DNA, 25 bp, probe
gcagggaggggcagagagaaaaatc

SEQ ID NO: 207686 - DNA, 25 bp, probe
gcaggctgagggtcgtgggaaaggg

SEQ ID NO: 207687 - DNA, 25 bp, probe
gcagggtcaggctggggtaagccgg

SEQ ID NO: 207688 - DNA, 25 bp, probe
gcagggacactgcgggggaagttgc

SEQ ID NO: 207689 - DNA, 25 bp, probe
gcagggacactgcgggggaagttgc

SEQ ID NO: 207690 - DNA, 25 bp, probe
gcaggagaccttcagcgggatggat

SEQ ID NO: 207691 - DNA, 25 bp, probe
gcaggaagctgcttcggggggtgag

SEQ ID NO: 207692 - DNA, 25 bp, probe
gcagtctactttgctgaggtggatg

SEQ ID NO: 207693 - DNA, 25 bp, probe
gcagtcttccttggcaaggcttaaa

SEQ ID NO: 207694 - DNA, 25 bp, probe
gcagcttatgacatgcatgataggt

SEQ ID NO: 207695 - DNA, 25 bp, probe
gcatggtatgcccatgaatcacatg

SEQ ID NO: 207696 - DNA, 25 bp, probe
gcatgggatgctcatgtgacagcag

SEQ ID NO: 207697 - DNA, 25 bp, probe
gcagtgatgagtgcgtatcgcgcca

SEQ ID NO: 207698 - DNA, 25 bp, probe
gcagtgatgagtgcgtatcgcgcca

SEQ ID NO: 207699 - DNA, 25 bp, probe
gcaggctggaagatacaggctcaga

SEQ ID NO: 207700 - DNA, 25 bp, probe
gcaggggaaaagtaagctcctccaa

SEQ ID NO: 207701 - DNA, 25 bp, probe
gcagggggaaggtgtccctgactta

SEQ ID NO: 207702 - DNA, 25 bp, probe
gcaggggtggagggcagtccctcag

SEQ ID NO: 207703 - DNA, 25 bp, probe
gcatggggggatctcagagcttaca

SEQ ID NO: 207704 - DNA, 25 bp, probe
gcagggaggctttggcatgacttaa

SEQ ID NO: 207705 - DNA, 25 bp, probe
gcatggggcttttgagcacacttaa

SEQ ID NO: 207706 - DNA, 25 bp, probe
gcagggtctagatagaagctataag

SEQ ID NO: 207707 - DNA, 25 bp, probe
gcaggacttcagaaagggccttgtg

SEQ ID NO: 207708 - DNA, 25 bp, probe
gcaggacttgcacacagggaggctg

SEQ ID NO: 207709 - DNA, 25 bp, probe
gcaggacttgcacacagggaggctg

SEQ ID NO: 207710 - DNA, 25 bp, probe
gcagtgccttgccattcattggcag

SEQ ID NO: 207711 - DNA, 25 bp, probe
gcagtggcttcaatgctgtctggag

SEQ ID NO: 207712 - DNA, 25 bp, probe
gcatgtggtggaagctgtgaggcaa

SEQ ID NO: 207713 - DNA, 25 bp, probe
gcagtggggcagtcatggcaaatag

SEQ ID NO: 207714 - DNA, 25 bp, probe
gcagggcttgaaatggacatctgtg

SEQ ID NO: 207715 - DNA, 25 bp, probe
gcagacgttaaactcactcgctgcc

SEQ ID NO: 207716 - DNA, 25 bp, probe
gcaggctgttaatgccactgggcac

SEQ ID NO: 207717 - DNA, 25 bp, probe
gcagtcagattctaagccctgttca

SEQ ID NO: 207718 - DNA, 25 bp, probe
gcagaagttcgaggcttatgtatca

SEQ ID NO: 207719 - DNA, 25 bp, probe
gcaggacattcttgccgtattctca

SEQ ID NO: 207720 - DNA, 25 bp, probe
gcaggacattcttgccgtattctca

SEQ ID NO: 207721 - DNA, 25 bp, probe
gcaggagattcactgtcagctttcc

SEQ ID NO: 207722 - DNA, 25 bp, probe
gcaggaatatgacagcacttcagcc

SEQ ID NO: 207723 - DNA, 25 bp, probe
gcaggaatatgacagcacttcagcc

SEQ ID NO: 207724 - DNA, 25 bp, probe
gcaggaagtgaccactgcctgagca

SEQ ID NO: 207725 - DNA, 25 bp, probe
gcatggggtgaccacagaggagtgc

SEQ ID NO: 207726 - DNA, 25 bp, probe
gcagtggtgatgcctaaaggaatgt

SEQ ID NO: 207727 - DNA, 25 bp, probe
gcatgtggtcaacacaggttatgta

SEQ ID NO: 207728 - DNA, 25 bp, probe
gcatggtatcactaaaggtttcaaa

SEQ ID NO: 207729 - DNA, 25 bp, probe
gcagtgttccaagatggtcccaaat

SEQ ID NO: 207730 - DNA, 25 bp, probe
gcaggttgcaaaccatacatggcca

SEQ ID NO: 207731 - DNA, 25 bp, probe
gcaggatatgcagagccattcttgg

SEQ ID NO: 207732 - DNA, 25 bp, probe
gcaggactgagcaccatcctgctgt

SEQ ID NO: 207733 - DNA, 25 bp, probe
gcaggacaagcactcgatccgtgcc

SEQ ID NO: 207734 - DNA, 25 bp, probe
gcaggacaagcactcgatccgtgcc

SEQ ID NO: 207735 - DNA, 25 bp, probe
gcaggaaactctcattcgtgcacta

SEQ ID NO: 207736 - DNA, 25 bp, probe
gcaggagtttctatagcgagacata

SEQ ID NO: 207737 - DNA, 25 bp, probe
gcaggcgtttatttctgcagggctg

SEQ ID NO: 207738 - DNA, 25 bp, probe
gcaggcgtttatttctgcagggctg

SEQ ID NO: 207739 - DNA, 25 bp, probe
gcaggcgctttcagtatagatggct

SEQ ID NO: 207740 - DNA, 25 bp, probe
gcagggtctgaaagaaggatgggaa

SEQ ID NO: 207741 - DNA, 25 bp, probe
gcaggcagccatcttcaaggtggga

SEQ ID NO: 207742 - DNA, 25 bp, probe
gcaggagctcaacgtgacggtggtg

SEQ ID NO: 207743 - DNA, 25 bp, probe
gcaggagctcaacgtgacggtggtg

SEQ ID NO: 207744 - DNA, 25 bp, probe
gcaggagcgacggtgaacctggcag

SEQ ID NO: 207745 - DNA, 25 bp, probe
gcaggagcgacggtgaacctggcag

SEQ ID NO: 207746 - DNA, 25 bp, probe
gcagggctacgacgagtcctgcgac

SEQ ID NO: 207747 - DNA, 25 bp, probe
gcaggggaggggcccctgcagagcc

SEQ ID NO: 207748 - DNA, 25 bp, probe
gcagttaagggggcacaggctgagc

SEQ ID NO: 207749 - DNA, 25 bp, probe
gcaggtcgactcggccgagtatggc

SEQ ID NO: 207750 - DNA, 25 bp, probe
gcaggatcgacgcgcttctgtatgg

SEQ ID NO: 207751 - DNA, 25 bp, probe
gcaggtggacaccctatttagtgat

SEQ ID NO: 207752 - DNA, 25 bp, probe
gcagttcttacaccgtttggtgatt

SEQ ID NO: 207753 - DNA, 25 bp, probe
gcagttcttaactcatattggactt

SEQ ID NO: 207754 - DNA, 25 bp, probe
gcactgactgtgaaacctttacctt

SEQ ID NO: 207755 - DNA, 25 bp, probe
gcagtacatgttgaccttattcgct

SEQ ID NO: 207756 - DNA, 25 bp, probe
gcagtacatgttgaccttattcgct

SEQ ID NO: 207757 - DNA, 25 bp, probe
gcagttcatggtcactgttaacagt

SEQ ID NO: 207758 - DNA, 25 bp, probe
gcagattatcgacatctttgaagct

SEQ ID NO: 207759 - DNA, 25 bp, probe
gcagacaatggacctccttaatatc

SEQ ID NO: 207760 - DNA, 25 bp, probe
gcagcaaagggcctcccttgaattc

SEQ ID NO: 207761 - DNA, 25 bp, probe
gcaccaagcggaactgcgcttaaaa

SEQ ID NO: 207762 - DNA, 25 bp, probe
gcagcccctagaagtggctttcacc

SEQ ID NO: 207763 - DNA, 25 bp, probe
gcaccgtcttgtagcatggttccaa

SEQ ID NO: 207764 - DNA, 25 bp, probe
gcacggattattacaggctctttaa

SEQ ID NO: 207765 - DNA, 25 bp, probe
gcaaaggacgtcatggcttttaaaa

SEQ ID NO: 207766 - DNA, 25 bp, probe
gcaaagaacgctctcctttgccgaa

SEQ ID NO: 207767 - DNA, 25 bp, probe
gcagaaaccacacacactgttgctg

SEQ ID NO: 207768 - DNA, 25 bp, probe
gcagtcaccaagataatctgaggtt

SEQ ID NO: 207769 - DNA, 25 bp, probe
gcaggggtggtttatctgcatggta

SEQ ID NO: 207770 - DNA, 25 bp, probe
gcagatgggggttctttcagttcaa

SEQ ID NO: 207771 - DNA, 25 bp, probe
gcagactagggttcatgtcttttta

SEQ ID NO: 207772 - DNA, 25 bp, probe
gcagtttacgtatgatcttaatttc

SEQ ID NO: 207773 - DNA, 25 bp, probe
gcagtttacgtatgatcttaatttc

SEQ ID NO: 207774 - DNA, 25 bp, probe
gcagcttttagttcagacttagttt

SEQ ID NO: 207775 - DNA, 25 bp, probe
gcagcttttagttcagacttagttt

SEQ ID NO: 207776 - DNA, 25 bp, probe
gcagttcctggtgagaaacagcttt

SEQ ID NO: 207777 - DNA, 25 bp, probe
gcagattcgaaagatggaacatgca

SEQ ID NO: 207778 - DNA, 25 bp, probe
gcagattcgaaagatggaacatgca

SEQ ID NO: 207779 - DNA, 25 bp, probe
gcagatgcgtgcacggaggaagaca

SEQ ID NO: 207780 - DNA, 25 bp, probe
gcagattactgcacgggcaacaaag

SEQ ID NO: 207781 - DNA, 25 bp, probe
gcaggaagcgcaagcgcagccgcaa

SEQ ID NO: 207782 - DNA, 25 bp, probe
gcaggtagctgccatgtgcagccca

SEQ ID NO: 207783 - DNA, 25 bp, probe
gcaggtgcagtccatcgagcacaag

SEQ ID NO: 207784 - DNA, 25 bp, probe
gcaggtgcagtccatcgagcacaag

SEQ ID NO: 207785 - DNA, 25 bp, probe
gcaggagcagtttctggccagaagc

SEQ ID NO: 207786 - DNA, 25 bp, probe
gcaggaggttatcggcagtggagct

SEQ ID NO: 207787 - DNA, 25 bp, probe
gcaggaggttatcggcagtggagct

SEQ ID NO: 207788 - DNA, 25 bp, probe
gcagtggacttaatcggttgaccct

SEQ ID NO: 207789 - DNA, 25 bp, probe
gcagtggacttaatcggttgaccct

SEQ ID NO: 207790 - DNA, 25 bp, probe
gcagtggtttgcagtggcttactgg

SEQ ID NO: 207791 - DNA, 25 bp, probe
gcagtagtgttcaagtgtttattta

SEQ ID NO: 207792 - DNA, 25 bp, probe
ggtggacctcacttgtttttagaag

SEQ ID NO: 207793 - DNA, 25 bp, probe
ggtggacctcacttgtttttagaag

SEQ ID NO: 207794 - DNA, 25 bp, probe
tcgtggacgtagtcctctttaagga

SEQ ID NO: 207795 - DNA, 25 bp, probe
gcagaggaagtagccttctttggag

SEQ ID NO: 207796 - DNA, 25 bp, probe
gcagaggtagccccctaaatgggca

SEQ ID NO: 207797 - DNA, 25 bp, probe
gcagaagaagccgctctacgtggcc

SEQ ID NO: 207798 - DNA, 25 bp, probe
gcaagacaacctggttatcgctctg

SEQ ID NO: 207799 - DNA, 25 bp, probe
gcagcatgacaagctggtcaaactt

SEQ ID NO: 207800 - DNA, 25 bp, probe
gcaggaagcaaaagtcaattcatta

SEQ ID NO: 207801 - DNA, 25 bp, probe
gcaggaagcatatggattctgtcat

SEQ ID NO: 207802 - DNA, 25 bp, probe
gcaggaagcatatggattctgtcat

SEQ ID NO: 207803 - DNA, 25 bp, probe
gcaggagtatattgatgcattctca

SEQ ID NO: 207804 - DNA, 25 bp, probe
gcaggagtatattgatgcattctca

SEQ ID NO: 207805 - DNA, 25 bp, probe
gcagggatctttacatgttcagcaa

SEQ ID NO: 207806 - DNA, 25 bp, probe
gcagaggccttgagcttatcatgcc

SEQ ID NO: 207807 - DNA, 25 bp, probe
gcaggcctgcaggtggagttcatca

SEQ ID NO: 207808 - DNA, 25 bp, probe
gcaggctctgatgctgagaggcttg

SEQ ID NO: 207809 - DNA, 25 bp, probe
gcaggcctgtgctgagaggcctggt

SEQ ID NO: 207810 - DNA, 25 bp, probe
gcaggcgctgcaggaagaatgcctt

SEQ ID NO: 207811 - DNA, 25 bp, probe
gcagatactcagaaatgtagtttgc

SEQ ID NO: 207812 - DNA, 25 bp, probe
gcagagaccctgcatgtaggtcaca

SEQ ID NO: 207813 - DNA, 25 bp, probe
gcaggacgtggctttgcaagtcaag

SEQ ID NO: 207814 - DNA, 25 bp, probe
gcaggacgtggctttgcaagtcaag

SEQ ID NO: 207815 - DNA, 25 bp, probe
gcaggacgttcaaatgcacccatca

SEQ ID NO: 207816 - DNA, 25 bp, probe
gcagtggtttcacatcagcgacaca

SEQ ID NO: 207817 - DNA, 25 bp, probe
gcagttgctttccaacagccaacag

SEQ ID NO: 207818 - DNA, 25 bp, probe
gcaggtgaactcgaagcccacaatc

SEQ ID NO: 207819 - DNA, 25 bp, probe
gcagggagaccttagctccgagaag

SEQ ID NO: 207820 - DNA, 25 bp, probe
gcagggcagtggctagcccggaagc

SEQ ID NO: 207821 - DNA, 25 bp, probe
gcagagcacttagttaccctggacg

SEQ ID NO: 207822 - DNA, 25 bp, probe
gcagaggctttgagaccctagcagg

SEQ ID NO: 207823 - DNA, 25 bp, probe
gcaggcctttgagaatggccgagca

SEQ ID NO: 207824 - DNA, 25 bp, probe
gcaggacctggctaaagacacggac

SEQ ID NO: 207825 - DNA, 25 bp, probe
gcaggacctggctaaagacacggac

SEQ ID NO: 207826 - DNA, 25 bp, probe
gcagtaccatggtcggaacgccata

SEQ ID NO: 207827 - DNA, 25 bp, probe
gcaggatctcatggtccggaatgac

SEQ ID NO: 207828 - DNA, 25 bp, probe
gcaggactctcagaatcgcactgac

SEQ ID NO: 207829 - DNA, 25 bp, probe
gcaggaatggcttacatcgagcgca

SEQ ID NO: 207830 - DNA, 25 bp, probe
gcaggtctgagtaacatcattggca

SEQ ID NO: 207831 - DNA, 25 bp, probe
gcaggtctgagtaacatcattggca

SEQ ID NO: 207832 - DNA, 25 bp, probe
gcaggtcatgaggggcctatgcctt

SEQ ID NO: 207833 - DNA, 25 bp, probe
gcagtatcagaagtatgccttgctg

SEQ ID NO: 207834 - DNA, 25 bp, probe
gcagtatcagaagtatgccttgctg

SEQ ID NO: 207835 - DNA, 25 bp, probe
gcaggataattgaagctatctgcat

SEQ ID NO: 207836 - DNA, 25 bp, probe
gcaggataattgaagctatctgcat

SEQ ID NO: 207837 - DNA, 25 bp, probe
gcaggaatcagtcagtatctgcaga

SEQ ID NO: 207838 - DNA, 25 bp, probe
gcaggaatatctcacctgtgtgcag

SEQ ID NO: 207839 - DNA, 25 bp, probe
gcagtgttgcagcaacctgtgacag

SEQ ID NO: 207840 - DNA, 25 bp, probe
gcagggtgggaacaggcagagggac

SEQ ID NO: 207841 - DNA, 25 bp, probe
gcagtgttggagtaggggcagaggg

SEQ ID NO: 207842 - DNA, 25 bp, probe
gcaggcggtatccagaggtgaggga

SEQ ID NO: 207843 - DNA, 25 bp, probe
gcaggcaggtcctgattgaagggga

SEQ ID NO: 207844 - DNA, 25 bp, probe
gcaggcagggcacaatttcgggcca

SEQ ID NO: 207845 - DNA, 25 bp, probe
gcagtgggaccagattccaggtcca

SEQ ID NO: 207846 - DNA, 25 bp, probe
gcagtgggagacaaagcctcggtcc

SEQ ID NO: 207847 - DNA, 25 bp, probe
gcagtgcgtgaagtacattcaggga

SEQ ID NO: 207848 - DNA, 25 bp, probe
gcaggtgctgaagttcgtcatggat

SEQ ID NO: 207849 - DNA, 25 bp, probe
gcagactgcagggcttgaaatggac

SEQ ID NO: 207850 - DNA, 25 bp, probe
gcagagctcggagcctcattgagac

SEQ ID NO: 207851 - DNA, 25 bp, probe
gcagagccactatctccattgaagc

SEQ ID NO: 207852 - DNA, 25 bp, probe
gcagaggagtgagctctgtggtccg

SEQ ID NO: 207853 - DNA, 25 bp, probe
gcagggagagccctgcatttcctct

SEQ ID NO: 207854 - DNA, 25 bp, probe
gcaggcgagagccaggagacgcccc

SEQ ID NO: 207855 - DNA, 25 bp, probe
gcaggcgagagccaggagacgcccc

SEQ ID NO: 207856 - DNA, 25 bp, probe
gcagaaagaccggaatgcccggccc

SEQ ID NO: 207857 - DNA, 25 bp, probe
gcagaaggaccggaacagccggccc

SEQ ID NO: 207858 - DNA, 25 bp, probe
gcagaagtatccggaacagccaggc

SEQ ID NO: 207859 - DNA, 25 bp, probe
gcagggaatcctgaagagccactca

SEQ ID NO: 207860 - DNA, 25 bp, probe
gcaggctggttttaacctacgcaaa

SEQ ID NO: 207861 - DNA, 25 bp, probe
gcagagtgtgtttaagaccaaaaaa

SEQ ID NO: 207862 - DNA, 25 bp, probe
gcagttgcttactgaacgccaaaac

SEQ ID NO: 207863 - DNA, 25 bp, probe
gcaggtcttaaggaagctgcaagaa

SEQ ID NO: 207864 - DNA, 25 bp, probe
gcagtttgttattgcatagtaaata

SEQ ID NO: 207865 - DNA, 25 bp, probe
gcagttatggtgatgacttagcgtc

SEQ ID NO: 207866 - DNA, 25 bp, probe
gcagttcacagtaggatttgggctc

SEQ ID NO: 207867 - DNA, 25 bp, probe
gcagttccagttctgtaagtctcac

SEQ ID NO: 207868 - DNA, 25 bp, probe
gcagtgtctcaaatgtaggtcgttc

SEQ ID NO: 207869 - DNA, 25 bp, probe
gcagtgttaactcatttctcatgcc

SEQ ID NO: 207870 - DNA, 25 bp, probe
gcagagtataatcgtaattcatccg

SEQ ID NO: 207871 - DNA, 25 bp, probe
gcagagtataatcgtaattcatccg

SEQ ID NO: 207872 - DNA, 25 bp, probe
gcaggctcagtactttttatgaaga

SEQ ID NO: 207873 - DNA, 25 bp, probe
gcagattcagtgctgtttggacaag

SEQ ID NO: 207874 - DNA, 25 bp, probe
gcagtgtggctacgtcctaaaacct

SEQ ID NO: 207875 - DNA, 25 bp, probe
gcagtactgccgcttaaagaacatc

SEQ ID NO: 207876 - DNA, 25 bp, probe
gcagtacagtggcttcaagagtcct

SEQ ID NO: 207877 - DNA, 25 bp, probe
gcagtacagtggcttcaagagtcct

SEQ ID NO: 207878 - DNA, 25 bp, probe
gcaggaaatcagctcctattctcca

SEQ ID NO: 207879 - DNA, 25 bp, probe
gcaggaagacagccctgtgattgtt

SEQ ID NO: 207880 - DNA, 25 bp, probe
gcaggaagtagccgcatttgatttt

SEQ ID NO: 207881 - DNA, 25 bp, probe
gcaggaactgagttcattacatctt

SEQ ID NO: 207882 - DNA, 25 bp, probe
gcaggtactgagtgatgctgtatat

SEQ ID NO: 207883 - DNA, 25 bp, probe
gcaggtcaccaagatgctggcagtg

SEQ ID NO: 207884 - DNA, 25 bp, probe
gcaggacattaaaatctccaggcct

SEQ ID NO: 207885 - DNA, 25 bp, probe
gcaggagatcattaagaccacggag

SEQ ID NO: 207886 - DNA, 25 bp, probe
gcaggagatcattaagaccacggag

SEQ ID NO: 207887 - DNA, 25 bp, probe
gcaggagatcattaagaccacggag

SEQ ID NO: 207888 - DNA, 25 bp, probe
gcaggagatcattaagaccacggag

SEQ ID NO: 207889 - DNA, 25 bp, probe
gcaggaggattgcctgagcccagga

SEQ ID NO: 207890 - DNA, 25 bp, probe
gcaggaggatcactggaggccaaga

SEQ ID NO: 207891 - DNA, 25 bp, probe
gcaggggaatctggcagtgcctctc

SEQ ID NO: 207892 - DNA, 25 bp, probe
gcaggggaatctggagctacacaca

SEQ ID NO: 207893 - DNA, 25 bp, probe
gcaggggaatctggagctacacaca

SEQ ID NO: 207894 - DNA, 25 bp, probe
gcaggagacgacttactagatctca

SEQ ID NO: 207895 - DNA, 25 bp, probe
gcaggaaagccatactgaatcagaa

SEQ ID NO: 207896 - DNA, 25 bp, probe
gcaggtcgagcacatactgaacgag

SEQ ID NO: 207897 - DNA, 25 bp, probe
gcagagcctgaccctaaaaagaaag

SEQ ID NO: 207898 - DNA, 25 bp, probe
gcagagcctaggttcaaaccaagat

SEQ ID NO: 207899 - DNA, 25 bp, probe
gcaagcccaaatttataggacagaa

SEQ ID NO: 207900 - DNA, 25 bp, probe
gcaggtggaatatttcatggacaaa

SEQ ID NO: 207901 - DNA, 25 bp, probe
gcaggtgcgattttgttaacccagc

SEQ ID NO: 207902 - DNA, 25 bp, probe
gcagatgtaatttatgttaacactc

SEQ ID NO: 207903 - DNA, 25 bp, probe
gcaggaagacattaccaaatcactc

SEQ ID NO: 207904 - DNA, 25 bp, probe
gcaggatgcagaagaagccaaaaac

SEQ ID NO: 207905 - DNA, 25 bp, probe
gcaggatgcagaagaagccaaaaac

SEQ ID NO: 207906 - DNA, 25 bp, probe
gcaggatgcagaagaagccaaaaac

SEQ ID NO: 207907 - DNA, 25 bp, probe
gcagcgtcgagaagtggcaaaaaca

SEQ ID NO: 207908 - DNA, 25 bp, probe
gcaggtgcgagagttgtaccagtaa

SEQ ID NO: 207909 - DNA, 25 bp, probe
gcaggagagtgaggttccctataaa

SEQ ID NO: 207910 - DNA, 25 bp, probe
gcaggatttgtcagtctctttagaa

SEQ ID NO: 207911 - DNA, 25 bp, probe
gcagtattctttctctgtgtttgac

SEQ ID NO: 207912 - DNA, 25 bp, probe
gcagtttctaacttgtgtttcttgc

SEQ ID NO: 207913 - DNA, 25 bp, probe
gcagtttaaggctgccttctcctgc

SEQ ID NO: 207914 - DNA, 25 bp, probe
gcagtcttcagtaaagcctttctcc

SEQ ID NO: 207915 - DNA, 25 bp, probe
gcagtattactataagcagttgctt

SEQ ID NO: 207916 - DNA, 25 bp, probe
gcagtcttttctgaacagcctatgc

SEQ ID NO: 207917 - DNA, 25 bp, probe
gcagttacttttgacccatgtgcaa

SEQ ID NO: 207918 - DNA, 25 bp, probe
gcagttcacaattttcaccatttaa

SEQ ID NO: 207919 - DNA, 25 bp, probe
gcagttgcattttattcgtcattac

SEQ ID NO: 207920 - DNA, 25 bp, probe
gcagtaatttgcaatttgtcagtgt

SEQ ID NO: 207921 - DNA, 25 bp, probe
gcagctgggcttcattagtgaggct

SEQ ID NO: 207922 - DNA, 25 bp, probe
gcagggtcttgctagtgagctggac

SEQ ID NO: 207923 - DNA, 25 bp, probe
gcagggtcttgctagtgagctggac

SEQ ID NO: 207924 - DNA, 25 bp, probe
gcaggatgtctaatatgtgaggaaa

SEQ ID NO: 207925 - DNA, 25 bp, probe
gcaggagttgcatcagtgtggcaaa

SEQ ID NO: 207926 - DNA, 25 bp, probe
gcaggacattgctgaggtggatcac

SEQ ID NO: 207927 - DNA, 25 bp, probe
gcaggacagtgcttgatacaggaac

SEQ ID NO: 207928 - DNA, 25 bp, probe
gcaggatcacagttacacaggagag

SEQ ID NO: 207929 - DNA, 25 bp, probe
gcaggacacaggtcacaactgtagg

SEQ ID NO: 207930 - DNA, 25 bp, probe
gcaggacacaagtgccagattgcgg

SEQ ID NO: 207931 - DNA, 25 bp, probe
gcagatgcccaacgggcactatcgg

SEQ ID NO: 207932 - DNA, 25 bp, probe
gcagtgagccgagatggcaccactg

SEQ ID NO: 207933 - DNA, 25 bp, probe
gcagtgagccgagattgtgccactg

SEQ ID NO: 207934 - DNA, 25 bp, probe
gcagtggcgcgatctcagttcactg

SEQ ID NO: 207935 - DNA, 25 bp, probe
gcagtgcgtcaatcagagcgtcctg

SEQ ID NO: 207936 - DNA, 25 bp, probe
gcagtgcgtcaatcagagcgtcctg

SEQ ID NO: 207937 - DNA, 25 bp, probe
gcagagcccaaagaggtggcgagtg

SEQ ID NO: 207938 - DNA, 25 bp, probe
gcagaggtaactgaggagaggggcg

SEQ ID NO: 207939 - DNA, 25 bp, probe
gcagggataacacacaatgagaggg

SEQ ID NO: 207940 - DNA, 25 bp, probe
gcaggagatacagctaaagagtgta

SEQ ID NO: 207941 - DNA, 25 bp, probe
gcagaagaacgtgcacgaggtgaag

SEQ ID NO: 207942 - DNA, 25 bp, probe
gcagggcaacgtgagcagctgggcc

SEQ ID NO: 207943 - DNA, 25 bp, probe
gcaggagaaggtgatgatctgggca

SEQ ID NO: 207944 - DNA, 25 bp, probe
gcaggagaacagccgtgtcatcgtc

SEQ ID NO: 207945 - DNA, 25 bp, probe
gcaggagaccagtgtatctctgtcc

SEQ ID NO: 207946 - DNA, 25 bp, probe
gcaggagaccagtgtatctctgtcc

SEQ ID NO: 207947 - DNA, 25 bp, probe
gcaggagaccgtgtgatttgtgtag

SEQ ID NO: 207948 - DNA, 25 bp, probe
gcaggagaccgtgtgatttgtgtag

SEQ ID NO: 207949 - DNA, 25 bp, probe
gcaggagaccgtgtgatttgtgtag

SEQ ID NO: 207950 - DNA, 25 bp, probe
gcaggagaccgtgtgatttgtgtag

SEQ ID NO: 207951 - DNA, 25 bp, probe
gcagaggatctcatttgactttgtt

SEQ ID NO: 207952 - DNA, 25 bp, probe
gcagggctctgatattccatgaatg

SEQ ID NO: 207953 - DNA, 25 bp, probe
gcagtgacctcatgttcgagaagca

SEQ ID NO: 207954 - DNA, 25 bp, probe
gcaggactccagatgaggacaagag

SEQ ID NO: 207955 - DNA, 25 bp, probe
gcaggttgccagagcacataacgaa

SEQ ID NO: 207956 - DNA, 25 bp, probe
gcaggtctttcatgcacataaacaa

SEQ ID NO: 207957 - DNA, 25 bp, probe
gcaggtctttcatgcacataaacaa

SEQ ID NO: 207958 - DNA, 25 bp, probe
gcagagtttctccctcaaagaacac

SEQ ID NO: 207959 - DNA, 25 bp, probe
gcagggtctctgcagcaaaaagtcc

SEQ ID NO: 207960 - DNA, 25 bp, probe
gcagggtctctgcagcaaaaagtcc

SEQ ID NO: 207961 - DNA, 25 bp, probe
gcaggtgtgcatgggacaagaacat

SEQ ID NO: 207962 - DNA, 25 bp, probe
gcaggatggcccacaagcagatcta

SEQ ID NO: 207963 - DNA, 25 bp, probe
gcagtagtcgtcaagttgcagatct

SEQ ID NO: 207964 - DNA, 25 bp, probe
gcaggagggtattgtacatgtgctc

SEQ ID NO: 207965 - DNA, 25 bp, probe
gcaggagggtattgtacatgtgctc

SEQ ID NO: 207966 - DNA, 25 bp, probe
gcagaggggattttggatgtcttcc

SEQ ID NO: 207967 - DNA, 25 bp, probe
gcagaggggattttggatgtcttcc

SEQ ID NO: 207968 - DNA, 25 bp, probe
gcagaggccgatgagcgagagtccc

SEQ ID NO: 207969 - DNA, 25 bp, probe
gcaggagctagggggatgagagcac

SEQ ID NO: 207970 - DNA, 25 bp, probe
gcaggagctagggggatgagagcac

SEQ ID NO: 207971 - DNA, 25 bp, probe
gcaggatcaagggagggggtcatag

SEQ ID NO: 207972 - DNA, 25 bp, probe
gcagaaccagaccaccgaggtcaag

SEQ ID NO: 207973 - DNA, 25 bp, probe
gcagaaccagaccaccgaggtcaag

SEQ ID NO: 207974 - DNA, 25 bp, probe
gcagaaacagtccctaaagcaagag

SEQ ID NO: 207975 - DNA, 25 bp, probe
gcagatcacatcattgcctaccagt

SEQ ID NO: 207976 - DNA, 25 bp, probe
gcagacaatgctgtgctttccagtg

SEQ ID NO: 207977 - DNA, 25 bp, probe
gcagaggactgctctttcgaatcca

SEQ ID NO: 207978 - DNA, 25 bp, probe
gcagaggagtcacaatctcagcaac

SEQ ID NO: 207979 - DNA, 25 bp, probe
gcagaggagtcacaatctcagcaac

SEQ ID NO: 207980 - DNA, 25 bp, probe
gcaggagactgactacgtgctcaac

SEQ ID NO: 207981 - DNA, 25 bp, probe
gcagtggagctactgctgtggttca

SEQ ID NO: 207982 - DNA, 25 bp, probe
gcagtgtgagtaccaggtttccctg

SEQ ID NO: 207983 - DNA, 25 bp, probe
gcagactcagtagcgttttagtcgt

SEQ ID NO: 207984 - DNA, 25 bp, probe
gcagaaacatcagcgtttctactcc

SEQ ID NO: 207985 - DNA, 25 bp, probe
gcagaatacaacattttgcagttcc

SEQ ID NO: 207986 - DNA, 25 bp, probe
gcagaatttacctcaagaactcttt

SEQ ID NO: 207987 - DNA, 25 bp, probe
gcagaatttacctcaagaactcttt

SEQ ID NO: 207988 - DNA, 25 bp, probe
gcagaatttacctcaagaactcttt

SEQ ID NO: 207989 - DNA, 25 bp, probe
gcagaacattagcctgtgcaaaacc

SEQ ID NO: 207990 - DNA, 25 bp, probe
gcagcatagccatcacttagtaacc

SEQ ID NO: 207991 - DNA, 25 bp, probe
gcagatgtccatactttgatttacc

SEQ ID NO: 207992 - DNA, 25 bp, probe
gcagtggcaattctagatatctgag

SEQ ID NO: 207993 - DNA, 25 bp, probe
gcagtggcaattctagatatctgag

SEQ ID NO: 207994 - DNA, 25 bp, probe
gcagattgcaatagactatgaggct

SEQ ID NO: 207995 - DNA, 25 bp, probe
gcagtctgcacaaggcacatcgagg

SEQ ID NO: 207996 - DNA, 25 bp, probe
gcagagtcactgtgtcatcgatgag

SEQ ID NO: 207997 - DNA, 25 bp, probe
gcagggcagccatcctggatgatgg

SEQ ID NO: 207998 - DNA, 25 bp, probe
gcagaagctgcctgcatcggagacg

SEQ ID NO: 207999 - DNA, 25 bp, probe
gcagtagtgcagttcaccatgaggg

SEQ ID NO: 208000 - DNA, 25 bp, probe
gcagtaagcgtccagccatctggat

SEQ ID NO: 208001 - DNA, 25 bp, probe
gcagttgacttcaagacgctggctg

SEQ ID NO: 208002 - DNA, 25 bp, probe
gcagttggtagaagacttggatcga

SEQ ID NO: 208003 - DNA, 25 bp, probe
gcagtagctctaacaggttggacca

SEQ ID NO: 208004 - DNA, 25 bp, probe
gcagtgcagcctagaaggcggcagc

SEQ ID NO: 208005 - DNA, 25 bp, probe
gcagtggcgcttcacagctcactgc

SEQ ID NO: 208006 - DNA, 25 bp, probe
gcagtgccgtgtagacagccttggc

SEQ ID NO: 208007 - DNA, 25 bp, probe
gcaggtgtgatgctgaccgttggca

SEQ ID NO: 208008 - DNA, 25 bp, probe
gcaggtggagcggcaggaggtggag

SEQ ID NO: 208009 - DNA, 25 bp, probe
gcaggtggagcggcaggaggtggag

SEQ ID NO: 208010 - DNA, 25 bp, probe
gcagtgggagcggtggaagaggagg

SEQ ID NO: 208011 - DNA, 25 bp, probe
gcaggaggagccacatgagagaggg

SEQ ID NO: 208012 - DNA, 25 bp, probe
gcaggtgcaggtggacagggactgg

SEQ ID NO: 208013 - DNA, 25 bp, probe
gcaggagaagtcgcagtgcgcactg

SEQ ID NO: 208014 - DNA, 25 bp, probe
gcagatttagccggcagtgcgtggt

SEQ ID NO: 208015 - DNA, 25 bp, probe
gcaggtgttccaggaggagtgcgtg

SEQ ID NO: 208016 - DNA, 25 bp, probe
gcaggtgcccgttgaggagcaggat

SEQ ID NO: 208017 - DNA, 25 bp, probe
gcaggaggccagaggacagagcaga

SEQ ID NO: 208018 - DNA, 25 bp, probe
gcagagaggcgggctcagagcccag

SEQ ID NO: 208019 - DNA, 25 bp, probe
gcagttatgagtgccaatgccgcag

SEQ ID NO: 208020 - DNA, 25 bp, probe
gcagtttatgtgtcatcaatgtaca

SEQ ID NO: 208021 - DNA, 25 bp, probe
gcagtgtccattcatgagtgtgaca

SEQ ID NO: 208022 - DNA, 25 bp, probe
gcagggctgatactatgaggctgaa

SEQ ID NO: 208023 - DNA, 25 bp, probe
gcagggctgactctaggtgcccttg

SEQ ID NO: 208024 - DNA, 25 bp, probe
gcagggcacaatttcgggccagttc

SEQ ID NO: 208025 - DNA, 25 bp, probe
gcagtggcacaattttggctccctg

SEQ ID NO: 208026 - DNA, 25 bp, probe
gcagggcagggtaggagcagccgct

SEQ ID NO: 208027 - DNA, 25 bp, probe
gcagggacgcgtacgagctgcagga

SEQ ID NO: 208028 - DNA, 25 bp, probe
gcagggagctgaattcgtgccagtg

SEQ ID NO: 208029 - DNA, 25 bp, probe
gcaggtgcaggcatctcgagaagat

SEQ ID NO: 208030 - DNA, 25 bp, probe
gcagtgtggcgtgcagcatgtgaaa

SEQ ID NO: 208031 - DNA, 25 bp, probe
gcaggatgggtcactggactacaag

SEQ ID NO: 208032 - DNA, 25 bp, probe
gcaggatgggtcactggactacaag

SEQ ID NO: 208033 - DNA, 25 bp, probe
gcagggggatctggggactaccaga

SEQ ID NO: 208034 - DNA, 25 bp, probe
taccggtgacggtgactaccagttt

SEQ ID NO: 208035 - DNA, 25 bp, probe
tacgtggtgacacggtactaccggg

SEQ ID NO: 208036 - DNA, 25 bp, probe
gcacgctggaacagttactcacctg

SEQ ID NO: 208037 - DNA, 25 bp, probe
gcagcgcatgaagtcctgttactac

SEQ ID NO: 208038 - DNA, 25 bp, probe
gcaggtgacggccttagatctctcg

SEQ ID NO: 208039 - DNA, 25 bp, probe
gcaggattccaggttatatctcatc

SEQ ID NO: 208040 - DNA, 25 bp, probe
gcaggattccaggttatatctcatc

SEQ ID NO: 208041 - DNA, 25 bp, probe
gcaggagtctcggctgacataatcc

SEQ ID NO: 208042 - DNA, 25 bp, probe
gcaggagtctcggctgacataatcc

SEQ ID NO: 208043 - DNA, 25 bp, probe
gcagaagtccgtggtcataaccttg

SEQ ID NO: 208044 - DNA, 25 bp, probe
gcagaaatgcaccgagtattggccg

SEQ ID NO: 208045 - DNA, 25 bp, probe
gcaggttgcacacagttttgtttat

SEQ ID NO: 208046 - DNA, 25 bp, probe
gcagtgtccacagagtattttaata

SEQ ID NO: 208047 - DNA, 25 bp, probe
gcagtgtccacagagtattttaata

SEQ ID NO: 208048 - DNA, 25 bp, probe
gcagttcaaagcaggatatgttaag

SEQ ID NO: 208049 - DNA, 25 bp, probe
gcagtatatcaagaggctagaagaa

SEQ ID NO: 208050 - DNA, 25 bp, probe
gcaggtgatcaagcagatgacggag

SEQ ID NO: 208051 - DNA, 25 bp, probe
gcaggtgatcaagcagatgacggag

SEQ ID NO: 208052 - DNA, 25 bp, probe
gcaggtgatccaggtggacagggac

SEQ ID NO: 208053 - DNA, 25 bp, probe
gcagtggcaacagtggtggcagcag

SEQ ID NO: 208054 - DNA, 25 bp, probe
gcagtggcaacagtggtggcagcag

SEQ ID NO: 208055 - DNA, 25 bp, probe
gcagtggcaacagtggtggcagcag

SEQ ID NO: 208056 - DNA, 25 bp, probe
gcagtggcaacagtggtggcagcag

SEQ ID NO: 208057 - DNA, 25 bp, probe
gcagatgcacatctggatgtccagc

SEQ ID NO: 208058 - DNA, 25 bp, probe
gcagatatctgcatgtgtcatgaag

SEQ ID NO: 208059 - DNA, 25 bp, probe
gcagtgcattgcgttgtggaattgg

SEQ ID NO: 208060 - DNA, 25 bp, probe
gcagtcttgcgtgtggatggtgcag

SEQ ID NO: 208061 - DNA, 25 bp, probe
gcagtcttgcgtgtggatggtgcag

SEQ ID NO: 208062 - DNA, 25 bp, probe
gcaggttggggaggatggctgcaaa

SEQ ID NO: 208063 - DNA, 25 bp, probe
gcaggttggtgagaccagatgcaaa

SEQ ID NO: 208064 - DNA, 25 bp, probe
gcaggtgtggcttcatgaccgtaag

SEQ ID NO: 208065 - DNA, 25 bp, probe
gcaggtgtggcttcatgaccgtaag

SEQ ID NO: 208066 - DNA, 25 bp, probe
gcagtgtgactgtggatccgtacag

SEQ ID NO: 208067 - DNA, 25 bp, probe
gcagtgtgacatgaggtggcctgaa

SEQ ID NO: 208068 - DNA, 25 bp, probe
gcagtgtgacatgaggtggcctgaa

SEQ ID NO: 208069 - DNA, 25 bp, probe
gcagtgtccagctaagctgatgact

SEQ ID NO: 208070 - DNA, 25 bp, probe
gcagtgtccgcatgcggaggcctgt

SEQ ID NO: 208071 - DNA, 25 bp, probe
gcagtgtccgcatgcggaggcctgt

SEQ ID NO: 208072 - DNA, 25 bp, probe
gcagaagccagctgcggagtcttct

SEQ ID NO: 208073 - DNA, 25 bp, probe
gcagaagccagctgcggagtcttct

SEQ ID NO: 208074 - DNA, 25 bp, probe
gcagaagccagctgcggagtcttct

SEQ ID NO: 208075 - DNA, 25 bp, probe
gcagaagtggctggctatagtcccg

SEQ ID NO: 208076 - DNA, 25 bp, probe
gcagccactattgttagtctcttga

SEQ ID NO: 208077 - DNA, 25 bp, probe
gcagccactattgttagtctcttga

SEQ ID NO: 208078 - DNA, 25 bp, probe
gcagtactggctgttgggtatggag

SEQ ID NO: 208079 - DNA, 25 bp, probe
gcagaacgggaaaggtgtcagtccg

SEQ ID NO: 208080 - DNA, 25 bp, probe
gaaacgtaaatattttcaccacgat

SEQ ID NO: 208081 - DNA, 25 bp, probe
gcagaagtaaaaatctttccccaga

SEQ ID NO: 208082 - DNA, 25 bp, probe
gcagcaacctgagaactgttcctct

SEQ ID NO: 208083 - DNA, 25 bp, probe
gcagcaacctgagaactgttcctct

SEQ ID NO: 208084 - DNA, 25 bp, probe
gcagaactctctaaaggattgcttc

SEQ ID NO: 208085 - DNA, 25 bp, probe
gcagataccactgaaagagtgcctg

SEQ ID NO: 208086 - DNA, 25 bp, probe
gcagtgacctcggaaggagggtgag

SEQ ID NO: 208087 - DNA, 25 bp, probe
gcagtgacgctggcagatgcggggg

SEQ ID NO: 208088 - DNA, 25 bp, probe
gcagtgacgctggcagatgcggggg

SEQ ID NO: 208089 - DNA, 25 bp, probe
gcagaatgggagcggtgggggtggg

SEQ ID NO: 208090 - DNA, 25 bp, probe
gcagaatgggagcggtgggggtggg

SEQ ID NO: 208091 - DNA, 25 bp, probe
gcagaaaggagacgaagcgggcggc

SEQ ID NO: 208092 - DNA, 25 bp, probe
gcagaaaagcaacaactcgctcccc

SEQ ID NO: 208093 - DNA, 25 bp, probe
gcagagaaatcttaagacggtggcc

SEQ ID NO: 208094 - DNA, 25 bp, probe
gcagcgtcagatgctaatactggag

SEQ ID NO: 208095 - DNA, 25 bp, probe
gcagaatgagatgatcgaatctggg

SEQ ID NO: 208096 - DNA, 25 bp, probe
gcagatagagacaatcttacccgca

SEQ ID NO: 208097 - DNA, 25 bp, probe
gcaggggaagtcttagctgccgcac

SEQ ID NO: 208098 - DNA, 25 bp, probe
gcaggggagcagacttggtgcccag

SEQ ID NO: 208099 - DNA, 25 bp, probe
gcaggtgagcagagcttggtgcctc

SEQ ID NO: 208100 - DNA, 25 bp, probe
gcaggggcaatagtgatggttatat

SEQ ID NO: 208101 - DNA, 25 bp, probe
gcagggtgatgaaagatgtgtgctt

SEQ ID NO: 208102 - DNA, 25 bp, probe
gcagtgcttggacagcattctcatg

SEQ ID NO: 208103 - DNA, 25 bp, probe
gcagatttgaagcaactcatggttc

SEQ ID NO: 208104 - DNA, 25 bp, probe
gcagatttgaagcaactcatggttc

SEQ ID NO: 208105 - DNA, 25 bp, probe
gcagcatttgaacttcagtcaggtt

SEQ ID NO: 208106 - DNA, 25 bp, probe
gcagactttggactagccagagctt

SEQ ID NO: 208107 - DNA, 25 bp, probe
gcagatctttgaagaccacgtgttc

SEQ ID NO: 208108 - DNA, 25 bp, probe
gcagatgctttgggcaacagggtcg

SEQ ID NO: 208109 - DNA, 25 bp, probe
gcagatgccctcccaggagtggagg

SEQ ID NO: 208110 - DNA, 25 bp, probe
gcagaccctggcgccaggaaggagc

SEQ ID NO: 208111 - DNA, 25 bp, probe
gcagaccctggcgccaggaaggagc

SEQ ID NO: 208112 - DNA, 25 bp, probe
gcagaccgccctggtaagaaacagt

SEQ ID NO: 208113 - DNA, 25 bp, probe
gcagaccgctcgggcatggagaatt

SEQ ID NO: 208114 - DNA, 25 bp, probe
gcagaccttcggcatcgagaagtac

SEQ ID NO: 208115 - DNA, 25 bp, probe
gcagatccttcccagattgaacttt

SEQ ID NO: 208116 - DNA, 25 bp, probe
gcagaagcttcacaggctgagagct

SEQ ID NO: 208117 - DNA, 25 bp, probe
gcagaagccgtctacctgaactgcc

SEQ ID NO: 208118 - DNA, 25 bp, probe
gcagacacctgttagggaaattgct

SEQ ID NO: 208119 - DNA, 25 bp, probe
gcagccagcctgaaaagtgaacttt

SEQ ID NO: 208120 - DNA, 25 bp, probe
gcagccggtaacagctgaccttatt

SEQ ID NO: 208121 - DNA, 25 bp, probe
gcacaggttaaccgtcagacttccg

SEQ ID NO: 208122 - DNA, 25 bp, probe
gcacaggttaaccgtcagacttccg

SEQ ID NO: 208123 - DNA, 25 bp, probe
gcacggtttaagcaccactggacta

SEQ ID NO: 208124 - DNA, 25 bp, probe
gcaccttgtctaaggaccctaaatg

SEQ ID NO: 208125 - DNA, 25 bp, probe
gcactacttctaaggatgccccaac

SEQ ID NO: 208126 - DNA, 25 bp, probe
gcagtactgtctgcagcgatacccc

SEQ ID NO: 208127 - DNA, 25 bp, probe
gcagtaccatcccactgatatcacg

SEQ ID NO: 208128 - DNA, 25 bp, probe
gcagcaaccagagcactgtataccc

SEQ ID NO: 208129 - DNA, 25 bp, probe
gcagcaacgcagaacaggcgattcc

SEQ ID NO: 208130 - DNA, 25 bp, probe
gcagaacgcagaagctgccgacgcc

SEQ ID NO: 208131 - DNA, 25 bp, probe
gcagatatccaaagggtgcagcccc

SEQ ID NO: 208132 - DNA, 25 bp, probe
gcagaaccaagacagcacagtgccc

SEQ ID NO: 208133 - DNA, 25 bp, probe
gcagaaccaagacagcacagtgccc

SEQ ID NO: 208134 - DNA, 25 bp, probe
gcagaggccaagttccaggtgtctg

SEQ ID NO: 208135 - DNA, 25 bp, probe
gcagggccgtgacacaggttctggc

SEQ ID NO: 208136 - DNA, 25 bp, probe
gcaggtggcgtacgacggtgttgag

SEQ ID NO: 208137 - DNA, 25 bp, probe
gcaggtggcgtacgacggtgttgag

SEQ ID NO: 208138 - DNA, 25 bp, probe
gcagcgtgggtaaggtgggtcaggt

SEQ ID NO: 208139 - DNA, 25 bp, probe
gcagcgtgggtaaggtgggtcaggt

SEQ ID NO: 208140 - DNA, 25 bp, probe
gacattcaggtacccgggtaggctc

SEQ ID NO: 208141 - DNA, 25 bp, probe
gaattcgtgtgagctggggtggggc

SEQ ID NO: 208142 - DNA, 25 bp, probe
gcaattggcgggcatggaggtgggt

SEQ ID NO: 208143 - DNA, 25 bp, probe
gcagatcgggggcgagggtggctgc

SEQ ID NO: 208144 - DNA, 25 bp, probe
gcagatctgtggatggggagcctac

SEQ ID NO: 208145 - DNA, 25 bp, probe
gcagttcatggcgagagggatgctc

SEQ ID NO: 208146 - DNA, 25 bp, probe
gcagtcacagggggcctgtgtcaca

SEQ ID NO: 208147 - DNA, 25 bp, probe
gcagacagacatggtggctcggtac

SEQ ID NO: 208148 - DNA, 25 bp, probe
gcagaaacatgctttcctagctgaa

SEQ ID NO: 208149 - DNA, 25 bp, probe
gcagcaattcactgtaaagctggaa

SEQ ID NO: 208150 - DNA, 25 bp, probe
gcagataacatctttataatcctaa

SEQ ID NO: 208151 - DNA, 25 bp, probe
gcagatacagcttgtattactggga

SEQ ID NO: 208152 - DNA, 25 bp, probe
gcactacgagcagatctttgggatg

SEQ ID NO: 208153 - DNA, 25 bp, probe
gcactaggagccactgggggagatg

SEQ ID NO: 208154 - DNA, 25 bp, probe
gcaggggatccttctgcaaggctgg

SEQ ID NO: 208155 - DNA, 25 bp, probe
gcaggggtcgcgatgatgggctgga

SEQ ID NO: 208156 - DNA, 25 bp, probe
gcagtgggcctaaagcagggctggg

SEQ ID NO: 208157 - DNA, 25 bp, probe
gcagggagtttggcagcagcgtctg

SEQ ID NO: 208158 - DNA, 25 bp, probe
gcagggttatcttcacacattctga

SEQ ID NO: 208159 - DNA, 25 bp, probe
gcagtggttcttgacatcacacgat

SEQ ID NO: 208160 - DNA, 25 bp, probe
gcagtggttcttgacatcacacgat

SEQ ID NO: 208161 - DNA, 25 bp, probe
gcagtggtgcttatacaaatctaca

SEQ ID NO: 208162 - DNA, 25 bp, probe
gcagtgcaggcattactaaaagaac

SEQ ID NO: 208163 - DNA, 25 bp, probe
gcagtgggtaggcagaaagcattct

SEQ ID NO: 208164 - DNA, 25 bp, probe
gcagcaatggtaagcgtaaagtttt

SEQ ID NO: 208165 - DNA, 25 bp, probe
gcagtgatggctggggaacaatgtt

SEQ ID NO: 208166 - DNA, 25 bp, probe
gcagtgagccatgatggcaccactg

SEQ ID NO: 208167 - DNA, 25 bp, probe
gcagtgagacatcatggctacagca

SEQ ID NO: 208168 - DNA, 25 bp, probe
gcagtagcatcaccatctgtaaaag

SEQ ID NO: 208169 - DNA, 25 bp, probe
gcagagcagctccctcgctgcgatc

SEQ ID NO: 208170 - DNA, 25 bp, probe
gcagaggcatccatctggcagattg

SEQ ID NO: 208171 - DNA, 25 bp, probe
gcagaggctcctggtacatcgagaa

SEQ ID NO: 208172 - DNA, 25 bp, probe
gcagcaccgactgcatactcgagtt

SEQ ID NO: 208173 - DNA, 25 bp, probe
gcagagggaatggcatacatcgagc

SEQ ID NO: 208174 - DNA, 25 bp, probe
gcagaggctgaagatcacctacagt

SEQ ID NO: 208175 - DNA, 25 bp, probe
gcagtggctacaggaactgaatgtg

SEQ ID NO: 208176 - DNA, 25 bp, probe
gcagggcaacgcagacatgttctgg

SEQ ID NO: 208177 - DNA, 25 bp, probe
gcagagggcaggggaagtcttagct

SEQ ID NO: 208178 - DNA, 25 bp, probe
gcagctgggggcagaataggtagta

SEQ ID NO: 208179 - DNA, 25 bp, probe
gcagtgggcggcagagatgctggta

SEQ ID NO: 208180 - DNA, 25 bp, probe
gcagtgggcggcagagatgctggta

SEQ ID NO: 208181 - DNA, 25 bp, probe
gcagggccacctggagtgtgagaga

SEQ ID NO: 208182 - DNA, 25 bp, probe
gcagggctggacggatgttgggagt

SEQ ID NO: 208183 - DNA, 25 bp, probe
gcagtgagttacgactttgatgagg

SEQ ID NO: 208184 - DNA, 25 bp, probe
gcagtgggatacctgcgcttgaagg

SEQ ID NO: 208185 - DNA, 25 bp, probe
gcagggagatgaaaggctttgcaga

SEQ ID NO: 208186 - DNA, 25 bp, probe
gcagggagatgagactcttttaatc

SEQ ID NO: 208187 - DNA, 25 bp, probe
gcaggggtgcaggatcctgttctga

SEQ ID NO: 208188 - DNA, 25 bp, probe
gcagagacagtcggtcatttttcac

SEQ ID NO: 208189 - DNA, 25 bp, probe
gcagggatttgtgcatcttattcat

SEQ ID NO: 208190 - DNA, 25 bp, probe
gcagggcctctaacctgtgatgtca

SEQ ID NO: 208191 - DNA, 25 bp, probe
gcagtgggctgctaacacttgggag

SEQ ID NO: 208192 - DNA, 25 bp, probe
gcagtggctgtacaacgaggtgcag

SEQ ID NO: 208193 - DNA, 25 bp, probe
gcagaggttaaagccagcgggtccc

SEQ ID NO: 208194 - DNA, 25 bp, probe
gcagggactgagtgtaccgtggatc

SEQ ID NO: 208195 - DNA, 25 bp, probe
gcagtgaactatttctacacagtgg

SEQ ID NO: 208196 - DNA, 25 bp, probe
gcagtcagaatatttccaacagtgt

SEQ ID NO: 208197 - DNA, 25 bp, probe
gcagtgccacatttgaccatgagca

SEQ ID NO: 208198 - DNA, 25 bp, probe
gcagacctcataatgacgctgacat

SEQ ID NO: 208199 - DNA, 25 bp, probe
gcagaccccatgcacagtgagtaca

SEQ ID NO: 208200 - DNA, 25 bp, probe
gcagacgccgagatgactggctacg

SEQ ID NO: 208201 - DNA, 25 bp, probe
gcagaatgggagctaccgctgcaag

SEQ ID NO: 208202 - DNA, 25 bp, probe
gcagagacgtagcatcacgcgagac

SEQ ID NO: 208203 - DNA, 25 bp, probe
gcagagacgtagcatcacgcgagac

SEQ ID NO: 208204 - DNA, 25 bp, probe
gcagcgacgtggctcgagaagcatt

SEQ ID NO: 208205 - DNA, 25 bp, probe
gcagtgcctatgcctgggaagaatt

SEQ ID NO: 208206 - DNA, 25 bp, probe
gcagtcccgaggctatgaaattgat

SEQ ID NO: 208207 - DNA, 25 bp, probe
gcagcttcctgggagattagaaatt

SEQ ID NO: 208208 - DNA, 25 bp, probe
gcagcaatcgcttccagattctaaa

SEQ ID NO: 208209 - DNA, 25 bp, probe
gcagaagtgcttcagtcattcacat

SEQ ID NO: 208210 - DNA, 25 bp, probe
gcagatgagcttacaagtattgaaa

SEQ ID NO: 208211 - DNA, 25 bp, probe
gcagaggcttattcagttcttacac

SEQ ID NO: 208212 - DNA, 25 bp, probe
gcagaacttatatgattttctaaag

SEQ ID NO: 208213 - DNA, 25 bp, probe
gcagcaatcttcattatttcctact

SEQ ID NO: 208214 - DNA, 25 bp, probe
gcagaagcttctgttaaggattctc

SEQ ID NO: 208215 - DNA, 25 bp, probe
gcagaaattttacacgagattgctg

SEQ ID NO: 208216 - DNA, 25 bp, probe
gcagaagataagaggacgcagaagc

SEQ ID NO: 208217 - DNA, 25 bp, probe
gcagaaagtcagggatacggcaagc

SEQ ID NO: 208218 - DNA, 25 bp, probe
gcagtacgaatgcgtggcggagatc

SEQ ID NO: 208219 - DNA, 25 bp, probe
gcagggcaggagcttggcagagaga

SEQ ID NO: 208220 - DNA, 25 bp, probe
gcagtagaggcgctgggcagagagt

SEQ ID NO: 208221 - DNA, 25 bp, probe
gcagtagaggcgctgggcagagagt

SEQ ID NO: 208222 - DNA, 25 bp, probe
gcagaacatagccctggcctaggac

SEQ ID NO: 208223 - DNA, 25 bp, probe
gcagaatgctagctctgagccagtt

SEQ ID NO: 208224 - DNA, 25 bp, probe
gcagtgctgggaccagagccagatg

SEQ ID NO: 208225 - DNA, 25 bp, probe
gcagtgtgatggccattgagcggtg

SEQ ID NO: 208226 - DNA, 25 bp, probe
gcagttcctgccagtgcagatctgg

SEQ ID NO: 208227 - DNA, 25 bp, probe
gcagttcctgccagtgcagatctgg

SEQ ID NO: 208228 - DNA, 25 bp, probe
gcagttctcggcggtgaaagggatc

SEQ ID NO: 208229 - DNA, 25 bp, probe
gcagttctccactgtgaagggcgtc

SEQ ID NO: 208230 - DNA, 25 bp, probe
gcagtttgtccattgtgacagtttg

SEQ ID NO: 208231 - DNA, 25 bp, probe
gcagattatggggattcaaattcta

SEQ ID NO: 208232 - DNA, 25 bp, probe
gcagatattggagagaacacattat

SEQ ID NO: 208233 - DNA, 25 bp, probe
gcagtgctaggataaaccaatcatc

SEQ ID NO: 208234 - DNA, 25 bp, probe
gcagctctcaggattcaacaccaac

SEQ ID NO: 208235 - DNA, 25 bp, probe
gcagccgcggtaattccagctccaa

SEQ ID NO: 208236 - DNA, 25 bp, probe
gcagaaggcgaaagtccagctgcca

SEQ ID NO: 208237 - DNA, 25 bp, probe
gcagaaaggaaacagagtgcctctc

SEQ ID NO: 208238 - DNA, 25 bp, probe
gcagcacacgtaaaaaagcgattcc

SEQ ID NO: 208239 - DNA, 25 bp, probe
gcagcaacagtcaggagggcggtct

SEQ ID NO: 208240 - DNA, 25 bp, probe
gcagcaggctaccggacggcaggtt

SEQ ID NO: 208241 - DNA, 25 bp, probe
gcagagcacatatggggtccatttt

SEQ ID NO: 208242 - DNA, 25 bp, probe
gcagaggatattggagccccttttt

SEQ ID NO: 208243 - DNA, 25 bp, probe
taacttcatgatgaccccttacgtg

SEQ ID NO: 208244 - DNA, 25 bp, probe
gaacctaaccactaccttacagtga

SEQ ID NO: 208245 - DNA, 25 bp, probe
gaacctaaccactaccttacagtga

SEQ ID NO: 208246 - DNA, 25 bp, probe
gaacctaatccagaccaacgatttt

SEQ ID NO: 208247 - DNA, 25 bp, probe
gaacttcgaccagaggccaagaatt

SEQ ID NO: 208248 - DNA, 25 bp, probe
gaatcccgagttgtgtccaacgatt

SEQ ID NO: 208249 - DNA, 25 bp, probe
gacccactggttacctacgaaggct

SEQ ID NO: 208250 - DNA, 25 bp, probe
gacccactggttacctacgaaggct

SEQ ID NO: 208251 - DNA, 25 bp, probe
gcagtgatccattgtagcgaaggca

SEQ ID NO: 208252 - DNA, 25 bp, probe
gcagtgtgctgttgtgcacgtcagg

SEQ ID NO: 208253 - DNA, 25 bp, probe
gcagtgtgctgttgtgcacgtcagg

SEQ ID NO: 208254 - DNA, 25 bp, probe
gcagtggctgagtgcagctgagcgg

SEQ ID NO: 208255 - DNA, 25 bp, probe
gcagtgtcttgctggcagatgtgga

SEQ ID NO: 208256 - DNA, 25 bp, probe
gcagtgatgtcactagggcagggac

SEQ ID NO: 208257 - DNA, 25 bp, probe
gcagttggcactggagtcaggcagg

SEQ ID NO: 208258 - DNA, 25 bp, probe
gcagtttgccagaagctcagggtgc

SEQ ID NO: 208259 - DNA, 25 bp, probe
gcagcttacaccaccagggtaagaa

SEQ ID NO: 208260 - DNA, 25 bp, probe
gcagcgtcaacaaacggggctcaag

SEQ ID NO: 208261 - DNA, 25 bp, probe
gcagacgagaagaacggggcccaga

SEQ ID NO: 208262 - DNA, 25 bp, probe
gcagtctagaagcagcagctgggcc

SEQ ID NO: 208263 - DNA, 25 bp, probe
gcagtctagaagcagcagctgggcc

SEQ ID NO: 208264 - DNA, 25 bp, probe
gcagtcgcagaagggccaggagtcg

SEQ ID NO: 208265 - DNA, 25 bp, probe
gcagtccatcgagcacaagctggac

SEQ ID NO: 208266 - DNA, 25 bp, probe
gcagtacatagagcgtgacggcact

SEQ ID NO: 208267 - DNA, 25 bp, probe
gcagtttagagaaggcagagccact

SEQ ID NO: 208268 - DNA, 25 bp, probe
gcagtatttgttggggcatggcaca

SEQ ID NO: 208269 - DNA, 25 bp, probe
gcagagattgctgacgggatggcct

SEQ ID NO: 208270 - DNA, 25 bp, probe
gcagagcaatgtgacaagtatgacg

SEQ ID NO: 208271 - DNA, 25 bp, probe
gcagtgccatggacgcagcagttac

SEQ ID NO: 208272 - DNA, 25 bp, probe
gcagtccatgggccacatgtggctc

SEQ ID NO: 208273 - DNA, 25 bp, probe
gcagtccatgggccacatgtggctc

SEQ ID NO: 208274 - DNA, 25 bp, probe
gcagtcagaggaggacgtgagccag

SEQ ID NO: 208275 - DNA, 25 bp, probe
gcagtcagaggaggacgtgagccag

SEQ ID NO: 208276 - DNA, 25 bp, probe
gcagtgggagatggaggtgtgcaaa

SEQ ID NO: 208277 - DNA, 25 bp, probe
gcagtcggatgtgaggttcagcagt

SEQ ID NO: 208278 - DNA, 25 bp, probe
gcagacgtgtggtcgtttggagtcc

SEQ ID NO: 208279 - DNA, 25 bp, probe
gcagcagggttttggttggagaccc

SEQ ID NO: 208280 - DNA, 25 bp, probe
gcacaggtctttccttatgggatac

SEQ ID NO: 208281 - DNA, 25 bp, probe
gcagagtatctaatttattggcaga

SEQ ID NO: 208282 - DNA, 25 bp, probe
gcagtctaaattaattattgcagta

SEQ ID NO: 208283 - DNA, 25 bp, probe
gcagtgctgaagattatgtgagaca

SEQ ID NO: 208284 - DNA, 25 bp, probe
gcagtgcgccaagttgctgctggaa

SEQ ID NO: 208285 - DNA, 25 bp, probe
gcagtgcgccaagttgctgctggaa

SEQ ID NO: 208286 - DNA, 25 bp, probe
gcagtgcggaagatgctgctggtgt

SEQ ID NO: 208287 - DNA, 25 bp, probe
gcagtcctgaagttggcatgtgcag

SEQ ID NO: 208288 - DNA, 25 bp, probe
gcagtcctgaagttggcatgtgcag

SEQ ID NO: 208289 - DNA, 25 bp, probe
gcagtttgactgtttgcctgagaaa

SEQ ID NO: 208290 - DNA, 25 bp, probe
gcagtttgactgtttgcctgagaaa

SEQ ID NO: 208291 - DNA, 25 bp, probe
gcagtttgtgaatttttgcagaaca

SEQ ID NO: 208292 - DNA, 25 bp, probe
gcagttatctccattttggaagaat

SEQ ID NO: 208293 - DNA, 25 bp, probe
gcagtttttcacaatggtggcatca

SEQ ID NO: 208294 - DNA, 25 bp, probe
gcagttcctctactatgagcaagtc

SEQ ID NO: 208295 - DNA, 25 bp, probe
gcagttcacttaaaggccatgagtt

SEQ ID NO: 208296 - DNA, 25 bp, probe
gcagtcatactggagaattttagtg

SEQ ID NO: 208297 - DNA, 25 bp, probe
gcagtcagcactggcagcaaggatg

SEQ ID NO: 208298 - DNA, 25 bp, probe
gcagtgtgcactgcatcaagcaaag

SEQ ID NO: 208299 - DNA, 25 bp, probe
gcagcttcgtacatatcaagagggc

SEQ ID NO: 208300 - DNA, 25 bp, probe
gcagtgtctgccagccagaaaggcc

SEQ ID NO: 208301 - DNA, 25 bp, probe
gcagtgcctctgcaggcaccaagag

SEQ ID NO: 208302 - DNA, 25 bp, probe
gcagtgcgcactggaggagtacgtg

SEQ ID NO: 208303 - DNA, 25 bp, probe
gcagcagatcatgcgagggtaccgg

SEQ ID NO: 208304 - DNA, 25 bp, probe
gcagcagatcatgcgagggtaccgg

SEQ ID NO: 208305 - DNA, 25 bp, probe
gcagcagatcatgcgagggtaccgg

SEQ ID NO: 208306 - DNA, 25 bp, probe
gcagcagactggtgtgaacccggga

SEQ ID NO: 208307 - DNA, 25 bp, probe
gcagaaagagtctgaatccacccag

SEQ ID NO: 208308 - DNA, 25 bp, probe
gcagcaaaggaagacttggcccagg

SEQ ID NO: 208309 - DNA, 25 bp, probe
gcagaaaggatcacagatgtggctt

SEQ ID NO: 208310 - DNA, 25 bp, probe
gcagaagaggacgaaatgcctttgg

SEQ ID NO: 208311 - DNA, 25 bp, probe
gcagagaaccttggaatcgtctttg

SEQ ID NO: 208312 - DNA, 25 bp, probe
gcagtgcaggccttgcgaagggttt

SEQ ID NO: 208313 - DNA, 25 bp, probe
gcagatcatgcaccagctggacaac

SEQ ID NO: 208314 - DNA, 25 bp, probe
gcagtcatgaagccagatgctcaag

SEQ ID NO: 208315 - DNA, 25 bp, probe
gcagtgtgagagccagctcaacagc

SEQ ID NO: 208316 - DNA, 25 bp, probe
gcagtgtgagagccagctcaacagc

SEQ ID NO: 208317 - DNA, 25 bp, probe
gcagtaggcatgcagctgagattgc

SEQ ID NO: 208318 - DNA, 25 bp, probe
gcactgcagagccagtctggactgc

SEQ ID NO: 208319 - DNA, 25 bp, probe
gcagcgcaagcgctcggagcgcaag

SEQ ID NO: 208320 - DNA, 25 bp, probe
gcagctcaagccacagagtccaggc

SEQ ID NO: 208321 - DNA, 25 bp, probe
gcagcgcaacgctgaagtcaagcgc

SEQ ID NO: 208322 - DNA, 25 bp, probe
gcagagagacgctggagccaggccc

SEQ ID NO: 208323 - DNA, 25 bp, probe
gcagaggttgcagggagccgagatc

SEQ ID NO: 208324 - DNA, 25 bp, probe
gcagtctgaatggcggcacgctgaa

SEQ ID NO: 208325 - DNA, 25 bp, probe
gcaccagaatggagacgctcccatt

SEQ ID NO: 208326 - DNA, 25 bp, probe
gcagccgcaaggagagctactccgt

SEQ ID NO: 208327 - DNA, 25 bp, probe
gcagacatgaagcgggtagtgacag

SEQ ID NO: 208328 - DNA, 25 bp, probe
gcagtgatggtgcggggaggaccgg

SEQ ID NO: 208329 - DNA, 25 bp, probe
gcagtgaagctgttagaggagctac

SEQ ID NO: 208330 - DNA, 25 bp, probe
gcagtgcaatctttcagcagcaacc

SEQ ID NO: 208331 - DNA, 25 bp, probe
gcagtgcaatctttcagcagcaacc

SEQ ID NO: 208332 - DNA, 25 bp, probe
gcagtcaattcattgatgaaggcac

SEQ ID NO: 208333 - DNA, 25 bp, probe
gcagatgcaatcgaatgtgacagga

SEQ ID NO: 208334 - DNA, 25 bp, probe
gcagatgcaatcgaatgtgacagga

SEQ ID NO: 208335 - DNA, 25 bp, probe
gcagagaaggaagtgacgcgcatgg

SEQ ID NO: 208336 - DNA, 25 bp, probe
gcagagaaggaagtgacgcgcatgg

SEQ ID NO: 208337 - DNA, 25 bp, probe
gcagaggaagcttctacgcgctaga

SEQ ID NO: 208338 - DNA, 25 bp, probe
gcagcagaaacgacaaggcacttca

SEQ ID NO: 208339 - DNA, 25 bp, probe
gcagcagcagtctaaaaagccccaa

SEQ ID NO: 208340 - DNA, 25 bp, probe
gcagagcttcttagcaaagtcctca

SEQ ID NO: 208341 - DNA, 25 bp, probe
gcagtgcctgcctatgaaatttcaa

SEQ ID NO: 208342 - DNA, 25 bp, probe
gcagtgacagcctatcagaaccaca

SEQ ID NO: 208343 - DNA, 25 bp, probe
gcagtgaatgctagacagaaaccaa

SEQ ID NO: 208344 - DNA, 25 bp, probe
gcagtgccttagacagcaaaacaga

SEQ ID NO: 208345 - DNA, 25 bp, probe
gcagtgcctttgaagaacaactaca

SEQ ID NO: 208346 - DNA, 25 bp, probe
gcagatcactctcaagaaggaccag

SEQ ID NO: 208347 - DNA, 25 bp, probe
gcagactctatgcaagagaagcaac

SEQ ID NO: 208348 - DNA, 25 bp, probe
gcagactttcagcagagactgtcca

SEQ ID NO: 208349 - DNA, 25 bp, probe
gcagatcttctttcgaagctatgcc

SEQ ID NO: 208350 - DNA, 25 bp, probe
gcagttctttagccatacatatcat

SEQ ID NO: 208351 - DNA, 25 bp, probe
gcagttgccagctgctgctcaataa

SEQ ID NO: 208352 - DNA, 25 bp, probe
gcagcaatcgaggagcttacatcaa

SEQ ID NO: 208353 - DNA, 25 bp, probe
gcagtcacgatcaacttaggcatga

SEQ ID NO: 208354 - DNA, 25 bp, probe
gcagtgcttagcaacattggtgata

SEQ ID NO: 208355 - DNA, 25 bp, probe
gcagtcatcttgaccaagcaggaag

SEQ ID NO: 208356 - DNA, 25 bp, probe
gcagtatctggagtcccggaagtgt

SEQ ID NO: 208357 - DNA, 25 bp, probe
gcagccagaaacatcctggtagctg

SEQ ID NO: 208358 - DNA, 25 bp, probe
gcagcagtaaacatctgtggtacat

SEQ ID NO: 208359 - DNA, 25 bp, probe
gcagttagaaaatttgtgtccacaa

SEQ ID NO: 208360 - DNA, 25 bp, probe
gcagttggatcagctcctttacaaa

SEQ ID NO: 208361 - DNA, 25 bp, probe
gcagttggatcagctcctttacaaa

SEQ ID NO: 208362 - DNA, 25 bp, probe
gcagttaatctcgttatttaaacaa

SEQ ID NO: 208363 - DNA, 25 bp, probe
gcagtacaacgcgaaagtggaaatc

SEQ ID NO: 208364 - DNA, 25 bp, probe
gcagtgacagcagcgacagcagtga

SEQ ID NO: 208365 - DNA, 25 bp, probe
gcagtacagcaactacagcgtgaac

SEQ ID NO: 208366 - DNA, 25 bp, probe
gcagtacagcaactacagcgtgaac

SEQ ID NO: 208367 - DNA, 25 bp, probe
gcagtgacggagagcaggtcagcct

SEQ ID NO: 208368 - DNA, 25 bp, probe
gcagatggggaggacgcctatgcca

SEQ ID NO: 208369 - DNA, 25 bp, probe
gcagtgctgggcaggtgacttcatc

SEQ ID NO: 208370 - DNA, 25 bp, probe
gcagaggaggtatatgactacatca

SEQ ID NO: 208371 - DNA, 25 bp, probe
gcagaggaggagcgtgatctctccc

SEQ ID NO: 208372 - DNA, 25 bp, probe
gcagagaagtgacggttcctacaca

SEQ ID NO: 208373 - DNA, 25 bp, probe
gcagagaaggacgagttcgacatcc

SEQ ID NO: 208374 - DNA, 25 bp, probe
gcagaagagaccctctgtggacacc

SEQ ID NO: 208375 - DNA, 25 bp, probe
gcagaaggcatggcattcattgaag

SEQ ID NO: 208376 - DNA, 25 bp, probe
gcagacaggtctatttaaactttca

SEQ ID NO: 208377 - DNA, 25 bp, probe
gcagacaggtctatttaaactttca

SEQ ID NO: 208378 - DNA, 25 bp, probe
gcagacctttttatacatggctttt

SEQ ID NO: 208379 - DNA, 25 bp, probe
gcagatgcctcttgttttaatatat

SEQ ID NO: 208380 - DNA, 25 bp, probe
gcagacctaaatattgattcttggc

SEQ ID NO: 208381 - DNA, 25 bp, probe
gcagatcccgaagtctttttaggcc

SEQ ID NO: 208382 - DNA, 25 bp, probe
gcagttacagcaccattgttttagc

SEQ ID NO: 208383 - DNA, 25 bp, probe
gcagtttgacccttgctgcaagtac

SEQ ID NO: 208384 - DNA, 25 bp, probe
gcagttcaatcctctggaacgactt

SEQ ID NO: 208385 - DNA, 25 bp, probe
gcagtttatagctccaaccaatgct

SEQ ID NO: 208386 - DNA, 25 bp, probe
gcagtttatagctccaaccaatgct

SEQ ID NO: 208387 - DNA, 25 bp, probe
gcacctaattctaccaatcaaatgt

SEQ ID NO: 208388 - DNA, 25 bp, probe
gcagaatacttctcacagctcaaag

SEQ ID NO: 208389 - DNA, 25 bp, probe
gcagaatacttctcacagctcaaag

SEQ ID NO: 208390 - DNA, 25 bp, probe
gcagagtcactttgacaatgggaat

SEQ ID NO: 208391 - DNA, 25 bp, probe
gcagagtcctatagaacagagtcgt

SEQ ID NO: 208392 - DNA, 25 bp, probe
gcagcagacgttaaactcactcgct

SEQ ID NO: 208393 - DNA, 25 bp, probe
gcagcaaatttgaacagctggtttg

SEQ ID NO: 208394 - DNA, 25 bp, probe
gcagacaatttgcaggctacttttg

SEQ ID NO: 208395 - DNA, 25 bp, probe
gcagagcaataacactatatttatt

SEQ ID NO: 208396 - DNA, 25 bp, probe
gcagcgtatacaaagctattcataa

SEQ ID NO: 208397 - DNA, 25 bp, probe
gcagcagctacgagagtcctcatat

SEQ ID NO: 208398 - DNA, 25 bp, probe
gcagcctgaggctgaatccttcttc

SEQ ID NO: 208399 - DNA, 25 bp, probe
gcagctcatgcggcattactgcctt

SEQ ID NO: 208400 - DNA, 25 bp, probe
gcagtctgcgtgtatgtctatgtat

SEQ ID NO: 208401 - DNA, 25 bp, probe
gcagatcagtctttgtcaatgctct

SEQ ID NO: 208402 - DNA, 25 bp, probe
gcagaaattcaagcatatgtcctat

SEQ ID NO: 208403 - DNA, 25 bp, probe
gcagtaattcccatctgcctttatt

SEQ ID NO: 208404 - DNA, 25 bp, probe
gcaacagaaacggtcctctttattg

SEQ ID NO: 208405 - DNA, 25 bp, probe
gcagcatagaacaggacctctgctt

SEQ ID NO: 208406 - DNA, 25 bp, probe
gcagttcatcaccaggacactagct

SEQ ID NO: 208407 - DNA, 25 bp, probe
gcagttatgcaatggacctgattct

SEQ ID NO: 208408 - DNA, 25 bp, probe
gcagctgttgagaaaacgaagtctt

SEQ ID NO: 208409 - DNA, 25 bp, probe
gcagctgttggacacgtgtctgtgc

SEQ ID NO: 208410 - DNA, 25 bp, probe
gcagctgttggaaagcattgcctct

SEQ ID NO: 208411 - DNA, 25 bp, probe
gcagtcttgtaatattgttcattca

SEQ ID NO: 208412 - DNA, 25 bp, probe
gcagtcttgtaatattgttcattca

SEQ ID NO: 208413 - DNA, 25 bp, probe
gcagttgtttgcttattttatggaa

SEQ ID NO: 208414 - DNA, 25 bp, probe
gcagttttgctcttttgtacatttt

SEQ ID NO: 208415 - DNA, 25 bp, probe
gcagttacagtcttgtggaaaaggt

SEQ ID NO: 208416 - DNA, 25 bp, probe
gcagattaccacattgagcaaaagc

SEQ ID NO: 208417 - DNA, 25 bp, probe
gcagatgctttcggtagagaaaatc

SEQ ID NO: 208418 - DNA, 25 bp, probe
gcagattttcttgggagagtcactc

SEQ ID NO: 208419 - DNA, 25 bp, probe
gcacttactttgttgcaagtactgc

SEQ ID NO: 208420 - DNA, 25 bp, probe
gcactaacttcatgatgacccctta

SEQ ID NO: 208421 - DNA, 25 bp, probe
gcagctaagcttaagaattctggat

SEQ ID NO: 208422 - DNA, 25 bp, probe
gcagcacgtcgtaggattccatggt

SEQ ID NO: 208423 - DNA, 25 bp, probe
gcagacatttgtagtgatgctccgg

SEQ ID NO: 208424 - DNA, 25 bp, probe
gcagaatgtatcatcagagcgccga

SEQ ID NO: 208425 - DNA, 25 bp, probe
gcagaagtcatgttccagcttggac

SEQ ID NO: 208426 - DNA, 25 bp, probe
gcagagatgaagttccaggggcccc

SEQ ID NO: 208427 - DNA, 25 bp, probe
gcagagatgaagttccaggggcccc

SEQ ID NO: 208428 - DNA, 25 bp, probe
gcagttgagagtagacaggttagag

SEQ ID NO: 208429 - DNA, 25 bp, probe
gcagttgtatgctgtggtttcagag

SEQ ID NO: 208430 - DNA, 25 bp, probe
gcagctggttaacgtgtttgctgag

SEQ ID NO: 208431 - DNA, 25 bp, probe
gcagctggttacaagtctttaatca

SEQ ID NO: 208432 - DNA, 25 bp, probe
gcagcttgttgaaggctcgtcaaaa

SEQ ID NO: 208433 - DNA, 25 bp, probe
gcagactgctagtgttctgtctaaa

SEQ ID NO: 208434 - DNA, 25 bp, probe
gcagactgtagctgctgtgggaaac

SEQ ID NO: 208435 - DNA, 25 bp, probe
gcagatcaaacatctggaaattacc

SEQ ID NO: 208436 - DNA, 25 bp, probe
gcagtactgacctgcaggaactccc

SEQ ID NO: 208437 - DNA, 25 bp, probe
gcagcaaggacctgcaggacgtgtc

SEQ ID NO: 208438 - DNA, 25 bp, probe
gcagagaaaggcaggtcagcgtgtc

SEQ ID NO: 208439 - DNA, 25 bp, probe
gcagagagatagccgggctccaggg

SEQ ID NO: 208440 - DNA, 25 bp, probe
gcagtagcatgatcagggatcactg

SEQ ID NO: 208441 - DNA, 25 bp, probe
gcagctacagtgtagaagatcctgt

SEQ ID NO: 208442 - DNA, 25 bp, probe
gcagctacagtgtagaagatcctgt

SEQ ID NO: 208443 - DNA, 25 bp, probe
gcagatccaggctctgcagtatctg

SEQ ID NO: 208444 - DNA, 25 bp, probe
gcagattcactggaggctgtattgc

SEQ ID NO: 208445 - DNA, 25 bp, probe
gcagagatcactgggagcaaatatc

SEQ ID NO: 208446 - DNA, 25 bp, probe
gcagatggcttgtgcagaagattgg

SEQ ID NO: 208447 - DNA, 25 bp, probe
gcagagtcttcggcagaagcacttg

SEQ ID NO: 208448 - DNA, 25 bp, probe
gcagattttctgcagcaagcactgt

SEQ ID NO: 208449 - DNA, 25 bp, probe
gcagattttctgcagcaagcactgt

SEQ ID NO: 208450 - DNA, 25 bp, probe
gcagatatttctgtgaacatgtatg

SEQ ID NO: 208451 - DNA, 25 bp, probe
gcagataaatctgatgagttttgct

SEQ ID NO: 208452 - DNA, 25 bp, probe
gcagatacttcatatagcccatttt

SEQ ID NO: 208453 - DNA, 25 bp, probe
gcagcattcttcgaaaaccgcattt

SEQ ID NO: 208454 - DNA, 25 bp, probe
gcagatctttaaatacagtcaactt

SEQ ID NO: 208455 - DNA, 25 bp, probe
gcagatctttaaatacagtcaactt

SEQ ID NO: 208456 - DNA, 25 bp, probe
gcagttgttgaaaacgtccccattt

SEQ ID NO: 208457 - DNA, 25 bp, probe
gcagatggtgtgggtacctcaccca

SEQ ID NO: 208458 - DNA, 25 bp, probe
gcagctgagtgttgatgtactccat

SEQ ID NO: 208459 - DNA, 25 bp, probe
gcagcaagatgttcaaactccatct

SEQ ID NO: 208460 - DNA, 25 bp, probe
gcagcaggttggtgattcagtccga

SEQ ID NO: 208461 - DNA, 25 bp, probe
gcagccgtttgatgattccttagaa

SEQ ID NO: 208462 - DNA, 25 bp, probe
gcagccgtttgatgattccttagaa

SEQ ID NO: 208463 - DNA, 25 bp, probe
gcagcaccctggagatactcttaaa

SEQ ID NO: 208464 - DNA, 25 bp, probe
gcaccctgcaggagatacagctaaa

SEQ ID NO: 208465 - DNA, 25 bp, probe
gcactactcggtgtgaatgaagaaa

SEQ ID NO: 208466 - DNA, 25 bp, probe
gcactactacctgcaggcacaaaag

SEQ ID NO: 208467 - DNA, 25 bp, probe
gcagcgattaataacaggcaaaagg

SEQ ID NO: 208468 - DNA, 25 bp, probe
gcagctttcaactcggcaaaatgga

SEQ ID NO: 208469 - DNA, 25 bp, probe
gcagctttaaccattaaaactgaag

SEQ ID NO: 208470 - DNA, 25 bp, probe
gagccttactgggttgaaaaggagt

SEQ ID NO: 208471 - DNA, 25 bp, probe
gcagcaacgacgaggtggccaagga

SEQ ID NO: 208472 - DNA, 25 bp, probe
gcagaacgaagtcgagttgcggcgg

SEQ ID NO: 208473 - DNA, 25 bp, probe
gcagaacgaagtcgagttgcggcgg

SEQ ID NO: 208474 - DNA, 25 bp, probe
gcagaccgccatgggggatcagtgc

SEQ ID NO: 208475 - DNA, 25 bp, probe
gcagacctcaatgcgtgagtccagc

SEQ ID NO: 208476 - DNA, 25 bp, probe
gcagaactgaatgcccgtctgcagg

SEQ ID NO: 208477 - DNA, 25 bp, probe
gcagaactgaatgcccgtctgcagg

SEQ ID NO: 208478 - DNA, 25 bp, probe
gcagaggtgaaggagtcggtgaggg

SEQ ID NO: 208479 - DNA, 25 bp, probe
gcagaggtgaaggagtcggtgaggg

SEQ ID NO: 208480 - DNA, 25 bp, probe
gcagaggcgaactgtagagtgcagg

SEQ ID NO: 208481 - DNA, 25 bp, probe
gcagaggggacaaatgaggacaggg

SEQ ID NO: 208482 - DNA, 25 bp, probe
gcagaggggacaaatgaggacaggg

SEQ ID NO: 208483 - DNA, 25 bp, probe
gcagagggggtaggggcagagtcag

SEQ ID NO: 208484 - DNA, 25 bp, probe
gcagatgggggcaaggttaggtgaa

SEQ ID NO: 208485 - DNA, 25 bp, probe
gcagatgggagggttgtgcttgtgg

SEQ ID NO: 208486 - DNA, 25 bp, probe
gcagacgcaaggctttctgtgggcc

SEQ ID NO: 208487 - DNA, 25 bp, probe
gcagaccaccagcatcgacatgtgg

SEQ ID NO: 208488 - DNA, 25 bp, probe
gcagaccaccagcatcgacatgtgg

SEQ ID NO: 208489 - DNA, 25 bp, probe
gcagaccaccagcatcgacatgtgg

SEQ ID NO: 208490 - DNA, 25 bp, probe
gcagaccagcaagctgtgagagtgc

SEQ ID NO: 208491 - DNA, 25 bp, probe
gcagaccacagggcagcttgggact

SEQ ID NO: 208492 - DNA, 25 bp, probe
gcagatgctgaaggcagagcagctg

SEQ ID NO: 208493 - DNA, 25 bp, probe
gcagatgctgaaggcagagcagctg

SEQ ID NO: 208494 - DNA, 25 bp, probe
gcagatggaatccgagcagggcgac

SEQ ID NO: 208495 - DNA, 25 bp, probe
gcagattgaatcccggaagcgactt

SEQ ID NO: 208496 - DNA, 25 bp, probe
gcagattgaatcccggaagcgactt

SEQ ID NO: 208497 - DNA, 25 bp, probe
gcagattgaatcccgaaagagaatt

SEQ ID NO: 208498 - DNA, 25 bp, probe
gcagcttgaacgactaaagcagaaa

SEQ ID NO: 208499 - DNA, 25 bp, probe
gcagcctgttaaagaaggatgaacc

SEQ ID NO: 208500 - DNA, 25 bp, probe
gcagactttcaataaggagatcaaa

SEQ ID NO: 208501 - DNA, 25 bp, probe
gcagcctcttcatccacgaagaatc

SEQ ID NO: 208502 - DNA, 25 bp, probe
gcactttataagccaatgaagcaaa

SEQ ID NO: 208503 - DNA, 25 bp, probe
gcagttccaagcttgcatcatgaag

SEQ ID NO: 208504 - DNA, 25 bp, probe
gcagttccaagcttgcatcatgaag

SEQ ID NO: 208505 - DNA, 25 bp, probe
gcagatcttcgtggtcatcaaagac

SEQ ID NO: 208506 - DNA, 25 bp, probe
gcagatcttggtggtcagctgggtc

SEQ ID NO: 208507 - DNA, 25 bp, probe
gcagcttggaggttcagtggagatc

SEQ ID NO: 208508 - DNA, 25 bp, probe
gcagcatttacggtagtggcattct

SEQ ID NO: 208509 - DNA, 25 bp, probe
gcagcatttatctgtttgatctcca

SEQ ID NO: 208510 - DNA, 25 bp, probe
gcagatgctaatttctcttgctcct

SEQ ID NO: 208511 - DNA, 25 bp, probe
gcagttagatagtgctctgtgccta

SEQ ID NO: 208512 - DNA, 25 bp, probe
gcagcttaagatggtgccttcgtga

SEQ ID NO: 208513 - DNA, 25 bp, probe
gcacctacatatggtgctgcccaag

SEQ ID NO: 208514 - DNA, 25 bp, probe
gcagcttagaggatctcccaaggat

SEQ ID NO: 208515 - DNA, 25 bp, probe
gcacttcaaggggtcaaagggcaac

SEQ ID NO: 208516 - DNA, 25 bp, probe
gcacttaatggtctctgttttcaat

SEQ ID NO: 208517 - DNA, 25 bp, probe
gcagttacctggttgctgttttaat

SEQ ID NO: 208518 - DNA, 25 bp, probe
gcaagtccaaggttttctattatga

SEQ ID NO: 208519 - DNA, 25 bp, probe
gcagcagttccgctttatctattac

SEQ ID NO: 208520 - DNA, 25 bp, probe
gcagcagttccgctttatctattac

SEQ ID NO: 208521 - DNA, 25 bp, probe
gcagagtaacattattgttctcatt

SEQ ID NO: 208522 - DNA, 25 bp, probe
gcagattaccatttattacatcgtt

SEQ ID NO: 208523 - DNA, 25 bp, probe
gcagttaaatatcctctactacctc

SEQ ID NO: 208524 - DNA, 25 bp, probe
gcagcttgagaattgccctcagtga

SEQ ID NO: 208525 - DNA, 25 bp, probe
gcagatgtggacaactccaagctct

SEQ ID NO: 208526 - DNA, 25 bp, probe
gcagatggtgaaattggaagccgag

SEQ ID NO: 208527 - DNA, 25 bp, probe
gcagatggtgatttccctgacacca

SEQ ID NO: 208528 - DNA, 25 bp, probe
gcagatgatggcagtggccgacatc

SEQ ID NO: 208529 - DNA, 25 bp, probe
gcagattgctgaagggatggcatac

SEQ ID NO: 208530 - DNA, 25 bp, probe
gcagacatggtcccaggagcataga

SEQ ID NO: 208531 - DNA, 25 bp, probe
gcagcctggatgaccggagcaggat

SEQ ID NO: 208532 - DNA, 25 bp, probe
gcagcgtggagacattaggtcagcc

SEQ ID NO: 208533 - DNA, 25 bp, probe
gcacctgaagcacgagaacgtcatc

SEQ ID NO: 208534 - DNA, 25 bp, probe
gcacctgcaacggagactccggtgg

SEQ ID NO: 208535 - DNA, 25 bp, probe
gcagatcatgcgagggtaccggctg

SEQ ID NO: 208536 - DNA, 25 bp, probe
gcagagctgcgcagggagaacgagc

SEQ ID NO: 208537 - DNA, 25 bp, probe
gcagcagctgccagagttgaacaga

SEQ ID NO: 208538 - DNA, 25 bp, probe
gcagacagtgctagagtgtatgaaa

SEQ ID NO: 208539 - DNA, 25 bp, probe
gcagagctgtgttgcggcttggaag

SEQ ID NO: 208540 - DNA, 25 bp, probe
gcagactggtacctcgttaagatgt

SEQ ID NO: 208541 - DNA, 25 bp, probe
gcagacagaatcactatttcaagtt

SEQ ID NO: 208542 - DNA, 25 bp, probe
gcagaggtatagccttttcaagctt

SEQ ID NO: 208543 - DNA, 25 bp, probe
gcagacctaagcttatatgtgaact

SEQ ID NO: 208544 - DNA, 25 bp, probe
gcagacgtaagcttacaaatcatcc

SEQ ID NO: 208545 - DNA, 25 bp, probe
gcagccaggacactcaaaaacacaa

SEQ ID NO: 208546 - DNA, 25 bp, probe
gcaccaggaatccctaaagccagcc

SEQ ID NO: 208547 - DNA, 25 bp, probe
gcagctcaggaaggctgtcagacag

SEQ ID NO: 208548 - DNA, 25 bp, probe
gcacctggagacggatctccagtct

SEQ ID NO: 208549 - DNA, 25 bp, probe
gcacctggtactgcacattttgtac

SEQ ID NO: 208550 - DNA, 25 bp, probe
gcaccttacttgaccatttgtttct

SEQ ID NO: 208551 - DNA, 25 bp, probe
gcagagttgcacaatatccttttga

SEQ ID NO: 208552 - DNA, 25 bp, probe
gcagattacaataaatcctttactt

SEQ ID NO: 208553 - DNA, 25 bp, probe
gcagattacaataaatcctttactt

SEQ ID NO: 208554 - DNA, 25 bp, probe
gcagatattcctaaagttttattga

SEQ ID NO: 208555 - DNA, 25 bp, probe
gcagaattccttttacttttagtca

SEQ ID NO: 208556 - DNA, 25 bp, probe
gcacaaacaaatttactattcggac

SEQ ID NO: 208557 - DNA, 25 bp, probe
gcagcaacactaaaaagtttctgga

SEQ ID NO: 208558 - DNA, 25 bp, probe
gcagccccttaaaaactgtgggagg

SEQ ID NO: 208559 - DNA, 25 bp, probe
gcagccccttaaaaactgtgggagg

SEQ ID NO: 208560 - DNA, 25 bp, probe
gcagaccctctatcaaagctctggg

SEQ ID NO: 208561 - DNA, 25 bp, probe
gcagcacctttagctaggttggccc

SEQ ID NO: 208562 - DNA, 25 bp, probe
gcagcagtctgtgaactaaatttgt

SEQ ID NO: 208563 - DNA, 25 bp, probe
gcacagatttgacccaagctattta

SEQ ID NO: 208564 - DNA, 25 bp, probe
gcagcacattcgggatcatgagttt

SEQ ID NO: 208565 - DNA, 25 bp, probe
gcagcacatctaacgagtagctcat

SEQ ID NO: 208566 - DNA, 25 bp, probe
gcagcacatctaacgagtagctcat

SEQ ID NO: 208567 - DNA, 25 bp, probe
gcagcagagagcggccagtagcttc

SEQ ID NO: 208568 - DNA, 25 bp, probe
gcagcacagacaaggcagatctcat

SEQ ID NO: 208569 - DNA, 25 bp, probe
gcagagcatcacctggcagatgatc

SEQ ID NO: 208570 - DNA, 25 bp, probe
gcagcgacacgcggcagagatcgcc

SEQ ID NO: 208571 - DNA, 25 bp, probe
gcagctggcagagcgcgagatcgac

SEQ ID NO: 208572 - DNA, 25 bp, probe
gcagctggcagagcgcgagatcgac

SEQ ID NO: 208573 - DNA, 25 bp, probe
gcagctggctgagacggaggccttc

SEQ ID NO: 208574 - DNA, 25 bp, probe
gcagcggcttaagggcgatgcctgg

SEQ ID NO: 208575 - DNA, 25 bp, probe
gcagagcctgcttgaagcgggcact

SEQ ID NO: 208576 - DNA, 25 bp, probe
gcagcagtgtcaacagacgggagtc

SEQ ID NO: 208577 - DNA, 25 bp, probe
gcagaggatgcactcaacacggtgt

SEQ ID NO: 208578 - DNA, 25 bp, probe
gcagagagagaggcaaacagcagtg

SEQ ID NO: 208579 - DNA, 25 bp, probe
gcagaagcaggctcaacagagaaca

SEQ ID NO: 208580 - DNA, 25 bp, probe
gcagaagcaggctcaacagagaaca

SEQ ID NO: 208581 - DNA, 25 bp, probe
gcagaagctggaggcacaacgcacc

SEQ ID NO: 208582 - DNA, 25 bp, probe
gcagcctgtgaagacagcctgcacc

SEQ ID NO: 208583 - DNA, 25 bp, probe
gcagctttgaggacagcagctgaca

SEQ ID NO: 208584 - DNA, 25 bp, probe
gcagctcctagccatagagcttcct

SEQ ID NO: 208585 - DNA, 25 bp, probe
gcagcagcgtgtcctcagagctgcg

SEQ ID NO: 208586 - DNA, 25 bp, probe
gcagcagcgtgtcctcagagctgcg

SEQ ID NO: 208587 - DNA, 25 bp, probe
gcagcatgcaagagctcagcacgat

SEQ ID NO: 208588 - DNA, 25 bp, probe
gcagatgatatgtgctgcctttgct

SEQ ID NO: 208589 - DNA, 25 bp, probe
gcagagatatgcctttctcattctt

SEQ ID NO: 208590 - DNA, 25 bp, probe
gcagatgtggtgcttctcatttatt

SEQ ID NO: 208591 - DNA, 25 bp, probe
gcagatgtcttcagctatgctctgt

SEQ ID NO: 208592 - DNA, 25 bp, probe
gcagctgtcatttggctgtgcgtgc

SEQ ID NO: 208593 - DNA, 25 bp, probe
gcagctgtagctcccgagctactct

SEQ ID NO: 208594 - DNA, 25 bp, probe
gcagcgtcaggtactactaatatta

SEQ ID NO: 208595 - DNA, 25 bp, probe
gcagctaaggaaggacatacaagta

SEQ ID NO: 208596 - DNA, 25 bp, probe
gcagctatagtctggcaccaaagtc

SEQ ID NO: 208597 - DNA, 25 bp, probe
gcagcaagcagttctacctaacgtc

SEQ ID NO: 208598 - DNA, 25 bp, probe
gcagcaagtgctttcatccaaaacc

SEQ ID NO: 208599 - DNA, 25 bp, probe
gcagagttctttaaaacacaccagc

SEQ ID NO: 208600 - DNA, 25 bp, probe
gcagcagtatctattaatacatgcc

SEQ ID NO: 208601 - DNA, 25 bp, probe
gcagcgtatctagtaattaagcata

SEQ ID NO: 208602 - DNA, 25 bp, probe
gcacgatattcagatttcggcctta

SEQ ID NO: 208603 - DNA, 25 bp, probe
gcagccaagtttacttcatgactct

SEQ ID NO: 208604 - DNA, 25 bp, probe
gcagcctttgttattgcatacatta

SEQ ID NO: 208605 - DNA, 25 bp, probe
gcagagttgtcatcttggagactaa

SEQ ID NO: 208606 - DNA, 25 bp, probe
gcagatggtgtatctcaggagctct

SEQ ID NO: 208607 - DNA, 25 bp, probe
gcagcaggctcttcactgaaggtca

SEQ ID NO: 208608 - DNA, 25 bp, probe
gcagcaagcactacagagtcagaac

SEQ ID NO: 208609 - DNA, 25 bp, probe
gcagaggcagccagagttgaatgtt

SEQ ID NO: 208610 - DNA, 25 bp, probe
gcagaggcagccagagttgaatgtt

SEQ ID NO: 208611 - DNA, 25 bp, probe
gcagaagcagcagcgcagggagatg

SEQ ID NO: 208612 - DNA, 25 bp, probe
gcagaagatcagtcactctcggagc

SEQ ID NO: 208613 - DNA, 25 bp, probe
gcagaagatcagtcactctcggagc

SEQ ID NO: 208614 - DNA, 25 bp, probe
gcagaaacagcagcatgctcaccct

SEQ ID NO: 208615 - DNA, 25 bp, probe
gcagaaacgacaaggcacttcatga

SEQ ID NO: 208616 - DNA, 25 bp, probe
gcagaaacgtgcaggcagagccgat

SEQ ID NO: 208617 - DNA, 25 bp, probe
gcagaagcaaatgtcatgcagcagc

SEQ ID NO: 208618 - DNA, 25 bp, probe
gcagatggccaagacgctgagcgag

SEQ ID NO: 208619 - DNA, 25 bp, probe
gcagaggcgcagaatcctgtgaggg

SEQ ID NO: 208620 - DNA, 25 bp, probe
gcagcatgagctgatgacactggat

SEQ ID NO: 208621 - DNA, 25 bp, probe
gcagcacactcatatcaatggtgtc

SEQ ID NO: 208622 - DNA, 25 bp, probe
gcagcatgacaagctcgtgaggctc

SEQ ID NO: 208623 - DNA, 25 bp, probe
gcagcagaacaggtattgggctgtt

SEQ ID NO: 208624 - DNA, 25 bp, probe
gcagaaacactcctgtggatggtat

SEQ ID NO: 208625 - DNA, 25 bp, probe
gcagcacataccactgtgggggcaa

SEQ ID NO: 208626 - DNA, 25 bp, probe
gcagcacataccactgtgggggcaa

SEQ ID NO: 208627 - DNA, 25 bp, probe
gcagcagaattcattgtcggaagga

SEQ ID NO: 208628 - DNA, 25 bp, probe
gcagagaatggttttcaggagcatg

SEQ ID NO: 208629 - DNA, 25 bp, probe
gcagagcgtggttgtatctggggcc

SEQ ID NO: 208630 - DNA, 25 bp, probe
gcagagcgtatgagctacctggagc

SEQ ID NO: 208631 - DNA, 25 bp, probe
gcagaggaatgtagggcctgcatgg

SEQ ID NO: 208632 - DNA, 25 bp, probe
gcagagagagatcatgtggccatgt

SEQ ID NO: 208633 - DNA, 25 bp, probe
gcagacaagatccagatggccatgg

SEQ ID NO: 208634 - DNA, 25 bp, probe
gcaacatcgagcctgatgagcgctg

SEQ ID NO: 208635 - DNA, 25 bp, probe
gcagcattcagactatgagagcaca

SEQ ID NO: 208636 - DNA, 25 bp, probe
gcagccagcagcctgtgaagacagc

SEQ ID NO: 208637 - DNA, 25 bp, probe
gcagcgatggcttatgacagatttg

SEQ ID NO: 208638 - DNA, 25 bp, probe
gcagcgatggcttatgacagatttg

SEQ ID NO: 208639 - DNA, 25 bp, probe
gcagccatgtgtctaattttctggg

SEQ ID NO: 208640 - DNA, 25 bp, probe
gcagcttctgttggcagagcttttg

SEQ ID NO: 208641 - DNA, 25 bp, probe
gcagccagctttgcaggttatcaga

SEQ ID NO: 208642 - DNA, 25 bp, probe
gcagcacagttcagcattgtgtggc

SEQ ID NO: 208643 - DNA, 25 bp, probe
gcagacacttcccaagtgtctgctc

SEQ ID NO: 208644 - DNA, 25 bp, probe
gcagatgcacggcagaatggttccc

SEQ ID NO: 208645 - DNA, 25 bp, probe
gcagcagatgcacggcagaatggtt

SEQ ID NO: 208646 - DNA, 25 bp, probe
gcagcagcacagttcagcattgtgt

SEQ ID NO: 208647 - DNA, 25 bp, probe
gcagagcaacctgcatctgctggag

SEQ ID NO: 208648 - DNA, 25 bp, probe
gcagcagaaactttcgctggatggt

SEQ ID NO: 208649 - DNA, 25 bp, probe
gcagcagagaacgggcagatggagg

SEQ ID NO: 208650 - DNA, 25 bp, probe
gcagcagagaacgggcagatggagg

SEQ ID NO: 208651 - DNA, 25 bp, probe
gcagcagaagcagcagcgcagggag

SEQ ID NO: 208652 - DNA, 25 bp, probe
gcagaggtgcaccctgcaggagata

SEQ ID NO: 208653 - DNA, 25 bp, probe
gcagaggtgcaccctgcaggagata

SEQ ID NO: 208654 - DNA, 25 bp, probe
gcagagtggccagcaaggagcagca

SEQ ID NO: 208655 - DNA, 25 bp, probe
gcagagggcacagaaaatggaagac

SEQ ID NO: 208656 - DNA, 25 bp, probe
gcagagagccacgcaaacatgggtg

SEQ ID NO: 208657 - DNA, 25 bp, probe
gcagaagccagtggctacatatggg

SEQ ID NO: 208658 - DNA, 25 bp, probe
gcagacggcagggccagtatggggc

SEQ ID NO: 208659 - DNA, 25 bp, probe
gcagaggagagggctcctgtgacgg

SEQ ID NO: 208660 - DNA, 25 bp, probe
gcagaggcagggatagctgggtggt

SEQ ID NO: 208661 - DNA, 25 bp, probe
gcagagtcagggatgggtccattat

SEQ ID NO: 208662 - DNA, 25 bp, probe
gcagagtcagggatgggtccattat

SEQ ID NO: 208663 - DNA, 25 bp, probe
gcacctcaaggacttttctgctatt

SEQ ID NO: 208664 - DNA, 25 bp, probe
gcactctgcaaccagtgttgcctgc

SEQ ID NO: 208665 - DNA, 25 bp, probe
gcacatctaacgagtagctcatttt

SEQ ID NO: 208666 - DNA, 25 bp, probe
gcagcattaacagttctacacattt

SEQ ID NO: 208667 - DNA, 25 bp, probe
gcagcaggagacgacttactagatc

SEQ ID NO: 208668 - DNA, 25 bp, probe
gcagagtggagcactgtacatacct

SEQ ID NO: 208669 - DNA, 25 bp, probe
gcagactgggagttgctagcaaaca

SEQ ID NO: 208670 - DNA, 25 bp, probe
gcagactgggagttgctagcaaaca

SEQ ID NO: 208671 - DNA, 25 bp, probe
gcagcgcgggcgttggaagaactgg

SEQ ID NO: 208672 - DNA, 25 bp, probe
gcagccggggcagtagtgaagaggg

SEQ ID NO: 208673 - DNA, 25 bp, probe
gcacttggctccttaggaacagctc

SEQ ID NO: 208674 - DNA, 25 bp, probe
gcacttgctaccagagaggacagct

SEQ ID NO: 208675 - DNA, 25 bp, probe
gcagcatcagcatccctagaaagcc

SEQ ID NO: 208676 - DNA, 25 bp, probe
gcagcaaagactgggggacagcact

SEQ ID NO: 208677 - DNA, 25 bp, probe
gcagaaaagcaggggtgtcgtcatg

SEQ ID NO: 208678 - DNA, 25 bp, probe
gcagaaatagcctgttgcatcttag

SEQ ID NO: 208679 - DNA, 25 bp, probe
gcagctcaatcacaggggtctatag

SEQ ID NO: 208680 - DNA, 25 bp, probe
gcagctcttcacagatggaatcaca

SEQ ID NO: 208681 - DNA, 25 bp, probe
gcagctttacagggtcactaactct

SEQ ID NO: 208682 - DNA, 25 bp, probe
gcagccattgggggaatccccttgc

SEQ ID NO: 208683 - DNA, 25 bp, probe
gcacgactggacgaggtcctacttc

SEQ ID NO: 208684 - DNA, 25 bp, probe
gcaccttgaacttaagcctactaca

SEQ ID NO: 208685 - DNA, 25 bp, probe
gcactttgtaaacagcactgagatt

SEQ ID NO: 208686 - DNA, 25 bp, probe
gcagctctttaatgtacttcaaaaa

SEQ ID NO: 208687 - DNA, 25 bp, probe
gcactcttaaaaccacttaaacagc

SEQ ID NO: 208688 - DNA, 25 bp, probe
gcactcttaaaaccacttaaacagc

SEQ ID NO: 208689 - DNA, 25 bp, probe
gcacctaaatcctcactttgacaga

SEQ ID NO: 208690 - DNA, 25 bp, probe
gcacctaaatcctcactttgacaga

SEQ ID NO: 208691 - DNA, 25 bp, probe
gcaccttcgatttcctcaaagacaa

SEQ ID NO: 208692 - DNA, 25 bp, probe
gcacctctctacttgggaggtacaa

SEQ ID NO: 208693 - DNA, 25 bp, probe
gcacctctctacttgggaggtacaa

SEQ ID NO: 208694 - DNA, 25 bp, probe
gcagctgcatcccactgtgggtgga

SEQ ID NO: 208695 - DNA, 25 bp, probe
gcaccaccgtgcaagggggtttggg

SEQ ID NO: 208696 - DNA, 25 bp, probe
gcaccaccgtgcaagggggtttggg

SEQ ID NO: 208697 - DNA, 25 bp, probe
gcaccaccttcaggtagcggttgag

SEQ ID NO: 208698 - DNA, 25 bp, probe
gcagctaggcttacagcattgcgga

SEQ ID NO: 208699 - DNA, 25 bp, probe
gcagcttgctgctttcagctggagc

SEQ ID NO: 208700 - DNA, 25 bp, probe
gcacttctgcagttgcctgagggaa

SEQ ID NO: 208701 - DNA, 25 bp, probe
gcagcagcttggtgaagcgggaagt

SEQ ID NO: 208702 - DNA, 25 bp, probe
gcagcggtcagcagacaaggagaag

SEQ ID NO: 208703 - DNA, 25 bp, probe
gcagcggtcagcagacaaggagaag

SEQ ID NO: 208704 - DNA, 25 bp, probe
gcagctgcgtcctgcagaatgggag

SEQ ID NO: 208705 - DNA, 25 bp, probe
gcagctcgacttgagatcaacgtgc

SEQ ID NO: 208706 - DNA, 25 bp, probe
gcagctgctggcatggagtacctgg

SEQ ID NO: 208707 - DNA, 25 bp, probe
gcagctggacagaggtttctgggag

SEQ ID NO: 208708 - DNA, 25 bp, probe
gcagcaggaggaatgcctttcaggg

SEQ ID NO: 208709 - DNA, 25 bp, probe
gcagctgtgcagcttgctgctttca

SEQ ID NO: 208710 - DNA, 25 bp, probe
gcagcggagatttggctgaacaagc

SEQ ID NO: 208711 - DNA, 25 bp, probe
gaattgcagatattgtggacacggc

SEQ ID NO: 208712 - DNA, 25 bp, probe
gaattgcagatattgtggacacggc

SEQ ID NO: 208713 - DNA, 25 bp, probe
gcagaagatgagtttgtgtactggc

SEQ ID NO: 208714 - DNA, 25 bp, probe
gcagaaatgctattttgtatgctgt

SEQ ID NO: 208715 - DNA, 25 bp, probe
gcagcaaatctacttttgggttaca

SEQ ID NO: 208716 - DNA, 25 bp, probe
gcactacataatctctggaaattaa

SEQ ID NO: 208717 - DNA, 25 bp, probe
gcagctataaattttgaaccattga

SEQ ID NO: 208718 - DNA, 25 bp, probe
gcagaaaatgtattctataccagta

SEQ ID NO: 208719 - DNA, 25 bp, probe
gcagacctatagatttaccaccaag

SEQ ID NO: 208720 - DNA, 25 bp, probe
gcagcccgtatgatattattcacat

SEQ ID NO: 208721 - DNA, 25 bp, probe
gcacccatgttttcttattcaattc

SEQ ID NO: 208722 - DNA, 25 bp, probe
gcaccgtccttacggcaatatgctt

SEQ ID NO: 208723 - DNA, 25 bp, probe
gcaccccctcaaggtgaagagctga

SEQ ID NO: 208724 - DNA, 25 bp, probe
gcacctcgcgcacaggtgggaggaa

SEQ ID NO: 208725 - DNA, 25 bp, probe
gcagcgaggcggcagagggagaaga

SEQ ID NO: 208726 - DNA, 25 bp, probe
gcagaagcgtgcctgtggaggagag

SEQ ID NO: 208727 - DNA, 25 bp, probe
gcagagaggtctcatggggaggcgc

SEQ ID NO: 208728 - DNA, 25 bp, probe
gcagaaggtcatctttggcagcggc

SEQ ID NO: 208729 - DNA, 25 bp, probe
gcagaagacggggattgtgagcggc

SEQ ID NO: 208730 - DNA, 25 bp, probe
gcagagacactaacgacttcagggc

SEQ ID NO: 208731 - DNA, 25 bp, probe
gcagagaactgaagtactggggcct

SEQ ID NO: 208732 - DNA, 25 bp, probe
gcagcaatgcactggttcgggagcc

SEQ ID NO: 208733 - DNA, 25 bp, probe
gcagaagcagaaagcctgctgggga

SEQ ID NO: 208734 - DNA, 25 bp, probe
gcagaatctggtagactgctctggg

SEQ ID NO: 208735 - DNA, 25 bp, probe
gcagagatcgccaacatgtcactgg

SEQ ID NO: 208736 - DNA, 25 bp, probe
gcagctgcaacagtacttcctgcgg

SEQ ID NO: 208737 - DNA, 25 bp, probe
gcagctgcaacagtacttcctgcgg

SEQ ID NO: 208738 - DNA, 25 bp, probe
gcagcagcaaaaacctggatcatgg

SEQ ID NO: 208739 - DNA, 25 bp, probe
gcagacaaaatcaacatggtcattt

SEQ ID NO: 208740 - DNA, 25 bp, probe
gcagctcaattatagcatcgtatgt

SEQ ID NO: 208741 - DNA, 25 bp, probe
gcagcttactgtccaagagtattcc

SEQ ID NO: 208742 - DNA, 25 bp, probe
gcagctaactccgagagcagtgggc

SEQ ID NO: 208743 - DNA, 25 bp, probe
gcagcacatactgtacgcggtggtg

SEQ ID NO: 208744 - DNA, 25 bp, probe
gcagccatacggcaccatgaagtag

SEQ ID NO: 208745 - DNA, 25 bp, probe
gcagactatcgagacagccacagta

SEQ ID NO: 208746 - DNA, 25 bp, probe
gcagacttctgacgaagccctgagc

SEQ ID NO: 208747 - DNA, 25 bp, probe
gcagaccttgcagaggtcctgggcc

SEQ ID NO: 208748 - DNA, 25 bp, probe
gcagaccttgcagaggtcctgggcc

SEQ ID NO: 208749 - DNA, 25 bp, probe
gcagaccttgcagaggtcctgggcc

SEQ ID NO: 208750 - DNA, 25 bp, probe
gcaacctcgaacagtcatcaaagca

SEQ ID NO: 208751 - DNA, 25 bp, probe
gcaacactcgatgatagtaaagaac

SEQ ID NO: 208752 - DNA, 25 bp, probe
gcagcaactacaaatttaaatggcc

SEQ ID NO: 208753 - DNA, 25 bp, probe
gcagactcttctaattttaatcccc

SEQ ID NO: 208754 - DNA, 25 bp, probe
gcagactcattggaatcgttactct

SEQ ID NO: 208755 - DNA, 25 bp, probe
gcagactcattggaatcgttactct

SEQ ID NO: 208756 - DNA, 25 bp, probe
gcagactgtgtggaagatgtgtacg

SEQ ID NO: 208757 - DNA, 25 bp, probe
gcagactgtgtggaagatgtgtacg

SEQ ID NO: 208758 - DNA, 25 bp, probe
gcagcctgactgacaaggctggccg

SEQ ID NO: 208759 - DNA, 25 bp, probe
gcagcctgattcggggctgaccttt

SEQ ID NO: 208760 - DNA, 25 bp, probe
gcacctatcatcgtgggcgaaattc

SEQ ID NO: 208761 - DNA, 25 bp, probe
gcagcctttcagatgcggcagacat

SEQ ID NO: 208762 - DNA, 25 bp, probe
gcagcctttcagatgcggcagacat

SEQ ID NO: 208763 - DNA, 25 bp, probe
gcagctcattccggaggtgcagaag

SEQ ID NO: 208764 - DNA, 25 bp, probe
gcacctttctgccagagcagagcag

SEQ ID NO: 208765 - DNA, 25 bp, probe
gcagcacattctcaagagcacacag

SEQ ID NO: 208766 - DNA, 25 bp, probe
gcagcacattctcaagagcacacag

SEQ ID NO: 208767 - DNA, 25 bp, probe
gcagactcgctcaagggcataagtt

SEQ ID NO: 208768 - DNA, 25 bp, probe
gcagcgctccatgggggtatggttt

SEQ ID NO: 208769 - DNA, 25 bp, probe
gcagcgctccatgggggtatggttt

SEQ ID NO: 208770 - DNA, 25 bp, probe
gcagctgcggcaggagggtgtggtg

SEQ ID NO: 208771 - DNA, 25 bp, probe
gcagctgcacgcaggacaggtgctt

SEQ ID NO: 208772 - DNA, 25 bp, probe
gcacgacagactgcacagggcatgg

SEQ ID NO: 208773 - DNA, 25 bp, probe
gcacgtcaagcgcatagcagcactg

SEQ ID NO: 208774 - DNA, 25 bp, probe
gcacgtcaagcgcatagcagcactg

SEQ ID NO: 208775 - DNA, 25 bp, probe
gcacgtccattgctggcaactgact

SEQ ID NO: 208776 - DNA, 25 bp, probe
gcacgtccattgctggcaactgact

SEQ ID NO: 208777 - DNA, 25 bp, probe
gcacctttatgattgagaacccatt

SEQ ID NO: 208778 - DNA, 25 bp, probe
gcagccctacgttgaaaaggattct

SEQ ID NO: 208779 - DNA, 25 bp, probe
gcagcttcgaggacaggaaaggccc

SEQ ID NO: 208780 - DNA, 25 bp, probe
gcagcttggtgaagcgggaagtctc

SEQ ID NO: 208781 - DNA, 25 bp, probe
gcagctcgggcaggggagaacattc

SEQ ID NO: 208782 - DNA, 25 bp, probe
gcagctcgagggaatgtagacatct

SEQ ID NO: 208783 - DNA, 25 bp, probe
gcagccgaaagcagggcatcatgtc

SEQ ID NO: 208784 - DNA, 25 bp, probe
gcagccgcatgagctggggaatcca

SEQ ID NO: 208785 - DNA, 25 bp, probe
gcagacatggaggctcggctgaacc

SEQ ID NO: 208786 - DNA, 25 bp, probe
gcagacaagcccaatggcatgaaac

SEQ ID NO: 208787 - DNA, 25 bp, probe
gcagacaatgtctaggagagagaag

SEQ ID NO: 208788 - DNA, 25 bp, probe
gcagaacagtaaaaggcagcatcaa

SEQ ID NO: 208789 - DNA, 25 bp, probe
gcagaacagtaaaaggcagcatcaa

SEQ ID NO: 208790 - DNA, 25 bp, probe
gcagcaagagaacaaggtgctgaag

SEQ ID NO: 208791 - DNA, 25 bp, probe
gcaaaggacctcaggggacaggtac

SEQ ID NO: 208792 - DNA, 25 bp, probe
gcaaaggacctcaggggacaggtac

SEQ ID NO: 208793 - DNA, 25 bp, probe
gcaaggaccctctgatgggacggta

SEQ ID NO: 208794 - DNA, 25 bp, probe
tcctggaccctgtagggtgccattt

SEQ ID NO: 208795 - DNA, 25 bp, probe
tcctggacccctgggtgtatatcct

SEQ ID NO: 208796 - DNA, 25 bp, probe
tccaggggacctcaggtctacctca

SEQ ID NO: 208797 - DNA, 25 bp, probe
tcctgggttacacagctttaccgac

SEQ ID NO: 208798 - DNA, 25 bp, probe
gcaaggtttacacagcacagaaccc

SEQ ID NO: 208799 - DNA, 25 bp, probe
gcaaagttaatagccaagataccaa

SEQ ID NO: 208800 - DNA, 25 bp, probe
gcaatggcctaaaaacaataaaaag

SEQ ID NO: 208801 - DNA, 25 bp, probe
gcagcactgcccaacaaaaatatag

SEQ ID NO: 208802 - DNA, 25 bp, probe
gcaaatgagccatatgaaaattaag

SEQ ID NO: 208803 - DNA, 25 bp, probe
gcagcaattgcctctgaaagacata

SEQ ID NO: 208804 - DNA, 25 bp, probe
gcagcagttgcttactgaacgccaa

SEQ ID NO: 208805 - DNA, 25 bp, probe
gcagcaatttgactggaacagccag

SEQ ID NO: 208806 - DNA, 25 bp, probe
gcagcatatccatctagaacaccac

SEQ ID NO: 208807 - DNA, 25 bp, probe
gcagcacatcacatgaacaaccctc

SEQ ID NO: 208808 - DNA, 25 bp, probe
gcagcagcacatctaacgagtagct

SEQ ID NO: 208809 - DNA, 25 bp, probe
gcagcatgagcacattgtcaagttc

SEQ ID NO: 208810 - DNA, 25 bp, probe
gcagcctgagctacttcaagctcat

SEQ ID NO: 208811 - DNA, 25 bp, probe
gcagacagtgtcacatcaactttgt

SEQ ID NO: 208812 - DNA, 25 bp, probe
gcagacagtgtcacatcaactttgt

SEQ ID NO: 208813 - DNA, 25 bp, probe
gcagacttgtcagaagatcctgtgg

SEQ ID NO: 208814 - DNA, 25 bp, probe
gcagcaccttaatacctcttgtgac

SEQ ID NO: 208815 - DNA, 25 bp, probe
gcagaccctacagagatgtgttgga

SEQ ID NO: 208816 - DNA, 25 bp, probe
gcagcagacgtgtcgggaggttagc

SEQ ID NO: 208817 - DNA, 25 bp, probe
gcagcagacgtgtcgggaggttagc

SEQ ID NO: 208818 - DNA, 25 bp, probe
gcagcagaggtgacagcggcagtga

SEQ ID NO: 208819 - DNA, 25 bp, probe
gcagcagaggtgacagcggcagtga

SEQ ID NO: 208820 - DNA, 25 bp, probe
gcagcagaggtgacagcggcagtga

SEQ ID NO: 208821 - DNA, 25 bp, probe
gcagcagaggtgacagcggcagtga

SEQ ID NO: 208822 - DNA, 25 bp, probe
gcactggtttcgctcatgtgagact

SEQ ID NO: 208823 - DNA, 25 bp, probe
gcactggtttcgctcatgtgagact

SEQ ID NO: 208824 - DNA, 25 bp, probe
gcagctggattacgcaacagtaaat

SEQ ID NO: 208825 - DNA, 25 bp, probe
gcagctgtggtacaaatgtgataat

SEQ ID NO: 208826 - DNA, 25 bp, probe
gcagcgggatctcgtatctttaaaa

SEQ ID NO: 208827 - DNA, 25 bp, probe
gcagcgggatctcgtatctttaaaa

SEQ ID NO: 208828 - DNA, 25 bp, probe
gcagcagtgttgcagcaacctgtga

SEQ ID NO: 208829 - DNA, 25 bp, probe
gcagcggttgaacatcaaggagatc

SEQ ID NO: 208830 - DNA, 25 bp, probe
gcagcaggtgttacccaaggtcaca

SEQ ID NO: 208831 - DNA, 25 bp, probe
gcagcaggtgttacccaaggtcaca

SEQ ID NO: 208832 - DNA, 25 bp, probe
gcactgggtacctcagggtgagcag

SEQ ID NO: 208833 - DNA, 25 bp, probe
gcactggagtacctcggaagctttg

SEQ ID NO: 208834 - DNA, 25 bp, probe
gaacgactacccagaagtgttctgg

SEQ ID NO: 208835 - DNA, 25 bp, probe
gaactcctaacctcaagtgatcctc

SEQ ID NO: 208836 - DNA, 25 bp, probe
gcacagccccaaaaccaaggacggc

SEQ ID NO: 208837 - DNA, 25 bp, probe
gcagacaccaaaaaccagtgagagc

SEQ ID NO: 208838 - DNA, 25 bp, probe
gcaccaccagatataccactatggc

SEQ ID NO: 208839 - DNA, 25 bp, probe
gcagccatgaagtgtcaccagtatc

SEQ ID NO: 208840 - DNA, 25 bp, probe
gcacgccagaaggatgccgcagacc

SEQ ID NO: 208841 - DNA, 25 bp, probe
gcagcgcatcacagttctggaaacc

SEQ ID NO: 208842 - DNA, 25 bp, probe
gcagcgcatcacagttctggaaacc

SEQ ID NO: 208843 - DNA, 25 bp, probe
gcagctcaccatggctttaaaacat

SEQ ID NO: 208844 - DNA, 25 bp, probe
gcagccctatgacttgtatgacaac

SEQ ID NO: 208845 - DNA, 25 bp, probe
gcaccatcaggccatttgcatgaaa

SEQ ID NO: 208846 - DNA, 25 bp, probe
gcaccatcaggccatttgcatgaaa

SEQ ID NO: 208847 - DNA, 25 bp, probe
gcaccataatcgctgtatgaaatat

SEQ ID NO: 208848 - DNA, 25 bp, probe
gcacctcatttggctttgtgaattg

SEQ ID NO: 208849 - DNA, 25 bp, probe
gcacctcatttggctttgtgaattg

SEQ ID NO: 208850 - DNA, 25 bp, probe
gcagcagtctcttgggattttatct

SEQ ID NO: 208851 - DNA, 25 bp, probe
gcagaatctctatgtatattctatt

SEQ ID NO: 208852 - DNA, 25 bp, probe
gcagaaggctgacgtctatagcttt

SEQ ID NO: 208853 - DNA, 25 bp, probe
gcagccagtctgaggttatgtttct

SEQ ID NO: 208854 - DNA, 25 bp, probe
gcagccaacgggcttatgcagacca

SEQ ID NO: 208855 - DNA, 25 bp, probe
gcacctagtgagccgtttgtggccc

SEQ ID NO: 208856 - DNA, 25 bp, probe
gcaccaaagatgtcctgactttgcc

SEQ ID NO: 208857 - DNA, 25 bp, probe
gcagcaaagggacctggcagttgca

SEQ ID NO: 208858 - DNA, 25 bp, probe
gcagcaaagggacctggcagttgca

SEQ ID NO: 208859 - DNA, 25 bp, probe
gcagcaaactgccgtgctggcaggg

SEQ ID NO: 208860 - DNA, 25 bp, probe
gcagcaacacatcgagtgcgtggtg

SEQ ID NO: 208861 - DNA, 25 bp, probe
gcagcacccatggattgcaggagat

SEQ ID NO: 208862 - DNA, 25 bp, probe
gcagctcagcaagtgatagcggagg

SEQ ID NO: 208863 - DNA, 25 bp, probe
gcagcttgatgtggtcttgggtgga

SEQ ID NO: 208864 - DNA, 25 bp, probe
gcagcttgaagagtttggctgggcc

SEQ ID NO: 208865 - DNA, 25 bp, probe
gcagctggtaggatgtctggtgccc

SEQ ID NO: 208866 - DNA, 25 bp, probe
gcagctgcctaggatgttctgggct

SEQ ID NO: 208867 - DNA, 25 bp, probe
gcagcacctcacgaagtctgctggc

SEQ ID NO: 208868 - DNA, 25 bp, probe
gcagcacctactatgcttcaggcat

SEQ ID NO: 208869 - DNA, 25 bp, probe
gcagacaaagctaacatcccagaca

SEQ ID NO: 208870 - DNA, 25 bp, probe
gcagcatcaaagcagacatcgtcca

SEQ ID NO: 208871 - DNA, 25 bp, probe
gcagcatcaaagcagacatcgtcca

SEQ ID NO: 208872 - DNA, 25 bp, probe
gcagctaacacatgaatgaggccaa

SEQ ID NO: 208873 - DNA, 25 bp, probe
gcagctaacacatgaatgaggccaa

SEQ ID NO: 208874 - DNA, 25 bp, probe
gcagaaggcacggagtcagagccaa

SEQ ID NO: 208875 - DNA, 25 bp, probe
gcagcggagcatcgagaggaggcca

SEQ ID NO: 208876 - DNA, 25 bp, probe
gcagctagttagtgccatggcacac

SEQ ID NO: 208877 - DNA, 25 bp, probe
gcagaaggatcgtgcccatgcacct

SEQ ID NO: 208878 - DNA, 25 bp, probe
gcagaaggatcgtgcccatgcacct

SEQ ID NO: 208879 - DNA, 25 bp, probe
gcaccatggacgatgccacagtcct

SEQ ID NO: 208880 - DNA, 25 bp, probe
gcagcgggactttgcaacattgtct

SEQ ID NO: 208881 - DNA, 25 bp, probe
gcaccggtgctatcacatctatatc

SEQ ID NO: 208882 - DNA, 25 bp, probe
gcagccagggcttacctgtacactg

SEQ ID NO: 208883 - DNA, 25 bp, probe
gcagcgccatggagacggtacagct

SEQ ID NO: 208884 - DNA, 25 bp, probe
gcagcccaggtaactgggccagcag

SEQ ID NO: 208885 - DNA, 25 bp, probe
gcagcgtccggaaccgctgcaacat

SEQ ID NO: 208886 - DNA, 25 bp, probe
gcaagtcctgtaacctgtacaacaa

SEQ ID NO: 208887 - DNA, 25 bp, probe
gcaagtcctgtaacctgtacaacaa

SEQ ID NO: 208888 - DNA, 25 bp, probe
gcactactcttttgctcttacgaac

SEQ ID NO: 208889 - DNA, 25 bp, probe
gcagctacgagagtcctcatatgag

SEQ ID NO: 208890 - DNA, 25 bp, probe
gcagctaatgaggctacagaaacag

SEQ ID NO: 208891 - DNA, 25 bp, probe
gcagctctggaggtacgaaaagagg

SEQ ID NO: 208892 - DNA, 25 bp, probe
gcagctctggtgggaggaaggcgag

SEQ ID NO: 208893 - DNA, 25 bp, probe
gcagcacaggtgaaggcgaggggga

SEQ ID NO: 208894 - DNA, 25 bp, probe
gcagccagatggtagagcgcagatg

SEQ ID NO: 208895 - DNA, 25 bp, probe
gcagccagatggtagagcgcagatg

SEQ ID NO: 208896 - DNA, 25 bp, probe
gcagctgcacagccatggagggaag

SEQ ID NO: 208897 - DNA, 25 bp, probe
gcagcggcacctcgagagagaaggg

SEQ ID NO: 208898 - DNA, 25 bp, probe
gcacgtgaaccaggaggacctggca

SEQ ID NO: 208899 - DNA, 25 bp, probe
gcacgggacaatgagggggccacgg

SEQ ID NO: 208900 - DNA, 25 bp, probe
gcaagggaaattttggtgacacatt

SEQ ID NO: 208901 - DNA, 25 bp, probe
gcacagggagagtgggaaccactac

SEQ ID NO: 208902 - DNA, 25 bp, probe
gcagcggacaaataaaactcgctga

SEQ ID NO: 208903 - DNA, 25 bp, probe
gcagcggaaacgcaggcaacgccta

SEQ ID NO: 208904 - DNA, 25 bp, probe
gcagctgctcatagacccaagagtc

SEQ ID NO: 208905 - DNA, 25 bp, probe
gcagctcattcagacctatgagctc

SEQ ID NO: 208906 - DNA, 25 bp, probe
gcagctgtatgagacctatcagagc

SEQ ID NO: 208907 - DNA, 25 bp, probe
gcagctgcaatgtacaccatagtga

SEQ ID NO: 208908 - DNA, 25 bp, probe
gcagctgcaatgtacaccatagtga

SEQ ID NO: 208909 - DNA, 25 bp, probe
gcagcagcagcagtaatacaaggca

SEQ ID NO: 208910 - DNA, 25 bp, probe
gcagcacgcaggtttccatgctgac

SEQ ID NO: 208911 - DNA, 25 bp, probe
gcagcatccagtctgtgctatcaga

SEQ ID NO: 208912 - DNA, 25 bp, probe
gcagcagaagtcaatgtggacagag

SEQ ID NO: 208913 - DNA, 25 bp, probe
gcagcaccaggcagggactgagtgt

SEQ ID NO: 208914 - DNA, 25 bp, probe
gcagcaccgtgaagacgaatatgat

SEQ ID NO: 208915 - DNA, 25 bp, probe
gcaccgcgtgtcaagcgacaatggt

SEQ ID NO: 208916 - DNA, 25 bp, probe
gcaccgcgtgtcaagcgacaatggt

SEQ ID NO: 208917 - DNA, 25 bp, probe
gcaccttgtgtctgtacacgtgtcc

SEQ ID NO: 208918 - DNA, 25 bp, probe
gcagccaattttgtacacatggata

SEQ ID NO: 208919 - DNA, 25 bp, probe
gcagcccatgtaacttacagccagt

SEQ ID NO: 208920 - DNA, 25 bp, probe
gcagcccatgtaacttacagccagt

SEQ ID NO: 208921 - DNA, 25 bp, probe
gcaccgagttccataggcacagtag

SEQ ID NO: 208922 - DNA, 25 bp, probe
gcacctcggtctgcacattaagaag

SEQ ID NO: 208923 - DNA, 25 bp, probe
gacttcggattggcccgattgatag

SEQ ID NO: 208924 - DNA, 25 bp, probe
gcactacgggtggtgccagtttaga

SEQ ID NO: 208925 - DNA, 25 bp, probe
gcagctgaggggtgtcacgtggtgc

SEQ ID NO: 208926 - DNA, 25 bp, probe
gcagctactgcaggtttccgagcag

SEQ ID NO: 208927 - DNA, 25 bp, probe
gcagctactgcaggtttccgagcag

SEQ ID NO: 208928 - DNA, 25 bp, probe
gcagcttctgcagcaaattctgaca

SEQ ID NO: 208929 - DNA, 25 bp, probe
gcagcatcgtgggcaggcatttgga

SEQ ID NO: 208930 - DNA, 25 bp, probe
gcaccttggggttttgtaatgacag

SEQ ID NO: 208931 - DNA, 25 bp, probe
gcaccgtcctggagcgtgtgaaagc

SEQ ID NO: 208932 - DNA, 25 bp, probe
gcaccttttcattagccatctgaaa

SEQ ID NO: 208933 - DNA, 25 bp, probe
gcaccatttttgtaggcctgcattg

SEQ ID NO: 208934 - DNA, 25 bp, probe
gcaccataatcactgaagtccttgg

SEQ ID NO: 208935 - DNA, 25 bp, probe
gcagcatcatcttcttgaagtactt

SEQ ID NO: 208936 - DNA, 25 bp, probe
gcagcatctgccctgtgaagtttgt

SEQ ID NO: 208937 - DNA, 25 bp, probe
gcagcaccgaggcctatgttagggc

SEQ ID NO: 208938 - DNA, 25 bp, probe
gcagccttaagcctcagcaaagagc

SEQ ID NO: 208939 - DNA, 25 bp, probe
gcagccttactattcatagaagggc

SEQ ID NO: 208940 - DNA, 25 bp, probe
gcagccttactattcatagaagggc

SEQ ID NO: 208941 - DNA, 25 bp, probe
gcagccctcacttaacagtgggcgg

SEQ ID NO: 208942 - DNA, 25 bp, probe
gcagccagccaaacacacagaaggg

SEQ ID NO: 208943 - DNA, 25 bp, probe
gcagcaagtccaacacaatcacagc

SEQ ID NO: 208944 - DNA, 25 bp, probe
gcagcaatgctgggaggcagaccca

SEQ ID NO: 208945 - DNA, 25 bp, probe
gcagaagcgggacgagaccctacag

SEQ ID NO: 208946 - DNA, 25 bp, probe
gcagaaggagaacggcatctactcc

SEQ ID NO: 208947 - DNA, 25 bp, probe
gcagcaaagcaatcaaattccttca

SEQ ID NO: 208948 - DNA, 25 bp, probe
gcagcaaagcaatcaaattccttca

SEQ ID NO: 208949 - DNA, 25 bp, probe
gcactaccaattcaatgcccttcat

SEQ ID NO: 208950 - DNA, 25 bp, probe
gcagccctcacaaaaaggccttgta

SEQ ID NO: 208951 - DNA, 25 bp, probe
gcagccctgaaaggacaggctcctg

SEQ ID NO: 208952 - DNA, 25 bp, probe
gcagccctgttcgagaagacgcggc

SEQ ID NO: 208953 - DNA, 25 bp, probe
gcagcctcgttaggacaaggctgtg

SEQ ID NO: 208954 - DNA, 25 bp, probe
gcagcctgcgcagacgacaaggctc

SEQ ID NO: 208955 - DNA, 25 bp, probe
gcagcttgcgggagatcacgctgct

SEQ ID NO: 208956 - DNA, 25 bp, probe
gcagcttctgggaccataagtttac

SEQ ID NO: 208957 - DNA, 25 bp, probe
gcacctacaagaacgaagtcttcac

SEQ ID NO: 208958 - DNA, 25 bp, probe
gcacctcaaaggggatccctgtaca

SEQ ID NO: 208959 - DNA, 25 bp, probe
gcagccgcatgaaccggatgtctcg

SEQ ID NO: 208960 - DNA, 25 bp, probe
gcagcacgatgaagactggaaagcg

SEQ ID NO: 208961 - DNA, 25 bp, probe
gcagccgtctcagctatgacaagtt

SEQ ID NO: 208962 - DNA, 25 bp, probe
gcagccgttgcaggcgaagttgatt

SEQ ID NO: 208963 - DNA, 25 bp, probe
gcagccgtgtggacgaagtttggcc

SEQ ID NO: 208964 - DNA, 25 bp, probe
gcagccattgtggatgagaagatct

SEQ ID NO: 208965 - DNA, 25 bp, probe
gcagcctttggtgaatacatgagcc

SEQ ID NO: 208966 - DNA, 25 bp, probe
gcagcactgttgatgggtaatgtcc

SEQ ID NO: 208967 - DNA, 25 bp, probe
gcagcagatggtgtgggtacctcac

SEQ ID NO: 208968 - DNA, 25 bp, probe
gcagcagatggtgtgggtacctcac

SEQ ID NO: 208969 - DNA, 25 bp, probe
gcagcaaggtgaaggagtcctctcc

SEQ ID NO: 208970 - DNA, 25 bp, probe
gcagctagtaaaggagactttctct

SEQ ID NO: 208971 - DNA, 25 bp, probe
gcagctaaacaccgttcttcagctc

SEQ ID NO: 208972 - DNA, 25 bp, probe
gcagctgaaaaacatctcatatgga

SEQ ID NO: 208973 - DNA, 25 bp, probe
gcagctgaaaccaattggctctggg

SEQ ID NO: 208974 - DNA, 25 bp, probe
gcagcgaaagccatgtgacacgatg

SEQ ID NO: 208975 - DNA, 25 bp, probe
gcagctgaaaccatatctgcagcaa

SEQ ID NO: 208976 - DNA, 25 bp, probe
gcagctgaaaccatatctgcagcaa

SEQ ID NO: 208977 - DNA, 25 bp, probe
gcagcagaatgaggccaaatgcaga

SEQ ID NO: 208978 - DNA, 25 bp, probe
gcagcagccttcaacaaagatgccc

SEQ ID NO: 208979 - DNA, 25 bp, probe
gcagcacactgtcaaaatatccgga

SEQ ID NO: 208980 - DNA, 25 bp, probe
gcagccatctttaaaatccaggatc

SEQ ID NO: 208981 - DNA, 25 bp, probe
gcagcgcatcttcgaaaacggctac

SEQ ID NO: 208982 - DNA, 25 bp, probe
gcagcgcatcttcgaaaacggctac

SEQ ID NO: 208983 - DNA, 25 bp, probe
gcactgtccaggtgaacttctacgg

SEQ ID NO: 208984 - DNA, 25 bp, probe
gcaccattaggaaaatcttctctgc

SEQ ID NO: 208985 - DNA, 25 bp, probe
gcagcacttcagaatgggatcttct

SEQ ID NO: 208986 - DNA, 25 bp, probe
gcagcacttcagaatgggatcttct

SEQ ID NO: 208987 - DNA, 25 bp, probe
gcagaatctatttgggacttcatga

SEQ ID NO: 208988 - DNA, 25 bp, probe
gcagaatctatttgggacttcatga

SEQ ID NO: 208989 - DNA, 25 bp, probe
gcagaatctcagaaggtcctcctga

SEQ ID NO: 208990 - DNA, 25 bp, probe
gcagcagatcgaaagttgcctcggg

SEQ ID NO: 208991 - DNA, 25 bp, probe
gcagcagcttgaagagtttggctgg

SEQ ID NO: 208992 - DNA, 25 bp, probe
gcacgctctgatcaggggtgctggt

SEQ ID NO: 208993 - DNA, 25 bp, probe
gcagctcatctaccaggagtggcgg

SEQ ID NO: 208994 - DNA, 25 bp, probe
gcagctatctaagtcacaggtggag

SEQ ID NO: 208995 - DNA, 25 bp, probe
gcactacttacttagagatgctact

SEQ ID NO: 208996 - DNA, 25 bp, probe
gcactacttacttagagatgctact

SEQ ID NO: 208997 - DNA, 25 bp, probe
gcactttgtccatatggtgtacaca

SEQ ID NO: 208998 - DNA, 25 bp, probe
gcagcctcctacacaggttagagca

SEQ ID NO: 208999 - DNA, 25 bp, probe
gcagcctcctacacaggttagagca

SEQ ID NO: 209000 - DNA, 25 bp, probe
gcagctttcctcaaaacttcagaca

SEQ ID NO: 209001 - DNA, 25 bp, probe
gcagctttcgacaaaagtcacaaaa

SEQ ID NO: 209002 - DNA, 25 bp, probe
gcagctttcgacaaaagtcacaaaa

SEQ ID NO: 209003 - DNA, 25 bp, probe
gcagcatttcgtgaaggtcatccag

SEQ ID NO: 209004 - DNA, 25 bp, probe
gcagcaacctgtgacaggatcaagc

SEQ ID NO: 209005 - DNA, 25 bp, probe
gcagcgaggagtgccaggtaagccg

SEQ ID NO: 209006 - DNA, 25 bp, probe
gcagcgaggagtgccaggtaagccg

SEQ ID NO: 209007 - DNA, 25 bp, probe
gcagcaggggatggcgtggtcaagc

SEQ ID NO: 209008 - DNA, 25 bp, probe
gcagcaagaggagtccaagtcacac

SEQ ID NO: 209009 - DNA, 25 bp, probe
gcagcagaaagagtctgaatccacc

SEQ ID NO: 209010 - DNA, 25 bp, probe
gcagcaaagagagagcaaccaccaa

SEQ ID NO: 209011 - DNA, 25 bp, probe
gaatacaaagaagaccccaaaagat

SEQ ID NO: 209012 - DNA, 25 bp, probe
gcaaaaaataactccagcctctaag

SEQ ID NO: 209013 - DNA, 25 bp, probe
gcaataattccatttttaccctttg

SEQ ID NO: 209014 - DNA, 25 bp, probe
gcaccaagtccattttgctgagccg

SEQ ID NO: 209015 - DNA, 25 bp, probe
gaaggcgatccattttctcagccta

SEQ ID NO: 209016 - DNA, 25 bp, probe
gaagggttttgtgcaatgactaaaa

SEQ ID NO: 209017 - DNA, 25 bp, probe
gcagcaggagctcctgttccattac

SEQ ID NO: 209018 - DNA, 25 bp, probe
gcagcacagcagactagttaatcta

SEQ ID NO: 209019 - DNA, 25 bp, probe
gcacctgaggcccttaactacggcc

SEQ ID NO: 209020 - DNA, 25 bp, probe
gcacctgaggcccttaactacggcc

SEQ ID NO: 209021 - DNA, 25 bp, probe
gaccaatacctcatacctaacgtct

SEQ ID NO: 209022 - DNA, 25 bp, probe
gacctaatccaagtgaaccccttgc

SEQ ID NO: 209023 - DNA, 25 bp, probe
gacttgaaacttgaatgtcccttcc

SEQ ID NO: 209024 - DNA, 25 bp, probe
gacttgaaacttgaatgtcccttcc

SEQ ID NO: 209025 - DNA, 25 bp, probe
gaccaaaattgataattccctcgac

SEQ ID NO: 209026 - DNA, 25 bp, probe
gaaaatgtttacagcttccagtgga

SEQ ID NO: 209027 - DNA, 25 bp, probe
gcaaaatttaacacctaggcctgca

SEQ ID NO: 209028 - DNA, 25 bp, probe
gcagcaaaatttaacacctaggcct

SEQ ID NO: 209029 - DNA, 25 bp, probe
gcagcaaaatttaacacctaggcct

SEQ ID NO: 209030 - DNA, 25 bp, probe
gcacagaactttgaacctaggaggc

SEQ ID NO: 209031 - DNA, 25 bp, probe
gcacagaactttgaacctaggaggc

SEQ ID NO: 209032 - DNA, 25 bp, probe
gcacctagctgtgcaagacctagtg

SEQ ID NO: 209033 - DNA, 25 bp, probe
gcagccacaggggcaacacctgtta

SEQ ID NO: 209034 - DNA, 25 bp, probe
gcagctataggaccagcaaccatga

SEQ ID NO: 209035 - DNA, 25 bp, probe
gcagctattgcacttcagccaaatg

SEQ ID NO: 209036 - DNA, 25 bp, probe
gcagctgtatgccatgaaggtattg

SEQ ID NO: 209037 - DNA, 25 bp, probe
gcagctgtatgccatgaaggtattg

SEQ ID NO: 209038 - DNA, 25 bp, probe
gcagcttcagcgcactgagctgatg

SEQ ID NO: 209039 - DNA, 25 bp, probe
gcagctcgcacactactcagagctt

SEQ ID NO: 209040 - DNA, 25 bp, probe
gcaccgctcacaactatatgctaag

SEQ ID NO: 209041 - DNA, 25 bp, probe
gcagccagttaactttgcatcaggt

SEQ ID NO: 209042 - DNA, 25 bp, probe
gcactcagttatggcttctacggct

SEQ ID NO: 209043 - DNA, 25 bp, probe
gcaccagatgcaacctcactatggt

SEQ ID NO: 209044 - DNA, 25 bp, probe
gcaacaatgcttggctgaccgagtc

SEQ ID NO: 209045 - DNA, 25 bp, probe
gcaacaatgcttggctgaccgagtc

SEQ ID NO: 209046 - DNA, 25 bp, probe
gcagcacagctgggagaacccagtg

SEQ ID NO: 209047 - DNA, 25 bp, probe
gcagctcacggaggagatccagcgg

SEQ ID NO: 209048 - DNA, 25 bp, probe
gcagcctctggataacagcatgggg

SEQ ID NO: 209049 - DNA, 25 bp, probe
gcagccttggtaacgccatggactg

SEQ ID NO: 209050 - DNA, 25 bp, probe
gcagccattgccaaaactcattgac

SEQ ID NO: 209051 - DNA, 25 bp, probe
gcacctggcccattacatatctagg

SEQ ID NO: 209052 - DNA, 25 bp, probe
gcagccttccacagattatgaagtg

SEQ ID NO: 209053 - DNA, 25 bp, probe
gcaccagtccgaagttcagcacggg

SEQ ID NO: 209054 - DNA, 25 bp, probe
gcaccacaaccaagtacaaaatgag

SEQ ID NO: 209055 - DNA, 25 bp, probe
gcacttgaaccagataaaactgtga

SEQ ID NO: 209056 - DNA, 25 bp, probe
gcacattatccctacaacaaatttt

SEQ ID NO: 209057 - DNA, 25 bp, probe
gcacattatccctacaacaaatttt

SEQ ID NO: 209058 - DNA, 25 bp, probe
gcacattactctctgaacgaaattc

SEQ ID NO: 209059 - DNA, 25 bp, probe
gcacattactctctgaacgaaattc

SEQ ID NO: 209060 - DNA, 25 bp, probe
gcagcattatcctgtgtcaggacag

SEQ ID NO: 209061 - DNA, 25 bp, probe
gcagcctagcctatgtctggcagat

SEQ ID NO: 209062 - DNA, 25 bp, probe
gcacctacagcttgcgagctgggca

SEQ ID NO: 209063 - DNA, 25 bp, probe
gcacgcatcaagaatgctggtggca

SEQ ID NO: 209064 - DNA, 25 bp, probe
gcagcagaccaaaggagtggcgccc

SEQ ID NO: 209065 - DNA, 25 bp, probe
gcagcgagaaactgcatggtcgccc

SEQ ID NO: 209066 - DNA, 25 bp, probe
gcagctacaagtgcagctgtgaccc

SEQ ID NO: 209067 - DNA, 25 bp, probe
gcagcctcaacagctgcatggaccc

SEQ ID NO: 209068 - DNA, 25 bp, probe
gcagccctcaaatttggacctgcca

SEQ ID NO: 209069 - DNA, 25 bp, probe
gcactactcaacttataaactgtct

SEQ ID NO: 209070 - DNA, 25 bp, probe
gcactagaggactttgaatgcctac

SEQ ID NO: 209071 - DNA, 25 bp, probe
gcacagtaagactttgcatggagta

SEQ ID NO: 209072 - DNA, 25 bp, probe
gcacctaagcaagttcagccattac

SEQ ID NO: 209073 - DNA, 25 bp, probe
gaccaagggaggcagacttacctcc

SEQ ID NO: 209074 - DNA, 25 bp, probe
gaaccggccaagaggttctccatcc

SEQ ID NO: 209075 - DNA, 25 bp, probe
gaaccggccaagaggttctccatcc

SEQ ID NO: 209076 - DNA, 25 bp, probe
gcaaccaggtaacagggcttccaaa

SEQ ID NO: 209077 - DNA, 25 bp, probe
gcacccagggaagcgcctgggctca

SEQ ID NO: 209078 - DNA, 25 bp, probe
gcaccctggagagcgtcaggggccc

SEQ ID NO: 209079 - DNA, 25 bp, probe
gcacccaggggtggatagggatccc

SEQ ID NO: 209080 - DNA, 25 bp, probe
gcagctgccaggggcaaatacctga

SEQ ID NO: 209081 - DNA, 25 bp, probe
gcacatgccaagcagaaacacgggc

SEQ ID NO: 209082 - DNA, 25 bp, probe
gcagctccacgccgaaaaatgaagt

SEQ ID NO: 209083 - DNA, 25 bp, probe
gcagctccacgccgaaaaatgaagt

SEQ ID NO: 209084 - DNA, 25 bp, probe
gcacatcctcactgtaaacagtaat

SEQ ID NO: 209085 - DNA, 25 bp, probe
gcagcttcacactctgcattacagt

SEQ ID NO: 209086 - DNA, 25 bp, probe
gcagcattgacatccttccatgatg

SEQ ID NO: 209087 - DNA, 25 bp, probe
gcagcattgacttgggtgaagatga

SEQ ID NO: 209088 - DNA, 25 bp, probe
gcacattgaattcttggatgcagtg

SEQ ID NO: 209089 - DNA, 25 bp, probe
gcacgctgaatcctgctatggtacc

SEQ ID NO: 209090 - DNA, 25 bp, probe
gcagctgcggtccatcttggtcaag

SEQ ID NO: 209091 - DNA, 25 bp, probe
gcagctagagtccagctagacccac

SEQ ID NO: 209092 - DNA, 25 bp, probe
gcagccaggtccagatacacctgca

SEQ ID NO: 209093 - DNA, 25 bp, probe
gcagcttattgcttcgaaacccagc

SEQ ID NO: 209094 - DNA, 25 bp, probe
gcagcttgagcacatcaaaacccac

SEQ ID NO: 209095 - DNA, 25 bp, probe
gcactgggcatcacaaaccaagacc

SEQ ID NO: 209096 - DNA, 25 bp, probe
gcactgtcaccataactcacaagac

SEQ ID NO: 209097 - DNA, 25 bp, probe
gcagcatgaactgaaacccaatggc

SEQ ID NO: 209098 - DNA, 25 bp, probe
gcaccatgatctgaaaacacaatga

SEQ ID NO: 209099 - DNA, 25 bp, probe
gcaccatgatctgaaaacacaatga

SEQ ID NO: 209100 - DNA, 25 bp, probe
gcagccatgatagggaggaccaggg

SEQ ID NO: 209101 - DNA, 25 bp, probe
gcagctgcttagggagcaaccaggt

SEQ ID NO: 209102 - DNA, 25 bp, probe
gcagccctactggaacacagcagag

SEQ ID NO: 209103 - DNA, 25 bp, probe
gcaccacatttgcaccaatcagcat

SEQ ID NO: 209104 - DNA, 25 bp, probe
gcaccacatttgcaccaatcagcat

SEQ ID NO: 209105 - DNA, 25 bp, probe
gcacccaaatgccccaatagcagtg

SEQ ID NO: 209106 - DNA, 25 bp, probe
gcacccgaggtcatcaaacagtcgg

SEQ ID NO: 209107 - DNA, 25 bp, probe
gcaccggaagctcttaattatggga

SEQ ID NO: 209108 - DNA, 25 bp, probe
gcaccgtgacttctgctaaaatgca

SEQ ID NO: 209109 - DNA, 25 bp, probe
gcagccagtgaactttgtcacggag

SEQ ID NO: 209110 - DNA, 25 bp, probe
gcagccagtgaactttgtcacggag

SEQ ID NO: 209111 - DNA, 25 bp, probe
gcagccagtgaactttgtcacggag

SEQ ID NO: 209112 - DNA, 25 bp, probe
gcagctcatagaggtcttgaagggg

SEQ ID NO: 209113 - DNA, 25 bp, probe
gcagccatcaaactactgaatgcag

SEQ ID NO: 209114 - DNA, 25 bp, probe
gcacctcagagaccagtgacatgcc

SEQ ID NO: 209115 - DNA, 25 bp, probe
gcacctcagagaccagtgacatgcc

SEQ ID NO: 209116 - DNA, 25 bp, probe
gcagcccaggagtatctgacatggt

SEQ ID NO: 209117 - DNA, 25 bp, probe
gcaactcatcgattgatttacggcg

SEQ ID NO: 209118 - DNA, 25 bp, probe
gcagcctatcagaatgactttggac

SEQ ID NO: 209119 - DNA, 25 bp, probe
gcagcttccgtaagcatgtgtgggc

SEQ ID NO: 209120 - DNA, 25 bp, probe
gcagccttcttcacaggctgagggg

SEQ ID NO: 209121 - DNA, 25 bp, probe
gcaccattttgtcaggtgggagatt

SEQ ID NO: 209122 - DNA, 25 bp, probe
gcaccgattggtgctgttgggcgca

SEQ ID NO: 209123 - DNA, 25 bp, probe
gcaccgttcactgtatttggagaaa

SEQ ID NO: 209124 - DNA, 25 bp, probe
gcaccttaccgttcacattggagat

SEQ ID NO: 209125 - DNA, 25 bp, probe
gcacaattacccaagatattggcag

SEQ ID NO: 209126 - DNA, 25 bp, probe
gcacctgaataggcaagtcgaggca

SEQ ID NO: 209127 - DNA, 25 bp, probe
gcagcccacaaggcaaatcgggtcc

SEQ ID NO: 209128 - DNA, 25 bp, probe
gcagcccaacaacatcatgggtatc

SEQ ID NO: 209129 - DNA, 25 bp, probe
gcagcccgaagactgcctggtgaac

SEQ ID NO: 209130 - DNA, 25 bp, probe
gcagcctcgaaactgtgacgatgaa

SEQ ID NO: 209131 - DNA, 25 bp, probe
gcagcctcttaattctttgaagaac

SEQ ID NO: 209132 - DNA, 25 bp, probe
gcactctctaaatcttccttgtgag

SEQ ID NO: 209133 - DNA, 25 bp, probe
gcagctcccacataattgcagtttc

SEQ ID NO: 209134 - DNA, 25 bp, probe
gcagctcccacataattgcagtttc

SEQ ID NO: 209135 - DNA, 25 bp, probe
gcactgcccagcttggaaggtatta

SEQ ID NO: 209136 - DNA, 25 bp, probe
gcactagactgcttgtaactaacca

SEQ ID NO: 209137 - DNA, 25 bp, probe
gcacggcgcttttaacagcaagcaa

SEQ ID NO: 209138 - DNA, 25 bp, probe
gcacgctcgtggaaaccacactcaa

SEQ ID NO: 209139 - DNA, 25 bp, probe
gcacgctcgtggaaaccacactcaa

SEQ ID NO: 209140 - DNA, 25 bp, probe
gcacctccatggaaacgaagcacca

SEQ ID NO: 209141 - DNA, 25 bp, probe
gcacacccagcagggggaacacacc

SEQ ID NO: 209142 - DNA, 25 bp, probe
gcagcttccaagctgtgggagcccc

SEQ ID NO: 209143 - DNA, 25 bp, probe
gcagcattcgcactggtgtggggag

SEQ ID NO: 209144 - DNA, 25 bp, probe
gcagcttgccacttgggagggcaga

SEQ ID NO: 209145 - DNA, 25 bp, probe
gcagcttgccacttgggagggcaga

SEQ ID NO: 209146 - DNA, 25 bp, probe
gcagctccaacctggaggctggacc

SEQ ID NO: 209147 - DNA, 25 bp, probe
gcagccctcaaaatggggggctccc

SEQ ID NO: 209148 - DNA, 25 bp, probe
gcagcctacaagtatatggggcact

SEQ ID NO: 209149 - DNA, 25 bp, probe
gcagcctacaagtatatggggcact

SEQ ID NO: 209150 - DNA, 25 bp, probe
gcacctgaagaattgatgggccacc

SEQ ID NO: 209151 - DNA, 25 bp, probe
gcacctgaagaattgatgggccacc

SEQ ID NO: 209152 - DNA, 25 bp, probe
gcacctgaactttctggacaagacc

SEQ ID NO: 209153 - DNA, 25 bp, probe
gcacctgaactccacggaaaaatca

SEQ ID NO: 209154 - DNA, 25 bp, probe
gcacctggcaccaagcggaaaataa

SEQ ID NO: 209155 - DNA, 25 bp, probe
gcacctggcaccaagcggaaaataa

SEQ ID NO: 209156 - DNA, 25 bp, probe
gcacctgcgcctgtgtggaaatttg

SEQ ID NO: 209157 - DNA, 25 bp, probe
gcagccaggcccgttataaatgtat

SEQ ID NO: 209158 - DNA, 25 bp, probe
gcagccagaccgatgtgtatttaac

SEQ ID NO: 209159 - DNA, 25 bp, probe
gcagccagaccgatgtgtatttaac

SEQ ID NO: 209160 - DNA, 25 bp, probe
gcagctaagctcaaatgtatattta

SEQ ID NO: 209161 - DNA, 25 bp, probe
gcagctaagctcaaatgtatattta

SEQ ID NO: 209162 - DNA, 25 bp, probe
gcagctacagtcaatcctgctctgt

SEQ ID NO: 209163 - DNA, 25 bp, probe
gcagctgaagtggacgcctcactta

SEQ ID NO: 209164 - DNA, 25 bp, probe
gcagctgaggaggccggctgcagcc

SEQ ID NO: 209165 - DNA, 25 bp, probe
gcagctagatgcatgcctgaggcag

SEQ ID NO: 209166 - DNA, 25 bp, probe
gcagctatgacagtgagtgggaaca

SEQ ID NO: 209167 - DNA, 25 bp, probe
gcagcattgcaatagtgaggcagac

SEQ ID NO: 209168 - DNA, 25 bp, probe
gcacatctctggaagcttagcaatc

SEQ ID NO: 209169 - DNA, 25 bp, probe
gcaccatctgtgtgctctacacaga

SEQ ID NO: 209170 - DNA, 25 bp, probe
gcagcctgcagctggattacgcaac

SEQ ID NO: 209171 - DNA, 25 bp, probe
gcacctgaatgacgtcaacgcaaag

SEQ ID NO: 209172 - DNA, 25 bp, probe
gcacctaggactgccatggcggatg

SEQ ID NO: 209173 - DNA, 25 bp, probe
gcacccaggaatgcgggggtctgct

SEQ ID NO: 209174 - DNA, 25 bp, probe
gcacctttgagagagggggcactgt

SEQ ID NO: 209175 - DNA, 25 bp, probe
gcaccatggttagagggaggcacac

SEQ ID NO: 209176 - DNA, 25 bp, probe
gcacgtggttgagtggggggaacgc

SEQ ID NO: 209177 - DNA, 25 bp, probe
gcactgtggttgctgtggttggaat

SEQ ID NO: 209178 - DNA, 25 bp, probe
gcacacgtgtgcggtctagtttaat

SEQ ID NO: 209179 - DNA, 25 bp, probe
gcacatagttctgcccaaattatgt

SEQ ID NO: 209180 - DNA, 25 bp, probe
gcaaagttatcagctaaaccttttc

SEQ ID NO: 209181 - DNA, 25 bp, probe
gcagctttgtacacgaagaccatcc

SEQ ID NO: 209182 - DNA, 25 bp, probe
gcacgattttgcacaaatatccacc

SEQ ID NO: 209183 - DNA, 25 bp, probe
gcacgacttatcagaaacttacccg

SEQ ID NO: 209184 - DNA, 25 bp, probe
gcacgagcttccagaaaagcgtccc

SEQ ID NO: 209185 - DNA, 25 bp, probe
gcacgactgtctatgccaatgaggc

SEQ ID NO: 209186 - DNA, 25 bp, probe
gcaccatcttcacatgcacatgttg

SEQ ID NO: 209187 - DNA, 25 bp, probe
gcagccttcatatttgccattgtgt

SEQ ID NO: 209188 - DNA, 25 bp, probe
gcagccttcatatttgccattgtgt

SEQ ID NO: 209189 - DNA, 25 bp, probe
gcaccttatcatttcagttttcctt

SEQ ID NO: 209190 - DNA, 25 bp, probe
gcaccttaatgaaattatctatttt

SEQ ID NO: 209191 - DNA, 25 bp, probe
gcaccttaatgaaattatctatttt

SEQ ID NO: 209192 - DNA, 25 bp, probe
gcaccttcactaaagtcttatttta

SEQ ID NO: 209193 - DNA, 25 bp, probe
gcacactaaaccaagttatttttct

SEQ ID NO: 209194 - DNA, 25 bp, probe
gcacactaaaccaagttatttttct

SEQ ID NO: 209195 - DNA, 25 bp, probe
gcaaccaacagtaaggacttacgtt

SEQ ID NO: 209196 - DNA, 25 bp, probe
gcacccccatgaacaagactataag

SEQ ID NO: 209197 - DNA, 25 bp, probe
gcacccccatgaacaagactataag

SEQ ID NO: 209198 - DNA, 25 bp, probe
gcaccacctcatactaagaattcct

SEQ ID NO: 209199 - DNA, 25 bp, probe
gcaccacctcatactaagaattcct

SEQ ID NO: 209200 - DNA, 25 bp, probe
gcaccactgctaaccaaaactgcgt

SEQ ID NO: 209201 - DNA, 25 bp, probe
gcaccactgctaaccaaaactgcgt

SEQ ID NO: 209202 - DNA, 25 bp, probe
gcaccactgctttacagaaacatcc

SEQ ID NO: 209203 - DNA, 25 bp, probe
gcaccactctctgaaacaacacagt

SEQ ID NO: 209204 - DNA, 25 bp, probe
gcacctctatgtcaggattaccaga

SEQ ID NO: 209205 - DNA, 25 bp, probe
gcagcctaaagcaagggtaccgcca

SEQ ID NO: 209206 - DNA, 25 bp, probe
gcacccaaagtgggtgctgacggct

SEQ ID NO: 209207 - DNA, 25 bp, probe
gcacccgaagtgctgccatgaaatt

SEQ ID NO: 209208 - DNA, 25 bp, probe
gcagcccgcatattaggcgcagata

SEQ ID NO: 209209 - DNA, 25 bp, probe
gcagcccgcatattaggcgcagata

SEQ ID NO: 209210 - DNA, 25 bp, probe
gcaccacgattgtgacagcgtatgt

SEQ ID NO: 209211 - DNA, 25 bp, probe
gcaccacgattgtgacagcgtatgt

SEQ ID NO: 209212 - DNA, 25 bp, probe
gcagccctgttacagctgcttgctc

SEQ ID NO: 209213 - DNA, 25 bp, probe
gcagccactgttaagccatgtgttc

SEQ ID NO: 209214 - DNA, 25 bp, probe
gcagcctcagtcacagtgacttgtc

SEQ ID NO: 209215 - DNA, 25 bp, probe
gcagcccagatgcaagcagaaggtc

SEQ ID NO: 209216 - DNA, 25 bp, probe
gcacgcacacatcagtgcacacgga

SEQ ID NO: 209217 - DNA, 25 bp, probe
gcactcacactcctacaacgaagga

SEQ ID NO: 209218 - DNA, 25 bp, probe
gcagccccatcgccaaaggatggaa

SEQ ID NO: 209219 - DNA, 25 bp, probe
gcagcccctcaccaagaagagtggt

SEQ ID NO: 209220 - DNA, 25 bp, probe
gcacctccacaccagagtacaatgt

SEQ ID NO: 209221 - DNA, 25 bp, probe
gcacctccacaccagagtacaatgt

SEQ ID NO: 209222 - DNA, 25 bp, probe
gcactttgagaatgagtctcctgtt

SEQ ID NO: 209223 - DNA, 25 bp, probe
gcactgttgatgtatctgagttgcc

SEQ ID NO: 209224 - DNA, 25 bp, probe
gcagctgattgtgctcaggtatgcg

SEQ ID NO: 209225 - DNA, 25 bp, probe
gcagctgattgtgctcaggtatgcg

SEQ ID NO: 209226 - DNA, 25 bp, probe
gcagctgttgctgcactgtgtgtgc

SEQ ID NO: 209227 - DNA, 25 bp, probe
gcagctgttgctgcactgtgtgtgc

SEQ ID NO: 209228 - DNA, 25 bp, probe
gcagctgtgtgtggcagtattttag

SEQ ID NO: 209229 - DNA, 25 bp, probe
gcagctgtaggtggttttgccagag

SEQ ID NO: 209230 - DNA, 25 bp, probe
gcagctgtcattgtgattttcgacc

SEQ ID NO: 209231 - DNA, 25 bp, probe
gcactgatcacttatcattcattcg

SEQ ID NO: 209232 - DNA, 25 bp, probe
gcactgtcagttacaccaatctgaa

SEQ ID NO: 209233 - DNA, 25 bp, probe
gcactgtcagagaatctggagttga

SEQ ID NO: 209234 - DNA, 25 bp, probe
gcactgctaaatactgtacatagat

SEQ ID NO: 209235 - DNA, 25 bp, probe
gcacgctaccaaatctcaaaatatc

SEQ ID NO: 209236 - DNA, 25 bp, probe
gcacctgatctaatactaaatgaac

SEQ ID NO: 209237 - DNA, 25 bp, probe
gcacctgatctaatactaaatgaac

SEQ ID NO: 209238 - DNA, 25 bp, probe
gcagcctatctcattatctaatgaa

SEQ ID NO: 209239 - DNA, 25 bp, probe
gcactgtcatctagattttccattt

SEQ ID NO: 209240 - DNA, 25 bp, probe
gcacgtcttcgagttcatcgaggtg

SEQ ID NO: 209241 - DNA, 25 bp, probe
gcactttctcagcttcttgaacatg

SEQ ID NO: 209242 - DNA, 25 bp, probe
gcacgctttatgccttcaatactcg

SEQ ID NO: 209243 - DNA, 25 bp, probe
gcacgttccagactatggacagctc

SEQ ID NO: 209244 - DNA, 25 bp, probe
gcacgttccagactatggacagctc

SEQ ID NO: 209245 - DNA, 25 bp, probe
gcacgtgcccaactgaggaacagga

SEQ ID NO: 209246 - DNA, 25 bp, probe
gcagctggccgccaagatgggcaag

SEQ ID NO: 209247 - DNA, 25 bp, probe
gcagccgccctaatgtgtggggtgt

SEQ ID NO: 209248 - DNA, 25 bp, probe
gcagccgccctaatgtgtggggtgt

SEQ ID NO: 209249 - DNA, 25 bp, probe
gcaccagacacttctggggatggta

SEQ ID NO: 209250 - DNA, 25 bp, probe
gcaccaagcagtgctgtggggccgg

SEQ ID NO: 209251 - DNA, 25 bp, probe
gcaccaacatggactgagggacttc

SEQ ID NO: 209252 - DNA, 25 bp, probe
gcaccaacatggactgagggacttc

SEQ ID NO: 209253 - DNA, 25 bp, probe
gaccgacaggtttgggatctggacc

SEQ ID NO: 209254 - DNA, 25 bp, probe
gcacaaaaggggatggccgtgaccc

SEQ ID NO: 209255 - DNA, 25 bp, probe
gcaaagaagtggcctcctggggggc

SEQ ID NO: 209256 - DNA, 25 bp, probe
gaagggggtcccttgagggagcgtg

SEQ ID NO: 209257 - DNA, 25 bp, probe
gcacagggctgtgcccaaggacaag

SEQ ID NO: 209258 - DNA, 25 bp, probe
gcacagacttagaccttcaggaaac

SEQ ID NO: 209259 - DNA, 25 bp, probe
gcaaccttagctgatggggaaaatt

SEQ ID NO: 209260 - DNA, 25 bp, probe
gcaaggccgactttggggtcaagca

SEQ ID NO: 209261 - DNA, 25 bp, probe
gaaggtgcgttgtaggggtattgat

SEQ ID NO: 209262 - DNA, 25 bp, probe
gagcgaatggaagttgggtgatttt

SEQ ID NO: 209263 - DNA, 25 bp, probe
gagcgaatggaagttgggtgatttt

SEQ ID NO: 209264 - DNA, 25 bp, probe
gcacagccattgtggtggggttttt

SEQ ID NO: 209265 - DNA, 25 bp, probe
gcacgagtagtgggtcgtcttgttt

SEQ ID NO: 209266 - DNA, 25 bp, probe
gcacgagtagtgggtcgtcttgttt

SEQ ID NO: 209267 - DNA, 25 bp, probe
gcaccagaaattgctcgtatggccc

SEQ ID NO: 209268 - DNA, 25 bp, probe
gcaccgaaacccatgtggagcgcgt

SEQ ID NO: 209269 - DNA, 25 bp, probe
gcaccgaaacccatgtggagcgcgt

SEQ ID NO: 209270 - DNA, 25 bp, probe
gcacccaaactacttctggatggtc

SEQ ID NO: 209271 - DNA, 25 bp, probe
gcacccaaactacttctggatggtc

SEQ ID NO: 209272 - DNA, 25 bp, probe
gcaccgaagcattatgccctggaag

SEQ ID NO: 209273 - DNA, 25 bp, probe
gcagccgcacactatgagcaacatg

SEQ ID NO: 209274 - DNA, 25 bp, probe
gcagcctgcgattgtgacagagagg

SEQ ID NO: 209275 - DNA, 25 bp, probe
gcagcctgtgtttgagcagcgagga

SEQ ID NO: 209276 - DNA, 25 bp, probe
gcagccatggctatggcacaaaata

SEQ ID NO: 209277 - DNA, 25 bp, probe
gcacgcatggtattgacttaaaagg

SEQ ID NO: 209278 - DNA, 25 bp, probe
gcaccatcgtgatcatcgttcaata

SEQ ID NO: 209279 - DNA, 25 bp, probe
gcaccatcgtgatcatcgttcaata

SEQ ID NO: 209280 - DNA, 25 bp, probe
gcagccaggtcatctgagtatcatt

SEQ ID NO: 209281 - DNA, 25 bp, probe
gcaccaaatccagtcagatacattt

SEQ ID NO: 209282 - DNA, 25 bp, probe
gcagctgcacatgccaagcagaaac

SEQ ID NO: 209283 - DNA, 25 bp, probe
gcagcgacagcagtgacagcaatga

SEQ ID NO: 209284 - DNA, 25 bp, probe
gcagcgacagcagtgacagcagcga

SEQ ID NO: 209285 - DNA, 25 bp, probe
gcagcgatagcagtgacagcagcaa

SEQ ID NO: 209286 - DNA, 25 bp, probe
gcagctgaagcagcccgcatattag

SEQ ID NO: 209287 - DNA, 25 bp, probe
gcagctggagtcacccatgtactgc

SEQ ID NO: 209288 - DNA, 25 bp, probe
gcagcggaggtggtggcatctactc

SEQ ID NO: 209289 - DNA, 25 bp, probe
gcagcggaggtggtggcatctactc

SEQ ID NO: 209290 - DNA, 25 bp, probe
gcagcgggcaggtgtgatgctgacc

SEQ ID NO: 209291 - DNA, 25 bp, probe
gcagcggaccaggggctgtgacagc

SEQ ID NO: 209292 - DNA, 25 bp, probe
gcactaacctgcttgggtatgcagc

SEQ ID NO: 209293 - DNA, 25 bp, probe
gcactaacctgcttgggtatgcagc

SEQ ID NO: 209294 - DNA, 25 bp, probe
gcaccagcacctatgtgaatgagct

SEQ ID NO: 209295 - DNA, 25 bp, probe
gcagcccacactgctggacatggac

SEQ ID NO: 209296 - DNA, 25 bp, probe
gcagcccgtctggcaggacgaaggc

SEQ ID NO: 209297 - DNA, 25 bp, probe
gcacccagtgtggacctagaatggt

SEQ ID NO: 209298 - DNA, 25 bp, probe
gcacgtgatatagacctcgacaggt

SEQ ID NO: 209299 - DNA, 25 bp, probe
gcagcgattgcaactggcctggccg

SEQ ID NO: 209300 - DNA, 25 bp, probe
gcagcgtatcggtagctggagcctg

SEQ ID NO: 209301 - DNA, 25 bp, probe
gcactctacttgtgctgtgtgcctg

SEQ ID NO: 209302 - DNA, 25 bp, probe
gcactctacttgtgctgtgtgcctg

SEQ ID NO: 209303 - DNA, 25 bp, probe
gactctaattttggattccttggtg

SEQ ID NO: 209304 - DNA, 25 bp, probe
gcacttaattttccgactgctagga

SEQ ID NO: 209305 - DNA, 25 bp, probe
gcactgttgatttgtaccaagaatg

SEQ ID NO: 209306 - DNA, 25 bp, probe
gcactgcttacttcttcaaaggtcc

SEQ ID NO: 209307 - DNA, 25 bp, probe
gcactgcgtggcgaatgtaaacgtc

SEQ ID NO: 209308 - DNA, 25 bp, probe
gcactgcgtggcgaatgtaaacgtc

SEQ ID NO: 209309 - DNA, 25 bp, probe
gcactgtgtgggaatgtccgccagg

SEQ ID NO: 209310 - DNA, 25 bp, probe
gcactgcgggggatgtgatgctcgg

SEQ ID NO: 209311 - DNA, 25 bp, probe
gcactgggacgtaagtggcgcagtc

SEQ ID NO: 209312 - DNA, 25 bp, probe
gcactgaaacagcgggaggcagcat

SEQ ID NO: 209313 - DNA, 25 bp, probe
gcacttgagagcactagggagccat

SEQ ID NO: 209314 - DNA, 25 bp, probe
gcacgtaggcggtgaggatgcacat

SEQ ID NO: 209315 - DNA, 25 bp, probe
gcagctggaggctgggatgctgatg

SEQ ID NO: 209316 - DNA, 25 bp, probe
gcagctggtggcaagcgtggagcag

SEQ ID NO: 209317 - DNA, 25 bp, probe
gcactcggctgcaaagtgaggcttc

SEQ ID NO: 209318 - DNA, 25 bp, probe
gcagcctggcagaagtggaactccc

SEQ ID NO: 209319 - DNA, 25 bp, probe
gcacttgtcagaggtggaaacacta

SEQ ID NO: 209320 - DNA, 25 bp, probe
gcaccagtcaactggaccaagccac

SEQ ID NO: 209321 - DNA, 25 bp, probe
gcactcaacagttgggtgcactact

SEQ ID NO: 209322 - DNA, 25 bp, probe
gcacctagaggcttggcacctaata

SEQ ID NO: 209323 - DNA, 25 bp, probe
gcactcttggatctaccctgagtat

SEQ ID NO: 209324 - DNA, 25 bp, probe
gcactttctgtggtactcctaatta

SEQ ID NO: 209325 - DNA, 25 bp, probe
gcactttctgtggtactcctaatta

SEQ ID NO: 209326 - DNA, 25 bp, probe
gcacatttttggctgtcccaaagag

SEQ ID NO: 209327 - DNA, 25 bp, probe
gcacctcaagtgcaaggaccaaagg

SEQ ID NO: 209328 - DNA, 25 bp, probe
gcaccaaatggtcaggccagagaag

SEQ ID NO: 209329 - DNA, 25 bp, probe
gcacccaaagtatcgccagaagcag

SEQ ID NO: 209330 - DNA, 25 bp, probe
gcacccacaacctggggaactgctc

SEQ ID NO: 209331 - DNA, 25 bp, probe
gcagccccccatgtgggagaaatac

SEQ ID NO: 209332 - DNA, 25 bp, probe
gcacaccctactgcgggatgacttg

SEQ ID NO: 209333 - DNA, 25 bp, probe
gcacccctttattgtggaactggcc

SEQ ID NO: 209334 - DNA, 25 bp, probe
gcacccctttattgtggaactggcc

SEQ ID NO: 209335 - DNA, 25 bp, probe
gcacctccattctgtgaggaagtgg

SEQ ID NO: 209336 - DNA, 25 bp, probe
gcacctccattctgtgaggaagtgg

SEQ ID NO: 209337 - DNA, 25 bp, probe
gcacctactatatgcagaaggggag

SEQ ID NO: 209338 - DNA, 25 bp, probe
gcaccccaagaggcgtgagggcaaa

SEQ ID NO: 209339 - DNA, 25 bp, probe
gcaccccgaggcaaagagggcaatc

SEQ ID NO: 209340 - DNA, 25 bp, probe
gcacgcccgaggcctatgaggggct

SEQ ID NO: 209341 - DNA, 25 bp, probe
gcacgcccgaggcctatgaggggct

SEQ ID NO: 209342 - DNA, 25 bp, probe
gcacgcccgaggcctatgaggggct

SEQ ID NO: 209343 - DNA, 25 bp, probe
gcaccttgatatccccagagtgggt

SEQ ID NO: 209344 - DNA, 25 bp, probe
gcagcgttgcttggtgcacagattg

SEQ ID NO: 209345 - DNA, 25 bp, probe
gcacgtggccaggagccatgacagg

SEQ ID NO: 209346 - DNA, 25 bp, probe
gcagcgtgaggcttcagcctggagc

SEQ ID NO: 209347 - DNA, 25 bp, probe
gcagcggatgtgttcagtctgggcc

SEQ ID NO: 209348 - DNA, 25 bp, probe
gcacgcgctttaagtgtgctgggca

SEQ ID NO: 209349 - DNA, 25 bp, probe
gcaccgctgaaaatttgtggagata

SEQ ID NO: 209350 - DNA, 25 bp, probe
gcactcctgaaattctattaacatt

SEQ ID NO: 209351 - DNA, 25 bp, probe
gcagcccaagacatgctttaaatgt

SEQ ID NO: 209352 - DNA, 25 bp, probe
gcagccacagctacaatgctgttaa

SEQ ID NO: 209353 - DNA, 25 bp, probe
gcacaaatgcatattggttataggt

SEQ ID NO: 209354 - DNA, 25 bp, probe
gcacaaatgcatattggttataggt

SEQ ID NO: 209355 - DNA, 25 bp, probe
gcactactgacatgtggggccaggt

SEQ ID NO: 209356 - DNA, 25 bp, probe
gcaaaggccttgcctagaccaggtc

SEQ ID NO: 209357 - DNA, 25 bp, probe
gcaaagcccaggctatactgcctct

SEQ ID NO: 209358 - DNA, 25 bp, probe
gcaaaaggaggtgatttcctcacct

SEQ ID NO: 209359 - DNA, 25 bp, probe
tgcttccgaaggagtttccatatgc

SEQ ID NO: 209360 - DNA, 25 bp, probe
gttccagacggagcagattcgcaag

SEQ ID NO: 209361 - DNA, 25 bp, probe
gcaactcggggagcagaatcacctg

SEQ ID NO: 209362 - DNA, 25 bp, probe
gaacgcgggaggaggtcagcaggac

SEQ ID NO: 209363 - DNA, 25 bp, probe
gaacgcgggaggaggtcagcaggac

SEQ ID NO: 209364 - DNA, 25 bp, probe
gcaagggatgccagtaagtctgcag

SEQ ID NO: 209365 - DNA, 25 bp, probe
gcaaatgagctggggataaacttga

SEQ ID NO: 209366 - DNA, 25 bp, probe
gcacagtgccttgggactggactgg

SEQ ID NO: 209367 - DNA, 25 bp, probe
gcacagtgccttgggactggactgg

SEQ ID NO: 209368 - DNA, 25 bp, probe
gcacctcactaaccattcgactgag

SEQ ID NO: 209369 - DNA, 25 bp, probe
gcacctcagctaaggaccgcagtgc

SEQ ID NO: 209370 - DNA, 25 bp, probe
gcacgtcactagagactgggagccg

SEQ ID NO: 209371 - DNA, 25 bp, probe
gcacccaccatgaggcatggagcag

SEQ ID NO: 209372 - DNA, 25 bp, probe
gcacctaccataactgcttggagtg

SEQ ID NO: 209373 - DNA, 25 bp, probe
gcacctcccacagcagcagtgggga

SEQ ID NO: 209374 - DNA, 25 bp, probe
gcaccacccacatcatcgtggtgtc

SEQ ID NO: 209375 - DNA, 25 bp, probe
gcaccacccacatcatcgtggtgtc

SEQ ID NO: 209376 - DNA, 25 bp, probe
gcaccagactattctctgcgtgttg

SEQ ID NO: 209377 - DNA, 25 bp, probe
gcactcaaggtcgctggatgctgat

SEQ ID NO: 209378 - DNA, 25 bp, probe
gcactcaaatgtggcacctggtgaa

SEQ ID NO: 209379 - DNA, 25 bp, probe
gactcaaagggagaggtctcagtgg

SEQ ID NO: 209380 - DNA, 25 bp, probe
gacgtaccgagaggagtaccgtggc

SEQ ID NO: 209381 - DNA, 25 bp, probe
gacactgacctgaacgcagtcatcc

SEQ ID NO: 209382 - DNA, 25 bp, probe
gcacctgaccgtacagatgatggca

SEQ ID NO: 209383 - DNA, 25 bp, probe
gcaccagacactcacagcaaggatg

SEQ ID NO: 209384 - DNA, 25 bp, probe
gcagcgcagactggcggagaaggag

SEQ ID NO: 209385 - DNA, 25 bp, probe
gcagcgcaggcgctcggagaagaaa

SEQ ID NO: 209386 - DNA, 25 bp, probe
gcactgcatggtctagggacgttct

SEQ ID NO: 209387 - DNA, 25 bp, probe
gcactgaagtcaagagggactgggg

SEQ ID NO: 209388 - DNA, 25 bp, probe
gcacagagcgacagaggacacaggg

SEQ ID NO: 209389 - DNA, 25 bp, probe
gcacataccactaagcggccaatgg

SEQ ID NO: 209390 - DNA, 25 bp, probe
gcacataccactaagcggccaatgg

SEQ ID NO: 209391 - DNA, 25 bp, probe
gcaaaccgaattctgacaatgggca

SEQ ID NO: 209392 - DNA, 25 bp, probe
gcaaccggccttggcccaaggatag

SEQ ID NO: 209393 - DNA, 25 bp, probe
gaaccaagtttcgccatgctggatg

SEQ ID NO: 209394 - DNA, 25 bp, probe
gcaactgaagtcactttatctgggt

SEQ ID NO: 209395 - DNA, 25 bp, probe
gcaacttgagaaatgctcttagggt

SEQ ID NO: 209396 - DNA, 25 bp, probe
gcacatttgtgaatgatgcttgctg

SEQ ID NO: 209397 - DNA, 25 bp, probe
gcactgctctatgcagctgtgcagg

SEQ ID NO: 209398 - DNA, 25 bp, probe
gcactgctctatgcagctgtgcagg

SEQ ID NO: 209399 - DNA, 25 bp, probe
gcactgccattggccatggccatgg

SEQ ID NO: 209400 - DNA, 25 bp, probe
gcacctcaagcagtatgagctcttg

SEQ ID NO: 209401 - DNA, 25 bp, probe
gcaccataagcaggagagcatcatg

SEQ ID NO: 209402 - DNA, 25 bp, probe
gcactctgatagcctgctacatcat

SEQ ID NO: 209403 - DNA, 25 bp, probe
gcactctgctatggctgtggtatca

SEQ ID NO: 209404 - DNA, 25 bp, probe
gcagccgctgctggctatggctgcc

SEQ ID NO: 209405 - DNA, 25 bp, probe
gcactgcctgtgttgaggcagccgc

SEQ ID NO: 209406 - DNA, 25 bp, probe
gcactgcctgtgttgaggcagccgc

SEQ ID NO: 209407 - DNA, 25 bp, probe
gaatgcggtgtgtgcaggcatcgca

SEQ ID NO: 209408 - DNA, 25 bp, probe
gcactggtgttgtgagatgcctgtg

SEQ ID NO: 209409 - DNA, 25 bp, probe
gcagccctgggctgcagaatcgctg

SEQ ID NO: 209410 - DNA, 25 bp, probe
gcacccaggccaggcagaagctgtg

SEQ ID NO: 209411 - DNA, 25 bp, probe
gcacccaggccaggcagaagctgtg

SEQ ID NO: 209412 - DNA, 25 bp, probe
gcactgctaggcatggcgaccgtgc

SEQ ID NO: 209413 - DNA, 25 bp, probe
gcactgctaggcatggcgaccgtgc

SEQ ID NO: 209414 - DNA, 25 bp, probe
gcacagtaggatgtggaacctgttt

SEQ ID NO: 209415 - DNA, 25 bp, probe
gcagccaagagatgcggaagacctt

SEQ ID NO: 209416 - DNA, 25 bp, probe
gcaccaagaaaagaaactgcttcat

SEQ ID NO: 209417 - DNA, 25 bp, probe
gcaccaagcggaaaataaactccaa

SEQ ID NO: 209418 - DNA, 25 bp, probe
gcacccagggtgagaaagccccatc

SEQ ID NO: 209419 - DNA, 25 bp, probe
gcagccaaggggctgcaaagcctcc

SEQ ID NO: 209420 - DNA, 25 bp, probe
gcaccaagggccccatgacagattc

SEQ ID NO: 209421 - DNA, 25 bp, probe
gcagccaagggggactgcaagggac

SEQ ID NO: 209422 - DNA, 25 bp, probe
gcaccaaagccggtggacagcggaa

SEQ ID NO: 209423 - DNA, 25 bp, probe
gactcaaaccacatggaccacgaat

SEQ ID NO: 209424 - DNA, 25 bp, probe
gtacaatgacctctggggaccaagt

SEQ ID NO: 209425 - DNA, 25 bp, probe
gaaaatactgctctgtggaacctcg

SEQ ID NO: 209426 - DNA, 25 bp, probe
gcaatgaaactgggagtgaaactcc

SEQ ID NO: 209427 - DNA, 25 bp, probe
gcacatctaaagagagtgaccctcc

SEQ ID NO: 209428 - DNA, 25 bp, probe
gcaccaatgccacagaggatcaccc

SEQ ID NO: 209429 - DNA, 25 bp, probe
gcaccaatgccacagaggatcaccc

SEQ ID NO: 209430 - DNA, 25 bp, probe
gcaccagaggccgaaggtgcctcag

SEQ ID NO: 209431 - DNA, 25 bp, probe
gcaccagcagtcctgaagttggcat

SEQ ID NO: 209432 - DNA, 25 bp, probe
gcaacaggtcttccagatgtgtaat

SEQ ID NO: 209433 - DNA, 25 bp, probe
gcaagccctttctggtgttatgaag

SEQ ID NO: 209434 - DNA, 25 bp, probe
tcaagccttggtaacctttaccagc

SEQ ID NO: 209435 - DNA, 25 bp, probe
tcaagccttggtaacctttaccagc

SEQ ID NO: 209436 - DNA, 25 bp, probe
gcaaggcttccctagactaatagct

SEQ ID NO: 209437 - DNA, 25 bp, probe
gcaaccctactaagatcataaaccc

SEQ ID NO: 209438 - DNA, 25 bp, probe
gcaaccctactaagatcataaaccc

SEQ ID NO: 209439 - DNA, 25 bp, probe
gcaaccttgaaaggcactactgact

SEQ ID NO: 209440 - DNA, 25 bp, probe
gcaaccttgaaaggcactactgact

SEQ ID NO: 209441 - DNA, 25 bp, probe
gcacctttgaattctacatcctgtt

SEQ ID NO: 209442 - DNA, 25 bp, probe
gcacctttgaattctacatcctgtt

SEQ ID NO: 209443 - DNA, 25 bp, probe
gcaccctggatttgcatacattctt

SEQ ID NO: 209444 - DNA, 25 bp, probe
gcacctgcgcagatagagacaatct

SEQ ID NO: 209445 - DNA, 25 bp, probe
gcaccagacaagacaacatcatctc

SEQ ID NO: 209446 - DNA, 25 bp, probe
gcaccagcagcatgaatggtccctc

SEQ ID NO: 209447 - DNA, 25 bp, probe
gcagccacaaagttgagacttctga

SEQ ID NO: 209448 - DNA, 25 bp, probe
gcacccacataggtaactcttcatt

SEQ ID NO: 209449 - DNA, 25 bp, probe
gcacccctagcatgaacttgtggga

SEQ ID NO: 209450 - DNA, 25 bp, probe
gcacctttcagacacactttggctg

SEQ ID NO: 209451 - DNA, 25 bp, probe
gcacctcttcgaaagcctggaggct

SEQ ID NO: 209452 - DNA, 25 bp, probe
gcaccacttggaacagtttatagag

SEQ ID NO: 209453 - DNA, 25 bp, probe
gcacccctcataacagatttcaaaa

SEQ ID NO: 209454 - DNA, 25 bp, probe
gcaccacttctgatgagattgtcaa

SEQ ID NO: 209455 - DNA, 25 bp, probe
gcaccatctctgtggtgaagtcaca

SEQ ID NO: 209456 - DNA, 25 bp, probe
gcagccacgagaaggtggggcagca

SEQ ID NO: 209457 - DNA, 25 bp, probe
gcagccaaaataccatctggccaga

SEQ ID NO: 209458 - DNA, 25 bp, probe
gcacgaggagatagccctgcacaag

SEQ ID NO: 209459 - DNA, 25 bp, probe
gcacgaggagatagccctgcacaag

SEQ ID NO: 209460 - DNA, 25 bp, probe
gcaccagcagagtcactttgacaat

SEQ ID NO: 209461 - DNA, 25 bp, probe
gcaccgcgtgtgctttgagcactac

SEQ ID NO: 209462 - DNA, 25 bp, probe
gcacttgagctgcgtttggacaaca

SEQ ID NO: 209463 - DNA, 25 bp, probe
gcacttgagctgcgtttggacaaca

SEQ ID NO: 209464 - DNA, 25 bp, probe
gcactgtccagaggatatttccaaa

SEQ ID NO: 209465 - DNA, 25 bp, probe
gcactgaaagtttttatccaacaat

SEQ ID NO: 209466 - DNA, 25 bp, probe
gcacggaggtataaccccaacgaga

SEQ ID NO: 209467 - DNA, 25 bp, probe
gcacggggatcacagacttagaaag

SEQ ID NO: 209468 - DNA, 25 bp, probe
gcacgggtacagcagacagtgtcac

SEQ ID NO: 209469 - DNA, 25 bp, probe
gcacgggtacagcagacagtgtcac

SEQ ID NO: 209470 - DNA, 25 bp, probe
gcacggaatgaaaacagagcttccc

SEQ ID NO: 209471 - DNA, 25 bp, probe
gcacaggacgaacttgcgttacctc

SEQ ID NO: 209472 - DNA, 25 bp, probe
gcacaggacgaacttgcgttacctc

SEQ ID NO: 209473 - DNA, 25 bp, probe
gcacgtatgcaatcttttattcctc

SEQ ID NO: 209474 - DNA, 25 bp, probe
gcacgttcaattcctggtttaccag

SEQ ID NO: 209475 - DNA, 25 bp, probe
gcacgttcaattcctggtttaccag

SEQ ID NO: 209476 - DNA, 25 bp, probe
gcacgaccacattgtccgatttatc

SEQ ID NO: 209477 - DNA, 25 bp, probe
gcacaaacagaggccgccattttgg

SEQ ID NO: 209478 - DNA, 25 bp, probe
gcactgaagacagaccctgtcatat

SEQ ID NO: 209479 - DNA, 25 bp, probe
gcactaatgcctggcactcctattt

SEQ ID NO: 209480 - DNA, 25 bp, probe
gcacgcaatgatacaacttctcttc

SEQ ID NO: 209481 - DNA, 25 bp, probe
gcactgcacatgagatatagatccg

SEQ ID NO: 209482 - DNA, 25 bp, probe
gcactgttgtggtctaatccgggca

SEQ ID NO: 209483 - DNA, 25 bp, probe
gcactgttgtggtctaatccgggca

SEQ ID NO: 209484 - DNA, 25 bp, probe
gcacctgggcagtgatacgctgggc

SEQ ID NO: 209485 - DNA, 25 bp, probe
gcacctgagtgagggcatgaccagc

SEQ ID NO: 209486 - DNA, 25 bp, probe
gcacggagctgaaggctttgcaggc

SEQ ID NO: 209487 - DNA, 25 bp, probe
gcaccgcatcggctgcattgtggtg

SEQ ID NO: 209488 - DNA, 25 bp, probe
gcaccgagcagtcggatgtgaggtt

SEQ ID NO: 209489 - DNA, 25 bp, probe
gcaccatgccagagttgtggctgta

SEQ ID NO: 209490 - DNA, 25 bp, probe
gcaccaggcagattttggggtcacc

SEQ ID NO: 209491 - DNA, 25 bp, probe
gcaccaggcagattttggggtcacc

SEQ ID NO: 209492 - DNA, 25 bp, probe
gcacgcatggctgagcatgtgtggg

SEQ ID NO: 209493 - DNA, 25 bp, probe
gcaccatgactctagtgctcttggt

SEQ ID NO: 209494 - DNA, 25 bp, probe
gcagccaagtaaggtgattgtgtag

SEQ ID NO: 209495 - DNA, 25 bp, probe
gcactgccagatgtggttattgtga

SEQ ID NO: 209496 - DNA, 25 bp, probe
gcaaccagcatggaggtcgacgtgc

SEQ ID NO: 209497 - DNA, 25 bp, probe
gcacttactgcatggtcagaccacg

SEQ ID NO: 209498 - DNA, 25 bp, probe
gcactctagcctgggcaagagaaca

SEQ ID NO: 209499 - DNA, 25 bp, probe
gcactcgcacctgggcagtgagatg

SEQ ID NO: 209500 - DNA, 25 bp, probe
gcactcgcacctgggcagtgagatg

SEQ ID NO: 209501 - DNA, 25 bp, probe
gcactcgcacctgggcagtgagatg

SEQ ID NO: 209502 - DNA, 25 bp, probe
gcaccatgactgtcgtactggatgt

SEQ ID NO: 209503 - DNA, 25 bp, probe
gcacctactatgcttcaggcatggt

SEQ ID NO: 209504 - DNA, 25 bp, probe
gcacctcactggatctagtgttgct

SEQ ID NO: 209505 - DNA, 25 bp, probe
gcagccaccagcgaatgctaggtct

SEQ ID NO: 209506 - DNA, 25 bp, probe
gcacacacgacctgtacatgatcat

SEQ ID NO: 209507 - DNA, 25 bp, probe
gcacacacgacctgtacatgatcat

SEQ ID NO: 209508 - DNA, 25 bp, probe
gcaccacggagaaggagctgctcat

SEQ ID NO: 209509 - DNA, 25 bp, probe
gcactacctcagaatgacgaccatt

SEQ ID NO: 209510 - DNA, 25 bp, probe
gcactgactctgcaaagctacatca

SEQ ID NO: 209511 - DNA, 25 bp, probe
gcactgtgtggccgacagcaacatc

SEQ ID NO: 209512 - DNA, 25 bp, probe
gcaccaggtggccaagcagatgcac

SEQ ID NO: 209513 - DNA, 25 bp, probe
gcacgcaggaggccgacggccagaa

SEQ ID NO: 209514 - DNA, 25 bp, probe
gcacggagaaagggctggtcacaga

SEQ ID NO: 209515 - DNA, 25 bp, probe
gcacggggtgaagcggcatcaccac

SEQ ID NO: 209516 - DNA, 25 bp, probe
gcaccgggtcaagctgaccttcatg

SEQ ID NO: 209517 - DNA, 25 bp, probe
gcacggggagaagctgcaggtattt

SEQ ID NO: 209518 - DNA, 25 bp, probe
gcactggaggagtacgtgaggagcc

SEQ ID NO: 209519 - DNA, 25 bp, probe
gcactagggagccatgggaggatct

SEQ ID NO: 209520 - DNA, 25 bp, probe
gcaccacgagctgtggccaggagtc

SEQ ID NO: 209521 - DNA, 25 bp, probe
gcaccactgcatgggtggtcgtgag

SEQ ID NO: 209522 - DNA, 25 bp, probe
gcacctgtgctgggtgcgtagcggc

SEQ ID NO: 209523 - DNA, 25 bp, probe
gcacagtgtctgggctgactgggac

SEQ ID NO: 209524 - DNA, 25 bp, probe
gcacagtgtctgggctgactgggac

SEQ ID NO: 209525 - DNA, 25 bp, probe
gcacagggcatggattacttacacg

SEQ ID NO: 209526 - DNA, 25 bp, probe
gcactgaatcatccatattttaatg

SEQ ID NO: 209527 - DNA, 25 bp, probe
gcacctcaggttctgctatgaggca

SEQ ID NO: 209528 - DNA, 25 bp, probe
gcacctcaggttctgctatgaggca

SEQ ID NO: 209529 - DNA, 25 bp, probe
gcacctcaggttctgctatgaggca

SEQ ID NO: 209530 - DNA, 25 bp, probe
gcacccagagggagcagtgaggcag

SEQ ID NO: 209531 - DNA, 25 bp, probe
gcaccctggaagggcaggtctggcg

SEQ ID NO: 209532 - DNA, 25 bp, probe
gcaccctggaagggcaggtctggcg

SEQ ID NO: 209533 - DNA, 25 bp, probe
gcacgttgggaggccaagtcgggcg

SEQ ID NO: 209534 - DNA, 25 bp, probe
gcactttgggaggccaagacgggcg

SEQ ID NO: 209535 - DNA, 25 bp, probe
gcacttgaggtagggcaggaggggg

SEQ ID NO: 209536 - DNA, 25 bp, probe
gcacctgaggtcatcaagcagtcgg

SEQ ID NO: 209537 - DNA, 25 bp, probe
gcactggacgtcacagagcagctgg

SEQ ID NO: 209538 - DNA, 25 bp, probe
gcacgggctactacacatgcgtgga

SEQ ID NO: 209539 - DNA, 25 bp, probe
gcactgggctacaatgcggagttac

SEQ ID NO: 209540 - DNA, 25 bp, probe
gcacgggcaacaaaggatgggactt

SEQ ID NO: 209541 - DNA, 25 bp, probe
gcacggtcaaaagggcaagtgcctc

SEQ ID NO: 209542 - DNA, 25 bp, probe
gcaagacaaaactgaaaccctcttt

SEQ ID NO: 209543 - DNA, 25 bp, probe
gcaagaaaaccactatcaccctttt

SEQ ID NO: 209544 - DNA, 25 bp, probe
gcaagaaaaccactatcaccctttt

SEQ ID NO: 209545 - DNA, 25 bp, probe
gcacgaaaacaacacgcactttctg

SEQ ID NO: 209546 - DNA, 25 bp, probe
gcacgaaaacaacacgcactttctg

SEQ ID NO: 209547 - DNA, 25 bp, probe
gcacaggaaaaaccaccagttactt

SEQ ID NO: 209548 - DNA, 25 bp, probe
gcacaggaaaaaccaccagttactt

SEQ ID NO: 209549 - DNA, 25 bp, probe
gactggaccgagtgactactataca

SEQ ID NO: 209550 - DNA, 25 bp, probe
gcacagctaacatggaagtactata

SEQ ID NO: 209551 - DNA, 25 bp, probe
gcacagctaacatggaagtactata

SEQ ID NO: 209552 - DNA, 25 bp, probe
gcacctcaactgtgacaatcagcaa

SEQ ID NO: 209553 - DNA, 25 bp, probe
gcacctaagcaatgagccacagcaa

SEQ ID NO: 209554 - DNA, 25 bp, probe
gcacctagaatatgctatgcacaga

SEQ ID NO: 209555 - DNA, 25 bp, probe
gcacctcaactatgtgactgagatc

SEQ ID NO: 209556 - DNA, 25 bp, probe
gcaccatctaccaggagctgcagag

SEQ ID NO: 209557 - DNA, 25 bp, probe
gcacgcatctacttcctggtgaagt

SEQ ID NO: 209558 - DNA, 25 bp, probe
gcacccagattaccgtggaagatca

SEQ ID NO: 209559 - DNA, 25 bp, probe
gcacccatgtctccctgggaaatgg

SEQ ID NO: 209560 - DNA, 25 bp, probe
gcacccatgggctctgacagaaagc

SEQ ID NO: 209561 - DNA, 25 bp, probe
gcaccataagactctgccagaactg

SEQ ID NO: 209562 - DNA, 25 bp, probe
gcaccataagactctgccagaactg

SEQ ID NO: 209563 - DNA, 25 bp, probe
gcactgaaggaggcgtccgagagtg

SEQ ID NO: 209564 - DNA, 25 bp, probe
gcactacagggtgctgggcagtgtg

SEQ ID NO: 209565 - DNA, 25 bp, probe
gcactgaaggcttttgagcaagagg

SEQ ID NO: 209566 - DNA, 25 bp, probe
gcacttgccgcctctgagaagaagc

SEQ ID NO: 209567 - DNA, 25 bp, probe
gaatggcggcacgctgaaggaaacg

SEQ ID NO: 209568 - DNA, 25 bp, probe
gcacggaggcctgttcagtgaagac

SEQ ID NO: 209569 - DNA, 25 bp, probe
gcactaaggccgtgtctctgaggac

SEQ ID NO: 209570 - DNA, 25 bp, probe
gcactgaagtacattttgctaggta

SEQ ID NO: 209571 - DNA, 25 bp, probe
gcactgatagtcctttttccaatgt

SEQ ID NO: 209572 - DNA, 25 bp, probe
gcacgatgggctcagctttcagaag

SEQ ID NO: 209573 - DNA, 25 bp, probe
gcacgtgccagtcactgttctaatg

SEQ ID NO: 209574 - DNA, 25 bp, probe
gcacctacagtgtacagtcttgtat

SEQ ID NO: 209575 - DNA, 25 bp, probe
gcacccagagtgtccactgttggtg

SEQ ID NO: 209576 - DNA, 25 bp, probe
gcaccctaatgtgattgcattgcag

SEQ ID NO: 209577 - DNA, 25 bp, probe
gcactcagctggtgaattctatagc

SEQ ID NO: 209578 - DNA, 25 bp, probe
gcactatgtgacagaatttaacaag

SEQ ID NO: 209579 - DNA, 25 bp, probe
gcactgactactacaggttctacac

SEQ ID NO: 209580 - DNA, 25 bp, probe
gcactggtacatgcatctgtaatac

SEQ ID NO: 209581 - DNA, 25 bp, probe
gcactggtcactgcaatccaagcat

SEQ ID NO: 209582 - DNA, 25 bp, probe
gcactggtcaagaaaacaagatggc

SEQ ID NO: 209583 - DNA, 25 bp, probe
gacggccaggtcatcaccattggca

SEQ ID NO: 209584 - DNA, 25 bp, probe
gcacggacagttgggcaccaatact

SEQ ID NO: 209585 - DNA, 25 bp, probe
gcaccattctttgtcaccaatattg

SEQ ID NO: 209586 - DNA, 25 bp, probe
gcaacagtccttggtcaactatctt

SEQ ID NO: 209587 - DNA, 25 bp, probe
gcaacagtccttggtcaactatctt

SEQ ID NO: 209588 - DNA, 25 bp, probe
gcaccaggccagagatagtcttctt

SEQ ID NO: 209589 - DNA, 25 bp, probe
gcacaccccagaagaaaccagcatt

SEQ ID NO: 209590 - DNA, 25 bp, probe
gcacccagccaagagaataagcagt

SEQ ID NO: 209591 - DNA, 25 bp, probe
gcacccagccaagagaataagcagt

SEQ ID NO: 209592 - DNA, 25 bp, probe
gcaccgggcacaggcaaggagacag

SEQ ID NO: 209593 - DNA, 25 bp, probe
gcaccgagacaagcagagtcgcacg

SEQ ID NO: 209594 - DNA, 25 bp, probe
gcacttgagggaccagagacccggc

SEQ ID NO: 209595 - DNA, 25 bp, probe
gcacttgagggaccagagacccggc

SEQ ID NO: 209596 - DNA, 25 bp, probe
gcaccgagggagcaatacctgtggc

SEQ ID NO: 209597 - DNA, 25 bp, probe
gcaccgtgaagacgaatatgatctg

SEQ ID NO: 209598 - DNA, 25 bp, probe
gcaccgtgaggactgcagggcatgt

SEQ ID NO: 209599 - DNA, 25 bp, probe
gcactcgtggtgtctgtgaaatgtg

SEQ ID NO: 209600 - DNA, 25 bp, probe
gcactggctgtggacgttcagatgc

SEQ ID NO: 209601 - DNA, 25 bp, probe
gcaccatcttggtcgtgaagatccg

SEQ ID NO: 209602 - DNA, 25 bp, probe
gcaccattgcggtcgcgcggatcat

SEQ ID NO: 209603 - DNA, 25 bp, probe
gcacacatatgtggaagccctgcat

SEQ ID NO: 209604 - DNA, 25 bp, probe
gcactcatgagtgactgctggatct

SEQ ID NO: 209605 - DNA, 25 bp, probe
gcactcatgagtgactgctggatct

SEQ ID NO: 209606 - DNA, 25 bp, probe
gcactatgagatgctcttcaactcc

SEQ ID NO: 209607 - DNA, 25 bp, probe
gcactatggtttgttgcctacctag

SEQ ID NO: 209608 - DNA, 25 bp, probe
gcactaggaattctttgcattcctt

SEQ ID NO: 209609 - DNA, 25 bp, probe
gcactagcagacatgtttgacttcc

SEQ ID NO: 209610 - DNA, 25 bp, probe
gcactgagccaaaggtctagcattg

SEQ ID NO: 209611 - DNA, 25 bp, probe
gcactgcaaccaagtgtcagagtcg

SEQ ID NO: 209612 - DNA, 25 bp, probe
gcacgaactgcccgtcagagaagtg

SEQ ID NO: 209613 - DNA, 25 bp, probe
gcacgaactgcccgtcagagaagtg

SEQ ID NO: 209614 - DNA, 25 bp, probe
gcactaaccccattcatgagagcag

SEQ ID NO: 209615 - DNA, 25 bp, probe
gcaatgcgaacccaaatgcagcaga

SEQ ID NO: 209616 - DNA, 25 bp, probe
gcacatgccaagatgcaaagtggtc

SEQ ID NO: 209617 - DNA, 25 bp, probe
gcacatccggatagaagattccccg

SEQ ID NO: 209618 - DNA, 25 bp, probe
gcacccaggccgatgagttgcctgc

SEQ ID NO: 209619 - DNA, 25 bp, probe
gcacctgagaggggaagttctcagc

SEQ ID NO: 209620 - DNA, 25 bp, probe
gcactgtattggaggcctttgcagc

SEQ ID NO: 209621 - DNA, 25 bp, probe
gcactgtattggaggcctttgcagc

SEQ ID NO: 209622 - DNA, 25 bp, probe
gcacgtcattggagaggatgccgcc

SEQ ID NO: 209623 - DNA, 25 bp, probe
gcacgtcattggagaggatgccgcc

SEQ ID NO: 209624 - DNA, 25 bp, probe
gcacgtcattggagaggatgccgcc

SEQ ID NO: 209625 - DNA, 25 bp, probe
gcacgtgtttgagcaggcatccagc

SEQ ID NO: 209626 - DNA, 25 bp, probe
gcacctcgtagaggcgagccacatg

SEQ ID NO: 209627 - DNA, 25 bp, probe
gcactttgttgtggcgagcctcatg

SEQ ID NO: 209628 - DNA, 25 bp, probe
gcactttatgagggagaccccgaca

SEQ ID NO: 209629 - DNA, 25 bp, probe
gcacttgctgaaggcaggtgccaac

SEQ ID NO: 209630 - DNA, 25 bp, probe
gcaccgctatgagcatgggcgcttc

SEQ ID NO: 209631 - DNA, 25 bp, probe
gcacttgctatgtgcaaggcctttt

SEQ ID NO: 209632 - DNA, 25 bp, probe
gcacttcaatgagacggtgctcact

SEQ ID NO: 209633 - DNA, 25 bp, probe
gcacctcattgagaagtcagtgcgt

SEQ ID NO: 209634 - DNA, 25 bp, probe
gcacctcattgagaagtcagtgcgt

SEQ ID NO: 209635 - DNA, 25 bp, probe
gcacctatgtgggaactttgcctgt

SEQ ID NO: 209636 - DNA, 25 bp, probe
gcactctggtgagggagctttccag

SEQ ID NO: 209637 - DNA, 25 bp, probe
gcacctgggcagtgagatgtttgct

SEQ ID NO: 209638 - DNA, 25 bp, probe
gcaatcgtgcgcaatgaagtgattg

SEQ ID NO: 209639 - DNA, 25 bp, probe
gcactgggagcatacagatgtctga

SEQ ID NO: 209640 - DNA, 25 bp, probe
gcactgtggccgtcaagatgctcaa

SEQ ID NO: 209641 - DNA, 25 bp, probe
gcacagtggcccaatgtggccaacg

SEQ ID NO: 209642 - DNA, 25 bp, probe
gcacaggagctccaagggctcaggc

SEQ ID NO: 209643 - DNA, 25 bp, probe
gcacaggagctccaagggctcaggc

SEQ ID NO: 209644 - DNA, 25 bp, probe
gcacggtgctggtgagccgcaccgc

SEQ ID NO: 209645 - DNA, 25 bp, probe
gcaaaggggggagtctcaccttctt

SEQ ID NO: 209646 - DNA, 25 bp, probe
gcaaggggaaaagtttacttcagtg

SEQ ID NO: 209647 - DNA, 25 bp, probe
gcaaggagaagggtttaaattatgg

SEQ ID NO: 209648 - DNA, 25 bp, probe
gcaaggagaaagcaccgacaatctt

SEQ ID NO: 209649 - DNA, 25 bp, probe
gcaagataaaaacccgtatagcttt

SEQ ID NO: 209650 - DNA, 25 bp, probe
gcaaaattattacccatacgtcttt

SEQ ID NO: 209651 - DNA, 25 bp, probe
gtattttcattatcgctacgggtgg

SEQ ID NO: 209652 - DNA, 25 bp, probe
gtattttcattatcgctacgggtgg

SEQ ID NO: 209653 - DNA, 25 bp, probe
gtatacgtttagtcccgattggtgg

SEQ ID NO: 209654 - DNA, 25 bp, probe
gtatacgtttagtcccgattggtgg

SEQ ID NO: 209655 - DNA, 25 bp, probe
gaataggtgttcaccggatctgggc

SEQ ID NO: 209656 - DNA, 25 bp, probe
gcacaactctttatacggttggctc

SEQ ID NO: 209657 - DNA, 25 bp, probe
gcacaactctttatacggttggctc

SEQ ID NO: 209658 - DNA, 25 bp, probe
gcaaaggacctgataccgtaggccc

SEQ ID NO: 209659 - DNA, 25 bp, probe
gcaaaagaactttacctgaaccctg

SEQ ID NO: 209660 - DNA, 25 bp, probe
gaacaagcctcaactaacaaaccct

SEQ ID NO: 209661 - DNA, 25 bp, probe
gcaacattgaccttctcaaaaccat

SEQ ID NO: 209662 - DNA, 25 bp, probe
gaagataaatctgcctaaccctggg

SEQ ID NO: 209663 - DNA, 25 bp, probe
gaagataaatctgcctaaccctggg

SEQ ID NO: 209664 - DNA, 25 bp, probe
gaattaacttcacatattccctctc

SEQ ID NO: 209665 - DNA, 25 bp, probe
gaattaacttcacatattccctctc

SEQ ID NO: 209666 - DNA, 25 bp, probe
gaataaatgtttctttcctctccac

SEQ ID NO: 209667 - DNA, 25 bp, probe
gaataaatgtttctttcctctccac

SEQ ID NO: 209668 - DNA, 25 bp, probe
gcaataaactttcttcggtgagacc

SEQ ID NO: 209669 - DNA, 25 bp, probe
gcaaaagtcttatccccagagagca

SEQ ID NO: 209670 - DNA, 25 bp, probe
gcacaaagcttttaccacctgtggt

SEQ ID NO: 209671 - DNA, 25 bp, probe
gcacagaatcctccaagatactttg

SEQ ID NO: 209672 - DNA, 25 bp, probe
gcacattcatccccaaatgctatgt

SEQ ID NO: 209673 - DNA, 25 bp, probe
gcaaattctgttagcaatgtagtac

SEQ ID NO: 209674 - DNA, 25 bp, probe
gcaaatatccagaacaggttgtact

SEQ ID NO: 209675 - DNA, 25 bp, probe
gcacttatcaggaacgcctcgatac

SEQ ID NO: 209676 - DNA, 25 bp, probe
gcactgtcaaggtacagctctccta

SEQ ID NO: 209677 - DNA, 25 bp, probe
gcacgagcaagtttctcattactgt

SEQ ID NO: 209678 - DNA, 25 bp, probe
gcaccgacaatctttgattactgaa

SEQ ID NO: 209679 - DNA, 25 bp, probe
gcaccgaaaatgctgatgtccagaa

SEQ ID NO: 209680 - DNA, 25 bp, probe
gcacggaacaagctgagacggatga

SEQ ID NO: 209681 - DNA, 25 bp, probe
gcacggacaattcggcggggtgctg

SEQ ID NO: 209682 - DNA, 25 bp, probe
gcaaaggacagtccgccgaggtgct

SEQ ID NO: 209683 - DNA, 25 bp, probe
gcaaaggcagcaggctaccggacgg

SEQ ID NO: 209684 - DNA, 25 bp, probe
gcactgcaggaggagaaccgcgacc

SEQ ID NO: 209685 - DNA, 25 bp, probe
gcactcatctgacagaatccctgag

SEQ ID NO: 209686 - DNA, 25 bp, probe
gcactactgcaggagaggagcttgg

SEQ ID NO: 209687 - DNA, 25 bp, probe
gcaaacgcagtaccatggtcggaac

SEQ ID NO: 209688 - DNA, 25 bp, probe
gcaagaggccgggccttcggaagca

SEQ ID NO: 209689 - DNA, 25 bp, probe
gcaagaggccgggccttcggaagca

SEQ ID NO: 209690 - DNA, 25 bp, probe
gcaacagaacgtccacttcaaggaa

SEQ ID NO: 209691 - DNA, 25 bp, probe
gaatcaggtaacactaacggatcaa

SEQ ID NO: 209692 - DNA, 25 bp, probe
gcaaaggaaagcatctagacagtaa

SEQ ID NO: 209693 - DNA, 25 bp, probe
gcaaaggaaagcatctagacagtaa

SEQ ID NO: 209694 - DNA, 25 bp, probe
gcaaaaacagccttctagcacactt

SEQ ID NO: 209695 - DNA, 25 bp, probe
gcaaaaccagtctattagacggcca

SEQ ID NO: 209696 - DNA, 25 bp, probe
gcaagggccaggcagtaacagggca

SEQ ID NO: 209697 - DNA, 25 bp, probe
gcacaggcaccacaaataaaagtcg

SEQ ID NO: 209698 - DNA, 25 bp, probe
gcacacgtctcatgaatgcatcaca

SEQ ID NO: 209699 - DNA, 25 bp, probe
gcacacttgacatcaactgcatcaa

SEQ ID NO: 209700 - DNA, 25 bp, probe
gcacacttgacatcaactgcatcaa

SEQ ID NO: 209701 - DNA, 25 bp, probe
gcacctgagagagtacactctcaaa

SEQ ID NO: 209702 - DNA, 25 bp, probe
gcacaaaggcatggaaattcaggaa

SEQ ID NO: 209703 - DNA, 25 bp, probe
gcactaaggacaaactgtcagccag

SEQ ID NO: 209704 - DNA, 25 bp, probe
gcacaaaagaaccgcatgactcctg

SEQ ID NO: 209705 - DNA, 25 bp, probe
gcacaaaagaaccgcatgactcctg

SEQ ID NO: 209706 - DNA, 25 bp, probe
gcacaaatcgaagcaggaattcccc

SEQ ID NO: 209707 - DNA, 25 bp, probe
gcacaaatcgaagcaggaattcccc

SEQ ID NO: 209708 - DNA, 25 bp, probe
gcaaaatggaataagctacgtcctc

SEQ ID NO: 209709 - DNA, 25 bp, probe
gcacactaagaacagcctggtcttc

SEQ ID NO: 209710 - DNA, 25 bp, probe
gaataaagcaagctgcctttgtact

SEQ ID NO: 209711 - DNA, 25 bp, probe
gcaaaaaagagacgcacttcttcac

SEQ ID NO: 209712 - DNA, 25 bp, probe
gcaaaatacatctcgcctggtacag

SEQ ID NO: 209713 - DNA, 25 bp, probe
gcaaaaaacaactagaggtcatcag

SEQ ID NO: 209714 - DNA, 25 bp, probe
gcaaaaaacaactagaggtcatcag

SEQ ID NO: 209715 - DNA, 25 bp, probe
gcaaaaagggaagtggtgcccgtca

SEQ ID NO: 209716 - DNA, 25 bp, probe
gcaaaaagggaagtggtgcccgtca

SEQ ID NO: 209717 - DNA, 25 bp, probe
gcaacaaagaggtcaagggcgccct

SEQ ID NO: 209718 - DNA, 25 bp, probe
gcaagccggagaggatttggtccct

SEQ ID NO: 209719 - DNA, 25 bp, probe
gaactgaggacagaaatggtcccaa

SEQ ID NO: 209720 - DNA, 25 bp, probe
gcaactattgtacaaaatgttcaca

SEQ ID NO: 209721 - DNA, 25 bp, probe
gcactcgattgttgtaaactgttgt

SEQ ID NO: 209722 - DNA, 25 bp, probe
gcactttctgttgataatggttgtt

SEQ ID NO: 209723 - DNA, 25 bp, probe
gcactttagcatctgttcaggtagt

SEQ ID NO: 209724 - DNA, 25 bp, probe
gcacattttgcaaccactaggaagg

SEQ ID NO: 209725 - DNA, 25 bp, probe
gcacattttcagactgcaatataga

SEQ ID NO: 209726 - DNA, 25 bp, probe
gcacatttattcagagacagagcat

SEQ ID NO: 209727 - DNA, 25 bp, probe
gcactatgagatactcgaggtggat

SEQ ID NO: 209728 - DNA, 25 bp, probe
gcactgcaggtagagggtgggcctg

SEQ ID NO: 209729 - DNA, 25 bp, probe
gcactgcagtgatggtgcggggagg

SEQ ID NO: 209730 - DNA, 25 bp, probe
gcacgcaggacaggtgcttcaggtg

SEQ ID NO: 209731 - DNA, 25 bp, probe
gcacagatgtacaggtatcagggaa

SEQ ID NO: 209732 - DNA, 25 bp, probe
gcacgatgaagactggaaagcgacg

SEQ ID NO: 209733 - DNA, 25 bp, probe
gcacgagcagtgtgagagccagctc

SEQ ID NO: 209734 - DNA, 25 bp, probe
gcacagacatgtccataactgagtt

SEQ ID NO: 209735 - DNA, 25 bp, probe
gcacagacatgtccataactgagtt

SEQ ID NO: 209736 - DNA, 25 bp, probe
gcacggcatgtgtcagcaaggcagg

SEQ ID NO: 209737 - DNA, 25 bp, probe
gcactggcattaaagagtcatagaa

SEQ ID NO: 209738 - DNA, 25 bp, probe
gcactggatccaaagcatgtctgca

SEQ ID NO: 209739 - DNA, 25 bp, probe
gcactgacaagcagcacattctcaa

SEQ ID NO: 209740 - DNA, 25 bp, probe
gcactgacaagcagcacattctcaa

SEQ ID NO: 209741 - DNA, 25 bp, probe
gcactgtcaaagacctgatctccag

SEQ ID NO: 209742 - DNA, 25 bp, probe
gcactctaaggagatcatctacagg

SEQ ID NO: 209743 - DNA, 25 bp, probe
gcacactgcaaggaaatcttcacgg

SEQ ID NO: 209744 - DNA, 25 bp, probe
gcacccgaggcattatttgaccgga

SEQ ID NO: 209745 - DNA, 25 bp, probe
gcacacggtgtctgtttatccgtgc

SEQ ID NO: 209746 - DNA, 25 bp, probe
gcaactcagtttatttaaccattcc

SEQ ID NO: 209747 - DNA, 25 bp, probe
gcacacctgtttaactttgactgct

SEQ ID NO: 209748 - DNA, 25 bp, probe
gcacacctattacctattatttgct

SEQ ID NO: 209749 - DNA, 25 bp, probe
gcacaccaaaatcatgacactatag

SEQ ID NO: 209750 - DNA, 25 bp, probe
gcacaccaaaatcatgacactatag

SEQ ID NO: 209751 - DNA, 25 bp, probe
gcacagcggaaacatattcttgcag

SEQ ID NO: 209752 - DNA, 25 bp, probe
gcacccagaaagctgtatttgcagt

SEQ ID NO: 209753 - DNA, 25 bp, probe
gcacccaggaggactctgcatttac

SEQ ID NO: 209754 - DNA, 25 bp, probe
gcacccaggaggactctgcatttac

SEQ ID NO: 209755 - DNA, 25 bp, probe
gcacccctcaagatctgcggtgaca

SEQ ID NO: 209756 - DNA, 25 bp, probe
gcacttcctaaactctggatgcctc

SEQ ID NO: 209757 - DNA, 25 bp, probe
gcacattgcccatggctgggaacat

SEQ ID NO: 209758 - DNA, 25 bp, probe
gcacatcctcactggtcgggagagg

SEQ ID NO: 209759 - DNA, 25 bp, probe
gcacatcctcttccgacggaggaga

SEQ ID NO: 209760 - DNA, 25 bp, probe
gcactaccttcaacatcgtggggac

SEQ ID NO: 209761 - DNA, 25 bp, probe
gaaacccctacgtgtgggactgagt

SEQ ID NO: 209762 - DNA, 25 bp, probe
gaagcacccctttattgtggaactg

SEQ ID NO: 209763 - DNA, 25 bp, probe
gaagcacccctttattgtggaactg

SEQ ID NO: 209764 - DNA, 25 bp, probe
gcacggccaccatgaagtctggcaa

SEQ ID NO: 209765 - DNA, 25 bp, probe
gcacgcccagtgagaacatctggcc

SEQ ID NO: 209766 - DNA, 25 bp, probe
gcacgcccagtgagaacatctggcc

SEQ ID NO: 209767 - DNA, 25 bp, probe
gcactcccaataatgaagtgtggcc

SEQ ID NO: 209768 - DNA, 25 bp, probe
gcactctgctaatcatgtgggtgag

SEQ ID NO: 209769 - DNA, 25 bp, probe
gcactctgctaatcagatgtgtgaa

SEQ ID NO: 209770 - DNA, 25 bp, probe
gcactcactgaatagttttaaatga

SEQ ID NO: 209771 - DNA, 25 bp, probe
gcaccctgtaaaccttttagagatt

SEQ ID NO: 209772 - DNA, 25 bp, probe
gcaccctgctaattttttgtatttt

SEQ ID NO: 209773 - DNA, 25 bp, probe
gcactgccatccaatttagttcaat

SEQ ID NO: 209774 - DNA, 25 bp, probe
gcacatcacaacatttacttaacag

SEQ ID NO: 209775 - DNA, 25 bp, probe
gcacaaagttttaggctgtacacag

SEQ ID NO: 209776 - DNA, 25 bp, probe
gcacgtattttaatagcgtcataac

SEQ ID NO: 209777 - DNA, 25 bp, probe
gcacttactccaaaatgagtctaca

SEQ ID NO: 209778 - DNA, 25 bp, probe
gcacccactccaataacagagtaaa

SEQ ID NO: 209779 - DNA, 25 bp, probe
gcacccacatcctgtgcatcaagga

SEQ ID NO: 209780 - DNA, 25 bp, probe
gcactccagcctgggtgacagagtg

SEQ ID NO: 209781 - DNA, 25 bp, probe
gcactccagcctgggtgacagagtg

SEQ ID NO: 209782 - DNA, 25 bp, probe
gcactccagcctgggcgacagagcg

SEQ ID NO: 209783 - DNA, 25 bp, probe
gcactgtcagccaatgtggggggtc

SEQ ID NO: 209784 - DNA, 25 bp, probe
gaataattctagcgggggacctggg

SEQ ID NO: 209785 - DNA, 25 bp, probe
gaaaattcaaggcgatggggcccaa

SEQ ID NO: 209786 - DNA, 25 bp, probe
gcaaacattgaaagtaaacgaccca

SEQ ID NO: 209787 - DNA, 25 bp, probe
gcacttattgcaatttaacaccaga

SEQ ID NO: 209788 - DNA, 25 bp, probe
gcactgctattaaagtatttccaac

SEQ ID NO: 209789 - DNA, 25 bp, probe
gcactgctattaaagtatttccaac

SEQ ID NO: 209790 - DNA, 25 bp, probe
gcacgttaactcgaattctcacaag

SEQ ID NO: 209791 - DNA, 25 bp, probe
gcactgttcaattcggtacgcacta

SEQ ID NO: 209792 - DNA, 25 bp, probe
gcactttcaagatgcggcacatgcc

SEQ ID NO: 209793 - DNA, 25 bp, probe
gcactttgcaggttggtgagaccag

SEQ ID NO: 209794 - DNA, 25 bp, probe
gcacgatcggggccggagacaagtg

SEQ ID NO: 209795 - DNA, 25 bp, probe
gcaactcggacgtgtatgaaaatga

SEQ ID NO: 209796 - DNA, 25 bp, probe
gcaactccccaaagtggacaagacc

SEQ ID NO: 209797 - DNA, 25 bp, probe
gcaacaacccagaacttacaaactt

SEQ ID NO: 209798 - DNA, 25 bp, probe
gcactaactgtaatggcttgaaaga

SEQ ID NO: 209799 - DNA, 25 bp, probe
gcactaactgtaatggcttgaaaga

SEQ ID NO: 209800 - DNA, 25 bp, probe
gcacaacctgtttgagcctgaagac

SEQ ID NO: 209801 - DNA, 25 bp, probe
gcacgacctgtacagccaaacacag

SEQ ID NO: 209802 - DNA, 25 bp, probe
gcacagacactgacaagcacgcaca

SEQ ID NO: 209803 - DNA, 25 bp, probe
gcactgatatgtccacagcagagct

SEQ ID NO: 209804 - DNA, 25 bp, probe
gcacatgatcatctcagctgctggc

SEQ ID NO: 209805 - DNA, 25 bp, probe
gcacatgatcatctcagctgctggc

SEQ ID NO: 209806 - DNA, 25 bp, probe
gcacatcactgagtcagtcaactcc

SEQ ID NO: 209807 - DNA, 25 bp, probe
gcacagcagctgtattttaccaccc

SEQ ID NO: 209808 - DNA, 25 bp, probe
gcacggcagaatggttcccgtctga

SEQ ID NO: 209809 - DNA, 25 bp, probe
gcacaggagaagggggcatcccggg

SEQ ID NO: 209810 - DNA, 25 bp, probe
gcaactgggagctggagaccactcg

SEQ ID NO: 209811 - DNA, 25 bp, probe
gcaactgggatgacgacagcctagg

SEQ ID NO: 209812 - DNA, 25 bp, probe
gcaactgggatgacgacagcctagg

SEQ ID NO: 209813 - DNA, 25 bp, probe
gcaactgttccgcaaactggggcta

SEQ ID NO: 209814 - DNA, 25 bp, probe
gcacactgtttcttagagacgggga

SEQ ID NO: 209815 - DNA, 25 bp, probe
gcactgattgttttagagactatgg

SEQ ID NO: 209816 - DNA, 25 bp, probe
gcacgaggattattcaagaattcta

SEQ ID NO: 209817 - DNA, 25 bp, probe
gcacacaggactctcattacttttt

SEQ ID NO: 209818 - DNA, 25 bp, probe
gcaaaggcaatcaaaaacctttttg

SEQ ID NO: 209819 - DNA, 25 bp, probe
gcacatatgcgctcaataaacgtgt

SEQ ID NO: 209820 - DNA, 25 bp, probe
gcaatatcgtttacaaaaggttaca

SEQ ID NO: 209821 - DNA, 25 bp, probe
gcaatatcgtttacaaaaggttaca

SEQ ID NO: 209822 - DNA, 25 bp, probe
gcaatatcgtttacaaaaggttaca

SEQ ID NO: 209823 - DNA, 25 bp, probe
gcaagctcatgttttaaatagtatt

SEQ ID NO: 209824 - DNA, 25 bp, probe
gcaaccagtaaggacaactttgata

SEQ ID NO: 209825 - DNA, 25 bp, probe
gcaagcctgcaatgcaaaggccttg

SEQ ID NO: 209826 - DNA, 25 bp, probe
gcacgactgcaaagaagccggctgt

SEQ ID NO: 209827 - DNA, 25 bp, probe
gcactgcttcaaagagagcctgccc

SEQ ID NO: 209828 - DNA, 25 bp, probe
gcacatgctcacttgaggtgcttta

SEQ ID NO: 209829 - DNA, 25 bp, probe
gcacacaaccattcaggctttacaa

SEQ ID NO: 209830 - DNA, 25 bp, probe
gcacacaaccattcaggctttacaa

SEQ ID NO: 209831 - DNA, 25 bp, probe
gcaacaacaaactgcttacgacagg

SEQ ID NO: 209832 - DNA, 25 bp, probe
gcaaaaacaacatgtgtccaaatcg

SEQ ID NO: 209833 - DNA, 25 bp, probe
gaaccaacgtcatcgttgccaacac

SEQ ID NO: 209834 - DNA, 25 bp, probe
gaaccaacgtcatcgttgccaacac

SEQ ID NO: 209835 - DNA, 25 bp, probe
gaaccaccacatgaggacggtaacc

SEQ ID NO: 209836 - DNA, 25 bp, probe
gcaatgcccctcatagtgtaggcta

SEQ ID NO: 209837 - DNA, 25 bp, probe
gcaatccccttttggtagaattgcc

SEQ ID NO: 209838 - DNA, 25 bp, probe
gcaatcccatttgcaggatccgtct

SEQ ID NO: 209839 - DNA, 25 bp, probe
gcaacccttcagaaaggctttgctc

SEQ ID NO: 209840 - DNA, 25 bp, probe
gcaacgctaccacgaagacattttc

SEQ ID NO: 209841 - DNA, 25 bp, probe
gcaacctcaccacaagtacaaagac

SEQ ID NO: 209842 - DNA, 25 bp, probe
gcaacttcctgaccgaggatcaaat

SEQ ID NO: 209843 - DNA, 25 bp, probe
gcaacgaccagtctcagtacaagag

SEQ ID NO: 209844 - DNA, 25 bp, probe
gcaacgaccagtctcagtacaagag

SEQ ID NO: 209845 - DNA, 25 bp, probe
gcacaacaccagcgtcgtcaagaag

SEQ ID NO: 209846 - DNA, 25 bp, probe
gcacatagaatacggcacagtctgg

SEQ ID NO: 209847 - DNA, 25 bp, probe
gcacatactgaacgagaagcgcatc

SEQ ID NO: 209848 - DNA, 25 bp, probe
gcacacaagacagggaagcgcgcgc

SEQ ID NO: 209849 - DNA, 25 bp, probe
gcacagcacacaaaggaatggtcag

SEQ ID NO: 209850 - DNA, 25 bp, probe
gcacaaatctaaccatgagcttcag

SEQ ID NO: 209851 - DNA, 25 bp, probe
gcacagagtttgctgcgagctctct

SEQ ID NO: 209852 - DNA, 25 bp, probe
gcacacatctttggctgatgttctt

SEQ ID NO: 209853 - DNA, 25 bp, probe
gcacaggctattagtcatgatagcg

SEQ ID NO: 209854 - DNA, 25 bp, probe
gcactgactactggctgtacatgga

SEQ ID NO: 209855 - DNA, 25 bp, probe
gcactgcaccacgattgtgacagcg

SEQ ID NO: 209856 - DNA, 25 bp, probe
gcaaaccacctgtgacagctggcaa

SEQ ID NO: 209857 - DNA, 25 bp, probe
gcaaagcccacagagaagtcggatg

SEQ ID NO: 209858 - DNA, 25 bp, probe
gcaaagcccacagagaagtcggatg

SEQ ID NO: 209859 - DNA, 25 bp, probe
gcaaacccaggcaagaacgtgtagc

SEQ ID NO: 209860 - DNA, 25 bp, probe
gcaaacccaggcaagaacgtgtagc

SEQ ID NO: 209861 - DNA, 25 bp, probe
gcaaaaccaggtgtacgatgtcaag

SEQ ID NO: 209862 - DNA, 25 bp, probe
gcaaaatcattgctttcagggctct

SEQ ID NO: 209863 - DNA, 25 bp, probe
gcaaaaccaagggctctggcgtctt

SEQ ID NO: 209864 - DNA, 25 bp, probe
gcaaatgccctctctggtgacgttt

SEQ ID NO: 209865 - DNA, 25 bp, probe
gcacagattcccgactgtggcggtt

SEQ ID NO: 209866 - DNA, 25 bp, probe
gcacattgtcaagttctatggagtg

SEQ ID NO: 209867 - DNA, 25 bp, probe
gcacttacaggcgtttcgagctgat

SEQ ID NO: 209868 - DNA, 25 bp, probe
gcacttaaactcattccatatgcat

SEQ ID NO: 209869 - DNA, 25 bp, probe
gcactataatattgttcccatatat

SEQ ID NO: 209870 - DNA, 25 bp, probe
gcactataatattgttcccatatat

SEQ ID NO: 209871 - DNA, 25 bp, probe
gcactactgactttgttcttattgg

SEQ ID NO: 209872 - DNA, 25 bp, probe
gcactactgactttgttcttattgg

SEQ ID NO: 209873 - DNA, 25 bp, probe
gcacttagactatgcactttttctg

SEQ ID NO: 209874 - DNA, 25 bp, probe
gcacttcgcattgtgaggtttacaa

SEQ ID NO: 209875 - DNA, 25 bp, probe
gcacttcgcattgtgaggtttacaa

SEQ ID NO: 209876 - DNA, 25 bp, probe
gcactgttgcactttatgttttaaa

SEQ ID NO: 209877 - DNA, 25 bp, probe
gcacgtgtctgggtatctttgtata

SEQ ID NO: 209878 - DNA, 25 bp, probe
gcacatttctaggtacatcaatttc

SEQ ID NO: 209879 - DNA, 25 bp, probe
gcacatttctaggtacatcaatttc

SEQ ID NO: 209880 - DNA, 25 bp, probe
gcacattttctggctttaaatcaca

SEQ ID NO: 209881 - DNA, 25 bp, probe
gcacttagtctggagcgacaaccca

SEQ ID NO: 209882 - DNA, 25 bp, probe
gcaaattgtgcttggctgccaacct

SEQ ID NO: 209883 - DNA, 25 bp, probe
gcacaactctgcaggactcatatcc

SEQ ID NO: 209884 - DNA, 25 bp, probe
gcacagacaaggcagatctcatcat

SEQ ID NO: 209885 - DNA, 25 bp, probe
gcacagcaaatcctcagacacctgt

SEQ ID NO: 209886 - DNA, 25 bp, probe
gcacaagacctctgacagcacgttc

SEQ ID NO: 209887 - DNA, 25 bp, probe
gcacaagacctctgacagcacgttc

SEQ ID NO: 209888 - DNA, 25 bp, probe
gcaaatgcaggccacgccagagtgc

SEQ ID NO: 209889 - DNA, 25 bp, probe
gcaaaatggagctccaggtattgcc

SEQ ID NO: 209890 - DNA, 25 bp, probe
gcaaactggccttcgaggacatcgc

SEQ ID NO: 209891 - DNA, 25 bp, probe
gcaagaagggcttgggttctgagga

SEQ ID NO: 209892 - DNA, 25 bp, probe
gcaagaaggtgccagaggccctgga

SEQ ID NO: 209893 - DNA, 25 bp, probe
gcaagaaggggggaggccaggaggt

SEQ ID NO: 209894 - DNA, 25 bp, probe
gcaacaggaggtcaaaggcaagggt

SEQ ID NO: 209895 - DNA, 25 bp, probe
gcaacaggaggtcaaaggcaagggt

SEQ ID NO: 209896 - DNA, 25 bp, probe
gcaacagtaactccaaagtgtcaga

SEQ ID NO: 209897 - DNA, 25 bp, probe
gcaacagttacggagggaggacatc

SEQ ID NO: 209898 - DNA, 25 bp, probe
gcaaacttgtccggaggagcgtaag

SEQ ID NO: 209899 - DNA, 25 bp, probe
gcaacctctggggatgggacccaag

SEQ ID NO: 209900 - DNA, 25 bp, probe
gcaaacctcaggctggggctcagcc

SEQ ID NO: 209901 - DNA, 25 bp, probe
gcaaagcgaaagcggcaggatcgac

SEQ ID NO: 209902 - DNA, 25 bp, probe
gcaaggctgaggcgggaggatcgct

SEQ ID NO: 209903 - DNA, 25 bp, probe
gcaaggctagtctggggggatttta

SEQ ID NO: 209904 - DNA, 25 bp, probe
gcaaggctagtctggggggatttta

SEQ ID NO: 209905 - DNA, 25 bp, probe
gcaaagtagattcgtagttagttta

SEQ ID NO: 209906 - DNA, 25 bp, probe
gcaagggaatagcgacttagtgttc

SEQ ID NO: 209907 - DNA, 25 bp, probe
gcacaggaaaacgtgttctaatctt

SEQ ID NO: 209908 - DNA, 25 bp, probe
gcaagagaaaatattttccccttat

SEQ ID NO: 209909 - DNA, 25 bp, probe
gcaatcgcaaaaacctttatcccta

SEQ ID NO: 209910 - DNA, 25 bp, probe
gcaacccaaaactctcaatctgatt

SEQ ID NO: 209911 - DNA, 25 bp, probe
gcactgcccaaagtgcttccaaggc

SEQ ID NO: 209912 - DNA, 25 bp, probe
gcacattgccaaacgcttctgcaaa

SEQ ID NO: 209913 - DNA, 25 bp, probe
gcacttccgatggcgtcaggaattt

SEQ ID NO: 209914 - DNA, 25 bp, probe
gcactacgccaagatcagcgacttt

SEQ ID NO: 209915 - DNA, 25 bp, probe
gcaagggccaaactctggttttcct

SEQ ID NO: 209916 - DNA, 25 bp, probe
gcaaaggaatagcctgctccttttc

SEQ ID NO: 209917 - DNA, 25 bp, probe
gcaacaggcagaaccggccttcatt

SEQ ID NO: 209918 - DNA, 25 bp, probe
gcaacagtaatcagagttaccatta

SEQ ID NO: 209919 - DNA, 25 bp, probe
gcaaatgttacactgccttattctg

SEQ ID NO: 209920 - DNA, 25 bp, probe
gcaaacttcatcatggcaacaggcc

SEQ ID NO: 209921 - DNA, 25 bp, probe
gcacaacttcatgatggatatccag

SEQ ID NO: 209922 - DNA, 25 bp, probe
gcaaacgtcccacaatcgcagacga

SEQ ID NO: 209923 - DNA, 25 bp, probe
gtacatccccgaaaagcgggccagt

SEQ ID NO: 209924 - DNA, 25 bp, probe
gtccaacaaacacacacgggtagat

SEQ ID NO: 209925 - DNA, 25 bp, probe
gtccaaggaaccaaacccagacgca

SEQ ID NO: 209926 - DNA, 25 bp, probe
gcaacaaggctctgaaacccgagga

SEQ ID NO: 209927 - DNA, 25 bp, probe
gcaaattgggggcaatccagtggga

SEQ ID NO: 209928 - DNA, 25 bp, probe
gcaaattgggggcaatccagtggga

SEQ ID NO: 209929 - DNA, 25 bp, probe
gcactcactgggcggcttggagtgg

SEQ ID NO: 209930 - DNA, 25 bp, probe
gcactaccgcgagagctgggaggcg

SEQ ID NO: 209931 - DNA, 25 bp, probe
gcactgacaccgaggcagggatcgg

SEQ ID NO: 209932 - DNA, 25 bp, probe
gcaataactctgggaggggctcgag

SEQ ID NO: 209933 - DNA, 25 bp, probe
gcacataccactgtgggggcaagtg

SEQ ID NO: 209934 - DNA, 25 bp, probe
gcacataccactgtgggggcaagtg

SEQ ID NO: 209935 - DNA, 25 bp, probe
gcactaccttggatgtggaagagtc

SEQ ID NO: 209936 - DNA, 25 bp, probe
gcaaacctacgtctggacaagatca

SEQ ID NO: 209937 - DNA, 25 bp, probe
gcaaacctacgtctggacaagatca

SEQ ID NO: 209938 - DNA, 25 bp, probe
gcacacactctaagtttggagctat

SEQ ID NO: 209939 - DNA, 25 bp, probe
gcacatctgcccagattctgaggtt

SEQ ID NO: 209940 - DNA, 25 bp, probe
gcactcggtaggacttcggtcttta

SEQ ID NO: 209941 - DNA, 25 bp, probe
gactttggatttgctcggcttttga

SEQ ID NO: 209942 - DNA, 25 bp, probe
gaagtggattttgccggctggttgt

SEQ ID NO: 209943 - DNA, 25 bp, probe
gaagtggattttgccggctggttgt

SEQ ID NO: 209944 - DNA, 25 bp, probe
gacagtttttccacggatgggtgac

SEQ ID NO: 209945 - DNA, 25 bp, probe
gacggttcctacacaggacaggggt

SEQ ID NO: 209946 - DNA, 25 bp, probe
gcaagggacctagtctcagggatgg

SEQ ID NO: 209947 - DNA, 25 bp, probe
gcacattggaacttgtccatggggc

SEQ ID NO: 209948 - DNA, 25 bp, probe
gaatctggcagatcttcgccgtagc

SEQ ID NO: 209949 - DNA, 25 bp, probe
gcacatacggattcttgctgccgga

SEQ ID NO: 209950 - DNA, 25 bp, probe
gcaaactggcagtggtggctgatga

SEQ ID NO: 209951 - DNA, 25 bp, probe
gcacaatctgggtcctggtgtggac

SEQ ID NO: 209952 - DNA, 25 bp, probe
gcacaatctgggtcctggtgtggac

SEQ ID NO: 209953 - DNA, 25 bp, probe
gcactttgggaggctgagatgggag

SEQ ID NO: 209954 - DNA, 25 bp, probe
gcacattgggtaagctgaaggcgaa

SEQ ID NO: 209955 - DNA, 25 bp, probe
gcacttgctttgattgaatgtggaa

SEQ ID NO: 209956 - DNA, 25 bp, probe
gcaaatgttctggttaagccgacac

SEQ ID NO: 209957 - DNA, 25 bp, probe
gcaaagtcccgagttactcagagca

SEQ ID NO: 209958 - DNA, 25 bp, probe
gcaaagtcaagcgggccaccgagag

SEQ ID NO: 209959 - DNA, 25 bp, probe
gcaaagtctggaaggctccttcgag

SEQ ID NO: 209960 - DNA, 25 bp, probe
gcaaagagggcaatcgcctccttgg

SEQ ID NO: 209961 - DNA, 25 bp, probe
gcaaagagggcaatcgcctccttgg

SEQ ID NO: 209962 - DNA, 25 bp, probe
gcaaagaggtttgcccatttggcag

SEQ ID NO: 209963 - DNA, 25 bp, probe
gaatcagggttaggctccatattta

SEQ ID NO: 209964 - DNA, 25 bp, probe
gcaacgttttatggtcctttactca

SEQ ID NO: 209965 - DNA, 25 bp, probe
gcaactcaagtttagacccttactc

SEQ ID NO: 209966 - DNA, 25 bp, probe
gcaagtcaagtagaacagttaatca

SEQ ID NO: 209967 - DNA, 25 bp, probe
gcaagtcaacaaggcacacaatagg

SEQ ID NO: 209968 - DNA, 25 bp, probe
gcaaaaccaagatcacagtacacca

SEQ ID NO: 209969 - DNA, 25 bp, probe
gcaaaaaccagaagcggcaaaagca

SEQ ID NO: 209970 - DNA, 25 bp, probe
gcaagaaagctacggagtgaacaag

SEQ ID NO: 209971 - DNA, 25 bp, probe
gcacagcataactactgagaggaaa

SEQ ID NO: 209972 - DNA, 25 bp, probe
gcactgcaagacacacacggagaag

SEQ ID NO: 209973 - DNA, 25 bp, probe
gcacacatagacacccaaaagattg

SEQ ID NO: 209974 - DNA, 25 bp, probe
gcacacatagacacccaaaagattg

SEQ ID NO: 209975 - DNA, 25 bp, probe
gcaaatagtttccaaagccagtctg

SEQ ID NO: 209976 - DNA, 25 bp, probe
gcacttttttctttgactcatttgg

SEQ ID NO: 209977 - DNA, 25 bp, probe
gcacttgggttttaatcagcagttc

SEQ ID NO: 209978 - DNA, 25 bp, probe
gcaacgacgttttccacaagttctc

SEQ ID NO: 209979 - DNA, 25 bp, probe
gaaggacgtcctaaacaaggatctg

SEQ ID NO: 209980 - DNA, 25 bp, probe
gcaaagtcggggataagggatctga

SEQ ID NO: 209981 - DNA, 25 bp, probe
gcaaatctaaggccaaaagctgtga

SEQ ID NO: 209982 - DNA, 25 bp, probe
gcaaattgaaggtaactggggcaaa

SEQ ID NO: 209983 - DNA, 25 bp, probe
gcacagtcagcatggatgatatgat

SEQ ID NO: 209984 - DNA, 25 bp, probe
gcacatgggcattgccagattggct

SEQ ID NO: 209985 - DNA, 25 bp, probe
gcacatgagatgtcctcagctgggc

SEQ ID NO: 209986 - DNA, 25 bp, probe
gcaagagcatgatcatcagcgccac

SEQ ID NO: 209987 - DNA, 25 bp, probe
gcaacagctgcaagctgtccagcag

SEQ ID NO: 209988 - DNA, 25 bp, probe
gcaagcctgatactctccaggctga

SEQ ID NO: 209989 - DNA, 25 bp, probe
gcaagccatagacagcctgcgagac

SEQ ID NO: 209990 - DNA, 25 bp, probe
gcacagaatggctgacttgaagagc

SEQ ID NO: 209991 - DNA, 25 bp, probe
gcacaaagcatcttccttaaagcac

SEQ ID NO: 209992 - DNA, 25 bp, probe
gcacagcaagctgtcggtgatccac

SEQ ID NO: 209993 - DNA, 25 bp, probe
gcactcaacacggtgtgaatcacac

SEQ ID NO: 209994 - DNA, 25 bp, probe
gcaagcacgagcagtgtgagagcca

SEQ ID NO: 209995 - DNA, 25 bp, probe
gcaagcacgagcagtgtgagagcca

SEQ ID NO: 209996 - DNA, 25 bp, probe
gcaaaaggccgttggatcgcaaacc

SEQ ID NO: 209997 - DNA, 25 bp, probe
gcaaaaggcggttcgtcttcaaggt

SEQ ID NO: 209998 - DNA, 25 bp, probe
gcaaaaggcggttcgtcttcaaggt

SEQ ID NO: 209999 - DNA, 25 bp, probe
gcaaggaagggatcggcttcgggga

SEQ ID NO: 210000 - DNA, 25 bp, probe
gcaaggaagggatcggcttcgggga

SEQ ID NO: 210001 - DNA, 25 bp, probe
gcaaggaagggatcggcttcgggga

SEQ ID NO: 210002 - DNA, 25 bp, probe
gcacatggaaggcccctggtatgga

SEQ ID NO: 210003 - DNA, 25 bp, probe
gcacaagacccggtgctgcgttatg

SEQ ID NO: 210004 - DNA, 25 bp, probe
gcacaagataaccgtgcaggcctct

SEQ ID NO: 210005 - DNA, 25 bp, probe
gcacaagataaccgtgcaggcctct

SEQ ID NO: 210006 - DNA, 25 bp, probe
gcacacagccaaggcctaactatgc

SEQ ID NO: 210007 - DNA, 25 bp, probe
gcacacagccaaggcctaactatgc

SEQ ID NO: 210008 - DNA, 25 bp, probe
gcacaggccaaggccctgagcaagc

SEQ ID NO: 210009 - DNA, 25 bp, probe
gcaaattccatggcaccgtcaaggc

SEQ ID NO: 210010 - DNA, 25 bp, probe
gcaaatagacatccacagcgtcggt

SEQ ID NO: 210011 - DNA, 25 bp, probe
gcaaatcatcgtcactgtgctcaga

SEQ ID NO: 210012 - DNA, 25 bp, probe
gcaagagcatccacaccttgctgag

SEQ ID NO: 210013 - DNA, 25 bp, probe
gcaaatcctcagacacctgtggaat

SEQ ID NO: 210014 - DNA, 25 bp, probe
gcacaatttcaactccatgcggttc

SEQ ID NO: 210015 - DNA, 25 bp, probe
gcacacgttcacattgcggtgatgt

SEQ ID NO: 210016 - DNA, 25 bp, probe
gcaacgtcttgaacaggcgctgatg

SEQ ID NO: 210017 - DNA, 25 bp, probe
gcacacagaattagacgaggcgatc

SEQ ID NO: 210018 - DNA, 25 bp, probe
gcaaaaatttgatgaggcgctcagg

SEQ ID NO: 210019 - DNA, 25 bp, probe
gcaaatttttaaaggcacaagaggc

SEQ ID NO: 210020 - DNA, 25 bp, probe
gcaaatgtaagtagaagctgggaga

SEQ ID NO: 210021 - DNA, 25 bp, probe
gcaaaactatggggagctggggcca

SEQ ID NO: 210022 - DNA, 25 bp, probe
gcaaaatggagggggaggggccaga

SEQ ID NO: 210023 - DNA, 25 bp, probe
gcaacagggtcggggaagcagccca

SEQ ID NO: 210024 - DNA, 25 bp, probe
gcaacagggaccataggaaggctca

SEQ ID NO: 210025 - DNA, 25 bp, probe
gcaaggaggacctgcgggaggtgct

SEQ ID NO: 210026 - DNA, 25 bp, probe
gcaaggggaaacctgtgaaagctgc

SEQ ID NO: 210027 - DNA, 25 bp, probe
gcaagtgacgcggacctggaaggcg

SEQ ID NO: 210028 - DNA, 25 bp, probe
gcaagtgacgcggacctggaaggcg

SEQ ID NO: 210029 - DNA, 25 bp, probe
gcacaacatcgaagtcctggagggg

SEQ ID NO: 210030 - DNA, 25 bp, probe
gcacaacatcgaagtcctggagggg

SEQ ID NO: 210031 - DNA, 25 bp, probe
gcaaaattcatcttttggagggtgg

SEQ ID NO: 210032 - DNA, 25 bp, probe
gcaaattacttacttctggcggggc

SEQ ID NO: 210033 - DNA, 25 bp, probe
gaatttgacctacttgctggggtac

SEQ ID NO: 210034 - DNA, 25 bp, probe
gaatttgacctacttgctggggtac

SEQ ID NO: 210035 - DNA, 25 bp, probe
gcacatttcagcctatttgcttagt

SEQ ID NO: 210036 - DNA, 25 bp, probe
gcactttgtggcaagattttcatga

SEQ ID NO: 210037 - DNA, 25 bp, probe
gcacatgggtgaaaagtatacaact

SEQ ID NO: 210038 - DNA, 25 bp, probe
gaatgatggctaaggtgttccaagt

SEQ ID NO: 210039 - DNA, 25 bp, probe
gcaaatggctaccgttttacaataa

SEQ ID NO: 210040 - DNA, 25 bp, probe
gcaaattctgatgaaatacttaaaa

SEQ ID NO: 210041 - DNA, 25 bp, probe
gcaaatgccattgaaaccgctagtc

SEQ ID NO: 210042 - DNA, 25 bp, probe
gcaaagctctttacctcttgctatt

SEQ ID NO: 210043 - DNA, 25 bp, probe
gcaacatgctttaaccccattgtat

SEQ ID NO: 210044 - DNA, 25 bp, probe
gcacagctgggagaacccagtgacc

SEQ ID NO: 210045 - DNA, 25 bp, probe
gcacagggtgtgaaagtccggccgc

SEQ ID NO: 210046 - DNA, 25 bp, probe
gcacagggtgtgaaagtccggccgc

SEQ ID NO: 210047 - DNA, 25 bp, probe
gcaagacggtggagtcgtggcggcg

SEQ ID NO: 210048 - DNA, 25 bp, probe
gcaaagctggatggggttgggccgg

SEQ ID NO: 210049 - DNA, 25 bp, probe
gcaacactggtcacgtttggaaaga

SEQ ID NO: 210050 - DNA, 25 bp, probe
gcaacgaggacttgagatttggcaa

SEQ ID NO: 210051 - DNA, 25 bp, probe
gcacacatggtgtcccagatctagg

SEQ ID NO: 210052 - DNA, 25 bp, probe
gcacagtgggtcacaactgcagctt

SEQ ID NO: 210053 - DNA, 25 bp, probe
gcacagtgggtcacaactgcagctt

SEQ ID NO: 210054 - DNA, 25 bp, probe
gcacaatggaacagaactcaccctc

SEQ ID NO: 210055 - DNA, 25 bp, probe
gcacaaggaaataaagcgtcctctc

SEQ ID NO: 210056 - DNA, 25 bp, probe
gcaaaggaggacaacagttcccacc

SEQ ID NO: 210057 - DNA, 25 bp, probe
gcaaagggctgtgtagacaactcac

SEQ ID NO: 210058 - DNA, 25 bp, probe
gcaaccggctggtaaagcaattcct

SEQ ID NO: 210059 - DNA, 25 bp, probe
gcaacaaggttgcaaaagatcctta

SEQ ID NO: 210060 - DNA, 25 bp, probe
gcaaataggtatttcaaagctcttt

SEQ ID NO: 210061 - DNA, 25 bp, probe
gcaaaaggccatttccaaacgattt

SEQ ID NO: 210062 - DNA, 25 bp, probe
gcaaagggcgcttttaaagagcttt

SEQ ID NO: 210063 - DNA, 25 bp, probe
gcaaagggcgcttttaaagagcttt

SEQ ID NO: 210064 - DNA, 25 bp, probe
gcaaggagggcatttgtaacggggt

SEQ ID NO: 210065 - DNA, 25 bp, probe
gcaagagagggtgatgttccggagg

SEQ ID NO: 210066 - DNA, 25 bp, probe
gcaaatgaagtgccttttcccgagg

SEQ ID NO: 210067 - DNA, 25 bp, probe
gcaaatgacacgttaatatccctag

SEQ ID NO: 210068 - DNA, 25 bp, probe
gcaaatagccctaacttgcctctag

SEQ ID NO: 210069 - DNA, 25 bp, probe
gcaacaagtcctgaatcccttgcag

SEQ ID NO: 210070 - DNA, 25 bp, probe
gcaaacttctctagaactgttatca

SEQ ID NO: 210071 - DNA, 25 bp, probe
gcaaacttctctagaactgttatca

SEQ ID NO: 210072 - DNA, 25 bp, probe
gcaaactcttgctgtttatttatga

SEQ ID NO: 210073 - DNA, 25 bp, probe
gcaagacttcgtgatttttaacaga

SEQ ID NO: 210074 - DNA, 25 bp, probe
gcaagttgtcctatttttgtcatta

SEQ ID NO: 210075 - DNA, 25 bp, probe
gcacacttgctcatttttacttcaa

SEQ ID NO: 210076 - DNA, 25 bp, probe
gcaacccagtttctctgaattccac

SEQ ID NO: 210077 - DNA, 25 bp, probe
gcaaccaagtaccctgctaaatccg

SEQ ID NO: 210078 - DNA, 25 bp, probe
gcaactgaaggagcctgtaatcacc

SEQ ID NO: 210079 - DNA, 25 bp, probe
gaattgaggatgtccctgaagtgcc

SEQ ID NO: 210080 - DNA, 25 bp, probe
gaattgaggatgtccctgaagtgcc

SEQ ID NO: 210081 - DNA, 25 bp, probe
gcaaatgaggagtcagctggaagct

SEQ ID NO: 210082 - DNA, 25 bp, probe
gcaaagagcagctacctggcaactg

SEQ ID NO: 210083 - DNA, 25 bp, probe
gcacagaggaaaccttctggctgat

SEQ ID NO: 210084 - DNA, 25 bp, probe
gcacacaggcagagtgccttggcag

SEQ ID NO: 210085 - DNA, 25 bp, probe
gcacaccagcaaaggcaactctggg

SEQ ID NO: 210086 - DNA, 25 bp, probe
gcacatccacaatctcaagcactgg

SEQ ID NO: 210087 - DNA, 25 bp, probe
gcacatcccagacatcatcaaggtg

SEQ ID NO: 210088 - DNA, 25 bp, probe
gcacattctcaagagcacacaggat

SEQ ID NO: 210089 - DNA, 25 bp, probe
gcacaatattcagggagcagcggat

SEQ ID NO: 210090 - DNA, 25 bp, probe
gcaaatcatgtggaggagatgccag

SEQ ID NO: 210091 - DNA, 25 bp, probe
gcaaaagctggaggagatgcccaag

SEQ ID NO: 210092 - DNA, 25 bp, probe
gcaacacgtggccaagcatgccttc

SEQ ID NO: 210093 - DNA, 25 bp, probe
gcaactgcgtggagctgcaggcttc

SEQ ID NO: 210094 - DNA, 25 bp, probe
gcaaaggggcacctgaggttcacgc

SEQ ID NO: 210095 - DNA, 25 bp, probe
gcaaacggagacctcggtcatctag

SEQ ID NO: 210096 - DNA, 25 bp, probe
gcaaatcagaaaatcctgttactag

SEQ ID NO: 210097 - DNA, 25 bp, probe
gcaagtatgaatttcctgacaaaga

SEQ ID NO: 210098 - DNA, 25 bp, probe
gcacaatcagtttatcctgacatat

SEQ ID NO: 210099 - DNA, 25 bp, probe
gcacaatcagtttatcctgacatat

SEQ ID NO: 210100 - DNA, 25 bp, probe
gcacaacagattatacggcatgaat

SEQ ID NO: 210101 - DNA, 25 bp, probe
gcacaagagttgcttctgggataga

SEQ ID NO: 210102 - DNA, 25 bp, probe
gcacatcaagagggtttcggatatg

SEQ ID NO: 210103 - DNA, 25 bp, probe
gcacaaatgagtggcagttgctgga

SEQ ID NO: 210104 - DNA, 25 bp, probe
gcacaggatggggcaagctctggca

SEQ ID NO: 210105 - DNA, 25 bp, probe
gcacaggatggggcaagctctggca

SEQ ID NO: 210106 - DNA, 25 bp, probe
gcacaggaggaggtagctagcgtgt

SEQ ID NO: 210107 - DNA, 25 bp, probe
gcacatgggtagcgaccgcgtgttg

SEQ ID NO: 210108 - DNA, 25 bp, probe
gcacatgggtagcgaccgcgtgttg

SEQ ID NO: 210109 - DNA, 25 bp, probe
gcacaggtgctaccagacctctgtg

SEQ ID NO: 210110 - DNA, 25 bp, probe
gcacaggtgacaagcgtcacttctc

SEQ ID NO: 210111 - DNA, 25 bp, probe
gcacagtggctcatgcctgtaatcc

SEQ ID NO: 210112 - DNA, 25 bp, probe
gcacagtggctcatgcctgtaatcc

SEQ ID NO: 210113 - DNA, 25 bp, probe
gcacagtgtgtttactgaagttgtg

SEQ ID NO: 210114 - DNA, 25 bp, probe
gcacagggattggaacatgatttat

SEQ ID NO: 210115 - DNA, 25 bp, probe
gcacagggaatgcacctattattgc

SEQ ID NO: 210116 - DNA, 25 bp, probe
gcacagaaacatcttgcttatttgc

SEQ ID NO: 210117 - DNA, 25 bp, probe
gcacagaaacatcttgcttatttgc

SEQ ID NO: 210118 - DNA, 25 bp, probe
gcacatcaagattttttcattctcg

SEQ ID NO: 210119 - DNA, 25 bp, probe
gcacaaatgatggctgactctccct

SEQ ID NO: 210120 - DNA, 25 bp, probe
gcacatgaattgggacgaccttctg

SEQ ID NO: 210121 - DNA, 25 bp, probe
gcacagaattgcgcagtacctggcc

SEQ ID NO: 210122 - DNA, 25 bp, probe
gcacaaagccacagtgacactggcc

SEQ ID NO: 210123 - DNA, 25 bp, probe
gcacaagggcacattgcccatggct

SEQ ID NO: 210124 - DNA, 25 bp, probe
gcacatggatggagattccctggat

SEQ ID NO: 210125 - DNA, 25 bp, probe
gcacaggtgtgtggaggccgtggtc

SEQ ID NO: 210126 - DNA, 25 bp, probe
gcacaggtgggagggcagcggagat

SEQ ID NO: 210127 - DNA, 25 bp, probe
gcacaggtgggagggcagcggagat

SEQ ID NO: 210128 - DNA, 25 bp, probe
gcacaggtgaaggcgagggggacag

SEQ ID NO: 210129 - DNA, 25 bp, probe
gcacagcaggaagagcccggtgccg

SEQ ID NO: 210130 - DNA, 25 bp, probe
gcacagaggaaagcgggtgcccggc

SEQ ID NO: 210131 - DNA, 25 bp, probe
gcacaagcagatccggctgcaggtg

SEQ ID NO: 210132 - DNA, 25 bp, probe
gcacaagcagatccggctgcaggtg

SEQ ID NO: 210133 - DNA, 25 bp, probe
gcacaagcagatccggctgcaggtg

SEQ ID NO: 210134 - DNA, 25 bp, probe
gcacatgccacagcaggcggtgggg

SEQ ID NO: 210135 - DNA, 25 bp, probe
gcacatccactggagatgctgggcc

SEQ ID NO: 210136 - DNA, 25 bp, probe
gcacatgcctctgtagagagcagca

SEQ ID NO: 210137 - DNA, 25 bp, probe
gcacatctcatcatatagtacagct

SEQ ID NO: 210138 - DNA, 25 bp, probe
gcacacgcactttaagaacatcccc

SEQ ID NO: 210139 - DNA, 25 bp, probe
gcacacgcactttaagaacatcccc

SEQ ID NO: 210140 - DNA, 25 bp, probe
gcacagagacttttactgagctccg

SEQ ID NO: 210141 - DNA, 25 bp, probe
gcacaagccatttaatctcactcag

SEQ ID NO: 210142 - DNA, 25 bp, probe
gcaaacactagctgttctgctcata

SEQ ID NO: 210143 - DNA, 25 bp, probe
gcaaaccgagcgatcatgtcgcaca

SEQ ID NO: 210144 - DNA, 25 bp, probe
gcaaaagtagcaacatatgtcaaca

SEQ ID NO: 210145 - DNA, 25 bp, probe
gcaaaagtagcaacatatgtcaaca

SEQ ID NO: 210146 - DNA, 25 bp, probe
gcaaatcggtgcactgatcgctgcc

SEQ ID NO: 210147 - DNA, 25 bp, probe
gcaaatggggcccttgtcagcatct

SEQ ID NO: 210148 - DNA, 25 bp, probe
gcacattgcggggcattcgtgcaca

SEQ ID NO: 210149 - DNA, 25 bp, probe
gcacatctggagcaactgcttgcca

SEQ ID NO: 210150 - DNA, 25 bp, probe
gcacatctggagctgaagcgttact

SEQ ID NO: 210151 - DNA, 25 bp, probe
gacatcggggtgagggtcgtaaatg

SEQ ID NO: 210152 - DNA, 25 bp, probe
gcaacgagtgggaggttcaaacaag

SEQ ID NO: 210153 - DNA, 25 bp, probe
gcaactgggaagaagtggcctcaaa

SEQ ID NO: 210154 - DNA, 25 bp, probe
gcaactgggaagaagtggcctcaaa

SEQ ID NO: 210155 - DNA, 25 bp, probe
gcaaagcaggaggtcttgggctaaa

SEQ ID NO: 210156 - DNA, 25 bp, probe
gcacaagcagggttgggggaggggg

SEQ ID NO: 210157 - DNA, 25 bp, probe
gcacaagcagggttgggggaggggg

SEQ ID NO: 210158 - DNA, 25 bp, probe
gcaacgcacggctgccggtgaagtg

SEQ ID NO: 210159 - DNA, 25 bp, probe
gcaagccaagtctgtgggtgacctc

SEQ ID NO: 210160 - DNA, 25 bp, probe
gcaaccatagccttgtcgtgggcat

SEQ ID NO: 210161 - DNA, 25 bp, probe
gcaaccatagccttgtcgtgggcat

SEQ ID NO: 210162 - DNA, 25 bp, probe
gcaaggatcgcctgtcagttgagtg

SEQ ID NO: 210163 - DNA, 25 bp, probe
gcacaggaagccttcacactggaag

SEQ ID NO: 210164 - DNA, 25 bp, probe
gcacagaaatggttccctgagctgc

SEQ ID NO: 210165 - DNA, 25 bp, probe
gcaagtagaagttctgccggatgga

SEQ ID NO: 210166 - DNA, 25 bp, probe
gcacagggtggcagtcacggagtga

SEQ ID NO: 210167 - DNA, 25 bp, probe
gcacagggtggcagtcacggagtga

SEQ ID NO: 210168 - DNA, 25 bp, probe
gcacagaggtggctgtgcgaagagg

SEQ ID NO: 210169 - DNA, 25 bp, probe
gcacaaggcggggccagaagtgatg

SEQ ID NO: 210170 - DNA, 25 bp, probe
gcacaaggcggggccagaagtgatg

SEQ ID NO: 210171 - DNA, 25 bp, probe
gcacagggcctggcccatgtatggc

SEQ ID NO: 210172 - DNA, 25 bp, probe
gcacagagggctacttcatggagga

SEQ ID NO: 210173 - DNA, 25 bp, probe
gcacagagggctacttcatggagga

SEQ ID NO: 210174 - DNA, 25 bp, probe
gcacaggagagtcccatcagcaggc

SEQ ID NO: 210175 - DNA, 25 bp, probe
gcacagaatatcaccattgcagttc

SEQ ID NO: 210176 - DNA, 25 bp, probe
gcacaggatatcaaagctctgtttg

SEQ ID NO: 210177 - DNA, 25 bp, probe
gcacagatggcaaaagctgcagctg

SEQ ID NO: 210178 - DNA, 25 bp, probe
gcacagatggcaaaagctgcagctg

SEQ ID NO: 210179 - DNA, 25 bp, probe
gcacagtgtcacgaacagacagaga

SEQ ID NO: 210180 - DNA, 25 bp, probe
gcaagcattagctatcacagcaaag

SEQ ID NO: 210181 - DNA, 25 bp, probe
gcaagctgtgcctacaactaaagta

SEQ ID NO: 210182 - DNA, 25 bp, probe
gcaagtggcctcagagaaacaatca

SEQ ID NO: 210183 - DNA, 25 bp, probe
gcaagtggcctcagagaaacaatca

SEQ ID NO: 210184 - DNA, 25 bp, probe
gcacagctggttccggaagaaacat

SEQ ID NO: 210185 - DNA, 25 bp, probe
gcacagctggatccaagggcacaaa

SEQ ID NO: 210186 - DNA, 25 bp, probe
gcaagggggcaagtcccagaagtaa

SEQ ID NO: 210187 - DNA, 25 bp, probe
gcaaggaagggcagaccaaaaagat

SEQ ID NO: 210188 - DNA, 25 bp, probe
gcaagtattggctcgtcaaaaacag

SEQ ID NO: 210189 - DNA, 25 bp, probe
gcaaatttgccagcttggagataga

SEQ ID NO: 210190 - DNA, 25 bp, probe
gcaaattgtacagcattagcagaaa

SEQ ID NO: 210191 - DNA, 25 bp, probe
gcaacatcttaagatccacaaatga

SEQ ID NO: 210192 - DNA, 25 bp, probe
gcacacatgctgaaaacatgcacaa

SEQ ID NO: 210193 - DNA, 25 bp, probe
gcacacatgctgaaaacatgcacaa

SEQ ID NO: 210194 - DNA, 25 bp, probe
gcacatgcatgctcagtgaagccta

SEQ ID NO: 210195 - DNA, 25 bp, probe
gcacatgcatgctcagtgaagccta

SEQ ID NO: 210196 - DNA, 25 bp, probe
gcacatcagcaaaggcaagggcagg

SEQ ID NO: 210197 - DNA, 25 bp, probe
gcacatcatcagcgcgcaagagggc

SEQ ID NO: 210198 - DNA, 25 bp, probe
gcacagtcagggccaagagagcagt

SEQ ID NO: 210199 - DNA, 25 bp, probe
gcacagtactggccaacagatgacc

SEQ ID NO: 210200 - DNA, 25 bp, probe
gcacatgtgttacccataaacactg

SEQ ID NO: 210201 - DNA, 25 bp, probe
gcacaaatgtcagccataagccctg

SEQ ID NO: 210202 - DNA, 25 bp, probe
gcaaactgctggtccataagcgctg

SEQ ID NO: 210203 - DNA, 25 bp, probe
gcaaagagtgtagatcagagcagca

SEQ ID NO: 210204 - DNA, 25 bp, probe
gcaacagagctcagttaaatgcaac

SEQ ID NO: 210205 - DNA, 25 bp, probe
gcaacagagctcagttaaatgcaac

SEQ ID NO: 210206 - DNA, 25 bp, probe
gcacacagagtgagcagtaccaaga

SEQ ID NO: 210207 - DNA, 25 bp, probe
gcaacagcaggggcgatatcctctg

SEQ ID NO: 210208 - DNA, 25 bp, probe
gcaagcaaaggtggcttccttcctg

SEQ ID NO: 210209 - DNA, 25 bp, probe
gcaagcaaatgggcggtccctctac

SEQ ID NO: 210210 - DNA, 25 bp, probe
gcaaaagtgagttcagtccatctct

SEQ ID NO: 210211 - DNA, 25 bp, probe
gcacagacagtgaaactcacctttc

SEQ ID NO: 210212 - DNA, 25 bp, probe
gcaaccaggcaaactcatccatatt

SEQ ID NO: 210213 - DNA, 25 bp, probe
gcacaccaggctaagatttctatgg

SEQ ID NO: 210214 - DNA, 25 bp, probe
gcaacctggtgaactttctgcggac

SEQ ID NO: 210215 - DNA, 25 bp, probe
gcaaacaggtggttttcatcctgac

SEQ ID NO: 210216 - DNA, 25 bp, probe
gcacaagatgagggttttgcacctg

SEQ ID NO: 210217 - DNA, 25 bp, probe
gcacaagctggagaggtgcgcccgc

SEQ ID NO: 210218 - DNA, 25 bp, probe
gcacatggtggtgactgtcacccgc

SEQ ID NO: 210219 - DNA, 25 bp, probe
gcacaagtgtctgtgcatgtccccc

SEQ ID NO: 210220 - DNA, 25 bp, probe
gcacaggatgtcattcagcagacct

SEQ ID NO: 210221 - DNA, 25 bp, probe
gcacagccagcagattcgaaagatg

SEQ ID NO: 210222 - DNA, 25 bp, probe
gcacagccagcagattcgaaagatg

SEQ ID NO: 210223 - DNA, 25 bp, probe
gcacacacacatgctttacaagttt

SEQ ID NO: 210224 - DNA, 25 bp, probe
gcaagcagccatgtgtctaattttc

SEQ ID NO: 210225 - DNA, 25 bp, probe
gcaagagggttgtatattttcccgt

SEQ ID NO: 210226 - DNA, 25 bp, probe
gcacaaaagttgtaagtttcctaat

SEQ ID NO: 210227 - DNA, 25 bp, probe
gcacacatcaagagaaagttaccat

SEQ ID NO: 210228 - DNA, 25 bp, probe
gcaacaatatgcagcaatggtaagc

SEQ ID NO: 210229 - DNA, 25 bp, probe
gcaacaatatgcagcaatggtaagc

SEQ ID NO: 210230 - DNA, 25 bp, probe
gcaaatctcacaaagtgcggcaagc

SEQ ID NO: 210231 - DNA, 25 bp, probe
gcaaatccccaccatttgagagctc

SEQ ID NO: 210232 - DNA, 25 bp, probe
gcaaatccccaccatttgagagctc

SEQ ID NO: 210233 - DNA, 25 bp, probe
tcaagttccaaccattaaggtccac

SEQ ID NO: 210234 - DNA, 25 bp, probe
gcaagctaccaagagcaaaggtccc

SEQ ID NO: 210235 - DNA, 25 bp, probe
gcaacgctagaagagccgaggaacc

SEQ ID NO: 210236 - DNA, 25 bp, probe
gcaacgctcagacggctgacgagga

SEQ ID NO: 210237 - DNA, 25 bp, probe
gcaacgctcagacggctgacgagga

SEQ ID NO: 210238 - DNA, 25 bp, probe
gcaagagctctgcgaggggatgaag

SEQ ID NO: 210239 - DNA, 25 bp, probe
gcaaacactgaagggctggataaga

SEQ ID NO: 210240 - DNA, 25 bp, probe
gcaaacccaggccagtggatagtga

SEQ ID NO: 210241 - DNA, 25 bp, probe
gcaagactcacagcactgcgtatca

SEQ ID NO: 210242 - DNA, 25 bp, probe
gcaagcattatatctcagtgtatcg

SEQ ID NO: 210243 - DNA, 25 bp, probe
gcaagatgtgatcctgccagagtac

SEQ ID NO: 210244 - DNA, 25 bp, probe
gcaaatgtgtgaatcttagtcatgg

SEQ ID NO: 210245 - DNA, 25 bp, probe
gcacaagtgttgtgtcgtgcagtga

SEQ ID NO: 210246 - DNA, 25 bp, probe
gcacagaatttgagtcagtagatct

SEQ ID NO: 210247 - DNA, 25 bp, probe
gcacagacttttatgcataattcac

SEQ ID NO: 210248 - DNA, 25 bp, probe
gcacagacttttatgcataattcac

SEQ ID NO: 210249 - DNA, 25 bp, probe
gcacagactctcttaataagaccaa

SEQ ID NO: 210250 - DNA, 25 bp, probe
gcacaagcctcagtacaacaactgt

SEQ ID NO: 210251 - DNA, 25 bp, probe
gcacagagacctaccagacaacggt

SEQ ID NO: 210252 - DNA, 25 bp, probe
gcacaagtaccttaagcaccgcaat

SEQ ID NO: 210253 - DNA, 25 bp, probe
gcacaagtaccttaagcaccgcaat

SEQ ID NO: 210254 - DNA, 25 bp, probe
gcacaaagttctcagagctctcgag

SEQ ID NO: 210255 - DNA, 25 bp, probe
gcacacagggttaatgagtctcttg

SEQ ID NO: 210256 - DNA, 25 bp, probe
gcacaaagagtgtttgagctcttct

SEQ ID NO: 210257 - DNA, 25 bp, probe
gcaaagagggcactgggcacttctc

SEQ ID NO: 210258 - DNA, 25 bp, probe
gcaaatgacatgcactgacccttcc

SEQ ID NO: 210259 - DNA, 25 bp, probe
gcaaatgacatgcactgacccttcc

SEQ ID NO: 210260 - DNA, 25 bp, probe
gcaaatgtaggctgatctccttcac

SEQ ID NO: 210261 - DNA, 25 bp, probe
gcaaattcaggcgaattccataccg

SEQ ID NO: 210262 - DNA, 25 bp, probe
gcaaataaagacaaagccaaccgat

SEQ ID NO: 210263 - DNA, 25 bp, probe
gcaatttccaacctgacaaatccgc

SEQ ID NO: 210264 - DNA, 25 bp, probe
gcaaattacgacctgaaaatggctg

SEQ ID NO: 210265 - DNA, 25 bp, probe
gcaaattatggatgaacctatggga

SEQ ID NO: 210266 - DNA, 25 bp, probe
gcaaattatggatgaacctatggga

SEQ ID NO: 210267 - DNA, 25 bp, probe
gcaaataagtgaagcctcccaaggg

SEQ ID NO: 210268 - DNA, 25 bp, probe
gaataaagcaggacccgcctagtgg

SEQ ID NO: 210269 - DNA, 25 bp, probe
gactaccaggagagccctgggctgg

SEQ ID NO: 210270 - DNA, 25 bp, probe
gacttcgtgaagatcttcgacttcg

SEQ ID NO: 210271 - DNA, 25 bp, probe
gactggcctagagatgttgcccttc

SEQ ID NO: 210272 - DNA, 25 bp, probe
gcaagtggtaggcagtgtcccttct

SEQ ID NO: 210273 - DNA, 25 bp, probe
gcaaggatgtgaacaaggtcgccta

SEQ ID NO: 210274 - DNA, 25 bp, probe
gcaagcggtggagacgttcgatgaa

SEQ ID NO: 210275 - DNA, 25 bp, probe
gcaacgtcctgaggacagttctgtg

SEQ ID NO: 210276 - DNA, 25 bp, probe
gcaacgtcctgaggacagttctgtg

SEQ ID NO: 210277 - DNA, 25 bp, probe
gcaagcagtccgaggctgcttttgg

SEQ ID NO: 210278 - DNA, 25 bp, probe
gcaagcagtccgaggctgcttttgg

SEQ ID NO: 210279 - DNA, 25 bp, probe
gcaaggtcggaaaggagtggagggg

SEQ ID NO: 210280 - DNA, 25 bp, probe
gcaactctatggtagggggagaggg

SEQ ID NO: 210281 - DNA, 25 bp, probe
gcaactgtctagtgggccagggact

SEQ ID NO: 210282 - DNA, 25 bp, probe
gcaactgtctgagatggccaacggc

SEQ ID NO: 210283 - DNA, 25 bp, probe
gcaagcgtctgagtagacagcaggc

SEQ ID NO: 210284 - DNA, 25 bp, probe
gcacacgctgctgcatatgaagtgg

SEQ ID NO: 210285 - DNA, 25 bp, probe
gcacaagatcatgcacatagatgtc

SEQ ID NO: 210286 - DNA, 25 bp, probe
gcacagaggctcaacacagatccaa

SEQ ID NO: 210287 - DNA, 25 bp, probe
gcacagaggcaaacaagaaggagac

SEQ ID NO: 210288 - DNA, 25 bp, probe
gcaagagagcaagtagaaagaggat

SEQ ID NO: 210289 - DNA, 25 bp, probe
gcaaagagcataatccaactcagta

SEQ ID NO: 210290 - DNA, 25 bp, probe
gcacaagaatatgctaggctgcact

SEQ ID NO: 210291 - DNA, 25 bp, probe
gcacaaggtgcagcatgacctcaac

SEQ ID NO: 210292 - DNA, 25 bp, probe
gcacaaggtgcagcatgacctcaac

SEQ ID NO: 210293 - DNA, 25 bp, probe
gcaacgggggcaacctgaacagccc

SEQ ID NO: 210294 - DNA, 25 bp, probe
gcaacgggggcaacctgaacagccc

SEQ ID NO: 210295 - DNA, 25 bp, probe
gcaacgtgtttgacatcctggtagg

SEQ ID NO: 210296 - DNA, 25 bp, probe
gcaaagcttttggctcaccgaaagc

SEQ ID NO: 210297 - DNA, 25 bp, probe
gcaaaatcggttcattcgatgagac

SEQ ID NO: 210298 - DNA, 25 bp, probe
gcaacaagcgatcccgaacgaggac

SEQ ID NO: 210299 - DNA, 25 bp, probe
gcaaccggaaaccaagcaaggacaa

SEQ ID NO: 210300 - DNA, 25 bp, probe
gcaacctagataccgaaaagggcct

SEQ ID NO: 210301 - DNA, 25 bp, probe
gcaacctattctcactaagatgggg

SEQ ID NO: 210302 - DNA, 25 bp, probe
tcaccaactactcaccagaaggggg

SEQ ID NO: 210303 - DNA, 25 bp, probe
tatttaatacatgacctaggggagg

SEQ ID NO: 210304 - DNA, 25 bp, probe
tagctgtaaaacagggacggggcgg

SEQ ID NO: 210305 - DNA, 25 bp, probe
tctgtaaacaactgggtgccttccc

SEQ ID NO: 210306 - DNA, 25 bp, probe
tcctaaaatatctgggtggcttaaa

SEQ ID NO: 210307 - DNA, 25 bp, probe
gcaaagaactactgggcatgtgctt

SEQ ID NO: 210308 - DNA, 25 bp, probe
gcaaagactctgttacggcatggtg

SEQ ID NO: 210309 - DNA, 25 bp, probe
gcacaatcaacttttctgagctggt

SEQ ID NO: 210310 - DNA, 25 bp, probe
gcacactgcacacggtgtctgttta

SEQ ID NO: 210311 - DNA, 25 bp, probe
gcacagcagaagcaggttgttcccc

SEQ ID NO: 210312 - DNA, 25 bp, probe
gcaaaacagggattatcatccccat

SEQ ID NO: 210313 - DNA, 25 bp, probe
gcaaacatccggaagtatcccacca

SEQ ID NO: 210314 - DNA, 25 bp, probe
gcaaacatccggaagtatcccacca

SEQ ID NO: 210315 - DNA, 25 bp, probe
gcaaaacgatgggcagtttcacagt

SEQ ID NO: 210316 - DNA, 25 bp, probe
gcacacacctgaaacatgttctccg

SEQ ID NO: 210317 - DNA, 25 bp, probe
gcacacacctgaaacatgttctccg

SEQ ID NO: 210318 - DNA, 25 bp, probe
gcacacacacataagcactgaaatc

SEQ ID NO: 210319 - DNA, 25 bp, probe
gcacacacacacatacacagagact

SEQ ID NO: 210320 - DNA, 25 bp, probe
gcacacaaacaatgcaaacggggca

SEQ ID NO: 210321 - DNA, 25 bp, probe
gcaaaacagaagcctggagagggga

SEQ ID NO: 210322 - DNA, 25 bp, probe
gcaactggcaaacctgccgacgccg

SEQ ID NO: 210323 - DNA, 25 bp, probe
gcaacttcaaagatgccagagacgc

SEQ ID NO: 210324 - DNA, 25 bp, probe
gcaactccaaagagcacttgcctct

SEQ ID NO: 210325 - DNA, 25 bp, probe
gcacacaccagaaatggacattttc

SEQ ID NO: 210326 - DNA, 25 bp, probe
gcacacaccagaaatggacattttc

SEQ ID NO: 210327 - DNA, 25 bp, probe
gcacaaccagaaaagcaatctgtat

SEQ ID NO: 210328 - DNA, 25 bp, probe
gcaaaacaggtggcagcagccttat

SEQ ID NO: 210329 - DNA, 25 bp, probe
gcaaatccagagcctggctcctggt

SEQ ID NO: 210330 - DNA, 25 bp, probe
gcaacaggcagagctgtgtcgcaca

SEQ ID NO: 210331 - DNA, 25 bp, probe
gcaatgcggctgcactggtggaaga

SEQ ID NO: 210332 - DNA, 25 bp, probe
gcaagatgggtcctgactcaaaacc

SEQ ID NO: 210333 - DNA, 25 bp, probe
gcaagatgggtcctgactcaaaacc

SEQ ID NO: 210334 - DNA, 25 bp, probe
gcaagaggagtccaagtcacacccc

SEQ ID NO: 210335 - DNA, 25 bp, probe
gcaagggcacttaacaaaccctcgt

SEQ ID NO: 210336 - DNA, 25 bp, probe
gcaagggcacttaacaaaccctcgt

SEQ ID NO: 210337 - DNA, 25 bp, probe
gcaagtggaattcatcaaccccatc

SEQ ID NO: 210338 - DNA, 25 bp, probe
gcaaatggaactacacaaacatcac

SEQ ID NO: 210339 - DNA, 25 bp, probe
gcacacatgaaattacagagtacca

SEQ ID NO: 210340 - DNA, 25 bp, probe
gcaacatagagtttaagtatccagt

SEQ ID NO: 210341 - DNA, 25 bp, probe
gcaacatagagtttaagtatccagt

SEQ ID NO: 210342 - DNA, 25 bp, probe
gcaacaaagtcccgagcaatgaagt

SEQ ID NO: 210343 - DNA, 25 bp, probe
gcacaaacgtcacaagacatgcaaa

SEQ ID NO: 210344 - DNA, 25 bp, probe
gcacacccggcaaatgagaaacaca

SEQ ID NO: 210345 - DNA, 25 bp, probe
gaatcccgaaagagaattgccagaa

SEQ ID NO: 210346 - DNA, 25 bp, probe
gcaacaacgaaacaagcctgacaga

SEQ ID NO: 210347 - DNA, 25 bp, probe
gcacaagaagaagaagcgcctggcc

SEQ ID NO: 210348 - DNA, 25 bp, probe
gcaaagaagaatcaacagggacact

SEQ ID NO: 210349 - DNA, 25 bp, probe
gcaacatcaaaaagaaccggcatcc

SEQ ID NO: 210350 - DNA, 25 bp, probe
gcaacatcaagaagaaccgccatcc

SEQ ID NO: 210351 - DNA, 25 bp, probe
gcaaatcactgaaaacccaactcaa

SEQ ID NO: 210352 - DNA, 25 bp, probe
gcaaaccaaatgcaaccagatacaa

SEQ ID NO: 210353 - DNA, 25 bp, probe
gcaaaaaatgtgcatgacctctaca

SEQ ID NO: 210354 - DNA, 25 bp, probe
gcaaaaactgtattaccatgccaca

SEQ ID NO: 210355 - DNA, 25 bp, probe
gcaaacacaagtttaagatccacac

SEQ ID NO: 210356 - DNA, 25 bp, probe
gcaacagcaaagtcggacagtccat

SEQ ID NO: 210357 - DNA, 25 bp, probe
gcaactacaacctgatgcgtctgct

SEQ ID NO: 210358 - DNA, 25 bp, probe
gcaactagaaattcagaggggcttg

SEQ ID NO: 210359 - DNA, 25 bp, probe
gcaactcttgataaagggctgtttt

SEQ ID NO: 210360 - DNA, 25 bp, probe
gcaactcttgataaagggctgtttt

SEQ ID NO: 210361 - DNA, 25 bp, probe
gcaactggggaaggctactgtttgt

SEQ ID NO: 210362 - DNA, 25 bp, probe
gcaaaggggagctgtacgattacat

SEQ ID NO: 210363 - DNA, 25 bp, probe
gcaaatgtttactgtatcaatttct

SEQ ID NO: 210364 - DNA, 25 bp, probe
gcaacaggttcacagtccaacttca

SEQ ID NO: 210365 - DNA, 25 bp, probe
gcaaaggattcctagcctattctta

SEQ ID NO: 210366 - DNA, 25 bp, probe
gcaaaggattcctagcctattctta

SEQ ID NO: 210367 - DNA, 25 bp, probe
gcaacaggcattactcgccattgat

SEQ ID NO: 210368 - DNA, 25 bp, probe
gcaacaggctatttctgcaatggat

SEQ ID NO: 210369 - DNA, 25 bp, probe
gcacacaggcctatctggaggaaaa

SEQ ID NO: 210370 - DNA, 25 bp, probe
gcaaagaagctttctaaggacatta

SEQ ID NO: 210371 - DNA, 25 bp, probe
gcaagagagatgggcccaaggaatt

SEQ ID NO: 210372 - DNA, 25 bp, probe
gcaagaggagggcccagaggatctg

SEQ ID NO: 210373 - DNA, 25 bp, probe
gcaagacgagtgaccacggtgtgga

SEQ ID NO: 210374 - DNA, 25 bp, probe
gcaagacgggcccagaggctggggg

SEQ ID NO: 210375 - DNA, 25 bp, probe
gcaaagccgtgctggcgtgtgtggg

SEQ ID NO: 210376 - DNA, 25 bp, probe
gcaaaggctgtggagactgatgtgt

SEQ ID NO: 210377 - DNA, 25 bp, probe
gcaaagtcatgctgactctatgaga

SEQ ID NO: 210378 - DNA, 25 bp, probe
gcacacagtcactaatctcttcatc

SEQ ID NO: 210379 - DNA, 25 bp, probe
gcaaagatcacaacattcgtgccca

SEQ ID NO: 210380 - DNA, 25 bp, probe
gcaaagaaccaccatcttattcagg

SEQ ID NO: 210381 - DNA, 25 bp, probe
gcaaaaacagaagtcttaccagtgc

SEQ ID NO: 210382 - DNA, 25 bp, probe
gcaactttcgacgtttgactagcca

SEQ ID NO: 210383 - DNA, 25 bp, probe
gcaactgttataggtttaccaacaa

SEQ ID NO: 210384 - DNA, 25 bp, probe
gcaatctggttgtgatttatatttt

SEQ ID NO: 210385 - DNA, 25 bp, probe
gcaatctggttgtgatttatatttt

SEQ ID NO: 210386 - DNA, 25 bp, probe
gcaatgctcagttctgatttttttt

SEQ ID NO: 210387 - DNA, 25 bp, probe
gaatccagaactttccatttgcagt

SEQ ID NO: 210388 - DNA, 25 bp, probe
gaatccagaactttccatttgcagt

SEQ ID NO: 210389 - DNA, 25 bp, probe
gcaaagcgaattgatctttatgcaa

SEQ ID NO: 210390 - DNA, 25 bp, probe
gcaaccatgaatttgttttctgaac

SEQ ID NO: 210391 - DNA, 25 bp, probe
gcaacttagaccttatttctgctac

SEQ ID NO: 210392 - DNA, 25 bp, probe
gcaacccagccattttcagtttatc

SEQ ID NO: 210393 - DNA, 25 bp, probe
gcaatcccaaataatgtcggcttac

SEQ ID NO: 210394 - DNA, 25 bp, probe
gcaatcccaaataatgtcggcttac

SEQ ID NO: 210395 - DNA, 25 bp, probe
gcaaacacaatgaggtctggcatct

SEQ ID NO: 210396 - DNA, 25 bp, probe
gcaaagccctgatcctgggcatcta

SEQ ID NO: 210397 - DNA, 25 bp, probe
gcaaaccatccaccctggtgttgac

SEQ ID NO: 210398 - DNA, 25 bp, probe
gcaaaccatccaccctggtgttgac

SEQ ID NO: 210399 - DNA, 25 bp, probe
gcaaatcttccacagttgttcaaga

SEQ ID NO: 210400 - DNA, 25 bp, probe
gcaaatcttccacagttgttcaaga

SEQ ID NO: 210401 - DNA, 25 bp, probe
gcaaatctctccttagttgatgaga

SEQ ID NO: 210402 - DNA, 25 bp, probe
gcaaacctcctgaagtgggcagcca

SEQ ID NO: 210403 - DNA, 25 bp, probe
gcaaaccacgctaactagctgacca

SEQ ID NO: 210404 - DNA, 25 bp, probe
gcaaacgcctgcaaaacagaagcct

SEQ ID NO: 210405 - DNA, 25 bp, probe
gcaaagcccacttagcaaaagccac

SEQ ID NO: 210406 - DNA, 25 bp, probe
gcaaacaccagccgaggatgtaccc

SEQ ID NO: 210407 - DNA, 25 bp, probe
gcaaacaccagccgaggatgtaccc

SEQ ID NO: 210408 - DNA, 25 bp, probe
gcaagactctcaaggagtactttct

SEQ ID NO: 210409 - DNA, 25 bp, probe
gcaaccctgagaagttacttcacat

SEQ ID NO: 210410 - DNA, 25 bp, probe
gcaaactctataattattttgacta

SEQ ID NO: 210411 - DNA, 25 bp, probe
gcaaactctataattattttgacta

SEQ ID NO: 210412 - DNA, 25 bp, probe
gcaacagacaaaattattgttaaca

SEQ ID NO: 210413 - DNA, 25 bp, probe
gcacaagaatatttttagcctaaca

SEQ ID NO: 210414 - DNA, 25 bp, probe
gcaagtaatacctattagtcatacc

SEQ ID NO: 210415 - DNA, 25 bp, probe
gcaagaagaacctctcaggcttctc

SEQ ID NO: 210416 - DNA, 25 bp, probe
gcaagataaatatcccatggcccaa

SEQ ID NO: 210417 - DNA, 25 bp, probe
gcaaatacaatatggcattatccgc

SEQ ID NO: 210418 - DNA, 25 bp, probe
gcaactacattgcagaattactgga

SEQ ID NO: 210419 - DNA, 25 bp, probe
gcaaatactctgcaagatgtgctca

SEQ ID NO: 210420 - DNA, 25 bp, probe
gcaaatactgcccgcaaagctcgcg

SEQ ID NO: 210421 - DNA, 25 bp, probe
gcaagctcctgccaggagtagcggg

SEQ ID NO: 210422 - DNA, 25 bp, probe
gcaagaactcctggagctacaggga

SEQ ID NO: 210423 - DNA, 25 bp, probe
gcaaacactttggtggacttggcaa

SEQ ID NO: 210424 - DNA, 25 bp, probe
gcaaactgttatgtaaatctgagat

SEQ ID NO: 210425 - DNA, 25 bp, probe
tgccgagttcttctacaactggtac

SEQ ID NO: 210426 - DNA, 25 bp, probe
gcaaagtacattctacattccgttc

SEQ ID NO: 210427 - DNA, 25 bp, probe
gcaaagtttttattcattccaagcc

SEQ ID NO: 210428 - DNA, 25 bp, probe
gcaaacttgttttctatctccatag

SEQ ID NO: 210429 - DNA, 25 bp, probe
gcaaatttgtttcctgaagcacatt

SEQ ID NO: 210430 - DNA, 25 bp, probe
gcaaatcatctgcattcctgatgac

SEQ ID NO: 210431 - DNA, 25 bp, probe
gcaaatcctgtaatgccggagctgg

SEQ ID NO: 210432 - DNA, 25 bp, probe
gcacaatcaggaatacagggaaggg

SEQ ID NO: 210433 - DNA, 25 bp, probe
gcaaatcggagacccggaaactgat

SEQ ID NO: 210434 - DNA, 25 bp, probe
gcaacacgacgacacgaaatcaatg

SEQ ID NO: 210435 - DNA, 25 bp, probe
gcaacacgacgacacgaaatcaatg

SEQ ID NO: 210436 - DNA, 25 bp, probe
gaattcatacgacttcgaagaaggc

SEQ ID NO: 210437 - DNA, 25 bp, probe
gaattcatacgacttcgaagaaggc

SEQ ID NO: 210438 - DNA, 25 bp, probe
gcaaatcatccccattaaaaagctt

SEQ ID NO: 210439 - DNA, 25 bp, probe
gcaaatatcttactagacaaagact

SEQ ID NO: 210440 - DNA, 25 bp, probe
gcaaatacatgtcctggatcaataa

SEQ ID NO: 210441 - DNA, 25 bp, probe
gcaaaatgagatgcgggcactaacc

SEQ ID NO: 210442 - DNA, 25 bp, probe
gcaaaatgtgatatgtacctaacga

SEQ ID NO: 210443 - DNA, 25 bp, probe
gcaaatatgcccattatcccaacaa

SEQ ID NO: 210444 - DNA, 25 bp, probe
gaatatatgaccacgctcacccgca

SEQ ID NO: 210445 - DNA, 25 bp, probe
gtgagtgtgaactcccactcaccga

SEQ ID NO: 210446 - DNA, 25 bp, probe
gtaggagaacgtgccctattcacac

SEQ ID NO: 210447 - DNA, 25 bp, probe
gcaaggcagactggtacctcgttaa

SEQ ID NO: 210448 - DNA, 25 bp, probe
gcaagagaggcaatggagcacccct

SEQ ID NO: 210449 - DNA, 25 bp, probe
gcaagcagactatcgagacagccac

SEQ ID NO: 210450 - DNA, 25 bp, probe
gcaagcagactatcgagacagccac

SEQ ID NO: 210451 - DNA, 25 bp, probe
gcaaatgactaccaagcaggcgccg

SEQ ID NO: 210452 - DNA, 25 bp, probe
gcaaattctacagaagagcagcaga

SEQ ID NO: 210453 - DNA, 25 bp, probe
gcaaattctacagaagagcagcaga

SEQ ID NO: 210454 - DNA, 25 bp, probe
gcaaactggacaccaagacaggctt

SEQ ID NO: 210455 - DNA, 25 bp, probe
gcaaagtgacaactgcactgaatga

SEQ ID NO: 210456 - DNA, 25 bp, probe
gcaaatgtgacactgtctatcagta

SEQ ID NO: 210457 - DNA, 25 bp, probe
gcaaatgtgacactgtctatcagta

SEQ ID NO: 210458 - DNA, 25 bp, probe
gcacaatcttgacttgtcaattact

SEQ ID NO: 210459 - DNA, 25 bp, probe
gcaaatcgtgtccttcgacaagctc

SEQ ID NO: 210460 - DNA, 25 bp, probe
gcaaattgtctccccaagacagctc

SEQ ID NO: 210461 - DNA, 25 bp, probe
gcaactcagtcccaaactacagttc

SEQ ID NO: 210462 - DNA, 25 bp, probe
gcaactcagtcccaaactacagttc

SEQ ID NO: 210463 - DNA, 25 bp, probe
gcaaatatgcctccaaactagcttt

SEQ ID NO: 210464 - DNA, 25 bp, probe
gcaaatatgcctccaaactagcttt

SEQ ID NO: 210465 - DNA, 25 bp, probe
gcaagtctccattcagaagcggctc

SEQ ID NO: 210466 - DNA, 25 bp, probe
gcaagatcatgaagacgggcggcac

SEQ ID NO: 210467 - DNA, 25 bp, probe
gcaagagatggccacggctgcttcc

SEQ ID NO: 210468 - DNA, 25 bp, probe
gcaacaatgtgaccgatatgttccc

SEQ ID NO: 210469 - DNA, 25 bp, probe
gcaacaatgtgaccgatatgttccc

SEQ ID NO: 210470 - DNA, 25 bp, probe
gcaacattgtgaccatagtttatac

SEQ ID NO: 210471 - DNA, 25 bp, probe
gcaaatctcagttcaaatctctttc

SEQ ID NO: 210472 - DNA, 25 bp, probe
gcaaacgcagctccaacttatataa

SEQ ID NO: 210473 - DNA, 25 bp, probe
gaataagccgtccactgaagaaaag

SEQ ID NO: 210474 - DNA, 25 bp, probe
gcaaactccttccagctgaaatcaa

SEQ ID NO: 210475 - DNA, 25 bp, probe
gcaaactgcccttgcatggaaaact

SEQ ID NO: 210476 - DNA, 25 bp, probe
gcaacagaaccttcaggaagacctt

SEQ ID NO: 210477 - DNA, 25 bp, probe
gcaactaatctttcaaaatcatcct

SEQ ID NO: 210478 - DNA, 25 bp, probe
gcaacatgtcacaacaataacctcc

SEQ ID NO: 210479 - DNA, 25 bp, probe
gcaacatgtcacaacaataacctcc

SEQ ID NO: 210480 - DNA, 25 bp, probe
gcaacattccagtcttgaatttcct

SEQ ID NO: 210481 - DNA, 25 bp, probe
gcaatcatgaccagtaagtttccaa

SEQ ID NO: 210482 - DNA, 25 bp, probe
gcaatcatgaccagtaagtttccaa

SEQ ID NO: 210483 - DNA, 25 bp, probe
gcaaggatctgcagttactttgaag

SEQ ID NO: 210484 - DNA, 25 bp, probe
gcaaggatctgcagttactttgaag

SEQ ID NO: 210485 - DNA, 25 bp, probe
gcaactgcattgagggacattttga

SEQ ID NO: 210486 - DNA, 25 bp, probe
gcaacagcagtgacagcagcgacag

SEQ ID NO: 210487 - DNA, 25 bp, probe
gcaacagcaatgcaagatggcagcc

SEQ ID NO: 210488 - DNA, 25 bp, probe
gcaaacatgcatcagaattggcacc

SEQ ID NO: 210489 - DNA, 25 bp, probe
gcaaagccatatggagcatctaccc

SEQ ID NO: 210490 - DNA, 25 bp, probe
gcaaagctttcttgtgcatgacgcc

SEQ ID NO: 210491 - DNA, 25 bp, probe
gcaaagctttcttgtgcatgacgcc

SEQ ID NO: 210492 - DNA, 25 bp, probe
gcaagcattcatttttagctcgctc

SEQ ID NO: 210493 - DNA, 25 bp, probe
gcaacattgcattttggatgccatt

SEQ ID NO: 210494 - DNA, 25 bp, probe
gcaagcattgacacaggctgcactg

SEQ ID NO: 210495 - DNA, 25 bp, probe
gcaagcattgacacaggctgcactg

SEQ ID NO: 210496 - DNA, 25 bp, probe
gcaagttggcccagtgctctgggat

SEQ ID NO: 210497 - DNA, 25 bp, probe
gcaaggagtgccaaagtccggagaa

SEQ ID NO: 210498 - DNA, 25 bp, probe
gcaagaggatccaggtcctattcaa

SEQ ID NO: 210499 - DNA, 25 bp, probe
gcaagaacaacatcgtcctcagtgc

SEQ ID NO: 210500 - DNA, 25 bp, probe
gcaagaaaacagcatatcactggtg

SEQ ID NO: 210501 - DNA, 25 bp, probe
gaagtaaagagttttcgagtgttgc

SEQ ID NO: 210502 - DNA, 25 bp, probe
gcaaaaacagttttctgcttggttg

SEQ ID NO: 210503 - DNA, 25 bp, probe
gcaaagccacagcgtttctggtttt

SEQ ID NO: 210504 - DNA, 25 bp, probe
gcaaatgaccggcctgattttttta

SEQ ID NO: 210505 - DNA, 25 bp, probe
gcaacgtggggtgattgtattgatc

SEQ ID NO: 210506 - DNA, 25 bp, probe
gcaaaaggcggtgagtgtgtctgag

SEQ ID NO: 210507 - DNA, 25 bp, probe
gcaaaaggcggtgagtgtgtctgag

SEQ ID NO: 210508 - DNA, 25 bp, probe
gcaaaaatgtggtcccagtgtatga

SEQ ID NO: 210509 - DNA, 25 bp, probe
gcaagacacatacagccctattcta

SEQ ID NO: 210510 - DNA, 25 bp, probe
gcaaagcaatcaaattccttcataa

SEQ ID NO: 210511 - DNA, 25 bp, probe
gcaaagcaagcaaactgaattttct

SEQ ID NO: 210512 - DNA, 25 bp, probe
gcaaaaccattagaattgttactca

SEQ ID NO: 210513 - DNA, 25 bp, probe
gaaggtcacttagccttcttaggca

SEQ ID NO: 210514 - DNA, 25 bp, probe
gcaagtgattgcttccgttttcaag

SEQ ID NO: 210515 - DNA, 25 bp, probe
gcaagtgattgcttccgttttcaag

SEQ ID NO: 210516 - DNA, 25 bp, probe
gcaagtgttctgaagagttttctta

SEQ ID NO: 210517 - DNA, 25 bp, probe
gcaaggtataattgatggattcttc

SEQ ID NO: 210518 - DNA, 25 bp, probe
gcaactgtttagtcatgtgttttca

SEQ ID NO: 210519 - DNA, 25 bp, probe
gcaatgctgtttcactggttatgcg

SEQ ID NO: 210520 - DNA, 25 bp, probe
gcaagctgtttccacatcagaactc

SEQ ID NO: 210521 - DNA, 25 bp, probe
gcaacatctactgagctaatagcca

SEQ ID NO: 210522 - DNA, 25 bp, probe
gcaagcactacagagtcagaactcc

SEQ ID NO: 210523 - DNA, 25 bp, probe
gcaacaaccagtagctcatggggcc

SEQ ID NO: 210524 - DNA, 25 bp, probe
gcaacaagccaaagtcatggacctt

SEQ ID NO: 210525 - DNA, 25 bp, probe
gcaaagatcaccagccatgtgcctt

SEQ ID NO: 210526 - DNA, 25 bp, probe
gcaagaacactgtgcacatggtcag

SEQ ID NO: 210527 - DNA, 25 bp, probe
gcaaaagtctgcgaccatcgtcatg

SEQ ID NO: 210528 - DNA, 25 bp, probe
gcaaagcattctcatcagtcgcaat

SEQ ID NO: 210529 - DNA, 25 bp, probe
gcaaacaatgctctaatcacaatat

SEQ ID NO: 210530 - DNA, 25 bp, probe
gcaaacaatgctctaatcacaatat

SEQ ID NO: 210531 - DNA, 25 bp, probe
gcaaaatggcactgaatcatccata

SEQ ID NO: 210532 - DNA, 25 bp, probe
gcaacagcatggtcattcacatccc

SEQ ID NO: 210533 - DNA, 25 bp, probe
gcaactgtgggcaataatatggcat

SEQ ID NO: 210534 - DNA, 25 bp, probe
gcaacattgaagttcgatcatggta

SEQ ID NO: 210535 - DNA, 25 bp, probe
gcaacctgaaagtgagagtgaacct

SEQ ID NO: 210536 - DNA, 25 bp, probe
gaatccggacaatgacgagaggccc

SEQ ID NO: 210537 - DNA, 25 bp, probe
gaaccgggcaaatggagggccgctt

SEQ ID NO: 210538 - DNA, 25 bp, probe
gaggccgtggagaaggggtaccgca

SEQ ID NO: 210539 - DNA, 25 bp, probe
gaaccttgggtgtgagggaccaatc

SEQ ID NO: 210540 - DNA, 25 bp, probe
gaattgtagggattgggggaccctg

SEQ ID NO: 210541 - DNA, 25 bp, probe
gaattctcagggggggtgggagcct

SEQ ID NO: 210542 - DNA, 25 bp, probe
gaaccaaggggatgcggggagtctg

SEQ ID NO: 210543 - DNA, 25 bp, probe
gcaaacaaggtagtatccgggcgcg

SEQ ID NO: 210544 - DNA, 25 bp, probe
gcaaacaagttagagctggcagctg

SEQ ID NO: 210545 - DNA, 25 bp, probe
gcaaaaatgtaaatgatgtgtagtt

SEQ ID NO: 210546 - DNA, 25 bp, probe
gcaaaagcgaaaattatgtcacttt

SEQ ID NO: 210547 - DNA, 25 bp, probe
gcaacaacaactttcttgtatcctt

SEQ ID NO: 210548 - DNA, 25 bp, probe
gcaaaacaacacagcttttcagttc

SEQ ID NO: 210549 - DNA, 25 bp, probe
gcaataccagaaaacttcattagct

SEQ ID NO: 210550 - DNA, 25 bp, probe
gcaataccagaaaacttcattagct

SEQ ID NO: 210551 - DNA, 25 bp, probe
gaattcgagacatacttaattttga

SEQ ID NO: 210552 - DNA, 25 bp, probe
gaatattggaactggctgacatttt

SEQ ID NO: 210553 - DNA, 25 bp, probe
gcaaacgtcaactgtgctgtctctt

SEQ ID NO: 210554 - DNA, 25 bp, probe
gcaaaccaaatcttctctgtttcag

SEQ ID NO: 210555 - DNA, 25 bp, probe
gcaaacagcgtccattttttcatat

SEQ ID NO: 210556 - DNA, 25 bp, probe
gcaaacaggtgtcgactatttcatt

SEQ ID NO: 210557 - DNA, 25 bp, probe
gcaaagactgtcagagcttcttctg

SEQ ID NO: 210558 - DNA, 25 bp, probe
gcaacagaactcatggctttaatcc

SEQ ID NO: 210559 - DNA, 25 bp, probe
gcaacaaactcctatcattgataac

SEQ ID NO: 210560 - DNA, 25 bp, probe
gcaacaagaccctcatattcgtcca

SEQ ID NO: 210561 - DNA, 25 bp, probe
gcaacaagaccctcatattcgtcca

SEQ ID NO: 210562 - DNA, 25 bp, probe
gcaacaaatctcaaaaaccctacaa

SEQ ID NO: 210563 - DNA, 25 bp, probe
gcaacatcaataaacaaacccaaag

SEQ ID NO: 210564 - DNA, 25 bp, probe
gaacaaaccaaagacccacaaggtg

SEQ ID NO: 210565 - DNA, 25 bp, probe
gaacctgagctctaagtaaccgaag

SEQ ID NO: 210566 - DNA, 25 bp, probe
gcaaccatggctgaagaacaaccgc

SEQ ID NO: 210567 - DNA, 25 bp, probe
gcaacctggcgcataagaacatccg

SEQ ID NO: 210568 - DNA, 25 bp, probe
gcaatagtttgcatagaggtaccag

SEQ ID NO: 210569 - DNA, 25 bp, probe
gcaaggacacttgaaggtactcagg

SEQ ID NO: 210570 - DNA, 25 bp, probe
gcaagcctctttgagggtactgcag

SEQ ID NO: 210571 - DNA, 25 bp, probe
gcaacacctttagggagattctctg

SEQ ID NO: 210572 - DNA, 25 bp, probe
gcaacacctttagggagattctctg

SEQ ID NO: 210573 - DNA, 25 bp, probe
gaatcacctgtgggggaatttatat

SEQ ID NO: 210574 - DNA, 25 bp, probe
gacagatccttgcggcaattaactt

SEQ ID NO: 210575 - DNA, 25 bp, probe
gcaaacttggctctcaataaacttt

SEQ ID NO: 210576 - DNA, 25 bp, probe
gcaactctttctcgattgaaaatct

SEQ ID NO: 210577 - DNA, 25 bp, probe
gcaaggcctttggcttggcgagatt

SEQ ID NO: 210578 - DNA, 25 bp, probe
gcaaggccttatgtgtacgacctca

SEQ ID NO: 210579 - DNA, 25 bp, probe
gcaagtgtccctgtggctggacttc

SEQ ID NO: 210580 - DNA, 25 bp, probe
gcaattgtccaaaacgctgatgact

SEQ ID NO: 210581 - DNA, 25 bp, probe
gaattttcaaggaacgtatcttata

SEQ ID NO: 210582 - DNA, 25 bp, probe
gaattttcgggtcaacatcccagag

SEQ ID NO: 210583 - DNA, 25 bp, probe
gaatttttgtagggattgaagccag

SEQ ID NO: 210584 - DNA, 25 bp, probe
gaattggcattttcgtaggaaagag

SEQ ID NO: 210585 - DNA, 25 bp, probe
gaattggattttgtcgcagtcacga

SEQ ID NO: 210586 - DNA, 25 bp, probe
gaattcagctaacgcttccagaccg

SEQ ID NO: 210587 - DNA, 25 bp, probe
gcaatatccaaagatctcctgatca

SEQ ID NO: 210588 - DNA, 25 bp, probe
gcaaaagaagaggtctccctcaatc

SEQ ID NO: 210589 - DNA, 25 bp, probe
gcaagtacaagcggattgccacccc

SEQ ID NO: 210590 - DNA, 25 bp, probe
gcaaggcaagggaattcccacagcc

SEQ ID NO: 210591 - DNA, 25 bp, probe
gcaagtggaggactgatgacgcccc

SEQ ID NO: 210592 - DNA, 25 bp, probe
gcaagctggtggctgtgaagcggca

SEQ ID NO: 210593 - DNA, 25 bp, probe
gcaagctggtggctgtgaagcggca

SEQ ID NO: 210594 - DNA, 25 bp, probe
gcaatgtgctggtgtctgaggacaa

SEQ ID NO: 210595 - DNA, 25 bp, probe
gcaaggtcatgttggcagaactcaa

SEQ ID NO: 210596 - DNA, 25 bp, probe
gcaagattcatgtataagagcccca

SEQ ID NO: 210597 - DNA, 25 bp, probe
gcaagattcatgtataagagcccca

SEQ ID NO: 210598 - DNA, 25 bp, probe
gcaattcttgcgtaaacccctttgc

SEQ ID NO: 210599 - DNA, 25 bp, probe
gcaactttggaaaactcctcttcac

SEQ ID NO: 210600 - DNA, 25 bp, probe
gaattgtgggaacaacagcttatat

SEQ ID NO: 210601 - DNA, 25 bp, probe
gaataatggtagcctaaacttaata

SEQ ID NO: 210602 - DNA, 25 bp, probe
gcaaggaggcttgctggacctaaaa

SEQ ID NO: 210603 - DNA, 25 bp, probe
gcaatgagcggttccgctgccctga

SEQ ID NO: 210604 - DNA, 25 bp, probe
gcaagagcgtttccaagtcctgaac

SEQ ID NO: 210605 - DNA, 25 bp, probe
gcaaagcactattccaaggctatgg

SEQ ID NO: 210606 - DNA, 25 bp, probe
gcaaggcattataccaaagctattg

SEQ ID NO: 210607 - DNA, 25 bp, probe
gcaagtgaacaccctgacaggaatg

SEQ ID NO: 210608 - DNA, 25 bp, probe
gcaagtgaacaccctgacaggaatg

SEQ ID NO: 210609 - DNA, 25 bp, probe
gcaagtgaagaactctgtcgaagga

SEQ ID NO: 210610 - DNA, 25 bp, probe
gaagtcaggttgcttggaagtggtt

SEQ ID NO: 210611 - DNA, 25 bp, probe
gaagtcaggttgcttggaagtggtt

SEQ ID NO: 210612 - DNA, 25 bp, probe
gaagacgttactcgtgaaagtcgtt

SEQ ID NO: 210613 - DNA, 25 bp, probe
gaagacgttactcgtgaaagtcgtt

SEQ ID NO: 210614 - DNA, 25 bp, probe
gcaagttttactcatagaagctggg

SEQ ID NO: 210615 - DNA, 25 bp, probe
gcaagcttttcctaataaacgtgga

SEQ ID NO: 210616 - DNA, 25 bp, probe
gcaactttggctgctacagaaagga

SEQ ID NO: 210617 - DNA, 25 bp, probe
gcaactacgggcatctagaaattgt

SEQ ID NO: 210618 - DNA, 25 bp, probe
gcaacttgcgggaattcaaggaatt

SEQ ID NO: 210619 - DNA, 25 bp, probe
gcaactgtccacttaataaggacaa

SEQ ID NO: 210620 - DNA, 25 bp, probe
gcaacttgcaagggaactggagaca

SEQ ID NO: 210621 - DNA, 25 bp, probe
gcaaccgcaagaagcccgggatcta

SEQ ID NO: 210622 - DNA, 25 bp, probe
gcaaccgcaagaagcccgggatcta

SEQ ID NO: 210623 - DNA, 25 bp, probe
gaatcccaggactccggagattaga

SEQ ID NO: 210624 - DNA, 25 bp, probe
gaagaccgagtccccaaggactagt

SEQ ID NO: 210625 - DNA, 25 bp, probe
gcaagacctagtgctcttaagccta

SEQ ID NO: 210626 - DNA, 25 bp, probe
gcaaacatgggtgctcttggagctg

SEQ ID NO: 210627 - DNA, 25 bp, probe
gcaaacatgggtgctcttggagctg

SEQ ID NO: 210628 - DNA, 25 bp, probe
gcaaacatgggtgctcttggagctg

SEQ ID NO: 210629 - DNA, 25 bp, probe
gcaaacagaagtaccctgagcagca

SEQ ID NO: 210630 - DNA, 25 bp, probe
gcaagaagaattccatcctcctgca

SEQ ID NO: 210631 - DNA, 25 bp, probe
gcaagaagagctcctctgttcactc

SEQ ID NO: 210632 - DNA, 25 bp, probe
gcaatcaaagccttttgatcatgta

SEQ ID NO: 210633 - DNA, 25 bp, probe
gcaatcttacttctatatcattagg

SEQ ID NO: 210634 - DNA, 25 bp, probe
gcaactggagctggtgacaactctg

SEQ ID NO: 210635 - DNA, 25 bp, probe
gcaacgcacagtggtgactgtccgg

SEQ ID NO: 210636 - DNA, 25 bp, probe
gcaagtcacagtgatgctgctgagc

SEQ ID NO: 210637 - DNA, 25 bp, probe
gcaagtcaagatctcagtgaccagc

SEQ ID NO: 210638 - DNA, 25 bp, probe
gcaactctagagccacaggcctaag

SEQ ID NO: 210639 - DNA, 25 bp, probe
gcaactgtcagcgcaatgggggaga

SEQ ID NO: 210640 - DNA, 25 bp, probe
gcaacgacagcggctttggaggcag

SEQ ID NO: 210641 - DNA, 25 bp, probe
gcaagcaagctctcttgccgaggag

SEQ ID NO: 210642 - DNA, 25 bp, probe
gcaagaagcagatgctgcgcaccag

SEQ ID NO: 210643 - DNA, 25 bp, probe
gcaagagaggaccagccagctgact

SEQ ID NO: 210644 - DNA, 25 bp, probe
gcaagatgaggcctcaaatgctgcc

SEQ ID NO: 210645 - DNA, 25 bp, probe
gaatgagctgcaactcaatgatgcc

SEQ ID NO: 210646 - DNA, 25 bp, probe
gcaatagcagctgctgccgtgtcat

SEQ ID NO: 210647 - DNA, 25 bp, probe
gcaacagcagcctgcagctggatta

SEQ ID NO: 210648 - DNA, 25 bp, probe
gcaaaagagcatgcagtgctgttga

SEQ ID NO: 210649 - DNA, 25 bp, probe
gcaaacagcagtgatggctggggaa

SEQ ID NO: 210650 - DNA, 25 bp, probe
gcaaaagcattgaatcctggagaga

SEQ ID NO: 210651 - DNA, 25 bp, probe
gcaacattgtctcacctgaacgaac

SEQ ID NO: 210652 - DNA, 25 bp, probe
gcaacttgtcaaacctaagcatatt

SEQ ID NO: 210653 - DNA, 25 bp, probe
gcaacttgtcaaacctaagcatatt

SEQ ID NO: 210654 - DNA, 25 bp, probe
gcaactggtcaaattcgagaaggtg

SEQ ID NO: 210655 - DNA, 25 bp, probe
gcaactggtcaaattcgagaaggtg

SEQ ID NO: 210656 - DNA, 25 bp, probe
gcaacggtatccagggactatgatg

SEQ ID NO: 210657 - DNA, 25 bp, probe
gcaaggcctttttaggcactagaga

SEQ ID NO: 210658 - DNA, 25 bp, probe
gcaagggtattttagctaatagaat

SEQ ID NO: 210659 - DNA, 25 bp, probe
gcaagggttccctcaagaggaagtg

SEQ ID NO: 210660 - DNA, 25 bp, probe
gcaaccaggtgcgcaagaagcggca

SEQ ID NO: 210661 - DNA, 25 bp, probe
gcaactcgaggagaagtacaggcag

SEQ ID NO: 210662 - DNA, 25 bp, probe
gcaagtgggggctgaggcagaggca

SEQ ID NO: 210663 - DNA, 25 bp, probe
gcaagtgggggctgaggcagaggca

SEQ ID NO: 210664 - DNA, 25 bp, probe
gcaagtgggggctgaggcagaggca

SEQ ID NO: 210665 - DNA, 25 bp, probe
gcaagtgggggctgaggcagaggca

SEQ ID NO: 210666 - DNA, 25 bp, probe
gcaagtgggggctgaggcagaggca

SEQ ID NO: 210667 - DNA, 25 bp, probe
gcaaggggacagcaaggcagcgtgg

SEQ ID NO: 210668 - DNA, 25 bp, probe
gcaatttggacaagggagacctgga

SEQ ID NO: 210669 - DNA, 25 bp, probe
gcaatttggacaagggagacctgga

SEQ ID NO: 210670 - DNA, 25 bp, probe
gcaagacggactttgaggtccttac

SEQ ID NO: 210671 - DNA, 25 bp, probe
gaagtcccctgaaaggtcctataca

SEQ ID NO: 210672 - DNA, 25 bp, probe
gaattccaaagaacggcctacatac

SEQ ID NO: 210673 - DNA, 25 bp, probe
gaatactaatggatcgtcttaaaat

SEQ ID NO: 210674 - DNA, 25 bp, probe
gaattgtactgggttttctgtaaag

SEQ ID NO: 210675 - DNA, 25 bp, probe
gaattgtactggatacattttccat

SEQ ID NO: 210676 - DNA, 25 bp, probe
gaattaactcgtatttttctatggt

SEQ ID NO: 210677 - DNA, 25 bp, probe
gcaattgacttcccttttttaatgt

SEQ ID NO: 210678 - DNA, 25 bp, probe
gcaattgacttcccttttttaatgt

SEQ ID NO: 210679 - DNA, 25 bp, probe
gaattcacattccctgactttgtaa

SEQ ID NO: 210680 - DNA, 25 bp, probe
gaattcacattccctgactttgtaa

SEQ ID NO: 210681 - DNA, 25 bp, probe
gcaactcaattctaccactgtggta

SEQ ID NO: 210682 - DNA, 25 bp, probe
gaatctagagtctccccgaaaagcc

SEQ ID NO: 210683 - DNA, 25 bp, probe
gttttgttggactcctaaaagtgct

SEQ ID NO: 210684 - DNA, 25 bp, probe
gattttttggttgcctaaagtggct

SEQ ID NO: 210685 - DNA, 25 bp, probe
gattttttggttgcctaaagtggct

SEQ ID NO: 210686 - DNA, 25 bp, probe
ggacttttgggagcccgacgtgaat

SEQ ID NO: 210687 - DNA, 25 bp, probe
gaactttcccaagcccaaaggatca

SEQ ID NO: 210688 - DNA, 25 bp, probe
gaactcagttccatccgtaaaatat

SEQ ID NO: 210689 - DNA, 25 bp, probe
gagcgtaggtcatcctcgtaaacat

SEQ ID NO: 210690 - DNA, 25 bp, probe
gacgtaggacatgtgcttggtacaa

SEQ ID NO: 210691 - DNA, 25 bp, probe
gacttgaccacttacttggataaag

SEQ ID NO: 210692 - DNA, 25 bp, probe
gaattattcctttcctagactaatt

SEQ ID NO: 210693 - DNA, 25 bp, probe
gaattattaatctcacttagcgaaa

SEQ ID NO: 210694 - DNA, 25 bp, probe
taataaataatctctgtaccaaata

SEQ ID NO: 210695 - DNA, 25 bp, probe
gcaaaaacgattccgaaacataata

SEQ ID NO: 210696 - DNA, 25 bp, probe
gcaacaacctgctcatcgaaatgct

SEQ ID NO: 210697 - DNA, 25 bp, probe
gcaacacagccatcctcaaagtgct

SEQ ID NO: 210698 - DNA, 25 bp, probe
gcaacacagccatcctcaaagtgct

SEQ ID NO: 210699 - DNA, 25 bp, probe
gcaacactgcaggacagtcaaggtg

SEQ ID NO: 210700 - DNA, 25 bp, probe
gcaactctggctccaggcagaagga

SEQ ID NO: 210701 - DNA, 25 bp, probe
gcaactgtggccgagaaagcagggt

SEQ ID NO: 210702 - DNA, 25 bp, probe
gcaaccttgcatcagtaaggtggtg

SEQ ID NO: 210703 - DNA, 25 bp, probe
gcaacgctatgcttcaaacgcggtg

SEQ ID NO: 210704 - DNA, 25 bp, probe
gcaacgctatgcttcaaacgcggtg

SEQ ID NO: 210705 - DNA, 25 bp, probe
gcaatagcaaccataactgccactg

SEQ ID NO: 210706 - DNA, 25 bp, probe
gcaatagcaaccataactgccactg

SEQ ID NO: 210707 - DNA, 25 bp, probe
gcaagacagcctgtaaccatgccga

SEQ ID NO: 210708 - DNA, 25 bp, probe
gcaagacagcctgtaaccatgccga

SEQ ID NO: 210709 - DNA, 25 bp, probe
gcaagacagcctgtaaccatgccga

SEQ ID NO: 210710 - DNA, 25 bp, probe
gcaaaacctgaatatccagtgaata

SEQ ID NO: 210711 - DNA, 25 bp, probe
gcaagaaactgcctggtaggtgaaa

SEQ ID NO: 210712 - DNA, 25 bp, probe
gcaaggtcccgtcgtagcaattata

SEQ ID NO: 210713 - DNA, 25 bp, probe
gcaagtatcctaagttagcacattt

SEQ ID NO: 210714 - DNA, 25 bp, probe
gcaacatcccaaattgtctccagtt

SEQ ID NO: 210715 - DNA, 25 bp, probe
gcaactgctcccttatttccagttg

SEQ ID NO: 210716 - DNA, 25 bp, probe
gcaaaattgccacattttcttatgg

SEQ ID NO: 210717 - DNA, 25 bp, probe
gcaaaatagttgcatctgtggcttt

SEQ ID NO: 210718 - DNA, 25 bp, probe
gcaaaacatgggtatgctgtagcta

SEQ ID NO: 210719 - DNA, 25 bp, probe
gcaaaacatgggtatgctgtagcta

SEQ ID NO: 210720 - DNA, 25 bp, probe
gcaagaactggcccatgctgtgaat

SEQ ID NO: 210721 - DNA, 25 bp, probe
gcaagaggctggcttcttggtcaat

SEQ ID NO: 210722 - DNA, 25 bp, probe
gcaacaggtgtgacagtttgggagt

SEQ ID NO: 210723 - DNA, 25 bp, probe
gcaacctcatgaacaggatctggga

SEQ ID NO: 210724 - DNA, 25 bp, probe
gcaacctcactatggtatgctggcc

SEQ ID NO: 210725 - DNA, 25 bp, probe
gcaactctcatcacagagctagtcc

SEQ ID NO: 210726 - DNA, 25 bp, probe
gcaacatctccatagagacagacgg

SEQ ID NO: 210727 - DNA, 25 bp, probe
gcaacaccaccacagaagatgagga

SEQ ID NO: 210728 - DNA, 25 bp, probe
gcaaccactctccgatggaagcaag

SEQ ID NO: 210729 - DNA, 25 bp, probe
gcaaccactctccgatggaagcaag

SEQ ID NO: 210730 - DNA, 25 bp, probe
gcaattcctcccagtgacaatatgg

SEQ ID NO: 210731 - DNA, 25 bp, probe
gcaagtcggatgtctggagttttgg

SEQ ID NO: 210732 - DNA, 25 bp, probe
gcaactgccagaacttggtattgta

SEQ ID NO: 210733 - DNA, 25 bp, probe
gcaatgccacagaacctgcggtagt

SEQ ID NO: 210734 - DNA, 25 bp, probe
gcaatgccacagaacctgcggtagt

SEQ ID NO: 210735 - DNA, 25 bp, probe
gcaaccaacaaattctggtgggaga

SEQ ID NO: 210736 - DNA, 25 bp, probe
gcaaccaatgtatatctgagtttga

SEQ ID NO: 210737 - DNA, 25 bp, probe
gcaaccaatgtatatctgagtttga

SEQ ID NO: 210738 - DNA, 25 bp, probe
gcaacagcaattttatcctttaatg

SEQ ID NO: 210739 - DNA, 25 bp, probe
gcaaggcagtaattccccttaggcc

SEQ ID NO: 210740 - DNA, 25 bp, probe
gcaaggtgaacacttccttctaggg

SEQ ID NO: 210741 - DNA, 25 bp, probe
gcaagtgatgtgtgggcctttgggg

SEQ ID NO: 210742 - DNA, 25 bp, probe
gcaaggagttcaagcgcgctttcgt

SEQ ID NO: 210743 - DNA, 25 bp, probe
gcaatggtagtcagcacgtggcgcg

SEQ ID NO: 210744 - DNA, 25 bp, probe
gcaatgtgaaagcaggtgtgcgtgc

SEQ ID NO: 210745 - DNA, 25 bp, probe
gcaatgtgaaagcaggtgtgcgtgc

SEQ ID NO: 210746 - DNA, 25 bp, probe
gcaagatgagaagacgctccagctg

SEQ ID NO: 210747 - DNA, 25 bp, probe
gcaaggtgaatggcacctggctgca

SEQ ID NO: 210748 - DNA, 25 bp, probe
gcaaggagacgtgctcatcgtcatc

SEQ ID NO: 210749 - DNA, 25 bp, probe
gcaaggagacgtgctcatcgtcatc

SEQ ID NO: 210750 - DNA, 25 bp, probe
gcaagtgatatcacctctcttcagc

SEQ ID NO: 210751 - DNA, 25 bp, probe
gcaagatgttcaaactccatctgca

SEQ ID NO: 210752 - DNA, 25 bp, probe
gcaagatgttcaaactccatctgca

SEQ ID NO: 210753 - DNA, 25 bp, probe
gcaatgatgttatatttctctggag

SEQ ID NO: 210754 - DNA, 25 bp, probe
gcaagcatttcatatttgttactct

SEQ ID NO: 210755 - DNA, 25 bp, probe
gcaagcaaacaggtcatttctactc

SEQ ID NO: 210756 - DNA, 25 bp, probe
gcaatctaaagtaatttccatatcc

SEQ ID NO: 210757 - DNA, 25 bp, probe
gcaaaatatgttatgtctccagagc

SEQ ID NO: 210758 - DNA, 25 bp, probe
gcaacatttgtcaattgtcttcaca

SEQ ID NO: 210759 - DNA, 25 bp, probe
gcaacactttaacgtcttacatttt

SEQ ID NO: 210760 - DNA, 25 bp, probe
gcaacgcgaggaaggcctgtacttt

SEQ ID NO: 210761 - DNA, 25 bp, probe
gcaacgtatggcaggacaaatgctt

SEQ ID NO: 210762 - DNA, 25 bp, probe
gcaacgcagaagagtacaaagtgtg

SEQ ID NO: 210763 - DNA, 25 bp, probe
gcaaggcagtagtggacagggttgg

SEQ ID NO: 210764 - DNA, 25 bp, probe
gcaaggactcgctggacgacagcgg

SEQ ID NO: 210765 - DNA, 25 bp, probe
gcaaggaccaagggaggccagcagg

SEQ ID NO: 210766 - DNA, 25 bp, probe
gcaacggcaacacaggggagcagag

SEQ ID NO: 210767 - DNA, 25 bp, probe
gcaagggaacagagagggacctggg

SEQ ID NO: 210768 - DNA, 25 bp, probe
gcaagggaacagcaggttaccagga

SEQ ID NO: 210769 - DNA, 25 bp, probe
gcaaggtgaaggagtcctctccagc

SEQ ID NO: 210770 - DNA, 25 bp, probe
gcaatggagaagtggacatttccaa

SEQ ID NO: 210771 - DNA, 25 bp, probe
gcaatagcgacgcgctggcgttaca

SEQ ID NO: 210772 - DNA, 25 bp, probe
gaattctcaggagtctggcgttatc

SEQ ID NO: 210773 - DNA, 25 bp, probe
gaattctcaggagtctggcgttatc

SEQ ID NO: 210774 - DNA, 25 bp, probe
gaatttcgtgccatgtggaaacttt

SEQ ID NO: 210775 - DNA, 25 bp, probe
gaattgtatgtcatgttagcaaacg

SEQ ID NO: 210776 - DNA, 25 bp, probe
gcaatgtgtatgccactgtcagtcc

SEQ ID NO: 210777 - DNA, 25 bp, probe
gcaatcgattccttgcatgagccac

SEQ ID NO: 210778 - DNA, 25 bp, probe
gcaatcgcctccttggaggctctgg

SEQ ID NO: 210779 - DNA, 25 bp, probe
gcaactgtgctacacttgcacctgg

SEQ ID NO: 210780 - DNA, 25 bp, probe
gcaacttcaaatagtctgatgcctg

SEQ ID NO: 210781 - DNA, 25 bp, probe
gcaactacaggagatatgatgcctc

SEQ ID NO: 210782 - DNA, 25 bp, probe
gcaacacaaggacatggtgcgcatc

SEQ ID NO: 210783 - DNA, 25 bp, probe
gcaagaagaaatctgagtcagcaca

SEQ ID NO: 210784 - DNA, 25 bp, probe
gcaagttgaatttgctgactccagc

SEQ ID NO: 210785 - DNA, 25 bp, probe
gcaagattgcagactttggcctagc

SEQ ID NO: 210786 - DNA, 25 bp, probe
gcaagattgcagactttggcctagc

SEQ ID NO: 210787 - DNA, 25 bp, probe
gcaactcagagggtcttcctgacaa

SEQ ID NO: 210788 - DNA, 25 bp, probe
gcaactcagagggtcttcctgacaa

SEQ ID NO: 210789 - DNA, 25 bp, probe
gcaacaggacagttcccctataaga

SEQ ID NO: 210790 - DNA, 25 bp, probe
gcaacaggacagtttccctacaaga

SEQ ID NO: 210791 - DNA, 25 bp, probe
gcaacaggacagtttccctacaaga

SEQ ID NO: 210792 - DNA, 25 bp, probe
gcaacggagtaaacctgctccaaaa

SEQ ID NO: 210793 - DNA, 25 bp, probe
gcaacgagtgaaactccgtctcaaa

SEQ ID NO: 210794 - DNA, 25 bp, probe
gcaactttatatacacagctttaaa

SEQ ID NO: 210795 - DNA, 25 bp, probe
gcaactcatgttatgggttaaatga

SEQ ID NO: 210796 - DNA, 25 bp, probe
gcaacctgctttttgcatttaatag

SEQ ID NO: 210797 - DNA, 25 bp, probe
gcaacttgcttcagtcatcctgaac

SEQ ID NO: 210798 - DNA, 25 bp, probe
gcaatatcgttcagtacctgggctc

SEQ ID NO: 210799 - DNA, 25 bp, probe
gcaatatcgttcagtacctgggctc

SEQ ID NO: 210800 - DNA, 25 bp, probe
gcaagattgtcgggtccctgtgtgc

SEQ ID NO: 210801 - DNA, 25 bp, probe
gcaagaaagcgttctccacgtgtgc

SEQ ID NO: 210802 - DNA, 25 bp, probe
gcaagagaagagcatcccaggcagg

SEQ ID NO: 210803 - DNA, 25 bp, probe
gcaacatgagggaaataagcaaaga

SEQ ID NO: 210804 - DNA, 25 bp, probe
gcaacatacggtttgaacagcatga

SEQ ID NO: 210805 - DNA, 25 bp, probe
gcaagctgtcggtgatccacagaga

SEQ ID NO: 210806 - DNA, 25 bp, probe
gcaagtggcgactgcacagaatggc

SEQ ID NO: 210807 - DNA, 25 bp, probe
gcaacggctcagtgacagcaagagc

SEQ ID NO: 210808 - DNA, 25 bp, probe
gcaacttgcacggggagaagctgca

SEQ ID NO: 210809 - DNA, 25 bp, probe
gcaactggcctggccgcaacagcag

SEQ ID NO: 210810 - DNA, 25 bp, probe
gcaagctggcctgcatggagtacag

SEQ ID NO: 210811 - DNA, 25 bp, probe
gcaaggagactgtctgcagcttagg

SEQ ID NO: 210812 - DNA, 25 bp, probe
gcaaggaggctgtcagcatcttgaa

SEQ ID NO: 210813 - DNA, 25 bp, probe
gcaaggatttgaagttgtgaaacat

SEQ ID NO: 210814 - DNA, 25 bp, probe
gcaaggattgtggagttaaatattc

SEQ ID NO: 210815 - DNA, 25 bp, probe
gcaagtaggcaggagctcaataaat

SEQ ID NO: 210816 - DNA, 25 bp, probe
gcaagcattgtctgagctgagggaa

SEQ ID NO: 210817 - DNA, 25 bp, probe
gcaagcattgtctgagctgagggaa

SEQ ID NO: 210818 - DNA, 25 bp, probe
gcaagatgtggcaggcgaggtgggt

SEQ ID NO: 210819 - DNA, 25 bp, probe
gcaagctgtgagagtgcaggcgggg

SEQ ID NO: 210820 - DNA, 25 bp, probe
gcaacattgagtcggtggaggaggg

SEQ ID NO: 210821 - DNA, 25 bp, probe
gcaacattatgctggacaagaaggg

SEQ ID NO: 210822 - DNA, 25 bp, probe
gcaacatggatggaggcaacgaaga

SEQ ID NO: 210823 - DNA, 25 bp, probe
gcaacatggggctagtgggatcaca

SEQ ID NO: 210824 - DNA, 25 bp, probe
gcaagggcggcaagtgaggatgcag

SEQ ID NO: 210825 - DNA, 25 bp, probe
gcaagggggcatgggaaatcgaatt

SEQ ID NO: 210826 - DNA, 25 bp, probe
gcaaggagggcaggaacagacagag

SEQ ID NO: 210827 - DNA, 25 bp, probe
gcaaggtgcggcggaaaggcctggg

SEQ ID NO: 210828 - DNA, 25 bp, probe
gaatgagtggggcgagactcctggg

SEQ ID NO: 210829 - DNA, 25 bp, probe
gcaacatttgggccagctaaacatg

SEQ ID NO: 210830 - DNA, 25 bp, probe
gcaagcattgtctgtgccataacac

SEQ ID NO: 210831 - DNA, 25 bp, probe
gcaacattgttactgcctacatggc

SEQ ID NO: 210832 - DNA, 25 bp, probe
gcaacatcgtgcggtggttctggca

SEQ ID NO: 210833 - DNA, 25 bp, probe
gcaagcatcaaggcagtggattcat

SEQ ID NO: 210834 - DNA, 25 bp, probe
gcaagcatcaaggcagtggattcat

SEQ ID NO: 210835 - DNA, 25 bp, probe
gcaagctgacaggctgtgaaatatg

SEQ ID NO: 210836 - DNA, 25 bp, probe
gcaagctactggcatggcaagagcc

SEQ ID NO: 210837 - DNA, 25 bp, probe
gaagtcctgggtcaggagcccagct

SEQ ID NO: 210838 - DNA, 25 bp, probe
gcaacatcctggtctcagaggacct

SEQ ID NO: 210839 - DNA, 25 bp, probe
gcaaggcgctatggtcaggagaccc

SEQ ID NO: 210840 - DNA, 25 bp, probe
gcaagcatctttactaggagacgcc

SEQ ID NO: 210841 - DNA, 25 bp, probe
gcaagacatcctacaagagaatact

SEQ ID NO: 210842 - DNA, 25 bp, probe
gcaagaacacatacactggagagaa

SEQ ID NO: 210843 - DNA, 25 bp, probe
gcaagagactggcccttgaagaacc

SEQ ID NO: 210844 - DNA, 25 bp, probe
gcaagaactttgccttatcataaac

SEQ ID NO: 210845 - DNA, 25 bp, probe
gaagacacttacctaacaagtactg

SEQ ID NO: 210846 - DNA, 25 bp, probe
gcaagcacctattcctacaaatata

SEQ ID NO: 210847 - DNA, 25 bp, probe
gcaagcaccacgtttgacaacttcc

SEQ ID NO: 210848 - DNA, 25 bp, probe
gcaacggcagcgtgcagatcaactt

SEQ ID NO: 210849 - DNA, 25 bp, probe
gcaactggcggagcagatgcatatt

SEQ ID NO: 210850 - DNA, 25 bp, probe
gcaactggcggagcagatgcatatt

SEQ ID NO: 210851 - DNA, 25 bp, probe
gcaactaggtacaatgtctatcagg

SEQ ID NO: 210852 - DNA, 25 bp, probe
gcaactaggtacaatgtctatcagg

SEQ ID NO: 210853 - DNA, 25 bp, probe
gcaactcatggttcatgcttttatc

SEQ ID NO: 210854 - DNA, 25 bp, probe
gcaatgttgactttgtttcatactg

SEQ ID NO: 210855 - DNA, 25 bp, probe
gcaactgctacttgttctctatgcc

SEQ ID NO: 210856 - DNA, 25 bp, probe
gcaagtcttcttaggatctgatccc

SEQ ID NO: 210857 - DNA, 25 bp, probe
gcaatggtgactctggaggacccct

SEQ ID NO: 210858 - DNA, 25 bp, probe
gcaaggtgttcctgaggctcttgcc

SEQ ID NO: 210859 - DNA, 25 bp, probe
gcaaccagtttcagatgtcctgtcc

SEQ ID NO: 210860 - DNA, 25 bp, probe
gcaaccagtttcagatgtcctgtcc

SEQ ID NO: 210861 - DNA, 25 bp, probe
gcaagccagcttactagcactttga

SEQ ID NO: 210862 - DNA, 25 bp, probe
gcaagcaacttttgtatttggagaa

SEQ ID NO: 210863 - DNA, 25 bp, probe
gcaactcccacttgtatttgtacga

SEQ ID NO: 210864 - DNA, 25 bp, probe
gcaactcccacaaaacttctctgag

SEQ ID NO: 210865 - DNA, 25 bp, probe
gcaagcaccaaaaaactaaagcagt

SEQ ID NO: 210866 - DNA, 25 bp, probe
gcaagtccaacacaatcacagcaac

SEQ ID NO: 210867 - DNA, 25 bp, probe
gcaagatccaccgagatatcaaagc

SEQ ID NO: 210868 - DNA, 25 bp, probe
gcaagatccaccgagatatcaaagc

SEQ ID NO: 210869 - DNA, 25 bp, probe
gcaagatcctgctttgtgatcaaac

SEQ ID NO: 210870 - DNA, 25 bp, probe
gcaagcagccggagacaaaacgcct

SEQ ID NO: 210871 - DNA, 25 bp, probe
gcaagtcctgtgtggcaaaactgcc

SEQ ID NO: 210872 - DNA, 25 bp, probe
gcaagtcctgtgtggcaaaactgcc

SEQ ID NO: 210873 - DNA, 25 bp, probe
gcaacttttataggcaaagcagcgc

SEQ ID NO: 210874 - DNA, 25 bp, probe
gcaacctgtgacaggatcaagcacc

SEQ ID NO: 210875 - DNA, 25 bp, probe
gcaaccatggcaggtgggctagcca

SEQ ID NO: 210876 - DNA, 25 bp, probe
gcaaccgggtggatgctcatggaaa

SEQ ID NO: 210877 - DNA, 25 bp, probe
gcaaccaagcctgctgtcttgtgat

SEQ ID NO: 210878 - DNA, 25 bp, probe
gcaaccccagtggcagttatgtgtc

SEQ ID NO: 210879 - DNA, 25 bp, probe
gcaacgccacagcatcaaggatgtg

SEQ ID NO: 210880 - DNA, 25 bp, probe
gcaatggtacactacaaatgtgctg

SEQ ID NO: 210881 - DNA, 25 bp, probe
gcaagttcacctccaagtttgtacg

SEQ ID NO: 210882 - DNA, 25 bp, probe
gcaagttcacctccaagtttgtacg

SEQ ID NO: 210883 - DNA, 25 bp, probe
gaattttcctactgagttgttgctg

SEQ ID NO: 210884 - DNA, 25 bp, probe
gcaataatgtttggtaggtatttgc

SEQ ID NO: 210885 - DNA, 25 bp, probe
gcaactgtgttgggtcaactatttc

SEQ ID NO: 210886 - DNA, 25 bp, probe
gcaaccaccgcgatgcaagtatgtt

SEQ ID NO: 210887 - DNA, 25 bp, probe
gcaatggcccaggattcaagaactg

SEQ ID NO: 210888 - DNA, 25 bp, probe
gcaatggcccaggattcaagaactg

SEQ ID NO: 210889 - DNA, 25 bp, probe
gcaatggatcctgtccacaacaagc

SEQ ID NO: 210890 - DNA, 25 bp, probe
gcaatggtctatttgttcaggcacc

SEQ ID NO: 210891 - DNA, 25 bp, probe
gcaatggtccatctattaacgcact

SEQ ID NO: 210892 - DNA, 25 bp, probe
gcaatggtccatctattaacgcact

SEQ ID NO: 210893 - DNA, 25 bp, probe
gcaaccttctgcattcataaatctt

SEQ ID NO: 210894 - DNA, 25 bp, probe
gcaacctatcatttgtagacctttg

SEQ ID NO: 210895 - DNA, 25 bp, probe
gcaactctaagactacagcacacgt

SEQ ID NO: 210896 - DNA, 25 bp, probe
gcaacgctgaagtcaagcgccgggc

SEQ ID NO: 210897 - DNA, 25 bp, probe
gcaacgctgaagtcaagcgccgggc

SEQ ID NO: 210898 - DNA, 25 bp, probe
gcaacctgaactgtgaggcgggcag

SEQ ID NO: 210899 - DNA, 25 bp, probe
gagacagtaactgtgaccgtgggtc

SEQ ID NO: 210900 - DNA, 25 bp, probe
gaattgtgaagtgtaccgctcggtg

SEQ ID NO: 210901 - DNA, 25 bp, probe
gaatcttggactgaaccttagtgag

SEQ ID NO: 210902 - DNA, 25 bp, probe
gcaatttaacaccagagttttgtgg

SEQ ID NO: 210903 - DNA, 25 bp, probe
gcaatttagaactagattttggtta

SEQ ID NO: 210904 - DNA, 25 bp, probe
gcaatttagaactagattttggtta

SEQ ID NO: 210905 - DNA, 25 bp, probe
gaatttattactaactctgggattt

SEQ ID NO: 210906 - DNA, 25 bp, probe
gaatattattatgtgccccgtgttc

SEQ ID NO: 210907 - DNA, 25 bp, probe
gaataccaagaactgcccaagtttg

SEQ ID NO: 210908 - DNA, 25 bp, probe
gaatactaaagaatacaacctgcta

SEQ ID NO: 210909 - DNA, 25 bp, probe
gaattcattaaacatatcatccttg

SEQ ID NO: 210910 - DNA, 25 bp, probe
gaattcattaaacatatcatccttg

SEQ ID NO: 210911 - DNA, 25 bp, probe
gaattgcttataaaccagccacttc

SEQ ID NO: 210912 - DNA, 25 bp, probe
gaattctgatctgaaggggcacctt

SEQ ID NO: 210913 - DNA, 25 bp, probe
gaattggctcatgaaggttcttctc

SEQ ID NO: 210914 - DNA, 25 bp, probe
gaattggcattgatacgttttgttg

SEQ ID NO: 210915 - DNA, 25 bp, probe
gaatattccgttctgcttttgtatg

SEQ ID NO: 210916 - DNA, 25 bp, probe
gaatattccgttctgcttttgtatg

SEQ ID NO: 210917 - DNA, 25 bp, probe
gaattattggttctgcctaaggatg

SEQ ID NO: 210918 - DNA, 25 bp, probe
gaattcaattgtggaccccaaagtg

SEQ ID NO: 210919 - DNA, 25 bp, probe
gaattacattgggaaccactgtgcc

SEQ ID NO: 210920 - DNA, 25 bp, probe
gacttcatccgggaggtcaatgcca

SEQ ID NO: 210921 - DNA, 25 bp, probe
gaattgcatccaccgggacgtggca

SEQ ID NO: 210922 - DNA, 25 bp, probe
gcaaggcatcccagaggcaagggga

SEQ ID NO: 210923 - DNA, 25 bp, probe
gcaaggtcatccctgagctgaacgg

SEQ ID NO: 210924 - DNA, 25 bp, probe
gcaagcaccaaccccataaagtgac

SEQ ID NO: 210925 - DNA, 25 bp, probe
gcaagccctacaaccagaagagtga

SEQ ID NO: 210926 - DNA, 25 bp, probe
gcaagccctacaaccagaagagtga

SEQ ID NO: 210927 - DNA, 25 bp, probe
gcaaggccaaatctcagaagagtat

SEQ ID NO: 210928 - DNA, 25 bp, probe
gcaagacaataacatcacaagctaa

SEQ ID NO: 210929 - DNA, 25 bp, probe
gcaagatcagaatagtagcagatgt

SEQ ID NO: 210930 - DNA, 25 bp, probe
gcaagagcggattagtcacagatat

SEQ ID NO: 210931 - DNA, 25 bp, probe
gcaagcggagggttcacatgtatga

SEQ ID NO: 210932 - DNA, 25 bp, probe
gcaagcggagggttcacatgtatga

SEQ ID NO: 210933 - DNA, 25 bp, probe
gcaaggaatggggctcactatgaca

SEQ ID NO: 210934 - DNA, 25 bp, probe
gcaatcagcaatgtcctacctgaaa

SEQ ID NO: 210935 - DNA, 25 bp, probe
gcaatggcactggtaaagcattcag

SEQ ID NO: 210936 - DNA, 25 bp, probe
gcaatggcactggtaaagcattcag

SEQ ID NO: 210937 - DNA, 25 bp, probe
gcaatggcactggtaaagcattcag

SEQ ID NO: 210938 - DNA, 25 bp, probe
gcaagcacagatgtacaggtatcag

SEQ ID NO: 210939 - DNA, 25 bp, probe
gcaatcaagatgggccggtatacag

SEQ ID NO: 210940 - DNA, 25 bp, probe
gcaatcaaggaagacgccatcaggg

SEQ ID NO: 210941 - DNA, 25 bp, probe
gaacataaaccctccaagggatctg

SEQ ID NO: 210942 - DNA, 25 bp, probe
gactcaaaacccagtgagggggatg

SEQ ID NO: 210943 - DNA, 25 bp, probe
gactcaaaacccagtgagggggatg

SEQ ID NO: 210944 - DNA, 25 bp, probe
gaatcggaatctctgggggttggga

SEQ ID NO: 210945 - DNA, 25 bp, probe
gaatcaaaatctctcaggggcttgg

SEQ ID NO: 210946 - DNA, 25 bp, probe
gagttaaactcaacatggccggtta

SEQ ID NO: 210947 - DNA, 25 bp, probe
gaattaaccttaagaccagttcata

SEQ ID NO: 210948 - DNA, 25 bp, probe
gaattcaaggttttgagtcggttca

SEQ ID NO: 210949 - DNA, 25 bp, probe
gaaggaaggggtaggctcgccctgc

SEQ ID NO: 210950 - DNA, 25 bp, probe
gcaagtaccgggaggctgcccggct

SEQ ID NO: 210951 - DNA, 25 bp, probe
gcaattcccgggagattaaccactt

SEQ ID NO: 210952 - DNA, 25 bp, probe
gcaattcccgggagattaaccactt

SEQ ID NO: 210953 - DNA, 25 bp, probe
gcaatacccggggtgtttgcaacaa

SEQ ID NO: 210954 - DNA, 25 bp, probe
gcaatacccggggtgtttgcaacaa

SEQ ID NO: 210955 - DNA, 25 bp, probe
gaatttccggaggcttgtgctcaat

SEQ ID NO: 210956 - DNA, 25 bp, probe
gaatcaaccggacctgttgctagca

SEQ ID NO: 210957 - DNA, 25 bp, probe
gactcaaactaacaatggcttcaac

SEQ ID NO: 210958 - DNA, 25 bp, probe
gactcaaactaacaatggcttcaac

SEQ ID NO: 210959 - DNA, 25 bp, probe
gacttaaaaacttaggctgtggaga

SEQ ID NO: 210960 - DNA, 25 bp, probe
gaactacaaacccaacatggtggag

SEQ ID NO: 210961 - DNA, 25 bp, probe
gaattagtaacaggaactgaggcga

SEQ ID NO: 210962 - DNA, 25 bp, probe
gaattttacaacaaactagtgcatg

SEQ ID NO: 210963 - DNA, 25 bp, probe
gaatttatcaatttgattctaggta

SEQ ID NO: 210964 - DNA, 25 bp, probe
gaattgtgatcgttggaatttggtc

SEQ ID NO: 210965 - DNA, 25 bp, probe
gaatatgctgccgttaactttgtgt

SEQ ID NO: 210966 - DNA, 25 bp, probe
gaatatgctgccgttaactttgtgt

SEQ ID NO: 210967 - DNA, 25 bp, probe
gaatatgcccgttggtctatgattg

SEQ ID NO: 210968 - DNA, 25 bp, probe
gcaatcacaagccaaggtctgaacc

SEQ ID NO: 210969 - DNA, 25 bp, probe
gcaatcagcacggacagttgggcac

SEQ ID NO: 210970 - DNA, 25 bp, probe
gcaatgcaaggagagtatggacatc

SEQ ID NO: 210971 - DNA, 25 bp, probe
gcaagaagcgagaattctgagatcc

SEQ ID NO: 210972 - DNA, 25 bp, probe
gcaagacagcagcgatgcttgtagc

SEQ ID NO: 210973 - DNA, 25 bp, probe
gcaagcagagagtgatgcttctgtg

SEQ ID NO: 210974 - DNA, 25 bp, probe
gcaaggagataggagctcatatctg

SEQ ID NO: 210975 - DNA, 25 bp, probe
gcaaggctacaggtgcatcaactgc

SEQ ID NO: 210976 - DNA, 25 bp, probe
gcaaggctacaggtgcatcaactgc

SEQ ID NO: 210977 - DNA, 25 bp, probe
gcaaggctcaaggctgtgcaggcac

SEQ ID NO: 210978 - DNA, 25 bp, probe
gcaaggctcaaggctgtgcaggcac

SEQ ID NO: 210979 - DNA, 25 bp, probe
gaaggccacatggctgacattagct

SEQ ID NO: 210980 - DNA, 25 bp, probe
gaagacacatcactctgaaattgga

SEQ ID NO: 210981 - DNA, 25 bp, probe
gcaagtctctgccaatgcaaattga

SEQ ID NO: 210982 - DNA, 25 bp, probe
gcaagctctactatgagaatgaaca

SEQ ID NO: 210983 - DNA, 25 bp, probe
gcaatcctcgcaatggaagaacgca

SEQ ID NO: 210984 - DNA, 25 bp, probe
gcaaccacgagacagacaacatgaa

SEQ ID NO: 210985 - DNA, 25 bp, probe
gaattacgagcacgacagcaaatgg

SEQ ID NO: 210986 - DNA, 25 bp, probe
gaataactggcgggcacagggtcag

SEQ ID NO: 210987 - DNA, 25 bp, probe
gaattccaagggccacatgcgagta

SEQ ID NO: 210988 - DNA, 25 bp, probe
gaatttaagtaccagccaagtacac

SEQ ID NO: 210989 - DNA, 25 bp, probe
gcaattaaagtcagcccagcaccaa

SEQ ID NO: 210990 - DNA, 25 bp, probe
gaattacagtgtgtacacaaccaac

SEQ ID NO: 210991 - DNA, 25 bp, probe
gaatttcgagatggcaccacaacca

SEQ ID NO: 210992 - DNA, 25 bp, probe
gaattctcacaaggaaaaggccatt

SEQ ID NO: 210993 - DNA, 25 bp, probe
gaattacagctttgcaatataacta

SEQ ID NO: 210994 - DNA, 25 bp, probe
gaatcatacagcatctggaaccttc

SEQ ID NO: 210995 - DNA, 25 bp, probe
gaattcaccttccgaaggttctttg

SEQ ID NO: 210996 - DNA, 25 bp, probe
gaatcatcagccacgtgtagggtgt

SEQ ID NO: 210997 - DNA, 25 bp, probe
gtcctaccccagtgaggttgaaggc

SEQ ID NO: 210998 - DNA, 25 bp, probe
gtcctttccctgatgggttggggca

SEQ ID NO: 210999 - DNA, 25 bp, probe
gtcctttccctgatgggttggggca

SEQ ID NO: 211000 - DNA, 25 bp, probe
gaagcttatcccactgggttgggat

SEQ ID NO: 211001 - DNA, 25 bp, probe
gaagtcttaccagtgctggtttaaa

SEQ ID NO: 211002 - DNA, 25 bp, probe
gaaggagtcaacagtgtaactaaat

SEQ ID NO: 211003 - DNA, 25 bp, probe
gcaataagtaaccctctaactaatg

SEQ ID NO: 211004 - DNA, 25 bp, probe
gcaataagtaaccctctaactaatg

SEQ ID NO: 211005 - DNA, 25 bp, probe
gcaatgtagtactgcctctataaaa

SEQ ID NO: 211006 - DNA, 25 bp, probe
gcaatgtagtactgcctctataaaa

SEQ ID NO: 211007 - DNA, 25 bp, probe
gcaatttgttaaggttcaagacaga

SEQ ID NO: 211008 - DNA, 25 bp, probe
gcaatgcttccacagcgtaaataca

SEQ ID NO: 211009 - DNA, 25 bp, probe
gcaattgcccatcgagatctgaaaa

SEQ ID NO: 211010 - DNA, 25 bp, probe
gcaagagaacaaggtgctgaagata

SEQ ID NO: 211011 - DNA, 25 bp, probe
gcaagagaagcaacgtatggcagga

SEQ ID NO: 211012 - DNA, 25 bp, probe
gcaagaagccattcgtgaggtggac

SEQ ID NO: 211013 - DNA, 25 bp, probe
gcaaggggatatagtgatggggctc

SEQ ID NO: 211014 - DNA, 25 bp, probe
gcaagaggtgcctcatgatgggccc

SEQ ID NO: 211015 - DNA, 25 bp, probe
gcaagtttgcactctttgagcgcgc

SEQ ID NO: 211016 - DNA, 25 bp, probe
gcaagttagcactttattcccgcag

SEQ ID NO: 211017 - DNA, 25 bp, probe
gcaatggaacattattagactctaa

SEQ ID NO: 211018 - DNA, 25 bp, probe
gcaagaacactatttaccctcagct

SEQ ID NO: 211019 - DNA, 25 bp, probe
gcaagcataactttctgcaggccca

SEQ ID NO: 211020 - DNA, 25 bp, probe
gcaagcataactttctgcaggccca

SEQ ID NO: 211021 - DNA, 25 bp, probe
gaatgattactacctcaggaccaac

SEQ ID NO: 211022 - DNA, 25 bp, probe
gcaatttatcaagccagtggaagca

SEQ ID NO: 211023 - DNA, 25 bp, probe
gcaattggaaacccttcatgaagca

SEQ ID NO: 211024 - DNA, 25 bp, probe
gaatattaacgcgttcgcagttgca

SEQ ID NO: 211025 - DNA, 25 bp, probe
gaatttaccggctgagagatgctca

SEQ ID NO: 211026 - DNA, 25 bp, probe
gaattagacccatttggtgctgctc

SEQ ID NO: 211027 - DNA, 25 bp, probe
gcaatgtctgatgcctttttgtgcc

SEQ ID NO: 211028 - DNA, 25 bp, probe
gcaatctgggacctgattttccacc

SEQ ID NO: 211029 - DNA, 25 bp, probe
gcaatctgggacctgattttccacc

SEQ ID NO: 211030 - DNA, 25 bp, probe
gcaattggccaacttctttgccttc

SEQ ID NO: 211031 - DNA, 25 bp, probe
gcaatggtgcaatcaatcttggctc

SEQ ID NO: 211032 - DNA, 25 bp, probe
gcaatggtgcaatcaatcttggctc

SEQ ID NO: 211033 - DNA, 25 bp, probe
gcaagcgatgcatacatgcaactac

SEQ ID NO: 211034 - DNA, 25 bp, probe
gcaagcactgacaagcagcacattc

SEQ ID NO: 211035 - DNA, 25 bp, probe
gcaagcactgacaagcagcacattc

SEQ ID NO: 211036 - DNA, 25 bp, probe
gcaagcactgtcaagacagcggcag

SEQ ID NO: 211037 - DNA, 25 bp, probe
gcaagcactgtcaagacagcggcag

SEQ ID NO: 211038 - DNA, 25 bp, probe
gcaagctcttcgtacaggacgaaaa

SEQ ID NO: 211039 - DNA, 25 bp, probe
gcaagccgtcgaccagggagaaaga

SEQ ID NO: 211040 - DNA, 25 bp, probe
gcaagccgtcgactatggagacaga

SEQ ID NO: 211041 - DNA, 25 bp, probe
gcaattcgtcgactagacaaaccaa

SEQ ID NO: 211042 - DNA, 25 bp, probe
gcaattcgtcgactagacaaaccaa

SEQ ID NO: 211043 - DNA, 25 bp, probe
gaatacgtgcactcaaagaacctca

SEQ ID NO: 211044 - DNA, 25 bp, probe
gcaataattcaccagaccagaagcc

SEQ ID NO: 211045 - DNA, 25 bp, probe
gaatccccacgaacgcgatatgccg

SEQ ID NO: 211046 - DNA, 25 bp, probe
gcaaggcactgcaggaggagaaccg

SEQ ID NO: 211047 - DNA, 25 bp, probe
gaattgcacagtaggatgtggaacc

SEQ ID NO: 211048 - DNA, 25 bp, probe
gcaatctgacttaggcatgggaatc

SEQ ID NO: 211049 - DNA, 25 bp, probe
gcaagctacttttcagcctcaagct

SEQ ID NO: 211050 - DNA, 25 bp, probe
gcaagaaatttctcttcaagcatca

SEQ ID NO: 211051 - DNA, 25 bp, probe
gcaagatgaatttatacgccagtat

SEQ ID NO: 211052 - DNA, 25 bp, probe
gcaaggagtttattacaatgtatct

SEQ ID NO: 211053 - DNA, 25 bp, probe
gcaaggagtttattacaatgtatct

SEQ ID NO: 211054 - DNA, 25 bp, probe
gcaaggtttacttctcagatgaaca

SEQ ID NO: 211055 - DNA, 25 bp, probe
gcaagttcactacagcatcaataga

SEQ ID NO: 211056 - DNA, 25 bp, probe
gcaagttcttagtgcatcttcatgg

SEQ ID NO: 211057 - DNA, 25 bp, probe
gcaagtctgtgatgtactttcactg

SEQ ID NO: 211058 - DNA, 25 bp, probe
gcaagttgccattgtacaaatccag

SEQ ID NO: 211059 - DNA, 25 bp, probe
gcaatgtcaccttgtagcctatgcg

SEQ ID NO: 211060 - DNA, 25 bp, probe
gggtccccgaagatctcaggaattt

SEQ ID NO: 211061 - DNA, 25 bp, probe
gactgcccctcgagattttggaatt

SEQ ID NO: 211062 - DNA, 25 bp, probe
gactgcccctcgagattttggaatt

SEQ ID NO: 211063 - DNA, 25 bp, probe
gactgcccggcgagaattcgaggag

SEQ ID NO: 211064 - DNA, 25 bp, probe
gactgcccggcgagaattcgaggag

SEQ ID NO: 211065 - DNA, 25 bp, probe
gaatgtcctaggagaatccggggag

SEQ ID NO: 211066 - DNA, 25 bp, probe
gaatgtcctaggagaatccggggag

SEQ ID NO: 211067 - DNA, 25 bp, probe
gaattttatggtgcattacgtgggc

SEQ ID NO: 211068 - DNA, 25 bp, probe
gaattttatggtgcattacgtgggc

SEQ ID NO: 211069 - DNA, 25 bp, probe
gaattctttgcattccttacttgca

SEQ ID NO: 211070 - DNA, 25 bp, probe
gaattcaaatgcttcaggtaaatgt

SEQ ID NO: 211071 - DNA, 25 bp, probe
gaattcaaatgcttcaggtaaatgt

SEQ ID NO: 211072 - DNA, 25 bp, probe
gaattaacttcatggtgaatagtca

SEQ ID NO: 211073 - DNA, 25 bp, probe
gcaatacaactttaccataaagcct

SEQ ID NO: 211074 - DNA, 25 bp, probe
gaattgcagaatttacctcaagaac

SEQ ID NO: 211075 - DNA, 25 bp, probe
gaattgcacatagttctgcccaaat

SEQ ID NO: 211076 - DNA, 25 bp, probe
gaattcacgagcatcgatgcacaca

SEQ ID NO: 211077 - DNA, 25 bp, probe
gaattcggaaatcgatcagatcaac

SEQ ID NO: 211078 - DNA, 25 bp, probe
gaattggcctattggcaagatcgca

SEQ ID NO: 211079 - DNA, 25 bp, probe
gaattggcctgtagtgacacattac

SEQ ID NO: 211080 - DNA, 25 bp, probe
gaatattctcatttggtcttaacta

SEQ ID NO: 211081 - DNA, 25 bp, probe
gaatcattttattttattgcccaat

SEQ ID NO: 211082 - DNA, 25 bp, probe
gaatctatttatgtctttcaattta

SEQ ID NO: 211083 - DNA, 25 bp, probe
gaatttttaaccatctcagactcca

SEQ ID NO: 211084 - DNA, 25 bp, probe
gcaagtttatggtcacccttgcctg

SEQ ID NO: 211085 - DNA, 25 bp, probe
gcaaggaaattgtacacacgtttga

SEQ ID NO: 211086 - DNA, 25 bp, probe
gcaaggaaatgcgagcacaccaggc

SEQ ID NO: 211087 - DNA, 25 bp, probe
gcaaggagagagccaggccctggtc

SEQ ID NO: 211088 - DNA, 25 bp, probe
gcaagtgaggatgcagtccagccgt

SEQ ID NO: 211089 - DNA, 25 bp, probe
gcaatgtgacaagtatgacgcccag

SEQ ID NO: 211090 - DNA, 25 bp, probe
gcaagatgaaacagggcaccccagc

SEQ ID NO: 211091 - DNA, 25 bp, probe
gcaattgtaatgacgggccgacacc

SEQ ID NO: 211092 - DNA, 25 bp, probe
gaatattgggaggggcagcaggccc

SEQ ID NO: 211093 - DNA, 25 bp, probe
gcaagatttgcaggctgggaaggct

SEQ ID NO: 211094 - DNA, 25 bp, probe
gcaatcttgccagtgtggaagaact

SEQ ID NO: 211095 - DNA, 25 bp, probe
gcaatcttgccagtgtggaagaact

SEQ ID NO: 211096 - DNA, 25 bp, probe
gcaatgcttgcttttctgaattacc

SEQ ID NO: 211097 - DNA, 25 bp, probe
gcaatcatatgtgatctgtcttgta

SEQ ID NO: 211098 - DNA, 25 bp, probe
gcaatttgattgactgcccattcac

SEQ ID NO: 211099 - DNA, 25 bp, probe
gcaatctttcagcagcaacctgaga

SEQ ID NO: 211100 - DNA, 25 bp, probe
gcaatctttcagcagcaacctgaga

SEQ ID NO: 211101 - DNA, 25 bp, probe
gcaatgtttcgatagacagcataat

SEQ ID NO: 211102 - DNA, 25 bp, probe
gcaagtcccagatatactacaactc

SEQ ID NO: 211103 - DNA, 25 bp, probe
gcaagtcccagatatactacaactc

SEQ ID NO: 211104 - DNA, 25 bp, probe
gcaagtcgtcaagctcctcaatgac

SEQ ID NO: 211105 - DNA, 25 bp, probe
gcaaggcgatgcaggtccatcctga

SEQ ID NO: 211106 - DNA, 25 bp, probe
gcaagggtggagaacagatgcacga

SEQ ID NO: 211107 - DNA, 25 bp, probe
gaattggggattacagctgtcatga

SEQ ID NO: 211108 - DNA, 25 bp, probe
gaatttggagagagcatcatgtcag

SEQ ID NO: 211109 - DNA, 25 bp, probe
gaattctcaggggacatctcccaca

SEQ ID NO: 211110 - DNA, 25 bp, probe
gaatacatcagtaaaataccatacg

SEQ ID NO: 211111 - DNA, 25 bp, probe
gaatgaccgttcaaagagcgaaagc

SEQ ID NO: 211112 - DNA, 25 bp, probe
gaatatcagcgtgctaagtcagaaa

SEQ ID NO: 211113 - DNA, 25 bp, probe
gcaattgcctctgaaagacataaca

SEQ ID NO: 211114 - DNA, 25 bp, probe
gcaataactctctacaggaatatat

SEQ ID NO: 211115 - DNA, 25 bp, probe
gcaataactctctacaggaatatat

SEQ ID NO: 211116 - DNA, 25 bp, probe
gaatatatgcatttcaatggaaaca

SEQ ID NO: 211117 - DNA, 25 bp, probe
gaatcacatgattgctcagaagcag

SEQ ID NO: 211118 - DNA, 25 bp, probe
gaattcaggcaggtgatgaatggct

SEQ ID NO: 211119 - DNA, 25 bp, probe
gaattcaggatgctaggggctactt

SEQ ID NO: 211120 - DNA, 25 bp, probe
gcaattgcactgtgtagccgtctgc

SEQ ID NO: 211121 - DNA, 25 bp, probe
gcaattgcactgtgtagccgtctgc

SEQ ID NO: 211122 - DNA, 25 bp, probe
gcaattgcactgtgtagccgtctgc

SEQ ID NO: 211123 - DNA, 25 bp, probe
gaattgcctctgcttacgttcaggc

SEQ ID NO: 211124 - DNA, 25 bp, probe
gcaatagacttcattgactgtgtca

SEQ ID NO: 211125 - DNA, 25 bp, probe
gaatcaagcatgcatccatgactgg

SEQ ID NO: 211126 - DNA, 25 bp, probe
gcaatgaagcatctcaattgctgga

SEQ ID NO: 211127 - DNA, 25 bp, probe
gcaatggagcatgtgcactggcatg

SEQ ID NO: 211128 - DNA, 25 bp, probe
gcaaggacatgcggcctgcatggtg

SEQ ID NO: 211129 - DNA, 25 bp, probe
gcaaggatgtcgcactgctggtgac

SEQ ID NO: 211130 - DNA, 25 bp, probe
gcaatggtgtcagtatccaggcttt

SEQ ID NO: 211131 - DNA, 25 bp, probe
gcaagattgctgattccagggatga

SEQ ID NO: 211132 - DNA, 25 bp, probe
gcaagagatcatatcctcagaccag

SEQ ID NO: 211133 - DNA, 25 bp, probe
gcaaggatcagtagccaggaccaga

SEQ ID NO: 211134 - DNA, 25 bp, probe
gcaagttcacaagcaggctgcacaa

SEQ ID NO: 211135 - DNA, 25 bp, probe
gcaatttcacaaatcagggccagtg

SEQ ID NO: 211136 - DNA, 25 bp, probe
gcaatggaacctacggacaggtgta

SEQ ID NO: 211137 - DNA, 25 bp, probe
gcaattgttgcctcggcagctggtg

SEQ ID NO: 211138 - DNA, 25 bp, probe
gcaagtttctcattactgtctgtgg

SEQ ID NO: 211139 - DNA, 25 bp, probe
gcaagtttctcattactgtctgtgg

SEQ ID NO: 211140 - DNA, 25 bp, probe
gcaagtttctcttaatctttgggaa

SEQ ID NO: 211141 - DNA, 25 bp, probe
gaatgaacctcttttgttggggaag

SEQ ID NO: 211142 - DNA, 25 bp, probe
gcaataacctgggagttttggtgga

SEQ ID NO: 211143 - DNA, 25 bp, probe
gaattctgctttcgtgtttttggga

SEQ ID NO: 211144 - DNA, 25 bp, probe
gaattttgttatagtggtattggga

SEQ ID NO: 211145 - DNA, 25 bp, probe
gaattagtgttattcagggttagta

SEQ ID NO: 211146 - DNA, 25 bp, probe
gaattagtgttattcagggttagta

SEQ ID NO: 211147 - DNA, 25 bp, probe
gaattagattgtttcctgatttaaa

SEQ ID NO: 211148 - DNA, 25 bp, probe
gaattagattgtttcctgatttaaa

SEQ ID NO: 211149 - DNA, 25 bp, probe
gaataagacttatccattttttaat

SEQ ID NO: 211150 - DNA, 25 bp, probe
gaataagacttatccattttttaat

SEQ ID NO: 211151 - DNA, 25 bp, probe
gacaaggaaatacccttcttttatg

SEQ ID NO: 211152 - DNA, 25 bp, probe
gaattggcaaatgccctgtcttact

SEQ ID NO: 211153 - DNA, 25 bp, probe
gaatttcaaatcaacctgcctgaac

SEQ ID NO: 211154 - DNA, 25 bp, probe
gaatttcaaatgtagttttcatgac

SEQ ID NO: 211155 - DNA, 25 bp, probe
gaatttcaaatgtagttttcatgac

SEQ ID NO: 211156 - DNA, 25 bp, probe
gaattgatggtcaagagattttcca

SEQ ID NO: 211157 - DNA, 25 bp, probe
gaattgatggtcaagagattttcca

SEQ ID NO: 211158 - DNA, 25 bp, probe
gaatcctgtgacaagcacttactcc

SEQ ID NO: 211159 - DNA, 25 bp, probe
gaatccttaaaggtgagccctcata

SEQ ID NO: 211160 - DNA, 25 bp, probe
gcaaggcttaaaggctgacacatta

SEQ ID NO: 211161 - DNA, 25 bp, probe
gcaaggttcagatccatgtagctaa

SEQ ID NO: 211162 - DNA, 25 bp, probe
gcaaggaccagatccagcggctggt

SEQ ID NO: 211163 - DNA, 25 bp, probe
gcaaggtcaccatggatgggcgagt

SEQ ID NO: 211164 - DNA, 25 bp, probe
gcaatcggcccagggcttgggtgta

SEQ ID NO: 211165 - DNA, 25 bp, probe
gcaagtaatgacggactctgggttc

SEQ ID NO: 211166 - DNA, 25 bp, probe
gcaatggagagcggcgagcatgctg

SEQ ID NO: 211167 - DNA, 25 bp, probe
gcaatggcagattatcgacatcttt

SEQ ID NO: 211168 - DNA, 25 bp, probe
gcaatcactttaccagctgcatatt

SEQ ID NO: 211169 - DNA, 25 bp, probe
gcaatcacatttatgcatatgatgc

SEQ ID NO: 211170 - DNA, 25 bp, probe
gcaatacatcgaagcatgtctcagc

SEQ ID NO: 211171 - DNA, 25 bp, probe
gaatatatggaccatgatctgatgg

SEQ ID NO: 211172 - DNA, 25 bp, probe
gcaatatagagactgtgttcatgtg

SEQ ID NO: 211173 - DNA, 25 bp, probe
gaatctacacgcatgatggagctga

SEQ ID NO: 211174 - DNA, 25 bp, probe
gcaatccacctgatatgtcagggtg

SEQ ID NO: 211175 - DNA, 25 bp, probe
gcaatccacctgatatgtcagggtg

SEQ ID NO: 211176 - DNA, 25 bp, probe
gcaatgccgccgatatgatggctgg

SEQ ID NO: 211177 - DNA, 25 bp, probe
gcaatgccgcctggtgatacagcat

SEQ ID NO: 211178 - DNA, 25 bp, probe
gaatcctgcagaagctgaaagctgg

SEQ ID NO: 211179 - DNA, 25 bp, probe
gaatcctgtgagggtgactctgggg

SEQ ID NO: 211180 - DNA, 25 bp, probe
gaattcgaggggaaatcggaagtgg

SEQ ID NO: 211181 - DNA, 25 bp, probe
gaattctggggtcatcctgagaagg

SEQ ID NO: 211182 - DNA, 25 bp, probe
gaattcacaggaccccctgagaaga

SEQ ID NO: 211183 - DNA, 25 bp, probe
gaatatgaacaaccccttgagaatg

SEQ ID NO: 211184 - DNA, 25 bp, probe
gaataaccaacaccctgaggttgtg

SEQ ID NO: 211185 - DNA, 25 bp, probe
gcaatataccaatctcctgaggctt

SEQ ID NO: 211186 - DNA, 25 bp, probe
gcaatataaatgtcaccctgggcgc

SEQ ID NO: 211187 - DNA, 25 bp, probe
gaattcagaagacccctgactcatc

SEQ ID NO: 211188 - DNA, 25 bp, probe
gaattacaataatctcgccaatgct

SEQ ID NO: 211189 - DNA, 25 bp, probe
gaattctgcagatatccatcacact

SEQ ID NO: 211190 - DNA, 25 bp, probe
gaatgctccaaaggccaaacttctg

SEQ ID NO: 211191 - DNA, 25 bp, probe
gaatccgaaactctgtgtcttcatg

SEQ ID NO: 211192 - DNA, 25 bp, probe
gaatcgctcaaacacctgtttgcag

SEQ ID NO: 211193 - DNA, 25 bp, probe
gaatcaggaatcttaacttcatgtg

SEQ ID NO: 211194 - DNA, 25 bp, probe
gactacggtctggacaactttgaca

SEQ ID NO: 211195 - DNA, 25 bp, probe
gaataatcctcaggacattctttaa

SEQ ID NO: 211196 - DNA, 25 bp, probe
gaataatcctcaggacattctttaa

SEQ ID NO: 211197 - DNA, 25 bp, probe
gaaaaaccaccagttacttgagtgt

SEQ ID NO: 211198 - DNA, 25 bp, probe
gaataaaccacacttagtcctgatg

SEQ ID NO: 211199 - DNA, 25 bp, probe
gcaatataactaattgtttcgcata

SEQ ID NO: 211200 - DNA, 25 bp, probe
gaattctcaccaaatgttcccaaat

SEQ ID NO: 211201 - DNA, 25 bp, probe
gaattatacccatctaccaaaagca

SEQ ID NO: 211202 - DNA, 25 bp, probe
gaattatacccatctaccaaaagca

SEQ ID NO: 211203 - DNA, 25 bp, probe
gaattatacccatctaccaaaagca

SEQ ID NO: 211204 - DNA, 25 bp, probe
gaatttccccagaaacctgtaatca

SEQ ID NO: 211205 - DNA, 25 bp, probe
gcaagtttcgccatcagaacattgt

SEQ ID NO: 211206 - DNA, 25 bp, probe
gaattttggacttgcaaagaggtat

SEQ ID NO: 211207 - DNA, 25 bp, probe
gaatttggctacagcaacagggtgg

SEQ ID NO: 211208 - DNA, 25 bp, probe
gaatttggtacagtctacaagtgca

SEQ ID NO: 211209 - DNA, 25 bp, probe
gaattacgtaagagatccagtgatt

SEQ ID NO: 211210 - DNA, 25 bp, probe
gaattactgttaccctcagaagttt

SEQ ID NO: 211211 - DNA, 25 bp, probe
gaattcttgttcacaaagtgttttt

SEQ ID NO: 211212 - DNA, 25 bp, probe
gaatttcttccttcagacggttttg

SEQ ID NO: 211213 - DNA, 25 bp, probe
gaatttcttccttcagacggttttg

SEQ ID NO: 211214 - DNA, 25 bp, probe
gcaatgttttcttgttccttgtttt

SEQ ID NO: 211215 - DNA, 25 bp, probe
gcaatgttgttatcattccctgatg

SEQ ID NO: 211216 - DNA, 25 bp, probe
gcaatttttatctaaccaatcagaa

SEQ ID NO: 211217 - DNA, 25 bp, probe
gcaatctattgttccattccaatca

SEQ ID NO: 211218 - DNA, 25 bp, probe
gaattcattgcttcaaggctatgac

SEQ ID NO: 211219 - DNA, 25 bp, probe
gaattcaatgcccggcgtaagctta

SEQ ID NO: 211220 - DNA, 25 bp, probe
gcaattgttgccatggtgaaactta

SEQ ID NO: 211221 - DNA, 25 bp, probe
gaattttctctagagtcagtcatta

SEQ ID NO: 211222 - DNA, 25 bp, probe
gcaatgttgcatataccttaatctt

SEQ ID NO: 211223 - DNA, 25 bp, probe
gcaatgattattaatgcttcaagtc

SEQ ID NO: 211224 - DNA, 25 bp, probe
gcaatgattattaatgcttcaagtc

SEQ ID NO: 211225 - DNA, 25 bp, probe
gcaattcggtcaattgtcactgtca

SEQ ID NO: 211226 - DNA, 25 bp, probe
gcaattcgggaaatttctctattaa

SEQ ID NO: 211227 - DNA, 25 bp, probe
gaattcggagtgatttaccactgca

SEQ ID NO: 211228 - DNA, 25 bp, probe
gaattcttggtttttcagccattcc

SEQ ID NO: 211229 - DNA, 25 bp, probe
gaatttgaaggttttgagtatatca

SEQ ID NO: 211230 - DNA, 25 bp, probe
gaatttgctatgcgttatggaattg

SEQ ID NO: 211231 - DNA, 25 bp, probe
gaattttagggtacacgagcacaac

SEQ ID NO: 211232 - DNA, 25 bp, probe
gaattgctaaggctgagcaagcaga

SEQ ID NO: 211233 - DNA, 25 bp, probe
gaactggctccggggaaagaatagg

SEQ ID NO: 211234 - DNA, 25 bp, probe
gaacttgctcgggttcaattaaagg

SEQ ID NO: 211235 - DNA, 25 bp, probe
gaatcttgtggtctgaggaaagaag

SEQ ID NO: 211236 - DNA, 25 bp, probe
gaatttggtgggacagcagaaaaga

SEQ ID NO: 211237 - DNA, 25 bp, probe
gaatttttttctccatcaacagtga

SEQ ID NO: 211238 - DNA, 25 bp, probe
gaattgagcttcatgtcaaaacgga

SEQ ID NO: 211239 - DNA, 25 bp, probe
gaatatggtgtcattaaccccgcag

SEQ ID NO: 211240 - DNA, 25 bp, probe
gcaattggcttccttagagtccaaa

SEQ ID NO: 211241 - DNA, 25 bp, probe
gcaattggcttccttagagtccaaa

SEQ ID NO: 211242 - DNA, 25 bp, probe
gcaattgcctatcgtaaattcacat

SEQ ID NO: 211243 - DNA, 25 bp, probe
gcaatgctgcctactatcaaactag

SEQ ID NO: 211244 - DNA, 25 bp, probe
gcaatgtgactatccacaaccgctg

SEQ ID NO: 211245 - DNA, 25 bp, probe
gcaatgtaagtgcctataaccatgt

SEQ ID NO: 211246 - DNA, 25 bp, probe
gcaatgcaaaggccttgcacctcaa

SEQ ID NO: 211247 - DNA, 25 bp, probe
gcaatgatcaacagttcactccagg

SEQ ID NO: 211248 - DNA, 25 bp, probe
gcaatcatatactgtttctgcaatg

SEQ ID NO: 211249 - DNA, 25 bp, probe
gcaataaccactgcttccaagtctc

SEQ ID NO: 211250 - DNA, 25 bp, probe
gaatacccaatggaaacaagtggca

SEQ ID NO: 211251 - DNA, 25 bp, probe
gaattcaccattagaggacatttag

SEQ ID NO: 211252 - DNA, 25 bp, probe
gaatgattccatgaaggcagcactg

SEQ ID NO: 211253 - DNA, 25 bp, probe
gaatctttcccatgagaagctggtg

SEQ ID NO: 211254 - DNA, 25 bp, probe
gaatttttactatggcagatatggt

SEQ ID NO: 211255 - DNA, 25 bp, probe
gaatttttactatggcagatatggt

SEQ ID NO: 211256 - DNA, 25 bp, probe
gaatttgcccaggtaggcgtgagag

SEQ ID NO: 211257 - DNA, 25 bp, probe
gaatttcctgacaaagactgggcac

SEQ ID NO: 211258 - DNA, 25 bp, probe
gcaatttcctgcaaccagtaaggac

SEQ ID NO: 211259 - DNA, 25 bp, probe
gaattatcctgccaacgtgaaaacc

SEQ ID NO: 211260 - DNA, 25 bp, probe
gaatttaggccagtcagtgaagaat

SEQ ID NO: 211261 - DNA, 25 bp, probe
gaatttttccagcccgaaggatctg

SEQ ID NO: 211262 - DNA, 25 bp, probe
gaatatttttgaggcgaaggcgtct

SEQ ID NO: 211263 - DNA, 25 bp, probe
gaattttttcctaaagactgtatat

SEQ ID NO: 211264 - DNA, 25 bp, probe
gaattttttcctaaagactgtatat

SEQ ID NO: 211265 - DNA, 25 bp, probe
gaattatctgatgccctaaactgta

SEQ ID NO: 211266 - DNA, 25 bp, probe
gaattccttgtctctgaatgactct

SEQ ID NO: 211267 - DNA, 25 bp, probe
gaattccttgtctctgaatgactct

SEQ ID NO: 211268 - DNA, 25 bp, probe
gaattggtttgctctgatcattgct

SEQ ID NO: 211269 - DNA, 25 bp, probe
gaattgtgtgcttaccttcattcgt

SEQ ID NO: 211270 - DNA, 25 bp, probe
gaatttgctttgtttactgctagta

SEQ ID NO: 211271 - DNA, 25 bp, probe
gaatttgctttgtttactgctagta

SEQ ID NO: 211272 - DNA, 25 bp, probe
gaatcatggttgttttgtctcacgt

SEQ ID NO: 211273 - DNA, 25 bp, probe
gaatcacgtatggttctttctgtgg

SEQ ID NO: 211274 - DNA, 25 bp, probe
gaattcagttggttcgttctgtact

SEQ ID NO: 211275 - DNA, 25 bp, probe
gaattagagtggtatttcactttgt

SEQ ID NO: 211276 - DNA, 25 bp, probe
gaatctcaaccgtattccatacaag

SEQ ID NO: 211277 - DNA, 25 bp, probe
gaattatgaccaaatctccgataag

SEQ ID NO: 211278 - DNA, 25 bp, probe
gaataaagcctcatatccaggaaaa

SEQ ID NO: 211279 - DNA, 25 bp, probe
gaataaagcctcatatccaggaaaa

SEQ ID NO: 211280 - DNA, 25 bp, probe
gaatgaaagcacacttcgggatgac

SEQ ID NO: 211281 - DNA, 25 bp, probe
gaattccagatcatccgtgggaact

SEQ ID NO: 211282 - DNA, 25 bp, probe
gaattccatgcagtgtcttgctggc

SEQ ID NO: 211283 - DNA, 25 bp, probe
gaatatcagctgccatattacgact

SEQ ID NO: 211284 - DNA, 25 bp, probe
gaattgagtccattttctagctgcc

SEQ ID NO: 211285 - DNA, 25 bp, probe
gacttggcccaagtttatggcctgg

SEQ ID NO: 211286 - DNA, 25 bp, probe
gacttggcccaagtttatggcctgg

SEQ ID NO: 211287 - DNA, 25 bp, probe
gaatcggcccaagtatgcgggactc

SEQ ID NO: 211288 - DNA, 25 bp, probe
gcaatcaggtcagaaagggatgagt

SEQ ID NO: 211289 - DNA, 25 bp, probe
gaattggatctggatcatttggaac

SEQ ID NO: 211290 - DNA, 25 bp, probe
gaattgtgatcctacctttgaactt

SEQ ID NO: 211291 - DNA, 25 bp, probe
gaagtggatacctctagtgcaattt

SEQ ID NO: 211292 - DNA, 25 bp, probe
gaagtggatacctctagtgcaattt

SEQ ID NO: 211293 - DNA, 25 bp, probe
gaagtggatacctctagtgcaattt

SEQ ID NO: 211294 - DNA, 25 bp, probe
gaactggtgacctgtaggccatgtt

SEQ ID NO: 211295 - DNA, 25 bp, probe
gaattgtgtacctgaagtacagtat

SEQ ID NO: 211296 - DNA, 25 bp, probe
gaattggtcacctaacactgacacg

SEQ ID NO: 211297 - DNA, 25 bp, probe
gaataggtcccaaacttaaatgtgg

SEQ ID NO: 211298 - DNA, 25 bp, probe
gaatctcctaacagactttcaggtt

SEQ ID NO: 211299 - DNA, 25 bp, probe
gaatctcctaacagactttcaggtt

SEQ ID NO: 211300 - DNA, 25 bp, probe
gaataagaaagaatacgtccggttg

SEQ ID NO: 211301 - DNA, 25 bp, probe
gaatgaaaagcacacctaccctttg

SEQ ID NO: 211302 - DNA, 25 bp, probe
gaattaatcacactgaccaactttt

SEQ ID NO: 211303 - DNA, 25 bp, probe
gaattaaaattcccaaacatctctt

SEQ ID NO: 211304 - DNA, 25 bp, probe
gaatttggacatgccccaatgcttc

SEQ ID NO: 211305 - DNA, 25 bp, probe
gaattctgcgacgcacagctagcgc

SEQ ID NO: 211306 - DNA, 25 bp, probe
gaatattctgaagacagtgcgcacg

SEQ ID NO: 211307 - DNA, 25 bp, probe
gaatattctgaagacagtgcgcacg

SEQ ID NO: 211308 - DNA, 25 bp, probe
gcaatgatttggcaacagtgcgggt

SEQ ID NO: 211309 - DNA, 25 bp, probe
gcaatgactgttcttgcgggggata

SEQ ID NO: 211310 - DNA, 25 bp, probe
gcaatgcgtgtgaccttcgggaaat

SEQ ID NO: 211311 - DNA, 25 bp, probe
gaattttgtacttcagtgtactcat

SEQ ID NO: 211312 - DNA, 25 bp, probe
gaattttgtacttcagtgtactcat

SEQ ID NO: 211313 - DNA, 25 bp, probe
gaattttccttgtgtgtagctgctc

SEQ ID NO: 211314 - DNA, 25 bp, probe
gaattttccttgtgtgtagctgctc

SEQ ID NO: 211315 - DNA, 25 bp, probe
gaattggtacataagccattactgg

SEQ ID NO: 211316 - DNA, 25 bp, probe
gaattgcaaccatagccttatgggg

SEQ ID NO: 211317 - DNA, 25 bp, probe
gaattgcgcaacacctttagggaga

SEQ ID NO: 211318 - DNA, 25 bp, probe
gaattgcgcaacacctttagggaga

SEQ ID NO: 211319 - DNA, 25 bp, probe
gaatctcagagtgtcctctgggggg

SEQ ID NO: 211320 - DNA, 25 bp, probe
gaatctcagagtgtcctctgggggg

SEQ ID NO: 211321 - DNA, 25 bp, probe
gaatttcaggacatctcggaggagg

SEQ ID NO: 211322 - DNA, 25 bp, probe
gaatttctggaacccaggaggcgga

SEQ ID NO: 211323 - DNA, 25 bp, probe
gaatttatggaatctaccaactgtt

SEQ ID NO: 211324 - DNA, 25 bp, probe
gaatttatggaatctaccaactgtt

SEQ ID NO: 211325 - DNA, 25 bp, probe
gaatttatggaatctaccaactgtt

SEQ ID NO: 211326 - DNA, 25 bp, probe
gaattttggaatttttgaagatgta

SEQ ID NO: 211327 - DNA, 25 bp, probe
gaatattcccaattttcgaagtcag

SEQ ID NO: 211328 - DNA, 25 bp, probe
gaatattcccaattttcgaagtcag

SEQ ID NO: 211329 - DNA, 25 bp, probe
gaatttcccgatattccagagaaag

SEQ ID NO: 211330 - DNA, 25 bp, probe
gaatttacagtaactgtccccaaag

SEQ ID NO: 211331 - DNA, 25 bp, probe
gaatattaagttttcctctgtgcaa

SEQ ID NO: 211332 - DNA, 25 bp, probe
gaatataaaatcactcctatcacaa

SEQ ID NO: 211333 - DNA, 25 bp, probe
gaattagaagtgtgccagcttcaaa

SEQ ID NO: 211334 - DNA, 25 bp, probe
gaattgcccctctgtagttaaaaag

SEQ ID NO: 211335 - DNA, 25 bp, probe
gaattccccctttcaatgatgaaac

SEQ ID NO: 211336 - DNA, 25 bp, probe
gaattcgtcccactaaagatgtcag

SEQ ID NO: 211337 - DNA, 25 bp, probe
gcaatccgtgcactgcttcaaagag

SEQ ID NO: 211338 - DNA, 25 bp, probe
gcaatccgtgcactgcttcaaagag

SEQ ID NO: 211339 - DNA, 25 bp, probe
gcaatcgggaaggagcacaagggga

SEQ ID NO: 211340 - DNA, 25 bp, probe
gaaggcggaaattcacgggggcagt

SEQ ID NO: 211341 - DNA, 25 bp, probe
gaataaggaagttacggctgctgtc

SEQ ID NO: 211342 - DNA, 25 bp, probe
gaatagttactcatacggctggtcc

SEQ ID NO: 211343 - DNA, 25 bp, probe
gaatagttactcatacggctggtcc

SEQ ID NO: 211344 - DNA, 25 bp, probe
gaatcgttagtctgaccctgaacgt

SEQ ID NO: 211345 - DNA, 25 bp, probe
gaattgatgtataaaaccctagact

SEQ ID NO: 211346 - DNA, 25 bp, probe
gaatttgtctaacacatttcaagga

SEQ ID NO: 211347 - DNA, 25 bp, probe
gaattattcttattgaccattaatg

SEQ ID NO: 211348 - DNA, 25 bp, probe
gaatcttacttctccacagtgaaga

SEQ ID NO: 211349 - DNA, 25 bp, probe
gaattgaaaatgcattagggaaaac

SEQ ID NO: 211350 - DNA, 25 bp, probe
gaattgacattgaaatctaggaaaa

SEQ ID NO: 211351 - DNA, 25 bp, probe
gaattactctgaagttatgaaacat

SEQ ID NO: 211352 - DNA, 25 bp, probe
gaattactctgaagttatgaaacat

SEQ ID NO: 211353 - DNA, 25 bp, probe
gaatcggcacgaggattattcaaga

SEQ ID NO: 211354 - DNA, 25 bp, probe
gcaatagtgaggcagactttcaata

SEQ ID NO: 211355 - DNA, 25 bp, probe
gcaatgacttgggtgaccttaagga

SEQ ID NO: 211356 - DNA, 25 bp, probe
gaatacttggaagtcgtttcaggac

SEQ ID NO: 211357 - DNA, 25 bp, probe
gaatacttggaagtcgtttcaggac

SEQ ID NO: 211358 - DNA, 25 bp, probe
gaatactgtgccaactttatgtggg

SEQ ID NO: 211359 - DNA, 25 bp, probe
gaatatttccatgtattttgactgg

SEQ ID NO: 211360 - DNA, 25 bp, probe
gaatatggatttttcatgtcttgag

SEQ ID NO: 211361 - DNA, 25 bp, probe
gcaatataattcagcaattgtctag

SEQ ID NO: 211362 - DNA, 25 bp, probe
gaattacatccaaagattcattcag

SEQ ID NO: 211363 - DNA, 25 bp, probe
gaatcaaatcccgagaagatgtcag

SEQ ID NO: 211364 - DNA, 25 bp, probe
gaatcaccacagtgctgaccatgtc

SEQ ID NO: 211365 - DNA, 25 bp, probe
gaatccccagacggaagctcatgta

SEQ ID NO: 211366 - DNA, 25 bp, probe
gaatccccagacggaagctcatgta

SEQ ID NO: 211367 - DNA, 25 bp, probe
gaattccataccgttactctgatga

SEQ ID NO: 211368 - DNA, 25 bp, probe
gaattccataactgtacagaatgta

SEQ ID NO: 211369 - DNA, 25 bp, probe
gaattgccagaacggtattggtgtt

SEQ ID NO: 211370 - DNA, 25 bp, probe
gcaatggccaaaagagttgttgctg

SEQ ID NO: 211371 - DNA, 25 bp, probe
gcaatggccaggaggcctatgcctc

SEQ ID NO: 211372 - DNA, 25 bp, probe
gaatagccaggtctggctgggtcgg

SEQ ID NO: 211373 - DNA, 25 bp, probe
gaacatgtcgggaggggggtggaca

SEQ ID NO: 211374 - DNA, 25 bp, probe
gaacctggaggcacgggtggaagca

SEQ ID NO: 211375 - DNA, 25 bp, probe
gacaacgagtacacggctcgggaag

SEQ ID NO: 211376 - DNA, 25 bp, probe
gacacggagtttgcgtttgaggtag

SEQ ID NO: 211377 - DNA, 25 bp, probe
gaatatggagagagccctttgcagg

SEQ ID NO: 211378 - DNA, 25 bp, probe
gaatatggagagagccctttgcagg

SEQ ID NO: 211379 - DNA, 25 bp, probe
gaatatggagagagccctttgcagg

SEQ ID NO: 211380 - DNA, 25 bp, probe
gaattggatatctgtcccttcagac

SEQ ID NO: 211381 - DNA, 25 bp, probe
gcaatggtgaactagacccctggtc

SEQ ID NO: 211382 - DNA, 25 bp, probe
gaatccatgaactgtgaggccttta

SEQ ID NO: 211383 - DNA, 25 bp, probe
gaatccgaaaagtttccacttgcag

SEQ ID NO: 211384 - DNA, 25 bp, probe
gaatatagaaagcatttcccccaaa

SEQ ID NO: 211385 - DNA, 25 bp, probe
gaatgaaaacagagcttcccgtgca

SEQ ID NO: 211386 - DNA, 25 bp, probe
gcaatcaaagatatgtcttcctcca

SEQ ID NO: 211387 - DNA, 25 bp, probe
gcaatgcaaaaatcatcttcaccct

SEQ ID NO: 211388 - DNA, 25 bp, probe
gaaggcaaaattattacccatacgt

SEQ ID NO: 211389 - DNA, 25 bp, probe
gaaggcaaaattattacccatacgt

SEQ ID NO: 211390 - DNA, 25 bp, probe
gaaggacgaaaagctttgccaaagt

SEQ ID NO: 211391 - DNA, 25 bp, probe
gaaatgggttaatcttgccaaaact

SEQ ID NO: 211392 - DNA, 25 bp, probe
gaagtagccatcacaccattaaaaa

SEQ ID NO: 211393 - DNA, 25 bp, probe
gaattaccattccagacatcaaaaa

SEQ ID NO: 211394 - DNA, 25 bp, probe
gaataaccactctaatcagtaaaca

SEQ ID NO: 211395 - DNA, 25 bp, probe
gcaataatgcacttttcatacttga

SEQ ID NO: 211396 - DNA, 25 bp, probe
gcaataatgcaaaagctgttctata

SEQ ID NO: 211397 - DNA, 25 bp, probe
gcaatcaagccacaggccttatttc

SEQ ID NO: 211398 - DNA, 25 bp, probe
gaatcacaccaagactttattgtta

SEQ ID NO: 211399 - DNA, 25 bp, probe
gaatgcacttaatagctggttttta

SEQ ID NO: 211400 - DNA, 25 bp, probe
gaaggcttagtagctcagtctttaa

SEQ ID NO: 211401 - DNA, 25 bp, probe
gaaggctttatacccatctagtgtt

SEQ ID NO: 211402 - DNA, 25 bp, probe
gaaggctttatacccatctagtgtt

SEQ ID NO: 211403 - DNA, 25 bp, probe
gacaggcaactatggcaactaccgg

SEQ ID NO: 211404 - DNA, 25 bp, probe
gaagtggactatgggaacgaatggt

SEQ ID NO: 211405 - DNA, 25 bp, probe
gaaggcgaatttggaaaagtggtca

SEQ ID NO: 211406 - DNA, 25 bp, probe
gaatggaaacttggaaatactcgtt

SEQ ID NO: 211407 - DNA, 25 bp, probe
gcaatgactaaaaggtaaaacgctg

SEQ ID NO: 211408 - DNA, 25 bp, probe
gaattcttcaagggctaattaccta

SEQ ID NO: 211409 - DNA, 25 bp, probe
gaatttgctccggccaaattggccg

SEQ ID NO: 211410 - DNA, 25 bp, probe
gaattctttgcagccagagttggac

SEQ ID NO: 211411 - DNA, 25 bp, probe
gaatattgtagcccgcaagattgtg

SEQ ID NO: 211412 - DNA, 25 bp, probe
gaattctatagccaagacgtatgtt

SEQ ID NO: 211413 - DNA, 25 bp, probe
gaattcatatatcatcaaagttatc

SEQ ID NO: 211414 - DNA, 25 bp, probe
gaattcatgttttgcagagttttgc

SEQ ID NO: 211415 - DNA, 25 bp, probe
gcaatagatgacactgatggtttta

SEQ ID NO: 211416 - DNA, 25 bp, probe
gcaatcagcagacacgggagtttgt

SEQ ID NO: 211417 - DNA, 25 bp, probe
gcaatagcgagggtcgtgagctttg

SEQ ID NO: 211418 - DNA, 25 bp, probe
gcaatcagtcagggctgcagtgagc

SEQ ID NO: 211419 - DNA, 25 bp, probe
gcaatctccatttctcagtgacaga

SEQ ID NO: 211420 - DNA, 25 bp, probe
gcaatctccatttctcagtgacaga

SEQ ID NO: 211421 - DNA, 25 bp, probe
gcaattccttctgagagatgcagca

SEQ ID NO: 211422 - DNA, 25 bp, probe
gcaatttctatatcaggacagcaac

SEQ ID NO: 211423 - DNA, 25 bp, probe
gaattcattgaaagtgggcatgcta

SEQ ID NO: 211424 - DNA, 25 bp, probe
gcaatcctcagtttgtggtctgcca

SEQ ID NO: 211425 - DNA, 25 bp, probe
gcaatcctcagtttgtggtctgcca

SEQ ID NO: 211426 - DNA, 25 bp, probe
gcaattcatgcttcttgtggtctgg

SEQ ID NO: 211427 - DNA, 25 bp, probe
gcaatatgacattcttggtgacagt

SEQ ID NO: 211428 - DNA, 25 bp, probe
gaatagcaatagcatggatagagta

SEQ ID NO: 211429 - DNA, 25 bp, probe
gaatagcagcaacagtcaggagggc

SEQ ID NO: 211430 - DNA, 25 bp, probe
gaatcaatcaatccagtcaggtaat

SEQ ID NO: 211431 - DNA, 25 bp, probe
gaatcagctggatcccagtgtcctg

SEQ ID NO: 211432 - DNA, 25 bp, probe
gaatcagctggatcccagtgtcctg

SEQ ID NO: 211433 - DNA, 25 bp, probe
gaataagcgcattatccaattatag

SEQ ID NO: 211434 - DNA, 25 bp, probe
gaatgcacaagaaccacaattaaga

SEQ ID NO: 211435 - DNA, 25 bp, probe
gcaatgccagagaggactcttgcga

SEQ ID NO: 211436 - DNA, 25 bp, probe
gcaattaacatccgactctgtagtg

SEQ ID NO: 211437 - DNA, 25 bp, probe
gcaatacacctctgaacatgtgtgt

SEQ ID NO: 211438 - DNA, 25 bp, probe
gcaatactcagcccaagaatttgtc

SEQ ID NO: 211439 - DNA, 25 bp, probe
gcaatccatacaccaagaacttgtt

SEQ ID NO: 211440 - DNA, 25 bp, probe
gcaatccatcaacgaagccatacgg

SEQ ID NO: 211441 - DNA, 25 bp, probe
gcaatcgactgcatcacgcagggac

SEQ ID NO: 211442 - DNA, 25 bp, probe
gcaattgcctcaccctgaggacatc

SEQ ID NO: 211443 - DNA, 25 bp, probe
gcaatctccatggcctctaagataa

SEQ ID NO: 211444 - DNA, 25 bp, probe
gaatctcctggaatgcttaatggac

SEQ ID NO: 211445 - DNA, 25 bp, probe
gaatctcctcagagaaaagggccac

SEQ ID NO: 211446 - DNA, 25 bp, probe
gaatttgcacagaggaaagcgggtg

SEQ ID NO: 211447 - DNA, 25 bp, probe
gaattgtccagcttggaacacgcag

SEQ ID NO: 211448 - DNA, 25 bp, probe
gaattgtccagcttggaacacgcag

SEQ ID NO: 211449 - DNA, 25 bp, probe
gaattctctgctgtggtatcagtgg

SEQ ID NO: 211450 - DNA, 25 bp, probe
gaatgcctccagatgagctatcagg

SEQ ID NO: 211451 - DNA, 25 bp, probe
gaatcactgctggttgtgcattcaa

SEQ ID NO: 211452 - DNA, 25 bp, probe
gcaatcacttgtcattttgcataat

SEQ ID NO: 211453 - DNA, 25 bp, probe
gcaataatggcagtagttctcaaat

SEQ ID NO: 211454 - DNA, 25 bp, probe
gcaatagagcaagagttccggctgc

SEQ ID NO: 211455 - DNA, 25 bp, probe
gcaatcaggccagtggctgtttggc

SEQ ID NO: 211456 - DNA, 25 bp, probe
gcaatcacaccatgccatgttttcc

SEQ ID NO: 211457 - DNA, 25 bp, probe
gcaatcattaaagtgcatagatttc

SEQ ID NO: 211458 - DNA, 25 bp, probe
gcaatcatgttaagtcttgttttca

SEQ ID NO: 211459 - DNA, 25 bp, probe
gaatatgctgtaggctgcctgcgac

SEQ ID NO: 211460 - DNA, 25 bp, probe
gaatatgctgatggagcgaagtaaa

SEQ ID NO: 211461 - DNA, 25 bp, probe
gaattgctgtgtcccagaggaaagt

SEQ ID NO: 211462 - DNA, 25 bp, probe
gaattctgtggctcagcacacagga

SEQ ID NO: 211463 - DNA, 25 bp, probe
gaattgctattctcgatacatacaa

SEQ ID NO: 211464 - DNA, 25 bp, probe
gaattggcagaatcagttgcaataa

SEQ ID NO: 211465 - DNA, 25 bp, probe
gaattggctggatatttcccatgat

SEQ ID NO: 211466 - DNA, 25 bp, probe
gaataggggcatcagtgtcccgtga

SEQ ID NO: 211467 - DNA, 25 bp, probe
gaatatgagtgggtcctgatcgccg

SEQ ID NO: 211468 - DNA, 25 bp, probe
gaatatgagctgtctgtcatttacc

SEQ ID NO: 211469 - DNA, 25 bp, probe
gaatcatcagccttggtcagaatgc

SEQ ID NO: 211470 - DNA, 25 bp, probe
gaatcatcagccttggtcagaatgc

SEQ ID NO: 211471 - DNA, 25 bp, probe
gaattaacttggcctaatgctaatg

SEQ ID NO: 211472 - DNA, 25 bp, probe
gaatctgacttacgccattattacg

SEQ ID NO: 211473 - DNA, 25 bp, probe
gaattcatcttctgctatatactcc

SEQ ID NO: 211474 - DNA, 25 bp, probe
gaattgcctgtcacaatacagtcaa

SEQ ID NO: 211475 - DNA, 25 bp, probe
gaattgcctgtcacaatacagtcaa

SEQ ID NO: 211476 - DNA, 25 bp, probe
gcaattttgtgcacagattcccgac

SEQ ID NO: 211477 - DNA, 25 bp, probe
gaatttttcaggaggcccagactat

SEQ ID NO: 211478 - DNA, 25 bp, probe
gaattttctttgaagagcccatcct

SEQ ID NO: 211479 - DNA, 25 bp, probe
gaattttctttgaagagcccatcct

SEQ ID NO: 211480 - DNA, 25 bp, probe
gaataatccttgttagagttatccc

SEQ ID NO: 211481 - DNA, 25 bp, probe
gaatctaccattgctacgatactcc

SEQ ID NO: 211482 - DNA, 25 bp, probe
gaatcatcggcttggtactgaaacc

SEQ ID NO: 211483 - DNA, 25 bp, probe
gaatcatcggcttggtactgaaacc

SEQ ID NO: 211484 - DNA, 25 bp, probe
gaatatcaccattgcagttcaaaac

SEQ ID NO: 211485 - DNA, 25 bp, probe
gaatatcctgatggaggctccacac

SEQ ID NO: 211486 - DNA, 25 bp, probe
gaatatcagagaaagcaccgctcac

SEQ ID NO: 211487 - DNA, 25 bp, probe
gaatatgctaggctgcactctgcta

SEQ ID NO: 211488 - DNA, 25 bp, probe
gaattgtcaggagtgcacctctcta

SEQ ID NO: 211489 - DNA, 25 bp, probe
gaattggcatgatgctcaccttcaa

SEQ ID NO: 211490 - DNA, 25 bp, probe
gaattagctgcttctatgtttcata

SEQ ID NO: 211491 - DNA, 25 bp, probe
gaattagctgcttctatgtttcata

SEQ ID NO: 211492 - DNA, 25 bp, probe
gcaattagtcagctgatttgattac

SEQ ID NO: 211493 - DNA, 25 bp, probe
gaattcattcaaatgctcttttccc

SEQ ID NO: 211494 - DNA, 25 bp, probe
gaattcattcaaatgctcttttccc

SEQ ID NO: 211495 - DNA, 25 bp, probe
gaattatgtcaggttggcttgtccc

SEQ ID NO: 211496 - DNA, 25 bp, probe
gaattgtttgcacttgtgcctgttt

SEQ ID NO: 211497 - DNA, 25 bp, probe
gcaattgattttattgactgcgtca

SEQ ID NO: 211498 - DNA, 25 bp, probe
gaatctattttctatgtactagtac

SEQ ID NO: 211499 - DNA, 25 bp, probe
gaatccagtttctactactttggct

SEQ ID NO: 211500 - DNA, 25 bp, probe
gaatccattattctattttagactt

SEQ ID NO: 211501 - DNA, 25 bp, probe
gaatccattattctattttagactt

SEQ ID NO: 211502 - DNA, 25 bp, probe
gaacttacttttccttgatagggtg

SEQ ID NO: 211503 - DNA, 25 bp, probe
gaaccccttttaattgaatcagtgg

SEQ ID NO: 211504 - DNA, 25 bp, probe
gaataccaattgccatattacaaca

SEQ ID NO: 211505 - DNA, 25 bp, probe
gaaaattcactgctataagaaaggt

SEQ ID NO: 211506 - DNA, 25 bp, probe
gtagtactgcctctataaaaacgtc

SEQ ID NO: 211507 - DNA, 25 bp, probe
gtagtactgcctctataaaaacgtc

SEQ ID NO: 211508 - DNA, 25 bp, probe
gaaggcactcctctttaaggaccga

SEQ ID NO: 211509 - DNA, 25 bp, probe
gaaggactggtaactaaatggtaca

SEQ ID NO: 211510 - DNA, 25 bp, probe
gcaatacactgtaatatcagaaatg

SEQ ID NO: 211511 - DNA, 25 bp, probe
gcaattcactgtaaagctggaaagg

SEQ ID NO: 211512 - DNA, 25 bp, probe
gaattcttggatgcagtggcagaat

SEQ ID NO: 211513 - DNA, 25 bp, probe
gaatactggccatgcctggagacat

SEQ ID NO: 211514 - DNA, 25 bp, probe
gcaatacgggggcctctatgaatta

SEQ ID NO: 211515 - DNA, 25 bp, probe
gaattagggtgggctctaaatccat

SEQ ID NO: 211516 - DNA, 25 bp, probe
gaattcaccgtgtgctttatgacca

SEQ ID NO: 211517 - DNA, 25 bp, probe
gaattcaccgtgtgctttatgacca

SEQ ID NO: 211518 - DNA, 25 bp, probe
gaatactgccaaaacatttatgaca

SEQ ID NO: 211519 - DNA, 25 bp, probe
gaattgccacaaacaaggctcaaaa

SEQ ID NO: 211520 - DNA, 25 bp, probe
gaattgtcacaatagcagagccatt

SEQ ID NO: 211521 - DNA, 25 bp, probe
gaattgtcacaatagcagagccatt

SEQ ID NO: 211522 - DNA, 25 bp, probe
gaattgtatcattaaaagtatctaa

SEQ ID NO: 211523 - DNA, 25 bp, probe
gaattgtatcattaaaagtatctaa

SEQ ID NO: 211524 - DNA, 25 bp, probe
gaatatgtcaagtttaggtcattta

SEQ ID NO: 211525 - DNA, 25 bp, probe
gaatattcccagatggacacattta

SEQ ID NO: 211526 - DNA, 25 bp, probe
gaatattataccagatgaacatttc

SEQ ID NO: 211527 - DNA, 25 bp, probe
gaattgcatcccaaggcaaagcttt

SEQ ID NO: 211528 - DNA, 25 bp, probe
gaattcaccctatgacattgccttg

SEQ ID NO: 211529 - DNA, 25 bp, probe
gaatttccactatatcaacctcatc

SEQ ID NO: 211530 - DNA, 25 bp, probe
gcaattgtccatgtgtttctccaat

SEQ ID NO: 211531 - DNA, 25 bp, probe
gcaattgtctctgttttacaagttg

SEQ ID NO: 211532 - DNA, 25 bp, probe
gcaattctacagtttcttactgttt

SEQ ID NO: 211533 - DNA, 25 bp, probe
gaatttaatgttataactcatctag

SEQ ID NO: 211534 - DNA, 25 bp, probe
gaattctgagtttgaaaccctctac

SEQ ID NO: 211535 - DNA, 25 bp, probe
gaatactgcagtaataagactagct

SEQ ID NO: 211536 - DNA, 25 bp, probe
gaatttatggcaataagactgagtt

SEQ ID NO: 211537 - DNA, 25 bp, probe
gaattaatggatgctaacttatgtc

SEQ ID NO: 211538 - DNA, 25 bp, probe
gaattcttggatattacttatgtct

SEQ ID NO: 211539 - DNA, 25 bp, probe
gaatttctgagtgagtccttttttt

SEQ ID NO: 211540 - DNA, 25 bp, probe
gaatttctgagtgagtccttttttt

SEQ ID NO: 211541 - DNA, 25 bp, probe
gaatcaatctgaattagtcctgttt

SEQ ID NO: 211542 - DNA, 25 bp, probe
gaattcttgataaatgactgttttt

SEQ ID NO: 211543 - DNA, 25 bp, probe
gaattcttgataaatgactgttttt

SEQ ID NO: 211544 - DNA, 25 bp, probe
gaattgttgtgtaatagccttttta

SEQ ID NO: 211545 - DNA, 25 bp, probe
gaatacctctaaatcgtccttttat

SEQ ID NO: 211546 - DNA, 25 bp, probe
gaatacctctactaacaaccaattt

SEQ ID NO: 211547 - DNA, 25 bp, probe
gaatacctttaggaccactggactt

SEQ ID NO: 211548 - DNA, 25 bp, probe
gaatacttttagagtgccagcagag

SEQ ID NO: 211549 - DNA, 25 bp, probe
gaattcttattccaggtgcaagcag

SEQ ID NO: 211550 - DNA, 25 bp, probe
gaattcttattccaggtgcaagcag

SEQ ID NO: 211551 - DNA, 25 bp, probe
gaatttgatactcctctgtgaatgc

SEQ ID NO: 211552 - DNA, 25 bp, probe
gaattctgtcctcactgataggggt

SEQ ID NO: 211553 - DNA, 25 bp, probe
gaattagtcctgttttggtggagtt

SEQ ID NO: 211554 - DNA, 25 bp, probe
gaattactgctttttctgtgggcat

SEQ ID NO: 211555 - DNA, 25 bp, probe
gaattgacggtattattggagattt

SEQ ID NO: 211556 - DNA, 25 bp, probe
gaattacatggttcaagcaggagac

SEQ ID NO: 211557 - DNA, 25 bp, probe
gaattacatggttcaagcaggagac

SEQ ID NO: 211558 - DNA, 25 bp, probe
gaattgcacaggaaaacgtgttcta

SEQ ID NO: 211559 - DNA, 25 bp, probe
gaattgcaaggctgaaaagcttgga

SEQ ID NO: 211560 - DNA, 25 bp, probe
gaattgcttggtggaacatatgctt

SEQ ID NO: 211561 - DNA, 25 bp, probe
gaattgttcgtgaaggctggcagtg

SEQ ID NO: 211562 - DNA, 25 bp, probe
gaattttcagctgaggctctgagaa

SEQ ID NO: 211563 - DNA, 25 bp, probe
gaatttctgcaccaagatctcaaga

SEQ ID NO: 211564 - DNA, 25 bp, probe
gaattcctcactctgacatgacagt

SEQ ID NO: 211565 - DNA, 25 bp, probe
gaattcactcctgccaatggagctg

SEQ ID NO: 211566 - DNA, 25 bp, probe
gaattcagcatcagcctgcagaggg

SEQ ID NO: 211567 - DNA, 25 bp, probe
gaattcagtaagtcacatgaagtaa

SEQ ID NO: 211568 - DNA, 25 bp, probe
gaattcagtaagtcacatgaagtaa

SEQ ID NO: 211569 - DNA, 25 bp, probe
gaattcactaggttcgaatccagag

SEQ ID NO: 211570 - DNA, 25 bp, probe
gaattctcagtgtttcaaatgcaaa

SEQ ID NO: 211571 - DNA, 25 bp, probe
gaatgtcaagctttgctccctagaa

SEQ ID NO: 211572 - DNA, 25 bp, probe
gaatgtcaagctttgctccctagaa

SEQ ID NO: 211573 - DNA, 25 bp, probe
gcaattccagcttagcaacgcagaa

SEQ ID NO: 211574 - DNA, 25 bp, probe
gaattgctcagccaccaaaagtaac

SEQ ID NO: 211575 - DNA, 25 bp, probe
gaatttcatgcacaatccaaaagac

SEQ ID NO: 211576 - DNA, 25 bp, probe
gaatgccctcaatccgagaaagcct

SEQ ID NO: 211577 - DNA, 25 bp, probe
gaatcacctctctcatggaagaacc

SEQ ID NO: 211578 - DNA, 25 bp, probe
gaatgcccctacttggtatatgtgc

SEQ ID NO: 211579 - DNA, 25 bp, probe
gaatcccaaaactgcttagattgca

SEQ ID NO: 211580 - DNA, 25 bp, probe
gaatcccaaaactgcttagattgca

SEQ ID NO: 211581 - DNA, 25 bp, probe
gaatagaaaaactcttcagcgcctt

SEQ ID NO: 211582 - DNA, 25 bp, probe
gaatcagaaaaacctgttcccatca

SEQ ID NO: 211583 - DNA, 25 bp, probe
gaatacaacattttgcagttccttc

SEQ ID NO: 211584 - DNA, 25 bp, probe
gaatacaacattttgcagttccttc

SEQ ID NO: 211585 - DNA, 25 bp, probe
gaattctactatttatgtgatcctt

SEQ ID NO: 211586 - DNA, 25 bp, probe
gaatcttaacttcatgtgagctatt

SEQ ID NO: 211587 - DNA, 25 bp, probe
gaatttgtaaactatgtgaggtctc

SEQ ID NO: 211588 - DNA, 25 bp, probe
gaatttgcacggtttgtgagagccc

SEQ ID NO: 211589 - DNA, 25 bp, probe
gaatttgcacggtttgtgagagccc

SEQ ID NO: 211590 - DNA, 25 bp, probe
gaatcttgcccgtttatgtatgctc

SEQ ID NO: 211591 - DNA, 25 bp, probe
gaatcacccacgttgtgaatgccgc

SEQ ID NO: 211592 - DNA, 25 bp, probe
gaatcacccacgttgtgaatgccgc

SEQ ID NO: 211593 - DNA, 25 bp, probe
gaatcacccacgttgtgaatgccgc

SEQ ID NO: 211594 - DNA, 25 bp, probe
gaatcacccacgttgtgaatgccgc

SEQ ID NO: 211595 - DNA, 25 bp, probe
gaatcacccacgttgtgaatgccgc

SEQ ID NO: 211596 - DNA, 25 bp, probe
gaataagcgcattttgatggacctg

SEQ ID NO: 211597 - DNA, 25 bp, probe
gaattgatggttagcgaggccgtgc

SEQ ID NO: 211598 - DNA, 25 bp, probe
gaattgatggttagcgaggccgtgc

SEQ ID NO: 211599 - DNA, 25 bp, probe
gaattgatggttagcgaggccgtgc

SEQ ID NO: 211600 - DNA, 25 bp, probe
gaattgatggttagcgaggccgtgc

SEQ ID NO: 211601 - DNA, 25 bp, probe
gaatcatgatctatacgcaaccgga

SEQ ID NO: 211602 - DNA, 25 bp, probe
gaatcttctaaaggcacacctcggt

SEQ ID NO: 211603 - DNA, 25 bp, probe
gaatcttctaaaggcacacctcggt

SEQ ID NO: 211604 - DNA, 25 bp, probe
gaatttatacaaggagaagcactgg

SEQ ID NO: 211605 - DNA, 25 bp, probe
gaatattctagctactgtaacattg

SEQ ID NO: 211606 - DNA, 25 bp, probe
gaatatcatctatgacagcatcaaa

SEQ ID NO: 211607 - DNA, 25 bp, probe
gaatcaacttggtcaacagaagctg

SEQ ID NO: 211608 - DNA, 25 bp, probe
gaataataatgttaccaactgctga

SEQ ID NO: 211609 - DNA, 25 bp, probe
gaataataatgttaccaactgctga

SEQ ID NO: 211610 - DNA, 25 bp, probe
gaatactattcttaaagctgctgaa

SEQ ID NO: 211611 - DNA, 25 bp, probe
gaataagattttgagcagtgtccag

SEQ ID NO: 211612 - DNA, 25 bp, probe
gaatacacttttaacagccctagat

SEQ ID NO: 211613 - DNA, 25 bp, probe
gaattcacttttttcatgacctaga

SEQ ID NO: 211614 - DNA, 25 bp, probe
gaatatcaattaaattatatcctaa

SEQ ID NO: 211615 - DNA, 25 bp, probe
gaatatcaattaaattatatcctaa

SEQ ID NO: 211616 - DNA, 25 bp, probe
gaattcagattgagatggccatcct

SEQ ID NO: 211617 - DNA, 25 bp, probe
gaattcctgatgggatagtatcaat

SEQ ID NO: 211618 - DNA, 25 bp, probe
gaattcctgatgggatagtatcaat

SEQ ID NO: 211619 - DNA, 25 bp, probe
gaattctctgagatataaacagttt

SEQ ID NO: 211620 - DNA, 25 bp, probe
gaattccatgatcctgataggcaag

SEQ ID NO: 211621 - DNA, 25 bp, probe
gaatttatctgaatataggaagcat

SEQ ID NO: 211622 - DNA, 25 bp, probe
gaatttatctgaatataggaagcat

SEQ ID NO: 211623 - DNA, 25 bp, probe
gaatatctatgatttacagagtaag

SEQ ID NO: 211624 - DNA, 25 bp, probe
gaatactttattacagagggtggga

SEQ ID NO: 211625 - DNA, 25 bp, probe
gaatttctttgtgagagaggtgcag

SEQ ID NO: 211626 - DNA, 25 bp, probe
gaatttttacgcaagaagagccaaa

SEQ ID NO: 211627 - DNA, 25 bp, probe
gaattgcttatgaaggaaaagccat

SEQ ID NO: 211628 - DNA, 25 bp, probe
gaattttgacgaagaaaatgccaac

SEQ ID NO: 211629 - DNA, 25 bp, probe
gaatcttggatccagtaaattgtca

SEQ ID NO: 211630 - DNA, 25 bp, probe
gaatcagtggcaacattaaagtttt

SEQ ID NO: 211631 - DNA, 25 bp, probe
gaatccgacattcaatgaaatgctt

SEQ ID NO: 211632 - DNA, 25 bp, probe
gaatgccgaatttggtacacatgtg

SEQ ID NO: 211633 - DNA, 25 bp, probe
gaatactgcaattgtggtcagaatt

SEQ ID NO: 211634 - DNA, 25 bp, probe
gaatactgcaattgtggtcagaatt

SEQ ID NO: 211635 - DNA, 25 bp, probe
gaatactgcaattttgtgctggctt

SEQ ID NO: 211636 - DNA, 25 bp, probe
gaatttcatgtttttgggctgtata

SEQ ID NO: 211637 - DNA, 25 bp, probe
gaatttcatgtttttgggctgtata

SEQ ID NO: 211638 - DNA, 25 bp, probe
gaatatttgcctaattgggaattaa

SEQ ID NO: 211639 - DNA, 25 bp, probe
gaagtttcccacttgtggatgttta

SEQ ID NO: 211640 - DNA, 25 bp, probe
gaagtttcccacttgtggatgttta

SEQ ID NO: 211641 - DNA, 25 bp, probe
gaatttgtaacctgattgtggaaag

SEQ ID NO: 211642 - DNA, 25 bp, probe
gaatttgtaatcatggttttactga

SEQ ID NO: 211643 - DNA, 25 bp, probe
gaattcgaaatagtggtatctctga

SEQ ID NO: 211644 - DNA, 25 bp, probe
gaatgtggtacaaagttagctctga

SEQ ID NO: 211645 - DNA, 25 bp, probe
gaattgcggagaactgtgtacttat

SEQ ID NO: 211646 - DNA, 25 bp, probe
gaattcgccatgtacttgaactact

SEQ ID NO: 211647 - DNA, 25 bp, probe
gaattcttctgtgcatatgtacata

SEQ ID NO: 211648 - DNA, 25 bp, probe
gaattcttctgtgcatatgtacata

SEQ ID NO: 211649 - DNA, 25 bp, probe
gaatatttctactacatctaatgac

SEQ ID NO: 211650 - DNA, 25 bp, probe
gaatctttgctaggaactgtgagtc

SEQ ID NO: 211651 - DNA, 25 bp, probe
gaatccctccatgaattgatgaatc

SEQ ID NO: 211652 - DNA, 25 bp, probe
gaatcttctagagagttgctgacca

SEQ ID NO: 211653 - DNA, 25 bp, probe
gaatttgtgacttagttctgccctt

SEQ ID NO: 211654 - DNA, 25 bp, probe
gaattttgaggttgtttccctggat

SEQ ID NO: 211655 - DNA, 25 bp, probe
gaattcaaaggtttctcctactttg

SEQ ID NO: 211656 - DNA, 25 bp, probe
gaattataaagtcatctcttctctg

SEQ ID NO: 211657 - DNA, 25 bp, probe
gaattctccaaccaatatttcctca

SEQ ID NO: 211658 - DNA, 25 bp, probe
gatttccctgcataattttagtact

SEQ ID NO: 211659 - DNA, 25 bp, probe
gaataccctgctcaacatttaatca

SEQ ID NO: 211660 - DNA, 25 bp, probe
gaatatctagtacttactttaacaa

SEQ ID NO: 211661 - DNA, 25 bp, probe
gaattgctggtactatttatgtaac

SEQ ID NO: 211662 - DNA, 25 bp, probe
gaattgctgaaagtctctatgttaa

SEQ ID NO: 211663 - DNA, 25 bp, probe
gaattgctgaaagtctctatgttaa

SEQ ID NO: 211664 - DNA, 25 bp, probe
gaattcatgcactagtctccatttc

SEQ ID NO: 211665 - DNA, 25 bp, probe
gaattcatgcactagtctccatttc

SEQ ID NO: 211666 - DNA, 25 bp, probe
gaattcagtgcatttcctcttgatt

SEQ ID NO: 211667 - DNA, 25 bp, probe
gaatttggtattggtttgatcctga

SEQ ID NO: 211668 - DNA, 25 bp, probe
gaatattggttcttcttttatctga

SEQ ID NO: 211669 - DNA, 25 bp, probe
gaatatggggtcatgtgtgttagga

SEQ ID NO: 211670 - DNA, 25 bp, probe
gaataggcaaacttttatgtaggca

SEQ ID NO: 211671 - DNA, 25 bp, probe
gaataggcaaacttttatgtaggca

SEQ ID NO: 211672 - DNA, 25 bp, probe
gaatatgctgcaaaatttctaaaaa

SEQ ID NO: 211673 - DNA, 25 bp, probe
gaattcagaaaaccacttaagcaag

SEQ ID NO: 211674 - DNA, 25 bp, probe
gaatagctgtgagaccgaattaaag

SEQ ID NO: 211675 - DNA, 25 bp, probe
gaatcctgctttacaggatcatgta

SEQ ID NO: 211676 - DNA, 25 bp, probe
gaataatatgtggaatggacagtat

SEQ ID NO: 211677 - DNA, 25 bp, probe
gaatcaattgtagaggatgccacat

SEQ ID NO: 211678 - DNA, 25 bp, probe
gaatatttgccctagaatgccagct

SEQ ID NO: 211679 - DNA, 25 bp, probe
gaatttcagccaataggagccagcc

SEQ ID NO: 211680 - DNA, 25 bp, probe
gaatttctcacaaaggatgcccaaa

SEQ ID NO: 211681 - DNA, 25 bp, probe
gaatccttacaaaaatgacgacact

SEQ ID NO: 211682 - DNA, 25 bp, probe
gaattcctaggaaactgtccagcct

SEQ ID NO: 211683 - DNA, 25 bp, probe
gaatcctccaagatactttgcagcc

SEQ ID NO: 211684 - DNA, 25 bp, probe
gaatccttcttgatagtttgcaggc

SEQ ID NO: 211685 - DNA, 25 bp, probe
gaatctctgtctagtttattaaagc

SEQ ID NO: 211686 - DNA, 25 bp, probe
gaatcttgtttgcttataagaactt

SEQ ID NO: 211687 - DNA, 25 bp, probe
gaatatggttctcctactaactagc

SEQ ID NO: 211688 - DNA, 25 bp, probe
gaatttattctcttactaacatctg

SEQ ID NO: 211689 - DNA, 25 bp, probe
gaatattctgtaaacctaatgtctg

SEQ ID NO: 211690 - DNA, 25 bp, probe
gaatattgtgtcaaccagaaagatt

SEQ ID NO: 211691 - DNA, 25 bp, probe
gaatttgttgaccacacaattcttg

SEQ ID NO: 211692 - DNA, 25 bp, probe
gaatattttgagcacacactctaag

SEQ ID NO: 211693 - DNA, 25 bp, probe
gaatttctgtgtcaaactgtttagc

SEQ ID NO: 211694 - DNA, 25 bp, probe
gaatcccgtgatcactactgtatgt

SEQ ID NO: 211695 - DNA, 25 bp, probe
gaatccgctgatctactactggagg

SEQ ID NO: 211696 - DNA, 25 bp, probe
gaatcctgctatggtaccattctaa

SEQ ID NO: 211697 - DNA, 25 bp, probe
gaatcacagctaaggaactactaga

SEQ ID NO: 211698 - DNA, 25 bp, probe
gagctggcgttagagacgattacaa

SEQ ID NO: 211699 - DNA, 25 bp, probe
gactggcttctaaaaccctgccaaa

SEQ ID NO: 211700 - DNA, 25 bp, probe
gacgggtcgggacaccagtgaaact

SEQ ID NO: 211701 - DNA, 25 bp, probe
ggggtccacgggtggcaggaattca

SEQ ID NO: 211702 - DNA, 25 bp, probe
gggtatccggggtgcggacaaggtg

SEQ ID NO: 211703 - DNA, 25 bp, probe
gggtatccggggtgcggacaaggtg

SEQ ID NO: 211704 - DNA, 25 bp, probe
gtcgtacggggagaggccctattgg

SEQ ID NO: 211705 - DNA, 25 bp, probe
gacttacgggaaaacaccatttcag

SEQ ID NO: 211706 - DNA, 25 bp, probe
gacccttggggtatacaaatgtcag

SEQ ID NO: 211707 - DNA, 25 bp, probe
gaatcactttggactttaccagtta

SEQ ID NO: 211708 - DNA, 25 bp, probe
gaatcacggttgcattaacaagttt

SEQ ID NO: 211709 - DNA, 25 bp, probe
tcaaccagtttgaaccaagaacttt

SEQ ID NO: 211710 - DNA, 25 bp, probe
gaatccaggttcaagccatagagtt

SEQ ID NO: 211711 - DNA, 25 bp, probe
gaatccaggttcaagccatagagtt

SEQ ID NO: 211712 - DNA, 25 bp, probe
gaatatgccgttaagccatcagttc

SEQ ID NO: 211713 - DNA, 25 bp, probe
gaatatgccgttaagccatcagttc

SEQ ID NO: 211714 - DNA, 25 bp, probe
gaatatgccctcgaaggagtgcttt

SEQ ID NO: 211715 - DNA, 25 bp, probe
gaatacaccaaaaggaggcgctctt

SEQ ID NO: 211716 - DNA, 25 bp, probe
gaatacaccaaaaggaggcgctctt

SEQ ID NO: 211717 - DNA, 25 bp, probe
gaatacagcctttcaagcagaggac

SEQ ID NO: 211718 - DNA, 25 bp, probe
gaatattctccttgatgatcgtgga

SEQ ID NO: 211719 - DNA, 25 bp, probe
gaatattctagctagcatatttggc

SEQ ID NO: 211720 - DNA, 25 bp, probe
gaatttcttgatactcttatagcct

SEQ ID NO: 211721 - DNA, 25 bp, probe
gaatttcttgatactcttatagcct

SEQ ID NO: 211722 - DNA, 25 bp, probe
gaattttgatcggctttttgcctac

SEQ ID NO: 211723 - DNA, 25 bp, probe
gaattttacatggtactcttgttga

SEQ ID NO: 211724 - DNA, 25 bp, probe
gaattttatggcttcctcttgtatg

SEQ ID NO: 211725 - DNA, 25 bp, probe
gaatgtttatggcacctgacttgta

SEQ ID NO: 211726 - DNA, 25 bp, probe
gaatgtttatggcacctgacttgta

SEQ ID NO: 211727 - DNA, 25 bp, probe
gaattttaaatgacctgcatcaagt

SEQ ID NO: 211728 - DNA, 25 bp, probe
gaatgctgttactaatcctgttacg

SEQ ID NO: 211729 - DNA, 25 bp, probe
gaatgtattactttactgttacctg

SEQ ID NO: 211730 - DNA, 25 bp, probe
gaattttattgcttatgtggcatac

SEQ ID NO: 211731 - DNA, 25 bp, probe
gaatattgtcatcctttgagctgct

SEQ ID NO: 211732 - DNA, 25 bp, probe
gaattcattctgatgtctggagctt

SEQ ID NO: 211733 - DNA, 25 bp, probe
gaatgcacttctgtggaggcacctt

SEQ ID NO: 211734 - DNA, 25 bp, probe
gaatgcctgtgcaggtggacacaca

SEQ ID NO: 211735 - DNA, 25 bp, probe
gaatctatggcagtgtttgaacagc

SEQ ID NO: 211736 - DNA, 25 bp, probe
gaatctcagagtgcttctaatcatc

SEQ ID NO: 211737 - DNA, 25 bp, probe
gaatccacacttaatataattcgcc

SEQ ID NO: 211738 - DNA, 25 bp, probe
gaatctattcgtcattcaattgctg

SEQ ID NO: 211739 - DNA, 25 bp, probe
gaatctattcgtcattcaattgctg

SEQ ID NO: 211740 - DNA, 25 bp, probe
gaatctcttcagcgtctgcagaagg

SEQ ID NO: 211741 - DNA, 25 bp, probe
gaatctctccagagttgcatgtaga

SEQ ID NO: 211742 - DNA, 25 bp, probe
gaatcccatcaggctgttattatga

SEQ ID NO: 211743 - DNA, 25 bp, probe
gaatcccatcaggctgttattatga

SEQ ID NO: 211744 - DNA, 25 bp, probe
gaatacttgcaggctttgtatgtga

SEQ ID NO: 211745 - DNA, 25 bp, probe
gaatactggagagttcttccgagac

SEQ ID NO: 211746 - DNA, 25 bp, probe
gaatactggagagttcttccgagac

SEQ ID NO: 211747 - DNA, 25 bp, probe
gaatactggagagttcttccgagac

SEQ ID NO: 211748 - DNA, 25 bp, probe
gaatactggagagttcttccgagac

SEQ ID NO: 211749 - DNA, 25 bp, probe
gaatcacctgaaacagcttccagag

SEQ ID NO: 211750 - DNA, 25 bp, probe
gaataccagcaaccgtatccagaac

SEQ ID NO: 211751 - DNA, 25 bp, probe
gaataccgaagcgaatactgcagaa

SEQ ID NO: 211752 - DNA, 25 bp, probe
gaatcacccaaccaaaagatgaaaa

SEQ ID NO: 211753 - DNA, 25 bp, probe
gaatccgacatcaaaacacgaaaat

SEQ ID NO: 211754 - DNA, 25 bp, probe
gaatctctggagaaaagacccagtt

SEQ ID NO: 211755 - DNA, 25 bp, probe
gaatctctgtagccgatgaggccca

SEQ ID NO: 211756 - DNA, 25 bp, probe
gaatatcaggatgctgagggcccac

SEQ ID NO: 211757 - DNA, 25 bp, probe
gaatatcaggatgctgagggcccac

SEQ ID NO: 211758 - DNA, 25 bp, probe
gaatctggaatgggagggtctggct

SEQ ID NO: 211759 - DNA, 25 bp, probe
gaatttaatgacccagtgctgggct

SEQ ID NO: 211760 - DNA, 25 bp, probe
gaattaaatcagcaaggatgagcag

SEQ ID NO: 211761 - DNA, 25 bp, probe
gaataccaaagttcaggatgtcaga

SEQ ID NO: 211762 - DNA, 25 bp, probe
gaatatccaccagtcggtgagtgag

SEQ ID NO: 211763 - DNA, 25 bp, probe
gaattatgactcatcggtcagcaga

SEQ ID NO: 211764 - DNA, 25 bp, probe
gaatgacgaccattacgtcatgcag

SEQ ID NO: 211765 - DNA, 25 bp, probe
gaatcagctgacccatacagacttg

SEQ ID NO: 211766 - DNA, 25 bp, probe
gaatcattgaggatccaagttgaga

SEQ ID NO: 211767 - DNA, 25 bp, probe
gaatatgagaggaacgggagatatg

SEQ ID NO: 211768 - DNA, 25 bp, probe
gaatctgagatgctcaagaggcaac

SEQ ID NO: 211769 - DNA, 25 bp, probe
gaatatgatgtcctcatagaaggtg

SEQ ID NO: 211770 - DNA, 25 bp, probe
gaattatccctcatgtgatgcctgt

SEQ ID NO: 211771 - DNA, 25 bp, probe
gaattatccctcatgtgatgcctgt

SEQ ID NO: 211772 - DNA, 25 bp, probe
gaattatcctgccttggatggactc

SEQ ID NO: 211773 - DNA, 25 bp, probe
gaatcagtggctacttggtggactc

SEQ ID NO: 211774 - DNA, 25 bp, probe
gaatccaagcaagcggctgggctgc

SEQ ID NO: 211775 - DNA, 25 bp, probe
gaatcccagccagcggattgggggt

SEQ ID NO: 211776 - DNA, 25 bp, probe
gaatcccagccagcggattgggggt

SEQ ID NO: 211777 - DNA, 25 bp, probe
gaatcccagccagcggattgggggt

SEQ ID NO: 211778 - DNA, 25 bp, probe
gaagagtcccagtcaggtcttgggg

SEQ ID NO: 211779 - DNA, 25 bp, probe
gaatgagacctaccagtattatggc

SEQ ID NO: 211780 - DNA, 25 bp, probe
gaatgataccgaggagtattctgag

SEQ ID NO: 211781 - DNA, 25 bp, probe
gaatatatacgtagtcatgtttatg

SEQ ID NO: 211782 - DNA, 25 bp, probe
gaatcagatattccttcacctttga

SEQ ID NO: 211783 - DNA, 25 bp, probe
gaatctgagtttagattcccttgaa

SEQ ID NO: 211784 - DNA, 25 bp, probe
gaatacaatttaacttccatttagc

SEQ ID NO: 211785 - DNA, 25 bp, probe
gaataacattgtacaccttgattta

SEQ ID NO: 211786 - DNA, 25 bp, probe
gaatagttaaactctatgattattt

SEQ ID NO: 211787 - DNA, 25 bp, probe
gaatattttaacttccttggactca

SEQ ID NO: 211788 - DNA, 25 bp, probe
gaatcattgttaaccacagctgtgg

SEQ ID NO: 211789 - DNA, 25 bp, probe
gaatatagtccaaccatcagcatct

SEQ ID NO: 211790 - DNA, 25 bp, probe
gaattagctctaaagatcagctgta

SEQ ID NO: 211791 - DNA, 25 bp, probe
gaattactaatctagctagtgtcat

SEQ ID NO: 211792 - DNA, 25 bp, probe
gaattacgagcagaaagatccatct

SEQ ID NO: 211793 - DNA, 25 bp, probe
gaataactagcaccagggactatga

SEQ ID NO: 211794 - DNA, 25 bp, probe
gaatataccacaccgaggagtccag

SEQ ID NO: 211795 - DNA, 25 bp, probe
gaatataccacaccgaggagtccag

SEQ ID NO: 211796 - DNA, 25 bp, probe
gaataatggacgccgctggcagtcc

SEQ ID NO: 211797 - DNA, 25 bp, probe
gaatcagatcgagtccaaggcagcc

SEQ ID NO: 211798 - DNA, 25 bp, probe
gaatcagatcgagtccaaggcagcc

SEQ ID NO: 211799 - DNA, 25 bp, probe
gaatcgtctgagtcagctaagagcg

SEQ ID NO: 211800 - DNA, 25 bp, probe
gaatctcatcggtgctatggaggag

SEQ ID NO: 211801 - DNA, 25 bp, probe
gaatctgtcacctccattggagcag

SEQ ID NO: 211802 - DNA, 25 bp, probe
gaatactccacggccgtggacatgt

SEQ ID NO: 211803 - DNA, 25 bp, probe
gaacttcagacggacctcagggtag

SEQ ID NO: 211804 - DNA, 25 bp, probe
gaactgcaagacggactttgaggtc

SEQ ID NO: 211805 - DNA, 25 bp, probe
gaactgcaagacggactttgaggtc

SEQ ID NO: 211806 - DNA, 25 bp, probe
gaactgcaagacggactttgaggtc

SEQ ID NO: 211807 - DNA, 25 bp, probe
gaatagaggtcttgatctttggaat

SEQ ID NO: 211808 - DNA, 25 bp, probe
gaatagcgacttagtgttctaaata

SEQ ID NO: 211809 - DNA, 25 bp, probe
gaataagaaatgggttctcaatcat

SEQ ID NO: 211810 - DNA, 25 bp, probe
gaataagaaatgggttctcaatcat

SEQ ID NO: 211811 - DNA, 25 bp, probe
gaattatagtgtgcgattcatcata

SEQ ID NO: 211812 - DNA, 25 bp, probe
gaatcgacagttgtatctctcatcc

SEQ ID NO: 211813 - DNA, 25 bp, probe
gaatgcagtcagttgtccatacctc

SEQ ID NO: 211814 - DNA, 25 bp, probe
gaatgctgttcaagccaacatgcct

SEQ ID NO: 211815 - DNA, 25 bp, probe
gaatcttcactactcaatctgatgt

SEQ ID NO: 211816 - DNA, 25 bp, probe
gaatttgagtcagtagatctggttt

SEQ ID NO: 211817 - DNA, 25 bp, probe
gaatatctggctaagctgactggtg

SEQ ID NO: 211818 - DNA, 25 bp, probe
gaatatcagagtcagctgctgcttg

SEQ ID NO: 211819 - DNA, 25 bp, probe
gaatatgcagactgcagggcttgaa

SEQ ID NO: 211820 - DNA, 25 bp, probe
gaatatcccgagtgctgcgtggaag

SEQ ID NO: 211821 - DNA, 25 bp, probe
gaatatcccgagtgctgcgtggaag

SEQ ID NO: 211822 - DNA, 25 bp, probe
gaatctccaccgaatcggggatacc

SEQ ID NO: 211823 - DNA, 25 bp, probe
gaatccaatcggatcgctcggatcg

SEQ ID NO: 211824 - DNA, 25 bp, probe
gaatccaaaggaacagatgtggcat

SEQ ID NO: 211825 - DNA, 25 bp, probe
gaatccaaaggaacagatgtggcat

SEQ ID NO: 211826 - DNA, 25 bp, probe
gaatcaaaacaaacgagcaggcatt

SEQ ID NO: 211827 - DNA, 25 bp, probe
gaatcacagaacaatcctgaaccag

SEQ ID NO: 211828 - DNA, 25 bp, probe
gaatctgccaaaattatggatccgg

SEQ ID NO: 211829 - DNA, 25 bp, probe
gaatctgccaaaattatggatccgg

SEQ ID NO: 211830 - DNA, 25 bp, probe
gaacgtcaaagaaagcgccgctcat

SEQ ID NO: 211831 - DNA, 25 bp, probe
gaatagtaagaaaagccacagcttc

SEQ ID NO: 211832 - DNA, 25 bp, probe
gaatacttagaaaaactcgctactt

SEQ ID NO: 211833 - DNA, 25 bp, probe
gaatacttagaaaaactcgctactt

SEQ ID NO: 211834 - DNA, 25 bp, probe
gaatatctattcaccaatttctact

SEQ ID NO: 211835 - DNA, 25 bp, probe
gaatatctattcaccaatttctact

SEQ ID NO: 211836 - DNA, 25 bp, probe
gaatgataattcagtccttgccttt

SEQ ID NO: 211837 - DNA, 25 bp, probe
gaataacattctgtagttcctaaaa

SEQ ID NO: 211838 - DNA, 25 bp, probe
gaatagtattctgatcagttgccaa

SEQ ID NO: 211839 - DNA, 25 bp, probe
gaatagtttcatggaagccagagaa

SEQ ID NO: 211840 - DNA, 25 bp, probe
gaagaatttttccagcccgaaggat

SEQ ID NO: 211841 - DNA, 25 bp, probe
gaatattttcttgaaccggagatca

SEQ ID NO: 211842 - DNA, 25 bp, probe
gaatattttcttgaaccggagatca

SEQ ID NO: 211843 - DNA, 25 bp, probe
gaattttcattttaagcacatttat

SEQ ID NO: 211844 - DNA, 25 bp, probe
gaatcctgtcgtttaatgctatatt

SEQ ID NO: 211845 - DNA, 25 bp, probe
gaatccctagtcttcaagcagattg

SEQ ID NO: 211846 - DNA, 25 bp, probe
gaatagcctgtggcctttgcaattt

SEQ ID NO: 211847 - DNA, 25 bp, probe
gaatacctgtggatctcatcttact

SEQ ID NO: 211848 - DNA, 25 bp, probe
gaatacctttgcatcacatcttcag

SEQ ID NO: 211849 - DNA, 25 bp, probe
gaatatcgtttaagaataatcgtta

SEQ ID NO: 211850 - DNA, 25 bp, probe
gaactcgttaaagcaaagcgctaag

SEQ ID NO: 211851 - DNA, 25 bp, probe
gaatctctctctcaacaaaaggtat

SEQ ID NO: 211852 - DNA, 25 bp, probe
gaatatcattcttaatcaccaaggt

SEQ ID NO: 211853 - DNA, 25 bp, probe
gaatccatggcttaacccacttgtt

SEQ ID NO: 211854 - DNA, 25 bp, probe
gaatcatcagagtaaactgccagtt

SEQ ID NO: 211855 - DNA, 25 bp, probe
gaatctcacaggacctcttagtctc

SEQ ID NO: 211856 - DNA, 25 bp, probe
gaatgcaaactccatcgttgagcct

SEQ ID NO: 211857 - DNA, 25 bp, probe
gaatgcaaactccatcgttgagcct

SEQ ID NO: 211858 - DNA, 25 bp, probe
gaatgcatgacctttggtacatgcc

SEQ ID NO: 211859 - DNA, 25 bp, probe
gaatatgcaccacttggaacagttt

SEQ ID NO: 211860 - DNA, 25 bp, probe
gaatttgcacatctctggaagctta

SEQ ID NO: 211861 - DNA, 25 bp, probe
gaatttgattgctttgctgcacagc

SEQ ID NO: 211862 - DNA, 25 bp, probe
gaatttgattgctttgctgcacagc

SEQ ID NO: 211863 - DNA, 25 bp, probe
gaatttaggcatctctggcatgcca

SEQ ID NO: 211864 - DNA, 25 bp, probe
gaatatattggccttctacagctat

SEQ ID NO: 211865 - DNA, 25 bp, probe
gaatatattggccttctacagctat

SEQ ID NO: 211866 - DNA, 25 bp, probe
gaattttatcttttaccatatccca

SEQ ID NO: 211867 - DNA, 25 bp, probe
gaatttaacttactcaagcaatagt

SEQ ID NO: 211868 - DNA, 25 bp, probe
gaatttaatttataggcagatcttt

SEQ ID NO: 211869 - DNA, 25 bp, probe
gaatttaatttataggcagatcttt

SEQ ID NO: 211870 - DNA, 25 bp, probe
gaatttaattgttgaatatgatgca

SEQ ID NO: 211871 - DNA, 25 bp, probe
gaatttccattgtaaatagctcagt

SEQ ID NO: 211872 - DNA, 25 bp, probe
gaatttcccatgcatttactagatt

SEQ ID NO: 211873 - DNA, 25 bp, probe
gaatttacagctcagactattacaa

SEQ ID NO: 211874 - DNA, 25 bp, probe
gaatttggaggctcagtttatcaga

SEQ ID NO: 211875 - DNA, 25 bp, probe
gaatttggaggttctatctaccaga

SEQ ID NO: 211876 - DNA, 25 bp, probe
gaatctttagggtaattcctccagt

SEQ ID NO: 211877 - DNA, 25 bp, probe
gaatctttagggtaattcctccagt

SEQ ID NO: 211878 - DNA, 25 bp, probe
gaatctttagggtaattcctccagt

SEQ ID NO: 211879 - DNA, 25 bp, probe
gaatctttagggtaattcctccagt

SEQ ID NO: 211880 - DNA, 25 bp, probe
gaatctacaaggcaaactcccatat

SEQ ID NO: 211881 - DNA, 25 bp, probe
gaatctcagaggcagagaactgttc

SEQ ID NO: 211882 - DNA, 25 bp, probe
gaatgctgaaggaaccaacagtcca

SEQ ID NO: 211883 - DNA, 25 bp, probe
gaatgcagaagggaatgcaccccac

SEQ ID NO: 211884 - DNA, 25 bp, probe
gaatacatagaccaggcccagaatc

SEQ ID NO: 211885 - DNA, 25 bp, probe
gaatacaaatcgaaggcctctacct

SEQ ID NO: 211886 - DNA, 25 bp, probe
gaatcaacatatggtagggattaca

SEQ ID NO: 211887 - DNA, 25 bp, probe
gaatcaccaaggcctgggatcaacc

SEQ ID NO: 211888 - DNA, 25 bp, probe
gaataccacagacaaggagagcacc

SEQ ID NO: 211889 - DNA, 25 bp, probe
gaatatgaccgtcagcgtggtcatc

SEQ ID NO: 211890 - DNA, 25 bp, probe
gaatcagacctgccaaggtgatggg

SEQ ID NO: 211891 - DNA, 25 bp, probe
gaatcagacctgccaaggtgatggg

SEQ ID NO: 211892 - DNA, 25 bp, probe
gaatatgcacttgcacaaggatatg

SEQ ID NO: 211893 - DNA, 25 bp, probe
gaatatctctgtgtcaaggccatga

SEQ ID NO: 211894 - DNA, 25 bp, probe
gaatttctggcaaaatggcactgaa

SEQ ID NO: 211895 - DNA, 25 bp, probe
gaatttctggcaaaatggcactgaa

SEQ ID NO: 211896 - DNA, 25 bp, probe
gaatttctggcaaaatggcactgaa

SEQ ID NO: 211897 - DNA, 25 bp, probe
gaatttctggcaaaatggcactgaa

SEQ ID NO: 211898 - DNA, 25 bp, probe
gaatctcttggaagtgtgtaagaaa

SEQ ID NO: 211899 - DNA, 25 bp, probe
gaatgccttggggcgtggaagggca

SEQ ID NO: 211900 - DNA, 25 bp, probe
gaatgcagacagtgcccgaaggggc

SEQ ID NO: 211901 - DNA, 25 bp, probe
gaatatgaagttgccgatgatgagg

SEQ ID NO: 211902 - DNA, 25 bp, probe
gaatatgcctgttcctgtgatgtgg

SEQ ID NO: 211903 - DNA, 25 bp, probe
gaatatgcctgttcctgtgatgtgg

SEQ ID NO: 211904 - DNA, 25 bp, probe
gaatccgcagtctgcttgagcggca

SEQ ID NO: 211905 - DNA, 25 bp, probe
gaatcccagcactttgagaggccaa

SEQ ID NO: 211906 - DNA, 25 bp, probe
gaatgctgcagacgttggggggcta

SEQ ID NO: 211907 - DNA, 25 bp, probe
gaatatgctatgcacagagcgggtg

SEQ ID NO: 211908 - DNA, 25 bp, probe
gaatcatctctgaaatgaagcaggt

SEQ ID NO: 211909 - DNA, 25 bp, probe
gaatatctgctttaatatagctatc

SEQ ID NO: 211910 - DNA, 25 bp, probe
gaaaggctagttttagcttcctttg

SEQ ID NO: 211911 - DNA, 25 bp, probe
gaataccacagtcattagccttctt

SEQ ID NO: 211912 - DNA, 25 bp, probe
gaatcctcttttttatggctttctg

SEQ ID NO: 211913 - DNA, 25 bp, probe
gaatttctgtgaattttagtttcca

SEQ ID NO: 211914 - DNA, 25 bp, probe
gaatttctgccaggattgaattatt

SEQ ID NO: 211915 - DNA, 25 bp, probe
gaatttgcctctggatgtgcaagag

SEQ ID NO: 211916 - DNA, 25 bp, probe
gaatgcttcaacggatgtagcagag

SEQ ID NO: 211917 - DNA, 25 bp, probe
gaatctgaagatgagttgagagatg

SEQ ID NO: 211918 - DNA, 25 bp, probe
gaatatgaattccgtgtgaaggcca

SEQ ID NO: 211919 - DNA, 25 bp, probe
gaatatccatgtcggcttgtagaga

SEQ ID NO: 211920 - DNA, 25 bp, probe
gaatatccatgtcggcttgtagaga

SEQ ID NO: 211921 - DNA, 25 bp, probe
gaatatacatgggactctcaaagaa

SEQ ID NO: 211922 - DNA, 25 bp, probe
gaatatggagactaactcctaggag

SEQ ID NO: 211923 - DNA, 25 bp, probe
gaatcatggacaaaacctgctggaa

SEQ ID NO: 211924 - DNA, 25 bp, probe
gaatcatggacaaaacctgctggaa

SEQ ID NO: 211925 - DNA, 25 bp, probe
gaatcaggttgcaaaacggatgagt

SEQ ID NO: 211926 - DNA, 25 bp, probe
gaatcaggttgcaaaacggatgagt

SEQ ID NO: 211927 - DNA, 25 bp, probe
gaatcacagtctcacatactgtctt

SEQ ID NO: 211928 - DNA, 25 bp, probe
gaatatatggtctaatagtttttta

SEQ ID NO: 211929 - DNA, 25 bp, probe
gaatatatggtctaatagtttttta

SEQ ID NO: 211930 - DNA, 25 bp, probe
gaatttggttacattagattttcct

SEQ ID NO: 211931 - DNA, 25 bp, probe
gaatttgggtacatggactacgccc

SEQ ID NO: 211932 - DNA, 25 bp, probe
gaatttgggtacatggactacgccc

SEQ ID NO: 211933 - DNA, 25 bp, probe
gaatttggagtcccttgaatcaacc

SEQ ID NO: 211934 - DNA, 25 bp, probe
gaatctgcactactcaacttataaa

SEQ ID NO: 211935 - DNA, 25 bp, probe
gaatatgatctcccataatttgaaa

SEQ ID NO: 211936 - DNA, 25 bp, probe
gaagtgatccccgaagtctacggga

SEQ ID NO: 211937 - DNA, 25 bp, probe
gaatctttaacttagtctactgggc

SEQ ID NO: 211938 - DNA, 25 bp, probe
gaatctttaacttagtctactgggc

SEQ ID NO: 211939 - DNA, 25 bp, probe
gaaccttaagtttgtaacgtgcagt

SEQ ID NO: 211940 - DNA, 25 bp, probe
gattttaaaggtttataattctgct

SEQ ID NO: 211941 - DNA, 25 bp, probe
gaagcccaaaggagttacattctta

SEQ ID NO: 211942 - DNA, 25 bp, probe
gaagatgtcaggcgggttactttcc

SEQ ID NO: 211943 - DNA, 25 bp, probe
gaagatgtcaggcgggttactttcc

SEQ ID NO: 211944 - DNA, 25 bp, probe
gaatcaatctggcttctgcattact

SEQ ID NO: 211945 - DNA, 25 bp, probe
gaatgcaattgttgttgttaacttg

SEQ ID NO: 211946 - DNA, 25 bp, probe
gaatcagatggtgtcatttagtaag

SEQ ID NO: 211947 - DNA, 25 bp, probe
gaatcaggcttggttcattttaatg

SEQ ID NO: 211948 - DNA, 25 bp, probe
gaatcgtgtgtcctgtcatggggag

SEQ ID NO: 211949 - DNA, 25 bp, probe
gaatgcagttgcgttggtcgggatg

SEQ ID NO: 211950 - DNA, 25 bp, probe
gaatcagcctgtgtggggtggagcc

SEQ ID NO: 211951 - DNA, 25 bp, probe
gaatgtactggctggggtaggcctc

SEQ ID NO: 211952 - DNA, 25 bp, probe
gaatgtactggctggggtaggcctc

SEQ ID NO: 211953 - DNA, 25 bp, probe
gaatatcctggcactgaggtcactc

SEQ ID NO: 211954 - DNA, 25 bp, probe
gaatcccggcagcctgaagatcatc

SEQ ID NO: 211955 - DNA, 25 bp, probe
gaatgcccacaagctacaaatgcta

SEQ ID NO: 211956 - DNA, 25 bp, probe
gaatggctacaagctattaagatgg

SEQ ID NO: 211957 - DNA, 25 bp, probe
gaatgatgtaaagcagataggaatg

SEQ ID NO: 211958 - DNA, 25 bp, probe
gaatgttgatgatcccacgggagcc

SEQ ID NO: 211959 - DNA, 25 bp, probe
gaatgatagtcatactcctggaaca

SEQ ID NO: 211960 - DNA, 25 bp, probe
gaatatcgtggaaaccatggagcac

SEQ ID NO: 211961 - DNA, 25 bp, probe
gaatatcagtggacgacgccttaca

SEQ ID NO: 211962 - DNA, 25 bp, probe
gaatatggtgtgacaggatccttta

SEQ ID NO: 211963 - DNA, 25 bp, probe
gaatatggtgtgacaggatccttta

SEQ ID NO: 211964 - DNA, 25 bp, probe
gagttggtggaacatttgggaaatc

SEQ ID NO: 211965 - DNA, 25 bp, probe
gaatgggttgttctcttgggaagtc

SEQ ID NO: 211966 - DNA, 25 bp, probe
gttggggtatatctcctcgaggagc

SEQ ID NO: 211967 - DNA, 25 bp, probe
tgttggggaaatatttcgaggagtt

SEQ ID NO: 211968 - DNA, 25 bp, probe
gattaaggtagtgttcccaaggtgt

SEQ ID NO: 211969 - DNA, 25 bp, probe
gactacgtgggtgtactccatcaac

SEQ ID NO: 211970 - DNA, 25 bp, probe
gaatacgtggaaggtacgctcactg

SEQ ID NO: 211971 - DNA, 25 bp, probe
gaataagtgcaagcgaagctctcaa

SEQ ID NO: 211972 - DNA, 25 bp, probe
gaataactcacagggatattaaacc

SEQ ID NO: 211973 - DNA, 25 bp, probe
gaatccagtccaggtaactaaagaa

SEQ ID NO: 211974 - DNA, 25 bp, probe
gaatccagtccaggtaactaaagaa

SEQ ID NO: 211975 - DNA, 25 bp, probe
gaatccagtggaggaaaccaaagga

SEQ ID NO: 211976 - DNA, 25 bp, probe
gacaccgtttcttgaaacaaagatg

SEQ ID NO: 211977 - DNA, 25 bp, probe
gaacgtgttgactgaagagtccgtg

SEQ ID NO: 211978 - DNA, 25 bp, probe
gaatgggtaactcaaagtccaggtt

SEQ ID NO: 211979 - DNA, 25 bp, probe
gaagaggtaacgcaagttcgtcctg

SEQ ID NO: 211980 - DNA, 25 bp, probe
gaaggggacaaggactagggtcctg

SEQ ID NO: 211981 - DNA, 25 bp, probe
gaatgtgggcactggcccaggttca

SEQ ID NO: 211982 - DNA, 25 bp, probe
gaatggtgtgacgaccaccacgttc

SEQ ID NO: 211983 - DNA, 25 bp, probe
gaatgccgtgtatacctcacgtact

SEQ ID NO: 211984 - DNA, 25 bp, probe
gaatctttctaaccctagctaactt

SEQ ID NO: 211985 - DNA, 25 bp, probe
gaatctttctaaccctagctaactt

SEQ ID NO: 211986 - DNA, 25 bp, probe
gaatgcctactgtaggcctcctaag

SEQ ID NO: 211987 - DNA, 25 bp, probe
gattggcaactgtgttacctttcaa

SEQ ID NO: 211988 - DNA, 25 bp, probe
gaaggctactggcattaattattaa

SEQ ID NO: 211989 - DNA, 25 bp, probe
gaatgtaaatacctctaatagatgt

SEQ ID NO: 211990 - DNA, 25 bp, probe
gaatgttgcagaaactctataaaat

SEQ ID NO: 211991 - DNA, 25 bp, probe
gaataatagcagccccttaaaaact

SEQ ID NO: 211992 - DNA, 25 bp, probe
gaataatagcagccccttaaaaact

SEQ ID NO: 211993 - DNA, 25 bp, probe
gaaggatacggacctcttaaagcac

SEQ ID NO: 211994 - DNA, 25 bp, probe
gaatccatgggacactttcaaaaac

SEQ ID NO: 211995 - DNA, 25 bp, probe
gaatcctaggcacagttcttcagaa

SEQ ID NO: 211996 - DNA, 25 bp, probe
gaatactgagcataatttcttcatt

SEQ ID NO: 211997 - DNA, 25 bp, probe
gaatactggccatatttgcttgagc

SEQ ID NO: 211998 - DNA, 25 bp, probe
gaataaagccctgttgcttgagtgt

SEQ ID NO: 211999 - DNA, 25 bp, probe
gaatcaaaacctgtgctgcaaggtg

SEQ ID NO: 212000 - DNA, 25 bp, probe
gaatgatataactcctgtgcaatga

SEQ ID NO: 212001 - DNA, 25 bp, probe
gaatgaattatcctgccttggatgg

SEQ ID NO: 212002 - DNA, 25 bp, probe
gaatgcatctgttcttctattagtg

SEQ ID NO: 212003 - DNA, 25 bp, probe
gaatccttgaatactcaattcagtg

SEQ ID NO: 212004 - DNA, 25 bp, probe
gaatccttgaatactcaattcagtg

SEQ ID NO: 212005 - DNA, 25 bp, probe
gaatgccttggatcctatgtctgtg

SEQ ID NO: 212006 - DNA, 25 bp, probe
gaagccctaatccagttcctggaac

SEQ ID NO: 212007 - DNA, 25 bp, probe
gaagccaaaaacattctgggtaaat

SEQ ID NO: 212008 - DNA, 25 bp, probe
gaagccaaaaacattctgggtaaat

SEQ ID NO: 212009 - DNA, 25 bp, probe
gaaggtgaggaaggttccgtggaag

SEQ ID NO: 212010 - DNA, 25 bp, probe
gaatgtgtggggtttcccctcagga

SEQ ID NO: 212011 - DNA, 25 bp, probe
gaatgtgtggggtttcccctcagga

SEQ ID NO: 212012 - DNA, 25 bp, probe
gaagggacggtttacggacgtgcag

SEQ ID NO: 212013 - DNA, 25 bp, probe
gacggaagagttgagacctaacgag

SEQ ID NO: 212014 - DNA, 25 bp, probe
gtcgggagttcgagaccaacctgac

SEQ ID NO: 212015 - DNA, 25 bp, probe
ttaggggaattgaggccaccaggaa

SEQ ID NO: 212016 - DNA, 25 bp, probe
gacgggaaagtgaagcccagccgga

SEQ ID NO: 212017 - DNA, 25 bp, probe
gaccggaactggcagcgcaaccggc

SEQ ID NO: 212018 - DNA, 25 bp, probe
gaacggaacaagcatccagtggaag

SEQ ID NO: 212019 - DNA, 25 bp, probe
gaaggtgaacaagtgctaccggggc

SEQ ID NO: 212020 - DNA, 25 bp, probe
gaaggtgaacaagtgctaccggggc

SEQ ID NO: 212021 - DNA, 25 bp, probe
gaagtaaaaaactcctgtgtggcag

SEQ ID NO: 212022 - DNA, 25 bp, probe
taagaaaaaaaagcgtctggcaaag

SEQ ID NO: 212023 - DNA, 25 bp, probe
gaatgaagaaagtccagacctcgga

SEQ ID NO: 212024 - DNA, 25 bp, probe
gaatgcaaatattcaaagaccctgc

SEQ ID NO: 212025 - DNA, 25 bp, probe
gaatcataatatttatcaactctgt

SEQ ID NO: 212026 - DNA, 25 bp, probe
gaatcaaactgacttacatcctctt

SEQ ID NO: 212027 - DNA, 25 bp, probe
gaaggcgaaggcctacatccttttc

SEQ ID NO: 212028 - DNA, 25 bp, probe
gaagggcaaggagccttcctcattc

SEQ ID NO: 212029 - DNA, 25 bp, probe
gagagagggggagacccctttgcct

SEQ ID NO: 212030 - DNA, 25 bp, probe
gaagagggatggacaaccccctatt

SEQ ID NO: 212031 - DNA, 25 bp, probe
gaagggctacgaagtcaaacccagt

SEQ ID NO: 212032 - DNA, 25 bp, probe
gaagggctacgaagtcaaacccagt

SEQ ID NO: 212033 - DNA, 25 bp, probe
gaatccctcaggtttcaaacagacc

SEQ ID NO: 212034 - DNA, 25 bp, probe
gaatcagcgcttgatttggcaaaac

SEQ ID NO: 212035 - DNA, 25 bp, probe
gaatcatgcccggggcaggtaaacc

SEQ ID NO: 212036 - DNA, 25 bp, probe
gaataccactgagggcaggtctttc

SEQ ID NO: 212037 - DNA, 25 bp, probe
gaatacctgggcaaagatgttcttc

SEQ ID NO: 212038 - DNA, 25 bp, probe
gaatacagtgggaggatttttagac

SEQ ID NO: 212039 - DNA, 25 bp, probe
gaatcaagttaagggacacgttaga

SEQ ID NO: 212040 - DNA, 25 bp, probe
gaatacatgctttaccagaaagtgt

SEQ ID NO: 212041 - DNA, 25 bp, probe
gaatacagcagttacaattacaggg

SEQ ID NO: 212042 - DNA, 25 bp, probe
gaatacagcagttacaattacaggg

SEQ ID NO: 212043 - DNA, 25 bp, probe
gaatgcacaggagacaaggacggca

SEQ ID NO: 212044 - DNA, 25 bp, probe
gaatccagcaacgcgaggaaggcct

SEQ ID NO: 212045 - DNA, 25 bp, probe
gaatgtcagaactcaagtgaagggc

SEQ ID NO: 212046 - DNA, 25 bp, probe
gaatctcaacaaccagggatcagga

SEQ ID NO: 212047 - DNA, 25 bp, probe
gaatcttggcgttcagcagagtcag

SEQ ID NO: 212048 - DNA, 25 bp, probe
gaatcctgtgagaagcgcaagctga

SEQ ID NO: 212049 - DNA, 25 bp, probe
gaatcctgtgagaagcgcaagctga

SEQ ID NO: 212050 - DNA, 25 bp, probe
gaatcctggggaacatagaactcat

SEQ ID NO: 212051 - DNA, 25 bp, probe
gacattcggggaaaggagattcgga

SEQ ID NO: 212052 - DNA, 25 bp, probe
gacattcggggaaaggagattcgga

SEQ ID NO: 212053 - DNA, 25 bp, probe
gatcaggggtggaggggcttccagg

SEQ ID NO: 212054 - DNA, 25 bp, probe
gaatgaggagtgggggggagtgcta

SEQ ID NO: 212055 - DNA, 25 bp, probe
gaatcagtagccaggatgactattg

SEQ ID NO: 212056 - DNA, 25 bp, probe
gaatcaggagctctgagtgccatag

SEQ ID NO: 212057 - DNA, 25 bp, probe
gaatcatagcacttcggtgccgaga

SEQ ID NO: 212058 - DNA, 25 bp, probe
gaataggcaagtcgaggcaatggaa

SEQ ID NO: 212059 - DNA, 25 bp, probe
gaataagcatggtgagagctcactg

SEQ ID NO: 212060 - DNA, 25 bp, probe
gaataacatatgaacagatgcagac

SEQ ID NO: 212061 - DNA, 25 bp, probe
gaatgaatatagatgctggccagca

SEQ ID NO: 212062 - DNA, 25 bp, probe
gaatcagtgtactattggctgcaga

SEQ ID NO: 212063 - DNA, 25 bp, probe
gaatctgtattctagatggtggcat

SEQ ID NO: 212064 - DNA, 25 bp, probe
gaatctgctttgttgggagtgatgg

SEQ ID NO: 212065 - DNA, 25 bp, probe
gaatcacctgtgtatttcagtgtgg

SEQ ID NO: 212066 - DNA, 25 bp, probe
gaatcatgccgtggtgtctcggatg

SEQ ID NO: 212067 - DNA, 25 bp, probe
gaatcatgccgtggtgtctcggatg

SEQ ID NO: 212068 - DNA, 25 bp, probe
gaatgccgcgatgggtcaggtaggg

SEQ ID NO: 212069 - DNA, 25 bp, probe
gaatgccgctgcaggcaagttccag

SEQ ID NO: 212070 - DNA, 25 bp, probe
gaatgccgctgcaggcaagttccag

SEQ ID NO: 212071 - DNA, 25 bp, probe
gaatgccgctgcaggcaagttccag

SEQ ID NO: 212072 - DNA, 25 bp, probe
gaatgccgctgcaggcaagttccag

SEQ ID NO: 212073 - DNA, 25 bp, probe
gaatgctagctctgagccagttcag

SEQ ID NO: 212074 - DNA, 25 bp, probe
gaatgctagctctgagccagttcag

SEQ ID NO: 212075 - DNA, 25 bp, probe
gaatgctagctctgagccagttcag

SEQ ID NO: 212076 - DNA, 25 bp, probe
gaatgccagctaggagctttctgcc

SEQ ID NO: 212077 - DNA, 25 bp, probe
gaatgccagcaagcagcaggtcaca

SEQ ID NO: 212078 - DNA, 25 bp, probe
gaatgccatagacagatggtccagg

SEQ ID NO: 212079 - DNA, 25 bp, probe
gaatgctgaaaccaagggggatgac

SEQ ID NO: 212080 - DNA, 25 bp, probe
gaatgcgaatcagacaggaggacta

SEQ ID NO: 212081 - DNA, 25 bp, probe
gaatgtactgacgagccgaggcagc

SEQ ID NO: 212082 - DNA, 25 bp, probe
gaatgtactgaccagctgaggcagc

SEQ ID NO: 212083 - DNA, 25 bp, probe
gaatgctcagctacttgtgctggag

SEQ ID NO: 212084 - DNA, 25 bp, probe
gaatgctcctgagtggtgtaggtgg

SEQ ID NO: 212085 - DNA, 25 bp, probe
gaatgctcctgagtggtgtaggtgg

SEQ ID NO: 212086 - DNA, 25 bp, probe
gaatcctctaatctatagcctgagg

SEQ ID NO: 212087 - DNA, 25 bp, probe
gaatgaccaaatttacgccatgaaa

SEQ ID NO: 212088 - DNA, 25 bp, probe
gaatgactctgacaaccgtagaata

SEQ ID NO: 212089 - DNA, 25 bp, probe
gaatgactctgacaaccgtagaata

SEQ ID NO: 212090 - DNA, 25 bp, probe
gaatactcttgcaatacctaaagca

SEQ ID NO: 212091 - DNA, 25 bp, probe
gaataatgctacacaccttcaagag

SEQ ID NO: 212092 - DNA, 25 bp, probe
gaataatgtcacattccccagtgca

SEQ ID NO: 212093 - DNA, 25 bp, probe
gaataagtactggctgtcctcagcc

SEQ ID NO: 212094 - DNA, 25 bp, probe
gaatgacgatacccgtgactcagcc

SEQ ID NO: 212095 - DNA, 25 bp, probe
gaatactgttgctatggtgatcttc

SEQ ID NO: 212096 - DNA, 25 bp, probe
gaatcgatttcgagtgtcttctcat

SEQ ID NO: 212097 - DNA, 25 bp, probe
gaatgcctttcagggtgtggtctac

SEQ ID NO: 212098 - DNA, 25 bp, probe
gaatagctttcagggcgataaaact

SEQ ID NO: 212099 - DNA, 25 bp, probe
gaatagctttcagggcgataaaact

SEQ ID NO: 212100 - DNA, 25 bp, probe
gaatacttctcacagctcaaagata

SEQ ID NO: 212101 - DNA, 25 bp, probe
gaatacttctcacagctcaaagata

SEQ ID NO: 212102 - DNA, 25 bp, probe
gaatcccgtctgccagtcaaagaaa

SEQ ID NO: 212103 - DNA, 25 bp, probe
gaatcccgtctgccagtcaaagaaa

SEQ ID NO: 212104 - DNA, 25 bp, probe
gaatcctgggctacaggaaacctga

SEQ ID NO: 212105 - DNA, 25 bp, probe
gaatgatgctggctatagtgaaccc

SEQ ID NO: 212106 - DNA, 25 bp, probe
gaatgccaggaatattgtcatcctt

SEQ ID NO: 212107 - DNA, 25 bp, probe
gaatgccaggaatattgtcatcctt

SEQ ID NO: 212108 - DNA, 25 bp, probe
gaatccagatgacagattaacctgt

SEQ ID NO: 212109 - DNA, 25 bp, probe
gaatacagcatctggagtaaccgta

SEQ ID NO: 212110 - DNA, 25 bp, probe
gaatcaagcatctggttgaccttct

SEQ ID NO: 212111 - DNA, 25 bp, probe
gaatcaagcatctggttgaccttct

SEQ ID NO: 212112 - DNA, 25 bp, probe
gaataagcatacacttcactcctct

SEQ ID NO: 212113 - DNA, 25 bp, probe
gaatccctacatggtatacatcctc

SEQ ID NO: 212114 - DNA, 25 bp, probe
gaatcaccgactactgaatctccta

SEQ ID NO: 212115 - DNA, 25 bp, probe
gaatcctaatgtatgaactcctgac

SEQ ID NO: 212116 - DNA, 25 bp, probe
gaatccctttttgatcatatctaca

SEQ ID NO: 212117 - DNA, 25 bp, probe
gaatgcccttttaggagcaattcca

SEQ ID NO: 212118 - DNA, 25 bp, probe
gaatgccactttgtggagctgaccg

SEQ ID NO: 212119 - DNA, 25 bp, probe
gaatgccactttgtggagctgaccg

SEQ ID NO: 212120 - DNA, 25 bp, probe
gaatctgcactattttggaggacaa

SEQ ID NO: 212121 - DNA, 25 bp, probe
gaatctagaacacttccaggtcaac

SEQ ID NO: 212122 - DNA, 25 bp, probe
gaataagaaacaggcctttacacac

SEQ ID NO: 212123 - DNA, 25 bp, probe
gaataaatacaaggctcgtctcaaa

SEQ ID NO: 212124 - DNA, 25 bp, probe
gaaaacaaaaggcgatacacaaggg

SEQ ID NO: 212125 - DNA, 25 bp, probe
gaatacacaaagaactggatcaccc

SEQ ID NO: 212126 - DNA, 25 bp, probe
gaataacagcaagtattggctcgtc

SEQ ID NO: 212127 - DNA, 25 bp, probe
gaataacatgcaagctgaggtgaca

SEQ ID NO: 212128 - DNA, 25 bp, probe
gaataacatgcaagctgaggtgaca

SEQ ID NO: 212129 - DNA, 25 bp, probe
gaatacacatgcaggacgttagact

SEQ ID NO: 212130 - DNA, 25 bp, probe
gaatacacatgcaggacgttagact

SEQ ID NO: 212131 - DNA, 25 bp, probe
gaatgagatatgaaggagttgtaga

SEQ ID NO: 212132 - DNA, 25 bp, probe
gaatcagctagcaaacagtcttagg

SEQ ID NO: 212133 - DNA, 25 bp, probe
gaatgcagattacactgatcttatg

SEQ ID NO: 212134 - DNA, 25 bp, probe
agtggcatgatcttggctcactgca

SEQ ID NO: 212135 - DNA, 25 bp, probe
gaatgcaaaatggtttatcgttcaa

SEQ ID NO: 212136 - DNA, 25 bp, probe
gaaggccaagccattacgggagcac

SEQ ID NO: 212137 - DNA, 25 bp, probe
gaaggagagaccattattttggacc

SEQ ID NO: 212138 - DNA, 25 bp, probe
gaatgctaaagctaattgattttgg

SEQ ID NO: 212139 - DNA, 25 bp, probe
gaatctgcaaggtgtttttaggctt

SEQ ID NO: 212140 - DNA, 25 bp, probe
gaatcttttgtacttcttgttggtt

SEQ ID NO: 212141 - DNA, 25 bp, probe
gaagaccttttcttcttgttcgtga

SEQ ID NO: 212142 - DNA, 25 bp, probe
gaaacccttgacattaatactgaga

SEQ ID NO: 212143 - DNA, 25 bp, probe
gaagatccacttattgtaacaccag

SEQ ID NO: 212144 - DNA, 25 bp, probe
gaagtgccagcgtcggttaaaacat

SEQ ID NO: 212145 - DNA, 25 bp, probe
gaagtgccagcgtcggttaaaacat

SEQ ID NO: 212146 - DNA, 25 bp, probe
gaaggccagactttgtcatcaataa

SEQ ID NO: 212147 - DNA, 25 bp, probe
gaaggtcgcctaagcctaagagaag

SEQ ID NO: 212148 - DNA, 25 bp, probe
gaatgtacgttctagcctggtggaa

SEQ ID NO: 212149 - DNA, 25 bp, probe
gaatgtacgttctagcctggtggaa

SEQ ID NO: 212150 - DNA, 25 bp, probe
gaatgatactttgcactgggctgta

SEQ ID NO: 212151 - DNA, 25 bp, probe
gaataatttcctttgatgacatgtc

SEQ ID NO: 212152 - DNA, 25 bp, probe
gaatgcagagaaccttggaatcgtc

SEQ ID NO: 212153 - DNA, 25 bp, probe
gaatgcagaagtccgtggtcataac

SEQ ID NO: 212154 - DNA, 25 bp, probe
gaatggaggtggcctggtgaacccc

SEQ ID NO: 212155 - DNA, 25 bp, probe
gaatgaggttggacctttactcaca

SEQ ID NO: 212156 - DNA, 25 bp, probe
gaatggatgtactacactttatcca

SEQ ID NO: 212157 - DNA, 25 bp, probe
gaatgccagaactacaatcttttga

SEQ ID NO: 212158 - DNA, 25 bp, probe
gaatgaagtacagagatgcttttgc

SEQ ID NO: 212159 - DNA, 25 bp, probe
gaatctgttacaataagctcttgtg

SEQ ID NO: 212160 - DNA, 25 bp, probe
gaatcgtgttcatagtgtctgtatg

SEQ ID NO: 212161 - DNA, 25 bp, probe
gaatcttgtcataacagttttgtgt

SEQ ID NO: 212162 - DNA, 25 bp, probe
gaatcattgtaaacattagttctat

SEQ ID NO: 212163 - DNA, 25 bp, probe
gaatcattgtaaacattagttctat

SEQ ID NO: 212164 - DNA, 25 bp, probe
gaatcatatgtacctgaatttatta

SEQ ID NO: 212165 - DNA, 25 bp, probe
gaatccatgtgcccaggattatatt

SEQ ID NO: 212166 - DNA, 25 bp, probe
gaatccttcaaacgtgctgacatct

SEQ ID NO: 212167 - DNA, 25 bp, probe
gaatctttcctacagaacacttttt

SEQ ID NO: 212168 - DNA, 25 bp, probe
gaatcttaactcctagagcaactct

SEQ ID NO: 212169 - DNA, 25 bp, probe
taatttatcatttttccaaccttgg

SEQ ID NO: 212170 - DNA, 25 bp, probe
taatttatcatttttccaaccttgg

SEQ ID NO: 212171 - DNA, 25 bp, probe
gaatctgtatcatttttcctacctg

SEQ ID NO: 212172 - DNA, 25 bp, probe
gaatcatgcttattttttactctta

SEQ ID NO: 212173 - DNA, 25 bp, probe
gaatcatgattgttttccatacctt

SEQ ID NO: 212174 - DNA, 25 bp, probe
gaatctgattgagtctccactccac

SEQ ID NO: 212175 - DNA, 25 bp, probe
gaatctgattgagtctccactccac

SEQ ID NO: 212176 - DNA, 25 bp, probe
gaatgtcagatggtcttacgccaca

SEQ ID NO: 212177 - DNA, 25 bp, probe
gaagtaatggtcatgcctgtacata

SEQ ID NO: 212178 - DNA, 25 bp, probe
gaatctacaggcttaccttatcgca

SEQ ID NO: 212179 - DNA, 25 bp, probe
gaatctgaatgtttattcattatat

SEQ ID NO: 212180 - DNA, 25 bp, probe
gaatctgaaggtgagaatctgagtt

SEQ ID NO: 212181 - DNA, 25 bp, probe
gaatggaaggtccgagtctttttag

SEQ ID NO: 212182 - DNA, 25 bp, probe
gaagaggtggttcaactttctccag

SEQ ID NO: 212183 - DNA, 25 bp, probe
gaagaggtggttcaactttctccag

SEQ ID NO: 212184 - DNA, 25 bp, probe
gaatgagcctggtaccaacttcgtc

SEQ ID NO: 212185 - DNA, 25 bp, probe
gaataacttgatccacacacttgca

SEQ ID NO: 212186 - DNA, 25 bp, probe
gaatcaacatctcacacaacttcag

SEQ ID NO: 212187 - DNA, 25 bp, probe
gaatcccatcatctacagtgtcaag

SEQ ID NO: 212188 - DNA, 25 bp, probe
gaatcccatgatctacagtctgaga

SEQ ID NO: 212189 - DNA, 25 bp, probe
gaatctatttgggacttcatgagaa

SEQ ID NO: 212190 - DNA, 25 bp, probe
gaatctgtattggggtacaggaatg

SEQ ID NO: 212191 - DNA, 25 bp, probe
gaatgtagattgggactgaaggagg

SEQ ID NO: 212192 - DNA, 25 bp, probe
gaatgtcaatcgtgtcagctaggtg

SEQ ID NO: 212193 - DNA, 25 bp, probe
gaatgtgccccattgtcagtgggtc

SEQ ID NO: 212194 - DNA, 25 bp, probe
gaatgatggcatctactcaaggtat

SEQ ID NO: 212195 - DNA, 25 bp, probe
gaatgcatcagctgtacctacaata

SEQ ID NO: 212196 - DNA, 25 bp, probe
gaatctcagaaggtcctcctgaacc

SEQ ID NO: 212197 - DNA, 25 bp, probe
gaatcatcaaatctcatcatctcca

SEQ ID NO: 212198 - DNA, 25 bp, probe
gaatccaatgtgccatcaagtcact

SEQ ID NO: 212199 - DNA, 25 bp, probe
gaatccctgtggaaatctacatttg

SEQ ID NO: 212200 - DNA, 25 bp, probe
gaatgccctggctaaagctactgtg

SEQ ID NO: 212201 - DNA, 25 bp, probe
gaatccctgagttacagtatacagc

SEQ ID NO: 212202 - DNA, 25 bp, probe
gaatccctcagctgacactgaagac

SEQ ID NO: 212203 - DNA, 25 bp, probe
gaatccctgcagttgatcaagagac

SEQ ID NO: 212204 - DNA, 25 bp, probe
gaatccagcatggagcagacgagaa

SEQ ID NO: 212205 - DNA, 25 bp, probe
gaatccacccagaaggcagagaagg

SEQ ID NO: 212206 - DNA, 25 bp, probe
gaatgccccggaaggaagtcagata

SEQ ID NO: 212207 - DNA, 25 bp, probe
gaatgccccggaaggaagtcagata

SEQ ID NO: 212208 - DNA, 25 bp, probe
gaatgcccagctagttaaagaatgc

SEQ ID NO: 212209 - DNA, 25 bp, probe
gaatgctgcaacagatgatccagag

SEQ ID NO: 212210 - DNA, 25 bp, probe
gaatgctgcaacagatgatccagag

SEQ ID NO: 212211 - DNA, 25 bp, probe
gaatctcagagcaaagtggctgtgt

SEQ ID NO: 212212 - DNA, 25 bp, probe
gaatgagcaggcgaaggagatgcag

SEQ ID NO: 212213 - DNA, 25 bp, probe
gaaggacgcgcaaatgcagcaagat

SEQ ID NO: 212214 - DNA, 25 bp, probe
gaatgctgtcgggactgagcaggca

SEQ ID NO: 212215 - DNA, 25 bp, probe
gaatcagtcagtatctgcagaacag

SEQ ID NO: 212216 - DNA, 25 bp, probe
gaatcttcatgtacttgatgtaata

SEQ ID NO: 212217 - DNA, 25 bp, probe
gaatcttctgacacatttattatag

SEQ ID NO: 212218 - DNA, 25 bp, probe
gaatgttcataagcagtgttccaag

SEQ ID NO: 212219 - DNA, 25 bp, probe
gaaggtgcaggagcggtacgacagt

SEQ ID NO: 212220 - DNA, 25 bp, probe
gaatcgtcagggggtgtctgctagc

SEQ ID NO: 212221 - DNA, 25 bp, probe
gaatgggagggtctggcttcagcta

SEQ ID NO: 212222 - DNA, 25 bp, probe
gaagctggggttgaggatccattat

SEQ ID NO: 212223 - DNA, 25 bp, probe
gaatgttagagctgacaggaccctt

SEQ ID NO: 212224 - DNA, 25 bp, probe
gaatcttatgaatgcagagaacctt

SEQ ID NO: 212225 - DNA, 25 bp, probe
gaatgctttaaggagctgaacgtgt

SEQ ID NO: 212226 - DNA, 25 bp, probe
gaatgttccacacgtggaaatctgt

SEQ ID NO: 212227 - DNA, 25 bp, probe
gaatgttccacacgtggaaatctgt

SEQ ID NO: 212228 - DNA, 25 bp, probe
gaatctgtctcccagttatgaatca

SEQ ID NO: 212229 - DNA, 25 bp, probe
gaatcagacctccaggagataatca

SEQ ID NO: 212230 - DNA, 25 bp, probe
gaatcaacccaactgaagcatttca

SEQ ID NO: 212231 - DNA, 25 bp, probe
gaatcaacccaactgaagcatttca

SEQ ID NO: 212232 - DNA, 25 bp, probe
gaatcaacccaactgaagcatttca

SEQ ID NO: 212233 - DNA, 25 bp, probe
gaatcagaccctgctgagagcatgg

SEQ ID NO: 212234 - DNA, 25 bp, probe
gaatgagaggacttctatgaatgag

SEQ ID NO: 212235 - DNA, 25 bp, probe
gaatgaccagagacatctatgaaac

SEQ ID NO: 212236 - DNA, 25 bp, probe
gaatgagcaaggcctcttggacaaa

SEQ ID NO: 212237 - DNA, 25 bp, probe
gaatggcagcaggggttggggaaac

SEQ ID NO: 212238 - DNA, 25 bp, probe
gaatgcgtggcggagatcggggagg

SEQ ID NO: 212239 - DNA, 25 bp, probe
gaatgctgtatgcaaccagtctgaa

SEQ ID NO: 212240 - DNA, 25 bp, probe
gaatcacttgaattcctggatgaaa

SEQ ID NO: 212241 - DNA, 25 bp, probe
gaatcacttgaacccgggagcagag

SEQ ID NO: 212242 - DNA, 25 bp, probe
gaatcgcttgaacccaggagacggt

SEQ ID NO: 212243 - DNA, 25 bp, probe
gaatctgtgtaaccgtggaagggaa

SEQ ID NO: 212244 - DNA, 25 bp, probe
gaaggcagtacaacgcgaaagtgga

SEQ ID NO: 212245 - DNA, 25 bp, probe
gaatggggactgtggagaactggac

SEQ ID NO: 212246 - DNA, 25 bp, probe
gaatgcgggagtgtacagaacatct

SEQ ID NO: 212247 - DNA, 25 bp, probe
gaatgagagggagaccggcatgctt

SEQ ID NO: 212248 - DNA, 25 bp, probe
gaatgaggtggagcagctggcctgc

SEQ ID NO: 212249 - DNA, 25 bp, probe
gaatgggactgagctgaactgcagc

SEQ ID NO: 212250 - DNA, 25 bp, probe
gaatgttactgcaatcatgttgtag

SEQ ID NO: 212251 - DNA, 25 bp, probe
gaatgtcgaagctatctgctctgtt

SEQ ID NO: 212252 - DNA, 25 bp, probe
gaagtcaggggctatcttttggtat

SEQ ID NO: 212253 - DNA, 25 bp, probe
gacccaaaggccatctttattttct

SEQ ID NO: 212254 - DNA, 25 bp, probe
gaaccaaaggtcaccttcttgactc

SEQ ID NO: 212255 - DNA, 25 bp, probe
gaaccctcatggaatacctttagga

SEQ ID NO: 212256 - DNA, 25 bp, probe
gaatgtactgcatgttaccatctta

SEQ ID NO: 212257 - DNA, 25 bp, probe
gaatctgtgtgaagttacacaatta

SEQ ID NO: 212258 - DNA, 25 bp, probe
gaatctgatgctttctgatcaacaa

SEQ ID NO: 212259 - DNA, 25 bp, probe
gaatctgatgctttctgatcaacaa

SEQ ID NO: 212260 - DNA, 25 bp, probe
gaatcgtgattattgtgatacaaga

SEQ ID NO: 212261 - DNA, 25 bp, probe
gaaggctgttaagaagaaatcctga

SEQ ID NO: 212262 - DNA, 25 bp, probe
gaaggatttccagagggaggccgag

SEQ ID NO: 212263 - DNA, 25 bp, probe
gaatcgttactctaaaggagctccg

SEQ ID NO: 212264 - DNA, 25 bp, probe
gaatcgttactctaaaggagctccg

SEQ ID NO: 212265 - DNA, 25 bp, probe
gaatcatgttaatagacagtagcca

SEQ ID NO: 212266 - DNA, 25 bp, probe
gaatcagtccaagaacaatatacca

SEQ ID NO: 212267 - DNA, 25 bp, probe
gaatcagatccatgtataagagtaa

SEQ ID NO: 212268 - DNA, 25 bp, probe
gaatcagatccatgtataagagtaa

SEQ ID NO: 212269 - DNA, 25 bp, probe
gaagggccgagtaaagtgtgatcat

SEQ ID NO: 212270 - DNA, 25 bp, probe
gaaggtctaagtgtaggtgatgtgc

SEQ ID NO: 212271 - DNA, 25 bp, probe
gaatccatgcaatgtttagagtgtg

SEQ ID NO: 212272 - DNA, 25 bp, probe
gaatctgcaccaagatgtttagctt

SEQ ID NO: 212273 - DNA, 25 bp, probe
gaatccatcacaatcttttgctttc

SEQ ID NO: 212274 - DNA, 25 bp, probe
gaatcctctgttttatggctttctg

SEQ ID NO: 212275 - DNA, 25 bp, probe
gaatgactctgtcttgtgggtgtct

SEQ ID NO: 212276 - DNA, 25 bp, probe
gaatgactctgtcttgtgggtgtct

SEQ ID NO: 212277 - DNA, 25 bp, probe
gaatgattcagtcttgacggtgaat

SEQ ID NO: 212278 - DNA, 25 bp, probe
gaagagtaggttctcggtacttagg

SEQ ID NO: 212279 - DNA, 25 bp, probe
gaagggaagttttgtggcttcttag

SEQ ID NO: 212280 - DNA, 25 bp, probe
gaagggaagttttgtggcttcttag

SEQ ID NO: 212281 - DNA, 25 bp, probe
gaatggaggaatcttggcgttcagc

SEQ ID NO: 212282 - DNA, 25 bp, probe
gaagggtaataggttggttgcagtg

SEQ ID NO: 212283 - DNA, 25 bp, probe
gaagggctaaccgtgatagtccttg

SEQ ID NO: 212284 - DNA, 25 bp, probe
gaaggggatcccagcaagctatctt

SEQ ID NO: 212285 - DNA, 25 bp, probe
gaaggccttcatcttcaagtactcg

SEQ ID NO: 212286 - DNA, 25 bp, probe
gaaggctctttggtttacaactcga

SEQ ID NO: 212287 - DNA, 25 bp, probe
gaagttttgttcatgtagcaaccag

SEQ ID NO: 212288 - DNA, 25 bp, probe
gaagtgtttgacatttaacccagcc

SEQ ID NO: 212289 - DNA, 25 bp, probe
gagccgggtgatcttttactcggcc

SEQ ID NO: 212290 - DNA, 25 bp, probe
gagccgggtgatcttttactcggcc

SEQ ID NO: 212291 - DNA, 25 bp, probe
ggtcgtggtgggatttacctacttg

SEQ ID NO: 212292 - DNA, 25 bp, probe
ggtcgtggtgggatttacctacttg

SEQ ID NO: 212293 - DNA, 25 bp, probe
gaaggggcagggatttctccttctt

SEQ ID NO: 212294 - DNA, 25 bp, probe
gaagggaaggtgcatattatcacgg

SEQ ID NO: 212295 - DNA, 25 bp, probe
gaagttaaggatctttcgccaggaa

SEQ ID NO: 212296 - DNA, 25 bp, probe
gaatgcttaatggacctttccagca

SEQ ID NO: 212297 - DNA, 25 bp, probe
gaatgctctacggaaacatattcta

SEQ ID NO: 212298 - DNA, 25 bp, probe
gaatgcttacacaaataaattttat

SEQ ID NO: 212299 - DNA, 25 bp, probe
gaatgttatctgattaaattactca

SEQ ID NO: 212300 - DNA, 25 bp, probe
gaatgactattgatgactgtgttaa

SEQ ID NO: 212301 - DNA, 25 bp, probe
gaatgatctatcactgacgttgaat

SEQ ID NO: 212302 - DNA, 25 bp, probe
gaatgatctatcactgacgttgaat

SEQ ID NO: 212303 - DNA, 25 bp, probe
gaatgtgcagtatgctggccttgac

SEQ ID NO: 212304 - DNA, 25 bp, probe
gaatgcagatgtggtgcttctcatt

SEQ ID NO: 212305 - DNA, 25 bp, probe
gaatgctgtggttgtgctcaatgtc

SEQ ID NO: 212306 - DNA, 25 bp, probe
gaatgctgggtatgctctgtgacaa

SEQ ID NO: 212307 - DNA, 25 bp, probe
gaagtgggttatgtggaaagaaaag

SEQ ID NO: 212308 - DNA, 25 bp, probe
gtttaggctggtgctgccaaaaaga

SEQ ID NO: 212309 - DNA, 25 bp, probe
gaatcgggctggtttccaaacagag

SEQ ID NO: 212310 - DNA, 25 bp, probe
gaatcgggctggtttccaaacagag

SEQ ID NO: 212311 - DNA, 25 bp, probe
gaatggaagacacttacctaacaag

SEQ ID NO: 212312 - DNA, 25 bp, probe
gaaggctggaccatgcatccttaaa

SEQ ID NO: 212313 - DNA, 25 bp, probe
gaaggcgtggtggacatctttcaga

SEQ ID NO: 212314 - DNA, 25 bp, probe
gaaggaacgctggatccattccaaa

SEQ ID NO: 212315 - DNA, 25 bp, probe
gaatgtgaagcccaatgccagtcgg

SEQ ID NO: 212316 - DNA, 25 bp, probe
gaatggctagaggcaatcaagatgg

SEQ ID NO: 212317 - DNA, 25 bp, probe
gaatggtcaaacacacagacagagg

SEQ ID NO: 212318 - DNA, 25 bp, probe
gaatgagtctactttggagacaatt

SEQ ID NO: 212319 - DNA, 25 bp, probe
gaaggttacaagtggcacttcaatg

SEQ ID NO: 212320 - DNA, 25 bp, probe
gaaggtggaaagaggacacgcacga

SEQ ID NO: 212321 - DNA, 25 bp, probe
gaaggttccataactggccagctgc

SEQ ID NO: 212322 - DNA, 25 bp, probe
gaaggatgtccttgagttttggctc

SEQ ID NO: 212323 - DNA, 25 bp, probe
gaaggagactcagggttactgccat

SEQ ID NO: 212324 - DNA, 25 bp, probe
gaaggtactcaggtttcagagccca

SEQ ID NO: 212325 - DNA, 25 bp, probe
gaaggaagtccgtttgatgattcca

SEQ ID NO: 212326 - DNA, 25 bp, probe
gaaggcacagtcttgtttatacttt

SEQ ID NO: 212327 - DNA, 25 bp, probe
gaatgatacgattatgcccaatatt

SEQ ID NO: 212328 - DNA, 25 bp, probe
gaatgtttgtgctagcctaagtata

SEQ ID NO: 212329 - DNA, 25 bp, probe
gaatgcatttgtaagcatcccccaa

SEQ ID NO: 212330 - DNA, 25 bp, probe
gaagatttattggcagcccacgaac

SEQ ID NO: 212331 - DNA, 25 bp, probe
gaatgtttcagtgagaccatgagaa

SEQ ID NO: 212332 - DNA, 25 bp, probe
gaagtgcttagtgagggggaagacc

SEQ ID NO: 212333 - DNA, 25 bp, probe
gtaggcctcagtgagtcggccggtc

SEQ ID NO: 212334 - DNA, 25 bp, probe
tgtacgcccagggaaagcggcgtta

SEQ ID NO: 212335 - DNA, 25 bp, probe
gtacgcccagggaaagcggcgttat

SEQ ID NO: 212336 - DNA, 25 bp, probe
gtaggcaccgttgaggtgtcctttg

SEQ ID NO: 212337 - DNA, 25 bp, probe
gacaggacccttgaaggtcacttag

SEQ ID NO: 212338 - DNA, 25 bp, probe
gaaggttcgggaaaggccatgttag

SEQ ID NO: 212339 - DNA, 25 bp, probe
gaagtttgcggagaaggcggtggat

SEQ ID NO: 212340 - DNA, 25 bp, probe
gaaggtctgggggaagcgacgggtg

SEQ ID NO: 212341 - DNA, 25 bp, probe
gaagtacggggacagcggggagcag

SEQ ID NO: 212342 - DNA, 25 bp, probe
gtagaacagggtcccacaggtttgg

SEQ ID NO: 212343 - DNA, 25 bp, probe
gtagaacagggtcccacaggtttgg

SEQ ID NO: 212344 - DNA, 25 bp, probe
gtagagacggggtttcaccgtgttg

SEQ ID NO: 212345 - DNA, 25 bp, probe
gaagaaccgggctgtgatccgggaa

SEQ ID NO: 212346 - DNA, 25 bp, probe
gaaggggtgtggggtgaggtagtga

SEQ ID NO: 212347 - DNA, 25 bp, probe
gaagggaggtgggccgtggcccttg

SEQ ID NO: 212348 - DNA, 25 bp, probe
gaaggcaagattgtcccttcctacg

SEQ ID NO: 212349 - DNA, 25 bp, probe
gaaggcaagattgtcccttcctacg

SEQ ID NO: 212350 - DNA, 25 bp, probe
gaaggcagagattcccatccttcct

SEQ ID NO: 212351 - DNA, 25 bp, probe
gaaggcagagattcccatccttcct

SEQ ID NO: 212352 - DNA, 25 bp, probe
gaaggcacataccaccaagttcaat

SEQ ID NO: 212353 - DNA, 25 bp, probe
gaagaacaaccgcaggtcgaattgt

SEQ ID NO: 212354 - DNA, 25 bp, probe
gaagacccccagggatgtggttatg

SEQ ID NO: 212355 - DNA, 25 bp, probe
gaatgacagccacagggagatggtg

SEQ ID NO: 212356 - DNA, 25 bp, probe
gaatgtcaccatcagaaggctgttt

SEQ ID NO: 212357 - DNA, 25 bp, probe
gaatgtcaccatcagaaggctgttt

SEQ ID NO: 212358 - DNA, 25 bp, probe
gaatgtcaatttcaagtgtatttga

SEQ ID NO: 212359 - DNA, 25 bp, probe
gaatgtcttctgtctttggtattat

SEQ ID NO: 212360 - DNA, 25 bp, probe
gaatgtgaatatctttgagtccttc

SEQ ID NO: 212361 - DNA, 25 bp, probe
gaatgtgaatatctttgagtccttc

SEQ ID NO: 212362 - DNA, 25 bp, probe
gaatgtatatgaacatactttccta

SEQ ID NO: 212363 - DNA, 25 bp, probe
gaagttaatagctatcttccttaaa

SEQ ID NO: 212364 - DNA, 25 bp, probe
gaagttaatagctatcttccttaaa

SEQ ID NO: 212365 - DNA, 25 bp, probe
gaagtggaaacttctcccaagtgaa

SEQ ID NO: 212366 - DNA, 25 bp, probe
gaagtgtaaactagcatccaccaaa

SEQ ID NO: 212367 - DNA, 25 bp, probe
gaagtgtaacgagggccctacactc

SEQ ID NO: 212368 - DNA, 25 bp, probe
gaagtaaactactgtacatactagt

SEQ ID NO: 212369 - DNA, 25 bp, probe
gaagttacccactgtcttcattttt

SEQ ID NO: 212370 - DNA, 25 bp, probe
gaagcttacgtgtcctgacgttttg

SEQ ID NO: 212371 - DNA, 25 bp, probe
gaatgtttccgtgctacactttgtg

SEQ ID NO: 212372 - DNA, 25 bp, probe
gaatgtttccgtgctacactttgtg

SEQ ID NO: 212373 - DNA, 25 bp, probe
gaatgatgatatgtggtatcacctt

SEQ ID NO: 212374 - DNA, 25 bp, probe
gaatgctagatgagtctgatttgct

SEQ ID NO: 212375 - DNA, 25 bp, probe
gaatgctacagtatctgcagtcgct

SEQ ID NO: 212376 - DNA, 25 bp, probe
gaatctaaatcaagcccatctgtca

SEQ ID NO: 212377 - DNA, 25 bp, probe
gaatctggaatattacctgtgtcat

SEQ ID NO: 212378 - DNA, 25 bp, probe
gaatcgtacattttgcttgcgtgct

SEQ ID NO: 212379 - DNA, 25 bp, probe
gaatctgtactaaggacctgtgttc

SEQ ID NO: 212380 - DNA, 25 bp, probe
gaatgtgttcttcggacagtcgtac

SEQ ID NO: 212381 - DNA, 25 bp, probe
gaatgtgttcttcggacagtcgtac

SEQ ID NO: 212382 - DNA, 25 bp, probe
gaatgtttctgtctgtggtgcgaac

SEQ ID NO: 212383 - DNA, 25 bp, probe
gaatgagtctcctgttgagctggta

SEQ ID NO: 212384 - DNA, 25 bp, probe
gaatgaggtctcaggcggcattggc

SEQ ID NO: 212385 - DNA, 25 bp, probe
gaatgaggtttgagcctcttgaccc

SEQ ID NO: 212386 - DNA, 25 bp, probe
gaatggggatatgtgcctgttcgac

SEQ ID NO: 212387 - DNA, 25 bp, probe
gaagtggcgcaagcttgctttgtaa

SEQ ID NO: 212388 - DNA, 25 bp, probe
gaatgggagaagactatccttggag

SEQ ID NO: 212389 - DNA, 25 bp, probe
gaatcgggaagaacatgaaaggcag

SEQ ID NO: 212390 - DNA, 25 bp, probe
gaatctgcggaactgcgcataaaaa

SEQ ID NO: 212391 - DNA, 25 bp, probe
gaatgctggaaagttgaatcagaaa

SEQ ID NO: 212392 - DNA, 25 bp, probe
gaatgtgggaaatgaatccgacatc

SEQ ID NO: 212393 - DNA, 25 bp, probe
gaatgtgggaaatgaatccgacatc

SEQ ID NO: 212394 - DNA, 25 bp, probe
gaatctgggattcagaactctgaga

SEQ ID NO: 212395 - DNA, 25 bp, probe
gaatccaggattcgaaccagcaagc

SEQ ID NO: 212396 - DNA, 25 bp, probe
gaatccaggatctgaaagtcagcct

SEQ ID NO: 212397 - DNA, 25 bp, probe
gaatgccatagatcggtggtcccgc

SEQ ID NO: 212398 - DNA, 25 bp, probe
gaatgcgcaggatgcggatggggcc

SEQ ID NO: 212399 - DNA, 25 bp, probe
gaaggcagagcaagtggagcagggc

SEQ ID NO: 212400 - DNA, 25 bp, probe
gaatctgcgctgaggaggcaggaga

SEQ ID NO: 212401 - DNA, 25 bp, probe
gaatctggtcaaggcagccaggagg

SEQ ID NO: 212402 - DNA, 25 bp, probe
gaatctggagctacacacaggaggg

SEQ ID NO: 212403 - DNA, 25 bp, probe
gaatctggagctacacacaggaggg

SEQ ID NO: 212404 - DNA, 25 bp, probe
gaatcggagcgaagcagagaggtgg

SEQ ID NO: 212405 - DNA, 25 bp, probe
gaatcggagcgaagcagagaggtgg

SEQ ID NO: 212406 - DNA, 25 bp, probe
gaatgctggaggaagggtgtttgtc

SEQ ID NO: 212407 - DNA, 25 bp, probe
gaatgatgaatggatgcaaggggtg

SEQ ID NO: 212408 - DNA, 25 bp, probe
gaatgagatgatcgaatctgggtgt

SEQ ID NO: 212409 - DNA, 25 bp, probe
gaatgagtgtgagcatcgggctttg

SEQ ID NO: 212410 - DNA, 25 bp, probe
gaatgatgtgttgatttggtttggc

SEQ ID NO: 212411 - DNA, 25 bp, probe
gaatgatgtgttgatttggtttggc

SEQ ID NO: 212412 - DNA, 25 bp, probe
gaatgcagcgttgatccgcgtcatc

SEQ ID NO: 212413 - DNA, 25 bp, probe
gaatgatggctagatcgacgatcgc

SEQ ID NO: 212414 - DNA, 25 bp, probe
gaatggcacactttcaacgactcca

SEQ ID NO: 212415 - DNA, 25 bp, probe
gaaggccactgtaaactggccgact

SEQ ID NO: 212416 - DNA, 25 bp, probe
gaaggccactgtaaactggccgact

SEQ ID NO: 212417 - DNA, 25 bp, probe
gaagaccctaagaaagagccgaaag

SEQ ID NO: 212418 - DNA, 25 bp, probe
gaatgaccctgtcaataagccagaa

SEQ ID NO: 212419 - DNA, 25 bp, probe
gaatgaaccttttgatgaagatcag

SEQ ID NO: 212420 - DNA, 25 bp, probe
gaatgaactttttactcttggtctt

SEQ ID NO: 212421 - DNA, 25 bp, probe
gaatggagtttttcagcctgtggcc

SEQ ID NO: 212422 - DNA, 25 bp, probe
gaatggactttgcacactttggccc

SEQ ID NO: 212423 - DNA, 25 bp, probe
gaatgcagactctgctaccattttg

SEQ ID NO: 212424 - DNA, 25 bp, probe
gaagaaatcacgcagccttttggtt

SEQ ID NO: 212425 - DNA, 25 bp, probe
gaatgaattaagcttcttctgggag

SEQ ID NO: 212426 - DNA, 25 bp, probe
gaatgaggtgaactggtctcactgg

SEQ ID NO: 212427 - DNA, 25 bp, probe
gaatgaggttagaagactgcagctt

SEQ ID NO: 212428 - DNA, 25 bp, probe
gaatgggtgaacaacactgctggtt

SEQ ID NO: 212429 - DNA, 25 bp, probe
gaatgggtgaacaacactgctggtt

SEQ ID NO: 212430 - DNA, 25 bp, probe
gaatgcctcggaatacctggccatc

SEQ ID NO: 212431 - DNA, 25 bp, probe
gaaggcgctgggtgcctgcagcgcc

SEQ ID NO: 212432 - DNA, 25 bp, probe
gaatcctggggttgactgtgtccat

SEQ ID NO: 212433 - DNA, 25 bp, probe
gaacgtgggcagagacgtgaccaag

SEQ ID NO: 212434 - DNA, 25 bp, probe
gaatcgggggacctgaggtcacaag

SEQ ID NO: 212435 - DNA, 25 bp, probe
gaatggggtggagggtcgccacacc

SEQ ID NO: 212436 - DNA, 25 bp, probe
gaaggaggaggcaaggtcctagtcc

SEQ ID NO: 212437 - DNA, 25 bp, probe
gaaggaaaggacagtccaggcattg

SEQ ID NO: 212438 - DNA, 25 bp, probe
gaaggaaagattgcagaggaggtat

SEQ ID NO: 212439 - DNA, 25 bp, probe
gaaggtcaaaccggaggagagactc

SEQ ID NO: 212440 - DNA, 25 bp, probe
gaaggctagcaaaccgagcgatcat

SEQ ID NO: 212441 - DNA, 25 bp, probe
gaaggctagcaaaccgagcgatcat

SEQ ID NO: 212442 - DNA, 25 bp, probe
gaaggaagcaaacagtggtcatcaa

SEQ ID NO: 212443 - DNA, 25 bp, probe
gaaggatggcatcaccgttgtggac

SEQ ID NO: 212444 - DNA, 25 bp, probe
gaaggcaatgacacgattatgtgcg

SEQ ID NO: 212445 - DNA, 25 bp, probe
gaatgaacatgacttctttagatgc

SEQ ID NO: 212446 - DNA, 25 bp, probe
gaatgaccagtgtttttcgtcgcca

SEQ ID NO: 212447 - DNA, 25 bp, probe
gaatgagaacttattttgtgcctag

SEQ ID NO: 212448 - DNA, 25 bp, probe
gaatgaagtattattatctgtctct

SEQ ID NO: 212449 - DNA, 25 bp, probe
gaatgacatgaactcgcttatctcc

SEQ ID NO: 212450 - DNA, 25 bp, probe
gaatggctcagagtccattattcac

SEQ ID NO: 212451 - DNA, 25 bp, probe
gaatgctggcaagttcaacatcatc

SEQ ID NO: 212452 - DNA, 25 bp, probe
gaatgcttccattgtcacaaatcaa

SEQ ID NO: 212453 - DNA, 25 bp, probe
gaatgcttccattgtcacaaatcaa

SEQ ID NO: 212454 - DNA, 25 bp, probe
gaatgcgtacatgtagatttcaatt

SEQ ID NO: 212455 - DNA, 25 bp, probe
gaatggtgccattgtaacttcatgt

SEQ ID NO: 212456 - DNA, 25 bp, probe
gaatggtgcaatggaacatctcatc

SEQ ID NO: 212457 - DNA, 25 bp, probe
gaatgatgctggtgcagactctctg

SEQ ID NO: 212458 - DNA, 25 bp, probe
gaatgcagccagtctgaggttatgt

SEQ ID NO: 212459 - DNA, 25 bp, probe
gaatggctgcagtgaggccgtgtca

SEQ ID NO: 212460 - DNA, 25 bp, probe
gaatgttgctggtgatcgttgtgct

SEQ ID NO: 212461 - DNA, 25 bp, probe
gaatgttgctggtgatcgttgtgct

SEQ ID NO: 212462 - DNA, 25 bp, probe
gaatgtctgtggggacctgagagca

SEQ ID NO: 212463 - DNA, 25 bp, probe
gaatgactagagggagccaagagga

SEQ ID NO: 212464 - DNA, 25 bp, probe
gaatggcatacatcgagcggaagaa

SEQ ID NO: 212465 - DNA, 25 bp, probe
gaatgaggacatttactataaaagc

SEQ ID NO: 212466 - DNA, 25 bp, probe
gaatgtggataaaactgtgtaaacc

SEQ ID NO: 212467 - DNA, 25 bp, probe
gaagggacactttcaggacccagtc

SEQ ID NO: 212468 - DNA, 25 bp, probe
gaatgggtcttattcagaccccaga

SEQ ID NO: 212469 - DNA, 25 bp, probe
gaatgaggccaatcaagaccagaag

SEQ ID NO: 212470 - DNA, 25 bp, probe
gaatgacgtcaacgcaaagcccaca

SEQ ID NO: 212471 - DNA, 25 bp, probe
gaatgacgtcaacgcaaagcccaca

SEQ ID NO: 212472 - DNA, 25 bp, probe
gaatggcaaagacagcacagccccc

SEQ ID NO: 212473 - DNA, 25 bp, probe
gaatggataagccagccaactgcac

SEQ ID NO: 212474 - DNA, 25 bp, probe
gaatgtacacagcgaaccacaggat

SEQ ID NO: 212475 - DNA, 25 bp, probe
gaatgtacacagcgaaccacaggat

SEQ ID NO: 212476 - DNA, 25 bp, probe
gaatggaagagtccaatccaccgaa

SEQ ID NO: 212477 - DNA, 25 bp, probe
gaatggaagttcgcccgagcaaaac

SEQ ID NO: 212478 - DNA, 25 bp, probe
gaagagttgtacgcccaggcaacaa

SEQ ID NO: 212479 - DNA, 25 bp, probe
gaagggtgtcactgaccccaaagaa

SEQ ID NO: 212480 - DNA, 25 bp, probe
gaagggttccacagaccaggagaag

SEQ ID NO: 212481 - DNA, 25 bp, probe
gaagggttcaccaggtcagggagag

SEQ ID NO: 212482 - DNA, 25 bp, probe
gaaggtgtccccttgggacgtcaat

SEQ ID NO: 212483 - DNA, 25 bp, probe
gaagtacgaccctaaggacgtcatc

SEQ ID NO: 212484 - DNA, 25 bp, probe
gaagtaccacctcactgagttggat

SEQ ID NO: 212485 - DNA, 25 bp, probe
gaagtacccactctatgttttaaag

SEQ ID NO: 212486 - DNA, 25 bp, probe
gaagaccttcactgattgttttaac

SEQ ID NO: 212487 - DNA, 25 bp, probe
gaagaccttcactgattgttttaac

SEQ ID NO: 212488 - DNA, 25 bp, probe
gaagggcatttctgtctttttaagc

SEQ ID NO: 212489 - DNA, 25 bp, probe
gaagggcatttctgtctttttaagc

SEQ ID NO: 212490 - DNA, 25 bp, probe
gaagagatttatttcctttttagag

SEQ ID NO: 212491 - DNA, 25 bp, probe
gaaggaaatagacccttttgtagct

SEQ ID NO: 212492 - DNA, 25 bp, probe
gaagtaagagtgaccctattatgct

SEQ ID NO: 212493 - DNA, 25 bp, probe
gaagtaagagtgaccctattatgct

SEQ ID NO: 212494 - DNA, 25 bp, probe
gaagtaaagtcacccagtgttccca

SEQ ID NO: 212495 - DNA, 25 bp, probe
gaaggaaattaagcaggacatctca

SEQ ID NO: 212496 - DNA, 25 bp, probe
gaaggccaatatcagcaagggcatg

SEQ ID NO: 212497 - DNA, 25 bp, probe
gaatggagtatctgagcaacaggaa

SEQ ID NO: 212498 - DNA, 25 bp, probe
gaatggagtctaatggtcaagggaa

SEQ ID NO: 212499 - DNA, 25 bp, probe
gaatggaattttgctacatggggtc

SEQ ID NO: 212500 - DNA, 25 bp, probe
gaaggaattggcactactagatggg

SEQ ID NO: 212501 - DNA, 25 bp, probe
gaaggtcaaggtttaatagcaggaa

SEQ ID NO: 212502 - DNA, 25 bp, probe
gaaggtgttggtatcacagagggca

SEQ ID NO: 212503 - DNA, 25 bp, probe
gaatggatctaacttcccagggggc

SEQ ID NO: 212504 - DNA, 25 bp, probe
gaagtactaactttccaaggcctgc

SEQ ID NO: 212505 - DNA, 25 bp, probe
gaagtactaactttccaaggcctgc

SEQ ID NO: 212506 - DNA, 25 bp, probe
gaagtacaagggtaccgtggccatc

SEQ ID NO: 212507 - DNA, 25 bp, probe
gaagtacaagggtaccgtggccatc

SEQ ID NO: 212508 - DNA, 25 bp, probe
gaagagatacgaagaaccgtccctc

SEQ ID NO: 212509 - DNA, 25 bp, probe
gacactgtacaaggtacccctttct

SEQ ID NO: 212510 - DNA, 25 bp, probe
gacactgtacaaggtacccctttct

SEQ ID NO: 212511 - DNA, 25 bp, probe
gacagtggaagtggagacccctcac

SEQ ID NO: 212512 - DNA, 25 bp, probe
gaaggtggcagtgaacctggccaag

SEQ ID NO: 212513 - DNA, 25 bp, probe
gaatggggagctgaaattggctgat

SEQ ID NO: 212514 - DNA, 25 bp, probe
gaaggaggcgctggcagagtacgag

SEQ ID NO: 212515 - DNA, 25 bp, probe
gacaagcccaatggcatgaaacggt

SEQ ID NO: 212516 - DNA, 25 bp, probe
gaaggctcaaaccagacaagcggct

SEQ ID NO: 212517 - DNA, 25 bp, probe
gaaggccatgacagatgaatccgac

SEQ ID NO: 212518 - DNA, 25 bp, probe
gaaggccaatgtaggaacccaaaat

SEQ ID NO: 212519 - DNA, 25 bp, probe
gaaggcaaggtagactctcccaaaa

SEQ ID NO: 212520 - DNA, 25 bp, probe
gaaggaagggaggacccaatctata

SEQ ID NO: 212521 - DNA, 25 bp, probe
gaaggaattggtcacctaacactga

SEQ ID NO: 212522 - DNA, 25 bp, probe
gaaggggacagtcaccaaacaccac

SEQ ID NO: 212523 - DNA, 25 bp, probe
gaaggcgaaagtccagctgccaagc

SEQ ID NO: 212524 - DNA, 25 bp, probe
gaaggacgaggatcagctgccattc

SEQ ID NO: 212525 - DNA, 25 bp, probe
gaatggtcgggtggtcagccatgac

SEQ ID NO: 212526 - DNA, 25 bp, probe
gaaggacgggctgaagatgaacgca

SEQ ID NO: 212527 - DNA, 25 bp, probe
gaagggcggggagagtgccattgcc

SEQ ID NO: 212528 - DNA, 25 bp, probe
gaagggcggggagagtgccattgcc

SEQ ID NO: 212529 - DNA, 25 bp, probe
gaaggggctgaggacgagaccccca

SEQ ID NO: 212530 - DNA, 25 bp, probe
gaaggaagtgagccacgagagcctg

SEQ ID NO: 212531 - DNA, 25 bp, probe
gaatgtattgtacactgacgcgtcc

SEQ ID NO: 212532 - DNA, 25 bp, probe
gaatggtttccttcatgaccaggcc

SEQ ID NO: 212533 - DNA, 25 bp, probe
gaaggttatcgtttaccagcaccca

SEQ ID NO: 212534 - DNA, 25 bp, probe
gaaggtttccaacttgctcatgacc

SEQ ID NO: 212535 - DNA, 25 bp, probe
gaaggtttccaacttgctcatgacc

SEQ ID NO: 212536 - DNA, 25 bp, probe
gaaggttgaagctccattcatacca

SEQ ID NO: 212537 - DNA, 25 bp, probe
gaatgtttagtatgctattaagtca

SEQ ID NO: 212538 - DNA, 25 bp, probe
gaatgtttgacttcgtattgaccct

SEQ ID NO: 212539 - DNA, 25 bp, probe
gaatgtttgacttcgtattgaccct

SEQ ID NO: 212540 - DNA, 25 bp, probe
gaagtttcactgtgtcttaccaagc

SEQ ID NO: 212541 - DNA, 25 bp, probe
gaaggatctaggctgttgtaccaag

SEQ ID NO: 212542 - DNA, 25 bp, probe
gaaggtcagttgccatggttaccga

SEQ ID NO: 212543 - DNA, 25 bp, probe
gaaggtcagtatatggagtccataa

SEQ ID NO: 212544 - DNA, 25 bp, probe
gaatgactagtcttagggctgccta

SEQ ID NO: 212545 - DNA, 25 bp, probe
gaatgactatcttcaagactgcctc

SEQ ID NO: 212546 - DNA, 25 bp, probe
gaatgcaccattccaaagcgagtcc

SEQ ID NO: 212547 - DNA, 25 bp, probe
gaatgacactctcaaattgttcctg

SEQ ID NO: 212548 - DNA, 25 bp, probe
gaatgacactctcaaattgttcctg

SEQ ID NO: 212549 - DNA, 25 bp, probe
gaatgaacactgctcaaactttctg

SEQ ID NO: 212550 - DNA, 25 bp, probe
gaatgatccctactcaaaatttatt

SEQ ID NO: 212551 - DNA, 25 bp, probe
gaatgtactgttctatagtttttca

SEQ ID NO: 212552 - DNA, 25 bp, probe
gaatgtactgttctatagtttttca

SEQ ID NO: 212553 - DNA, 25 bp, probe
gaatgtatctgtgaagtagttctgt

SEQ ID NO: 212554 - DNA, 25 bp, probe
gaatgaactgtctagatggatgaat

SEQ ID NO: 212555 - DNA, 25 bp, probe
gaatgaactgtctagatggatgaat

SEQ ID NO: 212556 - DNA, 25 bp, probe
gaatgaagcattctgtggtcaagta

SEQ ID NO: 212557 - DNA, 25 bp, probe
gaatgacagcatattgtaagaaaaa

SEQ ID NO: 212558 - DNA, 25 bp, probe
gaaggcactatttgctcaggaaatg

SEQ ID NO: 212559 - DNA, 25 bp, probe
gaatgtgactgaacacttcagaaag

SEQ ID NO: 212560 - DNA, 25 bp, probe
gaatgtttggccttctgagaaaaga

SEQ ID NO: 212561 - DNA, 25 bp, probe
gaatgttggtgccttttgtgccaca

SEQ ID NO: 212562 - DNA, 25 bp, probe
gaatggggctcgaatggctatgtaa

SEQ ID NO: 212563 - DNA, 25 bp, probe
gaatgagggcatcataggccagaca

SEQ ID NO: 212564 - DNA, 25 bp, probe
gaatgaggcctccaaacaaacactg

SEQ ID NO: 212565 - DNA, 25 bp, probe
gaatgaagctctggaaatcctcacc

SEQ ID NO: 212566 - DNA, 25 bp, probe
gaatgagacattggagaacctgaaa

SEQ ID NO: 212567 - DNA, 25 bp, probe
gaatgctgatctccaggtagctgga

SEQ ID NO: 212568 - DNA, 25 bp, probe
gaatgctgtgtgtcaagatggtggt

SEQ ID NO: 212569 - DNA, 25 bp, probe
gaatgctgtgtgtcaagatggtggt

SEQ ID NO: 212570 - DNA, 25 bp, probe
gaatgtgtggtaagcctgggtaaag

SEQ ID NO: 212571 - DNA, 25 bp, probe
gaaggatggcagacgcctggtgtca

SEQ ID NO: 212572 - DNA, 25 bp, probe
gaatgtgctggctctcattggtatc

SEQ ID NO: 212573 - DNA, 25 bp, probe
gaaggcaggcatgctgattcctgaa

SEQ ID NO: 212574 - DNA, 25 bp, probe
gaaggtacaggcctcacctggaact

SEQ ID NO: 212575 - DNA, 25 bp, probe
gaaggtagcgaccaacctctgattc

SEQ ID NO: 212576 - DNA, 25 bp, probe
gaagtttggcccaaccttttcatag

SEQ ID NO: 212577 - DNA, 25 bp, probe
gaaggttgaaggtactttttgatga

SEQ ID NO: 212578 - DNA, 25 bp, probe
gaaggttgaaggtactttttgatga

SEQ ID NO: 212579 - DNA, 25 bp, probe
gaaagtaaaggatcctcttattaag

SEQ ID NO: 212580 - DNA, 25 bp, probe
gaaagtaaaggatcctcttattaag

SEQ ID NO: 212581 - DNA, 25 bp, probe
gaaggtaccaggttgcgtcctttca

SEQ ID NO: 212582 - DNA, 25 bp, probe
gaaggtaccaggttgcgtcctttca

SEQ ID NO: 212583 - DNA, 25 bp, probe
gaaagctaaagtttggttttgacag

SEQ ID NO: 212584 - DNA, 25 bp, probe
gaaggtaacactttgggtcctgtgg

SEQ ID NO: 212585 - DNA, 25 bp, probe
gaaggtattccttttgtgtacagtg

SEQ ID NO: 212586 - DNA, 25 bp, probe
gaaggttgtagacgttgtgtaatgt

SEQ ID NO: 212587 - DNA, 25 bp, probe
gaaggccagttacactgtggaaatg

SEQ ID NO: 212588 - DNA, 25 bp, probe
gaaggccagtatgggaaggtgtaca

SEQ ID NO: 212589 - DNA, 25 bp, probe
gaaggccatggtggaggccgtcaca

SEQ ID NO: 212590 - DNA, 25 bp, probe
gaaggcactggcacagtcaggacca

SEQ ID NO: 212591 - DNA, 25 bp, probe
gaagtgcacagcctgggccagatac

SEQ ID NO: 212592 - DNA, 25 bp, probe
gaagtgcacagcctgggccagatac

SEQ ID NO: 212593 - DNA, 25 bp, probe
gaagtgcacagcctgggccagatac

SEQ ID NO: 212594 - DNA, 25 bp, probe
gaagtgccctcgagcactgaagtca

SEQ ID NO: 212595 - DNA, 25 bp, probe
gaatgttcacaccacgatctggatt

SEQ ID NO: 212596 - DNA, 25 bp, probe
gaatgttaatccatattggcagaac

SEQ ID NO: 212597 - DNA, 25 bp, probe
gaatgattaggtatagtggagactt

SEQ ID NO: 212598 - DNA, 25 bp, probe
gaatgaatatggtttgtgctggaag

SEQ ID NO: 212599 - DNA, 25 bp, probe
gaatggataggcttagtgctactac

SEQ ID NO: 212600 - DNA, 25 bp, probe
gaatgtgaagccttcatggtcagcg

SEQ ID NO: 212601 - DNA, 25 bp, probe
gaatgtgaagctcactgtgagcaat

SEQ ID NO: 212602 - DNA, 25 bp, probe
gaatgtaaatgtacatgtgcagata

SEQ ID NO: 212603 - DNA, 25 bp, probe
gaatggacagtgttgcatagcagat

SEQ ID NO: 212604 - DNA, 25 bp, probe
gaatgtgaagggtatgcagaatgtt

SEQ ID NO: 212605 - DNA, 25 bp, probe
gaatggggggaatgttttggctgcg

SEQ ID NO: 212606 - DNA, 25 bp, probe
gaatggggataattatgtcccaggg

SEQ ID NO: 212607 - DNA, 25 bp, probe
gaagtggctgtagcttatcccaagt

SEQ ID NO: 212608 - DNA, 25 bp, probe
gaagtggctgtagcttatcccaagt

SEQ ID NO: 212609 - DNA, 25 bp, probe
gaaggagattccgtgatcacccaag

SEQ ID NO: 212610 - DNA, 25 bp, probe
gaaggagattccgtgatcacccaag

SEQ ID NO: 212611 - DNA, 25 bp, probe
gaagtacattcagggactccagtgg

SEQ ID NO: 212612 - DNA, 25 bp, probe
gaaggacattcaggtacccgggtag

SEQ ID NO: 212613 - DNA, 25 bp, probe
gaaggagtgtgaggatacccacctt

SEQ ID NO: 212614 - DNA, 25 bp, probe
gaagggttttgatcattccagctcc

SEQ ID NO: 212615 - DNA, 25 bp, probe
gaaggttttgttgcattcacagcaa

SEQ ID NO: 212616 - DNA, 25 bp, probe
gaaggatgtactttccaaacaaatg

SEQ ID NO: 212617 - DNA, 25 bp, probe
gaaggattactctccatatcccttc

SEQ ID NO: 212618 - DNA, 25 bp, probe
gaaggagtacaacctgcatgacctc

SEQ ID NO: 212619 - DNA, 25 bp, probe
gaaggagtacaacctgcatgacctc

SEQ ID NO: 212620 - DNA, 25 bp, probe
gaatggggcccagggcagaccttca

SEQ ID NO: 212621 - DNA, 25 bp, probe
gaaggggcccagaccatgattgaac

SEQ ID NO: 212622 - DNA, 25 bp, probe
gaaggcgatgcacaacagattatac

SEQ ID NO: 212623 - DNA, 25 bp, probe
gaaggcctctgatgactatcttaac

SEQ ID NO: 212624 - DNA, 25 bp, probe
gaaggccctaaagatcctgaagcct

SEQ ID NO: 212625 - DNA, 25 bp, probe
gaaggtcttaaagaaggacgtcatc

SEQ ID NO: 212626 - DNA, 25 bp, probe
gaaggtccttaacacagtcgtgaac

SEQ ID NO: 212627 - DNA, 25 bp, probe
gaaggatcacttgaggccaggagtt

SEQ ID NO: 212628 - DNA, 25 bp, probe
gaaggcctttgctgcctgaaagtct

SEQ ID NO: 212629 - DNA, 25 bp, probe
gaagtgttttctcagcgaaatgttt

SEQ ID NO: 212630 - DNA, 25 bp, probe
gaatgttgtttgcctaccaagatat

SEQ ID NO: 212631 - DNA, 25 bp, probe
gaagttacttggttcccataatagc

SEQ ID NO: 212632 - DNA, 25 bp, probe
gaagttttgggagtgtttatcgagc

SEQ ID NO: 212633 - DNA, 25 bp, probe
gaagtacgggaaggattcctgccag

SEQ ID NO: 212634 - DNA, 25 bp, probe
gaagttggagggtctttctcaggag

SEQ ID NO: 212635 - DNA, 25 bp, probe
gaaggtggaggctatgctttggggg

SEQ ID NO: 212636 - DNA, 25 bp, probe
gaaggaggactggcagtttgtggcc

SEQ ID NO: 212637 - DNA, 25 bp, probe
gaaggaagacttcatgctgttggca

SEQ ID NO: 212638 - DNA, 25 bp, probe
gaaggaagttgtctataatgagccg

SEQ ID NO: 212639 - DNA, 25 bp, probe
gaagaaaattgtccacagggacctg

SEQ ID NO: 212640 - DNA, 25 bp, probe
gaatgaatgatactttgcactgggc

SEQ ID NO: 212641 - DNA, 25 bp, probe
gaatgaatgaatgactgccgttgct

SEQ ID NO: 212642 - DNA, 25 bp, probe
gaatggatgaaagccacatgtctgt

SEQ ID NO: 212643 - DNA, 25 bp, probe
gaatggatgaaagccacatgtctgt

SEQ ID NO: 212644 - DNA, 25 bp, probe
gaatgaatctaaggccttcctgcac

SEQ ID NO: 212645 - DNA, 25 bp, probe
gaatgaatctaaggccttcctgcac

SEQ ID NO: 212646 - DNA, 25 bp, probe
gaaggacaaagagtttgccgccttt

SEQ ID NO: 212647 - DNA, 25 bp, probe
gaaggaaaagccatagcaggagtta

SEQ ID NO: 212648 - DNA, 25 bp, probe
gaatggggataagaaaggcagctgt

SEQ ID NO: 212649 - DNA, 25 bp, probe
gaaggggctagactcaagccggctg

SEQ ID NO: 212650 - DNA, 25 bp, probe
gaaggggctagactcaagccggctg

SEQ ID NO: 212651 - DNA, 25 bp, probe
gaaggggtagataaggacatggatg

SEQ ID NO: 212652 - DNA, 25 bp, probe
gaatgggtgttgtatggggaggcaa

SEQ ID NO: 212653 - DNA, 25 bp, probe
gaatgaggggcttcacgagaggcca

SEQ ID NO: 212654 - DNA, 25 bp, probe
gaatggcgaagtccggcaaggccag

SEQ ID NO: 212655 - DNA, 25 bp, probe
gaaggtaactggggcaaatgccatt

SEQ ID NO: 212656 - DNA, 25 bp, probe
gaaggtaactggggcaaatgccatt

SEQ ID NO: 212657 - DNA, 25 bp, probe
gaaggctaaaactgctacatccaca

SEQ ID NO: 212658 - DNA, 25 bp, probe
gaaggctaaaactgctacatccaca

SEQ ID NO: 212659 - DNA, 25 bp, probe
gaagtgcaaaaacaacatgtgtcca

SEQ ID NO: 212660 - DNA, 25 bp, probe
gaagtgcaaaaacaacatgtgtcca

SEQ ID NO: 212661 - DNA, 25 bp, probe
gaagtgcaaaaacaacatgtgtcca

SEQ ID NO: 212662 - DNA, 25 bp, probe
gaagtgcaaaaacaacatgtgtcca

SEQ ID NO: 212663 - DNA, 25 bp, probe
gaatgtcataaagaagagccttcac

SEQ ID NO: 212664 - DNA, 25 bp, probe
gaagtaactgagaattaccatgtac

SEQ ID NO: 212665 - DNA, 25 bp, probe
gaagtaactgagaattaccatgtac

SEQ ID NO: 212666 - DNA, 25 bp, probe
gaatgtccctggagtactatggcat

SEQ ID NO: 212667 - DNA, 25 bp, probe
gaatgttggtggggatacctgcctt

SEQ ID NO: 212668 - DNA, 25 bp, probe
gaatgttggtggggatacctgcctt

SEQ ID NO: 212669 - DNA, 25 bp, probe
gaatggggtcacagtgagccacctg

SEQ ID NO: 212670 - DNA, 25 bp, probe
gaaggatttccacgtagacacctag

SEQ ID NO: 212671 - DNA, 25 bp, probe
gaatggtctttacctaacacagccc

SEQ ID NO: 212672 - DNA, 25 bp, probe
gaaagtccttagtgcaaaccaccat

SEQ ID NO: 212673 - DNA, 25 bp, probe
gaaagtccttagtgcaaaccaccat

SEQ ID NO: 212674 - DNA, 25 bp, probe
gaatggtacttacaggtacctctct

SEQ ID NO: 212675 - DNA, 25 bp, probe
gaagtttcaaagtgcctttctcctc

SEQ ID NO: 212676 - DNA, 25 bp, probe
gaagatttacagtggcgattattac

SEQ ID NO: 212677 - DNA, 25 bp, probe
gaagtggtggcaaaggtttattcca

SEQ ID NO: 212678 - DNA, 25 bp, probe
gaagggcattaggagtgtttcattt

SEQ ID NO: 212679 - DNA, 25 bp, probe
gaaggagcctatggagttgtactta

SEQ ID NO: 212680 - DNA, 25 bp, probe
gaaggagcctatggagttgtactta

SEQ ID NO: 212681 - DNA, 25 bp, probe
gaaggagccctaagttgtcactcag

SEQ ID NO: 212682 - DNA, 25 bp, probe
gaatgtagccctttttgtactgata

SEQ ID NO: 212683 - DNA, 25 bp, probe
gaatgagaaacgtgtttagtatcaa

SEQ ID NO: 212684 - DNA, 25 bp, probe
gaatggaaacagtgggcctggatca

SEQ ID NO: 212685 - DNA, 25 bp, probe
gaaggagggatgaggatgccggact

SEQ ID NO: 212686 - DNA, 25 bp, probe
gaaggaggtggaagagtgtgcaaac

SEQ ID NO: 212687 - DNA, 25 bp, probe
gaaggctggcatgcagaagctgtgc

SEQ ID NO: 212688 - DNA, 25 bp, probe
gaaggctggcatgcagaagctgtgc

SEQ ID NO: 212689 - DNA, 25 bp, probe
gaaggctttggaaagtgtcccagtc

SEQ ID NO: 212690 - DNA, 25 bp, probe
gaagggtggagatcaggtcccggcc

SEQ ID NO: 212691 - DNA, 25 bp, probe
gaaggggagagacaggggccgccct

SEQ ID NO: 212692 - DNA, 25 bp, probe
gaaggagggaagcctgggggcacct

SEQ ID NO: 212693 - DNA, 25 bp, probe
gaaggagacgaagatgattgggcat

SEQ ID NO: 212694 - DNA, 25 bp, probe
gaatgggagtgagggatagtggggt

SEQ ID NO: 212695 - DNA, 25 bp, probe
gaagggacatgtgggacgtgagccg

SEQ ID NO: 212696 - DNA, 25 bp, probe
gaagggagatgctgggtattctcag

SEQ ID NO: 212697 - DNA, 25 bp, probe
gaagggacagcaccagactattctc

SEQ ID NO: 212698 - DNA, 25 bp, probe
gaatgttggatctcagactaaccat

SEQ ID NO: 212699 - DNA, 25 bp, probe
gaatgtgttacatgcagactcgctc

SEQ ID NO: 212700 - DNA, 25 bp, probe
gaatggctttgtaataatcagtctt

SEQ ID NO: 212701 - DNA, 25 bp, probe
gaaggctcgtcaaaagtagcgctta

SEQ ID NO: 212702 - DNA, 25 bp, probe
gaaggccctaaagaaggcttatgaa

SEQ ID NO: 212703 - DNA, 25 bp, probe
gaaggccctaaagaaggcttatgaa

SEQ ID NO: 212704 - DNA, 25 bp, probe
gaaggcccttacgaaatggtgttca

SEQ ID NO: 212705 - DNA, 25 bp, probe
gaaggcccttatgacatggtgttcc

SEQ ID NO: 212706 - DNA, 25 bp, probe
gaaggaccttggaaggggctgctcc

SEQ ID NO: 212707 - DNA, 25 bp, probe
gaatggagttatacgggggcagccc

SEQ ID NO: 212708 - DNA, 25 bp, probe
gaatggagttatacgggggcagccc

SEQ ID NO: 212709 - DNA, 25 bp, probe
gaaggcagttgcaactgtggggccc

SEQ ID NO: 212710 - DNA, 25 bp, probe
gaagtgcacttcaatctgaaggtcc

SEQ ID NO: 212711 - DNA, 25 bp, probe
gaaggcagtcccagatgagcctcta

SEQ ID NO: 212712 - DNA, 25 bp, probe
gaatggcagcttgagaattgccctc

SEQ ID NO: 212713 - DNA, 25 bp, probe
gaatgtacattgatgcctgtgacct

SEQ ID NO: 212714 - DNA, 25 bp, probe
gaatgtcagcattatggcaattcct

SEQ ID NO: 212715 - DNA, 25 bp, probe
gaatgtcagtgtgactgatctctcg

SEQ ID NO: 212716 - DNA, 25 bp, probe
gaatgtcagtgtgactgatctctcg

SEQ ID NO: 212717 - DNA, 25 bp, probe
gaaggaagcactacagttcgtaagg

SEQ ID NO: 212718 - DNA, 25 bp, probe
gaaggaacacagtctttcgacaaga

SEQ ID NO: 212719 - DNA, 25 bp, probe
gaaggaatatctcttctcagaagga

SEQ ID NO: 212720 - DNA, 25 bp, probe
gaatggaatcctctgtggatgacgg

SEQ ID NO: 212721 - DNA, 25 bp, probe
gaactgaactcttttgggcctggag

SEQ ID NO: 212722 - DNA, 25 bp, probe
gagttgaaattttctggtgggagaa

SEQ ID NO: 212723 - DNA, 25 bp, probe
gaatgtgggattattgaatgggtga

SEQ ID NO: 212724 - DNA, 25 bp, probe
gaatgtgggattattgaatgggtga

SEQ ID NO: 212725 - DNA, 25 bp, probe
gaagtcgtttaaagctcaaagatgg

SEQ ID NO: 212726 - DNA, 25 bp, probe
gaaggcgctgtactacctgaaggag

SEQ ID NO: 212727 - DNA, 25 bp, probe
gaaggcgctgtactacctgaaggag

SEQ ID NO: 212728 - DNA, 25 bp, probe
gaatgatctctctgaatcctaaggg

SEQ ID NO: 212729 - DNA, 25 bp, probe
gaatgtttacatttactaaggtgtg

SEQ ID NO: 212730 - DNA, 25 bp, probe
gaagattgtagatgatcccaaagct

SEQ ID NO: 212731 - DNA, 25 bp, probe
gaagtgttaaggaacctgcgcagtg

SEQ ID NO: 212732 - DNA, 25 bp, probe
gaagggtactgaagagcctcacctg

SEQ ID NO: 212733 - DNA, 25 bp, probe
gaagggtactgaagagcctcacctg

SEQ ID NO: 212734 - DNA, 25 bp, probe
gaagggtactgaagagcctcacctg

SEQ ID NO: 212735 - DNA, 25 bp, probe
gaggaggccttgagaggccctgggg

SEQ ID NO: 212736 - DNA, 25 bp, probe
gaatggtccttaacagagtttgggg

SEQ ID NO: 212737 - DNA, 25 bp, probe
gaaggtccattcagctggtaggagg

SEQ ID NO: 212738 - DNA, 25 bp, probe
gaagtccctagcaagctgttattgg

SEQ ID NO: 212739 - DNA, 25 bp, probe
gaaggtcctacatgtaatgcatatg

SEQ ID NO: 212740 - DNA, 25 bp, probe
gaaggccttgaggagatcaatgcat

SEQ ID NO: 212741 - DNA, 25 bp, probe
gaaggccttgaggagatcaatgcat

SEQ ID NO: 212742 - DNA, 25 bp, probe
gaaggctttgagtatatcaacccat

SEQ ID NO: 212743 - DNA, 25 bp, probe
gaatggtgttgtaaaagatcagcct

SEQ ID NO: 212744 - DNA, 25 bp, probe
gaatgggaacaggacaagccagctt

SEQ ID NO: 212745 - DNA, 25 bp, probe
gaatgggaaagggtgaggacttcac

SEQ ID NO: 212746 - DNA, 25 bp, probe
gaatgggcatgatttggtgcatgga

SEQ ID NO: 212747 - DNA, 25 bp, probe
gaatggctattggtggtgcaggaag

SEQ ID NO: 212748 - DNA, 25 bp, probe
gaagtgctttacagtgcatggaatc

SEQ ID NO: 212749 - DNA, 25 bp, probe
gaaggcatgtctattgtgattttga

SEQ ID NO: 212750 - DNA, 25 bp, probe
gaatgtgaattacctgttttctggt

SEQ ID NO: 212751 - DNA, 25 bp, probe
gaagtggttcaaatttctcttggaa

SEQ ID NO: 212752 - DNA, 25 bp, probe
gaagtggttcaaatttctcttggaa

SEQ ID NO: 212753 - DNA, 25 bp, probe
gaatgtctgggaagttactctcatg

SEQ ID NO: 212754 - DNA, 25 bp, probe
gaatgttggtgaaggcaagtctctg

SEQ ID NO: 212755 - DNA, 25 bp, probe
gaatggtggggaatgcaactctgct

SEQ ID NO: 212756 - DNA, 25 bp, probe
gaaggcagtgcagtcactaactctg

SEQ ID NO: 212757 - DNA, 25 bp, probe
gaaggcactgaaactcacactgagc

SEQ ID NO: 212758 - DNA, 25 bp, probe
gagggcaataaaactgaagaccaag

SEQ ID NO: 212759 - DNA, 25 bp, probe
gaaggcaaaagatctcaggtacaag

SEQ ID NO: 212760 - DNA, 25 bp, probe
gaaggcaaaagatctcaggtacaag

SEQ ID NO: 212761 - DNA, 25 bp, probe
gaaggacaaatgcagctggttacaa

SEQ ID NO: 212762 - DNA, 25 bp, probe
gaaggcaaattcaggatgttaaagg

SEQ ID NO: 212763 - DNA, 25 bp, probe
gaaggcaattttagtgtattaatca

SEQ ID NO: 212764 - DNA, 25 bp, probe
gaaggcaagttaatctttccagtta

SEQ ID NO: 212765 - DNA, 25 bp, probe
gaaggagcagtttgagttcgcgctg

SEQ ID NO: 212766 - DNA, 25 bp, probe
gaaggaatttgattgctttgctgca

SEQ ID NO: 212767 - DNA, 25 bp, probe
gaatgggatgtctaatgtatttcaa

SEQ ID NO: 212768 - DNA, 25 bp, probe
gaagggatgtccgctatatccaaaa

SEQ ID NO: 212769 - DNA, 25 bp, probe
gaagacggtcgaacttgactatcta

SEQ ID NO: 212770 - DNA, 25 bp, probe
gaatggggttcaacttgacgcttgc

SEQ ID NO: 212771 - DNA, 25 bp, probe
gaatggttgtatatgctctgaagtg

SEQ ID NO: 212772 - DNA, 25 bp, probe
gaatgtgtctgcattgtcactgttg

SEQ ID NO: 212773 - DNA, 25 bp, probe
gaatgtgtatattattatcttttac

SEQ ID NO: 212774 - DNA, 25 bp, probe
gaatggctagtgtcattttgtttaa

SEQ ID NO: 212775 - DNA, 25 bp, probe
gacaggtacgtcaccatcttttacg

SEQ ID NO: 212776 - DNA, 25 bp, probe
gaatggagacgctcccatttttgat

SEQ ID NO: 212777 - DNA, 25 bp, probe
gaatggcagggatctattttattga

SEQ ID NO: 212778 - DNA, 25 bp, probe
gaatgtgaagagtgctttttgacct

SEQ ID NO: 212779 - DNA, 25 bp, probe
gaatgtgaagagtgctttttgacct

SEQ ID NO: 212780 - DNA, 25 bp, probe
gaaggccgagtacgagtttgactct

SEQ ID NO: 212781 - DNA, 25 bp, probe
gaaggcctttatcagattcatagat

SEQ ID NO: 212782 - DNA, 25 bp, probe
gaaggactataccgagtatcaggat

SEQ ID NO: 212783 - DNA, 25 bp, probe
gaaggactataccgagtatcaggat

SEQ ID NO: 212784 - DNA, 25 bp, probe
gaaggactgtaccggatcacagaga

SEQ ID NO: 212785 - DNA, 25 bp, probe
gaaggcactcatccgaaagacagaa

SEQ ID NO: 212786 - DNA, 25 bp, probe
gaagtgcccataggaaatagagaga

SEQ ID NO: 212787 - DNA, 25 bp, probe
gaagtccccatctaaattgcaggat

SEQ ID NO: 212788 - DNA, 25 bp, probe
gaagtccttcccatgatacagacat

SEQ ID NO: 212789 - DNA, 25 bp, probe
gaaggagtttccatatgccgatgcc

SEQ ID NO: 212790 - DNA, 25 bp, probe
gaagggttatcctttcattaggcaa

SEQ ID NO: 212791 - DNA, 25 bp, probe
gaaggaggtacctctgttcaggcta

SEQ ID NO: 212792 - DNA, 25 bp, probe
gaaggaggtacctctgttcaggcta

SEQ ID NO: 212793 - DNA, 25 bp, probe
gaaggcctgtacttttggtcattca

SEQ ID NO: 212794 - DNA, 25 bp, probe
gaaggcctgaactatgcctgtctca

SEQ ID NO: 212795 - DNA, 25 bp, probe
gaatgtcctgaagatcagtgacttt

SEQ ID NO: 212796 - DNA, 25 bp, probe
gaatgtactggagagactggcttct

SEQ ID NO: 212797 - DNA, 25 bp, probe
gaagtgtctggaatacccgttctat

SEQ ID NO: 212798 - DNA, 25 bp, probe
gaagggatggacttccacagattct

SEQ ID NO: 212799 - DNA, 25 bp, probe
gaaggagaggaaggccacaggtgtg

SEQ ID NO: 212800 - DNA, 25 bp, probe
gaaggatgagggggctcagcggggg

SEQ ID NO: 212801 - DNA, 25 bp, probe
gaagatggaggtgtgtaggttaggg

SEQ ID NO: 212802 - DNA, 25 bp, probe
gaaggtgaggtcataatttatcagg

SEQ ID NO: 212803 - DNA, 25 bp, probe
gaaggatgaacaattatatttatat

SEQ ID NO: 212804 - DNA, 25 bp, probe
gaatggtgtaatgttgataattgtt

SEQ ID NO: 212805 - DNA, 25 bp, probe
gaatggtgtaatgttgataattgtt

SEQ ID NO: 212806 - DNA, 25 bp, probe
gaatgtctgtaaattctaatacttg

SEQ ID NO: 212807 - DNA, 25 bp, probe
gaatgtgcgcattttgcattccata

SEQ ID NO: 212808 - DNA, 25 bp, probe
gaatgtgattcttcatcttccaagg

SEQ ID NO: 212809 - DNA, 25 bp, probe
gaatgtgatctcttctttccacaaa

SEQ ID NO: 212810 - DNA, 25 bp, probe
gaatgtgatctcttctttccacaaa

SEQ ID NO: 212811 - DNA, 25 bp, probe
gaaggatgccatgtttgcctctaaa

SEQ ID NO: 212812 - DNA, 25 bp, probe
gaagaacgccttcatttcatgcaaa

SEQ ID NO: 212813 - DNA, 25 bp, probe
gaagaacgccttcatttcatgcaaa

SEQ ID NO: 212814 - DNA, 25 bp, probe
gaagtacagtttcaaggatgaagat

SEQ ID NO: 212815 - DNA, 25 bp, probe
gaagtccatgtgataattgtaaagg

SEQ ID NO: 212816 - DNA, 25 bp, probe
gaagtccatgtgataattgtaaagg

SEQ ID NO: 212817 - DNA, 25 bp, probe
gaagttctgttatctgtgtatattg

SEQ ID NO: 212818 - DNA, 25 bp, probe
gaagttctgttatctgtgtatattg

SEQ ID NO: 212819 - DNA, 25 bp, probe
gaagctggggtatgtgtgtaagggt

SEQ ID NO: 212820 - DNA, 25 bp, probe
gaaggtgggtagggctacaggggtg

SEQ ID NO: 212821 - DNA, 25 bp, probe
gaagaggggtataggacaaggggtg

SEQ ID NO: 212822 - DNA, 25 bp, probe
gaaggcggagtaaggtggggtgagg

SEQ ID NO: 212823 - DNA, 25 bp, probe
gaagggaagtactccctggtgatgg

SEQ ID NO: 212824 - DNA, 25 bp, probe
gaaggaaatggaaaccctcgtggag

SEQ ID NO: 212825 - DNA, 25 bp, probe
gaaggacaggacaaagcggctcggg

SEQ ID NO: 212826 - DNA, 25 bp, probe
gaagtggcagggtcaagcttgtagg

SEQ ID NO: 212827 - DNA, 25 bp, probe
gaatgtgggctgaaatcatcatctt

SEQ ID NO: 212828 - DNA, 25 bp, probe
gaatgtgctggtaactgctttgctt

SEQ ID NO: 212829 - DNA, 25 bp, probe
gaatggtgtgatgagtcttcagtag

SEQ ID NO: 212830 - DNA, 25 bp, probe
gaaggctgtgatgtcgctgtcagga

SEQ ID NO: 212831 - DNA, 25 bp, probe
gaaggcatggccttcttggagagtc

SEQ ID NO: 212832 - DNA, 25 bp, probe
gaactgcagcgccgatttgagggtg

SEQ ID NO: 212833 - DNA, 25 bp, probe
gaactgacggagattaaccgtcggc

SEQ ID NO: 212834 - DNA, 25 bp, probe
gaagtacgggatctacaccaaggtc

SEQ ID NO: 212835 - DNA, 25 bp, probe
gaagtccgtggtcataaccttgtct

SEQ ID NO: 212836 - DNA, 25 bp, probe
gaatggccggtgggaaatcttccct

SEQ ID NO: 212837 - DNA, 25 bp, probe
gaatggtctgggagcaaaagtctgc

SEQ ID NO: 212838 - DNA, 25 bp, probe
gaagcgttggaagaaaatggcatca

SEQ ID NO: 212839 - DNA, 25 bp, probe
gattcgttggaagcttaacttttgt

SEQ ID NO: 212840 - DNA, 25 bp, probe
tgaacgtagtaagccttaccttaat

SEQ ID NO: 212841 - DNA, 25 bp, probe
tgaacgtagtaagccttaccttaat

SEQ ID NO: 212842 - DNA, 25 bp, probe
gaactaggcaaagacctacttctga

SEQ ID NO: 212843 - DNA, 25 bp, probe
gaaggaagcaaaggaccttctggtg

SEQ ID NO: 212844 - DNA, 25 bp, probe
gaaggccctgaaggagacgtcggag

SEQ ID NO: 212845 - DNA, 25 bp, probe
gaaggccctgaaggagacgtcggag

SEQ ID NO: 212846 - DNA, 25 bp, probe
gaaggccctgatgaaggcagttgca

SEQ ID NO: 212847 - DNA, 25 bp, probe
gaaggctccatgtctgaagaggatt

SEQ ID NO: 212848 - DNA, 25 bp, probe
gaaggccaatgagtggcagaggctg

SEQ ID NO: 212849 - DNA, 25 bp, probe
gaaggacagtagctcagagtctgag

SEQ ID NO: 212850 - DNA, 25 bp, probe
gaaggacgacggacagcacatgtgg

SEQ ID NO: 212851 - DNA, 25 bp, probe
gaagttacactgcacgcaagttgac

SEQ ID NO: 212852 - DNA, 25 bp, probe
gaagttcgtcatggatggcggggtc

SEQ ID NO: 212853 - DNA, 25 bp, probe
gaaggtcgtcacctgggagacagtc

SEQ ID NO: 212854 - DNA, 25 bp, probe
gaagtgatttagttgtggaaagata

SEQ ID NO: 212855 - DNA, 25 bp, probe
gaagttcttctgttgtagaaagcag

SEQ ID NO: 212856 - DNA, 25 bp, probe
gaaggactttgtggtacggcagagg

SEQ ID NO: 212857 - DNA, 25 bp, probe
gaaggacagtcattgcgtaaaaagg

SEQ ID NO: 212858 - DNA, 25 bp, probe
gaatggagcagttccttatataata

SEQ ID NO: 212859 - DNA, 25 bp, probe
gaatgtgggtggcctgtatctagaa

SEQ ID NO: 212860 - DNA, 25 bp, probe
gaatgtgggtggcctgtatctagaa

SEQ ID NO: 212861 - DNA, 25 bp, probe
gaaggcgagtgagagtgaataaata

SEQ ID NO: 212862 - DNA, 25 bp, probe
gaaggcgagtgagagtgaataaata

SEQ ID NO: 212863 - DNA, 25 bp, probe
gaaggctgttgacaagcaaggaaag

SEQ ID NO: 212864 - DNA, 25 bp, probe
gaaggctttgacgaaaatgagattc

SEQ ID NO: 212865 - DNA, 25 bp, probe
gaagtttatcgcgtcaagaaattcc

SEQ ID NO: 212866 - DNA, 25 bp, probe
gaaggttaatgggattgaaatgtca

SEQ ID NO: 212867 - DNA, 25 bp, probe
gaaggacaaaaggttagacagatgc

SEQ ID NO: 212868 - DNA, 25 bp, probe
gaagggctacaatgtcaagtctgac

SEQ ID NO: 212869 - DNA, 25 bp, probe
gaaggactccatttgatactgttgg

SEQ ID NO: 212870 - DNA, 25 bp, probe
gaaggatctccttttgcaagttggc

SEQ ID NO: 212871 - DNA, 25 bp, probe
gaatggtcgcaccttcaaagtgggc

SEQ ID NO: 212872 - DNA, 25 bp, probe
gaaggcaccatggttagagggaggc

SEQ ID NO: 212873 - DNA, 25 bp, probe
gaaggcacacaaacgaggaatgagg

SEQ ID NO: 212874 - DNA, 25 bp, probe
gaaggaccagatcgtggtgcagaaa

SEQ ID NO: 212875 - DNA, 25 bp, probe
gaaggaccagatcgtggtgcagaaa

SEQ ID NO: 212876 - DNA, 25 bp, probe
gaaggctggcagtgatggggccaag

SEQ ID NO: 212877 - DNA, 25 bp, probe
gaaggttcgagactggagtacaagg

SEQ ID NO: 212878 - DNA, 25 bp, probe
gaaggtcggaggagtgttacaggag

SEQ ID NO: 212879 - DNA, 25 bp, probe
gaagaacggaggccgtttcgtggcg

SEQ ID NO: 212880 - DNA, 25 bp, probe
gaaggaccacaagcgttacctggtg

SEQ ID NO: 212881 - DNA, 25 bp, probe
gagggacctggagcggaaagtgggc

SEQ ID NO: 212882 - DNA, 25 bp, probe
gagggacctggagcggaaagtgggc

SEQ ID NO: 212883 - DNA, 25 bp, probe
gaagggccaggagtcggagtacggg

SEQ ID NO: 212884 - DNA, 25 bp, probe
gaatggggagagacatgaggcaatt

SEQ ID NO: 212885 - DNA, 25 bp, probe
gaaggcaggagatcatggtgacagt

SEQ ID NO: 212886 - DNA, 25 bp, probe
gaaggcgtcagatattgctgcctct

SEQ ID NO: 212887 - DNA, 25 bp, probe
gaaggtgtcagagctggcggccttc

SEQ ID NO: 212888 - DNA, 25 bp, probe
gaaggtgtcagagctggcggccttc

SEQ ID NO: 212889 - DNA, 25 bp, probe
gaaggatggagaccatgtctgtgcc

SEQ ID NO: 212890 - DNA, 25 bp, probe
gaaggaggggacatgtctcccgatt

SEQ ID NO: 212891 - DNA, 25 bp, probe
gaagtgagtggaactcagtcccctg

SEQ ID NO: 212892 - DNA, 25 bp, probe
gaaggaaggagactcacctctgcct

SEQ ID NO: 212893 - DNA, 25 bp, probe
gaaggattggaatttcactcttcag

SEQ ID NO: 212894 - DNA, 25 bp, probe
gaaggcattgccattctcaacattc

SEQ ID NO: 212895 - DNA, 25 bp, probe
gaaggatgctgtagtatatgaaaac

SEQ ID NO: 212896 - DNA, 25 bp, probe
gaaggatgctgtagtatatgaaaac

SEQ ID NO: 212897 - DNA, 25 bp, probe
gaatggtgttattactgacaaggca

SEQ ID NO: 212898 - DNA, 25 bp, probe
gaatggtgttattactgacaaggca

SEQ ID NO: 212899 - DNA, 25 bp, probe
gaaggcatttattttgagccagact

SEQ ID NO: 212900 - DNA, 25 bp, probe
gaaggcttgtattagtcccaagcca

SEQ ID NO: 212901 - DNA, 25 bp, probe
gaactttgtcattacctataaccgg

SEQ ID NO: 212902 - DNA, 25 bp, probe
gaagcttctggttaaagagacccgg

SEQ ID NO: 212903 - DNA, 25 bp, probe
gaagcttctggttaaagagacccgg

SEQ ID NO: 212904 - DNA, 25 bp, probe
gaaggatctggttcaacatagcaca

SEQ ID NO: 212905 - DNA, 25 bp, probe
gaaggatccagaatcaaaagctcaa

SEQ ID NO: 212906 - DNA, 25 bp, probe
gaaggacacagaatggataagccag

SEQ ID NO: 212907 - DNA, 25 bp, probe
gaaggagcacaaggggaaatcagca

SEQ ID NO: 212908 - DNA, 25 bp, probe
gaagggcaccaccaggagtggagcc

SEQ ID NO: 212909 - DNA, 25 bp, probe
gaagggcaacacaaggacatggtgc

SEQ ID NO: 212910 - DNA, 25 bp, probe
gaaggcatccactatcgagatcatg

SEQ ID NO: 212911 - DNA, 25 bp, probe
gaagtctgacatttggagtctgggc

SEQ ID NO: 212912 - DNA, 25 bp, probe
gacatgtatgccatggggttggtgc

SEQ ID NO: 212913 - DNA, 25 bp, probe
gaatggagcttctggtgtgctatga

SEQ ID NO: 212914 - DNA, 25 bp, probe
gaaggacttgctgggaggctgagag

SEQ ID NO: 212915 - DNA, 25 bp, probe
gaaggctctttcctagtgatggaga

SEQ ID NO: 212916 - DNA, 25 bp, probe
gaaggctctgttccacatatatttc

SEQ ID NO: 212917 - DNA, 25 bp, probe
gaatggctgatgctggcctgtaatt

SEQ ID NO: 212918 - DNA, 25 bp, probe
gaaggctgacttgattgtgccattt

SEQ ID NO: 212919 - DNA, 25 bp, probe
gaaggcaagattgtgtcccattccc

SEQ ID NO: 212920 - DNA, 25 bp, probe
gaaggcaagattggcatatcattgt

SEQ ID NO: 212921 - DNA, 25 bp, probe
gaaggcgtgcttggcattcaattcc

SEQ ID NO: 212922 - DNA, 25 bp, probe
gaaggtggcctggatccaggacttc

SEQ ID NO: 212923 - DNA, 25 bp, probe
gaaggtggccacatccaagaagtac

SEQ ID NO: 212924 - DNA, 25 bp, probe
gaagggagcccaaccaggaactcct

SEQ ID NO: 212925 - DNA, 25 bp, probe
gaaggaaggccaatgtaggaaccca

SEQ ID NO: 212926 - DNA, 25 bp, probe
gaaggaaggccaatgtaggaaccca

SEQ ID NO: 212927 - DNA, 25 bp, probe
gaactacagggtttagggtcctcag

SEQ ID NO: 212928 - DNA, 25 bp, probe
gaactacagggtttagggtcctcag

SEQ ID NO: 212929 - DNA, 25 bp, probe
gaactactttatctacggatttaga

SEQ ID NO: 212930 - DNA, 25 bp, probe
gaacttttttttactggtctcattg

SEQ ID NO: 212931 - DNA, 25 bp, probe
gaaatggattgtattttggtttata

SEQ ID NO: 212932 - DNA, 25 bp, probe
gagaaagaggttgtttcccataata

SEQ ID NO: 212933 - DNA, 25 bp, probe
gaagaaacttccagttcctctcaaa

SEQ ID NO: 212934 - DNA, 25 bp, probe
gaagttacttcacatttctcatcct

SEQ ID NO: 212935 - DNA, 25 bp, probe
gacgtaagcttacaaatcatcctac

SEQ ID NO: 212936 - DNA, 25 bp, probe
gacgtaagcttacaaatcatcctac

SEQ ID NO: 212937 - DNA, 25 bp, probe
gaagtcgactcatgagaaaatccta

SEQ ID NO: 212938 - DNA, 25 bp, probe
gaatggctgacttgaagagcaacat

SEQ ID NO: 212939 - DNA, 25 bp, probe
gaaggcgagctgaaggaaatcaagc

SEQ ID NO: 212940 - DNA, 25 bp, probe
gaatggctgagtgagccagactgca

SEQ ID NO: 212941 - DNA, 25 bp, probe
gaaggcatggtggaagccactgcca

SEQ ID NO: 212942 - DNA, 25 bp, probe
gaaggcaggatggaactcggcctca

SEQ ID NO: 212943 - DNA, 25 bp, probe
gaacctggagggctagaacctagaa

SEQ ID NO: 212944 - DNA, 25 bp, probe
gaaggctgtaggactcttgaattcc

SEQ ID NO: 212945 - DNA, 25 bp, probe
gaaggaggagctactcggataagca

SEQ ID NO: 212946 - DNA, 25 bp, probe
gaaggagggactgctggatgagaac

SEQ ID NO: 212947 - DNA, 25 bp, probe
gaaggagggactgctggatgagaac

SEQ ID NO: 212948 - DNA, 25 bp, probe
gaaggttggacagcctggaacagca

SEQ ID NO: 212949 - DNA, 25 bp, probe
gaaggttggacagcctggaacagca

SEQ ID NO: 212950 - DNA, 25 bp, probe
gaaggtgttgaagctcgcgtggcac

SEQ ID NO: 212951 - DNA, 25 bp, probe
gaaggtgtggaacttgtgcctggct

SEQ ID NO: 212952 - DNA, 25 bp, probe
gaaggcagtggctagtttcttgaga

SEQ ID NO: 212953 - DNA, 25 bp, probe
gaagggagccgagtttatctggagt

SEQ ID NO: 212954 - DNA, 25 bp, probe
gaagtggaggcggtaaatctgaagt

SEQ ID NO: 212955 - DNA, 25 bp, probe
gaaggcgagggggacagacagacag

SEQ ID NO: 212956 - DNA, 25 bp, probe
gaaggaatggggggcacacagagtg

SEQ ID NO: 212957 - DNA, 25 bp, probe
gaaggttgaagaggtgagcacggcc

SEQ ID NO: 212958 - DNA, 25 bp, probe
gaagtgctgctgagacagggccacg

SEQ ID NO: 212959 - DNA, 25 bp, probe
gaaggctatcgttcagaagctccgc

SEQ ID NO: 212960 - DNA, 25 bp, probe
gaagatctgactaaagagaccctgc

SEQ ID NO: 212961 - DNA, 25 bp, probe
gaagatctgactaaagagaccctgc

SEQ ID NO: 212962 - DNA, 25 bp, probe
gaagttactagcaaggacctcgttt

SEQ ID NO: 212963 - DNA, 25 bp, probe
gaaggaactagaatgagggcccctg

SEQ ID NO: 212964 - DNA, 25 bp, probe
gaaggccgtagatgtgtgggccctg

SEQ ID NO: 212965 - DNA, 25 bp, probe
gaagtgcaaaaatgtggtcccagtg

SEQ ID NO: 212966 - DNA, 25 bp, probe
gaagtcctttcatgtgaatatccag

SEQ ID NO: 212967 - DNA, 25 bp, probe
gaagtcctttcatgtgaatatccag

SEQ ID NO: 212968 - DNA, 25 bp, probe
gaagtcaaattgtgtgaacagacag

SEQ ID NO: 212969 - DNA, 25 bp, probe
gaagtcagatcactaagcggaaaag

SEQ ID NO: 212970 - DNA, 25 bp, probe
gaagttgtactggcaggggaacagc

SEQ ID NO: 212971 - DNA, 25 bp, probe
gaagttgtactggcaggggaacagc

SEQ ID NO: 212972 - DNA, 25 bp, probe
gaagttttgctgtcacggaggtgga

SEQ ID NO: 212973 - DNA, 25 bp, probe
gaagtcctctggaatccgagtgggc

SEQ ID NO: 212974 - DNA, 25 bp, probe
gaagtcgcggtatgcagaactggac

SEQ ID NO: 212975 - DNA, 25 bp, probe
gaagttgggctatcaatggaagaaa

SEQ ID NO: 212976 - DNA, 25 bp, probe
gaagttgggcagaaagggaagaagg

SEQ ID NO: 212977 - DNA, 25 bp, probe
gaagttgggcagaaagggaagaagg

SEQ ID NO: 212978 - DNA, 25 bp, probe
gaagtgcggggtaggggaagaagag

SEQ ID NO: 212979 - DNA, 25 bp, probe
gaagggtagggtgggaaggtgagca

SEQ ID NO: 212980 - DNA, 25 bp, probe
gaagggccagggtgggaggattgtt

SEQ ID NO: 212981 - DNA, 25 bp, probe
gaagggtcagggcagcaaggtgatc

SEQ ID NO: 212982 - DNA, 25 bp, probe
gttgaggaggggagcaaggctgcta

SEQ ID NO: 212983 - DNA, 25 bp, probe
gaagaaagcgggaagaattcctgaa

SEQ ID NO: 212984 - DNA, 25 bp, probe
gaagaaggggagctgaactgggaag

SEQ ID NO: 212985 - DNA, 25 bp, probe
gaagaggagaggggggtcgggaatg

SEQ ID NO: 212986 - DNA, 25 bp, probe
gaaggcgaaggggtggtcctgtggg

SEQ ID NO: 212987 - DNA, 25 bp, probe
gaaggagaaggcctttgctgcctga

SEQ ID NO: 212988 - DNA, 25 bp, probe
gaaggagaaggcctttgctgcctga

SEQ ID NO: 212989 - DNA, 25 bp, probe
gaagaggaactccctctttctacag

SEQ ID NO: 212990 - DNA, 25 bp, probe
gaagagtgaaccctctttagtaaat

SEQ ID NO: 212991 - DNA, 25 bp, probe
gaagggaaccgaagccaagtgataa

SEQ ID NO: 212992 - DNA, 25 bp, probe
gaaggaatccctatgtcaagtgaga

SEQ ID NO: 212993 - DNA, 25 bp, probe
gaaggaatccctatgtcaagtgaga

SEQ ID NO: 212994 - DNA, 25 bp, probe
gaaggaatcagcctgtgtggggtgg

SEQ ID NO: 212995 - DNA, 25 bp, probe
gaaggcaatcgacatctggatggct

SEQ ID NO: 212996 - DNA, 25 bp, probe
gaaggaatgcgagtaaggattggct

SEQ ID NO: 212997 - DNA, 25 bp, probe
gaagtgaagctgattgggtttgctc

SEQ ID NO: 212998 - DNA, 25 bp, probe
gaagtgaaatgctttaatgatctta

SEQ ID NO: 212999 - DNA, 25 bp, probe
gaaggagagatgctgggagcctttt

SEQ ID NO: 213000 - DNA, 25 bp, probe
gaaggggaggcttgtactgctttgt

SEQ ID NO: 213001 - DNA, 25 bp, probe
gaaggggaggcttgtactgctttgt

SEQ ID NO: 213002 - DNA, 25 bp, probe
gaaggtggaagctagttctctgttg

SEQ ID NO: 213003 - DNA, 25 bp, probe
gaaggtggaagctagttctctgttg

SEQ ID NO: 213004 - DNA, 25 bp, probe
gaagatggaaactgttagcggctac

SEQ ID NO: 213005 - DNA, 25 bp, probe
gaagggcaagaaggtgccccagtac

SEQ ID NO: 213006 - DNA, 25 bp, probe
gaaggagaagcagttatgccaccac

SEQ ID NO: 213007 - DNA, 25 bp, probe
gaaggagaagcacggtgtcatccac

SEQ ID NO: 213008 - DNA, 25 bp, probe
gaaggagaagcacggtgtcatccac

SEQ ID NO: 213009 - DNA, 25 bp, probe
gaaggagaacggcatctactccgtc

SEQ ID NO: 213010 - DNA, 25 bp, probe
gaaggagacctaaatcatactttgg

SEQ ID NO: 213011 - DNA, 25 bp, probe
gaaggagacctaaatcatactttgg

SEQ ID NO: 213012 - DNA, 25 bp, probe
gaaggagcagttttaacgtttcgct

SEQ ID NO: 213013 - DNA, 25 bp, probe
gaaggagcagttttaacgtttcgct

SEQ ID NO: 213014 - DNA, 25 bp, probe
gaaggaaattggcatcacgctgttt

SEQ ID NO: 213015 - DNA, 25 bp, probe
gaaggagaataacttccagccttac

SEQ ID NO: 213016 - DNA, 25 bp, probe
gaaggctatttacttccatgcttct

SEQ ID NO: 213017 - DNA, 25 bp, probe
gaaggattttatcgctttctgctct

SEQ ID NO: 213018 - DNA, 25 bp, probe
gaaggttcatctttctgttcttcat

SEQ ID NO: 213019 - DNA, 25 bp, probe
gaaggtgtcttctgtgttctacatc

SEQ ID NO: 213020 - DNA, 25 bp, probe
gaaggtaatatcttgttgctggaag

SEQ ID NO: 213021 - DNA, 25 bp, probe
gaaggtaatatcttgttgctggaag

SEQ ID NO: 213022 - DNA, 25 bp, probe
gaagggagttatggaatggtgatga

SEQ ID NO: 213023 - DNA, 25 bp, probe
gaagggtatatttaatgagcgaaca

SEQ ID NO: 213024 - DNA, 25 bp, probe
gaagggtatatttaatgagcgaaca

SEQ ID NO: 213025 - DNA, 25 bp, probe
gaagggtaatgtggttcatctgaat

SEQ ID NO: 213026 - DNA, 25 bp, probe
gaagggctagagagctgtttgcaat

SEQ ID NO: 213027 - DNA, 25 bp, probe
gaagaggtggtggtcgtttctatgc

SEQ ID NO: 213028 - DNA, 25 bp, probe
gaaggagctgtgagccagtattcat

SEQ ID NO: 213029 - DNA, 25 bp, probe
gaaggacgtcattgagcagtactca

SEQ ID NO: 213030 - DNA, 25 bp, probe
gaaggcacagtgaaggctgtcctta

SEQ ID NO: 213031 - DNA, 25 bp, probe
gaagtgcctggtaagttgccttgtg

SEQ ID NO: 213032 - DNA, 25 bp, probe
gaaggactgtgtaagggcttgcctg

SEQ ID NO: 213033 - DNA, 25 bp, probe
gaagaatcctgtaagtacaatccca

SEQ ID NO: 213034 - DNA, 25 bp, probe
gaaggacttgaaaatcaaagcccat

SEQ ID NO: 213035 - DNA, 25 bp, probe
gaaggacttgaaaatcaaagcccat

SEQ ID NO: 213036 - DNA, 25 bp, probe
gaaggacttgaaaatcaaagcccat

SEQ ID NO: 213037 - DNA, 25 bp, probe
gaaggaccgaaccaagtgagcctgc

SEQ ID NO: 213038 - DNA, 25 bp, probe
gaagggctcgaagaaagccgtgact

SEQ ID NO: 213039 - DNA, 25 bp, probe
gacgggtccattaacaaagcgggct

SEQ ID NO: 213040 - DNA, 25 bp, probe
gacgggtccattaacaaagcgggct

SEQ ID NO: 213041 - DNA, 25 bp, probe
gaagccctccccaaaaaaagtgcat

SEQ ID NO: 213042 - DNA, 25 bp, probe
gaagctgtacttcacaaaaacagta

SEQ ID NO: 213043 - DNA, 25 bp, probe
gaacgtactcttggcagaaaggatt

SEQ ID NO: 213044 - DNA, 25 bp, probe
gaaggtactcttgggcatattttcc

SEQ ID NO: 213045 - DNA, 25 bp, probe
gaagagtacatctcggattttcctc

SEQ ID NO: 213046 - DNA, 25 bp, probe
gaagagtacatctcggattttcctc

SEQ ID NO: 213047 - DNA, 25 bp, probe
gaaggatgattcaacaggttttcct

SEQ ID NO: 213048 - DNA, 25 bp, probe
gaagggtcacaaagtgttcttcctc

SEQ ID NO: 213049 - DNA, 25 bp, probe
gaaggcagctcacattctgctattt

SEQ ID NO: 213050 - DNA, 25 bp, probe
gaaggcagctggtatattcagtctc

SEQ ID NO: 213051 - DNA, 25 bp, probe
gaagtggatgacctcatggagtcct

SEQ ID NO: 213052 - DNA, 25 bp, probe
gaaggaggaccttgatgatgctttc

SEQ ID NO: 213053 - DNA, 25 bp, probe
gaaggaggcttctgtatgcttgtga

SEQ ID NO: 213054 - DNA, 25 bp, probe
gaaggacctttacatggcagctaac

SEQ ID NO: 213055 - DNA, 25 bp, probe
gaaggaccctgatgaaagaccaaca

SEQ ID NO: 213056 - DNA, 25 bp, probe
gaaggaccctgatgaaagaccaaca

SEQ ID NO: 213057 - DNA, 25 bp, probe
gaagtgacctatgacaaaacgccgc

SEQ ID NO: 213058 - DNA, 25 bp, probe
gaagatgactggactcaaagtaccc

SEQ ID NO: 213059 - DNA, 25 bp, probe
gaaggatcaggaagcacaagaaccc

SEQ ID NO: 213060 - DNA, 25 bp, probe
gaagttcatggaagccaatcctctc

SEQ ID NO: 213061 - DNA, 25 bp, probe
gaagtttgccaagcacatgttcttt

SEQ ID NO: 213062 - DNA, 25 bp, probe
gaaggagtccttgcatcaatttttc

SEQ ID NO: 213063 - DNA, 25 bp, probe
gaaggatttatttacagtgtgttgt

SEQ ID NO: 213064 - DNA, 25 bp, probe
gaaggacttaaggacagcatgtctg

SEQ ID NO: 213065 - DNA, 25 bp, probe
gaaggaaatccaggacatgctgaag

SEQ ID NO: 213066 - DNA, 25 bp, probe
gaagtggaaccagatgcagaagagg

SEQ ID NO: 213067 - DNA, 25 bp, probe
gaagtggcaaactaatctgtagtgt

SEQ ID NO: 213068 - DNA, 25 bp, probe
gaaggtcaggactcatctgggcatg

SEQ ID NO: 213069 - DNA, 25 bp, probe
gaagtggatggcacccgaggcatta

SEQ ID NO: 213070 - DNA, 25 bp, probe
gaagaagtggcctcaaaggcactta

SEQ ID NO: 213071 - DNA, 25 bp, probe
gaagatttaccataagggactgtgc

SEQ ID NO: 213072 - DNA, 25 bp, probe
gaaggattcctatgtgggcgacgag

SEQ ID NO: 213073 - DNA, 25 bp, probe
gaaggattcctatgtgggcgacgag

SEQ ID NO: 213074 - DNA, 25 bp, probe
gaaggattcctgtaagggtgactca

SEQ ID NO: 213075 - DNA, 25 bp, probe
gaaggatctaaggtagtgggccatt

SEQ ID NO: 213076 - DNA, 25 bp, probe
gaaggatctaaggtagtgggccatt

SEQ ID NO: 213077 - DNA, 25 bp, probe
gaaaatttacttctggatgccaatc

SEQ ID NO: 213078 - DNA, 25 bp, probe
gaaaatttacttctggatgccaatc

SEQ ID NO: 213079 - DNA, 25 bp, probe
gaagaaagttttcagagtccgtctc

SEQ ID NO: 213080 - DNA, 25 bp, probe
gaagagtagatgagccgggtccggc

SEQ ID NO: 213081 - DNA, 25 bp, probe
gaaggggattaccagctggtccagc

SEQ ID NO: 213082 - DNA, 25 bp, probe
gaaggaggagtatttttgtgcctca

SEQ ID NO: 213083 - DNA, 25 bp, probe
gaaggtgctaatctttgctgtcttc

SEQ ID NO: 213084 - DNA, 25 bp, probe
gaaggtcatgttctttcagcttatg

SEQ ID NO: 213085 - DNA, 25 bp, probe
gaaggacagtacatctactgcttat

SEQ ID NO: 213086 - DNA, 25 bp, probe
gaaggatcgtgtctgctgactgttt

SEQ ID NO: 213087 - DNA, 25 bp, probe
gaaggtggatctctggagccttgga

SEQ ID NO: 213088 - DNA, 25 bp, probe
gaaggagagattgatccatgtctgt

SEQ ID NO: 213089 - DNA, 25 bp, probe
gaagggaatcatgatatcgccttga

SEQ ID NO: 213090 - DNA, 25 bp, probe
gaagtcagtatagaaccactagcga

SEQ ID NO: 213091 - DNA, 25 bp, probe
gaagtcagcagcagaaacgacaagg

SEQ ID NO: 213092 - DNA, 25 bp, probe
gaagatgaggcccaccattaaagat

SEQ ID NO: 213093 - DNA, 25 bp, probe
gaaggtggaggagtcatttcatgat

SEQ ID NO: 213094 - DNA, 25 bp, probe
gaaggtggggcagcacccatgctgc

SEQ ID NO: 213095 - DNA, 25 bp, probe
gaaggtggggattgcccatccatct

SEQ ID NO: 213096 - DNA, 25 bp, probe
gaaggtggcacgaatggatactcct

SEQ ID NO: 213097 - DNA, 25 bp, probe
gaaggtcaccagagagctttcagct

SEQ ID NO: 213098 - DNA, 25 bp, probe
gaaggtcaccagagagctttcagct

SEQ ID NO: 213099 - DNA, 25 bp, probe
gaagtatcaccacggatttcagcag

SEQ ID NO: 213100 - DNA, 25 bp, probe
gaagtcatacccgaaaaagcaaacg

SEQ ID NO: 213101 - DNA, 25 bp, probe
gaagtaagcccaagagaacaacata

SEQ ID NO: 213102 - DNA, 25 bp, probe
gaagtaagcccaagagaacaacata

SEQ ID NO: 213103 - DNA, 25 bp, probe
gaagtaactcctcattcaagaccct

SEQ ID NO: 213104 - DNA, 25 bp, probe
gaagtaatcttctctgttaacagcc

SEQ ID NO: 213105 - DNA, 25 bp, probe
gaaatgtatccctcgtttatcatcc

SEQ ID NO: 213106 - DNA, 25 bp, probe
gacattttccttccgttccatatga

SEQ ID NO: 213107 - DNA, 25 bp, probe
gaaggttctcttcaagtcgcagata

SEQ ID NO: 213108 - DNA, 25 bp, probe
gaaggagtacaccatcaagtcgcac

SEQ ID NO: 213109 - DNA, 25 bp, probe
gaaggagtacaccatcaagtcgcac

SEQ ID NO: 213110 - DNA, 25 bp, probe
gaaggactacatgatcaccatcacc

SEQ ID NO: 213111 - DNA, 25 bp, probe
gaaggacaactggatccacatcaca

SEQ ID NO: 213112 - DNA, 25 bp, probe
gaaggacaactggatccacatcaca

SEQ ID NO: 213113 - DNA, 25 bp, probe
gaaggacttgctggcagccaacaag

SEQ ID NO: 213114 - DNA, 25 bp, probe
gaaggacacagtaagagcaccaagt

SEQ ID NO: 213115 - DNA, 25 bp, probe
gaaggagacagaaaagcagttgcag

SEQ ID NO: 213116 - DNA, 25 bp, probe
gaaggagggaaggacgcttgcaagg

SEQ ID NO: 213117 - DNA, 25 bp, probe
gaaggagggaaggacgcttgcaagg

SEQ ID NO: 213118 - DNA, 25 bp, probe
gaaggaggtacacacctcaaagaga

SEQ ID NO: 213119 - DNA, 25 bp, probe
gaagggtggataccccacaagtaga

SEQ ID NO: 213120 - DNA, 25 bp, probe
agattcccagttaaaaggctccaga

SEQ ID NO: 213121 - DNA, 25 bp, probe
gaagggcaagtttaagagaagtcgt

SEQ ID NO: 213122 - DNA, 25 bp, probe
gaagggcaagtttaagagaagtcgt

SEQ ID NO: 213123 - DNA, 25 bp, probe
gaaggagctctggttccagagaatt

SEQ ID NO: 213124 - DNA, 25 bp, probe
gaaggagctctggttccagagaatt

SEQ ID NO: 213125 - DNA, 25 bp, probe
gaagtacattgccttctgcatcagc

SEQ ID NO: 213126 - DNA, 25 bp, probe
gaagtacattgccttctgcatcagc

SEQ ID NO: 213127 - DNA, 25 bp, probe
gaagtacatgctgctgtgcatgcac

SEQ ID NO: 213128 - DNA, 25 bp, probe
gaagatgagccttgcagatatctgc

SEQ ID NO: 213129 - DNA, 25 bp, probe
gaagaggcatctcagagcctcggtc

SEQ ID NO: 213130 - DNA, 25 bp, probe
gaaggagcagagcagagctgatgga

SEQ ID NO: 213131 - DNA, 25 bp, probe
gaaggtcaggtgatgcaatgtgaga

SEQ ID NO: 213132 - DNA, 25 bp, probe
gaaggtcaggtgatgcaatgtgaga

SEQ ID NO: 213133 - DNA, 25 bp, probe
gaaggttatgtcatctattggcaat

SEQ ID NO: 213134 - DNA, 25 bp, probe
gaaggactatagatcataaggcaat

SEQ ID NO: 213135 - DNA, 25 bp, probe
gaaggagtctgacatcttacagaga

SEQ ID NO: 213136 - DNA, 25 bp, probe
gaaggagtttattatctacatcaga

SEQ ID NO: 213137 - DNA, 25 bp, probe
gaaggagtttattatctacatcaga

SEQ ID NO: 213138 - DNA, 25 bp, probe
gaaggagcctgtaatcaccaaagag

SEQ ID NO: 213139 - DNA, 25 bp, probe
gaaggtccaggagcacatcaagagg

SEQ ID NO: 213140 - DNA, 25 bp, probe
gaaggaccatgggaacatcaaggcc

SEQ ID NO: 213141 - DNA, 25 bp, probe
gaaggacggcaggaagcgcaagcgc

SEQ ID NO: 213142 - DNA, 25 bp, probe
gaagttcgaaaactcagcaatggca

SEQ ID NO: 213143 - DNA, 25 bp, probe
gaaggataaatcaaggctcaaggct

SEQ ID NO: 213144 - DNA, 25 bp, probe
gaagtaacaaaaggaagcaggctct

SEQ ID NO: 213145 - DNA, 25 bp, probe
gaagactaccacaccaaagtcctct

SEQ ID NO: 213146 - DNA, 25 bp, probe
gaagattatctacaccgtgggccat

SEQ ID NO: 213147 - DNA, 25 bp, probe
gaagatgattctgtaccctagtata

SEQ ID NO: 213148 - DNA, 25 bp, probe
gaagtgtacatcctgaccactactg

SEQ ID NO: 213149 - DNA, 25 bp, probe
gaagatcgagcagtgtgactacccc

SEQ ID NO: 213150 - DNA, 25 bp, probe
gaagatcgagcagtgtgactacccc

SEQ ID NO: 213151 - DNA, 25 bp, probe
gaagtatggctcttataattgcccg

SEQ ID NO: 213152 - DNA, 25 bp, probe
gaagggctgcgcttaaaacaccgct

SEQ ID NO: 213153 - DNA, 25 bp, probe
gaagggctgcgcttaaaacaccgct

SEQ ID NO: 213154 - DNA, 25 bp, probe
gaagggcatcttgaaacacagcagc

SEQ ID NO: 213155 - DNA, 25 bp, probe
gaagggcatcttgaaacacagcagc

SEQ ID NO: 213156 - DNA, 25 bp, probe
gaagggcatgttgtaatgccaagct

SEQ ID NO: 213157 - DNA, 25 bp, probe
gaagggcatgttgtaatgccaagct

SEQ ID NO: 213158 - DNA, 25 bp, probe
gaagggctatgtggctgagcggaag

SEQ ID NO: 213159 - DNA, 25 bp, probe
gaagggctatgtggctgagcggaag

SEQ ID NO: 213160 - DNA, 25 bp, probe
gaagggtgagacggagccggaagtt

SEQ ID NO: 213161 - DNA, 25 bp, probe
gaaggggaagggcatcgaagagacc

SEQ ID NO: 213162 - DNA, 25 bp, probe
gaaggggagaggaactcgaaagcac

SEQ ID NO: 213163 - DNA, 25 bp, probe
gaaggtcagggtcacccaagcaaca

SEQ ID NO: 213164 - DNA, 25 bp, probe
gaaggtcagggtcacccaagcaaca

SEQ ID NO: 213165 - DNA, 25 bp, probe
gaagtacagggcagaaccaagaaca

SEQ ID NO: 213166 - DNA, 25 bp, probe
gaagaacaacaggaaaccaaggtct

SEQ ID NO: 213167 - DNA, 25 bp, probe
gaaggagagagacagtagccaagag

SEQ ID NO: 213168 - DNA, 25 bp, probe
gaaggagaggagcgacaggcctaaa

SEQ ID NO: 213169 - DNA, 25 bp, probe
gaagaaatgggtaacaggcctcaag

SEQ ID NO: 213170 - DNA, 25 bp, probe
gaagcaaaacggaaagtgcctcccg

SEQ ID NO: 213171 - DNA, 25 bp, probe
gaagcaaaacggaaagtgcctcccg

SEQ ID NO: 213172 - DNA, 25 bp, probe
gaaccattacgcccagggttcactc

SEQ ID NO: 213173 - DNA, 25 bp, probe
gaaccattacgcccagggttcactc

SEQ ID NO: 213174 - DNA, 25 bp, probe
gaaggattacggccaggagatacaa

SEQ ID NO: 213175 - DNA, 25 bp, probe
gaaggtattcaaggcagggagtata

SEQ ID NO: 213176 - DNA, 25 bp, probe
gaaggtacctatggagttgtgtata

SEQ ID NO: 213177 - DNA, 25 bp, probe
gaagcttaccaagagattttgaact

SEQ ID NO: 213178 - DNA, 25 bp, probe
gacagcttcccaaatcgtttaaacg

SEQ ID NO: 213179 - DNA, 25 bp, probe
gagcctttgaaaatggttagtaccg

SEQ ID NO: 213180 - DNA, 25 bp, probe
gagcctttgaaaatggttagtaccg

SEQ ID NO: 213181 - DNA, 25 bp, probe
gagcctttgaaaatggttagtaccg

SEQ ID NO: 213182 - DNA, 25 bp, probe
gagcctttgaaaatggttagtaccg

SEQ ID NO: 213183 - DNA, 25 bp, probe
gaactgtgaaaaagggctactacca

SEQ ID NO: 213184 - DNA, 25 bp, probe
gaacattaaaacaatggctacccaa

SEQ ID NO: 213185 - DNA, 25 bp, probe
gaacttaaacaaagaccacctgagg

SEQ ID NO: 213186 - DNA, 25 bp, probe
gaagattctaaaacgtccacctcgg

SEQ ID NO: 213187 - DNA, 25 bp, probe
gaaggtctataacagtcacccttgg

SEQ ID NO: 213188 - DNA, 25 bp, probe
gaagagtccaaacataacgggctgc

SEQ ID NO: 213189 - DNA, 25 bp, probe
gaaggttcactacaacggtgcctgc

SEQ ID NO: 213190 - DNA, 25 bp, probe
gaaggttcttctcaagggtgcgagc

SEQ ID NO: 213191 - DNA, 25 bp, probe
gaaggttcttcaacaactttgctgc

SEQ ID NO: 213192 - DNA, 25 bp, probe
gaaggatttcaaacaccaattgctt

SEQ ID NO: 213193 - DNA, 25 bp, probe
gaaggtcttcatccagatgccaaat

SEQ ID NO: 213194 - DNA, 25 bp, probe
gaaggatatattcggatggcaagaa

SEQ ID NO: 213195 - DNA, 25 bp, probe
gaaggatatattcggatggcaagaa

SEQ ID NO: 213196 - DNA, 25 bp, probe
gaaggttatggtggcagtcaagatc

SEQ ID NO: 213197 - DNA, 25 bp, probe
gaagtgcctgatggaccaggcaaca

SEQ ID NO: 213198 - DNA, 25 bp, probe
gaagtctgctggccaacagacaacc

SEQ ID NO: 213199 - DNA, 25 bp, probe
gaagttgatgtgcccttgaatacca

SEQ ID NO: 213200 - DNA, 25 bp, probe
gaaggatgatcgcccgataaagacg

SEQ ID NO: 213201 - DNA, 25 bp, probe
gaaggaggcacatctgatgagcaaa

SEQ ID NO: 213202 - DNA, 25 bp, probe
gaaggaggctcatgtcagactgtac

SEQ ID NO: 213203 - DNA, 25 bp, probe
gaaggaggctcatgtcagactgtac

SEQ ID NO: 213204 - DNA, 25 bp, probe
gaagtgaatctctgcaaggctgaaa

SEQ ID NO: 213205 - DNA, 25 bp, probe
gaaggtgttcatggcatagttggag

SEQ ID NO: 213206 - DNA, 25 bp, probe
gaagtgcttcttcatggatctgtga

SEQ ID NO: 213207 - DNA, 25 bp, probe
gaaggtgtcgtcgatgtggcatgcg

SEQ ID NO: 213208 - DNA, 25 bp, probe
gaaggatgtctttgatgatggtaga

SEQ ID NO: 213209 - DNA, 25 bp, probe
gaaggatgccatatgctgttgccaa

SEQ ID NO: 213210 - DNA, 25 bp, probe
gaaggatgccatatgctgttgccaa

SEQ ID NO: 213211 - DNA, 25 bp, probe
gaagtgcagcctttgttattgcata

SEQ ID NO: 213212 - DNA, 25 bp, probe
gaagtcatcctgggtatgggctaca

SEQ ID NO: 213213 - DNA, 25 bp, probe
gaagtgtccggccagagtggcttac

SEQ ID NO: 213214 - DNA, 25 bp, probe
gaagtgtccggccagagtggcttac

SEQ ID NO: 213215 - DNA, 25 bp, probe
gaagttcaccagcaagtcggatgtc

SEQ ID NO: 213216 - DNA, 25 bp, probe
gaagtgtggccagaagtggaatctt

SEQ ID NO: 213217 - DNA, 25 bp, probe
gaagtgtggccagaagtggaatctt

SEQ ID NO: 213218 - DNA, 25 bp, probe
gaagtgctggacgaaagcctgaaca

SEQ ID NO: 213219 - DNA, 25 bp, probe
gaaggttgacgatggctctgaactc

SEQ ID NO: 213220 - DNA, 25 bp, probe
gaaggttgacgatggctctgaactc

SEQ ID NO: 213221 - DNA, 25 bp, probe
gaaggattactgtagatgcagtata

SEQ ID NO: 213222 - DNA, 25 bp, probe
gaaggtaagtgatatgaagtaaagg

SEQ ID NO: 213223 - DNA, 25 bp, probe
gaaggtaatgtatctaaacaagcta

SEQ ID NO: 213224 - DNA, 25 bp, probe
gaagtttagagagctaagattatct

SEQ ID NO: 213225 - DNA, 25 bp, probe
gaagtactggaagggctggaatatc

SEQ ID NO: 213226 - DNA, 25 bp, probe
gagggactttcagcgggagattcag

SEQ ID NO: 213227 - DNA, 25 bp, probe
gaagtcactttatctgggtgtctcg

SEQ ID NO: 213228 - DNA, 25 bp, probe
gaagacctttaagatgctgcttctc

SEQ ID NO: 213229 - DNA, 25 bp, probe
gaagacctttaagatgctgcttctc

SEQ ID NO: 213230 - DNA, 25 bp, probe
gaagtccttggagaactgcagttca

SEQ ID NO: 213231 - DNA, 25 bp, probe
gaagaccttggagcactatacccac

SEQ ID NO: 213232 - DNA, 25 bp, probe
gaagaccttggagcactatacccac

SEQ ID NO: 213233 - DNA, 25 bp, probe
gaagaacaattagactggacccacc

SEQ ID NO: 213234 - DNA, 25 bp, probe
gaagaccaactatattgcgagaaac

SEQ ID NO: 213235 - DNA, 25 bp, probe
gaagaccaactatattgcgagaaac

SEQ ID NO: 213236 - DNA, 25 bp, probe
gaagggctggaatatctgcataaaa

SEQ ID NO: 213237 - DNA, 25 bp, probe
gaaggtcagaagtaatcctgagaaa

SEQ ID NO: 213238 - DNA, 25 bp, probe
gaaggtgcagctggtaaacggaatg

SEQ ID NO: 213239 - DNA, 25 bp, probe
gaaggatcatgtggtaactgcgaga

SEQ ID NO: 213240 - DNA, 25 bp, probe
gaagtcagatgtggtaactgttaaa

SEQ ID NO: 213241 - DNA, 25 bp, probe
gaagtcagatgtggtaactgttaaa

SEQ ID NO: 213242 - DNA, 25 bp, probe
gaagtgcagcaggttaagaattttt

SEQ ID NO: 213243 - DNA, 25 bp, probe
gaagtgcagcaggttaagaattttt

SEQ ID NO: 213244 - DNA, 25 bp, probe
gaagtgcagagagtaaggtgtcctt

SEQ ID NO: 213245 - DNA, 25 bp, probe
gaagtgcagagagtaaggtgtcctt

SEQ ID NO: 213246 - DNA, 25 bp, probe
gaagtagccgcatttgattttcatt

SEQ ID NO: 213247 - DNA, 25 bp, probe
gaagtgatgacttgttgcttttcaa

SEQ ID NO: 213248 - DNA, 25 bp, probe
gaagtgaaacagacgcttctctgca

SEQ ID NO: 213249 - DNA, 25 bp, probe
gaagtacaaaacaacatcctggaaa

SEQ ID NO: 213250 - DNA, 25 bp, probe
gaagtacagaaaatgacgccaagag

SEQ ID NO: 213251 - DNA, 25 bp, probe
gaagtagaggaaattcatcccaaaa

SEQ ID NO: 213252 - DNA, 25 bp, probe
gaagtgagggatatcatcagtacag

SEQ ID NO: 213253 - DNA, 25 bp, probe
gaagtgagggatatcatcagtacag

SEQ ID NO: 213254 - DNA, 25 bp, probe
gaagggtatgtcagcatcagcttgg

SEQ ID NO: 213255 - DNA, 25 bp, probe
gaagtggtagtgaagccagaatctc

SEQ ID NO: 213256 - DNA, 25 bp, probe
gaagggctactgcagctttacatgc

SEQ ID NO: 213257 - DNA, 25 bp, probe
gaaggggacaggattgtctgctgcc

SEQ ID NO: 213258 - DNA, 25 bp, probe
gaaggggcacagccctatttcttcc

SEQ ID NO: 213259 - DNA, 25 bp, probe
gaagggagacactctatctgtaatc

SEQ ID NO: 213260 - DNA, 25 bp, probe
gaagtccagaaatcatactgcatac

SEQ ID NO: 213261 - DNA, 25 bp, probe
gaagtccaatgaaattaaaagctgc

SEQ ID NO: 213262 - DNA, 25 bp, probe
gaagtccttgaccactcaaatcagc

SEQ ID NO: 213263 - DNA, 25 bp, probe
gaagttcttcaaaactagtcagttt

SEQ ID NO: 213264 - DNA, 25 bp, probe
gaagttcttcaaaactagtcagttt

SEQ ID NO: 213265 - DNA, 25 bp, probe
gaagttcttcaaaactagtcagttt

SEQ ID NO: 213266 - DNA, 25 bp, probe
gaagtccttcttaacttctagctaa

SEQ ID NO: 213267 - DNA, 25 bp, probe
gaagatccctttgtccacaagtaaa

SEQ ID NO: 213268 - DNA, 25 bp, probe
gaagttctcgatgattccataaata

SEQ ID NO: 213269 - DNA, 25 bp, probe
gaagttctcgatgattccataaata

SEQ ID NO: 213270 - DNA, 25 bp, probe
gaagtatttgatgtcttagagaaac

SEQ ID NO: 213271 - DNA, 25 bp, probe
gaagtgacggttcctacacaggaca

SEQ ID NO: 213272 - DNA, 25 bp, probe
gaagtgggaggacgtagagcagaga

SEQ ID NO: 213273 - DNA, 25 bp, probe
gaagggggatggtctatgccagagg

SEQ ID NO: 213274 - DNA, 25 bp, probe
gaaggtgcggatggacaaggagaag

SEQ ID NO: 213275 - DNA, 25 bp, probe
gaaggggcttctgaagggccagacg

SEQ ID NO: 213276 - DNA, 25 bp, probe
gaaggggtgtctgaagatgaatcca

SEQ ID NO: 213277 - DNA, 25 bp, probe
gaaggggtgtctgaagatgaatcca

SEQ ID NO: 213278 - DNA, 25 bp, probe
gaagtgggttctgcaaggagcctat

SEQ ID NO: 213279 - DNA, 25 bp, probe
gaagtggaatctttacaggactata

SEQ ID NO: 213280 - DNA, 25 bp, probe
gaagtggaatctttacaggactata

SEQ ID NO: 213281 - DNA, 25 bp, probe
gaagttgaaaactcagtgtgcataa

SEQ ID NO: 213282 - DNA, 25 bp, probe
gaagttgccatctaccttgggatca

SEQ ID NO: 213283 - DNA, 25 bp, probe
gaaggttacaacgtatatggcatcg

SEQ ID NO: 213284 - DNA, 25 bp, probe
gaagttacaaacatacagccatctg

SEQ ID NO: 213285 - DNA, 25 bp, probe
gaagtgatgaaagcttagagccagt

SEQ ID NO: 213286 - DNA, 25 bp, probe
gaaggtgctgaaggttcgagactgg

SEQ ID NO: 213287 - DNA, 25 bp, probe
gaaggtctcattcttccaagctgag

SEQ ID NO: 213288 - DNA, 25 bp, probe
gaaggtctcattcttccaagctgag

SEQ ID NO: 213289 - DNA, 25 bp, probe
gaaggttattgttttcaatgccagt

SEQ ID NO: 213290 - DNA, 25 bp, probe
gaaggttattgttttcaatgccagt

SEQ ID NO: 213291 - DNA, 25 bp, probe
gaaggttttgagtatatcaatcctc

SEQ ID NO: 213292 - DNA, 25 bp, probe
gaagggatttatgtgcacaaccacc

SEQ ID NO: 213293 - DNA, 25 bp, probe
gaagggagctctgaagcacaacccc

SEQ ID NO: 213294 - DNA, 25 bp, probe
gaagatggagctgacccaaatccat

SEQ ID NO: 213295 - DNA, 25 bp, probe
gaagttgacataccacctaacactc

SEQ ID NO: 213296 - DNA, 25 bp, probe
gaagttgacataccacctaacactc

SEQ ID NO: 213297 - DNA, 25 bp, probe
gaagttctgcttgacctgagagctc

SEQ ID NO: 213298 - DNA, 25 bp, probe
gaagtcatagttgaccacagacatg

SEQ ID NO: 213299 - DNA, 25 bp, probe
gaagtcatagttgaccacagacatg

SEQ ID NO: 213300 - DNA, 25 bp, probe
gaagtgtcaataaaccacaagttct

SEQ ID NO: 213301 - DNA, 25 bp, probe
gaaggtcaaattaggcaaattccag

SEQ ID NO: 213302 - DNA, 25 bp, probe
gaagttctatttgtgcacgttccag

SEQ ID NO: 213303 - DNA, 25 bp, probe
gaagttctatttgtgcacgttccag

SEQ ID NO: 213304 - DNA, 25 bp, probe
gaagttcttttggtgccatgttttg

SEQ ID NO: 213305 - DNA, 25 bp, probe
gaagttcttttggtgccatgttttg

SEQ ID NO: 213306 - DNA, 25 bp, probe
gaagttttctggatgtctttttatc

SEQ ID NO: 213307 - DNA, 25 bp, probe
gaagtctctgtccatgttgagctgt

SEQ ID NO: 213308 - DNA, 25 bp, probe
gaagtctctgtccatgttgagctgt

SEQ ID NO: 213309 - DNA, 25 bp, probe
gaagtcttgtcgagagacgctccca

SEQ ID NO: 213310 - DNA, 25 bp, probe
gaagttgctcatgggagcagacctc

SEQ ID NO: 213311 - DNA, 25 bp, probe
gaaggtgcctatggagaagttcaac

SEQ ID NO: 213312 - DNA, 25 bp, probe
gaagtgaacttggagcaggtccacc

SEQ ID NO: 213313 - DNA, 25 bp, probe
gaagtgaatctcgaaccgcatgttc

SEQ ID NO: 213314 - DNA, 25 bp, probe
gaagtgaatctcgaaccgcatgttc

SEQ ID NO: 213315 - DNA, 25 bp, probe
gaagtcgttcctactgacattgtat

SEQ ID NO: 213316 - DNA, 25 bp, probe
gaagtgctgcttcattccacttaca

SEQ ID NO: 213317 - DNA, 25 bp, probe
gaagtgctcctatatacctaaatgt

SEQ ID NO: 213318 - DNA, 25 bp, probe
gaagtgcctctaccattagtaagtc

SEQ ID NO: 213319 - DNA, 25 bp, probe
gaagtgcttattacttttaggatta

SEQ ID NO: 213320 - DNA, 25 bp, probe
gaagtgaacaatactttgtaattta

SEQ ID NO: 213321 - DNA, 25 bp, probe
gaagagagaccaacgtttgactact

SEQ ID NO: 213322 - DNA, 25 bp, probe
gaagagagaccaacgtttgactact

SEQ ID NO: 213323 - DNA, 25 bp, probe
gaagtggaccatgcagatttctgta

SEQ ID NO: 213324 - DNA, 25 bp, probe
gaagtgtacgagctgatgcgtcagt

SEQ ID NO: 213325 - DNA, 25 bp, probe
gaagatggagcccgtgtggggttcc

SEQ ID NO: 213326 - DNA, 25 bp, probe
gaagatgggtccgaggcgggggaca

SEQ ID NO: 213327 - DNA, 25 bp, probe
gaagaggagttacagcgggagtggc

SEQ ID NO: 213328 - DNA, 25 bp, probe
gaagggggtgagtggtgccagttgc

SEQ ID NO: 213329 - DNA, 25 bp, probe
gaagggtaaagtcggaccagtgtca

SEQ ID NO: 213330 - DNA, 25 bp, probe
gaagggctagaacctggaggggcta

SEQ ID NO: 213331 - DNA, 25 bp, probe
gaagtgaaaggcccttgggaatgaa

SEQ ID NO: 213332 - DNA, 25 bp, probe
gaagggcaaacattcctgggagctg

SEQ ID NO: 213333 - DNA, 25 bp, probe
gaacgaacagactcaggcgatgtgc

SEQ ID NO: 213334 - DNA, 25 bp, probe
gaaggtgacagagttcatgttgtgt

SEQ ID NO: 213335 - DNA, 25 bp, probe
gaaggtgacagatctgcggatgata

SEQ ID NO: 213336 - DNA, 25 bp, probe
gaaggtgacatatcagcccatgaac

SEQ ID NO: 213337 - DNA, 25 bp, probe
gaagtgattcagaacatgaccgaat

SEQ ID NO: 213338 - DNA, 25 bp, probe
gaagtgattcagaacatgaccgaat

SEQ ID NO: 213339 - DNA, 25 bp, probe
gaagtcttcaatacacacccattga

SEQ ID NO: 213340 - DNA, 25 bp, probe
gaagtctatcgatccaaaagtgttg

SEQ ID NO: 213341 - DNA, 25 bp, probe
gaagtctatcgatccaaaagtgttg

SEQ ID NO: 213342 - DNA, 25 bp, probe
gtagctttctgacaaaaagtttcca

SEQ ID NO: 213343 - DNA, 25 bp, probe
gtagctttctgacaaaaagtttcca

SEQ ID NO: 213344 - DNA, 25 bp, probe
gtagctttctgacaaaaagtttcca

SEQ ID NO: 213345 - DNA, 25 bp, probe
gaagatttccatctaaatagtttca

SEQ ID NO: 213346 - DNA, 25 bp, probe
gaagtgtttatgcaataaagcacta

SEQ ID NO: 213347 - DNA, 25 bp, probe
gaagtcgtattatacagtacatcta

SEQ ID NO: 213348 - DNA, 25 bp, probe
gaagtcgtttcattcaagttggtgt

SEQ ID NO: 213349 - DNA, 25 bp, probe
gaagtctttccggaggtcagtggtg

SEQ ID NO: 213350 - DNA, 25 bp, probe
gaagagtttcctgaggcacagtcgg

SEQ ID NO: 213351 - DNA, 25 bp, probe
gaagattttgcttgctaggacggtg

SEQ ID NO: 213352 - DNA, 25 bp, probe
gaagactctagacgtttactttgta

SEQ ID NO: 213353 - DNA, 25 bp, probe
gaagatctctggacaggtcccttca

SEQ ID NO: 213354 - DNA, 25 bp, probe
gaagtcactgtgacagttctccagg

SEQ ID NO: 213355 - DNA, 25 bp, probe
gaagtgaagatttctgcattccggg

SEQ ID NO: 213356 - DNA, 25 bp, probe
gaagtaacatggtcctgtggtggaa

SEQ ID NO: 213357 - DNA, 25 bp, probe
gaagtacacattctctgtggactgg

SEQ ID NO: 213358 - DNA, 25 bp, probe
gaagtatccctgatttattctggtg

SEQ ID NO: 213359 - DNA, 25 bp, probe
gaagtgtctcctgttgtgaggggct

SEQ ID NO: 213360 - DNA, 25 bp, probe
gaagtttcgtctaatgggggcagtc

SEQ ID NO: 213361 - DNA, 25 bp, probe
gaagattacagtatgtggggacacc

SEQ ID NO: 213362 - DNA, 25 bp, probe
gaagtctaatttttgaggggtgagc

SEQ ID NO: 213363 - DNA, 25 bp, probe
gaagtttacttatgcaggaattgac

SEQ ID NO: 213364 - DNA, 25 bp, probe
gaagttgtcacttatgggcgggtgc

SEQ ID NO: 213365 - DNA, 25 bp, probe
gaagtctctgaagaggtgcggtggc

SEQ ID NO: 213366 - DNA, 25 bp, probe
gaagactctaaaaatgacggttgca

SEQ ID NO: 213367 - DNA, 25 bp, probe
gaagatccaaaatttcaagggtagg

SEQ ID NO: 213368 - DNA, 25 bp, probe
gaagatcccaaagttacaagagcca

SEQ ID NO: 213369 - DNA, 25 bp, probe
gaagtctggatgggttactataaca

SEQ ID NO: 213370 - DNA, 25 bp, probe
gaagactgtgatcctcatgtactca

SEQ ID NO: 213371 - DNA, 25 bp, probe
gaagggtggcattctgctgaccaca

SEQ ID NO: 213372 - DNA, 25 bp, probe
gaagggatcacagatgcagccacca

SEQ ID NO: 213373 - DNA, 25 bp, probe
gaagtggaccaggacaggaccagat

SEQ ID NO: 213374 - DNA, 25 bp, probe
gaagttactaattcggacctgactg

SEQ ID NO: 213375 - DNA, 25 bp, probe
gaagttactaattcggacctgactg

SEQ ID NO: 213376 - DNA, 25 bp, probe
gaagttcttagaaagtgacgatgac

SEQ ID NO: 213377 - DNA, 25 bp, probe
gaagttcttaagctgtcattatgga

SEQ ID NO: 213378 - DNA, 25 bp, probe
gaagtattattatctgtctcttgta

SEQ ID NO: 213379 - DNA, 25 bp, probe
gaagtgatttctcaaagcacttgaa

SEQ ID NO: 213380 - DNA, 25 bp, probe
gaagtgtgtatcaaaagagactaat

SEQ ID NO: 213381 - DNA, 25 bp, probe
gaagtgttctggaaagaagcgagat

SEQ ID NO: 213382 - DNA, 25 bp, probe
gaagttatctagcaagccgctgggg

SEQ ID NO: 213383 - DNA, 25 bp, probe
gaagaagtaaggagtcgtgtatggt

SEQ ID NO: 213384 - DNA, 25 bp, probe
gaagggtgataagtctgtcagagtt

SEQ ID NO: 213385 - DNA, 25 bp, probe
gaagggtatgaaatctgtcatgatg

SEQ ID NO: 213386 - DNA, 25 bp, probe
gaagtgtctgaatttgcctctggat

SEQ ID NO: 213387 - DNA, 25 bp, probe
gaagtgcttgcagatgctttcggta

SEQ ID NO: 213388 - DNA, 25 bp, probe
gaagatgttgcaagtcgttcctttt

SEQ ID NO: 213389 - DNA, 25 bp, probe
gaagatgttgcaagtcgttcctttt

SEQ ID NO: 213390 - DNA, 25 bp, probe
gaagatgcaatctgatttgtccttt

SEQ ID NO: 213391 - DNA, 25 bp, probe
gaagatgcaaccaatcctgcttctg

SEQ ID NO: 213392 - DNA, 25 bp, probe
gaagacattgcagatgactgcagtc

SEQ ID NO: 213393 - DNA, 25 bp, probe
gaagtgcttgggtatctcagctctg

SEQ ID NO: 213394 - DNA, 25 bp, probe
gaagtcagtgcgtaagatcgtctcc

SEQ ID NO: 213395 - DNA, 25 bp, probe
gaagtgcaggagttcaacctcagca

SEQ ID NO: 213396 - DNA, 25 bp, probe
gaagtgaggacgtcacgcagacagc

SEQ ID NO: 213397 - DNA, 25 bp, probe
gaagtgcacaagagcacgcaggcgc

SEQ ID NO: 213398 - DNA, 25 bp, probe
gaagtgcacaagagcacgcaggcgc

SEQ ID NO: 213399 - DNA, 25 bp, probe
gaagtgactccaagaccatgacaga

SEQ ID NO: 213400 - DNA, 25 bp, probe
gaagataatgactatggccgagcag

SEQ ID NO: 213401 - DNA, 25 bp, probe
gaagctgaatttttccagatctgac

SEQ ID NO: 213402 - DNA, 25 bp, probe
gaagctgaatttttccagatctgac

SEQ ID NO: 213403 - DNA, 25 bp, probe
gaagatggacttcatgcaagttggc

SEQ ID NO: 213404 - DNA, 25 bp, probe
gaagatctgtttcagcaaccaggcc

SEQ ID NO: 213405 - DNA, 25 bp, probe
gaagtttttaattactcagatactc

SEQ ID NO: 213406 - DNA, 25 bp, probe
gaagattgttgtttataaccaacct

SEQ ID NO: 213407 - DNA, 25 bp, probe
gaagattttgtattaatcctaatgc

SEQ ID NO: 213408 - DNA, 25 bp, probe
gaagatttgtgtaattatcacccag

SEQ ID NO: 213409 - DNA, 25 bp, probe
gaagttatttattttagcgtagaag

SEQ ID NO: 213410 - DNA, 25 bp, probe
gaagattcttttcttaggtatacaa

SEQ ID NO: 213411 - DNA, 25 bp, probe
gaagtttgtcttcatgtactgtaag

SEQ ID NO: 213412 - DNA, 25 bp, probe
gaagtgtgatgtgagttgttgttaa

SEQ ID NO: 213413 - DNA, 25 bp, probe
gaagttgagagtgttttttatagaa

SEQ ID NO: 213414 - DNA, 25 bp, probe
gaagggatcgttttttatatctcag

SEQ ID NO: 213415 - DNA, 25 bp, probe
gaagggatcgttttttatatctcag

SEQ ID NO: 213416 - DNA, 25 bp, probe
gaagggaaacagtggcatattctca

SEQ ID NO: 213417 - DNA, 25 bp, probe
gaagggaaacagtggcatattctca

SEQ ID NO: 213418 - DNA, 25 bp, probe
gaagagggaacacagtctataccag

SEQ ID NO: 213419 - DNA, 25 bp, probe
gaagtggatgaaaccagtgctgaag

SEQ ID NO: 213420 - DNA, 25 bp, probe
gaagtggtggtacagtggcagaggc

SEQ ID NO: 213421 - DNA, 25 bp, probe
gaagaggtggcaccggtggcaggac

SEQ ID NO: 213422 - DNA, 25 bp, probe
gaagtggtggcgtgggaatggctgc

SEQ ID NO: 213423 - DNA, 25 bp, probe
gaagtatcggcgtctgggggagatg

SEQ ID NO: 213424 - DNA, 25 bp, probe
gaagttcccgtgcatgtgtggaatg

SEQ ID NO: 213425 - DNA, 25 bp, probe
gaagttcccagaggcttctgtacag

SEQ ID NO: 213426 - DNA, 25 bp, probe
gaagaacctcagttctgtccgacag

SEQ ID NO: 213427 - DNA, 25 bp, probe
gaagaatcgtggctctgatgcccag

SEQ ID NO: 213428 - DNA, 25 bp, probe
gaagggaagtgcatctgtcagccag

SEQ ID NO: 213429 - DNA, 25 bp, probe
gaagggaagctgcatatgatgaaag

SEQ ID NO: 213430 - DNA, 25 bp, probe
gaagaaggaccctgatgaaagacca

SEQ ID NO: 213431 - DNA, 25 bp, probe
taaccaagactcgaaatgagattat

SEQ ID NO: 213432 - DNA, 25 bp, probe
tgcaacgttgtccagaggtagatct

SEQ ID NO: 213433 - DNA, 25 bp, probe
gaagtgacagctgagcggctgagtc

SEQ ID NO: 213434 - DNA, 25 bp, probe
gaagtgaatggaatagagctagatg

SEQ ID NO: 213435 - DNA, 25 bp, probe
gaagtgattgaagtgggccagatgc

SEQ ID NO: 213436 - DNA, 25 bp, probe
gaagtgattgaagtgggccagatgc

SEQ ID NO: 213437 - DNA, 25 bp, probe
gaagtatgtgaagtcgccagcattt

SEQ ID NO: 213438 - DNA, 25 bp, probe
gaagtggagaagggtgcagcaggct

SEQ ID NO: 213439 - DNA, 25 bp, probe
gaagtgtggcaggggccatgtggta

SEQ ID NO: 213440 - DNA, 25 bp, probe
gaagattggagaaggcttgtattag

SEQ ID NO: 213441 - DNA, 25 bp, probe
gaagtaggaggatcatttatgcttg

SEQ ID NO: 213442 - DNA, 25 bp, probe
gaagtttagcaatatgacattcttg

SEQ ID NO: 213443 - DNA, 25 bp, probe
gaagtttcagtctttaatgtctgag

SEQ ID NO: 213444 - DNA, 25 bp, probe
gaagtgttcttcagtaattgtgctg

SEQ ID NO: 213445 - DNA, 25 bp, probe
gaagtgtgccagtatggttcatctg

SEQ ID NO: 213446 - DNA, 25 bp, probe
gaagtgtgccagtatggttcatctg

SEQ ID NO: 213447 - DNA, 25 bp, probe
gaagttgtcatgtttgtgccacgtt

SEQ ID NO: 213448 - DNA, 25 bp, probe
gaagttcatattttgtgacatctgc

SEQ ID NO: 213449 - DNA, 25 bp, probe
gaagtgtcaatagatgctgactgca

SEQ ID NO: 213450 - DNA, 25 bp, probe
gaagtcacaaagtcagtatatgcag

SEQ ID NO: 213451 - DNA, 25 bp, probe
gaagattaaagggctgaatcatgaa

SEQ ID NO: 213452 - DNA, 25 bp, probe
gaagataagaggacgcagaagctgg

SEQ ID NO: 213453 - DNA, 25 bp, probe
gaagttatcagttggaggagctgtg

SEQ ID NO: 213454 - DNA, 25 bp, probe
gaagtcctgatgtgaggagaggtgc

SEQ ID NO: 213455 - DNA, 25 bp, probe
gaagtactgtgttgcagaagtggca

SEQ ID NO: 213456 - DNA, 25 bp, probe
gaagtcactgtgtactaccagtcag

SEQ ID NO: 213457 - DNA, 25 bp, probe
gaagtgtgagttatcagccactcag

SEQ ID NO: 213458 - DNA, 25 bp, probe
gaagtggagcttctgagggatgcag

SEQ ID NO: 213459 - DNA, 25 bp, probe
gaagatgggcctgtggaagcgatgg

SEQ ID NO: 213460 - DNA, 25 bp, probe
gaagtggagatctgtggagccgagt

SEQ ID NO: 213461 - DNA, 25 bp, probe
gaagagggtcttggtgacctggcta

SEQ ID NO: 213462 - DNA, 25 bp, probe
gaagtgacgttgagatcctcggcta

SEQ ID NO: 213463 - DNA, 25 bp, probe
gaagtgacatgaaaagagcctctgg

SEQ ID NO: 213464 - DNA, 25 bp, probe
gaagtgcacaggtcaaagcgtctgg

SEQ ID NO: 213465 - DNA, 25 bp, probe
gaagtcagccattataagcgcctgg

SEQ ID NO: 213466 - DNA, 25 bp, probe
gaagtcattgccttcagtgacgcgg

SEQ ID NO: 213467 - DNA, 25 bp, probe
gaagtcattgccttcagtgacgcgg

SEQ ID NO: 213468 - DNA, 25 bp, probe
gaagtcgcgcacgatggtgaagccg

SEQ ID NO: 213469 - DNA, 25 bp, probe
gaagagagcccttggtaaccagttt

SEQ ID NO: 213470 - DNA, 25 bp, probe
gaagggccctgaggaaggcacactt

SEQ ID NO: 213471 - DNA, 25 bp, probe
gaagggccagaatggtcgcaccttc

SEQ ID NO: 213472 - DNA, 25 bp, probe
gaagtgagccagagtgtggccccta

SEQ ID NO: 213473 - DNA, 25 bp, probe
gaagtatccagttcttagtccttag

SEQ ID NO: 213474 - DNA, 25 bp, probe
gaagtacagagatgcttttgcttat

SEQ ID NO: 213475 - DNA, 25 bp, probe
gaagtttggatgccttactcttatc

SEQ ID NO: 213476 - DNA, 25 bp, probe
gaagtgttaatacatcacatcttat

SEQ ID NO: 213477 - DNA, 25 bp, probe
gaagtgtgtagaactactactttca

SEQ ID NO: 213478 - DNA, 25 bp, probe
gaagtgtgtagaactactactttca

SEQ ID NO: 213479 - DNA, 25 bp, probe
gaagtctgaagaacgccttcatttc

SEQ ID NO: 213480 - DNA, 25 bp, probe
gaagtctgaagaacgccttcatttc

SEQ ID NO: 213481 - DNA, 25 bp, probe
gaagacccagagagcactttgtttg

SEQ ID NO: 213482 - DNA, 25 bp, probe
gaagaggacgaaatgcctttgggtg

SEQ ID NO: 213483 - DNA, 25 bp, probe
gaagaggatccacaactccttggag

SEQ ID NO: 213484 - DNA, 25 bp, probe
gaagaggatccacaactccttggag

SEQ ID NO: 213485 - DNA, 25 bp, probe
gaagaggctcaccgtaagcctggcc

SEQ ID NO: 213486 - DNA, 25 bp, probe
gaagtccagcagccgtaaggtggcc

SEQ ID NO: 213487 - DNA, 25 bp, probe
gaagtccagcagccgtaaggtggcc

SEQ ID NO: 213488 - DNA, 25 bp, probe
gaagtgaagcagcgtgcgtggggcc

SEQ ID NO: 213489 - DNA, 25 bp, probe
gaagtctaagcagggcaggaaacgc

SEQ ID NO: 213490 - DNA, 25 bp, probe
gaagttaacagcagggacaccgttt

SEQ ID NO: 213491 - DNA, 25 bp, probe
gaagttgccaagatgtgggcaccgg

SEQ ID NO: 213492 - DNA, 25 bp, probe
gaagattgctgactttgggctggcc

SEQ ID NO: 213493 - DNA, 25 bp, probe
gaagattgctgactttgggctggcc

SEQ ID NO: 213494 - DNA, 25 bp, probe
gaagatgctgctggtgtgggtgctg

SEQ ID NO: 213495 - DNA, 25 bp, probe
gaagattgccagcatcgcagatgtg

SEQ ID NO: 213496 - DNA, 25 bp, probe
gaagtcaaacgtccagatgcattac

SEQ ID NO: 213497 - DNA, 25 bp, probe
gaagtggggcagcccagtgatgtca

SEQ ID NO: 213498 - DNA, 25 bp, probe
gaagatctgggcggccattgagagc

SEQ ID NO: 213499 - DNA, 25 bp, probe
gaagatctgggcggccattgagagc

SEQ ID NO: 213500 - DNA, 25 bp, probe
gaagtctaggcccagggatggctcc

SEQ ID NO: 213501 - DNA, 25 bp, probe
gaagtctaggcccagggatggctcc

SEQ ID NO: 213502 - DNA, 25 bp, probe
gaagacttggcccaggaaaaacctg

SEQ ID NO: 213503 - DNA, 25 bp, probe
gaagtcttgaatgcaggaaactatc

SEQ ID NO: 213504 - DNA, 25 bp, probe
gaagcaactgaaccacccaaatatc

SEQ ID NO: 213505 - DNA, 25 bp, probe
gaagaacgcacaaacgtcacaagac

SEQ ID NO: 213506 - DNA, 25 bp, probe
gaagaacgcacaaacgtcacaagac

SEQ ID NO: 213507 - DNA, 25 bp, probe
gaagcgacccagaaatggcagggac

SEQ ID NO: 213508 - DNA, 25 bp, probe
gaccgtcccaagagacgaggaccgg

SEQ ID NO: 213509 - DNA, 25 bp, probe
gacaagtccccgtgaagtggaccgc

SEQ ID NO: 213510 - DNA, 25 bp, probe
gaaaacacttggtagacgggactcg

SEQ ID NO: 213511 - DNA, 25 bp, probe
gaagacccattacagagggagttca

SEQ ID NO: 213512 - DNA, 25 bp, probe
gatggaccaaaagatgggtggttga

SEQ ID NO: 213513 - DNA, 25 bp, probe
gaagacaccaaagatgggggagggg

SEQ ID NO: 213514 - DNA, 25 bp, probe
gaagacgctaaagcccggaagcagg

SEQ ID NO: 213515 - DNA, 25 bp, probe
gaagacgctaaagcccggaagcagg

SEQ ID NO: 213516 - DNA, 25 bp, probe
gaagacgctaaagcccggaagcagg

SEQ ID NO: 213517 - DNA, 25 bp, probe
gaagcacaaaacgcctggtgggagg

SEQ ID NO: 213518 - DNA, 25 bp, probe
gaagccccagaagccgtggtgggag

SEQ ID NO: 213519 - DNA, 25 bp, probe
gaagccccagaagccgtggtgggag

SEQ ID NO: 213520 - DNA, 25 bp, probe
gaagtcccaagacctgcgatggact

SEQ ID NO: 213521 - DNA, 25 bp, probe
gaagtcccaagacctgcgatggact

SEQ ID NO: 213522 - DNA, 25 bp, probe
gaagtacaaggactcatctgtggtc

SEQ ID NO: 213523 - DNA, 25 bp, probe
gaagatgaaggtccattcagctggt

SEQ ID NO: 213524 - DNA, 25 bp, probe
gaagtatggctgtaagtctcatggt

SEQ ID NO: 213525 - DNA, 25 bp, probe
gaagtattgctggggtcagctcgtt

SEQ ID NO: 213526 - DNA, 25 bp, probe
gaagtattgctggggtcagctcgtt

SEQ ID NO: 213527 - DNA, 25 bp, probe
gaagtgattgtggactgtcaatctt

SEQ ID NO: 213528 - DNA, 25 bp, probe
gaagttggggcagtgggatgctgac

SEQ ID NO: 213529 - DNA, 25 bp, probe
gaagattgtggggtatgtcctggcc

SEQ ID NO: 213530 - DNA, 25 bp, probe
gaagttgtggaattttctcagcccc

SEQ ID NO: 213531 - DNA, 25 bp, probe
gaagttggacaatttgctcctggac

SEQ ID NO: 213532 - DNA, 25 bp, probe
gaagacggacattgctgccttcatg

SEQ ID NO: 213533 - DNA, 25 bp, probe
gaagttgtgaaggtcctacatgtaa

SEQ ID NO: 213534 - DNA, 25 bp, probe
gaagtccatggagttatctaagctc

SEQ ID NO: 213535 - DNA, 25 bp, probe
gaagtccatgatattgaaagatctg

SEQ ID NO: 213536 - DNA, 25 bp, probe
gaagatccatttaagaacacatgta

SEQ ID NO: 213537 - DNA, 25 bp, probe
gaagatccatttaagaacacatgta

SEQ ID NO: 213538 - DNA, 25 bp, probe
gaagtcttgttagtatacatcagtc

SEQ ID NO: 213539 - DNA, 25 bp, probe
gaagtttgtgaagaccatggtgctg

SEQ ID NO: 213540 - DNA, 25 bp, probe
gaagtttgtgaagaccatggtgctg

SEQ ID NO: 213541 - DNA, 25 bp, probe
gaagtttggtgaagagcacgggtac

SEQ ID NO: 213542 - DNA, 25 bp, probe
gaagtttggtgaagagcacgggtac

SEQ ID NO: 213543 - DNA, 25 bp, probe
gaagtcttgtgctataaaggggaac

SEQ ID NO: 213544 - DNA, 25 bp, probe
gaagtatcatccttaaagatgtggc

SEQ ID NO: 213545 - DNA, 25 bp, probe
gaagaacttccgcagcatattgcgg

SEQ ID NO: 213546 - DNA, 25 bp, probe
gaagaggctcattccaggtttcatt

SEQ ID NO: 213547 - DNA, 25 bp, probe
gaagacgcacacaaaggtattttat

SEQ ID NO: 213548 - DNA, 25 bp, probe
gaagttccactgatgtgtgttaatt

SEQ ID NO: 213549 - DNA, 25 bp, probe
gaagtatgccttgctgtggatggag

SEQ ID NO: 213550 - DNA, 25 bp, probe
gaagtatgccttgctgtggatggag

SEQ ID NO: 213551 - DNA, 25 bp, probe
gaagtacgttgcaatggtgatggac

SEQ ID NO: 213552 - DNA, 25 bp, probe
gaagatgtctgcttcgagggcagga

SEQ ID NO: 213553 - DNA, 25 bp, probe
gaagatgtctgcttcgagggcagga

SEQ ID NO: 213554 - DNA, 25 bp, probe
gaagatgaggttggcagctgatcag

SEQ ID NO: 213555 - DNA, 25 bp, probe
gaagatgaggttggcagctgatcag

SEQ ID NO: 213556 - DNA, 25 bp, probe
gaagatatttgtacagtgtcgcttt

SEQ ID NO: 213557 - DNA, 25 bp, probe
gaagaatgcttgtggtgcccttcga

SEQ ID NO: 213558 - DNA, 25 bp, probe
gaagaatgcttgtggtgcccttcga

SEQ ID NO: 213559 - DNA, 25 bp, probe
gaagatgagctttgcgttgactttc

SEQ ID NO: 213560 - DNA, 25 bp, probe
gaagatgagtttgtgtactggccaa

SEQ ID NO: 213561 - DNA, 25 bp, probe
gaagttgtcgcagcttactgtccaa

SEQ ID NO: 213562 - DNA, 25 bp, probe
gaagttgtccacattgcactgtcaa

SEQ ID NO: 213563 - DNA, 25 bp, probe
gaagataaccacaaggccgacatca

SEQ ID NO: 213564 - DNA, 25 bp, probe
gaagataaccacaaggccgacatca

SEQ ID NO: 213565 - DNA, 25 bp, probe
gaagtacatcctcagtcgtgagatc

SEQ ID NO: 213566 - DNA, 25 bp, probe
gaagtacatcctcagtcgtgagatc

SEQ ID NO: 213567 - DNA, 25 bp, probe
gaagtaaccatttgcactggagttc

SEQ ID NO: 213568 - DNA, 25 bp, probe
gaagaataccttacacttgaagtca

SEQ ID NO: 213569 - DNA, 25 bp, probe
gaagaggttcttactattgaagtca

SEQ ID NO: 213570 - DNA, 25 bp, probe
gaagaagtcgttcctactgacattg

SEQ ID NO: 213571 - DNA, 25 bp, probe
gaagaacacgtgggcttcccattcc

SEQ ID NO: 213572 - DNA, 25 bp, probe
gaaaatacaagggtactctattcct

SEQ ID NO: 213573 - DNA, 25 bp, probe
gacgaaccttgaaaactttatgcta

SEQ ID NO: 213574 - DNA, 25 bp, probe
gaagatcccttaagaggcatttgac

SEQ ID NO: 213575 - DNA, 25 bp, probe
gaagtccctgcttgaaggcaatgga

SEQ ID NO: 213576 - DNA, 25 bp, probe
gaagtgcttctggaaagagccttat

SEQ ID NO: 213577 - DNA, 25 bp, probe
gaagagcttctgtatagtaaccatt

SEQ ID NO: 213578 - DNA, 25 bp, probe
gaagaataccaagaaagctcatatt

SEQ ID NO: 213579 - DNA, 25 bp, probe
gaagaaactgcaaccaacagtaagg

SEQ ID NO: 213580 - DNA, 25 bp, probe
gaagagcgactcaaactaacaatgg

SEQ ID NO: 213581 - DNA, 25 bp, probe
gaagagcgactcaaactaacaatgg

SEQ ID NO: 213582 - DNA, 25 bp, probe
gaagatggacggtatttcaacggcc

SEQ ID NO: 213583 - DNA, 25 bp, probe
gaagatggggcttttggaattcgca

SEQ ID NO: 213584 - DNA, 25 bp, probe
gaagattgaggttcctggacagatc

SEQ ID NO: 213585 - DNA, 25 bp, probe
gaagtcatgaagaactgctggcacc

SEQ ID NO: 213586 - DNA, 25 bp, probe
gaagtctaatgacctctgatgaaaa

SEQ ID NO: 213587 - DNA, 25 bp, probe
gaagtttaactcctatgcaagatga

SEQ ID NO: 213588 - DNA, 25 bp, probe
gaagtttaactcctatgcaagatga

SEQ ID NO: 213589 - DNA, 25 bp, probe
gaagtcctgtactgctatgaagtgc

SEQ ID NO: 213590 - DNA, 25 bp, probe
gaagtctctggaaggcttcaggctg

SEQ ID NO: 213591 - DNA, 25 bp, probe
gaagtactggcagatttgcaggctg

SEQ ID NO: 213592 - DNA, 25 bp, probe
gaagtactggcgattctctgagggc

SEQ ID NO: 213593 - DNA, 25 bp, probe
gaagttcgtggtgccaatcagtgga

SEQ ID NO: 213594 - DNA, 25 bp, probe
gaagttcgtggtgccaatcagtgga

SEQ ID NO: 213595 - DNA, 25 bp, probe
gaagtcattgtcgctcagcaatagg

SEQ ID NO: 213596 - DNA, 25 bp, probe
gaagcagttggcactggagtcaggc

SEQ ID NO: 213597 - DNA, 25 bp, probe
gaagcacttccgactggaaaccgag

SEQ ID NO: 213598 - DNA, 25 bp, probe
gaagatttcctgaaaaaatgggaga

SEQ ID NO: 213599 - DNA, 25 bp, probe
gaagatttcggtttcacaaatggca

SEQ ID NO: 213600 - DNA, 25 bp, probe
gaagttttacttgacagaaggacct

SEQ ID NO: 213601 - DNA, 25 bp, probe
gaagttctatcagttgggggaggag

SEQ ID NO: 213602 - DNA, 25 bp, probe
gaagtttcaagaagggggaatgctg

SEQ ID NO: 213603 - DNA, 25 bp, probe
gaagctcggaaaatgggggcaactg

SEQ ID NO: 213604 - DNA, 25 bp, probe
gaagtctggagataattttgcaact

SEQ ID NO: 213605 - DNA, 25 bp, probe
gaagactccacatactattatctac

SEQ ID NO: 213606 - DNA, 25 bp, probe
gaagtcataactgattgctcaacca

SEQ ID NO: 213607 - DNA, 25 bp, probe
gaagtcataactgattgctcaacca

SEQ ID NO: 213608 - DNA, 25 bp, probe
gaagtatatttccatccataacctt

SEQ ID NO: 213609 - DNA, 25 bp, probe
gaagttgtagtcaatgcctatgaac

SEQ ID NO: 213610 - DNA, 25 bp, probe
gaagctttgcagatcaccatgtggt

SEQ ID NO: 213611 - DNA, 25 bp, probe
gaagcatgtttgagatgccgtggga

SEQ ID NO: 213612 - DNA, 25 bp, probe
gaagattgtcgaacaggagcttgga

SEQ ID NO: 213613 - DNA, 25 bp, probe
gaagttagcgaggaggccttggacc

SEQ ID NO: 213614 - DNA, 25 bp, probe
gaagtcaagcgccgggcgctgtgga

SEQ ID NO: 213615 - DNA, 25 bp, probe
gaagtcaagcgccgggcgctgtgga

SEQ ID NO: 213616 - DNA, 25 bp, probe
gaagtcgcagctctggtgggaggaa

SEQ ID NO: 213617 - DNA, 25 bp, probe
gaagtcgcagtgcgcactggaggag

SEQ ID NO: 213618 - DNA, 25 bp, probe
gaagtagggggagtgcgggagcagg

SEQ ID NO: 213619 - DNA, 25 bp, probe
gaagaggctgggcgtgaggggagac

SEQ ID NO: 213620 - DNA, 25 bp, probe
gaagaggagggcatccagtgacggc

SEQ ID NO: 213621 - DNA, 25 bp, probe
gaagagcaagggacctagtctcagg

SEQ ID NO: 213622 - DNA, 25 bp, probe
gaagatgcagtacggtttattagag

SEQ ID NO: 213623 - DNA, 25 bp, probe
gaagatgcagtacggtttattagag

SEQ ID NO: 213624 - DNA, 25 bp, probe
gacaggcactatctgggttttgggg

SEQ ID NO: 213625 - DNA, 25 bp, probe
gaagtcctgatggttggtgtccatg

SEQ ID NO: 213626 - DNA, 25 bp, probe
gaagtcacattagtgtgttgtctct

SEQ ID NO: 213627 - DNA, 25 bp, probe
gaagtcaatatgtctggttttattt

SEQ ID NO: 213628 - DNA, 25 bp, probe
gaagtaattcctctgattctgtttt

SEQ ID NO: 213629 - DNA, 25 bp, probe
gaagaaatttcacagcagtttatta

SEQ ID NO: 213630 - DNA, 25 bp, probe
gaagactgacttgacacgtttgtaa

SEQ ID NO: 213631 - DNA, 25 bp, probe
gaagattgtcaatattttgtggtaa

SEQ ID NO: 213632 - DNA, 25 bp, probe
gaagttgtgagatattggatgtgtg

SEQ ID NO: 213633 - DNA, 25 bp, probe
gaagatcctggtgcattgtgctgtg

SEQ ID NO: 213634 - DNA, 25 bp, probe
gaagattcggagccttgatgtggta

SEQ ID NO: 213635 - DNA, 25 bp, probe
gaagtcacagtggccttgttggtgc

SEQ ID NO: 213636 - DNA, 25 bp, probe
gaagatccagctgcctattgattta

SEQ ID NO: 213637 - DNA, 25 bp, probe
gaagaccctgcagcatgacaagctc

SEQ ID NO: 213638 - DNA, 25 bp, probe
gaagcaggccgagagacttgcacct

SEQ ID NO: 213639 - DNA, 25 bp, probe
gaagcaggccgagagacttgcacct

SEQ ID NO: 213640 - DNA, 25 bp, probe
gaagcatggcctagataggcgccca

SEQ ID NO: 213641 - DNA, 25 bp, probe
gaagatgtggctacatagttaccat

SEQ ID NO: 213642 - DNA, 25 bp, probe
gaagatgtcagtaattttgaccctg

SEQ ID NO: 213643 - DNA, 25 bp, probe
gaagatgacaggcaagtccgccctg

SEQ ID NO: 213644 - DNA, 25 bp, probe
gaagagatcggtacagacccaagca

SEQ ID NO: 213645 - DNA, 25 bp, probe
gaagcaaggagccggagctcccaca

SEQ ID NO: 213646 - DNA, 25 bp, probe
gaagacggtcaacgagtcagccagt

SEQ ID NO: 213647 - DNA, 25 bp, probe
gagcgaatatgatacggtctccggc

SEQ ID NO: 213648 - DNA, 25 bp, probe
gaagaaaatttccgcttcctggtct

SEQ ID NO: 213649 - DNA, 25 bp, probe
gaagacaaactaccaatttctcgtt

SEQ ID NO: 213650 - DNA, 25 bp, probe
gaagaactactgctcaaaattcatg

SEQ ID NO: 213651 - DNA, 25 bp, probe
gaagaagctttttaacgattatggt

SEQ ID NO: 213652 - DNA, 25 bp, probe
gaagagacgatttagaagctttagg

SEQ ID NO: 213653 - DNA, 25 bp, probe
gaagagccagttttaactccaattg

SEQ ID NO: 213654 - DNA, 25 bp, probe
gaagacctactttaacatcctcatc

SEQ ID NO: 213655 - DNA, 25 bp, probe
gaagagagttttaagacactgttct

SEQ ID NO: 213656 - DNA, 25 bp, probe
gaagagatgccttttggacactttc

SEQ ID NO: 213657 - DNA, 25 bp, probe
gaagagatgccttttggacactttc

SEQ ID NO: 213658 - DNA, 25 bp, probe
gaagagcataacttggcagacactg

SEQ ID NO: 213659 - DNA, 25 bp, probe
gaagagctttcactgctgattagtg

SEQ ID NO: 213660 - DNA, 25 bp, probe
gaagatggtgtggtctacgaggtca

SEQ ID NO: 213661 - DNA, 25 bp, probe
gaagaggtgtttgactgcatcgtca

SEQ ID NO: 213662 - DNA, 25 bp, probe
gaagaagttcaaatacgctgaggac

SEQ ID NO: 213663 - DNA, 25 bp, probe
gaagactgtaatgtacctgaagttt

SEQ ID NO: 213664 - DNA, 25 bp, probe
gaagagtctattgtctccttggtta

SEQ ID NO: 213665 - DNA, 25 bp, probe
gaagaggtgaaggatctggcttgtt

SEQ ID NO: 213666 - DNA, 25 bp, probe
gaagaggtcaaatgggctctctcat

SEQ ID NO: 213667 - DNA, 25 bp, probe
gaagagattaatggcagagtgcctc

SEQ ID NO: 213668 - DNA, 25 bp, probe
gaagatactatattgctgcgtccta

SEQ ID NO: 213669 - DNA, 25 bp, probe
gaagatactggatgtcagtctcttg

SEQ ID NO: 213670 - DNA, 25 bp, probe
gaagatactggatgtcagtctcttg

SEQ ID NO: 213671 - DNA, 25 bp, probe
gaagttcttcatggtcaccttcatc

SEQ ID NO: 213672 - DNA, 25 bp, probe
gaagtactacatggccactatgacc

SEQ ID NO: 213673 - DNA, 25 bp, probe
gaagaactaaaggacttagccccag

SEQ ID NO: 213674 - DNA, 25 bp, probe
gaagaactaaaggacttagccccag

SEQ ID NO: 213675 - DNA, 25 bp, probe
gaagaattccaaagaacggcctaca

SEQ ID NO: 213676 - DNA, 25 bp, probe
gaagtttccagcaaaaccctcatca

SEQ ID NO: 213677 - DNA, 25 bp, probe
gaagttccatcactagaaacgtgtg

SEQ ID NO: 213678 - DNA, 25 bp, probe
gaagtttcacatttacaacctgggc

SEQ ID NO: 213679 - DNA, 25 bp, probe
gaagtttcacatttacaacctgggc

SEQ ID NO: 213680 - DNA, 25 bp, probe
gaagttgtgttctgacaagactgag

SEQ ID NO: 213681 - DNA, 25 bp, probe
gaaatggtgttcaagaaacgtgaca

SEQ ID NO: 213682 - DNA, 25 bp, probe
gaagatggacagtgagaaagggaat

SEQ ID NO: 213683 - DNA, 25 bp, probe
gaagagtgaagggcagtacagtggc

SEQ ID NO: 213684 - DNA, 25 bp, probe
gaagaggaattgtaatgatcattag

SEQ ID NO: 213685 - DNA, 25 bp, probe
gaagctggcaagctacttttcagcc

SEQ ID NO: 213686 - DNA, 25 bp, probe
gaagatggacggagcttgttatcgc

SEQ ID NO: 213687 - DNA, 25 bp, probe
gaagatagtagtatgcttttgtcca

SEQ ID NO: 213688 - DNA, 25 bp, probe
gaagtcagcgagttttatttgtccg

SEQ ID NO: 213689 - DNA, 25 bp, probe
gaagtcatggagttctgacagttcc

SEQ ID NO: 213690 - DNA, 25 bp, probe
gaagtatgtgaccccaaattccatt

SEQ ID NO: 213691 - DNA, 25 bp, probe
gaagtagtgtctgccatacatgtta

SEQ ID NO: 213692 - DNA, 25 bp, probe
gaagtagtgtttccatgctctgtgt

SEQ ID NO: 213693 - DNA, 25 bp, probe
gaagtagctgttagccttgcttcca

SEQ ID NO: 213694 - DNA, 25 bp, probe
gaagcatagctgagtagttgaacta

SEQ ID NO: 213695 - DNA, 25 bp, probe
gaagtactcatacatgttacaacac

SEQ ID NO: 213696 - DNA, 25 bp, probe
gaagtactgcgtggtgtatgataac

SEQ ID NO: 213697 - DNA, 25 bp, probe
gaagtactgcgtggtgtatgataac

SEQ ID NO: 213698 - DNA, 25 bp, probe
gaagtaccagacctgctagagaagg

SEQ ID NO: 213699 - DNA, 25 bp, probe
gaagtcacccacccatatggaaatt

SEQ ID NO: 213700 - DNA, 25 bp, probe
gaaaagtaactgccaagtaagatta

SEQ ID NO: 213701 - DNA, 25 bp, probe
gaaaagtaactgccaagtaagatta

SEQ ID NO: 213702 - DNA, 25 bp, probe
gaagtaataactgatgagatacatt

SEQ ID NO: 213703 - DNA, 25 bp, probe
gaagtaaatcaagcagcagcaacaa

SEQ ID NO: 213704 - DNA, 25 bp, probe
gaagtagaactagcacgcatcaaga

SEQ ID NO: 213705 - DNA, 25 bp, probe
gaagtcagaagtatcaccacggatt

SEQ ID NO: 213706 - DNA, 25 bp, probe
gaagatcgacaaaatatcccgcatt

SEQ ID NO: 213707 - DNA, 25 bp, probe
gaagatcgacaaaatatcccgcatt

SEQ ID NO: 213708 - DNA, 25 bp, probe
gaagaaacaacaaacctgcgcctgc

SEQ ID NO: 213709 - DNA, 25 bp, probe
gaagaaacaacaaacctgcgcctgc

SEQ ID NO: 213710 - DNA, 25 bp, probe
gaagaaacactctgagcaagtccca

SEQ ID NO: 213711 - DNA, 25 bp, probe
gaagaaacactctgagcaagtccca

SEQ ID NO: 213712 - DNA, 25 bp, probe
gaagaaacactctgagcaagtccca

SEQ ID NO: 213713 - DNA, 25 bp, probe
gaagatatcccgttagaagaaccag

SEQ ID NO: 213714 - DNA, 25 bp, probe
gaagattacacggatgagaagatga

SEQ ID NO: 213715 - DNA, 25 bp, probe
gaagaccacgcgtctgaaggagtac

SEQ ID NO: 213716 - DNA, 25 bp, probe
gaagaacttcagtgcaggaggtcac

SEQ ID NO: 213717 - DNA, 25 bp, probe
gaagatgaatttttcaggaggccca

SEQ ID NO: 213718 - DNA, 25 bp, probe
gaagacctttatccagggaggccag

SEQ ID NO: 213719 - DNA, 25 bp, probe
gaactcggttataagctgggccgca

SEQ ID NO: 213720 - DNA, 25 bp, probe
gaactcggttataagctgggccgca

SEQ ID NO: 213721 - DNA, 25 bp, probe
gaagacggggattgaggaggcctca

SEQ ID NO: 213722 - DNA, 25 bp, probe
gaagcagagggggctggggacctgc

SEQ ID NO: 213723 - DNA, 25 bp, probe
gaagagaccggagtggtgctgtccc

SEQ ID NO: 213724 - DNA, 25 bp, probe
gaagagaccggagtggtgctgtccc

SEQ ID NO: 213725 - DNA, 25 bp, probe
gaagagggcagtgtgggctcttcct

SEQ ID NO: 213726 - DNA, 25 bp, probe
gaagacggcagtgttcagaattcca

SEQ ID NO: 213727 - DNA, 25 bp, probe
gaagaggccatgtgtctcagagctg

SEQ ID NO: 213728 - DNA, 25 bp, probe
gaagacatcctatctagctgcaagg

SEQ ID NO: 213729 - DNA, 25 bp, probe
gaagatcctgttactactgaaagac

SEQ ID NO: 213730 - DNA, 25 bp, probe
gaagatcctgttactactgaaagac

SEQ ID NO: 213731 - DNA, 25 bp, probe
gaagtttctgaaatattgcaaaccc

SEQ ID NO: 213732 - DNA, 25 bp, probe
gaagttgctgctgtgaatctgaaag

SEQ ID NO: 213733 - DNA, 25 bp, probe
gaagttggctttacatggaatcatc

SEQ ID NO: 213734 - DNA, 25 bp, probe
gaagtttgctgtattggatgccatc

SEQ ID NO: 213735 - DNA, 25 bp, probe
gaagtttgctgtattggatgccatc

SEQ ID NO: 213736 - DNA, 25 bp, probe
gaagtttgctgaacgaggactcaca

SEQ ID NO: 213737 - DNA, 25 bp, probe
gaagttgccgatgatgaggaccgaa

SEQ ID NO: 213738 - DNA, 25 bp, probe
gaagttcctctgataggaagctaga

SEQ ID NO: 213739 - DNA, 25 bp, probe
gaagatttctttaaaaggctcagat

SEQ ID NO: 213740 - DNA, 25 bp, probe
gaagtatattcttaataacctcata

SEQ ID NO: 213741 - DNA, 25 bp, probe
gaagttattcaattaaaatgccaca

SEQ ID NO: 213742 - DNA, 25 bp, probe
gaagttattcaattaaaatgccaca

SEQ ID NO: 213743 - DNA, 25 bp, probe
gaagttattccttgagaagttcata

SEQ ID NO: 213744 - DNA, 25 bp, probe
gaagtatatgctgtgaaggtcttaa

SEQ ID NO: 213745 - DNA, 25 bp, probe
gaagtatactcttgagtgtttaata

SEQ ID NO: 213746 - DNA, 25 bp, probe
gaagttttataattgcttccaaaca

SEQ ID NO: 213747 - DNA, 25 bp, probe
gaagtttttggtgttccaaatgatc

SEQ ID NO: 213748 - DNA, 25 bp, probe
gaagctactttgtttttaaatgatg

SEQ ID NO: 213749 - DNA, 25 bp, probe
gaagctactgtgagtctttaaatgg

SEQ ID NO: 213750 - DNA, 25 bp, probe
gaagtatataagggcacattaaagg

SEQ ID NO: 213751 - DNA, 25 bp, probe
gaagtatttgaagccatcaacatca

SEQ ID NO: 213752 - DNA, 25 bp, probe
gaagatagtttaaccaaacaaccag

SEQ ID NO: 213753 - DNA, 25 bp, probe
gaacaagatcctgtctcaaaaaaca

SEQ ID NO: 213754 - DNA, 25 bp, probe
gaagcaaatcgtgtccttcgacaag

SEQ ID NO: 213755 - DNA, 25 bp, probe
gaagagcaagggttccctcaagagg

SEQ ID NO: 213756 - DNA, 25 bp, probe
gaagaacgtggttagccaccgggca

SEQ ID NO: 213757 - DNA, 25 bp, probe
gacgagacgtaggtagccgtagttg

SEQ ID NO: 213758 - DNA, 25 bp, probe
gaagaggcgtgggaatccaggcagt

SEQ ID NO: 213759 - DNA, 25 bp, probe
gaagaggggttgagaatggaatcct

SEQ ID NO: 213760 - DNA, 25 bp, probe
gaagaggaagttatgccaaagtact

SEQ ID NO: 213761 - DNA, 25 bp, probe
gaagaggcaatggatataccaaatg

SEQ ID NO: 213762 - DNA, 25 bp, probe
gaagatgacaatcatgttgcagcaa

SEQ ID NO: 213763 - DNA, 25 bp, probe
gaagaggccatcctttgtgaagctg

SEQ ID NO: 213764 - DNA, 25 bp, probe
gaagatggacatgtggtggtacgaa

SEQ ID NO: 213765 - DNA, 25 bp, probe
gaagatgagcaggcgtggatggcat

SEQ ID NO: 213766 - DNA, 25 bp, probe
gaagatggcgcaatttcatggcatg

SEQ ID NO: 213767 - DNA, 25 bp, probe
gaagcaggccatgctgaatgccagc

SEQ ID NO: 213768 - DNA, 25 bp, probe
gaagatgccgacctcagcatcggca

SEQ ID NO: 213769 - DNA, 25 bp, probe
gaagactcagatgtctctgggcaag

SEQ ID NO: 213770 - DNA, 25 bp, probe
gaagatctcgcttggtcatgtggat

SEQ ID NO: 213771 - DNA, 25 bp, probe
gaagatctcgcttggtcatgtggat

SEQ ID NO: 213772 - DNA, 25 bp, probe
gaagatcttctgttgtcatggagga

SEQ ID NO: 213773 - DNA, 25 bp, probe
gaagatagctctctgactgctttgg

SEQ ID NO: 213774 - DNA, 25 bp, probe
gaagaagcctccttgcattacattc

SEQ ID NO: 213775 - DNA, 25 bp, probe
gaagttgacctttgcactggcatta

SEQ ID NO: 213776 - DNA, 25 bp, probe
gaagttgtctataatgagccgttaa

SEQ ID NO: 213777 - DNA, 25 bp, probe
gaagttgtcaataaagcattgcatg

SEQ ID NO: 213778 - DNA, 25 bp, probe
gaagattccaatgagagcttgagct

SEQ ID NO: 213779 - DNA, 25 bp, probe
gaagttccacagcaagatgtgatcc

SEQ ID NO: 213780 - DNA, 25 bp, probe
gaagttcttagcataatgtatccat

SEQ ID NO: 213781 - DNA, 25 bp, probe
gaagaatctacacttctttgcacca

SEQ ID NO: 213782 - DNA, 25 bp, probe
gaagaaaccaagacattacaccatg

SEQ ID NO: 213783 - DNA, 25 bp, probe
gaagaacaagaccgactacacgggc

SEQ ID NO: 213784 - DNA, 25 bp, probe
gaagattcaaggagctgtagaggtg

SEQ ID NO: 213785 - DNA, 25 bp, probe
gaagaagaaggaacccatagcttgg

SEQ ID NO: 213786 - DNA, 25 bp, probe
gaagaagaaggaacccatagcttgg

SEQ ID NO: 213787 - DNA, 25 bp, probe
gaagaaggaaagtccccctgtgtgg

SEQ ID NO: 213788 - DNA, 25 bp, probe
gaagaaggcaaagcccccaaaggct

SEQ ID NO: 213789 - DNA, 25 bp, probe
gaagagaggctatgacaaccccaac

SEQ ID NO: 213790 - DNA, 25 bp, probe
gaagaggagatatctcagaaccaaa

SEQ ID NO: 213791 - DNA, 25 bp, probe
gaagaggaggaggcccagaccatgt

SEQ ID NO: 213792 - DNA, 25 bp, probe
gaagaaggtggcgaaagtcatagac

SEQ ID NO: 213793 - DNA, 25 bp, probe
gaagaggaggactatattgtctaaa

SEQ ID NO: 213794 - DNA, 25 bp, probe
gaagaggaggactatattgtctaaa

SEQ ID NO: 213795 - DNA, 25 bp, probe
gaagaggctgtgcaagatgttctac

SEQ ID NO: 213796 - DNA, 25 bp, probe
gaagaggctgtgcaagatgttctac

SEQ ID NO: 213797 - DNA, 25 bp, probe
actgaccttaggcatggagaaaatt

SEQ ID NO: 213798 - DNA, 25 bp, probe
gaagatggtgtcccagagcttcacc

SEQ ID NO: 213799 - DNA, 25 bp, probe
gaagatgagatagaggacattcaac

SEQ ID NO: 213800 - DNA, 25 bp, probe
gaagatgccaggaaggacttaaagt

SEQ ID NO: 213801 - DNA, 25 bp, probe
gaagagagtgccagagtctatgaaa

SEQ ID NO: 213802 - DNA, 25 bp, probe
gaagaagagcagggtatcatcagaa

SEQ ID NO: 213803 - DNA, 25 bp, probe
gaagaatgcagggcccattcagcat

SEQ ID NO: 213804 - DNA, 25 bp, probe
gaagatcagcatacacaaattacaa

SEQ ID NO: 213805 - DNA, 25 bp, probe
gaagatcagcatacacaaattacaa

SEQ ID NO: 213806 - DNA, 25 bp, probe
gaagatagcattacaccagagagaa

SEQ ID NO: 213807 - DNA, 25 bp, probe
gaagatacatcaatacctgaccttt

SEQ ID NO: 213808 - DNA, 25 bp, probe
gaaaaactgacaggtgaccgatgta

SEQ ID NO: 213809 - DNA, 25 bp, probe
gaagaagaaaggggaccgctgtgcc

SEQ ID NO: 213810 - DNA, 25 bp, probe
gaagaataggcggggcacggtggct

SEQ ID NO: 213811 - DNA, 25 bp, probe
gaagcagatcgggggcgagggtggc

SEQ ID NO: 213812 - DNA, 25 bp, probe
gaagagaagatggagtgcgagggca

SEQ ID NO: 213813 - DNA, 25 bp, probe
gaagatgactacctgtctgatggga

SEQ ID NO: 213814 - DNA, 25 bp, probe
gaagatgacatggagtttggtgaag

SEQ ID NO: 213815 - DNA, 25 bp, probe
gaagatccaaaattgctgtgtacga

SEQ ID NO: 213816 - DNA, 25 bp, probe
gaagttcaaatacgctgaggacatg

SEQ ID NO: 213817 - DNA, 25 bp, probe
gaagttcacctactgtgacgacagg

SEQ ID NO: 213818 - DNA, 25 bp, probe
gaagttagcctactcttctgtcagt

SEQ ID NO: 213819 - DNA, 25 bp, probe
gaagttagcctactcttctgtcagt

SEQ ID NO: 213820 - DNA, 25 bp, probe
gaagatctcaggaatttttgtaggg

SEQ ID NO: 213821 - DNA, 25 bp, probe
gaagatctcaggaatttttgtaggg

SEQ ID NO: 213822 - DNA, 25 bp, probe
gaagttgagaaaatgattttccctt

SEQ ID NO: 213823 - DNA, 25 bp, probe
gaagattacaaaagcaattttcatt

SEQ ID NO: 213824 - DNA, 25 bp, probe
gaagatatatcaatttctatttcct

SEQ ID NO: 213825 - DNA, 25 bp, probe
gaagcctccattattatggtcacat

SEQ ID NO: 213826 - DNA, 25 bp, probe
gaagacctccacattaagtggcttt

SEQ ID NO: 213827 - DNA, 25 bp, probe
gaagaaactctcattcaggggctcc

SEQ ID NO: 213828 - DNA, 25 bp, probe
gaagaaagttcatttcagtggggaa

SEQ ID NO: 213829 - DNA, 25 bp, probe
gaagaaagtccagacctcggagaag

SEQ ID NO: 213830 - DNA, 25 bp, probe
gaagatcaaggcaagaacctcttta

SEQ ID NO: 213831 - DNA, 25 bp, probe
gaagatacaggctcagaggtttaac

SEQ ID NO: 213832 - DNA, 25 bp, probe
gaagattagtgctcggggtcaccat

SEQ ID NO: 213833 - DNA, 25 bp, probe
gaagatttgtgatccaggcctcact

SEQ ID NO: 213834 - DNA, 25 bp, probe
gaagattatggtttcagtgttgact

SEQ ID NO: 213835 - DNA, 25 bp, probe
gaagattaagtcatcagccattaca

SEQ ID NO: 213836 - DNA, 25 bp, probe
gaagattaagtcatcagccattaca

SEQ ID NO: 213837 - DNA, 25 bp, probe
gaagatatccgtgtctctataacag

SEQ ID NO: 213838 - DNA, 25 bp, probe
gaagatttcttccattataagacag

SEQ ID NO: 213839 - DNA, 25 bp, probe
gaagatgtagctttctgacaaaaag

SEQ ID NO: 213840 - DNA, 25 bp, probe
gaagttggtcatgctaatgatatag

SEQ ID NO: 213841 - DNA, 25 bp, probe
gaagttgctgtcacacattgtgtaa

SEQ ID NO: 213842 - DNA, 25 bp, probe
gaagttgctgtcacacattgtgtaa

SEQ ID NO: 213843 - DNA, 25 bp, probe
gaagaggccttggacactgtgtcaa

SEQ ID NO: 213844 - DNA, 25 bp, probe
gaagaggccttggacactgtgtcaa

SEQ ID NO: 213845 - DNA, 25 bp, probe
gaagattcctgtgacagcgatgcca

SEQ ID NO: 213846 - DNA, 25 bp, probe
gaagagccctatgaagagatcattc

SEQ ID NO: 213847 - DNA, 25 bp, probe
gaagaatcctgtgacaagcacttac

SEQ ID NO: 213848 - DNA, 25 bp, probe
gaagatacctgtgtctatgagtgtc

SEQ ID NO: 213849 - DNA, 25 bp, probe
gaagatacctgtgtctatgagtgtc

SEQ ID NO: 213850 - DNA, 25 bp, probe
gaagcttccgataatcttgcagtgc

SEQ ID NO: 213851 - DNA, 25 bp, probe
gaagatgtccgaaaactggctgttg

SEQ ID NO: 213852 - DNA, 25 bp, probe
gaagatgatcctgatgaaatggctg

SEQ ID NO: 213853 - DNA, 25 bp, probe
gaagatatgcgtgaggttgtgtgtg

SEQ ID NO: 213854 - DNA, 25 bp, probe
gaagttgcagtcttgcgtgtggatg

SEQ ID NO: 213855 - DNA, 25 bp, probe
gaagttgcagtcttgcgtgtggatg

SEQ ID NO: 213856 - DNA, 25 bp, probe
gaagttggatccagctgtgagatgc

SEQ ID NO: 213857 - DNA, 25 bp, probe
gaagttggatccagctgtgagatgc

SEQ ID NO: 213858 - DNA, 25 bp, probe
gaagatcttgaccaatggctaagtg

SEQ ID NO: 213859 - DNA, 25 bp, probe
gaagactgcatgtccaaacgaagta

SEQ ID NO: 213860 - DNA, 25 bp, probe
gaagacttagctaaacagactgaaa

SEQ ID NO: 213861 - DNA, 25 bp, probe
gagagaccgagctaattaactaact

SEQ ID NO: 213862 - DNA, 25 bp, probe
gagagaccgagctaattaactaact

SEQ ID NO: 213863 - DNA, 25 bp, probe
gaagataggaaccattcaacttagt

SEQ ID NO: 213864 - DNA, 25 bp, probe
gaagaaggcaacccaaatggtggcc

SEQ ID NO: 213865 - DNA, 25 bp, probe
gaagaaggtcacccgaatggtgtcc

SEQ ID NO: 213866 - DNA, 25 bp, probe
gaagatcggccactacattctgggt

SEQ ID NO: 213867 - DNA, 25 bp, probe
gaagactgaactccacagtcgtagt

SEQ ID NO: 213868 - DNA, 25 bp, probe
gaagactatatctcaactttgtgtc

SEQ ID NO: 213869 - DNA, 25 bp, probe
gaagactatatctcaactttgtgtc

SEQ ID NO: 213870 - DNA, 25 bp, probe
gaagaattgatgggccacccgttca

SEQ ID NO: 213871 - DNA, 25 bp, probe
gaagacactatgaatctaccgagat

SEQ ID NO: 213872 - DNA, 25 bp, probe
gaagacctttatttccaggatcaac

SEQ ID NO: 213873 - DNA, 25 bp, probe
gaagacctttatttccaggatcaac

SEQ ID NO: 213874 - DNA, 25 bp, probe
gaagacctctgttgtacctgtaata

SEQ ID NO: 213875 - DNA, 25 bp, probe
gaagaggattgttaccctggaaaca

SEQ ID NO: 213876 - DNA, 25 bp, probe
gaagagcatttggtacacacttgac

SEQ ID NO: 213877 - DNA, 25 bp, probe
gaagagcatttggtacacacttgac

SEQ ID NO: 213878 - DNA, 25 bp, probe
gaagactttgcagaacctttaattg

SEQ ID NO: 213879 - DNA, 25 bp, probe
gaagacctagcagaacttattagag

SEQ ID NO: 213880 - DNA, 25 bp, probe
gaagaacgaagccacctttgaagaa

SEQ ID NO: 213881 - DNA, 25 bp, probe
gaagaagcactcaaacagtttaagc

SEQ ID NO: 213882 - DNA, 25 bp, probe
gaagaagatcatgaacagccttcaa

SEQ ID NO: 213883 - DNA, 25 bp, probe
gaagcgcaagctgaagcgtgtccga

SEQ ID NO: 213884 - DNA, 25 bp, probe
gaagcgcaagctgaagcgtgtccga

SEQ ID NO: 213885 - DNA, 25 bp, probe
gaagactagtggtggattccatgac

SEQ ID NO: 213886 - DNA, 25 bp, probe
gaagatctaatgcatcctatatcca

SEQ ID NO: 213887 - DNA, 25 bp, probe
gaagatcaaatgcctcttctgccgc

SEQ ID NO: 213888 - DNA, 25 bp, probe
gaagatctcgtgactatactggcat

SEQ ID NO: 213889 - DNA, 25 bp, probe
gaagatcatcagtagcattaaagct

SEQ ID NO: 213890 - DNA, 25 bp, probe
gaagatgctgcacagtttacagatt

SEQ ID NO: 213891 - DNA, 25 bp, probe
gaagacgtgaataatcatactgatt

SEQ ID NO: 213892 - DNA, 25 bp, probe
gaagacagctcttatattgccattt

SEQ ID NO: 213893 - DNA, 25 bp, probe
gaagaggattcttgatttgcagtct

SEQ ID NO: 213894 - DNA, 25 bp, probe
gaagaggattctggactctctctgc

SEQ ID NO: 213895 - DNA, 25 bp, probe
gaagaagtacatggactccacccca

SEQ ID NO: 213896 - DNA, 25 bp, probe
gaagatcaggaaggggcatgacccc

SEQ ID NO: 213897 - DNA, 25 bp, probe
gaagccaggaacctggacctccttc

SEQ ID NO: 213898 - DNA, 25 bp, probe
gaacaggaaactctgcactctactt

SEQ ID NO: 213899 - DNA, 25 bp, probe
gaacaggaaactctgcactctactt

SEQ ID NO: 213900 - DNA, 25 bp, probe
gaagaagattaccctgactcatacc

SEQ ID NO: 213901 - DNA, 25 bp, probe
gaagaaattcgaatctcccaacatc

SEQ ID NO: 213902 - DNA, 25 bp, probe
gaagagtttcatatacaccaaataa

SEQ ID NO: 213903 - DNA, 25 bp, probe
gaagagtttcttcagcaaaaatgta

SEQ ID NO: 213904 - DNA, 25 bp, probe
gaagaattgtttttcaaaggtctca

SEQ ID NO: 213905 - DNA, 25 bp, probe
gaagaacttcttctcaaaagatcac

SEQ ID NO: 213906 - DNA, 25 bp, probe
gaagaatcccttctagaaagcattt

SEQ ID NO: 213907 - DNA, 25 bp, probe
gaagagttcctctgtatgaaagtat

SEQ ID NO: 213908 - DNA, 25 bp, probe
gaagacatttccggttgagagaaca

SEQ ID NO: 213909 - DNA, 25 bp, probe
gaagagtccgtggttagggagagca

SEQ ID NO: 213910 - DNA, 25 bp, probe
gaagagtcaactgttcagatgtaag

SEQ ID NO: 213911 - DNA, 25 bp, probe
gaagagtcagacggaatcgaaacgt

SEQ ID NO: 213912 - DNA, 25 bp, probe
gaagagtgcggagaggcgaaactga

SEQ ID NO: 213913 - DNA, 25 bp, probe
gagggccctcaggaggggaacgtgg

SEQ ID NO: 213914 - DNA, 25 bp, probe
gaagcccctgaggagaagggacgct

SEQ ID NO: 213915 - DNA, 25 bp, probe
gaagcgcctcagttacacaggaacc

SEQ ID NO: 213916 - DNA, 25 bp, probe
gaagctccgggaacaagtgaactcc

SEQ ID NO: 213917 - DNA, 25 bp, probe
gaagccattaggaaaacaaactaga

SEQ ID NO: 213918 - DNA, 25 bp, probe
gaagctcaaaggatatggaaacaaa

SEQ ID NO: 213919 - DNA, 25 bp, probe
gaagattcaaagattgccaaacaga

SEQ ID NO: 213920 - DNA, 25 bp, probe
gaagatataaactctccagaacaca

SEQ ID NO: 213921 - DNA, 25 bp, probe
gaagagaaagctgccaccaagaaca

SEQ ID NO: 213922 - DNA, 25 bp, probe
gaagaataagccgtccactgaagaa

SEQ ID NO: 213923 - DNA, 25 bp, probe
gaagcaagaactcctggagctacag

SEQ ID NO: 213924 - DNA, 25 bp, probe
gaagatcaaagttctaagaagctgg

SEQ ID NO: 213925 - DNA, 25 bp, probe
gaagataaacacctcattggcactg

SEQ ID NO: 213926 - DNA, 25 bp, probe
gaagataacattgtcattcctagat

SEQ ID NO: 213927 - DNA, 25 bp, probe
gaagataacattgtcattcctagat

SEQ ID NO: 213928 - DNA, 25 bp, probe
gaagaaagatctgtttcctctcctc

SEQ ID NO: 213929 - DNA, 25 bp, probe
gaagaatgacctagttgctcctctc

SEQ ID NO: 213930 - DNA, 25 bp, probe
gaagcaaatcctagttctcttccca

SEQ ID NO: 213931 - DNA, 25 bp, probe
gaagaaggtgctcacctcattcctc

SEQ ID NO: 213932 - DNA, 25 bp, probe
gaagaagagattcaaggagtcctta

SEQ ID NO: 213933 - DNA, 25 bp, probe
gaagaatgagttcagttacacaaaa

SEQ ID NO: 213934 - DNA, 25 bp, probe
gaagatagagctggagacctacaaa

SEQ ID NO: 213935 - DNA, 25 bp, probe
gaagatgccactgataccatacgaa

SEQ ID NO: 213936 - DNA, 25 bp, probe
gaagatgccactgataccatacgaa

SEQ ID NO: 213937 - DNA, 25 bp, probe
gaagatgccagctctaccagaaaaa

SEQ ID NO: 213938 - DNA, 25 bp, probe
gaagatgccagctctaccagaaaaa

SEQ ID NO: 213939 - DNA, 25 bp, probe
gaagatgccgcacacaaacaatgca

SEQ ID NO: 213940 - DNA, 25 bp, probe
gaagatgcgcaaacgctacagcgtg

SEQ ID NO: 213941 - DNA, 25 bp, probe
gaagatgcgcaaacgctacagcgtg

SEQ ID NO: 213942 - DNA, 25 bp, probe
gaactccaccggaagcagctagttt

SEQ ID NO: 213943 - DNA, 25 bp, probe
gaactatcccagatggttatgtttt

SEQ ID NO: 213944 - DNA, 25 bp, probe
gaactatcccagatggttatgtttt

SEQ ID NO: 213945 - DNA, 25 bp, probe
gaagattaccaactgccttattatg

SEQ ID NO: 213946 - DNA, 25 bp, probe
gaagcattagccagggttgttcatc

SEQ ID NO: 213947 - DNA, 25 bp, probe
gaagaatgtgccagaggttgtccac

SEQ ID NO: 213948 - DNA, 25 bp, probe
gaagatgatggcaggaaggtctcct

SEQ ID NO: 213949 - DNA, 25 bp, probe
gaagcatgataaaggggcagttcac

SEQ ID NO: 213950 - DNA, 25 bp, probe
gaagagaagaataagccgtccactg

SEQ ID NO: 213951 - DNA, 25 bp, probe
gaagagcaaccagtacctgtccatc

SEQ ID NO: 213952 - DNA, 25 bp, probe
gaagatggtcaactacctggtcatc

SEQ ID NO: 213953 - DNA, 25 bp, probe
gaagatggttattaacactgtgctg

SEQ ID NO: 213954 - DNA, 25 bp, probe
gaagagtgctttttgacctgtcaca

SEQ ID NO: 213955 - DNA, 25 bp, probe
gaagagtgctttttgacctgtcaca

SEQ ID NO: 213956 - DNA, 25 bp, probe
gaagagtctctatagaactgtcctc

SEQ ID NO: 213957 - DNA, 25 bp, probe
gaagaatcgctatctgatgggcccc

SEQ ID NO: 213958 - DNA, 25 bp, probe
gaagatcactcaagactatgggcag

SEQ ID NO: 213959 - DNA, 25 bp, probe
gaagatgtcattcgacacggagcag

SEQ ID NO: 213960 - DNA, 25 bp, probe
gaagatgtgattaacagtgttcagt

SEQ ID NO: 213961 - DNA, 25 bp, probe
gaagatgtgattaacagtgttcagt

SEQ ID NO: 213962 - DNA, 25 bp, probe
gaagatgtaatgtagctttccactg

SEQ ID NO: 213963 - DNA, 25 bp, probe
gaagagagatcgtgctgttcgcctc

SEQ ID NO: 213964 - DNA, 25 bp, probe
gaagaggagctgactcgggcggctc

SEQ ID NO: 213965 - DNA, 25 bp, probe
gaagaggagctgactcgggcggctc

SEQ ID NO: 213966 - DNA, 25 bp, probe
gaagatggcagacttcggtgtggct

SEQ ID NO: 213967 - DNA, 25 bp, probe
gaagatggcagacttcggtgtggct

SEQ ID NO: 213968 - DNA, 25 bp, probe
gaagaggcagaagccgtgggtgtgc

SEQ ID NO: 213969 - DNA, 25 bp, probe
gaagatgaaagggccggaggtcatg

SEQ ID NO: 213970 - DNA, 25 bp, probe
gaagagaaacctccggtgtgagata

SEQ ID NO: 213971 - DNA, 25 bp, probe
gaagaacaccagcatccgagtggct

SEQ ID NO: 213972 - DNA, 25 bp, probe
gaagcacaagttcatcacacgctac

SEQ ID NO: 213973 - DNA, 25 bp, probe
gaagaccagtgaccacaagcctgtc

SEQ ID NO: 213974 - DNA, 25 bp, probe
gaagagcgagtatccaatgccttac

SEQ ID NO: 213975 - DNA, 25 bp, probe
gaagatggatatgaccagtggctat

SEQ ID NO: 213976 - DNA, 25 bp, probe
gaagatgtgaagaaacagcccttct

SEQ ID NO: 213977 - DNA, 25 bp, probe
gaagatgctcacaaaccacaccttc

SEQ ID NO: 213978 - DNA, 25 bp, probe
gaagatacagcaaaaccagtctatt

SEQ ID NO: 213979 - DNA, 25 bp, probe
gaagatatcatccaagaaagtcgtt

SEQ ID NO: 213980 - DNA, 25 bp, probe
gaagatatcatccaagaaagtcgtt

SEQ ID NO: 213981 - DNA, 25 bp, probe
gaactgttggcccagaagtctttag

SEQ ID NO: 213982 - DNA, 25 bp, probe
gaactgttggcccagaagtctttag

SEQ ID NO: 213983 - DNA, 25 bp, probe
gaagagtttcggcaagcttttcaga

SEQ ID NO: 213984 - DNA, 25 bp, probe
gaagagtttatggcaaagatttttg

SEQ ID NO: 213985 - DNA, 25 bp, probe
gaagagtttatggcaaagatttttg

SEQ ID NO: 213986 - DNA, 25 bp, probe
gaagagctttgtggtgataattttg

SEQ ID NO: 213987 - DNA, 25 bp, probe
gaagagcatttttgtgaagtgggtt

SEQ ID NO: 213988 - DNA, 25 bp, probe
gaagagatttcatgcagaaccagtt

SEQ ID NO: 213989 - DNA, 25 bp, probe
gaagcagtattgtacagaacacggt

SEQ ID NO: 213990 - DNA, 25 bp, probe
gaagacgattgaagattacacggat

SEQ ID NO: 213991 - DNA, 25 bp, probe
gaagatcgtggtgcatccatactgg

SEQ ID NO: 213992 - DNA, 25 bp, probe
gaagatctggtgtagctccttcgga

SEQ ID NO: 213993 - DNA, 25 bp, probe
gaagataagatgtacacgggcagga

SEQ ID NO: 213994 - DNA, 25 bp, probe
gaagatgatttatctgctggcttgg

SEQ ID NO: 213995 - DNA, 25 bp, probe
gaagatgattctaacctgtgcaggg

SEQ ID NO: 213996 - DNA, 25 bp, probe
gaagagactgtatccttcacagggg

SEQ ID NO: 213997 - DNA, 25 bp, probe
gaagcgcaagttctcttaaagggga

SEQ ID NO: 213998 - DNA, 25 bp, probe
gaagccaactatcttttcttaggag

SEQ ID NO: 213999 - DNA, 25 bp, probe
gaagaaaaacttcattgctgtcagc

SEQ ID NO: 214000 - DNA, 25 bp, probe
gaagataaagttaggcaatgcgttg

SEQ ID NO: 214001 - DNA, 25 bp, probe
gaagataaagttaggcaatgcgttg

SEQ ID NO: 214002 - DNA, 25 bp, probe
gaagccaaagttatgcaagggactg

SEQ ID NO: 214003 - DNA, 25 bp, probe
gaagcacaacgacattgacgtgttc

SEQ ID NO: 214004 - DNA, 25 bp, probe
gaagcacaacgacattgacgtgttc

SEQ ID NO: 214005 - DNA, 25 bp, probe
gaagacaacatcactctgaagtgtt

SEQ ID NO: 214006 - DNA, 25 bp, probe
gaagatcagggcagcttaagtggtc

SEQ ID NO: 214007 - DNA, 25 bp, probe
gaagagcaaggaagtgcattagtag

SEQ ID NO: 214008 - DNA, 25 bp, probe
gaagacaaggccctgatcttggtag

SEQ ID NO: 214009 - DNA, 25 bp, probe
gaagaccatggtgtgtgctggaggg

SEQ ID NO: 214010 - DNA, 25 bp, probe
gaagacgacgaggactgctatggca

SEQ ID NO: 214011 - DNA, 25 bp, probe
gaagaagatcctgagcagtatccag

SEQ ID NO: 214012 - DNA, 25 bp, probe
gaagaaatctcaaacagtacccaat

SEQ ID NO: 214013 - DNA, 25 bp, probe
gaagagttcataaacgtagctccta

SEQ ID NO: 214014 - DNA, 25 bp, probe
gaagacttcaagaaagcattccaaa

SEQ ID NO: 214015 - DNA, 25 bp, probe
gaagacattaaatttcctcgaacac

SEQ ID NO: 214016 - DNA, 25 bp, probe
gaagagcttacaacctgccttaaaa

SEQ ID NO: 214017 - DNA, 25 bp, probe
gaagagtgtcagaacaatcagttaa

SEQ ID NO: 214018 - DNA, 25 bp, probe
gaagagtgtcagaacaatcagttaa

SEQ ID NO: 214019 - DNA, 25 bp, probe
gaagagtgtctgcaaatcatgtgga

SEQ ID NO: 214020 - DNA, 25 bp, probe
gaagaatttcaggacatctcggagg

SEQ ID NO: 214021 - DNA, 25 bp, probe
gaagaatcgcttgaacctgtgaggc

SEQ ID NO: 214022 - DNA, 25 bp, probe
gaagatgacccagatcatgtttgag

SEQ ID NO: 214023 - DNA, 25 bp, probe
gaagcaactcatggttcatgctttt

SEQ ID NO: 214024 - DNA, 25 bp, probe
gaagatgttcgcgattatcttctat

SEQ ID NO: 214025 - DNA, 25 bp, probe
gaagagttcgtttacattgcctgcc

SEQ ID NO: 214026 - DNA, 25 bp, probe
gaagactatccttggagattccatc

SEQ ID NO: 214027 - DNA, 25 bp, probe
gaagactatccttggagattccatc

SEQ ID NO: 214028 - DNA, 25 bp, probe
gaagactatccttggagattccatc

SEQ ID NO: 214029 - DNA, 25 bp, probe
gaagagctatccccgatgatgactt

SEQ ID NO: 214030 - DNA, 25 bp, probe
gaagagttcttcacagagacttaaa

SEQ ID NO: 214031 - DNA, 25 bp, probe
gaagagtttctttctagctttgagg

SEQ ID NO: 214032 - DNA, 25 bp, probe
gaagaatttaatatctgtttgaggc

SEQ ID NO: 214033 - DNA, 25 bp, probe
gaagactgccaatatgtctgttagg

SEQ ID NO: 214034 - DNA, 25 bp, probe
gaagagctgctaataattggtgggc

SEQ ID NO: 214035 - DNA, 25 bp, probe
gaagagtcgatgaacacggtgctgg

SEQ ID NO: 214036 - DNA, 25 bp, probe
gaagacattgtaagcagagtggctg

SEQ ID NO: 214037 - DNA, 25 bp, probe
gaagagccgctgagcagattccagg

SEQ ID NO: 214038 - DNA, 25 bp, probe
gaagatcctgcaaagcgatccaagt

SEQ ID NO: 214039 - DNA, 25 bp, probe
gaagatcctgtatgccacatcagac

SEQ ID NO: 214040 - DNA, 25 bp, probe
gaagatgagctggattcccacacca

SEQ ID NO: 214041 - DNA, 25 bp, probe
gaagaacatctcatcccatatgcat

SEQ ID NO: 214042 - DNA, 25 bp, probe
gaagaacttttgccaaatgccacct

SEQ ID NO: 214043 - DNA, 25 bp, probe
gaagagactttgggaaatgagaacc

SEQ ID NO: 214044 - DNA, 25 bp, probe
gaacaaatgtatgaggaatggcccc

SEQ ID NO: 214045 - DNA, 25 bp, probe
gaagcacaaggagacgacacgcgca

SEQ ID NO: 214046 - DNA, 25 bp, probe
gaagatccggaagaacacgtgggct

SEQ ID NO: 214047 - DNA, 25 bp, probe
gaaacgggtcactccatcgatgttc

SEQ ID NO: 214048 - DNA, 25 bp, probe
gaaaatggttccctttatgattatc

SEQ ID NO: 214049 - DNA, 25 bp, probe
gaagaatggtttacactaacattat

SEQ ID NO: 214050 - DNA, 25 bp, probe
gaagaatggaaagagctaatttaca

SEQ ID NO: 214051 - DNA, 25 bp, probe
gaagaatggttcgttaagtttagag

SEQ ID NO: 214052 - DNA, 25 bp, probe
gaagaatggttcgttaagtttagag

SEQ ID NO: 214053 - DNA, 25 bp, probe
gaagactagctttattatggttttg

SEQ ID NO: 214054 - DNA, 25 bp, probe
gaagatgttattttgttgggttttg

SEQ ID NO: 214055 - DNA, 25 bp, probe
gaagacttatttttctgggtctctt

SEQ ID NO: 214056 - DNA, 25 bp, probe
gaagactctaccagactgtgtattc

SEQ ID NO: 214057 - DNA, 25 bp, probe
gaagactctaccagactgtgtattc

SEQ ID NO: 214058 - DNA, 25 bp, probe
gaagacatttccagatctggtgatc

SEQ ID NO: 214059 - DNA, 25 bp, probe
gaagacatttccagatctggtgatc

SEQ ID NO: 214060 - DNA, 25 bp, probe
gaagacgtgatgccaggaccagtcc

SEQ ID NO: 214061 - DNA, 25 bp, probe
gaagacagtgtgtgcggcaagaacg

SEQ ID NO: 214062 - DNA, 25 bp, probe
gaagcttttggaggtgatggatata

SEQ ID NO: 214063 - DNA, 25 bp, probe
gaagctttttgagctcatcctcatg

SEQ ID NO: 214064 - DNA, 25 bp, probe
gaagcagagttgaaggatctccttt

SEQ ID NO: 214065 - DNA, 25 bp, probe
gaagacagtatggcagctttcctca

SEQ ID NO: 214066 - DNA, 25 bp, probe
gaagaagctagccacttctcgcaag

SEQ ID NO: 214067 - DNA, 25 bp, probe
gaagaaagactctattctcaaagtt

SEQ ID NO: 214068 - DNA, 25 bp, probe
gaagagggacacctttaaaggcttg

SEQ ID NO: 214069 - DNA, 25 bp, probe
gaacgaagccacctttgaagaagta

SEQ ID NO: 214070 - DNA, 25 bp, probe
gaagccttgtcagtggttaaaagta

SEQ ID NO: 214071 - DNA, 25 bp, probe
gaagccttttggctataaccagtct

SEQ ID NO: 214072 - DNA, 25 bp, probe
gaagcactttctcttaacttaattt

SEQ ID NO: 214073 - DNA, 25 bp, probe
gaagcactttctcttaacttaattt

SEQ ID NO: 214074 - DNA, 25 bp, probe
gaagagatttcatgtctaactaact

SEQ ID NO: 214075 - DNA, 25 bp, probe
gaagaatttacagctcagactatta

SEQ ID NO: 214076 - DNA, 25 bp, probe
gaagaaggtagcgaccaacctctga

SEQ ID NO: 214077 - DNA, 25 bp, probe
gaagaaggcagaggcgccaacgctt

SEQ ID NO: 214078 - DNA, 25 bp, probe
gaagaaggcagaggcgccaacgctt

SEQ ID NO: 214079 - DNA, 25 bp, probe
gaagagaggagtgggacagtcctct

SEQ ID NO: 214080 - DNA, 25 bp, probe
gaagagagtatggtgctgggtcctt

SEQ ID NO: 214081 - DNA, 25 bp, probe
gaagaactcatccgtggaggccttc

SEQ ID NO: 214082 - DNA, 25 bp, probe
gaagaattctccttgtaagccttga

SEQ ID NO: 214083 - DNA, 25 bp, probe
gaagaatttgacagtattcctagaa

SEQ ID NO: 214084 - DNA, 25 bp, probe
gaagatgatttgttctttccagaag

SEQ ID NO: 214085 - DNA, 25 bp, probe
gaagagatttacttattccaataat

SEQ ID NO: 214086 - DNA, 25 bp, probe
gttgaattaaaattgtcccatttgc

SEQ ID NO: 214087 - DNA, 25 bp, probe
gagtggtaaacaaatctcacctttg

SEQ ID NO: 214088 - DNA, 25 bp, probe
gacagagaaaccaaactaactttag

SEQ ID NO: 214089 - DNA, 25 bp, probe
gaagcagataaccaaactcttgata

SEQ ID NO: 214090 - DNA, 25 bp, probe
gaagacagagcagatcagtctttgt

SEQ ID NO: 214091 - DNA, 25 bp, probe
gaagacgaccattctgatctgtgtg

SEQ ID NO: 214092 - DNA, 25 bp, probe
gaagcacggctgacagctgagtgtg

SEQ ID NO: 214093 - DNA, 25 bp, probe
gaagacagcgatggctgctacgtgc

SEQ ID NO: 214094 - DNA, 25 bp, probe
gaagacagcgatggctgctacgtgc

SEQ ID NO: 214095 - DNA, 25 bp, probe
gaagaaggcatttgccacttgctca

SEQ ID NO: 214096 - DNA, 25 bp, probe
gaagaaggcatttgccacttgctca

SEQ ID NO: 214097 - DNA, 25 bp, probe
gaagaatggaacttgctgtattgca

SEQ ID NO: 214098 - DNA, 25 bp, probe
gaagacgagctatttcagtctatca

SEQ ID NO: 214099 - DNA, 25 bp, probe
gaagcaggcagttgatgtatgttta

SEQ ID NO: 214100 - DNA, 25 bp, probe
gacatgagccgggtgatcttttact

SEQ ID NO: 214101 - DNA, 25 bp, probe
gaagactccagtgatcagtatctac

SEQ ID NO: 214102 - DNA, 25 bp, probe
gaagacctcagtcaattctctactt

SEQ ID NO: 214103 - DNA, 25 bp, probe
gaagaccttcagcaatggcactggt

SEQ ID NO: 214104 - DNA, 25 bp, probe
gaagaccttcagcaatggcactggt

SEQ ID NO: 214105 - DNA, 25 bp, probe
gaagaccttcagcaatggcactggt

SEQ ID NO: 214106 - DNA, 25 bp, probe
gaagaacgtgcacgaggtgaaggac

SEQ ID NO: 214107 - DNA, 25 bp, probe
gaagaactgtggctggaaaatgaga

SEQ ID NO: 214108 - DNA, 25 bp, probe
gaagaactgtggctggaaaatgaga

SEQ ID NO: 214109 - DNA, 25 bp, probe
gaagagtctatgccttggaaatcaa

SEQ ID NO: 214110 - DNA, 25 bp, probe
gaagcccaagatgctgggtatcgaa

SEQ ID NO: 214111 - DNA, 25 bp, probe
gaagacgctagacctgctggtcaca

SEQ ID NO: 214112 - DNA, 25 bp, probe
gaagcatctgattgagacatggtgt

SEQ ID NO: 214113 - DNA, 25 bp, probe
gaagctagacgagcaggcttcttcc

SEQ ID NO: 214114 - DNA, 25 bp, probe
gaagatggcaaagcggtgattcccc

SEQ ID NO: 214115 - DNA, 25 bp, probe
gaagaggaaaccctggacatccctg

SEQ ID NO: 214116 - DNA, 25 bp, probe
gaagagaaagaccagtggggatttg

SEQ ID NO: 214117 - DNA, 25 bp, probe
gaagaaaaacagacggccagacatt

SEQ ID NO: 214118 - DNA, 25 bp, probe
gaagaagaaaatccccgtgacttct

SEQ ID NO: 214119 - DNA, 25 bp, probe
gaagaagaagatatccgtgtctcta

SEQ ID NO: 214120 - DNA, 25 bp, probe
gaagaacaaatattcctcgtgctaa

SEQ ID NO: 214121 - DNA, 25 bp, probe
gaagaacaaatattcctcgtgctaa

SEQ ID NO: 214122 - DNA, 25 bp, probe
gaagaacaaatattcctcgtgctaa

SEQ ID NO: 214123 - DNA, 25 bp, probe
gaagagaacaagcatgcgctcccta

SEQ ID NO: 214124 - DNA, 25 bp, probe
gaagagacacagtctagaggtcctg

SEQ ID NO: 214125 - DNA, 25 bp, probe
gaagaacagagacgtggaggccgga

SEQ ID NO: 214126 - DNA, 25 bp, probe
gaagaacagagacgtggaggccgga

SEQ ID NO: 214127 - DNA, 25 bp, probe
gaagactacagtcgtgatgaggacc

SEQ ID NO: 214128 - DNA, 25 bp, probe
gaagaatgacacagtctgggatctc

SEQ ID NO: 214129 - DNA, 25 bp, probe
gaagaatgacacagtctgggatctc

SEQ ID NO: 214130 - DNA, 25 bp, probe
gaagaggagcctggactaggactcc

SEQ ID NO: 214131 - DNA, 25 bp, probe
gaagcaggacctggctaaagacacg

SEQ ID NO: 214132 - DNA, 25 bp, probe
gaagcagtgagtcggggacagtcac

SEQ ID NO: 214133 - DNA, 25 bp, probe
gaagcagtgggcggcagagatgctg

SEQ ID NO: 214134 - DNA, 25 bp, probe
gaagagctgttcctgcaagagtttc

SEQ ID NO: 214135 - DNA, 25 bp, probe
gaagcagtttgcatcactgactctc

SEQ ID NO: 214136 - DNA, 25 bp, probe
gaagcatggtatgcccatgaatcac

SEQ ID NO: 214137 - DNA, 25 bp, probe
gaagcatttacaggcaatgtacagc

SEQ ID NO: 214138 - DNA, 25 bp, probe
gacagttacctggcagggacgctgg

SEQ ID NO: 214139 - DNA, 25 bp, probe
gacagttacctggcagggacgctgg

SEQ ID NO: 214140 - DNA, 25 bp, probe
gaagacttcctgcaggagtcagcgt

SEQ ID NO: 214141 - DNA, 25 bp, probe
gaagaggtaatcaagagaggaggtg

SEQ ID NO: 214142 - DNA, 25 bp, probe
gaagaggagagagggaacgataatg

SEQ ID NO: 214143 - DNA, 25 bp, probe
gaagaggagagagggaacgataatg

SEQ ID NO: 214144 - DNA, 25 bp, probe
gaaagggatgcttgagtacgaaccg

SEQ ID NO: 214145 - DNA, 25 bp, probe
gaagaagcggcctaggacagaacat

SEQ ID NO: 214146 - DNA, 25 bp, probe
gaagaaggtgcggatggacaaggag

SEQ ID NO: 214147 - DNA, 25 bp, probe
gaagaacctgcaggatagaaagagt

SEQ ID NO: 214148 - DNA, 25 bp, probe
gaagaagctctcgacaatacccgtt

SEQ ID NO: 214149 - DNA, 25 bp, probe
gaagacgtgttggaacacctcattt

SEQ ID NO: 214150 - DNA, 25 bp, probe
gaagacgctggttaatgcatcctgc

SEQ ID NO: 214151 - DNA, 25 bp, probe
gaagaagtggatgacagcagtgctg

SEQ ID NO: 214152 - DNA, 25 bp, probe
gaagaagttatcaacatgcacacat

SEQ ID NO: 214153 - DNA, 25 bp, probe
gaagaagttatcaacatgcacacat

SEQ ID NO: 214154 - DNA, 25 bp, probe
gaagcaagttcactacagcatcaat

SEQ ID NO: 214155 - DNA, 25 bp, probe
gaagagatgtcttctgtgcccagag

SEQ ID NO: 214156 - DNA, 25 bp, probe
gaagagatgtcttctgtgcccagag

SEQ ID NO: 214157 - DNA, 25 bp, probe
gaagagagacagtacatgccctggg

SEQ ID NO: 214158 - DNA, 25 bp, probe
gaagagagagaccctcactgctggg

SEQ ID NO: 214159 - DNA, 25 bp, probe
gaagagcaggacacaatgctgtgga

SEQ ID NO: 214160 - DNA, 25 bp, probe
gaagcaggaaatggcaatgtgattt

SEQ ID NO: 214161 - DNA, 25 bp, probe
gaagaagaaagccttttgttccata

SEQ ID NO: 214162 - DNA, 25 bp, probe
gaagagcagaaacggcttagttcta

SEQ ID NO: 214163 - DNA, 25 bp, probe
gaagcaggctctctggcttaagttt

SEQ ID NO: 214164 - DNA, 25 bp, probe
gaagacctcaaagctatcaagtttt

SEQ ID NO: 214165 - DNA, 25 bp, probe
gaagacttggaacctcaaagcttgt

SEQ ID NO: 214166 - DNA, 25 bp, probe
gaagaatggggtcgtcaaagagttt

SEQ ID NO: 214167 - DNA, 25 bp, probe
gaagaagatgcaggtttaagaagtt

SEQ ID NO: 214168 - DNA, 25 bp, probe
gaagagggcgacaattaggagagcc

SEQ ID NO: 214169 - DNA, 25 bp, probe
gaagaatgggaactctcactggaac

SEQ ID NO: 214170 - DNA, 25 bp, probe
gaagaagggaagctgcatatgatga

SEQ ID NO: 214171 - DNA, 25 bp, probe
gaagaatggacagtgttgcatagca

SEQ ID NO: 214172 - DNA, 25 bp, probe
gaagagcatgtgaagttacaatgag

SEQ ID NO: 214173 - DNA, 25 bp, probe
gaagacagatgaagggagcagattg

SEQ ID NO: 214174 - DNA, 25 bp, probe
gaagagcgatgaaggtggcaaagtg

SEQ ID NO: 214175 - DNA, 25 bp, probe
gaagagcagcagaagtgggttagtc

SEQ ID NO: 214176 - DNA, 25 bp, probe
gaagaccaaagcagttgtcatgctg

SEQ ID NO: 214177 - DNA, 25 bp, probe
gaagacaaagacagtctgtgttgca

SEQ ID NO: 214178 - DNA, 25 bp, probe
gaagaccaagcaaattcgtgaccat

SEQ ID NO: 214179 - DNA, 25 bp, probe
gaagacatcaaaaatggcactgtcc

SEQ ID NO: 214180 - DNA, 25 bp, probe
gaagaccaaggaaagacagtcaggg

SEQ ID NO: 214181 - DNA, 25 bp, probe
gaagagcggaacaaagacagtggaa

SEQ ID NO: 214182 - DNA, 25 bp, probe
gaagaccagaaatacaagtgtgcat

SEQ ID NO: 214183 - DNA, 25 bp, probe
gaagcacctgaataggcaagtcgag

SEQ ID NO: 214184 - DNA, 25 bp, probe
gaagacaccagataggacctctgag

SEQ ID NO: 214185 - DNA, 25 bp, probe
gaagacccaaaacagctttgtctcc

SEQ ID NO: 214186 - DNA, 25 bp, probe
gaagaagcccaaaggagttacattc

SEQ ID NO: 214187 - DNA, 25 bp, probe
gaagaacaagcctggagtctacacc

SEQ ID NO: 214188 - DNA, 25 bp, probe
gaagaagcaaagtaggagtgaagcc

SEQ ID NO: 214189 - DNA, 25 bp, probe
gaaccagggagctgtgggaagccac

SEQ ID NO: 214190 - DNA, 25 bp, probe
gaaccagggagctgtgggaagccac

SEQ ID NO: 214191 - DNA, 25 bp, probe
gaagcacagggagagtgggaaccac

SEQ ID NO: 214192 - DNA, 25 bp, probe
gaagcagcagtcagaaggggaacgg

SEQ ID NO: 214193 - DNA, 25 bp, probe
gaagagagactgcagcagaggcgag

SEQ ID NO: 214194 - DNA, 25 bp, probe
gaagaagaggcacagggctgtgagg

SEQ ID NO: 214195 - DNA, 25 bp, probe
gaagaactgcggatggcgcttgagc

SEQ ID NO: 214196 - DNA, 25 bp, probe
gaagaacgtgttggtggtggatgta

SEQ ID NO: 214197 - DNA, 25 bp, probe
gaagaacgtgttggtggtggatgta

SEQ ID NO: 214198 - DNA, 25 bp, probe
gaagctaccttttgggatgattgct

SEQ ID NO: 214199 - DNA, 25 bp, probe
gaagctaccttttgggatgattgct

SEQ ID NO: 214200 - DNA, 25 bp, probe
gaagcatatgcctacttgtaatttc

SEQ ID NO: 214201 - DNA, 25 bp, probe
gaagcaattgcctatcgtaaattca

SEQ ID NO: 214202 - DNA, 25 bp, probe
gaagctattacatgtggtaactcag

SEQ ID NO: 214203 - DNA, 25 bp, probe
gaagcaatgtactctgctgctagcc

SEQ ID NO: 214204 - DNA, 25 bp, probe
gaagctcttccatctgatatcagca

SEQ ID NO: 214205 - DNA, 25 bp, probe
gaactgattcaaactgtaataagct

SEQ ID NO: 214206 - DNA, 25 bp, probe
gaagctataagtgcatgtggtcaac

SEQ ID NO: 214207 - DNA, 25 bp, probe
gaagctcaaacttcctggtaactca

SEQ ID NO: 214208 - DNA, 25 bp, probe
gaagcctaagcttggctttaatttt

SEQ ID NO: 214209 - DNA, 25 bp, probe
gaaacggggaatctccaatttatat

SEQ ID NO: 214210 - DNA, 25 bp, probe
gaaaagggagagctaccaaattgtt

SEQ ID NO: 214211 - DNA, 25 bp, probe
gaaaatggggagcttcggttattgt

SEQ ID NO: 214212 - DNA, 25 bp, probe
gactaagggtgaaagtggtttagtg

SEQ ID NO: 214213 - DNA, 25 bp, probe
gaagaccaggctacaaggtgttttt

SEQ ID NO: 214214 - DNA, 25 bp, probe
gaagagccagccgtaatggggactc

SEQ ID NO: 214215 - DNA, 25 bp, probe
gaagagccagctgctaagtaccaag

SEQ ID NO: 214216 - DNA, 25 bp, probe
gaagcagactgtggctatgactatg

SEQ ID NO: 214217 - DNA, 25 bp, probe
gaagcataagtgtctcaatatatta

SEQ ID NO: 214218 - DNA, 25 bp, probe
gaagagaaggttgctccatatcata

SEQ ID NO: 214219 - DNA, 25 bp, probe
gaagcaaatgttacactgccttatt

SEQ ID NO: 214220 - DNA, 25 bp, probe
gaagcatacaggaaacttctcgttt

SEQ ID NO: 214221 - DNA, 25 bp, probe
gaagcatgacggacaagtacaggct

SEQ ID NO: 214222 - DNA, 25 bp, probe
gaagcatgatgcagataaagtcggt

SEQ ID NO: 214223 - DNA, 25 bp, probe
gaagcagcatgcagatcagaccgtg

SEQ ID NO: 214224 - DNA, 25 bp, probe
gaagctgtgcaactggagctggtga

SEQ ID NO: 214225 - DNA, 25 bp, probe
gaagcttgcagtgtgcactgcatca

SEQ ID NO: 214226 - DNA, 25 bp, probe
gaagctctgagctaagccttacggg

SEQ ID NO: 214227 - DNA, 25 bp, probe
gaagctccaggaactttaatgagtg

SEQ ID NO: 214228 - DNA, 25 bp, probe
gaagctccaggaactttaatgagtg

SEQ ID NO: 214229 - DNA, 25 bp, probe
gaagacactgggtatagtaatgggg

SEQ ID NO: 214230 - DNA, 25 bp, probe
gaagacactgggtatagtaatgggg

SEQ ID NO: 214231 - DNA, 25 bp, probe
gaagagcacgggtacagcagacagt

SEQ ID NO: 214232 - DNA, 25 bp, probe
gaagagcacgggtacagcagacagt

SEQ ID NO: 214233 - DNA, 25 bp, probe
gaagctccgcttcacatgcagaagt

SEQ ID NO: 214234 - DNA, 25 bp, probe
gaagcaccgtatttcgaatagtgcc

SEQ ID NO: 214235 - DNA, 25 bp, probe
gaagacattgtctgcttgaactctg

SEQ ID NO: 214236 - DNA, 25 bp, probe
gaagaaaacatgtctgtgaacttga

SEQ ID NO: 214237 - DNA, 25 bp, probe
gaagaaagcaatttccaacctgaca

SEQ ID NO: 214238 - DNA, 25 bp, probe
gaagcaaagaactctgcaagacgag

SEQ ID NO: 214239 - DNA, 25 bp, probe
gaagaacttacttctgaaatgaagg

SEQ ID NO: 214240 - DNA, 25 bp, probe
gaagaacattacacaacagatgcca

SEQ ID NO: 214241 - DNA, 25 bp, probe
gaagcaaattgaaggcacaggaata

SEQ ID NO: 214242 - DNA, 25 bp, probe
gaagctttctaaggacattaaacag

SEQ ID NO: 214243 - DNA, 25 bp, probe
gaagccacctaagaatgtttacatg

SEQ ID NO: 214244 - DNA, 25 bp, probe
gaaccaaaccaggtgtgttctacac

SEQ ID NO: 214245 - DNA, 25 bp, probe
gaaccaattccaggtgttggtacat

SEQ ID NO: 214246 - DNA, 25 bp, probe
gaaccatttcctggacattgggcct

SEQ ID NO: 214247 - DNA, 25 bp, probe
gaaccttaccttcaaggagcaagtg

SEQ ID NO: 214248 - DNA, 25 bp, probe
gaacctgtacgtccattatggagaa

SEQ ID NO: 214249 - DNA, 25 bp, probe
gagacttattcgctactacgagaac

SEQ ID NO: 214250 - DNA, 25 bp, probe
gaacctcatacccattctgaagaca

SEQ ID NO: 214251 - DNA, 25 bp, probe
gaagctgcttacgaatttgccgaca

SEQ ID NO: 214252 - DNA, 25 bp, probe
gaagctttcctatggtcctgaagaa

SEQ ID NO: 214253 - DNA, 25 bp, probe
gaagctttcctatggtcctgaagaa

SEQ ID NO: 214254 - DNA, 25 bp, probe
gaactttccattttggcgctattac

SEQ ID NO: 214255 - DNA, 25 bp, probe
gaacctctatgctggggactattac

SEQ ID NO: 214256 - DNA, 25 bp, probe
gaacctttggaggccgttgatgtgg

SEQ ID NO: 214257 - DNA, 25 bp, probe
gaagccggggagggcagttgaggac

SEQ ID NO: 214258 - DNA, 25 bp, probe
gaagcccagacgagtagtgtgagct

SEQ ID NO: 214259 - DNA, 25 bp, probe
gaagcacaagcagagcggcgggagc

SEQ ID NO: 214260 - DNA, 25 bp, probe
gaagcacaagcagagcggcgggagc

SEQ ID NO: 214261 - DNA, 25 bp, probe
gaagacaaagttcgggtcatggcag

SEQ ID NO: 214262 - DNA, 25 bp, probe
gaagaaagcagttacagtcttgtgg

SEQ ID NO: 214263 - DNA, 25 bp, probe
gaagaaatgtgcaccagtgttgctc

SEQ ID NO: 214264 - DNA, 25 bp, probe
gaagacatttgccaacaggtagcat

SEQ ID NO: 214265 - DNA, 25 bp, probe
gaagagcttgtggaaaagaaagttt

SEQ ID NO: 214266 - DNA, 25 bp, probe
gaagactattaataagttatgtttg

SEQ ID NO: 214267 - DNA, 25 bp, probe
gaagacaattaagtccgttatgttt

SEQ ID NO: 214268 - DNA, 25 bp, probe
gaagacttctatgctcggtttgcta

SEQ ID NO: 214269 - DNA, 25 bp, probe
gaagactttattcgtggtcacattt

SEQ ID NO: 214270 - DNA, 25 bp, probe
gaagactggtcttttgtgatggatg

SEQ ID NO: 214271 - DNA, 25 bp, probe
gaagacttgtttttatgatgtgcat

SEQ ID NO: 214272 - DNA, 25 bp, probe
gaagactggtgcatttacagctgtt

SEQ ID NO: 214273 - DNA, 25 bp, probe
gaagactggtgcatttacagctgtt

SEQ ID NO: 214274 - DNA, 25 bp, probe
gaagcattaattacttgtcactttc

SEQ ID NO: 214275 - DNA, 25 bp, probe
gaagcaaatattcctttactaccac

SEQ ID NO: 214276 - DNA, 25 bp, probe
gaagaaatatctcctgctgtttcac

SEQ ID NO: 214277 - DNA, 25 bp, probe
gaagagccaagccacaggctttcca

SEQ ID NO: 214278 - DNA, 25 bp, probe
gaagacagcaatcacggttctgccc

SEQ ID NO: 214279 - DNA, 25 bp, probe
gaagacagcaatcacggttctgccc

SEQ ID NO: 214280 - DNA, 25 bp, probe
gaagacatcaggttgggtcctgccc

SEQ ID NO: 214281 - DNA, 25 bp, probe
gaagcagtatgggtgcagtcccctc

SEQ ID NO: 214282 - DNA, 25 bp, probe
gaagctgtcatgttctgacacccac

SEQ ID NO: 214283 - DNA, 25 bp, probe
gaagctgtttctggagagccacaca

SEQ ID NO: 214284 - DNA, 25 bp, probe
gaagcacgtgtttgagcaggcatcc

SEQ ID NO: 214285 - DNA, 25 bp, probe
gaagacagagtgaagcagggcccag

SEQ ID NO: 214286 - DNA, 25 bp, probe
gaagacacagtgaggggaaccatct

SEQ ID NO: 214287 - DNA, 25 bp, probe
gaagacacaggccagagggtccctg

SEQ ID NO: 214288 - DNA, 25 bp, probe
gaagaacaggcattgcaaggaccct

SEQ ID NO: 214289 - DNA, 25 bp, probe
gaagcaacagaggtgccaggcctca

SEQ ID NO: 214290 - DNA, 25 bp, probe
gaagccacaatgttcttggcccatc

SEQ ID NO: 214291 - DNA, 25 bp, probe
gaagagccagattttgctgagccgc

SEQ ID NO: 214292 - DNA, 25 bp, probe
gaagactccaaaatcatgatctccg

SEQ ID NO: 214293 - DNA, 25 bp, probe
gaagacaccatactcagcaatcaca

SEQ ID NO: 214294 - DNA, 25 bp, probe
gaagaccatatactggcaatcctca

SEQ ID NO: 214295 - DNA, 25 bp, probe
gaagaatcatcacctgtgtacctag

SEQ ID NO: 214296 - DNA, 25 bp, probe
gaagcgcatacgcatgactacatta

SEQ ID NO: 214297 - DNA, 25 bp, probe
gaagactacatcaatgcgaactata

SEQ ID NO: 214298 - DNA, 25 bp, probe
gaagacgcccattgagacactgatc

SEQ ID NO: 214299 - DNA, 25 bp, probe
gaagctgcggctttaaatgctgtcc

SEQ ID NO: 214300 - DNA, 25 bp, probe
gaagcagaggattgctcctcatctg

SEQ ID NO: 214301 - DNA, 25 bp, probe
gaagcaggtacgtcttcacatggca

SEQ ID NO: 214302 - DNA, 25 bp, probe
gaagctgtgctacgtcgccctggac

SEQ ID NO: 214303 - DNA, 25 bp, probe
gaagcggtcagtttggagtggtcca

SEQ ID NO: 214304 - DNA, 25 bp, probe
gaagcggtcagtttggagtggtcca

SEQ ID NO: 214305 - DNA, 25 bp, probe
gaagcaggtcaatgtggtgctggtg

SEQ ID NO: 214306 - DNA, 25 bp, probe
gaagacagtgaaggtcgtgacttgc

SEQ ID NO: 214307 - DNA, 25 bp, probe
gaagaagcgcgaggtctggaccgaa

SEQ ID NO: 214308 - DNA, 25 bp, probe
gaagaagcgcgaggtctggaccgaa

SEQ ID NO: 214309 - DNA, 25 bp, probe
gaagaagccaacctcatgaagaccc

SEQ ID NO: 214310 - DNA, 25 bp, probe
gaagaagccaacctcatgaagaccc

SEQ ID NO: 214311 - DNA, 25 bp, probe
gaagaacatcaagggcatccatacc

SEQ ID NO: 214312 - DNA, 25 bp, probe
gaagaacatcaagggcatccatacc

SEQ ID NO: 214313 - DNA, 25 bp, probe
gaagacatccagatgagtcaatacc

SEQ ID NO: 214314 - DNA, 25 bp, probe
gaagacctcaagtagcaaagactct

SEQ ID NO: 214315 - DNA, 25 bp, probe
gaagaatctgaagcaaaaactggac

SEQ ID NO: 214316 - DNA, 25 bp, probe
gaagaatgtaaatcaggatcctgga

SEQ ID NO: 214317 - DNA, 25 bp, probe
gaagaatgtaaatcaggatcctgga

SEQ ID NO: 214318 - DNA, 25 bp, probe
gaagcggaacaagaagatcctggac

SEQ ID NO: 214319 - DNA, 25 bp, probe
gaagcaggtgagcgaaagaactcag

SEQ ID NO: 214320 - DNA, 25 bp, probe
gaagcaggtggtggaggagccgtca

SEQ ID NO: 214321 - DNA, 25 bp, probe
gaagcgccggagcaagaggctgtac

SEQ ID NO: 214322 - DNA, 25 bp, probe
gaagcgggggaaatacgtggtctgc

SEQ ID NO: 214323 - DNA, 25 bp, probe
gaagaagggttacatcgtaggcatc

SEQ ID NO: 214324 - DNA, 25 bp, probe
gaagaagggtgtcaacgtcacgcca

SEQ ID NO: 214325 - DNA, 25 bp, probe
gaagaagggtgtcaacgtcacgcca

SEQ ID NO: 214326 - DNA, 25 bp, probe
gaagaatggggttcaacttgacgct

SEQ ID NO: 214327 - DNA, 25 bp, probe
gaaaaggcatggtgacccatgacca

SEQ ID NO: 214328 - DNA, 25 bp, probe
gaagaaacggcagtgaaacacacac

SEQ ID NO: 214329 - DNA, 25 bp, probe
gaagcaaacaatgctctaatcacaa

SEQ ID NO: 214330 - DNA, 25 bp, probe
gaagcaggaaagttattatacaatg

SEQ ID NO: 214331 - DNA, 25 bp, probe
gaagcaggtttattttttccagcac

SEQ ID NO: 214332 - DNA, 25 bp, probe
gaagcagtgttccattttcttcctc

SEQ ID NO: 214333 - DNA, 25 bp, probe
gaagcagttacctagttccttcatt

SEQ ID NO: 214334 - DNA, 25 bp, probe
gaagaatctccagagggccatatcc

SEQ ID NO: 214335 - DNA, 25 bp, probe
gaagcaactgtctgagatggccaac

SEQ ID NO: 214336 - DNA, 25 bp, probe
gaagcaacgtatggcaggacaaatg

SEQ ID NO: 214337 - DNA, 25 bp, probe
gaagaactgtatgggtatctgaaga

SEQ ID NO: 214338 - DNA, 25 bp, probe
gaagaagctggcattgtttacagaa

SEQ ID NO: 214339 - DNA, 25 bp, probe
gaagaagggacacctttcacagcta

SEQ ID NO: 214340 - DNA, 25 bp, probe
gaagaagggacacctttcacagcta

SEQ ID NO: 214341 - DNA, 25 bp, probe
gaagcacgggacacatgtttcacat

SEQ ID NO: 214342 - DNA, 25 bp, probe
gaagcacgggacacatgtttcacat

SEQ ID NO: 214343 - DNA, 25 bp, probe
gaaccaggagtcagctgtactagca

SEQ ID NO: 214344 - DNA, 25 bp, probe
gaagaagagatgtaccttcaattga

SEQ ID NO: 214345 - DNA, 25 bp, probe
gaagaagagatgtaccttcaattga

SEQ ID NO: 214346 - DNA, 25 bp, probe
gaagaaacagaacctctctagctaa

SEQ ID NO: 214347 - DNA, 25 bp, probe
gaagaaacagaacctctctagctaa

SEQ ID NO: 214348 - DNA, 25 bp, probe
gaagaaagcaaactgatcccactca

SEQ ID NO: 214349 - DNA, 25 bp, probe
gaagcagaagacaagttcacagcct

SEQ ID NO: 214350 - DNA, 25 bp, probe
gaagacaaaacaatatgcatcagga

SEQ ID NO: 214351 - DNA, 25 bp, probe
gaagacaaaacaatatgcatcagga

SEQ ID NO: 214352 - DNA, 25 bp, probe
gaagcatcaaagccttagaccagat

SEQ ID NO: 214353 - DNA, 25 bp, probe
gaagcatcaaagccttagaccagat

SEQ ID NO: 214354 - DNA, 25 bp, probe
gaagaaaatggcaacagcgacaaga

SEQ ID NO: 214355 - DNA, 25 bp, probe
gaagactacttcactgctacagagc

SEQ ID NO: 214356 - DNA, 25 bp, probe
gaagactacttcactgctacagagc

SEQ ID NO: 214357 - DNA, 25 bp, probe
gaagacatacatctttgctggagac

SEQ ID NO: 214358 - DNA, 25 bp, probe
gaagaatgagtctactttggagaca

SEQ ID NO: 214359 - DNA, 25 bp, probe
gaagacatggaaactcttgaggaaa

SEQ ID NO: 214360 - DNA, 25 bp, probe
gaagacatggaaactcttgaggaaa

SEQ ID NO: 214361 - DNA, 25 bp, probe
gaagacatgagcttttctcgcagga

SEQ ID NO: 214362 - DNA, 25 bp, probe
gaagaagcagcactttctgttgata

SEQ ID NO: 214363 - DNA, 25 bp, probe
gaagacagccagtggtggtgattac

SEQ ID NO: 214364 - DNA, 25 bp, probe
gaagactgccagatttcggcatttc

SEQ ID NO: 214365 - DNA, 25 bp, probe
gaagcagtccagagtctaggcaatt

SEQ ID NO: 214366 - DNA, 25 bp, probe
gaagcagttcttagtagaggcattt

SEQ ID NO: 214367 - DNA, 25 bp, probe
gaagcagctgtgtatttaaggaaac

SEQ ID NO: 214368 - DNA, 25 bp, probe
gaagcagctgtgtatttaaggaaac

SEQ ID NO: 214369 - DNA, 25 bp, probe
gaacagattcgttggaagcttaact

SEQ ID NO: 214370 - DNA, 25 bp, probe
gaactatatgctgtggaccgtcaac

SEQ ID NO: 214371 - DNA, 25 bp, probe
gaagctattgcctaaatcagcgtca

SEQ ID NO: 214372 - DNA, 25 bp, probe
gaagctttgccattagatctagaca

SEQ ID NO: 214373 - DNA, 25 bp, probe
gaagccctccaatatgctagtaaac

SEQ ID NO: 214374 - DNA, 25 bp, probe
gaacccgctatatcagtttcagtat

SEQ ID NO: 214375 - DNA, 25 bp, probe
gaactcctttaagggtctcagttag

SEQ ID NO: 214376 - DNA, 25 bp, probe
gttccccttcaaggagcctgaaaag

SEQ ID NO: 214377 - DNA, 25 bp, probe
gtttccctacaagaactgcaagacg

SEQ ID NO: 214378 - DNA, 25 bp, probe
gtttccctacaagaactgcaagacg

SEQ ID NO: 214379 - DNA, 25 bp, probe
gtttccctacaagaactgcaagacg

SEQ ID NO: 214380 - DNA, 25 bp, probe
gtttccctacaagaactgcaagacg

SEQ ID NO: 214381 - DNA, 25 bp, probe
gtactacacttctgaaacttaacgt

SEQ ID NO: 214382 - DNA, 25 bp, probe
gacacccacttagaaagttaactgt

SEQ ID NO: 214383 - DNA, 25 bp, probe
gaagcccactccggaaactaaagtg

SEQ ID NO: 214384 - DNA, 25 bp, probe
gaactccataccgaactccgaagag

SEQ ID NO: 214385 - DNA, 25 bp, probe
gaacctaaaggcagatccagaaagt

SEQ ID NO: 214386 - DNA, 25 bp, probe
gaacgtccagtgctggaccagcaat

SEQ ID NO: 214387 - DNA, 25 bp, probe
gaactacctgtgggcaccgagaatg

SEQ ID NO: 214388 - DNA, 25 bp, probe
gaagccccaggggcactaagcagag

SEQ ID NO: 214389 - DNA, 25 bp, probe
gaagcaaccggaccctgagagaaga

SEQ ID NO: 214390 - DNA, 25 bp, probe
gaagcacacatagacacccaaaaga

SEQ ID NO: 214391 - DNA, 25 bp, probe
gaagcacacatagacacccaaaaga

SEQ ID NO: 214392 - DNA, 25 bp, probe
gaagaaacagaagacgccaacagaa

SEQ ID NO: 214393 - DNA, 25 bp, probe
gaagcaagaaagaaacccgacagag

SEQ ID NO: 214394 - DNA, 25 bp, probe
gaagaagcgcaaagtaaacggcaag

SEQ ID NO: 214395 - DNA, 25 bp, probe
gaacgagcaggaggtactaaatgca

SEQ ID NO: 214396 - DNA, 25 bp, probe
gaagcaggcggaggacattagagac

SEQ ID NO: 214397 - DNA, 25 bp, probe
gaagcaggaggatcactggaggcca

SEQ ID NO: 214398 - DNA, 25 bp, probe
gaagcaggcggcttgcctggaacag

SEQ ID NO: 214399 - DNA, 25 bp, probe
gaagcaggcggcttgcctggaacag

SEQ ID NO: 214400 - DNA, 25 bp, probe
gaagctggaagcctgccgaaaacag

SEQ ID NO: 214401 - DNA, 25 bp, probe
gaagctggaagcctgccgaaaacag

SEQ ID NO: 214402 - DNA, 25 bp, probe
gaagccgaaattcctagaaatcagg

SEQ ID NO: 214403 - DNA, 25 bp, probe
gaagctggattaggtgtggagaata

SEQ ID NO: 214404 - DNA, 25 bp, probe
gaagctggaacactggctggagacc

SEQ ID NO: 214405 - DNA, 25 bp, probe
gaagctgaccatactagtgaaacac

SEQ ID NO: 214406 - DNA, 25 bp, probe
gaagcagcccatgctctgggaaaca

SEQ ID NO: 214407 - DNA, 25 bp, probe
gaagcagcccatgctctgggaaaca

SEQ ID NO: 214408 - DNA, 25 bp, probe
gaagcagcccatgctctgggaaaca

SEQ ID NO: 214409 - DNA, 25 bp, probe
gaagcactccgagtcatggggagaa

SEQ ID NO: 214410 - DNA, 25 bp, probe
gaagcactccgagtcatggggagaa

SEQ ID NO: 214411 - DNA, 25 bp, probe
gaagcaagtgcgttcagctgctggg

SEQ ID NO: 214412 - DNA, 25 bp, probe
gaagaagacagactcgtgtgacagt

SEQ ID NO: 214413 - DNA, 25 bp, probe
gaagaaggccacatggctgacatta

SEQ ID NO: 214414 - DNA, 25 bp, probe
gaagaagggataatagacacatcaa

SEQ ID NO: 214415 - DNA, 25 bp, probe
gaagaacgatataaagccagccaag

SEQ ID NO: 214416 - DNA, 25 bp, probe
gaagaaaattattgatggagcacat

SEQ ID NO: 214417 - DNA, 25 bp, probe
gaagcagctaatgtaataagcactc

SEQ ID NO: 214418 - DNA, 25 bp, probe
gaagctctaatttatatagtcacct

SEQ ID NO: 214419 - DNA, 25 bp, probe
gaagcactataatattgttcccata

SEQ ID NO: 214420 - DNA, 25 bp, probe
gaagcactataatattgttcccata

SEQ ID NO: 214421 - DNA, 25 bp, probe
gaagcaacaagtcattttaccaaga

SEQ ID NO: 214422 - DNA, 25 bp, probe
gaagcactcaaacagtttaagcaaa

SEQ ID NO: 214423 - DNA, 25 bp, probe
gaacaacgaagctgatcctaaaagt

SEQ ID NO: 214424 - DNA, 25 bp, probe
gaaccaagagtgtgactgccaaaac

SEQ ID NO: 214425 - DNA, 25 bp, probe
gaagccaccgtgtggttctttcaca

SEQ ID NO: 214426 - DNA, 25 bp, probe
gaagaaacaggatggctttctgtag

SEQ ID NO: 214427 - DNA, 25 bp, probe
gaagctaaaaattgctctggcctta

SEQ ID NO: 214428 - DNA, 25 bp, probe
gaagctagaatatagatccctttaa

SEQ ID NO: 214429 - DNA, 25 bp, probe
gaagaagagagacggcacacctggt

SEQ ID NO: 214430 - DNA, 25 bp, probe
gaagaataaagcctcatatccagga

SEQ ID NO: 214431 - DNA, 25 bp, probe
gaagaataaagcctcatatccagga

SEQ ID NO: 214432 - DNA, 25 bp, probe
gaagaaaagcagaacatcccaggag

SEQ ID NO: 214433 - DNA, 25 bp, probe
gaagaagacagttacctggcaggga

SEQ ID NO: 214434 - DNA, 25 bp, probe
gaagaatggcatgaacctgggaggt

SEQ ID NO: 214435 - DNA, 25 bp, probe
gaagcagggatggacaaccgtaggg

SEQ ID NO: 214436 - DNA, 25 bp, probe
gaagcagcggtcagcagacaaggag

SEQ ID NO: 214437 - DNA, 25 bp, probe
gaagcagcggtcagcagacaaggag

SEQ ID NO: 214438 - DNA, 25 bp, probe
gaagcagctcaggaaagcacaagga

SEQ ID NO: 214439 - DNA, 25 bp, probe
gaagcagcataggaacaataagaac

SEQ ID NO: 214440 - DNA, 25 bp, probe
gaagacaatgagtacacagcaagac

SEQ ID NO: 214441 - DNA, 25 bp, probe
gaagaagcagcggtcagcagacaag

SEQ ID NO: 214442 - DNA, 25 bp, probe
gaagaatgctctggctacggagcag

SEQ ID NO: 214443 - DNA, 25 bp, probe
gaagaatgctctggctacggagcag

SEQ ID NO: 214444 - DNA, 25 bp, probe
gaagcagatgctgcgcaccaggagc

SEQ ID NO: 214445 - DNA, 25 bp, probe
gaagcagatgctgcgcaccaggagc

SEQ ID NO: 214446 - DNA, 25 bp, probe
gaagcagatgcgtgcacggaggaag

SEQ ID NO: 214447 - DNA, 25 bp, probe
gaagcatcaccatgcatggtggcga

SEQ ID NO: 214448 - DNA, 25 bp, probe
gaagctcacagcatgatgggcaaga

SEQ ID NO: 214449 - DNA, 25 bp, probe
gaagcgcaggccttgctggaaggct

SEQ ID NO: 214450 - DNA, 25 bp, probe
gaagcagcaattctgtggtacatgc

SEQ ID NO: 214451 - DNA, 25 bp, probe
gaagcagcactttctgttgataatg

SEQ ID NO: 214452 - DNA, 25 bp, probe
gaagcagccttactattcatagaag

SEQ ID NO: 214453 - DNA, 25 bp, probe
gaagcagccttactattcatagaag

SEQ ID NO: 214454 - DNA, 25 bp, probe
gaagcaccctaatgtgattgcattg

SEQ ID NO: 214455 - DNA, 25 bp, probe
gaagcaccctaatgtgattgcattg

SEQ ID NO: 214456 - DNA, 25 bp, probe
gaagcaacccaaatgttcatcaatg

SEQ ID NO: 214457 - DNA, 25 bp, probe
gaaccacccaaatatcatcaagtat

SEQ ID NO: 214458 - DNA, 25 bp, probe
gaaccacagcctgaaatctactgga

SEQ ID NO: 214459 - DNA, 25 bp, probe
gaacgcacaggctattagtcatgat

SEQ ID NO: 214460 - DNA, 25 bp, probe
gaagctcaagagtcttggtctgatc

SEQ ID NO: 214461 - DNA, 25 bp, probe
gaagccacagatattggttttggta

SEQ ID NO: 214462 - DNA, 25 bp, probe
gaaccacatttattggattttcctt

SEQ ID NO: 214463 - DNA, 25 bp, probe
gaagccctttattgacatggttcta

SEQ ID NO: 214464 - DNA, 25 bp, probe
gaacccttgttttctgaaatctaat

SEQ ID NO: 214465 - DNA, 25 bp, probe
gaacctttgctacaagaaattccag

SEQ ID NO: 214466 - DNA, 25 bp, probe
gaaccagaagtaaaagtaatcccag

SEQ ID NO: 214467 - DNA, 25 bp, probe
tggcacggaggtataaccccaacga

SEQ ID NO: 214468 - DNA, 25 bp, probe
ggcacggaggtataaccccaacgag

SEQ ID NO: 214469 - DNA, 25 bp, probe
gaacgtgctggtcaagagtcccaac

SEQ ID NO: 214470 - DNA, 25 bp, probe
gaacagtttggccaagatggaccca

SEQ ID NO: 214471 - DNA, 25 bp, probe
gaactgagttgcgacaagtttcccc

SEQ ID NO: 214472 - DNA, 25 bp, probe
gaagctagggggtgtttctcagcac

SEQ ID NO: 214473 - DNA, 25 bp, probe
gaaaagggtcggggattctcagtcg

SEQ ID NO: 214474 - DNA, 25 bp, probe
tgaaaatcgggcccggaattcagtt

SEQ ID NO: 214475 - DNA, 25 bp, probe
gaagaatcctgagctcgccaataag

SEQ ID NO: 214476 - DNA, 25 bp, probe
gaagaattctacatgctcacaagga

SEQ ID NO: 214477 - DNA, 25 bp, probe
gaagcatctagtacttatcaaagaa

SEQ ID NO: 214478 - DNA, 25 bp, probe
gaagcatctagtacttatcaaagaa

SEQ ID NO: 214479 - DNA, 25 bp, probe
gaagcttcgttcctgaggaagaaaa

SEQ ID NO: 214480 - DNA, 25 bp, probe
gaaccatcatttcacagttaaaaga

SEQ ID NO: 214481 - DNA, 25 bp, probe
gaaccatcatttcacagttaaaaga

SEQ ID NO: 214482 - DNA, 25 bp, probe
gaacctcttcacaacagtatcaaca

SEQ ID NO: 214483 - DNA, 25 bp, probe
gaacctagcctccaagattgcagac

SEQ ID NO: 214484 - DNA, 25 bp, probe
gaagcctccttcagagattcagagc

SEQ ID NO: 214485 - DNA, 25 bp, probe
gaagcaatgcctatactatcacaac

SEQ ID NO: 214486 - DNA, 25 bp, probe
gaagcaatgcctatactatcacaac

SEQ ID NO: 214487 - DNA, 25 bp, probe
gaagcaaagcatatcactctcagca

SEQ ID NO: 214488 - DNA, 25 bp, probe
gaagcaaagcatatcactctcagca

SEQ ID NO: 214489 - DNA, 25 bp, probe
gaagcatagaaaatccctatgtgcc

SEQ ID NO: 214490 - DNA, 25 bp, probe
gaagctgaatatatacgtagtcatg

SEQ ID NO: 214491 - DNA, 25 bp, probe
gaagctgaatatatacgtagtcatg

SEQ ID NO: 214492 - DNA, 25 bp, probe
gaagcagaaactaactaaacaggaa

SEQ ID NO: 214493 - DNA, 25 bp, probe
gaagcaagtacaatgttaaccctaa

SEQ ID NO: 214494 - DNA, 25 bp, probe
gaaaagtacgagtggcccctagagc

SEQ ID NO: 214495 - DNA, 25 bp, probe
gaacaagtaccgcctgggacggaag

SEQ ID NO: 214496 - DNA, 25 bp, probe
gaacgggaaaggcgagtcagggagt

SEQ ID NO: 214497 - DNA, 25 bp, probe
gaactagggaagagggtcttggtga

SEQ ID NO: 214498 - DNA, 25 bp, probe
gaaccatgggaaacccagcttctgg

SEQ ID NO: 214499 - DNA, 25 bp, probe
gaacccagaaaactgcaagtttagg

SEQ ID NO: 214500 - DNA, 25 bp, probe
gaacccagaaaactgcaagtttagg

SEQ ID NO: 214501 - DNA, 25 bp, probe
gaagccggtcaagttccaggttgat

SEQ ID NO: 214502 - DNA, 25 bp, probe
gaagccggtcaagttccaggttgat

SEQ ID NO: 214503 - DNA, 25 bp, probe
gaagccaatgtcacctcagaggttt

SEQ ID NO: 214504 - DNA, 25 bp, probe
gaagccagggtgttctaaactcttt

SEQ ID NO: 214505 - DNA, 25 bp, probe
gaagctgcaggtatttaagcaatct

SEQ ID NO: 214506 - DNA, 25 bp, probe
gaagctcggaaaaacaaccatcatt

SEQ ID NO: 214507 - DNA, 25 bp, probe
gaagcactggaaaaccgatcgtctc

SEQ ID NO: 214508 - DNA, 25 bp, probe
gaagcacaggagagaccagtccttc

SEQ ID NO: 214509 - DNA, 25 bp, probe
gaagccatgggataaagatgcctgg

SEQ ID NO: 214510 - DNA, 25 bp, probe
gaagcctgccgaaaacaggagcaaa

SEQ ID NO: 214511 - DNA, 25 bp, probe
gaagcaccgctgaaaatttgtggag

SEQ ID NO: 214512 - DNA, 25 bp, probe
gaagcaccgctgaaaatttgtggag

SEQ ID NO: 214513 - DNA, 25 bp, probe
gaagcagccagtgaactttgtcacg

SEQ ID NO: 214514 - DNA, 25 bp, probe
gaagcagccctatgacttgtatgac

SEQ ID NO: 214515 - DNA, 25 bp, probe
gaagcatttctgatactttctgtca

SEQ ID NO: 214516 - DNA, 25 bp, probe
gaagcattcttgacatgagcccttt

SEQ ID NO: 214517 - DNA, 25 bp, probe
gaagcattcgagacagaaccttgtt

SEQ ID NO: 214518 - DNA, 25 bp, probe
gaagcattcgagacagaaccttgtt

SEQ ID NO: 214519 - DNA, 25 bp, probe
gaagaatcaacagggacacttttta

SEQ ID NO: 214520 - DNA, 25 bp, probe
gaagaatcaacagggacacttttta

SEQ ID NO: 214521 - DNA, 25 bp, probe
gaagaatcaaccggacctgttgcta

SEQ ID NO: 214522 - DNA, 25 bp, probe
gaaccatgaaccgagactcttctct

SEQ ID NO: 214523 - DNA, 25 bp, probe
gaaccagggcaaggtgtcttcccta

SEQ ID NO: 214524 - DNA, 25 bp, probe
gaaccagggcaaggtgtcttcccta

SEQ ID NO: 214525 - DNA, 25 bp, probe
gaaccaaaaatccgatcacctcgaa

SEQ ID NO: 214526 - DNA, 25 bp, probe
gttcccaaatttcatacctatcatc

SEQ ID NO: 214527 - DNA, 25 bp, probe
gtacccccagtaaagagctttctca

SEQ ID NO: 214528 - DNA, 25 bp, probe
gaacctaccagttaaaatctcctca

SEQ ID NO: 214529 - DNA, 25 bp, probe
gaaccagagccatagaattatttta

SEQ ID NO: 214530 - DNA, 25 bp, probe
gaaccacctgcctatattttttgtt

SEQ ID NO: 214531 - DNA, 25 bp, probe
gaacgtctgccctatcaactttcga

SEQ ID NO: 214532 - DNA, 25 bp, probe
gaacgctggatccattccaaatatg

SEQ ID NO: 214533 - DNA, 25 bp, probe
gaagcagctgaagcagcccgcatat

SEQ ID NO: 214534 - DNA, 25 bp, probe
gaagcagctgaagcagcccgcatat

SEQ ID NO: 214535 - DNA, 25 bp, probe
gaagcatctgaatcatgtccactct

SEQ ID NO: 214536 - DNA, 25 bp, probe
gaagcactggatccaaagcatgtct

SEQ ID NO: 214537 - DNA, 25 bp, probe
gaagcactgatgccaaggatgattt

SEQ ID NO: 214538 - DNA, 25 bp, probe
gaagcactgatgccaaggatgattt

SEQ ID NO: 214539 - DNA, 25 bp, probe
gaagcagcttcacactctgcattac

SEQ ID NO: 214540 - DNA, 25 bp, probe
gaagcagtcctttctcatattgaga

SEQ ID NO: 214541 - DNA, 25 bp, probe
gaagctgtcttttatcattagaaca

SEQ ID NO: 214542 - DNA, 25 bp, probe
gaagcatttattctactgaaggcac

SEQ ID NO: 214543 - DNA, 25 bp, probe
gaagcaattgattttattgactgcg

SEQ ID NO: 214544 - DNA, 25 bp, probe
gaagcacattgtcatctttgccatg

SEQ ID NO: 214545 - DNA, 25 bp, probe
gaagccatgtctcactgtttaaata

SEQ ID NO: 214546 - DNA, 25 bp, probe
gaagccatgtctcactgtttaaata

SEQ ID NO: 214547 - DNA, 25 bp, probe
gaagcagcagactcgtgtaattaaa

SEQ ID NO: 214548 - DNA, 25 bp, probe
gaagcacagtaccgatttatctata

SEQ ID NO: 214549 - DNA, 25 bp, probe
gaagcacagaagtctattaacatat

SEQ ID NO: 214550 - DNA, 25 bp, probe
gaaccagaggacattgaaaaagact

SEQ ID NO: 214551 - DNA, 25 bp, probe
gaaccaggcaacttgggaactagac

SEQ ID NO: 214552 - DNA, 25 bp, probe
gaagcaaacaacagtggagtcataa

SEQ ID NO: 214553 - DNA, 25 bp, probe
gaagcaaaacagaaggatgtgtcaa

SEQ ID NO: 214554 - DNA, 25 bp, probe
gaaccgcaacatataatggccctcc

SEQ ID NO: 214555 - DNA, 25 bp, probe
gaaccgcaacatataatggccctcc

SEQ ID NO: 214556 - DNA, 25 bp, probe
gaacctgaaatttactgggtcactc

SEQ ID NO: 214557 - DNA, 25 bp, probe
gaacttatactaaatcaggggacca

SEQ ID NO: 214558 - DNA, 25 bp, probe
gaacttaacattttcctgaggacta

SEQ ID NO: 214559 - DNA, 25 bp, probe
gaagcttgacgcaccaagcggaact

SEQ ID NO: 214560 - DNA, 25 bp, probe
gaagcttgacgcaccaagcggaact

SEQ ID NO: 214561 - DNA, 25 bp, probe
gaagcttgaagctgtgcaactggag

SEQ ID NO: 214562 - DNA, 25 bp, probe
gaagctgaaatgcaggaagtggtgg

SEQ ID NO: 214563 - DNA, 25 bp, probe
gaagcgtatcagcgtaagaggtggc

SEQ ID NO: 214564 - DNA, 25 bp, probe
gaagcacctcaacctagaggagtgg

SEQ ID NO: 214565 - DNA, 25 bp, probe
gaacccttacctaagtatgtgattg

SEQ ID NO: 214566 - DNA, 25 bp, probe
gaagcattctgttcttaacctgtat

SEQ ID NO: 214567 - DNA, 25 bp, probe
gaagcagagggcctataacctgagt

SEQ ID NO: 214568 - DNA, 25 bp, probe
gaagcagaaacatgctttcctagct

SEQ ID NO: 214569 - DNA, 25 bp, probe
gacatcaaaaatggcactgtcccct

SEQ ID NO: 214570 - DNA, 25 bp, probe
gaaccaagacagcacagtgcccctg

SEQ ID NO: 214571 - DNA, 25 bp, probe
gaaactgagtcagagcggggcgtgc

SEQ ID NO: 214572 - DNA, 25 bp, probe
gaacctgagaagaggctgggcgtga

SEQ ID NO: 214573 - DNA, 25 bp, probe
gaacctccaacagggaaggctctgt

SEQ ID NO: 214574 - DNA, 25 bp, probe
gaagcccccaagtaagaagtctgag

SEQ ID NO: 214575 - DNA, 25 bp, probe
gaagcccccaagtaagaagtctgag

SEQ ID NO: 214576 - DNA, 25 bp, probe
gaagctgctcgctcagaaatacaag

SEQ ID NO: 214577 - DNA, 25 bp, probe
gaagctgctcgctcagaaatacaag

SEQ ID NO: 214578 - DNA, 25 bp, probe
gaagctgctcgctcagaaatacaag

SEQ ID NO: 214579 - DNA, 25 bp, probe
gaagctgacagctcagaggcacctg

SEQ ID NO: 214580 - DNA, 25 bp, probe
gaagctcacagtgaggagcatcact

SEQ ID NO: 214581 - DNA, 25 bp, probe
gaagctgcaagaagagtgtctgcaa

SEQ ID NO: 214582 - DNA, 25 bp, probe
gaagctatctgctgagtgtgctaaa

SEQ ID NO: 214583 - DNA, 25 bp, probe
gaagctatgctgggcaattctggca

SEQ ID NO: 214584 - DNA, 25 bp, probe
gaagctcatggtcaagatcggggtc

SEQ ID NO: 214585 - DNA, 25 bp, probe
gaagcacgaactcgagacggcggac

SEQ ID NO: 214586 - DNA, 25 bp, probe
gaagcagcgttcctgaagtggccga

SEQ ID NO: 214587 - DNA, 25 bp, probe
gaagctggttctccagaaggctctg

SEQ ID NO: 214588 - DNA, 25 bp, probe
gaagctggttctccagaaggctctg

SEQ ID NO: 214589 - DNA, 25 bp, probe
gaagcagttcacttaaaggccatga

SEQ ID NO: 214590 - DNA, 25 bp, probe
gaagcagttcacttaaaggccatga

SEQ ID NO: 214591 - DNA, 25 bp, probe
gaagcgttactacagcatctgccag

SEQ ID NO: 214592 - DNA, 25 bp, probe
gaagcagtcaacaaagcaatcacca

SEQ ID NO: 214593 - DNA, 25 bp, probe
gaagcagtcaacaaagcaatcacca

SEQ ID NO: 214594 - DNA, 25 bp, probe
gaagcagtcaccaagataatctgag

SEQ ID NO: 214595 - DNA, 25 bp, probe
gaagcagatatccaaagggtgcagc

SEQ ID NO: 214596 - DNA, 25 bp, probe
gaagcgcatcatggaagtggtgggc

SEQ ID NO: 214597 - DNA, 25 bp, probe
gaagctgcttcggggggtgagcaaa

SEQ ID NO: 214598 - DNA, 25 bp, probe
gaagcatgttgtgtgagggatgtca

SEQ ID NO: 214599 - DNA, 25 bp, probe
gaagcatgttgtgtgagggatgtca

SEQ ID NO: 214600 - DNA, 25 bp, probe
gaagcagatcttgtcaaggaacttc

SEQ ID NO: 214601 - DNA, 25 bp, probe
gaacgcatcctgagaggccaacttc

SEQ ID NO: 214602 - DNA, 25 bp, probe
gaacctgccagatggacgctttcat

SEQ ID NO: 214603 - DNA, 25 bp, probe
gaaccacacaagtgcttaattcatt

SEQ ID NO: 214604 - DNA, 25 bp, probe
gaaccacacaagtgcttaattcatt

SEQ ID NO: 214605 - DNA, 25 bp, probe
gaagcctaaggtgcagttagtcata

SEQ ID NO: 214606 - DNA, 25 bp, probe
gaacgttagttggttgtcagtgaac

SEQ ID NO: 214607 - DNA, 25 bp, probe
gaacgttagtctcttgcatggtaag

SEQ ID NO: 214608 - DNA, 25 bp, probe
gaagcagtatacatgcctttggtat

SEQ ID NO: 214609 - DNA, 25 bp, probe
gaagcctgcaccatgttttgaggtt

SEQ ID NO: 214610 - DNA, 25 bp, probe
gaagcctgcaccatgttttgaggtt

SEQ ID NO: 214611 - DNA, 25 bp, probe
gaagcatcggacagtgttgatggag

SEQ ID NO: 214612 - DNA, 25 bp, probe
gaagcagcgggcaggtgtgatgctg

SEQ ID NO: 214613 - DNA, 25 bp, probe
gaagctgagcaccaggggatgagtg

SEQ ID NO: 214614 - DNA, 25 bp, probe
gaagctgtgaccccagcaggatgtc

SEQ ID NO: 214615 - DNA, 25 bp, probe
gaagctgctacagctgcagaacttc

SEQ ID NO: 214616 - DNA, 25 bp, probe
gaagcattacaggatgacagcagcc

SEQ ID NO: 214617 - DNA, 25 bp, probe
gaagcatttcgcgatggacagactc

SEQ ID NO: 214618 - DNA, 25 bp, probe
gaagcatttcgcgatggacagactc

SEQ ID NO: 214619 - DNA, 25 bp, probe
gaagcatgcatggcaggctgtgaca

SEQ ID NO: 214620 - DNA, 25 bp, probe
gaagctcatgtaggtgctatgaagc

SEQ ID NO: 214621 - DNA, 25 bp, probe
gaagctggtggcgtgctaatggatg

SEQ ID NO: 214622 - DNA, 25 bp, probe
gaagctggtggcgtgctaatggatg

SEQ ID NO: 214623 - DNA, 25 bp, probe
gaagcgcgtggtgcgaatgttgctg

SEQ ID NO: 214624 - DNA, 25 bp, probe
gaagcgcgtggtgcgaatgttgctg

SEQ ID NO: 214625 - DNA, 25 bp, probe
gaagcgcctggggttcagagatgag

SEQ ID NO: 214626 - DNA, 25 bp, probe
gaagcacctgaccgtacagatgatg

SEQ ID NO: 214627 - DNA, 25 bp, probe
gaagcactcggctgcaaagtgaggc

SEQ ID NO: 214628 - DNA, 25 bp, probe
gaagcactaggatgttcaggcaggc

SEQ ID NO: 214629 - DNA, 25 bp, probe
gaagcataaagccttctctacgtgc

SEQ ID NO: 214630 - DNA, 25 bp, probe
gaagcaaagtgcccatggtggcggc

SEQ ID NO: 214631 - DNA, 25 bp, probe
gaagcttagagatgaactccttggc

SEQ ID NO: 214632 - DNA, 25 bp, probe
gaagcttagagatgaactccttggc

SEQ ID NO: 214633 - DNA, 25 bp, probe
gaactcagtaataaactccctggcc

SEQ ID NO: 214634 - DNA, 25 bp, probe
gaactcagtaataaactccctggcc

SEQ ID NO: 214635 - DNA, 25 bp, probe
gaaccaccattggacctatcttggc

SEQ ID NO: 214636 - DNA, 25 bp, probe
gaaccaccattggacctatcttggc

SEQ ID NO: 214637 - DNA, 25 bp, probe
gaaccacattgatattctactggcc

SEQ ID NO: 214638 - DNA, 25 bp, probe
gaaccctacaaaatccatggcctgg

SEQ ID NO: 214639 - DNA, 25 bp, probe
gaacctatagcttctaccatgagtt

SEQ ID NO: 214640 - DNA, 25 bp, probe
gagacctcagactcttcacagggtc

SEQ ID NO: 214641 - DNA, 25 bp, probe
gaagcaatagacttcattgactgtg

SEQ ID NO: 214642 - DNA, 25 bp, probe
gaagctataggctcttgttggataa

SEQ ID NO: 214643 - DNA, 25 bp, probe
gaagctataggctcttgttggataa

SEQ ID NO: 214644 - DNA, 25 bp, probe
gaagctcagggtgcatagtaggaga

SEQ ID NO: 214645 - DNA, 25 bp, probe
gaagccgaggacgtgcttggggagc

SEQ ID NO: 214646 - DNA, 25 bp, probe
gaagcaaaggccctcttaatggatg

SEQ ID NO: 214647 - DNA, 25 bp, probe
gaccccaggccttttataggcagga

SEQ ID NO: 214648 - DNA, 25 bp, probe
gaaccgcaccactgttatactggga

SEQ ID NO: 214649 - DNA, 25 bp, probe
gaacctcagttctgtccgacaggtt

SEQ ID NO: 214650 - DNA, 25 bp, probe
gaacctcgaaacgtcttgcgggtgt

SEQ ID NO: 214651 - DNA, 25 bp, probe
gaactttaataattctaccctgtat

SEQ ID NO: 214652 - DNA, 25 bp, probe
gaactttttagattattccaagcct

SEQ ID NO: 214653 - DNA, 25 bp, probe
gaactttttagattattccaagcct

SEQ ID NO: 214654 - DNA, 25 bp, probe
gaaccttgtatacttaccaacagcc

SEQ ID NO: 214655 - DNA, 25 bp, probe
gaaccatatttacctatacggaggc

SEQ ID NO: 214656 - DNA, 25 bp, probe
gaagccttttgaccagaaggaactg

SEQ ID NO: 214657 - DNA, 25 bp, probe
gaagccgtttacaatagactgaatc

SEQ ID NO: 214658 - DNA, 25 bp, probe
gaagctcgattcttaataagtgagt

SEQ ID NO: 214659 - DNA, 25 bp, probe
gaagctacgatgtctaaaagtctgt

SEQ ID NO: 214660 - DNA, 25 bp, probe
gaagcttcgaactcaaaatcatgga

SEQ ID NO: 214661 - DNA, 25 bp, probe
gaagcttcgaactcaaaatcatgga

SEQ ID NO: 214662 - DNA, 25 bp, probe
gaacttctcttttatataaaggcaa

SEQ ID NO: 214663 - DNA, 25 bp, probe
gaactttgccttatcataaacagga

SEQ ID NO: 214664 - DNA, 25 bp, probe
gaacgagttttgagtaatccaggaa

SEQ ID NO: 214665 - DNA, 25 bp, probe
gaacgtgtatttattaatgttcaaa

SEQ ID NO: 214666 - DNA, 25 bp, probe
gaacatgtacatctaatttaatgtc

SEQ ID NO: 214667 - DNA, 25 bp, probe
gaagctttaggtcatatgttcatgt

SEQ ID NO: 214668 - DNA, 25 bp, probe
gaagctgttcagctctcacatgaat

SEQ ID NO: 214669 - DNA, 25 bp, probe
gaagcttgtgcacattcattttttg

SEQ ID NO: 214670 - DNA, 25 bp, probe
gaagcatttggcatttatttgtgag

SEQ ID NO: 214671 - DNA, 25 bp, probe
gaagcatttggcatttatttgtgag

SEQ ID NO: 214672 - DNA, 25 bp, probe
gaagcttgcaggatttgagttgagg

SEQ ID NO: 214673 - DNA, 25 bp, probe
gaagcttgcaggatttgagttgagg

SEQ ID NO: 214674 - DNA, 25 bp, probe
gaagcttcgagagttgtgtgggacc

SEQ ID NO: 214675 - DNA, 25 bp, probe
gaagctctcgagtggctcatcagag

SEQ ID NO: 214676 - DNA, 25 bp, probe
gaagcttgctgagaggccagagaga

SEQ ID NO: 214677 - DNA, 25 bp, probe
gaagcattgcttttggacaaggaag

SEQ ID NO: 214678 - DNA, 25 bp, probe
gaagcagagctggttcaagaaggaa

SEQ ID NO: 214679 - DNA, 25 bp, probe
gaagcgcactgctgttcagataggg

SEQ ID NO: 214680 - DNA, 25 bp, probe
gaagcgcactgctgttcagataggg

SEQ ID NO: 214681 - DNA, 25 bp, probe
gaagctgacagcactacaaaggaga

SEQ ID NO: 214682 - DNA, 25 bp, probe
gaagctgacagcactacaaaggaga

SEQ ID NO: 214683 - DNA, 25 bp, probe
gaagctgaacgacaaagcggccaaa

SEQ ID NO: 214684 - DNA, 25 bp, probe
gaagctgcccaagaaacggaagaag

SEQ ID NO: 214685 - DNA, 25 bp, probe
gaacccaaacaacatcttattgaat

SEQ ID NO: 214686 - DNA, 25 bp, probe
gaactacttaaagctctggattact

SEQ ID NO: 214687 - DNA, 25 bp, probe
gaaccgttattgatccgaatgaact

SEQ ID NO: 214688 - DNA, 25 bp, probe
gaagccagtaaaagatcctgagatg

SEQ ID NO: 214689 - DNA, 25 bp, probe
gaagctcaatgatacaaacatttga

SEQ ID NO: 214690 - DNA, 25 bp, probe
gaagcatctatgttcccaagagttt

SEQ ID NO: 214691 - DNA, 25 bp, probe
gaagcatctatgttcccaagagttt

SEQ ID NO: 214692 - DNA, 25 bp, probe
gaagcttttctgggagaagtttgtt

SEQ ID NO: 214693 - DNA, 25 bp, probe
gaaccttgctttgtgaactgtcttt

SEQ ID NO: 214694 - DNA, 25 bp, probe
gaaccttgcagttctgtgaattttt

SEQ ID NO: 214695 - DNA, 25 bp, probe
gaagccatgtcaaggttaagtcttt

SEQ ID NO: 214696 - DNA, 25 bp, probe
gaagctctatctggtgtttgagttc

SEQ ID NO: 214697 - DNA, 25 bp, probe
gaagctcctggactggattgagggc

SEQ ID NO: 214698 - DNA, 25 bp, probe
gaagctacggagagaagcagccagc

SEQ ID NO: 214699 - DNA, 25 bp, probe
gaagccgggagtggcagacagaatc

SEQ ID NO: 214700 - DNA, 25 bp, probe
gaagcttggtgcagacgatgtaatt

SEQ ID NO: 214701 - DNA, 25 bp, probe
gaagcttgctggtagcacttgctac

SEQ ID NO: 214702 - DNA, 25 bp, probe
gaagctcactgtgagcaatgtgctg

SEQ ID NO: 214703 - DNA, 25 bp, probe
gaagctgcgtgtggcagcgttggtg

SEQ ID NO: 214704 - DNA, 25 bp, probe
gaagctggcttgacatgctgtattc

SEQ ID NO: 214705 - DNA, 25 bp, probe
gaagccactgtcaatgattagatcg

SEQ ID NO: 214706 - DNA, 25 bp, probe
gaactcttcagccatgattagacgt

SEQ ID NO: 214707 - DNA, 25 bp, probe
gaaccgaagcgcaatgtggtggtca

SEQ ID NO: 214708 - DNA, 25 bp, probe
gaagccaagcgggaggggagctgcg

SEQ ID NO: 214709 - DNA, 25 bp, probe
gaagccaagcgggaggggagctgcg

SEQ ID NO: 214710 - DNA, 25 bp, probe
gaagccaagcgggaggggagctgcg

SEQ ID NO: 214711 - DNA, 25 bp, probe
gaagccattcgtgaggtggactcct

SEQ ID NO: 214712 - DNA, 25 bp, probe
gaacctgtcattgggggtcagacct

SEQ ID NO: 214713 - DNA, 25 bp, probe
gaaccagatctacggtttcgagggt

SEQ ID NO: 214714 - DNA, 25 bp, probe
gaaccagcattacaatttgggagag

SEQ ID NO: 214715 - DNA, 25 bp, probe
gaaccagcattacaatttgggagag

SEQ ID NO: 214716 - DNA, 25 bp, probe
gaactcactccctcacggggagaga

SEQ ID NO: 214717 - DNA, 25 bp, probe
gaactcactccctcacggggagaga

SEQ ID NO: 214718 - DNA, 25 bp, probe
gaaccagtccctgaccaggatgagc

SEQ ID NO: 214719 - DNA, 25 bp, probe
gaaccaccacctgatgacaactcag

SEQ ID NO: 214720 - DNA, 25 bp, probe
gaaccccttcaaatgaacaccgaca

SEQ ID NO: 214721 - DNA, 25 bp, probe
gaaagacctgttgtaacccaacaga

SEQ ID NO: 214722 - DNA, 25 bp, probe
gaaagacctgttgtaacccaacaga

SEQ ID NO: 214723 - DNA, 25 bp, probe
gaaaccttacatgttaccaatatca

SEQ ID NO: 214724 - DNA, 25 bp, probe
gagaaaattacttgttaaactctag

SEQ ID NO: 214725 - DNA, 25 bp, probe
gactaatgttactgtccaagttctt

SEQ ID NO: 214726 - DNA, 25 bp, probe
gacttgggcaactgatccaggcttc

SEQ ID NO: 214727 - DNA, 25 bp, probe
gaacgaggactgtgagctcaggatc

SEQ ID NO: 214728 - DNA, 25 bp, probe
gaagctgaaggtacaacatagtgac

SEQ ID NO: 214729 - DNA, 25 bp, probe
gaagctgaaatgtcacttcaaggag

SEQ ID NO: 214730 - DNA, 25 bp, probe
gaagcatcaacattccattcagtgc

SEQ ID NO: 214731 - DNA, 25 bp, probe
gaagctcaagcagcgcatcacagtt

SEQ ID NO: 214732 - DNA, 25 bp, probe
gaagctcaagcagcgcatcacagtt

SEQ ID NO: 214733 - DNA, 25 bp, probe
gaagctgagtcttctgcatcagatt

SEQ ID NO: 214734 - DNA, 25 bp, probe
gaagctgagtcttctgcatcagatt

SEQ ID NO: 214735 - DNA, 25 bp, probe
gaagctgcatgttaagtgccattac

SEQ ID NO: 214736 - DNA, 25 bp, probe
gaaccatgaaaacctctgtgacaac

SEQ ID NO: 214737 - DNA, 25 bp, probe
gaagcctagcaacattgttgtgaaa

SEQ ID NO: 214738 - DNA, 25 bp, probe
gaagcccaagctgaattttaatgac

SEQ ID NO: 214739 - DNA, 25 bp, probe
gaaccccatattcttttacatggct

SEQ ID NO: 214740 - DNA, 25 bp, probe
gaaccccatattcttttacatggct

SEQ ID NO: 214741 - DNA, 25 bp, probe
gaagccgtgaattcagttggttcgt

SEQ ID NO: 214742 - DNA, 25 bp, probe
gaagcctgtgattggtggagtttgg

SEQ ID NO: 214743 - DNA, 25 bp, probe
gaagcctagtagaatatggacttgg

SEQ ID NO: 214744 - DNA, 25 bp, probe
gaagctcctggggaaggaccattgc

SEQ ID NO: 214745 - DNA, 25 bp, probe
gaagccgtggtgggaggacgagtgg

SEQ ID NO: 214746 - DNA, 25 bp, probe
gaactaggcctggtggaaggaggcg

SEQ ID NO: 214747 - DNA, 25 bp, probe
gaactactgctggcagtggaactaa

SEQ ID NO: 214748 - DNA, 25 bp, probe
gaactactaacgtcagaaccaatat

SEQ ID NO: 214749 - DNA, 25 bp, probe
gaacctctaacattggttccaattc

SEQ ID NO: 214750 - DNA, 25 bp, probe
gaaccagtgaaatttgttccacagg

SEQ ID NO: 214751 - DNA, 25 bp, probe
gaactgaggaaaaccttcaaagaga

SEQ ID NO: 214752 - DNA, 25 bp, probe
gaagctgaggagaatatgcctcaaa

SEQ ID NO: 214753 - DNA, 25 bp, probe
gaagcagaggaaactcttaatactt

SEQ ID NO: 214754 - DNA, 25 bp, probe
gaagcagattgatccgtttgatttt

SEQ ID NO: 214755 - DNA, 25 bp, probe
gaagctatttacatatttgttttca

SEQ ID NO: 214756 - DNA, 25 bp, probe
gaagctcaccaaaaactatttcttc

SEQ ID NO: 214757 - DNA, 25 bp, probe
gaagctcaccaaaaactatttcttc

SEQ ID NO: 214758 - DNA, 25 bp, probe
gaagctacacaaacctttctcttcc

SEQ ID NO: 214759 - DNA, 25 bp, probe
gaagcccatttaccattgacgtacc

SEQ ID NO: 214760 - DNA, 25 bp, probe
gaagcgtggttacctctgacgctat

SEQ ID NO: 214761 - DNA, 25 bp, probe
gaagcgtgcagaacggcttacctaa

SEQ ID NO: 214762 - DNA, 25 bp, probe
gaagcaggagcgacggtgaacctgg

SEQ ID NO: 214763 - DNA, 25 bp, probe
gaagcaggagcgacggtgaacctgg

SEQ ID NO: 214764 - DNA, 25 bp, probe
gaagcgagctggatggcaaggcctg

SEQ ID NO: 214765 - DNA, 25 bp, probe
gaagcgtcggccggagatgagccga

SEQ ID NO: 214766 - DNA, 25 bp, probe
gaagcgggccctgatgatgatgaag

SEQ ID NO: 214767 - DNA, 25 bp, probe
gaagcgggcctggaaggagcattgc

SEQ ID NO: 214768 - DNA, 25 bp, probe
gaagcagggcacggagaaggcagac

SEQ ID NO: 214769 - DNA, 25 bp, probe
gaagcgcagtcacctgaaacgagac

SEQ ID NO: 214770 - DNA, 25 bp, probe
gaagctggattgggacaacaggaca

SEQ ID NO: 214771 - DNA, 25 bp, probe
gaagcagtgcgtgtgaaacagcgta

SEQ ID NO: 214772 - DNA, 25 bp, probe
gaagcattctgtggtcaagtaagtt

SEQ ID NO: 214773 - DNA, 25 bp, probe
gaacttattcagacacgtaaatgtt

SEQ ID NO: 214774 - DNA, 25 bp, probe
gaacttattcagacacgtaaatgtt

SEQ ID NO: 214775 - DNA, 25 bp, probe
gaagctcttcaccaactgtcagaag

SEQ ID NO: 214776 - DNA, 25 bp, probe
gaagcatgttcagcattcaggtgat

SEQ ID NO: 214777 - DNA, 25 bp, probe
gaagctttgcccacagggacagtgc

SEQ ID NO: 214778 - DNA, 25 bp, probe
gaagctttgcccacagggacagtgc

SEQ ID NO: 214779 - DNA, 25 bp, probe
gactctttcctcacagggaaggcgc

SEQ ID NO: 214780 - DNA, 25 bp, probe
gaccgagtccccaaggactagtgga

SEQ ID NO: 214781 - DNA, 25 bp, probe
gaactgaaacccaatggcagaaatg

SEQ ID NO: 214782 - DNA, 25 bp, probe
gaagctgaagatgagatagaggaca

SEQ ID NO: 214783 - DNA, 25 bp, probe
gaagctgtgaggcaagagaaacaag

SEQ ID NO: 214784 - DNA, 25 bp, probe
gaagcttggtacacataagaaaaac

SEQ ID NO: 214785 - DNA, 25 bp, probe
gaagctatggctctaaatgagaaaa

SEQ ID NO: 214786 - DNA, 25 bp, probe
gaagctggtgctacaaatgaagaaa

SEQ ID NO: 214787 - DNA, 25 bp, probe
gaagccgctgtcgaaatgggtcgag

SEQ ID NO: 214788 - DNA, 25 bp, probe
gaagctctcgatggacaatgaacgg

SEQ ID NO: 214789 - DNA, 25 bp, probe
gaagctctctgaaccagaaagcaag

SEQ ID NO: 214790 - DNA, 25 bp, probe
gaagcttgcagaaaagacagccaag

SEQ ID NO: 214791 - DNA, 25 bp, probe
gaagctggaggcacaacgcaccaga

SEQ ID NO: 214792 - DNA, 25 bp, probe
gaagctggtggaggaacgcacacag

SEQ ID NO: 214793 - DNA, 25 bp, probe
gaagctgatgatcacaaagcagaca

SEQ ID NO: 214794 - DNA, 25 bp, probe
gaagctgatgatcacaaagcagaca

SEQ ID NO: 214795 - DNA, 25 bp, probe
gaagctcagagaagcaaagtggcag

SEQ ID NO: 214796 - DNA, 25 bp, probe
gaagctgcagaaagccatctctgtc

SEQ ID NO: 214797 - DNA, 25 bp, probe
gaacgaggaatggcactcagataat

SEQ ID NO: 214798 - DNA, 25 bp, probe
gaagcgggagactaacagaaataat

SEQ ID NO: 214799 - DNA, 25 bp, probe
gaacggcgaaccgcaacatataatg

SEQ ID NO: 214800 - DNA, 25 bp, probe
gaacgacaaagcggccaaatcctac

SEQ ID NO: 214801 - DNA, 25 bp, probe
gaagctgaaaaagccagaattgcta

SEQ ID NO: 214802 - DNA, 25 bp, probe
gaagctcagcaaagacccaaatatc

SEQ ID NO: 214803 - DNA, 25 bp, probe
gaagctgagtgaaacccaaagaagt

SEQ ID NO: 214804 - DNA, 25 bp, probe
gaagcgtgttacttacaaagaggtg

SEQ ID NO: 214805 - DNA, 25 bp, probe
gaagctgatgttcctggtaaaagtt

SEQ ID NO: 214806 - DNA, 25 bp, probe
gaagcgatgtggagttagtgaactt

SEQ ID NO: 214807 - DNA, 25 bp, probe
gaagctcatgggaaaattgtgatca

SEQ ID NO: 214808 - DNA, 25 bp, probe
gaagctcaggccatagtttcagaga

SEQ ID NO: 214809 - DNA, 25 bp, probe
gaagctcggtctattgtaatgcaga

SEQ ID NO: 214810 - DNA, 25 bp, probe
gaagccgtatccacttcacaggata

SEQ ID NO: 214811 - DNA, 25 bp, probe
gaaccgcttggaactgtacagaaat

SEQ ID NO: 214812 - DNA, 25 bp, probe
gaaacagctttatcgtagagtgcag

SEQ ID NO: 214813 - DNA, 25 bp, probe
gaaacagctttatcgtagagtgcag

SEQ ID NO: 214814 - DNA, 25 bp, probe
gaagcccttgttgctgtagatgtgc

SEQ ID NO: 214815 - DNA, 25 bp, probe
gaagcccttgttgctgtagatgtgc

SEQ ID NO: 214816 - DNA, 25 bp, probe
gaagccacctgcatttgtgatttca

SEQ ID NO: 214817 - DNA, 25 bp, probe
gaaccaccatcttattcaggattgc

SEQ ID NO: 214818 - DNA, 25 bp, probe
gaaccccttgatctacagcttgagg

SEQ ID NO: 214819 - DNA, 25 bp, probe
gaaagcgcccttcttatgttaggag

SEQ ID NO: 214820 - DNA, 25 bp, probe
gaaagcgcccttcttatgttaggag

SEQ ID NO: 214821 - DNA, 25 bp, probe
gaacggccatgtgttaatgttacga

SEQ ID NO: 214822 - DNA, 25 bp, probe
gaactaccagatcgattactttggg

SEQ ID NO: 214823 - DNA, 25 bp, probe
gaacccccaggttcactgtggggag

SEQ ID NO: 214824 - DNA, 25 bp, probe
gaaccacctcaaaaagtgcggagga

SEQ ID NO: 214825 - DNA, 25 bp, probe
gaaccaccaaaatagtgctcgagtc

SEQ ID NO: 214826 - DNA, 25 bp, probe
gaacaagctaattgggagtccaggc

SEQ ID NO: 214827 - DNA, 25 bp, probe
gaacgacatcaccgaggagtgtagg

SEQ ID NO: 214828 - DNA, 25 bp, probe
gaacagacagcctgaaggggcggcg

SEQ ID NO: 214829 - DNA, 25 bp, probe
gaacgcagcacttcagaatgggatc

SEQ ID NO: 214830 - DNA, 25 bp, probe
gaacgcagcacttcagaatgggatc

SEQ ID NO: 214831 - DNA, 25 bp, probe
gaaccaactgagccaatgccagcag

SEQ ID NO: 214832 - DNA, 25 bp, probe
gaaccaattggaggatgcctgcgag

SEQ ID NO: 214833 - DNA, 25 bp, probe
gaagcgcaatgtggtggtcactgcc

SEQ ID NO: 214834 - DNA, 25 bp, probe
gaagcgcattctttgcagtattcag

SEQ ID NO: 214835 - DNA, 25 bp, probe
gaagccttataccagtgcagtggac

SEQ ID NO: 214836 - DNA, 25 bp, probe
gaagcattccattctcgtggaggag

SEQ ID NO: 214837 - DNA, 25 bp, probe
gaagcattccattctcgtggaggag

SEQ ID NO: 214838 - DNA, 25 bp, probe
gaagcttcaaactgctggatcagat

SEQ ID NO: 214839 - DNA, 25 bp, probe
gaagctatcaatcaccttgcatttc

SEQ ID NO: 214840 - DNA, 25 bp, probe
gaagctatcaatcaccttgcatttc

SEQ ID NO: 214841 - DNA, 25 bp, probe
gaagctgatggacgaccttctgaac

SEQ ID NO: 214842 - DNA, 25 bp, probe
gaagctgtagggactcatcttgcat

SEQ ID NO: 214843 - DNA, 25 bp, probe
gaagctgtagccagccattatatga

SEQ ID NO: 214844 - DNA, 25 bp, probe
gaagctgtagccagcatcttagaca

SEQ ID NO: 214845 - DNA, 25 bp, probe
gaagcttcaggcacatctggagcaa

SEQ ID NO: 214846 - DNA, 25 bp, probe
gaagctcaaagaaatctgtgagaaa

SEQ ID NO: 214847 - DNA, 25 bp, probe
gaaccacaagcaaaccgtgaaaatg

SEQ ID NO: 214848 - DNA, 25 bp, probe
gaacgtaaaggaccgggaggatgtg

SEQ ID NO: 214849 - DNA, 25 bp, probe
gaacgtaaaggaccgggaggatgtg

SEQ ID NO: 214850 - DNA, 25 bp, probe
gaacttttgggacgtggcgttggtg

SEQ ID NO: 214851 - DNA, 25 bp, probe
gaacgtaggtaacatgtggtttctt

SEQ ID NO: 214852 - DNA, 25 bp, probe
gaacagccaggtgaggtgggaggtt

SEQ ID NO: 214853 - DNA, 25 bp, probe
gaagcgccaggtgatggtgggcaag

SEQ ID NO: 214854 - DNA, 25 bp, probe
gaagctccttgtcaggcttggagag

SEQ ID NO: 214855 - DNA, 25 bp, probe
gaacctctgtgtccagatgtttgac

SEQ ID NO: 214856 - DNA, 25 bp, probe
gaacaggcgattccagttcactcag

SEQ ID NO: 214857 - DNA, 25 bp, probe
gaagctgaggaacaatggcatctct

SEQ ID NO: 214858 - DNA, 25 bp, probe
gaactgctgacgggaatggcactgt

SEQ ID NO: 214859 - DNA, 25 bp, probe
gaagctgtggaggagaatggtgtta

SEQ ID NO: 214860 - DNA, 25 bp, probe
gaagcgtggcaggagaggaatgctg

SEQ ID NO: 214861 - DNA, 25 bp, probe
gaagcgtgtgctggagactgaactt

SEQ ID NO: 214862 - DNA, 25 bp, probe
gaagctgtctgagcagctcggaatt

SEQ ID NO: 214863 - DNA, 25 bp, probe
gaagcgacatgagcgcagtgtgaag

SEQ ID NO: 214864 - DNA, 25 bp, probe
gaagctgttgagctcgtgtgcacag

SEQ ID NO: 214865 - DNA, 25 bp, probe
gaagctgtacatgtcagtagaagat

SEQ ID NO: 214866 - DNA, 25 bp, probe
gaagcttagtgcccatatataagtt

SEQ ID NO: 214867 - DNA, 25 bp, probe
gaagcttagtgcccatatataagtt

SEQ ID NO: 214868 - DNA, 25 bp, probe
gaagctgatagaggcttaagaagct

SEQ ID NO: 214869 - DNA, 25 bp, probe
gaagctgatagaggcttaagaagct

SEQ ID NO: 214870 - DNA, 25 bp, probe
gaagcgcaggtcaattaagaagctg

SEQ ID NO: 214871 - DNA, 25 bp, probe
gaacccgtccattcagaaagcttca

SEQ ID NO: 214872 - DNA, 25 bp, probe
gaacccgtccattcagaaagcttca

SEQ ID NO: 214873 - DNA, 25 bp, probe
gaacgcctctagtagcaaaccattc

SEQ ID NO: 214874 - DNA, 25 bp, probe
gaagcggcctaggacagaacatctg

SEQ ID NO: 214875 - DNA, 25 bp, probe
gaacgtgccatctgtaaagcactca

SEQ ID NO: 214876 - DNA, 25 bp, probe
gaacgcacaaacgtcacaagacatg

SEQ ID NO: 214877 - DNA, 25 bp, probe
gaaccacactgactgtaaaggacag

SEQ ID NO: 214878 - DNA, 25 bp, probe
gaaccaagtacagaatgcgaacaga

SEQ ID NO: 214879 - DNA, 25 bp, probe
gaaccaagtacagaatgcgaacaga

SEQ ID NO: 214880 - DNA, 25 bp, probe
gaaccatgttatatgcagtggaaag

SEQ ID NO: 214881 - DNA, 25 bp, probe
gaaccagttcagagaatcttaattg

SEQ ID NO: 214882 - DNA, 25 bp, probe
gaaccagttcagagaatcttaattg

SEQ ID NO: 214883 - DNA, 25 bp, probe
gaagccaaacaccggcattttatgt

SEQ ID NO: 214884 - DNA, 25 bp, probe
gaaccaacacaccccagggtgtgct

SEQ ID NO: 214885 - DNA, 25 bp, probe
gaagccaatcctctcaagaagttgt

SEQ ID NO: 214886 - DNA, 25 bp, probe
gaacctaccagagcagagaagggca

SEQ ID NO: 214887 - DNA, 25 bp, probe
gaacctaacgaggagagcccaggcc

SEQ ID NO: 214888 - DNA, 25 bp, probe
gaacctgaacaagatggtcaagcaa

SEQ ID NO: 214889 - DNA, 25 bp, probe
gaaccggatgaatataagcaatgaa

SEQ ID NO: 214890 - DNA, 25 bp, probe
gaagccggagaatatcattcttaat

SEQ ID NO: 214891 - DNA, 25 bp, probe
gaagcccgagaatattctcctagat

SEQ ID NO: 214892 - DNA, 25 bp, probe
gaagcctaggaaagataccgaagat

SEQ ID NO: 214893 - DNA, 25 bp, probe
gaagccatttataaaagacggaatc

SEQ ID NO: 214894 - DNA, 25 bp, probe
gaacctttaaaggatgcaggcatgg

SEQ ID NO: 214895 - DNA, 25 bp, probe
gaaccggcgaaacgacatgggggag

SEQ ID NO: 214896 - DNA, 25 bp, probe
gaaccggagagccagctaaggggtg

SEQ ID NO: 214897 - DNA, 25 bp, probe
gaaccatgagggccctcaggagggg

SEQ ID NO: 214898 - DNA, 25 bp, probe
gaacctagcatttggttgagagggt

SEQ ID NO: 214899 - DNA, 25 bp, probe
gaacctagcatttggttgagagggt

SEQ ID NO: 214900 - DNA, 25 bp, probe
gaacatgccgttggttttattggca

SEQ ID NO: 214901 - DNA, 25 bp, probe
gaactggcaattgtctatttatctt

SEQ ID NO: 214902 - DNA, 25 bp, probe
gaaccaggatctgcctattactgct

SEQ ID NO: 214903 - DNA, 25 bp, probe
gaagccgtgtgctcttcattatttt

SEQ ID NO: 214904 - DNA, 25 bp, probe
gaagccgtgtgctcttcattatttt

SEQ ID NO: 214905 - DNA, 25 bp, probe
gaaccgatgtgaattacttagtttc

SEQ ID NO: 214906 - DNA, 25 bp, probe
gaagcctgttggttagtgtatttat

SEQ ID NO: 214907 - DNA, 25 bp, probe
gaagcctgttactttgtgtcacttc

SEQ ID NO: 214908 - DNA, 25 bp, probe
gaagccatattattttctgatttat

SEQ ID NO: 214909 - DNA, 25 bp, probe
gaagcctttttcacatagctcttgg

SEQ ID NO: 214910 - DNA, 25 bp, probe
gaagcctttctgtaacatgcggccg

SEQ ID NO: 214911 - DNA, 25 bp, probe
gaagcctgtttaaagagcagatgcc

SEQ ID NO: 214912 - DNA, 25 bp, probe
gaagcctgtgtagcagtgagacatc

SEQ ID NO: 214913 - DNA, 25 bp, probe
gaacatcgtgatcgccgaggacttc

SEQ ID NO: 214914 - DNA, 25 bp, probe
gaacatcgtgatcgccgaggacttc

SEQ ID NO: 214915 - DNA, 25 bp, probe
gaaccggaggtctgcgaggacctgg

SEQ ID NO: 214916 - DNA, 25 bp, probe
gaacctgagagaatcgggggacctg

SEQ ID NO: 214917 - DNA, 25 bp, probe
gaacctgagagaatcgggggacctg

SEQ ID NO: 214918 - DNA, 25 bp, probe
gaacctgagagaatcgggggacctg

SEQ ID NO: 214919 - DNA, 25 bp, probe
gaacagtaggattgctgtggcctag

SEQ ID NO: 214920 - DNA, 25 bp, probe
gaacagtaggattgctgtggcctag

SEQ ID NO: 214921 - DNA, 25 bp, probe
gaacttcgagatacgggcacatacg

SEQ ID NO: 214922 - DNA, 25 bp, probe
gaacggggttggcgacatcaagaac

SEQ ID NO: 214923 - DNA, 25 bp, probe
gaacgggagatatgagggctcaagt

SEQ ID NO: 214924 - DNA, 25 bp, probe
gaacgccgagatctacgactattta

SEQ ID NO: 214925 - DNA, 25 bp, probe
gaagcctcagagattacacagttag

SEQ ID NO: 214926 - DNA, 25 bp, probe
gaagcctcagagattacacagttag

SEQ ID NO: 214927 - DNA, 25 bp, probe
gaagcgccaaagatgcaccatgtag

SEQ ID NO: 214928 - DNA, 25 bp, probe
gaagctccataaatgtcaccttggg

SEQ ID NO: 214929 - DNA, 25 bp, probe
gaagctccaagaattcaatgcccgg

SEQ ID NO: 214930 - DNA, 25 bp, probe
gaacccaagcaatgctgagcacccc

SEQ ID NO: 214931 - DNA, 25 bp, probe
gaactggaccaatgttcatgccatc

SEQ ID NO: 214932 - DNA, 25 bp, probe
gaagctgagactcatggatccccag

SEQ ID NO: 214933 - DNA, 25 bp, probe
gaagctgagactcatggatccccag

SEQ ID NO: 214934 - DNA, 25 bp, probe
gaagctgtgactgagtaccctgatg

SEQ ID NO: 214935 - DNA, 25 bp, probe
gaagctgtgactgagtaccctgatg

SEQ ID NO: 214936 - DNA, 25 bp, probe
gaagctgttctcaggatcactgggc

SEQ ID NO: 214937 - DNA, 25 bp, probe
gaagctggggcaagaactctgggct

SEQ ID NO: 214938 - DNA, 25 bp, probe
gaagctggggcagatcccagagggc

SEQ ID NO: 214939 - DNA, 25 bp, probe
gaagctggaaaactcctaggaatgc

SEQ ID NO: 214940 - DNA, 25 bp, probe
gaagctgggagatgtgtcctggaat

SEQ ID NO: 214941 - DNA, 25 bp, probe
gaagctggggaaatggcacagttgt

SEQ ID NO: 214942 - DNA, 25 bp, probe
gaagctggggaaatggcacagttgt

SEQ ID NO: 214943 - DNA, 25 bp, probe
gaagctggggacacggcagtgatgc

SEQ ID NO: 214944 - DNA, 25 bp, probe
gaagctggggacacggcagtgatgc

SEQ ID NO: 214945 - DNA, 25 bp, probe
gaagctggtggactttggcatggct

SEQ ID NO: 214946 - DNA, 25 bp, probe
gaagccctggcaattttgcactgtg

SEQ ID NO: 214947 - DNA, 25 bp, probe
gaagccactgagacattcttgtttt

SEQ ID NO: 214948 - DNA, 25 bp, probe
gaagccgtgaacttcatcttgtcct

SEQ ID NO: 214949 - DNA, 25 bp, probe
gaagccgtgaacttcatcttgtcct

SEQ ID NO: 214950 - DNA, 25 bp, probe
gaaccaggagatctctcgtctcaat

SEQ ID NO: 214951 - DNA, 25 bp, probe
gaactctgaagtcactagtccagct

SEQ ID NO: 214952 - DNA, 25 bp, probe
gaagccataagaaacaaagccagat

SEQ ID NO: 214953 - DNA, 25 bp, probe
gaaccaagaacataaaccctccaag

SEQ ID NO: 214954 - DNA, 25 bp, probe
gaaccaaatagaaaaactccatgtt

SEQ ID NO: 214955 - DNA, 25 bp, probe
gaaccagaggacgaaaacgaagctt

SEQ ID NO: 214956 - DNA, 25 bp, probe
gaagcggagagagccaagacggagg

SEQ ID NO: 214957 - DNA, 25 bp, probe
gaagcggagagagccaagacggagg

SEQ ID NO: 214958 - DNA, 25 bp, probe
gaagctggagaaccaaagtctgaag

SEQ ID NO: 214959 - DNA, 25 bp, probe
gaactgggagggaagggtgagacgg

SEQ ID NO: 214960 - DNA, 25 bp, probe
gaacggggagaaaaggtcatcatcg

SEQ ID NO: 214961 - DNA, 25 bp, probe
gaaccgaggggtacggtatatcttg

SEQ ID NO: 214962 - DNA, 25 bp, probe
gaactctgaggggtgacaagtttcc

SEQ ID NO: 214963 - DNA, 25 bp, probe
gaacggtctggcaataccactttcg

SEQ ID NO: 214964 - DNA, 25 bp, probe
gaacaggacatgttacaccacgacc

SEQ ID NO: 214965 - DNA, 25 bp, probe
gaacaggacatgttacaccacgacc

SEQ ID NO: 214966 - DNA, 25 bp, probe
gaacgtaatgagaagattcagccaa

SEQ ID NO: 214967 - DNA, 25 bp, probe
gaacgtaacatcaaaatagccaact

SEQ ID NO: 214968 - DNA, 25 bp, probe
gaacgtaacatcaaaatagccaact

SEQ ID NO: 214969 - DNA, 25 bp, probe
gaaagtaagcctttttgtcacctca

SEQ ID NO: 214970 - DNA, 25 bp, probe
gaaagtaagcctttttgtcacctca

SEQ ID NO: 214971 - DNA, 25 bp, probe
gaacagtaggactttgtagttttat

SEQ ID NO: 214972 - DNA, 25 bp, probe
gaacagtaggactttgtagttttat

SEQ ID NO: 214973 - DNA, 25 bp, probe
gaacgttgagacattctggcttttt

SEQ ID NO: 214974 - DNA, 25 bp, probe
gaactgtcgaatgttgcgaatttat

SEQ ID NO: 214975 - DNA, 25 bp, probe
gaacgtctgtacattgggttataac

SEQ ID NO: 214976 - DNA, 25 bp, probe
gaagctgtctgtactttggggacta

SEQ ID NO: 214977 - DNA, 25 bp, probe
gaagctgtcaagagccagggagatt

SEQ ID NO: 214978 - DNA, 25 bp, probe
gaagctgtgaagatgcctgtgggca

SEQ ID NO: 214979 - DNA, 25 bp, probe
gaagctgtgaagatgcctgtgggca

SEQ ID NO: 214980 - DNA, 25 bp, probe
gaagcctagagaaggctgtgagcca

SEQ ID NO: 214981 - DNA, 25 bp, probe
gaagcgcatgaagatggtgtcccag

SEQ ID NO: 214982 - DNA, 25 bp, probe
gaagcgcatgaagatggtgtcccag

SEQ ID NO: 214983 - DNA, 25 bp, probe
gaagcgtgcactggaggtgtcaccg

SEQ ID NO: 214984 - DNA, 25 bp, probe
gaagctggagctaatgttgatgccc

SEQ ID NO: 214985 - DNA, 25 bp, probe
gaagctggagaaagcatgcgggcct

SEQ ID NO: 214986 - DNA, 25 bp, probe
gaagctggagaaagcatgcgggcct

SEQ ID NO: 214987 - DNA, 25 bp, probe
gaagctggagccagacggactgctg

SEQ ID NO: 214988 - DNA, 25 bp, probe
gaagcctcagtcatgacgcaactgc

SEQ ID NO: 214989 - DNA, 25 bp, probe
gaagccatcggcatcatgagaaggc

SEQ ID NO: 214990 - DNA, 25 bp, probe
gaaccatgggctacgcaacggtggt

SEQ ID NO: 214991 - DNA, 25 bp, probe
gaactcgaacccggacgaggtggtg

SEQ ID NO: 214992 - DNA, 25 bp, probe
gaaccgcaagccggagaggatttgg

SEQ ID NO: 214993 - DNA, 25 bp, probe
gaaccagaacaggctaaggcataca

SEQ ID NO: 214994 - DNA, 25 bp, probe
gaacctggacatcgccaaagagacc

SEQ ID NO: 214995 - DNA, 25 bp, probe
gaagcctggaattcgccaataggcg

SEQ ID NO: 214996 - DNA, 25 bp, probe
gaagcctggaattcgccaataggcg

SEQ ID NO: 214997 - DNA, 25 bp, probe
gaagccagtgacttcccatgtagag

SEQ ID NO: 214998 - DNA, 25 bp, probe
gaagcctgtgaattcctcaggaagt

SEQ ID NO: 214999 - DNA, 25 bp, probe
gaagcctgtgaattcctcaggaagt

SEQ ID NO: 215000 - DNA, 25 bp, probe
gaagcctgcagaatactcttgcaat

SEQ ID NO: 215001 - DNA, 25 bp, probe
gaagcctggattccagcagtgaatg

SEQ ID NO: 215002 - DNA, 25 bp, probe
gaagccttgttgaagctgtgagcag

SEQ ID NO: 215003 - DNA, 25 bp, probe
gaaccttttgtgttgtcagactttg

SEQ ID NO: 215004 - DNA, 25 bp, probe
gaaccacattctggggaagactatt

SEQ ID NO: 215005 - DNA, 25 bp, probe
gaaccgcattgtggagaaagaatcg

SEQ ID NO: 215006 - DNA, 25 bp, probe
gaacgctcaggttggaaaagccact

SEQ ID NO: 215007 - DNA, 25 bp, probe
gaagcgcctggccaagaacaagtcc

SEQ ID NO: 215008 - DNA, 25 bp, probe
gaaccactccgaggacggagctccc

SEQ ID NO: 215009 - DNA, 25 bp, probe
gaaccactccgaggacggagctccc

SEQ ID NO: 215010 - DNA, 25 bp, probe
gaagccgtccagaatgagcgggacc

SEQ ID NO: 215011 - DNA, 25 bp, probe
gaagccagccaaggtgctggggaac

SEQ ID NO: 215012 - DNA, 25 bp, probe
gaaccacaggactctggggaaaaag

SEQ ID NO: 215013 - DNA, 25 bp, probe
gaacccagtgaccagcgggaaagga

SEQ ID NO: 215014 - DNA, 25 bp, probe
gaaccacaggatggggccaaaaggc

SEQ ID NO: 215015 - DNA, 25 bp, probe
gaacctaggaggcagtcaataaata

SEQ ID NO: 215016 - DNA, 25 bp, probe
gaagcctgggggcacctggaaaatt

SEQ ID NO: 215017 - DNA, 25 bp, probe
gaacgctttaggctactggaaacct

SEQ ID NO: 215018 - DNA, 25 bp, probe
gaactggttagtcaaatggccagac

SEQ ID NO: 215019 - DNA, 25 bp, probe
gaactattttgacagcagatgagga

SEQ ID NO: 215020 - DNA, 25 bp, probe
gaacccattatcctgccagcatggg

SEQ ID NO: 215021 - DNA, 25 bp, probe
gaaccagcacatccactggagatgc

SEQ ID NO: 215022 - DNA, 25 bp, probe
gaaccagaccaccgaggtcaagatg

SEQ ID NO: 215023 - DNA, 25 bp, probe
gaaccccacacgggtagagagagtt

SEQ ID NO: 215024 - DNA, 25 bp, probe
gaaccccgcagagcgtatgagctac

SEQ ID NO: 215025 - DNA, 25 bp, probe
gaacgtcctagagctgattgagttc

SEQ ID NO: 215026 - DNA, 25 bp, probe
gaacctcctcagcctgtttgaggac

SEQ ID NO: 215027 - DNA, 25 bp, probe
gaagcccctgtctttttaggagagc

SEQ ID NO: 215028 - DNA, 25 bp, probe
gaaccaccagatctgcttcaaggaa

SEQ ID NO: 215029 - DNA, 25 bp, probe
gaaccaccaaagatctcaaataaaa

SEQ ID NO: 215030 - DNA, 25 bp, probe
gaaccacaaattcttctgaacaaca

SEQ ID NO: 215031 - DNA, 25 bp, probe
gaaccaatatttcactgtcgacaag

SEQ ID NO: 215032 - DNA, 25 bp, probe
gaacccatattgataagtgggccag

SEQ ID NO: 215033 - DNA, 25 bp, probe
gaacccatattgataagtgggccag

SEQ ID NO: 215034 - DNA, 25 bp, probe
gaacccttggatttatgtgaggtca

SEQ ID NO: 215035 - DNA, 25 bp, probe
gaacgtcatcgggcttctggacgtc

SEQ ID NO: 215036 - DNA, 25 bp, probe
gaacgtcatcgggcttctggacgtc

SEQ ID NO: 215037 - DNA, 25 bp, probe
gaacagatgcattgaggccttggat

SEQ ID NO: 215038 - DNA, 25 bp, probe
gaacggaatcaagctctgagcagag

SEQ ID NO: 215039 - DNA, 25 bp, probe
gaactggacatatgcctcgaaaggc

SEQ ID NO: 215040 - DNA, 25 bp, probe
gaactggacatatgcctcgaaaggc

SEQ ID NO: 215041 - DNA, 25 bp, probe
gaactggagctgaggttgacatcac

SEQ ID NO: 215042 - DNA, 25 bp, probe
gaagcgtgatcagccgtggaacacc

SEQ ID NO: 215043 - DNA, 25 bp, probe
gaacgtgcatattgccttgcaaaga

SEQ ID NO: 215044 - DNA, 25 bp, probe
gaacctgcattgttttataaaatct

SEQ ID NO: 215045 - DNA, 25 bp, probe
gactcccttagtctagaaaatgatc

SEQ ID NO: 215046 - DNA, 25 bp, probe
gaagcctcctaccctggaaagatta

SEQ ID NO: 215047 - DNA, 25 bp, probe
gaagcctcctaccctggaaagatta

SEQ ID NO: 215048 - DNA, 25 bp, probe
gacaccccttccagcggaagttact

SEQ ID NO: 215049 - DNA, 25 bp, probe
gacaccccttccagcggaagttact

SEQ ID NO: 215050 - DNA, 25 bp, probe
gaaccagcagctactagggagaagt

SEQ ID NO: 215051 - DNA, 25 bp, probe
gaagccaggaactatgtctgtgcaa

SEQ ID NO: 215052 - DNA, 25 bp, probe
gaagccaggaactatgtctgtgcaa

SEQ ID NO: 215053 - DNA, 25 bp, probe
gaagccaggacgtcaggctgaccaa

SEQ ID NO: 215054 - DNA, 25 bp, probe
gaagccaggtgcaaaagcccacata

SEQ ID NO: 215055 - DNA, 25 bp, probe
gaaccacgatcaaaacaaccacaac

SEQ ID NO: 215056 - DNA, 25 bp, probe
gaaccatcgccaaatagaaccgcct

SEQ ID NO: 215057 - DNA, 25 bp, probe
gaacgcaccttaataaatccagata

SEQ ID NO: 215058 - DNA, 25 bp, probe
gaacgcaccttaataaatccagata

SEQ ID NO: 215059 - DNA, 25 bp, probe
gaacgcaccttaataaatccagata

SEQ ID NO: 215060 - DNA, 25 bp, probe
gaaccactccagaatacttccagaa

SEQ ID NO: 215061 - DNA, 25 bp, probe
gaaccttgagaaaatctaccgagaa

SEQ ID NO: 215062 - DNA, 25 bp, probe
gaacctcgaggtttctcaaagaaat

SEQ ID NO: 215063 - DNA, 25 bp, probe
gaagcctctgggtgacaaaagtaaa

SEQ ID NO: 215064 - DNA, 25 bp, probe
gaacctggcggatggcaacgggaac

SEQ ID NO: 215065 - DNA, 25 bp, probe
gaactctaagaatgccaaagggacc

SEQ ID NO: 215066 - DNA, 25 bp, probe
gaactcgacaaatgaccctgttacc

SEQ ID NO: 215067 - DNA, 25 bp, probe
gaactggacaagacgacccagggcc

SEQ ID NO: 215068 - DNA, 25 bp, probe
gaactggtctcactggaaccagaac

SEQ ID NO: 215069 - DNA, 25 bp, probe
gaactggaccaggatgaaaaggacc

SEQ ID NO: 215070 - DNA, 25 bp, probe
gaacatgaatggtttaaacaggacc

SEQ ID NO: 215071 - DNA, 25 bp, probe
gaacattacatgccttcaaaatggg

SEQ ID NO: 215072 - DNA, 25 bp, probe
gaacattacatgccttcaaaatggg

SEQ ID NO: 215073 - DNA, 25 bp, probe
gaactgtacagaaatccgaatccga

SEQ ID NO: 215074 - DNA, 25 bp, probe
gaactgacagcaacgattccaacca

SEQ ID NO: 215075 - DNA, 25 bp, probe
gaacttctgcaaggcagtaattccc

SEQ ID NO: 215076 - DNA, 25 bp, probe
gaaccatatggtggcaaaagatacc

SEQ ID NO: 215077 - DNA, 25 bp, probe
gaacgcaacgcccataagcagtgca

SEQ ID NO: 215078 - DNA, 25 bp, probe
gaacgcacagcggaaacatattctt

SEQ ID NO: 215079 - DNA, 25 bp, probe
gaacctgcaggcgaaccatatttac

SEQ ID NO: 215080 - DNA, 25 bp, probe
gaacctgcactttgtccatatggtg

SEQ ID NO: 215081 - DNA, 25 bp, probe
gaaccagatcttggatccttgggtt

SEQ ID NO: 215082 - DNA, 25 bp, probe
gaaccagatcttggatccttgggtt

SEQ ID NO: 215083 - DNA, 25 bp, probe
gaacgtgtgcaaaagccttggactt

SEQ ID NO: 215084 - DNA, 25 bp, probe
gaacgtctgcaacatcgtggtggcc

SEQ ID NO: 215085 - DNA, 25 bp, probe
gaagccctgaagcttgctgagaggc

SEQ ID NO: 215086 - DNA, 25 bp, probe
gaagcccagcaacgtggctgtgaac

SEQ ID NO: 215087 - DNA, 25 bp, probe
gaagcccagcaacgtggctgtgaac

SEQ ID NO: 215088 - DNA, 25 bp, probe
gaaccctgagagggggtactccagg

SEQ ID NO: 215089 - DNA, 25 bp, probe
gaaccctgagagggggtactccagg

SEQ ID NO: 215090 - DNA, 25 bp, probe
gtatatccgaggctttgggcctagg

SEQ ID NO: 215091 - DNA, 25 bp, probe
gacttccgagatgttctgggcacgg

SEQ ID NO: 215092 - DNA, 25 bp, probe
gaaccggagatcaatttggtgacgg

SEQ ID NO: 215093 - DNA, 25 bp, probe
gaaccggagatcaatttggtgacgg

SEQ ID NO: 215094 - DNA, 25 bp, probe
gaagccgcagaacatcctactgcat

SEQ ID NO: 215095 - DNA, 25 bp, probe
gaagccacagaataccatatcccaa

SEQ ID NO: 215096 - DNA, 25 bp, probe
gaaccaagaagcccaaatagctcaa

SEQ ID NO: 215097 - DNA, 25 bp, probe
gaaccaagaagcccaaatagctcaa

SEQ ID NO: 215098 - DNA, 25 bp, probe
gaagccatgaagggccgactggcca

SEQ ID NO: 215099 - DNA, 25 bp, probe
gaaccatgcaagtggcgactgcaca

SEQ ID NO: 215100 - DNA, 25 bp, probe
gaaccagctgaggtggagactcgca

SEQ ID NO: 215101 - DNA, 25 bp, probe
gaaccacgtgttttgacatcatgta

SEQ ID NO: 215102 - DNA, 25 bp, probe
gaacctcagttattgctagatatta

SEQ ID NO: 215103 - DNA, 25 bp, probe
gaagccatcaacatcacaaataatg

SEQ ID NO: 215104 - DNA, 25 bp, probe
gaagccatcaacatcacaaataatg

SEQ ID NO: 215105 - DNA, 25 bp, probe
gaagccagccaattaataaagcact

SEQ ID NO: 215106 - DNA, 25 bp, probe
gaactagcaactaagaaaccacttt

SEQ ID NO: 215107 - DNA, 25 bp, probe
gaactagcaactaagaaaccacttt

SEQ ID NO: 215108 - DNA, 25 bp, probe
gaacttcaccgagaatgaccttctg

SEQ ID NO: 215109 - DNA, 25 bp, probe
gaactttctggacaagacctctggc

SEQ ID NO: 215110 - DNA, 25 bp, probe
gaactacgtggagcacgacctcaag

SEQ ID NO: 215111 - DNA, 25 bp, probe
gaactgaggtgggaaaccattcaag

SEQ ID NO: 215112 - DNA, 25 bp, probe
gaacgagggcggaccaaatgtcacc

SEQ ID NO: 215113 - DNA, 25 bp, probe
gaacaatagctgggctcccaagtac

SEQ ID NO: 215114 - DNA, 25 bp, probe
gaacaatagctgggctcccaagtac

SEQ ID NO: 215115 - DNA, 25 bp, probe
gaaccatctgtgttcccaaagtcca

SEQ ID NO: 215116 - DNA, 25 bp, probe
gaacattctgctgtcggaaagcgac

SEQ ID NO: 215117 - DNA, 25 bp, probe
gaacattctgctgtcggaaagcgac

SEQ ID NO: 215118 - DNA, 25 bp, probe
gaacttcatctccttggacaaagaa

SEQ ID NO: 215119 - DNA, 25 bp, probe
gaacttcatctccttggacaaagaa

SEQ ID NO: 215120 - DNA, 25 bp, probe
gaacttcactggaggtcaattgcac

SEQ ID NO: 215121 - DNA, 25 bp, probe
gaactccaccggaggcaattgcact

SEQ ID NO: 215122 - DNA, 25 bp, probe
gaacctgacctgcgagtgcaaggac

SEQ ID NO: 215123 - DNA, 25 bp, probe
gaaccaggcgggctgtgaaccagcc

SEQ ID NO: 215124 - DNA, 25 bp, probe
gaaccacagcagcggttgaacatca

SEQ ID NO: 215125 - DNA, 25 bp, probe
gaacccagcaggcatgagatgaacc

SEQ ID NO: 215126 - DNA, 25 bp, probe
gaaccaagatctgatgatgatgata

SEQ ID NO: 215127 - DNA, 25 bp, probe
gaagccagtatctgtcatatgctga

SEQ ID NO: 215128 - DNA, 25 bp, probe
gaactcggattcttttgcatgatgg

SEQ ID NO: 215129 - DNA, 25 bp, probe
gaacggatgatttatctggtgacag

SEQ ID NO: 215130 - DNA, 25 bp, probe
gaacggatgatttatctggtgacag

SEQ ID NO: 215131 - DNA, 25 bp, probe
gaactgcgtattacaatccggcaga

SEQ ID NO: 215132 - DNA, 25 bp, probe
gaacgcagtgatcagcaaacgggga

SEQ ID NO: 215133 - DNA, 25 bp, probe
gaacgcagtcatccggaagggcggc

SEQ ID NO: 215134 - DNA, 25 bp, probe
gaacagcttcagctggagcgggccc

SEQ ID NO: 215135 - DNA, 25 bp, probe
gaacattgtgcggtgtgtggggctc

SEQ ID NO: 215136 - DNA, 25 bp, probe
gaacttcctggtcctagatgtcttc

SEQ ID NO: 215137 - DNA, 25 bp, probe
gaacgtgccggaactttttgtccat

SEQ ID NO: 215138 - DNA, 25 bp, probe
gaactccaactatcttttttcctgt

SEQ ID NO: 215139 - DNA, 25 bp, probe
gaacttcaaaacctttgtgttcgag

SEQ ID NO: 215140 - DNA, 25 bp, probe
gaacttgaacgttttggttctggat

SEQ ID NO: 215141 - DNA, 25 bp, probe
gaactaaatgttctatggttatgaa

SEQ ID NO: 215142 - DNA, 25 bp, probe
gaactatggtttagaaggttcaagt

SEQ ID NO: 215143 - DNA, 25 bp, probe
gaacagggttttaacgtgctcaact

SEQ ID NO: 215144 - DNA, 25 bp, probe
gatactcaggatattaacttccaga

SEQ ID NO: 215145 - DNA, 25 bp, probe
gaactgcgatgtctgggaacccagc

SEQ ID NO: 215146 - DNA, 25 bp, probe
gaacgcaagggggcaagtcccagaa

SEQ ID NO: 215147 - DNA, 25 bp, probe
gaacctggtgttgaagatacggaat

SEQ ID NO: 215148 - DNA, 25 bp, probe
gaaccttcgtggtggaacaaatatc

SEQ ID NO: 215149 - DNA, 25 bp, probe
gaaccttttgagtgccttacacaat

SEQ ID NO: 215150 - DNA, 25 bp, probe
gaaccttactacagcatctataaca

SEQ ID NO: 215151 - DNA, 25 bp, probe
gaaccttactacagcatctataaca

SEQ ID NO: 215152 - DNA, 25 bp, probe
gaagcctcccaaggtcactatgaag

SEQ ID NO: 215153 - DNA, 25 bp, probe
gaagcctcccaaggtcactatgaag

SEQ ID NO: 215154 - DNA, 25 bp, probe
gaacctggcaaaggctatctacgac

SEQ ID NO: 215155 - DNA, 25 bp, probe
gaacttggccaaggaacaactgagt

SEQ ID NO: 215156 - DNA, 25 bp, probe
gaacttggtaacccacatggttctc

SEQ ID NO: 215157 - DNA, 25 bp, probe
gaactgatggtaactgtacattttg

SEQ ID NO: 215158 - DNA, 25 bp, probe
gaactcacagtacctatgacttttt

SEQ ID NO: 215159 - DNA, 25 bp, probe
gaaccacatattcttctctttagac

SEQ ID NO: 215160 - DNA, 25 bp, probe
gaagccatcagagggttctcgcttc

SEQ ID NO: 215161 - DNA, 25 bp, probe
gaagccagctgcggagtcttctggc

SEQ ID NO: 215162 - DNA, 25 bp, probe
gaagccagatgtgcagcgtatctag

SEQ ID NO: 215163 - DNA, 25 bp, probe
gaagccagtgcggcaggttcacagg

SEQ ID NO: 215164 - DNA, 25 bp, probe
gaaccgtggatgtctttcacgctgt

SEQ ID NO: 215165 - DNA, 25 bp, probe
gaaccgatggaggctgtatcaggat

SEQ ID NO: 215166 - DNA, 25 bp, probe
gaacccaaagggaatagagattctc

SEQ ID NO: 215167 - DNA, 25 bp, probe
gaaccataacatatcattaaatttc

SEQ ID NO: 215168 - DNA, 25 bp, probe
gaacctgaaacaaatccattttgct

SEQ ID NO: 215169 - DNA, 25 bp, probe
gaacctgtcctaaatcaattcctca

SEQ ID NO: 215170 - DNA, 25 bp, probe
gaaccttcttatttcaacatcctca

SEQ ID NO: 215171 - DNA, 25 bp, probe
gaaccatatctgaatttatcctctc

SEQ ID NO: 215172 - DNA, 25 bp, probe
gaaccatcaagttccaaccattaag

SEQ ID NO: 215173 - DNA, 25 bp, probe
gaagccatagagtacatcgatgccg

SEQ ID NO: 215174 - DNA, 25 bp, probe
gaagccatagagtacatcgatgccg

SEQ ID NO: 215175 - DNA, 25 bp, probe
gaagccagcagatcacatcattgcc

SEQ ID NO: 215176 - DNA, 25 bp, probe
gaagccagtggctacatatgggtag

SEQ ID NO: 215177 - DNA, 25 bp, probe
gaagccacatggtacctggattcag

SEQ ID NO: 215178 - DNA, 25 bp, probe
gaacctcatttaccgagatgtcaag

SEQ ID NO: 215179 - DNA, 25 bp, probe
gaaccatcctgtactcagaatgtga

SEQ ID NO: 215180 - DNA, 25 bp, probe
gaacgtcgtgtgactcagtgcagag

SEQ ID NO: 215181 - DNA, 25 bp, probe
gaacgtcgtgtgactcagtgcagag

SEQ ID NO: 215182 - DNA, 25 bp, probe
gaacctctgagtccaaagcaggctg

SEQ ID NO: 215183 - DNA, 25 bp, probe
gaacttctgtactacaacgctggtg

SEQ ID NO: 215184 - DNA, 25 bp, probe
gaactctttgaccggatcacggatg

SEQ ID NO: 215185 - DNA, 25 bp, probe
gaaccttctgatcagtgacacgggg

SEQ ID NO: 215186 - DNA, 25 bp, probe
gaaccagttcattgcatgctgaagc

SEQ ID NO: 215187 - DNA, 25 bp, probe
gaaccagatcactatgttgtagttg

SEQ ID NO: 215188 - DNA, 25 bp, probe
gaaccagaacatttcgaatctgtga

SEQ ID NO: 215189 - DNA, 25 bp, probe
gaaccagaatccttggaagctctag

SEQ ID NO: 215190 - DNA, 25 bp, probe
gaaccagaatccttggaagctctag

SEQ ID NO: 215191 - DNA, 25 bp, probe
gaactaaatcagtggcattctctag

SEQ ID NO: 215192 - DNA, 25 bp, probe
gaactacaacagcgccttcaagaac

SEQ ID NO: 215193 - DNA, 25 bp, probe
gaactacaacagcgccttcaagaac

SEQ ID NO: 215194 - DNA, 25 bp, probe
gaactccaaaagggcttcaatgcga

SEQ ID NO: 215195 - DNA, 25 bp, probe
gaactaaatttaagcttaagccata

SEQ ID NO: 215196 - DNA, 25 bp, probe
gaactaaatttaagcttaagccata

SEQ ID NO: 215197 - DNA, 25 bp, probe
gaacttattttgtgcctagagctct

SEQ ID NO: 215198 - DNA, 25 bp, probe
gaactttttctctgttaattcctgg

SEQ ID NO: 215199 - DNA, 25 bp, probe
gaacttttttgaaatcctattcaag

SEQ ID NO: 215200 - DNA, 25 bp, probe
gaacttttttgaaatcctattcaag

SEQ ID NO: 215201 - DNA, 25 bp, probe
gaactgtgtttttaaactgtaggag

SEQ ID NO: 215202 - DNA, 25 bp, probe
gaactcttttcttagaagggagagg

SEQ ID NO: 215203 - DNA, 25 bp, probe
gaacctttcctagggctgtggagtg

SEQ ID NO: 215204 - DNA, 25 bp, probe
gaacctttccatttagtgatcaaga

SEQ ID NO: 215205 - DNA, 25 bp, probe
gaacctggtgcgtagtagatgctca

SEQ ID NO: 215206 - DNA, 25 bp, probe
gaaccgtgaggatgttgactacgca

SEQ ID NO: 215207 - DNA, 25 bp, probe
gaaccagaggagttcttgaccccaa

SEQ ID NO: 215208 - DNA, 25 bp, probe
gaacctgaggagatttgcaccctag

SEQ ID NO: 215209 - DNA, 25 bp, probe
attacttgggtgagtccttgtggac

SEQ ID NO: 215210 - DNA, 25 bp, probe
gctaagaagaatggcggcaccctct

SEQ ID NO: 215211 - DNA, 25 bp, probe
gaacctggagggctagaacctggaa

SEQ ID NO: 215212 - DNA, 25 bp, probe
gaacctggagggctagaacctggag

SEQ ID NO: 215213 - DNA, 25 bp, probe
gaacccggcaggctagaacctggca

SEQ ID NO: 215214 - DNA, 25 bp, probe
gaacccggcaagtctcaagactgtg

SEQ ID NO: 215215 - DNA, 25 bp, probe
gaacctgcggtagtacagcagacag

SEQ ID NO: 215216 - DNA, 25 bp, probe
gaacctgcggtagtacagcagacag

SEQ ID NO: 215217 - DNA, 25 bp, probe
gaactgtgcggatgccacagtgacc

SEQ ID NO: 215218 - DNA, 25 bp, probe
gaacttcgaagaccacagcaattct

SEQ ID NO: 215219 - DNA, 25 bp, probe
gaacagtctgaggagccgcgagtac

SEQ ID NO: 215220 - DNA, 25 bp, probe
gaacgacgggagtcgctgcagaagc

SEQ ID NO: 215221 - DNA, 25 bp, probe
gaaccactgtgacatggctagcacc

SEQ ID NO: 215222 - DNA, 25 bp, probe
gaaccattctggtggtcatgatccc

SEQ ID NO: 215223 - DNA, 25 bp, probe
gaaccatatcgatgaggtctggccc

SEQ ID NO: 215224 - DNA, 25 bp, probe
gaacaacatagattggatttggagt

SEQ ID NO: 215225 - DNA, 25 bp, probe
gaactctcataattcaaattgtata

SEQ ID NO: 215226 - DNA, 25 bp, probe
gaacccatatatgagagcctgttga

SEQ ID NO: 215227 - DNA, 25 bp, probe
gaactccaagataaagacaccatga

SEQ ID NO: 215228 - DNA, 25 bp, probe
gaactccaagataaagacaccatga

SEQ ID NO: 215229 - DNA, 25 bp, probe
gaaccaaatttaagactctcgcatc

SEQ ID NO: 215230 - DNA, 25 bp, probe
gacatcaaaactagtaatccttatc

SEQ ID NO: 215231 - DNA, 25 bp, probe
gaacagggtctcaaacaccttcagc

SEQ ID NO: 215232 - DNA, 25 bp, probe
gaactggagtcttcataacgctaag

SEQ ID NO: 215233 - DNA, 25 bp, probe
gaactgaaatgcattccttgctagc

SEQ ID NO: 215234 - DNA, 25 bp, probe
gaacgaaatctctcattgtgtgccg

SEQ ID NO: 215235 - DNA, 25 bp, probe
gaactcctgacctcaggtgatccgc

SEQ ID NO: 215236 - DNA, 25 bp, probe
gaactcctgacctcaggtgattcac

SEQ ID NO: 215237 - DNA, 25 bp, probe
gaactcctgacctcaggcaatcttc

SEQ ID NO: 215238 - DNA, 25 bp, probe
gaaccggatgtctcggcattaatcc

SEQ ID NO: 215239 - DNA, 25 bp, probe
gaacgctttgtccacagtgaaaatc

SEQ ID NO: 215240 - DNA, 25 bp, probe
gaacctcggtcgcaggagttgcatc

SEQ ID NO: 215241 - DNA, 25 bp, probe
gaacctgggaggcggagcttgcagt

SEQ ID NO: 215242 - DNA, 25 bp, probe
gaacccaggagacggtggttgcagt

SEQ ID NO: 215243 - DNA, 25 bp, probe
gaacccagagggccaggatttgagg

SEQ ID NO: 215244 - DNA, 25 bp, probe
gaaccacagaagctgcatggttaaa

SEQ ID NO: 215245 - DNA, 25 bp, probe
gaacgaaatagcttatttgaataaa

SEQ ID NO: 215246 - DNA, 25 bp, probe
gaacgaaattcatattatcttatta

SEQ ID NO: 215247 - DNA, 25 bp, probe
gaacgaaattcatattatcttatta

SEQ ID NO: 215248 - DNA, 25 bp, probe
gaactgaaggcaattatttcttttg

SEQ ID NO: 215249 - DNA, 25 bp, probe
gaaccacagccaagttcattgcttg

SEQ ID NO: 215250 - DNA, 25 bp, probe
gaacatcatccctgtatctactagt

SEQ ID NO: 215251 - DNA, 25 bp, probe
gaactgcatcccaaggagctcaggg

SEQ ID NO: 215252 - DNA, 25 bp, probe
gaactgtccagcgaggatattgtgg

SEQ ID NO: 215253 - DNA, 25 bp, probe
gaacgccatcatccaggagatcgtc

SEQ ID NO: 215254 - DNA, 25 bp, probe
gaactgtatgcaatcaaaatcctga

SEQ ID NO: 215255 - DNA, 25 bp, probe
gaactgttctctgtgacatcatcct

SEQ ID NO: 215256 - DNA, 25 bp, probe
gaaccttctgagagactcacagctc

SEQ ID NO: 215257 - DNA, 25 bp, probe
gaaccatgcatatgatggacacaca

SEQ ID NO: 215258 - DNA, 25 bp, probe
gaaccatgcatatgatggacacaca

SEQ ID NO: 215259 - DNA, 25 bp, probe
gaacgctctagaggagatcaccaaa

SEQ ID NO: 215260 - DNA, 25 bp, probe
gaaccctgtcatctacagcatcaaa

SEQ ID NO: 215261 - DNA, 25 bp, probe
gaaccgctgaatatgaagcatttgg

SEQ ID NO: 215262 - DNA, 25 bp, probe
gaaccgctgaatatgaagcatttgg

SEQ ID NO: 215263 - DNA, 25 bp, probe
gaaccgcgagatagggcagatcact

SEQ ID NO: 215264 - DNA, 25 bp, probe
gaaccggaagctgcagcacgcagcg

SEQ ID NO: 215265 - DNA, 25 bp, probe
gaaccggcgaggacacacgcagagt

SEQ ID NO: 215266 - DNA, 25 bp, probe
gaacctgggaggtccatgctgcagg

SEQ ID NO: 215267 - DNA, 25 bp, probe
gaacctgatgggctcctacaggtcg

SEQ ID NO: 215268 - DNA, 25 bp, probe
gaaccatgaggtccatcagtatcgg

SEQ ID NO: 215269 - DNA, 25 bp, probe
gaactcttcaatgagctgaagccag

SEQ ID NO: 215270 - DNA, 25 bp, probe
gaactcttcaatgagctgaagccag

SEQ ID NO: 215271 - DNA, 25 bp, probe
gaactcttcaatttggagtgactaa

SEQ ID NO: 215272 - DNA, 25 bp, probe
gaactcttcaatttggagtgactaa

SEQ ID NO: 215273 - DNA, 25 bp, probe
gaacccgaatgtaaggtctgtaact

SEQ ID NO: 215274 - DNA, 25 bp, probe
gaaccctgaatgcaacttctgtgcc

SEQ ID NO: 215275 - DNA, 25 bp, probe
gaaccctgaatgcaacttctgtgcc

SEQ ID NO: 215276 - DNA, 25 bp, probe
gaaccctgaatgcaacttctgtgcc

SEQ ID NO: 215277 - DNA, 25 bp, probe
gaaccattaacatgcatctttggac

SEQ ID NO: 215278 - DNA, 25 bp, probe
gaaccattacaactacggctggtct

SEQ ID NO: 215279 - DNA, 25 bp, probe
gaactcattcataggaaggtgtttc

SEQ ID NO: 215280 - DNA, 25 bp, probe
gaactccttagagaagtttcacttc

SEQ ID NO: 215281 - DNA, 25 bp, probe
gaactacttaaatatattcgcaaaa

SEQ ID NO: 215282 - DNA, 25 bp, probe
gaactgaggcgatagaattggcgca

SEQ ID NO: 215283 - DNA, 25 bp, probe
gaacttgggacgccagaggggcagt

SEQ ID NO: 215284 - DNA, 25 bp, probe
gaacaaggacacagaatgcgggagt

SEQ ID NO: 215285 - DNA, 25 bp, probe
gagaaaggcccggagttagggctga

SEQ ID NO: 215286 - DNA, 25 bp, probe
gaaagggcccaggctttgactgggt

SEQ ID NO: 215287 - DNA, 25 bp, probe
gaacaggagcccactttgaaggtat

SEQ ID NO: 215288 - DNA, 25 bp, probe
gaacaggagcccactttgaaggtat

SEQ ID NO: 215289 - DNA, 25 bp, probe
gaaaccatgaccaccttggcaatgt

SEQ ID NO: 215290 - DNA, 25 bp, probe
gaaacacgacgggcgggtgaagatc

SEQ ID NO: 215291 - DNA, 25 bp, probe
gaacagccccgggggttcaaggcat

SEQ ID NO: 215292 - DNA, 25 bp, probe
gaacacccttggtggcttatgggtc

SEQ ID NO: 215293 - DNA, 25 bp, probe
gaaccctttaatagcagatttggtt

SEQ ID NO: 215294 - DNA, 25 bp, probe
gaaacttgttaaatgaaaggactct

SEQ ID NO: 215295 - DNA, 25 bp, probe
gaacctcttccgagaaatggagatc

SEQ ID NO: 215296 - DNA, 25 bp, probe
gaacctcttccgagaaatggagatc

SEQ ID NO: 215297 - DNA, 25 bp, probe
gaacctcgtgcagtgggaaatggaa

SEQ ID NO: 215298 - DNA, 25 bp, probe
gaaccttgatggggtgagaagtaca

SEQ ID NO: 215299 - DNA, 25 bp, probe
gaacagtctacaagggaaagtggca

SEQ ID NO: 215300 - DNA, 25 bp, probe
gaaccctatctgggagagaaggcga

SEQ ID NO: 215301 - DNA, 25 bp, probe
gaacctgctgaagaggcagaaaggc

SEQ ID NO: 215302 - DNA, 25 bp, probe
gaacctgtacagtggatggaatctg

SEQ ID NO: 215303 - DNA, 25 bp, probe
gaacctgtacagtggtgactattac

SEQ ID NO: 215304 - DNA, 25 bp, probe
gaacagttagagtaggttgctatgg

SEQ ID NO: 215305 - DNA, 25 bp, probe
gaactgtctagatggatgaattatg

SEQ ID NO: 215306 - DNA, 25 bp, probe
gaactgttaaatcagcattcatttt

SEQ ID NO: 215307 - DNA, 25 bp, probe
gaactgttaaatcagcattcatttt

SEQ ID NO: 215308 - DNA, 25 bp, probe
gaactgtttaatatgctgattattt

SEQ ID NO: 215309 - DNA, 25 bp, probe
gaacagtgttttatgctgggaatct

SEQ ID NO: 215310 - DNA, 25 bp, probe
gaacttgctggttgattgggccata

SEQ ID NO: 215311 - DNA, 25 bp, probe
gaacttgctggttgattgggccata

SEQ ID NO: 215312 - DNA, 25 bp, probe
gaactgctctggacatatgagggcc

SEQ ID NO: 215313 - DNA, 25 bp, probe
gaactgcctctgagctgggcagacc

SEQ ID NO: 215314 - DNA, 25 bp, probe
gaactgtctcatagtcatggaatgc

SEQ ID NO: 215315 - DNA, 25 bp, probe
gaactgttcacactgcagagactaa

SEQ ID NO: 215316 - DNA, 25 bp, probe
gaactgggccattgatcagactaaa

SEQ ID NO: 215317 - DNA, 25 bp, probe
gaactgtgagcttcgttgatgttaa

SEQ ID NO: 215318 - DNA, 25 bp, probe
gaacatgtacattgcagtcatactg

SEQ ID NO: 215319 - DNA, 25 bp, probe
gaacttatcaacgtcatcaaggaag

SEQ ID NO: 215320 - DNA, 25 bp, probe
gaactatactaccctcacagtgagg

SEQ ID NO: 215321 - DNA, 25 bp, probe
gaactgaactaggcctggtggaagg

SEQ ID NO: 215322 - DNA, 25 bp, probe
gaacctccggccatggtggaagaac

SEQ ID NO: 215323 - DNA, 25 bp, probe
gaacctccggccatggtggaagaac

SEQ ID NO: 215324 - DNA, 25 bp, probe
gaactctttagaattggtggaaaat

SEQ ID NO: 215325 - DNA, 25 bp, probe
gaactcctgtaagtttttgaactca

SEQ ID NO: 215326 - DNA, 25 bp, probe
gaaccctgaaatgttgtgtagacac

SEQ ID NO: 215327 - DNA, 25 bp, probe
gaactctctaaaggattgcttcaag

SEQ ID NO: 215328 - DNA, 25 bp, probe
gaaccctgacaaggttgattttgtg

SEQ ID NO: 215329 - DNA, 25 bp, probe
gaaccgtgacatcagcgtagtgttt

SEQ ID NO: 215330 - DNA, 25 bp, probe
gaacgctgatttcaggttttgtgtg

SEQ ID NO: 215331 - DNA, 25 bp, probe
gaacgctgatttcaggttttgtgtg

SEQ ID NO: 215332 - DNA, 25 bp, probe
gaaccctgtctcagtgcattttgtt

SEQ ID NO: 215333 - DNA, 25 bp, probe
gaaccccattctgtatgttttcatg

SEQ ID NO: 215334 - DNA, 25 bp, probe
gaaccgttgcttgtggatttatagt

SEQ ID NO: 215335 - DNA, 25 bp, probe
gaaccttgtttgtcagtgatttaga

SEQ ID NO: 215336 - DNA, 25 bp, probe
gaaccggtgtgttggtcactatgga

SEQ ID NO: 215337 - DNA, 25 bp, probe
gacaccgagggctacgtcaagatcg

SEQ ID NO: 215338 - DNA, 25 bp, probe
gaaccgaggttacttgtatatcgct

SEQ ID NO: 215339 - DNA, 25 bp, probe
gaacctgctggcaagagtttaactt

SEQ ID NO: 215340 - DNA, 25 bp, probe
gaacctgtgctctaagtgaatactt

SEQ ID NO: 215341 - DNA, 25 bp, probe
gaacctgtgctctaagtgaatactt

SEQ ID NO: 215342 - DNA, 25 bp, probe
gaacttgccatctaatttaacttaa

SEQ ID NO: 215343 - DNA, 25 bp, probe
gaacttgccatctaatttaacttaa

SEQ ID NO: 215344 - DNA, 25 bp, probe
gaacctgaattgcatttgatctctt

SEQ ID NO: 215345 - DNA, 25 bp, probe
gaacctcaaagcttgtattccatct

SEQ ID NO: 215346 - DNA, 25 bp, probe
gaacttgcataattatatactcctt

SEQ ID NO: 215347 - DNA, 25 bp, probe
gaacttcaggtgtctggaccctttc

SEQ ID NO: 215348 - DNA, 25 bp, probe
gaacttcaggtgtctggaccctttc

SEQ ID NO: 215349 - DNA, 25 bp, probe
gaactgtagagtgcagggacccctc

SEQ ID NO: 215350 - DNA, 25 bp, probe
gaacttcaacctcaggacagacctc

SEQ ID NO: 215351 - DNA, 25 bp, probe
gaacgggaagctcactggcatggcc

SEQ ID NO: 215352 - DNA, 25 bp, probe
gaacccagaaggcactggcacagtc

SEQ ID NO: 215353 - DNA, 25 bp, probe
gaacccattgaggcggtgggcttgc

SEQ ID NO: 215354 - DNA, 25 bp, probe
gaacccaggaggtggaggctgcggt

SEQ ID NO: 215355 - DNA, 25 bp, probe
gaacccgaagtggggagcacctgtt

SEQ ID NO: 215356 - DNA, 25 bp, probe
gaacctcgtggtgaggcccagagtt

SEQ ID NO: 215357 - DNA, 25 bp, probe
gaactccacggtgagggccgatgtc

SEQ ID NO: 215358 - DNA, 25 bp, probe
gaactccaagggctataccaagtcc

SEQ ID NO: 215359 - DNA, 25 bp, probe
gaaaccaatggtagtatacccctat

SEQ ID NO: 215360 - DNA, 25 bp, probe
gaaaccattgttcagaagacctccc

SEQ ID NO: 215361 - DNA, 25 bp, probe
gaaaccattgttcagaagacctccc

SEQ ID NO: 215362 - DNA, 25 bp, probe
gaaaacggagtacacagacacggcc

SEQ ID NO: 215363 - DNA, 25 bp, probe
gaaaaggaagcgacccagaaatggc

SEQ ID NO: 215364 - DNA, 25 bp, probe
gagaggggaaggtaccaggttgcgt

SEQ ID NO: 215365 - DNA, 25 bp, probe
gagaggggaaggtaccaggttgcgt

SEQ ID NO: 215366 - DNA, 25 bp, probe
gaactgggaaggatccaggttcgct

SEQ ID NO: 215367 - DNA, 25 bp, probe
gaactggaaaggctgtctggggtct

SEQ ID NO: 215368 - DNA, 25 bp, probe
gaacagggcaagacgtttggtttca

SEQ ID NO: 215369 - DNA, 25 bp, probe
gaacatcccaggacgtcagttctgt

SEQ ID NO: 215370 - DNA, 25 bp, probe
gaacatcatcaacctgcttggtgtc

SEQ ID NO: 215371 - DNA, 25 bp, probe
gaacatcatcaacctgcttggtgtc

SEQ ID NO: 215372 - DNA, 25 bp, probe
gaactcaagtcactgctctgtgtta

SEQ ID NO: 215373 - DNA, 25 bp, probe
gaactcagtcatttttctgtgtacc

SEQ ID NO: 215374 - DNA, 25 bp, probe
gaacctgcaataaactcgctgttcc

SEQ ID NO: 215375 - DNA, 25 bp, probe
gaacctgaagatgttcgcgattatc

SEQ ID NO: 215376 - DNA, 25 bp, probe
gaacctgaagctggttctccagaag

SEQ ID NO: 215377 - DNA, 25 bp, probe
gaaccgcaaatagtcatctctctaa

SEQ ID NO: 215378 - DNA, 25 bp, probe
gaacccacaaattattcttacagaa

SEQ ID NO: 215379 - DNA, 25 bp, probe
gaaccgacaatcaagttttacacca

SEQ ID NO: 215380 - DNA, 25 bp, probe
gaacctgatcattatagatattctg

SEQ ID NO: 215381 - DNA, 25 bp, probe
gaacctgatcattatagatattctg

SEQ ID NO: 215382 - DNA, 25 bp, probe
gaacctgtcaacttcagtgactgca

SEQ ID NO: 215383 - DNA, 25 bp, probe
gaacctggaagatcatggacctggt

SEQ ID NO: 215384 - DNA, 25 bp, probe
gaacctggcaagctagaacctggag

SEQ ID NO: 215385 - DNA, 25 bp, probe
gaactcatgcgcaaggggaacctgc

SEQ ID NO: 215386 - DNA, 25 bp, probe
gaactcatgcgcaaggggaacctgc

SEQ ID NO: 215387 - DNA, 25 bp, probe
gaactcatgcgcaaggggaacctgc

SEQ ID NO: 215388 - DNA, 25 bp, probe
gaactacctgagggagatgcgccac

SEQ ID NO: 215389 - DNA, 25 bp, probe
gaactagttgcagaactggaccagg

SEQ ID NO: 215390 - DNA, 25 bp, probe
gaactagttgcagaactggaccagg

SEQ ID NO: 215391 - DNA, 25 bp, probe
gaacgatggcgagatatctggtggg

SEQ ID NO: 215392 - DNA, 25 bp, probe
gaacggtccactttctttgatgagt

SEQ ID NO: 215393 - DNA, 25 bp, probe
gaacggtccactttctttgatgagt

SEQ ID NO: 215394 - DNA, 25 bp, probe
gaaccctacactgactttgatggga

SEQ ID NO: 215395 - DNA, 25 bp, probe
gaaccccaagcatgcatctttcatg

SEQ ID NO: 215396 - DNA, 25 bp, probe
gaactgaacaaccagctctttctgt

SEQ ID NO: 215397 - DNA, 25 bp, probe
gaactgaatagaggtcttgatcttt

SEQ ID NO: 215398 - DNA, 25 bp, probe
gaactactgatagggctgggtctgt

SEQ ID NO: 215399 - DNA, 25 bp, probe
gaactccatgatctgggggacgtat

SEQ ID NO: 215400 - DNA, 25 bp, probe
gaacccaatgtttcgtatatctgtt

SEQ ID NO: 215401 - DNA, 25 bp, probe
gaaccggcagtttcgaaactgcatc

SEQ ID NO: 215402 - DNA, 25 bp, probe
gaaccggcagtttcgaaactgcatc

SEQ ID NO: 215403 - DNA, 25 bp, probe
gaacgggcacttagcgaggagccag

SEQ ID NO: 215404 - DNA, 25 bp, probe
gaacgggcacttagtgaggagccag

SEQ ID NO: 215405 - DNA, 25 bp, probe
gaacggtgcctgggtgcaggctggc

SEQ ID NO: 215406 - DNA, 25 bp, probe
gaacctgctcctggaccaggcaggt

SEQ ID NO: 215407 - DNA, 25 bp, probe
gaacctgctcctggaccaggcaggt

SEQ ID NO: 215408 - DNA, 25 bp, probe
gaacctgttgctggacaagtgggag

SEQ ID NO: 215409 - DNA, 25 bp, probe
gaacggttctgaatcaaaggtgatc

SEQ ID NO: 215410 - DNA, 25 bp, probe
gaacggttctgaatcaaaggtgatc

SEQ ID NO: 215411 - DNA, 25 bp, probe
gaacgtgtagcaataaaacggatca

SEQ ID NO: 215412 - DNA, 25 bp, probe
gaacgtgaacgaacagaaaggctaa

SEQ ID NO: 215413 - DNA, 25 bp, probe
gaaccgaagccaagtgataaagcca

SEQ ID NO: 215414 - DNA, 25 bp, probe
gaacatcagtaccaaggagtacgcc

SEQ ID NO: 215415 - DNA, 25 bp, probe
gaactggtgacacgggaggtaccct

SEQ ID NO: 215416 - DNA, 25 bp, probe
gaacttgagcactgtggggattctc

SEQ ID NO: 215417 - DNA, 25 bp, probe
gaacttgactatctagaggaagtaa

SEQ ID NO: 215418 - DNA, 25 bp, probe
gaacgtggcattcttgggcaagtag

SEQ ID NO: 215419 - DNA, 25 bp, probe
gaacgtggcattcttgggcaagtag

SEQ ID NO: 215420 - DNA, 25 bp, probe
gaactgtggccgttatctggaagta

SEQ ID NO: 215421 - DNA, 25 bp, probe
gaactgtggctggaaaatgagaaaa

SEQ ID NO: 215422 - DNA, 25 bp, probe
gaactgtggctggaaaatgagaaaa

SEQ ID NO: 215423 - DNA, 25 bp, probe
gaaccgccttaagagagataaaatt

SEQ ID NO: 215424 - DNA, 25 bp, probe
gaaccctgctgtacaagagagtaac

SEQ ID NO: 215425 - DNA, 25 bp, probe
gaaccgcatggcaaaaggagtgaag

SEQ ID NO: 215426 - DNA, 25 bp, probe
gaaccgcagtgcccattgggctggg

SEQ ID NO: 215427 - DNA, 25 bp, probe
gaactggaatgccttggggcgtgga

SEQ ID NO: 215428 - DNA, 25 bp, probe
gaacatcggatactggggcggtggc

SEQ ID NO: 215429 - DNA, 25 bp, probe
gaacagcgataacgtggctgccggc

SEQ ID NO: 215430 - DNA, 25 bp, probe
gaacagctatgaacgaggccagtgg

SEQ ID NO: 215431 - DNA, 25 bp, probe
gaacactctgagactcgcgacaatg

SEQ ID NO: 215432 - DNA, 25 bp, probe
gaactgcatatgtttcgctgatata

SEQ ID NO: 215433 - DNA, 25 bp, probe
gaactgaaattctgcgttcaagacc

SEQ ID NO: 215434 - DNA, 25 bp, probe
gaactgaagttcagcgctgtcagga

SEQ ID NO: 215435 - DNA, 25 bp, probe
gaacgaggactcacagctgcaacgt

SEQ ID NO: 215436 - DNA, 25 bp, probe
gaactacgacttcgacgaggagtac

SEQ ID NO: 215437 - DNA, 25 bp, probe
gacaaagtgtttctagggtgtagct

SEQ ID NO: 215438 - DNA, 25 bp, probe
gaacaggttttgcctacctggtcct

SEQ ID NO: 215439 - DNA, 25 bp, probe
gaacaggttttgcctacctggtcct

SEQ ID NO: 215440 - DNA, 25 bp, probe
gaacaggttttgcctacctggtcct

SEQ ID NO: 215441 - DNA, 25 bp, probe
gaacggtgtggtccaccgggacttg

SEQ ID NO: 215442 - DNA, 25 bp, probe
gtacggatttgctctccggaaggaa

SEQ ID NO: 215443 - DNA, 25 bp, probe
gaaatggattcgtacccgtaagctg

SEQ ID NO: 215444 - DNA, 25 bp, probe
gaacggtgtctttctttataaatgc

SEQ ID NO: 215445 - DNA, 25 bp, probe
gaactgagttcattacatctttaat

SEQ ID NO: 215446 - DNA, 25 bp, probe
gaactgaattttgtctttatgattt

SEQ ID NO: 215447 - DNA, 25 bp, probe
gaactgcagagtttgctccttttgt

SEQ ID NO: 215448 - DNA, 25 bp, probe
gaacgctggtgcaatgttttcttgt

SEQ ID NO: 215449 - DNA, 25 bp, probe
gaacgctggtgcaatgttttcttgt

SEQ ID NO: 215450 - DNA, 25 bp, probe
gaactgtgtgtgaatctgcttttcc

SEQ ID NO: 215451 - DNA, 25 bp, probe
gaactggctgagaattctcctttag

SEQ ID NO: 215452 - DNA, 25 bp, probe
gaactgtctattttctcagtcattt

SEQ ID NO: 215453 - DNA, 25 bp, probe
gaacgccttcatttcatgcaaatct

SEQ ID NO: 215454 - DNA, 25 bp, probe
gaacgccttcatttcatgcaaatct

SEQ ID NO: 215455 - DNA, 25 bp, probe
gaacgacctacatttgagacactgc

SEQ ID NO: 215456 - DNA, 25 bp, probe
gaacgacctacatttgagacactgc

SEQ ID NO: 215457 - DNA, 25 bp, probe
gaacgccagaacttttaagtccagc

SEQ ID NO: 215458 - DNA, 25 bp, probe
gaacgctcatgatcttttatgttgc

SEQ ID NO: 215459 - DNA, 25 bp, probe
gaacgctcatgatcttttatgttgc

SEQ ID NO: 215460 - DNA, 25 bp, probe
gaacagcatgaaactttgtagcatc

SEQ ID NO: 215461 - DNA, 25 bp, probe
gaacagctaaggtttacatgtacca

SEQ ID NO: 215462 - DNA, 25 bp, probe
gaaactgacagtattaagggtagga

SEQ ID NO: 215463 - DNA, 25 bp, probe
taaacggcaagaaaaactcgtagag

SEQ ID NO: 215464 - DNA, 25 bp, probe
tccaacgaacaagaagttttgcgag

SEQ ID NO: 215465 - DNA, 25 bp, probe
tccacaaaaaccacagttattggaa

SEQ ID NO: 215466 - DNA, 25 bp, probe
gacgaaaaagtcactcttttgggat

SEQ ID NO: 215467 - DNA, 25 bp, probe
gacgaaaaagtcactcttttgggat

SEQ ID NO: 215468 - DNA, 25 bp, probe
gaacaaacttgtatcggttcttaat

SEQ ID NO: 215469 - DNA, 25 bp, probe
gaaaaactcttcagcgcctttgatc

SEQ ID NO: 215470 - DNA, 25 bp, probe
gaaaaaaatctctgggcttcgactg

SEQ ID NO: 215471 - DNA, 25 bp, probe
gaaagaaaccactcacgttagcata

SEQ ID NO: 215472 - DNA, 25 bp, probe
gaaagttcccaccaaccagtgagaa

SEQ ID NO: 215473 - DNA, 25 bp, probe
gaaagtttccagtggctgcagagag

SEQ ID NO: 215474 - DNA, 25 bp, probe
gaaagtttccagtggctgcagagag

SEQ ID NO: 215475 - DNA, 25 bp, probe
gaaagtttccagtggctgcagagag

SEQ ID NO: 215476 - DNA, 25 bp, probe
gaactttattcatgggctgcggagg

SEQ ID NO: 215477 - DNA, 25 bp, probe
gaacatttaaaggttggctgggtgt

SEQ ID NO: 215478 - DNA, 25 bp, probe
gaaactccaaacagggcttgcgatg

SEQ ID NO: 215479 - DNA, 25 bp, probe
gaacgtgccgataccggggatggac

SEQ ID NO: 215480 - DNA, 25 bp, probe
gaacatgtagtgttcccgggtgtcc

SEQ ID NO: 215481 - DNA, 25 bp, probe
gaacagactgagacacagccgggtg

SEQ ID NO: 215482 - DNA, 25 bp, probe
gaactgacgcagtcgcagatgctgc

SEQ ID NO: 215483 - DNA, 25 bp, probe
gaactgacgcagtcgcagatgctgc

SEQ ID NO: 215484 - DNA, 25 bp, probe
gaactatccaattatgactgctatg

SEQ ID NO: 215485 - DNA, 25 bp, probe
gaactagctcaaaagactgtacata

SEQ ID NO: 215486 - DNA, 25 bp, probe
gaacttctcttggaactgggctact

SEQ ID NO: 215487 - DNA, 25 bp, probe
gaactgatcattagtgagactggcc

SEQ ID NO: 215488 - DNA, 25 bp, probe
gaactgatcattagtgagactggcc

SEQ ID NO: 215489 - DNA, 25 bp, probe
gaacgactttgaagatctgttgtcc

SEQ ID NO: 215490 - DNA, 25 bp, probe
gaacgactttgaagatctgttgtcc

SEQ ID NO: 215491 - DNA, 25 bp, probe
gaactactgggcatgtgctttgggg

SEQ ID NO: 215492 - DNA, 25 bp, probe
gaacagactcaggcgatgtgcttta

SEQ ID NO: 215493 - DNA, 25 bp, probe
gaacatggccaatagtcatatgtga

SEQ ID NO: 215494 - DNA, 25 bp, probe
gaacaggcaagattaattagtgatg

SEQ ID NO: 215495 - DNA, 25 bp, probe
gaacaggcaagattaattagtgatg

SEQ ID NO: 215496 - DNA, 25 bp, probe
gaacggctcatggtacattcaagat

SEQ ID NO: 215497 - DNA, 25 bp, probe
gaacaggctggcctactgtcagttc

SEQ ID NO: 215498 - DNA, 25 bp, probe
gaacagccgtgtcatcgtcatgacc

SEQ ID NO: 215499 - DNA, 25 bp, probe
gaaccctggtgagtcgaatcacgga

SEQ ID NO: 215500 - DNA, 25 bp, probe
gaactgccggaagtggatgaactga

SEQ ID NO: 215501 - DNA, 25 bp, probe
gaactgcagggacgcggggcaggac

SEQ ID NO: 215502 - DNA, 25 bp, probe
gaacgcaggaggctgaggctgcagt

SEQ ID NO: 215503 - DNA, 25 bp, probe
gaacgctggacggatggtagcagtc

SEQ ID NO: 215504 - DNA, 25 bp, probe
gaactctatgccgtatgatttcagt

SEQ ID NO: 215505 - DNA, 25 bp, probe
gaacttcgccagtcaactacgcgag

SEQ ID NO: 215506 - DNA, 25 bp, probe
gaacttcgccagtcaactacgcgag

SEQ ID NO: 215507 - DNA, 25 bp, probe
gaacttcgtcagagatacactgcga

SEQ ID NO: 215508 - DNA, 25 bp, probe
gaacagtgctcttgtggtaggtgga

SEQ ID NO: 215509 - DNA, 25 bp, probe
gaactgttctagggaaagtggcttc

SEQ ID NO: 215510 - DNA, 25 bp, probe
gaactcctaaatcaaattggcttct

SEQ ID NO: 215511 - DNA, 25 bp, probe
gacaatcccaaacaagggacttcac

SEQ ID NO: 215512 - DNA, 25 bp, probe
gaaaccttacagcaaagccgttgac

SEQ ID NO: 215513 - DNA, 25 bp, probe
gaaagccctaagtgaggactgttgg

SEQ ID NO: 215514 - DNA, 25 bp, probe
gaaacccaattgtgccagcctggtt

SEQ ID NO: 215515 - DNA, 25 bp, probe
gacaagaacatacataccccggttt

SEQ ID NO: 215516 - DNA, 25 bp, probe
gacaagaacatacataccccggttt

SEQ ID NO: 215517 - DNA, 25 bp, probe
gacaagaacatacataccccggttt

SEQ ID NO: 215518 - DNA, 25 bp, probe
gaaaattaatttgcatccctcgttt

SEQ ID NO: 215519 - DNA, 25 bp, probe
gaaaaccacttagactgcacttttc

SEQ ID NO: 215520 - DNA, 25 bp, probe
gaaaatctagttcaactctaatttt

SEQ ID NO: 215521 - DNA, 25 bp, probe
gaaaatgctcagtgtgtactctaat

SEQ ID NO: 215522 - DNA, 25 bp, probe
gaaaatccactcagggcattgtatc

SEQ ID NO: 215523 - DNA, 25 bp, probe
gaaaatctcgcagaccagtcgtttc

SEQ ID NO: 215524 - DNA, 25 bp, probe
gaaagcccccaagcatgttggcttt

SEQ ID NO: 215525 - DNA, 25 bp, probe
gaaacgacaccagcagagatctgcc

SEQ ID NO: 215526 - DNA, 25 bp, probe
gataccgcaacaggccgaactagtc

SEQ ID NO: 215527 - DNA, 25 bp, probe
gataccgcaacaggccgaactagtc

SEQ ID NO: 215528 - DNA, 25 bp, probe
gaacacctgggcgcgctacaggtgc

SEQ ID NO: 215529 - DNA, 25 bp, probe
gaacacctcggagctgaatacagcc

SEQ ID NO: 215530 - DNA, 25 bp, probe
gaactccacggaaaaatcagaagct

SEQ ID NO: 215531 - DNA, 25 bp, probe
gaactctccaattgaaagacgaagt

SEQ ID NO: 215532 - DNA, 25 bp, probe
gaacatttcaatcaagaatggcagg

SEQ ID NO: 215533 - DNA, 25 bp, probe
gaacatgattctagtcaagacggca

SEQ ID NO: 215534 - DNA, 25 bp, probe
gaactggagctgatcataggcggcc

SEQ ID NO: 215535 - DNA, 25 bp, probe
gaactgaggtgggctagtgggggtg

SEQ ID NO: 215536 - DNA, 25 bp, probe
gaactgggattggcatagggcggtg

SEQ ID NO: 215537 - DNA, 25 bp, probe
gaacttgggtgagatgggcagtggt

SEQ ID NO: 215538 - DNA, 25 bp, probe
gaacttgtttcagatttgctctgtt

SEQ ID NO: 215539 - DNA, 25 bp, probe
gaacttttcattcatcattatcgtt

SEQ ID NO: 215540 - DNA, 25 bp, probe
gaacttttcattcatcattatcgtt

SEQ ID NO: 215541 - DNA, 25 bp, probe
gaactttcatatactataaactagt

SEQ ID NO: 215542 - DNA, 25 bp, probe
gaactttcatatactataaactagt

SEQ ID NO: 215543 - DNA, 25 bp, probe
gaacttaatgttcaaaatttgcttt

SEQ ID NO: 215544 - DNA, 25 bp, probe
gaacttaatgttcaaaatttgcttt

SEQ ID NO: 215545 - DNA, 25 bp, probe
gaacatttttttgcaaatctgtctt

SEQ ID NO: 215546 - DNA, 25 bp, probe
gaacattttctaccctaatttcact

SEQ ID NO: 215547 - DNA, 25 bp, probe
gaacattttctaccctaatttcact

SEQ ID NO: 215548 - DNA, 25 bp, probe
gaacactatttaccctcagctattc

SEQ ID NO: 215549 - DNA, 25 bp, probe
gaacatttcataatgccttcagtac

SEQ ID NO: 215550 - DNA, 25 bp, probe
gaacatttgttaggctggcctccgg

SEQ ID NO: 215551 - DNA, 25 bp, probe
gaacatttgttaggctggcctccgg

SEQ ID NO: 215552 - DNA, 25 bp, probe
gaacatgttgcttaccgcaccattc

SEQ ID NO: 215553 - DNA, 25 bp, probe
gaacatgctgtgttccatacagcct

SEQ ID NO: 215554 - DNA, 25 bp, probe
gaactctggaatgcaggctgccaga

SEQ ID NO: 215555 - DNA, 25 bp, probe
gaactctgagagtctgcaggcggct

SEQ ID NO: 215556 - DNA, 25 bp, probe
gaactctgagagtctgcaggcggct

SEQ ID NO: 215557 - DNA, 25 bp, probe
gaactctcaactccagagggctgga

SEQ ID NO: 215558 - DNA, 25 bp, probe
gaactgaacattccagagcgtgtag

SEQ ID NO: 215559 - DNA, 25 bp, probe
gaactacacaatcaagatagctgac

SEQ ID NO: 215560 - DNA, 25 bp, probe
gaactgcccgtcagagaagtgcaca

SEQ ID NO: 215561 - DNA, 25 bp, probe
gaactacagagtgcgaggtgagcca

SEQ ID NO: 215562 - DNA, 25 bp, probe
gaactcctgagttcaagcgatccac

SEQ ID NO: 215563 - DNA, 25 bp, probe
gaacaccgtgttggaggtccagggc

SEQ ID NO: 215564 - DNA, 25 bp, probe
gaacaccaggtgtggccacctgggg

SEQ ID NO: 215565 - DNA, 25 bp, probe
gaacatgccatgtagtgggcgccct

SEQ ID NO: 215566 - DNA, 25 bp, probe
gaactgcctggttggagcgaatctg

SEQ ID NO: 215567 - DNA, 25 bp, probe
gaactctctgagtggcagcagcacc

SEQ ID NO: 215568 - DNA, 25 bp, probe
gaactctctgagtggcagcagcacc

SEQ ID NO: 215569 - DNA, 25 bp, probe
gaactttcagaaagcgcagacctgc

SEQ ID NO: 215570 - DNA, 25 bp, probe
gaacggctggagtggcagactcgag

SEQ ID NO: 215571 - DNA, 25 bp, probe
gaacaggcattgcaaggaccctctg

SEQ ID NO: 215572 - DNA, 25 bp, probe
gaacagtgtcatcaaccctgtcttc

SEQ ID NO: 215573 - DNA, 25 bp, probe
gaacggtcatgaactcagcctttgt

SEQ ID NO: 215574 - DNA, 25 bp, probe
gaactgtgacatttcaagctctgtt

SEQ ID NO: 215575 - DNA, 25 bp, probe
gaactgttatcataactgctattgg

SEQ ID NO: 215576 - DNA, 25 bp, probe
gaactgttatcataactgctattgg

SEQ ID NO: 215577 - DNA, 25 bp, probe
gaacatgttccaagagccttttagt

SEQ ID NO: 215578 - DNA, 25 bp, probe
gaactgttcagcagtcctgcttcaa

SEQ ID NO: 215579 - DNA, 25 bp, probe
gaactctgatcgcttcacataacaa

SEQ ID NO: 215580 - DNA, 25 bp, probe
gaacaccacccttcacaatgaattt

SEQ ID NO: 215581 - DNA, 25 bp, probe
gaacagggactttcacttgaatctt

SEQ ID NO: 215582 - DNA, 25 bp, probe
gaacgtggacaagactcgcagattt

SEQ ID NO: 215583 - DNA, 25 bp, probe
gaactggagagggtacctcagttat

SEQ ID NO: 215584 - DNA, 25 bp, probe
gaactgggaggctgcccattgtttg

SEQ ID NO: 215585 - DNA, 25 bp, probe
gaacgtggagacggcgtgcattggc

SEQ ID NO: 215586 - DNA, 25 bp, probe
gaacttgggcaaggcgatgcaggtc

SEQ ID NO: 215587 - DNA, 25 bp, probe
gaacttggaagcaccatcaggccat

SEQ ID NO: 215588 - DNA, 25 bp, probe
gaacttggaagcaccatcaggccat

SEQ ID NO: 215589 - DNA, 25 bp, probe
gaactcttaggcacatcaattaatt

SEQ ID NO: 215590 - DNA, 25 bp, probe
gaacgttcaggctcacaagcttgat

SEQ ID NO: 215591 - DNA, 25 bp, probe
gaacttaaggcagacaacttgttga

SEQ ID NO: 215592 - DNA, 25 bp, probe
gaactgtaaaatgcacaacttttgt

SEQ ID NO: 215593 - DNA, 25 bp, probe
taatttgaaaactccactatagttc

SEQ ID NO: 215594 - DNA, 25 bp, probe
taccttactaacttctccgcaagtt

SEQ ID NO: 215595 - DNA, 25 bp, probe
gaacttacaaacttctccaaagatt

SEQ ID NO: 215596 - DNA, 25 bp, probe
gaactgtgaatatacttcctgaagg

SEQ ID NO: 215597 - DNA, 25 bp, probe
gaactgatgagatgaacgtaatgca

SEQ ID NO: 215598 - DNA, 25 bp, probe
gaactgatggacaaatgcaaagtct

SEQ ID NO: 215599 - DNA, 25 bp, probe
gaacgagaactactgatagggctgg

SEQ ID NO: 215600 - DNA, 25 bp, probe
gaactgcagataccactgaaagagt

SEQ ID NO: 215601 - DNA, 25 bp, probe
gaacttgtcctcttaaaatgtgtca

SEQ ID NO: 215602 - DNA, 25 bp, probe
gaacaaccctcagagaactggccaa

SEQ ID NO: 215603 - DNA, 25 bp, probe
gaacaacgacctagagaacgacctg

SEQ ID NO: 215604 - DNA, 25 bp, probe
gaacaacgacctagagaacgacctg

SEQ ID NO: 215605 - DNA, 25 bp, probe
gaacacggacatgaagagggccctg

SEQ ID NO: 215606 - DNA, 25 bp, probe
gaacaaaaaggtacatggcccctga

SEQ ID NO: 215607 - DNA, 25 bp, probe
gaacaaaaaggtacatggcccctga

SEQ ID NO: 215608 - DNA, 25 bp, probe
gaacagttaagtcaagggatcacag

SEQ ID NO: 215609 - DNA, 25 bp, probe
gaacagttaagtcaagggatcacag

SEQ ID NO: 215610 - DNA, 25 bp, probe
gaacagttaatcagtatgggagcca

SEQ ID NO: 215611 - DNA, 25 bp, probe
gaacagttaatcagtatgggagcca

SEQ ID NO: 215612 - DNA, 25 bp, probe
gaacattttatcagccaggtagtac

SEQ ID NO: 215613 - DNA, 25 bp, probe
gaactgaagttcaggcggtactgat

SEQ ID NO: 215614 - DNA, 25 bp, probe
gaactgaagttcaggcggtactgat

SEQ ID NO: 215615 - DNA, 25 bp, probe
gaactcatcgaaactggggaaccat

SEQ ID NO: 215616 - DNA, 25 bp, probe
gaactgcttgaaactctgctggaaa

SEQ ID NO: 215617 - DNA, 25 bp, probe
gaactcttgaggccctcggagagca

SEQ ID NO: 215618 - DNA, 25 bp, probe
gaacttcagcggtacgcggcaagca

SEQ ID NO: 215619 - DNA, 25 bp, probe
gaacttcagcggtacgcggcaagca

SEQ ID NO: 215620 - DNA, 25 bp, probe
gaacatggaccgattgggcatagca

SEQ ID NO: 215621 - DNA, 25 bp, probe
gaactagacgccatggctgcattga

SEQ ID NO: 215622 - DNA, 25 bp, probe
gaactagacgccatggctgcattga

SEQ ID NO: 215623 - DNA, 25 bp, probe
gaactagaccaaaggcgctgggaag

SEQ ID NO: 215624 - DNA, 25 bp, probe
gaacttgaaagcaaggctttggaca

SEQ ID NO: 215625 - DNA, 25 bp, probe
gaacttgagataatacctttacaac

SEQ ID NO: 215626 - DNA, 25 bp, probe
gaactgtcgttaacctcattcaaac

SEQ ID NO: 215627 - DNA, 25 bp, probe
gaactctcagtgttacagcatcatt

SEQ ID NO: 215628 - DNA, 25 bp, probe
gaacggcgtgcattatcaacatcat

SEQ ID NO: 215629 - DNA, 25 bp, probe
gaacagcgagtcttacgagcagcat

SEQ ID NO: 215630 - DNA, 25 bp, probe
gaacatccagtcgagcagaggagat

SEQ ID NO: 215631 - DNA, 25 bp, probe
gaacatcctactgcatgaagaacat

SEQ ID NO: 215632 - DNA, 25 bp, probe
gaactcagctattaagaaaatcaca

SEQ ID NO: 215633 - DNA, 25 bp, probe
gaactggcttaaagaatacaactct

SEQ ID NO: 215634 - DNA, 25 bp, probe
gaactggactagtgaaaaatctagt

SEQ ID NO: 215635 - DNA, 25 bp, probe
gaactgggagagttgtgaaaaccgt

SEQ ID NO: 215636 - DNA, 25 bp, probe
gaacgggcaaacagctgaagatctc

SEQ ID NO: 215637 - DNA, 25 bp, probe
gaacgggcaaacagctgaagatctc

SEQ ID NO: 215638 - DNA, 25 bp, probe
gaacagcaacaattccggaacattt

SEQ ID NO: 215639 - DNA, 25 bp, probe
gaactattaattccatgtgatacat

SEQ ID NO: 215640 - DNA, 25 bp, probe
gaactcattttcctcagtagagact

SEQ ID NO: 215641 - DNA, 25 bp, probe
gaactccatttcagcagctcaaaca

SEQ ID NO: 215642 - DNA, 25 bp, probe
gaactccatttcagcagctcaaaca

SEQ ID NO: 215643 - DNA, 25 bp, probe
gaacttcatttcagatagcaaacgc

SEQ ID NO: 215644 - DNA, 25 bp, probe
gaacttcttctcaaaagatcacagc

SEQ ID NO: 215645 - DNA, 25 bp, probe
gaactttgtcacggagacacaagct

SEQ ID NO: 215646 - DNA, 25 bp, probe
gaactggtgtcccggatatcagcga

SEQ ID NO: 215647 - DNA, 25 bp, probe
gaactacattcttcagaatacagtg

SEQ ID NO: 215648 - DNA, 25 bp, probe
gaactccatctcaggaaacttggcc

SEQ ID NO: 215649 - DNA, 25 bp, probe
gaactcctcacactggtgaacagga

SEQ ID NO: 215650 - DNA, 25 bp, probe
gaactgcatctggcagctggtggcc

SEQ ID NO: 215651 - DNA, 25 bp, probe
gaactgcatctggcagctggtggcc

SEQ ID NO: 215652 - DNA, 25 bp, probe
gaactgcatctggcagctggtggcc

SEQ ID NO: 215653 - DNA, 25 bp, probe
gaactgcatgctggcaggggacatg

SEQ ID NO: 215654 - DNA, 25 bp, probe
gaacggtgagcagggaacatgtcgg

SEQ ID NO: 215655 - DNA, 25 bp, probe
gaactgttaaggcacactgttgcta

SEQ ID NO: 215656 - DNA, 25 bp, probe
gaactgttaaggcacactgttgcta

SEQ ID NO: 215657 - DNA, 25 bp, probe
gaactttattggagcattgatctgc

SEQ ID NO: 215658 - DNA, 25 bp, probe
gaactgtacagtagtggcactgacc

SEQ ID NO: 215659 - DNA, 25 bp, probe
gaacatgaagatgattgaactgcac

SEQ ID NO: 215660 - DNA, 25 bp, probe
gaacatggattattagaactcaagg

SEQ ID NO: 215661 - DNA, 25 bp, probe
gaactggtgtcaggaatcactgaag

SEQ ID NO: 215662 - DNA, 25 bp, probe
gaacagttggctgtatgactgaagt

SEQ ID NO: 215663 - DNA, 25 bp, probe
gaacatttgggcattacagaagagc

SEQ ID NO: 215664 - DNA, 25 bp, probe
gaacttgtggaccatgtactgcaga

SEQ ID NO: 215665 - DNA, 25 bp, probe
gaactggtgcaggagagtttcaggg

SEQ ID NO: 215666 - DNA, 25 bp, probe
gaactagtggggcttctgcatgtga

SEQ ID NO: 215667 - DNA, 25 bp, probe
gaaatagacgggctcctgggaaaca

SEQ ID NO: 215668 - DNA, 25 bp, probe
gtaaaaccttttatgggcagagaag

SEQ ID NO: 215669 - DNA, 25 bp, probe
gtaactaaatttctctaggaagatg

SEQ ID NO: 215670 - DNA, 25 bp, probe
gataacttcagtgtccctatgatgg

SEQ ID NO: 215671 - DNA, 25 bp, probe
gaaacccagccattccgcatggctg

SEQ ID NO: 215672 - DNA, 25 bp, probe
gaacactctcaggatacccagttcc

SEQ ID NO: 215673 - DNA, 25 bp, probe
gaacactctcaggatacccagttcc

SEQ ID NO: 215674 - DNA, 25 bp, probe
gaacaacatcggacacatccgtccc

SEQ ID NO: 215675 - DNA, 25 bp, probe
gaacaacatcggacacatccgtccc

SEQ ID NO: 215676 - DNA, 25 bp, probe
gaactaatcgagcacttctcaccaa

SEQ ID NO: 215677 - DNA, 25 bp, probe
gaactaaggatattctttagcaaga

SEQ ID NO: 215678 - DNA, 25 bp, probe
gaactgaactgaactcttttgggcc

SEQ ID NO: 215679 - DNA, 25 bp, probe
gaacatgggtgatcggtttgggcag

SEQ ID NO: 215680 - DNA, 25 bp, probe
gaacatcgaaattcgtgttgtctcc

SEQ ID NO: 215681 - DNA, 25 bp, probe
gaacaccaatgatctggaggagtcc

SEQ ID NO: 215682 - DNA, 25 bp, probe
gaacaccaatgatctggaggagtcc

SEQ ID NO: 215683 - DNA, 25 bp, probe
gaacaccttaggaagaaagtccatg

SEQ ID NO: 215684 - DNA, 25 bp, probe
gaacaccttaggaagaaagtccatg

SEQ ID NO: 215685 - DNA, 25 bp, probe
gaaacccatgggaatacctgaccta

SEQ ID NO: 215686 - DNA, 25 bp, probe
gaaacccatgggaatacctgaccta

SEQ ID NO: 215687 - DNA, 25 bp, probe
gaaacctcttgtctaagagacctac

SEQ ID NO: 215688 - DNA, 25 bp, probe
gaaaacctactcagaagacacctac

SEQ ID NO: 215689 - DNA, 25 bp, probe
gaaaagcagtaacttgggtccagta

SEQ ID NO: 215690 - DNA, 25 bp, probe
gaacaaggagaactctgcggtacca

SEQ ID NO: 215691 - DNA, 25 bp, probe
gaacaaggagaactctgcggtacca

SEQ ID NO: 215692 - DNA, 25 bp, probe
gaacagcagggtagtctggtttcta

SEQ ID NO: 215693 - DNA, 25 bp, probe
gaacaaggacttgtcagtcacatct

SEQ ID NO: 215694 - DNA, 25 bp, probe
gaaaagggcatttggcaccactctc

SEQ ID NO: 215695 - DNA, 25 bp, probe
gaacagaggtcaaatgggctctctc

SEQ ID NO: 215696 - DNA, 25 bp, probe
gaacaggccattggcagggtcaccc

SEQ ID NO: 215697 - DNA, 25 bp, probe
gagaaggactttgtggtacggcaga

SEQ ID NO: 215698 - DNA, 25 bp, probe
gaacaaattcctgcttgtccggcag

SEQ ID NO: 215699 - DNA, 25 bp, probe
gaacaaattcctgcttgtccggcag

SEQ ID NO: 215700 - DNA, 25 bp, probe
gtagaaagtggctgtcagaccgaga

SEQ ID NO: 215701 - DNA, 25 bp, probe
gtagaactggttagtcaaatggcca

SEQ ID NO: 215702 - DNA, 25 bp, probe
gaactactgggtgtagactggcctg

SEQ ID NO: 215703 - DNA, 25 bp, probe
gagactaagggtgaaagtggtttag

SEQ ID NO: 215704 - DNA, 25 bp, probe
gaacaggcgggtgggccatgtggtt

SEQ ID NO: 215705 - DNA, 25 bp, probe
gaacagggtgatgggccctatggtt

SEQ ID NO: 215706 - DNA, 25 bp, probe
gaacaggagctgggtcagcctctgc

SEQ ID NO: 215707 - DNA, 25 bp, probe
gaacagcaaccaagtaccctgctaa

SEQ ID NO: 215708 - DNA, 25 bp, probe
gaaacatagtaataccacgtaaatc

SEQ ID NO: 215709 - DNA, 25 bp, probe
gaacataagtaatcactaatgctca

SEQ ID NO: 215710 - DNA, 25 bp, probe
gaacataagtaatcactaatgctca

SEQ ID NO: 215711 - DNA, 25 bp, probe
gaacttagaagaagcagataaccaa

SEQ ID NO: 215712 - DNA, 25 bp, probe
gaacatgtcgatcaagacttgacca

SEQ ID NO: 215713 - DNA, 25 bp, probe
gaacatatctgaaaaccttccccac

SEQ ID NO: 215714 - DNA, 25 bp, probe
gaacaataatgtaaatcaacgcccc

SEQ ID NO: 215715 - DNA, 25 bp, probe
gaacagtaagcgaaagagccggcct

SEQ ID NO: 215716 - DNA, 25 bp, probe
gaacagtcagtgcaacagtgtcagg

SEQ ID NO: 215717 - DNA, 25 bp, probe
gaacttcaatgccaaatatgtctcc

SEQ ID NO: 215718 - DNA, 25 bp, probe
gaacttcctataactgtgttgcact

SEQ ID NO: 215719 - DNA, 25 bp, probe
gaacttcctataactgtgttgcact

SEQ ID NO: 215720 - DNA, 25 bp, probe
gaacttcctatggccttttggtagc

SEQ ID NO: 215721 - DNA, 25 bp, probe
gaacattgcgtcgcgcattgctttt

SEQ ID NO: 215722 - DNA, 25 bp, probe
gaacttctgaaggcatgagtgtttt

SEQ ID NO: 215723 - DNA, 25 bp, probe
gaactcctatgagatgcgcctggtt

SEQ ID NO: 215724 - DNA, 25 bp, probe
gaactgtacattgtgagctctggtt

SEQ ID NO: 215725 - DNA, 25 bp, probe
gaactgtacattgtgagctctggtt

SEQ ID NO: 215726 - DNA, 25 bp, probe
gaactccacagtcgtagtcagtgct

SEQ ID NO: 215727 - DNA, 25 bp, probe
gaactcacatcagtcaaagatatac

SEQ ID NO: 215728 - DNA, 25 bp, probe
gaactcacacagtaaatagtgaccg

SEQ ID NO: 215729 - DNA, 25 bp, probe
gaactcctggactatattgtgaacg

SEQ ID NO: 215730 - DNA, 25 bp, probe
gaactgccgtgggaattttatcttt

SEQ ID NO: 215731 - DNA, 25 bp, probe
gaacattggtggcatttttatcgtg

SEQ ID NO: 215732 - DNA, 25 bp, probe
gaacttgggagtcctcatgtgtatt

SEQ ID NO: 215733 - DNA, 25 bp, probe
gaacaccgtgaacctcagttattgc

SEQ ID NO: 215734 - DNA, 25 bp, probe
gaacaccgtgaacctcagttattgc

SEQ ID NO: 215735 - DNA, 25 bp, probe
gaacatctcgtgaagagcataactt

SEQ ID NO: 215736 - DNA, 25 bp, probe
gaacatctactcagcagactactac

SEQ ID NO: 215737 - DNA, 25 bp, probe
gaacatgtcttcaagcgagctagcc

SEQ ID NO: 215738 - DNA, 25 bp, probe
gaaagcatgctagagtatgaaccag

SEQ ID NO: 215739 - DNA, 25 bp, probe
gaacacctcattttatggcaccaga

SEQ ID NO: 215740 - DNA, 25 bp, probe
gaactccagcctaagtatgaagaaa

SEQ ID NO: 215741 - DNA, 25 bp, probe
gaacatagccctagtttaagagaac

SEQ ID NO: 215742 - DNA, 25 bp, probe
gaacatctcgacttattggaaagaa

SEQ ID NO: 215743 - DNA, 25 bp, probe
gaacatatctgacattggtgaagtg

SEQ ID NO: 215744 - DNA, 25 bp, probe
gaacatttactttgaagacggtgtt

SEQ ID NO: 215745 - DNA, 25 bp, probe
gaactactactttcaagaaatgctg

SEQ ID NO: 215746 - DNA, 25 bp, probe
gaactactactttcaagaaatgctg

SEQ ID NO: 215747 - DNA, 25 bp, probe
gaactattcatacacgaacaacatg

SEQ ID NO: 215748 - DNA, 25 bp, probe
gaacagatgtcaagaacaaactatc

SEQ ID NO: 215749 - DNA, 25 bp, probe
gaacagatgtcaagaacaaactatc

SEQ ID NO: 215750 - DNA, 25 bp, probe
gaacagagctcaagggcaaaggcac

SEQ ID NO: 215751 - DNA, 25 bp, probe
gaacaggtgctggggctaaagtttg

SEQ ID NO: 215752 - DNA, 25 bp, probe
gaacatgggctggacctggaaacat

SEQ ID NO: 215753 - DNA, 25 bp, probe
gaacatttcgaatctgtgacaatct

SEQ ID NO: 215754 - DNA, 25 bp, probe
gaactcttggtacctggaaatgtga

SEQ ID NO: 215755 - DNA, 25 bp, probe
gaactctagttttctaacagattag

SEQ ID NO: 215756 - DNA, 25 bp, probe
gaactctagttttctaacagattag

SEQ ID NO: 215757 - DNA, 25 bp, probe
gaacttagttaatggaagactgaga

SEQ ID NO: 215758 - DNA, 25 bp, probe
gaacttcttttctaggcaacactga

SEQ ID NO: 215759 - DNA, 25 bp, probe
gaacatgacttctttagatgcaatg

SEQ ID NO: 215760 - DNA, 25 bp, probe
gaacacatcatgccaggtagatagt

SEQ ID NO: 215761 - DNA, 25 bp, probe
gaacacatcatgccaggtagatagt

SEQ ID NO: 215762 - DNA, 25 bp, probe
gaacagtgcgcccgtagatgggctg

SEQ ID NO: 215763 - DNA, 25 bp, probe
gaacagtgcgcccgtagatgggctg

SEQ ID NO: 215764 - DNA, 25 bp, probe
gaacttccgcagcatattgcggtgc

SEQ ID NO: 215765 - DNA, 25 bp, probe
gaactaactcggtcattgctgttga

SEQ ID NO: 215766 - DNA, 25 bp, probe
gaactcaggattcagagatctttga

SEQ ID NO: 215767 - DNA, 25 bp, probe
gaactctgtgttctctatattagat

SEQ ID NO: 215768 - DNA, 25 bp, probe
gaacttgatgttcgtgggatgttta

SEQ ID NO: 215769 - DNA, 25 bp, probe
gaacttgatctttgtgacttgtgct

SEQ ID NO: 215770 - DNA, 25 bp, probe
gaacatcttcggggacatgctgtgt

SEQ ID NO: 215771 - DNA, 25 bp, probe
gaacttgctggaacgactgtgggtc

SEQ ID NO: 215772 - DNA, 25 bp, probe
gaacatgtggggactactcagaggc

SEQ ID NO: 215773 - DNA, 25 bp, probe
gaacttgtggttgaggcagggccat

SEQ ID NO: 215774 - DNA, 25 bp, probe
gaacaggtacttgaaaggggctctg

SEQ ID NO: 215775 - DNA, 25 bp, probe
gaaaagtacttcctactgttggccg

SEQ ID NO: 215776 - DNA, 25 bp, probe
gaaaagtacttcctactgttggccg

SEQ ID NO: 215777 - DNA, 25 bp, probe
gaaaagggctccatttggttccagc

SEQ ID NO: 215778 - DNA, 25 bp, probe
gaaaatgacacttatacttggttta

SEQ ID NO: 215779 - DNA, 25 bp, probe
gaaaaacagtatattgggaagctca

SEQ ID NO: 215780 - DNA, 25 bp, probe
gaaaaacagtttataccaatacact

SEQ ID NO: 215781 - DNA, 25 bp, probe
gacagaaacattatttttattagca

SEQ ID NO: 215782 - DNA, 25 bp, probe
gaaaagaatttgatactcctctgtg

SEQ ID NO: 215783 - DNA, 25 bp, probe
gaacaagcctgttgggttcctggtt

SEQ ID NO: 215784 - DNA, 25 bp, probe
gaacagaagttgtcgcagcttactg

SEQ ID NO: 215785 - DNA, 25 bp, probe
gaacagcaagttctataaactggtg

SEQ ID NO: 215786 - DNA, 25 bp, probe
gaacaggttattgagaatactggag

SEQ ID NO: 215787 - DNA, 25 bp, probe
gaacaggttattgagaatactggag

SEQ ID NO: 215788 - DNA, 25 bp, probe
gaacagggaactcagaatacagaca

SEQ ID NO: 215789 - DNA, 25 bp, probe
gaacagtgagaggccaagattgaca

SEQ ID NO: 215790 - DNA, 25 bp, probe
gaacattacagtccaatggtatgct

SEQ ID NO: 215791 - DNA, 25 bp, probe
gaacattacacaacagatgccatag

SEQ ID NO: 215792 - DNA, 25 bp, probe
gaacatttcaaggcgcatgcacaac

SEQ ID NO: 215793 - DNA, 25 bp, probe
gaacatttcaaggcgcatgcacaac

SEQ ID NO: 215794 - DNA, 25 bp, probe
gaacatcccaagggaactccttcgc

SEQ ID NO: 215795 - DNA, 25 bp, probe
gaaatctcaaacagtacccaattcc

SEQ ID NO: 215796 - DNA, 25 bp, probe
gaacaccagaaaggtcacctgcctt

SEQ ID NO: 215797 - DNA, 25 bp, probe
gaacagccaagtagcttccagctta

SEQ ID NO: 215798 - DNA, 25 bp, probe
gaacagcgaagtagcttgctccctg

SEQ ID NO: 215799 - DNA, 25 bp, probe
gaacatcgaggctacttgtacctgg

SEQ ID NO: 215800 - DNA, 25 bp, probe
gaactaatgccgacgtgatgaccgc

SEQ ID NO: 215801 - DNA, 25 bp, probe
gaactaatgccgacgtgatgaccgc

SEQ ID NO: 215802 - DNA, 25 bp, probe
gacacttagccgctgtctcgccgtg

SEQ ID NO: 215803 - DNA, 25 bp, probe
gaacttgacgtagtcctgcggtgat

SEQ ID NO: 215804 - DNA, 25 bp, probe
gaacttcaagaagcctaagcttggc

SEQ ID NO: 215805 - DNA, 25 bp, probe
gaactcacttacgactataagttcc

SEQ ID NO: 215806 - DNA, 25 bp, probe
gaactcagttgcatcctacaatttg

SEQ ID NO: 215807 - DNA, 25 bp, probe
gaactacctcagtaatcacaattat

SEQ ID NO: 215808 - DNA, 25 bp, probe
gaactttctcagtcctgattttaaa

SEQ ID NO: 215809 - DNA, 25 bp, probe
gaactaatataattgctaccttaaa

SEQ ID NO: 215810 - DNA, 25 bp, probe
gaactagaaaattcatacctgtgag

SEQ ID NO: 215811 - DNA, 25 bp, probe
gaactcagaagtgccatgaccttgc

SEQ ID NO: 215812 - DNA, 25 bp, probe
gaactcagaagtgccatgaccttgc

SEQ ID NO: 215813 - DNA, 25 bp, probe
gaacatcaaactccaaaccctgggg

SEQ ID NO: 215814 - DNA, 25 bp, probe
gaacagggtgtgccaaagtcggggg

SEQ ID NO: 215815 - DNA, 25 bp, probe
gaaaaggatgtccctggtcaaggag

SEQ ID NO: 215816 - DNA, 25 bp, probe
gaacaaatattcctcgtgctaaagg

SEQ ID NO: 215817 - DNA, 25 bp, probe
gaacaaatattcctcgtgctaaagg

SEQ ID NO: 215818 - DNA, 25 bp, probe
gaacaaatattcctcgtgctaaagg

SEQ ID NO: 215819 - DNA, 25 bp, probe
gaacattgctgattcttcgtgcaca

SEQ ID NO: 215820 - DNA, 25 bp, probe
gaacttcttcatgtatgtgacactg

SEQ ID NO: 215821 - DNA, 25 bp, probe
gaacttcttgtgggagatactcagt

SEQ ID NO: 215822 - DNA, 25 bp, probe
gaacttcttgtgggagatactcagt

SEQ ID NO: 215823 - DNA, 25 bp, probe
gaacttcttgtgggagatactcagt

SEQ ID NO: 215824 - DNA, 25 bp, probe
gaactacttcttggagcaaggcatt

SEQ ID NO: 215825 - DNA, 25 bp, probe
gaactactcagggaatgaaggtgtc

SEQ ID NO: 215826 - DNA, 25 bp, probe
gaacagagttggaaatgcaaatggt

SEQ ID NO: 215827 - DNA, 25 bp, probe
gaaaatgtttgcagactcacagagt

SEQ ID NO: 215828 - DNA, 25 bp, probe
gaaaattcctgcaagctattcatca

SEQ ID NO: 215829 - DNA, 25 bp, probe
gaacatgttattgcagtgattctca

SEQ ID NO: 215830 - DNA, 25 bp, probe
gaacacaaggatgctggctttcaaa

SEQ ID NO: 215831 - DNA, 25 bp, probe
gaaaatcaatgacattgcttatgaa

SEQ ID NO: 215832 - DNA, 25 bp, probe
gaaaacagagacccgcttaaagaag

SEQ ID NO: 215833 - DNA, 25 bp, probe
gaaaattaggccgaggtaaatacag

SEQ ID NO: 215834 - DNA, 25 bp, probe
gaaaattaggccgaggtaaatacag

SEQ ID NO: 215835 - DNA, 25 bp, probe
gaacacttacccaggtagatatctc

SEQ ID NO: 215836 - DNA, 25 bp, probe
gaacacttacccaggtagatatctc

SEQ ID NO: 215837 - DNA, 25 bp, probe
gaacactatatcaattaccgaaaac

SEQ ID NO: 215838 - DNA, 25 bp, probe
gaactcaatttattcctgggaacct

SEQ ID NO: 215839 - DNA, 25 bp, probe
gaacatatattaatctactggcgaa

SEQ ID NO: 215840 - DNA, 25 bp, probe
gaacatgatattttatagcttggga

SEQ ID NO: 215841 - DNA, 25 bp, probe
gaactttatctattcctgtgctgga

SEQ ID NO: 215842 - DNA, 25 bp, probe
gaactttatctattcctgtgctgga

SEQ ID NO: 215843 - DNA, 25 bp, probe
gaaacttatcgatttcgtcacgcgt

SEQ ID NO: 215844 - DNA, 25 bp, probe
gaaaaatgactgttacgaccctgtt

SEQ ID NO: 215845 - DNA, 25 bp, probe
gaaaatatgactgtgactgaccctg

SEQ ID NO: 215846 - DNA, 25 bp, probe
gaaaattcaggctgatctctcctct

SEQ ID NO: 215847 - DNA, 25 bp, probe
gaacagttcagttgtatctatgccc

SEQ ID NO: 215848 - DNA, 25 bp, probe
gaacagactgcacagctaatggcac

SEQ ID NO: 215849 - DNA, 25 bp, probe
gaacagactgcacagctaatggcac

SEQ ID NO: 215850 - DNA, 25 bp, probe
gaaaagggtcacaaaggactggcct

SEQ ID NO: 215851 - DNA, 25 bp, probe
gaaatggggtatgcagggtctggaa

SEQ ID NO: 215852 - DNA, 25 bp, probe
gaaaacagagaagcgggctctgggc

SEQ ID NO: 215853 - DNA, 25 bp, probe
gaaaatcagagaaggcaaattcagg

SEQ ID NO: 215854 - DNA, 25 bp, probe
gaacatatgggaaccaacgtcatcg

SEQ ID NO: 215855 - DNA, 25 bp, probe
gaacatatctgcaatacccaagcca

SEQ ID NO: 215856 - DNA, 25 bp, probe
gaacactcatattaccacaacaacc

SEQ ID NO: 215857 - DNA, 25 bp, probe
gaacatcctgtgtgtcaacaccacc

SEQ ID NO: 215858 - DNA, 25 bp, probe
gaacatattgtgtgtcagccagaca

SEQ ID NO: 215859 - DNA, 25 bp, probe
gaacatattgtgtgtcagccagaca

SEQ ID NO: 215860 - DNA, 25 bp, probe
gaaaagtctgcaatgatcgaaatca

SEQ ID NO: 215861 - DNA, 25 bp, probe
gaaaagctgccaagaccctgggcat

SEQ ID NO: 215862 - DNA, 25 bp, probe
gaactactgctcaaaattcatgagg

SEQ ID NO: 215863 - DNA, 25 bp, probe
gaactacacgtaacatcatcatttg

SEQ ID NO: 215864 - DNA, 25 bp, probe
gaacatatgcctgagaacctttgca

SEQ ID NO: 215865 - DNA, 25 bp, probe
gaacatagcctttaagcatcattta

SEQ ID NO: 215866 - DNA, 25 bp, probe
gaactagacgcttaatgccctgtgt

SEQ ID NO: 215867 - DNA, 25 bp, probe
gaacaagaactcgaacccggacgag

SEQ ID NO: 215868 - DNA, 25 bp, probe
gaacaagaaccttaccttcaaggag

SEQ ID NO: 215869 - DNA, 25 bp, probe
gaacaagaaccacaacctgaaaatt

SEQ ID NO: 215870 - DNA, 25 bp, probe
gaacaagaaccacaacctgaaaatt

SEQ ID NO: 215871 - DNA, 25 bp, probe
gacataaatacgtaaacctataaga

SEQ ID NO: 215872 - DNA, 25 bp, probe
gaaagaaactgagaaccccaagaag

SEQ ID NO: 215873 - DNA, 25 bp, probe
gaaaataggtgacaacggcaaacca

SEQ ID NO: 215874 - DNA, 25 bp, probe
gaaaatcttggagaccctgcaaaca

SEQ ID NO: 215875 - DNA, 25 bp, probe
gaacaatcctgaaccaggcctgtca

SEQ ID NO: 215876 - DNA, 25 bp, probe
gaacagcaggttaccaggactgagc

SEQ ID NO: 215877 - DNA, 25 bp, probe
gaacagatttcttcgcaagactatg

SEQ ID NO: 215878 - DNA, 25 bp, probe
gaacactttcctgagatgcacttac

SEQ ID NO: 215879 - DNA, 25 bp, probe
gaacactttcaaagaggtttgagaa

SEQ ID NO: 215880 - DNA, 25 bp, probe
gaacaccttgacttagatttgtgag

SEQ ID NO: 215881 - DNA, 25 bp, probe
gaacagcctaatttgagtgtctgtg

SEQ ID NO: 215882 - DNA, 25 bp, probe
gaacatcctgtttgtgaattctgag

SEQ ID NO: 215883 - DNA, 25 bp, probe
gaacatctggggactaatatcatag

SEQ ID NO: 215884 - DNA, 25 bp, probe
gaacacgatggacctcaagaatcaa

SEQ ID NO: 215885 - DNA, 25 bp, probe
gaacacaaggatcgagaaacacaac

SEQ ID NO: 215886 - DNA, 25 bp, probe
gaacatgaactgtggcattacccca

SEQ ID NO: 215887 - DNA, 25 bp, probe
gaacaaactgaacgacattctcctc

SEQ ID NO: 215888 - DNA, 25 bp, probe
gaacaatcccaaatgcactgtcttc

SEQ ID NO: 215889 - DNA, 25 bp, probe
gaacagatcccggtgacattctatt

SEQ ID NO: 215890 - DNA, 25 bp, probe
gaacagatcccggtgacattctatt

SEQ ID NO: 215891 - DNA, 25 bp, probe
gaacagagctacgcagagcatcctc

SEQ ID NO: 215892 - DNA, 25 bp, probe
gaacagagccatccaaagcatcctt

SEQ ID NO: 215893 - DNA, 25 bp, probe
gaaaattcttcaaagcatggcactg

SEQ ID NO: 215894 - DNA, 25 bp, probe
gaacagatcttacaactgagagtga

SEQ ID NO: 215895 - DNA, 25 bp, probe
gaacagattttgaaggccgagtacg

SEQ ID NO: 215896 - DNA, 25 bp, probe
gaacatgctgtttgagagcatccag

SEQ ID NO: 215897 - DNA, 25 bp, probe
gaacatgttgagtgagcatgctgga

SEQ ID NO: 215898 - DNA, 25 bp, probe
gaacatcttgatcagtgagcaggat

SEQ ID NO: 215899 - DNA, 25 bp, probe
gaacactgtgcacatggtcagttcc

SEQ ID NO: 215900 - DNA, 25 bp, probe
gaacagcgagcagatcaaagccccg

SEQ ID NO: 215901 - DNA, 25 bp, probe
gaaagcggcctcaaggagagcccgt

SEQ ID NO: 215902 - DNA, 25 bp, probe
gaacaggagcctgagtgatgtggcc

SEQ ID NO: 215903 - DNA, 25 bp, probe
gaacaggagggtgctgtgtgagcat

SEQ ID NO: 215904 - DNA, 25 bp, probe
gaacaggagggtgctgtgtgagcat

SEQ ID NO: 215905 - DNA, 25 bp, probe
gaacatctgaggctgccttgtagag

SEQ ID NO: 215906 - DNA, 25 bp, probe
gaacatctcaggtgccatgtaaggc

SEQ ID NO: 215907 - DNA, 25 bp, probe
gaaaatcgccctaagttcagtgaac

SEQ ID NO: 215908 - DNA, 25 bp, probe
gaacactgctgcactaatcattgcc

SEQ ID NO: 215909 - DNA, 25 bp, probe
gaacacatgtgcagtcactggtgtc

SEQ ID NO: 215910 - DNA, 25 bp, probe
gaacacattcagctgctgggtgtcc

SEQ ID NO: 215911 - DNA, 25 bp, probe
gaacaagacacggctgggttggata

SEQ ID NO: 215912 - DNA, 25 bp, probe
gaacactaccgggagatcttcgaca

SEQ ID NO: 215913 - DNA, 25 bp, probe
gaacaccatcctgggagttagggca

SEQ ID NO: 215914 - DNA, 25 bp, probe
gaacatttcactggacagcccaggg

SEQ ID NO: 215915 - DNA, 25 bp, probe
gaacatcattaaactcaaccaggtg

SEQ ID NO: 215916 - DNA, 25 bp, probe
gaacacctatggatcaacactggtc

SEQ ID NO: 215917 - DNA, 25 bp, probe
gaacactcttggtagaagcccttct

SEQ ID NO: 215918 - DNA, 25 bp, probe
gaacacactgtataaactcttttta

SEQ ID NO: 215919 - DNA, 25 bp, probe
gaaaactcaaaatgtcttcctaaca

SEQ ID NO: 215920 - DNA, 25 bp, probe
gaaaactcaaaatgtcttcctaaca

SEQ ID NO: 215921 - DNA, 25 bp, probe
gaacaagatagaaagggtagccata

SEQ ID NO: 215922 - DNA, 25 bp, probe
gaacaaaaacaaggtctacagccat

SEQ ID NO: 215923 - DNA, 25 bp, probe
gaacaggagaaggccgtcttccagt

SEQ ID NO: 215924 - DNA, 25 bp, probe
gaaacaggaccctgtgcttcctgtg

SEQ ID NO: 215925 - DNA, 25 bp, probe
gaaacaggaccctgtgcttcctgtg

SEQ ID NO: 215926 - DNA, 25 bp, probe
gaaatgagggctttagtttcctggg

SEQ ID NO: 215927 - DNA, 25 bp, probe
gaaatgagggctttagtttcctggg

SEQ ID NO: 215928 - DNA, 25 bp, probe
gaaaaacctctgagtttcaccttag

SEQ ID NO: 215929 - DNA, 25 bp, probe
gaaaaacagctggggccacaacttt

SEQ ID NO: 215930 - DNA, 25 bp, probe
gaaaaacagctggggccacaacttt

SEQ ID NO: 215931 - DNA, 25 bp, probe
gaaaacaagggatggctcattgttt

SEQ ID NO: 215932 - DNA, 25 bp, probe
gaaaaataaagacacctggttgcta

SEQ ID NO: 215933 - DNA, 25 bp, probe
gaaaacaccaaataccgagggatca

SEQ ID NO: 215934 - DNA, 25 bp, probe
gaaaatcccagaagtcaaaggggat

SEQ ID NO: 215935 - DNA, 25 bp, probe
gaacagacccaaattcaatggcatg

SEQ ID NO: 215936 - DNA, 25 bp, probe
gaacaactcgagctttgaggcttcc

SEQ ID NO: 215937 - DNA, 25 bp, probe
gaacaacttcagcctgttaggttta

SEQ ID NO: 215938 - DNA, 25 bp, probe
gaacaccttccgctgtgaaatcttc

SEQ ID NO: 215939 - DNA, 25 bp, probe
gaacactgctccaggtggaactggt

SEQ ID NO: 215940 - DNA, 25 bp, probe
gataacttcctgatgggtactgggc

SEQ ID NO: 215941 - DNA, 25 bp, probe
gaaacttggagaagggtcctatggc

SEQ ID NO: 215942 - DNA, 25 bp, probe
gaaacttggagaaggattactgtag

SEQ ID NO: 215943 - DNA, 25 bp, probe
gaaagtttgcaatgaagtagtcgac

SEQ ID NO: 215944 - DNA, 25 bp, probe
gaacagttctcataataaagcactt

SEQ ID NO: 215945 - DNA, 25 bp, probe
gaacactttcaaattaaatatcagt

SEQ ID NO: 215946 - DNA, 25 bp, probe
gagaattttgattttttaaagtgtg

SEQ ID NO: 215947 - DNA, 25 bp, probe
gaacacattttattttctacaattt

SEQ ID NO: 215948 - DNA, 25 bp, probe
gaacatctctttacttttcagtgtc

SEQ ID NO: 215949 - DNA, 25 bp, probe
gaacagttgtgtccagattaaggga

SEQ ID NO: 215950 - DNA, 25 bp, probe
gaacagcctttgccaatcgtgggtg

SEQ ID NO: 215951 - DNA, 25 bp, probe
gaacaggctctgcgcatgagcgtgg

SEQ ID NO: 215952 - DNA, 25 bp, probe
gaacagccttggcatggtgtggggg

SEQ ID NO: 215953 - DNA, 25 bp, probe
gaacatcttaagcagcgtcgagaag

SEQ ID NO: 215954 - DNA, 25 bp, probe
gaacattgtcaacgtggtctataaa

SEQ ID NO: 215955 - DNA, 25 bp, probe
gaacattgtcaacgtggtctataaa

SEQ ID NO: 215956 - DNA, 25 bp, probe
gaacatattaaactgcttattcaaa

SEQ ID NO: 215957 - DNA, 25 bp, probe
gaacattattaaagttgctgccaag

SEQ ID NO: 215958 - DNA, 25 bp, probe
gaacattattaaagttgctgccaag

SEQ ID NO: 215959 - DNA, 25 bp, probe
gaacatacaatcaagtttgctggaa

SEQ ID NO: 215960 - DNA, 25 bp, probe
gaacataggacacgcttctgtctgt

SEQ ID NO: 215961 - DNA, 25 bp, probe
gaaaaggaacacatctgctgcttag

SEQ ID NO: 215962 - DNA, 25 bp, probe
gaaaagtgaagtatggctgtaagtc

SEQ ID NO: 215963 - DNA, 25 bp, probe
gaaaatggaagtctatgtgatcaag

SEQ ID NO: 215964 - DNA, 25 bp, probe
gaaaatgtgaggttgtttagatact

SEQ ID NO: 215965 - DNA, 25 bp, probe
gaaaatgtgaggttgtttagatact

SEQ ID NO: 215966 - DNA, 25 bp, probe
gaacatcattgactttgtctctatt

SEQ ID NO: 215967 - DNA, 25 bp, probe
gaacatatgctgtcatgattgtgct

SEQ ID NO: 215968 - DNA, 25 bp, probe
gaacatatgcagttattccactaaa

SEQ ID NO: 215969 - DNA, 25 bp, probe
gaacatcagagttgtaccataaata

SEQ ID NO: 215970 - DNA, 25 bp, probe
gaacacagaggattatctcttccaa

SEQ ID NO: 215971 - DNA, 25 bp, probe
gaaaaaggtgctatcgttcaacttc

SEQ ID NO: 215972 - DNA, 25 bp, probe
gaaaaaggtgctatcgttcaacttc

SEQ ID NO: 215973 - DNA, 25 bp, probe
gaaaaagtacttgcttttagagcca

SEQ ID NO: 215974 - DNA, 25 bp, probe
gaacacatagatactagatttttaa

SEQ ID NO: 215975 - DNA, 25 bp, probe
gaacagatagttggaattctagaca

SEQ ID NO: 215976 - DNA, 25 bp, probe
gaacaacactgctggtttgagacct

SEQ ID NO: 215977 - DNA, 25 bp, probe
gaacaacactgctggtttgagacct

SEQ ID NO: 215978 - DNA, 25 bp, probe
gaacactactgcctgtagtctgatg

SEQ ID NO: 215979 - DNA, 25 bp, probe
gaacatcttctgggaatggtgagct

SEQ ID NO: 215980 - DNA, 25 bp, probe
gaacatctttgacactctgcagact

SEQ ID NO: 215981 - DNA, 25 bp, probe
gaacatggattaggatcctagactg

SEQ ID NO: 215982 - DNA, 25 bp, probe
gaaattatatcaggctttaccggtt

SEQ ID NO: 215983 - DNA, 25 bp, probe
gaaagtctggagtgtttccctgtta

SEQ ID NO: 215984 - DNA, 25 bp, probe
gaaaagattgtgtgtcacccctgtt

SEQ ID NO: 215985 - DNA, 25 bp, probe
gaacaaaatctgttgccacccaggt

SEQ ID NO: 215986 - DNA, 25 bp, probe
gaacaaaacgttcacaacatcgtca

SEQ ID NO: 215987 - DNA, 25 bp, probe
gaaaaaaggttgtgtagctgtgtca

SEQ ID NO: 215988 - DNA, 25 bp, probe
gaaaaaacctggaatgacaatgtcc

SEQ ID NO: 215989 - DNA, 25 bp, probe
gaaaattgagcggaatcgacaaccc

SEQ ID NO: 215990 - DNA, 25 bp, probe
gaaaattgagcggaatcgacaaccc

SEQ ID NO: 215991 - DNA, 25 bp, probe
gaaaatctgggtcataggcctctcc

SEQ ID NO: 215992 - DNA, 25 bp, probe
gaaaactggtgtgcttgggtctgga

SEQ ID NO: 215993 - DNA, 25 bp, probe
gaaaactgcggtggaggaagttttg

SEQ ID NO: 215994 - DNA, 25 bp, probe
gaaactcgggtctggacaattcggc

SEQ ID NO: 215995 - DNA, 25 bp, probe
gaacacacgggtcaggagtcttatg

SEQ ID NO: 215996 - DNA, 25 bp, probe
gaacaacagggtgtgtaccttatta

SEQ ID NO: 215997 - DNA, 25 bp, probe
gaacaacagggtgtgtaccttatta

SEQ ID NO: 215998 - DNA, 25 bp, probe
gaacaaatggtgcttaccctttgaa

SEQ ID NO: 215999 - DNA, 25 bp, probe
gaaacaacttggagaccaccttaat

SEQ ID NO: 216000 - DNA, 25 bp, probe
gaaaacctgcggagacgccagtgtg

SEQ ID NO: 216001 - DNA, 25 bp, probe
gaaaatcaggctggccaacggggtg

SEQ ID NO: 216002 - DNA, 25 bp, probe
gaaaaaggcttctacacggagcggg

SEQ ID NO: 216003 - DNA, 25 bp, probe
gaaaaggacccatacggctcgatgg

SEQ ID NO: 216004 - DNA, 25 bp, probe
gaaaagaaactatctcggtcacgtg

SEQ ID NO: 216005 - DNA, 25 bp, probe
gaaacagataagtgaattggtaaga

SEQ ID NO: 216006 - DNA, 25 bp, probe
gaaacagataagtgaattggtaaga

SEQ ID NO: 216007 - DNA, 25 bp, probe
gaaacagagaggtggtttgtgggag

SEQ ID NO: 216008 - DNA, 25 bp, probe
gaaaaggaggtccgttcagctccgc

SEQ ID NO: 216009 - DNA, 25 bp, probe
gaaaatggggatcctgtacaaccct

SEQ ID NO: 216010 - DNA, 25 bp, probe
gaaaatggggatcctgtacaaccct

SEQ ID NO: 216011 - DNA, 25 bp, probe
gaaatacgtggtctgctttgaccca

SEQ ID NO: 216012 - DNA, 25 bp, probe
gaacatcacgtgcatttgctatgtg

SEQ ID NO: 216013 - DNA, 25 bp, probe
gaacaacagtagtttctcagggtca

SEQ ID NO: 216014 - DNA, 25 bp, probe
gaacaaccggtttctcagaagctga

SEQ ID NO: 216015 - DNA, 25 bp, probe
gaaataaagcgtcctctcagtaatg

SEQ ID NO: 216016 - DNA, 25 bp, probe
gaaacagaacctctctagctaatgt

SEQ ID NO: 216017 - DNA, 25 bp, probe
gactatcagacctggttagatttgc

SEQ ID NO: 216018 - DNA, 25 bp, probe
gaacacagacttatggatcgttatg

SEQ ID NO: 216019 - DNA, 25 bp, probe
taacaattctttgttctttacgttg

SEQ ID NO: 216020 - DNA, 25 bp, probe
gaacaatatctcactttcattatac

SEQ ID NO: 216021 - DNA, 25 bp, probe
gaacactgctcaaactttctgctat

SEQ ID NO: 216022 - DNA, 25 bp, probe
gaacagttacagtctaattgtcttg

SEQ ID NO: 216023 - DNA, 25 bp, probe
gaacagttacagtctaattgtcttg

SEQ ID NO: 216024 - DNA, 25 bp, probe
gaacagctgtaatctatgaattcta

SEQ ID NO: 216025 - DNA, 25 bp, probe
gaacaatgcatatccctgaaactga

SEQ ID NO: 216026 - DNA, 25 bp, probe
gaacaagcttatgctcaaacacaga

SEQ ID NO: 216027 - DNA, 25 bp, probe
gaacaagcttatgctcaaacacaga

SEQ ID NO: 216028 - DNA, 25 bp, probe
gaacacagcttcatcaagcgctacg

SEQ ID NO: 216029 - DNA, 25 bp, probe
gaacacagcttcatcaagcgctacg

SEQ ID NO: 216030 - DNA, 25 bp, probe
gaacacagcttcatcaagcgctacg

SEQ ID NO: 216031 - DNA, 25 bp, probe
gaacacgttcattcaactgtgatca

SEQ ID NO: 216032 - DNA, 25 bp, probe
gaacacgttcattcaactgtgatca

SEQ ID NO: 216033 - DNA, 25 bp, probe
gaacatcacattttcagtctgtctc

SEQ ID NO: 216034 - DNA, 25 bp, probe
gaacatcagcaatccacctgatatg

SEQ ID NO: 216035 - DNA, 25 bp, probe
gaacatcagcaatccacctgatatg

SEQ ID NO: 216036 - DNA, 25 bp, probe
gaacatcacacatccagagctaaag

SEQ ID NO: 216037 - DNA, 25 bp, probe
gaacagacacagcccgagggacagc

SEQ ID NO: 216038 - DNA, 25 bp, probe
gaacagcaatcttgccagtgtggaa

SEQ ID NO: 216039 - DNA, 25 bp, probe
gaacagcgtcttgcctgtgatcatc

SEQ ID NO: 216040 - DNA, 25 bp, probe
gaacatcgactttgacagtttcatc

SEQ ID NO: 216041 - DNA, 25 bp, probe
gaacatcggccatgaaaatccatca

SEQ ID NO: 216042 - DNA, 25 bp, probe
gaacatctgtcctgtgaaagactca

SEQ ID NO: 216043 - DNA, 25 bp, probe
gaacactgcttctcgaatggagtct

SEQ ID NO: 216044 - DNA, 25 bp, probe
gaacactgcctctgagttttgatgc

SEQ ID NO: 216045 - DNA, 25 bp, probe
gaacattctctcatagaacattgat

SEQ ID NO: 216046 - DNA, 25 bp, probe
gaacaactgccggtgatactggtag

SEQ ID NO: 216047 - DNA, 25 bp, probe
gaacaagccccaggcaagctggaac

SEQ ID NO: 216048 - DNA, 25 bp, probe
gaacacgctggttcataggctggca

SEQ ID NO: 216049 - DNA, 25 bp, probe
gaaacgggatgtgaggctactttat

SEQ ID NO: 216050 - DNA, 25 bp, probe
gacaaccccagtgagttacttaata

SEQ ID NO: 216051 - DNA, 25 bp, probe
gaaaaagacagttaattaccatatc

SEQ ID NO: 216052 - DNA, 25 bp, probe
gaaaaataagaacctgtacgtccat

SEQ ID NO: 216053 - DNA, 25 bp, probe
gaaaaataagaacctgtacgtccat

SEQ ID NO: 216054 - DNA, 25 bp, probe
gaaaaagagcatgacctggaaccct

SEQ ID NO: 216055 - DNA, 25 bp, probe
gaacagcaaacaggaccagggcaag

SEQ ID NO: 216056 - DNA, 25 bp, probe
gaacatcaacaagggccggaagacg

SEQ ID NO: 216057 - DNA, 25 bp, probe
gaacacagacaaccttccgaaggcc

SEQ ID NO: 216058 - DNA, 25 bp, probe
gacgacgacgatgtcgtcggggcca

SEQ ID NO: 216059 - DNA, 25 bp, probe
gaaagcgcctatgtggtcgtgggaa

SEQ ID NO: 216060 - DNA, 25 bp, probe
gaaagcccatttaaatgtgagcgga

SEQ ID NO: 216061 - DNA, 25 bp, probe
gaaaacatcatttgcaaagggagag

SEQ ID NO: 216062 - DNA, 25 bp, probe
gaacaacatcgtcaagtgccaggcg

SEQ ID NO: 216063 - DNA, 25 bp, probe
gaacaaggtgtccaaggctgagtcg

SEQ ID NO: 216064 - DNA, 25 bp, probe
gaacaggtgtgttgaagccgggctc

SEQ ID NO: 216065 - DNA, 25 bp, probe
gaacaggtgtgttgaagccgggctc

SEQ ID NO: 216066 - DNA, 25 bp, probe
gaacatggagatctgcaagcggagg

SEQ ID NO: 216067 - DNA, 25 bp, probe
gaacatgagtcatacgggaggcgag

SEQ ID NO: 216068 - DNA, 25 bp, probe
gaacagaactggtgggagggcagaa

SEQ ID NO: 216069 - DNA, 25 bp, probe
gaacagactgagcgtggaagggaga

SEQ ID NO: 216070 - DNA, 25 bp, probe
gaacagatgcagactgtgattgaag

SEQ ID NO: 216071 - DNA, 25 bp, probe
gaacagcagcagacgtgtcgggagg

SEQ ID NO: 216072 - DNA, 25 bp, probe
gaacagcagcagacgtgtcgggagg

SEQ ID NO: 216073 - DNA, 25 bp, probe
gaacacagcagagtctgtgccatga

SEQ ID NO: 216074 - DNA, 25 bp, probe
gaaaaccagatcgtgcacagagaca

SEQ ID NO: 216075 - DNA, 25 bp, probe
gaaaacctgatggaccagtacagcg

SEQ ID NO: 216076 - DNA, 25 bp, probe
gaaaatgccttccacgcaaataaga

SEQ ID NO: 216077 - DNA, 25 bp, probe
gaaaatttaccacataaacatcact

SEQ ID NO: 216078 - DNA, 25 bp, probe
gaaaatttacagaggcaaaacctga

SEQ ID NO: 216079 - DNA, 25 bp, probe
gagaaattccggaaccggaactctg

SEQ ID NO: 216080 - DNA, 25 bp, probe
gaaaaccctgaagccaggaactatg

SEQ ID NO: 216081 - DNA, 25 bp, probe
gaaaaccctgaagccaggaactatg

SEQ ID NO: 216082 - DNA, 25 bp, probe
gaaaatctcttgtactacagtcaag

SEQ ID NO: 216083 - DNA, 25 bp, probe
gaaaagcctgctgtgtacaccaagg

SEQ ID NO: 216084 - DNA, 25 bp, probe
gaaaacctgtgtaccagacctaagt

SEQ ID NO: 216085 - DNA, 25 bp, probe
gaaaatggtttaccagctcccaggt

SEQ ID NO: 216086 - DNA, 25 bp, probe
gaaaaggatttgaagcattccagcc

SEQ ID NO: 216087 - DNA, 25 bp, probe
gaaaagggtcggaatctggcagatc

SEQ ID NO: 216088 - DNA, 25 bp, probe
gaacaaggagttcattcatctcaat

SEQ ID NO: 216089 - DNA, 25 bp, probe
gaacaaggagttcattcatctcaat

SEQ ID NO: 216090 - DNA, 25 bp, probe
gaaaatgtggtttatcacttaagag

SEQ ID NO: 216091 - DNA, 25 bp, probe
gaaaactgtagttacgagtcaatgg

SEQ ID NO: 216092 - DNA, 25 bp, probe
gaacagcactgatattcaggttcaa

SEQ ID NO: 216093 - DNA, 25 bp, probe
gaacacattatatacaggatgtcag

SEQ ID NO: 216094 - DNA, 25 bp, probe
gaacagcattgtaaaatggcacaag

SEQ ID NO: 216095 - DNA, 25 bp, probe
gaacaccattcaaagattacaagga

SEQ ID NO: 216096 - DNA, 25 bp, probe
gaacaccattcaaagattacaagga

SEQ ID NO: 216097 - DNA, 25 bp, probe
gaacatcctaaatttctacactgga

SEQ ID NO: 216098 - DNA, 25 bp, probe
gaacaggaaagtttctcagcgccga

SEQ ID NO: 216099 - DNA, 25 bp, probe
gaacagcaaaagtcttatccccaga

SEQ ID NO: 216100 - DNA, 25 bp, probe
gaacagaaatgggatgctagcgtgc

SEQ ID NO: 216101 - DNA, 25 bp, probe
gaacagtgggtggtatcagcaggcc

SEQ ID NO: 216102 - DNA, 25 bp, probe
gaaaggccattggcaaagaggccgg

SEQ ID NO: 216103 - DNA, 25 bp, probe
gaacaggtcacgggaagagctgggg

SEQ ID NO: 216104 - DNA, 25 bp, probe
gaacagaaacgccgaatatccaggg

SEQ ID NO: 216105 - DNA, 25 bp, probe
gaaaaacaacctccatatcctggcg

SEQ ID NO: 216106 - DNA, 25 bp, probe
gaaaataccccatcattcatgctac

SEQ ID NO: 216107 - DNA, 25 bp, probe
gaaaataccccatcattcatgctac

SEQ ID NO: 216108 - DNA, 25 bp, probe
gaaaataacccaaaggcatgctcca

SEQ ID NO: 216109 - DNA, 25 bp, probe
gaaaattcaactatcccatggccac

SEQ ID NO: 216110 - DNA, 25 bp, probe
gaaaattcaactatcccatggccac

SEQ ID NO: 216111 - DNA, 25 bp, probe
gaaagatgtcccaggatccatggca

SEQ ID NO: 216112 - DNA, 25 bp, probe
gaacaagtcccgggacaacagcagg

SEQ ID NO: 216113 - DNA, 25 bp, probe
gaacaagtcccgggacaacagcagg

SEQ ID NO: 216114 - DNA, 25 bp, probe
gaacaaacccagatgcagcaacgca

SEQ ID NO: 216115 - DNA, 25 bp, probe
gaaaagttcaagactgccacactgg

SEQ ID NO: 216116 - DNA, 25 bp, probe
gaaacagcccaagcttcagcgggcc

SEQ ID NO: 216117 - DNA, 25 bp, probe
gaaaagcccaagctgcaggtggagc

SEQ ID NO: 216118 - DNA, 25 bp, probe
gaaaagcactggtcgtcagggagct

SEQ ID NO: 216119 - DNA, 25 bp, probe
gaaaaggaggcacgtcggaagttca

SEQ ID NO: 216120 - DNA, 25 bp, probe
gaaaaggagtagctcagacctgttt

SEQ ID NO: 216121 - DNA, 25 bp, probe
gaaaagccatattcatcttgatcct

SEQ ID NO: 216122 - DNA, 25 bp, probe
gaaaagccatattcatcttgatcct

SEQ ID NO: 216123 - DNA, 25 bp, probe
gaaaagctcattaacttaactgaca

SEQ ID NO: 216124 - DNA, 25 bp, probe
gaaaagtcattcagttatcactaca

SEQ ID NO: 216125 - DNA, 25 bp, probe
gaaaaggatatatgtttgattatga

SEQ ID NO: 216126 - DNA, 25 bp, probe
gaaaagaatgattcagtcttgacgg

SEQ ID NO: 216127 - DNA, 25 bp, probe
gaaaaattttcagttgggatgcgac

SEQ ID NO: 216128 - DNA, 25 bp, probe
gaaaaattttcagttgggatgcgac

SEQ ID NO: 216129 - DNA, 25 bp, probe
gaaaaatgggtctcattcgtgtgac

SEQ ID NO: 216130 - DNA, 25 bp, probe
gaaacaatagcgacagccattcgta

SEQ ID NO: 216131 - DNA, 25 bp, probe
gaacaagacaagatccacctgatca

SEQ ID NO: 216132 - DNA, 25 bp, probe
gaacaaacaaatccaactatgtagt

SEQ ID NO: 216133 - DNA, 25 bp, probe
gaacagagacacacaaatcaatggg

SEQ ID NO: 216134 - DNA, 25 bp, probe
gaacagcatgacctggatcactatt

SEQ ID NO: 216135 - DNA, 25 bp, probe
gaacagttgtctggatccattttgt

SEQ ID NO: 216136 - DNA, 25 bp, probe
gaacagttgtctggatccattttgt

SEQ ID NO: 216137 - DNA, 25 bp, probe
gaacagcttggaacaccatgtcctg

SEQ ID NO: 216138 - DNA, 25 bp, probe
gaacagcttggaacaccatgtcctg

SEQ ID NO: 216139 - DNA, 25 bp, probe
gaacaattggtactcacctcagtgc

SEQ ID NO: 216140 - DNA, 25 bp, probe
gaaaatgtgttgctagcctcagctg

SEQ ID NO: 216141 - DNA, 25 bp, probe
gaaaattggtggaagctctcaggca

SEQ ID NO: 216142 - DNA, 25 bp, probe
gaacactatcgacatacctcagaat

SEQ ID NO: 216143 - DNA, 25 bp, probe
gaacactatcgacatacctcagaat

SEQ ID NO: 216144 - DNA, 25 bp, probe
gaacagatgcacgagaaatccatcc

SEQ ID NO: 216145 - DNA, 25 bp, probe
gaacaacctggactatatcatccgc

SEQ ID NO: 216146 - DNA, 25 bp, probe
gaacacgcccggacatatatccagt

SEQ ID NO: 216147 - DNA, 25 bp, probe
gaaaacccgatcgaatactgagcat

SEQ ID NO: 216148 - DNA, 25 bp, probe
gaacaaccccttgagaatgagattg

SEQ ID NO: 216149 - DNA, 25 bp, probe
gagcctaccccagaagtaacatggt

SEQ ID NO: 216150 - DNA, 25 bp, probe
gaaatacctccagaagattcaagga

SEQ ID NO: 216151 - DNA, 25 bp, probe
gaaaaagcccaaggagatcaaagtc

SEQ ID NO: 216152 - DNA, 25 bp, probe
gaaaaagggaagggctgtcaggatg

SEQ ID NO: 216153 - DNA, 25 bp, probe
gaacaaaggcagtcagtgcctgtgc

SEQ ID NO: 216154 - DNA, 25 bp, probe
gaacagaagacagagcatgctcttt

SEQ ID NO: 216155 - DNA, 25 bp, probe
gaacagaagacagagcatgctcttt

SEQ ID NO: 216156 - DNA, 25 bp, probe
gaaaaaatcacttctttctgctgcc

SEQ ID NO: 216157 - DNA, 25 bp, probe
gaacaaacctcatttaccagtgctt

SEQ ID NO: 216158 - DNA, 25 bp, probe
gaaaacacctactgactttgtggag

SEQ ID NO: 216159 - DNA, 25 bp, probe
gaaaaccagtggaagatttcttgac

SEQ ID NO: 216160 - DNA, 25 bp, probe
gaaaatacacttggaggttcttgaa

SEQ ID NO: 216161 - DNA, 25 bp, probe
gaaaataccgaatgggtcttattca

SEQ ID NO: 216162 - DNA, 25 bp, probe
gaaaacttccaacttgtgttctcag

SEQ ID NO: 216163 - DNA, 25 bp, probe
gaaaatatcccaaatttgcctcctg

SEQ ID NO: 216164 - DNA, 25 bp, probe
gaaaatctccgattttggaacctcg

SEQ ID NO: 216165 - DNA, 25 bp, probe
taaaaaccaacactagttacctcag

SEQ ID NO: 216166 - DNA, 25 bp, probe
gaaagggccaaacaaaaagctagag

SEQ ID NO: 216167 - DNA, 25 bp, probe
gaaacgccggaacaaaaatgaggtg

SEQ ID NO: 216168 - DNA, 25 bp, probe
gaaaagccgttccaaaaacagagtg

SEQ ID NO: 216169 - DNA, 25 bp, probe
gaaaggccagttgactaagaagaaa

SEQ ID NO: 216170 - DNA, 25 bp, probe
gaacaggctcaggactatctcaaga

SEQ ID NO: 216171 - DNA, 25 bp, probe
gaacagcagtattcctaccaggaaa

SEQ ID NO: 216172 - DNA, 25 bp, probe
gaacagcagcagtgccatagccagg

SEQ ID NO: 216173 - DNA, 25 bp, probe
gaacaacagttggcaggacaggtgt

SEQ ID NO: 216174 - DNA, 25 bp, probe
gaacaacatgcattccgagaagctg

SEQ ID NO: 216175 - DNA, 25 bp, probe
gaaaagtgatgagggcagcaagcag

SEQ ID NO: 216176 - DNA, 25 bp, probe
gaacaaggtgctgaagatagagctg

SEQ ID NO: 216177 - DNA, 25 bp, probe
gaacacgcggctgaagcactgtgtg

SEQ ID NO: 216178 - DNA, 25 bp, probe
gaacaggtgtcttaatgcatttgga

SEQ ID NO: 216179 - DNA, 25 bp, probe
gaacaggtgtcttaatgcatttgga

SEQ ID NO: 216180 - DNA, 25 bp, probe
gaacagagttttcctcatatgagta

SEQ ID NO: 216181 - DNA, 25 bp, probe
gaacaatgtcagaaactcgatgaat

SEQ ID NO: 216182 - DNA, 25 bp, probe
gaacagcatgtggtgaaatcaaaat

SEQ ID NO: 216183 - DNA, 25 bp, probe
gaacagacagagaaaccaaactaac

SEQ ID NO: 216184 - DNA, 25 bp, probe
tagaaacggaaaacagctactacct

SEQ ID NO: 216185 - DNA, 25 bp, probe
gaaaacgtacaaagcctgacttaca

SEQ ID NO: 216186 - DNA, 25 bp, probe
gaacaacgaaattcactgctccttt

SEQ ID NO: 216187 - DNA, 25 bp, probe
gaacaactatatttcaccctctatt

SEQ ID NO: 216188 - DNA, 25 bp, probe
gaacaattctgaagttcccttctgt

SEQ ID NO: 216189 - DNA, 25 bp, probe
gaacaattctgaagttcccttctgt

SEQ ID NO: 216190 - DNA, 25 bp, probe
gaacaattgtacaagatcccactct

SEQ ID NO: 216191 - DNA, 25 bp, probe
gaaatctgcataaggaagcccactt

SEQ ID NO: 216192 - DNA, 25 bp, probe
gaacactgaaagaaaccactcacgt

SEQ ID NO: 216193 - DNA, 25 bp, probe
gaacactacgaaaactgcagctcca

SEQ ID NO: 216194 - DNA, 25 bp, probe
gaacaccaaaagaagcagcagcagc

SEQ ID NO: 216195 - DNA, 25 bp, probe
gaacaccagatctttatgcacagct

SEQ ID NO: 216196 - DNA, 25 bp, probe
gaacagacaatcttgatcagcagag

SEQ ID NO: 216197 - DNA, 25 bp, probe
gaacaacaacgagtcacagagttaa

SEQ ID NO: 216198 - DNA, 25 bp, probe
gaacaacatcagcagtaaagtccat

SEQ ID NO: 216199 - DNA, 25 bp, probe
gaacagccatctctggaagaagcca

SEQ ID NO: 216200 - DNA, 25 bp, probe
gaacaccactggggacagcacagac

SEQ ID NO: 216201 - DNA, 25 bp, probe
gaacacaaagtggagaagagctatc

SEQ ID NO: 216202 - DNA, 25 bp, probe
gaaacagagaggggaatacttatgc

SEQ ID NO: 216203 - DNA, 25 bp, probe
gaaaaaatggggccacctcttgcca

SEQ ID NO: 216204 - DNA, 25 bp, probe
gaacaagatgtgtggtactttacca

SEQ ID NO: 216205 - DNA, 25 bp, probe
gaacacatagtgtggatccaactag

SEQ ID NO: 216206 - DNA, 25 bp, probe
gaaaatcgctgcagcgacacaagtg

SEQ ID NO: 216207 - DNA, 25 bp, probe
gaacaattgcacaccagcaaaggca

SEQ ID NO: 216208 - DNA, 25 bp, probe
gaacaatctgtcaacaaaattgcga

SEQ ID NO: 216209 - DNA, 25 bp, probe
gaacaagcagtggacctgacattgc

SEQ ID NO: 216210 - DNA, 25 bp, probe
gaacacacagtgacacatctccagt

SEQ ID NO: 216211 - DNA, 25 bp, probe
gtcctcaagggccacatagctgtga

SEQ ID NO: 216212 - DNA, 25 bp, probe
gaacaagatgagcattctgtcaggt

SEQ ID NO: 216213 - DNA, 25 bp, probe
gaacagctttgctatgtgcttcgca

SEQ ID NO: 216214 - DNA, 25 bp, probe
gaacagctttgctatgtgcttcgca

SEQ ID NO: 216215 - DNA, 25 bp, probe
gaacagctttgctatgtgcttcgca

SEQ ID NO: 216216 - DNA, 25 bp, probe
gaacagctttgctatgtgcttcgca

SEQ ID NO: 216217 - DNA, 25 bp, probe
gaacactatgtgtattaatccactc

SEQ ID NO: 216218 - DNA, 25 bp, probe
gaaactagctacataagtactttga

SEQ ID NO: 216219 - DNA, 25 bp, probe
tgcaaagtagattcgtagttagttt

SEQ ID NO: 216220 - DNA, 25 bp, probe
tagggcttgtactcactttaatttg

SEQ ID NO: 216221 - DNA, 25 bp, probe
tctaggtggacctcacttgttttta

SEQ ID NO: 216222 - DNA, 25 bp, probe
tctaggtggacctcacttgttttta

SEQ ID NO: 216223 - DNA, 25 bp, probe
tctacagggaccacggctttggttc

SEQ ID NO: 216224 - DNA, 25 bp, probe
taaccgagggctggcgttttggaat

SEQ ID NO: 216225 - DNA, 25 bp, probe
gaacacagaggactaccttttccaa

SEQ ID NO: 216226 - DNA, 25 bp, probe
gaacaagcggagcaccatctgtttc

SEQ ID NO: 216227 - DNA, 25 bp, probe
gaacaaagagagctcatcatcagtc

SEQ ID NO: 216228 - DNA, 25 bp, probe
gaacaaagagagctcatcatcagtc

SEQ ID NO: 216229 - DNA, 25 bp, probe
gaaaatcaagagatccatctcacag

SEQ ID NO: 216230 - DNA, 25 bp, probe
gaaacacaaaattcaattcctcggc

SEQ ID NO: 216231 - DNA, 25 bp, probe
gaaaacaaaagatagccccacgaag

SEQ ID NO: 216232 - DNA, 25 bp, probe
gaaaactacgagcacaacaccagcg

SEQ ID NO: 216233 - DNA, 25 bp, probe
gaaaagctccagattctcaaaccag

SEQ ID NO: 216234 - DNA, 25 bp, probe
gaaaagctccagattctcaaaccag

SEQ ID NO: 216235 - DNA, 25 bp, probe
gaaacactacagacactacagaaaa

SEQ ID NO: 216236 - DNA, 25 bp, probe
gaaacactacagacactacagaaaa

SEQ ID NO: 216237 - DNA, 25 bp, probe
gaaaatgctacaacagtcactgagt

SEQ ID NO: 216238 - DNA, 25 bp, probe
gaacaatataccaagagcacggctg

SEQ ID NO: 216239 - DNA, 25 bp, probe
gaacaattgtctctggacggcagct

SEQ ID NO: 216240 - DNA, 25 bp, probe
gaacacagagtccctgaaaggcagc

SEQ ID NO: 216241 - DNA, 25 bp, probe
gaaaagatgcccccactgggcagac

SEQ ID NO: 216242 - DNA, 25 bp, probe
gaaaagctccctcacatcagagact

SEQ ID NO: 216243 - DNA, 25 bp, probe
gaaaagtcgcccaaaatgcaacctt

SEQ ID NO: 216244 - DNA, 25 bp, probe
gaaaagtgaaccacaagactccctc

SEQ ID NO: 216245 - DNA, 25 bp, probe
gaaaaggtaccttgacacctcctat

SEQ ID NO: 216246 - DNA, 25 bp, probe
gaaaaagtgaccttactcgtgcttt

SEQ ID NO: 216247 - DNA, 25 bp, probe
gaaaacattatcgcaactcagtcaa

SEQ ID NO: 216248 - DNA, 25 bp, probe
gaaaacattatcgcaactcagtcaa

SEQ ID NO: 216249 - DNA, 25 bp, probe
gaaaaaacatctaggcccagtcgaa

SEQ ID NO: 216250 - DNA, 25 bp, probe
gaaaataccatcaggcctaatctca

SEQ ID NO: 216251 - DNA, 25 bp, probe
gaacaaactatcaaagcttccactt

SEQ ID NO: 216252 - DNA, 25 bp, probe
gaacaaactatcaaagcttccactt

SEQ ID NO: 216253 - DNA, 25 bp, probe
gaaaaggtcatcatcgattctactt

SEQ ID NO: 216254 - DNA, 25 bp, probe
gaaaaggagcagcctcgtatttttc

SEQ ID NO: 216255 - DNA, 25 bp, probe
gaaaagggagtcatgcattttgctt

SEQ ID NO: 216256 - DNA, 25 bp, probe
gaaaactggcagctgtgacttacaa

SEQ ID NO: 216257 - DNA, 25 bp, probe
gaacaacgtggctggacaaacatct

SEQ ID NO: 216258 - DNA, 25 bp, probe
gaacaaatgcgagtacgggaacatc

SEQ ID NO: 216259 - DNA, 25 bp, probe
gaacacaacgaccagctatggtaca

SEQ ID NO: 216260 - DNA, 25 bp, probe
gaacacacagctggaggcttggaac

SEQ ID NO: 216261 - DNA, 25 bp, probe
gaacacaggcgggtgctggtgatga

SEQ ID NO: 216262 - DNA, 25 bp, probe
gaacaagttggacgtgaatgctgag

SEQ ID NO: 216263 - DNA, 25 bp, probe
gaacaacctagaagctttgctgcag

SEQ ID NO: 216264 - DNA, 25 bp, probe
gaacaacgcctgtggcattgccaac

SEQ ID NO: 216265 - DNA, 25 bp, probe
gaacaacgagcacagaattgcgcag

SEQ ID NO: 216266 - DNA, 25 bp, probe
gaacacaagacaccaaattgaactc

SEQ ID NO: 216267 - DNA, 25 bp, probe
gaaaaacaagaccagatgtgatttg

SEQ ID NO: 216268 - DNA, 25 bp, probe
gaaaataaaacactctggtcttgcc

SEQ ID NO: 216269 - DNA, 25 bp, probe
gaaactaacagactttggactacgc

SEQ ID NO: 216270 - DNA, 25 bp, probe
gaaaccaaatttctggcaaacgcag

SEQ ID NO: 216271 - DNA, 25 bp, probe
gaaacccagaattaatggctaccaa

SEQ ID NO: 216272 - DNA, 25 bp, probe
gaaaaggaaactgatgaacaccaat

SEQ ID NO: 216273 - DNA, 25 bp, probe
gaaaaggaaactgatgaacaccaat

SEQ ID NO: 216274 - DNA, 25 bp, probe
gaaaatggcaaactctaccagacca

SEQ ID NO: 216275 - DNA, 25 bp, probe
gaaaatggcaaactctaccagacca

SEQ ID NO: 216276 - DNA, 25 bp, probe
gaacaagcagcaagagcttaccata

SEQ ID NO: 216277 - DNA, 25 bp, probe
gaacaacagcattcagttatttgca

SEQ ID NO: 216278 - DNA, 25 bp, probe
gaacaaagatcctttttcatactga

SEQ ID NO: 216279 - DNA, 25 bp, probe
gaacaaaatcctgggcttcatcatg

SEQ ID NO: 216280 - DNA, 25 bp, probe
gaacaactatccatggctcttagcc

SEQ ID NO: 216281 - DNA, 25 bp, probe
gaacaaatatccaagtatcctcagc

SEQ ID NO: 216282 - DNA, 25 bp, probe
gaacaaatatccaagtatcctcagc

SEQ ID NO: 216283 - DNA, 25 bp, probe
gaaaatattgccatctccactatgc

SEQ ID NO: 216284 - DNA, 25 bp, probe
taaacaattccgtttactggcagga

SEQ ID NO: 216285 - DNA, 25 bp, probe
taaacaattccgtttactggcagga

SEQ ID NO: 216286 - DNA, 25 bp, probe
gaaacagcttctcagaactctgggg

SEQ ID NO: 216287 - DNA, 25 bp, probe
gaacacaggccttggaacaaggagg

SEQ ID NO: 216288 - DNA, 25 bp, probe
gaaaaacctagggaacaagtgctgg

SEQ ID NO: 216289 - DNA, 25 bp, probe
gaaaaacctagggaacaagtgctgg

SEQ ID NO: 216290 - DNA, 25 bp, probe
gaaaatcccttgaggaagaggctcg

SEQ ID NO: 216291 - DNA, 25 bp, probe
gaaaaggccggtcggaagagggcag

SEQ ID NO: 216292 - DNA, 25 bp, probe
gaaaagggggctcagatggagggct

SEQ ID NO: 216293 - DNA, 25 bp, probe
gaacacgagaaactcacagtggatg

SEQ ID NO: 216294 - DNA, 25 bp, probe
gaacacgagaaactcacagtggatg

SEQ ID NO: 216295 - DNA, 25 bp, probe
gaaaatggacatttccaagtatgtt

SEQ ID NO: 216296 - DNA, 25 bp, probe
gaaattaagtgatccaaagctgctg

SEQ ID NO: 216297 - DNA, 25 bp, probe
gaaatcatgaagcatcaccaggagc

SEQ ID NO: 216298 - DNA, 25 bp, probe
gaaaatcaagcttgctgacagtgcc

SEQ ID NO: 216299 - DNA, 25 bp, probe
gaaacagattgttctacagatgaat

SEQ ID NO: 216300 - DNA, 25 bp, probe
gaaaattgtgtactcccagacaaat

SEQ ID NO: 216301 - DNA, 25 bp, probe
gaaaattgtgtactcccagacaaat

SEQ ID NO: 216302 - DNA, 25 bp, probe
gaaaagtctgatgatcccaggaaac

SEQ ID NO: 216303 - DNA, 25 bp, probe
gaaaaagctgctgattccattagat

SEQ ID NO: 216304 - DNA, 25 bp, probe
gaaaacaggccagttcgttggatgg

SEQ ID NO: 216305 - DNA, 25 bp, probe
gaaaacaggccagttcgttggatgg

SEQ ID NO: 216306 - DNA, 25 bp, probe
gaaaagtcaccgattcttggacgac

SEQ ID NO: 216307 - DNA, 25 bp, probe
gaaacgtcccttgtcaggagacggc

SEQ ID NO: 216308 - DNA, 25 bp, probe
gaaacgtcccttgtcaggagacggc

SEQ ID NO: 216309 - DNA, 25 bp, probe
gaaaaactggtctgtcaggagaagt

SEQ ID NO: 216310 - DNA, 25 bp, probe
gagaaaactggttccagagtgggat

SEQ ID NO: 216311 - DNA, 25 bp, probe
gaaaaacgagcctcagctggcgaat

SEQ ID NO: 216312 - DNA, 25 bp, probe
gaaaaccgcccacagagtggacttc

SEQ ID NO: 216313 - DNA, 25 bp, probe
gaaaactggtcctgagaggtcctgt

SEQ ID NO: 216314 - DNA, 25 bp, probe
gaaaacgtgaaattgtctagtcctt

SEQ ID NO: 216315 - DNA, 25 bp, probe
gaaaacgtgaaattgtctagtcctt

SEQ ID NO: 216316 - DNA, 25 bp, probe
gaaaacctggacagttcgcttctac

SEQ ID NO: 216317 - DNA, 25 bp, probe
gaaaaccttaatagttctgcctgct

SEQ ID NO: 216318 - DNA, 25 bp, probe
gaaaagttctcagatgttcatcctg

SEQ ID NO: 216319 - DNA, 25 bp, probe
gaaaatgttcatcctatgtctccag

SEQ ID NO: 216320 - DNA, 25 bp, probe
gaaaattctacctgtgctacatagg

SEQ ID NO: 216321 - DNA, 25 bp, probe
gaaaactttggctctgtaagaagtc

SEQ ID NO: 216322 - DNA, 25 bp, probe
gaacacctttgagttcctgaaggag

SEQ ID NO: 216323 - DNA, 25 bp, probe
gaacaccctggatacactggagtgg

SEQ ID NO: 216324 - DNA, 25 bp, probe
gaaaccctggtaaatgacagtggga

SEQ ID NO: 216325 - DNA, 25 bp, probe
gaacaactcttcaagaagatccttg

SEQ ID NO: 216326 - DNA, 25 bp, probe
gaaaacttgtttacagctccagcat

SEQ ID NO: 216327 - DNA, 25 bp, probe
gagaaggcttgtattagtcccaagc

SEQ ID NO: 216328 - DNA, 25 bp, probe
gaaagcctttcgagaggcccaaggt

SEQ ID NO: 216329 - DNA, 25 bp, probe
gaaagccttcttttggggtcaacag

SEQ ID NO: 216330 - DNA, 25 bp, probe
gaaagccttcttttggggtcaacag

SEQ ID NO: 216331 - DNA, 25 bp, probe
gaaaagttctttgaggtttatgaga

SEQ ID NO: 216332 - DNA, 25 bp, probe
gaaaagttctttgaggtttatgaga

SEQ ID NO: 216333 - DNA, 25 bp, probe
gaaaatttacgtgacattcttttgc

SEQ ID NO: 216334 - DNA, 25 bp, probe
gaaacgtttgccatattttctttgc

SEQ ID NO: 216335 - DNA, 25 bp, probe
gaaatttattccttattccctcttg

SEQ ID NO: 216336 - DNA, 25 bp, probe
gaaatttattccttattccctcttg

SEQ ID NO: 216337 - DNA, 25 bp, probe
gaaaattattccttcaatccagtgt

SEQ ID NO: 216338 - DNA, 25 bp, probe
gaaaattattccttcaatccagtgt

SEQ ID NO: 216339 - DNA, 25 bp, probe
gaacacattttttctcaacattgta

SEQ ID NO: 216340 - DNA, 25 bp, probe
gaacaactttctctacattgtgttt

SEQ ID NO: 216341 - DNA, 25 bp, probe
gaaaacttgttcgcacgttgtttag

SEQ ID NO: 216342 - DNA, 25 bp, probe
gaaaagtggttcttacagtgctggt

SEQ ID NO: 216343 - DNA, 25 bp, probe
gaaaagtggttcttacagtgctggt

SEQ ID NO: 216344 - DNA, 25 bp, probe
gaacacagtggtactatgaggtcgg

SEQ ID NO: 216345 - DNA, 25 bp, probe
gaaacagtgactgctactttgggaa

SEQ ID NO: 216346 - DNA, 25 bp, probe
gaaacatggagctctaaatcgttaa

SEQ ID NO: 216347 - DNA, 25 bp, probe
gaaacatggagctctaaatcgttaa

SEQ ID NO: 216348 - DNA, 25 bp, probe
gaaaatgcagtctggaattccataa

SEQ ID NO: 216349 - DNA, 25 bp, probe
gaaaatgcattagggaaaacttaat

SEQ ID NO: 216350 - DNA, 25 bp, probe
gaaaagcaactcaaaacaacttcaa

SEQ ID NO: 216351 - DNA, 25 bp, probe
gaaaacagaccaaattcttctaaat

SEQ ID NO: 216352 - DNA, 25 bp, probe
gaaaacagacctaaatatgctggat

SEQ ID NO: 216353 - DNA, 25 bp, probe
gaacaacaagcccaacatggtcgac

SEQ ID NO: 216354 - DNA, 25 bp, probe
gaacaatcaaggcaactagtggaga

SEQ ID NO: 216355 - DNA, 25 bp, probe
gaacaatcaaggcaactagtggaga

SEQ ID NO: 216356 - DNA, 25 bp, probe
gaacaacagaggcagcagttgctta

SEQ ID NO: 216357 - DNA, 25 bp, probe
gaacaactaggcttcagcatattta

SEQ ID NO: 216358 - DNA, 25 bp, probe
gaaaacttagctcctgcttttgatc

SEQ ID NO: 216359 - DNA, 25 bp, probe
gaaaatttgggcgtttgttgttgca

SEQ ID NO: 216360 - DNA, 25 bp, probe
gaaaatgttcggtcatgattgcttt

SEQ ID NO: 216361 - DNA, 25 bp, probe
gaacacagctgtggagactttgctc

SEQ ID NO: 216362 - DNA, 25 bp, probe
gaacaagctgtggtactttgaattt

SEQ ID NO: 216363 - DNA, 25 bp, probe
gaacaactggtttattctgagtttc

SEQ ID NO: 216364 - DNA, 25 bp, probe
gaacaactggtttattctgagtttc

SEQ ID NO: 216365 - DNA, 25 bp, probe
gaacaactgttttaaatggtcttca

SEQ ID NO: 216366 - DNA, 25 bp, probe
gaacaactgttttaaatggtcttca

SEQ ID NO: 216367 - DNA, 25 bp, probe
gaaaactttcaaaattgcgagtcca

SEQ ID NO: 216368 - DNA, 25 bp, probe
gaaaaccttctaaaatcttacacag

SEQ ID NO: 216369 - DNA, 25 bp, probe
gaaaagcggtccacattgttcagag

SEQ ID NO: 216370 - DNA, 25 bp, probe
gaaaagaggtttgcatgctggtaat

SEQ ID NO: 216371 - DNA, 25 bp, probe
gaaaagggttctaacgagctcacac

SEQ ID NO: 216372 - DNA, 25 bp, probe
gaaagcagggtagacgtggccaagt

SEQ ID NO: 216373 - DNA, 25 bp, probe
gaaacgggtagttaatcctgcaagt

SEQ ID NO: 216374 - DNA, 25 bp, probe
gaaactcaggtacaaactcgacttc

SEQ ID NO: 216375 - DNA, 25 bp, probe
gaaactcagtcttcagaggcctcaa

SEQ ID NO: 216376 - DNA, 25 bp, probe
gaacaatcagttaaagaagctcaaa

SEQ ID NO: 216377 - DNA, 25 bp, probe
gaacaacagcttatatggcaccaga

SEQ ID NO: 216378 - DNA, 25 bp, probe
gaacaagcagccatactgatgacca

SEQ ID NO: 216379 - DNA, 25 bp, probe
gaaaacccatatttgatgggcagag

SEQ ID NO: 216380 - DNA, 25 bp, probe
gaaaacccatatttgatgggcagag

SEQ ID NO: 216381 - DNA, 25 bp, probe
gaaaattcactattggctgggagtg

SEQ ID NO: 216382 - DNA, 25 bp, probe
gaaaattacattggaagggagcttt

SEQ ID NO: 216383 - DNA, 25 bp, probe
gaaaattacattggaagggagcttt

SEQ ID NO: 216384 - DNA, 25 bp, probe
gaaaatccacattgcggaggttctg

SEQ ID NO: 216385 - DNA, 25 bp, probe
gaaaatccacattgcggaggttctg

SEQ ID NO: 216386 - DNA, 25 bp, probe
gaaaaccaaatagtgaagctatcag

SEQ ID NO: 216387 - DNA, 25 bp, probe
gaaaaccaaatagtgaagctatcag

SEQ ID NO: 216388 - DNA, 25 bp, probe
gacaaagtcaacaggcaaggtaatc

SEQ ID NO: 216389 - DNA, 25 bp, probe
gaaaatggcaacagcgacaagaaga

SEQ ID NO: 216390 - DNA, 25 bp, probe
gaaagaagagacacccaaactgttt

SEQ ID NO: 216391 - DNA, 25 bp, probe
gaaaacagagttgcccaaatattta

SEQ ID NO: 216392 - DNA, 25 bp, probe
gaaatccgaattgcccatatgctct

SEQ ID NO: 216393 - DNA, 25 bp, probe
gaaaaggtgattgccacatgtcact

SEQ ID NO: 216394 - DNA, 25 bp, probe
gaaaatgggttctgatatgtgatct

SEQ ID NO: 216395 - DNA, 25 bp, probe
gaaaatttcttcagtatgaatctaa

SEQ ID NO: 216396 - DNA, 25 bp, probe
gaaaatttcttcagtatgaatctaa

SEQ ID NO: 216397 - DNA, 25 bp, probe
gaaaactgtcttgcagctaagctta

SEQ ID NO: 216398 - DNA, 25 bp, probe
gaaaactccattagataaagctcga

SEQ ID NO: 216399 - DNA, 25 bp, probe
gaaaagcttcttaattaatttgatt

SEQ ID NO: 216400 - DNA, 25 bp, probe
gaaaatttcactgagttttagttca

SEQ ID NO: 216401 - DNA, 25 bp, probe
gaaaattctccttactgggatagtc

SEQ ID NO: 216402 - DNA, 25 bp, probe
gaaaatgtgcctggacaatggtgta

SEQ ID NO: 216403 - DNA, 25 bp, probe
gaaaatgtgcctggacaatggtgta

SEQ ID NO: 216404 - DNA, 25 bp, probe
gaaaatgctggtgagctgaggtaga

SEQ ID NO: 216405 - DNA, 25 bp, probe
gaaaacatgggctactacattatgt

SEQ ID NO: 216406 - DNA, 25 bp, probe
gaacaacattcggaaagccttgtca

SEQ ID NO: 216407 - DNA, 25 bp, probe
gaaaagatctccaagaggtttgtct

SEQ ID NO: 216408 - DNA, 25 bp, probe
gaaaaactccgagatgtgattgctc

SEQ ID NO: 216409 - DNA, 25 bp, probe
gaaaagccttcgaaagtgtcgctca

SEQ ID NO: 216410 - DNA, 25 bp, probe
gaaaatactgaaaaacgaggccaat

SEQ ID NO: 216411 - DNA, 25 bp, probe
gaaacgccgaatatccagggccaac

SEQ ID NO: 216412 - DNA, 25 bp, probe
gaaaagccaaactatcaagccctca

SEQ ID NO: 216413 - DNA, 25 bp, probe
gaacaaggacattcaaagtgccctg

SEQ ID NO: 216414 - DNA, 25 bp, probe
gaaaacagcatctcatcgagtcccc

SEQ ID NO: 216415 - DNA, 25 bp, probe
gaaaatcgcctcgttgagtgagcaa

SEQ ID NO: 216416 - DNA, 25 bp, probe
gaaaatggcattatttgatctgaaa

SEQ ID NO: 216417 - DNA, 25 bp, probe
gaaacaggcttaactttgtgtaaga

SEQ ID NO: 216418 - DNA, 25 bp, probe
gaaactggctttatagagttaacaa

SEQ ID NO: 216419 - DNA, 25 bp, probe
gacagaatcactatttcaagttaaa

SEQ ID NO: 216420 - DNA, 25 bp, probe
gaacaatactttgtaatttatgata

SEQ ID NO: 216421 - DNA, 25 bp, probe
gaaaatgcacttgtcctgttttgta

SEQ ID NO: 216422 - DNA, 25 bp, probe
gaaaatccttctcactttgaattag

SEQ ID NO: 216423 - DNA, 25 bp, probe
gaacaatccttttcagtattatatt

SEQ ID NO: 216424 - DNA, 25 bp, probe
gaaaagcctatatcaataatgattt

SEQ ID NO: 216425 - DNA, 25 bp, probe
gaaaaggcatcattgacaaaaggaa

SEQ ID NO: 216426 - DNA, 25 bp, probe
gaaaaggcatcattgacaaaaggaa

SEQ ID NO: 216427 - DNA, 25 bp, probe
gaaaagagcacttcacacagacaag

SEQ ID NO: 216428 - DNA, 25 bp, probe
gaaaagagcacttcacacagacaag

SEQ ID NO: 216429 - DNA, 25 bp, probe
gaaaaaactggagtcagaagaccag

SEQ ID NO: 216430 - DNA, 25 bp, probe
gaaaatagtttaggagaaaccagct

SEQ ID NO: 216431 - DNA, 25 bp, probe
gaaatttgcttttgccaaacccgct

SEQ ID NO: 216432 - DNA, 25 bp, probe
gaaatttgcttttgccaaacccgct

SEQ ID NO: 216433 - DNA, 25 bp, probe
gaaacttgctacagacttacccgta

SEQ ID NO: 216434 - DNA, 25 bp, probe
gaaactcgtaatagacttcccactc

SEQ ID NO: 216435 - DNA, 25 bp, probe
gaaacgtgtgaaaactccctattct

SEQ ID NO: 216436 - DNA, 25 bp, probe
gaaacgagcgttagagtgccgcctt

SEQ ID NO: 216437 - DNA, 25 bp, probe
gaaacaggggcaatggtgcgcctgc

SEQ ID NO: 216438 - DNA, 25 bp, probe
gaaaagcaggggtgtcgtcatgctc

SEQ ID NO: 216439 - DNA, 25 bp, probe
gaaacaaggggcttcgagcacgctc

SEQ ID NO: 216440 - DNA, 25 bp, probe
gaaaaatcgcaggattccagccctg

SEQ ID NO: 216441 - DNA, 25 bp, probe
gaaaaacgagttcatctgctctgtg

SEQ ID NO: 216442 - DNA, 25 bp, probe
gaaagaaacgttttcatgcttctgg

SEQ ID NO: 216443 - DNA, 25 bp, probe
gaaaatccatcacgaatacttttgg

SEQ ID NO: 216444 - DNA, 25 bp, probe
gaaaagtcatgttgcaaatctttct

SEQ ID NO: 216445 - DNA, 25 bp, probe
gaaaatgctgcaaaattcatctttt

SEQ ID NO: 216446 - DNA, 25 bp, probe
gaaaattctcaagcttctcatttct

SEQ ID NO: 216447 - DNA, 25 bp, probe
gaaaattctcaaggttccatagtat

SEQ ID NO: 216448 - DNA, 25 bp, probe
gaaaagcctagtcttctcaagcaat

SEQ ID NO: 216449 - DNA, 25 bp, probe
gaaaaatctaacaggatctatcaat

SEQ ID NO: 216450 - DNA, 25 bp, probe
gaaaaatggaaccagggcctgacat

SEQ ID NO: 216451 - DNA, 25 bp, probe
gaaaattcggagcactcgcctgaag

SEQ ID NO: 216452 - DNA, 25 bp, probe
gaaaaccgagagcacctggtgatga

SEQ ID NO: 216453 - DNA, 25 bp, probe
gataaaattatacagccaggtggga

SEQ ID NO: 216454 - DNA, 25 bp, probe
gaaaaaacattgaaccagaggtgag

SEQ ID NO: 216455 - DNA, 25 bp, probe
gaaaaaacattgaaccagaggtgag

SEQ ID NO: 216456 - DNA, 25 bp, probe
gaaaaaatgcaagcccattggtgga

SEQ ID NO: 216457 - DNA, 25 bp, probe
gaaaaagtgacttgcccaaggtcgt

SEQ ID NO: 216458 - DNA, 25 bp, probe
gaaaagattcacaatttcaaggtgc

SEQ ID NO: 216459 - DNA, 25 bp, probe
gaaacagttggcactgtaaggtgct

SEQ ID NO: 216460 - DNA, 25 bp, probe
gaaaaatatagcactgtagtcagag

SEQ ID NO: 216461 - DNA, 25 bp, probe
gaaaaaagagcttgttaatgatgat

SEQ ID NO: 216462 - DNA, 25 bp, probe
gaaaagacaccttgcctataattaa

SEQ ID NO: 216463 - DNA, 25 bp, probe
gaaaagccatagcaggagttattaa

SEQ ID NO: 216464 - DNA, 25 bp, probe
gaaaatgccaaccaaagcagtcatt

SEQ ID NO: 216465 - DNA, 25 bp, probe
gaaaataaactccaagcagccagta

SEQ ID NO: 216466 - DNA, 25 bp, probe
gaaaattaatcccaagacatcaatc

SEQ ID NO: 216467 - DNA, 25 bp, probe
gaaaattaatcccaagacatcaatc

SEQ ID NO: 216468 - DNA, 25 bp, probe
gaaacttggatttgaggagctggac

SEQ ID NO: 216469 - DNA, 25 bp, probe
gaaaaatagagctgggactgagcct

SEQ ID NO: 216470 - DNA, 25 bp, probe
gaaaaaggacctcggactgcaggga

SEQ ID NO: 216471 - DNA, 25 bp, probe
gaaaagataacctgcagaatgggag

SEQ ID NO: 216472 - DNA, 25 bp, probe
gaaacattcagaccagggaacggaa

SEQ ID NO: 216473 - DNA, 25 bp, probe
gaaacattcagaccagggaacggaa

SEQ ID NO: 216474 - DNA, 25 bp, probe
gaaacttcagccacaggaagtagca

SEQ ID NO: 216475 - DNA, 25 bp, probe
gaaacttcagccacaggaagtagca

SEQ ID NO: 216476 - DNA, 25 bp, probe
gaaactgcaaccaacagtaaggact

SEQ ID NO: 216477 - DNA, 25 bp, probe
gaaactgaatcccagcatgctgaga

SEQ ID NO: 216478 - DNA, 25 bp, probe
gaaacttctcctgatgcatcaggca

SEQ ID NO: 216479 - DNA, 25 bp, probe
gaaaatctcatcctagatcaccgag

SEQ ID NO: 216480 - DNA, 25 bp, probe
gaaaatctcatcgtcatggttctgc

SEQ ID NO: 216481 - DNA, 25 bp, probe
gaaaatctcatcgtcatggttctgc

SEQ ID NO: 216482 - DNA, 25 bp, probe
gaaaattcataacgtgtatctttaa

SEQ ID NO: 216483 - DNA, 25 bp, probe
gaaaattgataatgctgaagctctt

SEQ ID NO: 216484 - DNA, 25 bp, probe
gaaaattatacattctcgactttgg

SEQ ID NO: 216485 - DNA, 25 bp, probe
gaaacatcaatggattctcgacttc

SEQ ID NO: 216486 - DNA, 25 bp, probe
gaaacagaatctttgctagttggca

SEQ ID NO: 216487 - DNA, 25 bp, probe
gaaaagcacagaatttgagtcagta

SEQ ID NO: 216488 - DNA, 25 bp, probe
gaaaagccagtttcaaccactagta

SEQ ID NO: 216489 - DNA, 25 bp, probe
gaaaagcaaggttcagaaatgtcag

SEQ ID NO: 216490 - DNA, 25 bp, probe
gaaacgccaggacagacgatggcag

SEQ ID NO: 216491 - DNA, 25 bp, probe
gaaacacaaggaaatacgtcagcag

SEQ ID NO: 216492 - DNA, 25 bp, probe
gaaacatcaggtccttaaatacgat

SEQ ID NO: 216493 - DNA, 25 bp, probe
gaaaacaggtgactttggaaagcaa

SEQ ID NO: 216494 - DNA, 25 bp, probe
gaaaacaggtgactttggaaagcaa

SEQ ID NO: 216495 - DNA, 25 bp, probe
gaaaacgattcatattgcagaagac

SEQ ID NO: 216496 - DNA, 25 bp, probe
gaaaatcttcatggaattcacaaag

SEQ ID NO: 216497 - DNA, 25 bp, probe
gaaaatgtgctctgttgtcacagga

SEQ ID NO: 216498 - DNA, 25 bp, probe
gaaaatgtcctgcttgatgcacaca

SEQ ID NO: 216499 - DNA, 25 bp, probe
gaaaatgtctgtctttctgtccaaa

SEQ ID NO: 216500 - DNA, 25 bp, probe
gaaaattgtgctcttttctaatcca

SEQ ID NO: 216501 - DNA, 25 bp, probe
gaaaatacttattctttcttatcga

SEQ ID NO: 216502 - DNA, 25 bp, probe
gaaaatattaaattgtcttgtatcg

SEQ ID NO: 216503 - DNA, 25 bp, probe
gaaaatattaaattgtcttgtatcg

SEQ ID NO: 216504 - DNA, 25 bp, probe
gaaaatgcattgtatcgatgttatg

SEQ ID NO: 216505 - DNA, 25 bp, probe
gaaaatgcattgtatcgatgttatg

SEQ ID NO: 216506 - DNA, 25 bp, probe
gaaaatcatatccatggatctcttt

SEQ ID NO: 216507 - DNA, 25 bp, probe
gaaaatgctcacaattgatgcagat

SEQ ID NO: 216508 - DNA, 25 bp, probe
gaaaatgctcacaattgatgcagat

SEQ ID NO: 216509 - DNA, 25 bp, probe
gaaaactcagcaatggcagattatc

SEQ ID NO: 216510 - DNA, 25 bp, probe
gaaaaagcagctaatgaggctacag

SEQ ID NO: 216511 - DNA, 25 bp, probe
gaaaagcacgtaatgaaggaagaaa

SEQ ID NO: 216512 - DNA, 25 bp, probe
gaaaactctgttcaaggggaaagat

SEQ ID NO: 216513 - DNA, 25 bp, probe
gaaaactggttccagagtgggatag

SEQ ID NO: 216514 - DNA, 25 bp, probe
gaaaactgagatgctgaaggtgaga

SEQ ID NO: 216515 - DNA, 25 bp, probe
gaaaattacatccaaacatgtgaaa

SEQ ID NO: 216516 - DNA, 25 bp, probe
gaaacttccacacagaattttagtc

SEQ ID NO: 216517 - DNA, 25 bp, probe
gaaactttcgctggatggttttagg

SEQ ID NO: 216518 - DNA, 25 bp, probe
gaaattttctatgcaaggtttactt

SEQ ID NO: 216519 - DNA, 25 bp, probe
gaaattttctatgcaaggtttactt

SEQ ID NO: 216520 - DNA, 25 bp, probe
gaaaaggcttcagagaactttatct

SEQ ID NO: 216521 - DNA, 25 bp, probe
gaaacaagcttacatagtctttttt

SEQ ID NO: 216522 - DNA, 25 bp, probe
gaaacatggatggacaagggctttt

SEQ ID NO: 216523 - DNA, 25 bp, probe
gaaaaagctgcatcaagacccattt

SEQ ID NO: 216524 - DNA, 25 bp, probe
gaaaaagctgcatcaagacccattt

SEQ ID NO: 216525 - DNA, 25 bp, probe
gaaaaactcaggcaagacctctctc

SEQ ID NO: 216526 - DNA, 25 bp, probe
gaaaaaccatccaaatgaggcctct

SEQ ID NO: 216527 - DNA, 25 bp, probe
tggaagtcccctgaaaggtcctata

SEQ ID NO: 216528 - DNA, 25 bp, probe
gaaagtcccagaagaagaaatccta

SEQ ID NO: 216529 - DNA, 25 bp, probe
gaaaatctgaccataagaaatttac

SEQ ID NO: 216530 - DNA, 25 bp, probe
gaaaactgactaatcagctgccaat

SEQ ID NO: 216531 - DNA, 25 bp, probe
gaaaactgactaatcagctgccaat

SEQ ID NO: 216532 - DNA, 25 bp, probe
gaaaagttctacagcatgcgcagta

SEQ ID NO: 216533 - DNA, 25 bp, probe
gaaaagttggtcaggcgcagtggct

SEQ ID NO: 216534 - DNA, 25 bp, probe
gaaacagattgacacgctggcgggg

SEQ ID NO: 216535 - DNA, 25 bp, probe
gaaaatgttgacaagctctggttgc

SEQ ID NO: 216536 - DNA, 25 bp, probe
gacagactttgatatccggttttat

SEQ ID NO: 216537 - DNA, 25 bp, probe
gaaactgtggttcccgttgtgattt

SEQ ID NO: 216538 - DNA, 25 bp, probe
gaaacaggtgttctggctttaggtc

SEQ ID NO: 216539 - DNA, 25 bp, probe
gaaagcccatttctgggttggcttc

SEQ ID NO: 216540 - DNA, 25 bp, probe
gaaagctggttctacatggggggat

SEQ ID NO: 216541 - DNA, 25 bp, probe
gaaactgggtctgcaggacgttgct

SEQ ID NO: 216542 - DNA, 25 bp, probe
gaaacttggtctgcagtctggaagc

SEQ ID NO: 216543 - DNA, 25 bp, probe
gaaacaagacttgcagttctgattc

SEQ ID NO: 216544 - DNA, 25 bp, probe
gaaaatcgatgcagccatttctgat

SEQ ID NO: 216545 - DNA, 25 bp, probe
gaaaagccttttctacatgtgcctc

SEQ ID NO: 216546 - DNA, 25 bp, probe
tgaaatttttttctagtctggttag

SEQ ID NO: 216547 - DNA, 25 bp, probe
gaaaattttttgctgcttctggttc

SEQ ID NO: 216548 - DNA, 25 bp, probe
gaaatttctttcactgcttcaggta

SEQ ID NO: 216549 - DNA, 25 bp, probe
gaaaatgattttccctttgcaggtt

SEQ ID NO: 216550 - DNA, 25 bp, probe
gaaaatgaccatcgtgactttgcgg

SEQ ID NO: 216551 - DNA, 25 bp, probe
gaaaatgatgtccgtgaggttgttg

SEQ ID NO: 216552 - DNA, 25 bp, probe
gaaaagagatgccagccaggtattt

SEQ ID NO: 216553 - DNA, 25 bp, probe
gaaaatgagatccaccaacatcttt

SEQ ID NO: 216554 - DNA, 25 bp, probe
gacacatcaaatgccccgaatttag

SEQ ID NO: 216555 - DNA, 25 bp, probe
gaaaaatatgtaccaagaatcttgg

SEQ ID NO: 216556 - DNA, 25 bp, probe
gaaaatctattatcaactgctgctt

SEQ ID NO: 216557 - DNA, 25 bp, probe
gaaaatcttttactagtgtgtgtgt

SEQ ID NO: 216558 - DNA, 25 bp, probe
gaaaactaatctaaactgtagctgt

SEQ ID NO: 216559 - DNA, 25 bp, probe
gaaaaataacttggtttagtgtgct

SEQ ID NO: 216560 - DNA, 25 bp, probe
gaaaatcatgtacttcgcttaagtt

SEQ ID NO: 216561 - DNA, 25 bp, probe
gaaacaattatcaccttccagcttc

SEQ ID NO: 216562 - DNA, 25 bp, probe
gaaagtatattttcctcccagttct

SEQ ID NO: 216563 - DNA, 25 bp, probe
gaaagtcgtttctatttccgtggct

SEQ ID NO: 216564 - DNA, 25 bp, probe
gaaagtcgtttctatttccgtggct

SEQ ID NO: 216565 - DNA, 25 bp, probe
gaaagggaattggcattttcgtagg

SEQ ID NO: 216566 - DNA, 25 bp, probe
gaaaaacaatctcctttgtcccatg

SEQ ID NO: 216567 - DNA, 25 bp, probe
gaaagcaaacctacgtctggacaag

SEQ ID NO: 216568 - DNA, 25 bp, probe
gaaagcaaacctacgtctggacaag

SEQ ID NO: 216569 - DNA, 25 bp, probe
gaaaataacctaatcctgaagcata

SEQ ID NO: 216570 - DNA, 25 bp, probe
gaaaataacctaatcctgaagcata

SEQ ID NO: 216571 - DNA, 25 bp, probe
gaaaaatttgctaatcactacagga

SEQ ID NO: 216572 - DNA, 25 bp, probe
gaaaacagctatttacaaagcagta

SEQ ID NO: 216573 - DNA, 25 bp, probe
gaaaaggctcattaaaagatatgta

SEQ ID NO: 216574 - DNA, 25 bp, probe
gaaacagactgcctgaattgagaat

SEQ ID NO: 216575 - DNA, 25 bp, probe
gaaacactgctgacctttgcaaagg

SEQ ID NO: 216576 - DNA, 25 bp, probe
gaaacactgctgacctttgcaaagg

SEQ ID NO: 216577 - DNA, 25 bp, probe
gaaactgagtgggctttaaccagga

SEQ ID NO: 216578 - DNA, 25 bp, probe
gaaaatggacgtgttatgactccag

SEQ ID NO: 216579 - DNA, 25 bp, probe
gaaaatggacgtgttatgactccag

SEQ ID NO: 216580 - DNA, 25 bp, probe
gaaacaagaacagctgttactcaag

SEQ ID NO: 216581 - DNA, 25 bp, probe
gaaaaatggcacagctgtttctgaa

SEQ ID NO: 216582 - DNA, 25 bp, probe
gaaaactggcaaactcttaaatctg

SEQ ID NO: 216583 - DNA, 25 bp, probe
gaaaagttcaatactcttgaaatgt

SEQ ID NO: 216584 - DNA, 25 bp, probe
gaaaatgttctttcaagtgcaaagt

SEQ ID NO: 216585 - DNA, 25 bp, probe
gaaacatgtcttattactaaagaaa

SEQ ID NO: 216586 - DNA, 25 bp, probe
gaaacttttggttttagatgccaca

SEQ ID NO: 216587 - DNA, 25 bp, probe
gaaactatcctgggattaggtgaaa

SEQ ID NO: 216588 - DNA, 25 bp, probe
gaaactatcctgggattaggtgaaa

SEQ ID NO: 216589 - DNA, 25 bp, probe
gaaacctccggtgtgagatatacaa

SEQ ID NO: 216590 - DNA, 25 bp, probe
gaaacctccggtgtgagatatacaa

SEQ ID NO: 216591 - DNA, 25 bp, probe
gaaacacccgaggttcaatgaacct

SEQ ID NO: 216592 - DNA, 25 bp, probe
gaaaactcaagagcttcgagagcca

SEQ ID NO: 216593 - DNA, 25 bp, probe
gaaaaacaagcattggtcgaaacaa

SEQ ID NO: 216594 - DNA, 25 bp, probe
gaaacacaaacaatttggatcaaaa

SEQ ID NO: 216595 - DNA, 25 bp, probe
gaaacacatgaaattgtggcgatca

SEQ ID NO: 216596 - DNA, 25 bp, probe
gaaacacatgaaattgtggcgatca

SEQ ID NO: 216597 - DNA, 25 bp, probe
gaaaactatggactgtgctgctgcc

SEQ ID NO: 216598 - DNA, 25 bp, probe
gaaaagcttaatgggctggccaggc

SEQ ID NO: 216599 - DNA, 25 bp, probe
gaaaagcttaatgggctggccaggc

SEQ ID NO: 216600 - DNA, 25 bp, probe
gaaaagcttgcagaaccagacagag

SEQ ID NO: 216601 - DNA, 25 bp, probe
gaaaatgcttgggcagacgagacca

SEQ ID NO: 216602 - DNA, 25 bp, probe
gaaaatgtggagcagccaacaagca

SEQ ID NO: 216603 - DNA, 25 bp, probe
gaaaatgtggagcagccaacaagca

SEQ ID NO: 216604 - DNA, 25 bp, probe
gaaaatgtgtagacgcactctcaaa

SEQ ID NO: 216605 - DNA, 25 bp, probe
gaaaatgtgtagacgcactctcaaa

SEQ ID NO: 216606 - DNA, 25 bp, probe
gacactcggtttgactctcaaacgt

SEQ ID NO: 216607 - DNA, 25 bp, probe
gaaagtggctttgacccaaatattc

SEQ ID NO: 216608 - DNA, 25 bp, probe
gaaactggaccattacctagaatat

SEQ ID NO: 216609 - DNA, 25 bp, probe
gaaacaagccgcattccaagaagta

SEQ ID NO: 216610 - DNA, 25 bp, probe
gaaaaaggtgctctccagtaactaa

SEQ ID NO: 216611 - DNA, 25 bp, probe
gaaaaagtttctgctattaatcaga

SEQ ID NO: 216612 - DNA, 25 bp, probe
gaaaaggctattacccattgaagaa

SEQ ID NO: 216613 - DNA, 25 bp, probe
gaaaaggctattacccattgaagaa

SEQ ID NO: 216614 - DNA, 25 bp, probe
gaaagtgccgaaaccgtgctgaaaa

SEQ ID NO: 216615 - DNA, 25 bp, probe
gaaaatcctgacaaaagggacacat

SEQ ID NO: 216616 - DNA, 25 bp, probe
gaaactgacttcagagttggaagat

SEQ ID NO: 216617 - DNA, 25 bp, probe
gaaattaatttgcagtgtttggatt

SEQ ID NO: 216618 - DNA, 25 bp, probe
gaaattgaatttcccgatattccag

SEQ ID NO: 216619 - DNA, 25 bp, probe
gaaatggaaagccgccgaacctatc

SEQ ID NO: 216620 - DNA, 25 bp, probe
gaaagccaaacgctgtaaccgacgc

SEQ ID NO: 216621 - DNA, 25 bp, probe
gaaagcacaaagcgttttccacctg

SEQ ID NO: 216622 - DNA, 25 bp, probe
gaaagtggagggcattttccagggc

SEQ ID NO: 216623 - DNA, 25 bp, probe
gaaaagggtgggaatgtccactgga

SEQ ID NO: 216624 - DNA, 25 bp, probe
gaaaagggtgggaatgtccactgga

SEQ ID NO: 216625 - DNA, 25 bp, probe
gaaaaggagggtaggtctgcattat

SEQ ID NO: 216626 - DNA, 25 bp, probe
gaaacaggaaagttcatttcttcac

SEQ ID NO: 216627 - DNA, 25 bp, probe
gaaaagtgaatttcacacttgtccc

SEQ ID NO: 216628 - DNA, 25 bp, probe
gaaaatgtgaagtactccagttctc

SEQ ID NO: 216629 - DNA, 25 bp, probe
gaaacatgtgtactttcgaagtctg

SEQ ID NO: 216630 - DNA, 25 bp, probe
gaaactggaactctcgagcgttgct

SEQ ID NO: 216631 - DNA, 25 bp, probe
gaaactggaactctcgagcgttgct

SEQ ID NO: 216632 - DNA, 25 bp, probe
gaaacgggactgtttgaggaactga

SEQ ID NO: 216633 - DNA, 25 bp, probe
gaaacgggactgtttgaggaactga

SEQ ID NO: 216634 - DNA, 25 bp, probe
gaaactgtggggcttacagaaatga

SEQ ID NO: 216635 - DNA, 25 bp, probe
gaaacactggggctggcacaaactc

SEQ ID NO: 216636 - DNA, 25 bp, probe
gaaaactttggatgtgccatgcaat

SEQ ID NO: 216637 - DNA, 25 bp, probe
gaaacactccaggaaatccagctct

SEQ ID NO: 216638 - DNA, 25 bp, probe
gaaaacaccacgtgacacacttttg

SEQ ID NO: 216639 - DNA, 25 bp, probe
gaaacacagtaccaggcacaacctt

SEQ ID NO: 216640 - DNA, 25 bp, probe
gaaaaagctactcatcaatgcccac

SEQ ID NO: 216641 - DNA, 25 bp, probe
gaaaaagcatcgctaacgccacact

SEQ ID NO: 216642 - DNA, 25 bp, probe
gaaaaagaacaatctgtgccaacgg

SEQ ID NO: 216643 - DNA, 25 bp, probe
gagcaaagagaaaaacctccgagga

SEQ ID NO: 216644 - DNA, 25 bp, probe
gacaccctaataaagcaatcgcaaa

SEQ ID NO: 216645 - DNA, 25 bp, probe
gtaccctaaaatgtcactgaaagag

SEQ ID NO: 216646 - DNA, 25 bp, probe
gatacccaaaaagattcaagtaata

SEQ ID NO: 216647 - DNA, 25 bp, probe
gaaaccataaacagaccaaacaata

SEQ ID NO: 216648 - DNA, 25 bp, probe
gaaacattaaacattgccaacgcaa

SEQ ID NO: 216649 - DNA, 25 bp, probe
gaaacttacccgtatctaacacaca

SEQ ID NO: 216650 - DNA, 25 bp, probe
gaaaatggagcctgcagattataac

SEQ ID NO: 216651 - DNA, 25 bp, probe
gaaaatggaccaacagtttacaaca

SEQ ID NO: 216652 - DNA, 25 bp, probe
gacaagcgggaaaagtattacgaca

SEQ ID NO: 216653 - DNA, 25 bp, probe
gaaacaaggctaaggatactaccaa

SEQ ID NO: 216654 - DNA, 25 bp, probe
gaaacaactctaggtctgagtccta

SEQ ID NO: 216655 - DNA, 25 bp, probe
gaaacaactctaggtctgagtccta

SEQ ID NO: 216656 - DNA, 25 bp, probe
gaaaaacttcattgctgtcagcgct

SEQ ID NO: 216657 - DNA, 25 bp, probe
gaaaacatcttatttgtgcagtctg

SEQ ID NO: 216658 - DNA, 25 bp, probe
gaaaacacttaacttgcatgtgcac

SEQ ID NO: 216659 - DNA, 25 bp, probe
gaaaacacttaacttgcatgtgcac

SEQ ID NO: 216660 - DNA, 25 bp, probe
gaaaagcatttctctcatgtgcgcc

SEQ ID NO: 216661 - DNA, 25 bp, probe
gaaacagttacactgcttgtagctc

SEQ ID NO: 216662 - DNA, 25 bp, probe
gaaaagttcaacgttatatcataag

SEQ ID NO: 216663 - DNA, 25 bp, probe
gaaaagtttgcagcttatgtaatag

SEQ ID NO: 216664 - DNA, 25 bp, probe
gaaaaattgtacatccattaaatgt

SEQ ID NO: 216665 - DNA, 25 bp, probe
gaaaacatttccatgttagaaattt

SEQ ID NO: 216666 - DNA, 25 bp, probe
gaaacctttgaagttccagaaattg

SEQ ID NO: 216667 - DNA, 25 bp, probe
gaaaccttccaatgtccaaaactgc

SEQ ID NO: 216668 - DNA, 25 bp, probe
gaaatggttccttgttccgaaactg

SEQ ID NO: 216669 - DNA, 25 bp, probe
gaaaagagtctttgattcaccaaac

SEQ ID NO: 216670 - DNA, 25 bp, probe
gaaaaggtttaaagtgatgaagatc

SEQ ID NO: 216671 - DNA, 25 bp, probe
gaaaagaggattaattggctgacag

SEQ ID NO: 216672 - DNA, 25 bp, probe
gaaacagggcttgatttgccacagt

SEQ ID NO: 216673 - DNA, 25 bp, probe
gaaacagggttatcaatgccaagtg

SEQ ID NO: 216674 - DNA, 25 bp, probe
gaaatccagttgttaaataaagctt

SEQ ID NO: 216675 - DNA, 25 bp, probe
gaaaagcctcatgtaaaaccctatt

SEQ ID NO: 216676 - DNA, 25 bp, probe
gaaagtctctatgttaaaacctata

SEQ ID NO: 216677 - DNA, 25 bp, probe
gaaagccttgtcatttgacaaccga

SEQ ID NO: 216678 - DNA, 25 bp, probe
gagaaccctggtgagtcgaatcacg

SEQ ID NO: 216679 - DNA, 25 bp, probe
gaaacaccatggaggatgtagtcct

SEQ ID NO: 216680 - DNA, 25 bp, probe
gaaatcagacagggtagattacctc

SEQ ID NO: 216681 - DNA, 25 bp, probe
gaaaagccaactcgaagtcatccat

SEQ ID NO: 216682 - DNA, 25 bp, probe
gaaaactccactatagttcatcaag

SEQ ID NO: 216683 - DNA, 25 bp, probe
gaaaacctcttatactatcatccag

SEQ ID NO: 216684 - DNA, 25 bp, probe
gaaaacagtcttttgacatgagccc

SEQ ID NO: 216685 - DNA, 25 bp, probe
gaaagccacccagatactgcagaac

SEQ ID NO: 216686 - DNA, 25 bp, probe
gaaacccctagcatagagacagaca

SEQ ID NO: 216687 - DNA, 25 bp, probe
gaaacccctagcatagagacagaca

SEQ ID NO: 216688 - DNA, 25 bp, probe
gaaaccccatacagaagaaacaaca

SEQ ID NO: 216689 - DNA, 25 bp, probe
gaaaacaacaacacaaaccacacac

SEQ ID NO: 216690 - DNA, 25 bp, probe
gaaagacaggaacaacagacccaag

SEQ ID NO: 216691 - DNA, 25 bp, probe
gaaacacgagaaccagaggacgaaa

SEQ ID NO: 216692 - DNA, 25 bp, probe
gaaaccgctgataaccaggacaaaa

SEQ ID NO: 216693 - DNA, 25 bp, probe
gaaagccgaaattgcctgggaagaa

SEQ ID NO: 216694 - DNA, 25 bp, probe
gaaaagaacacaggccttggaacaa

SEQ ID NO: 216695 - DNA, 25 bp, probe
gaaaagaccacctacattaaacaga

SEQ ID NO: 216696 - DNA, 25 bp, probe
gaaaagaccctatcaagaaggtgaa

SEQ ID NO: 216697 - DNA, 25 bp, probe
gaaactgagaaccccaagaagtgaa

SEQ ID NO: 216698 - DNA, 25 bp, probe
gaaacagtgatcaacccagagacgg

SEQ ID NO: 216699 - DNA, 25 bp, probe
gacaatactgtatccaagaagggct

SEQ ID NO: 216700 - DNA, 25 bp, probe
gaaaacttgcagactcaggggggtc

SEQ ID NO: 216701 - DNA, 25 bp, probe
gaaaacggcagcagacatgaagcgg

SEQ ID NO: 216702 - DNA, 25 bp, probe
gaaagacgggcaacacagcgggtta

SEQ ID NO: 216703 - DNA, 25 bp, probe
gaaacacgggctacacaggatcctc

SEQ ID NO: 216704 - DNA, 25 bp, probe
gaaattcgtgagtcacctggaggcc

SEQ ID NO: 216705 - DNA, 25 bp, probe
gaaactgcctggagcctggaatgac

SEQ ID NO: 216706 - DNA, 25 bp, probe
gaaactgcctggagcctggaatgac

SEQ ID NO: 216707 - DNA, 25 bp, probe
gaaaagccggcaggccagaaggacc

SEQ ID NO: 216708 - DNA, 25 bp, probe
gaaaacactgatatccagaaggagc

SEQ ID NO: 216709 - DNA, 25 bp, probe
gaaagaagcagatatccaaagggtg

SEQ ID NO: 216710 - DNA, 25 bp, probe
gaaagaagcaggttccctgttttgc

SEQ ID NO: 216711 - DNA, 25 bp, probe
gaaaacagcggctttttctttactg

SEQ ID NO: 216712 - DNA, 25 bp, probe
gaaagacctggctcctttcagaact

SEQ ID NO: 216713 - DNA, 25 bp, probe
gaaagacctggctcctttcagaact

SEQ ID NO: 216714 - DNA, 25 bp, probe
gaaaggccctcagcttttagagaca

SEQ ID NO: 216715 - DNA, 25 bp, probe
gaaagccctgaaggttttagacaat

SEQ ID NO: 216716 - DNA, 25 bp, probe
gaaactgtaaagcttttatgactct

SEQ ID NO: 216717 - DNA, 25 bp, probe
gaaaagtagaagtgcctctaccatt

SEQ ID NO: 216718 - DNA, 25 bp, probe
gaaaaagagaaacccagctctccct

SEQ ID NO: 216719 - DNA, 25 bp, probe
gaaaaaaagatacccagattccaag

SEQ ID NO: 216720 - DNA, 25 bp, probe
gaaaagaaatgcaacctcaccacaa

SEQ ID NO: 216721 - DNA, 25 bp, probe
gaaacagaactcgatgcactgacct

SEQ ID NO: 216722 - DNA, 25 bp, probe
gaaaccatatctgcagcaagagcac

SEQ ID NO: 216723 - DNA, 25 bp, probe
gaaacatattcttgcagcccatcag

SEQ ID NO: 216724 - DNA, 25 bp, probe
gaaacagatgtctagtgatcatctc

SEQ ID NO: 216725 - DNA, 25 bp, probe
gaaaagaatatggtgtcaccctacc

SEQ ID NO: 216726 - DNA, 25 bp, probe
gaaaagctcttggttgcacatgtta

SEQ ID NO: 216727 - DNA, 25 bp, probe
gaaaagttgatggtattcattaggt

SEQ ID NO: 216728 - DNA, 25 bp, probe
gaaaacgtgttctaatcttaggcgc

SEQ ID NO: 216729 - DNA, 25 bp, probe
gaaaacaggatttcaatatgtacag

SEQ ID NO: 216730 - DNA, 25 bp, probe
gaaaactgtgactgcagtgctgtaa

SEQ ID NO: 216731 - DNA, 25 bp, probe
gaaaacgtgcacacaggactctcat

SEQ ID NO: 216732 - DNA, 25 bp, probe
gaaaacaatataaaggacatcctca

SEQ ID NO: 216733 - DNA, 25 bp, probe
gaaaacaaaatatctgacatcttat

SEQ ID NO: 216734 - DNA, 25 bp, probe
gaaaacaaaatatctgacatcttat

SEQ ID NO: 216735 - DNA, 25 bp, probe
gaaacaaaacaatctccaccatgaa

SEQ ID NO: 216736 - DNA, 25 bp, probe
gaaacaaaacaatctccaccatgaa

SEQ ID NO: 216737 - DNA, 25 bp, probe
gaaaaacaacacttacgctccaaca

SEQ ID NO: 216738 - DNA, 25 bp, probe
gaaaaacaacacttacgctccaaca

SEQ ID NO: 216739 - DNA, 25 bp, probe
gaaaagagaaccatcagcaggccag

SEQ ID NO: 216740 - DNA, 25 bp, probe
gaaagggtagccatactgatttgga

SEQ ID NO: 216741 - DNA, 25 bp, probe
gaaagggtagccatactgatttgga

SEQ ID NO: 216742 - DNA, 25 bp, probe
gacaggggctatgggtttgctttgg

SEQ ID NO: 216743 - DNA, 25 bp, probe
gacaggggctatgggtttgctttgg

SEQ ID NO: 216744 - DNA, 25 bp, probe
gaaagttctatctgttctattatag

SEQ ID NO: 216745 - DNA, 25 bp, probe
gaaagcattcattctgtgggattct

SEQ ID NO: 216746 - DNA, 25 bp, probe
gaaactgtgcactgcaggaacctac

SEQ ID NO: 216747 - DNA, 25 bp, probe
gaaatcgtagtgcttgtacttacct

SEQ ID NO: 216748 - DNA, 25 bp, probe
gaaacactaggttcttcctgtacat

SEQ ID NO: 216749 - DNA, 25 bp, probe
gaaagattcaggtatgttgccttta

SEQ ID NO: 216750 - DNA, 25 bp, probe
gaaagcactgcggatggtgttcatg

SEQ ID NO: 216751 - DNA, 25 bp, probe
gaaacagcatccaatcggcacttgt

SEQ ID NO: 216752 - DNA, 25 bp, probe
gaaactacacagacgtgcactggtc

SEQ ID NO: 216753 - DNA, 25 bp, probe
gaaaaacatcagtgctacaggcttt

SEQ ID NO: 216754 - DNA, 25 bp, probe
gaaagtggtcaaggcaacggcttcc

SEQ ID NO: 216755 - DNA, 25 bp, probe
gaaatggtggaggggcaatggttgc

SEQ ID NO: 216756 - DNA, 25 bp, probe
gaaatggtggaggggcaatggttgc

SEQ ID NO: 216757 - DNA, 25 bp, probe
gaaacggggtgcctgaaagttccag

SEQ ID NO: 216758 - DNA, 25 bp, probe
gaaagggagggtgaaagtgattatg

SEQ ID NO: 216759 - DNA, 25 bp, probe
gaaagcggagttcctaacaggatga

SEQ ID NO: 216760 - DNA, 25 bp, probe
gaaacggaattgtacaacactgtga

SEQ ID NO: 216761 - DNA, 25 bp, probe
gaaaaaaattgcaagccacacttct

SEQ ID NO: 216762 - DNA, 25 bp, probe
gaaaaaattcagcgtcgacctcatg

SEQ ID NO: 216763 - DNA, 25 bp, probe
gacagaaaatgtgtagtctaccttt

SEQ ID NO: 216764 - DNA, 25 bp, probe
gacagaaaatgtgtagtctaccttt

SEQ ID NO: 216765 - DNA, 25 bp, probe
gaaaacaattcagtggtcttatttt

SEQ ID NO: 216766 - DNA, 25 bp, probe
gaaaactactaagcttgacatctgt

SEQ ID NO: 216767 - DNA, 25 bp, probe
gaaaaaagtccagcttgaacatcta

SEQ ID NO: 216768 - DNA, 25 bp, probe
gaaaacagagcttcccgtgcaaaaa

SEQ ID NO: 216769 - DNA, 25 bp, probe
gaaaacagagcttcccgtgcaaaaa

SEQ ID NO: 216770 - DNA, 25 bp, probe
gaaaagcagcagacgcccaacaaga

SEQ ID NO: 216771 - DNA, 25 bp, probe
gaaactgaaatgcccacatccagga

SEQ ID NO: 216772 - DNA, 25 bp, probe
gaaacatgacactgaccttggagag

SEQ ID NO: 216773 - DNA, 25 bp, probe
gaaacatgacactgaccttggagag

SEQ ID NO: 216774 - DNA, 25 bp, probe
gacatacaacacctgtactttagag

SEQ ID NO: 216775 - DNA, 25 bp, probe
gaaacagacatactcattcatttga

SEQ ID NO: 216776 - DNA, 25 bp, probe
gaaagcagtagcatcaccatctgta

SEQ ID NO: 216777 - DNA, 25 bp, probe
gaaagcagtagcatcaccatctgta

SEQ ID NO: 216778 - DNA, 25 bp, probe
gaaacagtggcggcatgaagctcca

SEQ ID NO: 216779 - DNA, 25 bp, probe
gaaacagtgttgccatattctccaa

SEQ ID NO: 216780 - DNA, 25 bp, probe
gaaacagtgttgccatattctccaa

SEQ ID NO: 216781 - DNA, 25 bp, probe
gaaacctccagaaaatctcgcagac

SEQ ID NO: 216782 - DNA, 25 bp, probe
gaaaagcccagaaacttctctgcag

SEQ ID NO: 216783 - DNA, 25 bp, probe
gaaacgccaagaactgctggccgta

SEQ ID NO: 216784 - DNA, 25 bp, probe
gaaacgccaagaactgctggccgta

SEQ ID NO: 216785 - DNA, 25 bp, probe
gaaaccccatggattatcctgttga

SEQ ID NO: 216786 - DNA, 25 bp, probe
taaaagccttggtcactactttaga

SEQ ID NO: 216787 - DNA, 25 bp, probe
gaaaagccgggtcctagagactgac

SEQ ID NO: 216788 - DNA, 25 bp, probe
gaaaagccacggaccgttgcacaaa

SEQ ID NO: 216789 - DNA, 25 bp, probe
gaaaaacacggaccatgacatcaaa

SEQ ID NO: 216790 - DNA, 25 bp, probe
gaaaaacacggaccatgacatcaaa

SEQ ID NO: 216791 - DNA, 25 bp, probe
gaaaaaagctaatcatgctctctac

SEQ ID NO: 216792 - DNA, 25 bp, probe
gaaaaacagcaaagtcatgctgact

SEQ ID NO: 216793 - DNA, 25 bp, probe
gaaaacatgcacaaagttcaatttg

SEQ ID NO: 216794 - DNA, 25 bp, probe
gaaacactacaaatttattcttggt

SEQ ID NO: 216795 - DNA, 25 bp, probe
gaaacaccactcctttttgtgtgtg

SEQ ID NO: 216796 - DNA, 25 bp, probe
gaaacaccactcctttttgtgtgtg

SEQ ID NO: 216797 - DNA, 25 bp, probe
gaaacccaaggtacttttggagctg

SEQ ID NO: 216798 - DNA, 25 bp, probe
gaaactccaagatgaggatttgggt

SEQ ID NO: 216799 - DNA, 25 bp, probe
gaaagtgaccgacaggtttgggatc

SEQ ID NO: 216800 - DNA, 25 bp, probe
gaaaggttcgtgtggagttgtgtgt

SEQ ID NO: 216801 - DNA, 25 bp, probe
gaaagaactcctgaatcgtttgtgt

SEQ ID NO: 216802 - DNA, 25 bp, probe
gaaacaccatcagagaatggttttt

SEQ ID NO: 216803 - DNA, 25 bp, probe
gaaacaccatcagagaatggttttt

SEQ ID NO: 216804 - DNA, 25 bp, probe
gaaacctgtccataaagtaattttg

SEQ ID NO: 216805 - DNA, 25 bp, probe
gaaaccagtgcctgaaagaaactcc

SEQ ID NO: 216806 - DNA, 25 bp, probe
gaaaccaagccaatgttatagacgt

SEQ ID NO: 216807 - DNA, 25 bp, probe
gaaaacaagtgctgtctttgaaatg

SEQ ID NO: 216808 - DNA, 25 bp, probe
gaaacacggtgatatctttgagggt

SEQ ID NO: 216809 - DNA, 25 bp, probe
gaaagcctggaggctattttgctgc

SEQ ID NO: 216810 - DNA, 25 bp, probe
gaaacaggggcccatcatcatgtct

SEQ ID NO: 216811 - DNA, 25 bp, probe
gaaacaggggcccatcatcatgtct

SEQ ID NO: 216812 - DNA, 25 bp, probe
gaaactgcatggtcgcccatgattt

SEQ ID NO: 216813 - DNA, 25 bp, probe
gaaagcagatgagcgtcccactttc

SEQ ID NO: 216814 - DNA, 25 bp, probe
gaaacagaagcagtgttccattttc

SEQ ID NO: 216815 - DNA, 25 bp, probe
gaaagcagggcatcatgtccttcct

SEQ ID NO: 216816 - DNA, 25 bp, probe
gaaagcagggcatcatgtccttcct

SEQ ID NO: 216817 - DNA, 25 bp, probe
gaaagcagggcatcatgtccttcct

SEQ ID NO: 216818 - DNA, 25 bp, probe
gaaacagtggcatattctcatggta

SEQ ID NO: 216819 - DNA, 25 bp, probe
gaaacagtggcatattctcatggta

SEQ ID NO: 216820 - DNA, 25 bp, probe
gaaacactggcaaatatcacagcag

SEQ ID NO: 216821 - DNA, 25 bp, probe
gaaacactggcaaatatcacagcag

SEQ ID NO: 216822 - DNA, 25 bp, probe
gaaacacggtatttaagagagaact

SEQ ID NO: 216823 - DNA, 25 bp, probe
gaaaacgagacaattgaaaagtcaa

SEQ ID NO: 216824 - DNA, 25 bp, probe
gaaaaaagtgactatgacaccccaa

SEQ ID NO: 216825 - DNA, 25 bp, probe
gaaaacaattgacaacatcctcaaa

SEQ ID NO: 216826 - DNA, 25 bp, probe
gaaagatacttacatgttcccaaaa

SEQ ID NO: 216827 - DNA, 25 bp, probe
gagaaattttctctggacccagtta

SEQ ID NO: 216828 - DNA, 25 bp, probe
gaaagattttctatggaccacagat

SEQ ID NO: 216829 - DNA, 25 bp, probe
gaaacatctttcatagccacattaa

SEQ ID NO: 216830 - DNA, 25 bp, probe
gaaactaccttcaactccatcatga

SEQ ID NO: 216831 - DNA, 25 bp, probe
gaaactaccaccaaattatccaact

SEQ ID NO: 216832 - DNA, 25 bp, probe
gaaactagaacaaacaaatccaact

SEQ ID NO: 216833 - DNA, 25 bp, probe
gaaacaaaactaaagagaccactct

SEQ ID NO: 216834 - DNA, 25 bp, probe
gaaacaaaactaaagagaccactct

SEQ ID NO: 216835 - DNA, 25 bp, probe
gaaaacataacgacccaggccaggt

SEQ ID NO: 216836 - DNA, 25 bp, probe
gaaaaatgaacgacacacatgttag

SEQ ID NO: 216837 - DNA, 25 bp, probe
gaaaggaagccgcactcagttatgg

SEQ ID NO: 216838 - DNA, 25 bp, probe
gaaactgaagctgttctcaggatca

SEQ ID NO: 216839 - DNA, 25 bp, probe
gaaactgcagacgaattgaaaatat

SEQ ID NO: 216840 - DNA, 25 bp, probe
gagaactgacacctttgaaaccaca

SEQ ID NO: 216841 - DNA, 25 bp, probe
gaaacgactagaagagaaaccagat

SEQ ID NO: 216842 - DNA, 25 bp, probe
gaaacagattacaggacgaatagct

SEQ ID NO: 216843 - DNA, 25 bp, probe
gaaactgcttcatggagacataaag

SEQ ID NO: 216844 - DNA, 25 bp, probe
gaaactgcatgttgcgagatgacat

SEQ ID NO: 216845 - DNA, 25 bp, probe
gaaacatatgggctgataaacccgg

SEQ ID NO: 216846 - DNA, 25 bp, probe
gaaaaatgagcttgtaaatactcca

SEQ ID NO: 216847 - DNA, 25 bp, probe
gaaaaaggctacaatacacactgga

SEQ ID NO: 216848 - DNA, 25 bp, probe
gaaaaaggctacaatacacactgga

SEQ ID NO: 216849 - DNA, 25 bp, probe
gaaaaagagacaactgatacaagga

SEQ ID NO: 216850 - DNA, 25 bp, probe
gaaaaagagacaactgatacaagga

SEQ ID NO: 216851 - DNA, 25 bp, probe
gaaaacaggccaacgaacacaagaa

SEQ ID NO: 216852 - DNA, 25 bp, probe
gaaacaaacgcttagaacaaatata

SEQ ID NO: 216853 - DNA, 25 bp, probe
gaaactttccattaaaacagatgtc

SEQ ID NO: 216854 - DNA, 25 bp, probe
gaaactttcacatgcaaccaatgta

SEQ ID NO: 216855 - DNA, 25 bp, probe
gaaactttcacatgcaaccaatgta

SEQ ID NO: 216856 - DNA, 25 bp, probe
gaaactgtatcacctttgccaagta

SEQ ID NO: 216857 - DNA, 25 bp, probe
gaaagtggcacaccaagttcctcta

SEQ ID NO: 216858 - DNA, 25 bp, probe
gaaaactatcaagatgttcctcatt

SEQ ID NO: 216859 - DNA, 25 bp, probe
gaaaactatcaagatgttcctcatt

SEQ ID NO: 216860 - DNA, 25 bp, probe
gaaacttgcccagatgttctcagat

SEQ ID NO: 216861 - DNA, 25 bp, probe
tcttcaggttccacatggtatagtt

SEQ ID NO: 216862 - DNA, 25 bp, probe
tccttttgtccacaggtatgaggta

SEQ ID NO: 216863 - DNA, 25 bp, probe
tcctgaatttgcacagaggaaagcg

SEQ ID NO: 216864 - DNA, 25 bp, probe
gaaacacatggatgattctccgaag

SEQ ID NO: 216865 - DNA, 25 bp, probe
gaaactaggcagtattcatgccctg

SEQ ID NO: 216866 - DNA, 25 bp, probe
gaaactaggcagtattcatgccctg

SEQ ID NO: 216867 - DNA, 25 bp, probe
gaaactgaggactaaagtcactgat

SEQ ID NO: 216868 - DNA, 25 bp, probe
gaaactgcaccggaaatgtgcctac

SEQ ID NO: 216869 - DNA, 25 bp, probe
gaaactgaacggcacagtgccctgc

SEQ ID NO: 216870 - DNA, 25 bp, probe
gaaactatgtggagaatcggcccaa

SEQ ID NO: 216871 - DNA, 25 bp, probe
gaaactgttagcggctacgaggcca

SEQ ID NO: 216872 - DNA, 25 bp, probe
gaaacttttgacatggagagcctca

SEQ ID NO: 216873 - DNA, 25 bp, probe
gaaactttgacctttgaggatggca

SEQ ID NO: 216874 - DNA, 25 bp, probe
gaaacctagaactcagaggattgct

SEQ ID NO: 216875 - DNA, 25 bp, probe
gaaacactatccataaggagatttg

SEQ ID NO: 216876 - DNA, 25 bp, probe
gaaacactatccataaggagatttg

SEQ ID NO: 216877 - DNA, 25 bp, probe
gaaacagaatgctttaaggagctga

SEQ ID NO: 216878 - DNA, 25 bp, probe
gaaaggatgagctcaaatcgaccaa

SEQ ID NO: 216879 - DNA, 25 bp, probe
gaaatggatggccccagaaacaatt

SEQ ID NO: 216880 - DNA, 25 bp, probe
gaaacagctaggcccaaatcacaag

SEQ ID NO: 216881 - DNA, 25 bp, probe
gaaacagtgaagtctcaacagcaga

SEQ ID NO: 216882 - DNA, 25 bp, probe
gaaagcagtcttccatcaaatcacc

SEQ ID NO: 216883 - DNA, 25 bp, probe
gaaaggttttcctaatcgatcgctt

SEQ ID NO: 216884 - DNA, 25 bp, probe
gaaaggttttcctaatcgatcgctt

SEQ ID NO: 216885 - DNA, 25 bp, probe
gaaaaactattcctaatcaacatgg

SEQ ID NO: 216886 - DNA, 25 bp, probe
gaaaaactattcctaatcaacatgg

SEQ ID NO: 216887 - DNA, 25 bp, probe
gaaacatacgtttctaagcaatacg

SEQ ID NO: 216888 - DNA, 25 bp, probe
gaaacatacgtttctaagcaatacg

SEQ ID NO: 216889 - DNA, 25 bp, probe
gaaactacgtttgcaacacagtatt

SEQ ID NO: 216890 - DNA, 25 bp, probe
gaaactaaggctttactcatcagtc

SEQ ID NO: 216891 - DNA, 25 bp, probe
gaaacaggatggctttctgtagcca

SEQ ID NO: 216892 - DNA, 25 bp, probe
gaaacaggtgtgtctttttagtgga

SEQ ID NO: 216893 - DNA, 25 bp, probe
gaaacgggcaggtgagattaggggt

SEQ ID NO: 216894 - DNA, 25 bp, probe
gaaaccagggccggagttagagagg

SEQ ID NO: 216895 - DNA, 25 bp, probe
gaaacctgaggatcgacctaacaca

SEQ ID NO: 216896 - DNA, 25 bp, probe
gaaacctgaggatcgacctaacaca

SEQ ID NO: 216897 - DNA, 25 bp, probe
gaaacccatgtgaggctcctcagac

SEQ ID NO: 216898 - DNA, 25 bp, probe
gaaacagaattgatgtgctgctaaa

SEQ ID NO: 216899 - DNA, 25 bp, probe
gaaacacattggaagctgcgctcga

SEQ ID NO: 216900 - DNA, 25 bp, probe
gaaaccctgatgacacagtgcaggg

SEQ ID NO: 216901 - DNA, 25 bp, probe
gaaacatcgcaagaagatgcagcac

SEQ ID NO: 216902 - DNA, 25 bp, probe
gaaagcagcccagacactgagtgcc

SEQ ID NO: 216903 - DNA, 25 bp, probe
gaaaaacctgccaaatatgatgaca

SEQ ID NO: 216904 - DNA, 25 bp, probe
gaaacaagctatataattgtgtgca

SEQ ID NO: 216905 - DNA, 25 bp, probe
gaaacgatgcgtagttttcatttac

SEQ ID NO: 216906 - DNA, 25 bp, probe
gaaaccagatgtcgttttcttcggg

SEQ ID NO: 216907 - DNA, 25 bp, probe
gaaagccacatgtctgtgtgtgtgc

SEQ ID NO: 216908 - DNA, 25 bp, probe
gaaagccagtgcgtggagtgcagct

SEQ ID NO: 216909 - DNA, 25 bp, probe
gaaacagcagtggtgcggtggaaag

SEQ ID NO: 216910 - DNA, 25 bp, probe
gaaagagagtggtcctagtcaaaga

SEQ ID NO: 216911 - DNA, 25 bp, probe
gaaaggcctgttcaactacaagcgg

SEQ ID NO: 216912 - DNA, 25 bp, probe
gaaacagcttttccaactcagaagc

SEQ ID NO: 216913 - DNA, 25 bp, probe
gaaacagatttcatacctcagaatg

SEQ ID NO: 216914 - DNA, 25 bp, probe
gaaaaacttcatcacccgagagaac

SEQ ID NO: 216915 - DNA, 25 bp, probe
gaaaaacttcactgcccagaagcag

SEQ ID NO: 216916 - DNA, 25 bp, probe
gaaaaacattcatctcccagatggc

SEQ ID NO: 216917 - DNA, 25 bp, probe
gaaacaacatacttgtcccatgagc

SEQ ID NO: 216918 - DNA, 25 bp, probe
gaaaaagatccacgaccatgctcag

SEQ ID NO: 216919 - DNA, 25 bp, probe
gaaaaagatctccccatcagtgaaa

SEQ ID NO: 216920 - DNA, 25 bp, probe
gaaacatagctcctaccacagatgt

SEQ ID NO: 216921 - DNA, 25 bp, probe
gagacctattcctactccagtaggg

SEQ ID NO: 216922 - DNA, 25 bp, probe
gaaactattccaatgttcagtggcg

SEQ ID NO: 216923 - DNA, 25 bp, probe
gaaacttatcacatgccaatgggga

SEQ ID NO: 216924 - DNA, 25 bp, probe
gataacttcgaagccatagggtgga

SEQ ID NO: 216925 - DNA, 25 bp, probe
gaaacagtggttgccaaaagtggag

SEQ ID NO: 216926 - DNA, 25 bp, probe
gaaacggtgaaggctaaaactgcta

SEQ ID NO: 216927 - DNA, 25 bp, probe
gaaagggtgaggggccaacaccaag

SEQ ID NO: 216928 - DNA, 25 bp, probe
gaaacaggaatggggcaaagagcaa

SEQ ID NO: 216929 - DNA, 25 bp, probe
gaaagggaacacacaatagaagagt

SEQ ID NO: 216930 - DNA, 25 bp, probe
gaaagggaacacacaatagaagagt

SEQ ID NO: 216931 - DNA, 25 bp, probe
gaaaggcgacaaaccgctaagtctg

SEQ ID NO: 216932 - DNA, 25 bp, probe
gaaaggcgacaaaccgctaagtctg

SEQ ID NO: 216933 - DNA, 25 bp, probe
gaaactgaccaaacgcttattgtgt

SEQ ID NO: 216934 - DNA, 25 bp, probe
gaaactgacaaaggtagcgatgttg

SEQ ID NO: 216935 - DNA, 25 bp, probe
gaaacagaagcatcggacagtgttg

SEQ ID NO: 216936 - DNA, 25 bp, probe
gaaacagaagcatcggacagtgttg

SEQ ID NO: 216937 - DNA, 25 bp, probe
gaaactgaagcctgtgattggtgga

SEQ ID NO: 216938 - DNA, 25 bp, probe
gaaacattgatgcaggtgagatggt

SEQ ID NO: 216939 - DNA, 25 bp, probe
gaaactttgtagcatcgggctaaga

SEQ ID NO: 216940 - DNA, 25 bp, probe
gaaactttctaaatcagtgtaaatg

SEQ ID NO: 216941 - DNA, 25 bp, probe
gaaatgtagtttctcagttgcacta

SEQ ID NO: 216942 - DNA, 25 bp, probe
gaaatgtagtttctcagttgcacta

SEQ ID NO: 216943 - DNA, 25 bp, probe
gaaatatggttccttttgtggcttg

SEQ ID NO: 216944 - DNA, 25 bp, probe
gaaagatggtccccttttatctgat

SEQ ID NO: 216945 - DNA, 25 bp, probe
gaaacggtcctctttattgtcaaga

SEQ ID NO: 216946 - DNA, 25 bp, probe
gaaacggttctatcatgcatgtgta

SEQ ID NO: 216947 - DNA, 25 bp, probe
gaaacaaggatcttccgagtgcttg

SEQ ID NO: 216948 - DNA, 25 bp, probe
gaaaaagtgatgcctcaaggtcttg

SEQ ID NO: 216949 - DNA, 25 bp, probe
gaaagagacttgccatgaagcagtc

SEQ ID NO: 216950 - DNA, 25 bp, probe
gaaagacttttcgaatggaccctat

SEQ ID NO: 216951 - DNA, 25 bp, probe
gaaagacttttggagactggtcctg

SEQ ID NO: 216952 - DNA, 25 bp, probe
gaaagaacttcaggtgtctggaccc

SEQ ID NO: 216953 - DNA, 25 bp, probe
gaaagatctcttcctttctggagct

SEQ ID NO: 216954 - DNA, 25 bp, probe
gacaagttctctgcagagtttgttg

SEQ ID NO: 216955 - DNA, 25 bp, probe
gacaagttctctgcagagtttgttg

SEQ ID NO: 216956 - DNA, 25 bp, probe
gacaagttctctgcagagtttgttg

SEQ ID NO: 216957 - DNA, 25 bp, probe
gaaacttctctgcagtatctggctt

SEQ ID NO: 216958 - DNA, 25 bp, probe
gaaaccttctggctgattgggaaaa

SEQ ID NO: 216959 - DNA, 25 bp, probe
gaaaccctggagatgtcgggaagca

SEQ ID NO: 216960 - DNA, 25 bp, probe
gaaaccctggagatgtcgggaagca

SEQ ID NO: 216961 - DNA, 25 bp, probe
gaaaccctccagattacagggagga

SEQ ID NO: 216962 - DNA, 25 bp, probe
gaaacttctcccaagtgaagcttgg

SEQ ID NO: 216963 - DNA, 25 bp, probe
gaaacattccgtgattaagctttgt

SEQ ID NO: 216964 - DNA, 25 bp, probe
gaaaaattctgtgatagttgctatt

SEQ ID NO: 216965 - DNA, 25 bp, probe
gaaaaatgctctcgtaggtggccag

SEQ ID NO: 216966 - DNA, 25 bp, probe
gaaagcacataccactaagcggcca

SEQ ID NO: 216967 - DNA, 25 bp, probe
gaaagcacataccactaagcggcca

SEQ ID NO: 216968 - DNA, 25 bp, probe
gaaaaataccagaagcgagaacata

SEQ ID NO: 216969 - DNA, 25 bp, probe
gaaaaatctctgctcaaagaattca

SEQ ID NO: 216970 - DNA, 25 bp, probe
gaaaaatctctgctcaaagaattca

SEQ ID NO: 216971 - DNA, 25 bp, probe
gaaacaatttttgacagagtgtaca

SEQ ID NO: 216972 - DNA, 25 bp, probe
gaaactgttattgaacttggctatc

SEQ ID NO: 216973 - DNA, 25 bp, probe
gaaactgctttctgtactcttgcaa

SEQ ID NO: 216974 - DNA, 25 bp, probe
gaaactttttcaggacatgctatct

SEQ ID NO: 216975 - DNA, 25 bp, probe
gaaacatttttgcaaatgcatttta

SEQ ID NO: 216976 - DNA, 25 bp, probe
gaaacacttctcggccagaatttat

SEQ ID NO: 216977 - DNA, 25 bp, probe
gaaagccgtgcgtgcgcgttattta

SEQ ID NO: 216978 - DNA, 25 bp, probe
gaaactgctgtgagggccagtattt

SEQ ID NO: 216979 - DNA, 25 bp, probe
gaaaccagttggctctagctacttg

SEQ ID NO: 216980 - DNA, 25 bp, probe
gaaacacagagttgttctgctgata

SEQ ID NO: 216981 - DNA, 25 bp, probe
gaaagcgcaggtgttcgcagaaagc

SEQ ID NO: 216982 - DNA, 25 bp, probe
gaaagcatgcgggcctttgggaaaa

SEQ ID NO: 216983 - DNA, 25 bp, probe
gaaagtgggcatgctaagggcaagg

SEQ ID NO: 216984 - DNA, 25 bp, probe
gaaactggacaagaagcggctgaag

SEQ ID NO: 216985 - DNA, 25 bp, probe
gaaactgggcaacaatttgctgtaa

SEQ ID NO: 216986 - DNA, 25 bp, probe
gaaacgatggaaagaactttctaag

SEQ ID NO: 216987 - DNA, 25 bp, probe
gaaacgctgggaaaactttatccat

SEQ ID NO: 216988 - DNA, 25 bp, probe
gaaacacagcaacaatgacttaacc

SEQ ID NO: 216989 - DNA, 25 bp, probe
gaaacatcagaattactaatctagc

SEQ ID NO: 216990 - DNA, 25 bp, probe
gaaacatctgcatttgaaagactac

SEQ ID NO: 216991 - DNA, 25 bp, probe
gaaacttgctgtagatgaagaagaa

SEQ ID NO: 216992 - DNA, 25 bp, probe
gaaactctcattcgtgcactaagga

SEQ ID NO: 216993 - DNA, 25 bp, probe
gaaactctctggcagccataaatgg

SEQ ID NO: 216994 - DNA, 25 bp, probe
gaaacttctggaggccatggcatct

SEQ ID NO: 216995 - DNA, 25 bp, probe
gaaacttctggaggccatggcatct

SEQ ID NO: 216996 - DNA, 25 bp, probe
gaaacttctggaggccatggcatct

SEQ ID NO: 216997 - DNA, 25 bp, probe
gaaacttctggaggccatggcatct

SEQ ID NO: 216998 - DNA, 25 bp, probe
gaaacactctgagtggccaggcctg

SEQ ID NO: 216999 - DNA, 25 bp, probe
gaaaccatctgagatccagcaggtg

SEQ ID NO: 217000 - DNA, 25 bp, probe
gacaaccaatatttccaggggatag

SEQ ID NO: 217001 - DNA, 25 bp, probe
gaaaccacttttccatggggattca

SEQ ID NO: 217002 - DNA, 25 bp, probe
gaaaccacttttccatggggattca

SEQ ID NO: 217003 - DNA, 25 bp, probe
gaaaccacttttccatggggattca

SEQ ID NO: 217004 - DNA, 25 bp, probe
gaaaccacttttccatggggattca

SEQ ID NO: 217005 - DNA, 25 bp, probe
gaaacccttgttcttaggatcacag

SEQ ID NO: 217006 - DNA, 25 bp, probe
gagaaaggttttcctaatcgatcgc

SEQ ID NO: 217007 - DNA, 25 bp, probe
gagaaaggttttcctaatcgatcgc

SEQ ID NO: 217008 - DNA, 25 bp, probe
gaaagaatgtttcacccttgcatcc

SEQ ID NO: 217009 - DNA, 25 bp, probe
gaaacagaatttcatgcacaatcca

SEQ ID NO: 217010 - DNA, 25 bp, probe
gaaacaggagttgatgaacccatca

SEQ ID NO: 217011 - DNA, 25 bp, probe
gaaacaggagttgatgaacccatca

SEQ ID NO: 217012 - DNA, 25 bp, probe
gaaagacaagttgaggaaccataag

SEQ ID NO: 217013 - DNA, 25 bp, probe
gaaagacaagttgaggaaccataag

SEQ ID NO: 217014 - DNA, 25 bp, probe
gaaagaaggattggaggaccctgag

SEQ ID NO: 217015 - DNA, 25 bp, probe
gaaacaaggcttccagtgccaagga

SEQ ID NO: 217016 - DNA, 25 bp, probe
gaaacaaggaatccagtgaccaaac

SEQ ID NO: 217017 - DNA, 25 bp, probe
gaaatcttaagacggtggccaaatt

SEQ ID NO: 217018 - DNA, 25 bp, probe
gaaactgtcaagagggggcaagtca

SEQ ID NO: 217019 - DNA, 25 bp, probe
gaaactgacaaatactggggtgtcc

SEQ ID NO: 217020 - DNA, 25 bp, probe
gaaaggatccactgggtgggttgtt

SEQ ID NO: 217021 - DNA, 25 bp, probe
gaaaccgccgcaatgggggtgtctt

SEQ ID NO: 217022 - DNA, 25 bp, probe
gaaacctcagagctggtggggctcc

SEQ ID NO: 217023 - DNA, 25 bp, probe
gaaatcccaagcttaggagccctgg

SEQ ID NO: 217024 - DNA, 25 bp, probe
gaaacccacagctgcagaggtctct

SEQ ID NO: 217025 - DNA, 25 bp, probe
gaaacacactcctgcagaaggctgt

SEQ ID NO: 217026 - DNA, 25 bp, probe
gaaacatcctactggtagatggaac

SEQ ID NO: 217027 - DNA, 25 bp, probe
gaaacatcctactggtagatggaac

SEQ ID NO: 217028 - DNA, 25 bp, probe
gaaacacctcaactggataattatg

SEQ ID NO: 217029 - DNA, 25 bp, probe
gaaacatccaagttgcagtacctac

SEQ ID NO: 217030 - DNA, 25 bp, probe
gaaactcccatgtatggaatcccac

SEQ ID NO: 217031 - DNA, 25 bp, probe
gaaacatcctcgtggagagcgaggc

SEQ ID NO: 217032 - DNA, 25 bp, probe
gaaacatcctggtagctgaggggcg

SEQ ID NO: 217033 - DNA, 25 bp, probe
gaaacacttctgtcaatgagttggc

SEQ ID NO: 217034 - DNA, 25 bp, probe
gaaacactttgacacatgttatgaa

SEQ ID NO: 217035 - DNA, 25 bp, probe
gaaacactcctgtggatggtattgt

SEQ ID NO: 217036 - DNA, 25 bp, probe
gataacccgttctgtgagtttatta

SEQ ID NO: 217037 - DNA, 25 bp, probe
gataacccgttctgtgagtttatta

SEQ ID NO: 217038 - DNA, 25 bp, probe
gaaacccgtgtatctgggatatttc

SEQ ID NO: 217039 - DNA, 25 bp, probe
gaaacacactggattgggtatgtct

SEQ ID NO: 217040 - DNA, 25 bp, probe
gaaaccagtgcctttaggtgagatt

SEQ ID NO: 217041 - DNA, 25 bp, probe
gaaactggtcacttggatggtgtgt

SEQ ID NO: 217042 - DNA, 25 bp, probe
gaaactttacaacacaattgcatcc

SEQ ID NO: 217043 - DNA, 25 bp, probe
gaaactcttgaggaaaagttctcag

SEQ ID NO: 217044 - DNA, 25 bp, probe
gaaacgcctggctaaaattgtgctt

SEQ ID NO: 217045 - DNA, 25 bp, probe
gaaaccctcatgctaaactgtctga

SEQ ID NO: 217046 - DNA, 25 bp, probe
gaaatccagcttcataatttccatg

SEQ ID NO: 217047 - DNA, 25 bp, probe
gaaagccactaaaatcctgggcatc

SEQ ID NO: 217048 - DNA, 25 bp, probe
gaaaccaaagaatccaagagctcat

SEQ ID NO: 217049 - DNA, 25 bp, probe
gaaacatgcaaaggaacacagtacc

SEQ ID NO: 217050 - DNA, 25 bp, probe
gaaactggatcaagaacacatgttc

SEQ ID NO: 217051 - DNA, 25 bp, probe
gaaactggacagcacagacttcacc

SEQ ID NO: 217052 - DNA, 25 bp, probe
gaaacagccctgcatagagcttgca

SEQ ID NO: 217053 - DNA, 25 bp, probe
gaaacaccctgagtgagacattaaa

SEQ ID NO: 217054 - DNA, 25 bp, probe
gaaagcaccctaattgacttggaaa

SEQ ID NO: 217055 - DNA, 25 bp, probe
gaaagcaccctaattgacttggaaa

SEQ ID NO: 217056 - DNA, 25 bp, probe
gaaagccagtatattggtttgaaat

SEQ ID NO: 217057 - DNA, 25 bp, probe
gaaagccagtatattggtttgaaat

SEQ ID NO: 217058 - DNA, 25 bp, probe
gtaaccctaccgagttttatatatg

SEQ ID NO: 217059 - DNA, 25 bp, probe
gaaacctgtaccaggtgcttttatt

SEQ ID NO: 217060 - DNA, 25 bp, probe
gaaatactgtagtattttctatttt

SEQ ID NO: 217061 - DNA, 25 bp, probe
gaaatacttgaacttgcctctttta

SEQ ID NO: 217062 - DNA, 25 bp, probe
gaaatcccgaaatgactttattggt

SEQ ID NO: 217063 - DNA, 25 bp, probe
gaaagccctaaaaagctgttgactt

SEQ ID NO: 217064 - DNA, 25 bp, probe
gaaactccttagagagcattttgct

SEQ ID NO: 217065 - DNA, 25 bp, probe
gaaacctcctataaagcttagctgc

SEQ ID NO: 217066 - DNA, 25 bp, probe
gaaagcaccgctcacaactatatgc

SEQ ID NO: 217067 - DNA, 25 bp, probe
gaaacacctgcacgacaactggatc

SEQ ID NO: 217068 - DNA, 25 bp, probe
gaaagaggcagcttgaaactgagat

SEQ ID NO: 217069 - DNA, 25 bp, probe
gaaagcttccgtgaacatggccaca

SEQ ID NO: 217070 - DNA, 25 bp, probe
gaaagcttccgtgaacatggccaca

SEQ ID NO: 217071 - DNA, 25 bp, probe
gaaagccttagggaagctggcctga

SEQ ID NO: 217072 - DNA, 25 bp, probe
gaaactcttgaaatccagttgccat

SEQ ID NO: 217073 - DNA, 25 bp, probe
gaaacctgctaactacagtgtggcc

SEQ ID NO: 217074 - DNA, 25 bp, probe
gaaactatctcggtcacgtgagcgc

SEQ ID NO: 217075 - DNA, 25 bp, probe
gaaagccatctctgtcctggagatg

SEQ ID NO: 217076 - DNA, 25 bp, probe
gaaagccattgacatttggatggca

SEQ ID NO: 217077 - DNA, 25 bp, probe
gaaagccattgacatttggatggca

SEQ ID NO: 217078 - DNA, 25 bp, probe
gaaagccacgatccttgacagggtg

SEQ ID NO: 217079 - DNA, 25 bp, probe
gaaagccaaggctgcgtcgaactgt

SEQ ID NO: 217080 - DNA, 25 bp, probe
gaaagtgcaaagtagattcgtagtt

SEQ ID NO: 217081 - DNA, 25 bp, probe
gaaagggaagaacatcactcagctg

SEQ ID NO: 217082 - DNA, 25 bp, probe
gaaagggaacaagcagccaagtaag

SEQ ID NO: 217083 - DNA, 25 bp, probe
gaaagggccaaagaccattgcagag

SEQ ID NO: 217084 - DNA, 25 bp, probe
gaaagggccaaagaccattgcagag

SEQ ID NO: 217085 - DNA, 25 bp, probe
gaaaggcccaaggtatccaagcctg

SEQ ID NO: 217086 - DNA, 25 bp, probe
gaaagcaaccaagaagaagtctctg

SEQ ID NO: 217087 - DNA, 25 bp, probe
gaaagaatgaaacggtgaaggctaa

SEQ ID NO: 217088 - DNA, 25 bp, probe
gaaactaagctacagtaccagtaat

SEQ ID NO: 217089 - DNA, 25 bp, probe
gaaaccaagcaagaaactgctgtga

SEQ ID NO: 217090 - DNA, 25 bp, probe
gaaaccaaagagagttgctgctgtt

SEQ ID NO: 217091 - DNA, 25 bp, probe
gaaacccaaagaagtccatgatagg

SEQ ID NO: 217092 - DNA, 25 bp, probe
gaaacccaagagagccaatgatgga

SEQ ID NO: 217093 - DNA, 25 bp, probe
gaaatcatcctggaccccaaagtga

SEQ ID NO: 217094 - DNA, 25 bp, probe
gaaagactgtgtaggcccagaagtg

SEQ ID NO: 217095 - DNA, 25 bp, probe
gacaagagtgcgggggccgaaggat

SEQ ID NO: 217096 - DNA, 25 bp, probe
gacaagagtgcgggggccgaaggat

SEQ ID NO: 217097 - DNA, 25 bp, probe
gaaaggtggacatgtcctgaaggac

SEQ ID NO: 217098 - DNA, 25 bp, probe
gaaagcagttacagtcttgtggaaa

SEQ ID NO: 217099 - DNA, 25 bp, probe
gaaatgaattcctcatttggaggaa

SEQ ID NO: 217100 - DNA, 25 bp, probe
gaaagaactcaggacatattaaaaa

SEQ ID NO: 217101 - DNA, 25 bp, probe
gaaagaaccaccaaagatctcaaat

SEQ ID NO: 217102 - DNA, 25 bp, probe
gaaaccacaacacaggtctaaactc

SEQ ID NO: 217103 - DNA, 25 bp, probe
gaaactcaccagcgagaacaaacac

SEQ ID NO: 217104 - DNA, 25 bp, probe
gaaagcttccacagaaactgaatgc

SEQ ID NO: 217105 - DNA, 25 bp, probe
gaaacttgccacagagaagtcaggt

SEQ ID NO: 217106 - DNA, 25 bp, probe
gaaacgtgcaggcagagccgatcag

SEQ ID NO: 217107 - DNA, 25 bp, probe
gaaactgagaagcatgacggacaag

SEQ ID NO: 217108 - DNA, 25 bp, probe
gaaactgacacaaatagagagggga

SEQ ID NO: 217109 - DNA, 25 bp, probe
gaaactcacagccaaatggcagagg

SEQ ID NO: 217110 - DNA, 25 bp, probe
gaaagcttcagacacatgcagtcaa

SEQ ID NO: 217111 - DNA, 25 bp, probe
gaaagctgcatcaagagcacggtca

SEQ ID NO: 217112 - DNA, 25 bp, probe
gaaactgatcagggcagctgctctg

SEQ ID NO: 217113 - DNA, 25 bp, probe
gaaagcgccataacagcatctcgga

SEQ ID NO: 217114 - DNA, 25 bp, probe
gaaactcagcatgacgcttgggtgt

SEQ ID NO: 217115 - DNA, 25 bp, probe
gaaacctcaccccattgattggtag

SEQ ID NO: 217116 - DNA, 25 bp, probe
gaaacctcagcgtgaatttggggga

SEQ ID NO: 217117 - DNA, 25 bp, probe
gaaaccatgcacatagaatacggca

SEQ ID NO: 217118 - DNA, 25 bp, probe
gaaaccacagccgatgacatcatcg

SEQ ID NO: 217119 - DNA, 25 bp, probe
gaaaccacagccgatgacatcatcg

SEQ ID NO: 217120 - DNA, 25 bp, probe
gaaacctcacaatgtcatgatagat

SEQ ID NO: 217121 - DNA, 25 bp, probe
gaaacatccacacattgtagagtta

SEQ ID NO: 217122 - DNA, 25 bp, probe
gaaacatcaggaatatttatggtga

SEQ ID NO: 217123 - DNA, 25 bp, probe
gaaagaaactctgatggtgctgtga

SEQ ID NO: 217124 - DNA, 25 bp, probe
gaaagccaacatcaagtgggtgaag

SEQ ID NO: 217125 - DNA, 25 bp, probe
gaaaccagcactctcaaggaagaag

SEQ ID NO: 217126 - DNA, 25 bp, probe
gaaactaactaaacaggaacagaga

SEQ ID NO: 217127 - DNA, 25 bp, probe
gaaagctaaattactgcaggaagca

SEQ ID NO: 217128 - DNA, 25 bp, probe
gaaagctaaattactgcaggaagca

SEQ ID NO: 217129 - DNA, 25 bp, probe
gaaatgctagaaactgagccagtag

SEQ ID NO: 217130 - DNA, 25 bp, probe
gaaagcagtggaactggccggaccc

SEQ ID NO: 217131 - DNA, 25 bp, probe
gaaagagctggtgcatgatgacgag

SEQ ID NO: 217132 - DNA, 25 bp, probe
gaaacatctggaaggatgctcgaga

SEQ ID NO: 217133 - DNA, 25 bp, probe
gaaactctggacagcaggcatcaca

SEQ ID NO: 217134 - DNA, 25 bp, probe
gaaactttcctggcaggcacacaag

SEQ ID NO: 217135 - DNA, 25 bp, probe
gaaactttcctggcaggcacacaag

SEQ ID NO: 217136 - DNA, 25 bp, probe
gaaacatcttgcttatttgccaaag

SEQ ID NO: 217137 - DNA, 25 bp, probe
gaaacatcttgcttatttgccaaag

SEQ ID NO: 217138 - DNA, 25 bp, probe
gaaacatatctcttatcttacgaaa

SEQ ID NO: 217139 - DNA, 25 bp, probe
gaaactggtttatttctggcagaaa

SEQ ID NO: 217140 - DNA, 25 bp, probe
gaaagctggcttaaatgtcaagggg

SEQ ID NO: 217141 - DNA, 25 bp, probe
gaaagcgtctctgagtgtagcaggg

SEQ ID NO: 217142 - DNA, 25 bp, probe
gaaagcgtctctttgtctggagctt

SEQ ID NO: 217143 - DNA, 25 bp, probe
gaaactgtttgatgactggatggca

SEQ ID NO: 217144 - DNA, 25 bp, probe
gaaacctttgggaatggatatcaga

SEQ ID NO: 217145 - DNA, 25 bp, probe
gaaactctcatccgcgatatgttac

SEQ ID NO: 217146 - DNA, 25 bp, probe
gaaacttactgctgaatgattacat

SEQ ID NO: 217147 - DNA, 25 bp, probe
gaaacttagcttttgatgtctccaa

SEQ ID NO: 217148 - DNA, 25 bp, probe
gaaactttgctttaattatattata

SEQ ID NO: 217149 - DNA, 25 bp, probe
gaaaccccttattgatgtatttcat

SEQ ID NO: 217150 - DNA, 25 bp, probe
gaaagctctcctaatacttacttaa

SEQ ID NO: 217151 - DNA, 25 bp, probe
gaaactctgcactctacttgtgctg

SEQ ID NO: 217152 - DNA, 25 bp, probe
gaaactctgcactctacttgtgctg

SEQ ID NO: 217153 - DNA, 25 bp, probe
gaaacttgactctacatgtattgct

SEQ ID NO: 217154 - DNA, 25 bp, probe
gaaacattttctcctgctgattgtg

SEQ ID NO: 217155 - DNA, 25 bp, probe
gaaacatttcttgcaggtttgcttc

SEQ ID NO: 217156 - DNA, 25 bp, probe
gaaacatttcttgcaggtttgcttc

SEQ ID NO: 217157 - DNA, 25 bp, probe
gaaagcagtttagagatgattcagt

SEQ ID NO: 217158 - DNA, 25 bp, probe
gaaagcagtcattattcaaggtgat

SEQ ID NO: 217159 - DNA, 25 bp, probe
gaaagcattgactaatcaaaggatt

SEQ ID NO: 217160 - DNA, 25 bp, probe
gaaactcggctttgcaacaggcatt

SEQ ID NO: 217161 - DNA, 25 bp, probe
gaaacgcaggcaacgcctaggcttt

SEQ ID NO: 217162 - DNA, 25 bp, probe
gaaactcagccatcccaagctggtt

SEQ ID NO: 217163 - DNA, 25 bp, probe
gaaactcagccatcccaagctggtt

SEQ ID NO: 217164 - DNA, 25 bp, probe
gaaaccaacacccaaagcatggact

SEQ ID NO: 217165 - DNA, 25 bp, probe
gaaaccaatagataatgcgaagact

SEQ ID NO: 217166 - DNA, 25 bp, probe
gaaactacaacttacatgattaact

SEQ ID NO: 217167 - DNA, 25 bp, probe
gagaagtaaatattaaatccaacca

SEQ ID NO: 217168 - DNA, 25 bp, probe
gaaaggcataaattaaatccacgat

SEQ ID NO: 217169 - DNA, 25 bp, probe
gaaaggcataaattaaatccacgat

SEQ ID NO: 217170 - DNA, 25 bp, probe
gaaaggttgaattaattcctgggca

SEQ ID NO: 217171 - DNA, 25 bp, probe
gaaaggttgaattaattcctgggca

SEQ ID NO: 217172 - DNA, 25 bp, probe
gaaagatttgacttacagttctgtg

SEQ ID NO: 217173 - DNA, 25 bp, probe
gaaagatttgacttacagttctgtg

SEQ ID NO: 217174 - DNA, 25 bp, probe
gaaagatcagatgtccaggtttata

SEQ ID NO: 217175 - DNA, 25 bp, probe
gacaaaaatggtgctgttcttattg

SEQ ID NO: 217176 - DNA, 25 bp, probe
gacaacgactttgtgttcgtggtgt

SEQ ID NO: 217177 - DNA, 25 bp, probe
gaaaccatttcacttttaggttgct

SEQ ID NO: 217178 - DNA, 25 bp, probe
gaaactgcatcttgcagcttttcgg

SEQ ID NO: 217179 - DNA, 25 bp, probe
gaaactgcatcttgcagcttttcgg

SEQ ID NO: 217180 - DNA, 25 bp, probe
gaaactgctttgtatctgctttgta

SEQ ID NO: 217181 - DNA, 25 bp, probe
gaaactgtgatggactcgttctgta

SEQ ID NO: 217182 - DNA, 25 bp, probe
gaaagaccttattactgcacagagc

SEQ ID NO: 217183 - DNA, 25 bp, probe
gaaagccctaactgagcctgaggcc

SEQ ID NO: 217184 - DNA, 25 bp, probe
gaaaccactcacgttagcatagggc

SEQ ID NO: 217185 - DNA, 25 bp, probe
gagaatgtaccaagtattccagtgg

SEQ ID NO: 217186 - DNA, 25 bp, probe
gaaagtcctttggattctctggcag

SEQ ID NO: 217187 - DNA, 25 bp, probe
gaaataagttgagcatttctggagt

SEQ ID NO: 217188 - DNA, 25 bp, probe
gaaagctgtatttccattcttgggt

SEQ ID NO: 217189 - DNA, 25 bp, probe
gaaactgtatctgccactcatttcc

SEQ ID NO: 217190 - DNA, 25 bp, probe
gaaactgtctatgcactacattctg

SEQ ID NO: 217191 - DNA, 25 bp, probe
gaaagcatcctctccaaagttggag

SEQ ID NO: 217192 - DNA, 25 bp, probe
gaaaccagcattctcgaaattggag

SEQ ID NO: 217193 - DNA, 25 bp, probe
gaaagccagttcaccaaatcttcat

SEQ ID NO: 217194 - DNA, 25 bp, probe
gaaagcacatttcagcctatttgct

SEQ ID NO: 217195 - DNA, 25 bp, probe
gaaaccatttgtttgctattggctt

SEQ ID NO: 217196 - DNA, 25 bp, probe
gaaacgattttctgtatgatgttac

SEQ ID NO: 217197 - DNA, 25 bp, probe
gaaacttttttcttgatgagactca

SEQ ID NO: 217198 - DNA, 25 bp, probe
gaaacttttttcttgatgagactca

SEQ ID NO: 217199 - DNA, 25 bp, probe
gaaactgtatgaatgtctgtgggca

SEQ ID NO: 217200 - DNA, 25 bp, probe
gaaactgtatgaatgtctgctgggc

SEQ ID NO: 217201 - DNA, 25 bp, probe
gaaactgcttttaacatgggctgta

SEQ ID NO: 217202 - DNA, 25 bp, probe
gaaactgtatttgattggacttaat

SEQ ID NO: 217203 - DNA, 25 bp, probe
gaaaggtattagatttactgctaat

SEQ ID NO: 217204 - DNA, 25 bp, probe
gaaaggaagtggacctctacgcttt

SEQ ID NO: 217205 - DNA, 25 bp, probe
gaaacgaagcaccatcattcccgtt

SEQ ID NO: 217206 - DNA, 25 bp, probe
gaaactcaatcacttcttctacgat

SEQ ID NO: 217207 - DNA, 25 bp, probe
gaaagacataccatcttctatagct

SEQ ID NO: 217208 - DNA, 25 bp, probe
gaaagcaatcacttgtcattttgca

SEQ ID NO: 217209 - DNA, 25 bp, probe
gaaagaatcggttaaattgagagaa

SEQ ID NO: 217210 - DNA, 25 bp, probe
gaaagagaggggataagtatgcaga

SEQ ID NO: 217211 - DNA, 25 bp, probe
gaaagcagaggggattttggatgtc

SEQ ID NO: 217212 - DNA, 25 bp, probe
gaaagatagtgggttccctatgtgc

SEQ ID NO: 217213 - DNA, 25 bp, probe
gaaagatagctacacctcacaagga

SEQ ID NO: 217214 - DNA, 25 bp, probe
gaaactagctctgatcctaacaggc

SEQ ID NO: 217215 - DNA, 25 bp, probe
gaaattagcctttctgtgaaccaga

SEQ ID NO: 217216 - DNA, 25 bp, probe
gaaattagcctttctgtgaaccaga

SEQ ID NO: 217217 - DNA, 25 bp, probe
gaaactgagagtggtagtggaccaa

SEQ ID NO: 217218 - DNA, 25 bp, probe
gaaagcaggaactgagttcattaca

SEQ ID NO: 217219 - DNA, 25 bp, probe
gaaagaatggcagtaggtatttaat

SEQ ID NO: 217220 - DNA, 25 bp, probe
gaaagaatcgcgtggctcatcaaat

SEQ ID NO: 217221 - DNA, 25 bp, probe
gaaagcaattcaatataatccaaat

SEQ ID NO: 217222 - DNA, 25 bp, probe
gaaagcaattcaatataatccaaat

SEQ ID NO: 217223 - DNA, 25 bp, probe
gacaaggttcaaaaactaagcatcc

SEQ ID NO: 217224 - DNA, 25 bp, probe
gaaagtttgtgaaaaaagagcttgt

SEQ ID NO: 217225 - DNA, 25 bp, probe
gaaagtccctcgaaaatacgctatg

SEQ ID NO: 217226 - DNA, 25 bp, probe
gaaagcttcgtccgagaaacgccag

SEQ ID NO: 217227 - DNA, 25 bp, probe
gaaagcccaggaccagtaaccaagg

SEQ ID NO: 217228 - DNA, 25 bp, probe
gaaagaccctgacattcatgatcca

SEQ ID NO: 217229 - DNA, 25 bp, probe
gaaagaccctgacattcatgatcca

SEQ ID NO: 217230 - DNA, 25 bp, probe
gaaagaccctgacaacaagaacctc

SEQ ID NO: 217231 - DNA, 25 bp, probe
gaaagcaccactgctttacagaaac

SEQ ID NO: 217232 - DNA, 25 bp, probe
gaaagaatactggcttgtgaaaaac

SEQ ID NO: 217233 - DNA, 25 bp, probe
gttgtccaggaaattcagaataagc

SEQ ID NO: 217234 - DNA, 25 bp, probe
gaaataatgcggggtctgcggcatc

SEQ ID NO: 217235 - DNA, 25 bp, probe
gaaatcactggggcggtggagcctg

SEQ ID NO: 217236 - DNA, 25 bp, probe
gaaatcgaatggtggtgggcgcgcc

SEQ ID NO: 217237 - DNA, 25 bp, probe
gaaatggaaggatacggacctctta

SEQ ID NO: 217238 - DNA, 25 bp, probe
gaaagtcagggatacggcaagcatg

SEQ ID NO: 217239 - DNA, 25 bp, probe
gaaagtcagggatacggcaagcatg

SEQ ID NO: 217240 - DNA, 25 bp, probe
gaaagttgagtgtcaggggacatga

SEQ ID NO: 217241 - DNA, 25 bp, probe
gaaagctctgaacaagggtgatgcc

SEQ ID NO: 217242 - DNA, 25 bp, probe
gaaatactgcaacaaccgggacttc

SEQ ID NO: 217243 - DNA, 25 bp, probe
gacagtattattcctaccgaaatcc

SEQ ID NO: 217244 - DNA, 25 bp, probe
gacatttcttaagacccaactggca

SEQ ID NO: 217245 - DNA, 25 bp, probe
gacacttttacaggccccaattatc

SEQ ID NO: 217246 - DNA, 25 bp, probe
gaaattttctctggacccagttatg

SEQ ID NO: 217247 - DNA, 25 bp, probe
gaaatttgccctgaccctaaataat

SEQ ID NO: 217248 - DNA, 25 bp, probe
gaaaggattcttggacctctaccaa

SEQ ID NO: 217249 - DNA, 25 bp, probe
gaaagggtcatgaagccctggccca

SEQ ID NO: 217250 - DNA, 25 bp, probe
gaaacgttatgatgacctggcaaca

SEQ ID NO: 217251 - DNA, 25 bp, probe
gaaactgtcccatgacagggaaagc

SEQ ID NO: 217252 - DNA, 25 bp, probe
gaaattgccaaatacatggaaacag

SEQ ID NO: 217253 - DNA, 25 bp, probe
gaaactgaaacaaagattaaccaag

SEQ ID NO: 217254 - DNA, 25 bp, probe
gaaactgaaacaaagattaaccaag

SEQ ID NO: 217255 - DNA, 25 bp, probe
gaaattgaaaaggctattacccatt

SEQ ID NO: 217256 - DNA, 25 bp, probe
gaaattgaaaaggctattacccatt

SEQ ID NO: 217257 - DNA, 25 bp, probe
gaaatgtgcaaagtgcctttcccca

SEQ ID NO: 217258 - DNA, 25 bp, probe
gaaagactaaggatgctgttgcccg

SEQ ID NO: 217259 - DNA, 25 bp, probe
gaaagactaaggatgctgttgcccg

SEQ ID NO: 217260 - DNA, 25 bp, probe
gaaagtctagggggttccattctgg

SEQ ID NO: 217261 - DNA, 25 bp, probe
gaaagtagggggttcccatccagct

SEQ ID NO: 217262 - DNA, 25 bp, probe
gaaaggggagggtgtctgtgccact

SEQ ID NO: 217263 - DNA, 25 bp, probe
gaaaggccaagtgttgtctgagacc

SEQ ID NO: 217264 - DNA, 25 bp, probe
gaaagcaggaagggtgtcactgacc

SEQ ID NO: 217265 - DNA, 25 bp, probe
gaaatgcgaaaggttgtatgtgatc

SEQ ID NO: 217266 - DNA, 25 bp, probe
gaaagaaatgagactgctcgatgga

SEQ ID NO: 217267 - DNA, 25 bp, probe
gaaactgaagagggctcagagcgag

SEQ ID NO: 217268 - DNA, 25 bp, probe
gaaactgagggggaagagcaggctc

SEQ ID NO: 217269 - DNA, 25 bp, probe
gaaagccaacgggatcagaggacca

SEQ ID NO: 217270 - DNA, 25 bp, probe
gaaagccaggatggcccgaggaaga

SEQ ID NO: 217271 - DNA, 25 bp, probe
gaaaccagagcaacgcttaggaagc

SEQ ID NO: 217272 - DNA, 25 bp, probe
gaaagcactgtatggtttggaagct

SEQ ID NO: 217273 - DNA, 25 bp, probe
gaaagcactgtatggtttggaagct

SEQ ID NO: 217274 - DNA, 25 bp, probe
gaaacctgcatagagtttgcaaaga

SEQ ID NO: 217275 - DNA, 25 bp, probe
gacgactcctcagaaggctcagaag

SEQ ID NO: 217276 - DNA, 25 bp, probe
gaaagccgtgactaaggcgcagaag

SEQ ID NO: 217277 - DNA, 25 bp, probe
gacacagtcgtagaattcccaatca

SEQ ID NO: 217278 - DNA, 25 bp, probe
gaaagaagcctggaattcgccaata

SEQ ID NO: 217279 - DNA, 25 bp, probe
gaaagaagcctggaattcgccaata

SEQ ID NO: 217280 - DNA, 25 bp, probe
gacaagaaccatcaagttccaacca

SEQ ID NO: 217281 - DNA, 25 bp, probe
gacaaaaaaaagaggcgcaagcagc

SEQ ID NO: 217282 - DNA, 25 bp, probe
gaaaccaaaaagagactgatcatcc

SEQ ID NO: 217283 - DNA, 25 bp, probe
gacaccaaaaaccagtgagagcccc

SEQ ID NO: 217284 - DNA, 25 bp, probe
gacccaaggacccagtaataaccag

SEQ ID NO: 217285 - DNA, 25 bp, probe
gacccaaggacccagtaataaccag

SEQ ID NO: 217286 - DNA, 25 bp, probe
gacacctatgtcaccaaaaacctgc

SEQ ID NO: 217287 - DNA, 25 bp, probe
gacacacttttggccaaaactcctg

SEQ ID NO: 217288 - DNA, 25 bp, probe
gaaaccattcaagcaaatcttccac

SEQ ID NO: 217289 - DNA, 25 bp, probe
gaaaccattcaagcaaatcttccac

SEQ ID NO: 217290 - DNA, 25 bp, probe
gaaatccggtactgatgtcttccac

SEQ ID NO: 217291 - DNA, 25 bp, probe
gaaatccggtactgatgtcttccac

SEQ ID NO: 217292 - DNA, 25 bp, probe
gaaagaaggtacccatgttctcgat

SEQ ID NO: 217293 - DNA, 25 bp, probe
gaaagcagaactatccagtgttatc

SEQ ID NO: 217294 - DNA, 25 bp, probe
gaaagccaagatacccttagtgacc

SEQ ID NO: 217295 - DNA, 25 bp, probe
gaaagccaagatacccttagtgacc

SEQ ID NO: 217296 - DNA, 25 bp, probe
gaaaccagatctacacacttgcagt

SEQ ID NO: 217297 - DNA, 25 bp, probe
gaaaccagatctacacacttgcagt

SEQ ID NO: 217298 - DNA, 25 bp, probe
gaaaccgttacatctgccagtttgc

SEQ ID NO: 217299 - DNA, 25 bp, probe
gaaagcagcgtatcaactcctattg

SEQ ID NO: 217300 - DNA, 25 bp, probe
gaaagctctgttgcaattaggattt

SEQ ID NO: 217301 - DNA, 25 bp, probe
gaaagtgcttatgcttaacagtaat

SEQ ID NO: 217302 - DNA, 25 bp, probe
gaaagttttgccaggtagcaaatgc

SEQ ID NO: 217303 - DNA, 25 bp, probe
gaaagatttttcagcttacacctcc

SEQ ID NO: 217304 - DNA, 25 bp, probe
gaaacctgtttcaacttgaagacac

SEQ ID NO: 217305 - DNA, 25 bp, probe
gaaacgttattattgcttcaaacac

SEQ ID NO: 217306 - DNA, 25 bp, probe
gaaacgtgtttagtatcaaaagagc

SEQ ID NO: 217307 - DNA, 25 bp, probe
gaaatcgttgaagcgagagaaaagc

SEQ ID NO: 217308 - DNA, 25 bp, probe
gaaacgtgtgaagctagaaaagaga

SEQ ID NO: 217309 - DNA, 25 bp, probe
gaaacgggaatgcgaatcagacagg

SEQ ID NO: 217310 - DNA, 25 bp, probe
gaaacgaggggatgcctgtgaaggt

SEQ ID NO: 217311 - DNA, 25 bp, probe
gaaagtgagagtgaacctaaagggt

SEQ ID NO: 217312 - DNA, 25 bp, probe
gaaagcggcagaggaaggatacaat

SEQ ID NO: 217313 - DNA, 25 bp, probe
gaaaggtcatagccaaggtaactgc

SEQ ID NO: 217314 - DNA, 25 bp, probe
gaaagccttacctaggaagacgcag

SEQ ID NO: 217315 - DNA, 25 bp, probe
gaaagccttacctaggaagacgcag

SEQ ID NO: 217316 - DNA, 25 bp, probe
gaaaccaatgccgtagatgaaccct

SEQ ID NO: 217317 - DNA, 25 bp, probe
gaaaccaatgccgtagatgaaccct

SEQ ID NO: 217318 - DNA, 25 bp, probe
gaaacgacatgggggagaccctgct

SEQ ID NO: 217319 - DNA, 25 bp, probe
gaaacctcatgcagagggcctctcc

SEQ ID NO: 217320 - DNA, 25 bp, probe
gaaagccacatttagggctatcacc

SEQ ID NO: 217321 - DNA, 25 bp, probe
gaaagccacatttagggctatcacc

SEQ ID NO: 217322 - DNA, 25 bp, probe
gaaaccacatcaaagaagtaccagc

SEQ ID NO: 217323 - DNA, 25 bp, probe
gaaagcagcctcaaagaattacccc

SEQ ID NO: 217324 - DNA, 25 bp, probe
gaaagcactccatgcgaaaacagcc

SEQ ID NO: 217325 - DNA, 25 bp, probe
gaaagccagccattgctcatagaga

SEQ ID NO: 217326 - DNA, 25 bp, probe
gaaagccagccattgctcatagaga

SEQ ID NO: 217327 - DNA, 25 bp, probe
gaaagcatgggatgctcatgtgaca

SEQ ID NO: 217328 - DNA, 25 bp, probe
gaaatgcagggatctccagaagtgc

SEQ ID NO: 217329 - DNA, 25 bp, probe
gaaatgaggtcataccggatgtcta

SEQ ID NO: 217330 - DNA, 25 bp, probe
gaaagagcttaattcccgagatgga

SEQ ID NO: 217331 - DNA, 25 bp, probe
gaaagacattacacccagacagact

SEQ ID NO: 217332 - DNA, 25 bp, probe
gaaaggattccagacacaaaacata

SEQ ID NO: 217333 - DNA, 25 bp, probe
gaaaggattccagacacaaaacata

SEQ ID NO: 217334 - DNA, 25 bp, probe
gaaagctcaatcagatacaaaaaca

SEQ ID NO: 217335 - DNA, 25 bp, probe
gaaagtttgctaaatctaaacagca

SEQ ID NO: 217336 - DNA, 25 bp, probe
gaaagctttcaatcttcaagagaca

SEQ ID NO: 217337 - DNA, 25 bp, probe
gaaagcaaggcagtccattcaggga

SEQ ID NO: 217338 - DNA, 25 bp, probe
gaaagcaaggcagtccattcaggga

SEQ ID NO: 217339 - DNA, 25 bp, probe
gaaagcacggactcttactgctaac

SEQ ID NO: 217340 - DNA, 25 bp, probe
gaaagcaccgacaatctttgattac

SEQ ID NO: 217341 - DNA, 25 bp, probe
gaaatgatcctgaacactctgaact

SEQ ID NO: 217342 - DNA, 25 bp, probe
gaaagtcttgcagaccgagtctaca

SEQ ID NO: 217343 - DNA, 25 bp, probe
gaaagtcattcacacggaggattac

SEQ ID NO: 217344 - DNA, 25 bp, probe
gaaagtattcctggggaagcccact

SEQ ID NO: 217345 - DNA, 25 bp, probe
gaaagagagtttgcgtagcagccct

SEQ ID NO: 217346 - DNA, 25 bp, probe
gaaagtggcagttccttacagccct

SEQ ID NO: 217347 - DNA, 25 bp, probe
gaaagctggcagtacctgtatgcat

SEQ ID NO: 217348 - DNA, 25 bp, probe
gaaaccacagaaccttctgatcagt

SEQ ID NO: 217349 - DNA, 25 bp, probe
gaaaccacagaaccttctgatcagt

SEQ ID NO: 217350 - DNA, 25 bp, probe
gaaacctcagaacttactcatcagt

SEQ ID NO: 217351 - DNA, 25 bp, probe
gaaaccatggcattgcctactcatg

SEQ ID NO: 217352 - DNA, 25 bp, probe
gaaacctgtgaaagctgcactcaga

SEQ ID NO: 217353 - DNA, 25 bp, probe
gaaatctgtggaatgagggctaatc

SEQ ID NO: 217354 - DNA, 25 bp, probe
gaaatctgtggaatgagggctaatc

SEQ ID NO: 217355 - DNA, 25 bp, probe
gacaatgctgtgctttccagtggtc

SEQ ID NO: 217356 - DNA, 25 bp, probe
gaaagcgatgggaacgctttgtcca

SEQ ID NO: 217357 - DNA, 25 bp, probe
gaaagggaggtatccctgtgccaaa

SEQ ID NO: 217358 - DNA, 25 bp, probe
gaaagggatgtgcccttctcgtaaa

SEQ ID NO: 217359 - DNA, 25 bp, probe
gaaagcttatggccctaaagtcgac

SEQ ID NO: 217360 - DNA, 25 bp, probe
gaaatctttcagaactcaaagggca

SEQ ID NO: 217361 - DNA, 25 bp, probe
gaaatctgttcatgttaaaagcctt

SEQ ID NO: 217362 - DNA, 25 bp, probe
gaaagggtaggttcagtaatcattt

SEQ ID NO: 217363 - DNA, 25 bp, probe
gaaaggactcagtttgcaccctttt

SEQ ID NO: 217364 - DNA, 25 bp, probe
gaaagagttcagacttatcaccatt

SEQ ID NO: 217365 - DNA, 25 bp, probe
gaaatgaactgtactaatccctttc

SEQ ID NO: 217366 - DNA, 25 bp, probe
gaaattaggttgaaacatatctctt

SEQ ID NO: 217367 - DNA, 25 bp, probe
gaaagttggctgcctcagagcattc

SEQ ID NO: 217368 - DNA, 25 bp, probe
gaaagttggctgcctcagagcattc

SEQ ID NO: 217369 - DNA, 25 bp, probe
gaaagagtgcctgaagagcctcgac

SEQ ID NO: 217370 - DNA, 25 bp, probe
gaaagagtggtagagcagagcctga

SEQ ID NO: 217371 - DNA, 25 bp, probe
gaaagagctgggatccaggcactat

SEQ ID NO: 217372 - DNA, 25 bp, probe
gaaagatgttagagccaggatgaag

SEQ ID NO: 217373 - DNA, 25 bp, probe
gaaagagatgaacgagagggagaag

SEQ ID NO: 217374 - DNA, 25 bp, probe
gaaataagcaaagagggcaatcgcc

SEQ ID NO: 217375 - DNA, 25 bp, probe
gaaagaaaacagctcaggcacccca

SEQ ID NO: 217376 - DNA, 25 bp, probe
gaaatgcaaaactttaggccctgcc

SEQ ID NO: 217377 - DNA, 25 bp, probe
gacaaaaaccacctactgggctctc

SEQ ID NO: 217378 - DNA, 25 bp, probe
gagaaaaacaatctcctttgtccca

SEQ ID NO: 217379 - DNA, 25 bp, probe
gaaatggaaaagctgccttggccct

SEQ ID NO: 217380 - DNA, 25 bp, probe
gaaaggatcttgggtcctatccctt

SEQ ID NO: 217381 - DNA, 25 bp, probe
gaaaggatcttgggtcctatccctt

SEQ ID NO: 217382 - DNA, 25 bp, probe
gaaattatccagggatgccttcctt

SEQ ID NO: 217383 - DNA, 25 bp, probe
gaaatggtgaaggaaccagcccaat

SEQ ID NO: 217384 - DNA, 25 bp, probe
gaaagggggctgttggagtcccaga

SEQ ID NO: 217385 - DNA, 25 bp, probe
gaaagggggctatgagcgcttctca

SEQ ID NO: 217386 - DNA, 25 bp, probe
gaaagggggctatgagcgcttctca

SEQ ID NO: 217387 - DNA, 25 bp, probe
gaaaggggccatagtgaagtggtag

SEQ ID NO: 217388 - DNA, 25 bp, probe
gaaaggagccacaatgtgatagagg

SEQ ID NO: 217389 - DNA, 25 bp, probe
gaaagtgaacaagtgctacagaggc

SEQ ID NO: 217390 - DNA, 25 bp, probe
gaaagcagaactactgtgccgagcc

SEQ ID NO: 217391 - DNA, 25 bp, probe
gaaagcagtcgcaactgtggggccc

SEQ ID NO: 217392 - DNA, 25 bp, probe
gaaatggctctgaggtgcgggaccc

SEQ ID NO: 217393 - DNA, 25 bp, probe
gaaatggctctgaggtgcgggaccc

SEQ ID NO: 217394 - DNA, 25 bp, probe
gaaagcagacgacggactgagacca

SEQ ID NO: 217395 - DNA, 25 bp, probe
gaaagcgacgggtaatgcggcattg

SEQ ID NO: 217396 - DNA, 25 bp, probe
gaaagcgacgtggtgaagatctgtg

SEQ ID NO: 217397 - DNA, 25 bp, probe
gaaagtgagcgtgtagcgtcctgag

SEQ ID NO: 217398 - DNA, 25 bp, probe
gaaaggacttgattacctccattcg

SEQ ID NO: 217399 - DNA, 25 bp, probe
gaaagttttcagagtccgtctcggc

SEQ ID NO: 217400 - DNA, 25 bp, probe
gaaagtttgtaaagcctcttcggtg

SEQ ID NO: 217401 - DNA, 25 bp, probe
gaaagtttgtaaagcctcttcggtg

SEQ ID NO: 217402 - DNA, 25 bp, probe
gaaagtttatacggcttttttgctg

SEQ ID NO: 217403 - DNA, 25 bp, probe
gaaatgaatataccccttagtgttt

SEQ ID NO: 217404 - DNA, 25 bp, probe
gaaagactttccgcttacaatttgt

SEQ ID NO: 217405 - DNA, 25 bp, probe
gaaagactttccgcttacaatttgt

SEQ ID NO: 217406 - DNA, 25 bp, probe
gaaatcacttccagtcttacatcat

SEQ ID NO: 217407 - DNA, 25 bp, probe
gaaaccactatcgagtctacaatct

SEQ ID NO: 217408 - DNA, 25 bp, probe
gaaatccatagtggacttcatcaag

SEQ ID NO: 217409 - DNA, 25 bp, probe
gaaatccatagtggacttcatcaag

SEQ ID NO: 217410 - DNA, 25 bp, probe
gaaaccattgtggaattgcctcagc

SEQ ID NO: 217411 - DNA, 25 bp, probe
gaaaccattagtgagctgactctga

SEQ ID NO: 217412 - DNA, 25 bp, probe
gaaagccttttattctatcttgaga

SEQ ID NO: 217413 - DNA, 25 bp, probe
gaaagccatcttattcttgtaaaat

SEQ ID NO: 217414 - DNA, 25 bp, probe
gaaagctctctattctagttgataa

SEQ ID NO: 217415 - DNA, 25 bp, probe
gaaagcttatcatcatagtttcgat

SEQ ID NO: 217416 - DNA, 25 bp, probe
gaaagcttatcatcatagtttcgat

SEQ ID NO: 217417 - DNA, 25 bp, probe
gaaagctgtgttcatattctgtcta

SEQ ID NO: 217418 - DNA, 25 bp, probe
gaaagagcctttatctgcttctacc

SEQ ID NO: 217419 - DNA, 25 bp, probe
ggatgactgggggagcatcctctct

SEQ ID NO: 217420 - DNA, 25 bp, probe
gaaagggctacagacttcactgacc

SEQ ID NO: 217421 - DNA, 25 bp, probe
gaaagtggccaagtcgctggccgtc

SEQ ID NO: 217422 - DNA, 25 bp, probe
gaaagtggccaagtcgctggccgtc

SEQ ID NO: 217423 - DNA, 25 bp, probe
gaaagtgcgtcagatcagtgatcct

SEQ ID NO: 217424 - DNA, 25 bp, probe
ttaaggcggggaagtacagctcaga

SEQ ID NO: 217425 - DNA, 25 bp, probe
tgataaacccggggtgacctcatga

SEQ ID NO: 217426 - DNA, 25 bp, probe
gaaagcaaccggtggatcctcaaac

SEQ ID NO: 217427 - DNA, 25 bp, probe
gaaagcaaccgggtggatgctcatg

SEQ ID NO: 217428 - DNA, 25 bp, probe
gaaagcacacttcgggatgaccatg

SEQ ID NO: 217429 - DNA, 25 bp, probe
gaaagcaaagaggccagtgccctgg

SEQ ID NO: 217430 - DNA, 25 bp, probe
gaaagcaaggacatgcggcctgcat

SEQ ID NO: 217431 - DNA, 25 bp, probe
gaaatgcagtggacatggcctttgt

SEQ ID NO: 217432 - DNA, 25 bp, probe
gaaatgcgagccatggctcttcatg

SEQ ID NO: 217433 - DNA, 25 bp, probe
gaaattcagcattgtggctcctcag

SEQ ID NO: 217434 - DNA, 25 bp, probe
gaaatctagaggatctctccttttt

SEQ ID NO: 217435 - DNA, 25 bp, probe
gaaatctagaggatctctccttttt

SEQ ID NO: 217436 - DNA, 25 bp, probe
gaaatttcggagctctacttcttct

SEQ ID NO: 217437 - DNA, 25 bp, probe
gaaagggtgtgatgactacttgttt

SEQ ID NO: 217438 - DNA, 25 bp, probe
gaaaggcactactgactttgttctt

SEQ ID NO: 217439 - DNA, 25 bp, probe
gaaagacactaatggttcatcctct

SEQ ID NO: 217440 - DNA, 25 bp, probe
gaaagacctcagaggatgagccttc

SEQ ID NO: 217441 - DNA, 25 bp, probe
gaaagactctcagagaatagacaac

SEQ ID NO: 217442 - DNA, 25 bp, probe
gaaagactctcagagaatagacaac

SEQ ID NO: 217443 - DNA, 25 bp, probe
gaaagctgccaccaagaacaagcaa

SEQ ID NO: 217444 - DNA, 25 bp, probe
gaaaccacactcaaagagacagaga

SEQ ID NO: 217445 - DNA, 25 bp, probe
gaaaccaaagaaatgaagctggcaa

SEQ ID NO: 217446 - DNA, 25 bp, probe
gaaaccacacacactgttgctggat

SEQ ID NO: 217447 - DNA, 25 bp, probe
gaaattgtacacacgtttgagacga

SEQ ID NO: 217448 - DNA, 25 bp, probe
gaaattttcagcctgtgtttacctg

SEQ ID NO: 217449 - DNA, 25 bp, probe
gaaattttcagcctgtgtttacctg

SEQ ID NO: 217450 - DNA, 25 bp, probe
gaaagtacaactcgtatttatctct

SEQ ID NO: 217451 - DNA, 25 bp, probe
gaaagaccaacatttgaatatattc

SEQ ID NO: 217452 - DNA, 25 bp, probe
gaaagagccacattttggttttatt

SEQ ID NO: 217453 - DNA, 25 bp, probe
gaaagagccacattttggttttatt

SEQ ID NO: 217454 - DNA, 25 bp, probe
gaaagcccacagtcttctgagttgt

SEQ ID NO: 217455 - DNA, 25 bp, probe
gaaagcccacagtcttctgagttgt

SEQ ID NO: 217456 - DNA, 25 bp, probe
gaaagcgtcatgatattgctcagtt

SEQ ID NO: 217457 - DNA, 25 bp, probe
gaaagcctgcatatattatcgtact

SEQ ID NO: 217458 - DNA, 25 bp, probe
gaaagcctgcatatattatcgtact

SEQ ID NO: 217459 - DNA, 25 bp, probe
gaaagcactgtactatctgaaggag

SEQ ID NO: 217460 - DNA, 25 bp, probe
gaaagcttgcaactgtctgataaga

SEQ ID NO: 217461 - DNA, 25 bp, probe
gaaagcttgcaactgtctgataaga

SEQ ID NO: 217462 - DNA, 25 bp, probe
gaaagtctgcatagggcttatagca

SEQ ID NO: 217463 - DNA, 25 bp, probe
gaaagcttcctggtgcttaatcaag

SEQ ID NO: 217464 - DNA, 25 bp, probe
gaaagtctccgtggtggacacagag

SEQ ID NO: 217465 - DNA, 25 bp, probe
gaaagttctcagtattgtaacagca

SEQ ID NO: 217466 - DNA, 25 bp, probe
gaaattttacattagtacttgacaa

SEQ ID NO: 217467 - DNA, 25 bp, probe
gaaattttacattagtacttgacaa

SEQ ID NO: 217468 - DNA, 25 bp, probe
gaaatatctttccaagaagttgaat

SEQ ID NO: 217469 - DNA, 25 bp, probe
gaaaggttctcttaaaattctatcg

SEQ ID NO: 217470 - DNA, 25 bp, probe
gaaaggttctcttaaaattctatcg

SEQ ID NO: 217471 - DNA, 25 bp, probe
gacaaaaccctcaataaagtccacg

SEQ ID NO: 217472 - DNA, 25 bp, probe
gacaagaaaaccccaaagtggcctg

SEQ ID NO: 217473 - DNA, 25 bp, probe
gacaaaacaatccccatcaggtagc

SEQ ID NO: 217474 - DNA, 25 bp, probe
gaaagacaagatgggacacgtggga

SEQ ID NO: 217475 - DNA, 25 bp, probe
gaaagaccagtggggatttgtaaga

SEQ ID NO: 217476 - DNA, 25 bp, probe
gaaagccgcactgatggatatgtaa

SEQ ID NO: 217477 - DNA, 25 bp, probe
gaaagcgatgacgtgggacattaat

SEQ ID NO: 217478 - DNA, 25 bp, probe
gaaagcgatgacgtgggacattaat

SEQ ID NO: 217479 - DNA, 25 bp, probe
gaaagcaatgaccatcggagatgtt

SEQ ID NO: 217480 - DNA, 25 bp, probe
gaaagcaatgaccatcggagatgtt

SEQ ID NO: 217481 - DNA, 25 bp, probe
gaaagcacatgctgcaggagaagct

SEQ ID NO: 217482 - DNA, 25 bp, probe
gaaagcacatgctgcaggagaagct

SEQ ID NO: 217483 - DNA, 25 bp, probe
gaaagcatcagatcactgcaaagtg

SEQ ID NO: 217484 - DNA, 25 bp, probe
gaaagcaagatgtactataacatag

SEQ ID NO: 217485 - DNA, 25 bp, probe
gaaagcacagaatcagataacaata

SEQ ID NO: 217486 - DNA, 25 bp, probe
gaaagccgatcatgatcatcacaga

SEQ ID NO: 217487 - DNA, 25 bp, probe
gaaagtagatcctgctcacagaatc

SEQ ID NO: 217488 - DNA, 25 bp, probe
gaaagtaatctcttccacacaacag

SEQ ID NO: 217489 - DNA, 25 bp, probe
gaaagtaatctcttccacacaacag

SEQ ID NO: 217490 - DNA, 25 bp, probe
gaaagtgaactctcataattcaaat

SEQ ID NO: 217491 - DNA, 25 bp, probe
gaaagtccattgtacataacaaaac

SEQ ID NO: 217492 - DNA, 25 bp, probe
gaaatgctcttttgcacaaggaaat

SEQ ID NO: 217493 - DNA, 25 bp, probe
gaaatgtgtatgcacctattgaaat

SEQ ID NO: 217494 - DNA, 25 bp, probe
gaaatgggcatgctgaattccaaat

SEQ ID NO: 217495 - DNA, 25 bp, probe
gaaatgggcatgctgaattccaaat

SEQ ID NO: 217496 - DNA, 25 bp, probe
gaaagagtgcagaacaattacgaat

SEQ ID NO: 217497 - DNA, 25 bp, probe
gaaagagtgcagaacaattacgaat

SEQ ID NO: 217498 - DNA, 25 bp, probe
gaaagagtgcagaacaattacgaat

SEQ ID NO: 217499 - DNA, 25 bp, probe
gaaagcaaggacatgcggcctgcat

SEQ ID NO: 217500 - DNA, 25 bp, probe
gaaagctgggagcgtgggctcagca

SEQ ID NO: 217501 - DNA, 25 bp, probe
gaaagctggtaccagagggctccag

SEQ ID NO: 217502 - DNA, 25 bp, probe
gaaagcgaagcaggagagggccgcc

SEQ ID NO: 217503 - DNA, 25 bp, probe
gaaatgctattaggtggggcttcca

SEQ ID NO: 217504 - DNA, 25 bp, probe
gaaatgctattaggtggggcttcca

SEQ ID NO: 217505 - DNA, 25 bp, probe
gacagtgtttacaggcgagaactct

SEQ ID NO: 217506 - DNA, 25 bp, probe
gacagtgtttacaggcgagaactct

SEQ ID NO: 217507 - DNA, 25 bp, probe
gaaagtatgtaaatggaggagacct

SEQ ID NO: 217508 - DNA, 25 bp, probe
gaaagtatataaaggacgatgcaga

SEQ ID NO: 217509 - DNA, 25 bp, probe
gaaagacaaaactgggatgctgtgt

SEQ ID NO: 217510 - DNA, 25 bp, probe
gaaagacaaaactgggatgctgtgt

SEQ ID NO: 217511 - DNA, 25 bp, probe
gaaatagaactacaagcggatggtt

SEQ ID NO: 217512 - DNA, 25 bp, probe
gacaatcaaaaacaaacgatattct

SEQ ID NO: 217513 - DNA, 25 bp, probe
gaaatcttaaagaaactctccacct

SEQ ID NO: 217514 - DNA, 25 bp, probe
gaaatgctaaagatacagctcatac

SEQ ID NO: 217515 - DNA, 25 bp, probe
gaaatgctaaagatacagctcatac

SEQ ID NO: 217516 - DNA, 25 bp, probe
gaaagaatagacccaagcgcatcac

SEQ ID NO: 217517 - DNA, 25 bp, probe
gaaagcagattctccaatggatgac

SEQ ID NO: 217518 - DNA, 25 bp, probe
gaaagaatgtcaagccatgatggaa

SEQ ID NO: 217519 - DNA, 25 bp, probe
gaaagaagctgtggccaataaaggc

SEQ ID NO: 217520 - DNA, 25 bp, probe
gacaacaccgtgtccaaaaagggct

SEQ ID NO: 217521 - DNA, 25 bp, probe
gaaataccggcccaaacagaggctg

SEQ ID NO: 217522 - DNA, 25 bp, probe
gaaatacctgggaaaacaagacact

SEQ ID NO: 217523 - DNA, 25 bp, probe
gaaatgtaagggaaactgccagcaa

SEQ ID NO: 217524 - DNA, 25 bp, probe
gaaagttagcaggtgccaatccagc

SEQ ID NO: 217525 - DNA, 25 bp, probe
gacaagatggtgtcggccttctaca

SEQ ID NO: 217526 - DNA, 25 bp, probe
gaaagatgggaggaccgtcccaggc

SEQ ID NO: 217527 - DNA, 25 bp, probe
gaaagcaaggtggcccagtgtgggg

SEQ ID NO: 217528 - DNA, 25 bp, probe
gaaagaagggtctcacgtggctggc

SEQ ID NO: 217529 - DNA, 25 bp, probe
gtaaacaggttacccagctgggaga

SEQ ID NO: 217530 - DNA, 25 bp, probe
gaaagcaaagttttccctcagagag

SEQ ID NO: 217531 - DNA, 25 bp, probe
gaaatcagacgtttctgctccaaac

SEQ ID NO: 217532 - DNA, 25 bp, probe
gaaatcagcacgtggtggctcaaat

SEQ ID NO: 217533 - DNA, 25 bp, probe
gaaatgcaccgagtattggccggag

SEQ ID NO: 217534 - DNA, 25 bp, probe
gaaagtctgcaaatatgtggactgg

SEQ ID NO: 217535 - DNA, 25 bp, probe
gaaagctgctaaatacgtgtctggc

SEQ ID NO: 217536 - DNA, 25 bp, probe
gaaagttaattccaatgtcatgacg

SEQ ID NO: 217537 - DNA, 25 bp, probe
gaaaggacaatttgaagctatggca

SEQ ID NO: 217538 - DNA, 25 bp, probe
gaaaggcagctgtgagagagatgct

SEQ ID NO: 217539 - DNA, 25 bp, probe
gaaagcacaggtggcatatgcgagc

SEQ ID NO: 217540 - DNA, 25 bp, probe
gaaagatcggtgacatctgggcttt

SEQ ID NO: 217541 - DNA, 25 bp, probe
gaaagttggagtgctgtggctcatt

SEQ ID NO: 217542 - DNA, 25 bp, probe
gaaatggatgtaagcctggcccata

SEQ ID NO: 217543 - DNA, 25 bp, probe
gaaatggatgtaagcctggcccata

SEQ ID NO: 217544 - DNA, 25 bp, probe
gaaatgggtaacaggcctcaagcaa

SEQ ID NO: 217545 - DNA, 25 bp, probe
gaaatggggaaagccgtgcgtgcgc

SEQ ID NO: 217546 - DNA, 25 bp, probe
gaaagaggagagtcaaccagtagtg

SEQ ID NO: 217547 - DNA, 25 bp, probe
gaaagatgcgcattctaacctggag

SEQ ID NO: 217548 - DNA, 25 bp, probe
gaaagtggctgtcagaccgagagta

SEQ ID NO: 217549 - DNA, 25 bp, probe
gaaagaggtgtcggaggccgtggag

SEQ ID NO: 217550 - DNA, 25 bp, probe
gaaagaagattccagcgccctgggc

SEQ ID NO: 217551 - DNA, 25 bp, probe
gaaataagattcagagcacttggga

SEQ ID NO: 217552 - DNA, 25 bp, probe
gaaatacttttaaccattgatgata

SEQ ID NO: 217553 - DNA, 25 bp, probe
gaaatccctttggaccaggtggaca

SEQ ID NO: 217554 - DNA, 25 bp, probe
gagaacttccttcacaagtgggacc

SEQ ID NO: 217555 - DNA, 25 bp, probe
gagaacttccttcacaagtgggacc

SEQ ID NO: 217556 - DNA, 25 bp, probe
gaaatcattccaatgtcccgggagt

SEQ ID NO: 217557 - DNA, 25 bp, probe
gaaatttaatagtgccaaggaagcc

SEQ ID NO: 217558 - DNA, 25 bp, probe
gacccttgggacaccaacgagtgcc

SEQ ID NO: 217559 - DNA, 25 bp, probe
gacacttgggtcacctgacccgtgc

SEQ ID NO: 217560 - DNA, 25 bp, probe
gacaatggggtcaggccccagagga

SEQ ID NO: 217561 - DNA, 25 bp, probe
gaaatgggatgctagcgtgccacta

SEQ ID NO: 217562 - DNA, 25 bp, probe
gaaaggtgatgcttgccgacaggaa

SEQ ID NO: 217563 - DNA, 25 bp, probe
gaaagggatgattgccaacaggaaa

SEQ ID NO: 217564 - DNA, 25 bp, probe
gaaaggggatgaggccacaggctga

SEQ ID NO: 217565 - DNA, 25 bp, probe
gaaagaggtgagttccagcatctgg

SEQ ID NO: 217566 - DNA, 25 bp, probe
gaaaggtgtcagtccgttctggatg

SEQ ID NO: 217567 - DNA, 25 bp, probe
gaaagagaccatgccgtggtcgtgg

SEQ ID NO: 217568 - DNA, 25 bp, probe
gaaatgcaggaaggccgggttgtga

SEQ ID NO: 217569 - DNA, 25 bp, probe
gaaatcaaagcaaaggagtggttac

SEQ ID NO: 217570 - DNA, 25 bp, probe
gaaatcaaagcaaaggagtggttac

SEQ ID NO: 217571 - DNA, 25 bp, probe
gaaatttgtcatggatggagggtat

SEQ ID NO: 217572 - DNA, 25 bp, probe
gaaattttctggtgggagaatctat

SEQ ID NO: 217573 - DNA, 25 bp, probe
gaaatgttttgacttaggaatcatt

SEQ ID NO: 217574 - DNA, 25 bp, probe
gaaatttgttcagttcgtatacttc

SEQ ID NO: 217575 - DNA, 25 bp, probe
gaaattacttctttagatgacatta

SEQ ID NO: 217576 - DNA, 25 bp, probe
gaaattggttcctgcagaaattatt

SEQ ID NO: 217577 - DNA, 25 bp, probe
gaaagtactccctcagtaaagcatt

SEQ ID NO: 217578 - DNA, 25 bp, probe
gaaagtactccctcagtaaagcatt

SEQ ID NO: 217579 - DNA, 25 bp, probe
gaaatgtaccatcaaatgttaacag

SEQ ID NO: 217580 - DNA, 25 bp, probe
gaaatgtaccatcaaatgttaacag

SEQ ID NO: 217581 - DNA, 25 bp, probe
gaaagtagccacgagaattgtgcta

SEQ ID NO: 217582 - DNA, 25 bp, probe
gaaagagatgctcggaaagttctaa

SEQ ID NO: 217583 - DNA, 25 bp, probe
gaaagagatgctcggaaagttctaa

SEQ ID NO: 217584 - DNA, 25 bp, probe
gaaaggatctgggctaggtatatta

SEQ ID NO: 217585 - DNA, 25 bp, probe
gaaagagccggcctgtgagtgtaaa

SEQ ID NO: 217586 - DNA, 25 bp, probe
gaaagattcgtcctgtggtgcgtgc

SEQ ID NO: 217587 - DNA, 25 bp, probe
gaaaggacgccactggcgaggctgc

SEQ ID NO: 217588 - DNA, 25 bp, probe
gaaagtgaacagtctgaggagccgc

SEQ ID NO: 217589 - DNA, 25 bp, probe
gaaaggactcagtgtgtgatccggt

SEQ ID NO: 217590 - DNA, 25 bp, probe
gaaagaagccagggtttgccactgt

SEQ ID NO: 217591 - DNA, 25 bp, probe
gaaagaagccagggtttgccactgt

SEQ ID NO: 217592 - DNA, 25 bp, probe
gaaagggccggaggtcatggccttc

SEQ ID NO: 217593 - DNA, 25 bp, probe
gaaaggcccggagttagggctgagc

SEQ ID NO: 217594 - DNA, 25 bp, probe
gaaagggcaccgtttcaaggtggat

SEQ ID NO: 217595 - DNA, 25 bp, probe
taaggccctttgtgtaaggtgtctt

SEQ ID NO: 217596 - DNA, 25 bp, probe
gacaggttcttctggctgaaggttt

SEQ ID NO: 217597 - DNA, 25 bp, probe
gaaatggtttcctctggatcgtttt

SEQ ID NO: 217598 - DNA, 25 bp, probe
gaaatggtttcctgcttgaggctgc

SEQ ID NO: 217599 - DNA, 25 bp, probe
gaaatgttaaactatctgggggaat

SEQ ID NO: 217600 - DNA, 25 bp, probe
gaaatgttaaactatctgggggaat

SEQ ID NO: 217601 - DNA, 25 bp, probe
gaaagtcttcacatggctgggtgca

SEQ ID NO: 217602 - DNA, 25 bp, probe
gaaagatgctgtccttggcggaaca

SEQ ID NO: 217603 - DNA, 25 bp, probe
gaaagagttcctagagagagaagac

SEQ ID NO: 217604 - DNA, 25 bp, probe
gaaagcacttcttattgaagtgaat

SEQ ID NO: 217605 - DNA, 25 bp, probe
gaaatgctaactgatagacgtgtta

SEQ ID NO: 217606 - DNA, 25 bp, probe
gaaattcaagtggtgagacctttcc

SEQ ID NO: 217607 - DNA, 25 bp, probe
gaaagtcaattggcagagcccctga

SEQ ID NO: 217608 - DNA, 25 bp, probe
gaaagaattctggggtcatcctgag

SEQ ID NO: 217609 - DNA, 25 bp, probe
gacaaacttctgagcgaactcggtt

SEQ ID NO: 217610 - DNA, 25 bp, probe
gacaaacttctgagcgaactcggtt

SEQ ID NO: 217611 - DNA, 25 bp, probe
gaaatatgttctgggccaacttgtt

SEQ ID NO: 217612 - DNA, 25 bp, probe
gaaatatgttctgggccaacttgtt

SEQ ID NO: 217613 - DNA, 25 bp, probe
gaaatagctttggttcggttccttg

SEQ ID NO: 217614 - DNA, 25 bp, probe
gaaatacctgtggttcagtccatcc

SEQ ID NO: 217615 - DNA, 25 bp, probe
gaaattccagtttacgtcgaagcac

SEQ ID NO: 217616 - DNA, 25 bp, probe
gaaattccagtttacgtcgaagcac

SEQ ID NO: 217617 - DNA, 25 bp, probe
gaaattgccttgtttccgtgaaaga

SEQ ID NO: 217618 - DNA, 25 bp, probe
gaaattgttcgctccctggataaga

SEQ ID NO: 217619 - DNA, 25 bp, probe
gaaattgtgtactcccttgtacttg

SEQ ID NO: 217620 - DNA, 25 bp, probe
gaaattttacattcggttgttctgt

SEQ ID NO: 217621 - DNA, 25 bp, probe
gaaatttgtagaactggttagtcaa

SEQ ID NO: 217622 - DNA, 25 bp, probe
gaaatttctacacctgtgtctagtc

SEQ ID NO: 217623 - DNA, 25 bp, probe
gaaatgttctgggactagttgagtt

SEQ ID NO: 217624 - DNA, 25 bp, probe
gaaatggtctctggcattgaagtag

SEQ ID NO: 217625 - DNA, 25 bp, probe
gaaatggtctctggcattgaagtag

SEQ ID NO: 217626 - DNA, 25 bp, probe
gaaatggcttctggaagacctttat

SEQ ID NO: 217627 - DNA, 25 bp, probe
gaaattttctgtcagtgccttatct

SEQ ID NO: 217628 - DNA, 25 bp, probe
gaaattttctgtcagtgccttatct

SEQ ID NO: 217629 - DNA, 25 bp, probe
gaaatatcattctcaaatgcggctt

SEQ ID NO: 217630 - DNA, 25 bp, probe
gaaatatcattctcaaatgcggctt

SEQ ID NO: 217631 - DNA, 25 bp, probe
gaaattttcattagacgctgctgct

SEQ ID NO: 217632 - DNA, 25 bp, probe
gaaagtattgccaatgtccattgct

SEQ ID NO: 217633 - DNA, 25 bp, probe
gaaagtatcctgcatgacgattatg

SEQ ID NO: 217634 - DNA, 25 bp, probe
gaaagtatcctgcatgacgattatg

SEQ ID NO: 217635 - DNA, 25 bp, probe
gaaagaatcctgactaccattgctg

SEQ ID NO: 217636 - DNA, 25 bp, probe
gaaagaataagcatatgcttctgtt

SEQ ID NO: 217637 - DNA, 25 bp, probe
gaaagaacaatgcatatccctgaaa

SEQ ID NO: 217638 - DNA, 25 bp, probe
gaaagaacaatgcatatccctgaaa

SEQ ID NO: 217639 - DNA, 25 bp, probe
gaaaggtttggattcctatgaagaa

SEQ ID NO: 217640 - DNA, 25 bp, probe
gaaagaggttgtttcccataataga

SEQ ID NO: 217641 - DNA, 25 bp, probe
gaaaggatgttttgtcccatttcct

SEQ ID NO: 217642 - DNA, 25 bp, probe
gaaaggatgttttgtcccatttcct

SEQ ID NO: 217643 - DNA, 25 bp, probe
gaaaggatggcctcattctctttct

SEQ ID NO: 217644 - DNA, 25 bp, probe
gaaaggatggcctcattctctttct

SEQ ID NO: 217645 - DNA, 25 bp, probe
gaaagtgggcaatttgtcacctcac

SEQ ID NO: 217646 - DNA, 25 bp, probe
gaaaggcagagcagggtacaccacg

SEQ ID NO: 217647 - DNA, 25 bp, probe
gaaagagacgacttgggacgcaacg

SEQ ID NO: 217648 - DNA, 25 bp, probe
gaaagacaaatctcttgaggcagat

SEQ ID NO: 217649 - DNA, 25 bp, probe
gaaagaaaaagacctatgagcacat

SEQ ID NO: 217650 - DNA, 25 bp, probe
gaaagaaagaccagtgaacactcac

SEQ ID NO: 217651 - DNA, 25 bp, probe
gaaatgaacaaggcaggaaacaaaa

SEQ ID NO: 217652 - DNA, 25 bp, probe
gaaattgacagaacaggtataggat

SEQ ID NO: 217653 - DNA, 25 bp, probe
gaaattgacagaacaggtataggat

SEQ ID NO: 217654 - DNA, 25 bp, probe
gaaagtagccccattcataagatgt

SEQ ID NO: 217655 - DNA, 25 bp, probe
gaaatgtccctggtttctattgatc

SEQ ID NO: 217656 - DNA, 25 bp, probe
gaaatctctcatagctttcttttcc

SEQ ID NO: 217657 - DNA, 25 bp, probe
gaaatctctcatagctttcttttcc

SEQ ID NO: 217658 - DNA, 25 bp, probe
gacaacaccaccaagcctggtgtct

SEQ ID NO: 217659 - DNA, 25 bp, probe
gaaatccaccagccatgacctggtc

SEQ ID NO: 217660 - DNA, 25 bp, probe
gaaatcacactctctgaaagtgaca

SEQ ID NO: 217661 - DNA, 25 bp, probe
gaaagtgcctcatctgaataaaatg

SEQ ID NO: 217662 - DNA, 25 bp, probe
gaaaggccagcacctgaagaattga

SEQ ID NO: 217663 - DNA, 25 bp, probe
gaaaggctcagcaacgtgaaataac

SEQ ID NO: 217664 - DNA, 25 bp, probe
gaaagatgcaagacatgtagtaaaa

SEQ ID NO: 217665 - DNA, 25 bp, probe
gaaagatgccagaattcatgttgtg

SEQ ID NO: 217666 - DNA, 25 bp, probe
gaaaggtgtggaagcatgatatgta

SEQ ID NO: 217667 - DNA, 25 bp, probe
gaaagagcatgttatacacattata

SEQ ID NO: 217668 - DNA, 25 bp, probe
gaaatgctcatttaatagatattca

SEQ ID NO: 217669 - DNA, 25 bp, probe
gaaatggcatcgtacataatttttc

SEQ ID NO: 217670 - DNA, 25 bp, probe
gaaatggccgtccaaatgtgagcat

SEQ ID NO: 217671 - DNA, 25 bp, probe
gaaatggccgtccaaatgtgagcat

SEQ ID NO: 217672 - DNA, 25 bp, probe
gaaatgagactacctactggctgac

SEQ ID NO: 217673 - DNA, 25 bp, probe
gaaaggcgcagacctcaatgcgtga

SEQ ID NO: 217674 - DNA, 25 bp, probe
gaaagggcagctttaatggtggttt

SEQ ID NO: 217675 - DNA, 25 bp, probe
gaaagtctgagtgaaaggatggcct

SEQ ID NO: 217676 - DNA, 25 bp, probe
gaaagtcatggtggccaacagaggt

SEQ ID NO: 217677 - DNA, 25 bp, probe
gaaagtgacgatgacaaaatggtta

SEQ ID NO: 217678 - DNA, 25 bp, probe
gaaagtcaccaggacaatcttggct

SEQ ID NO: 217679 - DNA, 25 bp, probe
gaaatgctccaggttcaattttctg

SEQ ID NO: 217680 - DNA, 25 bp, probe
gaaatgctccaggttcaattttctg

SEQ ID NO: 217681 - DNA, 25 bp, probe
gaaatctcaccgaaacttactgctg

SEQ ID NO: 217682 - DNA, 25 bp, probe
gaaatctcaccgaaacttactgctg

SEQ ID NO: 217683 - DNA, 25 bp, probe
gaaattacctgaaacagcttctcag

SEQ ID NO: 217684 - DNA, 25 bp, probe
gacacttacctaacaagtactgctc

SEQ ID NO: 217685 - DNA, 25 bp, probe
gaccgtacaccaaaatttgcctgca

SEQ ID NO: 217686 - DNA, 25 bp, probe
gacaccatacgtaaggaattccgaa

SEQ ID NO: 217687 - DNA, 25 bp, probe
gacacacatgcatctagagtaaact

SEQ ID NO: 217688 - DNA, 25 bp, probe
gacacgtgcaacagactgccttata

SEQ ID NO: 217689 - DNA, 25 bp, probe
gacacgtgcaacagactgccttata

SEQ ID NO: 217690 - DNA, 25 bp, probe
gacccacaagtattgccctttaaca

SEQ ID NO: 217691 - DNA, 25 bp, probe
gacccaaagggtgacttttcatctg

SEQ ID NO: 217692 - DNA, 25 bp, probe
gaaatcacagaacagtacttttctt

SEQ ID NO: 217693 - DNA, 25 bp, probe
gaaatcacagaacagtacttttctt

SEQ ID NO: 217694 - DNA, 25 bp, probe
gaaataagagaagctactttgtttt

SEQ ID NO: 217695 - DNA, 25 bp, probe
gaaataagagaagctactttgtttt

SEQ ID NO: 217696 - DNA, 25 bp, probe
gaaagtggagaagctcactgttcac

SEQ ID NO: 217697 - DNA, 25 bp, probe
gaaatggtggtagcccttgatgctt

SEQ ID NO: 217698 - DNA, 25 bp, probe
gaaatggtcaggagccacctatgtg

SEQ ID NO: 217699 - DNA, 25 bp, probe
gaaaggcatcggtgccacgcatctt

SEQ ID NO: 217700 - DNA, 25 bp, probe
gaaagagccgaaagcaccactgctt

SEQ ID NO: 217701 - DNA, 25 bp, probe
gaaagagccagatggacctgagtgt

SEQ ID NO: 217702 - DNA, 25 bp, probe
gaaatctgaggatggatcggagttt

SEQ ID NO: 217703 - DNA, 25 bp, probe
gaaagtgatctatggatcctgtgct

SEQ ID NO: 217704 - DNA, 25 bp, probe
gaaagtatatatcccagactgtctt

SEQ ID NO: 217705 - DNA, 25 bp, probe
gaaagtatatatcccagactgtctt

SEQ ID NO: 217706 - DNA, 25 bp, probe
gaaaggtgttgcccagggtctgcat

SEQ ID NO: 217707 - DNA, 25 bp, probe
gaaagagtttgggctgggatcagag

SEQ ID NO: 217708 - DNA, 25 bp, probe
gaaagagtttgggctgggatcagag

SEQ ID NO: 217709 - DNA, 25 bp, probe
gaaagtggtttggagggatggggtg

SEQ ID NO: 217710 - DNA, 25 bp, probe
gaaagtggatgggagtgggaggagg

SEQ ID NO: 217711 - DNA, 25 bp, probe
gaaagtaggtgtgtggctgcggtga

SEQ ID NO: 217712 - DNA, 25 bp, probe
gaaatcatgagactggcttgtgctg

SEQ ID NO: 217713 - DNA, 25 bp, probe
gaaagagagagcttctgttgctgcc

SEQ ID NO: 217714 - DNA, 25 bp, probe
gaaagtcataattcttcatcctcca

SEQ ID NO: 217715 - DNA, 25 bp, probe
gaaagtatcatcaaactcagtctca

SEQ ID NO: 217716 - DNA, 25 bp, probe
gaaagtatcatcaaactcagtctca

SEQ ID NO: 217717 - DNA, 25 bp, probe
gaaagtaattgaactcttctctgta

SEQ ID NO: 217718 - DNA, 25 bp, probe
gaaatggcatttacgtttctctgat

SEQ ID NO: 217719 - DNA, 25 bp, probe
gaaatgcagaccaacggtgatgttt

SEQ ID NO: 217720 - DNA, 25 bp, probe
gaaaggatttcaggggagcagtatg

SEQ ID NO: 217721 - DNA, 25 bp, probe
gaaattaactgagggagagcaagat

SEQ ID NO: 217722 - DNA, 25 bp, probe
gagatattcaacaggagggcggaag

SEQ ID NO: 217723 - DNA, 25 bp, probe
gaaattaacagagcaggtaggaaac

SEQ ID NO: 217724 - DNA, 25 bp, probe
gaaattaacagagcaggtaggaaac

SEQ ID NO: 217725 - DNA, 25 bp, probe
gaaatgcgagcacaccaggctaaga

SEQ ID NO: 217726 - DNA, 25 bp, probe
gaaagtgagctgaagcgcaggtcaa

SEQ ID NO: 217727 - DNA, 25 bp, probe
gaaaggggcacaggcatgccaaatt

SEQ ID NO: 217728 - DNA, 25 bp, probe
gaaagagggccaggtcctaagctgc

SEQ ID NO: 217729 - DNA, 25 bp, probe
gaaatagagagagggtctttggctg

SEQ ID NO: 217730 - DNA, 25 bp, probe
gaaatgagaagacggctcggtgagg

SEQ ID NO: 217731 - DNA, 25 bp, probe
gaaatgagaagacggctcggtgagg

SEQ ID NO: 217732 - DNA, 25 bp, probe
gaaagtactgaacctctgagtgagg

SEQ ID NO: 217733 - DNA, 25 bp, probe
gaaagataccgaagattagtggagc

SEQ ID NO: 217734 - DNA, 25 bp, probe
gaaagatccggccagttattgaaca

SEQ ID NO: 217735 - DNA, 25 bp, probe
gaaagatacaggggatcatgttaaa

SEQ ID NO: 217736 - DNA, 25 bp, probe
gacaagcataagaaggaggcggaac

SEQ ID NO: 217737 - DNA, 25 bp, probe
gaaagtgaagaagcagcggtcagca

SEQ ID NO: 217738 - DNA, 25 bp, probe
gaaagttaccattcagaggtgcagt

SEQ ID NO: 217739 - DNA, 25 bp, probe
gaaagtctatcctatggcaagtctg

SEQ ID NO: 217740 - DNA, 25 bp, probe
gaaatgctcagaaaatgtcaggaca

SEQ ID NO: 217741 - DNA, 25 bp, probe
gaaatctggagaggatgtgaggaga

SEQ ID NO: 217742 - DNA, 25 bp, probe
gaaatgatagcgtgcagtagagagc

SEQ ID NO: 217743 - DNA, 25 bp, probe
gaaagatacatattcagaggtagat

SEQ ID NO: 217744 - DNA, 25 bp, probe
gaaattcacaagacacagtgctgag

SEQ ID NO: 217745 - DNA, 25 bp, probe
gaaatctgctgcaaaatctctcttg

SEQ ID NO: 217746 - DNA, 25 bp, probe
gaaatgcttgcaattccttctgaga

SEQ ID NO: 217747 - DNA, 25 bp, probe
gaaatcatgatgtacatccttctgg

SEQ ID NO: 217748 - DNA, 25 bp, probe
gaaatgtgcaaccactgcttcttgg

SEQ ID NO: 217749 - DNA, 25 bp, probe
gaaattggaggactcctttgaggcc

SEQ ID NO: 217750 - DNA, 25 bp, probe
gacaattggaggcaagatcgtgggc

SEQ ID NO: 217751 - DNA, 25 bp, probe
gacaattggaggcaagatcgtgggc

SEQ ID NO: 217752 - DNA, 25 bp, probe
gaaatcctcagccgagaaattgggc

SEQ ID NO: 217753 - DNA, 25 bp, probe
gaaatcctgactttgattatcagtg

SEQ ID NO: 217754 - DNA, 25 bp, probe
gaaatactcagcaactgttagctgg

SEQ ID NO: 217755 - DNA, 25 bp, probe
gaaatatctcgttatttattggagg

SEQ ID NO: 217756 - DNA, 25 bp, probe
gaaatacccttcttttatgagcaga

SEQ ID NO: 217757 - DNA, 25 bp, probe
gaaattcccccacttgggagctgat

SEQ ID NO: 217758 - DNA, 25 bp, probe
gaaagtccagacctcggagaagctg

SEQ ID NO: 217759 - DNA, 25 bp, probe
gacaagtacggccttgggtatcagc

SEQ ID NO: 217760 - DNA, 25 bp, probe
gactacattgttcttccgatatcag

SEQ ID NO: 217761 - DNA, 25 bp, probe
gacataattgagtttttaaatcagt

SEQ ID NO: 217762 - DNA, 25 bp, probe
gaaatttgaggttttatgaagcttg

SEQ ID NO: 217763 - DNA, 25 bp, probe
gaaatgctgttgcttttcgaagttt

SEQ ID NO: 217764 - DNA, 25 bp, probe
gacatgggatgtgactttcgggtgt

SEQ ID NO: 217765 - DNA, 25 bp, probe
gagagtggagggtttgacgggcctg

SEQ ID NO: 217766 - DNA, 25 bp, probe
gaaaggggtgtttacgagcagctgt

SEQ ID NO: 217767 - DNA, 25 bp, probe
gaaaggggtgtttacgagcagctgt

SEQ ID NO: 217768 - DNA, 25 bp, probe
gaaagtctgtctttagaccagcact

SEQ ID NO: 217769 - DNA, 25 bp, probe
gaaagtctgtctttagaccagcact

SEQ ID NO: 217770 - DNA, 25 bp, probe
gaaagtcagcccttagattcagata

SEQ ID NO: 217771 - DNA, 25 bp, probe
gaaatatcatgctccattgttcaga

SEQ ID NO: 217772 - DNA, 25 bp, probe
gacaattcatgtcttggttacaaga

SEQ ID NO: 217773 - DNA, 25 bp, probe
gaaatccgctcctttgtggagacga

SEQ ID NO: 217774 - DNA, 25 bp, probe
gaaagtgcctgccttgtttatagcc

SEQ ID NO: 217775 - DNA, 25 bp, probe
gaaaggctcatgctttatccagacc

SEQ ID NO: 217776 - DNA, 25 bp, probe
gaaaggttgtatgtgatcagaagct

SEQ ID NO: 217777 - DNA, 25 bp, probe
gaaagtggtttagtgctagaaggag

SEQ ID NO: 217778 - DNA, 25 bp, probe
gaaagtgtgctttatgctgaaacag

SEQ ID NO: 217779 - DNA, 25 bp, probe
gaaatgtggttgtatgagccaatca

SEQ ID NO: 217780 - DNA, 25 bp, probe
gaaagtgtattctaactgttccaat

SEQ ID NO: 217781 - DNA, 25 bp, probe
gaaagtgtattcaaattttatcagt

SEQ ID NO: 217782 - DNA, 25 bp, probe
gacaagggcattcattttcatttga

SEQ ID NO: 217783 - DNA, 25 bp, probe
gaaatgtagcaataatgtcttttga

SEQ ID NO: 217784 - DNA, 25 bp, probe
gaaaggtcaaagaagatttatctac

SEQ ID NO: 217785 - DNA, 25 bp, probe
gaaatgtacaaactagaattttaat

SEQ ID NO: 217786 - DNA, 25 bp, probe
gaaattaactatctgtacttataag

SEQ ID NO: 217787 - DNA, 25 bp, probe
gaaaggagattatctgtaatgtatt

SEQ ID NO: 217788 - DNA, 25 bp, probe
gaaaggagattatctgtaatgtatt

SEQ ID NO: 217789 - DNA, 25 bp, probe
gaaaggctgttatatggaatgtctg

SEQ ID NO: 217790 - DNA, 25 bp, probe
gaaagtgattttgatgatgaagcat

SEQ ID NO: 217791 - DNA, 25 bp, probe
gaaagtgtcccagtcatgatgctac

SEQ ID NO: 217792 - DNA, 25 bp, probe
gaaagggcagcctatctcattatct

SEQ ID NO: 217793 - DNA, 25 bp, probe
gaaagggcgtattcacatagacatc

SEQ ID NO: 217794 - DNA, 25 bp, probe
gaaagggcgtattcacatagacatc

SEQ ID NO: 217795 - DNA, 25 bp, probe
gacaaggtggacaccaagacctttc

SEQ ID NO: 217796 - DNA, 25 bp, probe
gacaggtttgacatcgaagacgtga

SEQ ID NO: 217797 - DNA, 25 bp, probe
gacactaacgacttcagggcagggc

SEQ ID NO: 217798 - DNA, 25 bp, probe
gacaccaacaagattgaggaatttc

SEQ ID NO: 217799 - DNA, 25 bp, probe
gaccctcaacgtctactgagtacta

SEQ ID NO: 217800 - DNA, 25 bp, probe
gacagcgacaccaggtttgagaagc

SEQ ID NO: 217801 - DNA, 25 bp, probe
gacacgccccataggaagtagtaga

SEQ ID NO: 217802 - DNA, 25 bp, probe
gacagcggccttagaaagcaacctg

SEQ ID NO: 217803 - DNA, 25 bp, probe
gacacaggattcagaaagacaccag

SEQ ID NO: 217804 - DNA, 25 bp, probe
gaaatggttgctggacgaacaccat

SEQ ID NO: 217805 - DNA, 25 bp, probe
gaaatggttgctggacgaacaccat

SEQ ID NO: 217806 - DNA, 25 bp, probe
gaaatggttggcctgagcaacctag

SEQ ID NO: 217807 - DNA, 25 bp, probe
gaaatggttggcctgagcaacctag

SEQ ID NO: 217808 - DNA, 25 bp, probe
gaaaggacatgggtagcaattctac

SEQ ID NO: 217809 - DNA, 25 bp, probe
gacaaggaatatctagtacttactt

SEQ ID NO: 217810 - DNA, 25 bp, probe
gacaaggaatatctagtacttactt

SEQ ID NO: 217811 - DNA, 25 bp, probe
gacaaaattatctcgaccttacata

SEQ ID NO: 217812 - DNA, 25 bp, probe
gaaattattcactgcgatccgggat

SEQ ID NO: 217813 - DNA, 25 bp, probe
gaaattttatatccactccagtgag

SEQ ID NO: 217814 - DNA, 25 bp, probe
gacaactcaggaatccagtacagga

SEQ ID NO: 217815 - DNA, 25 bp, probe
gaaatgacgttgccgattcaccagc

SEQ ID NO: 217816 - DNA, 25 bp, probe
gaaatgcaaataagtgaagcctccc

SEQ ID NO: 217817 - DNA, 25 bp, probe
gaaatccattcattctgctagcact

SEQ ID NO: 217818 - DNA, 25 bp, probe
gaaatgtgaccattactggccattc

SEQ ID NO: 217819 - DNA, 25 bp, probe
gaaatatcactatacacccattaga

SEQ ID NO: 217820 - DNA, 25 bp, probe
gaaatcacagtaaacctcctgtgac

SEQ ID NO: 217821 - DNA, 25 bp, probe
gaaatggcagggacacttctcttgc

SEQ ID NO: 217822 - DNA, 25 bp, probe
gaaagtgcgctggctcacattattt

SEQ ID NO: 217823 - DNA, 25 bp, probe
gaaagtgcgctggctcacattattt

SEQ ID NO: 217824 - DNA, 25 bp, probe
gacaatgtcctgtgccaaattacct

SEQ ID NO: 217825 - DNA, 25 bp, probe
gaaattcacatgcacctaaatcctc

SEQ ID NO: 217826 - DNA, 25 bp, probe
gaaattcacatgcacctaaatcctc

SEQ ID NO: 217827 - DNA, 25 bp, probe
gaaataccaggtaccataacctctt

SEQ ID NO: 217828 - DNA, 25 bp, probe
gaaataccaggtaccataacctctt

SEQ ID NO: 217829 - DNA, 25 bp, probe
gacaatagccagatacctagggcaa

SEQ ID NO: 217830 - DNA, 25 bp, probe
gaaattgccagtgtcctggtgaata

SEQ ID NO: 217831 - DNA, 25 bp, probe
gaaatctccagtgtgcgttggaatc

SEQ ID NO: 217832 - DNA, 25 bp, probe
gacaaccaaatctagccttggaaca

SEQ ID NO: 217833 - DNA, 25 bp, probe
gacagggtagattacctcggatacc

SEQ ID NO: 217834 - DNA, 25 bp, probe
gacagggtagattacctcggatacc

SEQ ID NO: 217835 - DNA, 25 bp, probe
gacagggtagattacctcggatacc

SEQ ID NO: 217836 - DNA, 25 bp, probe
gaaaggtgaaattccttggtcacaa

SEQ ID NO: 217837 - DNA, 25 bp, probe
gaaaggccaatatcccataggctaa

SEQ ID NO: 217838 - DNA, 25 bp, probe
gaaatgcccaaaaccttcagagatt

SEQ ID NO: 217839 - DNA, 25 bp, probe
gaaatggccagaattcctgtcatgg

SEQ ID NO: 217840 - DNA, 25 bp, probe
gaaatggcaatcttatgtgtgctga

SEQ ID NO: 217841 - DNA, 25 bp, probe
gaaatgcttatgcttgtgtatatgt

SEQ ID NO: 217842 - DNA, 25 bp, probe
gaaatgtatgcactgtttgaaatgt

SEQ ID NO: 217843 - DNA, 25 bp, probe
gacatgtggggtgttggttgcattt

SEQ ID NO: 217844 - DNA, 25 bp, probe
gacatgtggggtgttggttgcattt

SEQ ID NO: 217845 - DNA, 25 bp, probe
gacttgggtgaccttaaggatgtga

SEQ ID NO: 217846 - DNA, 25 bp, probe
gactcggaggaccttaagccagtta

SEQ ID NO: 217847 - DNA, 25 bp, probe
gactttaccccaaaagccgtgatgt

SEQ ID NO: 217848 - DNA, 25 bp, probe
gacagttaccccagggagattatgt

SEQ ID NO: 217849 - DNA, 25 bp, probe
gacacttaggcccctgggacaatga

SEQ ID NO: 217850 - DNA, 25 bp, probe
gaaagtgaggccggggcgagacaac

SEQ ID NO: 217851 - DNA, 25 bp, probe
gacaagaagggcgcgctgcgcaaac

SEQ ID NO: 217852 - DNA, 25 bp, probe
gaaatcaatggaacccttgcacaaa

SEQ ID NO: 217853 - DNA, 25 bp, probe
gaaatcaatggaacccttgcacaaa

SEQ ID NO: 217854 - DNA, 25 bp, probe
gaaatcagttcactccctggaagag

SEQ ID NO: 217855 - DNA, 25 bp, probe
gacaaagtctgcatgtccgaggacg

SEQ ID NO: 217856 - DNA, 25 bp, probe
gacataggtagccgtagttggactg

SEQ ID NO: 217857 - DNA, 25 bp, probe
gaaagggaggagaaggcggagtaag

SEQ ID NO: 217858 - DNA, 25 bp, probe
gaaaggagacgaagcgggcggctac

SEQ ID NO: 217859 - DNA, 25 bp, probe
gacaaggtgacgcagctggaccaga

SEQ ID NO: 217860 - DNA, 25 bp, probe
gacaaatggaggcagcattaacagt

SEQ ID NO: 217861 - DNA, 25 bp, probe
gacaaaagggcatgctggttcctaa

SEQ ID NO: 217862 - DNA, 25 bp, probe
gacaaaaatggttggcactaacaaa

SEQ ID NO: 217863 - DNA, 25 bp, probe
gacaaaaacttctcaaatcacactc

SEQ ID NO: 217864 - DNA, 25 bp, probe
gacaaaaccctatctagtcaactgg

SEQ ID NO: 217865 - DNA, 25 bp, probe
gacaagtcccccaaatgagtacaca

SEQ ID NO: 217866 - DNA, 25 bp, probe
gaaatccacccaacagaggaccaca

SEQ ID NO: 217867 - DNA, 25 bp, probe
gaaattgacccataggcagaggcat

SEQ ID NO: 217868 - DNA, 25 bp, probe
gaaatccacttctgggacaggcagt

SEQ ID NO: 217869 - DNA, 25 bp, probe
gaaatcccttgggggagcaggatga

SEQ ID NO: 217870 - DNA, 25 bp, probe
gaaatggggtgggagggcaggggtg

SEQ ID NO: 217871 - DNA, 25 bp, probe
gaaatggggtgggagggcaggggtg

SEQ ID NO: 217872 - DNA, 25 bp, probe
gaaatggggtgaacggtgctggcag

SEQ ID NO: 217873 - DNA, 25 bp, probe
gaaatctcagagtaccgaggctcca

SEQ ID NO: 217874 - DNA, 25 bp, probe
gaaattcagtatccactgggtgcct

SEQ ID NO: 217875 - DNA, 25 bp, probe
gaaataagccagccacggcagtcgc

SEQ ID NO: 217876 - DNA, 25 bp, probe
gaaattggacagcgaggctgtgccc

SEQ ID NO: 217877 - DNA, 25 bp, probe
gaaattggaagccgagatggaccgc

SEQ ID NO: 217878 - DNA, 25 bp, probe
gaaatcgtaaagcgagctgacgctg

SEQ ID NO: 217879 - DNA, 25 bp, probe
gacaacgtactactggaccacgaag

SEQ ID NO: 217880 - DNA, 25 bp, probe
gactacgtcccaaaggtcgacaagt

SEQ ID NO: 217881 - DNA, 25 bp, probe
gaaatggtcccatgacagtagacaa

SEQ ID NO: 217882 - DNA, 25 bp, probe
gaaaggtcctatacaagtcagttaa

SEQ ID NO: 217883 - DNA, 25 bp, probe
gaaaggatccagaaactagagttca

SEQ ID NO: 217884 - DNA, 25 bp, probe
gaaatggtacagatgactgggatac

SEQ ID NO: 217885 - DNA, 25 bp, probe
gaaattataccaggcaatgggatac

SEQ ID NO: 217886 - DNA, 25 bp, probe
gaaatcatttgccagagcgaggtaa

SEQ ID NO: 217887 - DNA, 25 bp, probe
gaaatattaggttcaggtgcataag

SEQ ID NO: 217888 - DNA, 25 bp, probe
gaaatcatggatttattaatcataa

SEQ ID NO: 217889 - DNA, 25 bp, probe
gaaatatggccctatctgaatgcct

SEQ ID NO: 217890 - DNA, 25 bp, probe
gaaatgatgctattgcttcatacac

SEQ ID NO: 217891 - DNA, 25 bp, probe
gaaatggctctgctgatgcaagcag

SEQ ID NO: 217892 - DNA, 25 bp, probe
gaaatgagcccaagcacacatgcat

SEQ ID NO: 217893 - DNA, 25 bp, probe
gaaatgaccacaggacatgcaacca

SEQ ID NO: 217894 - DNA, 25 bp, probe
gaaaggtcagcagagatcctccagc

SEQ ID NO: 217895 - DNA, 25 bp, probe
gaaaggatagcatacacgctggtgg

SEQ ID NO: 217896 - DNA, 25 bp, probe
gaaaggacctgctgccagggatggc

SEQ ID NO: 217897 - DNA, 25 bp, probe
gaaatgttcctgagtcacgctgagg

SEQ ID NO: 217898 - DNA, 25 bp, probe
gaaatggatacgtggaagctgggga

SEQ ID NO: 217899 - DNA, 25 bp, probe
gaaaggttgggggaggctgggagag

SEQ ID NO: 217900 - DNA, 25 bp, probe
gacaagtcgaggagcaaagcgggga

SEQ ID NO: 217901 - DNA, 25 bp, probe
gacaaccgaggagaggagcaccggg

SEQ ID NO: 217902 - DNA, 25 bp, probe
gacaactaagggcaggacccaaagg

SEQ ID NO: 217903 - DNA, 25 bp, probe
gacaactaagggcaggacccaaagg

SEQ ID NO: 217904 - DNA, 25 bp, probe
gagaactaatgccgacgtgatgacc

SEQ ID NO: 217905 - DNA, 25 bp, probe
gaaatctcagtgtgactgttacata

SEQ ID NO: 217906 - DNA, 25 bp, probe
gaaatcacagtgttgagatgtatga

SEQ ID NO: 217907 - DNA, 25 bp, probe
gaaatgccagtcattgactgatgta

SEQ ID NO: 217908 - DNA, 25 bp, probe
gaaatgactacactcaaggatgtga

SEQ ID NO: 217909 - DNA, 25 bp, probe
gaaatgtgccagtcacagaggagaa

SEQ ID NO: 217910 - DNA, 25 bp, probe
gaaattctgcgttcaagacctcagt

SEQ ID NO: 217911 - DNA, 25 bp, probe
gaaattctccactaagtctgacgtg

SEQ ID NO: 217912 - DNA, 25 bp, probe
gaaatgaatcctggggttgactgtg

SEQ ID NO: 217913 - DNA, 25 bp, probe
gaaatacactcatggggaagcttcc

SEQ ID NO: 217914 - DNA, 25 bp, probe
gacagcggaacatatgaggaagttc

SEQ ID NO: 217915 - DNA, 25 bp, probe
gacaagccaaagaaggagcaaattc

SEQ ID NO: 217916 - DNA, 25 bp, probe
gacaaataaaactcgctgacttcgg

SEQ ID NO: 217917 - DNA, 25 bp, probe
gacaaattcaaaagactgcccctcg

SEQ ID NO: 217918 - DNA, 25 bp, probe
gacacaattagagaagccttttcca

SEQ ID NO: 217919 - DNA, 25 bp, probe
gacacaattagagaagccttttcca

SEQ ID NO: 217920 - DNA, 25 bp, probe
gacaaatctggtgaaacttctcctg

SEQ ID NO: 217921 - DNA, 25 bp, probe
gacaaactttgcaggacttccctta

SEQ ID NO: 217922 - DNA, 25 bp, probe
gacaaactttgcaggacttccctta

SEQ ID NO: 217923 - DNA, 25 bp, probe
gacaaaagttttcattttgccttga

SEQ ID NO: 217924 - DNA, 25 bp, probe
gacaaaagttttcattttgccttga

SEQ ID NO: 217925 - DNA, 25 bp, probe
gactaaaggttacctgttgtcgtga

SEQ ID NO: 217926 - DNA, 25 bp, probe
gacacaaagtttaactggtacttga

SEQ ID NO: 217927 - DNA, 25 bp, probe
gacttagattttacctgttactcta

SEQ ID NO: 217928 - DNA, 25 bp, probe
gacttagattttacctgttactcta

SEQ ID NO: 217929 - DNA, 25 bp, probe
gactaatttttaagagtaactcagt

SEQ ID NO: 217930 - DNA, 25 bp, probe
gacaagatttttcatttcacccaat

SEQ ID NO: 217931 - DNA, 25 bp, probe
gataagtaattacactggacctagg

SEQ ID NO: 217932 - DNA, 25 bp, probe
gataacaaaatacactttactggta

SEQ ID NO: 217933 - DNA, 25 bp, probe
gaaatcagtaaacactgtgtattgt

SEQ ID NO: 217934 - DNA, 25 bp, probe
gataagagttaacatttggctatac

SEQ ID NO: 217935 - DNA, 25 bp, probe
gacaaagttttggctttggaactct

SEQ ID NO: 217936 - DNA, 25 bp, probe
gaaatgatttttagctctaggccac

SEQ ID NO: 217937 - DNA, 25 bp, probe
gaaatctttagtactcaaggcaaac

SEQ ID NO: 217938 - DNA, 25 bp, probe
gaaatagattagtagctccaggcag

SEQ ID NO: 217939 - DNA, 25 bp, probe
gaaatagattagtagctccaggcag

SEQ ID NO: 217940 - DNA, 25 bp, probe
gaaatgagcatgcagggctaaggca

SEQ ID NO: 217941 - DNA, 25 bp, probe
gacaatgatgctgagacgctgaaca

SEQ ID NO: 217942 - DNA, 25 bp, probe
gaaatgattccaaagtaacatgtaa

SEQ ID NO: 217943 - DNA, 25 bp, probe
gaaattgatccaaaggacctgacct

SEQ ID NO: 217944 - DNA, 25 bp, probe
gaaattgaagcaaacccgccaagac

SEQ ID NO: 217945 - DNA, 25 bp, probe
gacacaggaaaccaacacccaaagc

SEQ ID NO: 217946 - DNA, 25 bp, probe
gacacaggaaaccaacacccaaagc

SEQ ID NO: 217947 - DNA, 25 bp, probe
gacacaggaaaccaacacccaaagc

SEQ ID NO: 217948 - DNA, 25 bp, probe
gacagcggaaaccctggaaaagcag

SEQ ID NO: 217949 - DNA, 25 bp, probe
gacagggaaaatatagacctatgat

SEQ ID NO: 217950 - DNA, 25 bp, probe
gacaaaggaacaattaaactggctg

SEQ ID NO: 217951 - DNA, 25 bp, probe
gaaaggaaagctgtgaagacattgg

SEQ ID NO: 217952 - DNA, 25 bp, probe
gaaaggccaagatttgcagaacttg

SEQ ID NO: 217953 - DNA, 25 bp, probe
gaaaggcctggattatctgcactca

SEQ ID NO: 217954 - DNA, 25 bp, probe
gaaaggactagaatgttcacaccac

SEQ ID NO: 217955 - DNA, 25 bp, probe
gagaaaacaaaagatagccccacga

SEQ ID NO: 217956 - DNA, 25 bp, probe
gagaaaacaaaagatagccccacga

SEQ ID NO: 217957 - DNA, 25 bp, probe
gagaataagccagaaaagtacccta

SEQ ID NO: 217958 - DNA, 25 bp, probe
gacgaaagcctgaacaaaaaccact

SEQ ID NO: 217959 - DNA, 25 bp, probe
gacacaaacctaaactcagaagcct

SEQ ID NO: 217960 - DNA, 25 bp, probe
gacaggcaagctcactactagaaca

SEQ ID NO: 217961 - DNA, 25 bp, probe
gacaggcaagctcactactagaaca

SEQ ID NO: 217962 - DNA, 25 bp, probe
gaaatgcattgtcatcatcccgaac

SEQ ID NO: 217963 - DNA, 25 bp, probe
gaaatgtttgacatcatcctggatg

SEQ ID NO: 217964 - DNA, 25 bp, probe
gaaatgtttgacatcatcctggatg

SEQ ID NO: 217965 - DNA, 25 bp, probe
gaaatctatttcataccatggagga

SEQ ID NO: 217966 - DNA, 25 bp, probe
gaaattcattccaacccaggagaca

SEQ ID NO: 217967 - DNA, 25 bp, probe
gaaatgtcctccaacaataaagagc

SEQ ID NO: 217968 - DNA, 25 bp, probe
gaaatgtcgatcaagagaatcaaca

SEQ ID NO: 217969 - DNA, 25 bp, probe
gaaatgtcgatcaagagaatcaaca

SEQ ID NO: 217970 - DNA, 25 bp, probe
gacaatgctggagtctgtgaaaacg

SEQ ID NO: 217971 - DNA, 25 bp, probe
gacaatcagtatgtggtacaactga

SEQ ID NO: 217972 - DNA, 25 bp, probe
gacaatccgtggtgtatactctgtg

SEQ ID NO: 217973 - DNA, 25 bp, probe
gaaatgcctttttgtattgcaatcg

SEQ ID NO: 217974 - DNA, 25 bp, probe
gaaatgccatatttgacttggcttc

SEQ ID NO: 217975 - DNA, 25 bp, probe
gaaattcaatgaagatcggtgcttc

SEQ ID NO: 217976 - DNA, 25 bp, probe
gaaattcagtgacgaaggtgcgttg

SEQ ID NO: 217977 - DNA, 25 bp, probe
gaaattcttgagcagggatcttata

SEQ ID NO: 217978 - DNA, 25 bp, probe
gaaattcttatgcagccttttacct

SEQ ID NO: 217979 - DNA, 25 bp, probe
gaaatcttctatcagtttacttcct

SEQ ID NO: 217980 - DNA, 25 bp, probe
gaaatctgtctatgaatgttagtct

SEQ ID NO: 217981 - DNA, 25 bp, probe
gacaatcagattaagaagatgtagc

SEQ ID NO: 217982 - DNA, 25 bp, probe
gaaatctgtttcaacagatgaccgt

SEQ ID NO: 217983 - DNA, 25 bp, probe
gaaatctgtaacgcagcttccgtaa

SEQ ID NO: 217984 - DNA, 25 bp, probe
gaaatgcgtaatttcaattactgta

SEQ ID NO: 217985 - DNA, 25 bp, probe
gaaatggtatatatcaatgacagca

SEQ ID NO: 217986 - DNA, 25 bp, probe
gaaatggtcaacgccatgcaccaga

SEQ ID NO: 217987 - DNA, 25 bp, probe
gacagcatgtgtgttacctgctcca

SEQ ID NO: 217988 - DNA, 25 bp, probe
gaaatgtgttttggcatcagctact

SEQ ID NO: 217989 - DNA, 25 bp, probe
gaaatgctgattggtcagtcgcctt

SEQ ID NO: 217990 - DNA, 25 bp, probe
gacaagtgaaggtgtctgccctggg

SEQ ID NO: 217991 - DNA, 25 bp, probe
gacacagtggcaagggttcttcggg

SEQ ID NO: 217992 - DNA, 25 bp, probe
gacacgggaggtaccctttgctgac

SEQ ID NO: 217993 - DNA, 25 bp, probe
gacacttgaaggtactcaggtttca

SEQ ID NO: 217994 - DNA, 25 bp, probe
ggactttaccagttaggactccact

SEQ ID NO: 217995 - DNA, 25 bp, probe
gacacgggtccttcatcaggacccc

SEQ ID NO: 217996 - DNA, 25 bp, probe
gacaaggccactgacatcgtgacag

SEQ ID NO: 217997 - DNA, 25 bp, probe
gacaagacttctaaatcctcctgta

SEQ ID NO: 217998 - DNA, 25 bp, probe
gacaagaaggctttatacccatcta

SEQ ID NO: 217999 - DNA, 25 bp, probe
gacaagaaggctttatacccatcta

SEQ ID NO: 218000 - DNA, 25 bp, probe
gacaatagagatcatctagtcccat

SEQ ID NO: 218001 - DNA, 25 bp, probe
gaaatctggcatcatctcaggttcc

SEQ ID NO: 218002 - DNA, 25 bp, probe
gaaatatgatgaccccatggtaccc

SEQ ID NO: 218003 - DNA, 25 bp, probe
gaaatagatgtgccctacagaccct

SEQ ID NO: 218004 - DNA, 25 bp, probe
gaaatagatgtgccctacagaccct

SEQ ID NO: 218005 - DNA, 25 bp, probe
gaaataatgatcccagccagactga

SEQ ID NO: 218006 - DNA, 25 bp, probe
gaaatgatcaatacccacagtgctg

SEQ ID NO: 218007 - DNA, 25 bp, probe
gacagctacaaagctcaactcgggt

SEQ ID NO: 218008 - DNA, 25 bp, probe
gacacaatggtagctctgaagggag

SEQ ID NO: 218009 - DNA, 25 bp, probe
gacaccagtgaaacttgaaccggga

SEQ ID NO: 218010 - DNA, 25 bp, probe
gacaacagaaaaaggacctcggact

SEQ ID NO: 218011 - DNA, 25 bp, probe
gacataaacccgggaactctgagac

SEQ ID NO: 218012 - DNA, 25 bp, probe
gacaaaaggccggtgtttgcggaca

SEQ ID NO: 218013 - DNA, 25 bp, probe
gacaacaaacctgtttctgcagcca

SEQ ID NO: 218014 - DNA, 25 bp, probe
gatcaacttacctgttttcaacaaa

SEQ ID NO: 218015 - DNA, 25 bp, probe
gacaatcttacccgcaggttttcag

SEQ ID NO: 218016 - DNA, 25 bp, probe
gaaatgttaccgaagcaatgcctat

SEQ ID NO: 218017 - DNA, 25 bp, probe
gaaatgttaccgaagcaatgcctat

SEQ ID NO: 218018 - DNA, 25 bp, probe
gaaatatatcctctcaaatgcaaat

SEQ ID NO: 218019 - DNA, 25 bp, probe
gaaatatggccccaaagtggatgtc

SEQ ID NO: 218020 - DNA, 25 bp, probe
gaaattggattcgaaactggatgtg

SEQ ID NO: 218021 - DNA, 25 bp, probe
gaaattgtcactcgcttactggatc

SEQ ID NO: 218022 - DNA, 25 bp, probe
gaaattgtcactcgcttactggatc

SEQ ID NO: 218023 - DNA, 25 bp, probe
gaaattgtcactcgcttactggatc

SEQ ID NO: 218024 - DNA, 25 bp, probe
gaaattgtcactcgcttactggatc

SEQ ID NO: 218025 - DNA, 25 bp, probe
gaaattgtcactcgcttactggatc

SEQ ID NO: 218026 - DNA, 25 bp, probe
gaaattccatgatgcttgcctggac

SEQ ID NO: 218027 - DNA, 25 bp, probe
gaaatcaccgattgcccttgtcaac

SEQ ID NO: 218028 - DNA, 25 bp, probe
gaaatcacctgttatccttgtttgt

SEQ ID NO: 218029 - DNA, 25 bp, probe
gaaattacacttttcttgtctgcgt

SEQ ID NO: 218030 - DNA, 25 bp, probe
gaaattgaaatcgtattgtgtggag

SEQ ID NO: 218031 - DNA, 25 bp, probe
gaaattgacattgaacgctgtgtga

SEQ ID NO: 218032 - DNA, 25 bp, probe
gacaatggatttaaccctgtgtggg

SEQ ID NO: 218033 - DNA, 25 bp, probe
gacaatggctataaactgaattagg

SEQ ID NO: 218034 - DNA, 25 bp, probe
gacaatgactattccctgacagtta

SEQ ID NO: 218035 - DNA, 25 bp, probe
gaaatgctgttaacctggcagtatt

SEQ ID NO: 218036 - DNA, 25 bp, probe
gaaatctatcttgtctgcaagaatt

SEQ ID NO: 218037 - DNA, 25 bp, probe
gaaatctatcttgtctgcaagaatt

SEQ ID NO: 218038 - DNA, 25 bp, probe
gaaatcatattaaatacccacattt

SEQ ID NO: 218039 - DNA, 25 bp, probe
gaaatcatattaaatacccacattt

SEQ ID NO: 218040 - DNA, 25 bp, probe
gaaatatcctaaatacaacctctgt

SEQ ID NO: 218041 - DNA, 25 bp, probe
gaaataactggaacccagcctctcc

SEQ ID NO: 218042 - DNA, 25 bp, probe
gaaatacttggattctatccctcct

SEQ ID NO: 218043 - DNA, 25 bp, probe
gaaatactcagaatttttccacgag

SEQ ID NO: 218044 - DNA, 25 bp, probe
gacactactaatctagtcccttgca

SEQ ID NO: 218045 - DNA, 25 bp, probe
gacaccttatggcatagttcccgac

SEQ ID NO: 218046 - DNA, 25 bp, probe
gacaccttatggcatagttcccgac

SEQ ID NO: 218047 - DNA, 25 bp, probe
gacaccttatggcatagttcccgac

SEQ ID NO: 218048 - DNA, 25 bp, probe
gacaagcttatccggaatcccggca

SEQ ID NO: 218049 - DNA, 25 bp, probe
gacaagtttgacgagaacgctcagg

SEQ ID NO: 218050 - DNA, 25 bp, probe
gaaatagttgatgaatttgctatgc

SEQ ID NO: 218051 - DNA, 25 bp, probe
gaaatacttggttattgcatgatcc

SEQ ID NO: 218052 - DNA, 25 bp, probe
gaaatcaggtggttagctcaaccaa

SEQ ID NO: 218053 - DNA, 25 bp, probe
gaaatctggtgacttttatactgaa

SEQ ID NO: 218054 - DNA, 25 bp, probe
gaaatgcagtgttctctcttaacgc

SEQ ID NO: 218055 - DNA, 25 bp, probe
gaaatgctggtagttcctgaacagg

SEQ ID NO: 218056 - DNA, 25 bp, probe
gaaatgctggtagttcctgaacagg

SEQ ID NO: 218057 - DNA, 25 bp, probe
gaaattgaaagaatcctcaacagtg

SEQ ID NO: 218058 - DNA, 25 bp, probe
gaaataaccaagactcgaaatgaga

SEQ ID NO: 218059 - DNA, 25 bp, probe
gaaatccctgcaggaccaggaagag

SEQ ID NO: 218060 - DNA, 25 bp, probe
gaaatacctgcatgacctgggcatt

SEQ ID NO: 218061 - DNA, 25 bp, probe
gaaatatcgtgaaaggatgagctca

SEQ ID NO: 218062 - DNA, 25 bp, probe
gaaattagatgaacagcgcacagcc

SEQ ID NO: 218063 - DNA, 25 bp, probe
gaaatgaagctggctcagctccctc

SEQ ID NO: 218064 - DNA, 25 bp, probe
gacaatgaacatctgaggctgcctt

SEQ ID NO: 218065 - DNA, 25 bp, probe
gaaataatcatgcatgaagcgccaa

SEQ ID NO: 218066 - DNA, 25 bp, probe
gaaataatgttatgctcatgccaac

SEQ ID NO: 218067 - DNA, 25 bp, probe
gaaattgagatccaggctcatctac

SEQ ID NO: 218068 - DNA, 25 bp, probe
gaaatcgccactggagatatcccgt

SEQ ID NO: 218069 - DNA, 25 bp, probe
gaaatcctgccagagatcatcatct

SEQ ID NO: 218070 - DNA, 25 bp, probe
gaaatcctgtcagatgataacttca

SEQ ID NO: 218071 - DNA, 25 bp, probe
gaaatttgatgactctgtgatactt

SEQ ID NO: 218072 - DNA, 25 bp, probe
gaaattgagaatccagtttctttcc

SEQ ID NO: 218073 - DNA, 25 bp, probe
gaaattattcatcagttcattttgg

SEQ ID NO: 218074 - DNA, 25 bp, probe
gaaatttcacagcagtttattaatg

SEQ ID NO: 218075 - DNA, 25 bp, probe
gaaatatctccgaagttaaaatctg

SEQ ID NO: 218076 - DNA, 25 bp, probe
gaaattaccttaatatgcaagactc

SEQ ID NO: 218077 - DNA, 25 bp, probe
gaaattgaccatgactatgagcgag

SEQ ID NO: 218078 - DNA, 25 bp, probe
gaaattgaccatgactatgagcgag

SEQ ID NO: 218079 - DNA, 25 bp, probe
gaaattgaggatgacgctgatgtgg

SEQ ID NO: 218080 - DNA, 25 bp, probe
gaaattggtattgcagtggatgtga

SEQ ID NO: 218081 - DNA, 25 bp, probe
gaaatgcttgtatacagtggatata

SEQ ID NO: 218082 - DNA, 25 bp, probe
gaaatcttgctcagaagctcaatat

SEQ ID NO: 218083 - DNA, 25 bp, probe
gaaattatccatggaaccaaatcaa

SEQ ID NO: 218084 - DNA, 25 bp, probe
gaaattaccctgagctcaacaataa

SEQ ID NO: 218085 - DNA, 25 bp, probe
gaaattaccctgagctcaacaataa

SEQ ID NO: 218086 - DNA, 25 bp, probe
gaaataacccagacttaatcttgaa

SEQ ID NO: 218087 - DNA, 25 bp, probe
gaaataacccagacttaatcttgaa

SEQ ID NO: 218088 - DNA, 25 bp, probe
gaaattccaaagtctctaattctat

SEQ ID NO: 218089 - DNA, 25 bp, probe
gaaattccaaagtctctaattctat

SEQ ID NO: 218090 - DNA, 25 bp, probe
gacaatctctaatgtctgattattt

SEQ ID NO: 218091 - DNA, 25 bp, probe
gacaacaataattgctgcatttgat

SEQ ID NO: 218092 - DNA, 25 bp, probe
gacaaagtaattcctctcactaaac

SEQ ID NO: 218093 - DNA, 25 bp, probe
gacataatgtttgtttcactgattt

SEQ ID NO: 218094 - DNA, 25 bp, probe
gaaatagctactgtttgcaatgtct

SEQ ID NO: 218095 - DNA, 25 bp, probe
gaaatcatgtacgactggtcacagt

SEQ ID NO: 218096 - DNA, 25 bp, probe
gaaatagtacaactgtgtgaaaatg

SEQ ID NO: 218097 - DNA, 25 bp, probe
gaaattgatcaggagttggaacaca

SEQ ID NO: 218098 - DNA, 25 bp, probe
gaaattgatcaggagttggaacaca

SEQ ID NO: 218099 - DNA, 25 bp, probe
gaaatatctgtgggcttgtgacacg

SEQ ID NO: 218100 - DNA, 25 bp, probe
gaaatagcctgttgcatcttagcca

SEQ ID NO: 218101 - DNA, 25 bp, probe
gaaatcagttgcttgatagtagcta

SEQ ID NO: 218102 - DNA, 25 bp, probe
gaaatcagttgcttgatagtagcta

SEQ ID NO: 218103 - DNA, 25 bp, probe
gaaatccttttgtgaagtcattgcc

SEQ ID NO: 218104 - DNA, 25 bp, probe
gaaatcccttattgagggcccagac

SEQ ID NO: 218105 - DNA, 25 bp, probe
gaaatacctcatgaagaggcgctgg

SEQ ID NO: 218106 - DNA, 25 bp, probe
gacatgaacctcatgaaggaggtga

SEQ ID NO: 218107 - DNA, 25 bp, probe
gacaaactagccaaggaggggaagg

SEQ ID NO: 218108 - DNA, 25 bp, probe
gacaaccgactggggcgggagacgg

SEQ ID NO: 218109 - DNA, 25 bp, probe
gacaaccgactggggcgggagacgg

SEQ ID NO: 218110 - DNA, 25 bp, probe
gacaaccgactggggcgggagacgg

SEQ ID NO: 218111 - DNA, 25 bp, probe
gacaaccgactggggcgggagacgg

SEQ ID NO: 218112 - DNA, 25 bp, probe
tgaccccgttggtggaggacggtgt

SEQ ID NO: 218113 - DNA, 25 bp, probe
gacaccaaatttggcggaggggtgg

SEQ ID NO: 218114 - DNA, 25 bp, probe
gacactcacagcaaggatggagctg

SEQ ID NO: 218115 - DNA, 25 bp, probe
gacaagctgcaggaggccctgctgc

SEQ ID NO: 218116 - DNA, 25 bp, probe
gaaatccatggaatccctgctgatt

SEQ ID NO: 218117 - DNA, 25 bp, probe
gaaatcattgaggtctcctgagaag

SEQ ID NO: 218118 - DNA, 25 bp, probe
gaaatcctgagagcatctcgaatat

SEQ ID NO: 218119 - DNA, 25 bp, probe
gaaatcctgagagcatctcgaatat

SEQ ID NO: 218120 - DNA, 25 bp, probe
gaaatctatcagatcatgctggact

SEQ ID NO: 218121 - DNA, 25 bp, probe
gacaacttagccaattgcaactcca

SEQ ID NO: 218122 - DNA, 25 bp, probe
gacaacttagccaattgcaactcca

SEQ ID NO: 218123 - DNA, 25 bp, probe
gacaatttaccatgtcattgatcac

SEQ ID NO: 218124 - DNA, 25 bp, probe
gaaatattacgatgctaaaactgaa

SEQ ID NO: 218125 - DNA, 25 bp, probe
gaaatagcttatttgaataaactac

SEQ ID NO: 218126 - DNA, 25 bp, probe
gaaattgttacatgaatggcagtca

SEQ ID NO: 218127 - DNA, 25 bp, probe
gaaattgttacatgaatggcagtca

SEQ ID NO: 218128 - DNA, 25 bp, probe
gaaatctgtaattctattgtgccta

SEQ ID NO: 218129 - DNA, 25 bp, probe
gaaatcaatcacttctattgtgcag

SEQ ID NO: 218130 - DNA, 25 bp, probe
gaaatcaatcacttctattgtgcag

SEQ ID NO: 218131 - DNA, 25 bp, probe
gacaatatgtgagtgccttttgcag

SEQ ID NO: 218132 - DNA, 25 bp, probe
gacacaacggcaacattatgctgga

SEQ ID NO: 218133 - DNA, 25 bp, probe
gacacaacggcaacattatgctgga

SEQ ID NO: 218134 - DNA, 25 bp, probe
gacacaacggcaacattatgctgga

SEQ ID NO: 218135 - DNA, 25 bp, probe
gacaaactggcatccttgagctgac

SEQ ID NO: 218136 - DNA, 25 bp, probe
gacaggccagccactgtggcctgga

SEQ ID NO: 218137 - DNA, 25 bp, probe
gacaggccagccactgtggcctgga

SEQ ID NO: 218138 - DNA, 25 bp, probe
gacaaggagccaccagattggatgg

SEQ ID NO: 218139 - DNA, 25 bp, probe
gacaatggagacctgattcgggaga

SEQ ID NO: 218140 - DNA, 25 bp, probe
gacaagcatgggtgtgtccgggacc

SEQ ID NO: 218141 - DNA, 25 bp, probe
gaaatctgtgtgtgtgcgggtgtgt

SEQ ID NO: 218142 - DNA, 25 bp, probe
gaaattgctgatcatgggcggcagg

SEQ ID NO: 218143 - DNA, 25 bp, probe
gacaattgcatttatggcacctgag

SEQ ID NO: 218144 - DNA, 25 bp, probe
gaaatagaacactgcctctgagttt

SEQ ID NO: 218145 - DNA, 25 bp, probe
gaaatatgaaggtggccgtgaatta

SEQ ID NO: 218146 - DNA, 25 bp, probe
gaaatcatcaagcaagggtgtgagt

SEQ ID NO: 218147 - DNA, 25 bp, probe
gaaataaaataacgtgcttcatttg

SEQ ID NO: 218148 - DNA, 25 bp, probe
gaaataataaaccaccctgttctgt

SEQ ID NO: 218149 - DNA, 25 bp, probe
gaaataataaaccaccctgttctgt

SEQ ID NO: 218150 - DNA, 25 bp, probe
gaaatactcataagccacctctgta

SEQ ID NO: 218151 - DNA, 25 bp, probe
gacaactctctagggacacctgtac

SEQ ID NO: 218152 - DNA, 25 bp, probe
gacaagattcttggtgccaccattg

SEQ ID NO: 218153 - DNA, 25 bp, probe
gacaagatatctgctgctgtcctca

SEQ ID NO: 218154 - DNA, 25 bp, probe
gacaagatatctgctgctgtcctca

SEQ ID NO: 218155 - DNA, 25 bp, probe
gacaagcaatccgtgcactgcttca

SEQ ID NO: 218156 - DNA, 25 bp, probe
gacaagcaatccgtgcactgcttca

SEQ ID NO: 218157 - DNA, 25 bp, probe
gacaatgaccaaggactgctacacc

SEQ ID NO: 218158 - DNA, 25 bp, probe
gacaagatccgggccatgcagaagc

SEQ ID NO: 218159 - DNA, 25 bp, probe
gacacacacggagaagcagaaagaa

SEQ ID NO: 218160 - DNA, 25 bp, probe
gataaattgggtcacagaggcagaa

SEQ ID NO: 218161 - DNA, 25 bp, probe
gacacaattgggacaaccaccaccc

SEQ ID NO: 218162 - DNA, 25 bp, probe
gacaaagagggtgacccgcacagcc

SEQ ID NO: 218163 - DNA, 25 bp, probe
gacaaagagggtgacccgcacagcc

SEQ ID NO: 218164 - DNA, 25 bp, probe
gacaaggagggtcacctggtgtgcc

SEQ ID NO: 218165 - DNA, 25 bp, probe
gacaaggagggtcacctggtgtgcc

SEQ ID NO: 218166 - DNA, 25 bp, probe
gacacctaggttcacggtctgagta

SEQ ID NO: 218167 - DNA, 25 bp, probe
gacaccaaggttcttcagctattga

SEQ ID NO: 218168 - DNA, 25 bp, probe
gaaatcaggtttctactgctaggca

SEQ ID NO: 218169 - DNA, 25 bp, probe
gaaatcatggtacagtcactgccca

SEQ ID NO: 218170 - DNA, 25 bp, probe
gaaatcacggaccagtacatctaca

SEQ ID NO: 218171 - DNA, 25 bp, probe
gaaatcacggaccagtacatctaca

SEQ ID NO: 218172 - DNA, 25 bp, probe
gacaatcctggaaatctgttctcca

SEQ ID NO: 218173 - DNA, 25 bp, probe
gacaaacttgcatatgttgattaac

SEQ ID NO: 218174 - DNA, 25 bp, probe
gacaaggccacatagagtgtttgca

SEQ ID NO: 218175 - DNA, 25 bp, probe
gacaaggccacatagagtgtttgca

SEQ ID NO: 218176 - DNA, 25 bp, probe
gacaaagcagaatgaggctcttgta

SEQ ID NO: 218177 - DNA, 25 bp, probe
gacacactggaagcgagccttcaat

SEQ ID NO: 218178 - DNA, 25 bp, probe
gacacactggaagcgagccttcaat

SEQ ID NO: 218179 - DNA, 25 bp, probe
gactacttggaactaggctcttatg

SEQ ID NO: 218180 - DNA, 25 bp, probe
gacttcctaacactaggtacaagtt

SEQ ID NO: 218181 - DNA, 25 bp, probe
gacttcctaacactaggtacaagtt

SEQ ID NO: 218182 - DNA, 25 bp, probe
gactttgtaacagagggagccaggg

SEQ ID NO: 218183 - DNA, 25 bp, probe
gactcctaaaactaccaatcctggg

SEQ ID NO: 218184 - DNA, 25 bp, probe
gacatcaataagcaaactcaaagtg

SEQ ID NO: 218185 - DNA, 25 bp, probe
gacatcaataagcaaactcaaagtg

SEQ ID NO: 218186 - DNA, 25 bp, probe
gacacaaaactacaggtcaagtggt

SEQ ID NO: 218187 - DNA, 25 bp, probe
gacaaaaactgccctagccaggtac

SEQ ID NO: 218188 - DNA, 25 bp, probe
gacaaaaactgccctagccaggtac

SEQ ID NO: 218189 - DNA, 25 bp, probe
gaaattacaggccattacaatggta

SEQ ID NO: 218190 - DNA, 25 bp, probe
gacaatctacttcaggaaatgctat

SEQ ID NO: 218191 - DNA, 25 bp, probe
gacaatctacttcaggaaatgctat

SEQ ID NO: 218192 - DNA, 25 bp, probe
gacaattactggggacaattgcatt

SEQ ID NO: 218193 - DNA, 25 bp, probe
gaaattcctgaaggtccacgcagaa

SEQ ID NO: 218194 - DNA, 25 bp, probe
gaaattcctgaaggtccacgcagaa

SEQ ID NO: 218195 - DNA, 25 bp, probe
gacactttggatgttccaacgcaag

SEQ ID NO: 218196 - DNA, 25 bp, probe
gacacgtgggtcttttcaaacatag

SEQ ID NO: 218197 - DNA, 25 bp, probe
gacactggaggtttttaacagaacg

SEQ ID NO: 218198 - DNA, 25 bp, probe
gacaaggaggtggctgtaaagaagc

SEQ ID NO: 218199 - DNA, 25 bp, probe
gacaagcggatctctgtagacgaag

SEQ ID NO: 218200 - DNA, 25 bp, probe
gacaagctggataaccacccaaagt

SEQ ID NO: 218201 - DNA, 25 bp, probe
gacaagtggcgttcagccacccgag

SEQ ID NO: 218202 - DNA, 25 bp, probe
gacacgggccagatgcaccggcaga

SEQ ID NO: 218203 - DNA, 25 bp, probe
gacaaggacctgtacatcctctgga

SEQ ID NO: 218204 - DNA, 25 bp, probe
gacaagttcacagcctggatctggg

SEQ ID NO: 218205 - DNA, 25 bp, probe
gacaagtgtcacagcctggttggaa

SEQ ID NO: 218206 - DNA, 25 bp, probe
gacaggagtcactgtaggttcaaag

SEQ ID NO: 218207 - DNA, 25 bp, probe
gacaggcagaactgggtcttcaaga

SEQ ID NO: 218208 - DNA, 25 bp, probe
gacaacagctactggttcttgagca

SEQ ID NO: 218209 - DNA, 25 bp, probe
gtacaatctcacaggggtctactcc

SEQ ID NO: 218210 - DNA, 25 bp, probe
gactcacagtacagtgggttatttc

SEQ ID NO: 218211 - DNA, 25 bp, probe
gacccgtgtcacatcgtgaatattt

SEQ ID NO: 218212 - DNA, 25 bp, probe
gacccggccatcggggagttcattt

SEQ ID NO: 218213 - DNA, 25 bp, probe
gacacctgggcaaagacgaattcat

SEQ ID NO: 218214 - DNA, 25 bp, probe
gacacctgtggaatacccaatggaa

SEQ ID NO: 218215 - DNA, 25 bp, probe
gacacgattctttaccaaattggat

SEQ ID NO: 218216 - DNA, 25 bp, probe
gacaatggcctttaccattatgctg

SEQ ID NO: 218217 - DNA, 25 bp, probe
gacaatggactcaaccctgtatggc

SEQ ID NO: 218218 - DNA, 25 bp, probe
gaaattaggctaccaattatgaatt

SEQ ID NO: 218219 - DNA, 25 bp, probe
gaaatttgtagcatcaactagaata

SEQ ID NO: 218220 - DNA, 25 bp, probe
gacaagttgtacccagagtatgtga

SEQ ID NO: 218221 - DNA, 25 bp, probe
gagcaagctactgaccgatgtttaa

SEQ ID NO: 218222 - DNA, 25 bp, probe
gagcaagctactgaccgatgtttaa

SEQ ID NO: 218223 - DNA, 25 bp, probe
gacaaccccgactgggtgtcagagc

SEQ ID NO: 218224 - DNA, 25 bp, probe
gacacccaccatgccaggggtggca

SEQ ID NO: 218225 - DNA, 25 bp, probe
gacacccaccatgccaggggtggca

SEQ ID NO: 218226 - DNA, 25 bp, probe
gacatcccctactgaggaggggacc

SEQ ID NO: 218227 - DNA, 25 bp, probe
gacaccgacgagtgggagcgggacc

SEQ ID NO: 218228 - DNA, 25 bp, probe
gacaatgcggccaggggacgagcgc

SEQ ID NO: 218229 - DNA, 25 bp, probe
gacactcgtgccggaggcaaaggtc

SEQ ID NO: 218230 - DNA, 25 bp, probe
gacaatcgaccgaaagcaagaggtg

SEQ ID NO: 218231 - DNA, 25 bp, probe
gacacacccctaagtacaaggtggt

SEQ ID NO: 218232 - DNA, 25 bp, probe
gacacacccctaagtacaaggtggt

SEQ ID NO: 218233 - DNA, 25 bp, probe
gacaccctcttgggtccaatgaggt

SEQ ID NO: 218234 - DNA, 25 bp, probe
gacaacttcttccaggtgcaggagg

SEQ ID NO: 218235 - DNA, 25 bp, probe
gacatacggcttgtggtctgagggg

SEQ ID NO: 218236 - DNA, 25 bp, probe
gaaattgccttgtagatgtggaggg

SEQ ID NO: 218237 - DNA, 25 bp, probe
gacaatgctgctacaaaatctgggg

SEQ ID NO: 218238 - DNA, 25 bp, probe
gacaatgctgctacaaaatctgggg

SEQ ID NO: 218239 - DNA, 25 bp, probe
gacaagcgcttcatctagggtgggc

SEQ ID NO: 218240 - DNA, 25 bp, probe
gacaagcgcttcatctagggtgggc

SEQ ID NO: 218241 - DNA, 25 bp, probe
gacaagagcttgaattcggagtgat

SEQ ID NO: 218242 - DNA, 25 bp, probe
gacaagagcttgaattcggagtgat

SEQ ID NO: 218243 - DNA, 25 bp, probe
gacaaaatcagtttaggactattaa

SEQ ID NO: 218244 - DNA, 25 bp, probe
gacaaaacattcaagaagacactat

SEQ ID NO: 218245 - DNA, 25 bp, probe
gacaaaacattcaagaagacactat

SEQ ID NO: 218246 - DNA, 25 bp, probe
gacaagattattgatggcgccccat

SEQ ID NO: 218247 - DNA, 25 bp, probe
gacaatattttcaatggccacgcga

SEQ ID NO: 218248 - DNA, 25 bp, probe
gacaactttatcagccagactgccg

SEQ ID NO: 218249 - DNA, 25 bp, probe
gacaactttatcagccagactgccg

SEQ ID NO: 218250 - DNA, 25 bp, probe
gacaatcatttttcttaaggcctgg

SEQ ID NO: 218251 - DNA, 25 bp, probe
gaaatatttgttttactcagcaggt

SEQ ID NO: 218252 - DNA, 25 bp, probe
gaaattttggtactttcacagcacc

SEQ ID NO: 218253 - DNA, 25 bp, probe
gaaattttggtactttcacagcacc

SEQ ID NO: 218254 - DNA, 25 bp, probe
gaaattgtctttactaaacagattt

SEQ ID NO: 218255 - DNA, 25 bp, probe
gacacattgtctctttaaaatgctg

SEQ ID NO: 218256 - DNA, 25 bp, probe
gacacaagcacaatttataccaact

SEQ ID NO: 218257 - DNA, 25 bp, probe
gacacagtgcttacttaccttacta

SEQ ID NO: 218258 - DNA, 25 bp, probe
gaaattgcttacaaggcgcttaaga

SEQ ID NO: 218259 - DNA, 25 bp, probe
gaaatttctgaaaccgcttattgac

SEQ ID NO: 218260 - DNA, 25 bp, probe
gaaatttctgaaaccgcttattgac

SEQ ID NO: 218261 - DNA, 25 bp, probe
gaaatttctggattccagcttgtct

SEQ ID NO: 218262 - DNA, 25 bp, probe
gaaattgctctgcatttgacttaat

SEQ ID NO: 218263 - DNA, 25 bp, probe
gaaattgctcgtatggccctagcat

SEQ ID NO: 218264 - DNA, 25 bp, probe
gaaattctcgtcacactacatagac

SEQ ID NO: 218265 - DNA, 25 bp, probe
gaaattctgttggacactcacttcc

SEQ ID NO: 218266 - DNA, 25 bp, probe
gacaatcatgttgcagcaattcact

SEQ ID NO: 218267 - DNA, 25 bp, probe
gacacaagctgtgagcaatctgcag

SEQ ID NO: 218268 - DNA, 25 bp, probe
gacactatgtcacatgcacatgggt

SEQ ID NO: 218269 - DNA, 25 bp, probe
gaaatattctgttgacatcgctgga

SEQ ID NO: 218270 - DNA, 25 bp, probe
gaaatatggcaatacatccatgatg

SEQ ID NO: 218271 - DNA, 25 bp, probe
gacaatttgccatagcagtgctagg

SEQ ID NO: 218272 - DNA, 25 bp, probe
gaaattgctctctgatgaggcaaga

SEQ ID NO: 218273 - DNA, 25 bp, probe
gaaatattgtgactctgggaatgac

SEQ ID NO: 218274 - DNA, 25 bp, probe
gaaatatgtggactgctctagcaaa

SEQ ID NO: 218275 - DNA, 25 bp, probe
gacaagcaataactctctacaggaa

SEQ ID NO: 218276 - DNA, 25 bp, probe
gacaaggttaccaagtgcggaattg

SEQ ID NO: 218277 - DNA, 25 bp, probe
gacagaaggattgcaagggaacact

SEQ ID NO: 218278 - DNA, 25 bp, probe
gacaaaagcagcacaaggaatttcc

SEQ ID NO: 218279 - DNA, 25 bp, probe
gacaagagagacacctccaacttcg

SEQ ID NO: 218280 - DNA, 25 bp, probe
gacacagagtggagccctcagtttt

SEQ ID NO: 218281 - DNA, 25 bp, probe
gacaatgagaggcggccgcatttcc

SEQ ID NO: 218282 - DNA, 25 bp, probe
gacaatgagaggcggccgcatttcc

SEQ ID NO: 218283 - DNA, 25 bp, probe
gacactggggtagggtcataccaca

SEQ ID NO: 218284 - DNA, 25 bp, probe
gacaaggcggccatggatttgccct

SEQ ID NO: 218285 - DNA, 25 bp, probe
gacaaggggcacaggctctgatgca

SEQ ID NO: 218286 - DNA, 25 bp, probe
gacaaggggcacaggctctgatgca

SEQ ID NO: 218287 - DNA, 25 bp, probe
gacaagaaggcccgggccatgttta

SEQ ID NO: 218288 - DNA, 25 bp, probe
gacaaaagtaagcgagacccttcag

SEQ ID NO: 218289 - DNA, 25 bp, probe
gacaagtaggtaagaggacgccttc

SEQ ID NO: 218290 - DNA, 25 bp, probe
gacaattaagtcatggtacgtttcc

SEQ ID NO: 218291 - DNA, 25 bp, probe
gaaattaatgccttggtacaattga

SEQ ID NO: 218292 - DNA, 25 bp, probe
gaaattcagacttgatttacaattt

SEQ ID NO: 218293 - DNA, 25 bp, probe
gacaatctcgccatctttaatttct

SEQ ID NO: 218294 - DNA, 25 bp, probe
gaaattccactgattttatatctct

SEQ ID NO: 218295 - DNA, 25 bp, probe
gacaatgactcaccttttggatttt

SEQ ID NO: 218296 - DNA, 25 bp, probe
gacacatacagccctattctagagg

SEQ ID NO: 218297 - DNA, 25 bp, probe
gacagcatctagccacgatggaaag

SEQ ID NO: 218298 - DNA, 25 bp, probe
gacaccttcagcaatgaggtcatga

SEQ ID NO: 218299 - DNA, 25 bp, probe
gaaattctggcttgggatgctgatg

SEQ ID NO: 218300 - DNA, 25 bp, probe
gaaattcatagtcagtagcagagaa

SEQ ID NO: 218301 - DNA, 25 bp, probe
gacaatcctatttagcatatgcaaa

SEQ ID NO: 218302 - DNA, 25 bp, probe
gacaaactgagttagcatgatgttg

SEQ ID NO: 218303 - DNA, 25 bp, probe
gacagatgtcagactaatcaggctt

SEQ ID NO: 218304 - DNA, 25 bp, probe
gacagatgtcagactaatcaggctt

SEQ ID NO: 218305 - DNA, 25 bp, probe
gacacagtctgggatctcaacatgt

SEQ ID NO: 218306 - DNA, 25 bp, probe
gacaggtgcgggaccagcagaattt

SEQ ID NO: 218307 - DNA, 25 bp, probe
gacacggggtccagagtgagtattt

SEQ ID NO: 218308 - DNA, 25 bp, probe
gacacggggtccagagtgagtattt

SEQ ID NO: 218309 - DNA, 25 bp, probe
gacaagatgggacacgtgggattta

SEQ ID NO: 218310 - DNA, 25 bp, probe
gacaacagggtttaataagatttga

SEQ ID NO: 218311 - DNA, 25 bp, probe
gacaaaggtctattgaatttatttg

SEQ ID NO: 218312 - DNA, 25 bp, probe
gacaaaagtcacaaaatgctaaggt

SEQ ID NO: 218313 - DNA, 25 bp, probe
gacaaacctctcagcagcatcaaag

SEQ ID NO: 218314 - DNA, 25 bp, probe
gacaaacctctcagcagcatcaaag

SEQ ID NO: 218315 - DNA, 25 bp, probe
gaaattctcccaggagcaagaggag

SEQ ID NO: 218316 - DNA, 25 bp, probe
gacacatttcccttcgaaatgaggg

SEQ ID NO: 218317 - DNA, 25 bp, probe
gacactttcacttttgcagattggg

SEQ ID NO: 218318 - DNA, 25 bp, probe
gaaatttttgtgaagcacagtgagt

SEQ ID NO: 218319 - DNA, 25 bp, probe
gacagttttggtaactaggatccta

SEQ ID NO: 218320 - DNA, 25 bp, probe
gacaactttggtatcgtggaaggac

SEQ ID NO: 218321 - DNA, 25 bp, probe
gacaccctgggtgctctgggtgggt

SEQ ID NO: 218322 - DNA, 25 bp, probe
gacaccaccgagatacgggctgtga

SEQ ID NO: 218323 - DNA, 25 bp, probe
gacaccatcctggctaacacggtga

SEQ ID NO: 218324 - DNA, 25 bp, probe
gacaatcacgctgggaataggtttc

SEQ ID NO: 218325 - DNA, 25 bp, probe
gacaatccctcaggactagggacag

SEQ ID NO: 218326 - DNA, 25 bp, probe
gacatggtcccaggagcatagaaac

SEQ ID NO: 218327 - DNA, 25 bp, probe
gacaccatacgctggcatcgaaaac

SEQ ID NO: 218328 - DNA, 25 bp, probe
gacaccaatggctggcagcttttca

SEQ ID NO: 218329 - DNA, 25 bp, probe
gacaccaagacctttcatttgtact

SEQ ID NO: 218330 - DNA, 25 bp, probe
gacaacggccacattattctgaatt

SEQ ID NO: 218331 - DNA, 25 bp, probe
gacaaaggcacccctgatttttgtg

SEQ ID NO: 218332 - DNA, 25 bp, probe
gacacaaggacatcgctgttcttct

SEQ ID NO: 218333 - DNA, 25 bp, probe
gacaagaggaaccagtgccgctact

SEQ ID NO: 218334 - DNA, 25 bp, probe
gacaatgggaaggctcccagtgcgc

SEQ ID NO: 218335 - DNA, 25 bp, probe
gacaatacgaagaccctctgagatg

SEQ ID NO: 218336 - DNA, 25 bp, probe
gacaacatcgttactacatccagat

SEQ ID NO: 218337 - DNA, 25 bp, probe
gacaagggtacactgacttcagcta

SEQ ID NO: 218338 - DNA, 25 bp, probe
gacaagtggtcaaggagctgtggcc

SEQ ID NO: 218339 - DNA, 25 bp, probe
gacaggaatgtaaggattggcaact

SEQ ID NO: 218340 - DNA, 25 bp, probe
gacaggaatgtaaggattggcaact

SEQ ID NO: 218341 - DNA, 25 bp, probe
gacaaagttcgggtcatggcagact

SEQ ID NO: 218342 - DNA, 25 bp, probe
gacaaacttctgcgatacgaccatc

SEQ ID NO: 218343 - DNA, 25 bp, probe
gacaaacttctgcgatacgaccatc

SEQ ID NO: 218344 - DNA, 25 bp, probe
gacagaagcattccctataaggcct

SEQ ID NO: 218345 - DNA, 25 bp, probe
gacaaaagttccatatagacaccaa

SEQ ID NO: 218346 - DNA, 25 bp, probe
gacaccaggtttgagaagccacgca

SEQ ID NO: 218347 - DNA, 25 bp, probe
gacaagggttgtgtgaagacagcgg

SEQ ID NO: 218348 - DNA, 25 bp, probe
gacaagggttgtgtgaagacagcgg

SEQ ID NO: 218349 - DNA, 25 bp, probe
gacaagtgactgtatctgtgtagac

SEQ ID NO: 218350 - DNA, 25 bp, probe
gacagaggcagagattggagtgacg

SEQ ID NO: 218351 - DNA, 25 bp, probe
gacaagatgcaatacctgcaggtcc

SEQ ID NO: 218352 - DNA, 25 bp, probe
gacaagatgcaatacctgcaggtcc

SEQ ID NO: 218353 - DNA, 25 bp, probe
gacaagctcaaagcactgaaacagc

SEQ ID NO: 218354 - DNA, 25 bp, probe
gacaagctcatatgtggttaccatg

SEQ ID NO: 218355 - DNA, 25 bp, probe
gacacgcactgttgatttgtaccaa

SEQ ID NO: 218356 - DNA, 25 bp, probe
gacacgcatgatcctcatcgtggcc

SEQ ID NO: 218357 - DNA, 25 bp, probe
gacatccagtaccacggcgtggagg

SEQ ID NO: 218358 - DNA, 25 bp, probe
gacagccatgcctccgaaagagggc

SEQ ID NO: 218359 - DNA, 25 bp, probe
gacagcctcccttcgatggggagga

SEQ ID NO: 218360 - DNA, 25 bp, probe
gacactgagcccatcgaggaggagc

SEQ ID NO: 218361 - DNA, 25 bp, probe
gacacttgatccacgcagcgtggca

SEQ ID NO: 218362 - DNA, 25 bp, probe
gacaacatgaccatggaagctgaga

SEQ ID NO: 218363 - DNA, 25 bp, probe
gacaagcagcacattctcaagagca

SEQ ID NO: 218364 - DNA, 25 bp, probe
gacaagcagcacattctcaagagca

SEQ ID NO: 218365 - DNA, 25 bp, probe
gacaaggcatttacacggagaacga

SEQ ID NO: 218366 - DNA, 25 bp, probe
gacagggcatccccaagcagaaagg

SEQ ID NO: 218367 - DNA, 25 bp, probe
gagagggttcggcagggcaaagtct

SEQ ID NO: 218368 - DNA, 25 bp, probe
gagagggttcggcagggcaaagtct

SEQ ID NO: 218369 - DNA, 25 bp, probe
gagaagttttcagaggatgccaaat

SEQ ID NO: 218370 - DNA, 25 bp, probe
gacacagtttcttctctggagtaaa

SEQ ID NO: 218371 - DNA, 25 bp, probe
gacaaggattgggtcccacataaag

SEQ ID NO: 218372 - DNA, 25 bp, probe
gacaaaactggccccatcaatcaaa

SEQ ID NO: 218373 - DNA, 25 bp, probe
gacaaatactggggtgtcctcaaga

SEQ ID NO: 218374 - DNA, 25 bp, probe
gacaaatccacgggcgggtctggaa

SEQ ID NO: 218375 - DNA, 25 bp, probe
gacaaatccacgggcgggtctggaa

SEQ ID NO: 218376 - DNA, 25 bp, probe
gacatttccataaatggggtcgaga

SEQ ID NO: 218377 - DNA, 25 bp, probe
gacttactgaacatggggcaccaac

SEQ ID NO: 218378 - DNA, 25 bp, probe
gacactacaaacatggggagccata

SEQ ID NO: 218379 - DNA, 25 bp, probe
gacagctctgcatactcattaggat

SEQ ID NO: 218380 - DNA, 25 bp, probe
gacaagtcaatattctgtaggatgg

SEQ ID NO: 218381 - DNA, 25 bp, probe
gacaaacaattgtagaagtgaggac

SEQ ID NO: 218382 - DNA, 25 bp, probe
gacagactgatgtgtatacgtagga

SEQ ID NO: 218383 - DNA, 25 bp, probe
gacacactgatacttcatgggaagg

SEQ ID NO: 218384 - DNA, 25 bp, probe
gacaacatgataggtcctgatgggg

SEQ ID NO: 218385 - DNA, 25 bp, probe
gacaacatgataggtcctgatgggg

SEQ ID NO: 218386 - DNA, 25 bp, probe
gacaagctgatggtgcacctggtgg

SEQ ID NO: 218387 - DNA, 25 bp, probe
gacaagctgatggtgcacctggtgg

SEQ ID NO: 218388 - DNA, 25 bp, probe
gacaatgctggcgccatgatgagtg

SEQ ID NO: 218389 - DNA, 25 bp, probe
gacaatgggcagagctgtaatgtta

SEQ ID NO: 218390 - DNA, 25 bp, probe
gaaattgctcgacgatgttccattg

SEQ ID NO: 218391 - DNA, 25 bp, probe
gaaattgctcgacgatgttccattg

SEQ ID NO: 218392 - DNA, 25 bp, probe
gacaagactcgcagattttcttggg

SEQ ID NO: 218393 - DNA, 25 bp, probe
gacacgtcaccagactttcaaggag

SEQ ID NO: 218394 - DNA, 25 bp, probe
gacacaatcctagtcagctttgaac

SEQ ID NO: 218395 - DNA, 25 bp, probe
gacaaatcccggctgaatgagacca

SEQ ID NO: 218396 - DNA, 25 bp, probe
gacaactccagggtctgaagggact

SEQ ID NO: 218397 - DNA, 25 bp, probe
gacaacttcagtgggcatcgagatg

SEQ ID NO: 218398 - DNA, 25 bp, probe
gacacagtctagaggtcctgatggg

SEQ ID NO: 218399 - DNA, 25 bp, probe
gacaaagtgatgaccgtccagaggg

SEQ ID NO: 218400 - DNA, 25 bp, probe
gacaacgtgatgctggattccgagg

SEQ ID NO: 218401 - DNA, 25 bp, probe
gatcacctggtggaggtaccgttgg

SEQ ID NO: 218402 - DNA, 25 bp, probe
gacacttgtgggggtgattctgggg

SEQ ID NO: 218403 - DNA, 25 bp, probe
gacacttctggggatggtacagggt

SEQ ID NO: 218404 - DNA, 25 bp, probe
gacaatttggggtagtgaagtatgg

SEQ ID NO: 218405 - DNA, 25 bp, probe
gacaatttgaagctatggcaagggc

SEQ ID NO: 218406 - DNA, 25 bp, probe
gacactttctggctagtgggcagac

SEQ ID NO: 218407 - DNA, 25 bp, probe
gacaatgaacggccttgctgggggc

SEQ ID NO: 218408 - DNA, 25 bp, probe
gacaagcagaggggttgctggaggt

SEQ ID NO: 218409 - DNA, 25 bp, probe
gacaagccaggctttggtggcagca

SEQ ID NO: 218410 - DNA, 25 bp, probe
gacacccaggccatgaaggagatgc

SEQ ID NO: 218411 - DNA, 25 bp, probe
gacacccgcatgtgtaacaacagcc

SEQ ID NO: 218412 - DNA, 25 bp, probe
gacaacactgctgggttttacatcc

SEQ ID NO: 218413 - DNA, 25 bp, probe
gacaatactcttgtgttacatcatc

SEQ ID NO: 218414 - DNA, 25 bp, probe
gacaaatttcatatgtgtagcaata

SEQ ID NO: 218415 - DNA, 25 bp, probe
gacaattgtaatacggtcacagttg

SEQ ID NO: 218416 - DNA, 25 bp, probe
gacaatcttttgaatagtgcaagtt

SEQ ID NO: 218417 - DNA, 25 bp, probe
gacaattttatattgatgtgtgttt

SEQ ID NO: 218418 - DNA, 25 bp, probe
gaaattgtaaatcctgtgtttcatt

SEQ ID NO: 218419 - DNA, 25 bp, probe
gaaattgtctagtccttcgttatgt

SEQ ID NO: 218420 - DNA, 25 bp, probe
gaaattgttagtattcatttatcaa

SEQ ID NO: 218421 - DNA, 25 bp, probe
gacaatggtctggggtattttgaaa

SEQ ID NO: 218422 - DNA, 25 bp, probe
gacaatggaaaggctgttatatgga

SEQ ID NO: 218423 - DNA, 25 bp, probe
gacaatgtaacaggtcttattggaa

SEQ ID NO: 218424 - DNA, 25 bp, probe
gacaagtgaccaagatgctgtttgt

SEQ ID NO: 218425 - DNA, 25 bp, probe
gacaacatgaaccagatctacggtt

SEQ ID NO: 218426 - DNA, 25 bp, probe
gacaaactaccaatttctcgttcct

SEQ ID NO: 218427 - DNA, 25 bp, probe
gacaaactatacttttaggtcccat

SEQ ID NO: 218428 - DNA, 25 bp, probe
gacacagatcctaactttgggtccc

SEQ ID NO: 218429 - DNA, 25 bp, probe
gacaaattcattacttctggttaca

SEQ ID NO: 218430 - DNA, 25 bp, probe
gacagcaatgctgtttcactggtta

SEQ ID NO: 218431 - DNA, 25 bp, probe
gacaccagcagtgtctccaggacat

SEQ ID NO: 218432 - DNA, 25 bp, probe
gacagcaagataaccccaagacagt

SEQ ID NO: 218433 - DNA, 25 bp, probe
gacagaaattggccccaaacgtgac

SEQ ID NO: 218434 - DNA, 25 bp, probe
gacagaaacggagtctcggaagtgt

SEQ ID NO: 218435 - DNA, 25 bp, probe
gacagaaacggagtctcggaagtgt

SEQ ID NO: 218436 - DNA, 25 bp, probe
gacaaccactggtctgtagggattt

SEQ ID NO: 218437 - DNA, 25 bp, probe
gacacacaaatttggttgggagttg

SEQ ID NO: 218438 - DNA, 25 bp, probe
gacagcaccaaatggtcaggccaga

SEQ ID NO: 218439 - DNA, 25 bp, probe
gacaagggcatgaggtcagaccagg

SEQ ID NO: 218440 - DNA, 25 bp, probe
gacaatggtgctccaggggcactgc

SEQ ID NO: 218441 - DNA, 25 bp, probe
gacaatcttgatcagcagagaaacc

SEQ ID NO: 218442 - DNA, 25 bp, probe
gacaacagtctccacagtgagagca

SEQ ID NO: 218443 - DNA, 25 bp, probe
gacaagatgattcgcaagcctgata

SEQ ID NO: 218444 - DNA, 25 bp, probe
gacaaggctgtgtccatcagctaca

SEQ ID NO: 218445 - DNA, 25 bp, probe
gacacagagccttctctagaacagg

SEQ ID NO: 218446 - DNA, 25 bp, probe
gacacagagccttctctagaacagg

SEQ ID NO: 218447 - DNA, 25 bp, probe
gacacaacatcatcctgagtgccgg

SEQ ID NO: 218448 - DNA, 25 bp, probe
gacacaacatcatcctgagtgccgg

SEQ ID NO: 218449 - DNA, 25 bp, probe
gacacaaatatcacaggcttcaggg

SEQ ID NO: 218450 - DNA, 25 bp, probe
gacagcacaaatacgaacttcaaag

SEQ ID NO: 218451 - DNA, 25 bp, probe
gacagcacaaatacgaacttcaaag

SEQ ID NO: 218452 - DNA, 25 bp, probe
gacaaagaggtgatcttgagctcag

SEQ ID NO: 218453 - DNA, 25 bp, probe
gacaaagaattggatctggatcatt

SEQ ID NO: 218454 - DNA, 25 bp, probe
gacaacgtgatgaagatcgcagact

SEQ ID NO: 218455 - DNA, 25 bp, probe
gacacaccaagcagattcgactgca

SEQ ID NO: 218456 - DNA, 25 bp, probe
gacaacacaatcaaagctcaataga

SEQ ID NO: 218457 - DNA, 25 bp, probe
gacaagcacaggaaacccatcagtt

SEQ ID NO: 218458 - DNA, 25 bp, probe
gacaaccagggaacccatttctcta

SEQ ID NO: 218459 - DNA, 25 bp, probe
gacaaccagcggtactattttaata

SEQ ID NO: 218460 - DNA, 25 bp, probe
gacacccagcgttacataatcatta

SEQ ID NO: 218461 - DNA, 25 bp, probe
gacacccagcgttacataatcatta

SEQ ID NO: 218462 - DNA, 25 bp, probe
gacagcttccgtgaatcaacatttc

SEQ ID NO: 218463 - DNA, 25 bp, probe
gacagcattcggcgtatacctaagg

SEQ ID NO: 218464 - DNA, 25 bp, probe
gacacatccggatttcagacctcgg

SEQ ID NO: 218465 - DNA, 25 bp, probe
gacagtctccagggtcagtccctgg

SEQ ID NO: 218466 - DNA, 25 bp, probe
gacagtctccagggtcagtccctgg

SEQ ID NO: 218467 - DNA, 25 bp, probe
gacagtctccagggtcagtccctgg

SEQ ID NO: 218468 - DNA, 25 bp, probe
gacaatgacgaggaccgtctcggtg

SEQ ID NO: 218469 - DNA, 25 bp, probe
gacaagcacagggatctcgttctcc

SEQ ID NO: 218470 - DNA, 25 bp, probe
gacaagcacaaggcatgctgactac

SEQ ID NO: 218471 - DNA, 25 bp, probe
gacaagcagacatgcatgtgtgaca

SEQ ID NO: 218472 - DNA, 25 bp, probe
gacaatgcagtcagaagagactcgt

SEQ ID NO: 218473 - DNA, 25 bp, probe
gacaatgcatggggaagcacttcct

SEQ ID NO: 218474 - DNA, 25 bp, probe
gacaagcatgaggagaaccaccggc

SEQ ID NO: 218475 - DNA, 25 bp, probe
gacaaggaggagttccaccatgagc

SEQ ID NO: 218476 - DNA, 25 bp, probe
gacaaggatatgatgtccgctctga

SEQ ID NO: 218477 - DNA, 25 bp, probe
gacaaggtcagcatcatttgctctc

SEQ ID NO: 218478 - DNA, 25 bp, probe
gacaatggccacatcattctcaact

SEQ ID NO: 218479 - DNA, 25 bp, probe
gacaagtgtgccatttgaccatctc

SEQ ID NO: 218480 - DNA, 25 bp, probe
gacaatgctgctttggttaatctct

SEQ ID NO: 218481 - DNA, 25 bp, probe
gacaatgctgctttggttaatctct

SEQ ID NO: 218482 - DNA, 25 bp, probe
gacatcagcgtagtgttttgacctt

SEQ ID NO: 218483 - DNA, 25 bp, probe
gaccagggcaagttcatttccctgt

SEQ ID NO: 218484 - DNA, 25 bp, probe
gacggaacacagctatttccctatg

SEQ ID NO: 218485 - DNA, 25 bp, probe
gacggaaaacctgtaccctgatgct

SEQ ID NO: 218486 - DNA, 25 bp, probe
gacggataaacacctggacccaatc

SEQ ID NO: 218487 - DNA, 25 bp, probe
gacggataaacacctggacccaatc

SEQ ID NO: 218488 - DNA, 25 bp, probe
gacagaaaaccagcatgtacccacc

SEQ ID NO: 218489 - DNA, 25 bp, probe
gacagcaaagacaaccatgaagcca

SEQ ID NO: 218490 - DNA, 25 bp, probe
gacagcaaagacaaccatgaagcca

SEQ ID NO: 218491 - DNA, 25 bp, probe
gacactacatgatgactcaaggcca

SEQ ID NO: 218492 - DNA, 25 bp, probe
gacaaagctgggatcaaggataggg

SEQ ID NO: 218493 - DNA, 25 bp, probe
gacaaggtacgttttggatgatgag

SEQ ID NO: 218494 - DNA, 25 bp, probe
gacaaggtacgttttggatgatgag

SEQ ID NO: 218495 - DNA, 25 bp, probe
gacacatgggtggtatcctggcagt

SEQ ID NO: 218496 - DNA, 25 bp, probe
gacacagtgggggtgctctggagag

SEQ ID NO: 218497 - DNA, 25 bp, probe
gacacagtgggggtgctctggagag

SEQ ID NO: 218498 - DNA, 25 bp, probe
gacagttaagcgggttgggatcatc

SEQ ID NO: 218499 - DNA, 25 bp, probe
gacagactaagggcgcttgtcccat

SEQ ID NO: 218500 - DNA, 25 bp, probe
gacaaagaaggcagtatgtccaaag

SEQ ID NO: 218501 - DNA, 25 bp, probe
gacaaaataagctgtttgccacctc

SEQ ID NO: 218502 - DNA, 25 bp, probe
gacaaaatatcccgcattggcttcc

SEQ ID NO: 218503 - DNA, 25 bp, probe
gacaaaatatcccgcattggcttcc

SEQ ID NO: 218504 - DNA, 25 bp, probe
gacaaagactactacgtggtccgcg

SEQ ID NO: 218505 - DNA, 25 bp, probe
gacaacctctattactgggaccagg

SEQ ID NO: 218506 - DNA, 25 bp, probe
gacaagccttatggggagatgagca

SEQ ID NO: 218507 - DNA, 25 bp, probe
gacaacctgttgcaggagatgctgc

SEQ ID NO: 218508 - DNA, 25 bp, probe
gacagaagcttgtggggtgcatgga

SEQ ID NO: 218509 - DNA, 25 bp, probe
gacagaggcaagacgggggctgcgg

SEQ ID NO: 218510 - DNA, 25 bp, probe
gacaagtccagcatgaggagtcgac

SEQ ID NO: 218511 - DNA, 25 bp, probe
gacacagatacagtggcaggggccc

SEQ ID NO: 218512 - DNA, 25 bp, probe
gacacagatacagtggcaggggccc

SEQ ID NO: 218513 - DNA, 25 bp, probe
gacaaatcaagtcagaggttccatt

SEQ ID NO: 218514 - DNA, 25 bp, probe
gacaaatcaagtcagaggttccatt

SEQ ID NO: 218515 - DNA, 25 bp, probe
gacactctctaccaagagggtcttc

SEQ ID NO: 218516 - DNA, 25 bp, probe
gacatagcttaccagtagaccttta

SEQ ID NO: 218517 - DNA, 25 bp, probe
gacatagcttaccagtagaccttta

SEQ ID NO: 218518 - DNA, 25 bp, probe
gacaaggctacgctgacaatcagtt

SEQ ID NO: 218519 - DNA, 25 bp, probe
gacaagaatcctgggagcagtaatt

SEQ ID NO: 218520 - DNA, 25 bp, probe
gacaagagacgctggcgcaagatcc

SEQ ID NO: 218521 - DNA, 25 bp, probe
gacaaggacggcagcaaggtgacaa

SEQ ID NO: 218522 - DNA, 25 bp, probe
gacactggtccgagaagggacatgt

SEQ ID NO: 218523 - DNA, 25 bp, probe
gacacatcatgaccgtaaaggaaag

SEQ ID NO: 218524 - DNA, 25 bp, probe
gacacatcatgaccgtaaaggaaag

SEQ ID NO: 218525 - DNA, 25 bp, probe
gacagtgaggaccttagggcatgaa

SEQ ID NO: 218526 - DNA, 25 bp, probe
gacagagatccccttgcatgggaaa

SEQ ID NO: 218527 - DNA, 25 bp, probe
gacagagatccccttgcatgggaaa

SEQ ID NO: 218528 - DNA, 25 bp, probe
gacaagatccacctgatcaataata

SEQ ID NO: 218529 - DNA, 25 bp, probe
gacaagacagatttagcattatcaa

SEQ ID NO: 218530 - DNA, 25 bp, probe
gacacagccaattatacatcgtgac

SEQ ID NO: 218531 - DNA, 25 bp, probe
gacacagctgccagcaaacctgagg

SEQ ID NO: 218532 - DNA, 25 bp, probe
gacaggtccatgaaaaccaggggct

SEQ ID NO: 218533 - DNA, 25 bp, probe
gacaagttcttcacacgaggacagc

SEQ ID NO: 218534 - DNA, 25 bp, probe
gacaagttatgcctaatagcaggca

SEQ ID NO: 218535 - DNA, 25 bp, probe
gacaagatcttcatggacacgctgc

SEQ ID NO: 218536 - DNA, 25 bp, probe
gacaagatccagatggccatggtgc

SEQ ID NO: 218537 - DNA, 25 bp, probe
gacaagacaaggggcacaggctctg

SEQ ID NO: 218538 - DNA, 25 bp, probe
gacaaccagaggagatacagctgct

SEQ ID NO: 218539 - DNA, 25 bp, probe
gacaaccagaggagatacagctgct

SEQ ID NO: 218540 - DNA, 25 bp, probe
gacaactgcagcgaggagatgtacc

SEQ ID NO: 218541 - DNA, 25 bp, probe
gacaaccggcatgagatgctgaccc

SEQ ID NO: 218542 - DNA, 25 bp, probe
gacaacagagtattcagatcgccac

SEQ ID NO: 218543 - DNA, 25 bp, probe
gacaacaattgaatgcagtctccct

SEQ ID NO: 218544 - DNA, 25 bp, probe
gacaagagctgttatgctgtttcct

SEQ ID NO: 218545 - DNA, 25 bp, probe
gacaaagctcaggatgctggtgatg

SEQ ID NO: 218546 - DNA, 25 bp, probe
gacacaagccagggctgggacaatg

SEQ ID NO: 218547 - DNA, 25 bp, probe
gacaacccggacatgaacacagagg

SEQ ID NO: 218548 - DNA, 25 bp, probe
gacaaaccgaaggtgatcatcatcc

SEQ ID NO: 218549 - DNA, 25 bp, probe
gacaaaccaaagaagctatctgctg

SEQ ID NO: 218550 - DNA, 25 bp, probe
gacaaaccaaagaagctatctgctg

SEQ ID NO: 218551 - DNA, 25 bp, probe
gacagttcgcaaagaactactgggc

SEQ ID NO: 218552 - DNA, 25 bp, probe
gacagtcgccaagtggaccatcgat

SEQ ID NO: 218553 - DNA, 25 bp, probe
gacactccaaaggtctccagattct

SEQ ID NO: 218554 - DNA, 25 bp, probe
gacaactgcaaacttctctagaact

SEQ ID NO: 218555 - DNA, 25 bp, probe
gacaactgcaaacttctctagaact

SEQ ID NO: 218556 - DNA, 25 bp, probe
gacaagatccaacttatcaaaaata

SEQ ID NO: 218557 - DNA, 25 bp, probe
gacaaatcttatcaatgcctgaaag

SEQ ID NO: 218558 - DNA, 25 bp, probe
gacaactctgtctgcacaacaaaaa

SEQ ID NO: 218559 - DNA, 25 bp, probe
gacagacactcggccagaaaaaaga

SEQ ID NO: 218560 - DNA, 25 bp, probe
gacaccactcggcctgaagagtttg

SEQ ID NO: 218561 - DNA, 25 bp, probe
gacaccaacgtgctgacgcatgttc

SEQ ID NO: 218562 - DNA, 25 bp, probe
gacacacaatggatggacacattat

SEQ ID NO: 218563 - DNA, 25 bp, probe
gacacacaaatcaatgggacctgaa

SEQ ID NO: 218564 - DNA, 25 bp, probe
gacacaacaatgactgaggcagcct

SEQ ID NO: 218565 - DNA, 25 bp, probe
gacacaacatctgctgaggtgttca

SEQ ID NO: 218566 - DNA, 25 bp, probe
gacaacatcactctgaagtgttatc

SEQ ID NO: 218567 - DNA, 25 bp, probe
gacagacctctctgaagtgtctcct

SEQ ID NO: 218568 - DNA, 25 bp, probe
gacaacgtttcgacatttcaccggc

SEQ ID NO: 218569 - DNA, 25 bp, probe
gacaacagttacataattcactctg

SEQ ID NO: 218570 - DNA, 25 bp, probe
gacaacagttacataattcactctg

SEQ ID NO: 218571 - DNA, 25 bp, probe
gacaaccgtagaataattcgctatc

SEQ ID NO: 218572 - DNA, 25 bp, probe
gacagaaccttgttatttctcagac

SEQ ID NO: 218573 - DNA, 25 bp, probe
gacgtgtctgttatttcctaatcaa

SEQ ID NO: 218574 - DNA, 25 bp, probe
gacagttcaatctgattcctccagt

SEQ ID NO: 218575 - DNA, 25 bp, probe
gagcggtatgtctagattgaccctt

SEQ ID NO: 218576 - DNA, 25 bp, probe
gagcggtatgtctagattgaccctt

SEQ ID NO: 218577 - DNA, 25 bp, probe
gacagcgtatgtgatgactgtgacg

SEQ ID NO: 218578 - DNA, 25 bp, probe
gacatctgtattcaggttacccttc

SEQ ID NO: 218579 - DNA, 25 bp, probe
gacatttatcctttgtttcaccaac

SEQ ID NO: 218580 - DNA, 25 bp, probe
gacatttgtacgtgctggtcaacct

SEQ ID NO: 218581 - DNA, 25 bp, probe
gacatttgtacgtgctggtcaacct

SEQ ID NO: 218582 - DNA, 25 bp, probe
gacttcgaattctactgactcgacc

SEQ ID NO: 218583 - DNA, 25 bp, probe
gactctcagagaaccttactaatgc

SEQ ID NO: 218584 - DNA, 25 bp, probe
gacagcatgaggaagcgaataaaac

SEQ ID NO: 218585 - DNA, 25 bp, probe
gacagcatgaggaagcgaataaaac

SEQ ID NO: 218586 - DNA, 25 bp, probe
gacactgaggcacaaaagaaccgca

SEQ ID NO: 218587 - DNA, 25 bp, probe
gacactgaggcacaaaagaaccgca

SEQ ID NO: 218588 - DNA, 25 bp, probe
gacacgggggagttaaagctggcag

SEQ ID NO: 218589 - DNA, 25 bp, probe
gacacgggggagttaaagctggcag

SEQ ID NO: 218590 - DNA, 25 bp, probe
gacagctcggggcattttcactgtc

SEQ ID NO: 218591 - DNA, 25 bp, probe
gacaacgggggcttctacatatccc

SEQ ID NO: 218592 - DNA, 25 bp, probe
gacacaagggaatctcaacaaccag

SEQ ID NO: 218593 - DNA, 25 bp, probe
gacacaagggaatctcaacaaccag

SEQ ID NO: 218594 - DNA, 25 bp, probe
gacacaaccgaatacaaactccgta

SEQ ID NO: 218595 - DNA, 25 bp, probe
gacacagacctggaagcaacaagtc

SEQ ID NO: 218596 - DNA, 25 bp, probe
gacacacaccatgcataaaatacct

SEQ ID NO: 218597 - DNA, 25 bp, probe
gacacagccctcaacaaaaacatcc

SEQ ID NO: 218598 - DNA, 25 bp, probe
gacacagccggtaaacggaatcacg

SEQ ID NO: 218599 - DNA, 25 bp, probe
gacacagccggtaaacggaatcacg

SEQ ID NO: 218600 - DNA, 25 bp, probe
gacaaagcggccaaatcctacatcc

SEQ ID NO: 218601 - DNA, 25 bp, probe
gacaaagcggccaaatcctacatcc

SEQ ID NO: 218602 - DNA, 25 bp, probe
gacaaagggactaacatcgaagcat

SEQ ID NO: 218603 - DNA, 25 bp, probe
gacaaagcgtattaaacagaacact

SEQ ID NO: 218604 - DNA, 25 bp, probe
gacaaatgcctatgaaattaaacta

SEQ ID NO: 218605 - DNA, 25 bp, probe
gactttgcctcgtacaattaatagt

SEQ ID NO: 218606 - DNA, 25 bp, probe
gacagttgttgccaggaatttgctt

SEQ ID NO: 218607 - DNA, 25 bp, probe
gacagttgttgccaggaatttgctt

SEQ ID NO: 218608 - DNA, 25 bp, probe
gacagattgtcacggaacacgtgca

SEQ ID NO: 218609 - DNA, 25 bp, probe
gacactttcgagaagaacctcagtt

SEQ ID NO: 218610 - DNA, 25 bp, probe
gacactacttgataggccgttggtt

SEQ ID NO: 218611 - DNA, 25 bp, probe
gacaggaaggtatggctgctgtttg

SEQ ID NO: 218612 - DNA, 25 bp, probe
gacaggaaggcccgggagaagggcg

SEQ ID NO: 218613 - DNA, 25 bp, probe
gacagagggccagagtgggtagtgg

SEQ ID NO: 218614 - DNA, 25 bp, probe
gacagggccatcgaagggcgtaccg

SEQ ID NO: 218615 - DNA, 25 bp, probe
gacagggcctgggattgtgaggacc

SEQ ID NO: 218616 - DNA, 25 bp, probe
gacagggcctgggattgtgaggacc

SEQ ID NO: 218617 - DNA, 25 bp, probe
gacagaaggcagggacttgaggagc

SEQ ID NO: 218618 - DNA, 25 bp, probe
gacaaaggctcaggacggctggctc

SEQ ID NO: 218619 - DNA, 25 bp, probe
gacacaagtgccagattgcgggctg

SEQ ID NO: 218620 - DNA, 25 bp, probe
gacaaacaactgccatctctgggct

SEQ ID NO: 218621 - DNA, 25 bp, probe
gacaaagcaaagccacattttgcat

SEQ ID NO: 218622 - DNA, 25 bp, probe
gacagcaggaattgcccctgttcag

SEQ ID NO: 218623 - DNA, 25 bp, probe
gacagggatatacagacatgttacc

SEQ ID NO: 218624 - DNA, 25 bp, probe
gacagcggctttggaggcagtttcg

SEQ ID NO: 218625 - DNA, 25 bp, probe
gacagagtttgtgggtcagtctgtc

SEQ ID NO: 218626 - DNA, 25 bp, probe
gacagcagcttctcggaatgcatgt

SEQ ID NO: 218627 - DNA, 25 bp, probe
gacacagtatcagagtgcttcatct

SEQ ID NO: 218628 - DNA, 25 bp, probe
gacacagtatcagagtgcttcatct

SEQ ID NO: 218629 - DNA, 25 bp, probe
gacacaggtgatggcaactccctgg

SEQ ID NO: 218630 - DNA, 25 bp, probe
gacagggttggaaactgcactggaa

SEQ ID NO: 218631 - DNA, 25 bp, probe
gacaccgtacaacatcatggtgctg

SEQ ID NO: 218632 - DNA, 25 bp, probe
gacaccgtacaacatcatggtgctg

SEQ ID NO: 218633 - DNA, 25 bp, probe
gacacgtgtacctagaagggatgga

SEQ ID NO: 218634 - DNA, 25 bp, probe
gacacgtgtacctagaagggatgga

SEQ ID NO: 218635 - DNA, 25 bp, probe
gacactggtaccttcttcagtgctg

SEQ ID NO: 218636 - DNA, 25 bp, probe
gacacggagaccactgaggtgcatg

SEQ ID NO: 218637 - DNA, 25 bp, probe
gacacgggtcagattgtggccatca

SEQ ID NO: 218638 - DNA, 25 bp, probe
gacagaggaatgccctttggccatc

SEQ ID NO: 218639 - DNA, 25 bp, probe
gacagagctggcacctctgggatcg

SEQ ID NO: 218640 - DNA, 25 bp, probe
gacacagtgcccgtgtcggagccgc

SEQ ID NO: 218641 - DNA, 25 bp, probe
gacacaggttattgtcccacacgtg

SEQ ID NO: 218642 - DNA, 25 bp, probe
gacacagaatattttcatcaccaca

SEQ ID NO: 218643 - DNA, 25 bp, probe
gacacagaagattgccttacgctcg

SEQ ID NO: 218644 - DNA, 25 bp, probe
gacagcgccagaagccattaactac

SEQ ID NO: 218645 - DNA, 25 bp, probe
gacagcgccagaagccattaactac

SEQ ID NO: 218646 - DNA, 25 bp, probe
gacagcgccagaagccattaactac

SEQ ID NO: 218647 - DNA, 25 bp, probe
gacagactcacaacctgaacctagg

SEQ ID NO: 218648 - DNA, 25 bp, probe
gacaactagggctgcgaatctagag

SEQ ID NO: 218649 - DNA, 25 bp, probe
gacaacttctggaggagatgctgac

SEQ ID NO: 218650 - DNA, 25 bp, probe
gacaactttgatatgtgcagttcaa

SEQ ID NO: 218651 - DNA, 25 bp, probe
gacacacttattgattctgttgcac

SEQ ID NO: 218652 - DNA, 25 bp, probe
gacaactctcattctgtctgtgttc

SEQ ID NO: 218653 - DNA, 25 bp, probe
gacaactcacatttgctcttggatt

SEQ ID NO: 218654 - DNA, 25 bp, probe
gacaactcataccttcaagagcatt

SEQ ID NO: 218655 - DNA, 25 bp, probe
gacacatcccactccaaatgatatt

SEQ ID NO: 218656 - DNA, 25 bp, probe
gacactgcccaaggaccagtatttg

SEQ ID NO: 218657 - DNA, 25 bp, probe
gacacgggcaagctgccagtcaagt

SEQ ID NO: 218658 - DNA, 25 bp, probe
gacacaggtcacaactgtaggcaag

SEQ ID NO: 218659 - DNA, 25 bp, probe
gacacatggtcctttggagtgctgc

SEQ ID NO: 218660 - DNA, 25 bp, probe
gacacatggtcctttggagtgctgc

SEQ ID NO: 218661 - DNA, 25 bp, probe
gacacattgccttctagtgagttcc

SEQ ID NO: 218662 - DNA, 25 bp, probe
gacacattgccttctagtgagttcc

SEQ ID NO: 218663 - DNA, 25 bp, probe
gacacattactcaatcaatggcttc

SEQ ID NO: 218664 - DNA, 25 bp, probe
gacacatgagactaacacgtgcaat

SEQ ID NO: 218665 - DNA, 25 bp, probe
gacaacacagcaggaatcagtcagt

SEQ ID NO: 218666 - DNA, 25 bp, probe
gacaaaagccagcatactttccctg

SEQ ID NO: 218667 - DNA, 25 bp, probe
gacaaatatgcccgtattctctttc

SEQ ID NO: 218668 - DNA, 25 bp, probe
gacaaatatgcccgtattctctttc

SEQ ID NO: 218669 - DNA, 25 bp, probe
gacaaatgtccttgccttcatttgt

SEQ ID NO: 218670 - DNA, 25 bp, probe
gacacttggatttacttctttatca

SEQ ID NO: 218671 - DNA, 25 bp, probe
gacaaagtgtattctctgttttaca

SEQ ID NO: 218672 - DNA, 25 bp, probe
gacaaagtgtattctctgttttaca

SEQ ID NO: 218673 - DNA, 25 bp, probe
gacacaaggtacttcgatgatgaat

SEQ ID NO: 218674 - DNA, 25 bp, probe
gacacaaggtacttcgatgatgaat

SEQ ID NO: 218675 - DNA, 25 bp, probe
gacacaaggtacttcgatgatgaat

SEQ ID NO: 218676 - DNA, 25 bp, probe
gacacaagagcattcctaaataaac

SEQ ID NO: 218677 - DNA, 25 bp, probe
gacacaatgagcttagtacctccaa

SEQ ID NO: 218678 - DNA, 25 bp, probe
gacaaagcagctgagaccccagcga

SEQ ID NO: 218679 - DNA, 25 bp, probe
gacaaactgctgcgatatgaccacc

SEQ ID NO: 218680 - DNA, 25 bp, probe
gacaacactgagtgtctggccagac

SEQ ID NO: 218681 - DNA, 25 bp, probe
gacaacactgagtgtctggccagac

SEQ ID NO: 218682 - DNA, 25 bp, probe
gacacaatgctgtggacaggcacca

SEQ ID NO: 218683 - DNA, 25 bp, probe
gacacaatgctgtggacaggcacca

SEQ ID NO: 218684 - DNA, 25 bp, probe
gacacagagctgtgtacaggatgta

SEQ ID NO: 218685 - DNA, 25 bp, probe
gacacagatttacaagagcttcagg

SEQ ID NO: 218686 - DNA, 25 bp, probe
gacacagatttacaagagcttcagg

SEQ ID NO: 218687 - DNA, 25 bp, probe
gacacagtttgatcaactgtatcgg

SEQ ID NO: 218688 - DNA, 25 bp, probe
gacacatgttatgaaattcaatctt

SEQ ID NO: 218689 - DNA, 25 bp, probe
gacacagatatggtcgaatccaatc

SEQ ID NO: 218690 - DNA, 25 bp, probe
gacacaatagccaagatttccacag

SEQ ID NO: 218691 - DNA, 25 bp, probe
gacacaggtgccaaattctaccgtg

SEQ ID NO: 218692 - DNA, 25 bp, probe
gacacaggtgccaaattctaccgtg

SEQ ID NO: 218693 - DNA, 25 bp, probe
gacacaggtgccaaattctaccgtg

SEQ ID NO: 218694 - DNA, 25 bp, probe
gacacaggtgccaaattctaccgtg

SEQ ID NO: 218695 - DNA, 25 bp, probe
gacacaggtgccaaattctaccgtg

SEQ ID NO: 218696 - DNA, 25 bp, probe
gacaaaggcaacttcctgaccgagg

SEQ ID NO: 218697 - DNA, 25 bp, probe
gacaaagacaacacctacaatgtgg

SEQ ID NO: 218698 - DNA, 25 bp, probe
gacaaagagttcaccagacagcctg

SEQ ID NO: 218699 - DNA, 25 bp, probe
gacaggcggctgaaagccagcagca

SEQ ID NO: 218700 - DNA, 25 bp, probe
gacacagttctgaatgtccagcaca

SEQ ID NO: 218701 - DNA, 25 bp, probe
gacacagttctgaatgtccagcaca

SEQ ID NO: 218702 - DNA, 25 bp, probe
gacacaatatcaccagagcaagcca

SEQ ID NO: 218703 - DNA, 25 bp, probe
gacaaagatgaggaaggcagccaga

SEQ ID NO: 218704 - DNA, 25 bp, probe
gacaaagagtgcgactggctcaaca

SEQ ID NO: 218705 - DNA, 25 bp, probe
gacagtagatgggccgacacacact

SEQ ID NO: 218706 - DNA, 25 bp, probe
gacactcagatgcccagtatcatac

SEQ ID NO: 218707 - DNA, 25 bp, probe
gacactcagatgcccagtatcatac

SEQ ID NO: 218708 - DNA, 25 bp, probe
gacacttgcaggacactacaacgtg

SEQ ID NO: 218709 - DNA, 25 bp, probe
gacacttacgacaatgacattgcgc

SEQ ID NO: 218710 - DNA, 25 bp, probe
gacactgtcatcatcaatgatctct

SEQ ID NO: 218711 - DNA, 25 bp, probe
gacactctgcagactgctagtgttc

SEQ ID NO: 218712 - DNA, 25 bp, probe
gacactgtgctaatgtgaattttaa

SEQ ID NO: 218713 - DNA, 25 bp, probe
gacactaattcattaaatactaatt

SEQ ID NO: 218714 - DNA, 25 bp, probe
gacactaattcattaaatactaatt

SEQ ID NO: 218715 - DNA, 25 bp, probe
gacactatagatcataagttaactt

SEQ ID NO: 218716 - DNA, 25 bp, probe
gacactatagatcataagttaactt

SEQ ID NO: 218717 - DNA, 25 bp, probe
gacactacgggaacagtttgcctcc

SEQ ID NO: 218718 - DNA, 25 bp, probe
gacactccagggatcagtagttcct

SEQ ID NO: 218719 - DNA, 25 bp, probe
gacactccagggatcagtagttcct

SEQ ID NO: 218720 - DNA, 25 bp, probe
gacacttcatggtttaaagtctcac

SEQ ID NO: 218721 - DNA, 25 bp, probe
gacactctctcatcttaattttagg

SEQ ID NO: 218722 - DNA, 25 bp, probe
gacacatttccactataattttaca

SEQ ID NO: 218723 - DNA, 25 bp, probe
gacacttacctttattaattagctt

SEQ ID NO: 218724 - DNA, 25 bp, probe
gacatttcaactttttaagttgcta

SEQ ID NO: 218725 - DNA, 25 bp, probe
gacaccattacttttgtgaacgctt

SEQ ID NO: 218726 - DNA, 25 bp, probe
gacaccatctaccagatcatgtaca

SEQ ID NO: 218727 - DNA, 25 bp, probe
gacacacaatcagggctctgttgca

SEQ ID NO: 218728 - DNA, 25 bp, probe
gacactatataatctctttacaaag

SEQ ID NO: 218729 - DNA, 25 bp, probe
gacactaatggttcatcctctataa

SEQ ID NO: 218730 - DNA, 25 bp, probe
gacactttgtgatttccattaaggc

SEQ ID NO: 218731 - DNA, 25 bp, probe
gacacttttaaactctgaataggca

SEQ ID NO: 218732 - DNA, 25 bp, probe
gacactcttgcaaaagcattgaatc

SEQ ID NO: 218733 - DNA, 25 bp, probe
gacaggtggccaagtgcttggatca

SEQ ID NO: 218734 - DNA, 25 bp, probe
gacaggtggctaagtgctggaagag

SEQ ID NO: 218735 - DNA, 25 bp, probe
gacactggcagtcagggagaatcaa

SEQ ID NO: 218736 - DNA, 25 bp, probe
gacacctgcatatagtgtgggaaat

SEQ ID NO: 218737 - DNA, 25 bp, probe
gacagcaactagcagtctgggaaca

SEQ ID NO: 218738 - DNA, 25 bp, probe
gacagatgacggctgctcgaagaac

SEQ ID NO: 218739 - DNA, 25 bp, probe
gacagatgacggctgctcgaagaac

SEQ ID NO: 218740 - DNA, 25 bp, probe
gacagatatttttggcgaagatccc

SEQ ID NO: 218741 - DNA, 25 bp, probe
gacagaggtttctgggagacctacc

SEQ ID NO: 218742 - DNA, 25 bp, probe
gacagcagagtgtggggaggacccc

SEQ ID NO: 218743 - DNA, 25 bp, probe
gacagcagggtctgagagaggagcc

SEQ ID NO: 218744 - DNA, 25 bp, probe
gacacacgggaagtgaaggggccct

SEQ ID NO: 218745 - DNA, 25 bp, probe
gacacacgggaagtgaaggggccct

SEQ ID NO: 218746 - DNA, 25 bp, probe
gacacctggatgttcggggtgacac

SEQ ID NO: 218747 - DNA, 25 bp, probe
gacatcctggtaggacttggtgtac

SEQ ID NO: 218748 - DNA, 25 bp, probe
gacaccgaggcagggatcggtctga

SEQ ID NO: 218749 - DNA, 25 bp, probe
gacacccagtggggtggagtcggag

SEQ ID NO: 218750 - DNA, 25 bp, probe
gacacccagcttagggggtgggcgg

SEQ ID NO: 218751 - DNA, 25 bp, probe
gacacccagcttagggggtgggcgg

SEQ ID NO: 218752 - DNA, 25 bp, probe
gacagcccagggagtgtgggggccg

SEQ ID NO: 218753 - DNA, 25 bp, probe
gacagcccaggtcacacgtggggtc

SEQ ID NO: 218754 - DNA, 25 bp, probe
gacagccacagtagaagcggtagag

SEQ ID NO: 218755 - DNA, 25 bp, probe
gacagccacagtagaagcggtagag

SEQ ID NO: 218756 - DNA, 25 bp, probe
gacagccacggccaagtggttgctg

SEQ ID NO: 218757 - DNA, 25 bp, probe
gacagcctgggcttactggagctgg

SEQ ID NO: 218758 - DNA, 25 bp, probe
gacagcctgggcttactggagctgg

SEQ ID NO: 218759 - DNA, 25 bp, probe
gacagcctgggcttactggagctgg

SEQ ID NO: 218760 - DNA, 25 bp, probe
gacaggtggaccaacggactgattt

SEQ ID NO: 218761 - DNA, 25 bp, probe
gacggtaagggcagagaagtttcaa

SEQ ID NO: 218762 - DNA, 25 bp, probe
gacggtctcaatctaaaagcacttc

SEQ ID NO: 218763 - DNA, 25 bp, probe
gacaggtaaactaaaacagcacttt

SEQ ID NO: 218764 - DNA, 25 bp, probe
gacaggtaaactaaaacagcacttt

SEQ ID NO: 218765 - DNA, 25 bp, probe
gacagtttccctacaagaactgcaa

SEQ ID NO: 218766 - DNA, 25 bp, probe
gacagtaaccactcaaccagtgatg

SEQ ID NO: 218767 - DNA, 25 bp, probe
gacagaatcccattccatcttagtg

SEQ ID NO: 218768 - DNA, 25 bp, probe
gacaaattagcatgcaagcttggtc

SEQ ID NO: 218769 - DNA, 25 bp, probe
gacaccctgagctgcaagattgcag

SEQ ID NO: 218770 - DNA, 25 bp, probe
gacacacactactgcaatgatatct

SEQ ID NO: 218771 - DNA, 25 bp, probe
gacacagcactgtttgagatctacg

SEQ ID NO: 218772 - DNA, 25 bp, probe
gacacaccagaaaagaccacctaca

SEQ ID NO: 218773 - DNA, 25 bp, probe
gacagagcaaaaacttctccctcaa

SEQ ID NO: 218774 - DNA, 25 bp, probe
gacagaaagcagatcctcaccctgc

SEQ ID NO: 218775 - DNA, 25 bp, probe
gacacggagcagatgctgtccgcgg

SEQ ID NO: 218776 - DNA, 25 bp, probe
gacacggagcagatgctgtccgcgg

SEQ ID NO: 218777 - DNA, 25 bp, probe
gacacggagcagatgctgtccgcgg

SEQ ID NO: 218778 - DNA, 25 bp, probe
gacacggagcagatgctgtccgcgg

SEQ ID NO: 218779 - DNA, 25 bp, probe
gacacactggacaagcttcggcagg

SEQ ID NO: 218780 - DNA, 25 bp, probe
gacagaatggacagtgaggacagtt

SEQ ID NO: 218781 - DNA, 25 bp, probe
gacagagttcacaggaggccagtgg

SEQ ID NO: 218782 - DNA, 25 bp, probe
gacagagtgtacacaatccagagtg

SEQ ID NO: 218783 - DNA, 25 bp, probe
gacatggttccgactaccattgggg

SEQ ID NO: 218784 - DNA, 25 bp, probe
gacaggctacggatggatatgtcag

SEQ ID NO: 218785 - DNA, 25 bp, probe
gacagcaggagcgggggtgatgcca

SEQ ID NO: 218786 - DNA, 25 bp, probe
gacactgcgaaaccaagctgactca

SEQ ID NO: 218787 - DNA, 25 bp, probe
gacagctggaacccagaggacgcca

SEQ ID NO: 218788 - DNA, 25 bp, probe
gacacgcagaactcagagtccagcc

SEQ ID NO: 218789 - DNA, 25 bp, probe
gacaggaaccaactgagccaatgcc

SEQ ID NO: 218790 - DNA, 25 bp, probe
gactggaattgctgctacccagctg

SEQ ID NO: 218791 - DNA, 25 bp, probe
gactggaattgctgctacccagctg

SEQ ID NO: 218792 - DNA, 25 bp, probe
gacaggatcactgtgtcacaactgt

SEQ ID NO: 218793 - DNA, 25 bp, probe
gacaggatcactgtgtcacaactgt

SEQ ID NO: 218794 - DNA, 25 bp, probe
gacacagccactgtgaactgaactg

SEQ ID NO: 218795 - DNA, 25 bp, probe
gacacagccactgtgaactgaactg

SEQ ID NO: 218796 - DNA, 25 bp, probe
gacacagtacaacaacatgaatgct

SEQ ID NO: 218797 - DNA, 25 bp, probe
gacacagtagaagcacacaggcaga

SEQ ID NO: 218798 - DNA, 25 bp, probe
gacacagtagaagcacacaggcaga

SEQ ID NO: 218799 - DNA, 25 bp, probe
gacatagaagaggcacaaaggagtt

SEQ ID NO: 218800 - DNA, 25 bp, probe
gacactgccagagacaaaacagctg

SEQ ID NO: 218801 - DNA, 25 bp, probe
gacactgccagagacaaaacagctg

SEQ ID NO: 218802 - DNA, 25 bp, probe
gacatgtcctatgatcacaaaccag

SEQ ID NO: 218803 - DNA, 25 bp, probe
gacatggcgtatgtcatcaacgggg

SEQ ID NO: 218804 - DNA, 25 bp, probe
gacaggtgcattttatggacgggag

SEQ ID NO: 218805 - DNA, 25 bp, probe
gacaggcctttcttttggtggcagc

SEQ ID NO: 218806 - DNA, 25 bp, probe
gacaggcctttcttttggtggcagc

SEQ ID NO: 218807 - DNA, 25 bp, probe
gacagacacttttaactgtgttcct

SEQ ID NO: 218808 - DNA, 25 bp, probe
gacacgcgcattgtaacctttgcac

SEQ ID NO: 218809 - DNA, 25 bp, probe
gacaccacctcactgaggactttgc

SEQ ID NO: 218810 - DNA, 25 bp, probe
gacactctcctaagaggttctctcc

SEQ ID NO: 218811 - DNA, 25 bp, probe
gacacatcctaaaaggtgttgtaat

SEQ ID NO: 218812 - DNA, 25 bp, probe
gactactggaatcaggcttggttca

SEQ ID NO: 218813 - DNA, 25 bp, probe
gacagagatgaagtccggtttttca

SEQ ID NO: 218814 - DNA, 25 bp, probe
gacagaggagcagtacaggttcctg

SEQ ID NO: 218815 - DNA, 25 bp, probe
gacagagtgacgcactgactcacct

SEQ ID NO: 218816 - DNA, 25 bp, probe
gacagagtgagactccaactcaaaa

SEQ ID NO: 218817 - DNA, 25 bp, probe
gacacctgggtcttgagccataaac

SEQ ID NO: 218818 - DNA, 25 bp, probe
gacaccatggagggtacaattgcca

SEQ ID NO: 218819 - DNA, 25 bp, probe
gacactctgaagtgaaagtagccac

SEQ ID NO: 218820 - DNA, 25 bp, probe
gactctctaagtgaagaggttcaag

SEQ ID NO: 218821 - DNA, 25 bp, probe
gactctctaagtgaagaggttcaag

SEQ ID NO: 218822 - DNA, 25 bp, probe
gaccctgattgcccgtaggttaaga

SEQ ID NO: 218823 - DNA, 25 bp, probe
gacacttgttgtccagttgaaaaaa

SEQ ID NO: 218824 - DNA, 25 bp, probe
gacacttcttttggtgtgatcaatg

SEQ ID NO: 218825 - DNA, 25 bp, probe
gacacttgtgacttctatagacaat

SEQ ID NO: 218826 - DNA, 25 bp, probe
gacactatgtagtctgttagatttt

SEQ ID NO: 218827 - DNA, 25 bp, probe
gacacttgaaggcttattttgcttc

SEQ ID NO: 218828 - DNA, 25 bp, probe
gacacttgaaggcttattttgcttc

SEQ ID NO: 218829 - DNA, 25 bp, probe
gacacttactggtttaatttgcact

SEQ ID NO: 218830 - DNA, 25 bp, probe
gacacttactggtttaatttgcact

SEQ ID NO: 218831 - DNA, 25 bp, probe
gacatgttcactgtttaactacatt

SEQ ID NO: 218832 - DNA, 25 bp, probe
gacagttcgctcattccaactaatc

SEQ ID NO: 218833 - DNA, 25 bp, probe
gacagaagaggccttccaaaaacac

SEQ ID NO: 218834 - DNA, 25 bp, probe
gagcgacgggccaggaaagaacacc

SEQ ID NO: 218835 - DNA, 25 bp, probe
gactaagggctatgacaaaaaaaca

SEQ ID NO: 218836 - DNA, 25 bp, probe
gacattcagggtacaacaaaaagga

SEQ ID NO: 218837 - DNA, 25 bp, probe
gacataggggtttctggaccaagta

SEQ ID NO: 218838 - DNA, 25 bp, probe
gacacgggagaaaatccaccataat

SEQ ID NO: 218839 - DNA, 25 bp, probe
gacacaggatggacaagcccaccaa

SEQ ID NO: 218840 - DNA, 25 bp, probe
gacacagaatggataagccagccaa

SEQ ID NO: 218841 - DNA, 25 bp, probe
gacacgaagcaggaaacactggcaa

SEQ ID NO: 218842 - DNA, 25 bp, probe
gacagtgaaaagtcaagccatggaa

SEQ ID NO: 218843 - DNA, 25 bp, probe
gacagaatatgctagtggaggggaa

SEQ ID NO: 218844 - DNA, 25 bp, probe
gacagaatatgctagtggaggggaa

SEQ ID NO: 218845 - DNA, 25 bp, probe
gacagacttcatgctgtgtgtcgga

SEQ ID NO: 218846 - DNA, 25 bp, probe
gacatcaagctccattgtttcggaa

SEQ ID NO: 218847 - DNA, 25 bp, probe
gacacagtcccttctgtacaggaca

SEQ ID NO: 218848 - DNA, 25 bp, probe
gacacagtcccttctgtacaggaca

SEQ ID NO: 218849 - DNA, 25 bp, probe
gacagacttcggcatgtacgactac

SEQ ID NO: 218850 - DNA, 25 bp, probe
gacagacttcggcatgtacgactac

SEQ ID NO: 218851 - DNA, 25 bp, probe
gacacctacaggttatccagactac

SEQ ID NO: 218852 - DNA, 25 bp, probe
gacactctggaggtgatacggcatc

SEQ ID NO: 218853 - DNA, 25 bp, probe
gacacgcatctttgcttacagtgca

SEQ ID NO: 218854 - DNA, 25 bp, probe
gacacgaggctagtccaagtgcagt

SEQ ID NO: 218855 - DNA, 25 bp, probe
gacacaggacatgtcccaggatgag

SEQ ID NO: 218856 - DNA, 25 bp, probe
gacacgtacaaaatccagctatgaa

SEQ ID NO: 218857 - DNA, 25 bp, probe
gatactttaagaacctgtaaaatca

SEQ ID NO: 218858 - DNA, 25 bp, probe
gacacttttaggacctgatggacaa

SEQ ID NO: 218859 - DNA, 25 bp, probe
gacatcttttacatcattcggaaca

SEQ ID NO: 218860 - DNA, 25 bp, probe
gacttagcttagagcttttaaaaga

SEQ ID NO: 218861 - DNA, 25 bp, probe
gactacaacaagatctcctttaagg

SEQ ID NO: 218862 - DNA, 25 bp, probe
gactacaacaagatctcctttaagg

SEQ ID NO: 218863 - DNA, 25 bp, probe
gactacaacaagatctcctttaagg

SEQ ID NO: 218864 - DNA, 25 bp, probe
gactactacaaagctaatgaaaacg

SEQ ID NO: 218865 - DNA, 25 bp, probe
gaccactacaagaaggggaacgacg

SEQ ID NO: 218866 - DNA, 25 bp, probe
gacagagctacacaggggaaaagag

SEQ ID NO: 218867 - DNA, 25 bp, probe
gacagcactacaaaggagacggggg

SEQ ID NO: 218868 - DNA, 25 bp, probe
gacagcactacaaaggagacggggg

SEQ ID NO: 218869 - DNA, 25 bp, probe
gacacccacatcaacgagatgatgg

SEQ ID NO: 218870 - DNA, 25 bp, probe
gacacccacatcaacgagatgatgg

SEQ ID NO: 218871 - DNA, 25 bp, probe
gacagcccattctggatgcgatgga

SEQ ID NO: 218872 - DNA, 25 bp, probe
gacaccacatttgaggctggagaag

SEQ ID NO: 218873 - DNA, 25 bp, probe
gacagccagtttgtgagtggtgggg

SEQ ID NO: 218874 - DNA, 25 bp, probe
gactcctctttgggggagggtggat

SEQ ID NO: 218875 - DNA, 25 bp, probe
gacttctcttacacttgggggtagc

SEQ ID NO: 218876 - DNA, 25 bp, probe
gacttcctctccatttaaggtctgg

SEQ ID NO: 218877 - DNA, 25 bp, probe
gacttcccttttttaatgtttcatg

SEQ ID NO: 218878 - DNA, 25 bp, probe
gactatccttaccttttagtttcag

SEQ ID NO: 218879 - DNA, 25 bp, probe
gacttacttgcttgtatttggttta

SEQ ID NO: 218880 - DNA, 25 bp, probe
gactacctagttgtagtgtgaccta

SEQ ID NO: 218881 - DNA, 25 bp, probe
gactacgtcgatctaggtgtgacca

SEQ ID NO: 218882 - DNA, 25 bp, probe
gagctactccgtatacgtgtacaag

SEQ ID NO: 218883 - DNA, 25 bp, probe
gacatttcctgttgtgaagtaaaag

SEQ ID NO: 218884 - DNA, 25 bp, probe
gacatttggttctgggaatatgtag

SEQ ID NO: 218885 - DNA, 25 bp, probe
gacatttggttctgggaatatgtag

SEQ ID NO: 218886 - DNA, 25 bp, probe
gacatgagcttttctcgcaggaaat

SEQ ID NO: 218887 - DNA, 25 bp, probe
gacagactattaccgcaagggtggg

SEQ ID NO: 218888 - DNA, 25 bp, probe
gacagccatcttcactggagggtgg

SEQ ID NO: 218889 - DNA, 25 bp, probe
gacactgtctatcagtacgtcggca

SEQ ID NO: 218890 - DNA, 25 bp, probe
gacactcagttctgtcactgtcaag

SEQ ID NO: 218891 - DNA, 25 bp, probe
gacactgcgttggaaacttgaagac

SEQ ID NO: 218892 - DNA, 25 bp, probe
gacactgcgttggaaacttgaagac

SEQ ID NO: 218893 - DNA, 25 bp, probe
gacactgcctgcttttacttggcag

SEQ ID NO: 218894 - DNA, 25 bp, probe
gacactgctcattttgcttgtctgg

SEQ ID NO: 218895 - DNA, 25 bp, probe
gacaccactgttactgatgttgggc

SEQ ID NO: 218896 - DNA, 25 bp, probe
gacacctgtgtttcagcatttggag

SEQ ID NO: 218897 - DNA, 25 bp, probe
gacacatcagttatatcttgtggca

SEQ ID NO: 218898 - DNA, 25 bp, probe
gacacatgcagtcaaactcactgga

SEQ ID NO: 218899 - DNA, 25 bp, probe
gacagcctatcagaaccacaggatc

SEQ ID NO: 218900 - DNA, 25 bp, probe
gacactctatctgtaatccaagatg

SEQ ID NO: 218901 - DNA, 25 bp, probe
gacacttctcttgcagaccaagagg

SEQ ID NO: 218902 - DNA, 25 bp, probe
gacagcttctttgcccaaaatgcag

SEQ ID NO: 218903 - DNA, 25 bp, probe
gacagaactgttggcccagaagtct

SEQ ID NO: 218904 - DNA, 25 bp, probe
gacagaactgttggcccagaagtct

SEQ ID NO: 218905 - DNA, 25 bp, probe
gacagaagttcaccagcagctaagt

SEQ ID NO: 218906 - DNA, 25 bp, probe
gacaccatgttgtatcagaataatt

SEQ ID NO: 218907 - DNA, 25 bp, probe
gacagatgatgctgtcaagcaatat

SEQ ID NO: 218908 - DNA, 25 bp, probe
gacagagatgtaacaagctcatagg

SEQ ID NO: 218909 - DNA, 25 bp, probe
gacagagatgtaacaagctcatagg

SEQ ID NO: 218910 - DNA, 25 bp, probe
gacaggatgcaaaagaggctccaga

SEQ ID NO: 218911 - DNA, 25 bp, probe
gacagggacggagagctccagacct

SEQ ID NO: 218912 - DNA, 25 bp, probe
gacagttacgagtccatgtccgagc

SEQ ID NO: 218913 - DNA, 25 bp, probe
gacagcatcaaaggtcacgtgcggt

SEQ ID NO: 218914 - DNA, 25 bp, probe
gacagcaggtgtgctcctgtggagt

SEQ ID NO: 218915 - DNA, 25 bp, probe
gacagcaggtgtgctcctgtggagt

SEQ ID NO: 218916 - DNA, 25 bp, probe
gacagggtgatttcctggattctac

SEQ ID NO: 218917 - DNA, 25 bp, probe
gacagggtgatttcctggattctac

SEQ ID NO: 218918 - DNA, 25 bp, probe
gacagcggaggggcactggtgtttc

SEQ ID NO: 218919 - DNA, 25 bp, probe
gacagcggaggggcactggtgtttc

SEQ ID NO: 218920 - DNA, 25 bp, probe
gacagtggggtggaccagctggtgg

SEQ ID NO: 218921 - DNA, 25 bp, probe
gacagtggtggtccggtggagggaa

SEQ ID NO: 218922 - DNA, 25 bp, probe
gacagtggtggtccggtggagggaa

SEQ ID NO: 218923 - DNA, 25 bp, probe
gacagtggtggtccggtggagggaa

SEQ ID NO: 218924 - DNA, 25 bp, probe
gacagatgggtggatcaggggacgg

SEQ ID NO: 218925 - DNA, 25 bp, probe
gacacgagcgtgtatgagagcccct

SEQ ID NO: 218926 - DNA, 25 bp, probe
gacaggagcagtaatggcagcagcc

SEQ ID NO: 218927 - DNA, 25 bp, probe
gacagctgatgcagatatgtaggcc

SEQ ID NO: 218928 - DNA, 25 bp, probe
gacagctgtgtactcttaggctaag

SEQ ID NO: 218929 - DNA, 25 bp, probe
gacactgtgacagttttggtaacta

SEQ ID NO: 218930 - DNA, 25 bp, probe
gacacgtaaatgttgtttaattctg

SEQ ID NO: 218931 - DNA, 25 bp, probe
gacacgtaaatgttgtttaattctg

SEQ ID NO: 218932 - DNA, 25 bp, probe
gacacttatacttggtttaattcag

SEQ ID NO: 218933 - DNA, 25 bp, probe
gacacttctgttgtgtatttttcag

SEQ ID NO: 218934 - DNA, 25 bp, probe
gacacttagggctatttaatttcga

SEQ ID NO: 218935 - DNA, 25 bp, probe
gacactgtagcgactgatgttagtt

SEQ ID NO: 218936 - DNA, 25 bp, probe
gacactgtagcgactgatgttagtt

SEQ ID NO: 218937 - DNA, 25 bp, probe
gacacctagcgaagagctctgcagg

SEQ ID NO: 218938 - DNA, 25 bp, probe
gacacctacagattgcagttcatgg

SEQ ID NO: 218939 - DNA, 25 bp, probe
gacatcttcaggttcatgctcatat

SEQ ID NO: 218940 - DNA, 25 bp, probe
gacactgatcagagacatgctgctg

SEQ ID NO: 218941 - DNA, 25 bp, probe
gacactgacgctgccattgcagaag

SEQ ID NO: 218942 - DNA, 25 bp, probe
gacagctgattggcggattggagat

SEQ ID NO: 218943 - DNA, 25 bp, probe
gacagctcctggccatatatcaagg

SEQ ID NO: 218944 - DNA, 25 bp, probe
gacacccttggattagcaagtctgt

SEQ ID NO: 218945 - DNA, 25 bp, probe
gacacggctgggttggatatgcctt

SEQ ID NO: 218946 - DNA, 25 bp, probe
gacacggctgggttggatatgcctt

SEQ ID NO: 218947 - DNA, 25 bp, probe
gacactggtgtgaaaggtacaatct

SEQ ID NO: 218948 - DNA, 25 bp, probe
gacactttgattaagtcctattttt

SEQ ID NO: 218949 - DNA, 25 bp, probe
gacagctagttatactccattcttt

SEQ ID NO: 218950 - DNA, 25 bp, probe
gacagtggttattaaagcatgggtt

SEQ ID NO: 218951 - DNA, 25 bp, probe
gacactgttgataaaaactcaggca

SEQ ID NO: 218952 - DNA, 25 bp, probe
gacatagaccttcacaaccaggcaa

SEQ ID NO: 218953 - DNA, 25 bp, probe
gacatagaccttcacaaccaggcaa

SEQ ID NO: 218954 - DNA, 25 bp, probe
gacagtgactccacatcaactgatg

SEQ ID NO: 218955 - DNA, 25 bp, probe
gacactgaccaaatctgtttatgga

SEQ ID NO: 218956 - DNA, 25 bp, probe
gacatctgatgttgttttcctatgg

SEQ ID NO: 218957 - DNA, 25 bp, probe
gacaccatatttgttctgcattccc

SEQ ID NO: 218958 - DNA, 25 bp, probe
gacagaatatttctcctgctgtgcc

SEQ ID NO: 218959 - DNA, 25 bp, probe
gacagaattgggaagccagtgcggc

SEQ ID NO: 218960 - DNA, 25 bp, probe
gacagaattgggaagccagtgcggc

SEQ ID NO: 218961 - DNA, 25 bp, probe
gacatggacatccagtaccacggcg

SEQ ID NO: 218962 - DNA, 25 bp, probe
gacagatgaatccgacacatgcagc

SEQ ID NO: 218963 - DNA, 25 bp, probe
gacagatgatattagtgcagctagt

SEQ ID NO: 218964 - DNA, 25 bp, probe
gacagtcatgactagcagaattgtg

SEQ ID NO: 218965 - DNA, 25 bp, probe
gacagtcatgactagcagaattgtg

SEQ ID NO: 218966 - DNA, 25 bp, probe
gacagctctacaccagagagtgctg

SEQ ID NO: 218967 - DNA, 25 bp, probe
gacagctctaatgaagatgcaggga

SEQ ID NO: 218968 - DNA, 25 bp, probe
gacactctgcaagaggtgaagctga

SEQ ID NO: 218969 - DNA, 25 bp, probe
gacactctgcccgagggcaggagta

SEQ ID NO: 218970 - DNA, 25 bp, probe
gacagaacacacgggtcaggagtct

SEQ ID NO: 218971 - DNA, 25 bp, probe
gacagaaagcaaggacatgcggcct

SEQ ID NO: 218972 - DNA, 25 bp, probe
gacagtagaggaggggcagcggctc

SEQ ID NO: 218973 - DNA, 25 bp, probe
gacagcagaaggactgtaccggatc

SEQ ID NO: 218974 - DNA, 25 bp, probe
gacagcacaagagttgcttctggga

SEQ ID NO: 218975 - DNA, 25 bp, probe
gacagcagcggatgtgttcagtctg

SEQ ID NO: 218976 - DNA, 25 bp, probe
gacagacaggctcttagcagcttcc

SEQ ID NO: 218977 - DNA, 25 bp, probe
gacagcacagggtattaaggacaca

SEQ ID NO: 218978 - DNA, 25 bp, probe
gacatggcaggccgatttgggaacc

SEQ ID NO: 218979 - DNA, 25 bp, probe
gacaggtgaccgatgtacaggactt

SEQ ID NO: 218980 - DNA, 25 bp, probe
gacaggtacctggtgtgccagcgaa

SEQ ID NO: 218981 - DNA, 25 bp, probe
gacaggtacctggtgtgccagcgaa

SEQ ID NO: 218982 - DNA, 25 bp, probe
gacagaaacattcatgctggcagcg

SEQ ID NO: 218983 - DNA, 25 bp, probe
gacagaaacattcatgctggcagcg

SEQ ID NO: 218984 - DNA, 25 bp, probe
gacagacatctctgctagctggaca

SEQ ID NO: 218985 - DNA, 25 bp, probe
gacagacctgtcatctgtggaaccc

SEQ ID NO: 218986 - DNA, 25 bp, probe
gacagcaacgcaattcttgtaactt

SEQ ID NO: 218987 - DNA, 25 bp, probe
gacagaaccaaattatctccatctt

SEQ ID NO: 218988 - DNA, 25 bp, probe
gacagcgtccacaatgtgaatccta

SEQ ID NO: 218989 - DNA, 25 bp, probe
gacagcgtctcggatatgaaccaca

SEQ ID NO: 218990 - DNA, 25 bp, probe
gacacgtcattaaatctatggcaca

SEQ ID NO: 218991 - DNA, 25 bp, probe
gacacgtcattaaatctatggcaca

SEQ ID NO: 218992 - DNA, 25 bp, probe
gacacgtagtaattctgtgacatac

SEQ ID NO: 218993 - DNA, 25 bp, probe
gacacgtagtaattctgtgacatac

SEQ ID NO: 218994 - DNA, 25 bp, probe
gacacgatgagaagccctctgacat

SEQ ID NO: 218995 - DNA, 25 bp, probe
gacaccagataggacctctgagagg

SEQ ID NO: 218996 - DNA, 25 bp, probe
gacagcctgcgagacctaagaggat

SEQ ID NO: 218997 - DNA, 25 bp, probe
gacagctttgaaactgataaagagg

SEQ ID NO: 218998 - DNA, 25 bp, probe
gacagctggtaaactgaagagcaca

SEQ ID NO: 218999 - DNA, 25 bp, probe
gacatggttcacatcagacgagaga

SEQ ID NO: 219000 - DNA, 25 bp, probe
gacatggttcacatcagacgagaga

SEQ ID NO: 219001 - DNA, 25 bp, probe
gacactgtcaacatggcatccagaa

SEQ ID NO: 219002 - DNA, 25 bp, probe
gacactgtccatgaagcactgagca

SEQ ID NO: 219003 - DNA, 25 bp, probe
gacagtggctatagaagcacttgga

SEQ ID NO: 219004 - DNA, 25 bp, probe
gacagtggttggtccagatatgtag

SEQ ID NO: 219005 - DNA, 25 bp, probe
gacagtggttggtccagatatgtag

SEQ ID NO: 219006 - DNA, 25 bp, probe
gacagtcagttttatagtgtgcaag

SEQ ID NO: 219007 - DNA, 25 bp, probe
gagaggatttagttaggtcattaag

SEQ ID NO: 219008 - DNA, 25 bp, probe
gacagtgtttaaccatggtcaaaag

SEQ ID NO: 219009 - DNA, 25 bp, probe
gacagatgatgtcttccatggtcat

SEQ ID NO: 219010 - DNA, 25 bp, probe
gacatgagtgtctgtccagactcag

SEQ ID NO: 219011 - DNA, 25 bp, probe
gacatgagcatggctgagcctggac

SEQ ID NO: 219012 - DNA, 25 bp, probe
gacagaggcctacatggacagcaag

SEQ ID NO: 219013 - DNA, 25 bp, probe
gacagatccacaggtatgtaaaaga

SEQ ID NO: 219014 - DNA, 25 bp, probe
gacaccgccaaatttaattgcagag

SEQ ID NO: 219015 - DNA, 25 bp, probe
gacacctccaacttcgacaaagagt

SEQ ID NO: 219016 - DNA, 25 bp, probe
gacacctccaattttgatgaaccaa

SEQ ID NO: 219017 - DNA, 25 bp, probe
gacaccatacaatcttggattcatg

SEQ ID NO: 219018 - DNA, 25 bp, probe
gacaccaaacaacattatgttgggg

SEQ ID NO: 219019 - DNA, 25 bp, probe
gacaccacaacagttgaaatgtctg

SEQ ID NO: 219020 - DNA, 25 bp, probe
gacacccagacagatgagattgtcg

SEQ ID NO: 219021 - DNA, 25 bp, probe
gacactggaacagtatgagttctgc

SEQ ID NO: 219022 - DNA, 25 bp, probe
gacactggataggttctgattgcaa

SEQ ID NO: 219023 - DNA, 25 bp, probe
gacactggataggttctgattgcaa

SEQ ID NO: 219024 - DNA, 25 bp, probe
gacactggatggcttcatgatgtac

SEQ ID NO: 219025 - DNA, 25 bp, probe
gacactggtgatcgcatacatcatg

SEQ ID NO: 219026 - DNA, 25 bp, probe
gacactggtgatcgcatacatcatg

SEQ ID NO: 219027 - DNA, 25 bp, probe
gactctgggatgctcctagtttgac

SEQ ID NO: 219028 - DNA, 25 bp, probe
gactctgggatgctcctagtttgac

SEQ ID NO: 219029 - DNA, 25 bp, probe
gactttatggagcccaagtttgagt

SEQ ID NO: 219030 - DNA, 25 bp, probe
gacttattgtaggttcgtttgagct

SEQ ID NO: 219031 - DNA, 25 bp, probe
gacagttttcagtttgcttggaggt

SEQ ID NO: 219032 - DNA, 25 bp, probe
gacagattcctggtcttttggggtg

SEQ ID NO: 219033 - DNA, 25 bp, probe
gtcagacccggtgtttgggtgaagg

SEQ ID NO: 219034 - DNA, 25 bp, probe
gtcagacccggtgtttgggtgaagg

SEQ ID NO: 219035 - DNA, 25 bp, probe
gacgacccggaggtggtggagaacg

SEQ ID NO: 219036 - DNA, 25 bp, probe
gacgacccggaggtggtggagaacg

SEQ ID NO: 219037 - DNA, 25 bp, probe
gacagtcaaatggggtgggggttct

SEQ ID NO: 219038 - DNA, 25 bp, probe
gacaggctaatggggtggcgggtgt

SEQ ID NO: 219039 - DNA, 25 bp, probe
gacagggactggaatgggggtcatg

SEQ ID NO: 219040 - DNA, 25 bp, probe
gacagacatgtggagtatgggggtg

SEQ ID NO: 219041 - DNA, 25 bp, probe
gacatgactgcttatgggaggcggg

SEQ ID NO: 219042 - DNA, 25 bp, probe
gacagcagcctgtatgtggtgtggg

SEQ ID NO: 219043 - DNA, 25 bp, probe
gacagcatcctgacggttgatgtgg

SEQ ID NO: 219044 - DNA, 25 bp, probe
gacagcatccttgaatatgtaaaag

SEQ ID NO: 219045 - DNA, 25 bp, probe
gacagcatccttgaatatgtaaaag

SEQ ID NO: 219046 - DNA, 25 bp, probe
gacaccgctggtggactgtaataat

SEQ ID NO: 219047 - DNA, 25 bp, probe
gacagcaccggaagctcttaattat

SEQ ID NO: 219048 - DNA, 25 bp, probe
gacacccggacaatgctggcgcttc

SEQ ID NO: 219049 - DNA, 25 bp, probe
gacacccagtacaagatgaccatct

SEQ ID NO: 219050 - DNA, 25 bp, probe
gacatcctcagtgccgtgggcactt

SEQ ID NO: 219051 - DNA, 25 bp, probe
gacagattgcagtatccgggatcca

SEQ ID NO: 219052 - DNA, 25 bp, probe
gacagttggtgattggctggatgcc

SEQ ID NO: 219053 - DNA, 25 bp, probe
gacagttggttttgcatgtctgcat

SEQ ID NO: 219054 - DNA, 25 bp, probe
gacagctgcggtacttgagggcttc

SEQ ID NO: 219055 - DNA, 25 bp, probe
gacagctggttcctgtgatgagcct

SEQ ID NO: 219056 - DNA, 25 bp, probe
gactgtgtttcgcattcggcgttat

SEQ ID NO: 219057 - DNA, 25 bp, probe
gacagctttctgattgttggggtaa

SEQ ID NO: 219058 - DNA, 25 bp, probe
gacagctttctgattgttggggtaa

SEQ ID NO: 219059 - DNA, 25 bp, probe
gacagtgttcacagttatttggaaa

SEQ ID NO: 219060 - DNA, 25 bp, probe
gacatttacactagttacttagaca

SEQ ID NO: 219061 - DNA, 25 bp, probe
gacatgcccccaatttaatgtgatg

SEQ ID NO: 219062 - DNA, 25 bp, probe
gacagcccagccagtttggctgttt

SEQ ID NO: 219063 - DNA, 25 bp, probe
gacagttgacctggctattggttct

SEQ ID NO: 219064 - DNA, 25 bp, probe
gacagttgacctggctattggttct

SEQ ID NO: 219065 - DNA, 25 bp, probe
gacagtggatcggctgtacttcgtc

SEQ ID NO: 219066 - DNA, 25 bp, probe
gacagcgacttggcaatatttattg

SEQ ID NO: 219067 - DNA, 25 bp, probe
gacaggcacctacatccttattgac

SEQ ID NO: 219068 - DNA, 25 bp, probe
gacagactctgaatgcatgaccttt

SEQ ID NO: 219069 - DNA, 25 bp, probe
gacacctgcgatatgaacgttcaca

SEQ ID NO: 219070 - DNA, 25 bp, probe
gacatggctgaaaggacaggtccca

SEQ ID NO: 219071 - DNA, 25 bp, probe
gacagagcgctaagcgacgaccaca

SEQ ID NO: 219072 - DNA, 25 bp, probe
gacagcagcgatagcagtgacagca

SEQ ID NO: 219073 - DNA, 25 bp, probe
gacagcagagctcgatgatatagca

SEQ ID NO: 219074 - DNA, 25 bp, probe
gacagcactgctcagacagtcaaag

SEQ ID NO: 219075 - DNA, 25 bp, probe
gacagcatctgttcaaagtcgtagg

SEQ ID NO: 219076 - DNA, 25 bp, probe
gacagctctctcgaagagatcttac

SEQ ID NO: 219077 - DNA, 25 bp, probe
gacagcgttgcagaggactgaccct

SEQ ID NO: 219078 - DNA, 25 bp, probe
gacagcgttgcagaggactgaccct

SEQ ID NO: 219079 - DNA, 25 bp, probe
gacacgctatgggaaagagatctcc

SEQ ID NO: 219080 - DNA, 25 bp, probe
gacaccaatctcaaaaagctgctaa

SEQ ID NO: 219081 - DNA, 25 bp, probe
gacagctgccttgataccagctctc

SEQ ID NO: 219082 - DNA, 25 bp, probe
gacagctcctgtgtacagcatcgtt

SEQ ID NO: 219083 - DNA, 25 bp, probe
gacagctgagtgtgtacagcagcgc

SEQ ID NO: 219084 - DNA, 25 bp, probe
gacagctgaatattataccagatga

SEQ ID NO: 219085 - DNA, 25 bp, probe
gacagtgctcagtaaagcaatagag

SEQ ID NO: 219086 - DNA, 25 bp, probe
gacagtgccaataccaccatagagg

SEQ ID NO: 219087 - DNA, 25 bp, probe
gacagtgccaataccaccatagagg

SEQ ID NO: 219088 - DNA, 25 bp, probe
gacagtgccaataccaccatagagg

SEQ ID NO: 219089 - DNA, 25 bp, probe
gacagtaaatatcagccttgcagca

SEQ ID NO: 219090 - DNA, 25 bp, probe
gacagactctgaatgcatgaccttt

SEQ ID NO: 219091 - DNA, 25 bp, probe
gacagccatggaatatgaccgttat

SEQ ID NO: 219092 - DNA, 25 bp, probe
gacagctatggattatttgcggttg

SEQ ID NO: 219093 - DNA, 25 bp, probe
gacagcaccagactattctctgcgt

SEQ ID NO: 219094 - DNA, 25 bp, probe
gacagcctcagcatacttcttgctg

SEQ ID NO: 219095 - DNA, 25 bp, probe
gacagcgtgcactaacttcatgatg

SEQ ID NO: 219096 - DNA, 25 bp, probe
gacagctgagcggctgagtcctgag

SEQ ID NO: 219097 - DNA, 25 bp, probe
gacagctgcagaggtgacagcggag

SEQ ID NO: 219098 - DNA, 25 bp, probe
gacagtcatgattggcagccggagt

SEQ ID NO: 219099 - DNA, 25 bp, probe
gacagatgagattgtcgcactgaag

SEQ ID NO: 219100 - DNA, 25 bp, probe
gacagattaatttcactcaaatgca

SEQ ID NO: 219101 - DNA, 25 bp, probe
gacagattaatttcactcaaatgca

SEQ ID NO: 219102 - DNA, 25 bp, probe
gacagacaacatgaaccagatctac

SEQ ID NO: 219103 - DNA, 25 bp, probe
gacagacaacatgaaccagatctac

SEQ ID NO: 219104 - DNA, 25 bp, probe
gacagacacctaatattcatgactt

SEQ ID NO: 219105 - DNA, 25 bp, probe
gacagtcatccacaaggcatagcct

SEQ ID NO: 219106 - DNA, 25 bp, probe
gacagtcatccacaaggcatagcct

SEQ ID NO: 219107 - DNA, 25 bp, probe
gacagagtctcacaattgtcaccca

SEQ ID NO: 219108 - DNA, 25 bp, probe
gacagagtctcacaattgtcaccca

SEQ ID NO: 219109 - DNA, 25 bp, probe
gacagacctcagacagattgtcacg

SEQ ID NO: 219110 - DNA, 25 bp, probe
gacagcaagtgagcagagatgtact

SEQ ID NO: 219111 - DNA, 25 bp, probe
gacagcaagagggacagatgcccca

SEQ ID NO: 219112 - DNA, 25 bp, probe
gacagcaagagggacagatgcccca

SEQ ID NO: 219113 - DNA, 25 bp, probe
gacaggaaggagaccatggctctca

SEQ ID NO: 219114 - DNA, 25 bp, probe
gacagaaagggcagcctatctcatt

SEQ ID NO: 219115 - DNA, 25 bp, probe
gacagccctgtgattgttatgatca

SEQ ID NO: 219116 - DNA, 25 bp, probe
gacatgtcctgcatcttctataaac

SEQ ID NO: 219117 - DNA, 25 bp, probe
gacagatctctgctttggaaatcac

SEQ ID NO: 219118 - DNA, 25 bp, probe
gacagatcttgccgtggactagcaa

SEQ ID NO: 219119 - DNA, 25 bp, probe
gacatgatcctactgcggagtggca

SEQ ID NO: 219120 - DNA, 25 bp, probe
gacatgatcctactgcggagtggca

SEQ ID NO: 219121 - DNA, 25 bp, probe
gacagactcgtgtgacagtggcatc

SEQ ID NO: 219122 - DNA, 25 bp, probe
gacagacacgctgcagatcgaggac

SEQ ID NO: 219123 - DNA, 25 bp, probe
gaaggtgggcgattttggattcagc

SEQ ID NO: 219124 - DNA, 25 bp, probe
cccgctgcagtgaagagctgcgccc

SEQ ID NO: 219125 - DNA, 25 bp, probe
aaagtgattatgggaatcataggga

SEQ ID NO: 219126 - DNA, 25 bp, probe
tgtccttgcacttaaactcattcca

SEQ ID NO: 219127 - DNA, 25 bp, probe
gacagcagtgacagcagcgacagca

SEQ ID NO: 219128 - DNA, 25 bp, probe
gacagcaatgaaagcagcgacagca

SEQ ID NO: 219129 - DNA, 25 bp, probe
gacagcaatgatgagagtgacagcc

SEQ ID NO: 219130 - DNA, 25 bp, probe
gacagcgagctggagaggaagcgca

SEQ ID NO: 219131 - DNA, 25 bp, probe
gacagcagtgctgaagatgagggca

SEQ ID NO: 219132 - DNA, 25 bp, probe
gacagctggctgagaagtgggttca

SEQ ID NO: 219133 - DNA, 25 bp, probe
gacaggtgatgaggtcagtgggctt

SEQ ID NO: 219134 - DNA, 25 bp, probe
gacagggatgatggagagttcatga

SEQ ID NO: 219135 - DNA, 25 bp, probe
gacaggttgatgccagagccgtaag

SEQ ID NO: 219136 - DNA, 25 bp, probe
gacagtgtctgacattgcctgctca

SEQ ID NO: 219137 - DNA, 25 bp, probe
gacagctgcttacatgttcatctct

SEQ ID NO: 219138 - DNA, 25 bp, probe
gacagccattgagattgtgcctgcc

SEQ ID NO: 219139 - DNA, 25 bp, probe
gacagcatcaaaggtatggcttctc

SEQ ID NO: 219140 - DNA, 25 bp, probe
gacagtcaaaggacatcttctgcca

SEQ ID NO: 219141 - DNA, 25 bp, probe
gacagtgaattgacccatgttccct

SEQ ID NO: 219142 - DNA, 25 bp, probe
gacagtgaattgacccatgttccct

SEQ ID NO: 219143 - DNA, 25 bp, probe
gacagggtttcaccatgttagccgg

SEQ ID NO: 219144 - DNA, 25 bp, probe
gacaggagtttctaagtatcatgcc

SEQ ID NO: 219145 - DNA, 25 bp, probe
gacaggatcttcacagcgtagctcc

SEQ ID NO: 219146 - DNA, 25 bp, probe
gacatggtgttgagggaagcactga

SEQ ID NO: 219147 - DNA, 25 bp, probe
gacatcgttggtccggatggtctag

SEQ ID NO: 219148 - DNA, 25 bp, probe
gacagcgttagtacagtgatggcca

SEQ ID NO: 219149 - DNA, 25 bp, probe
gacatggttctcaacaagatggcca

SEQ ID NO: 219150 - DNA, 25 bp, probe
gacatggttctcaacaagatggcca

SEQ ID NO: 219151 - DNA, 25 bp, probe
gacaggtcaatatcagaactgccaa

SEQ ID NO: 219152 - DNA, 25 bp, probe
gacaggtcaatatcagaactgccaa

SEQ ID NO: 219153 - DNA, 25 bp, probe
gacagtggcatcaccaagagcgact

SEQ ID NO: 219154 - DNA, 25 bp, probe
gacatctggctatcacacagacaga

SEQ ID NO: 219155 - DNA, 25 bp, probe
gacagagtgtgacaagcagacatgc

SEQ ID NO: 219156 - DNA, 25 bp, probe
gacagagtgtgacaagcagacatgc

SEQ ID NO: 219157 - DNA, 25 bp, probe
gacagagggttcgaggaagagttgg

SEQ ID NO: 219158 - DNA, 25 bp, probe
gacatgacagggaacaggaaggtgg

SEQ ID NO: 219159 - DNA, 25 bp, probe
gacagacgatggcagaggagagggc

SEQ ID NO: 219160 - DNA, 25 bp, probe
gacagccgtggcggaggaagtgaat

SEQ ID NO: 219161 - DNA, 25 bp, probe
gacagcactggtcagagactaagaa

SEQ ID NO: 219162 - DNA, 25 bp, probe
gacagacagagtcaaatctacagca

SEQ ID NO: 219163 - DNA, 25 bp, probe
gacatagtgagtgtgaactcccact

SEQ ID NO: 219164 - DNA, 25 bp, probe
gacagtggcgctgtaactgtccctg

SEQ ID NO: 219165 - DNA, 25 bp, probe
gacagtggcgctgtaactgtccctg

SEQ ID NO: 219166 - DNA, 25 bp, probe
gacagtggcgacgatgaacatgccg

SEQ ID NO: 219167 - DNA, 25 bp, probe
gacagaaagcgccataacagcatct

SEQ ID NO: 219168 - DNA, 25 bp, probe
gacatgaggatggacaagacagagc

SEQ ID NO: 219169 - DNA, 25 bp, probe
gactcaggggaacaatgcagctgaa

SEQ ID NO: 219170 - DNA, 25 bp, probe
gacttggggtgacactcagggctgc

SEQ ID NO: 219171 - DNA, 25 bp, probe
gacttgccatggtgacacgggagcc

SEQ ID NO: 219172 - DNA, 25 bp, probe
gacagctggcagggaaaacggcacc

SEQ ID NO: 219173 - DNA, 25 bp, probe
gacatctggcaggccatcaaacctc

SEQ ID NO: 219174 - DNA, 25 bp, probe
gacagatgtggttgcatcctaactc

SEQ ID NO: 219175 - DNA, 25 bp, probe
gacagaatgctgggctcacaatcct

SEQ ID NO: 219176 - DNA, 25 bp, probe
gacatccagatgagtcaataccgtt

SEQ ID NO: 219177 - DNA, 25 bp, probe
gacttcggcacgtaaacgcggttct

SEQ ID NO: 219178 - DNA, 25 bp, probe
gacattcgtccggaaaaggggtctg

SEQ ID NO: 219179 - DNA, 25 bp, probe
gagcttcccgtgcaaaaagggtcac

SEQ ID NO: 219180 - DNA, 25 bp, probe
gacattcctcgtcagtattaggaat

SEQ ID NO: 219181 - DNA, 25 bp, probe
gacatccccatgttattcttttaag

SEQ ID NO: 219182 - DNA, 25 bp, probe
gacagctatgggtttatttcttaga

SEQ ID NO: 219183 - DNA, 25 bp, probe
gacagaagcccacttagtttcttgg

SEQ ID NO: 219184 - DNA, 25 bp, probe
gacagtcccacacgtggaggatctt

SEQ ID NO: 219185 - DNA, 25 bp, probe
gacattgcccaaggttgaagcaatg

SEQ ID NO: 219186 - DNA, 25 bp, probe
gacatttccagatctggtgatctat

SEQ ID NO: 219187 - DNA, 25 bp, probe
gacatttccagatctggtgatctat

SEQ ID NO: 219188 - DNA, 25 bp, probe
gacttccacagattctacttcgaga

SEQ ID NO: 219189 - DNA, 25 bp, probe
gacttccacagattctacttcgaga

SEQ ID NO: 219190 - DNA, 25 bp, probe
gacttccacagattctacttcgaga

SEQ ID NO: 219191 - DNA, 25 bp, probe
gacttccacagattctacttcgaga

SEQ ID NO: 219192 - DNA, 25 bp, probe
gacttccacagattctacttcgaga

SEQ ID NO: 219193 - DNA, 25 bp, probe
gacttcagcgaagtgtacttggtga

SEQ ID NO: 219194 - DNA, 25 bp, probe
gacagtagccaagttatattgaata

SEQ ID NO: 219195 - DNA, 25 bp, probe
gacagatactagatattttgatgaa

SEQ ID NO: 219196 - DNA, 25 bp, probe
gacagatactggaagctctacgcta

SEQ ID NO: 219197 - DNA, 25 bp, probe
gacagaagcggaactctcttctaac

SEQ ID NO: 219198 - DNA, 25 bp, probe
gacaggacgcagatctctcctaaag

SEQ ID NO: 219199 - DNA, 25 bp, probe
gacagaacatgctgtgttccataca

SEQ ID NO: 219200 - DNA, 25 bp, probe
gacagaccatggcctgatgtttaca

SEQ ID NO: 219201 - DNA, 25 bp, probe
gacatgccacatgccgtgttaagca

SEQ ID NO: 219202 - DNA, 25 bp, probe
gacagacacaacggcaacattatgc

SEQ ID NO: 219203 - DNA, 25 bp, probe
gacaggaccatctctgacattcatt

SEQ ID NO: 219204 - DNA, 25 bp, probe
gacagggcatcaaattaagatcatt

SEQ ID NO: 219205 - DNA, 25 bp, probe
gacagggcatcaaattaagatcatt

SEQ ID NO: 219206 - DNA, 25 bp, probe
gacatgtgacatttatatattgaat

SEQ ID NO: 219207 - DNA, 25 bp, probe
gacagtgacatcttgttcggaagtg

SEQ ID NO: 219208 - DNA, 25 bp, probe
gacagtgttttttcttttgtgtgtt

SEQ ID NO: 219209 - DNA, 25 bp, probe
gacagtcctttatatgatttgagta

SEQ ID NO: 219210 - DNA, 25 bp, probe
gacagtcctttatatgatttgagta

SEQ ID NO: 219211 - DNA, 25 bp, probe
gactgtcttttatctttagacttca

SEQ ID NO: 219212 - DNA, 25 bp, probe
gactgtcttttatctttagacttca

SEQ ID NO: 219213 - DNA, 25 bp, probe
gacatactttttttttcttatagca

SEQ ID NO: 219214 - DNA, 25 bp, probe
gacatattcattgtgttaccgtaac

SEQ ID NO: 219215 - DNA, 25 bp, probe
gacagcttcatcagctgtttcctga

SEQ ID NO: 219216 - DNA, 25 bp, probe
gacagctattcaatatgtgatctcc

SEQ ID NO: 219217 - DNA, 25 bp, probe
gacagctattcaatatgtgatctcc

SEQ ID NO: 219218 - DNA, 25 bp, probe
gacagctattcaatatgtgatctcc

SEQ ID NO: 219219 - DNA, 25 bp, probe
gacatgctttaaatgtggttcccgg

SEQ ID NO: 219220 - DNA, 25 bp, probe
gactcttctaattttaatccccaag

SEQ ID NO: 219221 - DNA, 25 bp, probe
gactttgaaaacttgtttcaccctg

SEQ ID NO: 219222 - DNA, 25 bp, probe
gactttgaaaacttgtttcaccctg

SEQ ID NO: 219223 - DNA, 25 bp, probe
gactttggccgaaatttctacacct

SEQ ID NO: 219224 - DNA, 25 bp, probe
gactttaattcaagttacttcctgt

SEQ ID NO: 219225 - DNA, 25 bp, probe
gacatctatgaaacggattactacc

SEQ ID NO: 219226 - DNA, 25 bp, probe
gacattagagacatctacgacttcc

SEQ ID NO: 219227 - DNA, 25 bp, probe
gacatcgacgaagccaaactttctg

SEQ ID NO: 219228 - DNA, 25 bp, probe
gacatcctacaagagaatactattc

SEQ ID NO: 219229 - DNA, 25 bp, probe
gactacgcaatccggaaagctttcc

SEQ ID NO: 219230 - DNA, 25 bp, probe
gactaatccaagaaaaggtttgact

SEQ ID NO: 219231 - DNA, 25 bp, probe
gactaatccaagaaaaggtttgact

SEQ ID NO: 219232 - DNA, 25 bp, probe
gagcgactccaaaaagaatagttac

SEQ ID NO: 219233 - DNA, 25 bp, probe
gactgacccactgtacaatttctac

SEQ ID NO: 219234 - DNA, 25 bp, probe
gacttacatcctcttcagattgctt

SEQ ID NO: 219235 - DNA, 25 bp, probe
gactatagccagcagtgtgacattt

SEQ ID NO: 219236 - DNA, 25 bp, probe
gacatatagctcagatggaatgctt

SEQ ID NO: 219237 - DNA, 25 bp, probe
gactatgagcgagatggactgaaag

SEQ ID NO: 219238 - DNA, 25 bp, probe
gactatgagcgagatggactgaaag

SEQ ID NO: 219239 - DNA, 25 bp, probe
gactagagcagtgtgtattcaaaac

SEQ ID NO: 219240 - DNA, 25 bp, probe
gacatggacagagatttttaaggaa

SEQ ID NO: 219241 - DNA, 25 bp, probe
gacaggcaccaatttctttaaagaa

SEQ ID NO: 219242 - DNA, 25 bp, probe
gactcctccaaatcttaaaatgaag

SEQ ID NO: 219243 - DNA, 25 bp, probe
gacatttgccaactacttaaatatg

SEQ ID NO: 219244 - DNA, 25 bp, probe
gacagaggcttatactggaataatg

SEQ ID NO: 219245 - DNA, 25 bp, probe
gacaggtgtgcttgaaagggaaatg

SEQ ID NO: 219246 - DNA, 25 bp, probe
gacagtgtgtgcggcaagaacgcaa

SEQ ID NO: 219247 - DNA, 25 bp, probe
gacagtgtgtgcggcaagaacgcaa

SEQ ID NO: 219248 - DNA, 25 bp, probe
gacatgtttcatagcaaggaggata

SEQ ID NO: 219249 - DNA, 25 bp, probe
gacagtgacagtgaaggcagtgaca

SEQ ID NO: 219250 - DNA, 25 bp, probe
gacagtccagtcctaggcaaaattt

SEQ ID NO: 219251 - DNA, 25 bp, probe
gacatggaatccttaggctacgttt

SEQ ID NO: 219252 - DNA, 25 bp, probe
gacaggacaaagtatgtgtgaagtt

SEQ ID NO: 219253 - DNA, 25 bp, probe
gacaggacaaagtatgtgtgaagtt

SEQ ID NO: 219254 - DNA, 25 bp, probe
gacagagggcaatgatgtgtgcaag

SEQ ID NO: 219255 - DNA, 25 bp, probe
gacagagggcaatgatgtgtgcaag

SEQ ID NO: 219256 - DNA, 25 bp, probe
gacagagggcaatgatgtgtgcaag

SEQ ID NO: 219257 - DNA, 25 bp, probe
gacagagggcaatgatgtgtgcaag

SEQ ID NO: 219258 - DNA, 25 bp, probe
gacagagggcaatgatgtgtgcaag

SEQ ID NO: 219259 - DNA, 25 bp, probe
gacagacagcgaagagatggtgtga

SEQ ID NO: 219260 - DNA, 25 bp, probe
gacagagctgtcagagcaggtgctg

SEQ ID NO: 219261 - DNA, 25 bp, probe
gacagaggtgctaatgcaagctttg

SEQ ID NO: 219262 - DNA, 25 bp, probe
gacagaggtgctaatgcaagctttg

SEQ ID NO: 219263 - DNA, 25 bp, probe
gacatggctgtggtccagagactct

SEQ ID NO: 219264 - DNA, 25 bp, probe
gacatgtgtgctagagcttactctg

SEQ ID NO: 219265 - DNA, 25 bp, probe
gacatgtgtgctagagcttactctg

SEQ ID NO: 219266 - DNA, 25 bp, probe
gacagatgtctattcatgttcttta

SEQ ID NO: 219267 - DNA, 25 bp, probe
gacagtgcttctacacatttcatct

SEQ ID NO: 219268 - DNA, 25 bp, probe
gacaggtggtgttcaattcatttga

SEQ ID NO: 219269 - DNA, 25 bp, probe
gacagttgtggtttatcattctcta

SEQ ID NO: 219270 - DNA, 25 bp, probe
gacagttgtggtttatcattctcta

SEQ ID NO: 219271 - DNA, 25 bp, probe
gactgattgtggtttgaatgttcat

SEQ ID NO: 219272 - DNA, 25 bp, probe
gacatttgtgtgttaaactaatgga

SEQ ID NO: 219273 - DNA, 25 bp, probe
gactttatcagctttaatcgatggg

SEQ ID NO: 219274 - DNA, 25 bp, probe
gacatttcaagctctgttggtgggt

SEQ ID NO: 219275 - DNA, 25 bp, probe
gacattgcagaactggtggatgcgg

SEQ ID NO: 219276 - DNA, 25 bp, probe
gacatggctgaaaggtgtggggtca

SEQ ID NO: 219277 - DNA, 25 bp, probe
gacatgactgtctgtgttgcggact

SEQ ID NO: 219278 - DNA, 25 bp, probe
gacatgagagctcagcttccgacac

SEQ ID NO: 219279 - DNA, 25 bp, probe
gacatgagagctcagcttccgacac

SEQ ID NO: 219280 - DNA, 25 bp, probe
gacagagcagatcagtctttgtcaa

SEQ ID NO: 219281 - DNA, 25 bp, probe
gacagagaagcacgtgtttgagcag

SEQ ID NO: 219282 - DNA, 25 bp, probe
gacatggaagaggtttgctgagcgg

SEQ ID NO: 219283 - DNA, 25 bp, probe
gacatggggcatagaaactgaggag

SEQ ID NO: 219284 - DNA, 25 bp, probe
gacattccagcagaattctcaggag

SEQ ID NO: 219285 - DNA, 25 bp, probe
gacatactcgcagcagtgttactgg

SEQ ID NO: 219286 - DNA, 25 bp, probe
gactcgtagcaccagggtttggagg

SEQ ID NO: 219287 - DNA, 25 bp, probe
gactcctagttgtgtttggaaaggg

SEQ ID NO: 219288 - DNA, 25 bp, probe
gactcctagttgtgtttggaaaggg

SEQ ID NO: 219289 - DNA, 25 bp, probe
gttctgctagtcacgtttccaaagc

SEQ ID NO: 219290 - DNA, 25 bp, probe
gacttgctagtgagcttgctttaaa

SEQ ID NO: 219291 - DNA, 25 bp, probe
gacttgctagtgagcttgctttaaa

SEQ ID NO: 219292 - DNA, 25 bp, probe
gacatggctcagatcctggatttgc

SEQ ID NO: 219293 - DNA, 25 bp, probe
gacatcatctacactcaggacttca

SEQ ID NO: 219294 - DNA, 25 bp, probe
gacatcctatctagctgcaaggtat

SEQ ID NO: 219295 - DNA, 25 bp, probe
gacatctctagtacttcggatcaag

SEQ ID NO: 219296 - DNA, 25 bp, probe
gacatcatcaagatccttaacaaga

SEQ ID NO: 219297 - DNA, 25 bp, probe
gacatctaagttttgtgtacagaga

SEQ ID NO: 219298 - DNA, 25 bp, probe
gacatggacgtttgtgatgatcacg

SEQ ID NO: 219299 - DNA, 25 bp, probe
gacatgcggcctgcatggtgggagc

SEQ ID NO: 219300 - DNA, 25 bp, probe
gacatgcggcctgcatggtgggagc

SEQ ID NO: 219301 - DNA, 25 bp, probe
gacatctgtgtttcaagtggggctc

SEQ ID NO: 219302 - DNA, 25 bp, probe
gactctgctggaaaagcggaggttg

SEQ ID NO: 219303 - DNA, 25 bp, probe
gactcgctggacgacagcggcagct

SEQ ID NO: 219304 - DNA, 25 bp, probe
gactaggtggcagaggccaacccaa

SEQ ID NO: 219305 - DNA, 25 bp, probe
gacagaggagggcgtgactcaccca

SEQ ID NO: 219306 - DNA, 25 bp, probe
gacagaaatggcttggctttccgac

SEQ ID NO: 219307 - DNA, 25 bp, probe
gacagaaatggcttggctttccgac

SEQ ID NO: 219308 - DNA, 25 bp, probe
gacagatcctggggagttacttaca

SEQ ID NO: 219309 - DNA, 25 bp, probe
gacttactgtggcagctttgcttac

SEQ ID NO: 219310 - DNA, 25 bp, probe
gacttactgtggcagctttgcttac

SEQ ID NO: 219311 - DNA, 25 bp, probe
gacggacagtggtatggttcttgcc

SEQ ID NO: 219312 - DNA, 25 bp, probe
gacaggaaagaattccattttccag

SEQ ID NO: 219313 - DNA, 25 bp, probe
gacaggaaagaattccattttccag

SEQ ID NO: 219314 - DNA, 25 bp, probe
gacagatagatgcaggtccattctg

SEQ ID NO: 219315 - DNA, 25 bp, probe
gacagatagatgcaggtccattctg

SEQ ID NO: 219316 - DNA, 25 bp, probe
gacagatggacaggttcctcctgcg

SEQ ID NO: 219317 - DNA, 25 bp, probe
gacagatggacaggttcctcctgcg

SEQ ID NO: 219318 - DNA, 25 bp, probe
gacatttacaggaggccccggagaa

SEQ ID NO: 219319 - DNA, 25 bp, probe
gacattcaccagagggcgccggtga

SEQ ID NO: 219320 - DNA, 25 bp, probe
gacttcccatgtagagtggccaagc

SEQ ID NO: 219321 - DNA, 25 bp, probe
gacttcccaagtaagcagcaaaccc

SEQ ID NO: 219322 - DNA, 25 bp, probe
gacattgaccagctgaagcgcatca

SEQ ID NO: 219323 - DNA, 25 bp, probe
gacatcgaagacgtgaataatcata

SEQ ID NO: 219324 - DNA, 25 bp, probe
gacatcgagactataaaattcaggc

SEQ ID NO: 219325 - DNA, 25 bp, probe
gacatggaatcgttagaatattggg

SEQ ID NO: 219326 - DNA, 25 bp, probe
gacaggaatcgaatgaaaacacttg

SEQ ID NO: 219327 - DNA, 25 bp, probe
gacatgacaatgcaatgaaacagat

SEQ ID NO: 219328 - DNA, 25 bp, probe
gacgcactgacctggaacaacgaaa

SEQ ID NO: 219329 - DNA, 25 bp, probe
gacccagacctagagccaggagaaa

SEQ ID NO: 219330 - DNA, 25 bp, probe
gactttacctcacagtgcttaaaga

SEQ ID NO: 219331 - DNA, 25 bp, probe
gacatttacctatgtgtgctgcctc

SEQ ID NO: 219332 - DNA, 25 bp, probe
gacattggccgtatgctggatgccc

SEQ ID NO: 219333 - DNA, 25 bp, probe
gacaggagacatgagtctttgccgg

SEQ ID NO: 219334 - DNA, 25 bp, probe
gacaggaaccaagtcctttgcgtgt

SEQ ID NO: 219335 - DNA, 25 bp, probe
gacagtgaaactcacctttctgtga

SEQ ID NO: 219336 - DNA, 25 bp, probe
gacattaaaatctccaggcctgtga

SEQ ID NO: 219337 - DNA, 25 bp, probe
gactatgcagatgcctaccaggacc

SEQ ID NO: 219338 - DNA, 25 bp, probe
gacagaggacgcttgagccagaatc

SEQ ID NO: 219339 - DNA, 25 bp, probe
gagcgagtgcaagatggccaagatc

SEQ ID NO: 219340 - DNA, 25 bp, probe
gacaggtcatcagatactcagaggc

SEQ ID NO: 219341 - DNA, 25 bp, probe
gacaggtcatcagatactcagaggc

SEQ ID NO: 219342 - DNA, 25 bp, probe
gacagttctgaaatcatcctggacc

SEQ ID NO: 219343 - DNA, 25 bp, probe
gacagtggtagagtcctaggacatc

SEQ ID NO: 219344 - DNA, 25 bp, probe
gacagtggtagagtcctaggacatc

SEQ ID NO: 219345 - DNA, 25 bp, probe
gacttcgtagcagcacctactatgc

SEQ ID NO: 219346 - DNA, 25 bp, probe
gacttcctaaaactctatcaggtcc

SEQ ID NO: 219347 - DNA, 25 bp, probe
gacatatgcctcgaaaggcttcagt

SEQ ID NO: 219348 - DNA, 25 bp, probe
gacatatgcctcgaaaggcttcagt

SEQ ID NO: 219349 - DNA, 25 bp, probe
tacttcctgcgaggaggcttcgacg

SEQ ID NO: 219350 - DNA, 25 bp, probe
gactatgtcttagaagttcggcact

SEQ ID NO: 219351 - DNA, 25 bp, probe
gacattcttttttattggcggctcc

SEQ ID NO: 219352 - DNA, 25 bp, probe
gacattcttgttttattcccagacc

SEQ ID NO: 219353 - DNA, 25 bp, probe
gacttcttttattgtcacctacacc

SEQ ID NO: 219354 - DNA, 25 bp, probe
gacagtcttctgaatatgccgttaa

SEQ ID NO: 219355 - DNA, 25 bp, probe
gacagtcttctgaatatgccgttaa

SEQ ID NO: 219356 - DNA, 25 bp, probe
gacatcttttggtcatccagattct

SEQ ID NO: 219357 - DNA, 25 bp, probe
gacatcttttggtcatccagattct

SEQ ID NO: 219358 - DNA, 25 bp, probe
gacatcttgcttataaatattccat

SEQ ID NO: 219359 - DNA, 25 bp, probe
gacattcatgcagtcattcatcaac

SEQ ID NO: 219360 - DNA, 25 bp, probe
gacatcatccccactatgatcaaca

SEQ ID NO: 219361 - DNA, 25 bp, probe
gacatcatccccactatgatcaaca

SEQ ID NO: 219362 - DNA, 25 bp, probe
gacattagctctcactttcaagaag

SEQ ID NO: 219363 - DNA, 25 bp, probe
gacatctaacgttttatcataaatt

SEQ ID NO: 219364 - DNA, 25 bp, probe
gacattaacccactcatttagtaat

SEQ ID NO: 219365 - DNA, 25 bp, probe
gacataaaccaagtctgcccagttc

SEQ ID NO: 219366 - DNA, 25 bp, probe
gactacagcaaaggtccccagaacc

SEQ ID NO: 219367 - DNA, 25 bp, probe
gactacagcaaaggtccccagaacc

SEQ ID NO: 219368 - DNA, 25 bp, probe
gacatccgcaaagacctgtacgcca

SEQ ID NO: 219369 - DNA, 25 bp, probe
gacatccgcaaagacctgtacgcca

SEQ ID NO: 219370 - DNA, 25 bp, probe
gacatctctgtaaaacctgcaaacc

SEQ ID NO: 219371 - DNA, 25 bp, probe
gacatctctgaaaagcaatgctaag

SEQ ID NO: 219372 - DNA, 25 bp, probe
gacatgtcggcgcagattgctgaag

SEQ ID NO: 219373 - DNA, 25 bp, probe
gacagtgctggaggcgggccagaga

SEQ ID NO: 219374 - DNA, 25 bp, probe
gacagggctgagtgggcaaaatacg

SEQ ID NO: 219375 - DNA, 25 bp, probe
gacagggctgagtgggcaaaatacg

SEQ ID NO: 219376 - DNA, 25 bp, probe
gacatggacatggaggggcagaacc

SEQ ID NO: 219377 - DNA, 25 bp, probe
gacatggacatggaggggcagaacc

SEQ ID NO: 219378 - DNA, 25 bp, probe
gacaggacgctccgagcgaatccgc

SEQ ID NO: 219379 - DNA, 25 bp, probe
gacagaggagtccagcggaaggtca

SEQ ID NO: 219380 - DNA, 25 bp, probe
gacggtcatgaccagccgaatcgtg

SEQ ID NO: 219381 - DNA, 25 bp, probe
tacggtttcgagggtgaggtgaagg

SEQ ID NO: 219382 - DNA, 25 bp, probe
gacgtttgggggagggaaagcagca

SEQ ID NO: 219383 - DNA, 25 bp, probe
gacgtggtggaacaagaggaaaggc

SEQ ID NO: 219384 - DNA, 25 bp, probe
gactgggggttgcaagggaacagag

SEQ ID NO: 219385 - DNA, 25 bp, probe
gactcgggggtattttggtcacagg

SEQ ID NO: 219386 - DNA, 25 bp, probe
gacattttgggtgatgcttgttctt

SEQ ID NO: 219387 - DNA, 25 bp, probe
gacatgttaggcccttgttttcttt

SEQ ID NO: 219388 - DNA, 25 bp, probe
gacagttagagatgctgattttttt

SEQ ID NO: 219389 - DNA, 25 bp, probe
gacagtttgtaaatgttatttctgc

SEQ ID NO: 219390 - DNA, 25 bp, probe
gacaggcatggtactagatttattt

SEQ ID NO: 219391 - DNA, 25 bp, probe
gacaggggtgaccacagctgtgatt

SEQ ID NO: 219392 - DNA, 25 bp, probe
gacatggaggcctgacagctgttgt

SEQ ID NO: 219393 - DNA, 25 bp, probe
gacagtgactaagggcagcatgttt

SEQ ID NO: 219394 - DNA, 25 bp, probe
gacagtccagaaggagaacttcctg

SEQ ID NO: 219395 - DNA, 25 bp, probe
gacatgtatcagatgctgagacaca

SEQ ID NO: 219396 - DNA, 25 bp, probe
gacatgttgagaatcatggacaaaa

SEQ ID NO: 219397 - DNA, 25 bp, probe
gacatgtgctggacactgtccatga

SEQ ID NO: 219398 - DNA, 25 bp, probe
gacagtggagatccatggcgtgagc

SEQ ID NO: 219399 - DNA, 25 bp, probe
gacatgttcagggatcgccaggcgt

SEQ ID NO: 219400 - DNA, 25 bp, probe
gacagttcatggtaatgttgccctc

SEQ ID NO: 219401 - DNA, 25 bp, probe
gacagttcatggtaatgttgccctc

SEQ ID NO: 219402 - DNA, 25 bp, probe
gacagtggaagacatatctcacctc

SEQ ID NO: 219403 - DNA, 25 bp, probe
gacatgtgttcataaattcccatct

SEQ ID NO: 219404 - DNA, 25 bp, probe
gacagtgtcatctaaatattccgaa

SEQ ID NO: 219405 - DNA, 25 bp, probe
gacagtgtcacatcaactttgtgga

SEQ ID NO: 219406 - DNA, 25 bp, probe
gacagtgtcacatcaactttgtgga

SEQ ID NO: 219407 - DNA, 25 bp, probe
gacatgggcatcaacacttttattc

SEQ ID NO: 219408 - DNA, 25 bp, probe
gacatctgagctcacactcagtgtt

SEQ ID NO: 219409 - DNA, 25 bp, probe
gacagtgctcatgaagccagtgcgt

SEQ ID NO: 219410 - DNA, 25 bp, probe
gacaggccagaatgaagtcctgggt

SEQ ID NO: 219411 - DNA, 25 bp, probe
gacaggacaagatgaagttcacggc

SEQ ID NO: 219412 - DNA, 25 bp, probe
gacaggaaagcattgaccctcattg

SEQ ID NO: 219413 - DNA, 25 bp, probe
gacaggcaagagcctgctgcacctc

SEQ ID NO: 219414 - DNA, 25 bp, probe
gacatggcaagaggcatggcttttc

SEQ ID NO: 219415 - DNA, 25 bp, probe
gacatcataaggcaggccctactgc

SEQ ID NO: 219416 - DNA, 25 bp, probe
gacatcatccagcggatgcacctca

SEQ ID NO: 219417 - DNA, 25 bp, probe
gacatcatcagcaggatattccgca

SEQ ID NO: 219418 - DNA, 25 bp, probe
gacatcaaggtgctgactctcactg

SEQ ID NO: 219419 - DNA, 25 bp, probe
gacatgaatgtattgtacactgacg

SEQ ID NO: 219420 - DNA, 25 bp, probe
gacatatcattagctatgcatcgca

SEQ ID NO: 219421 - DNA, 25 bp, probe
gactacagttcagtgcatgagctca

SEQ ID NO: 219422 - DNA, 25 bp, probe
gacatgcagctgtgtgtggcagtat

SEQ ID NO: 219423 - DNA, 25 bp, probe
gacatgctgctgtcggggagtacct

SEQ ID NO: 219424 - DNA, 25 bp, probe
gacatctgtgaaaatgggcgacctc

SEQ ID NO: 219425 - DNA, 25 bp, probe
gacatctgtgaaaatgggcgacctc

SEQ ID NO: 219426 - DNA, 25 bp, probe
gacatcgagcaaagtgtatggatcc

SEQ ID NO: 219427 - DNA, 25 bp, probe
gacagggacatacgttgtgattgat

SEQ ID NO: 219428 - DNA, 25 bp, probe
gacagggcatcatgggggatttggc

SEQ ID NO: 219429 - DNA, 25 bp, probe
gacagggatctcggtggggcctgtc

SEQ ID NO: 219430 - DNA, 25 bp, probe
gacatggtggctcggtacaggttgt

SEQ ID NO: 219431 - DNA, 25 bp, probe
gacatgggctatcttccaggtgtgc

SEQ ID NO: 219432 - DNA, 25 bp, probe
gacaggactattgtacagtatgaca

SEQ ID NO: 219433 - DNA, 25 bp, probe
gacatgtaccctgtgacaattggag

SEQ ID NO: 219434 - DNA, 25 bp, probe
gacatgtaccctgtgacaattggag

SEQ ID NO: 219435 - DNA, 25 bp, probe
gacagtgaaccgaagcgcaatgtgg

SEQ ID NO: 219436 - DNA, 25 bp, probe
gacagtgaaccgaagcgcaatgtgg

SEQ ID NO: 219437 - DNA, 25 bp, probe
gacaggaacatgctactgaagttta

SEQ ID NO: 219438 - DNA, 25 bp, probe
gacaggatatcatctagtgatcttt

SEQ ID NO: 219439 - DNA, 25 bp, probe
gacatgagttttccagcttttatac

SEQ ID NO: 219440 - DNA, 25 bp, probe
gacagtgttatcccacatattttga

SEQ ID NO: 219441 - DNA, 25 bp, probe
gacagtctgctacgcaaaacatttt

SEQ ID NO: 219442 - DNA, 25 bp, probe
gacgcgtcatcactgcagaaacgtg

SEQ ID NO: 219443 - DNA, 25 bp, probe
gacgcgtcatcactgcagaaacgtg

SEQ ID NO: 219444 - DNA, 25 bp, probe
gactagcctaggcaacacagtgagg

SEQ ID NO: 219445 - DNA, 25 bp, probe
gactaccaaaatcatcattgggtgt

SEQ ID NO: 219446 - DNA, 25 bp, probe
gacttgccaaaataactatgctgtg

SEQ ID NO: 219447 - DNA, 25 bp, probe
gacttgccaaaataactatgctgtg

SEQ ID NO: 219448 - DNA, 25 bp, probe
gactagccatctcaagcaactttcg

SEQ ID NO: 219449 - DNA, 25 bp, probe
gacatgtgccttaaacagacttttt

SEQ ID NO: 219450 - DNA, 25 bp, probe
gacttccttagaaattcatatttat

SEQ ID NO: 219451 - DNA, 25 bp, probe
gacttggtcagaaaattaattgttt

SEQ ID NO: 219452 - DNA, 25 bp, probe
gacttggtcaacaggatgcaaatga

SEQ ID NO: 219453 - DNA, 25 bp, probe
gacatagtgacaacatcatggtcaa

SEQ ID NO: 219454 - DNA, 25 bp, probe
gactagctagagacaatgaattaag

SEQ ID NO: 219455 - DNA, 25 bp, probe
gactaggggtgcatgccagcatacc

SEQ ID NO: 219456 - DNA, 25 bp, probe
gacattcgggcgaagaagattgcca

SEQ ID NO: 219457 - DNA, 25 bp, probe
gacagtctgtgttgcaaaagaagcc

SEQ ID NO: 219458 - DNA, 25 bp, probe
gacattttatagccaaggacgcctc

SEQ ID NO: 219459 - DNA, 25 bp, probe
gactttattggtcagtacaccctgc

SEQ ID NO: 219460 - DNA, 25 bp, probe
gacttaagctgcctcaaggaatttt

SEQ ID NO: 219461 - DNA, 25 bp, probe
gacttttctttcagccaagaattct

SEQ ID NO: 219462 - DNA, 25 bp, probe
gacttttctttcagccaagaattct

SEQ ID NO: 219463 - DNA, 25 bp, probe
gatcatctttccatcaggccaaaga

SEQ ID NO: 219464 - DNA, 25 bp, probe
gacatttccggttgagagaacagat

SEQ ID NO: 219465 - DNA, 25 bp, probe
gacatcgtgacaggtctgaaacaga

SEQ ID NO: 219466 - DNA, 25 bp, probe
gacatcgtgtcggactagtgcctgt

SEQ ID NO: 219467 - DNA, 25 bp, probe
gacatcgtgtcggactagtgcctgt

SEQ ID NO: 219468 - DNA, 25 bp, probe
gacattgtgtcagattaccagttat

SEQ ID NO: 219469 - DNA, 25 bp, probe
gacattggcaaccatttcaatgagt

SEQ ID NO: 219470 - DNA, 25 bp, probe
gacttggagctctttccaaatggac

SEQ ID NO: 219471 - DNA, 25 bp, probe
gacttggtgccacaaagaatgccac

SEQ ID NO: 219472 - DNA, 25 bp, probe
gacttggtgccacaaagaatgccac

SEQ ID NO: 219473 - DNA, 25 bp, probe
gactcatcggtcagcagaaaagacc

SEQ ID NO: 219474 - DNA, 25 bp, probe
gattacaggctgaggcacggtacgg

SEQ ID NO: 219475 - DNA, 25 bp, probe
gatctacggtttcgagggtgaggtg

SEQ ID NO: 219476 - DNA, 25 bp, probe
gactaacgccactgatggcggccgt

SEQ ID NO: 219477 - DNA, 25 bp, probe
gacatctaccagtccaaggaggccg

SEQ ID NO: 219478 - DNA, 25 bp, probe
gacatcatgcaccgagacaagcaga

SEQ ID NO: 219479 - DNA, 25 bp, probe
gacatctccacaggacacatgattc

SEQ ID NO: 219480 - DNA, 25 bp, probe
gacatcttcaagaagctggactcgg

SEQ ID NO: 219481 - DNA, 25 bp, probe
gacatcatgtaaacctaagcacgta

SEQ ID NO: 219482 - DNA, 25 bp, probe
gacattttcatagtgtcaagaagga

SEQ ID NO: 219483 - DNA, 25 bp, probe
gacatgtgcttgcatttctagcgag

SEQ ID NO: 219484 - DNA, 25 bp, probe
gacatttcggataactccagcagct

SEQ ID NO: 219485 - DNA, 25 bp, probe
gacatcagatcacaaatctaaggtc

SEQ ID NO: 219486 - DNA, 25 bp, probe
gacatcgtagcttcacattaagaaa

SEQ ID NO: 219487 - DNA, 25 bp, probe
gacatcgtagcttcacattaagaaa

SEQ ID NO: 219488 - DNA, 25 bp, probe
gacatccttctggacatttagaaca

SEQ ID NO: 219489 - DNA, 25 bp, probe
gacatccttctggacatttagaaca

SEQ ID NO: 219490 - DNA, 25 bp, probe
gacattcttgccgtattctcatgat

SEQ ID NO: 219491 - DNA, 25 bp, probe
gacattcattcgagatgctctctca

SEQ ID NO: 219492 - DNA, 25 bp, probe
gacattcctctgatcctaatgcagt

SEQ ID NO: 219493 - DNA, 25 bp, probe
gacatacctcagaatcctaaagtgg

SEQ ID NO: 219494 - DNA, 25 bp, probe
gacatacctcagaatcctaaagtgg

SEQ ID NO: 219495 - DNA, 25 bp, probe
gacatgacatcaagacactccagta

SEQ ID NO: 219496 - DNA, 25 bp, probe
gacatgttaccagcacaaataaaga

SEQ ID NO: 219497 - DNA, 25 bp, probe
gacttgattacctccattcggagaa

SEQ ID NO: 219498 - DNA, 25 bp, probe
gacttgtttacatcatttcacggaa

SEQ ID NO: 219499 - DNA, 25 bp, probe
gactttgtttcatactgccaataaa

SEQ ID NO: 219500 - DNA, 25 bp, probe
gactttgtccattaacatttatcca

SEQ ID NO: 219501 - DNA, 25 bp, probe
gactttgtccattaacatttatcca

SEQ ID NO: 219502 - DNA, 25 bp, probe
gacttattctaagcctcatctatcc

SEQ ID NO: 219503 - DNA, 25 bp, probe
gacttttctaaagctctgaacaaaa

SEQ ID NO: 219504 - DNA, 25 bp, probe
gacttttagggagcacaaacaagaa

SEQ ID NO: 219505 - DNA, 25 bp, probe
gactgaataaaccaggcaccgaaaa

SEQ ID NO: 219506 - DNA, 25 bp, probe
gacgattaactatgggcgggatgat

SEQ ID NO: 219507 - DNA, 25 bp, probe
gacttcccactctagggcagtggag

SEQ ID NO: 219508 - DNA, 25 bp, probe
gactatggccgagcagtagactggt

SEQ ID NO: 219509 - DNA, 25 bp, probe
gactatggctcgaggtctacggaga

SEQ ID NO: 219510 - DNA, 25 bp, probe
gacttcctttgggactaagcgcagg

SEQ ID NO: 219511 - DNA, 25 bp, probe
gacccttgtggttgactagggctgg

SEQ ID NO: 219512 - DNA, 25 bp, probe
gacatcctatgtcccagaggaggtg

SEQ ID NO: 219513 - DNA, 25 bp, probe
gacaggcattgttgccaggggtgag

SEQ ID NO: 219514 - DNA, 25 bp, probe
gacatgagcttgagcaggcaggggg

SEQ ID NO: 219515 - DNA, 25 bp, probe
gacggaagatcgggagcgggtcctt

SEQ ID NO: 219516 - DNA, 25 bp, probe
gacattaagatagaaggggctgttc

SEQ ID NO: 219517 - DNA, 25 bp, probe
gacattaggaaattagacaggttta

SEQ ID NO: 219518 - DNA, 25 bp, probe
gacattaggaaactaactgtacaaa

SEQ ID NO: 219519 - DNA, 25 bp, probe
gacatccaggaagggaacatcttgc

SEQ ID NO: 219520 - DNA, 25 bp, probe
gacatcacaaggtgctggcacttat

SEQ ID NO: 219521 - DNA, 25 bp, probe
gacatccaccagtggtaccatcacc

SEQ ID NO: 219522 - DNA, 25 bp, probe
gacttccagctgtggatgaacaccg

SEQ ID NO: 219523 - DNA, 25 bp, probe
gacttccatgagtttgggaactacg

SEQ ID NO: 219524 - DNA, 25 bp, probe
gactctccagatttccgaattctac

SEQ ID NO: 219525 - DNA, 25 bp, probe
gacatgccttgaaaccagaaatcta

SEQ ID NO: 219526 - DNA, 25 bp, probe
gttgtcattgtccagctgggaccta

SEQ ID NO: 219527 - DNA, 25 bp, probe
gactttttccagcaggacctgaagg

SEQ ID NO: 219528 - DNA, 25 bp, probe
gatttttcactagcgtacatctaag

SEQ ID NO: 219529 - DNA, 25 bp, probe
gatttttacctctgtaacaaacaca

SEQ ID NO: 219530 - DNA, 25 bp, probe
gacatttaacccagccaaaagaata

SEQ ID NO: 219531 - DNA, 25 bp, probe
gactcttaaccccctagaaagacag

SEQ ID NO: 219532 - DNA, 25 bp, probe
gagtttgagaccaacctgggtaaca

SEQ ID NO: 219533 - DNA, 25 bp, probe
ggtatttccccacacgtgtgtaagc

SEQ ID NO: 219534 - DNA, 25 bp, probe
gactatctaccaccaatacgtttaa

SEQ ID NO: 219535 - DNA, 25 bp, probe
gactactatacagactacgtggcta

SEQ ID NO: 219536 - DNA, 25 bp, probe
gactatcttcaagactgcctcgatg

SEQ ID NO: 219537 - DNA, 25 bp, probe
gacatttactatcactgcacctgaa

SEQ ID NO: 219538 - DNA, 25 bp, probe
gacttggagtagaatatcctcctaa

SEQ ID NO: 219539 - DNA, 25 bp, probe
gacttggaaggaatccctatgtcaa

SEQ ID NO: 219540 - DNA, 25 bp, probe
gacttggaaggaatccctatgtcaa

SEQ ID NO: 219541 - DNA, 25 bp, probe
gacttggaaaggtcacagaaggaaa

SEQ ID NO: 219542 - DNA, 25 bp, probe
ggcgtaaatacgaccaaagaccact

SEQ ID NO: 219543 - DNA, 25 bp, probe
ggcgtaaatacgaccaaagaccact

SEQ ID NO: 219544 - DNA, 25 bp, probe
gagttcagttacacaaaaatcccat

SEQ ID NO: 219545 - DNA, 25 bp, probe
gagttcagttacacaaaaatcccat

SEQ ID NO: 219546 - DNA, 25 bp, probe
gagttccttaaacaagcttccagcc

SEQ ID NO: 219547 - DNA, 25 bp, probe
gagttatttataccaaatcctacag

SEQ ID NO: 219548 - DNA, 25 bp, probe
gatttttaatcacaattccaaactt

SEQ ID NO: 219549 - DNA, 25 bp, probe
gacttttactaggagattcagcaaa

SEQ ID NO: 219550 - DNA, 25 bp, probe
gactttttgtgggactccagagtat

SEQ ID NO: 219551 - DNA, 25 bp, probe
gactgtaaaggtgactcggatgctc

SEQ ID NO: 219552 - DNA, 25 bp, probe
gactgtaaaagtcttctgagagctc

SEQ ID NO: 219553 - DNA, 25 bp, probe
gacatgctgaagaagttcttctgca

SEQ ID NO: 219554 - DNA, 25 bp, probe
gacaggaggaacttctcctcctcct

SEQ ID NO: 219555 - DNA, 25 bp, probe
gacggagtgtgagctctccggctac

SEQ ID NO: 219556 - DNA, 25 bp, probe
gacggagtgtgagctctccggctac

SEQ ID NO: 219557 - DNA, 25 bp, probe
gatctttggagtgcctaagaccccc

SEQ ID NO: 219558 - DNA, 25 bp, probe
gactttggcctagccaaggccgtgc

SEQ ID NO: 219559 - DNA, 25 bp, probe
gactttgggcaagccaagtgccctc

SEQ ID NO: 219560 - DNA, 25 bp, probe
gactgggggaactggagtgtccttg

SEQ ID NO: 219561 - DNA, 25 bp, probe
gacatgggggacctggtggatgctg

SEQ ID NO: 219562 - DNA, 25 bp, probe
gacatgtgggctcttggtgtgatca

SEQ ID NO: 219563 - DNA, 25 bp, probe
gacatgtggtctgttggggtcatca

SEQ ID NO: 219564 - DNA, 25 bp, probe
gacatgctgggttcagtatgggtta

SEQ ID NO: 219565 - DNA, 25 bp, probe
gacatgctgtacatcagctatgggc

SEQ ID NO: 219566 - DNA, 25 bp, probe
gacttcaatttcctcatggtgttgg

SEQ ID NO: 219567 - DNA, 25 bp, probe
gacatataattgctggctggtgggt

SEQ ID NO: 219568 - DNA, 25 bp, probe
gacatcaacaacaggctggagtcgt

SEQ ID NO: 219569 - DNA, 25 bp, probe
gacatgcaccaacagccgtatgtgt

SEQ ID NO: 219570 - DNA, 25 bp, probe
gacatgcatctctaaaggtgatttg

SEQ ID NO: 219571 - DNA, 25 bp, probe
gacatgcatctctaaaggtgatttg

SEQ ID NO: 219572 - DNA, 25 bp, probe
gacatgcctgtggagaggattctag

SEQ ID NO: 219573 - DNA, 25 bp, probe
gacatcaatgacaagaggttccagg

SEQ ID NO: 219574 - DNA, 25 bp, probe
gactatcatgaaaatggttcccttt

SEQ ID NO: 219575 - DNA, 25 bp, probe
gacatttaagttggcttctggctgt

SEQ ID NO: 219576 - DNA, 25 bp, probe
gacatttgtagatcggttggtgcat

SEQ ID NO: 219577 - DNA, 25 bp, probe
gacatgtttacagctgggtgtgact

SEQ ID NO: 219578 - DNA, 25 bp, probe
gacatgctgtattccacgaggcatt

SEQ ID NO: 219579 - DNA, 25 bp, probe
gacttgtatacccaggcagcagagg

SEQ ID NO: 219580 - DNA, 25 bp, probe
gacatgcggtactgaggtgcagaca

SEQ ID NO: 219581 - DNA, 25 bp, probe
gacatgtggtgagttgtgtgtggat

SEQ ID NO: 219582 - DNA, 25 bp, probe
gacttgtgctgatcgtgctaaattt

SEQ ID NO: 219583 - DNA, 25 bp, probe
gactttctgactaggaaaccatgtg

SEQ ID NO: 219584 - DNA, 25 bp, probe
gactttctgactaggaaaccatgtg

SEQ ID NO: 219585 - DNA, 25 bp, probe
gacttaagaatcaagggaccattgc

SEQ ID NO: 219586 - DNA, 25 bp, probe
gacgtaagcaataagtaaccctcta

SEQ ID NO: 219587 - DNA, 25 bp, probe
gacgtaagcaataagtaaccctcta

SEQ ID NO: 219588 - DNA, 25 bp, probe
gagatgggaaaaatgtaaacctatt

SEQ ID NO: 219589 - DNA, 25 bp, probe
gacatgttaatatagtaataccttt

SEQ ID NO: 219590 - DNA, 25 bp, probe
gacatgtatttatcagagaattcac

SEQ ID NO: 219591 - DNA, 25 bp, probe
gacattaatattgcacagaacttcc

SEQ ID NO: 219592 - DNA, 25 bp, probe
gacattaatattgcacagaacttcc

SEQ ID NO: 219593 - DNA, 25 bp, probe
gacatgtactgaattccataactgt

SEQ ID NO: 219594 - DNA, 25 bp, probe
gacatgtactgagttccttcagatc

SEQ ID NO: 219595 - DNA, 25 bp, probe
gacatgtactgagttccttcagatc

SEQ ID NO: 219596 - DNA, 25 bp, probe
gacattcatctgtttccactgagtc

SEQ ID NO: 219597 - DNA, 25 bp, probe
gacttcatgctgtgtgtcggacacc

SEQ ID NO: 219598 - DNA, 25 bp, probe
gacatctatgagagtgggggccacc

SEQ ID NO: 219599 - DNA, 25 bp, probe
gacattgatggcgaggcggaggacg

SEQ ID NO: 219600 - DNA, 25 bp, probe
gacatgtattgcgggcgctctagag

SEQ ID NO: 219601 - DNA, 25 bp, probe
gacatgttgtgaggagactatgata

SEQ ID NO: 219602 - DNA, 25 bp, probe
gacatgttgtgaggagactatgata

SEQ ID NO: 219603 - DNA, 25 bp, probe
gacatgtctggccaagacgtgatca

SEQ ID NO: 219604 - DNA, 25 bp, probe
gacatgtcatgctgcccaaggacat

SEQ ID NO: 219605 - DNA, 25 bp, probe
gacatgtgcatcagggagattgagt

SEQ ID NO: 219606 - DNA, 25 bp, probe
gacatgtgcatcagggagattgagt

SEQ ID NO: 219607 - DNA, 25 bp, probe
gacatgtcccaggatgagaaggtgg

SEQ ID NO: 219608 - DNA, 25 bp, probe
gactacccaggcagatgggagggtt

SEQ ID NO: 219609 - DNA, 25 bp, probe
gactacccgttccagggcaaagtca

SEQ ID NO: 219610 - DNA, 25 bp, probe
gactatcactgtctgggggacaatg

SEQ ID NO: 219611 - DNA, 25 bp, probe
gacatgaacgagcaggaggtactaa

SEQ ID NO: 219612 - DNA, 25 bp, probe
gacatgcagacgccgagatgactgg

SEQ ID NO: 219613 - DNA, 25 bp, probe
gaccaaggaggactacgtcgatcta

SEQ ID NO: 219614 - DNA, 25 bp, probe
gaccaaggaggactacgtcgatcta

SEQ ID NO: 219615 - DNA, 25 bp, probe
gacatcaaggaggtcttcgtccacc

SEQ ID NO: 219616 - DNA, 25 bp, probe
gacatcaccgaggagtgtaggcccc

SEQ ID NO: 219617 - DNA, 25 bp, probe
gacatcaccgaggagtgtaggcccc

SEQ ID NO: 219618 - DNA, 25 bp, probe
gacatcacacgatgaggcgcgcatc

SEQ ID NO: 219619 - DNA, 25 bp, probe
gacatcacagccctgatggctgcca

SEQ ID NO: 219620 - DNA, 25 bp, probe
gacatcatagtcctctactgcatga

SEQ ID NO: 219621 - DNA, 25 bp, probe
gacatcatagtcctctactgcatga

SEQ ID NO: 219622 - DNA, 25 bp, probe
gacatactgatcctctactctgagt

SEQ ID NO: 219623 - DNA, 25 bp, probe
gactactccactcagattgacatgt

SEQ ID NO: 219624 - DNA, 25 bp, probe
gactaaggcacaaatccaacatgtt

SEQ ID NO: 219625 - DNA, 25 bp, probe
gacatgaagccagtgacttcccatg

SEQ ID NO: 219626 - DNA, 25 bp, probe
gacatcaagccagacaacctgctgc

SEQ ID NO: 219627 - DNA, 25 bp, probe
gacatcaaggccttaaacgccaaaa

SEQ ID NO: 219628 - DNA, 25 bp, probe
gacatagggcaatttggggctcaaa

SEQ ID NO: 219629 - DNA, 25 bp, probe
gacatgaggcaatttctggggagat

SEQ ID NO: 219630 - DNA, 25 bp, probe
gacatgaggcaatttctggggagat

SEQ ID NO: 219631 - DNA, 25 bp, probe
gacatgaagagtttcctgaggcaca

SEQ ID NO: 219632 - DNA, 25 bp, probe
gacatgaagcgggccctgatgatga

SEQ ID NO: 219633 - DNA, 25 bp, probe
gacatgaagcgggccctgatgatga

SEQ ID NO: 219634 - DNA, 25 bp, probe
gacatgaccagaaagcctgaagaac

SEQ ID NO: 219635 - DNA, 25 bp, probe
gagcacggctgaagactctaaaaat

SEQ ID NO: 219636 - DNA, 25 bp, probe
gacattggagaacctgaaacaaatc

SEQ ID NO: 219637 - DNA, 25 bp, probe
gacatcgctggaagttcacaatgaa

SEQ ID NO: 219638 - DNA, 25 bp, probe
gacatcttggattgctagaagagaa

SEQ ID NO: 219639 - DNA, 25 bp, probe
gacatcttggattgctagaagagaa

SEQ ID NO: 219640 - DNA, 25 bp, probe
gacatgctgggccggatcaagagcc

SEQ ID NO: 219641 - DNA, 25 bp, probe
gacattgtgacttggctcaagcgcc

SEQ ID NO: 219642 - DNA, 25 bp, probe
gacattgctgaggtggatcacagtg

SEQ ID NO: 219643 - DNA, 25 bp, probe
gacattggatgtggagctcctgctg

SEQ ID NO: 219644 - DNA, 25 bp, probe
gacattgtattggaactgcttcctg

SEQ ID NO: 219645 - DNA, 25 bp, probe
gactttgtgtcagagcgattcctgg

SEQ ID NO: 219646 - DNA, 25 bp, probe
gactttgtgtcagagcgattcctgg

SEQ ID NO: 219647 - DNA, 25 bp, probe
gacttgtgattagagactgccaggg

SEQ ID NO: 219648 - DNA, 25 bp, probe
gacattgtatttgatggcatcgctc

SEQ ID NO: 219649 - DNA, 25 bp, probe
gactttatttgcggagcatttctgc

SEQ ID NO: 219650 - DNA, 25 bp, probe
gacttgtactagcagagagtcctga

SEQ ID NO: 219651 - DNA, 25 bp, probe
gacattataccacaagagacaagca

SEQ ID NO: 219652 - DNA, 25 bp, probe
gacattataccacaagagacaagca

SEQ ID NO: 219653 - DNA, 25 bp, probe
gacatttgccaacaggtagcatagc

SEQ ID NO: 219654 - DNA, 25 bp, probe
gacttcgccaagggcgttttcaacg

SEQ ID NO: 219655 - DNA, 25 bp, probe
gactttccaaaacgtttccagcatc

SEQ ID NO: 219656 - DNA, 25 bp, probe
gactttcacaagtggtttccatgga

SEQ ID NO: 219657 - DNA, 25 bp, probe
gactacttcagagagaggttcctaa

SEQ ID NO: 219658 - DNA, 25 bp, probe
gactacttaagttctagttttctat

SEQ ID NO: 219659 - DNA, 25 bp, probe
gactactatgaacagttttctttta

SEQ ID NO: 219660 - DNA, 25 bp, probe
gactactatgaacagttttctttta

SEQ ID NO: 219661 - DNA, 25 bp, probe
gacatgaaatgatatccattttttt

SEQ ID NO: 219662 - DNA, 25 bp, probe
gacatcttagtatttgcatattctt

SEQ ID NO: 219663 - DNA, 25 bp, probe
gacatcttaaagaatgcttccattg

SEQ ID NO: 219664 - DNA, 25 bp, probe
gacatcttaaagaatgcttccattg

SEQ ID NO: 219665 - DNA, 25 bp, probe
gacatttcgaagtcatcattcctct

SEQ ID NO: 219666 - DNA, 25 bp, probe
gacatatttgaatcactgcattttg

SEQ ID NO: 219667 - DNA, 25 bp, probe
gacatatttgaatcactgcattttg

SEQ ID NO: 219668 - DNA, 25 bp, probe
gactcattggaatcgttactctaaa

SEQ ID NO: 219669 - DNA, 25 bp, probe
gactcattggaatcgttactctaaa

SEQ ID NO: 219670 - DNA, 25 bp, probe
gactttgcagaacctttaattggat

SEQ ID NO: 219671 - DNA, 25 bp, probe
gacttggggttttacatgttggcat

SEQ ID NO: 219672 - DNA, 25 bp, probe
gacttccggctttctaagggtgatg

SEQ ID NO: 219673 - DNA, 25 bp, probe
gactaaagcgcctctcaggggctat

SEQ ID NO: 219674 - DNA, 25 bp, probe
gactaaactgggacttggtggaatc

SEQ ID NO: 219675 - DNA, 25 bp, probe
gactaaactgggacttggtggaatc

SEQ ID NO: 219676 - DNA, 25 bp, probe
gaccctactgtggattggtgggttt

SEQ ID NO: 219677 - DNA, 25 bp, probe
gactttgactgtgatctggagtcct

SEQ ID NO: 219678 - DNA, 25 bp, probe
gacatcttatgccagaattgtggtg

SEQ ID NO: 219679 - DNA, 25 bp, probe
gacatccttggggagattgctgtgt

SEQ ID NO: 219680 - DNA, 25 bp, probe
gacatgcagcttggaggttcagtgg

SEQ ID NO: 219681 - DNA, 25 bp, probe
gacatgcagcttggaggttcagtgg

SEQ ID NO: 219682 - DNA, 25 bp, probe
gacatcagctcctggttcatggaag

SEQ ID NO: 219683 - DNA, 25 bp, probe
gacatacttcaatgtattatacaga

SEQ ID NO: 219684 - DNA, 25 bp, probe
gacatacttcaatgtattatacaga

SEQ ID NO: 219685 - DNA, 25 bp, probe
gacatcacttagaagttcttataga

SEQ ID NO: 219686 - DNA, 25 bp, probe
gactcaattactctcttattagctt

SEQ ID NO: 219687 - DNA, 25 bp, probe
gacatttttcagctctttgctattg

SEQ ID NO: 219688 - DNA, 25 bp, probe
gacatttttcagctctttgctattg

SEQ ID NO: 219689 - DNA, 25 bp, probe
gacattttctggcttgtcattctgt

SEQ ID NO: 219690 - DNA, 25 bp, probe
gactttttagatgtgctgctttgat

SEQ ID NO: 219691 - DNA, 25 bp, probe
gacttttgtcgaaagctgcttttcc

SEQ ID NO: 219692 - DNA, 25 bp, probe
gacatcttgttcggaagtgcctcct

SEQ ID NO: 219693 - DNA, 25 bp, probe
gacatcttgttcggaagtgcctcct

SEQ ID NO: 219694 - DNA, 25 bp, probe
gacatttgtttggaatcgtgccact

SEQ ID NO: 219695 - DNA, 25 bp, probe
gacattttatcttgtccgtgaagat

SEQ ID NO: 219696 - DNA, 25 bp, probe
gacattttatcttgtccgtgaagat

SEQ ID NO: 219697 - DNA, 25 bp, probe
gacatttttcaattgccttctgact

SEQ ID NO: 219698 - DNA, 25 bp, probe
gacatatttgcctttggccttactt

SEQ ID NO: 219699 - DNA, 25 bp, probe
gacatctactcctttggcatgtgtg

SEQ ID NO: 219700 - DNA, 25 bp, probe
gacatcatgtcagagttactgtttc

SEQ ID NO: 219701 - DNA, 25 bp, probe
gactcatgtccagattgacttcttg

SEQ ID NO: 219702 - DNA, 25 bp, probe
gacatttcacgggagatttcttgtt

SEQ ID NO: 219703 - DNA, 25 bp, probe
gacattgatatctctgacatttctg

SEQ ID NO: 219704 - DNA, 25 bp, probe
gacattgatatctctgacatttctg

SEQ ID NO: 219705 - DNA, 25 bp, probe
gacatcgcaacaagtaccttctgtg

SEQ ID NO: 219706 - DNA, 25 bp, probe
gacatcccagatttacctcctgggg

SEQ ID NO: 219707 - DNA, 25 bp, probe
gacatcccagatttacctcctgggg

SEQ ID NO: 219708 - DNA, 25 bp, probe
gagatgccaatttcgaacctcggtc

SEQ ID NO: 219709 - DNA, 25 bp, probe
gagagagctctttggataccttgga

SEQ ID NO: 219710 - DNA, 25 bp, probe
gacatagccctgtgatactgcatct

SEQ ID NO: 219711 - DNA, 25 bp, probe
gacatcagctctgttcatgagtgct

SEQ ID NO: 219712 - DNA, 25 bp, probe
gacatcacaggcatgacaatgctgc

SEQ ID NO: 219713 - DNA, 25 bp, probe
gacatctggagctatggagtgctgc

SEQ ID NO: 219714 - DNA, 25 bp, probe
gacattgtatgctataattctgata

SEQ ID NO: 219715 - DNA, 25 bp, probe
gacatcagttgcccagtcatgtgat

SEQ ID NO: 219716 - DNA, 25 bp, probe
gacatcacttgccaatgtacatacc

SEQ ID NO: 219717 - DNA, 25 bp, probe
gactcagtccgctagtagcacactc

SEQ ID NO: 219718 - DNA, 25 bp, probe
gactaaagccatctatgcagcacat

SEQ ID NO: 219719 - DNA, 25 bp, probe
gacttaagcacacttgacatcaact

SEQ ID NO: 219720 - DNA, 25 bp, probe
gacttaagcacacttgacatcaact

SEQ ID NO: 219721 - DNA, 25 bp, probe
gacttaatgccactaaattgacact

SEQ ID NO: 219722 - DNA, 25 bp, probe
gactaaataaccacaataactgatt

SEQ ID NO: 219723 - DNA, 25 bp, probe
gactaatgatatgcctagtaaaaac

SEQ ID NO: 219724 - DNA, 25 bp, probe
gacatcagatagtcacctcactaag

SEQ ID NO: 219725 - DNA, 25 bp, probe
gacattaaatctgccatctcaggcc

SEQ ID NO: 219726 - DNA, 25 bp, probe
gacattcaaagtgccctgtgcaggc

SEQ ID NO: 219727 - DNA, 25 bp, probe
gacattcaaagtgccctgtgcaggc

SEQ ID NO: 219728 - DNA, 25 bp, probe
gacattcctgataatccagtaggca

SEQ ID NO: 219729 - DNA, 25 bp, probe
gacatctctgtaaaaagcaggtgac

SEQ ID NO: 219730 - DNA, 25 bp, probe
gacattcatggaaaggcatgcagtt

SEQ ID NO: 219731 - DNA, 25 bp, probe
gacattctggcaaagccaatctgct

SEQ ID NO: 219732 - DNA, 25 bp, probe
gagcatcctggtaacctactaggtg

SEQ ID NO: 219733 - DNA, 25 bp, probe
gagcatcctggtaacctactaggtg

SEQ ID NO: 219734 - DNA, 25 bp, probe
gactcctcctatagtgccaataggc

SEQ ID NO: 219735 - DNA, 25 bp, probe
gactcctcctatagtgccaataggc

SEQ ID NO: 219736 - DNA, 25 bp, probe
gactaatgctcgactgctggcagaa

SEQ ID NO: 219737 - DNA, 25 bp, probe
gactaacatcgaagcatctgaatca

SEQ ID NO: 219738 - DNA, 25 bp, probe
gacataactgtgaacctcgatgcca

SEQ ID NO: 219739 - DNA, 25 bp, probe
gacataatactgaataccgaagcga

SEQ ID NO: 219740 - DNA, 25 bp, probe
gacttcattcggaacctgatggaga

SEQ ID NO: 219741 - DNA, 25 bp, probe
gacttcactgctcagtgcctgagga

SEQ ID NO: 219742 - DNA, 25 bp, probe
gacatatcactcaatttctctgagg

SEQ ID NO: 219743 - DNA, 25 bp, probe
gacattcacaccaaagctctgagtt

SEQ ID NO: 219744 - DNA, 25 bp, probe
gacattacacccagacagactgtgt

SEQ ID NO: 219745 - DNA, 25 bp, probe
gacttgaaacctgagaacatcctgt

SEQ ID NO: 219746 - DNA, 25 bp, probe
gacattgcaaaggttcaacagctgc

SEQ ID NO: 219747 - DNA, 25 bp, probe
gacatacaagcagatctccacgctg

SEQ ID NO: 219748 - DNA, 25 bp, probe
gacatacagaatcatatgtacctga

SEQ ID NO: 219749 - DNA, 25 bp, probe
gacataatagtattctgtacccata

SEQ ID NO: 219750 - DNA, 25 bp, probe
gactaaagtattaaaccctctagct

SEQ ID NO: 219751 - DNA, 25 bp, probe
gactaaagtattaaaccctctagct

SEQ ID NO: 219752 - DNA, 25 bp, probe
gactataagggcagcttccctaagt

SEQ ID NO: 219753 - DNA, 25 bp, probe
gactttaggaatggttctctcaaca

SEQ ID NO: 219754 - DNA, 25 bp, probe
gactttgcggattgttctctccaac

SEQ ID NO: 219755 - DNA, 25 bp, probe
gacatttccatgtatgtccttacat

SEQ ID NO: 219756 - DNA, 25 bp, probe
gacttcacaatgttggcctgtcaga

SEQ ID NO: 219757 - DNA, 25 bp, probe
gacttcaaaggatacatgctgagat

SEQ ID NO: 219758 - DNA, 25 bp, probe
gacttcaaaggatacatgctgagat

SEQ ID NO: 219759 - DNA, 25 bp, probe
gacttccagagcctcaaatgagaaa

SEQ ID NO: 219760 - DNA, 25 bp, probe
gacttcacaatccacaagggagcac

SEQ ID NO: 219761 - DNA, 25 bp, probe
gacttcaactcgaaagagtaccggg

SEQ ID NO: 219762 - DNA, 25 bp, probe
gacttctatgctcggtttgctaccg

SEQ ID NO: 219763 - DNA, 25 bp, probe
gactttgatgaggaattcttcagcc

SEQ ID NO: 219764 - DNA, 25 bp, probe
gactttgatgaggaattcttcagcc

SEQ ID NO: 219765 - DNA, 25 bp, probe
gacttctgcaatgccaattacagcc

SEQ ID NO: 219766 - DNA, 25 bp, probe
gactttgattggtagcatccacgcc

SEQ ID NO: 219767 - DNA, 25 bp, probe
gactattcaagcgatgagcaacctg

SEQ ID NO: 219768 - DNA, 25 bp, probe
gactatcatcacccaaaacagcttg

SEQ ID NO: 219769 - DNA, 25 bp, probe
gactcattcatctcatagacaagca

SEQ ID NO: 219770 - DNA, 25 bp, probe
gacatcatgttattgcagctgagca

SEQ ID NO: 219771 - DNA, 25 bp, probe
gacatctgtctggcgatcagcatca

SEQ ID NO: 219772 - DNA, 25 bp, probe
gacattggctgggaggctgacccag

SEQ ID NO: 219773 - DNA, 25 bp, probe
gacattgctgttggggtgctggtca

SEQ ID NO: 219774 - DNA, 25 bp, probe
gactatcttatgtcaggaccttcat

SEQ ID NO: 219775 - DNA, 25 bp, probe
gacatcttttccatgatcatctaca

SEQ ID NO: 219776 - DNA, 25 bp, probe
gacatcttttccatgatcatctaca

SEQ ID NO: 219777 - DNA, 25 bp, probe
gacattctgttctcattattatcac

SEQ ID NO: 219778 - DNA, 25 bp, probe
gactgctttactgatttttaaggtc

SEQ ID NO: 219779 - DNA, 25 bp, probe
gactttaatcccggtttcagaagct

SEQ ID NO: 219780 - DNA, 25 bp, probe
gactttaatcccggtttcagaagct

SEQ ID NO: 219781 - DNA, 25 bp, probe
gactttatttcctttattcaaatca

SEQ ID NO: 219782 - DNA, 25 bp, probe
gacattgttttgtcaatttgtcaaa

SEQ ID NO: 219783 - DNA, 25 bp, probe
gacattgttttgtcaatttgtcaaa

SEQ ID NO: 219784 - DNA, 25 bp, probe
gacattgttcttacttgattatata

SEQ ID NO: 219785 - DNA, 25 bp, probe
gacattgttcttacttgattatata

SEQ ID NO: 219786 - DNA, 25 bp, probe
gacatcttatttacttgtagaaatc

SEQ ID NO: 219787 - DNA, 25 bp, probe
gacatcttatttacttgtagaaatc

SEQ ID NO: 219788 - DNA, 25 bp, probe
gacattggattacctttggatccat

SEQ ID NO: 219789 - DNA, 25 bp, probe
gacttgatttacaatttaatgcact

SEQ ID NO: 219790 - DNA, 25 bp, probe
gactagattaagagtcaatctgcaa

SEQ ID NO: 219791 - DNA, 25 bp, probe
gacatagtgaaaccagtgcaacagc

SEQ ID NO: 219792 - DNA, 25 bp, probe
gacatcatccataccaaggagacgc

SEQ ID NO: 219793 - DNA, 25 bp, probe
gacatcatccataccaaggagacgc

SEQ ID NO: 219794 - DNA, 25 bp, probe
gacataccatgagaatgcggcactg

SEQ ID NO: 219795 - DNA, 25 bp, probe
gagattcctatacagggacttaatg

SEQ ID NO: 219796 - DNA, 25 bp, probe
gagattcctatacagggacttaatg

SEQ ID NO: 219797 - DNA, 25 bp, probe
gacattcgttcacaatagcactatt

SEQ ID NO: 219798 - DNA, 25 bp, probe
gacattcgttcacaatagcactatt

SEQ ID NO: 219799 - DNA, 25 bp, probe
gacattttgtgactgaagagacttg

SEQ ID NO: 219800 - DNA, 25 bp, probe
gacattgggtagcattaactgtaag

SEQ ID NO: 219801 - DNA, 25 bp, probe
gacattgcaggtggccatgtttctg

SEQ ID NO: 219802 - DNA, 25 bp, probe
gacattgaacacgcgttgtctgtgt

SEQ ID NO: 219803 - DNA, 25 bp, probe
gacattatccaccaaattgctttgt

SEQ ID NO: 219804 - DNA, 25 bp, probe
gacttgtcagaccatcaatctcttg

SEQ ID NO: 219805 - DNA, 25 bp, probe
gacatttcagccgactactggtcac

SEQ ID NO: 219806 - DNA, 25 bp, probe
gactacttcactgctacagagccac

SEQ ID NO: 219807 - DNA, 25 bp, probe
gactacttcactgctacagagccac

SEQ ID NO: 219808 - DNA, 25 bp, probe
gacttcttcacggccacagagggcc

SEQ ID NO: 219809 - DNA, 25 bp, probe
gacttcttcacggccacagagggcc

SEQ ID NO: 219810 - DNA, 25 bp, probe
gacttcttcacggccacagagggcc

SEQ ID NO: 219811 - DNA, 25 bp, probe
gacattctgctcagctacaagcacc

SEQ ID NO: 219812 - DNA, 25 bp, probe
gactttgtgctagtcctggcactgc

SEQ ID NO: 219813 - DNA, 25 bp, probe
gactttgtgctagtcctggcactgc

SEQ ID NO: 219814 - DNA, 25 bp, probe
gacatttgacatttggtggacttta

SEQ ID NO: 219815 - DNA, 25 bp, probe
gactttggacttgtaacatctctga

SEQ ID NO: 219816 - DNA, 25 bp, probe
gactttgcccttttactcagggaag

SEQ ID NO: 219817 - DNA, 25 bp, probe
gactttccgcttacaatttgtagaa

SEQ ID NO: 219818 - DNA, 25 bp, probe
gactttccgcttacaatttgtagaa

SEQ ID NO: 219819 - DNA, 25 bp, probe
gactcttcactgttagctttttaaa

SEQ ID NO: 219820 - DNA, 25 bp, probe
gactctagacgtttactttgtagaa

SEQ ID NO: 219821 - DNA, 25 bp, probe
gacttggaggtcatagttattctgg

SEQ ID NO: 219822 - DNA, 25 bp, probe
gactatctgagtaaatggttctttg

SEQ ID NO: 219823 - DNA, 25 bp, probe
gacttgcggatttatgtttcagtgt

SEQ ID NO: 219824 - DNA, 25 bp, probe
gactttgctagtttgtggcagagtg

SEQ ID NO: 219825 - DNA, 25 bp, probe
gactttgtggtacggcagaggcggg

SEQ ID NO: 219826 - DNA, 25 bp, probe
gacttctgctggcatcaagaggtgg

SEQ ID NO: 219827 - DNA, 25 bp, probe
gacttcctgtccaaagagctggtga

SEQ ID NO: 219828 - DNA, 25 bp, probe
gacattgttcccaaaatgctggtca

SEQ ID NO: 219829 - DNA, 25 bp, probe
gacattgtccacagatgtactggcc

SEQ ID NO: 219830 - DNA, 25 bp, probe
gacttgtcattaaaacctggctctt

SEQ ID NO: 219831 - DNA, 25 bp, probe
gactttgacttaatactctgtcttt

SEQ ID NO: 219832 - DNA, 25 bp, probe
gacattctggctttttcttttaatg

SEQ ID NO: 219833 - DNA, 25 bp, probe
gacttcacatggcttttctttcaat

SEQ ID NO: 219834 - DNA, 25 bp, probe
gacattcaatgacttacttcttttc

SEQ ID NO: 219835 - DNA, 25 bp, probe
gactatcaactcccacttgtagttc

SEQ ID NO: 219836 - DNA, 25 bp, probe
gactctaactcatgccattgctgat

SEQ ID NO: 219837 - DNA, 25 bp, probe
gactctaactcatgccattgctgat

SEQ ID NO: 219838 - DNA, 25 bp, probe
gacttcaagccaagcgtatgtatca

SEQ ID NO: 219839 - DNA, 25 bp, probe
gacttcaagccaagcgtatgtatca

SEQ ID NO: 219840 - DNA, 25 bp, probe
gacttcaagccaagcgtatgtatca

SEQ ID NO: 219841 - DNA, 25 bp, probe
gacatttcagccactgtcattcaaa

SEQ ID NO: 219842 - DNA, 25 bp, probe
gacttatcaccattcttatgtcact

SEQ ID NO: 219843 - DNA, 25 bp, probe
gacttctcaatatgcttattttgct

SEQ ID NO: 219844 - DNA, 25 bp, probe
gacttacaatatgcctgttatctgt

SEQ ID NO: 219845 - DNA, 25 bp, probe
gacattgaacttggctgcggcaact

SEQ ID NO: 219846 - DNA, 25 bp, probe
gactggaacttcctggaatcctttt

SEQ ID NO: 219847 - DNA, 25 bp, probe
gactgagcatcccgaaggagaccta

SEQ ID NO: 219848 - DNA, 25 bp, probe
gactgagcatcccgaaggagaccta

SEQ ID NO: 219849 - DNA, 25 bp, probe
gactacagtcgtgatgaggaccaca

SEQ ID NO: 219850 - DNA, 25 bp, probe
gacgactgttgtaacttacccttct

SEQ ID NO: 219851 - DNA, 25 bp, probe
gacttctttttatatacctggatct

SEQ ID NO: 219852 - DNA, 25 bp, probe
gacttacttttatgacattctaata

SEQ ID NO: 219853 - DNA, 25 bp, probe
gactttcttttgtaaatatctataa

SEQ ID NO: 219854 - DNA, 25 bp, probe
gagctcttcttctttagtgtactaa

SEQ ID NO: 219855 - DNA, 25 bp, probe
gactttgtatagttcacttactctt

SEQ ID NO: 219856 - DNA, 25 bp, probe
gactttgtatagttcacttactctt

SEQ ID NO: 219857 - DNA, 25 bp, probe
gacattctgctaagattccttttgt

SEQ ID NO: 219858 - DNA, 25 bp, probe
gactttgtaagttcttattctggga

SEQ ID NO: 219859 - DNA, 25 bp, probe
gacttgggacagaaggttttgttca

SEQ ID NO: 219860 - DNA, 25 bp, probe
gactttggccaaagatgtacggctt

SEQ ID NO: 219861 - DNA, 25 bp, probe
gactttgtgaagcgcatgtacgaca

SEQ ID NO: 219862 - DNA, 25 bp, probe
gactttgtgaagcgcatgtacgaca

SEQ ID NO: 219863 - DNA, 25 bp, probe
gactttgagaaggtcatgcatacaa

SEQ ID NO: 219864 - DNA, 25 bp, probe
gacttagatgagatagcgcataata

SEQ ID NO: 219865 - DNA, 25 bp, probe
gacattgtcgcaagtcacagaatta

SEQ ID NO: 219866 - DNA, 25 bp, probe
gacatagtccatcctcaagaaagaa

SEQ ID NO: 219867 - DNA, 25 bp, probe
gactgagccaatcctgccagaaatt

SEQ ID NO: 219868 - DNA, 25 bp, probe
gactaccagctggttcgaaaattag

SEQ ID NO: 219869 - DNA, 25 bp, probe
gactaccagctggttcgaaaattag

SEQ ID NO: 219870 - DNA, 25 bp, probe
gactactacaggttctacaccttaa

SEQ ID NO: 219871 - DNA, 25 bp, probe
gactactacaggttctacaccttaa

SEQ ID NO: 219872 - DNA, 25 bp, probe
gacttctgacggtccaaatccttgt

SEQ ID NO: 219873 - DNA, 25 bp, probe
gactatggttggcccacaccaaagt

SEQ ID NO: 219874 - DNA, 25 bp, probe
gactaagtcagtcgtcatactaaac

SEQ ID NO: 219875 - DNA, 25 bp, probe
gactaagtgccttttcatccaaatg

SEQ ID NO: 219876 - DNA, 25 bp, probe
gactatgggtctttgtctagggagg

SEQ ID NO: 219877 - DNA, 25 bp, probe
gactatgggtctttgtctagggagg

SEQ ID NO: 219878 - DNA, 25 bp, probe
gactatggatgtgttctctaggcct

SEQ ID NO: 219879 - DNA, 25 bp, probe
gacattggctctttgtttaggccta

SEQ ID NO: 219880 - DNA, 25 bp, probe
gacttcgttaatatcatagcgtaca

SEQ ID NO: 219881 - DNA, 25 bp, probe
gactatttatagtactatggattta

SEQ ID NO: 219882 - DNA, 25 bp, probe
gacttctttagatgcaatggatatt

SEQ ID NO: 219883 - DNA, 25 bp, probe
gacttctttgagacagagggcaatg

SEQ ID NO: 219884 - DNA, 25 bp, probe
gacttcagaagagcaggacacaatg

SEQ ID NO: 219885 - DNA, 25 bp, probe
gactctatgagatggggaacaagct

SEQ ID NO: 219886 - DNA, 25 bp, probe
gagcttatgttacaggcaactgagc

SEQ ID NO: 219887 - DNA, 25 bp, probe
gacttaactcacaagagaactcatc

SEQ ID NO: 219888 - DNA, 25 bp, probe
gacttgagcccagagtgaacactct

SEQ ID NO: 219889 - DNA, 25 bp, probe
gacttggcagccagaaacatcctgg

SEQ ID NO: 219890 - DNA, 25 bp, probe
gactaggggaaggcagtcatcctga

SEQ ID NO: 219891 - DNA, 25 bp, probe
gactccctgaaaggcgctacattga

SEQ ID NO: 219892 - DNA, 25 bp, probe
gactacttacagagcgtcctggatg

SEQ ID NO: 219893 - DNA, 25 bp, probe
gactacttacagagcgtcctggatg

SEQ ID NO: 219894 - DNA, 25 bp, probe
gacattcttgaaggggttctgtgtc

SEQ ID NO: 219895 - DNA, 25 bp, probe
gactttctcagaaggtgtttggtat

SEQ ID NO: 219896 - DNA, 25 bp, probe
gactttctcagaaggtgtttggtat

SEQ ID NO: 219897 - DNA, 25 bp, probe
gactattctgagtaatgcttgcttg

SEQ ID NO: 219898 - DNA, 25 bp, probe
gactcatattcttaatgttgcatat

SEQ ID NO: 219899 - DNA, 25 bp, probe
gactttgtcaatcagtgccatgatc

SEQ ID NO: 219900 - DNA, 25 bp, probe
gacttggtcatgaagaatgctttgc

SEQ ID NO: 219901 - DNA, 25 bp, probe
gacttcggcatgtccagagatgtct

SEQ ID NO: 219902 - DNA, 25 bp, probe
gacttgtgagtccctgagatgtgct

SEQ ID NO: 219903 - DNA, 25 bp, probe
gacttgtgatcggcctgcatgagga

SEQ ID NO: 219904 - DNA, 25 bp, probe
gacttgtgcagaactctacgagaag

SEQ ID NO: 219905 - DNA, 25 bp, probe
gacattgctgccttcatgaaggaga

SEQ ID NO: 219906 - DNA, 25 bp, probe
gacttctgcaatagatgacactgat

SEQ ID NO: 219907 - DNA, 25 bp, probe
gactttcaataaggagatcaaaacc

SEQ ID NO: 219908 - DNA, 25 bp, probe
gacttgactgtaactggaacagaac

SEQ ID NO: 219909 - DNA, 25 bp, probe
gactcaacgatactctggacaaggg

SEQ ID NO: 219910 - DNA, 25 bp, probe
gactaacctatctatgaacaacagt

SEQ ID NO: 219911 - DNA, 25 bp, probe
gacttacgccattattacgacagta

SEQ ID NO: 219912 - DNA, 25 bp, probe
gacttatcagaaacttacccgtatc

SEQ ID NO: 219913 - DNA, 25 bp, probe
gactataagaatacatttcccaaat

SEQ ID NO: 219914 - DNA, 25 bp, probe
gacttgaaatgctcttttgcacaag

SEQ ID NO: 219915 - DNA, 25 bp, probe
gacttgtctctgggcttggatgaca

SEQ ID NO: 219916 - DNA, 25 bp, probe
gacttcatctggggttggcaacagg

SEQ ID NO: 219917 - DNA, 25 bp, probe
gacttccttggtttggacacagtgc

SEQ ID NO: 219918 - DNA, 25 bp, probe
gacttccatagaccatctggaccag

SEQ ID NO: 219919 - DNA, 25 bp, probe
gactatccacaaccgctgtaaagac

SEQ ID NO: 219920 - DNA, 25 bp, probe
gacattcaagacaacctgctacaag

SEQ ID NO: 219921 - DNA, 25 bp, probe
gacttgtggacatgactgtctaagc

SEQ ID NO: 219922 - DNA, 25 bp, probe
gactccggtcattactgtgtctaca

SEQ ID NO: 219923 - DNA, 25 bp, probe
gacccggtccaaggtatctggaagc

SEQ ID NO: 219924 - DNA, 25 bp, probe
gacccggtccaaggtatctggaagc

SEQ ID NO: 219925 - DNA, 25 bp, probe
gactctagagtccaaggtttaaaga

SEQ ID NO: 219926 - DNA, 25 bp, probe
gactctagagtccaaggtttaaaga

SEQ ID NO: 219927 - DNA, 25 bp, probe
gactttgatatccggttttatatgt

SEQ ID NO: 219928 - DNA, 25 bp, probe
gacttgttttctctgttttatgctc

SEQ ID NO: 219929 - DNA, 25 bp, probe
gacttgtattttttctctggtggca

SEQ ID NO: 219930 - DNA, 25 bp, probe
gacttctgagctataacttgtggga

SEQ ID NO: 219931 - DNA, 25 bp, probe
gacttctgagctataacttgtggga

SEQ ID NO: 219932 - DNA, 25 bp, probe
gacttcttgcttgtacatataggag

SEQ ID NO: 219933 - DNA, 25 bp, probe
gacttttgtcatttcaaagacatga

SEQ ID NO: 219934 - DNA, 25 bp, probe
gacttgatgttccacatccaaaagt

SEQ ID NO: 219935 - DNA, 25 bp, probe
gacttgatgttccacatccaaaagt

SEQ ID NO: 219936 - DNA, 25 bp, probe
gacttgagtttgatgtcacctgagt

SEQ ID NO: 219937 - DNA, 25 bp, probe
gacttgaagcattttgacccagagt

SEQ ID NO: 219938 - DNA, 25 bp, probe
gacattgatggcattgtgaagcctg

SEQ ID NO: 219939 - DNA, 25 bp, probe
gacattgatgagaactgggagattg

SEQ ID NO: 219940 - DNA, 25 bp, probe
gacattgatgagaactgggagattg

SEQ ID NO: 219941 - DNA, 25 bp, probe
gactagtgagagtcatcgggcgtgg

SEQ ID NO: 219942 - DNA, 25 bp, probe
gactagtggagtcctgagtcagcac

SEQ ID NO: 219943 - DNA, 25 bp, probe
gactcagggaggcgagcacgccatc

SEQ ID NO: 219944 - DNA, 25 bp, probe
gactgaggaagtggtgtgcttaagt

SEQ ID NO: 219945 - DNA, 25 bp, probe
gactgagttgggtgtttcaagagtt

SEQ ID NO: 219946 - DNA, 25 bp, probe
gactggcttaggtgtctccagacct

SEQ ID NO: 219947 - DNA, 25 bp, probe
gactgctttggatagtctcctacgc

SEQ ID NO: 219948 - DNA, 25 bp, probe
gactgctttggatagtctcctacgc

SEQ ID NO: 219949 - DNA, 25 bp, probe
gactttgtggagagattccttcctc

SEQ ID NO: 219950 - DNA, 25 bp, probe
gactcttgttatcttttgtgtcctg

SEQ ID NO: 219951 - DNA, 25 bp, probe
gactttgcaaagaatttgtgttcct

SEQ ID NO: 219952 - DNA, 25 bp, probe
gacttgaaaagtttgttcttcgctc

SEQ ID NO: 219953 - DNA, 25 bp, probe
gacttgacaagaaatcttcatattc

SEQ ID NO: 219954 - DNA, 25 bp, probe
gacttgacaagaaatcttcatattc

SEQ ID NO: 219955 - DNA, 25 bp, probe
gacttggatcgaattctcactctca

SEQ ID NO: 219956 - DNA, 25 bp, probe
gactctagacggcatccagccggag

SEQ ID NO: 219957 - DNA, 25 bp, probe
gactctagacggcatccagccggag

SEQ ID NO: 219958 - DNA, 25 bp, probe
gacttcaggaggctcctgcgcaaaa

SEQ ID NO: 219959 - DNA, 25 bp, probe
gacttcaagacgctggctgatgtac

SEQ ID NO: 219960 - DNA, 25 bp, probe
gactgtacgcggccttcgactgcac

SEQ ID NO: 219961 - DNA, 25 bp, probe
gacattctcggtactaagactacag

SEQ ID NO: 219962 - DNA, 25 bp, probe
gactctcacggtgacatgtttacag

SEQ ID NO: 219963 - DNA, 25 bp, probe
gacttcacggtctacatgatcaaat

SEQ ID NO: 219964 - DNA, 25 bp, probe
gacttcctgcgtgatatccagagtt

SEQ ID NO: 219965 - DNA, 25 bp, probe
gactaccaagtgaacatccagatta

SEQ ID NO: 219966 - DNA, 25 bp, probe
gacgaccacagtaagatcctggttc

SEQ ID NO: 219967 - DNA, 25 bp, probe
gacgaagacttcaaactcggcaccc

SEQ ID NO: 219968 - DNA, 25 bp, probe
gacgattacttggacaccgtgaagg

SEQ ID NO: 219969 - DNA, 25 bp, probe
gactttctcttggacattgtaaacg

SEQ ID NO: 219970 - DNA, 25 bp, probe
gacttctgccttcatctgcagtaac

SEQ ID NO: 219971 - DNA, 25 bp, probe
gactttcctctcagccaggaaggat

SEQ ID NO: 219972 - DNA, 25 bp, probe
gacttttgcctcacctaaagagacc

SEQ ID NO: 219973 - DNA, 25 bp, probe
gacttttgcctcacctaaagagacc

SEQ ID NO: 219974 - DNA, 25 bp, probe
gacttaagtatctcctaaatgtgat

SEQ ID NO: 219975 - DNA, 25 bp, probe
gacttagacctatactgaaagatct

SEQ ID NO: 219976 - DNA, 25 bp, probe
gactatggactggaaggcagaaagt

SEQ ID NO: 219977 - DNA, 25 bp, probe
gacttgagccatccaaagaaacact

SEQ ID NO: 219978 - DNA, 25 bp, probe
gacttgggagccacagaatgtcttc

SEQ ID NO: 219979 - DNA, 25 bp, probe
gacattgtggagctcacgaaggctg

SEQ ID NO: 219980 - DNA, 25 bp, probe
gacttgtgtgagctcacagtgacag

SEQ ID NO: 219981 - DNA, 25 bp, probe
gacttggtgcagttctcatgataga

SEQ ID NO: 219982 - DNA, 25 bp, probe
gacttggtgcagttctcatgataga

SEQ ID NO: 219983 - DNA, 25 bp, probe
gacttgtgtagatgcttctcagaac

SEQ ID NO: 219984 - DNA, 25 bp, probe
gactgcatgctacagggttcagaga

SEQ ID NO: 219985 - DNA, 25 bp, probe
gactcatatagctaggttgtggcag

SEQ ID NO: 219986 - DNA, 25 bp, probe
gactcttctgcatgggtgatgtcaa

SEQ ID NO: 219987 - DNA, 25 bp, probe
gactctgtcttgtgggtgtctgaca

SEQ ID NO: 219988 - DNA, 25 bp, probe
gactctgtcttgtgggtgtctgaca

SEQ ID NO: 219989 - DNA, 25 bp, probe
gactcttttcactgcagtggggcag

SEQ ID NO: 219990 - DNA, 25 bp, probe
gacttcagtctctttgatgtggtcc

SEQ ID NO: 219991 - DNA, 25 bp, probe
gactttgttcttattggatactcct

SEQ ID NO: 219992 - DNA, 25 bp, probe
gactttgttcttattggatactcct

SEQ ID NO: 219993 - DNA, 25 bp, probe
gacttttctctcagttgggatgctt

SEQ ID NO: 219994 - DNA, 25 bp, probe
gacttgtgtttgacagctatgggtt

SEQ ID NO: 219995 - DNA, 25 bp, probe
gacttggtatatgctcatctgagtg

SEQ ID NO: 219996 - DNA, 25 bp, probe
gactttgtgtttacatctgcatttc

SEQ ID NO: 219997 - DNA, 25 bp, probe
gactttcatgtcgtcatgcatctgt

SEQ ID NO: 219998 - DNA, 25 bp, probe
gacttactgctggacaatctgcatg

SEQ ID NO: 219999 - DNA, 25 bp, probe
gactctcactgacgaccatgaattc

SEQ ID NO: 220000 - DNA, 25 bp, probe
gacttcctgaggactcgacattgtc

SEQ ID NO: 220001 - DNA, 25 bp, probe
gactctctaaggactggaaggtcac

SEQ ID NO: 220002 - DNA, 25 bp, probe
gacttcgagaggacgctgggactca

SEQ ID NO: 220003 - DNA, 25 bp, probe
gacttggacagctcctggggatgat

SEQ ID NO: 220004 - DNA, 25 bp, probe
gactatgaacactgctccaggtgga

SEQ ID NO: 220005 - DNA, 25 bp, probe
gacttcacagatttgtccaggctgc

SEQ ID NO: 220006 - DNA, 25 bp, probe
gactaatcaggcttatccgatgtgc

SEQ ID NO: 220007 - DNA, 25 bp, probe
gactaatcaggcttatccgatgtgc

SEQ ID NO: 220008 - DNA, 25 bp, probe
gactcagctcgggtggccgagcacg

SEQ ID NO: 220009 - DNA, 25 bp, probe
gactcacattggggcgaatgaacca

SEQ ID NO: 220010 - DNA, 25 bp, probe
tacccggggtgtttgcaacaacaga

SEQ ID NO: 220011 - DNA, 25 bp, probe
tacccggggtgtttgcaacaacaga

SEQ ID NO: 220012 - DNA, 25 bp, probe
gaccttggagggaggaacaacgagc

SEQ ID NO: 220013 - DNA, 25 bp, probe
gatcactgggtgctgggaaaaacaa

SEQ ID NO: 220014 - DNA, 25 bp, probe
gactcaaacgcgtggaaaatatcta

SEQ ID NO: 220015 - DNA, 25 bp, probe
gacctacctgggggcaaagaaattg

SEQ ID NO: 220016 - DNA, 25 bp, probe
gaccttccggggaaatatccacatc

SEQ ID NO: 220017 - DNA, 25 bp, probe
gaccatagtcggattaaactacatc

SEQ ID NO: 220018 - DNA, 25 bp, probe
gacttgactggtattaaagctgcta

SEQ ID NO: 220019 - DNA, 25 bp, probe
gacttgattgtgccatttagaggga

SEQ ID NO: 220020 - DNA, 25 bp, probe
gacttcattgactgtgtcagagaaa

SEQ ID NO: 220021 - DNA, 25 bp, probe
gacttcatgctgttggcagtaggaa

SEQ ID NO: 220022 - DNA, 25 bp, probe
gacttaggactggcagtaagacatg

SEQ ID NO: 220023 - DNA, 25 bp, probe
gactcgggacgtgtatgagacagac

SEQ ID NO: 220024 - DNA, 25 bp, probe
gaccgaatacgcactcttgaaagct

SEQ ID NO: 220025 - DNA, 25 bp, probe
gactccaaggtgggctttgacaagt

SEQ ID NO: 220026 - DNA, 25 bp, probe
gactcaaagcaagcatctttactag

SEQ ID NO: 220027 - DNA, 25 bp, probe
gacttatacaagtatttcttcttcc

SEQ ID NO: 220028 - DNA, 25 bp, probe
gacttaacaactttatcctattcta

SEQ ID NO: 220029 - DNA, 25 bp, probe
gacttgaaatacgtttgtgtttcta

SEQ ID NO: 220030 - DNA, 25 bp, probe
gacttgcaggagaccgtgtgatttg

SEQ ID NO: 220031 - DNA, 25 bp, probe
gacttgccaagacagtgctggtgtt

SEQ ID NO: 220032 - DNA, 25 bp, probe
gacttcgccagacagattgctgata

SEQ ID NO: 220033 - DNA, 25 bp, probe
gactttcacttgaatcttgctgcta

SEQ ID NO: 220034 - DNA, 25 bp, probe
gactttgactacaatgctatcgaca

SEQ ID NO: 220035 - DNA, 25 bp, probe
gacttgcgacaagtgacctcgacaa

SEQ ID NO: 220036 - DNA, 25 bp, probe
gacttgaacagactgagcgtggaag

SEQ ID NO: 220037 - DNA, 25 bp, probe
gactgagtcagcggtggcgaggaga

SEQ ID NO: 220038 - DNA, 25 bp, probe
gactcagatgcagggtctgctcacc

SEQ ID NO: 220039 - DNA, 25 bp, probe
gactgctgcacaggagaatgcctcg

SEQ ID NO: 220040 - DNA, 25 bp, probe
gactcgcaaggtggtgctgatgcag

SEQ ID NO: 220041 - DNA, 25 bp, probe
gactccgaggatgagtgcagcacgc

SEQ ID NO: 220042 - DNA, 25 bp, probe
gactcactgatgcagcactgtagcc

SEQ ID NO: 220043 - DNA, 25 bp, probe
gactcacagctgcaacgtggggtga

SEQ ID NO: 220044 - DNA, 25 bp, probe
gacttctggcagatggtgtgggaga

SEQ ID NO: 220045 - DNA, 25 bp, probe
gagagccttagaatttttgaggaaa

SEQ ID NO: 220046 - DNA, 25 bp, probe
gagtcctaggacatctctgtaaaaa

SEQ ID NO: 220047 - DNA, 25 bp, probe
gagtcctaggacatctctgtaaaaa

SEQ ID NO: 220048 - DNA, 25 bp, probe
gactcctaggggcccagtaaggaca

SEQ ID NO: 220049 - DNA, 25 bp, probe
gagccctaagggcaagctccggctc

SEQ ID NO: 220050 - DNA, 25 bp, probe
gacctaaagggactacctctgtgcc

SEQ ID NO: 220051 - DNA, 25 bp, probe
gacgtccatcggggtactcgtggac

SEQ ID NO: 220052 - DNA, 25 bp, probe
gacgacaagtcggttgttcctggtc

SEQ ID NO: 220053 - DNA, 25 bp, probe
gactgccaaatgggttgttagtagt

SEQ ID NO: 220054 - DNA, 25 bp, probe
gactatcaaagctgcattgtcacgt

SEQ ID NO: 220055 - DNA, 25 bp, probe
gactttgaagcaatcctgctgcagc

SEQ ID NO: 220056 - DNA, 25 bp, probe
gactttgacagtttcatctgctgct

SEQ ID NO: 220057 - DNA, 25 bp, probe
gactctattcagtgtcatgtcctat

SEQ ID NO: 220058 - DNA, 25 bp, probe
gacttatatgcttatggctgcctct

SEQ ID NO: 220059 - DNA, 25 bp, probe
gactacatagctcctgagatcctgc

SEQ ID NO: 220060 - DNA, 25 bp, probe
gactcactgcagaagcaggacctcc

SEQ ID NO: 220061 - DNA, 25 bp, probe
gactcactgcagaagcaggacctcc

SEQ ID NO: 220062 - DNA, 25 bp, probe
gactcactgcagaagcaggacctcc

SEQ ID NO: 220063 - DNA, 25 bp, probe
gactcactgcagaagcaggacctcc

SEQ ID NO: 220064 - DNA, 25 bp, probe
gactatgagcagagggagcgcttct

SEQ ID NO: 220065 - DNA, 25 bp, probe
gactatgagcagagggagcgcttct

SEQ ID NO: 220066 - DNA, 25 bp, probe
gactcggatgactggaggtcgtcca

SEQ ID NO: 220067 - DNA, 25 bp, probe
gactcggatgactggaggtcgtcca

SEQ ID NO: 220068 - DNA, 25 bp, probe
gactcggatgactggaggtcgtcca

SEQ ID NO: 220069 - DNA, 25 bp, probe
gactcggatcaaatctcagggcttc

SEQ ID NO: 220070 - DNA, 25 bp, probe
acttatgaaagtagatcctgctcac

SEQ ID NO: 220071 - DNA, 25 bp, probe
gacttcagctactttaggggacagt

SEQ ID NO: 220072 - DNA, 25 bp, probe
gacttatcagtctttatggaggaag

SEQ ID NO: 220073 - DNA, 25 bp, probe
gacttatggatcgttatggagtact

SEQ ID NO: 220074 - DNA, 25 bp, probe
gacttcatggagattaagagtcatg

SEQ ID NO: 220075 - DNA, 25 bp, probe
gacttgaagagcaacatcatagagt

SEQ ID NO: 220076 - DNA, 25 bp, probe
gacttgaaacaaatgaggcttcaga

SEQ ID NO: 220077 - DNA, 25 bp, probe
gactctgcaaaatcatgctttttga

SEQ ID NO: 220078 - DNA, 25 bp, probe
gactagcaaatatcattttctgtat

SEQ ID NO: 220079 - DNA, 25 bp, probe
gactacatggtatacttcagcttcc

SEQ ID NO: 220080 - DNA, 25 bp, probe
gactactgaatctcctacatgtatt

SEQ ID NO: 220081 - DNA, 25 bp, probe
gactatgtcagagtgtcctcacttt

SEQ ID NO: 220082 - DNA, 25 bp, probe
gactcgtttatggcacagccattat

SEQ ID NO: 220083 - DNA, 25 bp, probe
gactaatcttcatcaccactgtaga

SEQ ID NO: 220084 - DNA, 25 bp, probe
gactgaacttgtggaccatgtactg

SEQ ID NO: 220085 - DNA, 25 bp, probe
gactcagacgttagacctcttgatg

SEQ ID NO: 220086 - DNA, 25 bp, probe
gactcagtttggaagatcatttgtt

SEQ ID NO: 220087 - DNA, 25 bp, probe
gactagtttacttatgcatctcttt

SEQ ID NO: 220088 - DNA, 25 bp, probe
gactagtttacttatgcatctcttt

SEQ ID NO: 220089 - DNA, 25 bp, probe
gactatgttcagtctaacaccattt

SEQ ID NO: 220090 - DNA, 25 bp, probe
gactatgttcagtctaacaccattt

SEQ ID NO: 220091 - DNA, 25 bp, probe
gactatctgaatataaacacaatct

SEQ ID NO: 220092 - DNA, 25 bp, probe
gactatgctatgaatttatacaagg

SEQ ID NO: 220093 - DNA, 25 bp, probe
gacttactagatctcatacaaggct

SEQ ID NO: 220094 - DNA, 25 bp, probe
gacttacgagatctttgagacctct

SEQ ID NO: 220095 - DNA, 25 bp, probe
gactttggaatgagcaggaacctgt

SEQ ID NO: 220096 - DNA, 25 bp, probe
gactttggaatgagcaggaacctgt

SEQ ID NO: 220097 - DNA, 25 bp, probe
gactttggcatgagccggaacctct

SEQ ID NO: 220098 - DNA, 25 bp, probe
gactttgaggcctacgcgaaaatct

SEQ ID NO: 220099 - DNA, 25 bp, probe
gactttgaggcctacgcgaaaatct

SEQ ID NO: 220100 - DNA, 25 bp, probe
gactttgaggcctacgcgaaaatct

SEQ ID NO: 220101 - DNA, 25 bp, probe
gactttgaggcctacgcgaaaatct

SEQ ID NO: 220102 - DNA, 25 bp, probe
gactttgaggcctacgcgaaaatct

SEQ ID NO: 220103 - DNA, 25 bp, probe
gactttgaggcctacacgaagattt

SEQ ID NO: 220104 - DNA, 25 bp, probe
gactttgatggcacatacgaaaccc

SEQ ID NO: 220105 - DNA, 25 bp, probe
gacttattcgctactacgagaacag

SEQ ID NO: 220106 - DNA, 25 bp, probe
gagcttttccttgcaggagcgtcag

SEQ ID NO: 220107 - DNA, 25 bp, probe
gacttttcctgcactggacagtaaa

SEQ ID NO: 220108 - DNA, 25 bp, probe
gacttcccactgttctgaaaggaga

SEQ ID NO: 220109 - DNA, 25 bp, probe
gacttcggcctctctaagaagattt

SEQ ID NO: 220110 - DNA, 25 bp, probe
gactttggcctctgatacagacagc

SEQ ID NO: 220111 - DNA, 25 bp, probe
gactttggcctctgatacagacagc

SEQ ID NO: 220112 - DNA, 25 bp, probe
gactttggactctgcaaggaaggga

SEQ ID NO: 220113 - DNA, 25 bp, probe
gactttggactctgcaaggaaggga

SEQ ID NO: 220114 - DNA, 25 bp, probe
gactttggcctctgcaaggagggga

SEQ ID NO: 220115 - DNA, 25 bp, probe
gacgtttgccagcaactggaggaag

SEQ ID NO: 220116 - DNA, 25 bp, probe
gactgctactccacagagatcggga

SEQ ID NO: 220117 - DNA, 25 bp, probe
gactgctactccacagagatcggga

SEQ ID NO: 220118 - DNA, 25 bp, probe
gactctcgctgtgtggtatctgagg

SEQ ID NO: 220119 - DNA, 25 bp, probe
gactctgccagaactgagaagccgg

SEQ ID NO: 220120 - DNA, 25 bp, probe
gactctgccagaactgagaagccgg

SEQ ID NO: 220121 - DNA, 25 bp, probe
gactcatttgacagagaagccaagg

SEQ ID NO: 220122 - DNA, 25 bp, probe
gactttgatgtagtggacgccacga

SEQ ID NO: 220123 - DNA, 25 bp, probe
gactatgtcattaaggaagcaacta

SEQ ID NO: 220124 - DNA, 25 bp, probe
gactatgtcattaaggaagcaacta

SEQ ID NO: 220125 - DNA, 25 bp, probe
gactcgttctgtagatgagagaaca

SEQ ID NO: 220126 - DNA, 25 bp, probe
gactcccatcgcctatacgaaatat

SEQ ID NO: 220127 - DNA, 25 bp, probe
gactcccatcgcctatacgaaatat

SEQ ID NO: 220128 - DNA, 25 bp, probe
gactctcttaggaaaccaatagtcc

SEQ ID NO: 220129 - DNA, 25 bp, probe
gacttcttactgaatgatcccaatg

SEQ ID NO: 220130 - DNA, 25 bp, probe
gacttcatgctctgataactgcctt

SEQ ID NO: 220131 - DNA, 25 bp, probe
gacttctctcatgatgacactttgg

SEQ ID NO: 220132 - DNA, 25 bp, probe
gactgacactcagatgcccagtatc

SEQ ID NO: 220133 - DNA, 25 bp, probe
gactgacactcagatgcccagtatc

SEQ ID NO: 220134 - DNA, 25 bp, probe
gacgacctcttccaaaagatcaaca

SEQ ID NO: 220135 - DNA, 25 bp, probe
gactcgtcatttcaaaagcaaaact

SEQ ID NO: 220136 - DNA, 25 bp, probe
gactcgtcatttcaaaagcaaaact

SEQ ID NO: 220137 - DNA, 25 bp, probe
gactcctatgttctaaagaatataa

SEQ ID NO: 220138 - DNA, 25 bp, probe
gactcaagtttttagaagctagaat

SEQ ID NO: 220139 - DNA, 25 bp, probe
gacttagctttacgtgaaggacact

SEQ ID NO: 220140 - DNA, 25 bp, probe
gacttcactttggtgccaatggaca

SEQ ID NO: 220141 - DNA, 25 bp, probe
gacttaccgttaccacggacacagt

SEQ ID NO: 220142 - DNA, 25 bp, probe
gacttaccgttaccacggacacagt

SEQ ID NO: 220143 - DNA, 25 bp, probe
gactaaccccaacgcacaggaaaag

SEQ ID NO: 220144 - DNA, 25 bp, probe
gacgagaacgctcaggttggaaaag

SEQ ID NO: 220145 - DNA, 25 bp, probe
gactattaccgcaagggtgggaagg

SEQ ID NO: 220146 - DNA, 25 bp, probe
gacgacgcctacaggttcgtgaagg

SEQ ID NO: 220147 - DNA, 25 bp, probe
gacgaggcctttgagtttgtgaagc

SEQ ID NO: 220148 - DNA, 25 bp, probe
gactggccgtttgacgatggggcgc

SEQ ID NO: 220149 - DNA, 25 bp, probe
gacggcggttgttattggtggtgat

SEQ ID NO: 220150 - DNA, 25 bp, probe
gacgggagtatgacaaggacgggaa

SEQ ID NO: 220151 - DNA, 25 bp, probe
gacgggagtatgacaaggacgggaa

SEQ ID NO: 220152 - DNA, 25 bp, probe
gactgggatgggaggggaggggagc

SEQ ID NO: 220153 - DNA, 25 bp, probe
gacggaatgggatgggggcttcggt

SEQ ID NO: 220154 - DNA, 25 bp, probe
gacggaatgggatgggggcttcggt

SEQ ID NO: 220155 - DNA, 25 bp, probe
gacttaagaggaagggcagtcttgg

SEQ ID NO: 220156 - DNA, 25 bp, probe
gacttagggctaggaacattctgct

SEQ ID NO: 220157 - DNA, 25 bp, probe
gactcacgaggcaacaacatccttc

SEQ ID NO: 220158 - DNA, 25 bp, probe
gactcacgaggcaacaacatccttc

SEQ ID NO: 220159 - DNA, 25 bp, probe
gactcactgggacagaactttcaag

SEQ ID NO: 220160 - DNA, 25 bp, probe
gactactttgataagcaagacttca

SEQ ID NO: 220161 - DNA, 25 bp, probe
gactaccttgacttgaaatgctctt

SEQ ID NO: 220162 - DNA, 25 bp, probe
gactgcaccttagggcagtgtccgt

SEQ ID NO: 220163 - DNA, 25 bp, probe
gactgtcctctatggcaatgatctc

SEQ ID NO: 220164 - DNA, 25 bp, probe
gactgtcccttgagtagaatccact

SEQ ID NO: 220165 - DNA, 25 bp, probe
gactgttttgagagtgggactcact

SEQ ID NO: 220166 - DNA, 25 bp, probe
gacttttcagagggtgctgagatta

SEQ ID NO: 220167 - DNA, 25 bp, probe
gacttttagacatcgtagcttcaca

SEQ ID NO: 220168 - DNA, 25 bp, probe
gacttttagacatcgtagcttcaca

SEQ ID NO: 220169 - DNA, 25 bp, probe
gactttaacaaggttcagttcacag

SEQ ID NO: 220170 - DNA, 25 bp, probe
gacttaggaagagcctcgtgtcaca

SEQ ID NO: 220171 - DNA, 25 bp, probe
gactttggagaagttcctggtcatt

SEQ ID NO: 220172 - DNA, 25 bp, probe
gactttggagaagttcctggtcatt

SEQ ID NO: 220173 - DNA, 25 bp, probe
gactttggacaagtgtggcggtggg

SEQ ID NO: 220174 - DNA, 25 bp, probe
gacttaacaacattgctgtcaggtg

SEQ ID NO: 220175 - DNA, 25 bp, probe
gactttaatgactatatgcccagga

SEQ ID NO: 220176 - DNA, 25 bp, probe
gactgttgaagcataatcccagcca

SEQ ID NO: 220177 - DNA, 25 bp, probe
gactgttgaagcataatcccagcca

SEQ ID NO: 220178 - DNA, 25 bp, probe
gactttgagagagtgaacttttcat

SEQ ID NO: 220179 - DNA, 25 bp, probe
gactttgagagagtgaacttttcat

SEQ ID NO: 220180 - DNA, 25 bp, probe
gactgtgcaaaggtacctagtgttt

SEQ ID NO: 220181 - DNA, 25 bp, probe
gactgctggcagaaggacccaggtg

SEQ ID NO: 220182 - DNA, 25 bp, probe
gactcttcagaagagggggctgcct

SEQ ID NO: 220183 - DNA, 25 bp, probe
gactctcacagaacgagggcggacc

SEQ ID NO: 220184 - DNA, 25 bp, probe
gactctccctatccggagagcagcc

SEQ ID NO: 220185 - DNA, 25 bp, probe
gacttttctgctcaggacagcagtg

SEQ ID NO: 220186 - DNA, 25 bp, probe
gactttgtcatgccagaaacaaggc

SEQ ID NO: 220187 - DNA, 25 bp, probe
gactttagcatgcagagcagcaaag

SEQ ID NO: 220188 - DNA, 25 bp, probe
gactattgacatcagcatcacctag

SEQ ID NO: 220189 - DNA, 25 bp, probe
gactattgacatcagcatcacctag

SEQ ID NO: 220190 - DNA, 25 bp, probe
gactttgatcatcaggagcctgtac

SEQ ID NO: 220191 - DNA, 25 bp, probe
gacttagattgggtgctcctgaagg

SEQ ID NO: 220192 - DNA, 25 bp, probe
gactgtagggtgggtcctggatgca

SEQ ID NO: 220193 - DNA, 25 bp, probe
gactgtagggtgggtcctggatgca

SEQ ID NO: 220194 - DNA, 25 bp, probe
gacttagatctgaccgtccaggaaa

SEQ ID NO: 220195 - DNA, 25 bp, probe
gactttatcgattccacacattaat

SEQ ID NO: 220196 - DNA, 25 bp, probe
gacttattcctgacacacatgcatc

SEQ ID NO: 220197 - DNA, 25 bp, probe
gactttcctatgacactcatcaggt

SEQ ID NO: 220198 - DNA, 25 bp, probe
gactttgaccacaatcttcagctgt

SEQ ID NO: 220199 - DNA, 25 bp, probe
gactttgaccacaatcttcagctgt

SEQ ID NO: 220200 - DNA, 25 bp, probe
gactttaccaattctgatgacatct

SEQ ID NO: 220201 - DNA, 25 bp, probe
gactttaccagttaggactccactt

SEQ ID NO: 220202 - DNA, 25 bp, probe
gactatatcacagagaagggcccac

SEQ ID NO: 220203 - DNA, 25 bp, probe
gactatatcacagagaagggcccac

SEQ ID NO: 220204 - DNA, 25 bp, probe
gactgatagcatttcagaatgtgtc

SEQ ID NO: 220205 - DNA, 25 bp, probe
gactgccagctcttgatggcagccc

SEQ ID NO: 220206 - DNA, 25 bp, probe
gactcacgctgactgcaggcagcgg

SEQ ID NO: 220207 - DNA, 25 bp, probe
gactcagctgcgaggagatgggctt

SEQ ID NO: 220208 - DNA, 25 bp, probe
gactctctctgaatggagtgcgctt

SEQ ID NO: 220209 - DNA, 25 bp, probe
gactcattgctcagggatcctttac

SEQ ID NO: 220210 - DNA, 25 bp, probe
gactcacgttaactcacatttatac

SEQ ID NO: 220211 - DNA, 25 bp, probe
gactcacgttaactcacatttatac

SEQ ID NO: 220212 - DNA, 25 bp, probe
gactagggtaatctgacttctcact

SEQ ID NO: 220213 - DNA, 25 bp, probe
gactgagggttactccagttgctct

SEQ ID NO: 220214 - DNA, 25 bp, probe
gactgtaatgtacctgaagtttctg

SEQ ID NO: 220215 - DNA, 25 bp, probe
gactgtaatgtacctgaagtttctg

SEQ ID NO: 220216 - DNA, 25 bp, probe
gactgtagctgtaagcagaatgctt

SEQ ID NO: 220217 - DNA, 25 bp, probe
gactgctaagtcaggaaatggggta

SEQ ID NO: 220218 - DNA, 25 bp, probe
gactcatagtacagtaaagggtgga

SEQ ID NO: 220219 - DNA, 25 bp, probe
gactgtcgtactggatgtaactagt

SEQ ID NO: 220220 - DNA, 25 bp, probe
gactgtacttatgtgtgaagtttgc

SEQ ID NO: 220221 - DNA, 25 bp, probe
gactttttgacgttgaactttctgt

SEQ ID NO: 220222 - DNA, 25 bp, probe
gacttttgtggcccgaaatcgtagt

SEQ ID NO: 220223 - DNA, 25 bp, probe
gactttgtttgggccaaatgttggt

SEQ ID NO: 220224 - DNA, 25 bp, probe
gactgtagtttagccagacttgttt

SEQ ID NO: 220225 - DNA, 25 bp, probe
gacgttgccgattcaccagcacttg

SEQ ID NO: 220226 - DNA, 25 bp, probe
gactttgaagatgaccagcacaaga

SEQ ID NO: 220227 - DNA, 25 bp, probe
gactattacaataacaccacctgaa

SEQ ID NO: 220228 - DNA, 25 bp, probe
gactatgttcagaaaacctactcag

SEQ ID NO: 220229 - DNA, 25 bp, probe
gactatattgtgaacgagccacctc

SEQ ID NO: 220230 - DNA, 25 bp, probe
gactatattgtgaacgagccacctc

SEQ ID NO: 220231 - DNA, 25 bp, probe
gactcttctggcagctagttagtgc

SEQ ID NO: 220232 - DNA, 25 bp, probe
gactcttgctggtgaagtacacctt

SEQ ID NO: 220233 - DNA, 25 bp, probe
gactgctttggaggcacaaacccat

SEQ ID NO: 220234 - DNA, 25 bp, probe
gactgttctgaagcaccgagacaca

SEQ ID NO: 220235 - DNA, 25 bp, probe
gactgttctgaagcaccgagacaca

SEQ ID NO: 220236 - DNA, 25 bp, probe
gactttgttcatggctggggacaca

SEQ ID NO: 220237 - DNA, 25 bp, probe
gactttgttcatggctggggacaca

SEQ ID NO: 220238 - DNA, 25 bp, probe
gactttgggctggctagaagataca

SEQ ID NO: 220239 - DNA, 25 bp, probe
gactttgggctggctagaagataca

SEQ ID NO: 220240 - DNA, 25 bp, probe
gactttggattggctcgagatatca

SEQ ID NO: 220241 - DNA, 25 bp, probe
gactttggaatgtctcgtcaagagg

SEQ ID NO: 220242 - DNA, 25 bp, probe
gactgtgaggacacacgggaagtga

SEQ ID NO: 220243 - DNA, 25 bp, probe
gactttggcacgtcacgggatggat

SEQ ID NO: 220244 - DNA, 25 bp, probe
gactgtggtgccgtacttggaggac

SEQ ID NO: 220245 - DNA, 25 bp, probe
gactgtggtgccgtacttggaggac

SEQ ID NO: 220246 - DNA, 25 bp, probe
gactagcagctggactgattttgaa

SEQ ID NO: 220247 - DNA, 25 bp, probe
gacgacctgttttgatttaaccaag

SEQ ID NO: 220248 - DNA, 25 bp, probe
gactcaccttttggattttccacat

SEQ ID NO: 220249 - DNA, 25 bp, probe
gactaactatggaagattataccaa

SEQ ID NO: 220250 - DNA, 25 bp, probe
gactgaacctggaagatcatggacc

SEQ ID NO: 220251 - DNA, 25 bp, probe
gactaagcgcagggagacgctgctc

SEQ ID NO: 220252 - DNA, 25 bp, probe
gactacacagaggcgtataatccca

SEQ ID NO: 220253 - DNA, 25 bp, probe
gactacacagaggcgtataatccca

SEQ ID NO: 220254 - DNA, 25 bp, probe
gactaccaagccatgtgtagagcca

SEQ ID NO: 220255 - DNA, 25 bp, probe
gactaccttctcatgctctgaggta

SEQ ID NO: 220256 - DNA, 25 bp, probe
gactacacattcttctgtggcagtt

SEQ ID NO: 220257 - DNA, 25 bp, probe
gactagcaatttatgcttcttggga

SEQ ID NO: 220258 - DNA, 25 bp, probe
gactatgcctatgattgggttggga

SEQ ID NO: 220259 - DNA, 25 bp, probe
gagcgagcccattttgtggattgtg

SEQ ID NO: 220260 - DNA, 25 bp, probe
gacgacgtgctgttcgaggatgtgt

SEQ ID NO: 220261 - DNA, 25 bp, probe
gactatcttcattgtcaaggagttg

SEQ ID NO: 220262 - DNA, 25 bp, probe
gactagcctctcttacaggaattgt

SEQ ID NO: 220263 - DNA, 25 bp, probe
gactacagccatttaagtgttcagc

SEQ ID NO: 220264 - DNA, 25 bp, probe
gactccaacacagaagctcatgtga

SEQ ID NO: 220265 - DNA, 25 bp, probe
gactccaacacagaagctcatgtga

SEQ ID NO: 220266 - DNA, 25 bp, probe
gactcagaagccgaaattcctagaa

SEQ ID NO: 220267 - DNA, 25 bp, probe
gactatgagagcacaaatgctacat

SEQ ID NO: 220268 - DNA, 25 bp, probe
gactgagaagcagcaggagctcctg

SEQ ID NO: 220269 - DNA, 25 bp, probe
gactatgaggctgcgaaggcagatg

SEQ ID NO: 220270 - DNA, 25 bp, probe
gactagagggagccaagaggatggg

SEQ ID NO: 220271 - DNA, 25 bp, probe
gactttgggcgccaagaagcatggg

SEQ ID NO: 220272 - DNA, 25 bp, probe
gacgactgggggttgcaagggaaca

SEQ ID NO: 220273 - DNA, 25 bp, probe
gacggccggggcagaagttgagacc

SEQ ID NO: 220274 - DNA, 25 bp, probe
gacgggcagaaggcgaaagtccagc

SEQ ID NO: 220275 - DNA, 25 bp, probe
gactggctgagaacttacggacaac

SEQ ID NO: 220276 - DNA, 25 bp, probe
gactgcggctatgactacatggagc

SEQ ID NO: 220277 - DNA, 25 bp, probe
gactctagcctacaacatgctgagc

SEQ ID NO: 220278 - DNA, 25 bp, probe
gactctagcctacaacatgctgagc

SEQ ID NO: 220279 - DNA, 25 bp, probe
gactctcgcctaaatatctgtgcct

SEQ ID NO: 220280 - DNA, 25 bp, probe
gactctctgccagtacacatttgtg

SEQ ID NO: 220281 - DNA, 25 bp, probe
gactctgaatgcatgacctttggta

SEQ ID NO: 220282 - DNA, 25 bp, probe
gactctgaatgcatgacctttggta

SEQ ID NO: 220283 - DNA, 25 bp, probe
gactattgtgatgactctttggaga

SEQ ID NO: 220284 - DNA, 25 bp, probe
gactttggatcaagctgttatgaac

SEQ ID NO: 220285 - DNA, 25 bp, probe
gactctgtgtataagctgatgctca

SEQ ID NO: 220286 - DNA, 25 bp, probe
gactctgtgtataagctgatgctca

SEQ ID NO: 220287 - DNA, 25 bp, probe
gactctgtgtataagctgatgctca

SEQ ID NO: 220288 - DNA, 25 bp, probe
gactgctcgaatcagcatggctgat

SEQ ID NO: 220289 - DNA, 25 bp, probe
gactcttgcaatccacaatctgaca

SEQ ID NO: 220290 - DNA, 25 bp, probe
gactcattgcatacagatccaggaa

SEQ ID NO: 220291 - DNA, 25 bp, probe
gactcttgcgatcacgcaggaacgt

SEQ ID NO: 220292 - DNA, 25 bp, probe
gactacgatgaggacgggaactgct

SEQ ID NO: 220293 - DNA, 25 bp, probe
gactcttcagaggacagggtacctg

SEQ ID NO: 220294 - DNA, 25 bp, probe
gactattcacacaggaggtattctt

SEQ ID NO: 220295 - DNA, 25 bp, probe
gactcgctacacagagtgttaactg

SEQ ID NO: 220296 - DNA, 25 bp, probe
gactctgtagccagaagacttcaat

SEQ ID NO: 220297 - DNA, 25 bp, probe
gactctggaacaagacagttcgcaa

SEQ ID NO: 220298 - DNA, 25 bp, probe
gactcagtgtaccaaagttgccctc

SEQ ID NO: 220299 - DNA, 25 bp, probe
gactaaacagcaaaagttctttctc

SEQ ID NO: 220300 - DNA, 25 bp, probe
gactaaacagcaaaagttctttctc

SEQ ID NO: 220301 - DNA, 25 bp, probe
gactttggaattctgcttctctttc

SEQ ID NO: 220302 - DNA, 25 bp, probe
gactttgtaaattttgttctatatg

SEQ ID NO: 220303 - DNA, 25 bp, probe
gactttgtaaattttgttctatatg

SEQ ID NO: 220304 - DNA, 25 bp, probe
gactggttcaaatgttgttctcttc

SEQ ID NO: 220305 - DNA, 25 bp, probe
gactctttgaactctgttgctgtct

SEQ ID NO: 220306 - DNA, 25 bp, probe
gactctttagtcttgggattgttaa

SEQ ID NO: 220307 - DNA, 25 bp, probe
gactttggagtcaggtttgtgttca

SEQ ID NO: 220308 - DNA, 25 bp, probe
gactattccctgacagttatttttg

SEQ ID NO: 220309 - DNA, 25 bp, probe
gactatgtacttgtctggtttttgt

SEQ ID NO: 220310 - DNA, 25 bp, probe
gactcagtagcgttttagtcgtttt

SEQ ID NO: 220311 - DNA, 25 bp, probe
gactcagtagcgttttagtcgtttt

SEQ ID NO: 220312 - DNA, 25 bp, probe
gaccaggggtctttactcatttatt

SEQ ID NO: 220313 - DNA, 25 bp, probe
gactatgaaggtttttcttagttct

SEQ ID NO: 220314 - DNA, 25 bp, probe
gactaaattttcttttaagcatttg

SEQ ID NO: 220315 - DNA, 25 bp, probe
gactaaaatttgattgtgatacatt

SEQ ID NO: 220316 - DNA, 25 bp, probe
gaccaaacgcttattgtgtaagata

SEQ ID NO: 220317 - DNA, 25 bp, probe
gactccactactaatttgctgtaaa

SEQ ID NO: 220318 - DNA, 25 bp, probe
gactccctggtggttgagtttaagg

SEQ ID NO: 220319 - DNA, 25 bp, probe
gactcccataatggtatgagtaccc

SEQ ID NO: 220320 - DNA, 25 bp, probe
gactcacatgctttggttagtatct

SEQ ID NO: 220321 - DNA, 25 bp, probe
gactctcagcgtatgttcaggactc

SEQ ID NO: 220322 - DNA, 25 bp, probe
gactctagtctgtgtttgagactct

SEQ ID NO: 220323 - DNA, 25 bp, probe
gactcacaatagtgcatcttggtcc

SEQ ID NO: 220324 - DNA, 25 bp, probe
gactacagaagtggccttgcactcc

SEQ ID NO: 220325 - DNA, 25 bp, probe
gactaaagattttcttcagctcagc

SEQ ID NO: 220326 - DNA, 25 bp, probe
gactatcataatctcttatactcgt

SEQ ID NO: 220327 - DNA, 25 bp, probe
gactatcataatctcttatactcgt

SEQ ID NO: 220328 - DNA, 25 bp, probe
gactacttgtcatttgttgtgtggt

SEQ ID NO: 220329 - DNA, 25 bp, probe
gactattgctgtgatcgtctttttc

SEQ ID NO: 220330 - DNA, 25 bp, probe
gactaccatgatgtcacatttttct

SEQ ID NO: 220331 - DNA, 25 bp, probe
gactgtcctacaatatcattttcct

SEQ ID NO: 220332 - DNA, 25 bp, probe
gactgtcagctgttaaactgttcct

SEQ ID NO: 220333 - DNA, 25 bp, probe
gactggaccttagtactgtaaattc

SEQ ID NO: 220334 - DNA, 25 bp, probe
gactggaccttagtactgtaaattc

SEQ ID NO: 220335 - DNA, 25 bp, probe
gacgagatccttcgtggggaaccgc

SEQ ID NO: 220336 - DNA, 25 bp, probe
gacgagatccttcgtggggaaccgc

SEQ ID NO: 220337 - DNA, 25 bp, probe
gacggaccactaagctggggacagg

SEQ ID NO: 220338 - DNA, 25 bp, probe
gacgaaatgcctttgggtgggcagg

SEQ ID NO: 220339 - DNA, 25 bp, probe
gactgaaccttagtgagggggatgg

SEQ ID NO: 220340 - DNA, 25 bp, probe
gactcaggcctgtgggaatgggatt

SEQ ID NO: 220341 - DNA, 25 bp, probe
gactcaccatcgagggagtgctgga

SEQ ID NO: 220342 - DNA, 25 bp, probe
gactctgacattgatggcgaggcgg

SEQ ID NO: 220343 - DNA, 25 bp, probe
gactctgacattgatggcgaggcgg

SEQ ID NO: 220344 - DNA, 25 bp, probe
gactcaagcaatggagagcggcgag

SEQ ID NO: 220345 - DNA, 25 bp, probe
gactgcaccctggagagcgtcaggg

SEQ ID NO: 220346 - DNA, 25 bp, probe
gactcctacgacaacttcagtgggc

SEQ ID NO: 220347 - DNA, 25 bp, probe
gactgttgttacactcgagctgagg

SEQ ID NO: 220348 - DNA, 25 bp, probe
gactctggtcataggacttggtagg

SEQ ID NO: 220349 - DNA, 25 bp, probe
gactcatgtgtgtttcaatatggaa

SEQ ID NO: 220350 - DNA, 25 bp, probe
gactcttgtattacgattcgcacga

SEQ ID NO: 220351 - DNA, 25 bp, probe
gactctgggatgtactgtccaacga

SEQ ID NO: 220352 - DNA, 25 bp, probe
gactggcgagatttttgctcaggcg

SEQ ID NO: 220353 - DNA, 25 bp, probe
gactcagtgaagtttctccagtccc

SEQ ID NO: 220354 - DNA, 25 bp, probe
gactcagtgaagtttctccagtccc

SEQ ID NO: 220355 - DNA, 25 bp, probe
gactcagaaggaggtcactttccca

SEQ ID NO: 220356 - DNA, 25 bp, probe
gactgcaaaattgatcctgctccct

SEQ ID NO: 220357 - DNA, 25 bp, probe
gactgaaagcacggagccttccatc

SEQ ID NO: 220358 - DNA, 25 bp, probe
gactctaatgcagggacctgaacag

SEQ ID NO: 220359 - DNA, 25 bp, probe
gactctaatgcagggacctgaacag

SEQ ID NO: 220360 - DNA, 25 bp, probe
gactaaagagaccctgcacaagcag

SEQ ID NO: 220361 - DNA, 25 bp, probe
gactaaagagaccctgcacaagcag

SEQ ID NO: 220362 - DNA, 25 bp, probe
gactcaggaagattgctgctcagaa

SEQ ID NO: 220363 - DNA, 25 bp, probe
gactgatggagccaatactatgatt

SEQ ID NO: 220364 - DNA, 25 bp, probe
gactataagctgtacccattgtacc

SEQ ID NO: 220365 - DNA, 25 bp, probe
gacgactcagtatccgagagctgac

SEQ ID NO: 220366 - DNA, 25 bp, probe
gactggaaggtcacgatcatctcag

SEQ ID NO: 220367 - DNA, 25 bp, probe
gacctggggccaagtatttcccaag

SEQ ID NO: 220368 - DNA, 25 bp, probe
gactgttgggacagccattttccaa

SEQ ID NO: 220369 - DNA, 25 bp, probe
gactgttgggacagccattttccaa

SEQ ID NO: 220370 - DNA, 25 bp, probe
gactgttggggatttcattatatgc

SEQ ID NO: 220371 - DNA, 25 bp, probe
gactgccatgggcacgactgttgtt

SEQ ID NO: 220372 - DNA, 25 bp, probe
gactgcatcacgcagggacgtgagt

SEQ ID NO: 220373 - DNA, 25 bp, probe
gactctcccgtggatgacggatgag

SEQ ID NO: 220374 - DNA, 25 bp, probe
gactctcctagggttcaggagctgc

SEQ ID NO: 220375 - DNA, 25 bp, probe
gactagacttgtgatatgcgtgtgt

SEQ ID NO: 220376 - DNA, 25 bp, probe
gactcagactgatctattgaatgtc

SEQ ID NO: 220377 - DNA, 25 bp, probe
gactcacacgcttcaattcaagacc

SEQ ID NO: 220378 - DNA, 25 bp, probe
gactatcgctgttgaatctcagagt

SEQ ID NO: 220379 - DNA, 25 bp, probe
gactatcgctgttgaatctcagagt

SEQ ID NO: 220380 - DNA, 25 bp, probe
gactacgctgaaaatcgcggctttg

SEQ ID NO: 220381 - DNA, 25 bp, probe
gactaccgaaaacgggctgggcgcg

SEQ ID NO: 220382 - DNA, 25 bp, probe
gactaacaccactggaagcttgtgc

SEQ ID NO: 220383 - DNA, 25 bp, probe
gactacatagccccggagatcattg

SEQ ID NO: 220384 - DNA, 25 bp, probe
gactgactatggctcgaggtctacg

SEQ ID NO: 220385 - DNA, 25 bp, probe
gactgcacttgagctgcgtttggac

SEQ ID NO: 220386 - DNA, 25 bp, probe
gactgcacttgagctgcgtttggac

SEQ ID NO: 220387 - DNA, 25 bp, probe
gactcactctacttctgttttgtgg

SEQ ID NO: 220388 - DNA, 25 bp, probe
gactacaagactctgaacttgctgg

SEQ ID NO: 220389 - DNA, 25 bp, probe
gactgagaagggcaaacattcctgg

SEQ ID NO: 220390 - DNA, 25 bp, probe
gactgaggagggcacgactcctttg

SEQ ID NO: 220391 - DNA, 25 bp, probe
gactgaggagggcacgactcctttg

SEQ ID NO: 220392 - DNA, 25 bp, probe
gactcaggaggagaaactgacttca

SEQ ID NO: 220393 - DNA, 25 bp, probe
gactgggggtggaacactacattct

SEQ ID NO: 220394 - DNA, 25 bp, probe
gactggtgaatgcgtacatgtagat

SEQ ID NO: 220395 - DNA, 25 bp, probe
gactgtgtagttgtatatttgtaag

SEQ ID NO: 220396 - DNA, 25 bp, probe
gactatggtcgtcttaatggtgaag

SEQ ID NO: 220397 - DNA, 25 bp, probe
gacgtagtcctctttaaggataaga

SEQ ID NO: 220398 - DNA, 25 bp, probe
gactctccccctttcaaggaaagtg

SEQ ID NO: 220399 - DNA, 25 bp, probe
gactctctccccagggaagaatggg

SEQ ID NO: 220400 - DNA, 25 bp, probe
gactcatccaccaggggatgaaatg

SEQ ID NO: 220401 - DNA, 25 bp, probe
gactacgaccaggtgaagatcaagg

SEQ ID NO: 220402 - DNA, 25 bp, probe
gactaggactcccataaatcactgg

SEQ ID NO: 220403 - DNA, 25 bp, probe
gacgtggacatccgcaaagacctgt

SEQ ID NO: 220404 - DNA, 25 bp, probe
gacgtcagagcaggtgacacgaccc

SEQ ID NO: 220405 - DNA, 25 bp, probe
gactgtcaagaggtgcacagatgct

SEQ ID NO: 220406 - DNA, 25 bp, probe
gactacgagcagatcaagataaaaa

SEQ ID NO: 220407 - DNA, 25 bp, probe
gactgcagcgtcactcaggaaagga

SEQ ID NO: 220408 - DNA, 25 bp, probe
gactcaggctcactgagcaggcttt

SEQ ID NO: 220409 - DNA, 25 bp, probe
gactcaggctcactgagcaggcttt

SEQ ID NO: 220410 - DNA, 25 bp, probe
gactatggctatggaggtgattttg

SEQ ID NO: 220411 - DNA, 25 bp, probe
gactggcatgttggtgggtggtcac

SEQ ID NO: 220412 - DNA, 25 bp, probe
gacgacttcatccgggaggtcaatg

SEQ ID NO: 220413 - DNA, 25 bp, probe
gacgagctttaccggaagacactgg

SEQ ID NO: 220414 - DNA, 25 bp, probe
ggggcttttcctattgatttgggag

SEQ ID NO: 220415 - DNA, 25 bp, probe
gacggctgtttctatgttttatggg

SEQ ID NO: 220416 - DNA, 25 bp, probe
gacggctgtttctatgttttatggg

SEQ ID NO: 220417 - DNA, 25 bp, probe
gacggaattagctgtgatttttggt

SEQ ID NO: 220418 - DNA, 25 bp, probe
gactgtaggaactgtgttggttggt

SEQ ID NO: 220419 - DNA, 25 bp, probe
gactgcccggacaagttttgcttat

SEQ ID NO: 220420 - DNA, 25 bp, probe
gactgcccggacaagttttgcttat

SEQ ID NO: 220421 - DNA, 25 bp, probe
gactgcgagggggagatttctttag

SEQ ID NO: 220422 - DNA, 25 bp, probe
gactcaaggagaggcagattcacca

SEQ ID NO: 220423 - DNA, 25 bp, probe
gactcagaggtagtggatgccacca

SEQ ID NO: 220424 - DNA, 25 bp, probe
gactagagcaaaataatgcaacgca

SEQ ID NO: 220425 - DNA, 25 bp, probe
gactaggcatgatttcacgaaggca

SEQ ID NO: 220426 - DNA, 25 bp, probe
gagctgggcatccgcaccgtagcca

SEQ ID NO: 220427 - DNA, 25 bp, probe
gacggtgtcaccctggatgacatcc

SEQ ID NO: 220428 - DNA, 25 bp, probe
gactcgtgtgacagtggcatcacca

SEQ ID NO: 220429 - DNA, 25 bp, probe
gactaggtgaggcatgctgaccaca

SEQ ID NO: 220430 - DNA, 25 bp, probe
gactaggtgaggcatgctgaccaca

SEQ ID NO: 220431 - DNA, 25 bp, probe
gactcagtatccgagagctgacaca

SEQ ID NO: 220432 - DNA, 25 bp, probe
gactacatctactgatgctagacac

SEQ ID NO: 220433 - DNA, 25 bp, probe
gactacactcaaggatgtgaacctg

SEQ ID NO: 220434 - DNA, 25 bp, probe
gactacactcaaggatgtgaacctg

SEQ ID NO: 220435 - DNA, 25 bp, probe
gactcacctagaggctgggacgtgg

SEQ ID NO: 220436 - DNA, 25 bp, probe
gactctctctgggttcagatgacga

SEQ ID NO: 220437 - DNA, 25 bp, probe
gactctctctgggttcagatgacga

SEQ ID NO: 220438 - DNA, 25 bp, probe
gactctacatgtattgctgaaagaa

SEQ ID NO: 220439 - DNA, 25 bp, probe
gactgtactacgactcttaagagaa

SEQ ID NO: 220440 - DNA, 25 bp, probe
gacgtcaccaaggccttcttggaag

SEQ ID NO: 220441 - DNA, 25 bp, probe
gacgtcaccaaggccttcttggaag

SEQ ID NO: 220442 - DNA, 25 bp, probe
gactgtgatctggagtccttcttgc

SEQ ID NO: 220443 - DNA, 25 bp, probe
gactgattctgacatcttatgccag

SEQ ID NO: 220444 - DNA, 25 bp, probe
gactacattgaccagctgaagcgca

SEQ ID NO: 220445 - DNA, 25 bp, probe
gacgatttcaaggtgaaccaagtag

SEQ ID NO: 220446 - DNA, 25 bp, probe
gacgatttcaaggtgaaccaagtag

SEQ ID NO: 220447 - DNA, 25 bp, probe
gactgtttcagacttggaaaggtca

SEQ ID NO: 220448 - DNA, 25 bp, probe
gatcttgtagacccaaaaaaggcat

SEQ ID NO: 220449 - DNA, 25 bp, probe
gactgtgtcagagaaaagaaaggca

SEQ ID NO: 220450 - DNA, 25 bp, probe
gactgttcagcatgaattagaactg

SEQ ID NO: 220451 - DNA, 25 bp, probe
gactgtccagctatcctgaaagtgg

SEQ ID NO: 220452 - DNA, 25 bp, probe
gactgtcgagccatggctgagccag

SEQ ID NO: 220453 - DNA, 25 bp, probe
gactggtggtgcttgggggcagtcc

SEQ ID NO: 220454 - DNA, 25 bp, probe
gactggtggtgcttgggggcagtcc

SEQ ID NO: 220455 - DNA, 25 bp, probe
gagctgggtttgtggggagttcctt

SEQ ID NO: 220456 - DNA, 25 bp, probe
gaccggagcttgtccggaagattgc

SEQ ID NO: 220457 - DNA, 25 bp, probe
gactctgagactaagggtgaaagtg

SEQ ID NO: 220458 - DNA, 25 bp, probe
gactctgaacttgctggttgattgg

SEQ ID NO: 220459 - DNA, 25 bp, probe
gactctgaacttgctggttgattgg

SEQ ID NO: 220460 - DNA, 25 bp, probe
gactgtggagttttggcttcatgtg

SEQ ID NO: 220461 - DNA, 25 bp, probe
gactggggtgacaatggcttcttta

SEQ ID NO: 220462 - DNA, 25 bp, probe
gacggggatgttaggaaaaatacag

SEQ ID NO: 220463 - DNA, 25 bp, probe
gacggatggcgtttgtgaatggaaa

SEQ ID NO: 220464 - DNA, 25 bp, probe
gacgggactcgagtgatgattggga

SEQ ID NO: 220465 - DNA, 25 bp, probe
gactacgagccggtgtttgagaagt

SEQ ID NO: 220466 - DNA, 25 bp, probe
gactggtacctcgttaagatgtagt

SEQ ID NO: 220467 - DNA, 25 bp, probe
gactgcaggccctgtatacgatccg

SEQ ID NO: 220468 - DNA, 25 bp, probe
gactctgcaccctgatatacagcac

SEQ ID NO: 220469 - DNA, 25 bp, probe
gactctgactcaattgtacctgcag

SEQ ID NO: 220470 - DNA, 25 bp, probe
gactcttacattgttctctgtaact

SEQ ID NO: 220471 - DNA, 25 bp, probe
gactctttcatttttcttgtacata

SEQ ID NO: 220472 - DNA, 25 bp, probe
gactcgtttttacctggtcattcag

SEQ ID NO: 220473 - DNA, 25 bp, probe
gagtatttcctgtgccaggtatacg

SEQ ID NO: 220474 - DNA, 25 bp, probe
gactcttgtcggtcaccagaagaag

SEQ ID NO: 220475 - DNA, 25 bp, probe
gactgattgtcatgacaatgaaaga

SEQ ID NO: 220476 - DNA, 25 bp, probe
gactgatgttcccacggatgctaat

SEQ ID NO: 220477 - DNA, 25 bp, probe
gactgagtcaccgcggactagcggc

SEQ ID NO: 220478 - DNA, 25 bp, probe
gactgagtcaccgcggactagcggc

SEQ ID NO: 220479 - DNA, 25 bp, probe
gactgagtcaccgcggactagcggc

SEQ ID NO: 220480 - DNA, 25 bp, probe
gactgagtcaccgcggactagcggc

SEQ ID NO: 220481 - DNA, 25 bp, probe
gactggatcaacgaccggatacggc

SEQ ID NO: 220482 - DNA, 25 bp, probe
gactggaaaccgagtgaactggctg

SEQ ID NO: 220483 - DNA, 25 bp, probe
gactggagaatctgggggactggga

SEQ ID NO: 220484 - DNA, 25 bp, probe
gactggaaatcccgaaatgacttta

SEQ ID NO: 220485 - DNA, 25 bp, probe
gactgcaaagtcccgagttactcag

SEQ ID NO: 220486 - DNA, 25 bp, probe
gactgcaagattgaaggatacccag

SEQ ID NO: 220487 - DNA, 25 bp, probe
gactgaaattgcatatgggaccctg

SEQ ID NO: 220488 - DNA, 25 bp, probe
gactgagacattatgggccacgcgc

SEQ ID NO: 220489 - DNA, 25 bp, probe
gactgacctgtctttggaaccagaa

SEQ ID NO: 220490 - DNA, 25 bp, probe
gactgacctttgtggaactgcaaga

SEQ ID NO: 220491 - DNA, 25 bp, probe
gactccctccagtgaggagctggga

SEQ ID NO: 220492 - DNA, 25 bp, probe
gactcctctggagaagggtgagaag

SEQ ID NO: 220493 - DNA, 25 bp, probe
gactccctggtgagggtggagacag

SEQ ID NO: 220494 - DNA, 25 bp, probe
gactccttcgtgatctggggatgtg

SEQ ID NO: 220495 - DNA, 25 bp, probe
gactctatttggatcctggatttgt

SEQ ID NO: 220496 - DNA, 25 bp, probe
gacccagttggagcctgagttcgag

SEQ ID NO: 220497 - DNA, 25 bp, probe
gaccgagttggggccaactttgatc

SEQ ID NO: 220498 - DNA, 25 bp, probe
gactctgggctgggaagccctgttg

SEQ ID NO: 220499 - DNA, 25 bp, probe
gactcgagagtggccaatgcccgag

SEQ ID NO: 220500 - DNA, 25 bp, probe
gactcaagacttccagagcctcaaa

SEQ ID NO: 220501 - DNA, 25 bp, probe
gactcagaagttcaagctaaatatt

SEQ ID NO: 220502 - DNA, 25 bp, probe
gactgcggatgtttacactgaatga

SEQ ID NO: 220503 - DNA, 25 bp, probe
gactctgtgatacttagaccaagca

SEQ ID NO: 220504 - DNA, 25 bp, probe
gactctgtgatccctaaaatatcag

SEQ ID NO: 220505 - DNA, 25 bp, probe
gactctgtgagattctaaatgttca

SEQ ID NO: 220506 - DNA, 25 bp, probe
gactcctggcagactcacagaattc

SEQ ID NO: 220507 - DNA, 25 bp, probe
gactcacgtagcattaaatcagctg

SEQ ID NO: 220508 - DNA, 25 bp, probe
gactcagcagcctgttaaagaagga

SEQ ID NO: 220509 - DNA, 25 bp, probe
gactcacagcactgcgtatcaaaaa

SEQ ID NO: 220510 - DNA, 25 bp, probe
gactcacagagctgaccaagaccat

SEQ ID NO: 220511 - DNA, 25 bp, probe
gactcacagagctgaccaagaccat

SEQ ID NO: 220512 - DNA, 25 bp, probe
gactcacagatctacacaaactaca

SEQ ID NO: 220513 - DNA, 25 bp, probe
gactcacagatctacacaaactaca

SEQ ID NO: 220514 - DNA, 25 bp, probe
gactcacagaattcataatgcactt

SEQ ID NO: 220515 - DNA, 25 bp, probe
gacgagtgacattcatcacttcagt

SEQ ID NO: 220516 - DNA, 25 bp, probe
gacgagtgacattcatcacttcagt

SEQ ID NO: 220517 - DNA, 25 bp, probe
gagctggttgctacattttcaggat

SEQ ID NO: 220518 - DNA, 25 bp, probe
gactgggactaatatcacaggatca

SEQ ID NO: 220519 - DNA, 25 bp, probe
gactgagaaccgtgacatcagcgta

SEQ ID NO: 220520 - DNA, 25 bp, probe
gactggattggccaaacatcagacc

SEQ ID NO: 220521 - DNA, 25 bp, probe
gactgttctgctgaagaagcggcct

SEQ ID NO: 220522 - DNA, 25 bp, probe
gactctgaagctgacgaacttccat

SEQ ID NO: 220523 - DNA, 25 bp, probe
gactctgaagctgacgaacttccat

SEQ ID NO: 220524 - DNA, 25 bp, probe
gactctgcatttaccaagcacttcc

SEQ ID NO: 220525 - DNA, 25 bp, probe
gactctgcatttaccaagcacttcc

SEQ ID NO: 220526 - DNA, 25 bp, probe
gactgatgcagtttccatagcaacc

SEQ ID NO: 220527 - DNA, 25 bp, probe
gactctcagacactcagaagcaact

SEQ ID NO: 220528 - DNA, 25 bp, probe
gactctggacacagacagatcctgg

SEQ ID NO: 220529 - DNA, 25 bp, probe
gactgccttactaaagatcacagga

SEQ ID NO: 220530 - DNA, 25 bp, probe
gactgccttactaaagatcacagga

SEQ ID NO: 220531 - DNA, 25 bp, probe
gactgccttactaaagatcacagga

SEQ ID NO: 220532 - DNA, 25 bp, probe
gactccctgatttatgacgacggcc

SEQ ID NO: 220533 - DNA, 25 bp, probe
gactcccataaatcactggggggct

SEQ ID NO: 220534 - DNA, 25 bp, probe
gactcttctggggacacttggggtc

SEQ ID NO: 220535 - DNA, 25 bp, probe
gactctctctgatggtcactttgtg

SEQ ID NO: 220536 - DNA, 25 bp, probe
gactcacattgttacacatgcttta

SEQ ID NO: 220537 - DNA, 25 bp, probe
gactcacagctgactccaagctgca

SEQ ID NO: 220538 - DNA, 25 bp, probe
gactgcggctgaggcaaagctgctc

SEQ ID NO: 220539 - DNA, 25 bp, probe
gactcagtgctggcaacatcagcct

SEQ ID NO: 220540 - DNA, 25 bp, probe
gactcagtgctggcaacatcagcct

SEQ ID NO: 220541 - DNA, 25 bp, probe
gactcactgacggagctcagagctg

SEQ ID NO: 220542 - DNA, 25 bp, probe
gactcctgcagaaactggagctaaa

SEQ ID NO: 220543 - DNA, 25 bp, probe
gactctcatgcacttatcgagatgt

SEQ ID NO: 220544 - DNA, 25 bp, probe
gactctgctgcagatgatggcagtg

SEQ ID NO: 220545 - DNA, 25 bp, probe
gactctgctcatgagatggtatcag

SEQ ID NO: 220546 - DNA, 25 bp, probe
gactctgtctcattgaccttcagat

SEQ ID NO: 220547 - DNA, 25 bp, probe
gactgccatcttggacttgtcagca

SEQ ID NO: 220548 - DNA, 25 bp, probe
gactgaccctgaggcttgttacatt

SEQ ID NO: 220549 - DNA, 25 bp, probe
gactgaaccgacttttctaaagctc

SEQ ID NO: 220550 - DNA, 25 bp, probe
gactgacacagagccttctctagaa

SEQ ID NO: 220551 - DNA, 25 bp, probe
gactgtgaagtggcttctccgtacg

SEQ ID NO: 220552 - DNA, 25 bp, probe
gactgtgaaatgtttgtcttttctg

SEQ ID NO: 220553 - DNA, 25 bp, probe
gactctagaatgtccatatttattt

SEQ ID NO: 220554 - DNA, 25 bp, probe
gactctagtgtttcatcttcataat

SEQ ID NO: 220555 - DNA, 25 bp, probe
gactctagtgtttcatcttcataat

SEQ ID NO: 220556 - DNA, 25 bp, probe
gactcaaagtctgctctcatataag

SEQ ID NO: 220557 - DNA, 25 bp, probe
gactcaccaggctcctattgaagga

SEQ ID NO: 220558 - DNA, 25 bp, probe
gactcaccaggctcctattgaagga

SEQ ID NO: 220559 - DNA, 25 bp, probe
gactcaccagagatattgtggatgg

SEQ ID NO: 220560 - DNA, 25 bp, probe
gactcgccagtcacagtgtgcggcg

SEQ ID NO: 220561 - DNA, 25 bp, probe
gactcacagagtcacggtgcatggg

SEQ ID NO: 220562 - DNA, 25 bp, probe
gactgaagactgcacaggtgacaag

SEQ ID NO: 220563 - DNA, 25 bp, probe
gactgaagcctgcaggagttaaaaa

SEQ ID NO: 220564 - DNA, 25 bp, probe
gacgggcctggagggtattaaagag

SEQ ID NO: 220565 - DNA, 25 bp, probe
gacgtatttgaaggtacttcatata

SEQ ID NO: 220566 - DNA, 25 bp, probe
gacggttagacatgttttaccagga

SEQ ID NO: 220567 - DNA, 25 bp, probe
gacggttagacatgttttaccagga

SEQ ID NO: 220568 - DNA, 25 bp, probe
gacgggaagacaagttcatgtactt

SEQ ID NO: 220569 - DNA, 25 bp, probe
gacggtgaatggaagacacttacct

SEQ ID NO: 220570 - DNA, 25 bp, probe
gacggtgagttcaattcactttagt

SEQ ID NO: 220571 - DNA, 25 bp, probe
gacggtgagttcaattcactttagt

SEQ ID NO: 220572 - DNA, 25 bp, probe
gactgactggattccttcctataat

SEQ ID NO: 220573 - DNA, 25 bp, probe
gactgagtggtatgcttacaattgt

SEQ ID NO: 220574 - DNA, 25 bp, probe
gactcattgcttaattctaagactt

SEQ ID NO: 220575 - DNA, 25 bp, probe
gacgcattcggaattccggaattcc

SEQ ID NO: 220576 - DNA, 25 bp, probe
gacgcttgcaaaattaccaaataac

SEQ ID NO: 220577 - DNA, 25 bp, probe
gactcactaaatcctttccaataat

SEQ ID NO: 220578 - DNA, 25 bp, probe
gactctctaaatctggtgtatgggt

SEQ ID NO: 220579 - DNA, 25 bp, probe
gactcctgaaacacagagctcatgg

SEQ ID NO: 220580 - DNA, 25 bp, probe
gactcaggtaacctgcgtgctttat

SEQ ID NO: 220581 - DNA, 25 bp, probe
gactcaggatcagggggacctttgc

SEQ ID NO: 220582 - DNA, 25 bp, probe
gactgagtgtaccgtggatctgttt

SEQ ID NO: 220583 - DNA, 25 bp, probe
gactgagtgtaccgtggatctgttt

SEQ ID NO: 220584 - DNA, 25 bp, probe
gactgtgcttaccaatgagtggttt

SEQ ID NO: 220585 - DNA, 25 bp, probe
gactggcttaaatggtgcaggcact

SEQ ID NO: 220586 - DNA, 25 bp, probe
gactggcttaaatggtgcaggcact

SEQ ID NO: 220587 - DNA, 25 bp, probe
gactggttgagttcaggtagctgcc

SEQ ID NO: 220588 - DNA, 25 bp, probe
gactgatgtggtcacagagacctgt

SEQ ID NO: 220589 - DNA, 25 bp, probe
gactggatgagtcaagttctcgtcg

SEQ ID NO: 220590 - DNA, 25 bp, probe
gactggatgagtcaagttctcgtcg

SEQ ID NO: 220591 - DNA, 25 bp, probe
gacggctagcagcagaattcattgt

SEQ ID NO: 220592 - DNA, 25 bp, probe
gactggaatcaccgactactgaatc

SEQ ID NO: 220593 - DNA, 25 bp, probe
tgactggaccgagtgactactatac

SEQ ID NO: 220594 - DNA, 25 bp, probe
gactggattctgaaggccacttccc

SEQ ID NO: 220595 - DNA, 25 bp, probe
gactggagcctgagagcagagcccc

SEQ ID NO: 220596 - DNA, 25 bp, probe
gactgcgaggaaaatccgcaaagca

SEQ ID NO: 220597 - DNA, 25 bp, probe
gacggcaggaacgtggacaagactc

SEQ ID NO: 220598 - DNA, 25 bp, probe
gactgtgagtgctggctaaaagccc

SEQ ID NO: 220599 - DNA, 25 bp, probe
gactctctcatgtggctaaacaccc

SEQ ID NO: 220600 - DNA, 25 bp, probe
gactgcatctagaatcgctcaaaca

SEQ ID NO: 220601 - DNA, 25 bp, probe
gactcatctcaggacactgatccac

SEQ ID NO: 220602 - DNA, 25 bp, probe
gactcatctcaggacactgatccac

SEQ ID NO: 220603 - DNA, 25 bp, probe
gacgacatgcatgtaagatccacaa

SEQ ID NO: 220604 - DNA, 25 bp, probe
gacgaatgatggctagatcgacgat

SEQ ID NO: 220605 - DNA, 25 bp, probe
gacgatgagtggaccaagcgggaat

SEQ ID NO: 220606 - DNA, 25 bp, probe
gacgatgagtggaccaagcgggaat

SEQ ID NO: 220607 - DNA, 25 bp, probe
gacgagagtttggcgcatgcgcata

SEQ ID NO: 220608 - DNA, 25 bp, probe
gacgagagtttggcgcatgcgcata

SEQ ID NO: 220609 - DNA, 25 bp, probe
gacgaagatgattgggcatccaaca

SEQ ID NO: 220610 - DNA, 25 bp, probe
gacgaagatgattgggcatccaaca

SEQ ID NO: 220611 - DNA, 25 bp, probe
gacgaagcgtatcagcgtaagaggt

SEQ ID NO: 220612 - DNA, 25 bp, probe
gagccccaatctcacttgaagatgg

SEQ ID NO: 220613 - DNA, 25 bp, probe
gagccccaatctcacttgaagatgg

SEQ ID NO: 220614 - DNA, 25 bp, probe
gactggccagttgagctcaggaagg

SEQ ID NO: 220615 - DNA, 25 bp, probe
gactggcgcggttggcgaagacagc

SEQ ID NO: 220616 - DNA, 25 bp, probe
gactggcgcggttggcgaagacagc

SEQ ID NO: 220617 - DNA, 25 bp, probe
gactggggtgcttccaagaggcatg

SEQ ID NO: 220618 - DNA, 25 bp, probe
gactgctgggatggagcacaaaatg

SEQ ID NO: 220619 - DNA, 25 bp, probe
gactgagaggaggtcctgatacagt

SEQ ID NO: 220620 - DNA, 25 bp, probe
gactgagaggaggtcctgatacagt

SEQ ID NO: 220621 - DNA, 25 bp, probe
gacgcagtcgcagatgctgcatata

SEQ ID NO: 220622 - DNA, 25 bp, probe
gacgcagtcgcagatgctgcatata

SEQ ID NO: 220623 - DNA, 25 bp, probe
gactgcagtccagggatgagagagc

SEQ ID NO: 220624 - DNA, 25 bp, probe
gactgtgtctgcaggaaggagctcc

SEQ ID NO: 220625 - DNA, 25 bp, probe
gactgtgcccggcaggagactgact

SEQ ID NO: 220626 - DNA, 25 bp, probe
gactgctgtccgctgcggaatctgt

SEQ ID NO: 220627 - DNA, 25 bp, probe
gactctggcttccggagagtctggc

SEQ ID NO: 220628 - DNA, 25 bp, probe
gactctggcttccggagagtctggc

SEQ ID NO: 220629 - DNA, 25 bp, probe
gactgggtttgtcacatggctgtgg

SEQ ID NO: 220630 - DNA, 25 bp, probe
gactgatgcagctctttacgggtct

SEQ ID NO: 220631 - DNA, 25 bp, probe
gacgaagccatccgattcttggtct

SEQ ID NO: 220632 - DNA, 25 bp, probe
gactgaaccttgcagttctgtgaat

SEQ ID NO: 220633 - DNA, 25 bp, probe
gactgagagagttacatgttgggaa

SEQ ID NO: 220634 - DNA, 25 bp, probe
gactgcatgcatggtgacatctttg

SEQ ID NO: 220635 - DNA, 25 bp, probe
gactgcatgcatggtgacatctttg

SEQ ID NO: 220636 - DNA, 25 bp, probe
gactggagtctgtctcattatgtga

SEQ ID NO: 220637 - DNA, 25 bp, probe
gactgagatgttgcctgatggatgg

SEQ ID NO: 220638 - DNA, 25 bp, probe
gactgagatgttgcctgatggatgg

SEQ ID NO: 220639 - DNA, 25 bp, probe
gactgcagtggtgcccatgtagttt

SEQ ID NO: 220640 - DNA, 25 bp, probe
gactcttaggcagctatgggtttct

SEQ ID NO: 220641 - DNA, 25 bp, probe
gactcttaggcagctatgggtttct

SEQ ID NO: 220642 - DNA, 25 bp, probe
gactcttaggcagctatgggtttct

SEQ ID NO: 220643 - DNA, 25 bp, probe
gactctaaaggttatggcgttggca

SEQ ID NO: 220644 - DNA, 25 bp, probe
gactgatataaacagtgggatccca

SEQ ID NO: 220645 - DNA, 25 bp, probe
gactgcataaaccttgcttgtgatg

SEQ ID NO: 220646 - DNA, 25 bp, probe
gactccaagaccatgacagagagct

SEQ ID NO: 220647 - DNA, 25 bp, probe
gactccatagcactccaaaagcagc

SEQ ID NO: 220648 - DNA, 25 bp, probe
gactccatagcactccaaaagcagc

SEQ ID NO: 220649 - DNA, 25 bp, probe
gactccatgggagcagacaaagagg

SEQ ID NO: 220650 - DNA, 25 bp, probe
gacccgcgtggtggacgacaacggg

SEQ ID NO: 220651 - DNA, 25 bp, probe
gacccgcgtggtggacgacaacggg

SEQ ID NO: 220652 - DNA, 25 bp, probe
gaccaagccgaattgcaaacaacgt

SEQ ID NO: 220653 - DNA, 25 bp, probe
gacccacacgacgggaagacaagtt

SEQ ID NO: 220654 - DNA, 25 bp, probe
gatccccacggagaggtacggaatc

SEQ ID NO: 220655 - DNA, 25 bp, probe
gtccaaccggctgtgcgaacggaag

SEQ ID NO: 220656 - DNA, 25 bp, probe
gaccaaaggcgctgggaagggacat

SEQ ID NO: 220657 - DNA, 25 bp, probe
gacccagaaggctgaacgggaggtg

SEQ ID NO: 220658 - DNA, 25 bp, probe
gacggaggaggggaaggggctgagg

SEQ ID NO: 220659 - DNA, 25 bp, probe
gacggggtggcagagagtgacacgg

SEQ ID NO: 220660 - DNA, 25 bp, probe
tacgggtcttgagagggaaggactc

SEQ ID NO: 220661 - DNA, 25 bp, probe
gatcgggtctcggaagggaagtagc

SEQ ID NO: 220662 - DNA, 25 bp, probe
gacggctgacctgaaggagacgtac

SEQ ID NO: 220663 - DNA, 25 bp, probe
gactccgagccatacagttgacttc

SEQ ID NO: 220664 - DNA, 25 bp, probe
gactccgagccatacagttgacttc

SEQ ID NO: 220665 - DNA, 25 bp, probe
gactccaaagactctgtggacattt

SEQ ID NO: 220666 - DNA, 25 bp, probe
gactgtaaggtctttagagattttt

SEQ ID NO: 220667 - DNA, 25 bp, probe
gactgtaaggtctttagagattttt

SEQ ID NO: 220668 - DNA, 25 bp, probe
gactgtggcggttagcattggattt

SEQ ID NO: 220669 - DNA, 25 bp, probe
gactgtggcggttagcattggattt

SEQ ID NO: 220670 - DNA, 25 bp, probe
gactgcccgaattagcatggctgat

SEQ ID NO: 220671 - DNA, 25 bp, probe
gactcccatgcaagtagctggctgt

SEQ ID NO: 220672 - DNA, 25 bp, probe
gactccacatcaactgatgctatgt

SEQ ID NO: 220673 - DNA, 25 bp, probe
gactctacacatcctgagctaagac

SEQ ID NO: 220674 - DNA, 25 bp, probe
gactgttacagctgagcattatgat

SEQ ID NO: 220675 - DNA, 25 bp, probe
gactgactaccttgacttgaaatgc

SEQ ID NO: 220676 - DNA, 25 bp, probe
gaccgctacctgaacatagttcatg

SEQ ID NO: 220677 - DNA, 25 bp, probe
gacgcctacctgatgaagctgcgcc

SEQ ID NO: 220678 - DNA, 25 bp, probe
gactccgacatcaggaagatgctgc

SEQ ID NO: 220679 - DNA, 25 bp, probe
gactcctagatccagggatagcccc

SEQ ID NO: 220680 - DNA, 25 bp, probe
gactcctagatccagggatagcccc

SEQ ID NO: 220681 - DNA, 25 bp, probe
gactcccttcaggagtggaggccac

SEQ ID NO: 220682 - DNA, 25 bp, probe
gactgctctgtttgggtgggagaag

SEQ ID NO: 220683 - DNA, 25 bp, probe
gactcgcagattttcttgggagagt

SEQ ID NO: 220684 - DNA, 25 bp, probe
gactctgctccgtttttggagcaga

SEQ ID NO: 220685 - DNA, 25 bp, probe
gactctgtggacatttatggagcag

SEQ ID NO: 220686 - DNA, 25 bp, probe
gactgcttgaacagttgtgtccaga

SEQ ID NO: 220687 - DNA, 25 bp, probe
gactgttatactcttgaatccctgt

SEQ ID NO: 220688 - DNA, 25 bp, probe
gactgttatactcttgaatccctgt

SEQ ID NO: 220689 - DNA, 25 bp, probe
gacgtctatcctccagagaacgatt

SEQ ID NO: 220690 - DNA, 25 bp, probe
gactgactataccagaaaatctgtt

SEQ ID NO: 220691 - DNA, 25 bp, probe
gactgccaataacattcttcgatct

SEQ ID NO: 220692 - DNA, 25 bp, probe
gactgccaataacattcttcgatct

SEQ ID NO: 220693 - DNA, 25 bp, probe
gactccaaaatcatgatctccgact

SEQ ID NO: 220694 - DNA, 25 bp, probe
gactccaagaaaaacgcctgcaatg

SEQ ID NO: 220695 - DNA, 25 bp, probe
gactccagagtatgtagccccagag

SEQ ID NO: 220696 - DNA, 25 bp, probe
gactccagtttacatccagaaaggc

SEQ ID NO: 220697 - DNA, 25 bp, probe
gactccagtggggaactcagcaaat

SEQ ID NO: 220698 - DNA, 25 bp, probe
gactccttgttacactgcaaatttt

SEQ ID NO: 220699 - DNA, 25 bp, probe
gactcctcagtagggcaacattttt

SEQ ID NO: 220700 - DNA, 25 bp, probe
gactccaagctgcatggcaagttct

SEQ ID NO: 220701 - DNA, 25 bp, probe
gactccaagctgcatggcaagttct

SEQ ID NO: 220702 - DNA, 25 bp, probe
gactccaagctgcatggcaagttct

SEQ ID NO: 220703 - DNA, 25 bp, probe
gactccaagctgcatggcaagttct

SEQ ID NO: 220704 - DNA, 25 bp, probe
gactccaagctgcatggcaagttct

SEQ ID NO: 220705 - DNA, 25 bp, probe
gacgtcattgtgcatggacaggccg

SEQ ID NO: 220706 - DNA, 25 bp, probe
gactgactggtgaggaagcagcctg

SEQ ID NO: 220707 - DNA, 25 bp, probe
gactggctcagcgtgtgcctaccct

SEQ ID NO: 220708 - DNA, 25 bp, probe
gactggtctgagtgctctagcacct

SEQ ID NO: 220709 - DNA, 25 bp, probe
gacggcttgcagcagtctaagtgcc

SEQ ID NO: 220710 - DNA, 25 bp, probe
gacggctctgacctgagctatgtgg

SEQ ID NO: 220711 - DNA, 25 bp, probe
gactggcattaccttcaatggccac

SEQ ID NO: 220712 - DNA, 25 bp, probe
gactccatatcgctacaataccagt

SEQ ID NO: 220713 - DNA, 25 bp, probe
gactctgcaaagctacatcaagggc

SEQ ID NO: 220714 - DNA, 25 bp, probe
gactccaaagccaagacgcggagcg

SEQ ID NO: 220715 - DNA, 25 bp, probe
gactcctaaccaaccagatggactg

SEQ ID NO: 220716 - DNA, 25 bp, probe
gactccaaacaagctcactgtgttt

SEQ ID NO: 220717 - DNA, 25 bp, probe
gactgacaagaagctcccagatgct

SEQ ID NO: 220718 - DNA, 25 bp, probe
gagctaaaatagatcctaggtgctg

SEQ ID NO: 220719 - DNA, 25 bp, probe
gagtagttaggtaccatttgtaagg

SEQ ID NO: 220720 - DNA, 25 bp, probe
gagtagttaggtaccatttgtaagg

SEQ ID NO: 220721 - DNA, 25 bp, probe
gagtacttggaagcctattggaagg

SEQ ID NO: 220722 - DNA, 25 bp, probe
gactccttgtttgcctttaggcagg

SEQ ID NO: 220723 - DNA, 25 bp, probe
gactgagatttatttctctctttta

SEQ ID NO: 220724 - DNA, 25 bp, probe
gactgccttatattattttctgtaa

SEQ ID NO: 220725 - DNA, 25 bp, probe
gactctgttgatgtgataatttgat

SEQ ID NO: 220726 - DNA, 25 bp, probe
gaccatgtttgggcaaattctgtta

SEQ ID NO: 220727 - DNA, 25 bp, probe
gaccatgtttgggcaaattctgtta

SEQ ID NO: 220728 - DNA, 25 bp, probe
tgtccttcctaagaccctgttattt

SEQ ID NO: 220729 - DNA, 25 bp, probe
gacctacgtgaataccacgctttat

SEQ ID NO: 220730 - DNA, 25 bp, probe
gacgtgttggaacacctcattttat

SEQ ID NO: 220731 - DNA, 25 bp, probe
gacgttagggagaaccatcatttca

SEQ ID NO: 220732 - DNA, 25 bp, probe
gactccaaggagctactgacattcc

SEQ ID NO: 220733 - DNA, 25 bp, probe
gactgcctagggtctcatggactgt

SEQ ID NO: 220734 - DNA, 25 bp, probe
gactgcctagggtctcatggactgt

SEQ ID NO: 220735 - DNA, 25 bp, probe
gacgtctggaggactcaagcaatgg

SEQ ID NO: 220736 - DNA, 25 bp, probe
gactggctcagcgccatcaaaatgg

SEQ ID NO: 220737 - DNA, 25 bp, probe
gacgtaccgctgcatcaagaaggtt

SEQ ID NO: 220738 - DNA, 25 bp, probe
gactgattccttctctggaatagtt

SEQ ID NO: 220739 - DNA, 25 bp, probe
gactgattccttctctggaatagtt

SEQ ID NO: 220740 - DNA, 25 bp, probe
gactgttccacatgtagtacattgt

SEQ ID NO: 220741 - DNA, 25 bp, probe
gactgctacacctctgattacaatt

SEQ ID NO: 220742 - DNA, 25 bp, probe
gactgctacacctctgattacaatt

SEQ ID NO: 220743 - DNA, 25 bp, probe
gacggaccctgttgtcaaaattgcc

SEQ ID NO: 220744 - DNA, 25 bp, probe
gacgggctcctgggaaacaagccgc

SEQ ID NO: 220745 - DNA, 25 bp, probe
gacggtgatcttgggcagaacatac

SEQ ID NO: 220746 - DNA, 25 bp, probe
gactgcgctgacaatggacagcaaa

SEQ ID NO: 220747 - DNA, 25 bp, probe
gactgcgctgacaatggacagcaaa

SEQ ID NO: 220748 - DNA, 25 bp, probe
gactcgcgacaatgcaaaccatcat

SEQ ID NO: 220749 - DNA, 25 bp, probe
gagcctgagaaagcaaacctacgtc

SEQ ID NO: 220750 - DNA, 25 bp, probe
gagcctgagaaagcaaacctacgtc

SEQ ID NO: 220751 - DNA, 25 bp, probe
gactctgggaatgacaacacctggt

SEQ ID NO: 220752 - DNA, 25 bp, probe
gagcttgtggaaaagaaagtttgta

SEQ ID NO: 220753 - DNA, 25 bp, probe
gactgggtgcaagaaaaatgtaaag

SEQ ID NO: 220754 - DNA, 25 bp, probe
gacggggccgaagaattgtgagaac

SEQ ID NO: 220755 - DNA, 25 bp, probe
gagcagggtcccaaggattgggaga

SEQ ID NO: 220756 - DNA, 25 bp, probe
gactctggacctacaggattggggc

SEQ ID NO: 220757 - DNA, 25 bp, probe
gaccgagagcgcttagtaggtcgga

SEQ ID NO: 220758 - DNA, 25 bp, probe
gactgggcagcttgttgaaggctcg

SEQ ID NO: 220759 - DNA, 25 bp, probe
gactgagggactctgaagcctctgg

SEQ ID NO: 220760 - DNA, 25 bp, probe
gacgaagtgacgttgagatcctcgg

SEQ ID NO: 220761 - DNA, 25 bp, probe
gacgacagtgaaaatggagttccag

SEQ ID NO: 220762 - DNA, 25 bp, probe
gactgtattgaaaagaactcaccaa

SEQ ID NO: 220763 - DNA, 25 bp, probe
gactgctttggtcatgaagctacac

SEQ ID NO: 220764 - DNA, 25 bp, probe
gactgctttcagatatgtacaaatc

SEQ ID NO: 220765 - DNA, 25 bp, probe
gacgcctccggtagtgtaaatgagg

SEQ ID NO: 220766 - DNA, 25 bp, probe
gactgcctcccagtgtttaagtggc

SEQ ID NO: 220767 - DNA, 25 bp, probe
gactggttactggatctttatgctg

SEQ ID NO: 220768 - DNA, 25 bp, probe
gactgaattaggaatttggatgctt

SEQ ID NO: 220769 - DNA, 25 bp, probe
gactcctgtagggaagtttcttcaa

SEQ ID NO: 220770 - DNA, 25 bp, probe
gagtccttaaagttgttctcccaag

SEQ ID NO: 220771 - DNA, 25 bp, probe
gactgcaatatagagactgtgttca

SEQ ID NO: 220772 - DNA, 25 bp, probe
gactgctctccatagcaaggttcta

SEQ ID NO: 220773 - DNA, 25 bp, probe
gactccatctctacaaataaataaa

SEQ ID NO: 220774 - DNA, 25 bp, probe
gactccatatctacagaacatttaa

SEQ ID NO: 220775 - DNA, 25 bp, probe
gactcctatttactgcttttactaa

SEQ ID NO: 220776 - DNA, 25 bp, probe
gactgccagatttcggcatttcttt

SEQ ID NO: 220777 - DNA, 25 bp, probe
gactgtcagtattctcgctatttta

SEQ ID NO: 220778 - DNA, 25 bp, probe
gactgtcagctgtattccgtgactt

SEQ ID NO: 220779 - DNA, 25 bp, probe
gactgtcaggtccaagtgtactgtt

SEQ ID NO: 220780 - DNA, 25 bp, probe
gactgtccgggaaggcatgagtgtc

SEQ ID NO: 220781 - DNA, 25 bp, probe
gactgtcctggaaggagtagtgtcc

SEQ ID NO: 220782 - DNA, 25 bp, probe
gactgtaaggtccgagttttcactt

SEQ ID NO: 220783 - DNA, 25 bp, probe
gactgttagaggccagtggtttcaa

SEQ ID NO: 220784 - DNA, 25 bp, probe
gagcggttggtgccgggtataaaag

SEQ ID NO: 220785 - DNA, 25 bp, probe
gacggttgtgtgacaatggtctgga

SEQ ID NO: 220786 - DNA, 25 bp, probe
gacgagttcggacgggattcgaggc

SEQ ID NO: 220787 - DNA, 25 bp, probe
gacggatttcgaaggagattcagag

SEQ ID NO: 220788 - DNA, 25 bp, probe
gacggttattgcaggtttcaaggca

SEQ ID NO: 220789 - DNA, 25 bp, probe
gacgggaatggcactgtcccagagc

SEQ ID NO: 220790 - DNA, 25 bp, probe
gacgggaatggcactgtcccagagc

SEQ ID NO: 220791 - DNA, 25 bp, probe
gacgggaatggcactgtcccagagc

SEQ ID NO: 220792 - DNA, 25 bp, probe
gacgtgagttggagcggccacgtgc

SEQ ID NO: 220793 - DNA, 25 bp, probe
gactgctaggggagggaacctgggt

SEQ ID NO: 220794 - DNA, 25 bp, probe
gacctcaggggacaggtacctggtg

SEQ ID NO: 220795 - DNA, 25 bp, probe
gacctcaggggacaggtacctggtg

SEQ ID NO: 220796 - DNA, 25 bp, probe
gacctctggggaccaagttcagttc

SEQ ID NO: 220797 - DNA, 25 bp, probe
gactccgtgggagaagctcattccc

SEQ ID NO: 220798 - DNA, 25 bp, probe
gagattcagttgcaaaaggacccgg

SEQ ID NO: 220799 - DNA, 25 bp, probe
gactccagttaataagaaccagcat

SEQ ID NO: 220800 - DNA, 25 bp, probe
gactgccggtcatttgaatgagacc

SEQ ID NO: 220801 - DNA, 25 bp, probe
gacgccatggctgcattgaatgata

SEQ ID NO: 220802 - DNA, 25 bp, probe
gacgccatggctgcattgaatgata

SEQ ID NO: 220803 - DNA, 25 bp, probe
gacgccatggctgcattgaatgata

SEQ ID NO: 220804 - DNA, 25 bp, probe
gacgccatggctgcattgaatgata

SEQ ID NO: 220805 - DNA, 25 bp, probe
gactgcctggtgaactgtatgaaat

SEQ ID NO: 220806 - DNA, 25 bp, probe
gactgcctggagagctcctatttca

SEQ ID NO: 220807 - DNA, 25 bp, probe
gactgcctggagagctcctatttca

SEQ ID NO: 220808 - DNA, 25 bp, probe
gactgcctggagagctcctatttca

SEQ ID NO: 220809 - DNA, 25 bp, probe
gactgctctagcaaaccctattttc

SEQ ID NO: 220810 - DNA, 25 bp, probe
gactgctatggaaaacccattgaag

SEQ ID NO: 220811 - DNA, 25 bp, probe
gactgttgctacaaacgtctggaga

SEQ ID NO: 220812 - DNA, 25 bp, probe
gactgtagtcataaatgatgttgga

SEQ ID NO: 220813 - DNA, 25 bp, probe
gactgccaggataacgaattggaaa

SEQ ID NO: 220814 - DNA, 25 bp, probe
gactgcacagaatggctgacttgaa

SEQ ID NO: 220815 - DNA, 25 bp, probe
gactccagagacctcaactttcaga

SEQ ID NO: 220816 - DNA, 25 bp, probe
gactgccgagtactgaacattgtca

SEQ ID NO: 220817 - DNA, 25 bp, probe
gactgccgagtactgaacattgtca

SEQ ID NO: 220818 - DNA, 25 bp, probe
gactgtcagaagttgacctttgcac

SEQ ID NO: 220819 - DNA, 25 bp, probe
gactgcccagagggacctggtgagc

SEQ ID NO: 220820 - DNA, 25 bp, probe
gactgccgctgagaagggttgatcc

SEQ ID NO: 220821 - DNA, 25 bp, probe
gactccagatgaggacaagagggac

SEQ ID NO: 220822 - DNA, 25 bp, probe
gactgccacactggaaagggaactg

SEQ ID NO: 220823 - DNA, 25 bp, probe
gactgtctcttgggagagggaggtg

SEQ ID NO: 220824 - DNA, 25 bp, probe
gactgcttatgggaggcgggaggct

SEQ ID NO: 220825 - DNA, 25 bp, probe
gactgcttatgggaggcgggaggct

SEQ ID NO: 220826 - DNA, 25 bp, probe
gactgctggatctacaagtgggagg

SEQ ID NO: 220827 - DNA, 25 bp, probe
gactgcatggacaatgagaggcggc

SEQ ID NO: 220828 - DNA, 25 bp, probe
gactgcttccttagagggtgctcat

SEQ ID NO: 220829 - DNA, 25 bp, probe
gactgtgtccattcgggttattagc

SEQ ID NO: 220830 - DNA, 25 bp, probe
gactgtacacattggtggttttagg

SEQ ID NO: 220831 - DNA, 25 bp, probe
gactggacaatttggggtagtgaag

SEQ ID NO: 220832 - DNA, 25 bp, probe
gactgagacacagccgggtggtgaa

SEQ ID NO: 220833 - DNA, 25 bp, probe
gactgaacacaacccaactttcaca

SEQ ID NO: 220834 - DNA, 25 bp, probe
gactggtcagtcacaagaacttcaa

SEQ ID NO: 220835 - DNA, 25 bp, probe
gactggtcagtcacaagaacttcaa

SEQ ID NO: 220836 - DNA, 25 bp, probe
gactgggcaacatagcgagacctca

SEQ ID NO: 220837 - DNA, 25 bp, probe
gacgggaacatctccaacagaagca

SEQ ID NO: 220838 - DNA, 25 bp, probe
gacggtggactatggcgacatggtc

SEQ ID NO: 220839 - DNA, 25 bp, probe
gacggtggactatggcgacatggtc

SEQ ID NO: 220840 - DNA, 25 bp, probe
gacgtcatgggcataggtgaccgct

SEQ ID NO: 220841 - DNA, 25 bp, probe
gactgtctgtgcaattacgtccacc

SEQ ID NO: 220842 - DNA, 25 bp, probe
gactgtttgagacaatgtgcacatc

SEQ ID NO: 220843 - DNA, 25 bp, probe
gactgcagggcttgaaatggacatc

SEQ ID NO: 220844 - DNA, 25 bp, probe
gactgcacaatgacagagaagagga

SEQ ID NO: 220845 - DNA, 25 bp, probe
gactgctctggcaagaagaagaggt

SEQ ID NO: 220846 - DNA, 25 bp, probe
gactgctatggcaatccgaaagggg

SEQ ID NO: 220847 - DNA, 25 bp, probe
gactgcatggccagcctaattgtgg

SEQ ID NO: 220848 - DNA, 25 bp, probe
gactgcatgtccaaacgaagtaaca

SEQ ID NO: 220849 - DNA, 25 bp, probe
gactgtacccaagaattaaaccaag

SEQ ID NO: 220850 - DNA, 25 bp, probe
gactgtgaaaaagcaattattccca

SEQ ID NO: 220851 - DNA, 25 bp, probe
gacgaggccaaagactttgtctcca

SEQ ID NO: 220852 - DNA, 25 bp, probe
gacgaggcaatttccactgtggttc

SEQ ID NO: 220853 - DNA, 25 bp, probe
gactgaagaaatttcacagcagttt

SEQ ID NO: 220854 - DNA, 25 bp, probe
gactgaagtaataactgatgagata

SEQ ID NO: 220855 - DNA, 25 bp, probe
gactgcacagctaatggcacaggag

SEQ ID NO: 220856 - DNA, 25 bp, probe
gactgcacagctaatggcacaggag

SEQ ID NO: 220857 - DNA, 25 bp, probe
gactgatcactccattgagaaagca

SEQ ID NO: 220858 - DNA, 25 bp, probe
gacgctacattgatgagtacagaaa

SEQ ID NO: 220859 - DNA, 25 bp, probe
gactgctagtgttctgtctaaaaac

SEQ ID NO: 220860 - DNA, 25 bp, probe
gactgtgaagattcagttcaaatgt

SEQ ID NO: 220861 - DNA, 25 bp, probe
gactgtgagatgaacagcccccagg

SEQ ID NO: 220862 - DNA, 25 bp, probe
gactggagaaactccacgatcttcc

SEQ ID NO: 220863 - DNA, 25 bp, probe
gactgggaaaatgcccatcctctcc

SEQ ID NO: 220864 - DNA, 25 bp, probe
gactgtggacaaaccactcagcctc

SEQ ID NO: 220865 - DNA, 25 bp, probe
gactgtggacaaaccactcagcctc

SEQ ID NO: 220866 - DNA, 25 bp, probe
gactgctgtacgaatgcaaccccat

SEQ ID NO: 220867 - DNA, 25 bp, probe
gactgatgtatcttcagtgacccca

SEQ ID NO: 220868 - DNA, 25 bp, probe
gactgatgtatcttcagtgacccca

SEQ ID NO: 220869 - DNA, 25 bp, probe
gacgcatgttcattagcgagctgct

SEQ ID NO: 220870 - DNA, 25 bp, probe
gactgctgttcttatcaatgcactg

SEQ ID NO: 220871 - DNA, 25 bp, probe
gactgctacctttcaaagcttggag

SEQ ID NO: 220872 - DNA, 25 bp, probe
gactgctgactctttgaaaatctga

SEQ ID NO: 220873 - DNA, 25 bp, probe
gacgctgacatcagatcacaaatct

SEQ ID NO: 220874 - DNA, 25 bp, probe
gacgtggtcagcatgcacaggagct

SEQ ID NO: 220875 - DNA, 25 bp, probe
gacgtggtcagcatgcacaggagct

SEQ ID NO: 220876 - DNA, 25 bp, probe
gactgtggtcatgtaacaggtaacc

SEQ ID NO: 220877 - DNA, 25 bp, probe
gactgtgcgtatgtagcaaaaccag

SEQ ID NO: 220878 - DNA, 25 bp, probe
gacgggttttcgtatcttccagaat

SEQ ID NO: 220879 - DNA, 25 bp, probe
gacgtggttaacggtccagaagaat

SEQ ID NO: 220880 - DNA, 25 bp, probe
gacggagattaaccgtcggcacatc

SEQ ID NO: 220881 - DNA, 25 bp, probe
gacgggagtaagccctggtggtggt

SEQ ID NO: 220882 - DNA, 25 bp, probe
gacgggagtaagccctggtggtggt

SEQ ID NO: 220883 - DNA, 25 bp, probe
gacgggcggatcacctgaggtgagg

SEQ ID NO: 220884 - DNA, 25 bp, probe
gacggacggatctacatcatcatgg

SEQ ID NO: 220885 - DNA, 25 bp, probe
gactgtgagcggagcaagcatctgg

SEQ ID NO: 220886 - DNA, 25 bp, probe
gactgacagcgtccagagacttggc

SEQ ID NO: 220887 - DNA, 25 bp, probe
gactgatcacggcatagacattgac

SEQ ID NO: 220888 - DNA, 25 bp, probe
gactgatcacggcatagacattgac

SEQ ID NO: 220889 - DNA, 25 bp, probe
gacgtgaatgcagagaactgtgact

SEQ ID NO: 220890 - DNA, 25 bp, probe
gacgtgggacattaatattgcacag

SEQ ID NO: 220891 - DNA, 25 bp, probe
gactgtgaagtcaacaataatggca

SEQ ID NO: 220892 - DNA, 25 bp, probe
gactgtgaactgggcatttcacgaa

SEQ ID NO: 220893 - DNA, 25 bp, probe
gactggtcctggattatcactgcac

SEQ ID NO: 220894 - DNA, 25 bp, probe
gacgagctactgctttggagcgagg

SEQ ID NO: 220895 - DNA, 25 bp, probe
aaacccgaggggacagcaatgcaaa

SEQ ID NO: 220896 - DNA, 25 bp, probe
gactgaggccagtttctatgaagag

SEQ ID NO: 220897 - DNA, 25 bp, probe
gacgatgccaagtacacctgcaagg

SEQ ID NO: 220898 - DNA, 25 bp, probe
gacgacagcgacaaaaccaatgggt

SEQ ID NO: 220899 - DNA, 25 bp, probe
gacgacacgaaatcaatgaaaggcg

SEQ ID NO: 220900 - DNA, 25 bp, probe
gacgacacgaaatcaatgaaaggcg

SEQ ID NO: 220901 - DNA, 25 bp, probe
gactgaacggaatcaagctctgagc

SEQ ID NO: 220902 - DNA, 25 bp, probe
gactgaagggactagctatctctgt

SEQ ID NO: 220903 - DNA, 25 bp, probe
gacgactttgactgtgatctggagt

SEQ ID NO: 220904 - DNA, 25 bp, probe
gacgtgcaatggcccaggattcaag

SEQ ID NO: 220905 - DNA, 25 bp, probe
gactgtcaagagcctgcggctacag

SEQ ID NO: 220906 - DNA, 25 bp, probe
gactgtcaagagcctgcggctacag

SEQ ID NO: 220907 - DNA, 25 bp, probe
gactgtggagaactggactgacgga

SEQ ID NO: 220908 - DNA, 25 bp, probe
gactgtggcgattgtgaaagcactg

SEQ ID NO: 220909 - DNA, 25 bp, probe
gactgtggtgtgcctgcaggacagt

SEQ ID NO: 220910 - DNA, 25 bp, probe
gactgaggggcagaggcacaggtgg

SEQ ID NO: 220911 - DNA, 25 bp, probe
gacgaggtaaggtgcaagtgcagag

SEQ ID NO: 220912 - DNA, 25 bp, probe
gacggtgggcagcgtgggtaaggtg

SEQ ID NO: 220913 - DNA, 25 bp, probe
gacggtgggcagcgtgggtaaggtg

SEQ ID NO: 220914 - DNA, 25 bp, probe
gactggtggtacatgggagaaaggt

SEQ ID NO: 220915 - DNA, 25 bp, probe
gactggggctgaaggttgaagaggt

SEQ ID NO: 220916 - DNA, 25 bp, probe
gacggggagtgaggttgggcagtgt

SEQ ID NO: 220917 - DNA, 25 bp, probe
gacgacggcctgaagatctgggcgg

SEQ ID NO: 220918 - DNA, 25 bp, probe
gacgacggcctgaagatctgggcgg

SEQ ID NO: 220919 - DNA, 25 bp, probe
gacggaagcctgtgactggtggagc

SEQ ID NO: 220920 - DNA, 25 bp, probe
gactggagacttttttggtgagatc

SEQ ID NO: 220921 - DNA, 25 bp, probe
gactgagcacactttcatatttgta

SEQ ID NO: 220922 - DNA, 25 bp, probe
gactgcaacaactacatctatattt

SEQ ID NO: 220923 - DNA, 25 bp, probe
gactgtgagaactcatcgaaactgg

SEQ ID NO: 220924 - DNA, 25 bp, probe
gacgtggcacatgtttgtacactgg

SEQ ID NO: 220925 - DNA, 25 bp, probe
gactgtgccaagtttcttacaacaa

SEQ ID NO: 220926 - DNA, 25 bp, probe
gactgtgccaagtttcttacaacaa

SEQ ID NO: 220927 - DNA, 25 bp, probe
gacctgaagacctctaacaaccggc

SEQ ID NO: 220928 - DNA, 25 bp, probe
gacctgaaacctcagaacttactca

SEQ ID NO: 220929 - DNA, 25 bp, probe
gacgtagaacctcgaggtttctcaa

SEQ ID NO: 220930 - DNA, 25 bp, probe
gacgtagaacctcgaggtttctcaa

SEQ ID NO: 220931 - DNA, 25 bp, probe
gacgctggcaagtccaaggttttct

SEQ ID NO: 220932 - DNA, 25 bp, probe
gacgctggcaagtccaaggttttct

SEQ ID NO: 220933 - DNA, 25 bp, probe
gaccctcaaactgggtgggttctgt

SEQ ID NO: 220934 - DNA, 25 bp, probe
gaccaccccaggggggaagattgtg

SEQ ID NO: 220935 - DNA, 25 bp, probe
gacccaaaagaaaggccaagatttg

SEQ ID NO: 220936 - DNA, 25 bp, probe
gactgcagaggataaagaccacagt

SEQ ID NO: 220937 - DNA, 25 bp, probe
gactgcagaggataaagaccacagt

SEQ ID NO: 220938 - DNA, 25 bp, probe
gacggaggcagacaagcccaatggc

SEQ ID NO: 220939 - DNA, 25 bp, probe
gacctgaggccacaggccaagttct

SEQ ID NO: 220940 - DNA, 25 bp, probe
gagcctaggttcaaaccaagattta

SEQ ID NO: 220941 - DNA, 25 bp, probe
gacctatgttacagcatccaactta

SEQ ID NO: 220942 - DNA, 25 bp, probe
gacctgttaacaagtatcacctttt

SEQ ID NO: 220943 - DNA, 25 bp, probe
gaccctggagtcagttaccgtacac

SEQ ID NO: 220944 - DNA, 25 bp, probe
gaccctggagtcagttaccgtacac

SEQ ID NO: 220945 - DNA, 25 bp, probe
gaccctgggactctggatggttaca

SEQ ID NO: 220946 - DNA, 25 bp, probe
gacgttagacctcttgatgttttcc

SEQ ID NO: 220947 - DNA, 25 bp, probe
gaccagctaaacaccaatttcttcc

SEQ ID NO: 220948 - DNA, 25 bp, probe
gagccttaatccaccaagtttatat

SEQ ID NO: 220949 - DNA, 25 bp, probe
gacccttctgtctgtaagattttat

SEQ ID NO: 220950 - DNA, 25 bp, probe
gacccttctgtctgtaagattttat

SEQ ID NO: 220951 - DNA, 25 bp, probe
gacggcttcgtcagtgacgtcatcg

SEQ ID NO: 220952 - DNA, 25 bp, probe
gacggatacgtcctagtgctgtcta

SEQ ID NO: 220953 - DNA, 25 bp, probe
gacgtgtacagtttattcgatcaca

SEQ ID NO: 220954 - DNA, 25 bp, probe
gacgttccatggtatttgtgcaaaa

SEQ ID NO: 220955 - DNA, 25 bp, probe
gactgtctttagctttctaatagaa

SEQ ID NO: 220956 - DNA, 25 bp, probe
gactggcctctagtttatataatta

SEQ ID NO: 220957 - DNA, 25 bp, probe
gactggtcttaaaagattgtcttca

SEQ ID NO: 220958 - DNA, 25 bp, probe
gactggatgctttataaatttgttc

SEQ ID NO: 220959 - DNA, 25 bp, probe
gactgtctctgtggaatatatttgt

SEQ ID NO: 220960 - DNA, 25 bp, probe
gactgatctctgtggtttggtttag

SEQ ID NO: 220961 - DNA, 25 bp, probe
gactgagccatgtgatggtacgtaa

SEQ ID NO: 220962 - DNA, 25 bp, probe
gacggcaatgcaatagcctatttaa

SEQ ID NO: 220963 - DNA, 25 bp, probe
gactgtgcaatgttatttactgttg

SEQ ID NO: 220964 - DNA, 25 bp, probe
gactgtgcaatgttatttactgttg

SEQ ID NO: 220965 - DNA, 25 bp, probe
gactgtcataatgatctgtacttcc

SEQ ID NO: 220966 - DNA, 25 bp, probe
gactgatattcaaatgctgtagtgt

SEQ ID NO: 220967 - DNA, 25 bp, probe
gactgagaccttagctgtcattgtg

SEQ ID NO: 220968 - DNA, 25 bp, probe
gactggcatcaccatggtgatcttc

SEQ ID NO: 220969 - DNA, 25 bp, probe
gactgtgctctcgacagattcttct

SEQ ID NO: 220970 - DNA, 25 bp, probe
gacgctgctgctggtatgttgtatc

SEQ ID NO: 220971 - DNA, 25 bp, probe
gacggcactgcgaattttctgcgtg

SEQ ID NO: 220972 - DNA, 25 bp, probe
gacggcacctgcaattttgtgcaca

SEQ ID NO: 220973 - DNA, 25 bp, probe
gacggcacctgcaattttgtgcaca

SEQ ID NO: 220974 - DNA, 25 bp, probe
gacggagctcgtattcagtgcaagt

SEQ ID NO: 220975 - DNA, 25 bp, probe
gacgtggcacgcactgccactataa

SEQ ID NO: 220976 - DNA, 25 bp, probe
gacgtgagatcctgctgaaaatgaa

SEQ ID NO: 220977 - DNA, 25 bp, probe
gactggagcccatgtaggtttgcag

SEQ ID NO: 220978 - DNA, 25 bp, probe
gacggaagctcatgtaggtgctatg

SEQ ID NO: 220979 - DNA, 25 bp, probe
gacggaagctcatgtaggtgctatg

SEQ ID NO: 220980 - DNA, 25 bp, probe
gacggtcccatatgggagtgatggg

SEQ ID NO: 220981 - DNA, 25 bp, probe
gaccccccattctggatgtatatca

SEQ ID NO: 220982 - DNA, 25 bp, probe
gaccgtgccgcagaagggtttagaa

SEQ ID NO: 220983 - DNA, 25 bp, probe
gacccccagggatgtggttatgatg

SEQ ID NO: 220984 - DNA, 25 bp, probe
tggcccccgaaagcctgtttgaagg

SEQ ID NO: 220985 - DNA, 25 bp, probe
gtcccttcaaacgcctgggagggcg

SEQ ID NO: 220986 - DNA, 25 bp, probe
gacccttctgaagttcgggacgcgg

SEQ ID NO: 220987 - DNA, 25 bp, probe
gaccctacaggtttaccaaccagca

SEQ ID NO: 220988 - DNA, 25 bp, probe
gaccctaagaaagagccgaaagcac

SEQ ID NO: 220989 - DNA, 25 bp, probe
gaccccaaagaatcacaccaagact

SEQ ID NO: 220990 - DNA, 25 bp, probe
gacgccggcaagaagaaaccaggac

SEQ ID NO: 220991 - DNA, 25 bp, probe
gacgccaggcaacaaaatgggcatg

SEQ ID NO: 220992 - DNA, 25 bp, probe
gacggcgacaggcaactatggcaac

SEQ ID NO: 220993 - DNA, 25 bp, probe
gactgggagagagcatccttccaac

SEQ ID NO: 220994 - DNA, 25 bp, probe
gactgagggagagactctgaggaca

SEQ ID NO: 220995 - DNA, 25 bp, probe
gacgagaagcgggacttccgcacat

SEQ ID NO: 220996 - DNA, 25 bp, probe
gactgtaagccagacttgaagcatg

SEQ ID NO: 220997 - DNA, 25 bp, probe
gactgtaagccagacttgaagcatg

SEQ ID NO: 220998 - DNA, 25 bp, probe
gactgtaagccagacttgaagcatg

SEQ ID NO: 220999 - DNA, 25 bp, probe
gactgtaagccagacttgaagcatg

SEQ ID NO: 221000 - DNA, 25 bp, probe
gactgaggagcgaggcctgaagcat

SEQ ID NO: 221001 - DNA, 25 bp, probe
gactgtgggatgtttgcctgcaaat

SEQ ID NO: 221002 - DNA, 25 bp, probe
gactgtgaattgttacctcatagac

SEQ ID NO: 221003 - DNA, 25 bp, probe
gagcgtgtagtgaatcacgtaaagc

SEQ ID NO: 221004 - DNA, 25 bp, probe
gactggcaaatggaactacacaaac

SEQ ID NO: 221005 - DNA, 25 bp, probe
gacgcgccaataaaaacgcacagcc

SEQ ID NO: 221006 - DNA, 25 bp, probe
gacggccttagatctctcgccgcca

SEQ ID NO: 221007 - DNA, 25 bp, probe
gacgcctgttaggatcttcaagtcc

SEQ ID NO: 221008 - DNA, 25 bp, probe
gacgcttgccaagatggttgaatcc

SEQ ID NO: 221009 - DNA, 25 bp, probe
gacgctggagatgcaaggtgctggt

SEQ ID NO: 221010 - DNA, 25 bp, probe
gacgtgctcattgagtggctgtgtg

SEQ ID NO: 221011 - DNA, 25 bp, probe
gacggcactggcgagatggtggcgg

SEQ ID NO: 221012 - DNA, 25 bp, probe
gactggccagaggcagctaaggggc

SEQ ID NO: 221013 - DNA, 25 bp, probe
gactggccggaacagggtgtgccaa

SEQ ID NO: 221014 - DNA, 25 bp, probe
gacggcctgaagatctgggcggcca

SEQ ID NO: 221015 - DNA, 25 bp, probe
gacggcctgaagatctgggcggcca

SEQ ID NO: 221016 - DNA, 25 bp, probe
gactggacacaagccagggctggga

SEQ ID NO: 221017 - DNA, 25 bp, probe
gaccccctacacagggctggagaac

SEQ ID NO: 221018 - DNA, 25 bp, probe
gacccggaactgatggtgcggagga

SEQ ID NO: 221019 - DNA, 25 bp, probe
gacccggaactgatggtgcggagga

SEQ ID NO: 221020 - DNA, 25 bp, probe
gacccaggcactaggccttggtgac

SEQ ID NO: 221021 - DNA, 25 bp, probe
gaccgaggccgtgtatgggatgacc

SEQ ID NO: 221022 - DNA, 25 bp, probe
gaccgaagcggtggaggccgtggct

SEQ ID NO: 221023 - DNA, 25 bp, probe
gaccttcagggccagagccctggcg

SEQ ID NO: 221024 - DNA, 25 bp, probe
gacgcttgcaagggagattcgggag

SEQ ID NO: 221025 - DNA, 25 bp, probe
gacgcttgcaagggagattcgggag

SEQ ID NO: 221026 - DNA, 25 bp, probe
gacgacgacgtgctgttcgaggatg

SEQ ID NO: 221027 - DNA, 25 bp, probe
gacgaggaagcgatggtggaggctg

SEQ ID NO: 221028 - DNA, 25 bp, probe
gacgagaggacgagcgattgaggtg

SEQ ID NO: 221029 - DNA, 25 bp, probe
gacgaggcggctaagccacgagttc

SEQ ID NO: 221030 - DNA, 25 bp, probe
gacggtgagaggcatcatccggttc

SEQ ID NO: 221031 - DNA, 25 bp, probe
gacgtggcagcgcgtaacgtgctgt

SEQ ID NO: 221032 - DNA, 25 bp, probe
gacggtcacgaagcacagagtgttg

SEQ ID NO: 221033 - DNA, 25 bp, probe
gacgattcacattttattagtttgg

SEQ ID NO: 221034 - DNA, 25 bp, probe
gacgtcatagctcttctatagtgtc

SEQ ID NO: 221035 - DNA, 25 bp, probe
gactgttcagtgtttgtcaagcttc

SEQ ID NO: 221036 - DNA, 25 bp, probe
gaccattcgtttgtcaaggtttggc

SEQ ID NO: 221037 - DNA, 25 bp, probe
gacccacgttttcagagttggtgga

SEQ ID NO: 221038 - DNA, 25 bp, probe
gacccccgaaggcagatttgtgtgg

SEQ ID NO: 221039 - DNA, 25 bp, probe
gaccgtagccacggcagtgtttttg

SEQ ID NO: 221040 - DNA, 25 bp, probe
gacggtcgaacttgactatctagag

SEQ ID NO: 221041 - DNA, 25 bp, probe
gacggcctggacttgaaactcagct

SEQ ID NO: 221042 - DNA, 25 bp, probe
gacgtccaggactaagaagatcatg

SEQ ID NO: 221043 - DNA, 25 bp, probe
gacgtccaggatggagtgagctgca

SEQ ID NO: 221044 - DNA, 25 bp, probe
gactgtctgcagcttagggcagaaa

SEQ ID NO: 221045 - DNA, 25 bp, probe
gactgtgcctctctaatgaagaaca

SEQ ID NO: 221046 - DNA, 25 bp, probe
gactgtccttgtctatgccagaatc

SEQ ID NO: 221047 - DNA, 25 bp, probe
gacgtgcctttacgatggtaagcgt

SEQ ID NO: 221048 - DNA, 25 bp, probe
gacgtgctgttcgaggatgtgtacg

SEQ ID NO: 221049 - DNA, 25 bp, probe
gactggcttctcagctgaggaatgc

SEQ ID NO: 221050 - DNA, 25 bp, probe
gacggctcttctttgaaatgaggtc

SEQ ID NO: 221051 - DNA, 25 bp, probe
gacggctcttctttgaaatgaggtc

SEQ ID NO: 221052 - DNA, 25 bp, probe
gacggctttcaagacaagatttgca

SEQ ID NO: 221053 - DNA, 25 bp, probe
gacggtttatgagcacacaattata

SEQ ID NO: 221054 - DNA, 25 bp, probe
gacggggagatagcgcctgaaataa

SEQ ID NO: 221055 - DNA, 25 bp, probe
gacggggagaaacatctggaaggat

SEQ ID NO: 221056 - DNA, 25 bp, probe
gacggggagaaacatctggaaggat

SEQ ID NO: 221057 - DNA, 25 bp, probe
gacggaggaaaaccattttattcag

SEQ ID NO: 221058 - DNA, 25 bp, probe
gactggggaaattgctcactttttc

SEQ ID NO: 221059 - DNA, 25 bp, probe
gactggggaaattgctcactttttc

SEQ ID NO: 221060 - DNA, 25 bp, probe
gacctgggctacatgtacttttacc

SEQ ID NO: 221061 - DNA, 25 bp, probe
gacgttggctacaggactgatgaat

SEQ ID NO: 221062 - DNA, 25 bp, probe
gacgcttcatgttaaggacgacaga

SEQ ID NO: 221063 - DNA, 25 bp, probe
gactggtgcatttacagctgttaaa

SEQ ID NO: 221064 - DNA, 25 bp, probe
gactggtgcatttacagctgttaaa

SEQ ID NO: 221065 - DNA, 25 bp, probe
gactgggatacctggatgtaaaata

SEQ ID NO: 221066 - DNA, 25 bp, probe
gactgggatacctggatgtaaaata

SEQ ID NO: 221067 - DNA, 25 bp, probe
gacgggaaccaggagaccaacaatg

SEQ ID NO: 221068 - DNA, 25 bp, probe
gacgggaaccaggagaccaacaatg

SEQ ID NO: 221069 - DNA, 25 bp, probe
gacgggaacacaggaaatcagggga

SEQ ID NO: 221070 - DNA, 25 bp, probe
gacggtgaacctggcagcaggcgag

SEQ ID NO: 221071 - DNA, 25 bp, probe
gacggtgcaacccaaggactgaggg

SEQ ID NO: 221072 - DNA, 25 bp, probe
gacgtcctaaacaaggatctgatga

SEQ ID NO: 221073 - DNA, 25 bp, probe
gactggagtgaacctgaggagcctg

SEQ ID NO: 221074 - DNA, 25 bp, probe
gactgtaatgaatctaagcagcatt

SEQ ID NO: 221075 - DNA, 25 bp, probe
gactgtaagcagttctattgacaag

SEQ ID NO: 221076 - DNA, 25 bp, probe
gactgtaagctgttggaggtcaaag

SEQ ID NO: 221077 - DNA, 25 bp, probe
gactgtgacactctgcaggtggacg

SEQ ID NO: 221078 - DNA, 25 bp, probe
gacgtcatccttcaggatgatgacg

SEQ ID NO: 221079 - DNA, 25 bp, probe
gacgtcatccagcgctgctggagac

SEQ ID NO: 221080 - DNA, 25 bp, probe
gactggctcgaaggccatggcatga

SEQ ID NO: 221081 - DNA, 25 bp, probe
gacggctctgcaacatcgagcctga

SEQ ID NO: 221082 - DNA, 25 bp, probe
gacggcatatgaactgctgagaggc

SEQ ID NO: 221083 - DNA, 25 bp, probe
gactggatcaattcggtgattgcaa

SEQ ID NO: 221084 - DNA, 25 bp, probe
gactggtccagagagtaatcagtgc

SEQ ID NO: 221085 - DNA, 25 bp, probe
gactggtccagagagtaatcagtgc

SEQ ID NO: 221086 - DNA, 25 bp, probe
gactggtaagcgactgtcatcaagt

SEQ ID NO: 221087 - DNA, 25 bp, probe
gacgggcaagtgacttctgcaagcc

SEQ ID NO: 221088 - DNA, 25 bp, probe
gacgggcgcagtatgtggcatggcg

SEQ ID NO: 221089 - DNA, 25 bp, probe
gacgtagagcagttttggcatgaga

SEQ ID NO: 221090 - DNA, 25 bp, probe
gacgtagagcagttttggcatgaga

SEQ ID NO: 221091 - DNA, 25 bp, probe
gactggagacagggatgatggagag

SEQ ID NO: 221092 - DNA, 25 bp, probe
gacgaggacctggctgaggaggagg

SEQ ID NO: 221093 - DNA, 25 bp, probe
gactgggacctaagagccagaggct

SEQ ID NO: 221094 - DNA, 25 bp, probe
gactgggagccgaggcagtggtgct

SEQ ID NO: 221095 - DNA, 25 bp, probe
gacgaggcccagagcaagagaggca

SEQ ID NO: 221096 - DNA, 25 bp, probe
gactggctccgcacggagaacgagc

SEQ ID NO: 221097 - DNA, 25 bp, probe
gactggtgtcctatggagatattac

SEQ ID NO: 221098 - DNA, 25 bp, probe
gactggtggagctttgggtctctac

SEQ ID NO: 221099 - DNA, 25 bp, probe
gactggtgggcacttggagtttgct

SEQ ID NO: 221100 - DNA, 25 bp, probe
gacggggagcaggtggagtatgggc

SEQ ID NO: 221101 - DNA, 25 bp, probe
gacggagaagaggctgtgcaagatg

SEQ ID NO: 221102 - DNA, 25 bp, probe
gacggagaagaggctgtgcaagatg

SEQ ID NO: 221103 - DNA, 25 bp, probe
gactggtgaggggcctctagagggt

SEQ ID NO: 221104 - DNA, 25 bp, probe
gactggtgaggggcctctagagggt

SEQ ID NO: 221105 - DNA, 25 bp, probe
gactggtgaggaagcagcctgcagg

SEQ ID NO: 221106 - DNA, 25 bp, probe
gactggcatggggggatctcagagc

SEQ ID NO: 221107 - DNA, 25 bp, probe
gactgtgatcctcatgtactcagag

SEQ ID NO: 221108 - DNA, 25 bp, probe
gactggatctctgaaacctgggtga

SEQ ID NO: 221109 - DNA, 25 bp, probe
gactggcattttagagacctgttaa

SEQ ID NO: 221110 - DNA, 25 bp, probe
gactggcattttagagacctgttaa

SEQ ID NO: 221111 - DNA, 25 bp, probe
gagggttcacgatgaccgtgtagtg

SEQ ID NO: 221112 - DNA, 25 bp, probe
gaccgtgtacaataccgtgtggtga

SEQ ID NO: 221113 - DNA, 25 bp, probe
gaccgtgtacaataccgtgtggtga

SEQ ID NO: 221114 - DNA, 25 bp, probe
gacgatgagttagaagaggttggga

SEQ ID NO: 221115 - DNA, 25 bp, probe
gacgatgagttagaagaggttggga

SEQ ID NO: 221116 - DNA, 25 bp, probe
gacggatgttgggagtggggtaaga

SEQ ID NO: 221117 - DNA, 25 bp, probe
gacggatgttgggagtggggtaaga

SEQ ID NO: 221118 - DNA, 25 bp, probe
gactggatttgtgagtgctgggacg

SEQ ID NO: 221119 - DNA, 25 bp, probe
gactggtcttttgtgatggatgaag

SEQ ID NO: 221120 - DNA, 25 bp, probe
gacggagtacttgctgctggaaagt

SEQ ID NO: 221121 - DNA, 25 bp, probe
gacggagtacttgctgctggaaagt

SEQ ID NO: 221122 - DNA, 25 bp, probe
gacggagaacttggagaggcaccag

SEQ ID NO: 221123 - DNA, 25 bp, probe
gacggacagcacatgtggaggccca

SEQ ID NO: 221124 - DNA, 25 bp, probe
gacgagaaccttctgagagactcac

SEQ ID NO: 221125 - DNA, 25 bp, probe
gaccaagacctacaacagtgtcagc

SEQ ID NO: 221126 - DNA, 25 bp, probe
gaccaacacacttttctacgtcagc

SEQ ID NO: 221127 - DNA, 25 bp, probe
gacgaagcagatcttgtcaaggaac

SEQ ID NO: 221128 - DNA, 25 bp, probe
gacgaagcagatcttgtcaaggaac

SEQ ID NO: 221129 - DNA, 25 bp, probe
gacgtgagcggcagtatgaaggggc

SEQ ID NO: 221130 - DNA, 25 bp, probe
gacgttcgatgaagaaaggagggcc

SEQ ID NO: 221131 - DNA, 25 bp, probe
gacgtcggtaaggcctggcaggcca

SEQ ID NO: 221132 - DNA, 25 bp, probe
gacgtcagttctgtccatgtgggag

SEQ ID NO: 221133 - DNA, 25 bp, probe
gacgtgcagtgtgaaccaaagcaag

SEQ ID NO: 221134 - DNA, 25 bp, probe
gacccagttgtacctaatcacagac

SEQ ID NO: 221135 - DNA, 25 bp, probe
gaccaaatttacgccatgaaagtgg

SEQ ID NO: 221136 - DNA, 25 bp, probe
gaccaaggtggagcccgagtttgag

SEQ ID NO: 221137 - DNA, 25 bp, probe
gacccagaggaagcctctatttatt

SEQ ID NO: 221138 - DNA, 25 bp, probe
gacccagaggaagcctctatttatt

SEQ ID NO: 221139 - DNA, 25 bp, probe
gacgccaatggagccctagaaatat

SEQ ID NO: 221140 - DNA, 25 bp, probe
gacccagggaatgccagggacattt

SEQ ID NO: 221141 - DNA, 25 bp, probe
gaccctgaggaaatccaattccttt

SEQ ID NO: 221142 - DNA, 25 bp, probe
gaccctgaggaaatccaattccttt

SEQ ID NO: 221143 - DNA, 25 bp, probe
gaccctgaagatatggaaccacttg

SEQ ID NO: 221144 - DNA, 25 bp, probe
gaccctctcgtgactgagaaccaac

SEQ ID NO: 221145 - DNA, 25 bp, probe
gacccttacttttgagaacatggcc

SEQ ID NO: 221146 - DNA, 25 bp, probe
gacccttattccagatgctgagagt

SEQ ID NO: 221147 - DNA, 25 bp, probe
gacgctcccatttttgatgaaagct

SEQ ID NO: 221148 - DNA, 25 bp, probe
gacgtcagcctttaagctgaccaca

SEQ ID NO: 221149 - DNA, 25 bp, probe
gacccaaatgtcaaactaccaaatg

SEQ ID NO: 221150 - DNA, 25 bp, probe
gaccgatatttaaggaccccagagc

SEQ ID NO: 221151 - DNA, 25 bp, probe
gacgtattatctgatggaccccagc

SEQ ID NO: 221152 - DNA, 25 bp, probe
gacgccaatattcatggacacaccg

SEQ ID NO: 221153 - DNA, 25 bp, probe
gacccttatctgtaaaacacctatt

SEQ ID NO: 221154 - DNA, 25 bp, probe
gacccttcaagattcaaagttccat

SEQ ID NO: 221155 - DNA, 25 bp, probe
gacccttcaagattcaaagttccat

SEQ ID NO: 221156 - DNA, 25 bp, probe
gaccattttgagaatcccgtctgcc

SEQ ID NO: 221157 - DNA, 25 bp, probe
gacggtactgagatatctcggcttc

SEQ ID NO: 221158 - DNA, 25 bp, probe
gacggatactacaaggctcaggctc

SEQ ID NO: 221159 - DNA, 25 bp, probe
gacgaatattacaacgcggcagcat

SEQ ID NO: 221160 - DNA, 25 bp, probe
gacggatattcaagacctgtctagt

SEQ ID NO: 221161 - DNA, 25 bp, probe
gacccacattcaagcagttggtcga

SEQ ID NO: 221162 - DNA, 25 bp, probe
gacgccagctctttgagatttgctc

SEQ ID NO: 221163 - DNA, 25 bp, probe
gacgacctgtcacagatcatgttca

SEQ ID NO: 221164 - DNA, 25 bp, probe
gacgagcggggccagatcaagctct

SEQ ID NO: 221165 - DNA, 25 bp, probe
gacgagcggggccagatcaagctct

SEQ ID NO: 221166 - DNA, 25 bp, probe
gacgtggagatggtgggccagcttg

SEQ ID NO: 221167 - DNA, 25 bp, probe
gacgctgtcacaggggacaggcttg

SEQ ID NO: 221168 - DNA, 25 bp, probe
gacgcaccaagcggaactgcgctta

SEQ ID NO: 221169 - DNA, 25 bp, probe
gacgcactctcaaaaactgcacgga

SEQ ID NO: 221170 - DNA, 25 bp, probe
gacgcactctcaaaaactgcacgga

SEQ ID NO: 221171 - DNA, 25 bp, probe
gacgactctcacagaacgagggcgg

SEQ ID NO: 221172 - DNA, 25 bp, probe
gacccctacagcctacgagaaggaa

SEQ ID NO: 221173 - DNA, 25 bp, probe
gaccccgatcagttaaggagctgtg

SEQ ID NO: 221174 - DNA, 25 bp, probe
gacccagcagctatctaagtcacag

SEQ ID NO: 221175 - DNA, 25 bp, probe
gaccgagcttaccaaattcatgaat

SEQ ID NO: 221176 - DNA, 25 bp, probe
gacgtggctcgagaagcattcatca

SEQ ID NO: 221177 - DNA, 25 bp, probe
gacggctgctcgaagaacaatgtca

SEQ ID NO: 221178 - DNA, 25 bp, probe
gacggctgctcgaagaacaatgtca

SEQ ID NO: 221179 - DNA, 25 bp, probe
gacgaggtcaaattccagcatgata

SEQ ID NO: 221180 - DNA, 25 bp, probe
gacgaggtcaaattccagcatgata

SEQ ID NO: 221181 - DNA, 25 bp, probe
gaccagtgtcatccatttaggtagc

SEQ ID NO: 221182 - DNA, 25 bp, probe
gacctttctcctgaaggtggaacca

SEQ ID NO: 221183 - DNA, 25 bp, probe
gacccttctccttagaagtggaagt

SEQ ID NO: 221184 - DNA, 25 bp, probe
gaccgttccgatctgtactgaagat

SEQ ID NO: 221185 - DNA, 25 bp, probe
gacgccctccgaagtatcgaaagat

SEQ ID NO: 221186 - DNA, 25 bp, probe
gagcctcccctgggttaacaaatga

SEQ ID NO: 221187 - DNA, 25 bp, probe
gagcggctccctatttatacaatag

SEQ ID NO: 221188 - DNA, 25 bp, probe
gacgacttactagatctcatacaag

SEQ ID NO: 221189 - DNA, 25 bp, probe
gacgaatgtccattcttcatctttc

SEQ ID NO: 221190 - DNA, 25 bp, probe
gacgaatgtccattcttcatctttc

SEQ ID NO: 221191 - DNA, 25 bp, probe
gacgtggcattcatcttgtttgctc

SEQ ID NO: 221192 - DNA, 25 bp, probe
gacgtggcattcatcttgtttgctc

SEQ ID NO: 221193 - DNA, 25 bp, probe
gacgctggcaacaaattttcagtca

SEQ ID NO: 221194 - DNA, 25 bp, probe
gaccaagagacatgttttgttaaac

SEQ ID NO: 221195 - DNA, 25 bp, probe
gacgaataaagccctgttgcttgag

SEQ ID NO: 221196 - DNA, 25 bp, probe
gacggtccaaatccttgtgacatgg

SEQ ID NO: 221197 - DNA, 25 bp, probe
gacgactgccaaggactgaggacag

SEQ ID NO: 221198 - DNA, 25 bp, probe
gacgtgctggtatacgggaatgctg

SEQ ID NO: 221199 - DNA, 25 bp, probe
gacgtctgagtagcaggaggagagg

SEQ ID NO: 221200 - DNA, 25 bp, probe
gacgccgagactccgtgggagaagc

SEQ ID NO: 221201 - DNA, 25 bp, probe
gacgggcagattggggagggaaagg

SEQ ID NO: 221202 - DNA, 25 bp, probe
gggggacataggagaagggaagagg

SEQ ID NO: 221203 - DNA, 25 bp, probe
gggctaattagtggacaagggaagg

SEQ ID NO: 221204 - DNA, 25 bp, probe
gatacccttagtgaccaacgaagag

SEQ ID NO: 221205 - DNA, 25 bp, probe
gatacctctttgtgtgaatttcaag

SEQ ID NO: 221206 - DNA, 25 bp, probe
gacccttgaagatgtagcttccaaa

SEQ ID NO: 221207 - DNA, 25 bp, probe
gacccttgaagatgtagcttccaaa

SEQ ID NO: 221208 - DNA, 25 bp, probe
gacccctggatatatatcctcctga

SEQ ID NO: 221209 - DNA, 25 bp, probe
gacccgctggtgtactactttagcg

SEQ ID NO: 221210 - DNA, 25 bp, probe
gacgccgtggttgcaacttataata

SEQ ID NO: 221211 - DNA, 25 bp, probe
gacggggagatagaactgtggcact

SEQ ID NO: 221212 - DNA, 25 bp, probe
gacccggaaactgatcagggcagct

SEQ ID NO: 221213 - DNA, 25 bp, probe
gacccctgacattcttgaaggggtt

SEQ ID NO: 221214 - DNA, 25 bp, probe
gaccctctgaattttagcacaaagt

SEQ ID NO: 221215 - DNA, 25 bp, probe
gacgtcaataattttgaccaagact

SEQ ID NO: 221216 - DNA, 25 bp, probe
gacgccaataactgcgactatgagc

SEQ ID NO: 221217 - DNA, 25 bp, probe
gacgccaataactgcgactatgagc

SEQ ID NO: 221218 - DNA, 25 bp, probe
gaccgccatgaagctgggcttcagt

SEQ ID NO: 221219 - DNA, 25 bp, probe
gacgcccagggaatgaactctagtt

SEQ ID NO: 221220 - DNA, 25 bp, probe
gacgcccagggaatgaactctagtt

SEQ ID NO: 221221 - DNA, 25 bp, probe
gagcccaagggaatttgcctttact

SEQ ID NO: 221222 - DNA, 25 bp, probe
gacctgcgaaggatgatcgcccgat

SEQ ID NO: 221223 - DNA, 25 bp, probe
gagccgcgcgagatatggcccgcgc

SEQ ID NO: 221224 - DNA, 25 bp, probe
gagcggcggattaaggcttgggcgg

SEQ ID NO: 221225 - DNA, 25 bp, probe
gacggggagttaggcatggggagct

SEQ ID NO: 221226 - DNA, 25 bp, probe
gacggggagttaggcatggggagct

SEQ ID NO: 221227 - DNA, 25 bp, probe
gacggcatgagcaggaggcggggac

SEQ ID NO: 221228 - DNA, 25 bp, probe
gacggcatggaggaggtggtgggac

SEQ ID NO: 221229 - DNA, 25 bp, probe
gacggcagagggtacaggtggtggc

SEQ ID NO: 221230 - DNA, 25 bp, probe
gacggaggcgcagtacaagttcatc

SEQ ID NO: 221231 - DNA, 25 bp, probe
gacggacccgtggatgagtacatgc

SEQ ID NO: 221232 - DNA, 25 bp, probe
gagcgaaccccaggggtcatcagcc

SEQ ID NO: 221233 - DNA, 25 bp, probe
gagctaagccttacgggtctgctcc

SEQ ID NO: 221234 - DNA, 25 bp, probe
gagctgaaggttgtggcctttgcgc

SEQ ID NO: 221235 - DNA, 25 bp, probe
gagctgaaggttgtggcctttgcgc

SEQ ID NO: 221236 - DNA, 25 bp, probe
gacgacatgtttgtgacgttcgccg

SEQ ID NO: 221237 - DNA, 25 bp, probe
gacggttttggatcttactgcacag

SEQ ID NO: 221238 - DNA, 25 bp, probe
gacggttttggatcttactgcacag

SEQ ID NO: 221239 - DNA, 25 bp, probe
gaccgtctttaatgtcttctgcacc

SEQ ID NO: 221240 - DNA, 25 bp, probe
gacctgtcgtacatttgtttgagtc

SEQ ID NO: 221241 - DNA, 25 bp, probe
gaccttctgcgactatttgagtatg

SEQ ID NO: 221242 - DNA, 25 bp, probe
gacgctgacacttgtgtttgaatat

SEQ ID NO: 221243 - DNA, 25 bp, probe
gacgtgattttgctgtagaagatgg

SEQ ID NO: 221244 - DNA, 25 bp, probe
gacggattttacttctggagacatg

SEQ ID NO: 221245 - DNA, 25 bp, probe
gacggatatgtgaaatttgtagaac

SEQ ID NO: 221246 - DNA, 25 bp, probe
gacggactgtaattgatagattgat

SEQ ID NO: 221247 - DNA, 25 bp, probe
gacgtgcacatgtgtgtgacgtttc

SEQ ID NO: 221248 - DNA, 25 bp, probe
gacgtgcagctgagctgtccgtgtc

SEQ ID NO: 221249 - DNA, 25 bp, probe
gacgtgaggaacgccattgtcctct

SEQ ID NO: 221250 - DNA, 25 bp, probe
gacgcgttaagcgcattggtccttt

SEQ ID NO: 221251 - DNA, 25 bp, probe
gagccggaactctctattgtgtttt

SEQ ID NO: 221252 - DNA, 25 bp, probe
gaccaggaacaccgtgttggaggtc

SEQ ID NO: 221253 - DNA, 25 bp, probe
gacctggtcaactggttcaaggctc

SEQ ID NO: 221254 - DNA, 25 bp, probe
gacgggtaagtcagtgaaagccacg

SEQ ID NO: 221255 - DNA, 25 bp, probe
gacgggtgatgctcaaggaaatcta

SEQ ID NO: 221256 - DNA, 25 bp, probe
gagcgggtgtgctcacttacattat

SEQ ID NO: 221257 - DNA, 25 bp, probe
gacgattggggatgcttacatggtg

SEQ ID NO: 221258 - DNA, 25 bp, probe
gacgtgggagactgtacacattggt

SEQ ID NO: 221259 - DNA, 25 bp, probe
gacgtggaggacattgtgacttggc

SEQ ID NO: 221260 - DNA, 25 bp, probe
gacgtggtgaagatctgtgactttg

SEQ ID NO: 221261 - DNA, 25 bp, probe
gacgggtaatgcggcattgatgctt

SEQ ID NO: 221262 - DNA, 25 bp, probe
gacggcgctatgtgcaggtgagctt

SEQ ID NO: 221263 - DNA, 25 bp, probe
gacgctgcactcgtggaggaagttc

SEQ ID NO: 221264 - DNA, 25 bp, probe
gacgctgatgtggagtggaaatttg

SEQ ID NO: 221265 - DNA, 25 bp, probe
gacgtggtccagaagaagctcctgc

SEQ ID NO: 221266 - DNA, 25 bp, probe
gacgtggtccagaagaagctcctgc

SEQ ID NO: 221267 - DNA, 25 bp, probe
gacggtgttaatgatagccatccag

SEQ ID NO: 221268 - DNA, 25 bp, probe
gacgtctttattgccatggagctca

SEQ ID NO: 221269 - DNA, 25 bp, probe
gacgcctttaatgtgggcagcatat

SEQ ID NO: 221270 - DNA, 25 bp, probe
gaccctcctactgttggcagtgatc

SEQ ID NO: 221271 - DNA, 25 bp, probe
gaccctgcctgagcaagggggcatg

SEQ ID NO: 221272 - DNA, 25 bp, probe
gacgccgccggaaagcgtgccaatc

SEQ ID NO: 221273 - DNA, 25 bp, probe
gaccccgcttcaataatgttcaact

SEQ ID NO: 221274 - DNA, 25 bp, probe
gagcccaacttctaaaggtcaatat

SEQ ID NO: 221275 - DNA, 25 bp, probe
gacgaatattatgaaatgtgccttt

SEQ ID NO: 221276 - DNA, 25 bp, probe
gacgacatttacactagttacttag

SEQ ID NO: 221277 - DNA, 25 bp, probe
gacgtatgtttccctttgtgaatta

SEQ ID NO: 221278 - DNA, 25 bp, probe
tacagctttggtgtggttttactag

SEQ ID NO: 221279 - DNA, 25 bp, probe
tctccattacgtttggggtaaccag

SEQ ID NO: 221280 - DNA, 25 bp, probe
tccacaaaggccctggtggtttcca

SEQ ID NO: 221281 - DNA, 25 bp, probe
gttaaaggccaaatgctgtttccca

SEQ ID NO: 221282 - DNA, 25 bp, probe
gtccaaagacaatggcctttaccat

SEQ ID NO: 221283 - DNA, 25 bp, probe
gaccaaaaatatactgggtttcctg

SEQ ID NO: 221284 - DNA, 25 bp, probe
gacccaaaatttctaggtgtgccac

SEQ ID NO: 221285 - DNA, 25 bp, probe
gacctaaactttcctaaatgttcat

SEQ ID NO: 221286 - DNA, 25 bp, probe
gacccagaagctcaccaaaaactat

SEQ ID NO: 221287 - DNA, 25 bp, probe
gacccagaagctcaccaaaaactat

SEQ ID NO: 221288 - DNA, 25 bp, probe
gacccaggcaagcacggaacaagct

SEQ ID NO: 221289 - DNA, 25 bp, probe
gacccggcatggtccagacgaagga

SEQ ID NO: 221290 - DNA, 25 bp, probe
gaccggcgcaagacggaccagagcg

SEQ ID NO: 221291 - DNA, 25 bp, probe
gaccggcgcaagacggaccagagcg

SEQ ID NO: 221292 - DNA, 25 bp, probe
gaccgtgcagctgagggtctggggg

SEQ ID NO: 221293 - DNA, 25 bp, probe
gaccagggctggtggaagggcgaga

SEQ ID NO: 221294 - DNA, 25 bp, probe
gaccagggctggtggaagggcgaga

SEQ ID NO: 221295 - DNA, 25 bp, probe
gaccactgggtgtggacggtgtggg

SEQ ID NO: 221296 - DNA, 25 bp, probe
gtcaccgggaggagagccgggactg

SEQ ID NO: 221297 - DNA, 25 bp, probe
gacccatgtgggcttaggcttggac

SEQ ID NO: 221298 - DNA, 25 bp, probe
gacccagttctggaaaggttcaggc

SEQ ID NO: 221299 - DNA, 25 bp, probe
gacccagttctggaaaggttcaggc

SEQ ID NO: 221300 - DNA, 25 bp, probe
gacccagatcctgaaagtgaccggg

SEQ ID NO: 221301 - DNA, 25 bp, probe
gacgaagtcaatgaaggcgagctga

SEQ ID NO: 221302 - DNA, 25 bp, probe
gacgaagtcaatgaaggcgagctga

SEQ ID NO: 221303 - DNA, 25 bp, probe
gacgacagaacaacaaggagaatac

SEQ ID NO: 221304 - DNA, 25 bp, probe
gacgtcagcaacttcgacgaggagt

SEQ ID NO: 221305 - DNA, 25 bp, probe
gacgtcacaaattttcagggcagat

SEQ ID NO: 221306 - DNA, 25 bp, probe
gacgaggaggatgttcagatggagc

SEQ ID NO: 221307 - DNA, 25 bp, probe
gacgagtgggaggtgtctcgagaga

SEQ ID NO: 221308 - DNA, 25 bp, probe
gacgagggggctgggtcggcagccc

SEQ ID NO: 221309 - DNA, 25 bp, probe
gacgggcgggtgaagatcggccact

SEQ ID NO: 221310 - DNA, 25 bp, probe
gacgctggcctgggatgagagggcc

SEQ ID NO: 221311 - DNA, 25 bp, probe
gacggtgctgtgactgaaaggaccc

SEQ ID NO: 221312 - DNA, 25 bp, probe
gacgcctcagtgagagggagacccg

SEQ ID NO: 221313 - DNA, 25 bp, probe
gacgccatcgcggagattgggaacc

SEQ ID NO: 221314 - DNA, 25 bp, probe
gaccctgggtgacaggaaagccttt

SEQ ID NO: 221315 - DNA, 25 bp, probe
gaccacgggcgaggacgtgaagcct

SEQ ID NO: 221316 - DNA, 25 bp, probe
gacctggatcccgagactaggagcc

SEQ ID NO: 221317 - DNA, 25 bp, probe
gaccggatcacggatgagaagtacc

SEQ ID NO: 221318 - DNA, 25 bp, probe
gaccggatcacggatgagaagtacc

SEQ ID NO: 221319 - DNA, 25 bp, probe
gacccacattaaaggcaagtacgca

SEQ ID NO: 221320 - DNA, 25 bp, probe
gacccacattaaaggcaagtacgca

SEQ ID NO: 221321 - DNA, 25 bp, probe
gaccacgtatattttcaaggactca

SEQ ID NO: 221322 - DNA, 25 bp, probe
gaccgttctattgtgtggatgacca

SEQ ID NO: 221323 - DNA, 25 bp, probe
gaccgttctattgtgtggatgacca

SEQ ID NO: 221324 - DNA, 25 bp, probe
gacgctggttttgtgtacagtgaag

SEQ ID NO: 221325 - DNA, 25 bp, probe
gaccttttcttcttgttcgtgataa

SEQ ID NO: 221326 - DNA, 25 bp, probe
gaccttttcctgttgattaatctat

SEQ ID NO: 221327 - DNA, 25 bp, probe
gacccctccttgtaatgtagacaga

SEQ ID NO: 221328 - DNA, 25 bp, probe
gacgatctgcccctggaagattaaa

SEQ ID NO: 221329 - DNA, 25 bp, probe
gggactctcacggtgacatgtttac

SEQ ID NO: 221330 - DNA, 25 bp, probe
gacgactccaaggtgggctttgaca

SEQ ID NO: 221331 - DNA, 25 bp, probe
gaccccctcatcatggtctttgaat

SEQ ID NO: 221332 - DNA, 25 bp, probe
gacctcaactacatggtttacatgt

SEQ ID NO: 221333 - DNA, 25 bp, probe
gaccccgtacacaagttcaagcagt

SEQ ID NO: 221334 - DNA, 25 bp, probe
gagctcacggcttaaagcccaagct

SEQ ID NO: 221335 - DNA, 25 bp, probe
gagcacgctcgtggaaaccacactc

SEQ ID NO: 221336 - DNA, 25 bp, probe
gaccaccgtggaaacaaacgcctct

SEQ ID NO: 221337 - DNA, 25 bp, probe
gacctccgtggccaaaaagtaccat

SEQ ID NO: 221338 - DNA, 25 bp, probe
gaccacccggcgaaagaagtagctg

SEQ ID NO: 221339 - DNA, 25 bp, probe
gaccatcccgagctgaatatcgggg

SEQ ID NO: 221340 - DNA, 25 bp, probe
gaccatgcccgcataaaactgaagg

SEQ ID NO: 221341 - DNA, 25 bp, probe
gagcccccaagtgaaactgaggttc

SEQ ID NO: 221342 - DNA, 25 bp, probe
gagccctttggtgctaataaggtct

SEQ ID NO: 221343 - DNA, 25 bp, probe
gagccctttcggttcaagaagagcc

SEQ ID NO: 221344 - DNA, 25 bp, probe
gagcccatttctggtaagagcctga

SEQ ID NO: 221345 - DNA, 25 bp, probe
gacccatgctggaagctaatggcct

SEQ ID NO: 221346 - DNA, 25 bp, probe
gacccatgctggaagctaatggcct

SEQ ID NO: 221347 - DNA, 25 bp, probe
gacgcctctgtgaagatctctgggc

SEQ ID NO: 221348 - DNA, 25 bp, probe
gacgcctctgtgaagatctctgggc

SEQ ID NO: 221349 - DNA, 25 bp, probe
gacggtgttgagatcactgtgcaga

SEQ ID NO: 221350 - DNA, 25 bp, probe
gacgcccattgagacactgatcaga

SEQ ID NO: 221351 - DNA, 25 bp, probe
gaccgccctgacacacaatcagggc

SEQ ID NO: 221352 - DNA, 25 bp, probe
gacccacctgccagtacagggcagc

SEQ ID NO: 221353 - DNA, 25 bp, probe
gacgcagaccccagtaagggcagcc

SEQ ID NO: 221354 - DNA, 25 bp, probe
gacgaaagccaacatcaagtgggtg

SEQ ID NO: 221355 - DNA, 25 bp, probe
gacgaatacgagctctacagggtgg

SEQ ID NO: 221356 - DNA, 25 bp, probe
gacgaaaaagcagctaatgaggcta

SEQ ID NO: 221357 - DNA, 25 bp, probe
gaggaaagaactatttgaggccgaa

SEQ ID NO: 221358 - DNA, 25 bp, probe
gtaaccagaactgtttagagccagg

SEQ ID NO: 221359 - DNA, 25 bp, probe
gataacctgtaccgactggaagggg

SEQ ID NO: 221360 - DNA, 25 bp, probe
gaccatccttaaccctcgaaggagg

SEQ ID NO: 221361 - DNA, 25 bp, probe
gaccatccttaaccctcgaaggagg

SEQ ID NO: 221362 - DNA, 25 bp, probe
gacctcctaaatgccccatattaaa

SEQ ID NO: 221363 - DNA, 25 bp, probe
gaccccttcattgacctcaactaca

SEQ ID NO: 221364 - DNA, 25 bp, probe
gaccccttatatgaagtaatgctaa

SEQ ID NO: 221365 - DNA, 25 bp, probe
gagccccttaaatatcttgtctaca

SEQ ID NO: 221366 - DNA, 25 bp, probe
gacccagtcatatactacttttcca

SEQ ID NO: 221367 - DNA, 25 bp, probe
gacccagtcaattacatgtttggta

SEQ ID NO: 221368 - DNA, 25 bp, probe
gacccccaaagctagcactgtggtc

SEQ ID NO: 221369 - DNA, 25 bp, probe
gacgccaaatgggcttcccatggtc

SEQ ID NO: 221370 - DNA, 25 bp, probe
gaccctagagtggtttccatctcac

SEQ ID NO: 221371 - DNA, 25 bp, probe
gaccctaaggattcctgtagctgcc

SEQ ID NO: 221372 - DNA, 25 bp, probe
gaccctaaggattcctgtagctgcc

SEQ ID NO: 221373 - DNA, 25 bp, probe
gacgcctacaggttcgtgaaggaca

SEQ ID NO: 221374 - DNA, 25 bp, probe
gacgcgtacgagctgcaggaggtta

SEQ ID NO: 221375 - DNA, 25 bp, probe
gacgctgtaaacctctgaaggaatt

SEQ ID NO: 221376 - DNA, 25 bp, probe
gacctggaaccctgatgagaagatg

SEQ ID NO: 221377 - DNA, 25 bp, probe
gacgatgccacagtcctaaggaaga

SEQ ID NO: 221378 - DNA, 25 bp, probe
gacgatgaggatgccataaagagga

SEQ ID NO: 221379 - DNA, 25 bp, probe
gacgtgagccgatcattaagcgcaa

SEQ ID NO: 221380 - DNA, 25 bp, probe
gacgtggactgcacaatgacagaga

SEQ ID NO: 221381 - DNA, 25 bp, probe
gacgtggactttagcatgcagagca

SEQ ID NO: 221382 - DNA, 25 bp, probe
gacgggagtcgctgcagaagcaaga

SEQ ID NO: 221383 - DNA, 25 bp, probe
gacgaggagtcagacgatgagacca

SEQ ID NO: 221384 - DNA, 25 bp, probe
gacgagggtgtctacgtcaacacgt

SEQ ID NO: 221385 - DNA, 25 bp, probe
gacgcgctggcgttacagcgcaaca

SEQ ID NO: 221386 - DNA, 25 bp, probe
gacgcggagaacaaactgaacgaca

SEQ ID NO: 221387 - DNA, 25 bp, probe
gaccttgataatgaaataagccaac

SEQ ID NO: 221388 - DNA, 25 bp, probe
gaccttgataatgaaataagccaac

SEQ ID NO: 221389 - DNA, 25 bp, probe
gaccgagctaattaactaactcatg

SEQ ID NO: 221390 - DNA, 25 bp, probe
gaccgagctaattaactaactcatg

SEQ ID NO: 221391 - DNA, 25 bp, probe
gacctgattaatttcctattcttcc

SEQ ID NO: 221392 - DNA, 25 bp, probe
gaccttacaaccacatttctggcca

SEQ ID NO: 221393 - DNA, 25 bp, probe
gaccaaatccacgctcaattagagc

SEQ ID NO: 221394 - DNA, 25 bp, probe
gaccggacccaactgaatgaagagc

SEQ ID NO: 221395 - DNA, 25 bp, probe
gaccgaagccacagggcagcatgga

SEQ ID NO: 221396 - DNA, 25 bp, probe
gaccagcggccagaggtggaggacc

SEQ ID NO: 221397 - DNA, 25 bp, probe
gacccggcggaaagatctgggcaac

SEQ ID NO: 221398 - DNA, 25 bp, probe
gacccggcggaaagatctgggcaac

SEQ ID NO: 221399 - DNA, 25 bp, probe
gacgtcgtggtgatcgacagcggca

SEQ ID NO: 221400 - DNA, 25 bp, probe
gacgtggtgaggatctacagccgca

SEQ ID NO: 221401 - DNA, 25 bp, probe
gacgctggtagaggccatccagacg

SEQ ID NO: 221402 - DNA, 25 bp, probe
gacgctcgtgaaagcacataccact

SEQ ID NO: 221403 - DNA, 25 bp, probe
gacgcccatacatggaccaagtcgc

SEQ ID NO: 221404 - DNA, 25 bp, probe
gacgcccatacatggaccaagtcgc

SEQ ID NO: 221405 - DNA, 25 bp, probe
gaccgctataagcgctggaagtcag

SEQ ID NO: 221406 - DNA, 25 bp, probe
gacgacgaagacttcttagagctcc

SEQ ID NO: 221407 - DNA, 25 bp, probe
gacccaatacccatgtagatctctc

SEQ ID NO: 221408 - DNA, 25 bp, probe
gacccaaaacagctttgtctccaaa

SEQ ID NO: 221409 - DNA, 25 bp, probe
gaccctaaacaacgttctatctggc

SEQ ID NO: 221410 - DNA, 25 bp, probe
gaccctaacaagcggatttcggcca

SEQ ID NO: 221411 - DNA, 25 bp, probe
gaccctgtaaatcctggttatcggc

SEQ ID NO: 221412 - DNA, 25 bp, probe
gaccctcattgattgtcaactttgg

SEQ ID NO: 221413 - DNA, 25 bp, probe
gacccatcatggctgtctttttgcc

SEQ ID NO: 221414 - DNA, 25 bp, probe
gaccaagtatgccggcggtattgtc

SEQ ID NO: 221415 - DNA, 25 bp, probe
gaccaattatagttcggctcttgac

SEQ ID NO: 221416 - DNA, 25 bp, probe
gacgtagttcattagctggtcttac

SEQ ID NO: 221417 - DNA, 25 bp, probe
gacgaatgtataaactgtggtatcc

SEQ ID NO: 221418 - DNA, 25 bp, probe
gacgaggatattgactgggtacaga

SEQ ID NO: 221419 - DNA, 25 bp, probe
gacgaccattctgatctgtgtgtga

SEQ ID NO: 221420 - DNA, 25 bp, probe
gacccaatattggcctgtttgcaac

SEQ ID NO: 221421 - DNA, 25 bp, probe
gacccaatattggcctgtttgcaac

SEQ ID NO: 221422 - DNA, 25 bp, probe
gacccattttgagatttcataccag

SEQ ID NO: 221423 - DNA, 25 bp, probe
gacccttgtttgattttagctgcag

SEQ ID NO: 221424 - DNA, 25 bp, probe
gacccagttttgattcagtggagcc

SEQ ID NO: 221425 - DNA, 25 bp, probe
gaccgacttttggacttttggcaag

SEQ ID NO: 221426 - DNA, 25 bp, probe
gaccgacttttggacttttggcaag

SEQ ID NO: 221427 - DNA, 25 bp, probe
gatcctacctttgaacttgaggaaa

SEQ ID NO: 221428 - DNA, 25 bp, probe
gacctaaatattgattcttggctca

SEQ ID NO: 221429 - DNA, 25 bp, probe
gaccgttatgttgctatctgtcgcc

SEQ ID NO: 221430 - DNA, 25 bp, probe
gaccttatttctgctactgttgctg

SEQ ID NO: 221431 - DNA, 25 bp, probe
gaccttaagcctgaaaacatcatgc

SEQ ID NO: 221432 - DNA, 25 bp, probe
gacctaaagccggaaaacatcctct

SEQ ID NO: 221433 - DNA, 25 bp, probe
gacctagaaaagtgagaacaatctc

SEQ ID NO: 221434 - DNA, 25 bp, probe
gagcttagaaaacccagttagatgc

SEQ ID NO: 221435 - DNA, 25 bp, probe
gaccggataaagcaagtcatggagc

SEQ ID NO: 221436 - DNA, 25 bp, probe
gacccctaagaccaagtgacaactg

SEQ ID NO: 221437 - DNA, 25 bp, probe
gacctactgcaaacagaagtaccct

SEQ ID NO: 221438 - DNA, 25 bp, probe
gacccagtcaaaatgatttacccct

SEQ ID NO: 221439 - DNA, 25 bp, probe
gacccagccgagctgtttaacaaat

SEQ ID NO: 221440 - DNA, 25 bp, probe
gaccgcctcaaggtgtttaacggca

SEQ ID NO: 221441 - DNA, 25 bp, probe
gacctcttccaggcatttttaagac

SEQ ID NO: 221442 - DNA, 25 bp, probe
gaccttctcttggtgctattatttg

SEQ ID NO: 221443 - DNA, 25 bp, probe
gacccagtccactgtatggcatttg

SEQ ID NO: 221444 - DNA, 25 bp, probe
gacccattcgaacgtctgccctatc

SEQ ID NO: 221445 - DNA, 25 bp, probe
gacccattcgaacgtctgccctatc

SEQ ID NO: 221446 - DNA, 25 bp, probe
gacccattcagagactgtccctgaa

SEQ ID NO: 221447 - DNA, 25 bp, probe
gaccctccatgagagttttggacac

SEQ ID NO: 221448 - DNA, 25 bp, probe
gacccagatcatgccagtcttaaaa

SEQ ID NO: 221449 - DNA, 25 bp, probe
gaccctgacattcatgatccaaaga

SEQ ID NO: 221450 - DNA, 25 bp, probe
gaccctgacattcatgatccaaaga

SEQ ID NO: 221451 - DNA, 25 bp, probe
gacccagaatcaaatcccgagaaga

SEQ ID NO: 221452 - DNA, 25 bp, probe
gaccaagaatcacccaaccaaaaga

SEQ ID NO: 221453 - DNA, 25 bp, probe
gaccaacctcagaaaagccaactcg

SEQ ID NO: 221454 - DNA, 25 bp, probe
gacgagttctgatgaaccataacat

SEQ ID NO: 221455 - DNA, 25 bp, probe
gacgcctttgcatgaagcctgtaac

SEQ ID NO: 221456 - DNA, 25 bp, probe
gaccgcatcggcaagaagaattcca

SEQ ID NO: 221457 - DNA, 25 bp, probe
gaccctgaggcttgttacattggca

SEQ ID NO: 221458 - DNA, 25 bp, probe
gaccctgaggcttgttacattggca

SEQ ID NO: 221459 - DNA, 25 bp, probe
gacgcttgagccagaatctcaggac

SEQ ID NO: 221460 - DNA, 25 bp, probe
gaccgatagcaggtgaactcgaagc

SEQ ID NO: 221461 - DNA, 25 bp, probe
gaccgtggcgcagcaatacgaagct

SEQ ID NO: 221462 - DNA, 25 bp, probe
gaccgttggcactaagccagatggc

SEQ ID NO: 221463 - DNA, 25 bp, probe
gaccctggagaatgcagacagtgcc

SEQ ID NO: 221464 - DNA, 25 bp, probe
gacgccgagatgactggctacgtgg

SEQ ID NO: 221465 - DNA, 25 bp, probe
gacgctctggttgagctcagtggag

SEQ ID NO: 221466 - DNA, 25 bp, probe
gacgttgctgcagttcaggcattgg

SEQ ID NO: 221467 - DNA, 25 bp, probe
gacgattctccaccgagtatgagct

SEQ ID NO: 221468 - DNA, 25 bp, probe
gacgcatcctcaaggtagatgtgag

SEQ ID NO: 221469 - DNA, 25 bp, probe
gacgaacatcacagtacattggtat

SEQ ID NO: 221470 - DNA, 25 bp, probe
gacgaacatcacagtacattggtat

SEQ ID NO: 221471 - DNA, 25 bp, probe
gacgaacatcacagtacattggtat

SEQ ID NO: 221472 - DNA, 25 bp, probe
gacgatgacacctccaattttgatg

SEQ ID NO: 221473 - DNA, 25 bp, probe
gacgtagatccatccaagacttgac

SEQ ID NO: 221474 - DNA, 25 bp, probe
gacgtagatccatccaagacttgac

SEQ ID NO: 221475 - DNA, 25 bp, probe
gacctggagcacctccatagacgtg

SEQ ID NO: 221476 - DNA, 25 bp, probe
gacctgggactgatctcaggctggg

SEQ ID NO: 221477 - DNA, 25 bp, probe
gacctggagaatatttgggactgct

SEQ ID NO: 221478 - DNA, 25 bp, probe
gaccctggttttcatggtgcacatg

SEQ ID NO: 221479 - DNA, 25 bp, probe
gaccctggttttcatggtgcacatg

SEQ ID NO: 221480 - DNA, 25 bp, probe
gaccctgggcattgttgtgggcata

SEQ ID NO: 221481 - DNA, 25 bp, probe
gacccgggcaagaatgagacctacc

SEQ ID NO: 221482 - DNA, 25 bp, probe
gacccaatgtacttagacacgtcat

SEQ ID NO: 221483 - DNA, 25 bp, probe
gacccaatgtacttagacacgtcat

SEQ ID NO: 221484 - DNA, 25 bp, probe
gacgctaacttctataaactgattc

SEQ ID NO: 221485 - DNA, 25 bp, probe
gacgcagatctctcctaaagctgca

SEQ ID NO: 221486 - DNA, 25 bp, probe
gacgcaactctcagtgaaactgcca

SEQ ID NO: 221487 - DNA, 25 bp, probe
gacgatgccacgacggtggacacac

SEQ ID NO: 221488 - DNA, 25 bp, probe
gacgatgccacgacggtggacacac

SEQ ID NO: 221489 - DNA, 25 bp, probe
gacgatgccactgacaaggacctgt

SEQ ID NO: 221490 - DNA, 25 bp, probe
gacgatgaagtgtacgagctgatgc

SEQ ID NO: 221491 - DNA, 25 bp, probe
gacgagacagagtaccatgcagatg

SEQ ID NO: 221492 - DNA, 25 bp, probe
gacgaactgatttctgatgatgaag

SEQ ID NO: 221493 - DNA, 25 bp, probe
gacgaactggtgtaatgatatgtgc

SEQ ID NO: 221494 - DNA, 25 bp, probe
gaccaacttgagtaagtaatccaaa

SEQ ID NO: 221495 - DNA, 25 bp, probe
gaccccttgtgggatgaaagccaaa

SEQ ID NO: 221496 - DNA, 25 bp, probe
gagcccacctctggtagaaaagaaa

SEQ ID NO: 221497 - DNA, 25 bp, probe
gaccatgacttctgctaaaaagcaa

SEQ ID NO: 221498 - DNA, 25 bp, probe
gacctgactgatgcagtttccatag

SEQ ID NO: 221499 - DNA, 25 bp, probe
gacctgactgatgcagtttccatag

SEQ ID NO: 221500 - DNA, 25 bp, probe
gacgctcaatctacagtttattcat

SEQ ID NO: 221501 - DNA, 25 bp, probe
gacgctcaatctacagtttattcat

SEQ ID NO: 221502 - DNA, 25 bp, probe
gacctgagactgagttttgtctttt

SEQ ID NO: 221503 - DNA, 25 bp, probe
gacgatgaacatgccgttggtttta

SEQ ID NO: 221504 - DNA, 25 bp, probe
gacgctacacagtgggtggtttgga

SEQ ID NO: 221505 - DNA, 25 bp, probe
gatcttcaacagtgggctgctagtt

SEQ ID NO: 221506 - DNA, 25 bp, probe
gaccgcgtcatgtggagcgtcgtgt

SEQ ID NO: 221507 - DNA, 25 bp, probe
gacctggtgcgaaggcacccgacat

SEQ ID NO: 221508 - DNA, 25 bp, probe
gacgctggttaatgcatcctgcaga

SEQ ID NO: 221509 - DNA, 25 bp, probe
gaccctgtgtgtacaatccaggaaa

SEQ ID NO: 221510 - DNA, 25 bp, probe
gaccctgtgtgtacaatccaggaaa

SEQ ID NO: 221511 - DNA, 25 bp, probe
gacctgttgtaacccaacagagaat

SEQ ID NO: 221512 - DNA, 25 bp, probe
gacctgttgtaacccaacagagaat

SEQ ID NO: 221513 - DNA, 25 bp, probe
gaccgtttattgcccaacacgttat

SEQ ID NO: 221514 - DNA, 25 bp, probe
gacctggttttggccaggacctgac

SEQ ID NO: 221515 - DNA, 25 bp, probe
gacctggttttggccaggacctgac

SEQ ID NO: 221516 - DNA, 25 bp, probe
gacctggtgtttctacaacacagaa

SEQ ID NO: 221517 - DNA, 25 bp, probe
gacctggggaagagactatcacaaa

SEQ ID NO: 221518 - DNA, 25 bp, probe
gaccgaagtgattgtggactgtcaa

SEQ ID NO: 221519 - DNA, 25 bp, probe
gacgagaagtcatggagttctgaca

SEQ ID NO: 221520 - DNA, 25 bp, probe
gacgcagaagacggggattgtgagc

SEQ ID NO: 221521 - DNA, 25 bp, probe
gacgcagcagagaacgggcagatgg

SEQ ID NO: 221522 - DNA, 25 bp, probe
gacgcagcagagaacgggcagatgg

SEQ ID NO: 221523 - DNA, 25 bp, probe
gacgctgcagcagatcatgcgaggg

SEQ ID NO: 221524 - DNA, 25 bp, probe
gacgctgcagcagatcatgcgaggg

SEQ ID NO: 221525 - DNA, 25 bp, probe
gacgctgcagcagatcatgcgaggg

SEQ ID NO: 221526 - DNA, 25 bp, probe
gacgcagacacagatgatgagggac

SEQ ID NO: 221527 - DNA, 25 bp, probe
gacgctatgacacacagcgcgagcc

SEQ ID NO: 221528 - DNA, 25 bp, probe
gagcgtgagctatgacagtgaaccg

SEQ ID NO: 221529 - DNA, 25 bp, probe
gagcgtgagctatgacagtgaaccg

SEQ ID NO: 221530 - DNA, 25 bp, probe
gacgcagagcacttagttaccctgg

SEQ ID NO: 221531 - DNA, 25 bp, probe
gaccgacctggagttacccagagag

SEQ ID NO: 221532 - DNA, 25 bp, probe
gaccgccctggtaagaaacagtgat

SEQ ID NO: 221533 - DNA, 25 bp, probe
gacctgccccttaaataagaggcaa

SEQ ID NO: 221534 - DNA, 25 bp, probe
gagccctccaaaacaaaagaccaga

SEQ ID NO: 221535 - DNA, 25 bp, probe
gacccaaggaaaaatgacaggccaa

SEQ ID NO: 221536 - DNA, 25 bp, probe
gaccccggtgaaacagtaggtggag

SEQ ID NO: 221537 - DNA, 25 bp, probe
gaccccgggagactcaaagggagag

SEQ ID NO: 221538 - DNA, 25 bp, probe
gaccccgtgaggctcattaggggag

SEQ ID NO: 221539 - DNA, 25 bp, probe
gaccaacggtgatgtttcaagggca

SEQ ID NO: 221540 - DNA, 25 bp, probe
gacctcagggtaggttctcgggact

SEQ ID NO: 221541 - DNA, 25 bp, probe
gatctcccggtcagttcgggatgtg

SEQ ID NO: 221542 - DNA, 25 bp, probe
gagcacccagggagtgacgaagggg

SEQ ID NO: 221543 - DNA, 25 bp, probe
gacgcccaagtgaagcgcatgcgca

SEQ ID NO: 221544 - DNA, 25 bp, probe
gacgcccaagtgaagcgcatgcgca

SEQ ID NO: 221545 - DNA, 25 bp, probe
gacccgaagtgaggagtcccaagga

SEQ ID NO: 221546 - DNA, 25 bp, probe
gacctgggaatgggggcagccaagg

SEQ ID NO: 221547 - DNA, 25 bp, probe
gaccagggaaggaggcagctaggct

SEQ ID NO: 221548 - DNA, 25 bp, probe
gaccagggaaggaggcagctaggct

SEQ ID NO: 221549 - DNA, 25 bp, probe
gaccagggaaggaggcagctaggct

SEQ ID NO: 221550 - DNA, 25 bp, probe
gaccagggaaggaggcagctaggct

SEQ ID NO: 221551 - DNA, 25 bp, probe
gacgcgtggtcaggttacaaatggc

SEQ ID NO: 221552 - DNA, 25 bp, probe
gacgcgtggtcaaggtggagaagca

SEQ ID NO: 221553 - DNA, 25 bp, probe
gacccaggataaaggggaagcctga

SEQ ID NO: 221554 - DNA, 25 bp, probe
gacccaggaacaagtggcttagctt

SEQ ID NO: 221555 - DNA, 25 bp, probe
gaccgaggaggagatcgctttgttc

SEQ ID NO: 221556 - DNA, 25 bp, probe
gaccgaggaggagatcgctttgttc

SEQ ID NO: 221557 - DNA, 25 bp, probe
gaccggtgtggacacgtgctggtta

SEQ ID NO: 221558 - DNA, 25 bp, probe
gacccagagctgcacgtcaagctgg

SEQ ID NO: 221559 - DNA, 25 bp, probe
gacctcaggcactctaaacatatgt

SEQ ID NO: 221560 - DNA, 25 bp, probe
gacccagtgccaactctgaagttga

SEQ ID NO: 221561 - DNA, 25 bp, probe
gaccgagtgactactatacagacta

SEQ ID NO: 221562 - DNA, 25 bp, probe
gacgcataagacttgcttgaacccg

SEQ ID NO: 221563 - DNA, 25 bp, probe
gacgctcaaggaggtgctgacatgc

SEQ ID NO: 221564 - DNA, 25 bp, probe
gacctgccgcagagtctgaaaagga

SEQ ID NO: 221565 - DNA, 25 bp, probe
gacctgacgcagatgggaatcacac

SEQ ID NO: 221566 - DNA, 25 bp, probe
gacctgcaacatgaggggaatctgc

SEQ ID NO: 221567 - DNA, 25 bp, probe
gacctgcaacatgaggggaatctgc

SEQ ID NO: 221568 - DNA, 25 bp, probe
gacccaaatggaggatgtgttcagc

SEQ ID NO: 221569 - DNA, 25 bp, probe
gacgccacagagcaaggggctgacc

SEQ ID NO: 221570 - DNA, 25 bp, probe
gacctgccaaggtgatgggcgtctg

SEQ ID NO: 221571 - DNA, 25 bp, probe
gacctgccaaggtgatgggcgtctg

SEQ ID NO: 221572 - DNA, 25 bp, probe
gaccgaaagcaagaggtgcctcatg

SEQ ID NO: 221573 - DNA, 25 bp, probe
gaccaataagaattcggaccgcatg

SEQ ID NO: 221574 - DNA, 25 bp, probe
gaccaggcccagaatcgaatccaat

SEQ ID NO: 221575 - DNA, 25 bp, probe
gaccaacccggaggtgattcagaac

SEQ ID NO: 221576 - DNA, 25 bp, probe
gaccagggcctgcacaggttaaccg

SEQ ID NO: 221577 - DNA, 25 bp, probe
gaccacgcgtctgaaggagtacacc

SEQ ID NO: 221578 - DNA, 25 bp, probe
gaccacgcgtctgaaggagtacacc

SEQ ID NO: 221579 - DNA, 25 bp, probe
gaccactcttcagagaatggataca

SEQ ID NO: 221580 - DNA, 25 bp, probe
gacccttgatatacgctatggtaaa

SEQ ID NO: 221581 - DNA, 25 bp, probe
gacccttgatatacgctatggtaaa

SEQ ID NO: 221582 - DNA, 25 bp, probe
gaccctgggattggctatgggaaag

SEQ ID NO: 221583 - DNA, 25 bp, probe
gaccctgggattggctatgggaaag

SEQ ID NO: 221584 - DNA, 25 bp, probe
gaccctgaggtcgtcaatgatgagt

SEQ ID NO: 221585 - DNA, 25 bp, probe
gacctggaagtcacacaatagaatt

SEQ ID NO: 221586 - DNA, 25 bp, probe
gaccgtattctcaaacaaaaatgtt

SEQ ID NO: 221587 - DNA, 25 bp, probe
gacctgtctttggaaccagaacatc

SEQ ID NO: 221588 - DNA, 25 bp, probe
gaccttctgtgggactccagattat

SEQ ID NO: 221589 - DNA, 25 bp, probe
gacctttatagcagcccgtatgata

SEQ ID NO: 221590 - DNA, 25 bp, probe
gacccttataaaatcctgtgcaata

SEQ ID NO: 221591 - DNA, 25 bp, probe
gaccctaaggacgtcatcggcagag

SEQ ID NO: 221592 - DNA, 25 bp, probe
gacccagcaaggattcattgtacgt

SEQ ID NO: 221593 - DNA, 25 bp, probe
gacccagaaagtctatcctatggca

SEQ ID NO: 221594 - DNA, 25 bp, probe
gacccacaatcagtaacatccatat

SEQ ID NO: 221595 - DNA, 25 bp, probe
gacccaaatcacagagtgcctttga

SEQ ID NO: 221596 - DNA, 25 bp, probe
gacccaattcagagattctttatgc

SEQ ID NO: 221597 - DNA, 25 bp, probe
gacccacgctctaagttgttgatct

SEQ ID NO: 221598 - DNA, 25 bp, probe
gacccacagctcgaggtctggtttc

SEQ ID NO: 221599 - DNA, 25 bp, probe
gacccacagctcgaggtctggtttc

SEQ ID NO: 221600 - DNA, 25 bp, probe
gacccaagcatatggattttcttca

SEQ ID NO: 221601 - DNA, 25 bp, probe
gacccagacatattgtactctttct

SEQ ID NO: 221602 - DNA, 25 bp, probe
gaccctgaacgttagtctcttgcat

SEQ ID NO: 221603 - DNA, 25 bp, probe
gaccacatactcctcggagtcttca

SEQ ID NO: 221604 - DNA, 25 bp, probe
gaccacatactcctcggagtcttca

SEQ ID NO: 221605 - DNA, 25 bp, probe
gaccaaatgtcaccagtactggcca

SEQ ID NO: 221606 - DNA, 25 bp, probe
gaccacaagttgcgttgaggccgca

SEQ ID NO: 221607 - DNA, 25 bp, probe
gacccaacagcggcttttgggagca

SEQ ID NO: 221608 - DNA, 25 bp, probe
gaccacatacggatcttccaagagc

SEQ ID NO: 221609 - DNA, 25 bp, probe
gaccacatacggatcttccaagagc

SEQ ID NO: 221610 - DNA, 25 bp, probe
gacccagaggaactcttcaccaagc

SEQ ID NO: 221611 - DNA, 25 bp, probe
gaccgacggaggtcctaccagatgc

SEQ ID NO: 221612 - DNA, 25 bp, probe
gaccggtctggttcctaagcaataa

SEQ ID NO: 221613 - DNA, 25 bp, probe
gaccaggttcgttcactcatggaaa

SEQ ID NO: 221614 - DNA, 25 bp, probe
gacctgtgttcaggaacagaggaag

SEQ ID NO: 221615 - DNA, 25 bp, probe
gacctgaggtccgagaacatgatca

SEQ ID NO: 221616 - DNA, 25 bp, probe
gacgcagggtctagatagaagctat

SEQ ID NO: 221617 - DNA, 25 bp, probe
gacgcagggtctagatagaagctat

SEQ ID NO: 221618 - DNA, 25 bp, probe
gagcgttctcctagaagacagaatt

SEQ ID NO: 221619 - DNA, 25 bp, probe
gaccattccgcttcaaggcagagca

SEQ ID NO: 221620 - DNA, 25 bp, probe
gacctactctggaaaggcggcggac

SEQ ID NO: 221621 - DNA, 25 bp, probe
gacctgcccggaacagagggtggga

SEQ ID NO: 221622 - DNA, 25 bp, probe
gacctgcccggaacagagggtggga

SEQ ID NO: 221623 - DNA, 25 bp, probe
gacccccagccaccaggctggggcc

SEQ ID NO: 221624 - DNA, 25 bp, probe
gaccctcctacactacagaggggcc

SEQ ID NO: 221625 - DNA, 25 bp, probe
gaccctcctacactacagaggggcc

SEQ ID NO: 221626 - DNA, 25 bp, probe
gaccccagccatgggaagaggggca

SEQ ID NO: 221627 - DNA, 25 bp, probe
gacctccccggtgatgaggctgaat

SEQ ID NO: 221628 - DNA, 25 bp, probe
gacctccccggtgatgaggctgaat

SEQ ID NO: 221629 - DNA, 25 bp, probe
gacgctcccaagaagtcagaggcag

SEQ ID NO: 221630 - DNA, 25 bp, probe
gacctgcccagatttctgcatgtgc

SEQ ID NO: 221631 - DNA, 25 bp, probe
gacctgaatcagtatgtcctgtccc

SEQ ID NO: 221632 - DNA, 25 bp, probe
gaccagagcggtatctctggcacca

SEQ ID NO: 221633 - DNA, 25 bp, probe
gaccagaaattcaacctgccaaccc

SEQ ID NO: 221634 - DNA, 25 bp, probe
gaccagaagcttgacgcaccaagcg

SEQ ID NO: 221635 - DNA, 25 bp, probe
gaccaaactgcaaaacatcccagat

SEQ ID NO: 221636 - DNA, 25 bp, probe
gacctgaagctagataacatcctgt

SEQ ID NO: 221637 - DNA, 25 bp, probe
gaccccagcaagcattatatctcag

SEQ ID NO: 221638 - DNA, 25 bp, probe
gaccctactgggagatgaccaatca

SEQ ID NO: 221639 - DNA, 25 bp, probe
gaccaggcctggcagttgaaatctc

SEQ ID NO: 221640 - DNA, 25 bp, probe
gacctggagctggagagcttcaaga

SEQ ID NO: 221641 - DNA, 25 bp, probe
gacctgataggattgcctgcttaga

SEQ ID NO: 221642 - DNA, 25 bp, probe
gaccgctcaccaagaacaacgcggc

SEQ ID NO: 221643 - DNA, 25 bp, probe
gaccgctcaccaagaacaacgcggc

SEQ ID NO: 221644 - DNA, 25 bp, probe
gaccgcatcatcgatgagagctaca

SEQ ID NO: 221645 - DNA, 25 bp, probe
gacctgcatcatcatttgcttcaag

SEQ ID NO: 221646 - DNA, 25 bp, probe
gacctgaacaacatcgtcaagtgcc

SEQ ID NO: 221647 - DNA, 25 bp, probe
gacctgtacatcctctggaaggggc

SEQ ID NO: 221648 - DNA, 25 bp, probe
gacgcctacatggtggtgtgggggc

SEQ ID NO: 221649 - DNA, 25 bp, probe
gaccccagatgaggtggtgtggcca

SEQ ID NO: 221650 - DNA, 25 bp, probe
gaccctacagagcctgaggggcacc

SEQ ID NO: 221651 - DNA, 25 bp, probe
gacgccaacaggtcagaggctgtgt

SEQ ID NO: 221652 - DNA, 25 bp, probe
gacccaacatgagcatcgtggtgaa

SEQ ID NO: 221653 - DNA, 25 bp, probe
gaccccatcacagtcatcgagggca

SEQ ID NO: 221654 - DNA, 25 bp, probe
gaccccatcacagtcatcgagggca

SEQ ID NO: 221655 - DNA, 25 bp, probe
gaccccatgcaccagctggaggggc

SEQ ID NO: 221656 - DNA, 25 bp, probe
gaccccatgcaccagctggaggggc

SEQ ID NO: 221657 - DNA, 25 bp, probe
gatccctcgagcctttcgggaaaat

SEQ ID NO: 221658 - DNA, 25 bp, probe
gacccggaggctcacagggaacaag

SEQ ID NO: 221659 - DNA, 25 bp, probe
gacccggaggctcacagggaacaag

SEQ ID NO: 221660 - DNA, 25 bp, probe
gacctaagaggatccggggcaatac

SEQ ID NO: 221661 - DNA, 25 bp, probe
gacccactgaggaatccgtagagca

SEQ ID NO: 221662 - DNA, 25 bp, probe
gacccactgaggaatccgtagagca

SEQ ID NO: 221663 - DNA, 25 bp, probe
gacccacagaggcaactcaggagta

SEQ ID NO: 221664 - DNA, 25 bp, probe
gacccagtgatgtggcaaagaggtt

SEQ ID NO: 221665 - DNA, 25 bp, probe
gacccagtgagattacagaggaagt

SEQ ID NO: 221666 - DNA, 25 bp, probe
gacgctggctgatgtactggtacag

SEQ ID NO: 221667 - DNA, 25 bp, probe
gacctggctggatgagccgccactg

SEQ ID NO: 221668 - DNA, 25 bp, probe
gaccgtgaggaaggccctcaccttg

SEQ ID NO: 221669 - DNA, 25 bp, probe
gaccgtcacgaagcacacggtgttg

SEQ ID NO: 221670 - DNA, 25 bp, probe
gaccccagcgagatcaaagttgtat

SEQ ID NO: 221671 - DNA, 25 bp, probe
gatccttcccagattgaacttttaa

SEQ ID NO: 221672 - DNA, 25 bp, probe
gaccttagcttgggtgagactgttt

SEQ ID NO: 221673 - DNA, 25 bp, probe
gaccttagcttgggtgagactgttt

SEQ ID NO: 221674 - DNA, 25 bp, probe
gaccttcagcttaggggtttgtccg

SEQ ID NO: 221675 - DNA, 25 bp, probe
gacgccttcttcgaggagttctggc

SEQ ID NO: 221676 - DNA, 25 bp, probe
gaccctctgatgggacggtactgag

SEQ ID NO: 221677 - DNA, 25 bp, probe
gaccttctggaccacagagttttgg

SEQ ID NO: 221678 - DNA, 25 bp, probe
gaccttctggaccacagagttttgg

SEQ ID NO: 221679 - DNA, 25 bp, probe
gaccttcggagccaaggctaatgtg

SEQ ID NO: 221680 - DNA, 25 bp, probe
gaccttcggagccaaggctaatgtg

SEQ ID NO: 221681 - DNA, 25 bp, probe
gaccttatggctgagagttgaattg

SEQ ID NO: 221682 - DNA, 25 bp, probe
gacccgggtgtaagtctaacgccag

SEQ ID NO: 221683 - DNA, 25 bp, probe
gagcctcggggtgatgctctatacg

SEQ ID NO: 221684 - DNA, 25 bp, probe
gacctggtgggagacatcagtagtg

SEQ ID NO: 221685 - DNA, 25 bp, probe
gacctggagggaacagacatgttgg

SEQ ID NO: 221686 - DNA, 25 bp, probe
gacctggaggtacctggatgggcag

SEQ ID NO: 221687 - DNA, 25 bp, probe
gaccaggacctgttgctggagtcgg

SEQ ID NO: 221688 - DNA, 25 bp, probe
gaccatcgatgccagcgtgtggatc

SEQ ID NO: 221689 - DNA, 25 bp, probe
gacccatgtgcaaggattgtacacg

SEQ ID NO: 221690 - DNA, 25 bp, probe
gacgccttactggcaatgcttccac

SEQ ID NO: 221691 - DNA, 25 bp, probe
gacctcttaatggcatagcaccaat

SEQ ID NO: 221692 - DNA, 25 bp, probe
gacctcttaatggcatagcaccaat

SEQ ID NO: 221693 - DNA, 25 bp, probe
gaccctggtagaggtcatcatcaat

SEQ ID NO: 221694 - DNA, 25 bp, probe
gaccctgagaaagtttacaatgaaa

SEQ ID NO: 221695 - DNA, 25 bp, probe
ggcacgtaaacagactactagactt

SEQ ID NO: 221696 - DNA, 25 bp, probe
gacctttaagcaaactactacagcc

SEQ ID NO: 221697 - DNA, 25 bp, probe
gacctcttgacagacctgattaagc

SEQ ID NO: 221698 - DNA, 25 bp, probe
gacctctgtgaccgaacatttactt

SEQ ID NO: 221699 - DNA, 25 bp, probe
gacccatgtgtcaaaaatcttactt

SEQ ID NO: 221700 - DNA, 25 bp, probe
gaccatagtttatacactgtacagt

SEQ ID NO: 221701 - DNA, 25 bp, probe
gagctatggtcagataactttacag

SEQ ID NO: 221702 - DNA, 25 bp, probe
gaccatggatcagtaccacttttgc

SEQ ID NO: 221703 - DNA, 25 bp, probe
gacctcctgcaaaccaggtttgccc

SEQ ID NO: 221704 - DNA, 25 bp, probe
gacctcctgcaaaccaggtttgccc

SEQ ID NO: 221705 - DNA, 25 bp, probe
gacctcggcaactgcaggttatctg

SEQ ID NO: 221706 - DNA, 25 bp, probe
gacctcggcaactgcaggttatctg

SEQ ID NO: 221707 - DNA, 25 bp, probe
gacctcgttcactgggtgtagtgtg

SEQ ID NO: 221708 - DNA, 25 bp, probe
gacctgcgctactttgagggcgagt

SEQ ID NO: 221709 - DNA, 25 bp, probe
gacctgcgctactttgagggcgagt

SEQ ID NO: 221710 - DNA, 25 bp, probe
gacctctctaatatggagatcggaa

SEQ ID NO: 221711 - DNA, 25 bp, probe
gacctccgagagctggaggggaaga

SEQ ID NO: 221712 - DNA, 25 bp, probe
gacgccaagagaaaggatgcggctg

SEQ ID NO: 221713 - DNA, 25 bp, probe
gacgccaagcagaggctgagtgccg

SEQ ID NO: 221714 - DNA, 25 bp, probe
gacccaagctgacgtcggtaaggcc

SEQ ID NO: 221715 - DNA, 25 bp, probe
gacccaggggtgtgtgttgaggagc

SEQ ID NO: 221716 - DNA, 25 bp, probe
gaccctggtggatgtgttcacgaag

SEQ ID NO: 221717 - DNA, 25 bp, probe
gaccctggaggatgtaatagctgat

SEQ ID NO: 221718 - DNA, 25 bp, probe
gacccagtgaggggatttcatctga

SEQ ID NO: 221719 - DNA, 25 bp, probe
gaccacggaggcctgatttcaaaga

SEQ ID NO: 221720 - DNA, 25 bp, probe
gacccacagtgactctgagatccca

SEQ ID NO: 221721 - DNA, 25 bp, probe
gacccacagtgactctgagatccca

SEQ ID NO: 221722 - DNA, 25 bp, probe
gaccgctatgtggctatatgtcacc

SEQ ID NO: 221723 - DNA, 25 bp, probe
gacctgtaggccatgttagcactgc

SEQ ID NO: 221724 - DNA, 25 bp, probe
gaccgctcgggcatggagaattccg

SEQ ID NO: 221725 - DNA, 25 bp, probe
gacccttgatgctattcacatgaat

SEQ ID NO: 221726 - DNA, 25 bp, probe
gacccttgatgctattcacatgaat

SEQ ID NO: 221727 - DNA, 25 bp, probe
gacccctgatgattccacagatacc

SEQ ID NO: 221728 - DNA, 25 bp, probe
gaccgagtgcatggtagagcagtac

SEQ ID NO: 221729 - DNA, 25 bp, probe
gaccgagtgcatggtagagcagtac

SEQ ID NO: 221730 - DNA, 25 bp, probe
gaccaggatccattgagacgtatga

SEQ ID NO: 221731 - DNA, 25 bp, probe
gaccctactaagactgcgtctgagg

SEQ ID NO: 221732 - DNA, 25 bp, probe
gaccctatccaagctgcacttggtg

SEQ ID NO: 221733 - DNA, 25 bp, probe
gacctcgaccagaaccaggatggct

SEQ ID NO: 221734 - DNA, 25 bp, probe
gacctctcaccaccatagacaaggt

SEQ ID NO: 221735 - DNA, 25 bp, probe
gacctgtaccacaagaggctaactc

SEQ ID NO: 221736 - DNA, 25 bp, probe
gaccgaatgctcatagaggttgacc

SEQ ID NO: 221737 - DNA, 25 bp, probe
gacccatttggcaagaggttgtccg

SEQ ID NO: 221738 - DNA, 25 bp, probe
gacccatttggcaagaggttgtccg

SEQ ID NO: 221739 - DNA, 25 bp, probe
gacctccttggaaggatgctggtgc

SEQ ID NO: 221740 - DNA, 25 bp, probe
gacctggccagggtggagcattgtc

SEQ ID NO: 221741 - DNA, 25 bp, probe
gacctgggcttgatgggctatgtca

SEQ ID NO: 221742 - DNA, 25 bp, probe
gacctggtggctccggagcaagtga

SEQ ID NO: 221743 - DNA, 25 bp, probe
gacctggtggctccggagcaagtga

SEQ ID NO: 221744 - DNA, 25 bp, probe
gacctggtgttgggtgagcagattg

SEQ ID NO: 221745 - DNA, 25 bp, probe
gacctggttagatttgcgagagctg

SEQ ID NO: 221746 - DNA, 25 bp, probe
gaccacagttaataccataggggct

SEQ ID NO: 221747 - DNA, 25 bp, probe
gaccacagttaataccataggggct

SEQ ID NO: 221748 - DNA, 25 bp, probe
gacccatgttaatgacctcatgctc

SEQ ID NO: 221749 - DNA, 25 bp, probe
gaccgatgtgtatttaaccagtcac

SEQ ID NO: 221750 - DNA, 25 bp, probe
gaccgatgtgtatttaaccagtcac

SEQ ID NO: 221751 - DNA, 25 bp, probe
gacccagtgatacaaacctgtcctg

SEQ ID NO: 221752 - DNA, 25 bp, probe
gaccaagtatcccaaaccagtggca

SEQ ID NO: 221753 - DNA, 25 bp, probe
gaccaagtatcccaaaccagtggca

SEQ ID NO: 221754 - DNA, 25 bp, probe
gacctacttgctggggtacagttgc

SEQ ID NO: 221755 - DNA, 25 bp, probe
gacctacttgctggggtacagttgc

SEQ ID NO: 221756 - DNA, 25 bp, probe
gacctactgatgtccctgatacagt

SEQ ID NO: 221757 - DNA, 25 bp, probe
gacctactgatgtccctgatacagt

SEQ ID NO: 221758 - DNA, 25 bp, probe
gacctgatcttctgcttaatgcagt

SEQ ID NO: 221759 - DNA, 25 bp, probe
gacctgatcatagactttgacagct

SEQ ID NO: 221760 - DNA, 25 bp, probe
gacctgaaatcaactgttgacctgt

SEQ ID NO: 221761 - DNA, 25 bp, probe
gacccagatcatgtttgagaccttc

SEQ ID NO: 221762 - DNA, 25 bp, probe
gacccagaaatggcagggacacttc

SEQ ID NO: 221763 - DNA, 25 bp, probe
gaccaagaacacctggctaccattt

SEQ ID NO: 221764 - DNA, 25 bp, probe
gaccatatcaacagtggccaggtta

SEQ ID NO: 221765 - DNA, 25 bp, probe
gaccactaagctggggacaggaacc

SEQ ID NO: 221766 - DNA, 25 bp, probe
gaccactaagctggggacaggaacc

SEQ ID NO: 221767 - DNA, 25 bp, probe
gaccctggggtgggatcagggacca

SEQ ID NO: 221768 - DNA, 25 bp, probe
gaccctgggagggatgaggaggacc

SEQ ID NO: 221769 - DNA, 25 bp, probe
gacccgtggagaattggccagagcc

SEQ ID NO: 221770 - DNA, 25 bp, probe
gacccgtggcagatgatggctgtgg

SEQ ID NO: 221771 - DNA, 25 bp, probe
gaccctgtgggcatggagatggaca

SEQ ID NO: 221772 - DNA, 25 bp, probe
gacccttgagccatatgaaagagac

SEQ ID NO: 221773 - DNA, 25 bp, probe
gaccctaagctcataaggatgaact

SEQ ID NO: 221774 - DNA, 25 bp, probe
gaccataagactatcaaggaaactg

SEQ ID NO: 221775 - DNA, 25 bp, probe
gacctcaaagctgtccgggagaagt

SEQ ID NO: 221776 - DNA, 25 bp, probe
gaccttggagccgacacgggagtac

SEQ ID NO: 221777 - DNA, 25 bp, probe
gaccagtagtgaccaatcgggagta

SEQ ID NO: 221778 - DNA, 25 bp, probe
gaccagtagtgaccaatcgggagta

SEQ ID NO: 221779 - DNA, 25 bp, probe
gaccgctactggccagatgagggtg

SEQ ID NO: 221780 - DNA, 25 bp, probe
gaccctcactggaagagatcctgct

SEQ ID NO: 221781 - DNA, 25 bp, probe
gaccctgacaacaagaacctctgtg

SEQ ID NO: 221782 - DNA, 25 bp, probe
gaccctgtcataaagaaaattgccc

SEQ ID NO: 221783 - DNA, 25 bp, probe
gacccatatcaagctacagaatgtc

SEQ ID NO: 221784 - DNA, 25 bp, probe
gacccatatcaagctacagaatgtc

SEQ ID NO: 221785 - DNA, 25 bp, probe
gaccctgagcaatcttctgcatatc

SEQ ID NO: 221786 - DNA, 25 bp, probe
gaccctgacatgtgacatctacctc

SEQ ID NO: 221787 - DNA, 25 bp, probe
gaccctactgtagtcactaccagta

SEQ ID NO: 221788 - DNA, 25 bp, probe
gaccctgatgcttaataaacgcagc

SEQ ID NO: 221789 - DNA, 25 bp, probe
gaccgcgtcttgtacagaagccgcc

SEQ ID NO: 221790 - DNA, 25 bp, probe
gaccggcctatgtcatggaactgcc

SEQ ID NO: 221791 - DNA, 25 bp, probe
gacctgttgctagcaggcaatctcc

SEQ ID NO: 221792 - DNA, 25 bp, probe
gaccttctgttgaagaaattctcga

SEQ ID NO: 221793 - DNA, 25 bp, probe
gagcctttattggtaaattctggta

SEQ ID NO: 221794 - DNA, 25 bp, probe
gagccttctctagaacaggtcggtg

SEQ ID NO: 221795 - DNA, 25 bp, probe
gagccttctctagaacaggtcggtg

SEQ ID NO: 221796 - DNA, 25 bp, probe
gacctttgtacagacgcaatcggcc

SEQ ID NO: 221797 - DNA, 25 bp, probe
gaccttttcacatacccctgtgaaa

SEQ ID NO: 221798 - DNA, 25 bp, probe
gaccttttcacatacccctgtgaaa

SEQ ID NO: 221799 - DNA, 25 bp, probe
gaccataataaatactccttttcaa

SEQ ID NO: 221800 - DNA, 25 bp, probe
gatccaacctagagaccatttttag

SEQ ID NO: 221801 - DNA, 25 bp, probe
gaccaccagacaattactgcatttt

SEQ ID NO: 221802 - DNA, 25 bp, probe
gaccccagattactacagatttctc

SEQ ID NO: 221803 - DNA, 25 bp, probe
gaccacgggctacatcatatgcttt

SEQ ID NO: 221804 - DNA, 25 bp, probe
gaccacgggctacatcatatgcttt

SEQ ID NO: 221805 - DNA, 25 bp, probe
gacctcgatagctaggccaagtttg

SEQ ID NO: 221806 - DNA, 25 bp, probe
gacctcgatagctaggccaagtttg

SEQ ID NO: 221807 - DNA, 25 bp, probe
gaccctgatgaaagaccaacatttg

SEQ ID NO: 221808 - DNA, 25 bp, probe
gaccttcagcaaaagccggtacttg

SEQ ID NO: 221809 - DNA, 25 bp, probe
gagacccatcacaaatgcctggttc

SEQ ID NO: 221810 - DNA, 25 bp, probe
gaccctctgcacatgaggctggttt

SEQ ID NO: 221811 - DNA, 25 bp, probe
gaccctcgcctaagaggcgtgctgt

SEQ ID NO: 221812 - DNA, 25 bp, probe
gaccccagctcttgaagggctgagt

SEQ ID NO: 221813 - DNA, 25 bp, probe
gacctctgcctatgcaagtgtctaa

SEQ ID NO: 221814 - DNA, 25 bp, probe
gacctggcccagtatatgtctcagc

SEQ ID NO: 221815 - DNA, 25 bp, probe
gacctgtcccagctcaggtatgagt

SEQ ID NO: 221816 - DNA, 25 bp, probe
gaccttcctggcaatcaagtatgtt

SEQ ID NO: 221817 - DNA, 25 bp, probe
gaccttctgtgccaataaccttgtc

SEQ ID NO: 221818 - DNA, 25 bp, probe
gaccgactgtcaagaatagccttcc

SEQ ID NO: 221819 - DNA, 25 bp, probe
gaccgactgtcaagaatagccttcc

SEQ ID NO: 221820 - DNA, 25 bp, probe
gaccagtgtgccatgaaagccctgc

SEQ ID NO: 221821 - DNA, 25 bp, probe
gacctgttgcacatgagcgaggcgg

SEQ ID NO: 221822 - DNA, 25 bp, probe
gacctgattctcagtcagaggctga

SEQ ID NO: 221823 - DNA, 25 bp, probe
gacctactgccatgacaagaaagtg

SEQ ID NO: 221824 - DNA, 25 bp, probe
gacccctcccagtcaataaagtctg

SEQ ID NO: 221825 - DNA, 25 bp, probe
gacccctcccagtcaataaagtctg

SEQ ID NO: 221826 - DNA, 25 bp, probe
gacccctgcctatatctatgaaatt

SEQ ID NO: 221827 - DNA, 25 bp, probe
gaccccattatatttcttttattag

SEQ ID NO: 221828 - DNA, 25 bp, probe
gaccgtttataagtcattttgtttg

SEQ ID NO: 221829 - DNA, 25 bp, probe
gaccgcaattctaagtttctagata

SEQ ID NO: 221830 - DNA, 25 bp, probe
gaccgagttctgtagattcttgtta

SEQ ID NO: 221831 - DNA, 25 bp, probe
gacctggtgtcaaagatgcttcatg

SEQ ID NO: 221832 - DNA, 25 bp, probe
gaccctgctgtcaagactgtgtgtg

SEQ ID NO: 221833 - DNA, 25 bp, probe
gaccctcatcagagactgactgctg

SEQ ID NO: 221834 - DNA, 25 bp, probe
gaccactctcagatacatcactgat

SEQ ID NO: 221835 - DNA, 25 bp, probe
gaccactctcagatacatcactgat

SEQ ID NO: 221836 - DNA, 25 bp, probe
gaccctgtgcgtgatcagcattgac

SEQ ID NO: 221837 - DNA, 25 bp, probe
gaccctggagctcatatgactacac

SEQ ID NO: 221838 - DNA, 25 bp, probe
gaccctggagcacttgagggaccag

SEQ ID NO: 221839 - DNA, 25 bp, probe
gaccactgagatactcaaggatgag

SEQ ID NO: 221840 - DNA, 25 bp, probe
gaccactgagatactcaaggatgag

SEQ ID NO: 221841 - DNA, 25 bp, probe
gacccgtgtacttgcagacagggaa

SEQ ID NO: 221842 - DNA, 25 bp, probe
gaccctattatgcttctcaaggaca

SEQ ID NO: 221843 - DNA, 25 bp, probe
gaccctattatgcttctcaaggaca

SEQ ID NO: 221844 - DNA, 25 bp, probe
gaccctcaggcaggtacatcgagta

SEQ ID NO: 221845 - DNA, 25 bp, probe
gaccctcaggcaggtacatcgagta

SEQ ID NO: 221846 - DNA, 25 bp, probe
gaccccagtgaagacaccagatagg

SEQ ID NO: 221847 - DNA, 25 bp, probe
gaccaaaggaacatagccctagttt

SEQ ID NO: 221848 - DNA, 25 bp, probe
gaccccagagtacatagctcctgag

SEQ ID NO: 221849 - DNA, 25 bp, probe
gacctaccagtattatggcttctcg

SEQ ID NO: 221850 - DNA, 25 bp, probe
gaccataaagtcttttgctccgctg

SEQ ID NO: 221851 - DNA, 25 bp, probe
gaccatggaagatcttgtctgctac

SEQ ID NO: 221852 - DNA, 25 bp, probe
gaccggccagattgttgctattaag

SEQ ID NO: 221853 - DNA, 25 bp, probe
gacctggctattggttctgaaaaaa

SEQ ID NO: 221854 - DNA, 25 bp, probe
gaccgacaagggttgtgtgaagaca

SEQ ID NO: 221855 - DNA, 25 bp, probe
gaccccaaggcgggtctggaagagg

SEQ ID NO: 221856 - DNA, 25 bp, probe
gacctccaaccaagcgtatgtgaag

SEQ ID NO: 221857 - DNA, 25 bp, probe
gacccccagagaagcatgtatgtac

SEQ ID NO: 221858 - DNA, 25 bp, probe
gacccctaatgctgcatatgttaca

SEQ ID NO: 221859 - DNA, 25 bp, probe
gaccacaaatagtgctcgctttcta

SEQ ID NO: 221860 - DNA, 25 bp, probe
gaccacaaatagtgctcgctttcta

SEQ ID NO: 221861 - DNA, 25 bp, probe
gagccaaacaagtgtcagccacact

SEQ ID NO: 221862 - DNA, 25 bp, probe
gagccaaacacgtaggatttccgtt

SEQ ID NO: 221863 - DNA, 25 bp, probe
gaccaaagaatgtacgttctagcct

SEQ ID NO: 221864 - DNA, 25 bp, probe
gaccaaagaatgtacgttctagcct

SEQ ID NO: 221865 - DNA, 25 bp, probe
gaccaggacaagatggtgtcggcct

SEQ ID NO: 221866 - DNA, 25 bp, probe
gacctggagaagatcggcatgggtc

SEQ ID NO: 221867 - DNA, 25 bp, probe
gacctggaataaagcagttggtgtt

SEQ ID NO: 221868 - DNA, 25 bp, probe
gacctggggagaaagttgagtgtca

SEQ ID NO: 221869 - DNA, 25 bp, probe
gaccgggagaggaaggtgagtatga

SEQ ID NO: 221870 - DNA, 25 bp, probe
gaccgagtgaaactcacggacttca

SEQ ID NO: 221871 - DNA, 25 bp, probe
gaccgagccgaacgacgggagtcgc

SEQ ID NO: 221872 - DNA, 25 bp, probe
gacctaccgatgagacgctggactc

SEQ ID NO: 221873 - DNA, 25 bp, probe
gaccaaatcgagtgatagggatcct

SEQ ID NO: 221874 - DNA, 25 bp, probe
gaccaaatgctattaatttccatcc

SEQ ID NO: 221875 - DNA, 25 bp, probe
gaccacattgtccgatttatcactg

SEQ ID NO: 221876 - DNA, 25 bp, probe
gaccacttctcagaaaatgcagcag

SEQ ID NO: 221877 - DNA, 25 bp, probe
gaccttgcctcagaaggagctgtga

SEQ ID NO: 221878 - DNA, 25 bp, probe
gacctgattcaacaactcagcgaga

SEQ ID NO: 221879 - DNA, 25 bp, probe
gacctgattcaacaactcagcgaga

SEQ ID NO: 221880 - DNA, 25 bp, probe
gaccatgatctgatgggactactgg

SEQ ID NO: 221881 - DNA, 25 bp, probe
gacctgattcgggagatctggcatt

SEQ ID NO: 221882 - DNA, 25 bp, probe
gacctattgggatacttataaaaat

SEQ ID NO: 221883 - DNA, 25 bp, probe
gaccgttgtgaatttctgtctcaaa

SEQ ID NO: 221884 - DNA, 25 bp, probe
gaccggctgcgcaaatggatgttca

SEQ ID NO: 221885 - DNA, 25 bp, probe
gaccggctgcgcaaatggatgttca

SEQ ID NO: 221886 - DNA, 25 bp, probe
gaccgggctgcattgtgtatggtgc

SEQ ID NO: 221887 - DNA, 25 bp, probe
gaccgattatgctttctttggccta

SEQ ID NO: 221888 - DNA, 25 bp, probe
gaccgatgtacaggactttcctcta

SEQ ID NO: 221889 - DNA, 25 bp, probe
gacctgtggaccgtctttaatgtct

SEQ ID NO: 221890 - DNA, 25 bp, probe
gagccagggacctcatttcaagact

SEQ ID NO: 221891 - DNA, 25 bp, probe
gagccggtgcagcagacgttaaact

SEQ ID NO: 221892 - DNA, 25 bp, probe
gagagtggtatcagcttttaggaat

SEQ ID NO: 221893 - DNA, 25 bp, probe
gagcatgggtacccatttgataaga

SEQ ID NO: 221894 - DNA, 25 bp, probe
gagcgggtggaggatttgtttgagt

SEQ ID NO: 221895 - DNA, 25 bp, probe
gagcgggtgcttgagttgttgtcgt

SEQ ID NO: 221896 - DNA, 25 bp, probe
gagcgggtgcttgagttgttgtcgt

SEQ ID NO: 221897 - DNA, 25 bp, probe
ggagaggtccagagggttcctataa

SEQ ID NO: 221898 - DNA, 25 bp, probe
gaccaggttcagaagggttcttgaa

SEQ ID NO: 221899 - DNA, 25 bp, probe
gaccaggctacaaggtgtttttggc

SEQ ID NO: 221900 - DNA, 25 bp, probe
gagccagagccgtgggttttggtgg

SEQ ID NO: 221901 - DNA, 25 bp, probe
gagcccagccatgggggtttagggc

SEQ ID NO: 221902 - DNA, 25 bp, probe
gaccatcagctatgtgggttgtatc

SEQ ID NO: 221903 - DNA, 25 bp, probe
gacctcttctagagagactgcctcc

SEQ ID NO: 221904 - DNA, 25 bp, probe
gaccttctcaagagaaccactccag

SEQ ID NO: 221905 - DNA, 25 bp, probe
gaccttctcaagagaaccactccag

SEQ ID NO: 221906 - DNA, 25 bp, probe
gacctcctcaacatattcgagctca

SEQ ID NO: 221907 - DNA, 25 bp, probe
gacccctgacactttgttgaacatc

SEQ ID NO: 221908 - DNA, 25 bp, probe
gacccctgacactttgttgaacatc

SEQ ID NO: 221909 - DNA, 25 bp, probe
gaccccgcagacagtgatggaaata

SEQ ID NO: 221910 - DNA, 25 bp, probe
gacctccacgtctgatgctggggtc

SEQ ID NO: 221911 - DNA, 25 bp, probe
gaccccaagatggatatcggatggt

SEQ ID NO: 221912 - DNA, 25 bp, probe
gacctccaagctcttaggtttttat

SEQ ID NO: 221913 - DNA, 25 bp, probe
gaccactccctaataagccttttgg

SEQ ID NO: 221914 - DNA, 25 bp, probe
gaccgctgcctttttagtcagtttc

SEQ ID NO: 221915 - DNA, 25 bp, probe
gaccggcttttggctaatggcttta

SEQ ID NO: 221916 - DNA, 25 bp, probe
gacccctttttgctgatgagtgttg

SEQ ID NO: 221917 - DNA, 25 bp, probe
gagccccatttttgctggggtagtt

SEQ ID NO: 221918 - DNA, 25 bp, probe
gaccccagtgattaatgtggttcag

SEQ ID NO: 221919 - DNA, 25 bp, probe
gagcctaaggttgatgctgtattac

SEQ ID NO: 221920 - DNA, 25 bp, probe
gacctttggtacatgcctgttaata

SEQ ID NO: 221921 - DNA, 25 bp, probe
gagcctttaatgagtgtcttaaaga

SEQ ID NO: 221922 - DNA, 25 bp, probe
gagcctaataaacttcctaattcag

SEQ ID NO: 221923 - DNA, 25 bp, probe
gacctaataaagtcagcttaaccca

SEQ ID NO: 221924 - DNA, 25 bp, probe
gaccttgaaaagaccttgaaaagca

SEQ ID NO: 221925 - DNA, 25 bp, probe
gagcttacaacctgccttaaaaatt

SEQ ID NO: 221926 - DNA, 25 bp, probe
gagttcactacagacgattaacaca

SEQ ID NO: 221927 - DNA, 25 bp, probe
gagcctccagtagacgacaagaacg

SEQ ID NO: 221928 - DNA, 25 bp, probe
gagcctccagtagacgacaagaacg

SEQ ID NO: 221929 - DNA, 25 bp, probe
gacccccaaggaggacaaagaagtg

SEQ ID NO: 221930 - DNA, 25 bp, probe
gaccccctcggagccaaatgaggca

SEQ ID NO: 221931 - DNA, 25 bp, probe
gaccccctcggagccaaatgaggca

SEQ ID NO: 221932 - DNA, 25 bp, probe
gacccccagggaggtgcaaaggctc

SEQ ID NO: 221933 - DNA, 25 bp, probe
gaccacctagtcatggacaaaggcc

SEQ ID NO: 221934 - DNA, 25 bp, probe
gaccacctgagggtgaacaagggca

SEQ ID NO: 221935 - DNA, 25 bp, probe
gacccgcgtggcggtgaagacggtc

SEQ ID NO: 221936 - DNA, 25 bp, probe
gagcccaggaggtggaaactgcaga

SEQ ID NO: 221937 - DNA, 25 bp, probe
gacctcagaaagtatccaaaccaag

SEQ ID NO: 221938 - DNA, 25 bp, probe
gacctaacacatctgaaatactaag

SEQ ID NO: 221939 - DNA, 25 bp, probe
gacctaaatatgctggatatagctt

SEQ ID NO: 221940 - DNA, 25 bp, probe
gaccccaatatcatagataacttct

SEQ ID NO: 221941 - DNA, 25 bp, probe
gaccccaatatcatagataacttct

SEQ ID NO: 221942 - DNA, 25 bp, probe
gaccccaaatcagatcaagtcggga

SEQ ID NO: 221943 - DNA, 25 bp, probe
gagccccaactagatcagcaggagc

SEQ ID NO: 221944 - DNA, 25 bp, probe
gagccccaactagatcagcaggagc

SEQ ID NO: 221945 - DNA, 25 bp, probe
gaccaccaggtttcatccaaaccgg

SEQ ID NO: 221946 - DNA, 25 bp, probe
gaccacagcctgatattccagaacc

SEQ ID NO: 221947 - DNA, 25 bp, probe
gacctcagacagattgtcacggaac

SEQ ID NO: 221948 - DNA, 25 bp, probe
gacctgctactgttgcattgcaagg

SEQ ID NO: 221949 - DNA, 25 bp, probe
gaccagctgaggctacgcatagggg

SEQ ID NO: 221950 - DNA, 25 bp, probe
gaccagtggaggtgccagggaggcc

SEQ ID NO: 221951 - DNA, 25 bp, probe
gaccgctcgggaaatgcaggaaggc

SEQ ID NO: 221952 - DNA, 25 bp, probe
gaccgctcgggaaatgcaggaaggc

SEQ ID NO: 221953 - DNA, 25 bp, probe
gaccgctcgggaaatgcaggaaggc

SEQ ID NO: 221954 - DNA, 25 bp, probe
gaccgtccttgaagaggatgactga

SEQ ID NO: 221955 - DNA, 25 bp, probe
gaccgtccttgttgaagcagttacc

SEQ ID NO: 221956 - DNA, 25 bp, probe
gaccgtttctgttgcaaagtaagcc

SEQ ID NO: 221957 - DNA, 25 bp, probe
gaccgttggtgtgcagaggtaccct

SEQ ID NO: 221958 - DNA, 25 bp, probe
gaccggcttagggcagaggtgcacc

SEQ ID NO: 221959 - DNA, 25 bp, probe
gaccacgctaagggcgaattccagc

SEQ ID NO: 221960 - DNA, 25 bp, probe
gaccaggtgaaggtagaatgtaaga

SEQ ID NO: 221961 - DNA, 25 bp, probe
gacctggtggatgctgaggagtatc

SEQ ID NO: 221962 - DNA, 25 bp, probe
gacctgtgtgtgacctgctttggtc

SEQ ID NO: 221963 - DNA, 25 bp, probe
gaccatcatggtgccagtctaggac

SEQ ID NO: 221964 - DNA, 25 bp, probe
gacctctgatatggcatatgtcatt

SEQ ID NO: 221965 - DNA, 25 bp, probe
gaccccaacgctggagcagtatatc

SEQ ID NO: 221966 - DNA, 25 bp, probe
gaccccaacgctggagcagtatatc

SEQ ID NO: 221967 - DNA, 25 bp, probe
gaccccaatgctgcagagcagtcag

SEQ ID NO: 221968 - DNA, 25 bp, probe
gacctctaagccgagagaggaggag

SEQ ID NO: 221969 - DNA, 25 bp, probe
gacctcaagagtgaaatgtagggga

SEQ ID NO: 221970 - DNA, 25 bp, probe
gacctgaaggtcagtatatggagtc

SEQ ID NO: 221971 - DNA, 25 bp, probe
gacctgcaagttggcgttattaagc

SEQ ID NO: 221972 - DNA, 25 bp, probe
gtccagaacttcccgtatatgaatg

SEQ ID NO: 221973 - DNA, 25 bp, probe
gaccagatacattccgtgtacatca

SEQ ID NO: 221974 - DNA, 25 bp, probe
gacctgtactcgtcagtggacacaa

SEQ ID NO: 221975 - DNA, 25 bp, probe
gacctgtacatgatcatgcgggagt

SEQ ID NO: 221976 - DNA, 25 bp, probe
gacctgtacatgatcatgcgggagt

SEQ ID NO: 221977 - DNA, 25 bp, probe
gacctggatcagattcggacaatcg

SEQ ID NO: 221978 - DNA, 25 bp, probe
gaccatcgtcatgttaacaaacttg

SEQ ID NO: 221979 - DNA, 25 bp, probe
gaccactgccacactaaaaactatt

SEQ ID NO: 221980 - DNA, 25 bp, probe
gaccaccctcacataatcaaacttt

SEQ ID NO: 221981 - DNA, 25 bp, probe
gacctcacttacgttacagaacgta

SEQ ID NO: 221982 - DNA, 25 bp, probe
gacctacttgactttggagaagttc

SEQ ID NO: 221983 - DNA, 25 bp, probe
gacctacttgactttggagaagttc

SEQ ID NO: 221984 - DNA, 25 bp, probe
gacctcacttgtttttagaagtcct

SEQ ID NO: 221985 - DNA, 25 bp, probe
gacctcacttgtttttagaagtcct

SEQ ID NO: 221986 - DNA, 25 bp, probe
gacctccttaatatcatcagccagt

SEQ ID NO: 221987 - DNA, 25 bp, probe
gacctcaggtgattcaccagcctca

SEQ ID NO: 221988 - DNA, 25 bp, probe
gacctatgagctcaacgagacagcc

SEQ ID NO: 221989 - DNA, 25 bp, probe
gaccaggactgcaccaagaagcacc

SEQ ID NO: 221990 - DNA, 25 bp, probe
gacctggccagagccaagaaacact

SEQ ID NO: 221991 - DNA, 25 bp, probe
gacctcccaagctctggagagcaac

SEQ ID NO: 221992 - DNA, 25 bp, probe
tacctaccacgcactgaggactttg

SEQ ID NO: 221993 - DNA, 25 bp, probe
gaggtaccacgaagctaccttttgg

SEQ ID NO: 221994 - DNA, 25 bp, probe
gaggtaccacgaagctaccttttgg

SEQ ID NO: 221995 - DNA, 25 bp, probe
gagcagtaccaagagttccgtaaac

SEQ ID NO: 221996 - DNA, 25 bp, probe
gatttacgaactctatgccgtatga

SEQ ID NO: 221997 - DNA, 25 bp, probe
gatcttgccataactttacagggta

SEQ ID NO: 221998 - DNA, 25 bp, probe
gatcttacaaacctgcaaatggaaa

SEQ ID NO: 221999 - DNA, 25 bp, probe
gacctacaaactgaagtgcaaggca

SEQ ID NO: 222000 - DNA, 25 bp, probe
gacctaaggacagacagctctgcgg

SEQ ID NO: 222001 - DNA, 25 bp, probe
gaccgaagagaatacattgatctgt

SEQ ID NO: 222002 - DNA, 25 bp, probe
gaccgaagagaatacattgatctgt

SEQ ID NO: 222003 - DNA, 25 bp, probe
gaccgaatgtttcatcactggctgg

SEQ ID NO: 222004 - DNA, 25 bp, probe
gagcccaagtttgagtttgctgtga

SEQ ID NO: 222005 - DNA, 25 bp, probe
gaccaacgttcaagcagttggtaga

SEQ ID NO: 222006 - DNA, 25 bp, probe
gaccaaggaaagacagtcagggaaa

SEQ ID NO: 222007 - DNA, 25 bp, probe
gaccgaggagaagcaccacaggacc

SEQ ID NO: 222008 - DNA, 25 bp, probe
gacctgcggaggctacggcaggagc

SEQ ID NO: 222009 - DNA, 25 bp, probe
gacctgcggaggctacggcaggagc

SEQ ID NO: 222010 - DNA, 25 bp, probe
gacctggtagtgcttattcaccact

SEQ ID NO: 222011 - DNA, 25 bp, probe
gacctgtcaaggcttatgctaacag

SEQ ID NO: 222012 - DNA, 25 bp, probe
gacctgtgccgagctctatgaaaag

SEQ ID NO: 222013 - DNA, 25 bp, probe
gaccatgtgctatgcctgtaacaag

SEQ ID NO: 222014 - DNA, 25 bp, probe
gacctggctaactgcatacaaagaa

SEQ ID NO: 222015 - DNA, 25 bp, probe
gaccaccaaacatgcaacgaacaca

SEQ ID NO: 222016 - DNA, 25 bp, probe
gaccaggcaacacataccgtacaga

SEQ ID NO: 222017 - DNA, 25 bp, probe
gaccgtgccaagaaaacgtaagcaa

SEQ ID NO: 222018 - DNA, 25 bp, probe
gagcctgaccctaaaaagaaagcca

SEQ ID NO: 222019 - DNA, 25 bp, probe
gagcttccagctctaataaaacagc

SEQ ID NO: 222020 - DNA, 25 bp, probe
gacctgaagatgctcacaaaccaca

SEQ ID NO: 222021 - DNA, 25 bp, probe
gacctgtgaaactactgaggccagc

SEQ ID NO: 222022 - DNA, 25 bp, probe
gacctgtggttctctggtgtaaaaa

SEQ ID NO: 222023 - DNA, 25 bp, probe
gaccgtggcttctatagcgtcgaaa

SEQ ID NO: 222024 - DNA, 25 bp, probe
gaccagtggttttggcgagtgagaa

SEQ ID NO: 222025 - DNA, 25 bp, probe
gacctgtgcgattgctgtagcggtt

SEQ ID NO: 222026 - DNA, 25 bp, probe
gaccattatatgccttcactggctt

SEQ ID NO: 222027 - DNA, 25 bp, probe
gacctggatatccacatcaatggac

SEQ ID NO: 222028 - DNA, 25 bp, probe
gacctggatatccacatcaatggac

SEQ ID NO: 222029 - DNA, 25 bp, probe
gaccagtcatttcctaagctacata

SEQ ID NO: 222030 - DNA, 25 bp, probe
gacctattctgaccaaactatataa

SEQ ID NO: 222031 - DNA, 25 bp, probe
gaccaaactgctcaaatctttacac

SEQ ID NO: 222032 - DNA, 25 bp, probe
gaccattacacgcaaagatattcaa

SEQ ID NO: 222033 - DNA, 25 bp, probe
gaccaattcacctgataaactctag

SEQ ID NO: 222034 - DNA, 25 bp, probe
gaccagaccccagtgattaatgtgg

SEQ ID NO: 222035 - DNA, 25 bp, probe
gaccagagccggttgacttctctgc

SEQ ID NO: 222036 - DNA, 25 bp, probe
gaccaagacaaagtgtattctctgt

SEQ ID NO: 222037 - DNA, 25 bp, probe
gaccaagacaaagtgtattctctgt

SEQ ID NO: 222038 - DNA, 25 bp, probe
gagcctcgtgaatgtatttctcgtg

SEQ ID NO: 222039 - DNA, 25 bp, probe
gagcctcgtgaatgtatttctcgtg

SEQ ID NO: 222040 - DNA, 25 bp, probe
gagcaatcgtggtgcctagactttg

SEQ ID NO: 222041 - DNA, 25 bp, probe
gaccattgggaagggcaactttgcc

SEQ ID NO: 222042 - DNA, 25 bp, probe
gacctggaaaacggcagacctcagt

SEQ ID NO: 222043 - DNA, 25 bp, probe
gacctggaaaacggcagacctcagt

SEQ ID NO: 222044 - DNA, 25 bp, probe
gagccatggaaacctgacggtgctg

SEQ ID NO: 222045 - DNA, 25 bp, probe
gagcgtgtgaaccttttgtgttgtc

SEQ ID NO: 222046 - DNA, 25 bp, probe
gagcctttacctggttgtgtcttca

SEQ ID NO: 222047 - DNA, 25 bp, probe
gacctcttagcgggtggatttccct

SEQ ID NO: 222048 - DNA, 25 bp, probe
gacctcttagcgggtggatttccct

SEQ ID NO: 222049 - DNA, 25 bp, probe
gacctcttagcgggtggatttccct

SEQ ID NO: 222050 - DNA, 25 bp, probe
gacctcttagcgggtggatttccct

SEQ ID NO: 222051 - DNA, 25 bp, probe
gacctctttggttgtgttattgccc

SEQ ID NO: 222052 - DNA, 25 bp, probe
gacctctgacatcatggtgttttct

SEQ ID NO: 222053 - DNA, 25 bp, probe
gacctgctaatcaagacctttgtac

SEQ ID NO: 222054 - DNA, 25 bp, probe
gacctgctaatcaagacctttgtac

SEQ ID NO: 222055 - DNA, 25 bp, probe
gagccaggacacagaccttttcagt

SEQ ID NO: 222056 - DNA, 25 bp, probe
gacctggaacaaatcgtttctcaga

SEQ ID NO: 222057 - DNA, 25 bp, probe
gaccaggaaatttcgatttgcacac

SEQ ID NO: 222058 - DNA, 25 bp, probe
gaccaggtaattactgcttgtctct

SEQ ID NO: 222059 - DNA, 25 bp, probe
gagcgaggtaatcatctgcatttgg

SEQ ID NO: 222060 - DNA, 25 bp, probe
gagcgtaggatttgttgcattatgc

SEQ ID NO: 222061 - DNA, 25 bp, probe
gaccgtgtgatttgtgtagtgagcc

SEQ ID NO: 222062 - DNA, 25 bp, probe
gaccagtgtatctctgtccatgatg

SEQ ID NO: 222063 - DNA, 25 bp, probe
gaccagtgtatctctgtccatgatg

SEQ ID NO: 222064 - DNA, 25 bp, probe
gaccagaatttcctggctcaggcta

SEQ ID NO: 222065 - DNA, 25 bp, probe
gaccaggagttcctgaacgagaagg

SEQ ID NO: 222066 - DNA, 25 bp, probe
gaccaggagattgctaactgcttag

SEQ ID NO: 222067 - DNA, 25 bp, probe
gaccagtgcagtttctaagcatgta

SEQ ID NO: 222068 - DNA, 25 bp, probe
gaccttagtttcaaagcttattctt

SEQ ID NO: 222069 - DNA, 25 bp, probe
gaccttgagtaaactaatttagctt

SEQ ID NO: 222070 - DNA, 25 bp, probe
gaccttatgcaaagccaaatattcc

SEQ ID NO: 222071 - DNA, 25 bp, probe
gagctcattgatgagatgcggaaga

SEQ ID NO: 222072 - DNA, 25 bp, probe
gagctcattgatgagatgcggaaga

SEQ ID NO: 222073 - DNA, 25 bp, probe
gagccttgcatgacatcatgaggcc

SEQ ID NO: 222074 - DNA, 25 bp, probe
gacctgctcagagtcattgcagagc

SEQ ID NO: 222075 - DNA, 25 bp, probe
gacctgcatcaagtcttctgatctc

SEQ ID NO: 222076 - DNA, 25 bp, probe
gacctgcatctcatcattgcatgtt

SEQ ID NO: 222077 - DNA, 25 bp, probe
gacctccgcaagagcatgatcatca

SEQ ID NO: 222078 - DNA, 25 bp, probe
gacctccgcaagagcatgatcatca

SEQ ID NO: 222079 - DNA, 25 bp, probe
gacctgctctgcaagaatatcatct

SEQ ID NO: 222080 - DNA, 25 bp, probe
gacctgctctgcaagaatatcatct

SEQ ID NO: 222081 - DNA, 25 bp, probe
gacctggcagctcgaaactgtttgg

SEQ ID NO: 222082 - DNA, 25 bp, probe
gacctgtacaccaaacttccaggag

SEQ ID NO: 222083 - DNA, 25 bp, probe
gagcctgaggagggaacttccaaag

SEQ ID NO: 222084 - DNA, 25 bp, probe
gaccttgagagtaggcgtcctctaa

SEQ ID NO: 222085 - DNA, 25 bp, probe
gaccatgtaggaagagttctcctga

SEQ ID NO: 222086 - DNA, 25 bp, probe
gaccattaggaacgtatctttgcaa

SEQ ID NO: 222087 - DNA, 25 bp, probe
gaccatctttgctgtgtacttacag

SEQ ID NO: 222088 - DNA, 25 bp, probe
gaccatctttgctgtgtacttacag

SEQ ID NO: 222089 - DNA, 25 bp, probe
gaccaacgtttgactacttacagag

SEQ ID NO: 222090 - DNA, 25 bp, probe
gaccaacgtttgactacttacagag

SEQ ID NO: 222091 - DNA, 25 bp, probe
gaccaagtttgtccaacctgcagtc

SEQ ID NO: 222092 - DNA, 25 bp, probe
gaccaagtttgtccaacctgcagtc

SEQ ID NO: 222093 - DNA, 25 bp, probe
gaccagggtgggccaccgcatgaac

SEQ ID NO: 222094 - DNA, 25 bp, probe
gaccactggtgctagctgcaccgtg

SEQ ID NO: 222095 - DNA, 25 bp, probe
gaccactggtgctagctgcaccgtg

SEQ ID NO: 222096 - DNA, 25 bp, probe
gagccacgggattgtaactggagca

SEQ ID NO: 222097 - DNA, 25 bp, probe
gagccactgggtgaagactgccctt

SEQ ID NO: 222098 - DNA, 25 bp, probe
gagccactgggtgaagactgccctt

SEQ ID NO: 222099 - DNA, 25 bp, probe
gaccacaggcctgaccagggcctgc

SEQ ID NO: 222100 - DNA, 25 bp, probe
gaccacaagcgttacctggtgggca

SEQ ID NO: 222101 - DNA, 25 bp, probe
gaccatcgaggatccaaagtgggaa

SEQ ID NO: 222102 - DNA, 25 bp, probe
gacctgcgagtgtgacaagagggct

SEQ ID NO: 222103 - DNA, 25 bp, probe
gacctcaagttgtgacagaagagtt

SEQ ID NO: 222104 - DNA, 25 bp, probe
gacctcactgggcggcaagaggtct

SEQ ID NO: 222105 - DNA, 25 bp, probe
gaccatcctccgaagtaagagcttg

SEQ ID NO: 222106 - DNA, 25 bp, probe
gacctcctccgcagaagagagatgc

SEQ ID NO: 222107 - DNA, 25 bp, probe
gacctcctccgcagaagagagatgc

SEQ ID NO: 222108 - DNA, 25 bp, probe
gaccacttcctgactaaggagctgc

SEQ ID NO: 222109 - DNA, 25 bp, probe
gacctgctctcactggtaaggtgac

SEQ ID NO: 222110 - DNA, 25 bp, probe
gaccttctcgctggtcaaggagaag

SEQ ID NO: 222111 - DNA, 25 bp, probe
gacctcttcgacatcgaggatgaca

SEQ ID NO: 222112 - DNA, 25 bp, probe
gacctttcagacataagctctgcca

SEQ ID NO: 222113 - DNA, 25 bp, probe
gacctttcagacataagctctgcca

SEQ ID NO: 222114 - DNA, 25 bp, probe
gaccttagcagtgctacagctagcc

SEQ ID NO: 222115 - DNA, 25 bp, probe
gacctggagtgtgtgaagtactgcg

SEQ ID NO: 222116 - DNA, 25 bp, probe
gacctggagtgtgtgaagtactgcg

SEQ ID NO: 222117 - DNA, 25 bp, probe
gacctgagccattttgtcagtatcc

SEQ ID NO: 222118 - DNA, 25 bp, probe
gacctgcaggatctgtctatcttca

SEQ ID NO: 222119 - DNA, 25 bp, probe
gacctgcaggaagcatatggattct

SEQ ID NO: 222120 - DNA, 25 bp, probe
gacctgcgatggacttcacagattt

SEQ ID NO: 222121 - DNA, 25 bp, probe
gacctgaaggtttccaacttgctca

SEQ ID NO: 222122 - DNA, 25 bp, probe
gacctgaaagttgacaacgtgatgc

SEQ ID NO: 222123 - DNA, 25 bp, probe
gaccagagacatctatgaaacggat

SEQ ID NO: 222124 - DNA, 25 bp, probe
gaccaaatctccgataagacagaca

SEQ ID NO: 222125 - DNA, 25 bp, probe
gaccaagcacctgagagagtacact

SEQ ID NO: 222126 - DNA, 25 bp, probe
gaccagcagcggacaaataaaactc

SEQ ID NO: 222127 - DNA, 25 bp, probe
gaccaacgggaaaaagccagtctag

SEQ ID NO: 222128 - DNA, 25 bp, probe
gaccaacgggaaaaagccagtctag

SEQ ID NO: 222129 - DNA, 25 bp, probe
gaccaacaggaaaggacgccaccgg

SEQ ID NO: 222130 - DNA, 25 bp, probe
gaccacctggacagggttgcagctc

SEQ ID NO: 222131 - DNA, 25 bp, probe
gaccacctggacagggttgcagctc

SEQ ID NO: 222132 - DNA, 25 bp, probe
gaccatcctgtgttgtaagtacccg

SEQ ID NO: 222133 - DNA, 25 bp, probe
gacctcacgatggtgctgaaaacct

SEQ ID NO: 222134 - DNA, 25 bp, probe
gacctgggatgcagtagtaggcact

SEQ ID NO: 222135 - DNA, 25 bp, probe
gacctgggatgcagtagtaggcact

SEQ ID NO: 222136 - DNA, 25 bp, probe
gacctggtgtccatatctaggacct

SEQ ID NO: 222137 - DNA, 25 bp, probe
gacctagttccaggatccatgggag

SEQ ID NO: 222138 - DNA, 25 bp, probe
gacctaactccaagacctggaagtc

SEQ ID NO: 222139 - DNA, 25 bp, probe
gacctagactctagagttctgaatg

SEQ ID NO: 222140 - DNA, 25 bp, probe
gacctagactctagagttctgaatg

SEQ ID NO: 222141 - DNA, 25 bp, probe
gacctcagacgctcagattatgcta

SEQ ID NO: 222142 - DNA, 25 bp, probe
gaccaagaccaatgtctatgtgatc

SEQ ID NO: 222143 - DNA, 25 bp, probe
gaccaagaccactggtgctagctgc

SEQ ID NO: 222144 - DNA, 25 bp, probe
gaccaagaccactggtgctagctgc

SEQ ID NO: 222145 - DNA, 25 bp, probe
gaccatgacatcaaaaggccttggc

SEQ ID NO: 222146 - DNA, 25 bp, probe
gaccatgactcataagcttcttgtc

SEQ ID NO: 222147 - DNA, 25 bp, probe
gaccatgactcataagcttcttgtc

SEQ ID NO: 222148 - DNA, 25 bp, probe
gaccatcatagagatcgattcttgt

SEQ ID NO: 222149 - DNA, 25 bp, probe
gaccaaagggatcctgcgcttgatc

SEQ ID NO: 222150 - DNA, 25 bp, probe
gaccaaagggagtctgccagggccc

SEQ ID NO: 222151 - DNA, 25 bp, probe
gaccagggagaatgcccacaggccc

SEQ ID NO: 222152 - DNA, 25 bp, probe
gaccatggatggtttcctccaagga

SEQ ID NO: 222153 - DNA, 25 bp, probe
gaccatggatggtttcctccaagga

SEQ ID NO: 222154 - DNA, 25 bp, probe
gagccagagtgtggcccctaaagga

SEQ ID NO: 222155 - DNA, 25 bp, probe
gaccaaggctgaaggttaagagcgt

SEQ ID NO: 222156 - DNA, 25 bp, probe
gaccagaggatgtctagttctaggc

SEQ ID NO: 222157 - DNA, 25 bp, probe
gaccaaggtgcccagggctatgagc

SEQ ID NO: 222158 - DNA, 25 bp, probe
gaccaacgatcctatgagagaagag

SEQ ID NO: 222159 - DNA, 25 bp, probe
gaccaacaacctactggacgacaac

SEQ ID NO: 222160 - DNA, 25 bp, probe
gaccaacaacctgctggatgacaat

SEQ ID NO: 222161 - DNA, 25 bp, probe
gagctgaagacgagcgcgggaaatc

SEQ ID NO: 222162 - DNA, 25 bp, probe
gagctaagattatctggggaaatca

SEQ ID NO: 222163 - DNA, 25 bp, probe
gagctgcgatttacacggcgggaat

SEQ ID NO: 222164 - DNA, 25 bp, probe
gaccagatcaaccagcggcaggaaa

SEQ ID NO: 222165 - DNA, 25 bp, probe
gacctgctgacatagtggatggaca

SEQ ID NO: 222166 - DNA, 25 bp, probe
gacctgctgaaagggatgcttgagt

SEQ ID NO: 222167 - DNA, 25 bp, probe
gacctgagacaagatgctgtcatgc

SEQ ID NO: 222168 - DNA, 25 bp, probe
gacctgacacaatatgagcactgcc

SEQ ID NO: 222169 - DNA, 25 bp, probe
gatcaggcccaatcattacgcactg

SEQ ID NO: 222170 - DNA, 25 bp, probe
gacctacgataattatacgacggag

SEQ ID NO: 222171 - DNA, 25 bp, probe
gacctaaaatcaatgatcgagaagg

SEQ ID NO: 222172 - DNA, 25 bp, probe
gacctcattaaagtgcatggaaatc

SEQ ID NO: 222173 - DNA, 25 bp, probe
gacctcatgaaatgagttgcagcag

SEQ ID NO: 222174 - DNA, 25 bp, probe
gacctcgacaacaaagtcatgcagg

SEQ ID NO: 222175 - DNA, 25 bp, probe
gacctgcgagcagctaatgttctgg

SEQ ID NO: 222176 - DNA, 25 bp, probe
gacctgcgggacaagattcttggtg

SEQ ID NO: 222177 - DNA, 25 bp, probe
gacctgcggagctacgttttgcagg

SEQ ID NO: 222178 - DNA, 25 bp, probe
gagcctgcgaaagccttttggtgac

SEQ ID NO: 222179 - DNA, 25 bp, probe
gagcccctgaactgctgttgggaac

SEQ ID NO: 222180 - DNA, 25 bp, probe
gagccccgaagcagctaatgtaata

SEQ ID NO: 222181 - DNA, 25 bp, probe
gagccagctgctaagtaccaagcta

SEQ ID NO: 222182 - DNA, 25 bp, probe
gagccgcctggataccgcagctagg

SEQ ID NO: 222183 - DNA, 25 bp, probe
gagccccaggtgtcagggcagtagg

SEQ ID NO: 222184 - DNA, 25 bp, probe
gagctccacggatgcatggacaggg

SEQ ID NO: 222185 - DNA, 25 bp, probe
gagccgaggaaccaggacaagcgca

SEQ ID NO: 222186 - DNA, 25 bp, probe
gagccgacaaacagcagatggacgc

SEQ ID NO: 222187 - DNA, 25 bp, probe
gagctgcggaaatactgggtccgct

SEQ ID NO: 222188 - DNA, 25 bp, probe
gagccggagaaaaccggccagcgtg

SEQ ID NO: 222189 - DNA, 25 bp, probe
gagaagttgaaaagctggggaggta

SEQ ID NO: 222190 - DNA, 25 bp, probe
gagccagttcagtacctggaggagg

SEQ ID NO: 222191 - DNA, 25 bp, probe
gagccagttcagtacctggaggagg

SEQ ID NO: 222192 - DNA, 25 bp, probe
gagccaggtacttccttagtgagtt

SEQ ID NO: 222193 - DNA, 25 bp, probe
gagccaggatgggactggtcgtgtt

SEQ ID NO: 222194 - DNA, 25 bp, probe
gaccaggcagggacttctgcatgtt

SEQ ID NO: 222195 - DNA, 25 bp, probe
gaccaggcagggacttctgcatgtt

SEQ ID NO: 222196 - DNA, 25 bp, probe
gaccaagcgggaattccagctgcag

SEQ ID NO: 222197 - DNA, 25 bp, probe
gacctcactggaattaccaatcagc

SEQ ID NO: 222198 - DNA, 25 bp, probe
gacctgcttggatctagacagcatc

SEQ ID NO: 222199 - DNA, 25 bp, probe
gacctcatggagtcctcatacaatc

SEQ ID NO: 222200 - DNA, 25 bp, probe
gaccaaaggttgccatgacagccct

SEQ ID NO: 222201 - DNA, 25 bp, probe
gaccatcaacagagactgactgcca

SEQ ID NO: 222202 - DNA, 25 bp, probe
gaccatcaacagagactgactgcca

SEQ ID NO: 222203 - DNA, 25 bp, probe
gacctcaagcaaccatgaactcagc

SEQ ID NO: 222204 - DNA, 25 bp, probe
gacctcacaggagctgagacttatc

SEQ ID NO: 222205 - DNA, 25 bp, probe
gacctcacaggagctgagacttatc

SEQ ID NO: 222206 - DNA, 25 bp, probe
gacctctgacggacggatctacatc

SEQ ID NO: 222207 - DNA, 25 bp, probe
gacctgcgagtgcaaggacctcatc

SEQ ID NO: 222208 - DNA, 25 bp, probe
gacctcggatggggagagactgcgc

SEQ ID NO: 222209 - DNA, 25 bp, probe
gagcccgaagggagagactgagact

SEQ ID NO: 222210 - DNA, 25 bp, probe
gagcgtgggaggcgggagtggagtg

SEQ ID NO: 222211 - DNA, 25 bp, probe
gagccaggagagtgaggggccggac

SEQ ID NO: 222212 - DNA, 25 bp, probe
gaccaggctggcctgagggatgccc

SEQ ID NO: 222213 - DNA, 25 bp, probe
gaccagcctggaaggtggcatctcc

SEQ ID NO: 222214 - DNA, 25 bp, probe
gaccaagtggaaggcgatgcacaac

SEQ ID NO: 222215 - DNA, 25 bp, probe
gagccaacatgaaaggggccatcac

SEQ ID NO: 222216 - DNA, 25 bp, probe
gaccagccgaatcgtgggcacaacg

SEQ ID NO: 222217 - DNA, 25 bp, probe
gaccatggaagctgagaggccagac

SEQ ID NO: 222218 - DNA, 25 bp, probe
gacctgctgcgagcaaggggatatc

SEQ ID NO: 222219 - DNA, 25 bp, probe
gagctgtgggcaaaagagtgtaaaa

SEQ ID NO: 222220 - DNA, 25 bp, probe
gagctggttggggtggcttagcaga

SEQ ID NO: 222221 - DNA, 25 bp, probe
gagctggtggagttttaccagcaga

SEQ ID NO: 222222 - DNA, 25 bp, probe
gagctttggagtgttgatgtgggaa

SEQ ID NO: 222223 - DNA, 25 bp, probe
gagctttggggctttgaaggcaggt

SEQ ID NO: 222224 - DNA, 25 bp, probe
gagactttgggaaatgagaaccagt

SEQ ID NO: 222225 - DNA, 25 bp, probe
gacctttgtggaactgcaagacgag

SEQ ID NO: 222226 - DNA, 25 bp, probe
gacctttgcatgaagtgctctgaga

SEQ ID NO: 222227 - DNA, 25 bp, probe
gacctttgcaaaggctgccgagctt

SEQ ID NO: 222228 - DNA, 25 bp, probe
gacctttgcaaaggctgccgagctt

SEQ ID NO: 222229 - DNA, 25 bp, probe
gaccttcgaatacatccagagtgtg

SEQ ID NO: 222230 - DNA, 25 bp, probe
gaccttcagaacttctcttggtgtg

SEQ ID NO: 222231 - DNA, 25 bp, probe
gaccttcaaaattctttgcatctcc

SEQ ID NO: 222232 - DNA, 25 bp, probe
gacctatgaagaattatcttccatc

SEQ ID NO: 222233 - DNA, 25 bp, probe
gacctatactgaaagatctctgtca

SEQ ID NO: 222234 - DNA, 25 bp, probe
gacctcaacatagtagatgatcagt

SEQ ID NO: 222235 - DNA, 25 bp, probe
gaccatcaccaagcaggaagttatc

SEQ ID NO: 222236 - DNA, 25 bp, probe
gaccttcacaaccaggcaagtgtac

SEQ ID NO: 222237 - DNA, 25 bp, probe
gaccttcacaaccaggcaagtgtac

SEQ ID NO: 222238 - DNA, 25 bp, probe
gaccttcgccagcaacaatgtgacc

SEQ ID NO: 222239 - DNA, 25 bp, probe
gaccttcgccagcaacaatgtgacc

SEQ ID NO: 222240 - DNA, 25 bp, probe
gacctcaagccagaaaatctcatcc

SEQ ID NO: 222241 - DNA, 25 bp, probe
gacctcagccccaaagagattgtcc

SEQ ID NO: 222242 - DNA, 25 bp, probe
gacctcatgttcgagaagcagtcag

SEQ ID NO: 222243 - DNA, 25 bp, probe
gacctagtctcagggatggagcagc

SEQ ID NO: 222244 - DNA, 25 bp, probe
gaccaacactcagggagctgtggcc

SEQ ID NO: 222245 - DNA, 25 bp, probe
gaccaacactcagggagctgtggcc

SEQ ID NO: 222246 - DNA, 25 bp, probe
gaccaacactcagggagctgtggcc

SEQ ID NO: 222247 - DNA, 25 bp, probe
gaccaacactcagggagctgtggcc

SEQ ID NO: 222248 - DNA, 25 bp, probe
gaccagaaccaggatggctgcatca

SEQ ID NO: 222249 - DNA, 25 bp, probe
gaccagaagtcagatcactaagcgg

SEQ ID NO: 222250 - DNA, 25 bp, probe
gaccaggagtctaacaatgcggcgg

SEQ ID NO: 222251 - DNA, 25 bp, probe
gaccaggagtctaacaatgcggcgg

SEQ ID NO: 222252 - DNA, 25 bp, probe
gagctgcagagcatccgaaagcggc

SEQ ID NO: 222253 - DNA, 25 bp, probe
gagctgcagagcatccgaaagcggc

SEQ ID NO: 222254 - DNA, 25 bp, probe
gacctagcaatcagtcagggctgca

SEQ ID NO: 222255 - DNA, 25 bp, probe
gacctagcaatcagtcagggctgca

SEQ ID NO: 222256 - DNA, 25 bp, probe
gacctcactgtgctgaagggcatca

SEQ ID NO: 222257 - DNA, 25 bp, probe
gaccatgcctggtgaagtgaacagc

SEQ ID NO: 222258 - DNA, 25 bp, probe
gaccatgcctggtgaagtgaacagc

SEQ ID NO: 222259 - DNA, 25 bp, probe
gaccatgcccgaatcaagctgaaag

SEQ ID NO: 222260 - DNA, 25 bp, probe
gaccatgcccggagaggtgaacagc

SEQ ID NO: 222261 - DNA, 25 bp, probe
gagcctcccgtgggagcagtgtgga

SEQ ID NO: 222262 - DNA, 25 bp, probe
gagcctcctcagtgaaggtggtggg

SEQ ID NO: 222263 - DNA, 25 bp, probe
gagcccctagaagaggatggccagc

SEQ ID NO: 222264 - DNA, 25 bp, probe
gagcccctgaacagcggaagacaga

SEQ ID NO: 222265 - DNA, 25 bp, probe
gagccccagcctgggctggagagcc

SEQ ID NO: 222266 - DNA, 25 bp, probe
gaccacacccaggactgggtgcagc

SEQ ID NO: 222267 - DNA, 25 bp, probe
gaccaagccagagattgcgggcagc

SEQ ID NO: 222268 - DNA, 25 bp, probe
gaccaagccagagattgcgggcagc

SEQ ID NO: 222269 - DNA, 25 bp, probe
gaccacacaagttgaacgtggcaga

SEQ ID NO: 222270 - DNA, 25 bp, probe
gagccaacaggatgaacgtgtgcaa

SEQ ID NO: 222271 - DNA, 25 bp, probe
gagccaaatggatatcacaggacaa

SEQ ID NO: 222272 - DNA, 25 bp, probe
gaccacaatggacagtagcaacagg

SEQ ID NO: 222273 - DNA, 25 bp, probe
gaccacaatggacagtagcaacagg

SEQ ID NO: 222274 - DNA, 25 bp, probe
gacctcaagcccgaggaacatcatg

SEQ ID NO: 222275 - DNA, 25 bp, probe
gacctcaagcccgaggaacatcatg

SEQ ID NO: 222276 - DNA, 25 bp, probe
gacctcaagagcctgatggagacca

SEQ ID NO: 222277 - DNA, 25 bp, probe
gacctcaggggtggcaagatcaagc

SEQ ID NO: 222278 - DNA, 25 bp, probe
gacctacgggatggcatcatctcag

SEQ ID NO: 222279 - DNA, 25 bp, probe
gacctagcagtgacatctcattgtc

SEQ ID NO: 222280 - DNA, 25 bp, probe
gacctatacatgatgcacctacata

SEQ ID NO: 222281 - DNA, 25 bp, probe
gaccagcagaatttgccctacggtg

SEQ ID NO: 222282 - DNA, 25 bp, probe
gaccagcagaatttgccctacggtg

SEQ ID NO: 222283 - DNA, 25 bp, probe
gaccagcaaaatacatctcgcctgg

SEQ ID NO: 222284 - DNA, 25 bp, probe
gaccatcaacaaactcctggacatg

SEQ ID NO: 222285 - DNA, 25 bp, probe
gaccaaccatctatggctgggctgt

SEQ ID NO: 222286 - DNA, 25 bp, probe
gacctcatcccactgtgggggagtc

SEQ ID NO: 222287 - DNA, 25 bp, probe
gacctcatcccactgtgggggagtc

SEQ ID NO: 222288 - DNA, 25 bp, probe
gacctcatcagccaggtgttggcca

SEQ ID NO: 222289 - DNA, 25 bp, probe
gaccaccagcatcgacatgtgggct

SEQ ID NO: 222290 - DNA, 25 bp, probe
gaccaccagcatcgacatgtgggct

SEQ ID NO: 222291 - DNA, 25 bp, probe
gaccaccagcatcgacatgtgggct

SEQ ID NO: 222292 - DNA, 25 bp, probe
gaccacatagcccacatcatagagc

SEQ ID NO: 222293 - DNA, 25 bp, probe
gagccccagcatggactcaagggac

SEQ ID NO: 222294 - DNA, 25 bp, probe
gagccctcagacgctgaagcggagc

SEQ ID NO: 222295 - DNA, 25 bp, probe
gagccctcagacgctgaagcggagc

SEQ ID NO: 222296 - DNA, 25 bp, probe
gagccctcagacgctgaagcggagc

SEQ ID NO: 222297 - DNA, 25 bp, probe
gagctccctggggtcaaggaggcaa

SEQ ID NO: 222298 - DNA, 25 bp, probe
gagctccctggggtcaaggaggcaa

SEQ ID NO: 222299 - DNA, 25 bp, probe
gagctccctggggtcaaggaggcaa

SEQ ID NO: 222300 - DNA, 25 bp, probe
gagctccctggggtcaaggaggcaa

SEQ ID NO: 222301 - DNA, 25 bp, probe
gagcccactgaggggccagggagga

SEQ ID NO: 222302 - DNA, 25 bp, probe
gagcccactgtgtggcagggggatg

SEQ ID NO: 222303 - DNA, 25 bp, probe
gagcccagagtgtgggagctaatgg

SEQ ID NO: 222304 - DNA, 25 bp, probe
gaccagagagaggacgtggctgaag

SEQ ID NO: 222305 - DNA, 25 bp, probe
gaccagagggtcagtgcagctgagg

SEQ ID NO: 222306 - DNA, 25 bp, probe
gagcctgtgggaacttcaggggttc

SEQ ID NO: 222307 - DNA, 25 bp, probe
gaccatgtggggatagaggcgctgt

SEQ ID NO: 222308 - DNA, 25 bp, probe
gaccattcgcgatttagaagttgtg

SEQ ID NO: 222309 - DNA, 25 bp, probe
gagctcttggcctttaaagttcacc

SEQ ID NO: 222310 - DNA, 25 bp, probe
gagccttgttttaaagggatcctcg

SEQ ID NO: 222311 - DNA, 25 bp, probe
gacctttatttccaggatcaaccgt

SEQ ID NO: 222312 - DNA, 25 bp, probe
gacctttgctttttgatgatctccc

SEQ ID NO: 222313 - DNA, 25 bp, probe
gacctttgctttttgatgatctccc

SEQ ID NO: 222314 - DNA, 25 bp, probe
gaccattctgatctgtgtgtgatct

SEQ ID NO: 222315 - DNA, 25 bp, probe
gaccttctgaacatgagtgtcaact

SEQ ID NO: 222316 - DNA, 25 bp, probe
gagccttcgaatccaggttcaagcc

SEQ ID NO: 222317 - DNA, 25 bp, probe
gagccttcgaatccaggttcaagcc

SEQ ID NO: 222318 - DNA, 25 bp, probe
gagccttcgaatccaggttcaagcc

SEQ ID NO: 222319 - DNA, 25 bp, probe
gagcttttgactctggccagaacct

SEQ ID NO: 222320 - DNA, 25 bp, probe
gagaatattggccctttctaaccta

SEQ ID NO: 222321 - DNA, 25 bp, probe
gagcaatatttccctttagaacttc

SEQ ID NO: 222322 - DNA, 25 bp, probe
gacctaattatgcctgtctgcaaac

SEQ ID NO: 222323 - DNA, 25 bp, probe
gaccttattgggacatgtcaaatca

SEQ ID NO: 222324 - DNA, 25 bp, probe
gaccattacgtcatgcaggaacatc

SEQ ID NO: 222325 - DNA, 25 bp, probe
gaccagctgggtagtcaggagagac

SEQ ID NO: 222326 - DNA, 25 bp, probe
gaccagctgaagcgcatcatggaag

SEQ ID NO: 222327 - DNA, 25 bp, probe
gaccaggcagaggagatatggaaca

SEQ ID NO: 222328 - DNA, 25 bp, probe
gaccaaagcagttgtcatgctgaac

SEQ ID NO: 222329 - DNA, 25 bp, probe
gaccaaagaccactctcagatacat

SEQ ID NO: 222330 - DNA, 25 bp, probe
gaccacaggacatgcaaccagagat

SEQ ID NO: 222331 - DNA, 25 bp, probe
gaccactatgatcacaccatcgaga

SEQ ID NO: 222332 - DNA, 25 bp, probe
gaccactatgatcacaccatcgaga

SEQ ID NO: 222333 - DNA, 25 bp, probe
gagcccagagtgaacactcttggta

SEQ ID NO: 222334 - DNA, 25 bp, probe
gagccgcaaggaccagatccagcgg

SEQ ID NO: 222335 - DNA, 25 bp, probe
gagcggaagaactacattcaccggg

SEQ ID NO: 222336 - DNA, 25 bp, probe
gagctggaagaagagaatgaccggc

SEQ ID NO: 222337 - DNA, 25 bp, probe
gacctagagagtgagaagtatcggc

SEQ ID NO: 222338 - DNA, 25 bp, probe
gaccaaggcgcagagcaactatcag

SEQ ID NO: 222339 - DNA, 25 bp, probe
gaccaaggcgcagagcaactatcag

SEQ ID NO: 222340 - DNA, 25 bp, probe
gagccacaggcctaagagtcattaa

SEQ ID NO: 222341 - DNA, 25 bp, probe
gagccaatggcctttggatcactgg

SEQ ID NO: 222342 - DNA, 25 bp, probe
gaccatgttgcactgtttgcatgcg

SEQ ID NO: 222343 - DNA, 25 bp, probe
gaccatgatgccctgtattggtcca

SEQ ID NO: 222344 - DNA, 25 bp, probe
gaccatcacctccagggagatccag

SEQ ID NO: 222345 - DNA, 25 bp, probe
gagccccttctatggagataagatg

SEQ ID NO: 222346 - DNA, 25 bp, probe
gagccccttctatggagataagatg

SEQ ID NO: 222347 - DNA, 25 bp, probe
gagcccactccatctggtagaaggg

SEQ ID NO: 222348 - DNA, 25 bp, probe
gagcccactccatctggtagaaggg

SEQ ID NO: 222349 - DNA, 25 bp, probe
gagccggggagagtggggatggggg

SEQ ID NO: 222350 - DNA, 25 bp, probe
gaccaggatagggcgggtgggaagg

SEQ ID NO: 222351 - DNA, 25 bp, probe
gagccaagacggaggaggggaaggg

SEQ ID NO: 222352 - DNA, 25 bp, probe
gagcccaacgagatgatgcgggaga

SEQ ID NO: 222353 - DNA, 25 bp, probe
gagcccaaagaggtggcgagtgaag

SEQ ID NO: 222354 - DNA, 25 bp, probe
gagcgcttagtaggtcggaggaagt

SEQ ID NO: 222355 - DNA, 25 bp, probe
gagcgattgaggtgtatggagagaa

SEQ ID NO: 222356 - DNA, 25 bp, probe
gagcttcggggggatgtggaaatga

SEQ ID NO: 222357 - DNA, 25 bp, probe
gagcttcggggggatgtggaaatga

SEQ ID NO: 222358 - DNA, 25 bp, probe
gagcctaagtctgtggtggacagat

SEQ ID NO: 222359 - DNA, 25 bp, probe
gacctatcagtatcggcagaacatt

SEQ ID NO: 222360 - DNA, 25 bp, probe
gaccatcgaggattgctgggaccat

SEQ ID NO: 222361 - DNA, 25 bp, probe
gaccatcgaggtcctgatgaacacc

SEQ ID NO: 222362 - DNA, 25 bp, probe
gaccaccagaggctgatgaaacgcc

SEQ ID NO: 222363 - DNA, 25 bp, probe
gaccaccagaggctgatgaaacgcc

SEQ ID NO: 222364 - DNA, 25 bp, probe
gagctgaccgaagatataggtcccc

SEQ ID NO: 222365 - DNA, 25 bp, probe
gagctgcccagtattgaaggcctca

SEQ ID NO: 222366 - DNA, 25 bp, probe
gagctccaggtattgccaaggtcaa

SEQ ID NO: 222367 - DNA, 25 bp, probe
gagccaaggctctaggcaaggccag

SEQ ID NO: 222368 - DNA, 25 bp, probe
gagcgagctggccaaggactttatt

SEQ ID NO: 222369 - DNA, 25 bp, probe
gagctgtgcttagagggctctcctt

SEQ ID NO: 222370 - DNA, 25 bp, probe
gagctgccgtcacatgacgtctatc

SEQ ID NO: 222371 - DNA, 25 bp, probe
gagctggcacccacatcctgtgcat

SEQ ID NO: 222372 - DNA, 25 bp, probe
gagctggcatcatcgtcatagaggc

SEQ ID NO: 222373 - DNA, 25 bp, probe
gagcctgcttcaagattaaggccct

SEQ ID NO: 222374 - DNA, 25 bp, probe
gagcttcctcattgttaaggcagca

SEQ ID NO: 222375 - DNA, 25 bp, probe
gagctttgttggatgagatggaagg

SEQ ID NO: 222376 - DNA, 25 bp, probe
gagaattttgacaagactgtccctg

SEQ ID NO: 222377 - DNA, 25 bp, probe
gagaattttgacaagactgtccctg

SEQ ID NO: 222378 - DNA, 25 bp, probe
tgaagtcttggagttcctaggccgg

SEQ ID NO: 222379 - DNA, 25 bp, probe
gtcgtattacagttgacgcggccgg

SEQ ID NO: 222380 - DNA, 25 bp, probe
gatcctttacagagcgggatgccgt

SEQ ID NO: 222381 - DNA, 25 bp, probe
gagcaacttacgagaggacagcctt

SEQ ID NO: 222382 - DNA, 25 bp, probe
gagcactacgggtggtgccagttta

SEQ ID NO: 222383 - DNA, 25 bp, probe
gagactacgaggtcattgatgaagt

SEQ ID NO: 222384 - DNA, 25 bp, probe
gagcgtactgcggtcagtgcagcga

SEQ ID NO: 222385 - DNA, 25 bp, probe
gagcctactgggcagagcagcagag

SEQ ID NO: 222386 - DNA, 25 bp, probe
gagctgtacgggctgatgcgtgagt

SEQ ID NO: 222387 - DNA, 25 bp, probe
gagctgtacgggctgatgcgtgagt

SEQ ID NO: 222388 - DNA, 25 bp, probe
gagctgtgcaataaccttcctagta

SEQ ID NO: 222389 - DNA, 25 bp, probe
gagctggcaatgggcgattatttgt

SEQ ID NO: 222390 - DNA, 25 bp, probe
gagcttgaattcggagtgatttacc

SEQ ID NO: 222391 - DNA, 25 bp, probe
gagctttgtctcagaaatcgtgggc

SEQ ID NO: 222392 - DNA, 25 bp, probe
gagctttgtctcagaaatcgtgggc

SEQ ID NO: 222393 - DNA, 25 bp, probe
gagcctcgtgtcacaacacgtgtcc

SEQ ID NO: 222394 - DNA, 25 bp, probe
gagccctgtgataccacagactgtg

SEQ ID NO: 222395 - DNA, 25 bp, probe
gagccggctgaaagcggagctgtct

SEQ ID NO: 222396 - DNA, 25 bp, probe
gagccaggatactggggtccttttc

SEQ ID NO: 222397 - DNA, 25 bp, probe
gagccaggatactggggtccttttc

SEQ ID NO: 222398 - DNA, 25 bp, probe
gatgccagtaaacaggctgaccttt

SEQ ID NO: 222399 - DNA, 25 bp, probe
gagccacgcaaacatgggtgctctt

SEQ ID NO: 222400 - DNA, 25 bp, probe
gagccgcagagaagtgacggttcct

SEQ ID NO: 222401 - DNA, 25 bp, probe
gagccagaagagctccggattcttc

SEQ ID NO: 222402 - DNA, 25 bp, probe
gaccacaaatgcttgcttggacttg

SEQ ID NO: 222403 - DNA, 25 bp, probe
gaccaggacatcatgctgttgcgcc

SEQ ID NO: 222404 - DNA, 25 bp, probe
gaccaggacagcagctcctgaggcc

SEQ ID NO: 222405 - DNA, 25 bp, probe
gaccacggagcagctcatcgaggcc

SEQ ID NO: 222406 - DNA, 25 bp, probe
gaccacggagcagctcatcgaggcc

SEQ ID NO: 222407 - DNA, 25 bp, probe
gaccacggagcagctcatcgaggcc

SEQ ID NO: 222408 - DNA, 25 bp, probe
gaccacggagcagctcatcgaggcc

SEQ ID NO: 222409 - DNA, 25 bp, probe
gaccacggagcagctcatcgaggcc

SEQ ID NO: 222410 - DNA, 25 bp, probe
gaccttgaagagcccatcacaggcc

SEQ ID NO: 222411 - DNA, 25 bp, probe
gaccaggaagagccctcaggtgacc

SEQ ID NO: 222412 - DNA, 25 bp, probe
gaccaagaagtccaagaggggccgt

SEQ ID NO: 222413 - DNA, 25 bp, probe
gaccaagaagtccaagaggggccgt

SEQ ID NO: 222414 - DNA, 25 bp, probe
gaccatgaacagtgaggatgagcgg

SEQ ID NO: 222415 - DNA, 25 bp, probe
gaccatgaacagtgaggatgagcgg

SEQ ID NO: 222416 - DNA, 25 bp, probe
gaccagcaagctgtgagagtgcagg

SEQ ID NO: 222417 - DNA, 25 bp, probe
gagccaatgccagcaggaatgggta

SEQ ID NO: 222418 - DNA, 25 bp, probe
gaccagtctgattttgaagggttct

SEQ ID NO: 222419 - DNA, 25 bp, probe
gaccagtcagagttcgaaggctttg

SEQ ID NO: 222420 - DNA, 25 bp, probe
gaccaatatacattaagagttttgc

SEQ ID NO: 222421 - DNA, 25 bp, probe
gaccaatgtgggacaatgagttttc

SEQ ID NO: 222422 - DNA, 25 bp, probe
gaccaagtgacagcaatgctgtttc

SEQ ID NO: 222423 - DNA, 25 bp, probe
gaccaactgcacgctattgctgtgc

SEQ ID NO: 222424 - DNA, 25 bp, probe
gaccatgagaagctttttgagctca

SEQ ID NO: 222425 - DNA, 25 bp, probe
gagccaaccagtacttttagcattt

SEQ ID NO: 222426 - DNA, 25 bp, probe
gaccaacctctgattcaactcattg

SEQ ID NO: 222427 - DNA, 25 bp, probe
gagccgcaccttgtcatgtaccatc

SEQ ID NO: 222428 - DNA, 25 bp, probe
gagccatgacctatgtcatcaacca

SEQ ID NO: 222429 - DNA, 25 bp, probe
gagccatgctcagaatgtctggtcc

SEQ ID NO: 222430 - DNA, 25 bp, probe
gagcctgtagacctatcggctctca

SEQ ID NO: 222431 - DNA, 25 bp, probe
gagcctgtagctgcttcaagcttag

SEQ ID NO: 222432 - DNA, 25 bp, probe
gagccttttgcagacaagtttccaa

SEQ ID NO: 222433 - DNA, 25 bp, probe
gagcctttgtgatacgaattcaatt

SEQ ID NO: 222434 - DNA, 25 bp, probe
gagccttaataaacgtccacagagt

SEQ ID NO: 222435 - DNA, 25 bp, probe
gagccattatgttgtggaatccaaa

SEQ ID NO: 222436 - DNA, 25 bp, probe
gaccactttagaatgaaccagttca

SEQ ID NO: 222437 - DNA, 25 bp, probe
gaccatctttcatggactactttga

SEQ ID NO: 222438 - DNA, 25 bp, probe
gaccacattctatggaacgctcatg

SEQ ID NO: 222439 - DNA, 25 bp, probe
gaccacattctatggaacgctcatg

SEQ ID NO: 222440 - DNA, 25 bp, probe
gaccatcagccatagagagatcctt

SEQ ID NO: 222441 - DNA, 25 bp, probe
gaccaagtgcaaagtgagagaattc

SEQ ID NO: 222442 - DNA, 25 bp, probe
gaccaagctgccagactataagccc

SEQ ID NO: 222443 - DNA, 25 bp, probe
gaccaagctgccagactataagccc

SEQ ID NO: 222444 - DNA, 25 bp, probe
gagccaatgtccatagtaaagcatc

SEQ ID NO: 222445 - DNA, 25 bp, probe
gaccaggtgtctagaggcaacagtg

SEQ ID NO: 222446 - DNA, 25 bp, probe
gaccatggctgttacagggatcatg

SEQ ID NO: 222447 - DNA, 25 bp, probe
gaccatggctgttacagggatcatg

SEQ ID NO: 222448 - DNA, 25 bp, probe
gaccagcactgtttatggctgctat

SEQ ID NO: 222449 - DNA, 25 bp, probe
gagccatcaccttcatcatggtggt

SEQ ID NO: 222450 - DNA, 25 bp, probe
gaccagctccttgaagtggtggggc

SEQ ID NO: 222451 - DNA, 25 bp, probe
gaccactgcctacaactgttggaga

SEQ ID NO: 222452 - DNA, 25 bp, probe
gagccatgtcctcaaagcttttaaa

SEQ ID NO: 222453 - DNA, 25 bp, probe
gaccagcccccaaatgtcgaagaat

SEQ ID NO: 222454 - DNA, 25 bp, probe
gaccagcctggccaacatggtgaaa

SEQ ID NO: 222455 - DNA, 25 bp, probe
gagccattggtccagaagaggagat

SEQ ID NO: 222456 - DNA, 25 bp, probe
gaccatggtgataaacagtgaggat

SEQ ID NO: 222457 - DNA, 25 bp, probe
gaccaagtgcttcatctgtggaatc

SEQ ID NO: 222458 - DNA, 25 bp, probe
gaccagggcgtcgatctgtggtctg

SEQ ID NO: 222459 - DNA, 25 bp, probe
gaccagggcgtcgatctgtggtctg

SEQ ID NO: 222460 - DNA, 25 bp, probe
gagccaggactctgatccagggctg

SEQ ID NO: 222461 - DNA, 25 bp, probe
gaccagtatgtcagttcagtcggaa

SEQ ID NO: 222462 - DNA, 25 bp, probe
gaccagcaaatcggtgcactgatcg

SEQ ID NO: 222463 - DNA, 25 bp, probe
gaccagcagtacgaatgcgtggcgg

SEQ ID NO: 222464 - DNA, 25 bp, probe
gaccacagtatgtcgcaggcattac

SEQ ID NO: 222465 - DNA, 25 bp, probe
gaccacagtatgtcgcaggcattac

SEQ ID NO: 222466 - DNA, 25 bp, probe
gaccactttgtcaagctcatttcct

SEQ ID NO: 222467 - DNA, 25 bp, probe
gagctcagcatgacttgaatgtctt

SEQ ID NO: 222468 - DNA, 25 bp, probe
gagcatgctcttttaagtctgataa

SEQ ID NO: 222469 - DNA, 25 bp, probe
gagcatctagtataagtctgggcac

SEQ ID NO: 222470 - DNA, 25 bp, probe
gagcatcccgtgtggatatgaggct

SEQ ID NO: 222471 - DNA, 25 bp, probe
gagctgcgatcccgggaagaggagc

SEQ ID NO: 222472 - DNA, 25 bp, probe
gagctgcgatcccgggaagaggagc

SEQ ID NO: 222473 - DNA, 25 bp, probe
gagcgagaccgtcaacagtgtcgcc

SEQ ID NO: 222474 - DNA, 25 bp, probe
gagcgagaccgtcaacagtgtcgcc

SEQ ID NO: 222475 - DNA, 25 bp, probe
gagcggggagggtaatgtgcaccac

SEQ ID NO: 222476 - DNA, 25 bp, probe
gagcggggcaaagtgagggccatcc

SEQ ID NO: 222477 - DNA, 25 bp, probe
gagcaggatggctcctctaagaatc

SEQ ID NO: 222478 - DNA, 25 bp, probe
gagctggtgatcttcatcactgggg

SEQ ID NO: 222479 - DNA, 25 bp, probe
gagctgaggttgacatcacaggcat

SEQ ID NO: 222480 - DNA, 25 bp, probe
gagcggcgttggtcaaagcggagac

SEQ ID NO: 222481 - DNA, 25 bp, probe
gagcggtgtattggagtcacaaaac

SEQ ID NO: 222482 - DNA, 25 bp, probe
gagcggacagaatgatgccaaaata

SEQ ID NO: 222483 - DNA, 25 bp, probe
gaccagctcagcgaggagccataat

SEQ ID NO: 222484 - DNA, 25 bp, probe
gaccagctcagcgaggagccataat

SEQ ID NO: 222485 - DNA, 25 bp, probe
gaccatgatgcagaggctcgcttgt

SEQ ID NO: 222486 - DNA, 25 bp, probe
gagccagctgagaggtctatttaaa

SEQ ID NO: 222487 - DNA, 25 bp, probe
gaccagtggcactgttgtttcacaa

SEQ ID NO: 222488 - DNA, 25 bp, probe
gaccacagttgctgttgtgttcacc

SEQ ID NO: 222489 - DNA, 25 bp, probe
gaccaagttgaggtctgttctgtcc

SEQ ID NO: 222490 - DNA, 25 bp, probe
gaccacgtgtgcatgttgtcatctt

SEQ ID NO: 222491 - DNA, 25 bp, probe
gaccatggcctgatgtttacagaga

SEQ ID NO: 222492 - DNA, 25 bp, probe
gaccatggactggatgctttataaa

SEQ ID NO: 222493 - DNA, 25 bp, probe
gagctgcttaatgtgctttaaaaga

SEQ ID NO: 222494 - DNA, 25 bp, probe
gagtgtttgcagtggttaattaaaa

SEQ ID NO: 222495 - DNA, 25 bp, probe
gagtgtttgcagtggttaattaaaa

SEQ ID NO: 222496 - DNA, 25 bp, probe
gagtgtcccaacatgtaaacgaaaa

SEQ ID NO: 222497 - DNA, 25 bp, probe
gagaatcccaaaacccaatcgaaat

SEQ ID NO: 222498 - DNA, 25 bp, probe
gagaatcccaaaacccaatcgaaat

SEQ ID NO: 222499 - DNA, 25 bp, probe
gagcatattcgaaataaccaaggga

SEQ ID NO: 222500 - DNA, 25 bp, probe
gagctttgcagacatagcccaggcc

SEQ ID NO: 222501 - DNA, 25 bp, probe
gagccactcaaggaaacgcgtgcac

SEQ ID NO: 222502 - DNA, 25 bp, probe
gagccaccaagaaattgtcctgatg

SEQ ID NO: 222503 - DNA, 25 bp, probe
gagccaggagaagatcttctgtggc

SEQ ID NO: 222504 - DNA, 25 bp, probe
gagcgcggaaagaacatgtgtggcc

SEQ ID NO: 222505 - DNA, 25 bp, probe
gagccttgaaaaaactggagtcaga

SEQ ID NO: 222506 - DNA, 25 bp, probe
gagccctgaagagattctggagtgg

SEQ ID NO: 222507 - DNA, 25 bp, probe
gagccctgaagagattctggagtgg

SEQ ID NO: 222508 - DNA, 25 bp, probe
gagccacatgtgcaggtactggaaa

SEQ ID NO: 222509 - DNA, 25 bp, probe
gaccactgtggaatgtactggagag

SEQ ID NO: 222510 - DNA, 25 bp, probe
gaccactgtaggatacggtgacatg

SEQ ID NO: 222511 - DNA, 25 bp, probe
gaccactgtaggatacggtgacatg

SEQ ID NO: 222512 - DNA, 25 bp, probe
gaccaatttgtgaagatcgtggacg

SEQ ID NO: 222513 - DNA, 25 bp, probe
gaccaccttggaggatttcagccga

SEQ ID NO: 222514 - DNA, 25 bp, probe
gagcgcaccatcaaggagactacag

SEQ ID NO: 222515 - DNA, 25 bp, probe
gagcgaatcctgggcaagatgactg

SEQ ID NO: 222516 - DNA, 25 bp, probe
gagcgtgacactggtgatcgcatac

SEQ ID NO: 222517 - DNA, 25 bp, probe
gagcgtgacactggtgatcgcatac

SEQ ID NO: 222518 - DNA, 25 bp, probe
gagctgctgtccgaggtgcagctgc

SEQ ID NO: 222519 - DNA, 25 bp, probe
gagctgctgtccgaggtgcagctgc

SEQ ID NO: 222520 - DNA, 25 bp, probe
gagcgcagtgtgaagagcacagctg

SEQ ID NO: 222521 - DNA, 25 bp, probe
gagccagtctgtggctgatttgcca

SEQ ID NO: 222522 - DNA, 25 bp, probe
gagccagtctacttgatgacttata

SEQ ID NO: 222523 - DNA, 25 bp, probe
gaccagtctactgcaatctgtgcga

SEQ ID NO: 222524 - DNA, 25 bp, probe
gaccagctcgcgcagagactggcgc

SEQ ID NO: 222525 - DNA, 25 bp, probe
gagccagcactgcaagagcctggcc

SEQ ID NO: 222526 - DNA, 25 bp, probe
gagccagcactgcaagagcctggcc

SEQ ID NO: 222527 - DNA, 25 bp, probe
gagcaggatgctcaggacctggaca

SEQ ID NO: 222528 - DNA, 25 bp, probe
gagcactggctgtggacgttcagat

SEQ ID NO: 222529 - DNA, 25 bp, probe
gagcactggctgtggacgttcagat

SEQ ID NO: 222530 - DNA, 25 bp, probe
gagagccgctataggacgcttcgga

SEQ ID NO: 222531 - DNA, 25 bp, probe
gagagccgctataggacgcttcgga

SEQ ID NO: 222532 - DNA, 25 bp, probe
gagcgaagctataggctcttgttgg

SEQ ID NO: 222533 - DNA, 25 bp, probe
gagcggcggaagtcgcggtatgcag

SEQ ID NO: 222534 - DNA, 25 bp, probe
gagcgaggtgtattccatggacatg

SEQ ID NO: 222535 - DNA, 25 bp, probe
gagcgaggtgtattccatggacatg

SEQ ID NO: 222536 - DNA, 25 bp, probe
gagcgaggatgatttcactaggcat

SEQ ID NO: 222537 - DNA, 25 bp, probe
gagctgctgaagacattcgtattat

SEQ ID NO: 222538 - DNA, 25 bp, probe
gagcttggaacgagatcttcttgat

SEQ ID NO: 222539 - DNA, 25 bp, probe
gagagggaaaggctgtactatatat

SEQ ID NO: 222540 - DNA, 25 bp, probe
gaccacggaaggcatgtcagcttca

SEQ ID NO: 222541 - DNA, 25 bp, probe
gagctacgacaagcacgtcacttac

SEQ ID NO: 222542 - DNA, 25 bp, probe
gagcgaggagaaggttgtcacctat

SEQ ID NO: 222543 - DNA, 25 bp, probe
gagccattggaagactgtcctctat

SEQ ID NO: 222544 - DNA, 25 bp, probe
gagccttctgaagcatcaaagcctt

SEQ ID NO: 222545 - DNA, 25 bp, probe
gagcctcctgaagaatcgattcctc

SEQ ID NO: 222546 - DNA, 25 bp, probe
gagcatcccgaaggagacctaaatc

SEQ ID NO: 222547 - DNA, 25 bp, probe
gagccccgaatctgacattagatga

SEQ ID NO: 222548 - DNA, 25 bp, probe
gagcccccattacactggatgatga

SEQ ID NO: 222549 - DNA, 25 bp, probe
gagcccccattacactggatgatga

SEQ ID NO: 222550 - DNA, 25 bp, probe
gagtcccaagtacaaggagtgtttt

SEQ ID NO: 222551 - DNA, 25 bp, probe
gagtcccaagtacaaggagtgtttt

SEQ ID NO: 222552 - DNA, 25 bp, probe
gagacgggttagtggggctttctat

SEQ ID NO: 222553 - DNA, 25 bp, probe
gagacgggttagtggggctttctat

SEQ ID NO: 222554 - DNA, 25 bp, probe
ggaagggcaccgagggagttttctg

SEQ ID NO: 222555 - DNA, 25 bp, probe
gagaaaataccgaatgggtcttatt

SEQ ID NO: 222556 - DNA, 25 bp, probe
gagaatacttgcagaggggttcagg

SEQ ID NO: 222557 - DNA, 25 bp, probe
gagaaaaagtgtgctgtggttcgga

SEQ ID NO: 222558 - DNA, 25 bp, probe
gagcttaatggtgtttggtctagga

SEQ ID NO: 222559 - DNA, 25 bp, probe
gagcttaatggtgtttggtctagga

SEQ ID NO: 222560 - DNA, 25 bp, probe
gagcagaaacggcttagttctaaag

SEQ ID NO: 222561 - DNA, 25 bp, probe
gagctgaatatcggggtcattgcca

SEQ ID NO: 222562 - DNA, 25 bp, probe
gagcgaatccgcagtctgcttgagc

SEQ ID NO: 222563 - DNA, 25 bp, probe
gagagattccatgccatctttacta

SEQ ID NO: 222564 - DNA, 25 bp, probe
gagaattctgacttacttaaccagg

SEQ ID NO: 222565 - DNA, 25 bp, probe
gagaattctgacttacttaaccagg

SEQ ID NO: 222566 - DNA, 25 bp, probe
ggagctaggaacacttacccaggta

SEQ ID NO: 222567 - DNA, 25 bp, probe
ggagctaggaacacttacccaggta

SEQ ID NO: 222568 - DNA, 25 bp, probe
gagccaaaaacagtttatccacagg

SEQ ID NO: 222569 - DNA, 25 bp, probe
gaccagagccaaattatcccaagag

SEQ ID NO: 222570 - DNA, 25 bp, probe
gtccaaccaagatatcccaggacgt

SEQ ID NO: 222571 - DNA, 25 bp, probe
gaccaacgacgacatcaagaggatt

SEQ ID NO: 222572 - DNA, 25 bp, probe
gaccaacaatggctgtcacaaggtg

SEQ ID NO: 222573 - DNA, 25 bp, probe
tgacccaactgggggcaaaggtttg

SEQ ID NO: 222574 - DNA, 25 bp, probe
gaccagcaactggacggcaagcagg

SEQ ID NO: 222575 - DNA, 25 bp, probe
gaccacgacatcatctggacagagg

SEQ ID NO: 222576 - DNA, 25 bp, probe
gaccagctgaacatgttgggagaga

SEQ ID NO: 222577 - DNA, 25 bp, probe
gagccactgaagaattttgacgaag

SEQ ID NO: 222578 - DNA, 25 bp, probe
gaccagctactgaattattaatctc

SEQ ID NO: 222579 - DNA, 25 bp, probe
gaccacagactgactttgaaattat

SEQ ID NO: 222580 - DNA, 25 bp, probe
gaccagcagagctttttaatacaag

SEQ ID NO: 222581 - DNA, 25 bp, probe
gagccaggagcatttaaaaatcagc

SEQ ID NO: 222582 - DNA, 25 bp, probe
gagccgggactggacacaagccagg

SEQ ID NO: 222583 - DNA, 25 bp, probe
gagctggggactggacaatttgggg

SEQ ID NO: 222584 - DNA, 25 bp, probe
gagcggattagtcacagatattggc

SEQ ID NO: 222585 - DNA, 25 bp, probe
gagctggaaagtcattctttacacc

SEQ ID NO: 222586 - DNA, 25 bp, probe
gagctccaaggacatgtcttaatgc

SEQ ID NO: 222587 - DNA, 25 bp, probe
gagccgaaagcaccactgctttaca

SEQ ID NO: 222588 - DNA, 25 bp, probe
gatgccgaacagagaccttctgcag

SEQ ID NO: 222589 - DNA, 25 bp, probe
gagcttgaacagaaatcacttccag

SEQ ID NO: 222590 - DNA, 25 bp, probe
gagctctatgaaaagctgccccagg

SEQ ID NO: 222591 - DNA, 25 bp, probe
gagcttgtggaggtggtcggcaatg

SEQ ID NO: 222592 - DNA, 25 bp, probe
gagctttaaggtcactcttatggct

SEQ ID NO: 222593 - DNA, 25 bp, probe
gagcttttggaatacctatcagagt

SEQ ID NO: 222594 - DNA, 25 bp, probe
gagcttttggaatacctatcagagt

SEQ ID NO: 222595 - DNA, 25 bp, probe
gagcatttggggtaatacttccaga

SEQ ID NO: 222596 - DNA, 25 bp, probe
gagcctggggtgtaagacttcaagc

SEQ ID NO: 222597 - DNA, 25 bp, probe
gagcctggggtgtaagacttcaagc

SEQ ID NO: 222598 - DNA, 25 bp, probe
gagcctggggtgtaagacttcaagc

SEQ ID NO: 222599 - DNA, 25 bp, probe
gagcttggcggtcaaggcggaagcc

SEQ ID NO: 222600 - DNA, 25 bp, probe
gagcctgtggaggacgaggcggaac

SEQ ID NO: 222601 - DNA, 25 bp, probe
gagctgcttggtgacattgggggcc

SEQ ID NO: 222602 - DNA, 25 bp, probe
gagcatgatctggtccaattttggc

SEQ ID NO: 222603 - DNA, 25 bp, probe
gagcatgatctggtccaattttggc

SEQ ID NO: 222604 - DNA, 25 bp, probe
gagcatgttgcagcaaatctattgt

SEQ ID NO: 222605 - DNA, 25 bp, probe
gagctgtatcagaacacagtgatct

SEQ ID NO: 222606 - DNA, 25 bp, probe
gagctgtatcagaacacagtgatct

SEQ ID NO: 222607 - DNA, 25 bp, probe
gagcttcatcatgaccagaagcttg

SEQ ID NO: 222608 - DNA, 25 bp, probe
gagccatcatcgcgccaaattttgc

SEQ ID NO: 222609 - DNA, 25 bp, probe
gagccatcatcgcgccaaattttgc

SEQ ID NO: 222610 - DNA, 25 bp, probe
gagccaatcctgccagaaattcatt

SEQ ID NO: 222611 - DNA, 25 bp, probe
gagcgcgaggctgcaaatttcatca

SEQ ID NO: 222612 - DNA, 25 bp, probe
gagcgcgaggctgcaaatttcatca

SEQ ID NO: 222613 - DNA, 25 bp, probe
gagcctgcggcttaatttgactcaa

SEQ ID NO: 222614 - DNA, 25 bp, probe
gagcctaggcatctctttggctgaa

SEQ ID NO: 222615 - DNA, 25 bp, probe
gagcctgggcaggtgtttggcttag

SEQ ID NO: 222616 - DNA, 25 bp, probe
gagcctgagtatgtgctcttggctg

SEQ ID NO: 222617 - DNA, 25 bp, probe
gagccaggagtgtgctgtctggcaa

SEQ ID NO: 222618 - DNA, 25 bp, probe
gagccagtgtggactctgcactggc

SEQ ID NO: 222619 - DNA, 25 bp, probe
gagccaatgatggacattcagactc

SEQ ID NO: 222620 - DNA, 25 bp, probe
gagccaaggctaatgtgctgactga

SEQ ID NO: 222621 - DNA, 25 bp, probe
gagccaaggctaatgtgctgactga

SEQ ID NO: 222622 - DNA, 25 bp, probe
gaccaatggctaagtgaagatgaca

SEQ ID NO: 222623 - DNA, 25 bp, probe
gaccaattcaaactgtctatgcaca

SEQ ID NO: 222624 - DNA, 25 bp, probe
gagccacattctgacttcagatccc

SEQ ID NO: 222625 - DNA, 25 bp, probe
gagctccatgtgggaactcaggccc

SEQ ID NO: 222626 - DNA, 25 bp, probe
gagcctcagtgagggcactgggact

SEQ ID NO: 222627 - DNA, 25 bp, probe
gagcaccagcctgggcatcaggaag

SEQ ID NO: 222628 - DNA, 25 bp, probe
gagccatggaccacgcaggaagggc

SEQ ID NO: 222629 - DNA, 25 bp, probe
gagcctgtaatcaccaaagaggatg

SEQ ID NO: 222630 - DNA, 25 bp, probe
gagcccttactgccggaagggcatc

SEQ ID NO: 222631 - DNA, 25 bp, probe
gagcctcttatccggtgaagtgtgc

SEQ ID NO: 222632 - DNA, 25 bp, probe
gagcttttctcgcaggaaattttct

SEQ ID NO: 222633 - DNA, 25 bp, probe
gagcgttaacacagtaaaatattca

SEQ ID NO: 222634 - DNA, 25 bp, probe
gagctgtaaaacatctgaacctaac

SEQ ID NO: 222635 - DNA, 25 bp, probe
gagcgctacatcacccatgaaagtg

SEQ ID NO: 222636 - DNA, 25 bp, probe
gagcgatacatcacgcatgagagtg

SEQ ID NO: 222637 - DNA, 25 bp, probe
gagcgatacatcacgcatgagagtg

SEQ ID NO: 222638 - DNA, 25 bp, probe
gagcagtaagtaagtaagtgtgggg

SEQ ID NO: 222639 - DNA, 25 bp, probe
gagccaagaggatggggtgggggcc

SEQ ID NO: 222640 - DNA, 25 bp, probe
gagacgtaggtagccgtagttggac

SEQ ID NO: 222641 - DNA, 25 bp, probe
gagaaaaatttcacaggacttggac

SEQ ID NO: 222642 - DNA, 25 bp, probe
gaggaaattttccgcaaggttcgat

SEQ ID NO: 222643 - DNA, 25 bp, probe
gaggaaattttccgcaaggttcgat

SEQ ID NO: 222644 - DNA, 25 bp, probe
gggaacaaaccctgcaggttctaag

SEQ ID NO: 222645 - DNA, 25 bp, probe
gatgccaaaatacccacggggtcta

SEQ ID NO: 222646 - DNA, 25 bp, probe
gatgccaaaatacccacggggtcta

SEQ ID NO: 222647 - DNA, 25 bp, probe
gatccagtacaatctcacaggggtc

SEQ ID NO: 222648 - DNA, 25 bp, probe
gatgcccttagatgtccggggctgc

SEQ ID NO: 222649 - DNA, 25 bp, probe
gagccatttcaggagggctggggtg

SEQ ID NO: 222650 - DNA, 25 bp, probe
gagccttcacatgaaattagtagtg

SEQ ID NO: 222651 - DNA, 25 bp, probe
gagccattcctaaagatttggggtt

SEQ ID NO: 222652 - DNA, 25 bp, probe
gagccattaaaatctctttggtttg

SEQ ID NO: 222653 - DNA, 25 bp, probe
gagccattaaacactagttcagtat

SEQ ID NO: 222654 - DNA, 25 bp, probe
gagccagtaaaactcatcgttacca

SEQ ID NO: 222655 - DNA, 25 bp, probe
gagcagcagtaaaagtcaccctaaa

SEQ ID NO: 222656 - DNA, 25 bp, probe
gagcttggaagtcatacccgaaaaa

SEQ ID NO: 222657 - DNA, 25 bp, probe
gagctggagcaagaataccaagaca

SEQ ID NO: 222658 - DNA, 25 bp, probe
gagcttgaattttgataccaaccat

SEQ ID NO: 222659 - DNA, 25 bp, probe
gagcctgtttaaatccagcaagccc

SEQ ID NO: 222660 - DNA, 25 bp, probe
gagccagttttaactccaattgatg

SEQ ID NO: 222661 - DNA, 25 bp, probe
gagcacggtttaagcaccactggac

SEQ ID NO: 222662 - DNA, 25 bp, probe
gagcacggtttaagcaccactggac

SEQ ID NO: 222663 - DNA, 25 bp, probe
gtgccggtttagagctcctagaagt

SEQ ID NO: 222664 - DNA, 25 bp, probe
gagcttgatgttttgaagtccttga

SEQ ID NO: 222665 - DNA, 25 bp, probe
gagcctatgtgttgtccaaggcctc

SEQ ID NO: 222666 - DNA, 25 bp, probe
gagcacttagttaccctggacgctc

SEQ ID NO: 222667 - DNA, 25 bp, probe
gagccattcaaaattccttaagatc

SEQ ID NO: 222668 - DNA, 25 bp, probe
gagccactgattatacctctagtat

SEQ ID NO: 222669 - DNA, 25 bp, probe
gagccttgaattaaccatgcattta

SEQ ID NO: 222670 - DNA, 25 bp, probe
gagccttatgctataaatgtcattt

SEQ ID NO: 222671 - DNA, 25 bp, probe
gagcccttctgaaaaagtatcctgc

SEQ ID NO: 222672 - DNA, 25 bp, probe
gagccctccgtaaatatacatctgt

SEQ ID NO: 222673 - DNA, 25 bp, probe
gagccctgcacgggagacaggtctg

SEQ ID NO: 222674 - DNA, 25 bp, probe
gagccctgcacgggagacaggtctg

SEQ ID NO: 222675 - DNA, 25 bp, probe
gagctgcctgcacttacaggcgttt

SEQ ID NO: 222676 - DNA, 25 bp, probe
gagctcctcgtggactatcagatgt

SEQ ID NO: 222677 - DNA, 25 bp, probe
gagcctgttgagggcttcaattgag

SEQ ID NO: 222678 - DNA, 25 bp, probe
gagccagttggccctgaaacaggaa

SEQ ID NO: 222679 - DNA, 25 bp, probe
gagccttatgtggacgacatacaga

SEQ ID NO: 222680 - DNA, 25 bp, probe
gagccttctgaggagaggcaacagg

SEQ ID NO: 222681 - DNA, 25 bp, probe
gagcgttgtgaaggcagccaaccct

SEQ ID NO: 222682 - DNA, 25 bp, probe
gagctgtggctaagggcaagcccct

SEQ ID NO: 222683 - DNA, 25 bp, probe
gagcatgggttactggaagccggga

SEQ ID NO: 222684 - DNA, 25 bp, probe
gagagggttattggaaagcttcaaa

SEQ ID NO: 222685 - DNA, 25 bp, probe
gagagggttattggaaagcttcaaa

SEQ ID NO: 222686 - DNA, 25 bp, probe
gagcaggctttatctggaacgtcac

SEQ ID NO: 222687 - DNA, 25 bp, probe
gagcaggctttatctggaacgtcac

SEQ ID NO: 222688 - DNA, 25 bp, probe
gagcaatcgttttacgtacgtcctc

SEQ ID NO: 222689 - DNA, 25 bp, probe
gagcccattttgtggattgtgtcct

SEQ ID NO: 222690 - DNA, 25 bp, probe
gagcactttgtttggttctgtcatc

SEQ ID NO: 222691 - DNA, 25 bp, probe
gagccaagctgtaaagtttgctttg

SEQ ID NO: 222692 - DNA, 25 bp, probe
gagcgccagcgaaaagaaactgtat

SEQ ID NO: 222693 - DNA, 25 bp, probe
gagccagaagacatggaaactcttg

SEQ ID NO: 222694 - DNA, 25 bp, probe
gagccagaagacatggaaactcttg

SEQ ID NO: 222695 - DNA, 25 bp, probe
gagccagaagccaggcacactgctc

SEQ ID NO: 222696 - DNA, 25 bp, probe
gagctcagatacagaggacagtgct

SEQ ID NO: 222697 - DNA, 25 bp, probe
gagctgaattgcagagaaactgtgc

SEQ ID NO: 222698 - DNA, 25 bp, probe
gagatgtactgcaaagtcgccagtc

SEQ ID NO: 222699 - DNA, 25 bp, probe
gagatccggcagaagtaccagtcca

SEQ ID NO: 222700 - DNA, 25 bp, probe
gagctgccatgttgatagtatcaca

SEQ ID NO: 222701 - DNA, 25 bp, probe
gaccaatgtctatgtgatcacaaac

SEQ ID NO: 222702 - DNA, 25 bp, probe
gagccaagacttctgagctataact

SEQ ID NO: 222703 - DNA, 25 bp, probe
gagccaagacttctgagctataact

SEQ ID NO: 222704 - DNA, 25 bp, probe
gagccagaaccacatattcttctct

SEQ ID NO: 222705 - DNA, 25 bp, probe
gaccaagacagggtctcctttgctc

SEQ ID NO: 222706 - DNA, 25 bp, probe
gaccaatagctgctgctttcatatt

SEQ ID NO: 222707 - DNA, 25 bp, probe
gagccttagctacttttcagaattg

SEQ ID NO: 222708 - DNA, 25 bp, probe
gagccttacatactgggagaatttg

SEQ ID NO: 222709 - DNA, 25 bp, probe
gagcctgattttccatgggaaattg

SEQ ID NO: 222710 - DNA, 25 bp, probe
gagctcagagatacatggatgggca

SEQ ID NO: 222711 - DNA, 25 bp, probe
gagctccagatcatgagaaagctag

SEQ ID NO: 222712 - DNA, 25 bp, probe
gagctggagacctacaaactgaagt

SEQ ID NO: 222713 - DNA, 25 bp, probe
gagctgtgacctgatgccaaatgag

SEQ ID NO: 222714 - DNA, 25 bp, probe
gagctggagctttgatggatgaata

SEQ ID NO: 222715 - DNA, 25 bp, probe
gagctggtgcatgatgacgaggata

SEQ ID NO: 222716 - DNA, 25 bp, probe
gagctgggcacatgaagcaggtcaa

SEQ ID NO: 222717 - DNA, 25 bp, probe
gagcagtgcaattatgaaggcgtaa

SEQ ID NO: 222718 - DNA, 25 bp, probe
gagcagtgcaattatgaaggcgtaa

SEQ ID NO: 222719 - DNA, 25 bp, probe
gagctgatgaaggtgcaagccttag

SEQ ID NO: 222720 - DNA, 25 bp, probe
gagcttgaagctcgacgtcattcag

SEQ ID NO: 222721 - DNA, 25 bp, probe
gagcttgaggctggagcccttgaaa

SEQ ID NO: 222722 - DNA, 25 bp, probe
gagctgaagcgcaggtcaattaaga

SEQ ID NO: 222723 - DNA, 25 bp, probe
gagctctatccagggtcataaaaaa

SEQ ID NO: 222724 - DNA, 25 bp, probe
ggatctaccgggctgcccggaaccg

SEQ ID NO: 222725 - DNA, 25 bp, probe
gagactaccaggagagccctgggct

SEQ ID NO: 222726 - DNA, 25 bp, probe
gagaagtccgagaaggtccttgtgg

SEQ ID NO: 222727 - DNA, 25 bp, probe
gagaaactgggttggacctagtggt

SEQ ID NO: 222728 - DNA, 25 bp, probe
gagctgaacgtgtttggacctaatg

SEQ ID NO: 222729 - DNA, 25 bp, probe
gagcgaattgtgtggagaactcagt

SEQ ID NO: 222730 - DNA, 25 bp, probe
gagccattttaacagacacatctgt

SEQ ID NO: 222731 - DNA, 25 bp, probe
gagccatgtagatagccactcacat

SEQ ID NO: 222732 - DNA, 25 bp, probe
gagccgagatggcaccactgcaatc

SEQ ID NO: 222733 - DNA, 25 bp, probe
gagccgagatcgcgccactgcactc

SEQ ID NO: 222734 - DNA, 25 bp, probe
gagccgagatcgtgccattgtactc

SEQ ID NO: 222735 - DNA, 25 bp, probe
gagccaggtgctttacatgtaactc

SEQ ID NO: 222736 - DNA, 25 bp, probe
gagccagcttttaacgttcagcctc

SEQ ID NO: 222737 - DNA, 25 bp, probe
gagccagcttttaacgttcagcctc

SEQ ID NO: 222738 - DNA, 25 bp, probe
gagccactacatttaggctgtagac

SEQ ID NO: 222739 - DNA, 25 bp, probe
gagccatctttgatcgggtgctgac

SEQ ID NO: 222740 - DNA, 25 bp, probe
gagaacatcgtgatcgccgaggact

SEQ ID NO: 222741 - DNA, 25 bp, probe
gagaacatcgtgatcgccgaggact

SEQ ID NO: 222742 - DNA, 25 bp, probe
gagaaaatggaagcgggagactaac

SEQ ID NO: 222743 - DNA, 25 bp, probe
gaggaaatcgcctccaggaaccagt

SEQ ID NO: 222744 - DNA, 25 bp, probe
gagcgaaagacctacgtgaatacca

SEQ ID NO: 222745 - DNA, 25 bp, probe
gagcggaaacaattcaagaagacag

SEQ ID NO: 222746 - DNA, 25 bp, probe
gagcgaaatcctttatatcaagtaa

SEQ ID NO: 222747 - DNA, 25 bp, probe
gagctgaagctggattattaaagtg

SEQ ID NO: 222748 - DNA, 25 bp, probe
gagctgaagctggattattaaagtg

SEQ ID NO: 222749 - DNA, 25 bp, probe
gagctgacgctggttttgtgtacag

SEQ ID NO: 222750 - DNA, 25 bp, probe
gagctgactcatgcttttgatgatc

SEQ ID NO: 222751 - DNA, 25 bp, probe
gagcatcatccagctttttttgtta

SEQ ID NO: 222752 - DNA, 25 bp, probe
gagcatctccacctcagtatggaag

SEQ ID NO: 222753 - DNA, 25 bp, probe
gagctgtcccctagtgagggactgt

SEQ ID NO: 222754 - DNA, 25 bp, probe
gagcttggagtctagtgcagggacc

SEQ ID NO: 222755 - DNA, 25 bp, probe
gagcctgagactgggtgccagcttc

SEQ ID NO: 222756 - DNA, 25 bp, probe
gagctcttggatgtggtcagctctc

SEQ ID NO: 222757 - DNA, 25 bp, probe
gagctctagtgagcacctgacctgc

SEQ ID NO: 222758 - DNA, 25 bp, probe
gagctgctggtgggatatccaccct

SEQ ID NO: 222759 - DNA, 25 bp, probe
gagcttgtatggttatggaggtctg

SEQ ID NO: 222760 - DNA, 25 bp, probe
gagcttgtagtgtttgttgttgtga

SEQ ID NO: 222761 - DNA, 25 bp, probe
gagcctgaagttttgacttctgctt

SEQ ID NO: 222762 - DNA, 25 bp, probe
gagcggaacattctagagtcagtga

SEQ ID NO: 222763 - DNA, 25 bp, probe
gagcggaacattctagagtcagtga

SEQ ID NO: 222764 - DNA, 25 bp, probe
gagctgtagaattctttgcagccag

SEQ ID NO: 222765 - DNA, 25 bp, probe
gagctgatgggtgcattaactgcac

SEQ ID NO: 222766 - DNA, 25 bp, probe
gagctgaaggctagcaaaccgagcg

SEQ ID NO: 222767 - DNA, 25 bp, probe
gagctgaacgggaagctcactggca

SEQ ID NO: 222768 - DNA, 25 bp, probe
gagcgaccagctgtcagctgcagtg

SEQ ID NO: 222769 - DNA, 25 bp, probe
gagccacaatgtgatagaggtggct

SEQ ID NO: 222770 - DNA, 25 bp, probe
gagccacaggtgcctggaggagctg

SEQ ID NO: 222771 - DNA, 25 bp, probe
gagcccagagagcatgtggcaggca

SEQ ID NO: 222772 - DNA, 25 bp, probe
gagcctcagaatcatttggagaaac

SEQ ID NO: 222773 - DNA, 25 bp, probe
gagccaagaggtttctgcggaagtc

SEQ ID NO: 222774 - DNA, 25 bp, probe
gagccaagaggtttctgcggaagtc

SEQ ID NO: 222775 - DNA, 25 bp, probe
gagccaagagttttccgagaggtga

SEQ ID NO: 222776 - DNA, 25 bp, probe
gaggggactttagaagaggtgtcaa

SEQ ID NO: 222777 - DNA, 25 bp, probe
gaggggactttagaagaggtgtcaa

SEQ ID NO: 222778 - DNA, 25 bp, probe
gagcgtggacgttggctacaggact

SEQ ID NO: 222779 - DNA, 25 bp, probe
gagcgtggacgatggaggcagtttt

SEQ ID NO: 222780 - DNA, 25 bp, probe
gagcgtggtccacggaggcagcaat

SEQ ID NO: 222781 - DNA, 25 bp, probe
gagcggaccgaccagctgaaagaaa

SEQ ID NO: 222782 - DNA, 25 bp, probe
gatggagaccggtggattcagtgca

SEQ ID NO: 222783 - DNA, 25 bp, probe
gagccgaacgacgggagtcgctgca

SEQ ID NO: 222784 - DNA, 25 bp, probe
gagccgccactggcgggaacgtcac

SEQ ID NO: 222785 - DNA, 25 bp, probe
gagccatgcacacaggtgcagacac

SEQ ID NO: 222786 - DNA, 25 bp, probe
gagcctcatcaataatgagatcccg

SEQ ID NO: 222787 - DNA, 25 bp, probe
gagccaaaaatattgagacccccaa

SEQ ID NO: 222788 - DNA, 25 bp, probe
gagtgcaaaaaagcccacgtccaga

SEQ ID NO: 222789 - DNA, 25 bp, probe
gagctaaaaataccctccagtgccc

SEQ ID NO: 222790 - DNA, 25 bp, probe
gagctaaaaataccctccagtgccc

SEQ ID NO: 222791 - DNA, 25 bp, probe
gagctgagaaaaacctccaaggccc

SEQ ID NO: 222792 - DNA, 25 bp, probe
gagctggcaagtacaccgccaaaga

SEQ ID NO: 222793 - DNA, 25 bp, probe
gagctgacactgttcagctgcctca

SEQ ID NO: 222794 - DNA, 25 bp, probe
gagctgagactagtcatgtctctct

SEQ ID NO: 222795 - DNA, 25 bp, probe
gagcatctgaagttgcagtcttgcg

SEQ ID NO: 222796 - DNA, 25 bp, probe
gagcctgagtgagtgggatggcatc

SEQ ID NO: 222797 - DNA, 25 bp, probe
gagcctggcagagtaccatgcgctc

SEQ ID NO: 222798 - DNA, 25 bp, probe
gagcccaagcacacatgcatggcat

SEQ ID NO: 222799 - DNA, 25 bp, probe
gagcacgaaacaacacagcgctgga

SEQ ID NO: 222800 - DNA, 25 bp, probe
gagccagataataaccgcagcacga

SEQ ID NO: 222801 - DNA, 25 bp, probe
gagccgatcattaagcgcaagacag

SEQ ID NO: 222802 - DNA, 25 bp, probe
gagccagactgtagcagtgaagaca

SEQ ID NO: 222803 - DNA, 25 bp, probe
gagccgggatcaggtacatgaggac

SEQ ID NO: 222804 - DNA, 25 bp, probe
gagccagaggacagcgagctggaga

SEQ ID NO: 222805 - DNA, 25 bp, probe
gagccagatggacctgagtgtcggt

SEQ ID NO: 222806 - DNA, 25 bp, probe
gagcgcaggaaggcgatctcctggt

SEQ ID NO: 222807 - DNA, 25 bp, probe
gagcgaggcctgaagcattactggt

SEQ ID NO: 222808 - DNA, 25 bp, probe
gagcgaggcctgaagcattactggt

SEQ ID NO: 222809 - DNA, 25 bp, probe
gagcctgaccatacacttaggaata

SEQ ID NO: 222810 - DNA, 25 bp, probe
gagctcacctacaacctagagaaga

SEQ ID NO: 222811 - DNA, 25 bp, probe
gagctcacctacaacctagagaaga

SEQ ID NO: 222812 - DNA, 25 bp, probe
gagctcacatctttaacagaagaaa

SEQ ID NO: 222813 - DNA, 25 bp, probe
gagccattgtgagaatcagcaagaa

SEQ ID NO: 222814 - DNA, 25 bp, probe
gagcgctttgcaataagcatcaagt

SEQ ID NO: 222815 - DNA, 25 bp, probe
gagcagcctcgaaactgtgacgatg

SEQ ID NO: 222816 - DNA, 25 bp, probe
gagcagtctggggacggtttggtca

SEQ ID NO: 222817 - DNA, 25 bp, probe
gagcactcaggagggttccttggtc

SEQ ID NO: 222818 - DNA, 25 bp, probe
gagctctcaggaagggccctgagga

SEQ ID NO: 222819 - DNA, 25 bp, probe
gagctccatcagtaagactcttgag

SEQ ID NO: 222820 - DNA, 25 bp, probe
gagctccatcagtaagactcttgag

SEQ ID NO: 222821 - DNA, 25 bp, probe
gagcatcccagctataaggctcttg

SEQ ID NO: 222822 - DNA, 25 bp, probe
gagctcccagcagaaggcacggagt

SEQ ID NO: 222823 - DNA, 25 bp, probe
gagcgccgagcgagcaggagcggcg

SEQ ID NO: 222824 - DNA, 25 bp, probe
gagcttccgctcagcggagaagctg

SEQ ID NO: 222825 - DNA, 25 bp, probe
gagctgcagcctgcggggaagcagc

SEQ ID NO: 222826 - DNA, 25 bp, probe
gagctatgcctcagtggcaacctca

SEQ ID NO: 222827 - DNA, 25 bp, probe
gagcctgtctcagggaattgcctgc

SEQ ID NO: 222828 - DNA, 25 bp, probe
gagccatggcgaaggcaatcacatt

SEQ ID NO: 222829 - DNA, 25 bp, probe
gagcctgggcaggacactccagggc

SEQ ID NO: 222830 - DNA, 25 bp, probe
gagccaggtgaggtctctctaagtc

SEQ ID NO: 222831 - DNA, 25 bp, probe
gagccaggtgaggtctctctaagtc

SEQ ID NO: 222832 - DNA, 25 bp, probe
gagccttgtgagatccttcacaggc

SEQ ID NO: 222833 - DNA, 25 bp, probe
gagccattgaggaatttacactgtc

SEQ ID NO: 222834 - DNA, 25 bp, probe
gagctcacgatggacttttccttgt

SEQ ID NO: 222835 - DNA, 25 bp, probe
gagccatcgtggtcatgtatgtcat

SEQ ID NO: 222836 - DNA, 25 bp, probe
gagctctcttagacatcttgtgata

SEQ ID NO: 222837 - DNA, 25 bp, probe
gagctctcttagacatcttgtgata

SEQ ID NO: 222838 - DNA, 25 bp, probe
gagcaccagaagtcatccttgagtt

SEQ ID NO: 222839 - DNA, 25 bp, probe
gagcccaagagttcatatctagcct

SEQ ID NO: 222840 - DNA, 25 bp, probe
gagcccaaatgcttagcagtgcccc

SEQ ID NO: 222841 - DNA, 25 bp, probe
gagcccaaatgcttagcagtgcccc

SEQ ID NO: 222842 - DNA, 25 bp, probe
gagcctcaaagcgtggaattgctgc

SEQ ID NO: 222843 - DNA, 25 bp, probe
gagcccatgaagcccaagatgctgg

SEQ ID NO: 222844 - DNA, 25 bp, probe
gagcccatgaagcccaagatgctgg

SEQ ID NO: 222845 - DNA, 25 bp, probe
gagctcgctgacgtgtacagattgt

SEQ ID NO: 222846 - DNA, 25 bp, probe
gagctcgcatttgtcaatgacagtt

SEQ ID NO: 222847 - DNA, 25 bp, probe
gagctcgcatttgtcaatgacagtt

SEQ ID NO: 222848 - DNA, 25 bp, probe
gagctgtgaactgccggaagtggat

SEQ ID NO: 222849 - DNA, 25 bp, probe
gagctggggttgtggaatgatcgat

SEQ ID NO: 222850 - DNA, 25 bp, probe
gagcgggtccttcggagatatctac

SEQ ID NO: 222851 - DNA, 25 bp, probe
gagcggccagactttggacagatta

SEQ ID NO: 222852 - DNA, 25 bp, probe
gagcggcacatagataggaagagtc

SEQ ID NO: 222853 - DNA, 25 bp, probe
gagcggcacagatgatggggagcgg

SEQ ID NO: 222854 - DNA, 25 bp, probe
gagctgctccgattcaggaggaagc

SEQ ID NO: 222855 - DNA, 25 bp, probe
gagctctggcaagctataggagaga

SEQ ID NO: 222856 - DNA, 25 bp, probe
gagcctgatcaagccagaggagaac

SEQ ID NO: 222857 - DNA, 25 bp, probe
gagcgtggaaggaagcgtgcagaac

SEQ ID NO: 222858 - DNA, 25 bp, probe
gagcggcgacggaagctggagaagg

SEQ ID NO: 222859 - DNA, 25 bp, probe
gagcgaggacagttacaatggccgg

SEQ ID NO: 222860 - DNA, 25 bp, probe
gagctgggatcgtccagaaagccgg

SEQ ID NO: 222861 - DNA, 25 bp, probe
gagctgggggctaaaagggctgtac

SEQ ID NO: 222862 - DNA, 25 bp, probe
gagcagagggtcatacacagggctg

SEQ ID NO: 222863 - DNA, 25 bp, probe
gagcagagggtcatacacagggctg

SEQ ID NO: 222864 - DNA, 25 bp, probe
gagcattggctgagagaccaggagg

SEQ ID NO: 222865 - DNA, 25 bp, probe
gagctgggcaaacgcccggagagct

SEQ ID NO: 222866 - DNA, 25 bp, probe
gagctgatccagtaacctcggagac

SEQ ID NO: 222867 - DNA, 25 bp, probe
gagctgatccagtaacctcggagac

SEQ ID NO: 222868 - DNA, 25 bp, probe
gagctgacatcacaaggtgctggca

SEQ ID NO: 222869 - DNA, 25 bp, probe
gagcagccatcaagaagtgatttct

SEQ ID NO: 222870 - DNA, 25 bp, probe
gagccctcagaatggagagtctccc

SEQ ID NO: 222871 - DNA, 25 bp, probe
gagcgccaagaagatgtcacttgcc

SEQ ID NO: 222872 - DNA, 25 bp, probe
gagcgccaagaagatgtcacttgcc

SEQ ID NO: 222873 - DNA, 25 bp, probe
gagcagccaggaagttgtagatttc

SEQ ID NO: 222874 - DNA, 25 bp, probe
gagctggagggcctgtgtgagttac

SEQ ID NO: 222875 - DNA, 25 bp, probe
gagctggaggccagcgtggtggtgc

SEQ ID NO: 222876 - DNA, 25 bp, probe
gagctggaggccagcagtcactcac

SEQ ID NO: 222877 - DNA, 25 bp, probe
gagctgcgaggccaaacagcagcta

SEQ ID NO: 222878 - DNA, 25 bp, probe
gagctgctgactgccaataacattc

SEQ ID NO: 222879 - DNA, 25 bp, probe
gagcgcgacttcgtgaagatcttcg

SEQ ID NO: 222880 - DNA, 25 bp, probe
gagcgcgacttcgtgaagatcttcg

SEQ ID NO: 222881 - DNA, 25 bp, probe
gagcctattctcacacatgatcttc

SEQ ID NO: 222882 - DNA, 25 bp, probe
gagcctattctcacacatgatcttc

SEQ ID NO: 222883 - DNA, 25 bp, probe
gagccgatgacaaaagcagatcttg

SEQ ID NO: 222884 - DNA, 25 bp, probe
gagcgtgagccagaagcagctgtgt

SEQ ID NO: 222885 - DNA, 25 bp, probe
gagcgtgagccagaagcagctgtgt

SEQ ID NO: 222886 - DNA, 25 bp, probe
gagcgtgagccagaagcagctgtgt

SEQ ID NO: 222887 - DNA, 25 bp, probe
gagcagtgaacctgagcatcatggc

SEQ ID NO: 222888 - DNA, 25 bp, probe
gagcagtgaacctgagcatcatggc

SEQ ID NO: 222889 - DNA, 25 bp, probe
gagcttgagcctttgatatcttgct

SEQ ID NO: 222890 - DNA, 25 bp, probe
gagctgagagcatttagcatatcgt

SEQ ID NO: 222891 - DNA, 25 bp, probe
gagctgagagcatttagcatatcgt

SEQ ID NO: 222892 - DNA, 25 bp, probe
gagctcgacaagttgcatcaagtgt

SEQ ID NO: 222893 - DNA, 25 bp, probe
gagcctgccaagatcacagatgttg

SEQ ID NO: 222894 - DNA, 25 bp, probe
gagcgcctcaagttcaatgtggctg

SEQ ID NO: 222895 - DNA, 25 bp, probe
gagctgcccagcaagcaaatgggcg

SEQ ID NO: 222896 - DNA, 25 bp, probe
gagctgagccagaacgagcagaagc

SEQ ID NO: 222897 - DNA, 25 bp, probe
gagctgcagccaggttggcatcaaa

SEQ ID NO: 222898 - DNA, 25 bp, probe
gagccccagctgacatggaaataca

SEQ ID NO: 222899 - DNA, 25 bp, probe
gagccctgcagaatctcagagcaaa

SEQ ID NO: 222900 - DNA, 25 bp, probe
gagcggtggcaaagcagcagaaaga

SEQ ID NO: 222901 - DNA, 25 bp, probe
gagcgagctctcaaagcaggagaag

SEQ ID NO: 222902 - DNA, 25 bp, probe
gagcagatcctcaaggcggaatatg

SEQ ID NO: 222903 - DNA, 25 bp, probe
gagcagtgatttggggtgagtaggc

SEQ ID NO: 222904 - DNA, 25 bp, probe
gagcttatttgaagggatctacaca

SEQ ID NO: 222905 - DNA, 25 bp, probe
gagcctactctcaagaggaaatcac

SEQ ID NO: 222906 - DNA, 25 bp, probe
gagctccatcatcaaatggccaatc

SEQ ID NO: 222907 - DNA, 25 bp, probe
gagccctctcgaacatgcaaagatc

SEQ ID NO: 222908 - DNA, 25 bp, probe
gagccccatcggccaagaatacttg

SEQ ID NO: 222909 - DNA, 25 bp, probe
gagccgcagacctactaaaacatga

SEQ ID NO: 222910 - DNA, 25 bp, probe
gagctaatagccactagcagaacaa

SEQ ID NO: 222911 - DNA, 25 bp, probe
gagctaaaggctttgtctgcagaag

SEQ ID NO: 222912 - DNA, 25 bp, probe
gagctgttcagagtaggtggcgacg

SEQ ID NO: 222913 - DNA, 25 bp, probe
gagcgttgaggccaaggagcgcacg

SEQ ID NO: 222914 - DNA, 25 bp, probe
gagcttctgagggatgcaggtggct

SEQ ID NO: 222915 - DNA, 25 bp, probe
gagctacagagggcaccatgtggct

SEQ ID NO: 222916 - DNA, 25 bp, probe
gagctacagagggcaccatgtggct

SEQ ID NO: 222917 - DNA, 25 bp, probe
gagctgtacgattacatcagtgagc

SEQ ID NO: 222918 - DNA, 25 bp, probe
gagcaaacaacaacaccatggatta

SEQ ID NO: 222919 - DNA, 25 bp, probe
gagcaaacaacaacaccatggatta

SEQ ID NO: 222920 - DNA, 25 bp, probe
gagtcaagcatctaagcccaggaca

SEQ ID NO: 222921 - DNA, 25 bp, probe
gagctgcaactcaatgatgccgagt

SEQ ID NO: 222922 - DNA, 25 bp, probe
gagcgcatcagtgttctctgaggtc

SEQ ID NO: 222923 - DNA, 25 bp, probe
gagctgatataaattctgtgggtcc

SEQ ID NO: 222924 - DNA, 25 bp, probe
gagctgatataaattctgtgggtcc

SEQ ID NO: 222925 - DNA, 25 bp, probe
gagcttatacacatcaggttgtaac

SEQ ID NO: 222926 - DNA, 25 bp, probe
gagcttatacatatcaggttgcaac

SEQ ID NO: 222927 - DNA, 25 bp, probe
gagctcctacagaagcagccagtga

SEQ ID NO: 222928 - DNA, 25 bp, probe
gagctcctacagaagcagccagtga

SEQ ID NO: 222929 - DNA, 25 bp, probe
gagcccatcactaatatccagtgta

SEQ ID NO: 222930 - DNA, 25 bp, probe
gagcgcctatctcattcagaatatt

SEQ ID NO: 222931 - DNA, 25 bp, probe
gagcgcctatctcattcagaatatt

SEQ ID NO: 222932 - DNA, 25 bp, probe
gagctctggccacagcacagaattt

SEQ ID NO: 222933 - DNA, 25 bp, probe
gagcacttcacacagacaagtggct

SEQ ID NO: 222934 - DNA, 25 bp, probe
gagcctggcaaccagcaagagctgg

SEQ ID NO: 222935 - DNA, 25 bp, probe
gagcgtggctaccaggagagcaggt

SEQ ID NO: 222936 - DNA, 25 bp, probe
gagccggctccggcagtgagaggat

SEQ ID NO: 222937 - DNA, 25 bp, probe
gagccgtgcctacagtgtggaagac

SEQ ID NO: 222938 - DNA, 25 bp, probe
gagcggacctcggatggggagagac

SEQ ID NO: 222939 - DNA, 25 bp, probe
gagcggacctcggatggggagagac

SEQ ID NO: 222940 - DNA, 25 bp, probe
gagctgccccacggtggggagggct

SEQ ID NO: 222941 - DNA, 25 bp, probe
gagcactggtctgtgggcaaggggc

SEQ ID NO: 222942 - DNA, 25 bp, probe
gagctgcagagtcttcggcagaagc

SEQ ID NO: 222943 - DNA, 25 bp, probe
gagctgcagagtcttcggcagaagc

SEQ ID NO: 222944 - DNA, 25 bp, probe
gagctggagctggtcattacgagga

SEQ ID NO: 222945 - DNA, 25 bp, probe
gagctggagctgatgtttgggtgcc

SEQ ID NO: 222946 - DNA, 25 bp, probe
gagctgggctgtatttggagatcat

SEQ ID NO: 222947 - DNA, 25 bp, probe
gagctaggatgtatggtgtaggtgt

SEQ ID NO: 222948 - DNA, 25 bp, probe
gagcccagtgtagttgtgtggcgtg

SEQ ID NO: 222949 - DNA, 25 bp, probe
gagcgccgtgtcctatgaggacagg

SEQ ID NO: 222950 - DNA, 25 bp, probe
gagcgtcgtgtcacagtggacagat

SEQ ID NO: 222951 - DNA, 25 bp, probe
gagctccagtttacctaaatgttca

SEQ ID NO: 222952 - DNA, 25 bp, probe
gagcatgggttcatcctattctttc

SEQ ID NO: 222953 - DNA, 25 bp, probe
gagcatgggttcatcctattctttc

SEQ ID NO: 222954 - DNA, 25 bp, probe
gagcttgagctgtctgaactatttt

SEQ ID NO: 222955 - DNA, 25 bp, probe
gagctctgtctgatatcactgatga

SEQ ID NO: 222956 - DNA, 25 bp, probe
gagctgactctgatgccagtatgga

SEQ ID NO: 222957 - DNA, 25 bp, probe
gagctgacatctattctgttggtct

SEQ ID NO: 222958 - DNA, 25 bp, probe
gagctgacatctattctgttggtct

SEQ ID NO: 222959 - DNA, 25 bp, probe
gagctgacttcctcatgtgttactc

SEQ ID NO: 222960 - DNA, 25 bp, probe
gagcttctacaatctgatataaatc

SEQ ID NO: 222961 - DNA, 25 bp, probe
gagcttcgtcaaagaattcaaatcc

SEQ ID NO: 222962 - DNA, 25 bp, probe
gagcttgtccggaagattgcaaata

SEQ ID NO: 222963 - DNA, 25 bp, probe
gagctgtgtagggagatattcaaca

SEQ ID NO: 222964 - DNA, 25 bp, probe
gagcttcattgggagttcctagcaa

SEQ ID NO: 222965 - DNA, 25 bp, probe
gagcatccatagatatattcctaga

SEQ ID NO: 222966 - DNA, 25 bp, probe
gagccctaagttgtcactcagttta

SEQ ID NO: 222967 - DNA, 25 bp, probe
gagctcgacaaaatttactcacatt

SEQ ID NO: 222968 - DNA, 25 bp, probe
gagccgccaaaagtgtcatcacaag

SEQ ID NO: 222969 - DNA, 25 bp, probe
gagccgctataggacgcttcggaat

SEQ ID NO: 222970 - DNA, 25 bp, probe
gagccgctataggacgcttcggaat

SEQ ID NO: 222971 - DNA, 25 bp, probe
gagcccatgaaggaacttagcagca

SEQ ID NO: 222972 - DNA, 25 bp, probe
gagcgcctagggcaacatgagcagc

SEQ ID NO: 222973 - DNA, 25 bp, probe
gagcatcatgtacaggaaattcacg

SEQ ID NO: 222974 - DNA, 25 bp, probe
gagcgtgctgataatggatcaactc

SEQ ID NO: 222975 - DNA, 25 bp, probe
gagcgtgctgataatggatcaactc

SEQ ID NO: 222976 - DNA, 25 bp, probe
gagcgcatgtatgacgtgacaccgc

SEQ ID NO: 222977 - DNA, 25 bp, probe
gagcagctataggaccagcaaccat

SEQ ID NO: 222978 - DNA, 25 bp, probe
gagcttctagtaattgaaccatggg

SEQ ID NO: 222979 - DNA, 25 bp, probe
gagctccaaggaattgtctcctggg

SEQ ID NO: 222980 - DNA, 25 bp, probe
gagctgcgcaaactgttggtcgctt

SEQ ID NO: 222981 - DNA, 25 bp, probe
gagctgcagagctagtgttcggccc

SEQ ID NO: 222982 - DNA, 25 bp, probe
gagctatgtgcatcgtgatctggcc

SEQ ID NO: 222983 - DNA, 25 bp, probe
gagctttctagaatatttgcctaat

SEQ ID NO: 222984 - DNA, 25 bp, probe
gagcccctatgaaaagaccagaaac

SEQ ID NO: 222985 - DNA, 25 bp, probe
gagcccctatgaaaagaccagaaac

SEQ ID NO: 222986 - DNA, 25 bp, probe
gagccctttgaactttccaaagtgc

SEQ ID NO: 222987 - DNA, 25 bp, probe
gatgcccgggaccttgtcaaaaagt

SEQ ID NO: 222988 - DNA, 25 bp, probe
gagcccgagtactttgagcaagtga

SEQ ID NO: 222989 - DNA, 25 bp, probe
gagctcctgaggaatgtctgggaag

SEQ ID NO: 222990 - DNA, 25 bp, probe
gagctcctgaacttcttgtgggaga

SEQ ID NO: 222991 - DNA, 25 bp, probe
gagcatccgaaagcggcatcggtga

SEQ ID NO: 222992 - DNA, 25 bp, probe
gagcatccgaaagcggcatcggtga

SEQ ID NO: 222993 - DNA, 25 bp, probe
gagctgcagcgatacatcgaagggc

SEQ ID NO: 222994 - DNA, 25 bp, probe
gagctgaggaatttgcaacgagaga

SEQ ID NO: 222995 - DNA, 25 bp, probe
gagctgtgggaagccacagcagaaa

SEQ ID NO: 222996 - DNA, 25 bp, probe
gagctgtgaagatgtcccggtagca

SEQ ID NO: 222997 - DNA, 25 bp, probe
gagctggaaaaaaacgcgtatctac

SEQ ID NO: 222998 - DNA, 25 bp, probe
gagctggcgaagaagtcctggtttg

SEQ ID NO: 222999 - DNA, 25 bp, probe
gagctcgccaataagcttcttggtt

SEQ ID NO: 223000 - DNA, 25 bp, probe
gagcattctcaaaggctttagccct

SEQ ID NO: 223001 - DNA, 25 bp, probe
gattatccggtggctttagccgtgc

SEQ ID NO: 223002 - DNA, 25 bp, probe
tgagtaccagttctgttaccaggcg

SEQ ID NO: 223003 - DNA, 25 bp, probe
gagctaccttcagctattatgccag

SEQ ID NO: 223004 - DNA, 25 bp, probe
gagctacgagctgcctgacggccag

SEQ ID NO: 223005 - DNA, 25 bp, probe
gagcggcgagtggtggaaggcgcag

SEQ ID NO: 223006 - DNA, 25 bp, probe
gagcggcaggaggtggagctgccca

SEQ ID NO: 223007 - DNA, 25 bp, probe
gagctggaggagttggaccacactg

SEQ ID NO: 223008 - DNA, 25 bp, probe
gagctggaggcatttgcacaccgcc

SEQ ID NO: 223009 - DNA, 25 bp, probe
gagctggaggcatttgcacaccgcc

SEQ ID NO: 223010 - DNA, 25 bp, probe
gagcggatggagttgctgcaggcag

SEQ ID NO: 223011 - DNA, 25 bp, probe
gagcggagtgacagtaagcaggaca

SEQ ID NO: 223012 - DNA, 25 bp, probe
gagctggcctagcgatggagggaca

SEQ ID NO: 223013 - DNA, 25 bp, probe
gagcttgtgttgtgctgaagggaca

SEQ ID NO: 223014 - DNA, 25 bp, probe
gagctgctggtattttgggaggagt

SEQ ID NO: 223015 - DNA, 25 bp, probe
gagaggttttctagggcacatactg

SEQ ID NO: 223016 - DNA, 25 bp, probe
gagcagtattttcattatcgctacg

SEQ ID NO: 223017 - DNA, 25 bp, probe
gagctttttgtcactatctgtcaag

SEQ ID NO: 223018 - DNA, 25 bp, probe
gagctttttcttctgttaaaattat

SEQ ID NO: 223019 - DNA, 25 bp, probe
gagaacttccttctggataccaatt

SEQ ID NO: 223020 - DNA, 25 bp, probe
gagacttcaaccaagtggttcgatt

SEQ ID NO: 223021 - DNA, 25 bp, probe
gagacttcaaccaagtggttcgatt

SEQ ID NO: 223022 - DNA, 25 bp, probe
gagcactgtgcaagccaaatggttc

SEQ ID NO: 223023 - DNA, 25 bp, probe
gagcactgtgcaagccaaatggttc

SEQ ID NO: 223024 - DNA, 25 bp, probe
gagcatgtgctccagcaagtctgag

SEQ ID NO: 223025 - DNA, 25 bp, probe
gagcatgtgctccagcaagtctgag

SEQ ID NO: 223026 - DNA, 25 bp, probe
gagcatctgcacagcaagctgtcgg

SEQ ID NO: 223027 - DNA, 25 bp, probe
gagcaatacatcgaagcatgtctca

SEQ ID NO: 223028 - DNA, 25 bp, probe
gagctgaacatctcaggtgccatgt

SEQ ID NO: 223029 - DNA, 25 bp, probe
gagctgaggaggaggctgcatcact

SEQ ID NO: 223030 - DNA, 25 bp, probe
gagctgctggcgcagcagggctacg

SEQ ID NO: 223031 - DNA, 25 bp, probe
gagctgagtgtgcatggggtcaccc

SEQ ID NO: 223032 - DNA, 25 bp, probe
gagctgtgatgtatggagtgttggc

SEQ ID NO: 223033 - DNA, 25 bp, probe
gagcatttcatttggagtgattatg

SEQ ID NO: 223034 - DNA, 25 bp, probe
gagcttgttacaggagtctttggaa

SEQ ID NO: 223035 - DNA, 25 bp, probe
gagcttgttacaggagtctttggaa

SEQ ID NO: 223036 - DNA, 25 bp, probe
gagctagttacaaagtgcttgttca

SEQ ID NO: 223037 - DNA, 25 bp, probe
gagctacgtagttcagtggctgtcc

SEQ ID NO: 223038 - DNA, 25 bp, probe
gagctcaatgtcaccgtggtgacct

SEQ ID NO: 223039 - DNA, 25 bp, probe
gagctgcaaatgccctctctggtga

SEQ ID NO: 223040 - DNA, 25 bp, probe
gagctgatcataggcggcctggata

SEQ ID NO: 223041 - DNA, 25 bp, probe
gagctatatacggctgttgcagcag

SEQ ID NO: 223042 - DNA, 25 bp, probe
gagcagctaccacatgttgcatgag

SEQ ID NO: 223043 - DNA, 25 bp, probe
gagctgttcctcgagttgaatgggg

SEQ ID NO: 223044 - DNA, 25 bp, probe
gagcagttctccactgtgaagggcg

SEQ ID NO: 223045 - DNA, 25 bp, probe
gagagggctgtgcccgtaaggggaa

SEQ ID NO: 223046 - DNA, 25 bp, probe
gagcagggaggggggcaaggggaag

SEQ ID NO: 223047 - DNA, 25 bp, probe
gagcgggcaggggactcagaggctc

SEQ ID NO: 223048 - DNA, 25 bp, probe
gagcagttagggaccgcaggctgcc

SEQ ID NO: 223049 - DNA, 25 bp, probe
gagcggaaggtgacgcgcatggtgt

SEQ ID NO: 223050 - DNA, 25 bp, probe
gagcccacaggattcagcagcatgg

SEQ ID NO: 223051 - DNA, 25 bp, probe
gagctgccaaggtggcacaggggcc

SEQ ID NO: 223052 - DNA, 25 bp, probe
gagcgatgaaggtggcaaagtgctg

SEQ ID NO: 223053 - DNA, 25 bp, probe
gagctgtgaagccttgagagtaatg

SEQ ID NO: 223054 - DNA, 25 bp, probe
gagctgtgaagccttgagagtaatg

SEQ ID NO: 223055 - DNA, 25 bp, probe
gagctcatgatccactgctggaaaa

SEQ ID NO: 223056 - DNA, 25 bp, probe
gagctcatgatccactgctggaaaa

SEQ ID NO: 223057 - DNA, 25 bp, probe
gagctcatggcccatggccaagaga

SEQ ID NO: 223058 - DNA, 25 bp, probe
gagtgcatcgccatgagcaacagca

SEQ ID NO: 223059 - DNA, 25 bp, probe
gagctcatcctcatggaagagatcc

SEQ ID NO: 223060 - DNA, 25 bp, probe
gagctcacactcagtgtttgcactc

SEQ ID NO: 223061 - DNA, 25 bp, probe
gagctctcactcactgataatgctt

SEQ ID NO: 223062 - DNA, 25 bp, probe
gagctcatcatcagtcttaatattc

SEQ ID NO: 223063 - DNA, 25 bp, probe
gagctcatcatcagtcttaatattc

SEQ ID NO: 223064 - DNA, 25 bp, probe
gagctgacagtgcttctacacattt

SEQ ID NO: 223065 - DNA, 25 bp, probe
gagctgtgcactcacttcacaaatt

SEQ ID NO: 223066 - DNA, 25 bp, probe
gagcttgatctgggcattccagaga

SEQ ID NO: 223067 - DNA, 25 bp, probe
gagctcatggagcagttccagaagg

SEQ ID NO: 223068 - DNA, 25 bp, probe
gagctttgggcactcccaataatga

SEQ ID NO: 223069 - DNA, 25 bp, probe
gagcttctggtgctgtccatttaat

SEQ ID NO: 223070 - DNA, 25 bp, probe
gagctttcgtgcactttttacataa

SEQ ID NO: 223071 - DNA, 25 bp, probe
gagctttcgtgcactttttacataa

SEQ ID NO: 223072 - DNA, 25 bp, probe
gagcttatcgtgaacttgtcctctt

SEQ ID NO: 223073 - DNA, 25 bp, probe
gagcttcggttattgtcatccattg

SEQ ID NO: 223074 - DNA, 25 bp, probe
gagctttgttagtttttcatgtgta

SEQ ID NO: 223075 - DNA, 25 bp, probe
gagctgtttctattttatttattga

SEQ ID NO: 223076 - DNA, 25 bp, probe
gagctccttcacttaaaaatcagct

SEQ ID NO: 223077 - DNA, 25 bp, probe
gagatgtacctcttaaacctcgtca

SEQ ID NO: 223078 - DNA, 25 bp, probe
gagcaggaccacttcaaaactggta

SEQ ID NO: 223079 - DNA, 25 bp, probe
gagctgagagctacattataagaat

SEQ ID NO: 223080 - DNA, 25 bp, probe
gagcgagactccatctcaaaaaaaa

SEQ ID NO: 223081 - DNA, 25 bp, probe
gagcgagatccctccaaaatcaagt

SEQ ID NO: 223082 - DNA, 25 bp, probe
gagaatgatccctactcaaaattta

SEQ ID NO: 223083 - DNA, 25 bp, probe
gagtcaacagtgtaactaaatttct

SEQ ID NO: 223084 - DNA, 25 bp, probe
gagctaagggtaagggactgttctg

SEQ ID NO: 223085 - DNA, 25 bp, probe
gagctatcaggagaaagcttggttc

SEQ ID NO: 223086 - DNA, 25 bp, probe
gagctaaataaattactgttgtctt

SEQ ID NO: 223087 - DNA, 25 bp, probe
gagctcacaaaatgatggcttcttc

SEQ ID NO: 223088 - DNA, 25 bp, probe
gagctcacaaaatgatggcttcttc

SEQ ID NO: 223089 - DNA, 25 bp, probe
gagctacctcattgaatgtttttgg

SEQ ID NO: 223090 - DNA, 25 bp, probe
gagaaccttggaatcgtctttggac

SEQ ID NO: 223091 - DNA, 25 bp, probe
gagaaccttggaatcgtctttggac

SEQ ID NO: 223092 - DNA, 25 bp, probe
gagaaccttggaatcgtctttggac

SEQ ID NO: 223093 - DNA, 25 bp, probe
gagaaccttggaatcgtctttggac

SEQ ID NO: 223094 - DNA, 25 bp, probe
gagaaccgtgacatcagcgtagtgt

SEQ ID NO: 223095 - DNA, 25 bp, probe
gagagaacagattcgttggaagctt

SEQ ID NO: 223096 - DNA, 25 bp, probe
gagaaaggcagctggttaagtttag

SEQ ID NO: 223097 - DNA, 25 bp, probe
gagaagggcgtttgctttggtttca

SEQ ID NO: 223098 - DNA, 25 bp, probe
gagacgggcgctagatttggggctc

SEQ ID NO: 223099 - DNA, 25 bp, probe
gagcaagttgttaatttgtggagta

SEQ ID NO: 223100 - DNA, 25 bp, probe
gagctctttgaccgtattgtggaaa

SEQ ID NO: 223101 - DNA, 25 bp, probe
gagtctaataccagcttgggaaaaa

SEQ ID NO: 223102 - DNA, 25 bp, probe
gagacgaaattcagattaggagata

SEQ ID NO: 223103 - DNA, 25 bp, probe
gagctgcaaaatccggtgtaggcac

SEQ ID NO: 223104 - DNA, 25 bp, probe
ggcaaaagatggtgttagtcccctt

SEQ ID NO: 223105 - DNA, 25 bp, probe
gagcagcagaagtgggttagtcggt

SEQ ID NO: 223106 - DNA, 25 bp, probe
gagcagcagaagtgggttagtcggt

SEQ ID NO: 223107 - DNA, 25 bp, probe
gagcagctggacagaggtttctggg

SEQ ID NO: 223108 - DNA, 25 bp, probe
gagcttggcagaagatgagtttgtg

SEQ ID NO: 223109 - DNA, 25 bp, probe
gagctcatggcgaagagacttgggc

SEQ ID NO: 223110 - DNA, 25 bp, probe
gagctgctgagcctaaagactggag

SEQ ID NO: 223111 - DNA, 25 bp, probe
gagctgctgagcctaaagactggag

SEQ ID NO: 223112 - DNA, 25 bp, probe
gagctgcagagcccaaagaggtggc

SEQ ID NO: 223113 - DNA, 25 bp, probe
gagcgaggccagcctagaggtggct

SEQ ID NO: 223114 - DNA, 25 bp, probe
gagcggggctgacagcaggtgtgct

SEQ ID NO: 223115 - DNA, 25 bp, probe
gagcaggaggccctacagacatttc

SEQ ID NO: 223116 - DNA, 25 bp, probe
gagcagtgcacgacctaagacttca

SEQ ID NO: 223117 - DNA, 25 bp, probe
gagcaggaggtactaaatgcaatag

SEQ ID NO: 223118 - DNA, 25 bp, probe
gagcagcgaggagtcagaaagcagt

SEQ ID NO: 223119 - DNA, 25 bp, probe
gagcagcgaggagtcagaaagcagt

SEQ ID NO: 223120 - DNA, 25 bp, probe
gagcattaagagacagcaacaagcc

SEQ ID NO: 223121 - DNA, 25 bp, probe
gagcattaagagacagcaacaagcc

SEQ ID NO: 223122 - DNA, 25 bp, probe
gagcttacaggctgagccaagccca

SEQ ID NO: 223123 - DNA, 25 bp, probe
gagcattagcggagtgcgcatggcc

SEQ ID NO: 223124 - DNA, 25 bp, probe
gagcatctactggtttgtgctctac

SEQ ID NO: 223125 - DNA, 25 bp, probe
gagcattgtctgggtgtttctgcgc

SEQ ID NO: 223126 - DNA, 25 bp, probe
gagcattgtctgggtgtttctgcgc

SEQ ID NO: 223127 - DNA, 25 bp, probe
gagcaggtgctgaagttcgtcatgg

SEQ ID NO: 223128 - DNA, 25 bp, probe
gagctcctagaagttggtcatgcta

SEQ ID NO: 223129 - DNA, 25 bp, probe
gagctcaggaaggttatgtcatcta

SEQ ID NO: 223130 - DNA, 25 bp, probe
gagctccaaagcaattatgatgtct

SEQ ID NO: 223131 - DNA, 25 bp, probe
gagctccataagaactgtgctgact

SEQ ID NO: 223132 - DNA, 25 bp, probe
gagctccataagaactgtgctgact

SEQ ID NO: 223133 - DNA, 25 bp, probe
gagctcctgaagcacaagttcatca

SEQ ID NO: 223134 - DNA, 25 bp, probe
gagctggctggacagaaggatgagc

SEQ ID NO: 223135 - DNA, 25 bp, probe
gagcggctggaacgattggagatcc

SEQ ID NO: 223136 - DNA, 25 bp, probe
gagcaagctggaagtgtatgccaat

SEQ ID NO: 223137 - DNA, 25 bp, probe
gagcataggtagcttgtccaaggtc

SEQ ID NO: 223138 - DNA, 25 bp, probe
gagctcagggagcctgagcttcagg

SEQ ID NO: 223139 - DNA, 25 bp, probe
gagctgaccaagccagagattgcgg

SEQ ID NO: 223140 - DNA, 25 bp, probe
gagctgaccaagccagagattgcgg

SEQ ID NO: 223141 - DNA, 25 bp, probe
gagctgaccaagaccatatctcgac

SEQ ID NO: 223142 - DNA, 25 bp, probe
gagctgacaacacttttccatgacc

SEQ ID NO: 223143 - DNA, 25 bp, probe
gagcatatggaatctttctaaccct

SEQ ID NO: 223144 - DNA, 25 bp, probe
gagcatatggaatctttctaaccct

SEQ ID NO: 223145 - DNA, 25 bp, probe
gagcacctgaagttattttagccct

SEQ ID NO: 223146 - DNA, 25 bp, probe
gagcacctgaagttattttagccct

SEQ ID NO: 223147 - DNA, 25 bp, probe
gagcacgatgactctgagtttgagc

SEQ ID NO: 223148 - DNA, 25 bp, probe
gagaacgtcatcgggcttctggacg

SEQ ID NO: 223149 - DNA, 25 bp, probe
gagaacgtattggtgtttgtacagt

SEQ ID NO: 223150 - DNA, 25 bp, probe
gagctatttttggttttgtccttca

SEQ ID NO: 223151 - DNA, 25 bp, probe
gagcattttcatggagtttgttcct

SEQ ID NO: 223152 - DNA, 25 bp, probe
gagcagtttaaggctgccttctcct

SEQ ID NO: 223153 - DNA, 25 bp, probe
gagagttctcggagccatttgtaca

SEQ ID NO: 223154 - DNA, 25 bp, probe
gatcaatttcatcttccttttcaac

SEQ ID NO: 223155 - DNA, 25 bp, probe
gagcattttgctcctaccaaggatc

SEQ ID NO: 223156 - DNA, 25 bp, probe
gagcatgttctcgccaacaatgatg

SEQ ID NO: 223157 - DNA, 25 bp, probe
gagctgttcacagccagactggcac

SEQ ID NO: 223158 - DNA, 25 bp, probe
gagctgcgtttggacaacaggcaca

SEQ ID NO: 223159 - DNA, 25 bp, probe
gagcttgttatcgcaaatgctgcac

SEQ ID NO: 223160 - DNA, 25 bp, probe
gagcttgtgttctcagaatctgatg

SEQ ID NO: 223161 - DNA, 25 bp, probe
gagcattgggactccatatcgctac

SEQ ID NO: 223162 - DNA, 25 bp, probe
gagcatttagactctcgactggcca

SEQ ID NO: 223163 - DNA, 25 bp, probe
gagcatctttgactgtgtctacacg

SEQ ID NO: 223164 - DNA, 25 bp, probe
gagcattgatattggtgtgcccaca

SEQ ID NO: 223165 - DNA, 25 bp, probe
gagcattgatattggtgtgcccaca

SEQ ID NO: 223166 - DNA, 25 bp, probe
gagcattcagaattctgtcctcact

SEQ ID NO: 223167 - DNA, 25 bp, probe
gagcattcagaattctgtcctcact

SEQ ID NO: 223168 - DNA, 25 bp, probe
gagcattagtaactgagcactagag

SEQ ID NO: 223169 - DNA, 25 bp, probe
gagctgtcagtttgggcctgacgtc

SEQ ID NO: 223170 - DNA, 25 bp, probe
gagctgtcagtttgggcctgacgtc

SEQ ID NO: 223171 - DNA, 25 bp, probe
gagctgtgcaaaatgggcttgccct

SEQ ID NO: 223172 - DNA, 25 bp, probe
gagctcagaaacagctgtcgcctca

SEQ ID NO: 223173 - DNA, 25 bp, probe
gagctcagaaacagctgtcgcctca

SEQ ID NO: 223174 - DNA, 25 bp, probe
gagcatcagaatgaactctatgaat

SEQ ID NO: 223175 - DNA, 25 bp, probe
gagctctgagattaaggctgaaatt

SEQ ID NO: 223176 - DNA, 25 bp, probe
gagctgtggaaatggtgagcgctgt

SEQ ID NO: 223177 - DNA, 25 bp, probe
gagctgtggaaagaggaccctcagg

SEQ ID NO: 223178 - DNA, 25 bp, probe
gagctgtggaaagaggaccctcagg

SEQ ID NO: 223179 - DNA, 25 bp, probe
gagcttccagaaaagcgtcccacat

SEQ ID NO: 223180 - DNA, 25 bp, probe
gagctctctaaaaggcagcaaccca

SEQ ID NO: 223181 - DNA, 25 bp, probe
gagtcatctaagataccaactttac

SEQ ID NO: 223182 - DNA, 25 bp, probe
gagtcatctaagataccaactttac

SEQ ID NO: 223183 - DNA, 25 bp, probe
gagctatcttaagaccaatatctct

SEQ ID NO: 223184 - DNA, 25 bp, probe
gagaaaaaactaccaccactcatta

SEQ ID NO: 223185 - DNA, 25 bp, probe
gagtaaatgaactggaccaaatctc

SEQ ID NO: 223186 - DNA, 25 bp, probe
gagctgaagcagaaactaactaaac

SEQ ID NO: 223187 - DNA, 25 bp, probe
gagcagaagtaaactactgtacata

SEQ ID NO: 223188 - DNA, 25 bp, probe
gagaccctaaacaacgttctatctg

SEQ ID NO: 223189 - DNA, 25 bp, probe
gagaccccaggaccaaggtccatac

SEQ ID NO: 223190 - DNA, 25 bp, probe
tgaaaactactacaaggcccagacc

SEQ ID NO: 223191 - DNA, 25 bp, probe
gagaagggactcctgaaagccctga

SEQ ID NO: 223192 - DNA, 25 bp, probe
gagtcagggagccctggggtttcca

SEQ ID NO: 223193 - DNA, 25 bp, probe
gagaatgggagtctagtggattttc

SEQ ID NO: 223194 - DNA, 25 bp, probe
gagaagggggtgagtggtgccagtt

SEQ ID NO: 223195 - DNA, 25 bp, probe
gagaaagagggtttggaagccagat

SEQ ID NO: 223196 - DNA, 25 bp, probe
gagaatttgggtttggcagataaat

SEQ ID NO: 223197 - DNA, 25 bp, probe
gagaaatagaggatttggcaaaaga

SEQ ID NO: 223198 - DNA, 25 bp, probe
gagcaaaaggcggttcgtcttcaag

SEQ ID NO: 223199 - DNA, 25 bp, probe
gagcaaaaggcggttcgtcttcaag

SEQ ID NO: 223200 - DNA, 25 bp, probe
gataaacggcacggcgcttttaaca

SEQ ID NO: 223201 - DNA, 25 bp, probe
gataaacggcacggcgcttttaaca

SEQ ID NO: 223202 - DNA, 25 bp, probe
gataactgtggaaaccctttcagat

SEQ ID NO: 223203 - DNA, 25 bp, probe
tgaaatctaggaaaattattctata

SEQ ID NO: 223204 - DNA, 25 bp, probe
gagaattaagaagacgcttgccaag

SEQ ID NO: 223205 - DNA, 25 bp, probe
gagagtaaaacgttctgttacaaga

SEQ ID NO: 223206 - DNA, 25 bp, probe
gagagtaaaacgttctgttacaaga

SEQ ID NO: 223207 - DNA, 25 bp, probe
gtgggttctcaatacggtaccaaag

SEQ ID NO: 223208 - DNA, 25 bp, probe
gttggacccagatatgggaacccca

SEQ ID NO: 223209 - DNA, 25 bp, probe
gatggaaccaaatagaaaaactcca

SEQ ID NO: 223210 - DNA, 25 bp, probe
ggataacccaaacaaaaatgactct

SEQ ID NO: 223211 - DNA, 25 bp, probe
gagaccaaccaatgtattagagatg

SEQ ID NO: 223212 - DNA, 25 bp, probe
gagagtcaaccagtagtgaaaggca

SEQ ID NO: 223213 - DNA, 25 bp, probe
gagagacaacactgaaaagggaacg

SEQ ID NO: 223214 - DNA, 25 bp, probe
gagaaggacccgaataaaagataca

SEQ ID NO: 223215 - DNA, 25 bp, probe
gagaaggaaccacatgcagacaaag

SEQ ID NO: 223216 - DNA, 25 bp, probe
gagctcattaactaccatcagcaca

SEQ ID NO: 223217 - DNA, 25 bp, probe
gagctatttgcattcatcagtcaca

SEQ ID NO: 223218 - DNA, 25 bp, probe
gagctcaacaataatcagtacaaca

SEQ ID NO: 223219 - DNA, 25 bp, probe
gagctcaacaataatcagtacaaca

SEQ ID NO: 223220 - DNA, 25 bp, probe
gagctgcaagaacattggcaaatca

SEQ ID NO: 223221 - DNA, 25 bp, probe
gagctgcaaaaccagagcaaattca

SEQ ID NO: 223222 - DNA, 25 bp, probe
gagctgagacagataagagaatacc

SEQ ID NO: 223223 - DNA, 25 bp, probe
gagctgagacagataagagaatacc

SEQ ID NO: 223224 - DNA, 25 bp, probe
gagctcaacatggaacagaaaaatc

SEQ ID NO: 223225 - DNA, 25 bp, probe
gagctaagccatgcaaatcaaatac

SEQ ID NO: 223226 - DNA, 25 bp, probe
gagctaagccatgcaaatcaaatac

SEQ ID NO: 223227 - DNA, 25 bp, probe
gagctcagagcaattaaaccactat

SEQ ID NO: 223228 - DNA, 25 bp, probe
gagctcgatgatatagcaatggcac

SEQ ID NO: 223229 - DNA, 25 bp, probe
gagctttgattttgcactgagccaa

SEQ ID NO: 223230 - DNA, 25 bp, probe
gagcattagatttctcatttgccaa

SEQ ID NO: 223231 - DNA, 25 bp, probe
gagcattgagcactttatctcccac

SEQ ID NO: 223232 - DNA, 25 bp, probe
gagcattgagcactttatctcccac

SEQ ID NO: 223233 - DNA, 25 bp, probe
gagaagaaattaatctccccaccgc

SEQ ID NO: 223234 - DNA, 25 bp, probe
gagaaacgtatatccctacaaacct

SEQ ID NO: 223235 - DNA, 25 bp, probe
gagcaagtctggtaacggtaacaac

SEQ ID NO: 223236 - DNA, 25 bp, probe
gagaagtcatggttcagggaaacgg

SEQ ID NO: 223237 - DNA, 25 bp, probe
gagaagtgggttcaggcgaagggtg

SEQ ID NO: 223238 - DNA, 25 bp, probe
gagaaggggcttcaggcagtgactc

SEQ ID NO: 223239 - DNA, 25 bp, probe
gagctgcaggaggttatcggcagtg

SEQ ID NO: 223240 - DNA, 25 bp, probe
gagcatgcactgccagttactgggc

SEQ ID NO: 223241 - DNA, 25 bp, probe
gagctatttcagtctatcatggagc

SEQ ID NO: 223242 - DNA, 25 bp, probe
gagctcatcgaccgctataagcgct

SEQ ID NO: 223243 - DNA, 25 bp, probe
gagctcatcgaccgctataagcgct

SEQ ID NO: 223244 - DNA, 25 bp, probe
gagctacagcaccagatatgccacc

SEQ ID NO: 223245 - DNA, 25 bp, probe
gagctcaggagcaagacaccatctc

SEQ ID NO: 223246 - DNA, 25 bp, probe
gagctagggtaattcagatctggga

SEQ ID NO: 223247 - DNA, 25 bp, probe
gagaatttgtaacctgattgtggaa

SEQ ID NO: 223248 - DNA, 25 bp, probe
gagcagatttgaagcaactcatggt

SEQ ID NO: 223249 - DNA, 25 bp, probe
gagcagacattaaacatctttgtgc

SEQ ID NO: 223250 - DNA, 25 bp, probe
gagcatgaatgggaacagattattg

SEQ ID NO: 223251 - DNA, 25 bp, probe
gagcatcacgtggcaaatgattgag

SEQ ID NO: 223252 - DNA, 25 bp, probe
gagctcagcgagactcagcttgtag

SEQ ID NO: 223253 - DNA, 25 bp, probe
gagctcatgggcacatgtgcagaga

SEQ ID NO: 223254 - DNA, 25 bp, probe
gagctcatggtatatgtgatgggtg

SEQ ID NO: 223255 - DNA, 25 bp, probe
gagcatcagggttgttgtggctgtg

SEQ ID NO: 223256 - DNA, 25 bp, probe
gagcataggatgcattcttattgaa

SEQ ID NO: 223257 - DNA, 25 bp, probe
gagcataggatgcattcttattgaa

SEQ ID NO: 223258 - DNA, 25 bp, probe
gagcataggatgcattcttattgaa

SEQ ID NO: 223259 - DNA, 25 bp, probe
gagagaggaggagcttcactgaaat

SEQ ID NO: 223260 - DNA, 25 bp, probe
gagaatgaggacatttactataaaa

SEQ ID NO: 223261 - DNA, 25 bp, probe
gagaatatctatgatttacagagta

SEQ ID NO: 223262 - DNA, 25 bp, probe
gagcacacactctaagtttggagct

SEQ ID NO: 223263 - DNA, 25 bp, probe
gagctagaggtgaagatccgcgact

SEQ ID NO: 223264 - DNA, 25 bp, probe
gagcaagaagcttgtgcaccgcgac

SEQ ID NO: 223265 - DNA, 25 bp, probe
gagaaactgcatggtcgcccatgat

SEQ ID NO: 223266 - DNA, 25 bp, probe
gagacgaatgatggctagatcgacg

SEQ ID NO: 223267 - DNA, 25 bp, probe
gagcatttaatcctagtaacagtgc

SEQ ID NO: 223268 - DNA, 25 bp, probe
gagcattccaagtccgtgaaggtgc

SEQ ID NO: 223269 - DNA, 25 bp, probe
gagcattcttagacgagtaagtgtg

SEQ ID NO: 223270 - DNA, 25 bp, probe
gagcatttgtaaggcaggagaaagt

SEQ ID NO: 223271 - DNA, 25 bp, probe
gagacttgaaactggacaacgtact

SEQ ID NO: 223272 - DNA, 25 bp, probe
gagacttgaaactggacaacgtact

SEQ ID NO: 223273 - DNA, 25 bp, probe
ggaggtataaccccaacgagaagct

SEQ ID NO: 223274 - DNA, 25 bp, probe
ggaggaccctccacaggaggacctc

SEQ ID NO: 223275 - DNA, 25 bp, probe
gagcaggaacctgtacagtggtgac

SEQ ID NO: 223276 - DNA, 25 bp, probe
gagcaggaacctgtacagtggtgac

SEQ ID NO: 223277 - DNA, 25 bp, probe
gagcagcgaacgaaggagcagtttt

SEQ ID NO: 223278 - DNA, 25 bp, probe
gagcagcgaacgaaggagcagtttt

SEQ ID NO: 223279 - DNA, 25 bp, probe
gagcatgataactgtcagagctttt

SEQ ID NO: 223280 - DNA, 25 bp, probe
gagcagcaaatcttgtagggatatc

SEQ ID NO: 223281 - DNA, 25 bp, probe
gagaacattttggggctgaacttac

SEQ ID NO: 223282 - DNA, 25 bp, probe
gagaatattttgtgggcaggtatca

SEQ ID NO: 223283 - DNA, 25 bp, probe
gagaaagttgagtgtcaggggacat

SEQ ID NO: 223284 - DNA, 25 bp, probe
gagaaagttgagtgtcaggggacat

SEQ ID NO: 223285 - DNA, 25 bp, probe
gagcagaagtttgtgcacagggacc

SEQ ID NO: 223286 - DNA, 25 bp, probe
gagcaagttctcgggagcggttctc

SEQ ID NO: 223287 - DNA, 25 bp, probe
gagcaagttctcgggagcggttctc

SEQ ID NO: 223288 - DNA, 25 bp, probe
gatgccttccttgtcagagttatgc

SEQ ID NO: 223289 - DNA, 25 bp, probe
gatgtcagttgctgaacaggttgac

SEQ ID NO: 223290 - DNA, 25 bp, probe
gatgtcagttgctgaacaggttgac

SEQ ID NO: 223291 - DNA, 25 bp, probe
gataatgtagtttaaggtaactcta

SEQ ID NO: 223292 - DNA, 25 bp, probe
gataatgtagtttaaggtaactcta

SEQ ID NO: 223293 - DNA, 25 bp, probe
gagaattattcctttcctagactaa

SEQ ID NO: 223294 - DNA, 25 bp, probe
gagaattattcctttcctagactaa

SEQ ID NO: 223295 - DNA, 25 bp, probe
gagcaatgaatttttgaactgaagc

SEQ ID NO: 223296 - DNA, 25 bp, probe
gagcaatgaatttttgaactgaagc

SEQ ID NO: 223297 - DNA, 25 bp, probe
gagcacattcttttagaacctgacc

SEQ ID NO: 223298 - DNA, 25 bp, probe
gagaattttttatgtcttaccagat

SEQ ID NO: 223299 - DNA, 25 bp, probe
gagaaacctttgaagttccagaaat

SEQ ID NO: 223300 - DNA, 25 bp, probe
gagaaacgtgtttagtatcaaaaga

SEQ ID NO: 223301 - DNA, 25 bp, probe
gagaaaggtttgtgtagcttcatga

SEQ ID NO: 223302 - DNA, 25 bp, probe
gagagtatggtgctgggtccttaaa

SEQ ID NO: 223303 - DNA, 25 bp, probe
gagaattggatatctgtcccttcag

SEQ ID NO: 223304 - DNA, 25 bp, probe
gagaatctgagtttagattcccttg

SEQ ID NO: 223305 - DNA, 25 bp, probe
gagcaatgtgacaagtatgacgccc

SEQ ID NO: 223306 - DNA, 25 bp, probe
gagcatttgttagatcacatcgccg

SEQ ID NO: 223307 - DNA, 25 bp, probe
gagcatttgtcctaatctgctgcca

SEQ ID NO: 223308 - DNA, 25 bp, probe
gagcttgttcgctagagtggctgag

SEQ ID NO: 223309 - DNA, 25 bp, probe
gagctctttccaaatggactagact

SEQ ID NO: 223310 - DNA, 25 bp, probe
gagctctttggcattaatctaattt

SEQ ID NO: 223311 - DNA, 25 bp, probe
gagctccggagcattaatgaggcct

SEQ ID NO: 223312 - DNA, 25 bp, probe
gagctgccggactacaacaagatct

SEQ ID NO: 223313 - DNA, 25 bp, probe
gagctgccggactacaacaagatct

SEQ ID NO: 223314 - DNA, 25 bp, probe
gagcttcaggcctcaatggagcagc

SEQ ID NO: 223315 - DNA, 25 bp, probe
gagctcggagcctcattgagacagg

SEQ ID NO: 223316 - DNA, 25 bp, probe
gagctcagtagcgggcatggaagga

SEQ ID NO: 223317 - DNA, 25 bp, probe
gagctcaggccagacggatactaca

SEQ ID NO: 223318 - DNA, 25 bp, probe
gagctcaaccagaagggatacagtg

SEQ ID NO: 223319 - DNA, 25 bp, probe
gagcttgattagaagccaagacagt

SEQ ID NO: 223320 - DNA, 25 bp, probe
gagctttacagtgccacgacatggc

SEQ ID NO: 223321 - DNA, 25 bp, probe
gagctactgacattcctaagagtgg

SEQ ID NO: 223322 - DNA, 25 bp, probe
gagaatttcttccttcagacggttt

SEQ ID NO: 223323 - DNA, 25 bp, probe
gagaatttcttccttcagacggttt

SEQ ID NO: 223324 - DNA, 25 bp, probe
gaggatttagtacccaaatcgtctt

SEQ ID NO: 223325 - DNA, 25 bp, probe
gagcaatttaaactcccagttgttt

SEQ ID NO: 223326 - DNA, 25 bp, probe
gagaataggtataacctcagttttt

SEQ ID NO: 223327 - DNA, 25 bp, probe
gagcaaaggtcaaatactcttttta

SEQ ID NO: 223328 - DNA, 25 bp, probe
gagcaaaggtacagtctcttctctc

SEQ ID NO: 223329 - DNA, 25 bp, probe
gagaaaggggctgagacatgtcttc

SEQ ID NO: 223330 - DNA, 25 bp, probe
gagctcctgcgggcagggaagtctt

SEQ ID NO: 223331 - DNA, 25 bp, probe
gagagtcatcgggcgtggaagctat

SEQ ID NO: 223332 - DNA, 25 bp, probe
gagcagatgcacagaggggatcact

SEQ ID NO: 223333 - DNA, 25 bp, probe
gagcaggacacaatgctgtggacag

SEQ ID NO: 223334 - DNA, 25 bp, probe
gagcaggacacaatgctgtggacag

SEQ ID NO: 223335 - DNA, 25 bp, probe
gagcagaacgctttgagagaagtat

SEQ ID NO: 223336 - DNA, 25 bp, probe
gagaaaatctaccgagaagtacaaa

SEQ ID NO: 223337 - DNA, 25 bp, probe
gagacagataaatcgaagcagtaaa

SEQ ID NO: 223338 - DNA, 25 bp, probe
gagcaaaataatgcaacgcaggagg

SEQ ID NO: 223339 - DNA, 25 bp, probe
gagcaacaatgcttggctgaccgag

SEQ ID NO: 223340 - DNA, 25 bp, probe
gagcaacaatgcttggctgaccgag

SEQ ID NO: 223341 - DNA, 25 bp, probe
gataccatatttgtaccgaacacag

SEQ ID NO: 223342 - DNA, 25 bp, probe
gagatccaaaatgatatccaaccca

SEQ ID NO: 223343 - DNA, 25 bp, probe
gagactcaaagagactccaagattc

SEQ ID NO: 223344 - DNA, 25 bp, probe
gatgaattacgggacccaaatgtca

SEQ ID NO: 223345 - DNA, 25 bp, probe
gatgaattacgggacccaaatgtca

SEQ ID NO: 223346 - DNA, 25 bp, probe
gatgaattacgggacccaaatgtca

SEQ ID NO: 223347 - DNA, 25 bp, probe
gagaagtatccagaattgcagaatt

SEQ ID NO: 223348 - DNA, 25 bp, probe
gagaagtatccagaattgcagaatt

SEQ ID NO: 223349 - DNA, 25 bp, probe
gagaaggactatcaagtgctggtct

SEQ ID NO: 223350 - DNA, 25 bp, probe
gagaaggactatcaagtgctggtct

SEQ ID NO: 223351 - DNA, 25 bp, probe
gagctaggactaaccatctcgagtg

SEQ ID NO: 223352 - DNA, 25 bp, probe
gagcagggacaagctcactcagagc

SEQ ID NO: 223353 - DNA, 25 bp, probe
gagcacggtcaagattgccaaggta

SEQ ID NO: 223354 - DNA, 25 bp, probe
gaggtggccaacaaagtcaaggtcc

SEQ ID NO: 223355 - DNA, 25 bp, probe
gaggtggccaacaaagtcaaggtcc

SEQ ID NO: 223356 - DNA, 25 bp, probe
gagcaggtccataccaagtaataga

SEQ ID NO: 223357 - DNA, 25 bp, probe
gagcaggtccaagacacttattcat

SEQ ID NO: 223358 - DNA, 25 bp, probe
gagctagccggatggactctaatgc

SEQ ID NO: 223359 - DNA, 25 bp, probe
gagctagccggatggactctaatgc

SEQ ID NO: 223360 - DNA, 25 bp, probe
gagcaggcgtggatggcatcttata

SEQ ID NO: 223361 - DNA, 25 bp, probe
gagcagccatggctatggcacaaaa

SEQ ID NO: 223362 - DNA, 25 bp, probe
gagagctctggcagatgtcccaatc

SEQ ID NO: 223363 - DNA, 25 bp, probe
gagcagcttagaggatctcccaagg

SEQ ID NO: 223364 - DNA, 25 bp, probe
gagcagttgagaggacactcccgtt

SEQ ID NO: 223365 - DNA, 25 bp, probe
gagcagtgtgagagccagctcaaca

SEQ ID NO: 223366 - DNA, 25 bp, probe
gagcatgtgtgggtgggagtcagca

SEQ ID NO: 223367 - DNA, 25 bp, probe
gagcatgctgtgaacttcgaagacc

SEQ ID NO: 223368 - DNA, 25 bp, probe
gagcattcatgtacctcaaaccctt

SEQ ID NO: 223369 - DNA, 25 bp, probe
gagcattcatgtacctcaaaccctt

SEQ ID NO: 223370 - DNA, 25 bp, probe
gagcatccggaagtgataacacgca

SEQ ID NO: 223371 - DNA, 25 bp, probe
gagcatccaggagggcaagtacgag

SEQ ID NO: 223372 - DNA, 25 bp, probe
gagcatcgagaggaggccagatgtc

SEQ ID NO: 223373 - DNA, 25 bp, probe
gagcatcagagagtgtacatcatgt

SEQ ID NO: 223374 - DNA, 25 bp, probe
gagctagggctgctcatctttttcc

SEQ ID NO: 223375 - DNA, 25 bp, probe
gagctagggctgctcatctttttcc

SEQ ID NO: 223376 - DNA, 25 bp, probe
gagaatggagatctcaatcagtttc

SEQ ID NO: 223377 - DNA, 25 bp, probe
gagcagacgagaagtcatggagttc

SEQ ID NO: 223378 - DNA, 25 bp, probe
gagcagtgccaactcttggaggtcc

SEQ ID NO: 223379 - DNA, 25 bp, probe
gagcaaccatagccttgtcgtgggc

SEQ ID NO: 223380 - DNA, 25 bp, probe
gagaaaaagcccctggtggcggtca

SEQ ID NO: 223381 - DNA, 25 bp, probe
gagaaaaagcccctggtggcggtca

SEQ ID NO: 223382 - DNA, 25 bp, probe
gagcagaaaccctacgggaaggccg

SEQ ID NO: 223383 - DNA, 25 bp, probe
gagcagaaaccctacgggaaggccg

SEQ ID NO: 223384 - DNA, 25 bp, probe
gagagcttaccggacgttagaaatc

SEQ ID NO: 223385 - DNA, 25 bp, probe
gagagtaaccctgtctaatgaaacc

SEQ ID NO: 223386 - DNA, 25 bp, probe
gagaattaacttggcctaatgctaa

SEQ ID NO: 223387 - DNA, 25 bp, probe
gagaattgaagcaccctaatgtgat

SEQ ID NO: 223388 - DNA, 25 bp, probe
gagctaatctgaccgttctattgtg

SEQ ID NO: 223389 - DNA, 25 bp, probe
gagcatattcactggtttatttgca

SEQ ID NO: 223390 - DNA, 25 bp, probe
gagctatccccgatgatgacttgga

SEQ ID NO: 223391 - DNA, 25 bp, probe
gagctaccgctgcaagtgtcgggat

SEQ ID NO: 223392 - DNA, 25 bp, probe
gagcttcggcatcatcatgtgggag

SEQ ID NO: 223393 - DNA, 25 bp, probe
gagcatctcgaatatcaggatgctg

SEQ ID NO: 223394 - DNA, 25 bp, probe
gagcatctcgaatatcaggatgctg

SEQ ID NO: 223395 - DNA, 25 bp, probe
gagcatgctgagtgccatcagtact

SEQ ID NO: 223396 - DNA, 25 bp, probe
gagcatgctgagtgccatcagtact

SEQ ID NO: 223397 - DNA, 25 bp, probe
gagcatgtgcactggcatggaatgg

SEQ ID NO: 223398 - DNA, 25 bp, probe
gagcatggcaagggggtctgtctct

SEQ ID NO: 223399 - DNA, 25 bp, probe
gagcagtaagagctgatgacttcct

SEQ ID NO: 223400 - DNA, 25 bp, probe
gagcagtaagagctgatgacttcct

SEQ ID NO: 223401 - DNA, 25 bp, probe
gagcaaggcagactggtacctcgtt

SEQ ID NO: 223402 - DNA, 25 bp, probe
gagctaggaacacttacccaggtag

SEQ ID NO: 223403 - DNA, 25 bp, probe
gagcagggagaccttagctccgaga

SEQ ID NO: 223404 - DNA, 25 bp, probe
gagcaaggagtgccaaagtccggag

SEQ ID NO: 223405 - DNA, 25 bp, probe
gagctacaagtttagcaactcgggg

SEQ ID NO: 223406 - DNA, 25 bp, probe
gagctaaatgtggaagctgcctctg

SEQ ID NO: 223407 - DNA, 25 bp, probe
gagctaaagctgtaacccagtgatt

SEQ ID NO: 223408 - DNA, 25 bp, probe
gagtaaagttgatcccaagcctggg

SEQ ID NO: 223409 - DNA, 25 bp, probe
gagctatgacagtgaaccgaagcgc

SEQ ID NO: 223410 - DNA, 25 bp, probe
gagaatggcgaagtccggcaaggcc

SEQ ID NO: 223411 - DNA, 25 bp, probe
gagcactagggagccatgggaggat

SEQ ID NO: 223412 - DNA, 25 bp, probe
gagcaccaggggatgagtggaggtt

SEQ ID NO: 223413 - DNA, 25 bp, probe
gagcaccagggtcagggtgcaagga

SEQ ID NO: 223414 - DNA, 25 bp, probe
gagcaaccaggtgacgaatacagtg

SEQ ID NO: 223415 - DNA, 25 bp, probe
gagcaaccaggtgacgaatacagtg

SEQ ID NO: 223416 - DNA, 25 bp, probe
gagaacgaagaccacagcaagaact

SEQ ID NO: 223417 - DNA, 25 bp, probe
gagaaggtggggcagcacccatgct

SEQ ID NO: 223418 - DNA, 25 bp, probe
gagaatggtcgggtggtcagccatg

SEQ ID NO: 223419 - DNA, 25 bp, probe
gagaatatcccagaggatagcagca

SEQ ID NO: 223420 - DNA, 25 bp, probe
gagaaaccacgcggaaactctacgt

SEQ ID NO: 223421 - DNA, 25 bp, probe
gagaaaccacgcggaaactctacgt

SEQ ID NO: 223422 - DNA, 25 bp, probe
gagaaccactccagaatacttccag

SEQ ID NO: 223423 - DNA, 25 bp, probe
gagaaccactccagaatacttccag

SEQ ID NO: 223424 - DNA, 25 bp, probe
gagaccaacgtttgactacttacag

SEQ ID NO: 223425 - DNA, 25 bp, probe
gagaccaacgtttgactacttacag

SEQ ID NO: 223426 - DNA, 25 bp, probe
gagaaaaaactacctgaattacagc

SEQ ID NO: 223427 - DNA, 25 bp, probe
gagaaaaaactacctgaattacagc

SEQ ID NO: 223428 - DNA, 25 bp, probe
gagaagataacagaagctaaatcca

SEQ ID NO: 223429 - DNA, 25 bp, probe
gagcaagtggaaccggcgaaacgac

SEQ ID NO: 223430 - DNA, 25 bp, probe
gagcataaagaatctgcgctgagga

SEQ ID NO: 223431 - DNA, 25 bp, probe
gagcataaagaatctgcgctgagga

SEQ ID NO: 223432 - DNA, 25 bp, probe
gagcagaaagatccatcttgctgac

SEQ ID NO: 223433 - DNA, 25 bp, probe
gagcactcaagaaagttctgaaact

SEQ ID NO: 223434 - DNA, 25 bp, probe
gagcatcctagaggacttctttact

SEQ ID NO: 223435 - DNA, 25 bp, probe
gagcactgctggagagattcctgtt

SEQ ID NO: 223436 - DNA, 25 bp, probe
gagcagctttcttcaagtcgctctt

SEQ ID NO: 223437 - DNA, 25 bp, probe
gagactaatgcgttcagtcctctgt

SEQ ID NO: 223438 - DNA, 25 bp, probe
gagcagtacatttttatccatcagt

SEQ ID NO: 223439 - DNA, 25 bp, probe
gagcatgagcacctaaatcactata

SEQ ID NO: 223440 - DNA, 25 bp, probe
gagcataacttggcagacactgcaa

SEQ ID NO: 223441 - DNA, 25 bp, probe
gagctacctgatggccatggagaag

SEQ ID NO: 223442 - DNA, 25 bp, probe
gagctacgtggcccagatgatcaag

SEQ ID NO: 223443 - DNA, 25 bp, probe
gagctacgtgtggggaacaagtacc

SEQ ID NO: 223444 - DNA, 25 bp, probe
gagaacagtgtggggtgctaaacag

SEQ ID NO: 223445 - DNA, 25 bp, probe
gagcaagtcctgtgtggcaaaactg

SEQ ID NO: 223446 - DNA, 25 bp, probe
gagcaagtccagtgctgaccttgac

SEQ ID NO: 223447 - DNA, 25 bp, probe
gagaatgatctatcactgacgttga

SEQ ID NO: 223448 - DNA, 25 bp, probe
gagaatacatagaccaggcccagaa

SEQ ID NO: 223449 - DNA, 25 bp, probe
gagaatgcacaaacagaggccgcca

SEQ ID NO: 223450 - DNA, 25 bp, probe
gagcatcacagccaaggaagccctc

SEQ ID NO: 223451 - DNA, 25 bp, probe
gagcactacctcagaatgacgacca

SEQ ID NO: 223452 - DNA, 25 bp, probe
gagcagcatatccatctagaacacc

SEQ ID NO: 223453 - DNA, 25 bp, probe
gagcagctcaccaagaatatgcact

SEQ ID NO: 223454 - DNA, 25 bp, probe
gagcagctgctgggaggcagagccc

SEQ ID NO: 223455 - DNA, 25 bp, probe
gagcagctgagggaggggcgctggc

SEQ ID NO: 223456 - DNA, 25 bp, probe
gagcagctgagggaggggcgctggc

SEQ ID NO: 223457 - DNA, 25 bp, probe
gagcagctgagggaggggcgctggc

SEQ ID NO: 223458 - DNA, 25 bp, probe
gagcagaagatgaaagggccggagg

SEQ ID NO: 223459 - DNA, 25 bp, probe
gagcaggtggagtatgggccgctac

SEQ ID NO: 223460 - DNA, 25 bp, probe
gagcaagtggagcagggcttagcag

SEQ ID NO: 223461 - DNA, 25 bp, probe
gagcatgcagggctaaggcatatag

SEQ ID NO: 223462 - DNA, 25 bp, probe
gagcatcagcgacctacaagaacct

SEQ ID NO: 223463 - DNA, 25 bp, probe
gagcatcagcgacctacaagaacct

SEQ ID NO: 223464 - DNA, 25 bp, probe
gagcttcgccctggaagaagcctct

SEQ ID NO: 223465 - DNA, 25 bp, probe
gagcatgtggtcctggaaatccctt

SEQ ID NO: 223466 - DNA, 25 bp, probe
gagcagatggtggatggcagtatgc

SEQ ID NO: 223467 - DNA, 25 bp, probe
gagcagtggctgagtgcagctgagc

SEQ ID NO: 223468 - DNA, 25 bp, probe
gagcagaagctgatggacgaccttc

SEQ ID NO: 223469 - DNA, 25 bp, probe
gagcagagagtggttcctggctgtc

SEQ ID NO: 223470 - DNA, 25 bp, probe
gagcagagagtggttcctggctgtc

SEQ ID NO: 223471 - DNA, 25 bp, probe
gagcagaagaggattcttgatttgc

SEQ ID NO: 223472 - DNA, 25 bp, probe
gagcagaagcctattcctgctttgc

SEQ ID NO: 223473 - DNA, 25 bp, probe
gagcaactactaattcctcaattcc

SEQ ID NO: 223474 - DNA, 25 bp, probe
gagcaactactaattcctcaattcc

SEQ ID NO: 223475 - DNA, 25 bp, probe
gagctttgattgactccgttattcc

SEQ ID NO: 223476 - DNA, 25 bp, probe
gagcacttaatggtctctgttttca

SEQ ID NO: 223477 - DNA, 25 bp, probe
gagcaccaggtggtctcctctgact

SEQ ID NO: 223478 - DNA, 25 bp, probe
gagcaagagaacattcctctgcagc

SEQ ID NO: 223479 - DNA, 25 bp, probe
gagcaatcaaacaattggattatga

SEQ ID NO: 223480 - DNA, 25 bp, probe
gagactaacacgtgcaattatttaa

SEQ ID NO: 223481 - DNA, 25 bp, probe
gagaataaagtgtgcaatcgctatg

SEQ ID NO: 223482 - DNA, 25 bp, probe
gagcaaacaaggtagtatccgggcg

SEQ ID NO: 223483 - DNA, 25 bp, probe
gagaaccacagttaattcggggatc

SEQ ID NO: 223484 - DNA, 25 bp, probe
gagacctcatctcaaaccggaattc

SEQ ID NO: 223485 - DNA, 25 bp, probe
gagcagcctttcgagaaacgttcat

SEQ ID NO: 223486 - DNA, 25 bp, probe
gagcaggtttccaaacacagttgtc

SEQ ID NO: 223487 - DNA, 25 bp, probe
gagcaggtttccaaacacagttgtc

SEQ ID NO: 223488 - DNA, 25 bp, probe
gagagggatttctcacggtttcttt

SEQ ID NO: 223489 - DNA, 25 bp, probe
gagagggatttctcacggtttcttt

SEQ ID NO: 223490 - DNA, 25 bp, probe
gagagggcaatttggctgggtgtct

SEQ ID NO: 223491 - DNA, 25 bp, probe
gagcagggcaaaatggtggctgtgt

SEQ ID NO: 223492 - DNA, 25 bp, probe
gagcagagccgacaggaggtggttc

SEQ ID NO: 223493 - DNA, 25 bp, probe
gagcaactctatcagaagatggtga

SEQ ID NO: 223494 - DNA, 25 bp, probe
gagcacttctatatgcaaggtgaat

SEQ ID NO: 223495 - DNA, 25 bp, probe
gagcaccatctgtttcagagggaga

SEQ ID NO: 223496 - DNA, 25 bp, probe
gagcacctctctgatcaggacaagt

SEQ ID NO: 223497 - DNA, 25 bp, probe
gagcacctactatatgcagaagggg

SEQ ID NO: 223498 - DNA, 25 bp, probe
gagcagccataaggacagcatgaac

SEQ ID NO: 223499 - DNA, 25 bp, probe
gagcagcgtatcggtagctggagcc

SEQ ID NO: 223500 - DNA, 25 bp, probe
gagcactgcgaggtgaagctggtgg

SEQ ID NO: 223501 - DNA, 25 bp, probe
gagcagcgtggtcattgctgggtgc

SEQ ID NO: 223502 - DNA, 25 bp, probe
gagcacgggtacagcagacagtgtc

SEQ ID NO: 223503 - DNA, 25 bp, probe
gagcacgggtacagcagacagtgtc

SEQ ID NO: 223504 - DNA, 25 bp, probe
gagaagggaagcatccaggttccgg

SEQ ID NO: 223505 - DNA, 25 bp, probe
gagaagggtacttgctaggtatcct

SEQ ID NO: 223506 - DNA, 25 bp, probe
gagcaaggcgctatggtcaggagac

SEQ ID NO: 223507 - DNA, 25 bp, probe
gagcaaagcactaaggaattcagca

SEQ ID NO: 223508 - DNA, 25 bp, probe
gagcataatcaaacaggaattttct

SEQ ID NO: 223509 - DNA, 25 bp, probe
gagcaactgcattgagggacatttt

SEQ ID NO: 223510 - DNA, 25 bp, probe
gagcaagctggtggggacatctctg

SEQ ID NO: 223511 - DNA, 25 bp, probe
gagaagctgcgtgtggcagcgttgg

SEQ ID NO: 223512 - DNA, 25 bp, probe
gagaagctgtgctacgtcgccctgg

SEQ ID NO: 223513 - DNA, 25 bp, probe
gagaagcagttatgccaccactgga

SEQ ID NO: 223514 - DNA, 25 bp, probe
gagcaaagtgtatggatccacagtc

SEQ ID NO: 223515 - DNA, 25 bp, probe
gagcaaagagcgaagaatccatcac

SEQ ID NO: 223516 - DNA, 25 bp, probe
gagcaaagagcgaagaatccatcac

SEQ ID NO: 223517 - DNA, 25 bp, probe
gagacaaagtctaaatcacccgtgg

SEQ ID NO: 223518 - DNA, 25 bp, probe
gagaataaattcgaacagccctggt

SEQ ID NO: 223519 - DNA, 25 bp, probe
gagaataaattcgaacagccctggt

SEQ ID NO: 223520 - DNA, 25 bp, probe
gagaatgacgatacccgtgactcag

SEQ ID NO: 223521 - DNA, 25 bp, probe
gagaagatgcttttccgtagtcgtg

SEQ ID NO: 223522 - DNA, 25 bp, probe
gagaagtctttccggaggtcagtgg

SEQ ID NO: 223523 - DNA, 25 bp, probe
gagaatgaccggcttagggcagagg

SEQ ID NO: 223524 - DNA, 25 bp, probe
gagaagcaacgtatggcaggacaaa

SEQ ID NO: 223525 - DNA, 25 bp, probe
gagcaggcccgacagagagatgaag

SEQ ID NO: 223526 - DNA, 25 bp, probe
gagcaggcccgacagagagatgaag

SEQ ID NO: 223527 - DNA, 25 bp, probe
gagcacggccaacaaagctgttgat

SEQ ID NO: 223528 - DNA, 25 bp, probe
gagcacatggccatcgtgaagctgg

SEQ ID NO: 223529 - DNA, 25 bp, probe
gagcagatggccaggatgatgagca

SEQ ID NO: 223530 - DNA, 25 bp, probe
gagcaggactctcagaatcgcactg

SEQ ID NO: 223531 - DNA, 25 bp, probe
gagcagtgcacattttgcaaccact

SEQ ID NO: 223532 - DNA, 25 bp, probe
gagcaagcacaagttcaaaatccac

SEQ ID NO: 223533 - DNA, 25 bp, probe
gagcacacgcactttaagaacatcc

SEQ ID NO: 223534 - DNA, 25 bp, probe
gagcacacgcactttaagaacatcc

SEQ ID NO: 223535 - DNA, 25 bp, probe
gagcatcctctcttttgagaaccgg

SEQ ID NO: 223536 - DNA, 25 bp, probe
gagacctgccccttaaataagaggc

SEQ ID NO: 223537 - DNA, 25 bp, probe
gagaactggtcgccatcaagaaagt

SEQ ID NO: 223538 - DNA, 25 bp, probe
gagcagagcctgaccctaaaaagaa

SEQ ID NO: 223539 - DNA, 25 bp, probe
gagcagagcctgaccctaaaaagaa

SEQ ID NO: 223540 - DNA, 25 bp, probe
gagaagccttttccataaagtgtaa

SEQ ID NO: 223541 - DNA, 25 bp, probe
gagaagccttttccataaagtgtaa

SEQ ID NO: 223542 - DNA, 25 bp, probe
gagtatagtttttaaaagtcattca

SEQ ID NO: 223543 - DNA, 25 bp, probe
gatttaattccctcaataacaccaa

SEQ ID NO: 223544 - DNA, 25 bp, probe
gatttaattccctcaataacaccaa

SEQ ID NO: 223545 - DNA, 25 bp, probe
gttaaaagtctctcaaattaggcca

SEQ ID NO: 223546 - DNA, 25 bp, probe
gtaaccaaggtcagcgactttggcc

SEQ ID NO: 223547 - DNA, 25 bp, probe
gagaaccacggtaaccatctatatg

SEQ ID NO: 223548 - DNA, 25 bp, probe
gagaataacaccttaccaaacattg

SEQ ID NO: 223549 - DNA, 25 bp, probe
gagaaagaccttattgggacatgtc

SEQ ID NO: 223550 - DNA, 25 bp, probe
gagaacctccctctatggggatggc

SEQ ID NO: 223551 - DNA, 25 bp, probe
gagaatcggcccaagtatgcgggac

SEQ ID NO: 223552 - DNA, 25 bp, probe
gagcaagggacctagtctcagggat

SEQ ID NO: 223553 - DNA, 25 bp, probe
gagaagggatgccaagttcggactt

SEQ ID NO: 223554 - DNA, 25 bp, probe
gagaataggcatcaccttggcaggc

SEQ ID NO: 223555 - DNA, 25 bp, probe
gagcaaacgcagtaccatggtcgga

SEQ ID NO: 223556 - DNA, 25 bp, probe
gagcataactgggagcacctcattt

SEQ ID NO: 223557 - DNA, 25 bp, probe
gagaaacttaccagcagcagtatgg

SEQ ID NO: 223558 - DNA, 25 bp, probe
gagacaatcttacccgcaggttttc

SEQ ID NO: 223559 - DNA, 25 bp, probe
gagacaatcttacccgcaggttttc

SEQ ID NO: 223560 - DNA, 25 bp, probe
gagaagattagtgctcggggtcacc

SEQ ID NO: 223561 - DNA, 25 bp, probe
gagaatttagtccatagaggtccct

SEQ ID NO: 223562 - DNA, 25 bp, probe
gagacatttaacatggatgcgtccc

SEQ ID NO: 223563 - DNA, 25 bp, probe
gagacatttaacatggatgcgtccc

SEQ ID NO: 223564 - DNA, 25 bp, probe
gagcatttctatattggatctgcct

SEQ ID NO: 223565 - DNA, 25 bp, probe
gagactctaattttggattccttgg

SEQ ID NO: 223566 - DNA, 25 bp, probe
gagactctaattttggattccttgg

SEQ ID NO: 223567 - DNA, 25 bp, probe
gagactctaattttggattccttgg

SEQ ID NO: 223568 - DNA, 25 bp, probe
gagactctaattttggattccttgg

SEQ ID NO: 223569 - DNA, 25 bp, probe
gagagttttgtcttggatattcttg

SEQ ID NO: 223570 - DNA, 25 bp, probe
gagcagttagagtaggtgaatttgt

SEQ ID NO: 223571 - DNA, 25 bp, probe
gagcatttagcatatcgtggttctg

SEQ ID NO: 223572 - DNA, 25 bp, probe
gagttctaactgagctggtttccaa

SEQ ID NO: 223573 - DNA, 25 bp, probe
gagattttccctagtgggttctgaa

SEQ ID NO: 223574 - DNA, 25 bp, probe
gagaaggtacctatggagttgtgta

SEQ ID NO: 223575 - DNA, 25 bp, probe
gagcaagagaacatgttggtttgga

SEQ ID NO: 223576 - DNA, 25 bp, probe
gagcaggaaattggggtgttgggac

SEQ ID NO: 223577 - DNA, 25 bp, probe
gagcagggaacaggggtggagtggc

SEQ ID NO: 223578 - DNA, 25 bp, probe
gagcaccaaatccagggcggagggc

SEQ ID NO: 223579 - DNA, 25 bp, probe
gagcaccaaatccagggcggagggc

SEQ ID NO: 223580 - DNA, 25 bp, probe
gagcagacacaaaacggtggcaggt

SEQ ID NO: 223581 - DNA, 25 bp, probe
gagcagaagcttcacaggctgagag

SEQ ID NO: 223582 - DNA, 25 bp, probe
gagcaaactggaaagagctgggatc

SEQ ID NO: 223583 - DNA, 25 bp, probe
gagcatacctggaaaatgcttctgt

SEQ ID NO: 223584 - DNA, 25 bp, probe
gagcacaccgtttcctgattgctca

SEQ ID NO: 223585 - DNA, 25 bp, probe
gagcataccagtactcagtatagca

SEQ ID NO: 223586 - DNA, 25 bp, probe
gagcacccagacctgagtgatggca

SEQ ID NO: 223587 - DNA, 25 bp, probe
gagcagtcggatgtgaggttcagca

SEQ ID NO: 223588 - DNA, 25 bp, probe
gagcagtctgtgacttagtggacag

SEQ ID NO: 223589 - DNA, 25 bp, probe
gagcagatcagtctttgtcaatgct

SEQ ID NO: 223590 - DNA, 25 bp, probe
gagcagtgaggtttgttctttccag

SEQ ID NO: 223591 - DNA, 25 bp, probe
gagaaagctgtttatccgttccatg

SEQ ID NO: 223592 - DNA, 25 bp, probe
gagaaagctgtttatccgttccatg

SEQ ID NO: 223593 - DNA, 25 bp, probe
gagaaactattcacaatgcattcct

SEQ ID NO: 223594 - DNA, 25 bp, probe
gagaagccttaaagcatcctttctt

SEQ ID NO: 223595 - DNA, 25 bp, probe
gagaagccttaaagcatcctttctt

SEQ ID NO: 223596 - DNA, 25 bp, probe
gagaagccttaaagcatcctttctt

SEQ ID NO: 223597 - DNA, 25 bp, probe
gagaaggccatagagatccgatctg

SEQ ID NO: 223598 - DNA, 25 bp, probe
gagcaggcccaacgattctcgtcat

SEQ ID NO: 223599 - DNA, 25 bp, probe
gagaattgctaatgatttcccatga

SEQ ID NO: 223600 - DNA, 25 bp, probe
gagaattgctaatgatttcccatga

SEQ ID NO: 223601 - DNA, 25 bp, probe
gagaataacatctatgaaatcccaa

SEQ ID NO: 223602 - DNA, 25 bp, probe
gagcaaaaacttctccctcaagaac

SEQ ID NO: 223603 - DNA, 25 bp, probe
gagaccaaaagaacccaccaagaag

SEQ ID NO: 223604 - DNA, 25 bp, probe
gagaccaaaaggcttcactcagtga

SEQ ID NO: 223605 - DNA, 25 bp, probe
gagaccaaaaggcttcactcagtga

SEQ ID NO: 223606 - DNA, 25 bp, probe
gagactacagtaactttgaccagga

SEQ ID NO: 223607 - DNA, 25 bp, probe
gagcactggattggatctttagcca

SEQ ID NO: 223608 - DNA, 25 bp, probe
gagcaggaggctgggtttcaggaga

SEQ ID NO: 223609 - DNA, 25 bp, probe
gagaagagggcgacaattaggagag

SEQ ID NO: 223610 - DNA, 25 bp, probe
gagcaggcaggcgtgtaacaagaaa

SEQ ID NO: 223611 - DNA, 25 bp, probe
gagcaagggctcagaaaacagaaat

SEQ ID NO: 223612 - DNA, 25 bp, probe
gagagagggattcgaaaacagtcct

SEQ ID NO: 223613 - DNA, 25 bp, probe
gagcagcggattgctgaaaaccttt

SEQ ID NO: 223614 - DNA, 25 bp, probe
gagcagcggattgctctggagcagc

SEQ ID NO: 223615 - DNA, 25 bp, probe
gagcaggtgcaggcatctcgagaag

SEQ ID NO: 223616 - DNA, 25 bp, probe
gagcaagtgcatgactgtgaaatca

SEQ ID NO: 223617 - DNA, 25 bp, probe
gagcacgtgatggtctgagactctc

SEQ ID NO: 223618 - DNA, 25 bp, probe
gagcagctaatgttctggtctccga

SEQ ID NO: 223619 - DNA, 25 bp, probe
gagcatctagaaccttgttgcctgt

SEQ ID NO: 223620 - DNA, 25 bp, probe
gagcatctagaaccttgttgcctgt

SEQ ID NO: 223621 - DNA, 25 bp, probe
gagaatctataccttgttcctttat

SEQ ID NO: 223622 - DNA, 25 bp, probe
gagaacaaatctatttcctattatg

SEQ ID NO: 223623 - DNA, 25 bp, probe
gagaaccaacattaattccatatga

SEQ ID NO: 223624 - DNA, 25 bp, probe
gagaaccggatgaatataagcaatg

SEQ ID NO: 223625 - DNA, 25 bp, probe
gagaacgccgagatctacgactatt

SEQ ID NO: 223626 - DNA, 25 bp, probe
gagaacggctacattaagatattta

SEQ ID NO: 223627 - DNA, 25 bp, probe
gagaacggctacattaagatattta

SEQ ID NO: 223628 - DNA, 25 bp, probe
gagcaacggccaacgtttgaatatt

SEQ ID NO: 223629 - DNA, 25 bp, probe
gagaccggccagattgttgctatta

SEQ ID NO: 223630 - DNA, 25 bp, probe
gagaaggttcacatgtgttttgatt

SEQ ID NO: 223631 - DNA, 25 bp, probe
gagaagttaactgagattcctatac

SEQ ID NO: 223632 - DNA, 25 bp, probe
gagaagttacttcacatttctcatc

SEQ ID NO: 223633 - DNA, 25 bp, probe
gagacagggtttcaccatgttagcc

SEQ ID NO: 223634 - DNA, 25 bp, probe
gagatggggtttcaccatgttggcc

SEQ ID NO: 223635 - DNA, 25 bp, probe
gagatggggtttcaccatgttggcc

SEQ ID NO: 223636 - DNA, 25 bp, probe
gagatggggtttcaccatgttggcc

SEQ ID NO: 223637 - DNA, 25 bp, probe
gagacgaggtttcaccatgttgccc

SEQ ID NO: 223638 - DNA, 25 bp, probe
gagaatcaggttactactcttcccc

SEQ ID NO: 223639 - DNA, 25 bp, probe
gagaatcaggttactactcttcccc

SEQ ID NO: 223640 - DNA, 25 bp, probe
gagacacaggttattgtcccacacg

SEQ ID NO: 223641 - DNA, 25 bp, probe
gagaagggttacttgctgctcacac

SEQ ID NO: 223642 - DNA, 25 bp, probe
gagcaaaggtcccatgatcattcac

SEQ ID NO: 223643 - DNA, 25 bp, probe
gagcaaagggctcacgcattcagcc

SEQ ID NO: 223644 - DNA, 25 bp, probe
gagcaaaggcggaacaataagcagc

SEQ ID NO: 223645 - DNA, 25 bp, probe
gagcaaagtgggaacagtaagcagc

SEQ ID NO: 223646 - DNA, 25 bp, probe
gagaaagcaggcatcaagctgaaca

SEQ ID NO: 223647 - DNA, 25 bp, probe
gagcaacatgcagatctacagcgcc

SEQ ID NO: 223648 - DNA, 25 bp, probe
gagcagtgatgagtgtctaaggcag

SEQ ID NO: 223649 - DNA, 25 bp, probe
gagcaggaggtgcctgaaagctggg

SEQ ID NO: 223650 - DNA, 25 bp, probe
gagcagggcggtgggaagctggtgc

SEQ ID NO: 223651 - DNA, 25 bp, probe
gagcaggcggtggggagagatggac

SEQ ID NO: 223652 - DNA, 25 bp, probe
gagcaggcgggctgaggagagtgga

SEQ ID NO: 223653 - DNA, 25 bp, probe
gagaagcgggcctggaaggagcatt

SEQ ID NO: 223654 - DNA, 25 bp, probe
gagagaggttcctaaaattgaggtg

SEQ ID NO: 223655 - DNA, 25 bp, probe
gagtaggttctcggtacttaggact

SEQ ID NO: 223656 - DNA, 25 bp, probe
gatgtcgcgtcctggtttaaggatg

SEQ ID NO: 223657 - DNA, 25 bp, probe
gagaccgtccttgttgaagcagtta

SEQ ID NO: 223658 - DNA, 25 bp, probe
gagacccttttgggggatgagtttg

SEQ ID NO: 223659 - DNA, 25 bp, probe
gagacaatcgggaaggggtcctttg

SEQ ID NO: 223660 - DNA, 25 bp, probe
gagaagggcgacaaggggccctccg

SEQ ID NO: 223661 - DNA, 25 bp, probe
gagaagggcgacaaggggccctccg

SEQ ID NO: 223662 - DNA, 25 bp, probe
gagaacccagagaggcgtccctctc

SEQ ID NO: 223663 - DNA, 25 bp, probe
gagaaccgtgagtggagctcttgct

SEQ ID NO: 223664 - DNA, 25 bp, probe
gagaaccgtggatgtctttcacgct

SEQ ID NO: 223665 - DNA, 25 bp, probe
gagaatactggagagttcttccgag

SEQ ID NO: 223666 - DNA, 25 bp, probe
gagaaatgctcttagggtcttccga

SEQ ID NO: 223667 - DNA, 25 bp, probe
gagaaactgtgatggactcgttctg

SEQ ID NO: 223668 - DNA, 25 bp, probe
gagaagatcggcatgggtcggcctg

SEQ ID NO: 223669 - DNA, 25 bp, probe
gagaagatcggcatgggtcggcctg

SEQ ID NO: 223670 - DNA, 25 bp, probe
gagaagaggttagtggatcgggggt

SEQ ID NO: 223671 - DNA, 25 bp, probe
gagcaaactgtaaactgtcagggtg

SEQ ID NO: 223672 - DNA, 25 bp, probe
gagaataccacagagctccagtggc

SEQ ID NO: 223673 - DNA, 25 bp, probe
gagaaaggcgcagacctcaatgcgt

SEQ ID NO: 223674 - DNA, 25 bp, probe
gagaaactggcagcagcacttgccg

SEQ ID NO: 223675 - DNA, 25 bp, probe
gagaaactagacgccttcatcatgg

SEQ ID NO: 223676 - DNA, 25 bp, probe
gagaaactgaactgtactgctgcat

SEQ ID NO: 223677 - DNA, 25 bp, probe
gagcaagcactggactacaagggca

SEQ ID NO: 223678 - DNA, 25 bp, probe
gagaatcagatcgagtccaaggcag

SEQ ID NO: 223679 - DNA, 25 bp, probe
gagtgcatcaacgtgcttctgcagt

SEQ ID NO: 223680 - DNA, 25 bp, probe
gaggcatcaaaggctgcatccgttc

SEQ ID NO: 223681 - DNA, 25 bp, probe
gagcagacaaccctgcacaagactc

SEQ ID NO: 223682 - DNA, 25 bp, probe
gagcagaatcacctgtgcaaaacag

SEQ ID NO: 223683 - DNA, 25 bp, probe
gagcagaagcagcgctggctcaagg

SEQ ID NO: 223684 - DNA, 25 bp, probe
gagcaaagcaggaggtcttgggcta

SEQ ID NO: 223685 - DNA, 25 bp, probe
gagaaagcagggtagacgtggccaa

SEQ ID NO: 223686 - DNA, 25 bp, probe
gagagaatcgggggacctgaggtca

SEQ ID NO: 223687 - DNA, 25 bp, probe
gagggcaagggatgccagtaagtct

SEQ ID NO: 223688 - DNA, 25 bp, probe
gagaccaagggaggcagacttacct

SEQ ID NO: 223689 - DNA, 25 bp, probe
gagaccaagggaggcagacttacct

SEQ ID NO: 223690 - DNA, 25 bp, probe
gagaaaagggagtcatgcattttgc

SEQ ID NO: 223691 - DNA, 25 bp, probe
gagaaagggaattggcattttcgta

SEQ ID NO: 223692 - DNA, 25 bp, probe
gagaagggagcataagtttacagcc

SEQ ID NO: 223693 - DNA, 25 bp, probe
gagaagaggccatcctttgtgaagc

SEQ ID NO: 223694 - DNA, 25 bp, probe
gagcaaaggcacttcgcaaggagaa

SEQ ID NO: 223695 - DNA, 25 bp, probe
gagcaaaggcacttcgcaaggagaa

SEQ ID NO: 223696 - DNA, 25 bp, probe
gagcaaaggctaccacagactgcaa

SEQ ID NO: 223697 - DNA, 25 bp, probe
gagaagcaggtaccaagcctcaggg

SEQ ID NO: 223698 - DNA, 25 bp, probe
gagcaactgtttcatatcctcacgt

SEQ ID NO: 223699 - DNA, 25 bp, probe
gagcaagtttctcattactgtctgt

SEQ ID NO: 223700 - DNA, 25 bp, probe
gagcaagtttctcattactgtctgt

SEQ ID NO: 223701 - DNA, 25 bp, probe
gagaactttatctattcctgtgctg

SEQ ID NO: 223702 - DNA, 25 bp, probe
gagaactttatctattcctgtgctg

SEQ ID NO: 223703 - DNA, 25 bp, probe
gagaagtttacatcatcactgacaa

SEQ ID NO: 223704 - DNA, 25 bp, probe
gagaagtttacatcatcactgacaa

SEQ ID NO: 223705 - DNA, 25 bp, probe
gagaaggattactgtagatgcagta

SEQ ID NO: 223706 - DNA, 25 bp, probe
gagaagggtatatttaatgagcgaa

SEQ ID NO: 223707 - DNA, 25 bp, probe
gagacagggctggacttgaaaggaa

SEQ ID NO: 223708 - DNA, 25 bp, probe
gagacagggctggacttgaaaggaa

SEQ ID NO: 223709 - DNA, 25 bp, probe
gagaaagcctgtacccgagggaata

SEQ ID NO: 223710 - DNA, 25 bp, probe
gagagaacctgtttcttcacctaaa

SEQ ID NO: 223711 - DNA, 25 bp, probe
gagaatcatgcactttttctcctct

SEQ ID NO: 223712 - DNA, 25 bp, probe
gagactgtgtttatctccctttaaa

SEQ ID NO: 223713 - DNA, 25 bp, probe
gagaagttctattttcatgttctta

SEQ ID NO: 223714 - DNA, 25 bp, probe
gagacagttccttttagactcacca

SEQ ID NO: 223715 - DNA, 25 bp, probe
gagaaggacctgtgaaactactgag

SEQ ID NO: 223716 - DNA, 25 bp, probe
gagaaggacctgtgaaactactgag

SEQ ID NO: 223717 - DNA, 25 bp, probe
gagaaggccgctttaacttctctgc

SEQ ID NO: 223718 - DNA, 25 bp, probe
gagaaggccgctttaacttctctgc

SEQ ID NO: 223719 - DNA, 25 bp, probe
gagaaggccgacaaatactactaca

SEQ ID NO: 223720 - DNA, 25 bp, probe
gagaaaaccacttagactgcacttt

SEQ ID NO: 223721 - DNA, 25 bp, probe
gagaatcaacccaactgaagcattt

SEQ ID NO: 223722 - DNA, 25 bp, probe
gagaatagggcttgcaatgaacttt

SEQ ID NO: 223723 - DNA, 25 bp, probe
gagaatcatgggagctaacctttat

SEQ ID NO: 223724 - DNA, 25 bp, probe
gagaatcatggacaaaacctgctgg

SEQ ID NO: 223725 - DNA, 25 bp, probe
gagaatcatggacaaaacctgctgg

SEQ ID NO: 223726 - DNA, 25 bp, probe
gagaacagagacagttaccccaggg

SEQ ID NO: 223727 - DNA, 25 bp, probe
gagaataagtcatgttccttcaaga

SEQ ID NO: 223728 - DNA, 25 bp, probe
gagaataagtcatgttccttcaaga

SEQ ID NO: 223729 - DNA, 25 bp, probe
gagaaaagtgcagtactacttccaa

SEQ ID NO: 223730 - DNA, 25 bp, probe
gagaacatttgcgaactggccgcga

SEQ ID NO: 223731 - DNA, 25 bp, probe
gagaacatttgcgaactggccgcga

SEQ ID NO: 223732 - DNA, 25 bp, probe
gagaatcatagcacttcggtgccga

SEQ ID NO: 223733 - DNA, 25 bp, probe
gagcacctgaactttctggacaaga

SEQ ID NO: 223734 - DNA, 25 bp, probe
gagcacctggaatttgttggaagca

SEQ ID NO: 223735 - DNA, 25 bp, probe
gagcacattgtcaagttctatggag

SEQ ID NO: 223736 - DNA, 25 bp, probe
gagacttgtctagctttggggtggc

SEQ ID NO: 223737 - DNA, 25 bp, probe
gagaaagttaccattcagaggtgca

SEQ ID NO: 223738 - DNA, 25 bp, probe
gagcacaactatattcttatgaagg

SEQ ID NO: 223739 - DNA, 25 bp, probe
gagaatacattgatctgttaaagaa

SEQ ID NO: 223740 - DNA, 25 bp, probe
gagaatacattgatctgttaaagaa

SEQ ID NO: 223741 - DNA, 25 bp, probe
gagaatcaagatgtgcctcataaaa

SEQ ID NO: 223742 - DNA, 25 bp, probe
gagaacaagataacgcctacaccac

SEQ ID NO: 223743 - DNA, 25 bp, probe
gagaagaccttggagcactataccc

SEQ ID NO: 223744 - DNA, 25 bp, probe
gagaagggcgctagtgcctaacctc

SEQ ID NO: 223745 - DNA, 25 bp, probe
gagaaggaccacaagcgttacctgg

SEQ ID NO: 223746 - DNA, 25 bp, probe
gagaaggatctaggctgttgtacca

SEQ ID NO: 223747 - DNA, 25 bp, probe
gagaaggatctaggctgttgtacca

SEQ ID NO: 223748 - DNA, 25 bp, probe
gagacagttctctgtggttcaggaa

SEQ ID NO: 223749 - DNA, 25 bp, probe
gagaagggacatgtgggacgtgagc

SEQ ID NO: 223750 - DNA, 25 bp, probe
gagaaagcgaggaggggcagatagg

SEQ ID NO: 223751 - DNA, 25 bp, probe
gagaaagcgaagcaggagagggccg

SEQ ID NO: 223752 - DNA, 25 bp, probe
gtgaaagccaagttagagggccgag

SEQ ID NO: 223753 - DNA, 25 bp, probe
gtgaaagccaagttagagggccgag

SEQ ID NO: 223754 - DNA, 25 bp, probe
gagaaacgaacatagatggagccat

SEQ ID NO: 223755 - DNA, 25 bp, probe
gagcacaacagcaaataagcaggac

SEQ ID NO: 223756 - DNA, 25 bp, probe
gagacagacagcaccaaatggtcag

SEQ ID NO: 223757 - DNA, 25 bp, probe
gagaaagcccccaagcatgttggct

SEQ ID NO: 223758 - DNA, 25 bp, probe
gagcaagagatggccacggctgctt

SEQ ID NO: 223759 - DNA, 25 bp, probe
gagagaagatggtgtggtctacgag

SEQ ID NO: 223760 - DNA, 25 bp, probe
gagcaaagtggctgtgtgttccgag

SEQ ID NO: 223761 - DNA, 25 bp, probe
gagcaaacgtcaactgtgctgtctc

SEQ ID NO: 223762 - DNA, 25 bp, probe
gagcaagatcagaatagtagcagat

SEQ ID NO: 223763 - DNA, 25 bp, probe
gagcaatattctagatgtcatggat

SEQ ID NO: 223764 - DNA, 25 bp, probe
gagcacagatctgtttcgtgcattg

SEQ ID NO: 223765 - DNA, 25 bp, probe
gagcaatgtcgtcttcatggcattg

SEQ ID NO: 223766 - DNA, 25 bp, probe
gagaattcactgacgtgtggcttaa

SEQ ID NO: 223767 - DNA, 25 bp, probe
gagaatgaacagtgctggtttggca

SEQ ID NO: 223768 - DNA, 25 bp, probe
gagcaagaggagagggatgtcgggg

SEQ ID NO: 223769 - DNA, 25 bp, probe
gagaatatcctgtgtgtgaatcggg

SEQ ID NO: 223770 - DNA, 25 bp, probe
gagacaatccgtggtgtatactctg

SEQ ID NO: 223771 - DNA, 25 bp, probe
gagacaaccagtgtcagtacatctg

SEQ ID NO: 223772 - DNA, 25 bp, probe
gagacgcggagtggtagtgctcacg

SEQ ID NO: 223773 - DNA, 25 bp, probe
gagagagaggcaatggctccttcac

SEQ ID NO: 223774 - DNA, 25 bp, probe
gagagagaggcaatggctccttcac

SEQ ID NO: 223775 - DNA, 25 bp, probe
gagaatgagacagcctgcgcttaga

SEQ ID NO: 223776 - DNA, 25 bp, probe
gagcacgatgacacgttgccatcac

SEQ ID NO: 223777 - DNA, 25 bp, probe
gagcagcgagaacgcctggatgacc

SEQ ID NO: 223778 - DNA, 25 bp, probe
gagcaaaaacaggtggtacctccct

SEQ ID NO: 223779 - DNA, 25 bp, probe
gatgcaaaaattctttggcctacct

SEQ ID NO: 223780 - DNA, 25 bp, probe
gagcaaaatggtcattgtgtgcctc

SEQ ID NO: 223781 - DNA, 25 bp, probe
gagcaaaatggtcattgtgtgcctc

SEQ ID NO: 223782 - DNA, 25 bp, probe
gagaactgaagtactggggcctcct

SEQ ID NO: 223783 - DNA, 25 bp, probe
gagaactgaagtactggggcctcct

SEQ ID NO: 223784 - DNA, 25 bp, probe
gagaaatgaaacttgggtcgatact

SEQ ID NO: 223785 - DNA, 25 bp, probe
gagacaagaaacctgtttcaacttg

SEQ ID NO: 223786 - DNA, 25 bp, probe
gagaagcggaacctctataatgcct

SEQ ID NO: 223787 - DNA, 25 bp, probe
gagaactaatatgttaattgcctta

SEQ ID NO: 223788 - DNA, 25 bp, probe
gagaagtaattcctctgattctgtt

SEQ ID NO: 223789 - DNA, 25 bp, probe
gagaatatgtgttcgtctgtttgtt

SEQ ID NO: 223790 - DNA, 25 bp, probe
gatagttgctaatccttatttcttc

SEQ ID NO: 223791 - DNA, 25 bp, probe
gagaacttcaagtccttcatcttca

SEQ ID NO: 223792 - DNA, 25 bp, probe
gagaacttcaaaacctttgtgttcg

SEQ ID NO: 223793 - DNA, 25 bp, probe
gagaagttcagatacacccggactc

SEQ ID NO: 223794 - DNA, 25 bp, probe
gagttgttaaccagtcgggagctct

SEQ ID NO: 223795 - DNA, 25 bp, probe
gagttttccaccagtctgaaaggca

SEQ ID NO: 223796 - DNA, 25 bp, probe
gagttttccaccagtctgaaaggca

SEQ ID NO: 223797 - DNA, 25 bp, probe
gagtcagttaccgtacacgagaaga

SEQ ID NO: 223798 - DNA, 25 bp, probe
gagaagttacgagaactggtcagca

SEQ ID NO: 223799 - DNA, 25 bp, probe
gagaagatggtcaactacctggtca

SEQ ID NO: 223800 - DNA, 25 bp, probe
gagaagatggtcaactacctggtca

SEQ ID NO: 223801 - DNA, 25 bp, probe
gagcaaaagtctgcgaccatcgtca

SEQ ID NO: 223802 - DNA, 25 bp, probe
gagaaaatccccaactatgcatgcc

SEQ ID NO: 223803 - DNA, 25 bp, probe
gagaaaatcctcatgctgtatcacc

SEQ ID NO: 223804 - DNA, 25 bp, probe
gagaaaaactcaggcaagacctctc

SEQ ID NO: 223805 - DNA, 25 bp, probe
gagcaaaaaagagacgcacttcttc

SEQ ID NO: 223806 - DNA, 25 bp, probe
gagaaataagaatactgcaattttg

SEQ ID NO: 223807 - DNA, 25 bp, probe
gagacaatttaaggcctgcactctt

SEQ ID NO: 223808 - DNA, 25 bp, probe
gagagaagttagacaggtagatctt

SEQ ID NO: 223809 - DNA, 25 bp, probe
gagaggatttggtccctcaactatc

SEQ ID NO: 223810 - DNA, 25 bp, probe
gagaagagaaggttgctccatatca

SEQ ID NO: 223811 - DNA, 25 bp, probe
gagaagagcaagggttccctcaaga

SEQ ID NO: 223812 - DNA, 25 bp, probe
gagaagaagacggctgtgccaccca

SEQ ID NO: 223813 - DNA, 25 bp, probe
gagaagaataagccgtccactgaag

SEQ ID NO: 223814 - DNA, 25 bp, probe
gagaaggaagagccgttcaaaagac

SEQ ID NO: 223815 - DNA, 25 bp, probe
gagaagtacagggcagaaccaagaa

SEQ ID NO: 223816 - DNA, 25 bp, probe
gagaagccataagagagagaccgaa

SEQ ID NO: 223817 - DNA, 25 bp, probe
gagaagccaacagagcagtaagcgc

SEQ ID NO: 223818 - DNA, 25 bp, probe
gagaggatcaacccagagctgaacc

SEQ ID NO: 223819 - DNA, 25 bp, probe
gagaagacagtcccaggagaagctg

SEQ ID NO: 223820 - DNA, 25 bp, probe
gagaatgccagtgtcacaaaaggag

SEQ ID NO: 223821 - DNA, 25 bp, probe
gagaatccttacaccaaagctgatg

SEQ ID NO: 223822 - DNA, 25 bp, probe
gagacctattaagcaaacttgatgt

SEQ ID NO: 223823 - DNA, 25 bp, probe
gagacacgttacagaacctatgttc

SEQ ID NO: 223824 - DNA, 25 bp, probe
gagaacctgaaacaaatccattttg

SEQ ID NO: 223825 - DNA, 25 bp, probe
gagaaacaacaacacagtcacattt

SEQ ID NO: 223826 - DNA, 25 bp, probe
gagaaactagaagccagtgaactct

SEQ ID NO: 223827 - DNA, 25 bp, probe
gagaaactagaagccagtgaactct

SEQ ID NO: 223828 - DNA, 25 bp, probe
gagaaactgaacggcacagtgccct

SEQ ID NO: 223829 - DNA, 25 bp, probe
gagaaactgaacggcacagtgccct

SEQ ID NO: 223830 - DNA, 25 bp, probe
gagaatatgctgtaggctgcctgcg

SEQ ID NO: 223831 - DNA, 25 bp, probe
gagaaggagggaagcctgggggcac

SEQ ID NO: 223832 - DNA, 25 bp, probe
gagaatcgggggacctgaggtcaca

SEQ ID NO: 223833 - DNA, 25 bp, probe
gagaatctgggggactgggagtggg

SEQ ID NO: 223834 - DNA, 25 bp, probe
gagaatctgggggactgggagtggg

SEQ ID NO: 223835 - DNA, 25 bp, probe
gagcaactgggctgtagggcagggc

SEQ ID NO: 223836 - DNA, 25 bp, probe
gagcacagcggggtgagagggattc

SEQ ID NO: 223837 - DNA, 25 bp, probe
gagagcatgtgggggaaggccttgc

SEQ ID NO: 223838 - DNA, 25 bp, probe
gatgaaacgccggaagtccgtttag

SEQ ID NO: 223839 - DNA, 25 bp, probe
gatgaaacgccggaagtccgtttag

SEQ ID NO: 223840 - DNA, 25 bp, probe
gatgaacaccgtgaacctcagttat

SEQ ID NO: 223841 - DNA, 25 bp, probe
gagaatctaagtcaaactcactatt

SEQ ID NO: 223842 - DNA, 25 bp, probe
gagaatctaagtcaaactcactatt

SEQ ID NO: 223843 - DNA, 25 bp, probe
gagacataaagtcttcaaatgttgt

SEQ ID NO: 223844 - DNA, 25 bp, probe
gagacaaaagggatctgacttctgg

SEQ ID NO: 223845 - DNA, 25 bp, probe
gagcacaacatgtggaactacttgt

SEQ ID NO: 223846 - DNA, 25 bp, probe
gggacactctaacacaactttccct

SEQ ID NO: 223847 - DNA, 25 bp, probe
gggtcacccaagcaacaaagtcccg

SEQ ID NO: 223848 - DNA, 25 bp, probe
taggaccctttacaaaagcaccctg

SEQ ID NO: 223849 - DNA, 25 bp, probe
tggacgaccttctgaacaaaacccg

SEQ ID NO: 223850 - DNA, 25 bp, probe
gagactcaactcccagaataaaacc

SEQ ID NO: 223851 - DNA, 25 bp, probe
gagaacaacataaagcaaacaacat

SEQ ID NO: 223852 - DNA, 25 bp, probe
gagaacaacataaagcaaacaacat

SEQ ID NO: 223853 - DNA, 25 bp, probe
gagaactggccaacgagcacaagaa

SEQ ID NO: 223854 - DNA, 25 bp, probe
gagaatttatcaaccaccacaatcc

SEQ ID NO: 223855 - DNA, 25 bp, probe
gagaatttttcacactaacacagcg

SEQ ID NO: 223856 - DNA, 25 bp, probe
gagaatggtctttacctaacacagc

SEQ ID NO: 223857 - DNA, 25 bp, probe
gagaatggatacaaatcctgcaaaa

SEQ ID NO: 223858 - DNA, 25 bp, probe
gagagatgcttagagacccagaatt

SEQ ID NO: 223859 - DNA, 25 bp, probe
gagaatgctctacggaaacatattc

SEQ ID NO: 223860 - DNA, 25 bp, probe
gagaagtttccggaatgctgccgcc

SEQ ID NO: 223861 - DNA, 25 bp, probe
gagaatattttgggcaatgagcacc

SEQ ID NO: 223862 - DNA, 25 bp, probe
gagaatattttgggcaatgagcacc

SEQ ID NO: 223863 - DNA, 25 bp, probe
gagaatgatgtcttcagagaaagca

SEQ ID NO: 223864 - DNA, 25 bp, probe
gagaatgtgacaggcacagatgaat

SEQ ID NO: 223865 - DNA, 25 bp, probe
gagaagctgatggtccaacagattg

SEQ ID NO: 223866 - DNA, 25 bp, probe
gagaatgttactgcaatcatgttgt

SEQ ID NO: 223867 - DNA, 25 bp, probe
gagcaagtgacactgtactttagtg

SEQ ID NO: 223868 - DNA, 25 bp, probe
gagcaaggagagtggttcatcaatg

SEQ ID NO: 223869 - DNA, 25 bp, probe
gagcaagagagggtgatgttccgga

SEQ ID NO: 223870 - DNA, 25 bp, probe
gagcaagagagggtgatgttccgga

SEQ ID NO: 223871 - DNA, 25 bp, probe
gagaaggaagcttggtaccgagagg

SEQ ID NO: 223872 - DNA, 25 bp, probe
gagaagtgaaataagaacctagcat

SEQ ID NO: 223873 - DNA, 25 bp, probe
gagaagtgaaataagaacctagcat

SEQ ID NO: 223874 - DNA, 25 bp, probe
gagacagtagccaagagaaccccac

SEQ ID NO: 223875 - DNA, 25 bp, probe
gagaaatatgccgaggagaacttca

SEQ ID NO: 223876 - DNA, 25 bp, probe
gagacaaggccttggggacatggca

SEQ ID NO: 223877 - DNA, 25 bp, probe
gagagaagtctttccggaggtcagt

SEQ ID NO: 223878 - DNA, 25 bp, probe
gagcaacgtggacttgcggaggtcc

SEQ ID NO: 223879 - DNA, 25 bp, probe
gagaaggtggatctctggagccttg

SEQ ID NO: 223880 - DNA, 25 bp, probe
gagaaggtggatctctggagccttg

SEQ ID NO: 223881 - DNA, 25 bp, probe
gagaaggacgagttcgacatcccgg

SEQ ID NO: 223882 - DNA, 25 bp, probe
gagaagtgacggttcctacacagga

SEQ ID NO: 223883 - DNA, 25 bp, probe
gagaaggaaggctccatctccagtg

SEQ ID NO: 223884 - DNA, 25 bp, probe
gagaaggaaggctccatctccagtg

SEQ ID NO: 223885 - DNA, 25 bp, probe
gagacaggaaaatcctctggctggc

SEQ ID NO: 223886 - DNA, 25 bp, probe
gagacatttacctcaatgctggtcc

SEQ ID NO: 223887 - DNA, 25 bp, probe
gagaatattctccttgatgatcgtg

SEQ ID NO: 223888 - DNA, 25 bp, probe
gagaattctcctttagacagtgggc

SEQ ID NO: 223889 - DNA, 25 bp, probe
gagaagggccgagtaaagtgtgatc

SEQ ID NO: 223890 - DNA, 25 bp, probe
gagaagggttactactacttgcatc

SEQ ID NO: 223891 - DNA, 25 bp, probe
gagatagtggggagacttcttggct

SEQ ID NO: 223892 - DNA, 25 bp, probe
gagatagtggggagacttcttggct

SEQ ID NO: 223893 - DNA, 25 bp, probe
gagaaggtggaggctatgctttggg

SEQ ID NO: 223894 - DNA, 25 bp, probe
gagaagttggaagatctgctgtgct

SEQ ID NO: 223895 - DNA, 25 bp, probe
gagaagtgtgcccagtactggccat

SEQ ID NO: 223896 - DNA, 25 bp, probe
gagaatctgttccattacttgactg

SEQ ID NO: 223897 - DNA, 25 bp, probe
gagacatggcatacggttactgact

SEQ ID NO: 223898 - DNA, 25 bp, probe
gagaatggtgttattactgacaagg

SEQ ID NO: 223899 - DNA, 25 bp, probe
gagacatactgttactaaacataag

SEQ ID NO: 223900 - DNA, 25 bp, probe
gagacacactagtactattagctat

SEQ ID NO: 223901 - DNA, 25 bp, probe
gagacacagtaccctgggaggcata

SEQ ID NO: 223902 - DNA, 25 bp, probe
gagaaagatgcaagacatgtagtaa

SEQ ID NO: 223903 - DNA, 25 bp, probe
gagaaggctctggacacgagctacg

SEQ ID NO: 223904 - DNA, 25 bp, probe
gagaagtatatgctcatgcagtgct

SEQ ID NO: 223905 - DNA, 25 bp, probe
gagaatggaatcctctgtggatgac

SEQ ID NO: 223906 - DNA, 25 bp, probe
gagaatggaatcctctgtggatgac

SEQ ID NO: 223907 - DNA, 25 bp, probe
gagaacgcacaggctattagtcatg

SEQ ID NO: 223908 - DNA, 25 bp, probe
gagaagtgcatggccctcatggcca

SEQ ID NO: 223909 - DNA, 25 bp, probe
gagaagtgcatggccctcatggcca

SEQ ID NO: 223910 - DNA, 25 bp, probe
gagaatggcatgaacccgggaggtg

SEQ ID NO: 223911 - DNA, 25 bp, probe
gagaatggcatgaacctgggaggcg

SEQ ID NO: 223912 - DNA, 25 bp, probe
gagaagctgctgacagccgtggagg

SEQ ID NO: 223913 - DNA, 25 bp, probe
gagcaatgtctgatcacaggggcgc

SEQ ID NO: 223914 - DNA, 25 bp, probe
gatcaacatcgcctccatgttgggc

SEQ ID NO: 223915 - DNA, 25 bp, probe
gagaatcatcagccacgtgtagggt

SEQ ID NO: 223916 - DNA, 25 bp, probe
gagaagctgcagggcgtggagtgcg

SEQ ID NO: 223917 - DNA, 25 bp, probe
gagaagtgcagggggagccttccag

SEQ ID NO: 223918 - DNA, 25 bp, probe
gagacagagccggggtcactgtcct

SEQ ID NO: 223919 - DNA, 25 bp, probe
gagacacaggtgatggcaactccct

SEQ ID NO: 223920 - DNA, 25 bp, probe
gagacatctcggaggtacaaccctg

SEQ ID NO: 223921 - DNA, 25 bp, probe
gagacacgttatgagggaagccctg

SEQ ID NO: 223922 - DNA, 25 bp, probe
gagacaggatttgggggttctgcca

SEQ ID NO: 223923 - DNA, 25 bp, probe
gagaaggtttcacatgggacccaac

SEQ ID NO: 223924 - DNA, 25 bp, probe
gagaaggctgcttcggaggaaccca

SEQ ID NO: 223925 - DNA, 25 bp, probe
gagaaggctgcttcggaggaaccca

SEQ ID NO: 223926 - DNA, 25 bp, probe
gagacttgtgcctggaaggaaaaag

SEQ ID NO: 223927 - DNA, 25 bp, probe
gagacttttcagcaaatggaaccaa

SEQ ID NO: 223928 - DNA, 25 bp, probe
gagactgtatccttcacaggggacc

SEQ ID NO: 223929 - DNA, 25 bp, probe
gagactggacattaaaggggctaga

SEQ ID NO: 223930 - DNA, 25 bp, probe
gagagattgaaataatgcggggtct

SEQ ID NO: 223931 - DNA, 25 bp, probe
gagaactactgatagggctgggtct

SEQ ID NO: 223932 - DNA, 25 bp, probe
gagaactactaaagtgcctacccca

SEQ ID NO: 223933 - DNA, 25 bp, probe
gagaacatcctgatagacctacgcc

SEQ ID NO: 223934 - DNA, 25 bp, probe
gagaacatcctgatagacctacgcc

SEQ ID NO: 223935 - DNA, 25 bp, probe
gagagcagcccatgtaacttacagc

SEQ ID NO: 223936 - DNA, 25 bp, probe
gagagaccctctgaattttagcaca

SEQ ID NO: 223937 - DNA, 25 bp, probe
gagaaccccatgcagtttgaagaat

SEQ ID NO: 223938 - DNA, 25 bp, probe
gagagcccacctctggtagaaaaga

SEQ ID NO: 223939 - DNA, 25 bp, probe
ggaccaacggactgatttagaagag

SEQ ID NO: 223940 - DNA, 25 bp, probe
gagaccaacagggtagtgggttaga

SEQ ID NO: 223941 - DNA, 25 bp, probe
gagaccaaagtgatgaactgtgttg

SEQ ID NO: 223942 - DNA, 25 bp, probe
gagacctttgagaaggcaagtttga

SEQ ID NO: 223943 - DNA, 25 bp, probe
gagaacttggagaggcaccaggaga

SEQ ID NO: 223944 - DNA, 25 bp, probe
gagaacttggagaggcaccaggaga

SEQ ID NO: 223945 - DNA, 25 bp, probe
gagaaatgtgttcaggtccagatat

SEQ ID NO: 223946 - DNA, 25 bp, probe
gagaatttgtgttgaacccagtttc

SEQ ID NO: 223947 - DNA, 25 bp, probe
gagaatttggctttgcgtgaagttt

SEQ ID NO: 223948 - DNA, 25 bp, probe
gagaatttggctttgcgtgaagttt

SEQ ID NO: 223949 - DNA, 25 bp, probe
gagacatttggtttcattgaagatg

SEQ ID NO: 223950 - DNA, 25 bp, probe
gagacacttgggactactagagata

SEQ ID NO: 223951 - DNA, 25 bp, probe
gagaagcactggatccaaagcatgt

SEQ ID NO: 223952 - DNA, 25 bp, probe
gagaagactggtgcatttacagctg

SEQ ID NO: 223953 - DNA, 25 bp, probe
gagaagactggtgcatttacagctg

SEQ ID NO: 223954 - DNA, 25 bp, probe
gagacgattggggatgcttacatgg

SEQ ID NO: 223955 - DNA, 25 bp, probe
gagagctatgggcattgaaactagt

SEQ ID NO: 223956 - DNA, 25 bp, probe
gagacctggcagctcgaaactgttt

SEQ ID NO: 223957 - DNA, 25 bp, probe
gagacgtggagtaggtatttttgct

SEQ ID NO: 223958 - DNA, 25 bp, probe
gagaaggaagtccgtttgatgattc

SEQ ID NO: 223959 - DNA, 25 bp, probe
gagaaggacctacgtatgatgatat

SEQ ID NO: 223960 - DNA, 25 bp, probe
gagaaggacctacgtatgatgatat

SEQ ID NO: 223961 - DNA, 25 bp, probe
gagaagtgactcagctgccatagct

SEQ ID NO: 223962 - DNA, 25 bp, probe
gagaagtgactcagctgccatagct

SEQ ID NO: 223963 - DNA, 25 bp, probe
gagaagatccgcaagctggtggctg

SEQ ID NO: 223964 - DNA, 25 bp, probe
gagaagatccgcaagctggtggctg

SEQ ID NO: 223965 - DNA, 25 bp, probe
gagaaatcctgcccagagggcgatg

SEQ ID NO: 223966 - DNA, 25 bp, probe
gagaacatttcacagaagtgcctga

SEQ ID NO: 223967 - DNA, 25 bp, probe
gagaagagatttcatgcagaaccag

SEQ ID NO: 223968 - DNA, 25 bp, probe
gagagaagtttcacaggacatggac

SEQ ID NO: 223969 - DNA, 25 bp, probe
gagaggaaggccacaggtgtgggca

SEQ ID NO: 223970 - DNA, 25 bp, probe
gagaagccacgcatggacgacgggc

SEQ ID NO: 223971 - DNA, 25 bp, probe
gagaagccacgcatggacgacgggc

SEQ ID NO: 223972 - DNA, 25 bp, probe
gagaagtcactaatgtgacaacagc

SEQ ID NO: 223973 - DNA, 25 bp, probe
gagagcaacattaagggcaaagcca

SEQ ID NO: 223974 - DNA, 25 bp, probe
gagacacatcttaaggggacccaca

SEQ ID NO: 223975 - DNA, 25 bp, probe
gagagcctgtcatagggaactgcat

SEQ ID NO: 223976 - DNA, 25 bp, probe
gagagcacgtaccaataaaaatgtt

SEQ ID NO: 223977 - DNA, 25 bp, probe
gagacggctgacctgaaggagacgt

SEQ ID NO: 223978 - DNA, 25 bp, probe
gagaacctgaggggagggggctggg

SEQ ID NO: 223979 - DNA, 25 bp, probe
gagaacactggggtataggggccgg

SEQ ID NO: 223980 - DNA, 25 bp, probe
gagaacaaggtgctgaagatagagc

SEQ ID NO: 223981 - DNA, 25 bp, probe
gagaaccttctgagagactcacagc

SEQ ID NO: 223982 - DNA, 25 bp, probe
gagaactcttcagccatgattagac

SEQ ID NO: 223983 - DNA, 25 bp, probe
gagaactttcatgcacaagcagaga

SEQ ID NO: 223984 - DNA, 25 bp, probe
gagaacctgctggccaagaacagca

SEQ ID NO: 223985 - DNA, 25 bp, probe
gagaaccactgtgacatggctagca

SEQ ID NO: 223986 - DNA, 25 bp, probe
gagaaccactgtgacatggctagca

SEQ ID NO: 223987 - DNA, 25 bp, probe
gagaacccaggcaacaggaagagaa

SEQ ID NO: 223988 - DNA, 25 bp, probe
gagaacccagtgaccagcgggaaag

SEQ ID NO: 223989 - DNA, 25 bp, probe
gagaaccctgctgtacaagagagta

SEQ ID NO: 223990 - DNA, 25 bp, probe
gatgagacacacccttacacggtga

SEQ ID NO: 223991 - DNA, 25 bp, probe
gagaaaagccacggaccgttgcaca

SEQ ID NO: 223992 - DNA, 25 bp, probe
gggaaccaacgtcatcgttgccaac

SEQ ID NO: 223993 - DNA, 25 bp, probe
gggaaccaacgtcatcgttgccaac

SEQ ID NO: 223994 - DNA, 25 bp, probe
gagaaacacaacaatttctgtacta

SEQ ID NO: 223995 - DNA, 25 bp, probe
gagaagaacctgcactttgtccata

SEQ ID NO: 223996 - DNA, 25 bp, probe
gagacagaatttcactcttctcacc

SEQ ID NO: 223997 - DNA, 25 bp, probe
gagaacaaaaagacctcctcatcct

SEQ ID NO: 223998 - DNA, 25 bp, probe
gagaacaaaaagacctcctcatcct

SEQ ID NO: 223999 - DNA, 25 bp, probe
gagacaaagaaacacataccataca

SEQ ID NO: 224000 - DNA, 25 bp, probe
gagaagggacattccacaaccattt

SEQ ID NO: 224001 - DNA, 25 bp, probe
gagactggagccaccaagaaattgt

SEQ ID NO: 224002 - DNA, 25 bp, probe
gagacgtagcatcacgcgagacagt

SEQ ID NO: 224003 - DNA, 25 bp, probe
gagacgtagcatcacgcgagacagt

SEQ ID NO: 224004 - DNA, 25 bp, probe
gagaatgcggcactgacgggcaagt

SEQ ID NO: 224005 - DNA, 25 bp, probe
gagaaggatgcactttggacaagtc

SEQ ID NO: 224006 - DNA, 25 bp, probe
gagaagagatgtctgaggaaggtca

SEQ ID NO: 224007 - DNA, 25 bp, probe
gagagaagatgtcctgaaagaagct

SEQ ID NO: 224008 - DNA, 25 bp, probe
gagagaagatgtcctgaaagaagct

SEQ ID NO: 224009 - DNA, 25 bp, probe
gagaacagatgcacgagaaatccat

SEQ ID NO: 224010 - DNA, 25 bp, probe
gagaacagagctacgcagagcatcc

SEQ ID NO: 224011 - DNA, 25 bp, probe
gagaaagatgaccacacatccagcc

SEQ ID NO: 224012 - DNA, 25 bp, probe
gagaccagttgccaaatgatcagcc

SEQ ID NO: 224013 - DNA, 25 bp, probe
gagaaggttgctccatatcatattc

SEQ ID NO: 224014 - DNA, 25 bp, probe
gagaaggagctgctcatctacttgc

SEQ ID NO: 224015 - DNA, 25 bp, probe
gagaaggttcttcgctcagtatgaa

SEQ ID NO: 224016 - DNA, 25 bp, probe
gagaagtttgatatgagcagttaga

SEQ ID NO: 224017 - DNA, 25 bp, probe
gagaagcacgtgtttgagcaggcat

SEQ ID NO: 224018 - DNA, 25 bp, probe
gagaaggcaggaatgtgtggcagat

SEQ ID NO: 224019 - DNA, 25 bp, probe
gagaagggcaggcatatggagtatg

SEQ ID NO: 224020 - DNA, 25 bp, probe
gagaagggcaggcatatggagtatg

SEQ ID NO: 224021 - DNA, 25 bp, probe
gagagagggggcactgtggtcaggc

SEQ ID NO: 224022 - DNA, 25 bp, probe
gagaagtggtggcgtgggaatggct

SEQ ID NO: 224023 - DNA, 25 bp, probe
gagaagggcccactgggtgaaggcc

SEQ ID NO: 224024 - DNA, 25 bp, probe
gagacagggccacggccctgaggcg

SEQ ID NO: 224025 - DNA, 25 bp, probe
gagaatgtactgtgccccagaggtt

SEQ ID NO: 224026 - DNA, 25 bp, probe
gagaagtcgcagtgcgcactggagg

SEQ ID NO: 224027 - DNA, 25 bp, probe
gagaaattcagctgtcattcagtta

SEQ ID NO: 224028 - DNA, 25 bp, probe
gagaaattcagctgtcattcagtta

SEQ ID NO: 224029 - DNA, 25 bp, probe
gagaacattgctgattcttcgtgca

SEQ ID NO: 224030 - DNA, 25 bp, probe
gagaactgtgtggtacatcgcgata

SEQ ID NO: 224031 - DNA, 25 bp, probe
gagaacgtggtgggcatgagcaatg

SEQ ID NO: 224032 - DNA, 25 bp, probe
gagaacgaactagcagaggagccag

SEQ ID NO: 224033 - DNA, 25 bp, probe
gagagtggaaaaggaagcgacccag

SEQ ID NO: 224034 - DNA, 25 bp, probe
gagagggaacgataatgaagaacag

SEQ ID NO: 224035 - DNA, 25 bp, probe
gagagggaacgataatgaagaacag

SEQ ID NO: 224036 - DNA, 25 bp, probe
gagagggattcgaaaacagtcctca

SEQ ID NO: 224037 - DNA, 25 bp, probe
gagaggctttcgacgaaacatctct

SEQ ID NO: 224038 - DNA, 25 bp, probe
gagggcatcatagggggacccctag

SEQ ID NO: 224039 - DNA, 25 bp, probe
gagaggatcatgagggactcccctg

SEQ ID NO: 224040 - DNA, 25 bp, probe
gagagagattaacaactcccacatc

SEQ ID NO: 224041 - DNA, 25 bp, probe
gagaaggttgcagagcacttcccac

SEQ ID NO: 224042 - DNA, 25 bp, probe
gagaaggttcgatcctactcagcaa

SEQ ID NO: 224043 - DNA, 25 bp, probe
gagaagggttgatcctgcatctggg

SEQ ID NO: 224044 - DNA, 25 bp, probe
gagaaggatggcatcaccgttgtgg

SEQ ID NO: 224045 - DNA, 25 bp, probe
gagacaagtgtcacagcctggttgg

SEQ ID NO: 224046 - DNA, 25 bp, probe
gagacacagagtggagccctcagtt

SEQ ID NO: 224047 - DNA, 25 bp, probe
gagactgccagtggagacggaatct

SEQ ID NO: 224048 - DNA, 25 bp, probe
gagagctccaaaccacggaaagccc

SEQ ID NO: 224049 - DNA, 25 bp, probe
gagactacaaagacacggaatggtt

SEQ ID NO: 224050 - DNA, 25 bp, probe
gagacccagaatatctagagcagcc

SEQ ID NO: 224051 - DNA, 25 bp, probe
gagacgcaaggatcacttgagccca

SEQ ID NO: 224052 - DNA, 25 bp, probe
gagacacacaaatcaatgggacctg

SEQ ID NO: 224053 - DNA, 25 bp, probe
gagaaacagaatgagcaggcgaagg

SEQ ID NO: 224054 - DNA, 25 bp, probe
gagaaccagctctgagacaggaagc

SEQ ID NO: 224055 - DNA, 25 bp, probe
gagaacgagctgcatggggagaagc

SEQ ID NO: 224056 - DNA, 25 bp, probe
gagaacgtctgcaacatcgtggtgg

SEQ ID NO: 224057 - DNA, 25 bp, probe
gagaactcatcgaaactggggaacc

SEQ ID NO: 224058 - DNA, 25 bp, probe
gagagagtctcagaattggagggct

SEQ ID NO: 224059 - DNA, 25 bp, probe
gagacagtacatgccctgggaggcc

SEQ ID NO: 224060 - DNA, 25 bp, probe
gagaagataatcaccaggacagagg

SEQ ID NO: 224061 - DNA, 25 bp, probe
gagaccaacatcagggaccaggagg

SEQ ID NO: 224062 - DNA, 25 bp, probe
gagactgaacttgtggaccatgtac

SEQ ID NO: 224063 - DNA, 25 bp, probe
gagactgaacttgtggaccatgtac

SEQ ID NO: 224064 - DNA, 25 bp, probe
gagaagaactttgtgcaccgtgacc

SEQ ID NO: 224065 - DNA, 25 bp, probe
gagaacaaacttgggcagccggaac

SEQ ID NO: 224066 - DNA, 25 bp, probe
gagaagaaacttggagctgggcagt

SEQ ID NO: 224067 - DNA, 25 bp, probe
gagaagggatatgggagctggagct

SEQ ID NO: 224068 - DNA, 25 bp, probe
gagaagtggagcttctgagggatgc

SEQ ID NO: 224069 - DNA, 25 bp, probe
gagaagatggagtgcgagggcagca

SEQ ID NO: 224070 - DNA, 25 bp, probe
gagaagccaggaagccggtcatcac

SEQ ID NO: 224071 - DNA, 25 bp, probe
gagaggccggagaccgtatcatatt

SEQ ID NO: 224072 - DNA, 25 bp, probe
gagagaccaaagaccagtgttaatt

SEQ ID NO: 224073 - DNA, 25 bp, probe
gagaactgaaaagtagcgtgctatt

SEQ ID NO: 224074 - DNA, 25 bp, probe
gagaagctgacaaatcatgacccat

SEQ ID NO: 224075 - DNA, 25 bp, probe
gagaagctgacaaatcatgacccat

SEQ ID NO: 224076 - DNA, 25 bp, probe
gagactgtcaagatctcatccctgt

SEQ ID NO: 224077 - DNA, 25 bp, probe
gagacagcatcttgctctgtctccc

SEQ ID NO: 224078 - DNA, 25 bp, probe
gagaagattatcctgtcctgcaaac

SEQ ID NO: 224079 - DNA, 25 bp, probe
gagagagagtgtcttcatgccaacc

SEQ ID NO: 224080 - DNA, 25 bp, probe
gagaagcgggacttccgcacatacc

SEQ ID NO: 224081 - DNA, 25 bp, probe
tggtatcgggcccccgagttactat

SEQ ID NO: 224082 - DNA, 25 bp, probe
gagaacagggccctgtcggtttgtt

SEQ ID NO: 224083 - DNA, 25 bp, probe
gagaaagaccagtggggatttgtaa

SEQ ID NO: 224084 - DNA, 25 bp, probe
gagaaaacaatgtgtctggaattaa

SEQ ID NO: 224085 - DNA, 25 bp, probe
gagaacccaatgtttcgtatatctg

SEQ ID NO: 224086 - DNA, 25 bp, probe
gagaagacagagtctcctagttttg

SEQ ID NO: 224087 - DNA, 25 bp, probe
gagaagacagagatgatccggtcat

SEQ ID NO: 224088 - DNA, 25 bp, probe
gagacagacaacatgaaccagatct

SEQ ID NO: 224089 - DNA, 25 bp, probe
gagaagcacagacttaaacaacaac

SEQ ID NO: 224090 - DNA, 25 bp, probe
gagaactcaatgtaaaatcaaaccc

SEQ ID NO: 224091 - DNA, 25 bp, probe
gagagtcatcagaaaaatacattag

SEQ ID NO: 224092 - DNA, 25 bp, probe
gagagtcaccaattcatacaccggg

SEQ ID NO: 224093 - DNA, 25 bp, probe
gagttccttactaacccagagactt

SEQ ID NO: 224094 - DNA, 25 bp, probe
gagttccttaatattctcaagttct

SEQ ID NO: 224095 - DNA, 25 bp, probe
gattgtggttactgttctacggtct

SEQ ID NO: 224096 - DNA, 25 bp, probe
gagagtggttaatgtattcaaatgt

SEQ ID NO: 224097 - DNA, 25 bp, probe
gagagtggttaatgtattcaaatgt

SEQ ID NO: 224098 - DNA, 25 bp, probe
gagactgaggatcaagtttacatgg

SEQ ID NO: 224099 - DNA, 25 bp, probe
gagacagggcatttgagtttatatc

SEQ ID NO: 224100 - DNA, 25 bp, probe
gagacagggcatttgagtttatatc

SEQ ID NO: 224101 - DNA, 25 bp, probe
gagaagaggctgtgcaagatgttct

SEQ ID NO: 224102 - DNA, 25 bp, probe
gagaagaggctgtgcaagatgttct

SEQ ID NO: 224103 - DNA, 25 bp, probe
gagaagcgcactttgcacagacgtc

SEQ ID NO: 224104 - DNA, 25 bp, probe
gagactggcattttagagacctgtt

SEQ ID NO: 224105 - DNA, 25 bp, probe
gagactggcattttagagacctgtt

SEQ ID NO: 224106 - DNA, 25 bp, probe
gagagacacttttaggacctgatgg

SEQ ID NO: 224107 - DNA, 25 bp, probe
gagaaccaattggaggatgcctgcg

SEQ ID NO: 224108 - DNA, 25 bp, probe
gagaaaactatggactgtgctgctg

SEQ ID NO: 224109 - DNA, 25 bp, probe
gagaagacatcttggcctgatttgc

SEQ ID NO: 224110 - DNA, 25 bp, probe
gagaaatattataccttttcatata

SEQ ID NO: 224111 - DNA, 25 bp, probe
gagaaatattataccttttcatata

SEQ ID NO: 224112 - DNA, 25 bp, probe
gagaacatattaaactgcttattca

SEQ ID NO: 224113 - DNA, 25 bp, probe
gagactcctatttactgcttttact

SEQ ID NO: 224114 - DNA, 25 bp, probe
gagactctttcatttttcttgtaca

SEQ ID NO: 224115 - DNA, 25 bp, probe
gagaacgtgtgccatttgttttgac

SEQ ID NO: 224116 - DNA, 25 bp, probe
gagactagtgatgcattagcttctg

SEQ ID NO: 224117 - DNA, 25 bp, probe
gagactatcgctgttgaatctcaga

SEQ ID NO: 224118 - DNA, 25 bp, probe
gagagtcaacaggtgtcacactaag

SEQ ID NO: 224119 - DNA, 25 bp, probe
gagagtcaacaggtgtcacactaag

SEQ ID NO: 224120 - DNA, 25 bp, probe
gagagtcaccatgtatgcaattaag

SEQ ID NO: 224121 - DNA, 25 bp, probe
gagaaccatcatttcacagttaaaa

SEQ ID NO: 224122 - DNA, 25 bp, probe
gagaagccagcagatcacatcattg

SEQ ID NO: 224123 - DNA, 25 bp, probe
gagaaccaaggatactttcggaaga

SEQ ID NO: 224124 - DNA, 25 bp, probe
gagaactaaggatattctttagcaa

SEQ ID NO: 224125 - DNA, 25 bp, probe
gagaactaaggatattctttagcaa

SEQ ID NO: 224126 - DNA, 25 bp, probe
gagaactgaggacacttttattaca

SEQ ID NO: 224127 - DNA, 25 bp, probe
gagaactgagtgccagttcctttat

SEQ ID NO: 224128 - DNA, 25 bp, probe
gagaagagagtgccagagtctatga

SEQ ID NO: 224129 - DNA, 25 bp, probe
gagaagagaggcctggattcatgtc

SEQ ID NO: 224130 - DNA, 25 bp, probe
gagaagacaatgctggagtctgtga

SEQ ID NO: 224131 - DNA, 25 bp, probe
gagaagacagtgctagagtctatga

SEQ ID NO: 224132 - DNA, 25 bp, probe
gagaacatctttgacactctgcaga

SEQ ID NO: 224133 - DNA, 25 bp, probe
gagaccttcaattacatcaagcaga

SEQ ID NO: 224134 - DNA, 25 bp, probe
gagaccttcaattacatcaagcaga

SEQ ID NO: 224135 - DNA, 25 bp, probe
gagaactatcaaaacaagcagcggg

SEQ ID NO: 224136 - DNA, 25 bp, probe
gagagcctatgctacaatcggcaga

SEQ ID NO: 224137 - DNA, 25 bp, probe
gagagcctatgctacaatcggcaga

SEQ ID NO: 224138 - DNA, 25 bp, probe
gagactctgagactaagggtgaaag

SEQ ID NO: 224139 - DNA, 25 bp, probe
gagagctaagattatctggggaaat

SEQ ID NO: 224140 - DNA, 25 bp, probe
gagacaaagagactggagcggatcc

SEQ ID NO: 224141 - DNA, 25 bp, probe
gagacaaagagactggagcggatcc

SEQ ID NO: 224142 - DNA, 25 bp, probe
gagacaagtgaggtggagggcctgc

SEQ ID NO: 224143 - DNA, 25 bp, probe
gagacaaggacggcagcaaggtgac

SEQ ID NO: 224144 - DNA, 25 bp, probe
gagacacacccttacacggtgactt

SEQ ID NO: 224145 - DNA, 25 bp, probe
gagaaactcctatgcagtgagtgtg

SEQ ID NO: 224146 - DNA, 25 bp, probe
gagaaactcctatgcagtgagtgtg

SEQ ID NO: 224147 - DNA, 25 bp, probe
gagaaacctccggtgtgagatatac

SEQ ID NO: 224148 - DNA, 25 bp, probe
gagaagcgcctggggttcagagatg

SEQ ID NO: 224149 - DNA, 25 bp, probe
gagaagatggtgtggtctacgaggt

SEQ ID NO: 224150 - DNA, 25 bp, probe
gagaaagtgatggggcctccgatga

SEQ ID NO: 224151 - DNA, 25 bp, probe
gagaacagtgagaggccaagattga

SEQ ID NO: 224152 - DNA, 25 bp, probe
gagaaatggatgtttccaaattcca

SEQ ID NO: 224153 - DNA, 25 bp, probe
gagaaattatgttttcatccattaa

SEQ ID NO: 224154 - DNA, 25 bp, probe
gagaaatactgtccattccacatat

SEQ ID NO: 224155 - DNA, 25 bp, probe
gagaaatactgtccattccacatat

SEQ ID NO: 224156 - DNA, 25 bp, probe
gagaaaactgcatcataactttaca

SEQ ID NO: 224157 - DNA, 25 bp, probe
gagaagaagctctcatacgccttcc

SEQ ID NO: 224158 - DNA, 25 bp, probe
gagacagaactgtccacatctgcct

SEQ ID NO: 224159 - DNA, 25 bp, probe
gagacagtctcatcgcagtctcagc

SEQ ID NO: 224160 - DNA, 25 bp, probe
gagacatggcatccatcgtgtctga

SEQ ID NO: 224161 - DNA, 25 bp, probe
gagaagacaccttgtgctcatgggc

SEQ ID NO: 224162 - DNA, 25 bp, probe
gagaagcagtcagagcggcatgggc

SEQ ID NO: 224163 - DNA, 25 bp, probe
gagaagcagtcagagcggcatgggc

SEQ ID NO: 224164 - DNA, 25 bp, probe
gagaccaacggacggattggctggt

SEQ ID NO: 224165 - DNA, 25 bp, probe
gagaccaacgttcaagcagttggta

SEQ ID NO: 224166 - DNA, 25 bp, probe
gagacccacgttttcagagttggtg

SEQ ID NO: 224167 - DNA, 25 bp, probe
gagaaccctttaatagcagatttgg

SEQ ID NO: 224168 - DNA, 25 bp, probe
gagaaccctttaatagcagatttgg

SEQ ID NO: 224169 - DNA, 25 bp, probe
gagaaccctttaatagcagatttgg

SEQ ID NO: 224170 - DNA, 25 bp, probe
gagaaacttttggtaaatatcgtga

SEQ ID NO: 224171 - DNA, 25 bp, probe
gagaacttctttctcttaagaggaa

SEQ ID NO: 224172 - DNA, 25 bp, probe
gagaacttattttgtgcctagagct

SEQ ID NO: 224173 - DNA, 25 bp, probe
gagaccattattttggaccagatca

SEQ ID NO: 224174 - DNA, 25 bp, probe
gagacactctatctgtaatccaaga

SEQ ID NO: 224175 - DNA, 25 bp, probe
gagacatgtcttcattcaaatccag

SEQ ID NO: 224176 - DNA, 25 bp, probe
gagaggagcctgtttaaatccagca

SEQ ID NO: 224177 - DNA, 25 bp, probe
gagaggagcctgtttaaatccagca

SEQ ID NO: 224178 - DNA, 25 bp, probe
gagaccagcactctgtgaaaccttg

SEQ ID NO: 224179 - DNA, 25 bp, probe
gagaccagctcttaatatcaacctt

SEQ ID NO: 224180 - DNA, 25 bp, probe
gagaccagcttctaaacatacgcca

SEQ ID NO: 224181 - DNA, 25 bp, probe
gagaaatgctggtcacaaacaccca

SEQ ID NO: 224182 - DNA, 25 bp, probe
gagaaatgcacctacaagaacgaag

SEQ ID NO: 224183 - DNA, 25 bp, probe
gagacaggacatgggaagaacagaa

SEQ ID NO: 224184 - DNA, 25 bp, probe
gagagtggcaagcgaaaactagagg

SEQ ID NO: 224185 - DNA, 25 bp, probe
gagagggcacgagaacccaaaggga

SEQ ID NO: 224186 - DNA, 25 bp, probe
gagagagggcacgagaacccaaagg

SEQ ID NO: 224187 - DNA, 25 bp, probe
gagaaaggcctgttcaactacaagc

SEQ ID NO: 224188 - DNA, 25 bp, probe
gagaaagctgccaccaagaacaagc

SEQ ID NO: 224189 - DNA, 25 bp, probe
gagaaccatggaaccacaggaaagg

SEQ ID NO: 224190 - DNA, 25 bp, probe
gagaaaaggataaccacctgaaagg

SEQ ID NO: 224191 - DNA, 25 bp, probe
gagaaaagttcaatactcttgaaat

SEQ ID NO: 224192 - DNA, 25 bp, probe
gagaaacgtgttaattgtgtggaat

SEQ ID NO: 224193 - DNA, 25 bp, probe
gagaacactgtgagcattttcatgg

SEQ ID NO: 224194 - DNA, 25 bp, probe
gagaaaatgctgggtcactctcttt

SEQ ID NO: 224195 - DNA, 25 bp, probe
gagaaaatgctgggtcactctcttt

SEQ ID NO: 224196 - DNA, 25 bp, probe
gagaaaatgcataatggcctttgtt

SEQ ID NO: 224197 - DNA, 25 bp, probe
gagagaatctatcaacctgttttgt

SEQ ID NO: 224198 - DNA, 25 bp, probe
gaggaaaaccaacgtcttgtctccg

SEQ ID NO: 224199 - DNA, 25 bp, probe
gagtgcattacccaaggtcgtgttt

SEQ ID NO: 224200 - DNA, 25 bp, probe
gagtgcattacccaaggtcgtgttt

SEQ ID NO: 224201 - DNA, 25 bp, probe
gagtgcattacccaaggtcgtgttt

SEQ ID NO: 224202 - DNA, 25 bp, probe
gagtgcattacccaaggtcgtgttt

SEQ ID NO: 224203 - DNA, 25 bp, probe
tgactacttccctgagttttgctta

SEQ ID NO: 224204 - DNA, 25 bp, probe
gagaacttcccttgcaaattatttt

SEQ ID NO: 224205 - DNA, 25 bp, probe
gagacacttcccgagaggacaaaag

SEQ ID NO: 224206 - DNA, 25 bp, probe
gagaacttcaccgataaccagttgg

SEQ ID NO: 224207 - DNA, 25 bp, probe
gagagatttcctgttaggtgcttcg

SEQ ID NO: 224208 - DNA, 25 bp, probe
gagaggtcgactgtggggtcatttg

SEQ ID NO: 224209 - DNA, 25 bp, probe
gtcagaagtctagcctcaggtttct

SEQ ID NO: 224210 - DNA, 25 bp, probe
gagactgtacacattggtggtttta

SEQ ID NO: 224211 - DNA, 25 bp, probe
gagaccttcagcttaggggtttgtc

SEQ ID NO: 224212 - DNA, 25 bp, probe
gagacctggacttaagagaatttgc

SEQ ID NO: 224213 - DNA, 25 bp, probe
gagaccgatatttaaggaccccaga

SEQ ID NO: 224214 - DNA, 25 bp, probe
gagaccaaactgcaaaacatcccag

SEQ ID NO: 224215 - DNA, 25 bp, probe
gagacatcaaaccgtcgaacttcgc

SEQ ID NO: 224216 - DNA, 25 bp, probe
gagataaatcaccagtcacagacta

SEQ ID NO: 224217 - DNA, 25 bp, probe
gagacaaaattgctgaggagctcag

SEQ ID NO: 224218 - DNA, 25 bp, probe
gagacaaaattgctgaggagctcag

SEQ ID NO: 224219 - DNA, 25 bp, probe
gagacaacattccgttggcagctgg

SEQ ID NO: 224220 - DNA, 25 bp, probe
gagaacagttcatgagttgcattgt

SEQ ID NO: 224221 - DNA, 25 bp, probe
gagaactgttctaaatgtgactgat

SEQ ID NO: 224222 - DNA, 25 bp, probe
gagaactgttctaaatgtgactgat

SEQ ID NO: 224223 - DNA, 25 bp, probe
gagaactgtttaatatgctgattat

SEQ ID NO: 224224 - DNA, 25 bp, probe
gagaactgtctcatagtcatggaat

SEQ ID NO: 224225 - DNA, 25 bp, probe
gagaacatggccaatagtcatatgt

SEQ ID NO: 224226 - DNA, 25 bp, probe
gagagatcatgtggccatgttggca

SEQ ID NO: 224227 - DNA, 25 bp, probe
gagagatcatgtggccatgttggca

SEQ ID NO: 224228 - DNA, 25 bp, probe
gagagatcatgtggccatgttggca

SEQ ID NO: 224229 - DNA, 25 bp, probe
gagacagagggcaatgatgtgtgca

SEQ ID NO: 224230 - DNA, 25 bp, probe
gagacagagctggagaatgaggaag

SEQ ID NO: 224231 - DNA, 25 bp, probe
gagagcagactgggcaacatagcga

SEQ ID NO: 224232 - DNA, 25 bp, probe
gagacacagctgccagcaaacctga

SEQ ID NO: 224233 - DNA, 25 bp, probe
gagacacagtctagaggtcctgatg

SEQ ID NO: 224234 - DNA, 25 bp, probe
gagacatcagatagtcacctcacta

SEQ ID NO: 224235 - DNA, 25 bp, probe
gagacattaggtcagccactagatg

SEQ ID NO: 224236 - DNA, 25 bp, probe
gagagcgtaggtcatcctcgtaaac

SEQ ID NO: 224237 - DNA, 25 bp, probe
gatgacgtaggacatgtgcttggta

SEQ ID NO: 224238 - DNA, 25 bp, probe
gagagagtgaagaaattgccttgta

SEQ ID NO: 224239 - DNA, 25 bp, probe
gagaaatacaaacagcacttgaagc

SEQ ID NO: 224240 - DNA, 25 bp, probe
gagaaatgaacccaaactacacaga

SEQ ID NO: 224241 - DNA, 25 bp, probe
gagaaaaacacggaccatgacatca

SEQ ID NO: 224242 - DNA, 25 bp, probe
gagaaaagcacagaatttgagtcag

SEQ ID NO: 224243 - DNA, 25 bp, probe
gagacaaaactttattgcactgaca

SEQ ID NO: 224244 - DNA, 25 bp, probe
gagactataccaaatatctactgtg

SEQ ID NO: 224245 - DNA, 25 bp, probe
gagacttaccgcatattacagtgga

SEQ ID NO: 224246 - DNA, 25 bp, probe
gagatgcggaagacctttaaggaga

SEQ ID NO: 224247 - DNA, 25 bp, probe
gagaacacaagagccttacaggaac

SEQ ID NO: 224248 - DNA, 25 bp, probe
tggttcggaagtctaagcagggcag

SEQ ID NO: 224249 - DNA, 25 bp, probe
gagttcggacgggattcgaggcgtg

SEQ ID NO: 224250 - DNA, 25 bp, probe
gagttcggacgggattcgaggcgtg

SEQ ID NO: 224251 - DNA, 25 bp, probe
gagagagggcacgggagttggtctt

SEQ ID NO: 224252 - DNA, 25 bp, probe
gagagaagggcccggagggtgtctc

SEQ ID NO: 224253 - DNA, 25 bp, probe
gagaacagtggcccggagagctgcc

SEQ ID NO: 224254 - DNA, 25 bp, probe
gagagagagggcacgagaacccaaa

SEQ ID NO: 224255 - DNA, 25 bp, probe
gagagaatggccagaaatccgccaa

SEQ ID NO: 224256 - DNA, 25 bp, probe
gagagaatggccagaaatccgccaa

SEQ ID NO: 224257 - DNA, 25 bp, probe
gagaaaggacgtgagatcctgctga

SEQ ID NO: 224258 - DNA, 25 bp, probe
gagagtcaggaccttaactgatgta

SEQ ID NO: 224259 - DNA, 25 bp, probe
gagagtcaggagttttactgcctgt

SEQ ID NO: 224260 - DNA, 25 bp, probe
gagactcaaagtcaatttcctgtct

SEQ ID NO: 224261 - DNA, 25 bp, probe
gagactcaaagtcaatttcctgtct

SEQ ID NO: 224262 - DNA, 25 bp, probe
gagactaaactttatacttcatttt

SEQ ID NO: 224263 - DNA, 25 bp, probe
gagacttacttttatgacattctaa

SEQ ID NO: 224264 - DNA, 25 bp, probe
gagagctccccaaaagagtttatac

SEQ ID NO: 224265 - DNA, 25 bp, probe
gagacccctgaacatcattgattta

SEQ ID NO: 224266 - DNA, 25 bp, probe
gagacccctgaacatcattgattta

SEQ ID NO: 224267 - DNA, 25 bp, probe
gagacatccccatgttattctttta

SEQ ID NO: 224268 - DNA, 25 bp, probe
gagacattctggctttttcttttaa

SEQ ID NO: 224269 - DNA, 25 bp, probe
gagacattgtgggtgtgtatcttct

SEQ ID NO: 224270 - DNA, 25 bp, probe
gagacatttgactgtcttcctcttg

SEQ ID NO: 224271 - DNA, 25 bp, probe
gagactttgaccacaatcttcagct

SEQ ID NO: 224272 - DNA, 25 bp, probe
gagactttgaccacaatcttcagct

SEQ ID NO: 224273 - DNA, 25 bp, probe
gagaaaatggctaacaccttcagta

SEQ ID NO: 224274 - DNA, 25 bp, probe
gagaaaatggctaacaccttcagta

SEQ ID NO: 224275 - DNA, 25 bp, probe
gagagagaaactaaacacatacgta

SEQ ID NO: 224276 - DNA, 25 bp, probe
gagagagaaactaaacacatacgta

SEQ ID NO: 224277 - DNA, 25 bp, probe
gagagccatgttcataaactacgaa

SEQ ID NO: 224278 - DNA, 25 bp, probe
gagaggatttaaagtcagtcacaaa

SEQ ID NO: 224279 - DNA, 25 bp, probe
gagaggatttaaagtcagtcacaaa

SEQ ID NO: 224280 - DNA, 25 bp, probe
gagaaatatttaagctatggagcat

SEQ ID NO: 224281 - DNA, 25 bp, probe
gagaaagctctcaatactcatggcc

SEQ ID NO: 224282 - DNA, 25 bp, probe
gagacagtgctcatgaagccagtgc

SEQ ID NO: 224283 - DNA, 25 bp, probe
gagagactgctcagattctaagttg

SEQ ID NO: 224284 - DNA, 25 bp, probe
gagagacagcttgtatgcagaagta

SEQ ID NO: 224285 - DNA, 25 bp, probe
gagaacagcattgagatgatgaaca

SEQ ID NO: 224286 - DNA, 25 bp, probe
gagaacagcattgagatgatgaaca

SEQ ID NO: 224287 - DNA, 25 bp, probe
gagacagcagttgagagtagacagg

SEQ ID NO: 224288 - DNA, 25 bp, probe
gagagcgcttagtaggtcggaggaa

SEQ ID NO: 224289 - DNA, 25 bp, probe
gagacagatgggtggatcaggggac

SEQ ID NO: 224290 - DNA, 25 bp, probe
gagacatgggagtggggagcggacg

SEQ ID NO: 224291 - DNA, 25 bp, probe
gagacagaagtctaggcccagggat

SEQ ID NO: 224292 - DNA, 25 bp, probe
gagacagaacctggacctcaccagg

SEQ ID NO: 224293 - DNA, 25 bp, probe
gagaggaaactggcgatctcccagg

SEQ ID NO: 224294 - DNA, 25 bp, probe
gataggccgttggttgtctgaagag

SEQ ID NO: 224295 - DNA, 25 bp, probe
gagacccttgtggttgactagggct

SEQ ID NO: 224296 - DNA, 25 bp, probe
gagacccttgtggttgactagggct

SEQ ID NO: 224297 - DNA, 25 bp, probe
gagaaacctgtgggtggcttgtcct

SEQ ID NO: 224298 - DNA, 25 bp, probe
gagtgaccctggagtcagttaccgt

SEQ ID NO: 224299 - DNA, 25 bp, probe
gagtgaccctggagtcagttaccgt

SEQ ID NO: 224300 - DNA, 25 bp, probe
gaggaccctaacacagtatatccca

SEQ ID NO: 224301 - DNA, 25 bp, probe
gagaaaccaaacacagctaatgcta

SEQ ID NO: 224302 - DNA, 25 bp, probe
gagaccactaaaggaagctactctt

SEQ ID NO: 224303 - DNA, 25 bp, probe
gagacctacaaaagaatatcacggg

SEQ ID NO: 224304 - DNA, 25 bp, probe
gagacctacaaactgaagtgcaagg

SEQ ID NO: 224305 - DNA, 25 bp, probe
gagaaacaagaactgtatggcaagt

SEQ ID NO: 224306 - DNA, 25 bp, probe
gagaaacaagaactgtatggcaagt

SEQ ID NO: 224307 - DNA, 25 bp, probe
gagacaatcgagagcatttcaaact

SEQ ID NO: 224308 - DNA, 25 bp, probe
gagacagatcgagtgagcattacaa

SEQ ID NO: 224309 - DNA, 25 bp, probe
ttgtcaggagacggctcttctttga

SEQ ID NO: 224310 - DNA, 25 bp, probe
gagaaacagcccaagcttcagcggg

SEQ ID NO: 224311 - DNA, 25 bp, probe
gagaaagcatgcgggcctttgggaa

SEQ ID NO: 224312 - DNA, 25 bp, probe
gagaaagcatgcgggcctttgggaa

SEQ ID NO: 224313 - DNA, 25 bp, probe
gagaaacaccgggtttcagctttct

SEQ ID NO: 224314 - DNA, 25 bp, probe
gagaaacaccgggtttcagctttct

SEQ ID NO: 224315 - DNA, 25 bp, probe
gagaaagcaccgacaatctttgatt

SEQ ID NO: 224316 - DNA, 25 bp, probe
gagaaagcaccgctcacaactatat

SEQ ID NO: 224317 - DNA, 25 bp, probe
gagaaaactgaactcaccccagatc

SEQ ID NO: 224318 - DNA, 25 bp, probe
gagagcaaaggcaattcacctccga

SEQ ID NO: 224319 - DNA, 25 bp, probe
gagacaaagggactaacatcgaagc

SEQ ID NO: 224320 - DNA, 25 bp, probe
gagaacaagggcaagaaccgctaca

SEQ ID NO: 224321 - DNA, 25 bp, probe
gagagaaaggctcagcaacgtgaaa

SEQ ID NO: 224322 - DNA, 25 bp, probe
gagagaagagggcgacaattaggag

SEQ ID NO: 224323 - DNA, 25 bp, probe
gagagaagagggcgacaattaggag

SEQ ID NO: 224324 - DNA, 25 bp, probe
gagatgaagcagggccgtactttgc

SEQ ID NO: 224325 - DNA, 25 bp, probe
gagagaaaccgttgctagcttgctg

SEQ ID NO: 224326 - DNA, 25 bp, probe
gagaacaacactgagatagtctgca

SEQ ID NO: 224327 - DNA, 25 bp, probe
gagaacaacactgagatagtctgca

SEQ ID NO: 224328 - DNA, 25 bp, probe
gagacacgcccagtggatgatccta

SEQ ID NO: 224329 - DNA, 25 bp, probe
gagacatcccacaatgggctctgtt

SEQ ID NO: 224330 - DNA, 25 bp, probe
gagagcagaccaaatgagagctatg

SEQ ID NO: 224331 - DNA, 25 bp, probe
gagacagagcgacagagcagttgag

SEQ ID NO: 224332 - DNA, 25 bp, probe
gagacagagtaccatgcagatgggg

SEQ ID NO: 224333 - DNA, 25 bp, probe
gagacaattggcatcagtgaagaga

SEQ ID NO: 224334 - DNA, 25 bp, probe
gagacatgctgggttcagtatgggt

SEQ ID NO: 224335 - DNA, 25 bp, probe
gagacagcatcggtgtctgctgctg

SEQ ID NO: 224336 - DNA, 25 bp, probe
gagacgcatctggtcctgtaattca

SEQ ID NO: 224337 - DNA, 25 bp, probe
gagagcaccggtgctatcacatcta

SEQ ID NO: 224338 - DNA, 25 bp, probe
gagacagttggttttgcatgtctgc

SEQ ID NO: 224339 - DNA, 25 bp, probe
gagacgattggagtcttctctcctt

SEQ ID NO: 224340 - DNA, 25 bp, probe
gagacgattggagtcttctctcctt

SEQ ID NO: 224341 - DNA, 25 bp, probe
gagaaagcttgtacttcttcaccag

SEQ ID NO: 224342 - DNA, 25 bp, probe
gagaaatgtacaaatctttcatcca

SEQ ID NO: 224343 - DNA, 25 bp, probe
gagaaagcacaaagcgttttccacc

SEQ ID NO: 224344 - DNA, 25 bp, probe
gagaaagccaaacgctgtaaccgac

SEQ ID NO: 224345 - DNA, 25 bp, probe
gagaaagcagacaaccattaaccaa

SEQ ID NO: 224346 - DNA, 25 bp, probe
gagacaagcgctaacgtgaagacga

SEQ ID NO: 224347 - DNA, 25 bp, probe
gagacaagcgctaacgtgaagacga

SEQ ID NO: 224348 - DNA, 25 bp, probe
gagagaagccgcgtctgtgggacga

SEQ ID NO: 224349 - DNA, 25 bp, probe
gagatgaagcttacgtgtcctgacg

SEQ ID NO: 224350 - DNA, 25 bp, probe
gagatgggcattgtttcccctataa

SEQ ID NO: 224351 - DNA, 25 bp, probe
gagatgggcattgtttcccctataa

SEQ ID NO: 224352 - DNA, 25 bp, probe
tgaaaggacttgattacctccattc

SEQ ID NO: 224353 - DNA, 25 bp, probe
gtttggacttaggtatcctaactat

SEQ ID NO: 224354 - DNA, 25 bp, probe
ttgttggaccggctacgtaagcacc

SEQ ID NO: 224355 - DNA, 25 bp, probe
gttgttggaccggctacgtaagcac

SEQ ID NO: 224356 - DNA, 25 bp, probe
gagatgttcgactggaacctggagc

SEQ ID NO: 224357 - DNA, 25 bp, probe
gagacttgcccatgaaacttcaacg

SEQ ID NO: 224358 - DNA, 25 bp, probe
gagtttgaccactatgtgcacttca

SEQ ID NO: 224359 - DNA, 25 bp, probe
gagtttgaccactatgtgcacttca

SEQ ID NO: 224360 - DNA, 25 bp, probe
gagagtgtgaccaggaccattcagg

SEQ ID NO: 224361 - DNA, 25 bp, probe
gagacttaccaacacaattattaac

SEQ ID NO: 224362 - DNA, 25 bp, probe
gagagattataacataaactattaa

SEQ ID NO: 224363 - DNA, 25 bp, probe
gagagttgcaaaaaaagactgtatc

SEQ ID NO: 224364 - DNA, 25 bp, probe
gagagtacaggtcagtaagcctcat

SEQ ID NO: 224365 - DNA, 25 bp, probe
gagagagaagggagccattgccatc

SEQ ID NO: 224366 - DNA, 25 bp, probe
gagagaaatactgtccattccacat

SEQ ID NO: 224367 - DNA, 25 bp, probe
gagagaaatactgtccattccacat

SEQ ID NO: 224368 - DNA, 25 bp, probe
gagagatagataacttcttcccagg

SEQ ID NO: 224369 - DNA, 25 bp, probe
gaggaagatctacatcgtcgggggc

SEQ ID NO: 224370 - DNA, 25 bp, probe
gaggaagatctacatcgtcgggggc

SEQ ID NO: 224371 - DNA, 25 bp, probe
gaggacagttacaatggccgggggc

SEQ ID NO: 224372 - DNA, 25 bp, probe
gagttctgttacaagtccagggcag

SEQ ID NO: 224373 - DNA, 25 bp, probe
gagtttgtgtactggccaagtcgag

SEQ ID NO: 224374 - DNA, 25 bp, probe
gagtttgttagccgaaatagaagag

SEQ ID NO: 224375 - DNA, 25 bp, probe
gagtttgttagccgaaatagaagag

SEQ ID NO: 224376 - DNA, 25 bp, probe
gagtcggttagtcattgatagaact

SEQ ID NO: 224377 - DNA, 25 bp, probe
gagagctgcttaatgtgctttaaaa

SEQ ID NO: 224378 - DNA, 25 bp, probe
gagagacaataatttcttgcaaaaa

SEQ ID NO: 224379 - DNA, 25 bp, probe
gagaaagctagatcactgtaacata

SEQ ID NO: 224380 - DNA, 25 bp, probe
gagacattggagaacctgaaacaaa

SEQ ID NO: 224381 - DNA, 25 bp, probe
gagacacagacagtggcgctgtaac

SEQ ID NO: 224382 - DNA, 25 bp, probe
gagacacagacagtggcgctgtaac

SEQ ID NO: 224383 - DNA, 25 bp, probe
gagacgaagcctttctgtaacatgc

SEQ ID NO: 224384 - DNA, 25 bp, probe
gagacagaaccttgttatttctcag

SEQ ID NO: 224385 - DNA, 25 bp, probe
gagacagaaccttgttatttctcag

SEQ ID NO: 224386 - DNA, 25 bp, probe
gagactttcacaagtggtttccatg

SEQ ID NO: 224387 - DNA, 25 bp, probe
gagaaagtgcaaagtagattcgtag

SEQ ID NO: 224388 - DNA, 25 bp, probe
gagacaatgaggaaggaggatggat

SEQ ID NO: 224389 - DNA, 25 bp, probe
gagagcactagggagccatgggagg

SEQ ID NO: 224390 - DNA, 25 bp, probe
gagactctagggtccagtggatgcc

SEQ ID NO: 224391 - DNA, 25 bp, probe
gagagttaaagacagtgtggctgca

SEQ ID NO: 224392 - DNA, 25 bp, probe
gagacattaaagtaaggtagcaaca

SEQ ID NO: 224393 - DNA, 25 bp, probe
gagactatgatataacatgtgtatg

SEQ ID NO: 224394 - DNA, 25 bp, probe
gagactatgatataacatgtgtatg

SEQ ID NO: 224395 - DNA, 25 bp, probe
gagactagaatcccatctgtgctct

SEQ ID NO: 224396 - DNA, 25 bp, probe
gagatgcaggatgcccacgtcatcc

SEQ ID NO: 224397 - DNA, 25 bp, probe
gagagcaggaacctttgtccattgg

SEQ ID NO: 224398 - DNA, 25 bp, probe
gagacatagctagcatttttcttgg

SEQ ID NO: 224399 - DNA, 25 bp, probe
gagaaagctgatggccttgtttcaa

SEQ ID NO: 224400 - DNA, 25 bp, probe
gagagagtgctgtccttttattaaa

SEQ ID NO: 224401 - DNA, 25 bp, probe
gagacgtctcctgggatgtttaact

SEQ ID NO: 224402 - DNA, 25 bp, probe
gagacagccaccaatggctttccaa

SEQ ID NO: 224403 - DNA, 25 bp, probe
gagagagaccgaattctgtggctca

SEQ ID NO: 224404 - DNA, 25 bp, probe
gagacaagcacgtcaaggtgttttc

SEQ ID NO: 224405 - DNA, 25 bp, probe
gagactgcaaagtcccgagttactc

SEQ ID NO: 224406 - DNA, 25 bp, probe
gagagaagagagtgccagagtctat

SEQ ID NO: 224407 - DNA, 25 bp, probe
gagagaagacaatgctggagtctgt

SEQ ID NO: 224408 - DNA, 25 bp, probe
gagagaatcactcagtggtatctga

SEQ ID NO: 224409 - DNA, 25 bp, probe
gagacatatagctcagatggaatgc

SEQ ID NO: 224410 - DNA, 25 bp, probe
gagactgaagtgtcagaagttgcaa

SEQ ID NO: 224411 - DNA, 25 bp, probe
gagagataagcttcggcagtatcac

SEQ ID NO: 224412 - DNA, 25 bp, probe
gagagataagcttcggcagtatcac

SEQ ID NO: 224413 - DNA, 25 bp, probe
gagatgatagcaatggcctgagatt

SEQ ID NO: 224414 - DNA, 25 bp, probe
gagaaagcactgacctgtcatgccc

SEQ ID NO: 224415 - DNA, 25 bp, probe
gagacagagcctcgctctgttaccc

SEQ ID NO: 224416 - DNA, 25 bp, probe
gagacagagtctcgctctgtcgccc

SEQ ID NO: 224417 - DNA, 25 bp, probe
gagacagattcttgctctgtcaccc

SEQ ID NO: 224418 - DNA, 25 bp, probe
gagacagacatgagtcttcacccgc

SEQ ID NO: 224419 - DNA, 25 bp, probe
gagacagagatgatgatttactcaa

SEQ ID NO: 224420 - DNA, 25 bp, probe
gagacagtgatagtgatttggtaaa

SEQ ID NO: 224421 - DNA, 25 bp, probe
gagagtgctgaagacttagctaaac

SEQ ID NO: 224422 - DNA, 25 bp, probe
gagagggaaggactcttccaaagcc

SEQ ID NO: 224423 - DNA, 25 bp, probe
gagacgcgagagacgtgcttccgaa

SEQ ID NO: 224424 - DNA, 25 bp, probe
gagacagcagagctcgatgatatag

SEQ ID NO: 224425 - DNA, 25 bp, probe
gagaccatgagtagccatgtctggt

SEQ ID NO: 224426 - DNA, 25 bp, probe
gagattcagccatccaattggtttt

SEQ ID NO: 224427 - DNA, 25 bp, probe
gagattatactttcgtttatttgtt

SEQ ID NO: 224428 - DNA, 25 bp, probe
gagattttaaatgtttttgagctta

SEQ ID NO: 224429 - DNA, 25 bp, probe
gagagcttcataaacctatttctga

SEQ ID NO: 224430 - DNA, 25 bp, probe
gagacatctatgaaacggattacta

SEQ ID NO: 224431 - DNA, 25 bp, probe
gagtcatctattcaagcacttacag

SEQ ID NO: 224432 - DNA, 25 bp, probe
gagtttaccaaaagttactgtagct

SEQ ID NO: 224433 - DNA, 25 bp, probe
gagactttcaccttttgtcaagaac

SEQ ID NO: 224434 - DNA, 25 bp, probe
gagactttcaccttttgtcaagaac

SEQ ID NO: 224435 - DNA, 25 bp, probe
gagactttagttatgcttccaagac

SEQ ID NO: 224436 - DNA, 25 bp, probe
gagacattcttgttttattcccaga

SEQ ID NO: 224437 - DNA, 25 bp, probe
gagacattttattattttgccttac

SEQ ID NO: 224438 - DNA, 25 bp, probe
gagacattttatcttgtccgtgaag

SEQ ID NO: 224439 - DNA, 25 bp, probe
gagactttttgcatgtcctctatga

SEQ ID NO: 224440 - DNA, 25 bp, probe
gagacttttatgtatgccctatctg

SEQ ID NO: 224441 - DNA, 25 bp, probe
gagactttctcttcagcagtgatca

SEQ ID NO: 224442 - DNA, 25 bp, probe
gagacatataccatctgcagctgta

SEQ ID NO: 224443 - DNA, 25 bp, probe
gagacatatcaggcgaatgcagctc

SEQ ID NO: 224444 - DNA, 25 bp, probe
gagacatatcaggcgaatgcagctc

SEQ ID NO: 224445 - DNA, 25 bp, probe
gagacagatactggaagctctacgc

SEQ ID NO: 224446 - DNA, 25 bp, probe
gagacagatactagatattttgatg

SEQ ID NO: 224447 - DNA, 25 bp, probe
gagagcgatattggagtcttttgtt

SEQ ID NO: 224448 - DNA, 25 bp, probe
gagtcagatcaagagtcccttcact

SEQ ID NO: 224449 - DNA, 25 bp, probe
gagtcagatcaagagtcccttcact

SEQ ID NO: 224450 - DNA, 25 bp, probe
gagacatgaagagacagcctctctc

SEQ ID NO: 224451 - DNA, 25 bp, probe
gagacagatagatgacaccatgttc

SEQ ID NO: 224452 - DNA, 25 bp, probe
gagaggatgaaaggcctcttgtccg

SEQ ID NO: 224453 - DNA, 25 bp, probe
gagatggtgagaaggcagatatttc

SEQ ID NO: 224454 - DNA, 25 bp, probe
gagatggccatctccaacatctatc

SEQ ID NO: 224455 - DNA, 25 bp, probe
gagacgcctctgtgaagatctctgg

SEQ ID NO: 224456 - DNA, 25 bp, probe
gagacgactgccggcaggacatgct

SEQ ID NO: 224457 - DNA, 25 bp, probe
gagacatgactgccaggaagaagag

SEQ ID NO: 224458 - DNA, 25 bp, probe
gagatcacgctggggaaacggatag

SEQ ID NO: 224459 - DNA, 25 bp, probe
gatgaccgtgtacaataccgtgtgg

SEQ ID NO: 224460 - DNA, 25 bp, probe
gatgaccgtgtacaataccgtgtgg

SEQ ID NO: 224461 - DNA, 25 bp, probe
gagactcttatttagaaggcgtggg

SEQ ID NO: 224462 - DNA, 25 bp, probe
gagactgctgagaccaaaaggcttc

SEQ ID NO: 224463 - DNA, 25 bp, probe
gagactgctgagaccaaaaggcttc

SEQ ID NO: 224464 - DNA, 25 bp, probe
gagacctaccagtattatggcttct

SEQ ID NO: 224465 - DNA, 25 bp, probe
gagagccattaaaactatgacttca

SEQ ID NO: 224466 - DNA, 25 bp, probe
gagaccttaaacctcagaatctgct

SEQ ID NO: 224467 - DNA, 25 bp, probe
gagaccatagcaagccactagaacc

SEQ ID NO: 224468 - DNA, 25 bp, probe
gagactaatgaatgcctcatgcacc

SEQ ID NO: 224469 - DNA, 25 bp, probe
gagactgtggagactgctcctgagc

SEQ ID NO: 224470 - DNA, 25 bp, probe
gagacttgcaggagaccgtgtgatt

SEQ ID NO: 224471 - DNA, 25 bp, probe
gagacttgcaggagaccgtgtgatt

SEQ ID NO: 224472 - DNA, 25 bp, probe
gagactacgctgaaaatcgcggctt

SEQ ID NO: 224473 - DNA, 25 bp, probe
gagactagtgagagtcatcgggcgt

SEQ ID NO: 224474 - DNA, 25 bp, probe
gagacttgtgagaagttgggctatc

SEQ ID NO: 224475 - DNA, 25 bp, probe
gagagcatttagcatatcgtggttc

SEQ ID NO: 224476 - DNA, 25 bp, probe
gagagctcatcaaggcaattggttt

SEQ ID NO: 224477 - DNA, 25 bp, probe
gagagctcatcaaggcaattggttt

SEQ ID NO: 224478 - DNA, 25 bp, probe
gagatccatctcacagggttattgt

SEQ ID NO: 224479 - DNA, 25 bp, probe
gagacactctttgtgagcttcagtt

SEQ ID NO: 224480 - DNA, 25 bp, probe
gagacccacattgatgacttttttt

SEQ ID NO: 224481 - DNA, 25 bp, probe
gagacccacattcaagcagttggtc

SEQ ID NO: 224482 - DNA, 25 bp, probe
gagacagccacagtagaagcggtag

SEQ ID NO: 224483 - DNA, 25 bp, probe
gagacagccacagtagaagcggtag

SEQ ID NO: 224484 - DNA, 25 bp, probe
gagacatgctgctgtcggggagtac

SEQ ID NO: 224485 - DNA, 25 bp, probe
gagacactctgcccgagggcaggag

SEQ ID NO: 224486 - DNA, 25 bp, probe
gagagccctttgcaggatgcagaag

SEQ ID NO: 224487 - DNA, 25 bp, probe
gagagccctttgcaggatgcagaag

SEQ ID NO: 224488 - DNA, 25 bp, probe
gagagccctttgcaggatgcagaag

SEQ ID NO: 224489 - DNA, 25 bp, probe
gagagacccagtgatgtggcaaaga

SEQ ID NO: 224490 - DNA, 25 bp, probe
gagagacccagtgatgtggcaaaga

SEQ ID NO: 224491 - DNA, 25 bp, probe
gagagatcccctggcttgcagaaaa

SEQ ID NO: 224492 - DNA, 25 bp, probe
gagatatttttacctgcctaaaata

SEQ ID NO: 224493 - DNA, 25 bp, probe
gagagtctgttatcacccaaatagg

SEQ ID NO: 224494 - DNA, 25 bp, probe
gagagtctgttatcacccaaatagg

SEQ ID NO: 224495 - DNA, 25 bp, probe
gagagttcgataaaagccattaaag

SEQ ID NO: 224496 - DNA, 25 bp, probe
gagactgtcgaaggtcaccaaatca

SEQ ID NO: 224497 - DNA, 25 bp, probe
gagactgctcgatggaaaaatgtga

SEQ ID NO: 224498 - DNA, 25 bp, probe
gagactgtcgtctaagaactgtgag

SEQ ID NO: 224499 - DNA, 25 bp, probe
gagacatgtcctgggtgacatggga

SEQ ID NO: 224500 - DNA, 25 bp, probe
gagacatctgtctggcgatcagcat

SEQ ID NO: 224501 - DNA, 25 bp, probe
gagacactgtcaacatggcatccag

SEQ ID NO: 224502 - DNA, 25 bp, probe
gagacactgatcagagacatgctgc

SEQ ID NO: 224503 - DNA, 25 bp, probe
gagacttatcagccagaatgtgttc

SEQ ID NO: 224504 - DNA, 25 bp, probe
gagacttatcagccagaatgtgttc

SEQ ID NO: 224505 - DNA, 25 bp, probe
gagacttccagtttattgcatatat

SEQ ID NO: 224506 - DNA, 25 bp, probe
gagacttccagtttattgcatatat

SEQ ID NO: 224507 - DNA, 25 bp, probe
gagactgtccagtgagtcattgaag

SEQ ID NO: 224508 - DNA, 25 bp, probe
gagagtgtcaagtgtgtaagggccc

SEQ ID NO: 224509 - DNA, 25 bp, probe
gagagggaagatgggtccgaggcgg

SEQ ID NO: 224510 - DNA, 25 bp, probe
gagaggcagaacatagccctggcct

SEQ ID NO: 224511 - DNA, 25 bp, probe
gaggtcggtcaatggcactacctcg

SEQ ID NO: 224512 - DNA, 25 bp, probe
gagaggagggcgaggcctgagccct

SEQ ID NO: 224513 - DNA, 25 bp, probe
gagagtgagcaccaacgggataccc

SEQ ID NO: 224514 - DNA, 25 bp, probe
gagagtgagcaccaacgggataccc

SEQ ID NO: 224515 - DNA, 25 bp, probe
gagagggcctgaaccaggtggcctt

SEQ ID NO: 224516 - DNA, 25 bp, probe
gagagggcctgaaccaggtggcctt

SEQ ID NO: 224517 - DNA, 25 bp, probe
gagagcaggggaaacaaggggcttc

SEQ ID NO: 224518 - DNA, 25 bp, probe
gagacgggctgatgcacgaggtggt

SEQ ID NO: 224519 - DNA, 25 bp, probe
gagagtgtggtcacctggattggct

SEQ ID NO: 224520 - DNA, 25 bp, probe
gagagggtgtatctgtggggcactg

SEQ ID NO: 224521 - DNA, 25 bp, probe
gagagcctggtagtgggggccattg

SEQ ID NO: 224522 - DNA, 25 bp, probe
gagagcctgttgagggcttcaattg

SEQ ID NO: 224523 - DNA, 25 bp, probe
gagacctgaataagttcctcagggc

SEQ ID NO: 224524 - DNA, 25 bp, probe
gagactcttttcactgcagtggggc

SEQ ID NO: 224525 - DNA, 25 bp, probe
gagatctcctttaagctgggagaag

SEQ ID NO: 224526 - DNA, 25 bp, probe
gagactctccctatccggagagcag

SEQ ID NO: 224527 - DNA, 25 bp, probe
gagacatctccctgtgggatgggca

SEQ ID NO: 224528 - DNA, 25 bp, probe
gagactattttcctgtgtggggcac

SEQ ID NO: 224529 - DNA, 25 bp, probe
gagatgttattactgttttgggcct

SEQ ID NO: 224530 - DNA, 25 bp, probe
gagagttttggacacttgggtcacc

SEQ ID NO: 224531 - DNA, 25 bp, probe
gagagttttgtgtacagcttgggaa

SEQ ID NO: 224532 - DNA, 25 bp, probe
gagactctttagagcagctttggga

SEQ ID NO: 224533 - DNA, 25 bp, probe
gagagctctgtctgatatcactgat

SEQ ID NO: 224534 - DNA, 25 bp, probe
gagactctgtctcagtccatgaaga

SEQ ID NO: 224535 - DNA, 25 bp, probe
gagactgtgatcccagaagacacag

SEQ ID NO: 224536 - DNA, 25 bp, probe
gaggtttgctctgaagaccagaagt

SEQ ID NO: 224537 - DNA, 25 bp, probe
gagacctttggatagaacagaagct

SEQ ID NO: 224538 - DNA, 25 bp, probe
gagaccttagctccgagaagcaact

SEQ ID NO: 224539 - DNA, 25 bp, probe
gagaccctactgggagatgaccaat

SEQ ID NO: 224540 - DNA, 25 bp, probe
gagaccagtttggctgaatgtactt

SEQ ID NO: 224541 - DNA, 25 bp, probe
gagagaggtttagtgccatgttcag

SEQ ID NO: 224542 - DNA, 25 bp, probe
gagagaggttgaggatgcactggcc

SEQ ID NO: 224543 - DNA, 25 bp, probe
gagacatgagcatggctgagcctgg

SEQ ID NO: 224544 - DNA, 25 bp, probe
gagactcgcaaggtggtgctgatgc

SEQ ID NO: 224545 - DNA, 25 bp, probe
gagactcctagttgagtgatagctg

SEQ ID NO: 224546 - DNA, 25 bp, probe
gagactcaccatcgagggagtgctg

SEQ ID NO: 224547 - DNA, 25 bp, probe
gagagtcactctcggaatgactgcc

SEQ ID NO: 224548 - DNA, 25 bp, probe
gagactcatctcaggacactgatcc

SEQ ID NO: 224549 - DNA, 25 bp, probe
gagactctctctgggttcagatgac

SEQ ID NO: 224550 - DNA, 25 bp, probe
gagactctctcatgtggctaaacac

SEQ ID NO: 224551 - DNA, 25 bp, probe
gagactatggagcctggcacaggac

SEQ ID NO: 224552 - DNA, 25 bp, probe
gagagaatagagctgccactgggca

SEQ ID NO: 224553 - DNA, 25 bp, probe
gagagtgtagagagttgtgggaagg

SEQ ID NO: 224554 - DNA, 25 bp, probe
gagaggtacgctgtggaatgagata

SEQ ID NO: 224555 - DNA, 25 bp, probe
gagatggaaagcgtgtgaaatagta

SEQ ID NO: 224556 - DNA, 25 bp, probe
gagatgaggaagcaggacctggcta

SEQ ID NO: 224557 - DNA, 25 bp, probe
gagagagggagaaggaccgcgttta

SEQ ID NO: 224558 - DNA, 25 bp, probe
gagaggtcaggattggccctgggtt

SEQ ID NO: 224559 - DNA, 25 bp, probe
gagggcgaggactgggccaggttag

SEQ ID NO: 224560 - DNA, 25 bp, probe
gagagggggcactgtggtcaggccc

SEQ ID NO: 224561 - DNA, 25 bp, probe
gagagaatggtcgggtggtcagcca

SEQ ID NO: 224562 - DNA, 25 bp, probe
gagagcagttactggggtcacccaa

SEQ ID NO: 224563 - DNA, 25 bp, probe
gagagaatccagtggaggaaaccaa

SEQ ID NO: 224564 - DNA, 25 bp, probe
gagagccccagattggaggcagaca

SEQ ID NO: 224565 - DNA, 25 bp, probe
gagagccccagctgacatggaaata

SEQ ID NO: 224566 - DNA, 25 bp, probe
gagacttcagaagagcaggacacaa

SEQ ID NO: 224567 - DNA, 25 bp, probe
gagacttcagaagagcaggacacaa

SEQ ID NO: 224568 - DNA, 25 bp, probe
gagacttcagaaggagtcctctcta

SEQ ID NO: 224569 - DNA, 25 bp, probe
gagagcttgggagatgagccatttc

SEQ ID NO: 224570 - DNA, 25 bp, probe
gagagcttgggagatgagccatttc

SEQ ID NO: 224571 - DNA, 25 bp, probe
gagactgtcagaagttgacctttgc

SEQ ID NO: 224572 - DNA, 25 bp, probe
gagatctcaatcagtttctttcccg

SEQ ID NO: 224573 - DNA, 25 bp, probe
gagatctcaatcagtttctttcccg

SEQ ID NO: 224574 - DNA, 25 bp, probe
gagagctcctgatgtcttagtttcc

SEQ ID NO: 224575 - DNA, 25 bp, probe
gagagcatcctgtaccgtaagttca

SEQ ID NO: 224576 - DNA, 25 bp, probe
gagactcctcaagcatgaaaggaaa

SEQ ID NO: 224577 - DNA, 25 bp, probe
gagaccctaagccaagaaggagaag

SEQ ID NO: 224578 - DNA, 25 bp, probe
gagacccccagccaaatgtgaagga

SEQ ID NO: 224579 - DNA, 25 bp, probe
gagactgcagccctcaaaatggggg

SEQ ID NO: 224580 - DNA, 25 bp, probe
gagactgtccataggaggtggggga

SEQ ID NO: 224581 - DNA, 25 bp, probe
gagactttgggatggactggaggag

SEQ ID NO: 224582 - DNA, 25 bp, probe
gagactctgggaaatggacaaggtg

SEQ ID NO: 224583 - DNA, 25 bp, probe
gagactctgggaaatggacaaggtg

SEQ ID NO: 224584 - DNA, 25 bp, probe
gagactaggtgaagagagggcaggg

SEQ ID NO: 224585 - DNA, 25 bp, probe
gagactggggaagtgcaggcctgtc

SEQ ID NO: 224586 - DNA, 25 bp, probe
gagagtggatgatattcaggctctg

SEQ ID NO: 224587 - DNA, 25 bp, probe
gagactggagcggatccagggcatg

SEQ ID NO: 224588 - DNA, 25 bp, probe
gagacggtggttgcagtgagcgaag

SEQ ID NO: 224589 - DNA, 25 bp, probe
gagagggatggctaccaggaggaaa

SEQ ID NO: 224590 - DNA, 25 bp, probe
gagactgggagagcacaacatcgaa

SEQ ID NO: 224591 - DNA, 25 bp, probe
gagactgggagagcacaacatcgaa

SEQ ID NO: 224592 - DNA, 25 bp, probe
gagacgtctaggaacacaccagaga

SEQ ID NO: 224593 - DNA, 25 bp, probe
gagaccttaggcaaagcatgcaatc

SEQ ID NO: 224594 - DNA, 25 bp, probe
gagacttggtgtccaacagagtcta

SEQ ID NO: 224595 - DNA, 25 bp, probe
gagacttggcacagagtaagtgctc

SEQ ID NO: 224596 - DNA, 25 bp, probe
gagactggtcagaggtaagatggga

SEQ ID NO: 224597 - DNA, 25 bp, probe
gagacgggcgagcagattcagagct

SEQ ID NO: 224598 - DNA, 25 bp, probe
gagatcaggagttcgagaccagtct

SEQ ID NO: 224599 - DNA, 25 bp, probe
gagaggggtcgggagatcctcatga

SEQ ID NO: 224600 - DNA, 25 bp, probe
gagaggggtcgggagatcctcatga

SEQ ID NO: 224601 - DNA, 25 bp, probe
gagaggaggatgggtcagccctcac

SEQ ID NO: 224602 - DNA, 25 bp, probe
gagatggctacagggaagcctccac

SEQ ID NO: 224603 - DNA, 25 bp, probe
gagatggtagaaggagagcctccat

SEQ ID NO: 224604 - DNA, 25 bp, probe
gagagagcattgtacgaacttccag

SEQ ID NO: 224605 - DNA, 25 bp, probe
gagaggattgaatactgcacccagg

SEQ ID NO: 224606 - DNA, 25 bp, probe
gagaggattgaatactgcacccagg

SEQ ID NO: 224607 - DNA, 25 bp, probe
gagaggaagaagtacatgggggtgt

SEQ ID NO: 224608 - DNA, 25 bp, probe
gagagagaccctcactgctggggag

SEQ ID NO: 224609 - DNA, 25 bp, probe
gagagagaccctcactgctggggag

SEQ ID NO: 224610 - DNA, 25 bp, probe
gagagagtcccacagggagcgcaga

SEQ ID NO: 224611 - DNA, 25 bp, probe
gagagagtcccacagggagcgcaga

SEQ ID NO: 224612 - DNA, 25 bp, probe
gagacgtgactctggtggacgcaga

SEQ ID NO: 224613 - DNA, 25 bp, probe
gagacgcatacctagaggaactcta

SEQ ID NO: 224614 - DNA, 25 bp, probe
gagacctattctgaccaaactatat

SEQ ID NO: 224615 - DNA, 25 bp, probe
gagactccttccgaagaagactgta

SEQ ID NO: 224616 - DNA, 25 bp, probe
gagattccttcctcgggagatggac

SEQ ID NO: 224617 - DNA, 25 bp, probe
gagtcccttctatagggagggggca

SEQ ID NO: 224618 - DNA, 25 bp, probe
gagaccctttaagagaagagggcag

SEQ ID NO: 224619 - DNA, 25 bp, probe
gagaccctgtctgaaagaaagagag

SEQ ID NO: 224620 - DNA, 25 bp, probe
gagaccactgtcttaacagtggaag

SEQ ID NO: 224621 - DNA, 25 bp, probe
gagaccactgtcttaacagtggaag

SEQ ID NO: 224622 - DNA, 25 bp, probe
gagaccctggttttcatggtgcaca

SEQ ID NO: 224623 - DNA, 25 bp, probe
gagaccctggttttcatggtgcaca

SEQ ID NO: 224624 - DNA, 25 bp, probe
gagacccggaaactgatcagggcag

SEQ ID NO: 224625 - DNA, 25 bp, probe
gagagcccgcgttcagtatgggttg

SEQ ID NO: 224626 - DNA, 25 bp, probe
gagagcgaccgtgcagctgagggtc

SEQ ID NO: 224627 - DNA, 25 bp, probe
gagaccctcactgctggggagtccc

SEQ ID NO: 224628 - DNA, 25 bp, probe
gatcccactagtgagaggtggtacc

SEQ ID NO: 224629 - DNA, 25 bp, probe
gatttcctaagaaaggtgggcagca

SEQ ID NO: 224630 - DNA, 25 bp, probe
gagttacgtagagagggtggccaca

SEQ ID NO: 224631 - DNA, 25 bp, probe
gtattaccaaactgggttctccaat

SEQ ID NO: 224632 - DNA, 25 bp, probe
gtcatgtaccatcaataaagtaccc

SEQ ID NO: 224633 - DNA, 25 bp, probe
gagatggcaccacaaccaagtacaa

SEQ ID NO: 224634 - DNA, 25 bp, probe
gagacgcaggcacaactctttatac

SEQ ID NO: 224635 - DNA, 25 bp, probe
gagacgcaggcacaactctttatac

SEQ ID NO: 224636 - DNA, 25 bp, probe
gagactgatgtgtgaatctttttcc

SEQ ID NO: 224637 - DNA, 25 bp, probe
gagactgaggaaacttttgtgaaag

SEQ ID NO: 224638 - DNA, 25 bp, probe
gagactgaggaaacttttgtgaaag

SEQ ID NO: 224639 - DNA, 25 bp, probe
gagactgaagttttttagacaagaa

SEQ ID NO: 224640 - DNA, 25 bp, probe
gagatctgtgtttacttaagaccga

SEQ ID NO: 224641 - DNA, 25 bp, probe
gagactggcttgtgctgacataact

SEQ ID NO: 224642 - DNA, 25 bp, probe
gagactcctcagtagggcaacattt

SEQ ID NO: 224643 - DNA, 25 bp, probe
gagaccacataatatctgcctttta

SEQ ID NO: 224644 - DNA, 25 bp, probe
gagaccatcatagagatcgattctt

SEQ ID NO: 224645 - DNA, 25 bp, probe
gagaccatcatagagatcgattctt

SEQ ID NO: 224646 - DNA, 25 bp, probe
gagactgtgctctcgacagattctt

SEQ ID NO: 224647 - DNA, 25 bp, probe
gagactctcttaggagcagagctct

SEQ ID NO: 224648 - DNA, 25 bp, probe
gagatgctcgtgtgcagagagcact

SEQ ID NO: 224649 - DNA, 25 bp, probe
gagagctcagaggatcaaggcctcg

SEQ ID NO: 224650 - DNA, 25 bp, probe
gagatgccagcattgatcaagatgg

SEQ ID NO: 224651 - DNA, 25 bp, probe
gagagggactaactgatgctgcatc

SEQ ID NO: 224652 - DNA, 25 bp, probe
gagagctgagactagtcatgtctct

SEQ ID NO: 224653 - DNA, 25 bp, probe
gagagtgagatctccctctctgaga

SEQ ID NO: 224654 - DNA, 25 bp, probe
gagacgacttactagatctcataca

SEQ ID NO: 224655 - DNA, 25 bp, probe
gagactcagcttgtagctgactaca

SEQ ID NO: 224656 - DNA, 25 bp, probe
gagactgactgtgagtgctggctaa

SEQ ID NO: 224657 - DNA, 25 bp, probe
gagactggtcctgtgtgcagtgaag

SEQ ID NO: 224658 - DNA, 25 bp, probe
gagatgcaggtcctgtgcttcagct

SEQ ID NO: 224659 - DNA, 25 bp, probe
gagaggttggtgacatgcatggtgg

SEQ ID NO: 224660 - DNA, 25 bp, probe
gagaggggtgagacagtgggggtgc

SEQ ID NO: 224661 - DNA, 25 bp, probe
gagacgggaagcggtgcagaggggc

SEQ ID NO: 224662 - DNA, 25 bp, probe
gagacgggaagcggtgcagaggggc

SEQ ID NO: 224663 - DNA, 25 bp, probe
gagaggtggcaaggcagggaagagg

SEQ ID NO: 224664 - DNA, 25 bp, probe
gagagaatggcatctcgcgtggagg

SEQ ID NO: 224665 - DNA, 25 bp, probe
gagagacagtacatgccctgggagg

SEQ ID NO: 224666 - DNA, 25 bp, probe
gagagcaaggccaagctgtcatcgg

SEQ ID NO: 224667 - DNA, 25 bp, probe
gagagacatgaggcaatttctgggg

SEQ ID NO: 224668 - DNA, 25 bp, probe
gagaccagggaagctctggctgaga

SEQ ID NO: 224669 - DNA, 25 bp, probe
gagaccagtgtatctctgtccatga

SEQ ID NO: 224670 - DNA, 25 bp, probe
gagaccagtgtatctctgtccatga

SEQ ID NO: 224671 - DNA, 25 bp, probe
gagacctgtgcaaatctgagctccg

SEQ ID NO: 224672 - DNA, 25 bp, probe
gagacggatgataatatggatacaa

SEQ ID NO: 224673 - DNA, 25 bp, probe
gagacgcggaacaattgagcaagaa

SEQ ID NO: 224674 - DNA, 25 bp, probe
gagatcgggatcagttagcaactat

SEQ ID NO: 224675 - DNA, 25 bp, probe
gagatcgggatcagttagcaactat

SEQ ID NO: 224676 - DNA, 25 bp, probe
gagacccagaattgagatccaaaat

SEQ ID NO: 224677 - DNA, 25 bp, probe
gagaccgtggacagaccaataatgc

SEQ ID NO: 224678 - DNA, 25 bp, probe
gagatgccgtgggaaaccaaatata

SEQ ID NO: 224679 - DNA, 25 bp, probe
gagagggctcgcaggcacaaaaaag

SEQ ID NO: 224680 - DNA, 25 bp, probe
gagagtggtcctagtcaaagagagg

SEQ ID NO: 224681 - DNA, 25 bp, probe
gagagtgatgaagtgaacgaagggg

SEQ ID NO: 224682 - DNA, 25 bp, probe
gagacgatgagagtaatccattgga

SEQ ID NO: 224683 - DNA, 25 bp, probe
gagaccatgaagtcagaccaggagt

SEQ ID NO: 224684 - DNA, 25 bp, probe
gagagccagaaaaatcgcaggattc

SEQ ID NO: 224685 - DNA, 25 bp, probe
gagagcagaatgaataattgaggtt

SEQ ID NO: 224686 - DNA, 25 bp, probe
gagatgctgaataatgtacgggact

SEQ ID NO: 224687 - DNA, 25 bp, probe
gagagctacaatttgacggagcttg

SEQ ID NO: 224688 - DNA, 25 bp, probe
gagagctccagatcatgagaaagct

SEQ ID NO: 224689 - DNA, 25 bp, probe
gagactgcagcagaggcgagagatg

SEQ ID NO: 224690 - DNA, 25 bp, probe
gagactgcagcagaggcgagagatg

SEQ ID NO: 224691 - DNA, 25 bp, probe
gagaccatgcaaacagctgagagtg

SEQ ID NO: 224692 - DNA, 25 bp, probe
gagacgctgcagcagatcatgcgag

SEQ ID NO: 224693 - DNA, 25 bp, probe
gagagactgcagcagaggcgagaga

SEQ ID NO: 224694 - DNA, 25 bp, probe
gagatacagctccagacgcgttaag

SEQ ID NO: 224695 - DNA, 25 bp, probe
gagagacacatcatgaccgtaaagg

SEQ ID NO: 224696 - DNA, 25 bp, probe
gagagacacatcatgaccgtaaagg

SEQ ID NO: 224697 - DNA, 25 bp, probe
gagagatactacgcctggagagagg

SEQ ID NO: 224698 - DNA, 25 bp, probe
gagagatactacgcctggagagagg

SEQ ID NO: 224699 - DNA, 25 bp, probe
gagaggcctgtcgcgaggagaaggg

SEQ ID NO: 224700 - DNA, 25 bp, probe
gagagccattggtccagaagaggag

SEQ ID NO: 224701 - DNA, 25 bp, probe
gagacctgattctcagtcagaggct

SEQ ID NO: 224702 - DNA, 25 bp, probe
gagacctagcaatcagtcagggctg

SEQ ID NO: 224703 - DNA, 25 bp, probe
gagacctagcaatcagtcagggctg

SEQ ID NO: 224704 - DNA, 25 bp, probe
gagaccattcagtacaggaaggctg

SEQ ID NO: 224705 - DNA, 25 bp, probe
gagacgccttgctagaggtagagtt

SEQ ID NO: 224706 - DNA, 25 bp, probe
gagacggatggaaggagagaggttg

SEQ ID NO: 224707 - DNA, 25 bp, probe
gagactggagggggaggtggcactg

SEQ ID NO: 224708 - DNA, 25 bp, probe
gagaccagaggggacggaagcattg

SEQ ID NO: 224709 - DNA, 25 bp, probe
gagaccaaggatttcgtggtgatgg

SEQ ID NO: 224710 - DNA, 25 bp, probe
gagagaaaggtgttgactgcgatat

SEQ ID NO: 224711 - DNA, 25 bp, probe
gagagagatgaagagtacggctatg

SEQ ID NO: 224712 - DNA, 25 bp, probe
gagagagctgtagaattctttgcag

SEQ ID NO: 224713 - DNA, 25 bp, probe
gagagagtgaacttttcattcatca

SEQ ID NO: 224714 - DNA, 25 bp, probe
gagagagtgaacttttcattcatca

SEQ ID NO: 224715 - DNA, 25 bp, probe
gagaggtgcgccatatttctcatct

SEQ ID NO: 224716 - DNA, 25 bp, probe
gagagtgatctgcagatttttcaga

SEQ ID NO: 224717 - DNA, 25 bp, probe
gagagtattgctgttgatcttcgtc

SEQ ID NO: 224718 - DNA, 25 bp, probe
gagagtttggtgatactgtcaagcc

SEQ ID NO: 224719 - DNA, 25 bp, probe
gagttttgagtaatccaggaagtat

SEQ ID NO: 224720 - DNA, 25 bp, probe
gagtactggattgtccggaattcat

SEQ ID NO: 224721 - DNA, 25 bp, probe
gagatacgggcacatacggattctt

SEQ ID NO: 224722 - DNA, 25 bp, probe
gagatggcgccacggtgagcggaat

SEQ ID NO: 224723 - DNA, 25 bp, probe
gagatggcgccacggtgagcggaat

SEQ ID NO: 224724 - DNA, 25 bp, probe
gagagggaagaggggcgttttcgag

SEQ ID NO: 224725 - DNA, 25 bp, probe
gagaggtaaagctggctttcgagag

SEQ ID NO: 224726 - DNA, 25 bp, probe
gagagtgtgaaatagacatttgtaa

SEQ ID NO: 224727 - DNA, 25 bp, probe
gagagtatagccaaaacagtaataa

SEQ ID NO: 224728 - DNA, 25 bp, probe
gagagtatagccaaaacagtaataa

SEQ ID NO: 224729 - DNA, 25 bp, probe
gagagtgacccaaagatgagatgga

SEQ ID NO: 224730 - DNA, 25 bp, probe
gagaggcaaacagcagtgatggctg

SEQ ID NO: 224731 - DNA, 25 bp, probe
gagagtgaccaggacagcagctcct

SEQ ID NO: 224732 - DNA, 25 bp, probe
gagagtgacagccagagcaagtctg

SEQ ID NO: 224733 - DNA, 25 bp, probe
gagtttcagggacaattactgggga

SEQ ID NO: 224734 - DNA, 25 bp, probe
gagagtttcagggacaattactggg

SEQ ID NO: 224735 - DNA, 25 bp, probe
gagagcattgtacgaacttccaggc

SEQ ID NO: 224736 - DNA, 25 bp, probe
gagagtgatgtatggagcttcgggg

SEQ ID NO: 224737 - DNA, 25 bp, probe
gagagtgatgtatggagcttcgggg

SEQ ID NO: 224738 - DNA, 25 bp, probe
gagagtgatgtatggagcttcgggg

SEQ ID NO: 224739 - DNA, 25 bp, probe
gagagctttttgcaatatgctgggg

SEQ ID NO: 224740 - DNA, 25 bp, probe
gagagcagtgttgagaagtcgggga

SEQ ID NO: 224741 - DNA, 25 bp, probe
gagagcagtttgccagaagctcagg

SEQ ID NO: 224742 - DNA, 25 bp, probe
gagatggtgattgagtatgccggca

SEQ ID NO: 224743 - DNA, 25 bp, probe
gagatggtgctagatggcatccagt

SEQ ID NO: 224744 - DNA, 25 bp, probe
gagatgcggccaagataggaccttg

SEQ ID NO: 224745 - DNA, 25 bp, probe
gagagagacacaatatccgcagcct

SEQ ID NO: 224746 - DNA, 25 bp, probe
gagagagacacaatatccgcagcct

SEQ ID NO: 224747 - DNA, 25 bp, probe
gagatatcacacaaattctgaattc

SEQ ID NO: 224748 - DNA, 25 bp, probe
gatgcattgacagtgttgaattacc

SEQ ID NO: 224749 - DNA, 25 bp, probe
gagagcatatcaagcatgtgaattt

SEQ ID NO: 224750 - DNA, 25 bp, probe
gagagcttatcgtgaacttgtcctc

SEQ ID NO: 224751 - DNA, 25 bp, probe
gagagatatttttgcaactatttcc

SEQ ID NO: 224752 - DNA, 25 bp, probe
gagagcttttttgcaaaatatccac

SEQ ID NO: 224753 - DNA, 25 bp, probe
gagagtatttttttattcaatgatc

SEQ ID NO: 224754 - DNA, 25 bp, probe
gagagtgctgtccttttattaaact

SEQ ID NO: 224755 - DNA, 25 bp, probe
gagacgctcccatttttgatgaaag

SEQ ID NO: 224756 - DNA, 25 bp, probe
gagatggccaaagatgttgtgagga

SEQ ID NO: 224757 - DNA, 25 bp, probe
gagatggggaacaagcttgtgcaag

SEQ ID NO: 224758 - DNA, 25 bp, probe
gagatggagctcacggcttaaagcc

SEQ ID NO: 224759 - DNA, 25 bp, probe
gagatggccgcatacctgaaagatg

SEQ ID NO: 224760 - DNA, 25 bp, probe
gagaggccatcatttgcccagatat

SEQ ID NO: 224761 - DNA, 25 bp, probe
gagatggatcatctgagcctcagga

SEQ ID NO: 224762 - DNA, 25 bp, probe
gagatggatcatctgagcctcagga

SEQ ID NO: 224763 - DNA, 25 bp, probe
gagagagctcagcgagactcagctt

SEQ ID NO: 224764 - DNA, 25 bp, probe
gagatggctcaggagaggctctttg

SEQ ID NO: 224765 - DNA, 25 bp, probe
gagagagctagggctgctcatcttt

SEQ ID NO: 224766 - DNA, 25 bp, probe
gagagagctagggctgctcatcttt

SEQ ID NO: 224767 - DNA, 25 bp, probe
gagatgacatgactgtctgtgttgc

SEQ ID NO: 224768 - DNA, 25 bp, probe
gagagcaacaatgcttggctgaccg

SEQ ID NO: 224769 - DNA, 25 bp, probe
gagagcagacagtgctagagtgtat

SEQ ID NO: 224770 - DNA, 25 bp, probe
gagagctactgaagcatccagtctt

SEQ ID NO: 224771 - DNA, 25 bp, probe
gagagctcagcgagactcagcttgt

SEQ ID NO: 224772 - DNA, 25 bp, probe
gagagccacgcaaacatgggtgctc

SEQ ID NO: 224773 - DNA, 25 bp, probe
gagagtcagctcacatctaagtcca

SEQ ID NO: 224774 - DNA, 25 bp, probe
gagagtcagctcacatctaagtcca

SEQ ID NO: 224775 - DNA, 25 bp, probe
gagagtcagatgaactgtacagtag

SEQ ID NO: 224776 - DNA, 25 bp, probe
gagagtcttgtgatgctgaggagca

SEQ ID NO: 224777 - DNA, 25 bp, probe
gagagctctataagattgggatcac

SEQ ID NO: 224778 - DNA, 25 bp, probe
gagaccatgagaattccaggctcac

SEQ ID NO: 224779 - DNA, 25 bp, probe
gagaccagagagactgtagttccct

SEQ ID NO: 224780 - DNA, 25 bp, probe
gagaccagagagactgtagttccct

SEQ ID NO: 224781 - DNA, 25 bp, probe
gagaccagaggacccttgtctcact

SEQ ID NO: 224782 - DNA, 25 bp, probe
gagaccagaggacccttgtctcact

SEQ ID NO: 224783 - DNA, 25 bp, probe
gagatgctgaaggacccttttgtgc

SEQ ID NO: 224784 - DNA, 25 bp, probe
gagagtacaccaagccctggatggt

SEQ ID NO: 224785 - DNA, 25 bp, probe
gagagtacaccaagccctggatggt

SEQ ID NO: 224786 - DNA, 25 bp, probe
gagagatagccgggctccagggagt

SEQ ID NO: 224787 - DNA, 25 bp, probe
gagagatagccgggctccagggagt

SEQ ID NO: 224788 - DNA, 25 bp, probe
gagagcatccacaggtcctgggatg

SEQ ID NO: 224789 - DNA, 25 bp, probe
gagagctcctgaggaatgtctggga

SEQ ID NO: 224790 - DNA, 25 bp, probe
gagagtcggagatatgactgactga

SEQ ID NO: 224791 - DNA, 25 bp, probe
gagagtcggagatatgactgactga

SEQ ID NO: 224792 - DNA, 25 bp, probe
gagagtcgaatgctacagtatctgc

SEQ ID NO: 224793 - DNA, 25 bp, probe
gagagttgacagtaaatgatagtga

SEQ ID NO: 224794 - DNA, 25 bp, probe
gagagaatatgcctacgatgtccca

SEQ ID NO: 224795 - DNA, 25 bp, probe
gagatggattcacactgggcccatt

SEQ ID NO: 224796 - DNA, 25 bp, probe
gagagagaagcatcctgaagcccct

SEQ ID NO: 224797 - DNA, 25 bp, probe
gagagctacagcaccagatatgcca

SEQ ID NO: 224798 - DNA, 25 bp, probe
gagagcttgagctcggatgagcgcc

SEQ ID NO: 224799 - DNA, 25 bp, probe
gagagcgatacatcacgcatgagag

SEQ ID NO: 224800 - DNA, 25 bp, probe
gagagcatttcaaactgctggtgga

SEQ ID NO: 224801 - DNA, 25 bp, probe
gagagatttcattgaggctcagatg

SEQ ID NO: 224802 - DNA, 25 bp, probe
gagatgatcttcgtcaggatatgct

SEQ ID NO: 224803 - DNA, 25 bp, probe
gagatgatcttcgtcaggatatgct

SEQ ID NO: 224804 - DNA, 25 bp, probe
gagatgactgcttcttcaaatgtgc

SEQ ID NO: 224805 - DNA, 25 bp, probe
gagagatgtctgttctaagtccact

SEQ ID NO: 224806 - DNA, 25 bp, probe
gagagatctcatgcgctagagaaac

SEQ ID NO: 224807 - DNA, 25 bp, probe
gagagttgctgcctttgatagaccc

SEQ ID NO: 224808 - DNA, 25 bp, probe
tgagacttcggcacgtaaacgcggt

SEQ ID NO: 224809 - DNA, 25 bp, probe
gagagcttcctcattgttaaggcag

SEQ ID NO: 224810 - DNA, 25 bp, probe
gagagtttctttgtccaagtgcatg

SEQ ID NO: 224811 - DNA, 25 bp, probe
gagagttttctcagataaaggctgc

SEQ ID NO: 224812 - DNA, 25 bp, probe
gagatttttactatacaaagccacc

SEQ ID NO: 224813 - DNA, 25 bp, probe
gagtcatttttcttttactgacccg

SEQ ID NO: 224814 - DNA, 25 bp, probe
gagttaatttttgtcagcaacaaag

SEQ ID NO: 224815 - DNA, 25 bp, probe
gagatctaaatcattacatggaaca

SEQ ID NO: 224816 - DNA, 25 bp, probe
gagatcgccaacatgtcactggaca

SEQ ID NO: 224817 - DNA, 25 bp, probe
gagatggagaataatgccaatgcaa

SEQ ID NO: 224818 - DNA, 25 bp, probe
gagatcagatggaacagacaatgcc

SEQ ID NO: 224819 - DNA, 25 bp, probe
gagatcgctcggactgtgcagatcc

SEQ ID NO: 224820 - DNA, 25 bp, probe
gagaccatcagccatagagagatcc

SEQ ID NO: 224821 - DNA, 25 bp, probe
gagaccagcaccagaggaatctaca

SEQ ID NO: 224822 - DNA, 25 bp, probe
gagaggaagctgatggggtctatgc

SEQ ID NO: 224823 - DNA, 25 bp, probe
gagaggagagtgcttggggcttgaa

SEQ ID NO: 224824 - DNA, 25 bp, probe
gagagagtggtctggtgggcttcag

SEQ ID NO: 224825 - DNA, 25 bp, probe
gagagatgtggggctgggagtcctc

SEQ ID NO: 224826 - DNA, 25 bp, probe
gagagcagtggcagtgggaggcatc

SEQ ID NO: 224827 - DNA, 25 bp, probe
gagatggatgtggataggcgaggat

SEQ ID NO: 224828 - DNA, 25 bp, probe
gagaggagcggattggatggtgggg

SEQ ID NO: 224829 - DNA, 25 bp, probe
gagaggagggtcctattgtttggga

SEQ ID NO: 224830 - DNA, 25 bp, probe
gagagtaaggctgtaggatctttgg

SEQ ID NO: 224831 - DNA, 25 bp, probe
gagagtaaagcttctaggcatctga

SEQ ID NO: 224832 - DNA, 25 bp, probe
gagatccttggggttgtaggtgaag

SEQ ID NO: 224833 - DNA, 25 bp, probe
gagatccttggggttgtaggtgaag

SEQ ID NO: 224834 - DNA, 25 bp, probe
gagatgtttgaggaggtgttcgctg

SEQ ID NO: 224835 - DNA, 25 bp, probe
gagaggttgaggatgcactggcctg

SEQ ID NO: 224836 - DNA, 25 bp, probe
gagaggactacacatcagggcttga

SEQ ID NO: 224837 - DNA, 25 bp, probe
gagagactccaacacagaagctcat

SEQ ID NO: 224838 - DNA, 25 bp, probe
gagagactccaacacagaagctcat

SEQ ID NO: 224839 - DNA, 25 bp, probe
gagagatcatactccagctgaagtt

SEQ ID NO: 224840 - DNA, 25 bp, probe
gagagacagacatgccagattttct

SEQ ID NO: 224841 - DNA, 25 bp, probe
gatggacttccacagattctacttc

SEQ ID NO: 224842 - DNA, 25 bp, probe
gatggacttccacagattctacttc

SEQ ID NO: 224843 - DNA, 25 bp, probe
gatggacttccacagattctacttc

SEQ ID NO: 224844 - DNA, 25 bp, probe
gatggacttccacagattctacttc

SEQ ID NO: 224845 - DNA, 25 bp, probe
gatggacttccacagattctacttc

SEQ ID NO: 224846 - DNA, 25 bp, probe
gagagctcctactttgattcttttc

SEQ ID NO: 224847 - DNA, 25 bp, probe
gagagctcctactttgattcttttc

SEQ ID NO: 224848 - DNA, 25 bp, probe
gagagctcacaagattgtttttagt

SEQ ID NO: 224849 - DNA, 25 bp, probe
gagagtcatatacattagttttaat

SEQ ID NO: 224850 - DNA, 25 bp, probe
gagagtgtaagcctgaaggtctttt

SEQ ID NO: 224851 - DNA, 25 bp, probe
gagattagacactggaggtttttaa

SEQ ID NO: 224852 - DNA, 25 bp, probe
gagttaaactgggttcattttaatg

SEQ ID NO: 224853 - DNA, 25 bp, probe
gagttaaaagtgtgatcactttctt

SEQ ID NO: 224854 - DNA, 25 bp, probe
gagttaaagagatcccaccattccg

SEQ ID NO: 224855 - DNA, 25 bp, probe
tcgttacagggagtccaacaccgcc

SEQ ID NO: 224856 - DNA, 25 bp, probe
gagattacgggagacacacccatgg

SEQ ID NO: 224857 - DNA, 25 bp, probe
gagatcttcgtggagtcagaactgc

SEQ ID NO: 224858 - DNA, 25 bp, probe
gagattcatgcgatgtgtccaatcg

SEQ ID NO: 224859 - DNA, 25 bp, probe
gagatgtctctgaggttgcatggca

SEQ ID NO: 224860 - DNA, 25 bp, probe
gagatgtgctcttgttgtttggcat

SEQ ID NO: 224861 - DNA, 25 bp, probe
gagagatgctgagtgttttgtatgt

SEQ ID NO: 224862 - DNA, 25 bp, probe
gagagattgatccatgtctgtttgt

SEQ ID NO: 224863 - DNA, 25 bp, probe
gagatatagatccgtagaattgtca

SEQ ID NO: 224864 - DNA, 25 bp, probe
gagtttgtgggtcagtctgtcttcc

SEQ ID NO: 224865 - DNA, 25 bp, probe
gatgactttgaaatcgggcgtcccc

SEQ ID NO: 224866 - DNA, 25 bp, probe
gagagcatctcgaatatcaggatgc

SEQ ID NO: 224867 - DNA, 25 bp, probe
gagagcatctcgaatatcaggatgc

SEQ ID NO: 224868 - DNA, 25 bp, probe
gagatgatctccatgaaggacttgc

SEQ ID NO: 224869 - DNA, 25 bp, probe
gagatgagccctgaagagattctgg

SEQ ID NO: 224870 - DNA, 25 bp, probe
gagagcagatttgaagcaactcatg

SEQ ID NO: 224871 - DNA, 25 bp, probe
gagagagcagatttgaagcaactca

SEQ ID NO: 224872 - DNA, 25 bp, probe
gagagctcagatttagaaagctctg

SEQ ID NO: 224873 - DNA, 25 bp, probe
gagagctgaatgttgatgatcccac

SEQ ID NO: 224874 - DNA, 25 bp, probe
gagatcatgtcattgatgaactgcc

SEQ ID NO: 224875 - DNA, 25 bp, probe
gagtcgtttatgtactactgaactg

SEQ ID NO: 224876 - DNA, 25 bp, probe
gagaggtattttagtcacttgattg

SEQ ID NO: 224877 - DNA, 25 bp, probe
gaggggtttcagaattttgcattgc

SEQ ID NO: 224878 - DNA, 25 bp, probe
gagaggtattacttattttcatatt

SEQ ID NO: 224879 - DNA, 25 bp, probe
gagtgactaacacaagttgttatct

SEQ ID NO: 224880 - DNA, 25 bp, probe
gagtgactaacacaagttgttatct

SEQ ID NO: 224881 - DNA, 25 bp, probe
gagtcacaaaaccaatatttcattc

SEQ ID NO: 224882 - DNA, 25 bp, probe
gagtaaaaccctgacatgtattgcg

SEQ ID NO: 224883 - DNA, 25 bp, probe
gagtaaacaccttcaaatttcaggc

SEQ ID NO: 224884 - DNA, 25 bp, probe
gagatcaaaccccctattatacatt

SEQ ID NO: 224885 - DNA, 25 bp, probe
gagatgcaccaagctccttatttaa

SEQ ID NO: 224886 - DNA, 25 bp, probe
gagatgtcaaaggtgccaatttgct

SEQ ID NO: 224887 - DNA, 25 bp, probe
gagttcatcgaggtgtgcaacggga

SEQ ID NO: 224888 - DNA, 25 bp, probe
gagttcatcgaggtgtgcaacggga

SEQ ID NO: 224889 - DNA, 25 bp, probe
gagatactcgaggtggatgtcgcgt

SEQ ID NO: 224890 - DNA, 25 bp, probe
gatgaatatcctgtgggcctggttt

SEQ ID NO: 224891 - DNA, 25 bp, probe
gagagaacctggaggcacgggtgga

SEQ ID NO: 224892 - DNA, 25 bp, probe
gagagagacctgcattggcatgtgc

SEQ ID NO: 224893 - DNA, 25 bp, probe
gagatccagcggcatctggatgcca

SEQ ID NO: 224894 - DNA, 25 bp, probe
gagagtgacagtcatctttgcccac

SEQ ID NO: 224895 - DNA, 25 bp, probe
gagatgtgaacacatcagcttgccc

SEQ ID NO: 224896 - DNA, 25 bp, probe
gagattaacacaacacctgtcctta

SEQ ID NO: 224897 - DNA, 25 bp, probe
gagatacgaagaaccgtccctcatt

SEQ ID NO: 224898 - DNA, 25 bp, probe
gagatacgaagaaccgtccctcatt

SEQ ID NO: 224899 - DNA, 25 bp, probe
gagatacgaagaaccgtccctcatt

SEQ ID NO: 224900 - DNA, 25 bp, probe
gagatacgaagaaccgtccctcatt

SEQ ID NO: 224901 - DNA, 25 bp, probe
gagtacaacttaaagtacctcttct

SEQ ID NO: 224902 - DNA, 25 bp, probe
gagtaccagcatatagagtgtttta

SEQ ID NO: 224903 - DNA, 25 bp, probe
gagtactgcgatgaggggactttag

SEQ ID NO: 224904 - DNA, 25 bp, probe
gagatgactcttgacctgtggttct

SEQ ID NO: 224905 - DNA, 25 bp, probe
gagattatttgctgccgtggtttca

SEQ ID NO: 224906 - DNA, 25 bp, probe
gagagactgtagttccctattttaa

SEQ ID NO: 224907 - DNA, 25 bp, probe
gagagactgtagttccctattttaa

SEQ ID NO: 224908 - DNA, 25 bp, probe
gagatacttacatttccatttattg

SEQ ID NO: 224909 - DNA, 25 bp, probe
gagatacttacatttccatttattg

SEQ ID NO: 224910 - DNA, 25 bp, probe
gagattgtggacaccacatttgagg

SEQ ID NO: 224911 - DNA, 25 bp, probe
gagttgtgtgaaacccctagcatag

SEQ ID NO: 224912 - DNA, 25 bp, probe
gagagtttgcaatctacctagagag

SEQ ID NO: 224913 - DNA, 25 bp, probe
gagagtttgcaatctacctagagag

SEQ ID NO: 224914 - DNA, 25 bp, probe
gagaggatggtttctcccatagaga

SEQ ID NO: 224915 - DNA, 25 bp, probe
gagaggacagctctacaccagagag

SEQ ID NO: 224916 - DNA, 25 bp, probe
gagaggacgagattagcccacaaac

SEQ ID NO: 224917 - DNA, 25 bp, probe
gagagagatgctcaatatgccccag

SEQ ID NO: 224918 - DNA, 25 bp, probe
gagagagatctttgtggccatcaag

SEQ ID NO: 224919 - DNA, 25 bp, probe
gatgaaatccttcacgcatatcagc

SEQ ID NO: 224920 - DNA, 25 bp, probe
gagatgaggtttcaccatgatggcc

SEQ ID NO: 224921 - DNA, 25 bp, probe
gagagaggctggcctacacaggtgc

SEQ ID NO: 224922 - DNA, 25 bp, probe
gagagaggctggcctacacaggtgc

SEQ ID NO: 224923 - DNA, 25 bp, probe
gagagacctgtgcaaatctgagctc

SEQ ID NO: 224924 - DNA, 25 bp, probe
gagatacctggcctggtctggacac

SEQ ID NO: 224925 - DNA, 25 bp, probe
gagatcaggtgggcagaggctggca

SEQ ID NO: 224926 - DNA, 25 bp, probe
gagatgctggtagcgctggaggcgc

SEQ ID NO: 224927 - DNA, 25 bp, probe
gagatgctggtagcgctggaggcgc

SEQ ID NO: 224928 - DNA, 25 bp, probe
gagaggcgtgatgcaggggtgtgag

SEQ ID NO: 224929 - DNA, 25 bp, probe
gagagtgagacccagtggagggagc

SEQ ID NO: 224930 - DNA, 25 bp, probe
gagagagaaagcgaggaggggcaga

SEQ ID NO: 224931 - DNA, 25 bp, probe
gagagagcaagactgcaggaacgga

SEQ ID NO: 224932 - DNA, 25 bp, probe
gagagtgacatgtgctggacactgt

SEQ ID NO: 224933 - DNA, 25 bp, probe
gagatgaggctgagctgggagctgg

SEQ ID NO: 224934 - DNA, 25 bp, probe
gagatgagcgtggacgttggctaca

SEQ ID NO: 224935 - DNA, 25 bp, probe
gagagaagggagccattgccatcca

SEQ ID NO: 224936 - DNA, 25 bp, probe
gagtacgggaacatcacctatcccc

SEQ ID NO: 224937 - DNA, 25 bp, probe
gagtacctcgggaatgaacttccgc

SEQ ID NO: 224938 - DNA, 25 bp, probe
gagtcaaccttgggtgatgccttcc

SEQ ID NO: 224939 - DNA, 25 bp, probe
gagtcaaccttgggtgatgccttcc

SEQ ID NO: 224940 - DNA, 25 bp, probe
gagttactagacctgaaccttgcta

SEQ ID NO: 224941 - DNA, 25 bp, probe
gagttttaacctgacggcatggaat

SEQ ID NO: 224942 - DNA, 25 bp, probe
gagagagttaaggtggacgagcatg

SEQ ID NO: 224943 - DNA, 25 bp, probe
gagaggttaaagctgatgggataca

SEQ ID NO: 224944 - DNA, 25 bp, probe
gagaggttatgcatgggatggcaaa

SEQ ID NO: 224945 - DNA, 25 bp, probe
gagaggttatgcatgggatggcaaa

SEQ ID NO: 224946 - DNA, 25 bp, probe
gagagagttcaggagagtagcaaca

SEQ ID NO: 224947 - DNA, 25 bp, probe
gagagatgcctacatcagtagcata

SEQ ID NO: 224948 - DNA, 25 bp, probe
gagagaccagccaacagcttgatag

SEQ ID NO: 224949 - DNA, 25 bp, probe
gagagaccacacgcagtattgagct

SEQ ID NO: 224950 - DNA, 25 bp, probe
gagagaccacacgcagtattgagct

SEQ ID NO: 224951 - DNA, 25 bp, probe
gagagaccaacgtttgactacttac

SEQ ID NO: 224952 - DNA, 25 bp, probe
gagagaccaacgtttgactacttac

SEQ ID NO: 224953 - DNA, 25 bp, probe
gagagtggaacggcttgctcttctt

SEQ ID NO: 224954 - DNA, 25 bp, probe
gagatgggaccgtcatcagcacatt

SEQ ID NO: 224955 - DNA, 25 bp, probe
gagaggggcatgcacatgcccacgt

SEQ ID NO: 224956 - DNA, 25 bp, probe
gagatggcagggcacttgccctggt

SEQ ID NO: 224957 - DNA, 25 bp, probe
gagaggcagtgtggcctccaatcgg

SEQ ID NO: 224958 - DNA, 25 bp, probe
gagagagaggctggcctacacaggt

SEQ ID NO: 224959 - DNA, 25 bp, probe
gagatgaggatgggcccaacattga

SEQ ID NO: 224960 - DNA, 25 bp, probe
gagatgagggatgggcctggcattc

SEQ ID NO: 224961 - DNA, 25 bp, probe
gagatgggaatgttggctgaatgct

SEQ ID NO: 224962 - DNA, 25 bp, probe
gagaggagagcatctgctctgagac

SEQ ID NO: 224963 - DNA, 25 bp, probe
gagagggagcaggtgcagctggacc

SEQ ID NO: 224964 - DNA, 25 bp, probe
gagagagaggcaaacagcagtgatg

SEQ ID NO: 224965 - DNA, 25 bp, probe
gagagaggcaaacagcagtgatggc

SEQ ID NO: 224966 - DNA, 25 bp, probe
gagaggcgaaactgagtcagagcgg

SEQ ID NO: 224967 - DNA, 25 bp, probe
gagagagccaagacggaggagggga

SEQ ID NO: 224968 - DNA, 25 bp, probe
gagagagccaagacggaggagggga

SEQ ID NO: 224969 - DNA, 25 bp, probe
gagatggacgacacggtgggggcat

SEQ ID NO: 224970 - DNA, 25 bp, probe
gagggcatagacatcgagggggcct

SEQ ID NO: 224971 - DNA, 25 bp, probe
gagagactcaccatcgagggagtgc

SEQ ID NO: 224972 - DNA, 25 bp, probe
gagagaccctcactgctggggagtc

SEQ ID NO: 224973 - DNA, 25 bp, probe
gagagatgccccatggtgggcaggc

SEQ ID NO: 224974 - DNA, 25 bp, probe
gagattgccatccgtgtgttccggg

SEQ ID NO: 224975 - DNA, 25 bp, probe
gagatggccacggctgcttccagct

SEQ ID NO: 224976 - DNA, 25 bp, probe
gagatgctcataggtcacttctact

SEQ ID NO: 224977 - DNA, 25 bp, probe
gagagtgtcagaactcttctgctgc

SEQ ID NO: 224978 - DNA, 25 bp, probe
gagatcctcagccactcgtggctgc

SEQ ID NO: 224979 - DNA, 25 bp, probe
gagagaccgaattctgtggctcagc

SEQ ID NO: 224980 - DNA, 25 bp, probe
gagagaccgaattctgtggctcagc

SEQ ID NO: 224981 - DNA, 25 bp, probe
gagagaccgaattctgtggctcagc

SEQ ID NO: 224982 - DNA, 25 bp, probe
gaggaacgacttctgtaagctccag

SEQ ID NO: 224983 - DNA, 25 bp, probe
gaggaacgacttctgtaagctccag

SEQ ID NO: 224984 - DNA, 25 bp, probe
gagtaactatttcagaaaaccctat

SEQ ID NO: 224985 - DNA, 25 bp, probe
gagtaaccctgtctaatgaaacctg

SEQ ID NO: 224986 - DNA, 25 bp, probe
gagtgaaccctctttagtaaatgaa

SEQ ID NO: 224987 - DNA, 25 bp, probe
gagtgaagcgtatttgaagtaactg

SEQ ID NO: 224988 - DNA, 25 bp, probe
gagtgaagcgtatttgaagtaactg

SEQ ID NO: 224989 - DNA, 25 bp, probe
gagttggccatatttacctcagcct

SEQ ID NO: 224990 - DNA, 25 bp, probe
gagttggccatatttacctcagcct

SEQ ID NO: 224991 - DNA, 25 bp, probe
gagtttgccacatgataatcaccct

SEQ ID NO: 224992 - DNA, 25 bp, probe
gagtttgatgaatgcttcaacggat

SEQ ID NO: 224993 - DNA, 25 bp, probe
gagtttgtcaagcttcaagttagcc

SEQ ID NO: 224994 - DNA, 25 bp, probe
gagattttaactcttggtcatcagc

SEQ ID NO: 224995 - DNA, 25 bp, probe
gagttctaccaatgtattgtccaca

SEQ ID NO: 224996 - DNA, 25 bp, probe
gagttgctaaaagttatgattcatc

SEQ ID NO: 224997 - DNA, 25 bp, probe
gagttgctaaaagttatgattcatc

SEQ ID NO: 224998 - DNA, 25 bp, probe
gagatgtgtacctgcttagttaatt

SEQ ID NO: 224999 - DNA, 25 bp, probe
gagagtgtacatcatgttattttat

SEQ ID NO: 225000 - DNA, 25 bp, probe
gagagtgtcacattaataattttta

SEQ ID NO: 225001 - DNA, 25 bp, probe
gagagtgtcacattaataattttta

SEQ ID NO: 225002 - DNA, 25 bp, probe
gagagtgtcacattaataattttta

SEQ ID NO: 225003 - DNA, 25 bp, probe
gagatgtccacctaaaattcatatg

SEQ ID NO: 225004 - DNA, 25 bp, probe
gagatgtccacctaaaattcatatg

SEQ ID NO: 225005 - DNA, 25 bp, probe
gagtaccattctagcaaacctacat

SEQ ID NO: 225006 - DNA, 25 bp, probe
gagagagccaatcttggacctacca

SEQ ID NO: 225007 - DNA, 25 bp, probe
gagagaccatattttagccccactc

SEQ ID NO: 225008 - DNA, 25 bp, probe
gagagaggaatttgaattcttactt

SEQ ID NO: 225009 - DNA, 25 bp, probe
gagatgaggttttgccattttggtc

SEQ ID NO: 225010 - DNA, 25 bp, probe
gagattgttgtttgccatactttgt

SEQ ID NO: 225011 - DNA, 25 bp, probe
gagttgcttctgaggtacattttga

SEQ ID NO: 225012 - DNA, 25 bp, probe
gagttccacaagggctaatttattc

SEQ ID NO: 225013 - DNA, 25 bp, probe
gagttccacaagggctaatttattc

SEQ ID NO: 225014 - DNA, 25 bp, probe
gagtctcggaagtgtagaaaatacc

SEQ ID NO: 225015 - DNA, 25 bp, probe
gagtctcggaagtgtagaaaatacc

SEQ ID NO: 225016 - DNA, 25 bp, probe
gagtctctgactgtttaaagaaatc

SEQ ID NO: 225017 - DNA, 25 bp, probe
gagtcttccagagcctaagaaaatc

SEQ ID NO: 225018 - DNA, 25 bp, probe
gagtcttccagagcctaagaaaatc

SEQ ID NO: 225019 - DNA, 25 bp, probe
gagatcctacagggcctgaagtaca

SEQ ID NO: 225020 - DNA, 25 bp, probe
gagatcctggcatagcacagggtca

SEQ ID NO: 225021 - DNA, 25 bp, probe
gagatgtcgagaagcagtctggtgt

SEQ ID NO: 225022 - DNA, 25 bp, probe
gagtctgggacttgtcttgtttggg

SEQ ID NO: 225023 - DNA, 25 bp, probe
gagtatggcaccttgcattattttg

SEQ ID NO: 225024 - DNA, 25 bp, probe
gagattagtcacagatgtattttga

SEQ ID NO: 225025 - DNA, 25 bp, probe
gagattagtcacagatgtattttga

SEQ ID NO: 225026 - DNA, 25 bp, probe
gagttcagtagctttggtattatga

SEQ ID NO: 225027 - DNA, 25 bp, probe
gagttcctctgtatgaaagtattgt

SEQ ID NO: 225028 - DNA, 25 bp, probe
gagattttaggttgctatagattgt

SEQ ID NO: 225029 - DNA, 25 bp, probe
gagttcattacatctttaatttggc

SEQ ID NO: 225030 - DNA, 25 bp, probe
gagttttaagacactgttctgggct

SEQ ID NO: 225031 - DNA, 25 bp, probe
gagagttttaagacactgttctggg

SEQ ID NO: 225032 - DNA, 25 bp, probe
gagagtttctatggattcacttcta

SEQ ID NO: 225033 - DNA, 25 bp, probe
gagagttactctgcaaagttctcag

SEQ ID NO: 225034 - DNA, 25 bp, probe
gagatgaggtctccctaagtttctc

SEQ ID NO: 225035 - DNA, 25 bp, probe
gagaggcgatatctgctgtttttcc

SEQ ID NO: 225036 - DNA, 25 bp, probe
gagaggagattctatgtgcttttat

SEQ ID NO: 225037 - DNA, 25 bp, probe
gagaggagattctatgtgcttttat

SEQ ID NO: 225038 - DNA, 25 bp, probe
gagaggaggatccatgcctttgtca

SEQ ID NO: 225039 - DNA, 25 bp, probe
gagtggacccttggcatttgccaac

SEQ ID NO: 225040 - DNA, 25 bp, probe
gaggtgtccactttgatttccagac

SEQ ID NO: 225041 - DNA, 25 bp, probe
gagagttccagattgttctgtccag

SEQ ID NO: 225042 - DNA, 25 bp, probe
gagagttcacagaaggatcgtgtct

SEQ ID NO: 225043 - DNA, 25 bp, probe
gagatcttacagactgtatcagtct

SEQ ID NO: 225044 - DNA, 25 bp, probe
gagatcttacagactgtatcagtct

SEQ ID NO: 225045 - DNA, 25 bp, probe
gagatcatatcctcagaccaggtgg

SEQ ID NO: 225046 - DNA, 25 bp, probe
gagatatcaccttataccaggtaga

SEQ ID NO: 225047 - DNA, 25 bp, probe
gagatatcccgtttcaaggctgtaa

SEQ ID NO: 225048 - DNA, 25 bp, probe
gagatccagtctattcaaggcattg

SEQ ID NO: 225049 - DNA, 25 bp, probe
gagatgaccttaaatatgatggagt

SEQ ID NO: 225050 - DNA, 25 bp, probe
gagagattatgctatattatggaaa

SEQ ID NO: 225051 - DNA, 25 bp, probe
gagatgattactacactgaaaaaaa

SEQ ID NO: 225052 - DNA, 25 bp, probe
gagatgattactacactgaaaaaaa

SEQ ID NO: 225053 - DNA, 25 bp, probe
gagatatctcagaaccaaaaaagaa

SEQ ID NO: 225054 - DNA, 25 bp, probe
gagttgctacaataaaataagggga

SEQ ID NO: 225055 - DNA, 25 bp, probe
gagttcttccgagaccaagggaggc

SEQ ID NO: 225056 - DNA, 25 bp, probe
ggattcactccctaaccaaaggaat

SEQ ID NO: 225057 - DNA, 25 bp, probe
gagatttgtttttcctcaaaggaga

SEQ ID NO: 225058 - DNA, 25 bp, probe
gagttgcttcggttttcatacggga

SEQ ID NO: 225059 - DNA, 25 bp, probe
gagttgcttcggttttcatacggga

SEQ ID NO: 225060 - DNA, 25 bp, probe
gagttcctctgggtttctaagcagt

SEQ ID NO: 225061 - DNA, 25 bp, probe
gagatgccagccaggtattttaaga

SEQ ID NO: 225062 - DNA, 25 bp, probe
gagatcaaacttcgacattttgaag

SEQ ID NO: 225063 - DNA, 25 bp, probe
gagatcgtgtattgagatttcttaa

SEQ ID NO: 225064 - DNA, 25 bp, probe
gagattgatccatgtctgtttgtag

SEQ ID NO: 225065 - DNA, 25 bp, probe
gagatccaccagatcgacttgatcg

SEQ ID NO: 225066 - DNA, 25 bp, probe
gagatccaccagatcgacttgatcg

SEQ ID NO: 225067 - DNA, 25 bp, probe
gagatccaccagatcgacttgatcg

SEQ ID NO: 225068 - DNA, 25 bp, probe
gagatccacctaaggccattgacgt

SEQ ID NO: 225069 - DNA, 25 bp, probe
gagatccacctaaggccattgacgt

SEQ ID NO: 225070 - DNA, 25 bp, probe
gagttctgactaaaggttacctgtt

SEQ ID NO: 225071 - DNA, 25 bp, probe
gagttctggtgacaagctataccta

SEQ ID NO: 225072 - DNA, 25 bp, probe
gagtttggctgggccagttcccaga

SEQ ID NO: 225073 - DNA, 25 bp, probe
gagtttggtggatgacgtgccaagg

SEQ ID NO: 225074 - DNA, 25 bp, probe
gagttggtggaaatacacagccaag

SEQ ID NO: 225075 - DNA, 25 bp, probe
gagagatgcggccaagataggacct

SEQ ID NO: 225076 - DNA, 25 bp, probe
gagtacgtcaagaatgaggacctgg

SEQ ID NO: 225077 - DNA, 25 bp, probe
gagtaggccaaatgccaactctgta

SEQ ID NO: 225078 - DNA, 25 bp, probe
gagatattctaaacttccattctgt

SEQ ID NO: 225079 - DNA, 25 bp, probe
gagatctacaaaatcctccatgctt

SEQ ID NO: 225080 - DNA, 25 bp, probe
gagattaaccgtcggcacatcactg

SEQ ID NO: 225081 - DNA, 25 bp, probe
gagatgctaactagtttggcacaga

SEQ ID NO: 225082 - DNA, 25 bp, probe
gagatcattaccctcttgtggaaga

SEQ ID NO: 225083 - DNA, 25 bp, probe
gagatagataacttcttcccaggag

SEQ ID NO: 225084 - DNA, 25 bp, probe
gagaggaagatctacatcgtcgggg

SEQ ID NO: 225085 - DNA, 25 bp, probe
gagaggaagatctacatcgtcgggg

SEQ ID NO: 225086 - DNA, 25 bp, probe
gagatttaatcaggctcagtcgggg

SEQ ID NO: 225087 - DNA, 25 bp, probe
gagataccaacatgatcccgggctc

SEQ ID NO: 225088 - DNA, 25 bp, probe
gagatacgcaaacacaccgatgcac

SEQ ID NO: 225089 - DNA, 25 bp, probe
gagtcccgaagcaaatctgctgtcc

SEQ ID NO: 225090 - DNA, 25 bp, probe
gagttcaagaagccaacgctgagtc

SEQ ID NO: 225091 - DNA, 25 bp, probe
gagatgctcaagaggcaacgctctc

SEQ ID NO: 225092 - DNA, 25 bp, probe
gagattcagaggcagcaagcactac

SEQ ID NO: 225093 - DNA, 25 bp, probe
gagatggaggtgtgcaaactgccgc

SEQ ID NO: 225094 - DNA, 25 bp, probe
gagttaaggtggacgagcatgccct

SEQ ID NO: 225095 - DNA, 25 bp, probe
gagtatccatgggaaccaagcccct

SEQ ID NO: 225096 - DNA, 25 bp, probe
gagtaccgaggctccaaggatgctg

SEQ ID NO: 225097 - DNA, 25 bp, probe
gagttgcttgtgccaccaagacgtg

SEQ ID NO: 225098 - DNA, 25 bp, probe
gagttgcttgtgccaccaagacgtg

SEQ ID NO: 225099 - DNA, 25 bp, probe
gagttgcttgtgccaccaagacgtg

SEQ ID NO: 225100 - DNA, 25 bp, probe
gagattgtgttgtcctcattaggac

SEQ ID NO: 225101 - DNA, 25 bp, probe
gagattgtgttgtcctcattaggac

SEQ ID NO: 225102 - DNA, 25 bp, probe
gagttgtgtccaacgattcggactc

SEQ ID NO: 225103 - DNA, 25 bp, probe
gagttttcctaatatgctggtgccc

SEQ ID NO: 225104 - DNA, 25 bp, probe
gagttttgcccatatcaggacagtg

SEQ ID NO: 225105 - DNA, 25 bp, probe
gagttattacgctacatgacaacgt

SEQ ID NO: 225106 - DNA, 25 bp, probe
gagagtatgtccaacctgacaccag

SEQ ID NO: 225107 - DNA, 25 bp, probe
gagagtcatgatcatgtccttacac

SEQ ID NO: 225108 - DNA, 25 bp, probe
gagatatcatctcatgatcccgaac

SEQ ID NO: 225109 - DNA, 25 bp, probe
gagatttggaatacacatgcaggac

SEQ ID NO: 225110 - DNA, 25 bp, probe
gagatctatggaccaatattggagc

SEQ ID NO: 225111 - DNA, 25 bp, probe
gagatctatggaccaatattggagc

SEQ ID NO: 225112 - DNA, 25 bp, probe
gagttcatgcgacgtatattttcct

SEQ ID NO: 225113 - DNA, 25 bp, probe
gagtacatctcggattttcctctta

SEQ ID NO: 225114 - DNA, 25 bp, probe
gagtacatctcggattttcctctta

SEQ ID NO: 225115 - DNA, 25 bp, probe
gagatgtccttgtaatattcccttt

SEQ ID NO: 225116 - DNA, 25 bp, probe
gagatgtctgttctaagtccactta

SEQ ID NO: 225117 - DNA, 25 bp, probe
gagatgttctttctaccaatctata

SEQ ID NO: 225118 - DNA, 25 bp, probe
gagataattttgcaactcatgttat

SEQ ID NO: 225119 - DNA, 25 bp, probe
gagatcgattcttgtatattgattt

SEQ ID NO: 225120 - DNA, 25 bp, probe
gagatggtcacttggatgagggggc

SEQ ID NO: 225121 - DNA, 25 bp, probe
gagatggtcacttggatgagggggc

SEQ ID NO: 225122 - DNA, 25 bp, probe
gagatggtgccccctggggggcaca

SEQ ID NO: 225123 - DNA, 25 bp, probe
gagtcgggccctagcagtggggccc

SEQ ID NO: 225124 - DNA, 25 bp, probe
gggccgtgacacaggttctggccaa

SEQ ID NO: 225125 - DNA, 25 bp, probe
gaggccttaacaagggatggtccca

SEQ ID NO: 225126 - DNA, 25 bp, probe
gagtcctctaagtgggaggtccctt

SEQ ID NO: 225127 - DNA, 25 bp, probe
gggcctcccagaatggaaagtccca

SEQ ID NO: 225128 - DNA, 25 bp, probe
gagatcctactactatggaaaattc

SEQ ID NO: 225129 - DNA, 25 bp, probe
gagatcccctggcttgcagaaaatc

SEQ ID NO: 225130 - DNA, 25 bp, probe
gagatcctcccgtggcattaaaaga

SEQ ID NO: 225131 - DNA, 25 bp, probe
gaggcctttgcagcggcctacaaag

SEQ ID NO: 225132 - DNA, 25 bp, probe
gaggcctttgcagcggcctacaaag

SEQ ID NO: 225133 - DNA, 25 bp, probe
gatgacttcgtagcagcacctacta

SEQ ID NO: 225134 - DNA, 25 bp, probe
gagtcttcggcagaagcacttgtca

SEQ ID NO: 225135 - DNA, 25 bp, probe
gagtcttcggcagaagcacttgtca

SEQ ID NO: 225136 - DNA, 25 bp, probe
gagtcttcggcagaagcacttgtca

SEQ ID NO: 225137 - DNA, 25 bp, probe
gagtctgtccgagtttgcagggtgc

SEQ ID NO: 225138 - DNA, 25 bp, probe
gagtctgtccgagtttgcagggtgc

SEQ ID NO: 225139 - DNA, 25 bp, probe
gagatcttcactttagggggctcgc

SEQ ID NO: 225140 - DNA, 25 bp, probe
gagatcattactcgggggcagaccc

SEQ ID NO: 225141 - DNA, 25 bp, probe
gagatcattactcgggggcagaccc

SEQ ID NO: 225142 - DNA, 25 bp, probe
gagatgctgttcacaggaggctacg

SEQ ID NO: 225143 - DNA, 25 bp, probe
gagatgttgcctgatggatggaaag

SEQ ID NO: 225144 - DNA, 25 bp, probe
gagatgttgcctgatggatggaaag

SEQ ID NO: 225145 - DNA, 25 bp, probe
gagaggcatcctgatatgcttacaa

SEQ ID NO: 225146 - DNA, 25 bp, probe
gagaggaatatgagatgctaactag

SEQ ID NO: 225147 - DNA, 25 bp, probe
gagaggagaatgagagcgcccggca

SEQ ID NO: 225148 - DNA, 25 bp, probe
gagaggaaatgttgactggccaaaa

SEQ ID NO: 225149 - DNA, 25 bp, probe
gagattaatggcagagtgcctcaaa

SEQ ID NO: 225150 - DNA, 25 bp, probe
gagattaatggcagagtgcctcaaa

SEQ ID NO: 225151 - DNA, 25 bp, probe
gagattaatggcagagtgcctcaaa

SEQ ID NO: 225152 - DNA, 25 bp, probe
gagtatgaaaccctttctaagaagt

SEQ ID NO: 225153 - DNA, 25 bp, probe
gagatgatgaaatccacccaacaga

SEQ ID NO: 225154 - DNA, 25 bp, probe
gagatgatgaaatccacccaacaga

SEQ ID NO: 225155 - DNA, 25 bp, probe
gagatgaagagacacagtctagagg

SEQ ID NO: 225156 - DNA, 25 bp, probe
gagtaagtctgaacctctaatggaa

SEQ ID NO: 225157 - DNA, 25 bp, probe
gagatttgctccattctctttggaa

SEQ ID NO: 225158 - DNA, 25 bp, probe
gagtatggtgctgggtccttaaaaa

SEQ ID NO: 225159 - DNA, 25 bp, probe
gagtctaggctgggttcattacatg

SEQ ID NO: 225160 - DNA, 25 bp, probe
gagatgctgtgcatgggcttcttca

SEQ ID NO: 225161 - DNA, 25 bp, probe
gagatgctgtgcatgggcttcttca

SEQ ID NO: 225162 - DNA, 25 bp, probe
gagatgcttttgcttatgttcaaga

SEQ ID NO: 225163 - DNA, 25 bp, probe
gagattctatgtgcttttatcagaa

SEQ ID NO: 225164 - DNA, 25 bp, probe
gagattctatgtgcttttatcagaa

SEQ ID NO: 225165 - DNA, 25 bp, probe
gagttccactgccagatttatggga

SEQ ID NO: 225166 - DNA, 25 bp, probe
gagttccactgccagatttatggga

SEQ ID NO: 225167 - DNA, 25 bp, probe
gagatttcactgacaactttaagat

SEQ ID NO: 225168 - DNA, 25 bp, probe
gagtttcggcaagcttttcagaaaa

SEQ ID NO: 225169 - DNA, 25 bp, probe
gagtttcggaatccttctctgggaa

SEQ ID NO: 225170 - DNA, 25 bp, probe
gagtttcggaatccttctctgggaa

SEQ ID NO: 225171 - DNA, 25 bp, probe
gagtttctggaaaggtactaggatt

SEQ ID NO: 225172 - DNA, 25 bp, probe
gagtttccgaagagtgaagggcagt

SEQ ID NO: 225173 - DNA, 25 bp, probe
gagtttccgaagagtgaagggcagt

SEQ ID NO: 225174 - DNA, 25 bp, probe
tggttttcgtccaggacgtctgagt

SEQ ID NO: 225175 - DNA, 25 bp, probe
gagtttctttccatggatctgaaga

SEQ ID NO: 225176 - DNA, 25 bp, probe
gagtttctttccatggatctgaaga

SEQ ID NO: 225177 - DNA, 25 bp, probe
gagtaatttatcctagtggtaatgg

SEQ ID NO: 225178 - DNA, 25 bp, probe
gagtaatttatcctagtggtaatgg

SEQ ID NO: 225179 - DNA, 25 bp, probe
gagataatttaaccctgcctctcag

SEQ ID NO: 225180 - DNA, 25 bp, probe
gagataatttaaccctgcctctcag

SEQ ID NO: 225181 - DNA, 25 bp, probe
gagatggtcacatgacccaggcctg

SEQ ID NO: 225182 - DNA, 25 bp, probe
gagaggccagtacgacgtggccatc

SEQ ID NO: 225183 - DNA, 25 bp, probe
gagaggccagagagacctgagtttg

SEQ ID NO: 225184 - DNA, 25 bp, probe
gagaggccaaggcaggtggatcacg

SEQ ID NO: 225185 - DNA, 25 bp, probe
gatctccctggggagtgggtcctgg

SEQ ID NO: 225186 - DNA, 25 bp, probe
gatctccctggggagtgggtcctgg

SEQ ID NO: 225187 - DNA, 25 bp, probe
gttcccgatgggcgacaactcggag

SEQ ID NO: 225188 - DNA, 25 bp, probe
gatgttcccgatgggcgacaactcg

SEQ ID NO: 225189 - DNA, 25 bp, probe
gatgtcccggaggggactgagctcc

SEQ ID NO: 225190 - DNA, 25 bp, probe
gagtaccagacgtggctggacctcc

SEQ ID NO: 225191 - DNA, 25 bp, probe
gagatgaaagaggggtgggatccac

SEQ ID NO: 225192 - DNA, 25 bp, probe
gagatgatgaacaaggggttagcaa

SEQ ID NO: 225193 - DNA, 25 bp, probe
gagatgatgaacaaggggttagcaa

SEQ ID NO: 225194 - DNA, 25 bp, probe
gagatgtggactttggttccatgtt

SEQ ID NO: 225195 - DNA, 25 bp, probe
gagatgtggactttggttccatgtt

SEQ ID NO: 225196 - DNA, 25 bp, probe
gagttgtatctttagtattcaggtt

SEQ ID NO: 225197 - DNA, 25 bp, probe
gagaggttcctaaaattgaggtgta

SEQ ID NO: 225198 - DNA, 25 bp, probe
gagaggacttctatgaatgagaggg

SEQ ID NO: 225199 - DNA, 25 bp, probe
gagatgagagtgtcacattaataat

SEQ ID NO: 225200 - DNA, 25 bp, probe
gagatggagtgagctgagacagata

SEQ ID NO: 225201 - DNA, 25 bp, probe
gagatggagtgagctgagacagata

SEQ ID NO: 225202 - DNA, 25 bp, probe
gagatggagcaagagagtggtcaga

SEQ ID NO: 225203 - DNA, 25 bp, probe
gagatggaccaggcggtggacagat

SEQ ID NO: 225204 - DNA, 25 bp, probe
gagatgagcacccagggagtgacga

SEQ ID NO: 225205 - DNA, 25 bp, probe
gagttccacaagcagattactgcac

SEQ ID NO: 225206 - DNA, 25 bp, probe
gagtcttacgagcagcatatccatc

SEQ ID NO: 225207 - DNA, 25 bp, probe
gagtcttacggcagggatcattggg

SEQ ID NO: 225208 - DNA, 25 bp, probe
gagtcttacggcagggatcattggg

SEQ ID NO: 225209 - DNA, 25 bp, probe
gagtcttaaactggggcttcatgtg

SEQ ID NO: 225210 - DNA, 25 bp, probe
gagatgtggaactcgggctgtcagc

SEQ ID NO: 225211 - DNA, 25 bp, probe
gagatatcgaatccctgccgttagc

SEQ ID NO: 225212 - DNA, 25 bp, probe
gagatgatcgaatctgggtgtttca

SEQ ID NO: 225213 - DNA, 25 bp, probe
gagatgccttgtgtgggcagttgcc

SEQ ID NO: 225214 - DNA, 25 bp, probe
gagtcccttgcgggaagactgccaa

SEQ ID NO: 225215 - DNA, 25 bp, probe
gagatgccctttgaaaatgcctgaa

SEQ ID NO: 225216 - DNA, 25 bp, probe
gagatgccctttgaaaatgcctgaa

SEQ ID NO: 225217 - DNA, 25 bp, probe
gagatccaccttcagaatggacatg

SEQ ID NO: 225218 - DNA, 25 bp, probe
gagatcccctttaggatgaagggaa

SEQ ID NO: 225219 - DNA, 25 bp, probe
gagatcacttgtcttgtggtgggga

SEQ ID NO: 225220 - DNA, 25 bp, probe
gagatcacttgtcttgtggtgggga

SEQ ID NO: 225221 - DNA, 25 bp, probe
gagtcacttgagtgggttggtagtg

SEQ ID NO: 225222 - DNA, 25 bp, probe
gagttctttctgggacttggagagt

SEQ ID NO: 225223 - DNA, 25 bp, probe
gagtttgagcctgggacagggagag

SEQ ID NO: 225224 - DNA, 25 bp, probe
gagttggattctctgaaggcaaata

SEQ ID NO: 225225 - DNA, 25 bp, probe
gagttggattctctgaaggcaaata

SEQ ID NO: 225226 - DNA, 25 bp, probe
gagtgggttctcaatacggtaccaa

SEQ ID NO: 225227 - DNA, 25 bp, probe
gagtgggttctcaatacggtaccaa

SEQ ID NO: 225228 - DNA, 25 bp, probe
gagatcagagtgacttaacagttag

SEQ ID NO: 225229 - DNA, 25 bp, probe
gagatcagagtgacttaacagttag

SEQ ID NO: 225230 - DNA, 25 bp, probe
gagataattattttactgccatgag

SEQ ID NO: 225231 - DNA, 25 bp, probe
gagataattattttactgccatgag

SEQ ID NO: 225232 - DNA, 25 bp, probe
gagatgagtttgtttacagctgttg

SEQ ID NO: 225233 - DNA, 25 bp, probe
gagatcgttctgtaaaaggtttttg

SEQ ID NO: 225234 - DNA, 25 bp, probe
gagatcgtgttgagagaagagggtt

SEQ ID NO: 225235 - DNA, 25 bp, probe
gagatcctgtttcagctaaatgcag

SEQ ID NO: 225236 - DNA, 25 bp, probe
gagatcgtgttacagtcacaatcta

SEQ ID NO: 225237 - DNA, 25 bp, probe
gagataagatttaaccaacatcaac

SEQ ID NO: 225238 - DNA, 25 bp, probe
gagattaggttgggcccagccagat

SEQ ID NO: 225239 - DNA, 25 bp, probe
gagatgatgggaaggaaccccaagt

SEQ ID NO: 225240 - DNA, 25 bp, probe
gagatgacaggaagcgacgcctctg

SEQ ID NO: 225241 - DNA, 25 bp, probe
gagatgaggctagcgattgccctgt

SEQ ID NO: 225242 - DNA, 25 bp, probe
gagaggcaatcatcaatctcctgct

SEQ ID NO: 225243 - DNA, 25 bp, probe
gagaggcaacaaggtttgctgctgc

SEQ ID NO: 225244 - DNA, 25 bp, probe
gagaggacacaaaattatcatcagc

SEQ ID NO: 225245 - DNA, 25 bp, probe
gagaggaacgggagatatgagggct

SEQ ID NO: 225246 - DNA, 25 bp, probe
gagaggaacgggagatatgagggct

SEQ ID NO: 225247 - DNA, 25 bp, probe
gagaggaacgggagatatgagggct

SEQ ID NO: 225248 - DNA, 25 bp, probe
gagaggagggggaataatagtgggt

SEQ ID NO: 225249 - DNA, 25 bp, probe
gagaggaaggtgagtatgaggctgc

SEQ ID NO: 225250 - DNA, 25 bp, probe
gagaggaacgtggaacaggagcagg

SEQ ID NO: 225251 - DNA, 25 bp, probe
gagaggaacgtcggcagaggctcct

SEQ ID NO: 225252 - DNA, 25 bp, probe
gagaggcagagcctccacaaagcct

SEQ ID NO: 225253 - DNA, 25 bp, probe
gaggggcaggacaaaaacctagact

SEQ ID NO: 225254 - DNA, 25 bp, probe
gagtcccaggacattaaactctgat

SEQ ID NO: 225255 - DNA, 25 bp, probe
gagtccaaggtttaaagagtctaga

SEQ ID NO: 225256 - DNA, 25 bp, probe
gagtccaaggtttaaagagtctaga

SEQ ID NO: 225257 - DNA, 25 bp, probe
gagtatcaagtcagaaaaagttcag

SEQ ID NO: 225258 - DNA, 25 bp, probe
gagtccactgccaaaagagtagttg

SEQ ID NO: 225259 - DNA, 25 bp, probe
gagttactcgtgtactaatagatta

SEQ ID NO: 225260 - DNA, 25 bp, probe
gagtagcccaggtcactgttaacta

SEQ ID NO: 225261 - DNA, 25 bp, probe
gagtagcccatttcctagggcacca

SEQ ID NO: 225262 - DNA, 25 bp, probe
gagtccccaaggactagtggagtcc

SEQ ID NO: 225263 - DNA, 25 bp, probe
gagatcccagaaggacagagggttc

SEQ ID NO: 225264 - DNA, 25 bp, probe
gagatgccaagaagctcacagtgag

SEQ ID NO: 225265 - DNA, 25 bp, probe
gagatggattgcatatacagtgtgc

SEQ ID NO: 225266 - DNA, 25 bp, probe
gagatcagtctggtcaacatggtga

SEQ ID NO: 225267 - DNA, 25 bp, probe
gagatcgttgagagccgagtgttta

SEQ ID NO: 225268 - DNA, 25 bp, probe
gagatcataaagagcacgttttcca

SEQ ID NO: 225269 - DNA, 25 bp, probe
gagatcataaagagcacgttttcca

SEQ ID NO: 225270 - DNA, 25 bp, probe
gatgtaacaagctcatagggtatca

SEQ ID NO: 225271 - DNA, 25 bp, probe
gagtagcaacgcccaagggttcctc

SEQ ID NO: 225272 - DNA, 25 bp, probe
gagtacaccacggaactcgaactct

SEQ ID NO: 225273 - DNA, 25 bp, probe
gagttatagcccaaactcaactctc

SEQ ID NO: 225274 - DNA, 25 bp, probe
gagatatgattctgtaactccaatc

SEQ ID NO: 225275 - DNA, 25 bp, probe
gagatatgagggctcaagtcgcaat

SEQ ID NO: 225276 - DNA, 25 bp, probe
gagttgatggaaccaaatagaaaaa

SEQ ID NO: 225277 - DNA, 25 bp, probe
gagttaaacagcagcaacactaaaa

SEQ ID NO: 225278 - DNA, 25 bp, probe
gagttttgacacagccaaatccaaa

SEQ ID NO: 225279 - DNA, 25 bp, probe
gagattgggaattggccatcaacca

SEQ ID NO: 225280 - DNA, 25 bp, probe
gagattgcctacaagcggcacaagg

SEQ ID NO: 225281 - DNA, 25 bp, probe
gagattctgttcagcattcactaac

SEQ ID NO: 225282 - DNA, 25 bp, probe
gagatcttctacagttcttcaagcc

SEQ ID NO: 225283 - DNA, 25 bp, probe
gagtttgctcacagtgcctgtgcac

SEQ ID NO: 225284 - DNA, 25 bp, probe
gagatcttgcaacatggccatgtgc

SEQ ID NO: 225285 - DNA, 25 bp, probe
gagatctgtactcacatgctcagtt

SEQ ID NO: 225286 - DNA, 25 bp, probe
gagtctgccattcgtagctgaatat

SEQ ID NO: 225287 - DNA, 25 bp, probe
gagatgcagcagaatatttgtggaa

SEQ ID NO: 225288 - DNA, 25 bp, probe
gagatcagcagcaattgcctctgaa

SEQ ID NO: 225289 - DNA, 25 bp, probe
gagtgcagcagttggcctgcttgtc

SEQ ID NO: 225290 - DNA, 25 bp, probe
gagtgcacaatctagatcctttggt

SEQ ID NO: 225291 - DNA, 25 bp, probe
gagatgcgaataaactgctttgtga

SEQ ID NO: 225292 - DNA, 25 bp, probe
gagattgaaaaagtttctgctatta

SEQ ID NO: 225293 - DNA, 25 bp, probe
gagatctgaaagtttatggcttcat

SEQ ID NO: 225294 - DNA, 25 bp, probe
gagttgagttgcttctgaggtacat

SEQ ID NO: 225295 - DNA, 25 bp, probe
gagttgagttgcttctgaggtacat

SEQ ID NO: 225296 - DNA, 25 bp, probe
gagatggtgatttgctctgaagcat

SEQ ID NO: 225297 - DNA, 25 bp, probe
gagatttcttcattctgctgagcaa

SEQ ID NO: 225298 - DNA, 25 bp, probe
gagattgtgcccaatctggagccag

SEQ ID NO: 225299 - DNA, 25 bp, probe
gagatttctcacctcgagacaggac

SEQ ID NO: 225300 - DNA, 25 bp, probe
gagatctttgagacctctgacggac

SEQ ID NO: 225301 - DNA, 25 bp, probe
gagatcattaagaccacggagcagc

SEQ ID NO: 225302 - DNA, 25 bp, probe
gagtcacttgaaccggggaggcgga

SEQ ID NO: 225303 - DNA, 25 bp, probe
gagtcacaggactcgagggggacag

SEQ ID NO: 225304 - DNA, 25 bp, probe
gagtacacggctcgggaaggggcca

SEQ ID NO: 225305 - DNA, 25 bp, probe
gagtacatccccgaaaagcgggcca

SEQ ID NO: 225306 - DNA, 25 bp, probe
gagtatatcctgtacaacaagggga

SEQ ID NO: 225307 - DNA, 25 bp, probe
gagtctacagttataccaagtggat

SEQ ID NO: 225308 - DNA, 25 bp, probe
gagtctacagttataccaagtggat

SEQ ID NO: 225309 - DNA, 25 bp, probe
ggtttttcttccatacgattgttat

SEQ ID NO: 225310 - DNA, 25 bp, probe
gatgttctttttacgtaccaattct

SEQ ID NO: 225311 - DNA, 25 bp, probe
gatgttctttttacgtaccaattct

SEQ ID NO: 225312 - DNA, 25 bp, probe
gagtttaattttgtgaatctattgt

SEQ ID NO: 225313 - DNA, 25 bp, probe
gagtttaattttgtgaatctattgt

SEQ ID NO: 225314 - DNA, 25 bp, probe
gagatttgaaatcagctatgaatta

SEQ ID NO: 225315 - DNA, 25 bp, probe
gagattcgatttcagcctaacgacc

SEQ ID NO: 225316 - DNA, 25 bp, probe
gagattcgatttcaacctaatgacc

SEQ ID NO: 225317 - DNA, 25 bp, probe
gagatgtcagttttaacactcatta

SEQ ID NO: 225318 - DNA, 25 bp, probe
gagatgtcagttttaacactcatta

SEQ ID NO: 225319 - DNA, 25 bp, probe
gagatgaaggtggctatatcaatgc

SEQ ID NO: 225320 - DNA, 25 bp, probe
gagatgatccggtcatatatccagg

SEQ ID NO: 225321 - DNA, 25 bp, probe
gagatgatccggtcatatatccagg

SEQ ID NO: 225322 - DNA, 25 bp, probe
gagttgcaatcgtaatgtacagatg

SEQ ID NO: 225323 - DNA, 25 bp, probe
gagttgcaatcgtaatgtacagatg

SEQ ID NO: 225324 - DNA, 25 bp, probe
gagttgctatcatgtcaaacgtgaa

SEQ ID NO: 225325 - DNA, 25 bp, probe
gagtctacacaagtaaaagtgatgt

SEQ ID NO: 225326 - DNA, 25 bp, probe
gagatgctgtagcttaaaacatgtt

SEQ ID NO: 225327 - DNA, 25 bp, probe
gagatttagctgctcgaaactgcat

SEQ ID NO: 225328 - DNA, 25 bp, probe
gagatcttcacctatggaaagcagc

SEQ ID NO: 225329 - DNA, 25 bp, probe
gagatctcatgcgctagagaaacag

SEQ ID NO: 225330 - DNA, 25 bp, probe
gagatcctgctgaaaatgaacaagt

SEQ ID NO: 225331 - DNA, 25 bp, probe
gagatcctcgactacatctatgagg

SEQ ID NO: 225332 - DNA, 25 bp, probe
gagatcccagaaaacctgatggacc

SEQ ID NO: 225333 - DNA, 25 bp, probe
gagatcctacaaacacgtcagtggg

SEQ ID NO: 225334 - DNA, 25 bp, probe
gagatcctaataacccaatttgggg

SEQ ID NO: 225335 - DNA, 25 bp, probe
gagatgcttagagacccagaattga

SEQ ID NO: 225336 - DNA, 25 bp, probe
gagatgttgagaacccgcagagggc

SEQ ID NO: 225337 - DNA, 25 bp, probe
gaggtctggtacagcaatgggccgg

SEQ ID NO: 225338 - DNA, 25 bp, probe
gaggtctggtacagcaatgggccgg

SEQ ID NO: 225339 - DNA, 25 bp, probe
gagttggggcacagcgaggtactgc

SEQ ID NO: 225340 - DNA, 25 bp, probe
gagtttgagaccatggctgttacag

SEQ ID NO: 225341 - DNA, 25 bp, probe
gagttcttgaaaaggtgtcttcact

SEQ ID NO: 225342 - DNA, 25 bp, probe
gagtccttcaaacgagctgacatct

SEQ ID NO: 225343 - DNA, 25 bp, probe
gagatctctctgcatagaggtgagt

SEQ ID NO: 225344 - DNA, 25 bp, probe
gagatcctcatgaaggagggactgc

SEQ ID NO: 225345 - DNA, 25 bp, probe
gagatcctcatgaaggagggactgc

SEQ ID NO: 225346 - DNA, 25 bp, probe
gagatgctacagaggagaggaagcg

SEQ ID NO: 225347 - DNA, 25 bp, probe
gagtcatacgggaggcgagtggttg

SEQ ID NO: 225348 - DNA, 25 bp, probe
gagtcaccgaggaggctggagagga

SEQ ID NO: 225349 - DNA, 25 bp, probe
gagatcaccaagcggagacgcaagg

SEQ ID NO: 225350 - DNA, 25 bp, probe
gagatcgtcaagtacgaccgcgaga

SEQ ID NO: 225351 - DNA, 25 bp, probe
gagatctggccacacgaaactgttt

SEQ ID NO: 225352 - DNA, 25 bp, probe
gagatctggccacacgaaactgttt

SEQ ID NO: 225353 - DNA, 25 bp, probe
gagatctggccacacgaaactgttt

SEQ ID NO: 225354 - DNA, 25 bp, probe
gagatctggagacaggtatcctcgt

SEQ ID NO: 225355 - DNA, 25 bp, probe
gagtcagtagatctggtttccattc

SEQ ID NO: 225356 - DNA, 25 bp, probe
gagatagtcttctttttgtcctttc

SEQ ID NO: 225357 - DNA, 25 bp, probe
gagatcaagtgtgcagtttgacctt

SEQ ID NO: 225358 - DNA, 25 bp, probe
gagtaatggtattttctagactgtg

SEQ ID NO: 225359 - DNA, 25 bp, probe
gagtaatggtattttctagactgtg

SEQ ID NO: 225360 - DNA, 25 bp, probe
gagatgttgtggtcgatttacaagg

SEQ ID NO: 225361 - DNA, 25 bp, probe
gagtttgcacagtggtctggaatgg

SEQ ID NO: 225362 - DNA, 25 bp, probe
gagtttgaaggatgtttatataggg

SEQ ID NO: 225363 - DNA, 25 bp, probe
gagtttgaaggatgtttatataggg

SEQ ID NO: 225364 - DNA, 25 bp, probe
gagatcttaagccaagtaatatatt

SEQ ID NO: 225365 - DNA, 25 bp, probe
gagatattcaggccaattcagtttt

SEQ ID NO: 225366 - DNA, 25 bp, probe
gagatttcatgcagaaccagttgat

SEQ ID NO: 225367 - DNA, 25 bp, probe
gagattatacagacaaagcatttga

SEQ ID NO: 225368 - DNA, 25 bp, probe
gagatgccagacaacaataattgct

SEQ ID NO: 225369 - DNA, 25 bp, probe
gagatctgcgatcagcaaacattct

SEQ ID NO: 225370 - DNA, 25 bp, probe
gagatctggctgcaagaaatgtgtt

SEQ ID NO: 225371 - DNA, 25 bp, probe
gatgttagcgtataaattagtgttc

SEQ ID NO: 225372 - DNA, 25 bp, probe
gagtttgagctattaaagtacttct

SEQ ID NO: 225373 - DNA, 25 bp, probe
gagttcttctacaactggtacttcc

SEQ ID NO: 225374 - DNA, 25 bp, probe
gagtctctttcagtttcattttttc

SEQ ID NO: 225375 - DNA, 25 bp, probe
gagtctttacaaaatagccagttat

SEQ ID NO: 225376 - DNA, 25 bp, probe
gagtttccctggaatacctttgcat

SEQ ID NO: 225377 - DNA, 25 bp, probe
gagattattttggtacacctttctt

SEQ ID NO: 225378 - DNA, 25 bp, probe
gagttgttttgaacagaactgtttt

SEQ ID NO: 225379 - DNA, 25 bp, probe
gagttattctgctaaaaatggtctt

SEQ ID NO: 225380 - DNA, 25 bp, probe
gagttgtccatcgtgacatcaagga

SEQ ID NO: 225381 - DNA, 25 bp, probe
gagttgtccatcgtgacatcaagga

SEQ ID NO: 225382 - DNA, 25 bp, probe
gagatcagctccactggaaggggga

SEQ ID NO: 225383 - DNA, 25 bp, probe
gagatcagctccactggaaggggga

SEQ ID NO: 225384 - DNA, 25 bp, probe
gagtagccactgtcatcgatgacag

SEQ ID NO: 225385 - DNA, 25 bp, probe
gagataggagctcatatctgacagc

SEQ ID NO: 225386 - DNA, 25 bp, probe
gagataaactgcatttcaagtaaaa

SEQ ID NO: 225387 - DNA, 25 bp, probe
gagtttcattgcataccggatacag

SEQ ID NO: 225388 - DNA, 25 bp, probe
gagtcctgtggcatccacgaaacta

SEQ ID NO: 225389 - DNA, 25 bp, probe
gagtcagtttgtgcccatgaataat

SEQ ID NO: 225390 - DNA, 25 bp, probe
gatgctttacttcctccagaatatt

SEQ ID NO: 225391 - DNA, 25 bp, probe
gatgctttacttcctccagaatatt

SEQ ID NO: 225392 - DNA, 25 bp, probe
gagttagactatttcccacatgttc

SEQ ID NO: 225393 - DNA, 25 bp, probe
gagtctagcactcattttctataac

SEQ ID NO: 225394 - DNA, 25 bp, probe
gagtctagcactcattttctataac

SEQ ID NO: 225395 - DNA, 25 bp, probe
gagtggtccatgctaagtctaacac

SEQ ID NO: 225396 - DNA, 25 bp, probe
gagtatgttaacagatgtcaaacac

SEQ ID NO: 225397 - DNA, 25 bp, probe
gagttgtctaccacggagaatacat

SEQ ID NO: 225398 - DNA, 25 bp, probe
gagatttaacttgggtaacatggct

SEQ ID NO: 225399 - DNA, 25 bp, probe
gagattgataacatactgcgcaaca

SEQ ID NO: 225400 - DNA, 25 bp, probe
gagttgagacctaacgagaaataga

SEQ ID NO: 225401 - DNA, 25 bp, probe
gagattacacctacagtgactctga

SEQ ID NO: 225402 - DNA, 25 bp, probe
gagattcctccttatgatgtatgct

SEQ ID NO: 225403 - DNA, 25 bp, probe
gagatgctgagtgttttgtatgtta

SEQ ID NO: 225404 - DNA, 25 bp, probe
gagattggcatggctttatttgttt

SEQ ID NO: 225405 - DNA, 25 bp, probe
gagatctccatgactgtgtgttgtg

SEQ ID NO: 225406 - DNA, 25 bp, probe
gagatgccacgactattcttggact

SEQ ID NO: 225407 - DNA, 25 bp, probe
gagttacgactttgatgaggaattc

SEQ ID NO: 225408 - DNA, 25 bp, probe
gagttctcctcataggaggatgatt

SEQ ID NO: 225409 - DNA, 25 bp, probe
gagtctgccccaaagaggtgtacga

SEQ ID NO: 225410 - DNA, 25 bp, probe
gagtctgccccaaagaggtgtacga

SEQ ID NO: 225411 - DNA, 25 bp, probe
gagtctgccccaaagaggtgtacga

SEQ ID NO: 225412 - DNA, 25 bp, probe
gagattccaactccacagagtgacc

SEQ ID NO: 225413 - DNA, 25 bp, probe
gagattttataagccagtgatcctc

SEQ ID NO: 225414 - DNA, 25 bp, probe
gagttccttcaagaagttcctctga

SEQ ID NO: 225415 - DNA, 25 bp, probe
gagttacttctaaggagtataccag

SEQ ID NO: 225416 - DNA, 25 bp, probe
gagtaaatgtgtatgggttaaatca

SEQ ID NO: 225417 - DNA, 25 bp, probe
gagatacgggctgtgaggttcatac

SEQ ID NO: 225418 - DNA, 25 bp, probe
gagataggaattctcagtgtttcaa

SEQ ID NO: 225419 - DNA, 25 bp, probe
gagtcagagagaatccctagtcttc

SEQ ID NO: 225420 - DNA, 25 bp, probe
gagtccaaggcagcctatgtcctct

SEQ ID NO: 225421 - DNA, 25 bp, probe
gagtccaaggcagcctatgtcctct

SEQ ID NO: 225422 - DNA, 25 bp, probe
gagatccagaaagcgctctgtctca

SEQ ID NO: 225423 - DNA, 25 bp, probe
gagatccagaaagcgctctgtctca

SEQ ID NO: 225424 - DNA, 25 bp, probe
gagttgagataaacactctcattca

SEQ ID NO: 225425 - DNA, 25 bp, probe
gagattgaggtgaaagcttcgtccg

SEQ ID NO: 225426 - DNA, 25 bp, probe
gagttgggttgcagcttatgacatg

SEQ ID NO: 225427 - DNA, 25 bp, probe
gagattcaggttttctctagagcaa

SEQ ID NO: 225428 - DNA, 25 bp, probe
gagttcagtgtggagacttgaaact

SEQ ID NO: 225429 - DNA, 25 bp, probe
gagttcatgttggataagctacaga

SEQ ID NO: 225430 - DNA, 25 bp, probe
gagttcatgttggataagctacaga

SEQ ID NO: 225431 - DNA, 25 bp, probe
gagattcagcaaaacagatgtagga

SEQ ID NO: 225432 - DNA, 25 bp, probe
gagatctggcattaccagtacctga

SEQ ID NO: 225433 - DNA, 25 bp, probe
gagatctgagccaaccttggccgac

SEQ ID NO: 225434 - DNA, 25 bp, probe
gagatctgagccaaccttggccgac

SEQ ID NO: 225435 - DNA, 25 bp, probe
gagattgatccatctctaggccaca

SEQ ID NO: 225436 - DNA, 25 bp, probe
gagatctatccaatttacacagcaa

SEQ ID NO: 225437 - DNA, 25 bp, probe
gagtcagaccatttcagcacagagc

SEQ ID NO: 225438 - DNA, 25 bp, probe
gagttgactcatatagctaggttgt

SEQ ID NO: 225439 - DNA, 25 bp, probe
gagttgatctttggagccactgatt

SEQ ID NO: 225440 - DNA, 25 bp, probe
gagtatgtatttgtacactatctgg

SEQ ID NO: 225441 - DNA, 25 bp, probe
gagttgttgttaagacagccatcca

SEQ ID NO: 225442 - DNA, 25 bp, probe
gagtcattatgtttgcaaagcccct

SEQ ID NO: 225443 - DNA, 25 bp, probe
gagatcatgtcatctctcaaccatc

SEQ ID NO: 225444 - DNA, 25 bp, probe
gagatcattgcaaactcaacacaat

SEQ ID NO: 225445 - DNA, 25 bp, probe
gagatctccagaactagacgccatg

SEQ ID NO: 225446 - DNA, 25 bp, probe
gagattgtgcgagccatgacctatg

SEQ ID NO: 225447 - DNA, 25 bp, probe
gagattttgactacattgctgattg

SEQ ID NO: 225448 - DNA, 25 bp, probe
gagatttgtgactttgtcaatcagt

SEQ ID NO: 225449 - DNA, 25 bp, probe
gagattattgagcttcatcatgacc

SEQ ID NO: 225450 - DNA, 25 bp, probe
gagatatttcgccttatgatgccac

SEQ ID NO: 225451 - DNA, 25 bp, probe
gagtttgcttgcccaattgccaaac

SEQ ID NO: 225452 - DNA, 25 bp, probe
gagtttgcttgcccaattgccaaac

SEQ ID NO: 225453 - DNA, 25 bp, probe
gagttgagctctcggaactgcatgc

SEQ ID NO: 225454 - DNA, 25 bp, probe
gagattgcaatacctgtcaccatgc

SEQ ID NO: 225455 - DNA, 25 bp, probe
gagattgaaatattgatgcgctatg

SEQ ID NO: 225456 - DNA, 25 bp, probe
gagtcagctggaagctatggctatg

SEQ ID NO: 225457 - DNA, 25 bp, probe
gagatcatcgagagctgcatgaatg

SEQ ID NO: 225458 - DNA, 25 bp, probe
gagatcatccatctgctggcagaga

SEQ ID NO: 225459 - DNA, 25 bp, probe
gagatcatccatctgctggcagaga

SEQ ID NO: 225460 - DNA, 25 bp, probe
gagatcatccatctgctggcagaga

SEQ ID NO: 225461 - DNA, 25 bp, probe
gagatcaagatggcgtgctgaggag

SEQ ID NO: 225462 - DNA, 25 bp, probe
gagatcatggtgacagtggatggga

SEQ ID NO: 225463 - DNA, 25 bp, probe
gagatattgtggatggcatgggcat

SEQ ID NO: 225464 - DNA, 25 bp, probe
gagataatatctgtgaggtgctgat

SEQ ID NO: 225465 - DNA, 25 bp, probe
gagataatatctgtgaggtgctgat

SEQ ID NO: 225466 - DNA, 25 bp, probe
gagataacactgaggttgcatattt

SEQ ID NO: 225467 - DNA, 25 bp, probe
gagataacactgaggttgcatattt

SEQ ID NO: 225468 - DNA, 25 bp, probe
gagttactctgcaaagttctcagtt

SEQ ID NO: 225469 - DNA, 25 bp, probe
gagttagcatcactaacctgacagt

SEQ ID NO: 225470 - DNA, 25 bp, probe
gagatttgggatattgttctgcccc

SEQ ID NO: 225471 - DNA, 25 bp, probe
gagttttggacacttgggtcacctg

SEQ ID NO: 225472 - DNA, 25 bp, probe
gagttttgcacacgaagttgccctc

SEQ ID NO: 225473 - DNA, 25 bp, probe
gagttttgatgctgtatttgctgcc

SEQ ID NO: 225474 - DNA, 25 bp, probe
gagttgttctgctgatagttttggg

SEQ ID NO: 225475 - DNA, 25 bp, probe
gagattattggctcaggttcttttg

SEQ ID NO: 225476 - DNA, 25 bp, probe
gagataatttcagaggtatttggaa

SEQ ID NO: 225477 - DNA, 25 bp, probe
gagatcaatgttccacaggacattt

SEQ ID NO: 225478 - DNA, 25 bp, probe
gagatcaagatgtcccaggtcctgg

SEQ ID NO: 225479 - DNA, 25 bp, probe
gagtatgaagaccacgagctccatg

SEQ ID NO: 225480 - DNA, 25 bp, probe
gagtatgaagaccacgagctccatg

SEQ ID NO: 225481 - DNA, 25 bp, probe
gagttggaacagtcggctacatggc

SEQ ID NO: 225482 - DNA, 25 bp, probe
gagttggaacagtcggctacatggc

SEQ ID NO: 225483 - DNA, 25 bp, probe
gagttggagccagagatctacttgt

SEQ ID NO: 225484 - DNA, 25 bp, probe
gagttggattgctgaattacaatga

SEQ ID NO: 225485 - DNA, 25 bp, probe
gagttggattgctgaattacaatga

SEQ ID NO: 225486 - DNA, 25 bp, probe
gagttgtcatcttggagactaaaga

SEQ ID NO: 225487 - DNA, 25 bp, probe
gagttaaacagttacttacagagtt

SEQ ID NO: 225488 - DNA, 25 bp, probe
gagtctaaaaatgacctcatatagt

SEQ ID NO: 225489 - DNA, 25 bp, probe
gagtctaaaaatgacctcatatagt

SEQ ID NO: 225490 - DNA, 25 bp, probe
gagtctgaacagctgtaatctatga

SEQ ID NO: 225491 - DNA, 25 bp, probe
gagtctgaacagctgtaatctatga

SEQ ID NO: 225492 - DNA, 25 bp, probe
gagtatccaatgccttacactctgt

SEQ ID NO: 225493 - DNA, 25 bp, probe
gagatttcatggaactacactcttg

SEQ ID NO: 225494 - DNA, 25 bp, probe
gagatttcatggaactacactcttg

SEQ ID NO: 225495 - DNA, 25 bp, probe
gagttgtcagcactcactgaacctc

SEQ ID NO: 225496 - DNA, 25 bp, probe
gagtagtcacatatataagcactgc

SEQ ID NO: 225497 - DNA, 25 bp, probe
gatgatcgcccgataaagacggatt

SEQ ID NO: 225498 - DNA, 25 bp, probe
gagttcctggcagataaggtggtct

SEQ ID NO: 225499 - DNA, 25 bp, probe
gagttctaggaaaaggcggatttgg

SEQ ID NO: 225500 - DNA, 25 bp, probe
gagtttaagtatccagtagtgattt

SEQ ID NO: 225501 - DNA, 25 bp, probe
gagatttgaagttgggtcttgactc

SEQ ID NO: 225502 - DNA, 25 bp, probe
gagatttcctgttaggtgcttcgtc

SEQ ID NO: 225503 - DNA, 25 bp, probe
gagatttcctgttaggtgcttcgtc

SEQ ID NO: 225504 - DNA, 25 bp, probe
gagatttccgatgagttcctggtac

SEQ ID NO: 225505 - DNA, 25 bp, probe
gagatttccgatgagttcctggtac

SEQ ID NO: 225506 - DNA, 25 bp, probe
gagatttcctgtgagaacatgcgtt

SEQ ID NO: 225507 - DNA, 25 bp, probe
gagattcccagttaaaaggctccag

SEQ ID NO: 225508 - DNA, 25 bp, probe
tcaaatccaccagaaaaagcccggg

SEQ ID NO: 225509 - DNA, 25 bp, probe
tcaaaacaaccacaacacagaccgg

SEQ ID NO: 225510 - DNA, 25 bp, probe
ggaccagaaccacaagcaaaccgtg

SEQ ID NO: 225511 - DNA, 25 bp, probe
gaggggagaagtgaaaaaccgtgag

SEQ ID NO: 225512 - DNA, 25 bp, probe
gagtgtggaaagtgccgaaaccgtg

SEQ ID NO: 225513 - DNA, 25 bp, probe
gagttggtggagtactaccagtgcc

SEQ ID NO: 225514 - DNA, 25 bp, probe
gagttggtagactttatcctggcac

SEQ ID NO: 225515 - DNA, 25 bp, probe
gagtttgttgactttacctcacagt

SEQ ID NO: 225516 - DNA, 25 bp, probe
gagtttgttgactttacctcacagt

SEQ ID NO: 225517 - DNA, 25 bp, probe
gaggctagttcttgtctaactcaag

SEQ ID NO: 225518 - DNA, 25 bp, probe
gaggcagttacttgtgtaaatacca

SEQ ID NO: 225519 - DNA, 25 bp, probe
gaggcagttacttgtgtaaatacca

SEQ ID NO: 225520 - DNA, 25 bp, probe
gagtcagactggctgtgtcaaatcc

SEQ ID NO: 225521 - DNA, 25 bp, probe
gagtagaatatcctcctaaatccgt

SEQ ID NO: 225522 - DNA, 25 bp, probe
gagtaaaggccaccttaatctcttc

SEQ ID NO: 225523 - DNA, 25 bp, probe
gagtaccattgttccttatatcgtt

SEQ ID NO: 225524 - DNA, 25 bp, probe
gagtatcacagagatccagtctatt

SEQ ID NO: 225525 - DNA, 25 bp, probe
gagttcctgatggcattagtcatat

SEQ ID NO: 225526 - DNA, 25 bp, probe
gagttctctagcgctagtgatgtgt

SEQ ID NO: 225527 - DNA, 25 bp, probe
gagattctgctgttcattattggag

SEQ ID NO: 225528 - DNA, 25 bp, probe
gagtatgtcagttcttttggagcca

SEQ ID NO: 225529 - DNA, 25 bp, probe
gagatataagctgctttagctgggg

SEQ ID NO: 225530 - DNA, 25 bp, probe
gagatataagctgctttagctgggg

SEQ ID NO: 225531 - DNA, 25 bp, probe
gagatcaccgtggagcttagctgtg

SEQ ID NO: 225532 - DNA, 25 bp, probe
gagataccaatgggcattgctgtgt

SEQ ID NO: 225533 - DNA, 25 bp, probe
gagtagccaaggcatcgctattgtc

SEQ ID NO: 225534 - DNA, 25 bp, probe
gagttggcaccaaacgctatatgcc

SEQ ID NO: 225535 - DNA, 25 bp, probe
gagttggaccacactgtgagcatgc

SEQ ID NO: 225536 - DNA, 25 bp, probe
gagtatcatgaggcagaactgtgag

SEQ ID NO: 225537 - DNA, 25 bp, probe
gagtatcatgaggcagaactgtgag

SEQ ID NO: 225538 - DNA, 25 bp, probe
gagtacatggccaatggctgcctcc

SEQ ID NO: 225539 - DNA, 25 bp, probe
gagtacatggccaaggggagccttg

SEQ ID NO: 225540 - DNA, 25 bp, probe
gagtacatggccagaggatgcctgc

SEQ ID NO: 225541 - DNA, 25 bp, probe
gagttcatggctccggagatggtga

SEQ ID NO: 225542 - DNA, 25 bp, probe
gagttcatggctccggagatggtga

SEQ ID NO: 225543 - DNA, 25 bp, probe
gagttcatggctccggagatggtga

SEQ ID NO: 225544 - DNA, 25 bp, probe
gagtatctgagcaacaggaattttc

SEQ ID NO: 225545 - DNA, 25 bp, probe
gagttgctaaaagtgagcattttat

SEQ ID NO: 225546 - DNA, 25 bp, probe
gagtaaacaaagtgattctgatgat

SEQ ID NO: 225547 - DNA, 25 bp, probe
gagtacagtcccaggaactgagcaa

SEQ ID NO: 225548 - DNA, 25 bp, probe
gagtaacacctcattacaccgaagc

SEQ ID NO: 225549 - DNA, 25 bp, probe
gagtctagaggtcttaattctgaag

SEQ ID NO: 225550 - DNA, 25 bp, probe
gagtcctgaggttattattttactc

SEQ ID NO: 225551 - DNA, 25 bp, probe
tggtcagcggccatatttccggcca

SEQ ID NO: 225552 - DNA, 25 bp, probe
gagatagggcagatcactctcaaga

SEQ ID NO: 225553 - DNA, 25 bp, probe
gagatagtctgcagtgacctcaaca

SEQ ID NO: 225554 - DNA, 25 bp, probe
gagatagtctgcagtgacctcaaca

SEQ ID NO: 225555 - DNA, 25 bp, probe
gagtgcagtctacaacttcaccaaa

SEQ ID NO: 225556 - DNA, 25 bp, probe
gagtgcagtctacaacttcaccaaa

SEQ ID NO: 225557 - DNA, 25 bp, probe
gagtaactcagtaatttcaaaatac

SEQ ID NO: 225558 - DNA, 25 bp, probe
gagtacccagctattaatagaagca

SEQ ID NO: 225559 - DNA, 25 bp, probe
gagtaccaagtgctacagaaaccat

SEQ ID NO: 225560 - DNA, 25 bp, probe
gagtaccaagtgctacagaaaccat

SEQ ID NO: 225561 - DNA, 25 bp, probe
gagtaaacaggacattgacaacgca

SEQ ID NO: 225562 - DNA, 25 bp, probe
gagtaaacaggacattgacaacgca

SEQ ID NO: 225563 - DNA, 25 bp, probe
gagattcaagcataaattacaccga

SEQ ID NO: 225564 - DNA, 25 bp, probe
gagttcacgaattaggggcaggagc

SEQ ID NO: 225565 - DNA, 25 bp, probe
gagttggcgaataagtgcaagcgaa

SEQ ID NO: 225566 - DNA, 25 bp, probe
gagatagcgcataataaggggaaga

SEQ ID NO: 225567 - DNA, 25 bp, probe
gagtgtctgcaaatcatgtggagga

SEQ ID NO: 225568 - DNA, 25 bp, probe
gagatatctgcactttgtagaaagg

SEQ ID NO: 225569 - DNA, 25 bp, probe
gagtagccagcaaggtgaaagagag

SEQ ID NO: 225570 - DNA, 25 bp, probe
gagtagccagcaaggtgaaagagag

SEQ ID NO: 225571 - DNA, 25 bp, probe
gagtcacctgaaggggaacatgaaa

SEQ ID NO: 225572 - DNA, 25 bp, probe
gagtcggtggaggagggagtcaaac

SEQ ID NO: 225573 - DNA, 25 bp, probe
gagtcaggctgagtggactgaggcc

SEQ ID NO: 225574 - DNA, 25 bp, probe
gagtcagacgatgagaccagcctgg

SEQ ID NO: 225575 - DNA, 25 bp, probe
gagtcaccaattcatacaccgggac

SEQ ID NO: 225576 - DNA, 25 bp, probe
gagtcctcaattgtgactccttccc

SEQ ID NO: 225577 - DNA, 25 bp, probe
gagtcctcaattgtgactccttccc

SEQ ID NO: 225578 - DNA, 25 bp, probe
gagtcaacctcatgtgacaccttac

SEQ ID NO: 225579 - DNA, 25 bp, probe
gagtcagcgttcaatcttgaccttg

SEQ ID NO: 225580 - DNA, 25 bp, probe
gagtattttcaacttgagtgatctg

SEQ ID NO: 225581 - DNA, 25 bp, probe
gagtattgatttaggggctttggag

SEQ ID NO: 225582 - DNA, 25 bp, probe
gagtttgagtttgaggcgcatcggc

SEQ ID NO: 225583 - DNA, 25 bp, probe
gagtttgagtttgaggcgcatcggc

SEQ ID NO: 225584 - DNA, 25 bp, probe
gagttgggcgttgaggcttgcagac

SEQ ID NO: 225585 - DNA, 25 bp, probe
gagtaggtgggggaacactgagaaa

SEQ ID NO: 225586 - DNA, 25 bp, probe
gagtcaccgggaggagagccgggac

SEQ ID NO: 225587 - DNA, 25 bp, probe
gagtctgtctgggagctggactgcg

SEQ ID NO: 225588 - DNA, 25 bp, probe
gagtcctgctggacacggagtgggt

SEQ ID NO: 225589 - DNA, 25 bp, probe
gagttctctaggttggagtgggcat

SEQ ID NO: 225590 - DNA, 25 bp, probe
gagttctctaggttggagtgggcat

SEQ ID NO: 225591 - DNA, 25 bp, probe
gagattccaacgttgcagaggagtt

SEQ ID NO: 225592 - DNA, 25 bp, probe
gagattggcagacaggcagaagatg

SEQ ID NO: 225593 - DNA, 25 bp, probe
gagattgtagcacagcacacaaagg

SEQ ID NO: 225594 - DNA, 25 bp, probe
gagattgatatcgcagcgaccctgg

SEQ ID NO: 225595 - DNA, 25 bp, probe
gagattatcattccatggcaccaaa

SEQ ID NO: 225596 - DNA, 25 bp, probe
gagattgaagtgtggcaccaagatt

SEQ ID NO: 225597 - DNA, 25 bp, probe
gagattacagattctcttccaggat

SEQ ID NO: 225598 - DNA, 25 bp, probe
gagttgtagatatcttccagactgt

SEQ ID NO: 225599 - DNA, 25 bp, probe
gagttgcaaaattatctccagactt

SEQ ID NO: 225600 - DNA, 25 bp, probe
gagattggacagtttcagaggcctt

SEQ ID NO: 225601 - DNA, 25 bp, probe
gagattggacagtttcagaggcctt

SEQ ID NO: 225602 - DNA, 25 bp, probe
gagtatggacagtttctcgtgaact

SEQ ID NO: 225603 - DNA, 25 bp, probe
gagttacatcagatcctcaatcaaa

SEQ ID NO: 225604 - DNA, 25 bp, probe
gagtaagacagctaccaatatcatc

SEQ ID NO: 225605 - DNA, 25 bp, probe
gagtcccaaggagcaatacatcgaa

SEQ ID NO: 225606 - DNA, 25 bp, probe
gagtacctgaatgtgcactacattg

SEQ ID NO: 225607 - DNA, 25 bp, probe
gagtatactaagggagttcattgat

SEQ ID NO: 225608 - DNA, 25 bp, probe
gagttccgcaaggtggagtcattga

SEQ ID NO: 225609 - DNA, 25 bp, probe
gagattcccaacctgggattccaga

SEQ ID NO: 225610 - DNA, 25 bp, probe
gagttccaccacctctggaacaaga

SEQ ID NO: 225611 - DNA, 25 bp, probe
gatgttcccctatgggtacaaatgt

SEQ ID NO: 225612 - DNA, 25 bp, probe
gagtcctccccattgggaacagggt

SEQ ID NO: 225613 - DNA, 25 bp, probe
gagtcccctccaggaagaagcaggg

SEQ ID NO: 225614 - DNA, 25 bp, probe
gagtctcttccaacgaaactgagat

SEQ ID NO: 225615 - DNA, 25 bp, probe
gagttcttcaaccggagaggagagc

SEQ ID NO: 225616 - DNA, 25 bp, probe
gagttctgataatcggggctgaggg

SEQ ID NO: 225617 - DNA, 25 bp, probe
gagtttgctagatctggtcagcttg

SEQ ID NO: 225618 - DNA, 25 bp, probe
gagttcttcagatcatagaccaaaa

SEQ ID NO: 225619 - DNA, 25 bp, probe
gagttattggagacatatagctcag

SEQ ID NO: 225620 - DNA, 25 bp, probe
gagtcaatctgcaagccattttatg

SEQ ID NO: 225621 - DNA, 25 bp, probe
gagtatatcaatcctcttttgatgt

SEQ ID NO: 225622 - DNA, 25 bp, probe
gagttaaattctccattatgttcgt

SEQ ID NO: 225623 - DNA, 25 bp, probe
gagtccacacttgaatttgggcagc

SEQ ID NO: 225624 - DNA, 25 bp, probe
gagtgctaactcctaaactgggacc

SEQ ID NO: 225625 - DNA, 25 bp, probe
gagttgactcttcaaactacgaccc

SEQ ID NO: 225626 - DNA, 25 bp, probe
gagttgactttgatacttacagtgc

SEQ ID NO: 225627 - DNA, 25 bp, probe
gagttgactttgatacttacagtgc

SEQ ID NO: 225628 - DNA, 25 bp, probe
gagttattcatagagacattaagcc

SEQ ID NO: 225629 - DNA, 25 bp, probe
gagttctttaaaacacaccagccat

SEQ ID NO: 225630 - DNA, 25 bp, probe
gagtttttcaggtatatacctccat

SEQ ID NO: 225631 - DNA, 25 bp, probe
gagttttcgagtgttgcaggctcat

SEQ ID NO: 225632 - DNA, 25 bp, probe
gagtcatttatgcgctttgggatta

SEQ ID NO: 225633 - DNA, 25 bp, probe
gagtcttcggagctgttggacagta

SEQ ID NO: 225634 - DNA, 25 bp, probe
gagttctcggagccatttgtacatt

SEQ ID NO: 225635 - DNA, 25 bp, probe
gagtcatcatgggggatttttcatt

SEQ ID NO: 225636 - DNA, 25 bp, probe
gagtcatcatgggggatttttcatt

SEQ ID NO: 225637 - DNA, 25 bp, probe
ggaagagctctgaaattaccaaatc

SEQ ID NO: 225638 - DNA, 25 bp, probe
gagttgattatctggaggtctcatt

SEQ ID NO: 225639 - DNA, 25 bp, probe
gagattgaaataatgcggggtctgc

SEQ ID NO: 225640 - DNA, 25 bp, probe
gagttataaaatcagagtggccaag

SEQ ID NO: 225641 - DNA, 25 bp, probe
gagttgcaaaaaaagactgtatcaa

SEQ ID NO: 225642 - DNA, 25 bp, probe
gagttccaatccaaaactgtctcag

SEQ ID NO: 225643 - DNA, 25 bp, probe
gagtcccgtttaacagcagatccag

SEQ ID NO: 225644 - DNA, 25 bp, probe
gagattccgagaattcccaatcgct

SEQ ID NO: 225645 - DNA, 25 bp, probe
gagttcctcaaattgaccaatagct

SEQ ID NO: 225646 - DNA, 25 bp, probe
gagttccctaaacttgcttcagtta

SEQ ID NO: 225647 - DNA, 25 bp, probe
gagtccttgcatcaatttttcttat

SEQ ID NO: 225648 - DNA, 25 bp, probe
gagattgttgctgagttggtttata

SEQ ID NO: 225649 - DNA, 25 bp, probe
gagttggttgtggtatgtgtttgat

SEQ ID NO: 225650 - DNA, 25 bp, probe
gagttggttgtggtatgtgtttgat

SEQ ID NO: 225651 - DNA, 25 bp, probe
gagttcgaaggctttgagtatatca

SEQ ID NO: 225652 - DNA, 25 bp, probe
gagttggacagtggaggaccttcag

SEQ ID NO: 225653 - DNA, 25 bp, probe
gagtcggcacaatgaggaccaggct

SEQ ID NO: 225654 - DNA, 25 bp, probe
gagtcggagtacgggaacatcacct

SEQ ID NO: 225655 - DNA, 25 bp, probe
gagttgccagtggccgtaacatccc

SEQ ID NO: 225656 - DNA, 25 bp, probe
gagtatgtgcgggcgcagtacccgt

SEQ ID NO: 225657 - DNA, 25 bp, probe
gagtttggcgcatgcgcataggcgc

SEQ ID NO: 225658 - DNA, 25 bp, probe
gagtttggcgcatgcgcataggcgc

SEQ ID NO: 225659 - DNA, 25 bp, probe
gagtttggcgaggtctgcagtggcc

SEQ ID NO: 225660 - DNA, 25 bp, probe
gagttggggatggttcagtgcttcg

SEQ ID NO: 225661 - DNA, 25 bp, probe
gagtccgaggaggtgtcggtgtgcc

SEQ ID NO: 225662 - DNA, 25 bp, probe
gagttagcatgatgttgtcggagga

SEQ ID NO: 225663 - DNA, 25 bp, probe
gagttcctgcggatgatgggatgtg

SEQ ID NO: 225664 - DNA, 25 bp, probe
gagttcctgtcacctgaggtggtga

SEQ ID NO: 225665 - DNA, 25 bp, probe
gagtagccttgtccagacgaagtga

SEQ ID NO: 225666 - DNA, 25 bp, probe
gagttcctttgccaaatgcgagatg

SEQ ID NO: 225667 - DNA, 25 bp, probe
gagttccttagacacaggcagcctg

SEQ ID NO: 225668 - DNA, 25 bp, probe
gagtttgttacccagcggaactgta

SEQ ID NO: 225669 - DNA, 25 bp, probe
gagtttgttacccagcggaactgta

SEQ ID NO: 225670 - DNA, 25 bp, probe
gagtattttactagagatggattta

SEQ ID NO: 225671 - DNA, 25 bp, probe
gagtctctttacctaatggtctcta

SEQ ID NO: 225672 - DNA, 25 bp, probe
gagtttgtcttcatgaagattccta

SEQ ID NO: 225673 - DNA, 25 bp, probe
gagtttgtttttcttttgctattgt

SEQ ID NO: 225674 - DNA, 25 bp, probe
gtagggatttttcgtctattgtaag

SEQ ID NO: 225675 - DNA, 25 bp, probe
gtaaagttctttctgccttataagg

SEQ ID NO: 225676 - DNA, 25 bp, probe
tgggggttctttcagttcaaaagtg

SEQ ID NO: 225677 - DNA, 25 bp, probe
tagagggtttccatacttaccaccg

SEQ ID NO: 225678 - DNA, 25 bp, probe
tgaccgtgttttcaactgtgtccac

SEQ ID NO: 225679 - DNA, 25 bp, probe
gatccttgggtttacctgctgttaa

SEQ ID NO: 225680 - DNA, 25 bp, probe
gatccttgggtttacctgctgttaa

SEQ ID NO: 225681 - DNA, 25 bp, probe
gatgttagggtataagttgctgtaa

SEQ ID NO: 225682 - DNA, 25 bp, probe
gagttgaagtgttatacatttctta

SEQ ID NO: 225683 - DNA, 25 bp, probe
gagttaacttcagtcctttcttagg

SEQ ID NO: 225684 - DNA, 25 bp, probe
gagttcagacttatcaccattctta

SEQ ID NO: 225685 - DNA, 25 bp, probe
gagttcatactttctacgtggcatt

SEQ ID NO: 225686 - DNA, 25 bp, probe
gagtatcaccttcctcaaggatttc

SEQ ID NO: 225687 - DNA, 25 bp, probe
gagtatcccaacctcttggatgtat

SEQ ID NO: 225688 - DNA, 25 bp, probe
gagtatcctccaaactgtggataca

SEQ ID NO: 225689 - DNA, 25 bp, probe
gagtacgtcactgacttgtgtatct

SEQ ID NO: 225690 - DNA, 25 bp, probe
gagtacggctatgagtgtctggacg

SEQ ID NO: 225691 - DNA, 25 bp, probe
gagtatggagtacagctgtctggcc

SEQ ID NO: 225692 - DNA, 25 bp, probe
gagtatgtagccccagagatcatcc

SEQ ID NO: 225693 - DNA, 25 bp, probe
gagttcctgccggagagatatacag

SEQ ID NO: 225694 - DNA, 25 bp, probe
gagttcctgccggagagatatacag

SEQ ID NO: 225695 - DNA, 25 bp, probe
gagttcctggtgcacgaaaacaaca

SEQ ID NO: 225696 - DNA, 25 bp, probe
gagtttaggctggtgctgccaaaaa

SEQ ID NO: 225697 - DNA, 25 bp, probe
gagtttaggctggtgctgccaaaaa

SEQ ID NO: 225698 - DNA, 25 bp, probe
gagtttgggctgtatgttagcaagc

SEQ ID NO: 225699 - DNA, 25 bp, probe
gagtttgcggtgaagattatggaag

SEQ ID NO: 225700 - DNA, 25 bp, probe
gagttatgagttgaagtcttgaatg

SEQ ID NO: 225701 - DNA, 25 bp, probe
gagtcttcagtagagatgtttacaa

SEQ ID NO: 225702 - DNA, 25 bp, probe
gagttgtgattataggtttcatgca

SEQ ID NO: 225703 - DNA, 25 bp, probe
gagtctgtgccatgaagcagttaca

SEQ ID NO: 225704 - DNA, 25 bp, probe
gagtctggctatggacggaaatcag

SEQ ID NO: 225705 - DNA, 25 bp, probe
gatgtcggtgcagaacgaagtcgag

SEQ ID NO: 225706 - DNA, 25 bp, probe
gatgtcggtgcagaacgaagtcgag

SEQ ID NO: 225707 - DNA, 25 bp, probe
gagtcccacagggagcgcagagtcg

SEQ ID NO: 225708 - DNA, 25 bp, probe
gagtcccacagggagcgcagagtcg

SEQ ID NO: 225709 - DNA, 25 bp, probe
gagttctgggctgagctgcagagtc

SEQ ID NO: 225710 - DNA, 25 bp, probe
gagttctgggctgagctgcagagtc

SEQ ID NO: 225711 - DNA, 25 bp, probe
gagttgtgggaccagatgtcatctc

SEQ ID NO: 225712 - DNA, 25 bp, probe
gagttgtggtggaacagcaaccggt

SEQ ID NO: 225713 - DNA, 25 bp, probe
gagtcagtgtggcaaagcgggggca

SEQ ID NO: 225714 - DNA, 25 bp, probe
gagtagttgaggacacaggcacggg

SEQ ID NO: 225715 - DNA, 25 bp, probe
gagtaccgcgtgacagcccacgcgg

SEQ ID NO: 225716 - DNA, 25 bp, probe
gagtacgtcgtggagtccactggcg

SEQ ID NO: 225717 - DNA, 25 bp, probe
gagttcctagattacctcactggga

SEQ ID NO: 225718 - DNA, 25 bp, probe
gagttcctcaatgaggcctcggtca

SEQ ID NO: 225719 - DNA, 25 bp, probe
gagtctaacaatgcggcggcagagt

SEQ ID NO: 225720 - DNA, 25 bp, probe
gagtctaacaatgcggcggcagagt

SEQ ID NO: 225721 - DNA, 25 bp, probe
gagtcgaacaatgcgtccaatgaca

SEQ ID NO: 225722 - DNA, 25 bp, probe
gagtcagagaccactgtcttaacag

SEQ ID NO: 225723 - DNA, 25 bp, probe
gagttagcactcagctggtgaattc

SEQ ID NO: 225724 - DNA, 25 bp, probe
gagttgactcttgctggtgaagtac

SEQ ID NO: 225725 - DNA, 25 bp, probe
gagttgttgactcatagtacagtaa

SEQ ID NO: 225726 - DNA, 25 bp, probe
gagtatgcttcacctagaaacagat

SEQ ID NO: 225727 - DNA, 25 bp, probe
gagtctctgatacacagtaattgtg

SEQ ID NO: 225728 - DNA, 25 bp, probe
gagtcctgaagccacaacagcagag

SEQ ID NO: 225729 - DNA, 25 bp, probe
gagtcccaggagccaatcagaggcc

SEQ ID NO: 225730 - DNA, 25 bp, probe
gagtcccaggagccaatcagaggcc

SEQ ID NO: 225731 - DNA, 25 bp, probe
gagttcctgaacgagaaggcgcgcc

SEQ ID NO: 225732 - DNA, 25 bp, probe
gagttgcaagtgacaggagggcccc

SEQ ID NO: 225733 - DNA, 25 bp, probe
gagttagtgacagggtggcagtccc

SEQ ID NO: 225734 - DNA, 25 bp, probe
gagtcaaggaagcagtggcaattct

SEQ ID NO: 225735 - DNA, 25 bp, probe
gagtcaaggaagcagtggcaattct

SEQ ID NO: 225736 - DNA, 25 bp, probe
gagtgaagtgaaccagtccgtggcc

SEQ ID NO: 225737 - DNA, 25 bp, probe
gagtatgggagagacggtgctgtgc

SEQ ID NO: 225738 - DNA, 25 bp, probe
gagtactgggactacgaggctcacg

SEQ ID NO: 225739 - DNA, 25 bp, probe
gagtagctgggattacagcgcccgc

SEQ ID NO: 225740 - DNA, 25 bp, probe
gagtagctgggattacagcgcccgc

SEQ ID NO: 225741 - DNA, 25 bp, probe
gagttctgggcattaagatcggctg

SEQ ID NO: 225742 - DNA, 25 bp, probe
gagttcagatgatcacaaacaggtg

SEQ ID NO: 225743 - DNA, 25 bp, probe
gagtcacagcatacactggaacagg

SEQ ID NO: 225744 - DNA, 25 bp, probe
gagtcctgtgcaacatggaaagtgc

SEQ ID NO: 225745 - DNA, 25 bp, probe
gagttctgctgtatgagatgttggc

SEQ ID NO: 225746 - DNA, 25 bp, probe
gagttgcacattaatcagattagcc

SEQ ID NO: 225747 - DNA, 25 bp, probe
gagtatgctctaaaagaatatggcg

SEQ ID NO: 225748 - DNA, 25 bp, probe
gagtcactcatgtgcaaaattgcag

SEQ ID NO: 225749 - DNA, 25 bp, probe
gagtcttctgcatcagattattgca

SEQ ID NO: 225750 - DNA, 25 bp, probe
gagtcttctgcatcagattattgca

SEQ ID NO: 225751 - DNA, 25 bp, probe
gagtctgattgatgagagtgtccat

SEQ ID NO: 225752 - DNA, 25 bp, probe
gagtctgtctcattatgtgattcct

SEQ ID NO: 225753 - DNA, 25 bp, probe
gagtgctggtcaaatcagaacactt

SEQ ID NO: 225754 - DNA, 25 bp, probe
gagtgttgtgtgcttgaacttttgg

SEQ ID NO: 225755 - DNA, 25 bp, probe
gagttttgcatggtctaaattgtgt

SEQ ID NO: 225756 - DNA, 25 bp, probe
gagttgcttctgggatagaaatgtt

SEQ ID NO: 225757 - DNA, 25 bp, probe
gagtccattccccactagaatgttt

SEQ ID NO: 225758 - DNA, 25 bp, probe
gagtccattccccactagaatgttt

SEQ ID NO: 225759 - DNA, 25 bp, probe
gagtgaccacctcacttgaagcttt

SEQ ID NO: 225760 - DNA, 25 bp, probe
gagtgaccacctcacttgaagcttt

SEQ ID NO: 225761 - DNA, 25 bp, probe
gagtacgaccgtgctgtgaaggagg

SEQ ID NO: 225762 - DNA, 25 bp, probe
gagtacgaggccaggatgaagggtc

SEQ ID NO: 225763 - DNA, 25 bp, probe
gagtacgaggccaggatgaagggtc

SEQ ID NO: 225764 - DNA, 25 bp, probe
gaggacctggcgagtaaggagtttt

SEQ ID NO: 225765 - DNA, 25 bp, probe
gaggacctggcgagtaaggagtttt

SEQ ID NO: 225766 - DNA, 25 bp, probe
gaggagctcttggcctttaaagttc

SEQ ID NO: 225767 - DNA, 25 bp, probe
gagtgctgtccttttattaaactta

SEQ ID NO: 225768 - DNA, 25 bp, probe
gagtcttaccgtaattgataacaaa

SEQ ID NO: 225769 - DNA, 25 bp, probe
gagttttacggcaatatcatcacca

SEQ ID NO: 225770 - DNA, 25 bp, probe
gaggattattcaagaattctaccaa

SEQ ID NO: 225771 - DNA, 25 bp, probe
gagtttattcactgtcttatctgca

SEQ ID NO: 225772 - DNA, 25 bp, probe
gagtttattcactgtcttatctgca

SEQ ID NO: 225773 - DNA, 25 bp, probe
gagttatcttgctataagcttttca

SEQ ID NO: 225774 - DNA, 25 bp, probe
gagtttgtttacagctgttgtcctg

SEQ ID NO: 225775 - DNA, 25 bp, probe
gagtttcttttcagctatggaacta

SEQ ID NO: 225776 - DNA, 25 bp, probe
gagtctttggttctaaggacctgaa

SEQ ID NO: 225777 - DNA, 25 bp, probe
gagtctttggttctaaggacctgaa

SEQ ID NO: 225778 - DNA, 25 bp, probe
gagtgcttggggcttgaacccctta

SEQ ID NO: 225779 - DNA, 25 bp, probe
gagtcgtgggggatggactcactgc

SEQ ID NO: 225780 - DNA, 25 bp, probe
gagtcctgggcggaaggaggcttct

SEQ ID NO: 225781 - DNA, 25 bp, probe
gagtccatccagctaagggacctgg

SEQ ID NO: 225782 - DNA, 25 bp, probe
gagtcactttgacaatgggaatgag

SEQ ID NO: 225783 - DNA, 25 bp, probe
gagtgcacctctctacttgggaggt

SEQ ID NO: 225784 - DNA, 25 bp, probe
gagtgacaatcatttttcttaaggc

SEQ ID NO: 225785 - DNA, 25 bp, probe
gagggaacctgtttcactatggcct

SEQ ID NO: 225786 - DNA, 25 bp, probe
gagggaagccttttggctataacca

SEQ ID NO: 225787 - DNA, 25 bp, probe
gaggaaagtctcagtccaaacacct

SEQ ID NO: 225788 - DNA, 25 bp, probe
gaggaatagttgagccccaagtcct

SEQ ID NO: 225789 - DNA, 25 bp, probe
gaggctaagtggcaggtccaatccc

SEQ ID NO: 225790 - DNA, 25 bp, probe
gagtctgaagtgctagctgttaagg

SEQ ID NO: 225791 - DNA, 25 bp, probe
gagtctgaaggcacagtcaatatac

SEQ ID NO: 225792 - DNA, 25 bp, probe
gagtctgaaggcacagtcaatatac

SEQ ID NO: 225793 - DNA, 25 bp, probe
gagtgtcagaacaatcagttaaaga

SEQ ID NO: 225794 - DNA, 25 bp, probe
gagttcagtccatctctataataaa

SEQ ID NO: 225795 - DNA, 25 bp, probe
gagtccttcctgttctataaagaag

SEQ ID NO: 225796 - DNA, 25 bp, probe
gagtcaataccgttccatagaggtt

SEQ ID NO: 225797 - DNA, 25 bp, probe
gagtcatgaagctaaatccttgggc

SEQ ID NO: 225798 - DNA, 25 bp, probe
gagtctgagacatacacactttcca

SEQ ID NO: 225799 - DNA, 25 bp, probe
gagtctgagacatacacactttcca

SEQ ID NO: 225800 - DNA, 25 bp, probe
gagttcaaatcaacatctttctgga

SEQ ID NO: 225801 - DNA, 25 bp, probe
gagttaacatttggctatactgatg

SEQ ID NO: 225802 - DNA, 25 bp, probe
gagttttgtcttggatattcttgaa

SEQ ID NO: 225803 - DNA, 25 bp, probe
gagtattatctgatccatgttcttg

SEQ ID NO: 225804 - DNA, 25 bp, probe
gagtttcactgtactgcatgtgact

SEQ ID NO: 225805 - DNA, 25 bp, probe
gagtttcactgtactgcatgtgact

SEQ ID NO: 225806 - DNA, 25 bp, probe
gagtcttactgtaagcagtggctga

SEQ ID NO: 225807 - DNA, 25 bp, probe
gagtttattgaggaaatgctgctga

SEQ ID NO: 225808 - DNA, 25 bp, probe
gagtttctttgtcaacagcgtgccg

SEQ ID NO: 225809 - DNA, 25 bp, probe
gagttttctcttttacaattgcctg

SEQ ID NO: 225810 - DNA, 25 bp, probe
gagttttactgcctgtagcaatggc

SEQ ID NO: 225811 - DNA, 25 bp, probe
gagttcttactggtgagatgctgag

SEQ ID NO: 225812 - DNA, 25 bp, probe
gagttattagtcgatcgagatgagg

SEQ ID NO: 225813 - DNA, 25 bp, probe
gagtttgagagtttgcagaagcagg

SEQ ID NO: 225814 - DNA, 25 bp, probe
ggtttcatggttacgacctggtagt

SEQ ID NO: 225815 - DNA, 25 bp, probe
gagtttcttctcatcagagcactgg

SEQ ID NO: 225816 - DNA, 25 bp, probe
gagtcttttcacttcagtggggtga

SEQ ID NO: 225817 - DNA, 25 bp, probe
gagttttagacaatctctaggtaga

SEQ ID NO: 225818 - DNA, 25 bp, probe
gagtactaaacagcttccttcagat

SEQ ID NO: 225819 - DNA, 25 bp, probe
gagtaatagaacatctcgacttatt

SEQ ID NO: 225820 - DNA, 25 bp, probe
gagggatcagttcttaacttttcag

SEQ ID NO: 225821 - DNA, 25 bp, probe
gagggatcagttcttaacttttcag

SEQ ID NO: 225822 - DNA, 25 bp, probe
gatgggaaaggtattagatttactg

SEQ ID NO: 225823 - DNA, 25 bp, probe
gatcgggaggctgaattagtgttat

SEQ ID NO: 225824 - DNA, 25 bp, probe
gatcgggaggctgaattagtgttat

SEQ ID NO: 225825 - DNA, 25 bp, probe
gatcaggggacgggatggggtacac

SEQ ID NO: 225826 - DNA, 25 bp, probe
gataaggtagagctgagaccgtcct

SEQ ID NO: 225827 - DNA, 25 bp, probe
gatccgggatagcgagaccactaaa

SEQ ID NO: 225828 - DNA, 25 bp, probe
gatgtccggaacaggatgtcctcaa

SEQ ID NO: 225829 - DNA, 25 bp, probe
gagttcaagaccagcctggccaaca

SEQ ID NO: 225830 - DNA, 25 bp, probe
gagttacaagaaactctgcctcaga

SEQ ID NO: 225831 - DNA, 25 bp, probe
gagtatgaaggtggacttggtcaac

SEQ ID NO: 225832 - DNA, 25 bp, probe
gagtatgtgaaaagaatgggacgac

SEQ ID NO: 225833 - DNA, 25 bp, probe
gagtcatggaaaagtcaaggccttc

SEQ ID NO: 225834 - DNA, 25 bp, probe
gagtcatggaaaagtcaaggccttc

SEQ ID NO: 225835 - DNA, 25 bp, probe
gagtcatggctaatttaacaccctt

SEQ ID NO: 225836 - DNA, 25 bp, probe
gagtctgttttaaaaagcagcgatg

SEQ ID NO: 225837 - DNA, 25 bp, probe
gagtttgctgtatacaaacaggtgc

SEQ ID NO: 225838 - DNA, 25 bp, probe
gagtaagctgtccaacactataaag

SEQ ID NO: 225839 - DNA, 25 bp, probe
gagtaagctgtccaacactataaag

SEQ ID NO: 225840 - DNA, 25 bp, probe
gagtcagccgtggacacagctaaga

SEQ ID NO: 225841 - DNA, 25 bp, probe
gaggaccctgggacttaagaagaag

SEQ ID NO: 225842 - DNA, 25 bp, probe
gaggaccctgggacttaagaagaag

SEQ ID NO: 225843 - DNA, 25 bp, probe
gagtgactttacaacttaactagga

SEQ ID NO: 225844 - DNA, 25 bp, probe
gagtgactactatacagactacgtg

SEQ ID NO: 225845 - DNA, 25 bp, probe
gagtacgaaattcctggcaactggt

SEQ ID NO: 225846 - DNA, 25 bp, probe
gagtcttcaagatcctgagaacttg

SEQ ID NO: 225847 - DNA, 25 bp, probe
gagtttagattcccttgaagatgtg

SEQ ID NO: 225848 - DNA, 25 bp, probe
gaggtgggcatttcacgggaagggt

SEQ ID NO: 225849 - DNA, 25 bp, probe
ggacgtgaagtctcgggcaaagcgt

SEQ ID NO: 225850 - DNA, 25 bp, probe
gagggtcaagtctgggtttaggtct

SEQ ID NO: 225851 - DNA, 25 bp, probe
gagggtttccatggggtaggaggat

SEQ ID NO: 225852 - DNA, 25 bp, probe
gagggtttcggatatggtggaggac

SEQ ID NO: 225853 - DNA, 25 bp, probe
gagggctgtgcccgtaaggggaagt

SEQ ID NO: 225854 - DNA, 25 bp, probe
gaggtagccccctaaatgggcaagc

SEQ ID NO: 225855 - DNA, 25 bp, probe
gaggctccccagcctaaggaggagc

SEQ ID NO: 225856 - DNA, 25 bp, probe
gagtctcttctccactggatggagg

SEQ ID NO: 225857 - DNA, 25 bp, probe
gagtacttgtctgtggaggggatgc

SEQ ID NO: 225858 - DNA, 25 bp, probe
gagtacttgtctgtggaggggatgc

SEQ ID NO: 225859 - DNA, 25 bp, probe
gagtacgtgccgggtggggagatgt

SEQ ID NO: 225860 - DNA, 25 bp, probe
gagtatcgccctgggatgtggtggg

SEQ ID NO: 225861 - DNA, 25 bp, probe
gagtactacactcagcagcagggtg

SEQ ID NO: 225862 - DNA, 25 bp, probe
gagtttacactcatcagagcgatgt

SEQ ID NO: 225863 - DNA, 25 bp, probe
gagtttatatctctcatgcatattt

SEQ ID NO: 225864 - DNA, 25 bp, probe
gagtttatatctctcatgcatattt

SEQ ID NO: 225865 - DNA, 25 bp, probe
gagtttttgtgttctccagtttaat

SEQ ID NO: 225866 - DNA, 25 bp, probe
gagtattttgatcttcaattaaaga

SEQ ID NO: 225867 - DNA, 25 bp, probe
gatgggacttttgtcatttcaaaga

SEQ ID NO: 225868 - DNA, 25 bp, probe
gatggagactttgactttttgaaaa

SEQ ID NO: 225869 - DNA, 25 bp, probe
gagtaactttgttttgtatggtaag

SEQ ID NO: 225870 - DNA, 25 bp, probe
gagtacctaattttagatttgtcaa

SEQ ID NO: 225871 - DNA, 25 bp, probe
gagtaggctataagggaagattgtc

SEQ ID NO: 225872 - DNA, 25 bp, probe
gagtaggctataagggaagattgtc

SEQ ID NO: 225873 - DNA, 25 bp, probe
gagtcatggtaatagtagcaattgt

SEQ ID NO: 225874 - DNA, 25 bp, probe
gagtcatggtaatagtagcaattgt

SEQ ID NO: 225875 - DNA, 25 bp, probe
gagtatcaggatttagtgacctaat

SEQ ID NO: 225876 - DNA, 25 bp, probe
gagtatcaggatttagtgacctaat

SEQ ID NO: 225877 - DNA, 25 bp, probe
gagtaaggcaggagtacctaatttt

SEQ ID NO: 225878 - DNA, 25 bp, probe
gagtaacacaggattcactgtttta

SEQ ID NO: 225879 - DNA, 25 bp, probe
gagtagactaggattccttctctta

SEQ ID NO: 225880 - DNA, 25 bp, probe
gagggactaagagtacctttgcctg

SEQ ID NO: 225881 - DNA, 25 bp, probe
gagggaaacagtgactgctactttg

SEQ ID NO: 225882 - DNA, 25 bp, probe
gagggcaaaattcaggccatcttct

SEQ ID NO: 225883 - DNA, 25 bp, probe
gagggaatcttcaggaccatgcttt

SEQ ID NO: 225884 - DNA, 25 bp, probe
gaggagaacttcaaaacctttgtgt

SEQ ID NO: 225885 - DNA, 25 bp, probe
gagggccacgtccataaattttctt

SEQ ID NO: 225886 - DNA, 25 bp, probe
gaggagcaaggtttaaatttgttat

SEQ ID NO: 225887 - DNA, 25 bp, probe
gagtgtcctggttgtaagctccttt

SEQ ID NO: 225888 - DNA, 25 bp, probe
gagggcctggtacaagggaatgtca

SEQ ID NO: 225889 - DNA, 25 bp, probe
gagggtcggtggaggggtcattcac

SEQ ID NO: 225890 - DNA, 25 bp, probe
gagggatgggggaggatgtccttgc

SEQ ID NO: 225891 - DNA, 25 bp, probe
gagtgagggtggccaaactaccgcc

SEQ ID NO: 225892 - DNA, 25 bp, probe
gagtaggagggcagaagcttccatt

SEQ ID NO: 225893 - DNA, 25 bp, probe
gagtgcgggggccgaaggatagcaa

SEQ ID NO: 225894 - DNA, 25 bp, probe
gagtaggagagactgctaagtcagg

SEQ ID NO: 225895 - DNA, 25 bp, probe
gagtcgcgagaacatacaatcaagt

SEQ ID NO: 225896 - DNA, 25 bp, probe
gagtcgctgcagaagcaagaagcca

SEQ ID NO: 225897 - DNA, 25 bp, probe
gagtgcacatcaaagaaatcacaat

SEQ ID NO: 225898 - DNA, 25 bp, probe
gagtgcacatcaaagaaatcacaat

SEQ ID NO: 225899 - DNA, 25 bp, probe
gagtgagcatcagcgacctacaaga

SEQ ID NO: 225900 - DNA, 25 bp, probe
gagtgagcatcagcgacctacaaga

SEQ ID NO: 225901 - DNA, 25 bp, probe
gagtagcatcagccagaacatgaga

SEQ ID NO: 225902 - DNA, 25 bp, probe
gagtagccagcaccatgactgatgg

SEQ ID NO: 225903 - DNA, 25 bp, probe
gagtcactcagccaaatctgtctgc

SEQ ID NO: 225904 - DNA, 25 bp, probe
gagtcactcagccaaatctgtctgc

SEQ ID NO: 225905 - DNA, 25 bp, probe
gagtcaacatgaggacatctagctc

SEQ ID NO: 225906 - DNA, 25 bp, probe
gagtcaacatgaggacatctagctc

SEQ ID NO: 225907 - DNA, 25 bp, probe
gagtcattcatggtatctctcatgt

SEQ ID NO: 225908 - DNA, 25 bp, probe
gagtatatatttacatgtcttttta

SEQ ID NO: 225909 - DNA, 25 bp, probe
gagtagaatgtgatcaatccagttt

SEQ ID NO: 225910 - DNA, 25 bp, probe
gagtatgaatgcccctacttggtat

SEQ ID NO: 225911 - DNA, 25 bp, probe
gagtatgaatgcccctacttggtat

SEQ ID NO: 225912 - DNA, 25 bp, probe
gagtacatcgggactatcattcgaa

SEQ ID NO: 225913 - DNA, 25 bp, probe
gagtatcaggggatcttgctggcaa

SEQ ID NO: 225914 - DNA, 25 bp, probe
gagtagcaggttaccactctggcag

SEQ ID NO: 225915 - DNA, 25 bp, probe
gagtatgcagttgtccaggtgatgc

SEQ ID NO: 225916 - DNA, 25 bp, probe
gagtatgagtccatgcagcagaaac

SEQ ID NO: 225917 - DNA, 25 bp, probe
gagtatgagtccatgcagcagaaac

SEQ ID NO: 225918 - DNA, 25 bp, probe
gagtatcgtcaccgcaagatgaagc

SEQ ID NO: 225919 - DNA, 25 bp, probe
gagtacttgcacggcaagggcatca

SEQ ID NO: 225920 - DNA, 25 bp, probe
gagtcacttcaggtggtgtgtcaga

SEQ ID NO: 225921 - DNA, 25 bp, probe
gagtcactctcggaatgactgccga

SEQ ID NO: 225922 - DNA, 25 bp, probe
gagtcctcatatgaggaggcccaca

SEQ ID NO: 225923 - DNA, 25 bp, probe
gagtccatagctgaagaggagcgcc

SEQ ID NO: 225924 - DNA, 25 bp, probe
gagtcctcatgtgtattgaatgctc

SEQ ID NO: 225925 - DNA, 25 bp, probe
gagtcctctgtttgcactggacata

SEQ ID NO: 225926 - DNA, 25 bp, probe
gagtcccttcattcagagaagctga

SEQ ID NO: 225927 - DNA, 25 bp, probe
gagtccagtctaagcagagagactg

SEQ ID NO: 225928 - DNA, 25 bp, probe
gagtcactgtgtcatcgatgagcgg

SEQ ID NO: 225929 - DNA, 25 bp, probe
gagtccttgctttctgatatgcttg

SEQ ID NO: 225930 - DNA, 25 bp, probe
gagtattagtctttatgtcatcatt

SEQ ID NO: 225931 - DNA, 25 bp, probe
gagtattagtctttatgtcatcatt

SEQ ID NO: 225932 - DNA, 25 bp, probe
gagtcgtagtaatatgtgcacacac

SEQ ID NO: 225933 - DNA, 25 bp, probe
gagtttgagaaccatgaggtccatc

SEQ ID NO: 225934 - DNA, 25 bp, probe
gagtttgagaagcatgaggtccatc

SEQ ID NO: 225935 - DNA, 25 bp, probe
gagtttgagaagcatgaggtccatc

SEQ ID NO: 225936 - DNA, 25 bp, probe
gatgtttacaagatggcgaccacca

SEQ ID NO: 225937 - DNA, 25 bp, probe
gagtcttacaagagacactgccact

SEQ ID NO: 225938 - DNA, 25 bp, probe
gagtcttcaagttttcactccagct

SEQ ID NO: 225939 - DNA, 25 bp, probe
gagtcatgatcatgtccttacactc

SEQ ID NO: 225940 - DNA, 25 bp, probe
gagtcagatgctttcatttacacag

SEQ ID NO: 225941 - DNA, 25 bp, probe
gagtcagatgattttctgggacaaa

SEQ ID NO: 225942 - DNA, 25 bp, probe
gagtcaaggatggatctggaacata

SEQ ID NO: 225943 - DNA, 25 bp, probe
gagtacatcgatgccgtgaaggact

SEQ ID NO: 225944 - DNA, 25 bp, probe
gagtaattatcctatgccaaggact

SEQ ID NO: 225945 - DNA, 25 bp, probe
gaggataggacctcccaggatgctt

SEQ ID NO: 225946 - DNA, 25 bp, probe
gaggtagagacttcaaccaagtggt

SEQ ID NO: 225947 - DNA, 25 bp, probe
gaggtagagacttcaaccaagtggt

SEQ ID NO: 225948 - DNA, 25 bp, probe
gaggctgtaacttatactaaaggtt

SEQ ID NO: 225949 - DNA, 25 bp, probe
gagtcttacattttctagaggaggt

SEQ ID NO: 225950 - DNA, 25 bp, probe
gagtgcttccttcttgaagacgagt

SEQ ID NO: 225951 - DNA, 25 bp, probe
gagtattgccttctggtgtcattaa

SEQ ID NO: 225952 - DNA, 25 bp, probe
gagtattgccttctggtgtcattaa

SEQ ID NO: 225953 - DNA, 25 bp, probe
gagtaactgctctctgagttttgca

SEQ ID NO: 225954 - DNA, 25 bp, probe
gagtagcactcactgaatagtttta

SEQ ID NO: 225955 - DNA, 25 bp, probe
gagtatcagtgccagaaattcctta

SEQ ID NO: 225956 - DNA, 25 bp, probe
gagtacaggtcagtaagcctcatta

SEQ ID NO: 225957 - DNA, 25 bp, probe
gagtcacctgatgtcaaccttgtga

SEQ ID NO: 225958 - DNA, 25 bp, probe
gagtcacctgatgtcaaccttgtga

SEQ ID NO: 225959 - DNA, 25 bp, probe
gagtcctagatgaatctaccattgc

SEQ ID NO: 225960 - DNA, 25 bp, probe
gagtctgggagaactccaatgctga

SEQ ID NO: 225961 - DNA, 25 bp, probe
gagtctgggagaactccaatgctga

SEQ ID NO: 225962 - DNA, 25 bp, probe
gagtctcaggaaacaccagctggca

SEQ ID NO: 225963 - DNA, 25 bp, probe
gagtccaaacataacgggctgcaat

SEQ ID NO: 225964 - DNA, 25 bp, probe
gagtcgcgaggcatttggagagcaa

SEQ ID NO: 225965 - DNA, 25 bp, probe
gagtatgtatggatgcgtggatatc

SEQ ID NO: 225966 - DNA, 25 bp, probe
gagtagtaagcatggctgcctatgc

SEQ ID NO: 225967 - DNA, 25 bp, probe
gagtcttaacattggccagcatctg

SEQ ID NO: 225968 - DNA, 25 bp, probe
gagtcttcataacgctaagcattgt

SEQ ID NO: 225969 - DNA, 25 bp, probe
gagtctcaagaacctttgaatgaag

SEQ ID NO: 225970 - DNA, 25 bp, probe
gagtccaagaagctccttgtcaggc

SEQ ID NO: 225971 - DNA, 25 bp, probe
gagtccaaagcaggctggttggcat

SEQ ID NO: 225972 - DNA, 25 bp, probe
gagtccagaactactgagacaggat

SEQ ID NO: 225973 - DNA, 25 bp, probe
gagtccattatcgctgggcattttt

SEQ ID NO: 225974 - DNA, 25 bp, probe
gagtggttacccagacacttctttt

SEQ ID NO: 225975 - DNA, 25 bp, probe
gagtgctttactccaagaagctttc

SEQ ID NO: 225976 - DNA, 25 bp, probe
gagtctcttggactaagaagatgtt

SEQ ID NO: 225977 - DNA, 25 bp, probe
gagtctcttggactaagaagatgtt

SEQ ID NO: 225978 - DNA, 25 bp, probe
gagtctgcttgtcttagatgttggt

SEQ ID NO: 225979 - DNA, 25 bp, probe
gagtgctgctatgggaaatcttttc

SEQ ID NO: 225980 - DNA, 25 bp, probe
gagtgctgctatgggaaatcttttc

SEQ ID NO: 225981 - DNA, 25 bp, probe
gagtctgatatcagcaagattgctg

SEQ ID NO: 225982 - DNA, 25 bp, probe
gagtgctcatgtttgaagatgatgg

SEQ ID NO: 225983 - DNA, 25 bp, probe
gggctcgttggacgaggggtacaag

SEQ ID NO: 225984 - DNA, 25 bp, probe
gagtgccaagtgcgagggggacatc

SEQ ID NO: 225985 - DNA, 25 bp, probe
gagtctacagatgggatgggtctga

SEQ ID NO: 225986 - DNA, 25 bp, probe
gagtctcagaaccgtggtgtgtaca

SEQ ID NO: 225987 - DNA, 25 bp, probe
gagtcagaaagcagtggggaagatg

SEQ ID NO: 225988 - DNA, 25 bp, probe
gagtcggaaacaggcatggggagat

SEQ ID NO: 225989 - DNA, 25 bp, probe
gagtcggaaacaggcatggggagat

SEQ ID NO: 225990 - DNA, 25 bp, probe
gagtctatgaaaacgtgggcctgat

SEQ ID NO: 225991 - DNA, 25 bp, probe
gcgagtggtggaaggcgcagtccct

SEQ ID NO: 225992 - DNA, 25 bp, probe
gagtgcttggaaactattagctttt

SEQ ID NO: 225993 - DNA, 25 bp, probe
gaggttgaagtgtctttggcccatt

SEQ ID NO: 225994 - DNA, 25 bp, probe
gaggttaaaattttgtctgcacttg

SEQ ID NO: 225995 - DNA, 25 bp, probe
gagtgtattttcttattgaggccct

SEQ ID NO: 225996 - DNA, 25 bp, probe
gagggattcctaatcactcagagca

SEQ ID NO: 225997 - DNA, 25 bp, probe
gaggtatggcccatccaagactttt

SEQ ID NO: 225998 - DNA, 25 bp, probe
gaggtagtgaacatcctaaatttct

SEQ ID NO: 225999 - DNA, 25 bp, probe
gaggtagtgaacatcctaaatttct

SEQ ID NO: 226000 - DNA, 25 bp, probe
gaggcatagggagtccttaaagttg

SEQ ID NO: 226001 - DNA, 25 bp, probe
gaggatattggagcccctttttgtg

SEQ ID NO: 226002 - DNA, 25 bp, probe
gaggtgttagaagccatcgttctgt

SEQ ID NO: 226003 - DNA, 25 bp, probe
gagtatgtcttggaaccgggctatg

SEQ ID NO: 226004 - DNA, 25 bp, probe
gagtgatgttttaatccagtccaat

SEQ ID NO: 226005 - DNA, 25 bp, probe
gagtgatttggaactccattccacc

SEQ ID NO: 226006 - DNA, 25 bp, probe
gagtgatttggaactccattccacc

SEQ ID NO: 226007 - DNA, 25 bp, probe
gagtgtttcttgtgccattaaccat

SEQ ID NO: 226008 - DNA, 25 bp, probe
gagtctgtctgtatgaccttgggcc

SEQ ID NO: 226009 - DNA, 25 bp, probe
gagtctgtctgtatgaccttgggcc

SEQ ID NO: 226010 - DNA, 25 bp, probe
gagtagtcattttgcccattagccc

SEQ ID NO: 226011 - DNA, 25 bp, probe
gagtctgtttttgctcaaaccatca

SEQ ID NO: 226012 - DNA, 25 bp, probe
gagtcattttcttctttacactatc

SEQ ID NO: 226013 - DNA, 25 bp, probe
gagtcattttcttctttacactatc

SEQ ID NO: 226014 - DNA, 25 bp, probe
gagtcatgttttttttctcctcttt

SEQ ID NO: 226015 - DNA, 25 bp, probe
gagtcgtgttttttatccctgattt

SEQ ID NO: 226016 - DNA, 25 bp, probe
gatgtggtatttattttcttagttc

SEQ ID NO: 226017 - DNA, 25 bp, probe
gagtaggttgctatggttttatcta

SEQ ID NO: 226018 - DNA, 25 bp, probe
gagtatggttgcttttgccatggtt

SEQ ID NO: 226019 - DNA, 25 bp, probe
gagtctggatctctgatgatcacag

SEQ ID NO: 226020 - DNA, 25 bp, probe
gagtctggactggctgagataagag

SEQ ID NO: 226021 - DNA, 25 bp, probe
gagtcagcggtggcgaggagaggcg

SEQ ID NO: 226022 - DNA, 25 bp, probe
gagtcagcacagtacaggcgagaac

SEQ ID NO: 226023 - DNA, 25 bp, probe
gagtcagaagaccaggctacaaggt

SEQ ID NO: 226024 - DNA, 25 bp, probe
gagtgaaagctgtggtagagtggtt

SEQ ID NO: 226025 - DNA, 25 bp, probe
gagtgaacactcttggtagaagccc

SEQ ID NO: 226026 - DNA, 25 bp, probe
gatgtaccttcaattgaaaacctcg

SEQ ID NO: 226027 - DNA, 25 bp, probe
gagtggtttctgagaacattccctg

SEQ ID NO: 226028 - DNA, 25 bp, probe
gagtgttttggcagcagcacatcta

SEQ ID NO: 226029 - DNA, 25 bp, probe
gagtgttttggcagcagcacatcta

SEQ ID NO: 226030 - DNA, 25 bp, probe
gagtgcttattaactgccacagata

SEQ ID NO: 226031 - DNA, 25 bp, probe
gagtgctgacttgtctttgcaatat

SEQ ID NO: 226032 - DNA, 25 bp, probe
gagtgctgacgccttactggcaatg

SEQ ID NO: 226033 - DNA, 25 bp, probe
gagtccacgctgatgacgcagaaga

SEQ ID NO: 226034 - DNA, 25 bp, probe
gagtgcagaacaattacgaatagaa

SEQ ID NO: 226035 - DNA, 25 bp, probe
gaggggcagttataaatggacacat

SEQ ID NO: 226036 - DNA, 25 bp, probe
gagggggtttatgtaaacacatatg

SEQ ID NO: 226037 - DNA, 25 bp, probe
gagggggttttatgcaaacgcactc

SEQ ID NO: 226038 - DNA, 25 bp, probe
gaggggcgacttaccaaaatcagcc

SEQ ID NO: 226039 - DNA, 25 bp, probe
gatggacgaccttctgaacaaaacc

SEQ ID NO: 226040 - DNA, 25 bp, probe
gatggtaacctcagaaagcaagaat

SEQ ID NO: 226041 - DNA, 25 bp, probe
gaggtacacacctcaaagagaaaag

SEQ ID NO: 226042 - DNA, 25 bp, probe
gaggtggaacctcaagaatgacttt

SEQ ID NO: 226043 - DNA, 25 bp, probe
gaggtgcacttcgtggaacactacc

SEQ ID NO: 226044 - DNA, 25 bp, probe
gagtgtcagctgatgtatgtccctt

SEQ ID NO: 226045 - DNA, 25 bp, probe
gagtgtgcatccagtattctggttt

SEQ ID NO: 226046 - DNA, 25 bp, probe
gagtgttccatggccaggcagtgtt

SEQ ID NO: 226047 - DNA, 25 bp, probe
gagtggaccatccgggagtttaaga

SEQ ID NO: 226048 - DNA, 25 bp, probe
gagtggaccaagcgggaattccagc

SEQ ID NO: 226049 - DNA, 25 bp, probe
gagggaccctggaggagatgccaac

SEQ ID NO: 226050 - DNA, 25 bp, probe
gagggaccctggaggagatgccaac

SEQ ID NO: 226051 - DNA, 25 bp, probe
gaggggcctctagagggtacatagt

SEQ ID NO: 226052 - DNA, 25 bp, probe
gagggaccctgagcaagtccctctt

SEQ ID NO: 226053 - DNA, 25 bp, probe
gagtggcccctagagcaggccacac

SEQ ID NO: 226054 - DNA, 25 bp, probe
gagtaccaggtcttagatgtccaac

SEQ ID NO: 226055 - DNA, 25 bp, probe
gagtaccaggtcttagatgtccaac

SEQ ID NO: 226056 - DNA, 25 bp, probe
gagtaacagctggcttaattgttga

SEQ ID NO: 226057 - DNA, 25 bp, probe
gagtaaagtcaaataactgttagta

SEQ ID NO: 226058 - DNA, 25 bp, probe
gagtaaagtcaaataactgttagta

SEQ ID NO: 226059 - DNA, 25 bp, probe
gagtaaactaatttagcttctagga

SEQ ID NO: 226060 - DNA, 25 bp, probe
gagtgatactcatatctctcagttc

SEQ ID NO: 226061 - DNA, 25 bp, probe
gagtgaaccagaatgcagttttcct

SEQ ID NO: 226062 - DNA, 25 bp, probe
gaggatgaactgatcctttgacccc

SEQ ID NO: 226063 - DNA, 25 bp, probe
gagtgggacgattacttggacaccg

SEQ ID NO: 226064 - DNA, 25 bp, probe
gagggtcaagtctgctcttgacatc

SEQ ID NO: 226065 - DNA, 25 bp, probe
gagtcccaagatctctgctggacat

SEQ ID NO: 226066 - DNA, 25 bp, probe
gagtcctattgtcgtgcatgtggga

SEQ ID NO: 226067 - DNA, 25 bp, probe
gagtcaactgttcagatgtaagatg

SEQ ID NO: 226068 - DNA, 25 bp, probe
gagtcatagcgttaggagtgggagt

SEQ ID NO: 226069 - DNA, 25 bp, probe
gagtctcagccgaagagagctgggc

SEQ ID NO: 226070 - DNA, 25 bp, probe
gagtctcagagcaggggagtggctt

SEQ ID NO: 226071 - DNA, 25 bp, probe
gagtcagatgcagacgcagtggggc

SEQ ID NO: 226072 - DNA, 25 bp, probe
gagtgcaatgacacagtcttggctc

SEQ ID NO: 226073 - DNA, 25 bp, probe
gagtgccagacagcactaggagcca

SEQ ID NO: 226074 - DNA, 25 bp, probe
gagtgcaaaccggtagcacagccca

SEQ ID NO: 226075 - DNA, 25 bp, probe
gagtcagaactgcctctgagctggg

SEQ ID NO: 226076 - DNA, 25 bp, probe
gagtcagagatcagctccactggaa

SEQ ID NO: 226077 - DNA, 25 bp, probe
gagtcagagatcagctccactggaa

SEQ ID NO: 226078 - DNA, 25 bp, probe
gaggatgagattgccctctacacag

SEQ ID NO: 226079 - DNA, 25 bp, probe
gaggcagcagttgcttactgaacgc

SEQ ID NO: 226080 - DNA, 25 bp, probe
gagtcacagtgtgctgtcacagacc

SEQ ID NO: 226081 - DNA, 25 bp, probe
gagtcacagtgtgctgtcacagacc

SEQ ID NO: 226082 - DNA, 25 bp, probe
gagtcacagtgtgctgtcacagacc

SEQ ID NO: 226083 - DNA, 25 bp, probe
gagtaaggacctgcgacacgctttc

SEQ ID NO: 226084 - DNA, 25 bp, probe
gagtgaagcagatctccacacatct

SEQ ID NO: 226085 - DNA, 25 bp, probe
gagtaacatggagcggctgctgcat

SEQ ID NO: 226086 - DNA, 25 bp, probe
gagtacaatgtgaaaggcatcttct

SEQ ID NO: 226087 - DNA, 25 bp, probe
gagtacaatgtgaaaggcatcttct

SEQ ID NO: 226088 - DNA, 25 bp, probe
gagtcaccaagttcagtgatctcac

SEQ ID NO: 226089 - DNA, 25 bp, probe
gagtgcgccaagatgcagaacgcag

SEQ ID NO: 226090 - DNA, 25 bp, probe
gagtcaccatgtatgcaattaagaa

SEQ ID NO: 226091 - DNA, 25 bp, probe
gagtccctgctaatgtaattggaag

SEQ ID NO: 226092 - DNA, 25 bp, probe
gagtctcactagattgactgaggaa

SEQ ID NO: 226093 - DNA, 25 bp, probe
gagtggacttgattttctcagtgaa

SEQ ID NO: 226094 - DNA, 25 bp, probe
gagtggctgttggttggcttgaaat

SEQ ID NO: 226095 - DNA, 25 bp, probe
gagtcaggtatggctaggttccaat

SEQ ID NO: 226096 - DNA, 25 bp, probe
gagtcaggtggtgggagtaccagcc

SEQ ID NO: 226097 - DNA, 25 bp, probe
gagtgcagtgagggggatgtcacca

SEQ ID NO: 226098 - DNA, 25 bp, probe
gagtgcagcgaggtcatgagcaaca

SEQ ID NO: 226099 - DNA, 25 bp, probe
gagtgctgacatgtctgaaatagaa

SEQ ID NO: 226100 - DNA, 25 bp, probe
gagtgctaatgtttgagacgatggc

SEQ ID NO: 226101 - DNA, 25 bp, probe
gagtctgttgcgttgcagaggcatt

SEQ ID NO: 226102 - DNA, 25 bp, probe
gagtgcctactgtatgcatgagttg

SEQ ID NO: 226103 - DNA, 25 bp, probe
gagtgacgacttcgatagtagatga

SEQ ID NO: 226104 - DNA, 25 bp, probe
gagtacaatctttgcatcaaactac

SEQ ID NO: 226105 - DNA, 25 bp, probe
gagtaaagtgtgatcattactggcc

SEQ ID NO: 226106 - DNA, 25 bp, probe
gagtaatatgtgctctattcacagt

SEQ ID NO: 226107 - DNA, 25 bp, probe
gagtgaaggcagccctgttacagct

SEQ ID NO: 226108 - DNA, 25 bp, probe
gagtctaggagctcagctgtgtgtc

SEQ ID NO: 226109 - DNA, 25 bp, probe
gaggcttggaacatgtgggtcccta

SEQ ID NO: 226110 - DNA, 25 bp, probe
gaggtagaaatcatgaaggtcccga

SEQ ID NO: 226111 - DNA, 25 bp, probe
gagggaaatatactggggtccccag

SEQ ID NO: 226112 - DNA, 25 bp, probe
gagtgagaagtatcggcgtctgggg

SEQ ID NO: 226113 - DNA, 25 bp, probe
gagtgagaagtatcggcgtctgggg

SEQ ID NO: 226114 - DNA, 25 bp, probe
gagtgcgtatgaaagtgtgtgtctg

SEQ ID NO: 226115 - DNA, 25 bp, probe
gagtgaatatgttaagctttgatga

SEQ ID NO: 226116 - DNA, 25 bp, probe
gagtgaagagtgaagagcatttggt

SEQ ID NO: 226117 - DNA, 25 bp, probe
gagtgaagagtgaagagcatttggt

SEQ ID NO: 226118 - DNA, 25 bp, probe
gagtaagatgtgtgagcgcactcgt

SEQ ID NO: 226119 - DNA, 25 bp, probe
gatcgggatatgcgaggccgagtcc

SEQ ID NO: 226120 - DNA, 25 bp, probe
gagtggaaatgcagtcccgaggcta

SEQ ID NO: 226121 - DNA, 25 bp, probe
gagggagaactaatgccgacgtgat

SEQ ID NO: 226122 - DNA, 25 bp, probe
gagggagaactaatgccgacgtgat

SEQ ID NO: 226123 - DNA, 25 bp, probe
gagtggcacaaccttgtaaatgtga

SEQ ID NO: 226124 - DNA, 25 bp, probe
gagtggatcttccaggccataaaga

SEQ ID NO: 226125 - DNA, 25 bp, probe
gagtgtttatcgagccaaatggata

SEQ ID NO: 226126 - DNA, 25 bp, probe
gagtctttgattcaccaaacatgaa

SEQ ID NO: 226127 - DNA, 25 bp, probe
gagtctgttatcacccaaataggaa

SEQ ID NO: 226128 - DNA, 25 bp, probe
gagtctgttatcacccaaataggaa

SEQ ID NO: 226129 - DNA, 25 bp, probe
gagtctgaatccacccagaaggcag

SEQ ID NO: 226130 - DNA, 25 bp, probe
gaggacaacgagtacacagccaggg

SEQ ID NO: 226131 - DNA, 25 bp, probe
gaggacgaggcggaacgctccgccc

SEQ ID NO: 226132 - DNA, 25 bp, probe
gaggacgaggcggaacgctccgccc

SEQ ID NO: 226133 - DNA, 25 bp, probe
gagtgccgagaagatgacgcccacc

SEQ ID NO: 226134 - DNA, 25 bp, probe
gagtcggagactgagacctacacag

SEQ ID NO: 226135 - DNA, 25 bp, probe
gagtcagggagttaaacagcagcaa

SEQ ID NO: 226136 - DNA, 25 bp, probe
gagtgacttggataaaacagatgcc

SEQ ID NO: 226137 - DNA, 25 bp, probe
gagtctcgggcaagaaacattcatg

SEQ ID NO: 226138 - DNA, 25 bp, probe
gagtggctcaggtgacaactctcat

SEQ ID NO: 226139 - DNA, 25 bp, probe
gagtggctcaggtgacaactctcat

SEQ ID NO: 226140 - DNA, 25 bp, probe
gagtggtcagactgtcgtcttactc

SEQ ID NO: 226141 - DNA, 25 bp, probe
gagtgtgctagcatcaatcgcattt

SEQ ID NO: 226142 - DNA, 25 bp, probe
gagtgtgctagcatcaatcgcattt

SEQ ID NO: 226143 - DNA, 25 bp, probe
gagtgatgtacagtctattccatag

SEQ ID NO: 226144 - DNA, 25 bp, probe
gagtgatgtacagtctattccatag

SEQ ID NO: 226145 - DNA, 25 bp, probe
gagtgatgtctggtcatatggaata

SEQ ID NO: 226146 - DNA, 25 bp, probe
gagtgactctggtcataggacttgg

SEQ ID NO: 226147 - DNA, 25 bp, probe
gagtgacatcggttcaggaggagac

SEQ ID NO: 226148 - DNA, 25 bp, probe
gagtccatgcagtttcttagaaatc

SEQ ID NO: 226149 - DNA, 25 bp, probe
gagtccatgcagcagaaactgaaac

SEQ ID NO: 226150 - DNA, 25 bp, probe
gagggcatgaacgagaagcggaacc

SEQ ID NO: 226151 - DNA, 25 bp, probe
gagtgcagcagatcgaaagttgcct

SEQ ID NO: 226152 - DNA, 25 bp, probe
gagtggtgcagacagaagtctcctc

SEQ ID NO: 226153 - DNA, 25 bp, probe
gagtggtctgaatggaaccctcagg

SEQ ID NO: 226154 - DNA, 25 bp, probe
gaggatttcacttttaccctcaagt

SEQ ID NO: 226155 - DNA, 25 bp, probe
gatcccttcttacttaacctgaagc

SEQ ID NO: 226156 - DNA, 25 bp, probe
gatgttctgtttttataacctacca

SEQ ID NO: 226157 - DNA, 25 bp, probe
gagtccattttttataaccgctaca

SEQ ID NO: 226158 - DNA, 25 bp, probe
gagtgtttttgtgtccagctcagta

SEQ ID NO: 226159 - DNA, 25 bp, probe
gagtgtttttgtgtccagctcagta

SEQ ID NO: 226160 - DNA, 25 bp, probe
gagtgaaaatttgttatgactgttt

SEQ ID NO: 226161 - DNA, 25 bp, probe
gagtgaaaatttgttatgactgttt

SEQ ID NO: 226162 - DNA, 25 bp, probe
gagtcatagaatttcatgtttgatt

SEQ ID NO: 226163 - DNA, 25 bp, probe
gagtctccagatgttgttctgtcag

SEQ ID NO: 226164 - DNA, 25 bp, probe
gagtcttcgagacttgggagctgct

SEQ ID NO: 226165 - DNA, 25 bp, probe
gagtcccagatacttgcagggcctc

SEQ ID NO: 226166 - DNA, 25 bp, probe
gagtctgaggaactgaagtgggtca

SEQ ID NO: 226167 - DNA, 25 bp, probe
gagtgctaggtaccaaattgtgaaa

SEQ ID NO: 226168 - DNA, 25 bp, probe
gagtgtacagaacatcttctgggaa

SEQ ID NO: 226169 - DNA, 25 bp, probe
gaggtaacagggtcaactggcgaag

SEQ ID NO: 226170 - DNA, 25 bp, probe
gaggtcagactgagctgaaggggaa

SEQ ID NO: 226171 - DNA, 25 bp, probe
gaggactacgtcgatctaggtgtga

SEQ ID NO: 226172 - DNA, 25 bp, probe
gatggacaaccaaagtcagtgggac

SEQ ID NO: 226173 - DNA, 25 bp, probe
gaggggcacaccaagtctggggtgc

SEQ ID NO: 226174 - DNA, 25 bp, probe
gagtgggaatggtcaggctggggta

SEQ ID NO: 226175 - DNA, 25 bp, probe
gagtgcggagagaaggggcaggatg

SEQ ID NO: 226176 - DNA, 25 bp, probe
gagtgggtagtggggaatgaagggg

SEQ ID NO: 226177 - DNA, 25 bp, probe
gagggagatcacgctggggaaacgg

SEQ ID NO: 226178 - DNA, 25 bp, probe
gaggtgtacaaggggatcgacaacc

SEQ ID NO: 226179 - DNA, 25 bp, probe
gagtgtaacaaccttgatcgtttcg

SEQ ID NO: 226180 - DNA, 25 bp, probe
gagtgtaacaaccacgggtgtaagt

SEQ ID NO: 226181 - DNA, 25 bp, probe
gagggaaccacagcagcggttgaac

SEQ ID NO: 226182 - DNA, 25 bp, probe
gagggaaccacagcagcggttgaac

SEQ ID NO: 226183 - DNA, 25 bp, probe
gagggaaccacagcagcggttgaac

SEQ ID NO: 226184 - DNA, 25 bp, probe
gagggaaccacagcagcggttgaac

SEQ ID NO: 226185 - DNA, 25 bp, probe
gagggaataattgatgagccttgaa

SEQ ID NO: 226186 - DNA, 25 bp, probe
gagtgtaatgtttgttacctccaac

SEQ ID NO: 226187 - DNA, 25 bp, probe
gagtgtaatgtttgttacctccaac

SEQ ID NO: 226188 - DNA, 25 bp, probe
gagggagagttactttctttgtatc

SEQ ID NO: 226189 - DNA, 25 bp, probe
gggcggagtctattttacgcgtcgc

SEQ ID NO: 226190 - DNA, 25 bp, probe
gggcggagtctattttacgcgtcgc

SEQ ID NO: 226191 - DNA, 25 bp, probe
gaggggagtgcctatttttaatcct

SEQ ID NO: 226192 - DNA, 25 bp, probe
gagtggtttgtggattccctcaacc

SEQ ID NO: 226193 - DNA, 25 bp, probe
gagtggtatttcttttcgtacctct

SEQ ID NO: 226194 - DNA, 25 bp, probe
gagtggtcattacatttgccatatc

SEQ ID NO: 226195 - DNA, 25 bp, probe
gagggcaatcttcatgattcctaca

SEQ ID NO: 226196 - DNA, 25 bp, probe
gagggtatgccaattacacttacaa

SEQ ID NO: 226197 - DNA, 25 bp, probe
gagggccaccaaatagcctaggaag

SEQ ID NO: 226198 - DNA, 25 bp, probe
gagggccttaagtatcttcatgaaa

SEQ ID NO: 226199 - DNA, 25 bp, probe
gagtcctcactaaacatttcatatg

SEQ ID NO: 226200 - DNA, 25 bp, probe
gagtgcccactgaaaccataaagga

SEQ ID NO: 226201 - DNA, 25 bp, probe
gagtggcaactgaaattataccagg

SEQ ID NO: 226202 - DNA, 25 bp, probe
gagggcgacaattaggagagccaga

SEQ ID NO: 226203 - DNA, 25 bp, probe
gagggcgacaattaggagagccaga

SEQ ID NO: 226204 - DNA, 25 bp, probe
gagggcgacaattaggagagccaga

SEQ ID NO: 226205 - DNA, 25 bp, probe
gagtgaacaaatttacagagacaga

SEQ ID NO: 226206 - DNA, 25 bp, probe
gagtgatagcgaaggtaatagcaag

SEQ ID NO: 226207 - DNA, 25 bp, probe
gaggaaaatccgcaaagcagagaaa

SEQ ID NO: 226208 - DNA, 25 bp, probe
gagggaaataagcaaagagggcaat

SEQ ID NO: 226209 - DNA, 25 bp, probe
gagggcacgagaacccaaagggaat

SEQ ID NO: 226210 - DNA, 25 bp, probe
gagggagggacaagccctggggaga

SEQ ID NO: 226211 - DNA, 25 bp, probe
gaggggctcccgacagacgggagca

SEQ ID NO: 226212 - DNA, 25 bp, probe
gagggagctcctagaagactgttgg

SEQ ID NO: 226213 - DNA, 25 bp, probe
gaggcaggatttgtagtcagtatag

SEQ ID NO: 226214 - DNA, 25 bp, probe
gagtcaggagttttactgcctgtag

SEQ ID NO: 226215 - DNA, 25 bp, probe
gagtcgtgcgctaatgtactacgta

SEQ ID NO: 226216 - DNA, 25 bp, probe
gagtggctctgtaaggacgccttga

SEQ ID NO: 226217 - DNA, 25 bp, probe
gagtcatctcttaataaacgcttaa

SEQ ID NO: 226218 - DNA, 25 bp, probe
gagtctgtttcaaaatagtcttcaa

SEQ ID NO: 226219 - DNA, 25 bp, probe
gagtcatgttctccatggaatgttt

SEQ ID NO: 226220 - DNA, 25 bp, probe
gagtcgtctgccattcaatgtttac

SEQ ID NO: 226221 - DNA, 25 bp, probe
gagtcgattatttccagtgttctat

SEQ ID NO: 226222 - DNA, 25 bp, probe
gagtggagtgtgcatccagtattct

SEQ ID NO: 226223 - DNA, 25 bp, probe
gagggaagggaccagaagccaagga

SEQ ID NO: 226224 - DNA, 25 bp, probe
gagggaagggaccagaagccaagga

SEQ ID NO: 226225 - DNA, 25 bp, probe
gagggagaaggaccgaaccaagtga

SEQ ID NO: 226226 - DNA, 25 bp, probe
gagggaacctggctgagaccaaaac

SEQ ID NO: 226227 - DNA, 25 bp, probe
gaggtgaaccgtttagggcaaatca

SEQ ID NO: 226228 - DNA, 25 bp, probe
gaggtgacaaggattgggtcccaca

SEQ ID NO: 226229 - DNA, 25 bp, probe
gaggtgaaagtctccgtggtggaca

SEQ ID NO: 226230 - DNA, 25 bp, probe
gaggtgaaagtctccgtggtggaca

SEQ ID NO: 226231 - DNA, 25 bp, probe
gagggaaggcttcctcaagggagaa

SEQ ID NO: 226232 - DNA, 25 bp, probe
gagggtgggtgcagacacaggctga

SEQ ID NO: 226233 - DNA, 25 bp, probe
gaggggcagtgggtgccacaatctg

SEQ ID NO: 226234 - DNA, 25 bp, probe
gagtggaagtacgttgcaatggtga

SEQ ID NO: 226235 - DNA, 25 bp, probe
gagtgggcagaatctcagaaggtcc

SEQ ID NO: 226236 - DNA, 25 bp, probe
gagtgggaacacctattggttctcc

SEQ ID NO: 226237 - DNA, 25 bp, probe
gagtggagaaatggatgtctggtac

SEQ ID NO: 226238 - DNA, 25 bp, probe
gagtgccagaagagatacagaggac

SEQ ID NO: 226239 - DNA, 25 bp, probe
gagtgccagaagagatacagaggac

SEQ ID NO: 226240 - DNA, 25 bp, probe
gagtgcttgaggatgatccggaagc

SEQ ID NO: 226241 - DNA, 25 bp, probe
gagtgggaggtgtctcgagagaaga

SEQ ID NO: 226242 - DNA, 25 bp, probe
gagtggagacgtactaagtgcaaga

SEQ ID NO: 226243 - DNA, 25 bp, probe
gagggaccagaacaattacaatgag

SEQ ID NO: 226244 - DNA, 25 bp, probe
gagtgagactccaactcaaaaaaaa

SEQ ID NO: 226245 - DNA, 25 bp, probe
gaggctgaccccttcagttaaagat

SEQ ID NO: 226246 - DNA, 25 bp, probe
gagggtcctctcatcgttactgaag

SEQ ID NO: 226247 - DNA, 25 bp, probe
gaggagtacctcatctatatgttaa

SEQ ID NO: 226248 - DNA, 25 bp, probe
gagggtacctcagttataaggagtc

SEQ ID NO: 226249 - DNA, 25 bp, probe
gagggctacttcatggaggatggga

SEQ ID NO: 226250 - DNA, 25 bp, probe
gagggctacttcatggaggatggga

SEQ ID NO: 226251 - DNA, 25 bp, probe
gagggcctcctgagaaggacaggca

SEQ ID NO: 226252 - DNA, 25 bp, probe
gagggcgcctatgggaaggtgttca

SEQ ID NO: 226253 - DNA, 25 bp, probe
gagtgacggatatgtgaaatttgta

SEQ ID NO: 226254 - DNA, 25 bp, probe
gagtgacgtttacagttttggagtt

SEQ ID NO: 226255 - DNA, 25 bp, probe
gagtgacgtttacagttttggagtt

SEQ ID NO: 226256 - DNA, 25 bp, probe
gagtgagcattcttagacgagtaag

SEQ ID NO: 226257 - DNA, 25 bp, probe
gagtggttcatcaatgattggctaa

SEQ ID NO: 226258 - DNA, 25 bp, probe
gagtggttcttgttcattgtaatgc

SEQ ID NO: 226259 - DNA, 25 bp, probe
gagggacatcttccaatgattaacc

SEQ ID NO: 226260 - DNA, 25 bp, probe
gaggtacaattgccatatgatttct

SEQ ID NO: 226261 - DNA, 25 bp, probe
gaggtcacaagttgccatctacctt

SEQ ID NO: 226262 - DNA, 25 bp, probe
gaggccccagttcctatatcgggcc

SEQ ID NO: 226263 - DNA, 25 bp, probe
gaggccccagttcctatatcgggcc

SEQ ID NO: 226264 - DNA, 25 bp, probe
gaggccccagttcctatatcgggcc

SEQ ID NO: 226265 - DNA, 25 bp, probe
gaggtgtcctttttataaggtgcac

SEQ ID NO: 226266 - DNA, 25 bp, probe
gaggatgtccttgcacttaaactca

SEQ ID NO: 226267 - DNA, 25 bp, probe
gagtgttcctgagagttgaaagtgg

SEQ ID NO: 226268 - DNA, 25 bp, probe
gaggttagctgcggaaagaaatcgg

SEQ ID NO: 226269 - DNA, 25 bp, probe
gaggttagctgcggaaagaaatcgg

SEQ ID NO: 226270 - DNA, 25 bp, probe
gaggatttctgctgctcgagaaagg

SEQ ID NO: 226271 - DNA, 25 bp, probe
gagtgtcttcacggcaggacaacga

SEQ ID NO: 226272 - DNA, 25 bp, probe
gagtgacttgcactggcagcactgc

SEQ ID NO: 226273 - DNA, 25 bp, probe
gagtgacatgtgctggacactgtcc

SEQ ID NO: 226274 - DNA, 25 bp, probe
gagtgacatgtgctggacactgtcc

SEQ ID NO: 226275 - DNA, 25 bp, probe
gagtgagcagtgagggccagtcttc

SEQ ID NO: 226276 - DNA, 25 bp, probe
gagtgagccagtgagggcagtcctg

SEQ ID NO: 226277 - DNA, 25 bp, probe
gagtgggactgaggagcgaggcctg

SEQ ID NO: 226278 - DNA, 25 bp, probe
gagtggtgacataaaagggctgctt

SEQ ID NO: 226279 - DNA, 25 bp, probe
gagtggtgacataaaagggctgctt

SEQ ID NO: 226280 - DNA, 25 bp, probe
gagtgcactgactgtgaaaccttta

SEQ ID NO: 226281 - DNA, 25 bp, probe
gagtgcctatttttaatcctgtctg

SEQ ID NO: 226282 - DNA, 25 bp, probe
gaggttttaggatacaatggctgtt

SEQ ID NO: 226283 - DNA, 25 bp, probe
gaggtcctaaggaacaagggctaca

SEQ ID NO: 226284 - DNA, 25 bp, probe
gaggttcctaaaattgaggtgtaat

SEQ ID NO: 226285 - DNA, 25 bp, probe
gagtcccttaatatgtggtggaaca

SEQ ID NO: 226286 - DNA, 25 bp, probe
gagtcccctactggtggggaaacag

SEQ ID NO: 226287 - DNA, 25 bp, probe
gaggacctttctgaggagtaaaaag

SEQ ID NO: 226288 - DNA, 25 bp, probe
gagggagctgttggatagggaaaaa

SEQ ID NO: 226289 - DNA, 25 bp, probe
gaggggtattcttcatgcaggagac

SEQ ID NO: 226290 - DNA, 25 bp, probe
gagtgaggtaggtgctagcagccac

SEQ ID NO: 226291 - DNA, 25 bp, probe
gagtgcatggtagagcagtacagca

SEQ ID NO: 226292 - DNA, 25 bp, probe
gagtgcatggtagagcagtacagca

SEQ ID NO: 226293 - DNA, 25 bp, probe
gagtgactgcaagagcagctacaat

SEQ ID NO: 226294 - DNA, 25 bp, probe
gaggcgctgccgcgcagcttgaacg

SEQ ID NO: 226295 - DNA, 25 bp, probe
gagtgcagctgagcggctgtatggg

SEQ ID NO: 226296 - DNA, 25 bp, probe
gagtgaaggcaccatgctgaagcgg

SEQ ID NO: 226297 - DNA, 25 bp, probe
gagtgcagggccagcaagcacgagc

SEQ ID NO: 226298 - DNA, 25 bp, probe
gagtgggatggcatcgtcacggtct

SEQ ID NO: 226299 - DNA, 25 bp, probe
gagtgggatggcatcgtcacggtct

SEQ ID NO: 226300 - DNA, 25 bp, probe
gagtgggattaggctgaagtggctt

SEQ ID NO: 226301 - DNA, 25 bp, probe
gagtgggattaggctgaagtggctt

SEQ ID NO: 226302 - DNA, 25 bp, probe
gagtgctgtcttatgtgaagtggat

SEQ ID NO: 226303 - DNA, 25 bp, probe
gagtgcttctaatcatcacagtagt

SEQ ID NO: 226304 - DNA, 25 bp, probe
gagtggactaacaacagctgtaggc

SEQ ID NO: 226305 - DNA, 25 bp, probe
gagggatcttcagaaccatatggtg

SEQ ID NO: 226306 - DNA, 25 bp, probe
gagtgtagctgtgaaatccatatat

SEQ ID NO: 226307 - DNA, 25 bp, probe
gagtgctctgtggaccacagcctaa

SEQ ID NO: 226308 - DNA, 25 bp, probe
gagtgctcttgctattaacgttatt

SEQ ID NO: 226309 - DNA, 25 bp, probe
gagtgctgtcattatttcctcttat

SEQ ID NO: 226310 - DNA, 25 bp, probe
gagtgagtgtattttccttgtgtat

SEQ ID NO: 226311 - DNA, 25 bp, probe
gagtgagagagtgctgtccttttat

SEQ ID NO: 226312 - DNA, 25 bp, probe
gagggaggtcctcaaattgtatacg

SEQ ID NO: 226313 - DNA, 25 bp, probe
gagggaggtcctcaaattgtatacg

SEQ ID NO: 226314 - DNA, 25 bp, probe
gagggggaccttgagtttcattagc

SEQ ID NO: 226315 - DNA, 25 bp, probe
gagggggaccttgagttcattagca

SEQ ID NO: 226316 - DNA, 25 bp, probe
gagggggaccttgagttcattagca

SEQ ID NO: 226317 - DNA, 25 bp, probe
gaggaggggatccagtagccctttc

SEQ ID NO: 226318 - DNA, 25 bp, probe
gagtgcagagggataggcagtgcct

SEQ ID NO: 226319 - DNA, 25 bp, probe
gaggtgaagcagatcatccatatgc

SEQ ID NO: 226320 - DNA, 25 bp, probe
gagtgtgaagctgaccagctcgcgc

SEQ ID NO: 226321 - DNA, 25 bp, probe
gagtgtgaagctgaccagctcgcgc

SEQ ID NO: 226322 - DNA, 25 bp, probe
gagtgtgaagctgaccagctcgcgc

SEQ ID NO: 226323 - DNA, 25 bp, probe
gagtgtgaagctgaccagctcgcgc

SEQ ID NO: 226324 - DNA, 25 bp, probe
gagtgtgaagctgaccagctcgcgc

SEQ ID NO: 226325 - DNA, 25 bp, probe
gagtgcagtatgaaactcaccagcg

SEQ ID NO: 226326 - DNA, 25 bp, probe
gagtgaggcttgtcagccaaagctg

SEQ ID NO: 226327 - DNA, 25 bp, probe
gagtgttgctgttgcaccatacttt

SEQ ID NO: 226328 - DNA, 25 bp, probe
gagtgcatcgtgaggttcattgtct

SEQ ID NO: 226329 - DNA, 25 bp, probe
gagtgcatcgtgaggttcattgtct

SEQ ID NO: 226330 - DNA, 25 bp, probe
gagtcctggcatgggaatgaatgtc

SEQ ID NO: 226331 - DNA, 25 bp, probe
gagtcctggcatgggaatgaatgtc

SEQ ID NO: 226332 - DNA, 25 bp, probe
gagtgcgatggctgtgaggaagaca

SEQ ID NO: 226333 - DNA, 25 bp, probe
gagtgacaagcgggacgaagacaaa

SEQ ID NO: 226334 - DNA, 25 bp, probe
gaggtcaagggcgccctgaaaaggg

SEQ ID NO: 226335 - DNA, 25 bp, probe
gaggtccagagggttcctataagga

SEQ ID NO: 226336 - DNA, 25 bp, probe
gagtgtaccgtggatctgtttaacg

SEQ ID NO: 226337 - DNA, 25 bp, probe
gagtgtaccgtggatctgtttaacg

SEQ ID NO: 226338 - DNA, 25 bp, probe
gagtgtgattttgatctgttttcca

SEQ ID NO: 226339 - DNA, 25 bp, probe
gaggagattctatgtgcttttatca

SEQ ID NO: 226340 - DNA, 25 bp, probe
gaggagattctatgtgcttttatca

SEQ ID NO: 226341 - DNA, 25 bp, probe
gagggcttatgattcagattgttat

SEQ ID NO: 226342 - DNA, 25 bp, probe
gagggcttaagtccttatgctgtgt

SEQ ID NO: 226343 - DNA, 25 bp, probe
gagggcttaagtccttatgctgtgt

SEQ ID NO: 226344 - DNA, 25 bp, probe
gagggtgtcaaacattcgtgagctg

SEQ ID NO: 226345 - DNA, 25 bp, probe
gagggaccaggagattctggaagct

SEQ ID NO: 226346 - DNA, 25 bp, probe
gaggggcctgggaaactgaaatgcc

SEQ ID NO: 226347 - DNA, 25 bp, probe
gagggcggtgagtacgacggaatgc

SEQ ID NO: 226348 - DNA, 25 bp, probe
gagggctggtgacagccgtgtcttc

SEQ ID NO: 226349 - DNA, 25 bp, probe
gagtggggatgacatgcactcagct

SEQ ID NO: 226350 - DNA, 25 bp, probe
gagtggggatgacatgcactcagct

SEQ ID NO: 226351 - DNA, 25 bp, probe
gaggaggagagctacagcaccagat

SEQ ID NO: 226352 - DNA, 25 bp, probe
gagggaaggacagacatcaagtgcc

SEQ ID NO: 226353 - DNA, 25 bp, probe
gagggtaggtgagagtcagggtgca

SEQ ID NO: 226354 - DNA, 25 bp, probe
gaggactttgtgctagtcctggcac

SEQ ID NO: 226355 - DNA, 25 bp, probe
gagggcgatagtcgttttcttgcaa

SEQ ID NO: 226356 - DNA, 25 bp, probe
gagggccgagatgttgatccgaata

SEQ ID NO: 226357 - DNA, 25 bp, probe
gagggccgagatgttgatccgaata

SEQ ID NO: 226358 - DNA, 25 bp, probe
gagtggcctgaagagtcctctgaat

SEQ ID NO: 226359 - DNA, 25 bp, probe
gagtggcctgaagagtcctctgaat

SEQ ID NO: 226360 - DNA, 25 bp, probe
gagggagctcaatatgtcctggaac

SEQ ID NO: 226361 - DNA, 25 bp, probe
gagtgcggagcctcattacgagaac

SEQ ID NO: 226362 - DNA, 25 bp, probe
gagtgctggacctcattaaagtgca

SEQ ID NO: 226363 - DNA, 25 bp, probe
gagtggagagcctcttctacaacta

SEQ ID NO: 226364 - DNA, 25 bp, probe
gaggatgggcccaacattgacaaca

SEQ ID NO: 226365 - DNA, 25 bp, probe
gagggtggcaccagcatattggaca

SEQ ID NO: 226366 - DNA, 25 bp, probe
gagtggatggctcaagatcttgaaa

SEQ ID NO: 226367 - DNA, 25 bp, probe
gagtggtgggtggcacatgcttata

SEQ ID NO: 226368 - DNA, 25 bp, probe
gagtggtcagctgggcaagtggaag

SEQ ID NO: 226369 - DNA, 25 bp, probe
gagggagcttagccaatgtgggagc

SEQ ID NO: 226370 - DNA, 25 bp, probe
gagggacgtgagagagcatgccttc

SEQ ID NO: 226371 - DNA, 25 bp, probe
gagggcaggggtgggagccctccta

SEQ ID NO: 226372 - DNA, 25 bp, probe
gagggcaggggtgggagccctccta

SEQ ID NO: 226373 - DNA, 25 bp, probe
gagggagggagagtggagggtttga

SEQ ID NO: 226374 - DNA, 25 bp, probe
gagggaggagaaccctggtgagtcg

SEQ ID NO: 226375 - DNA, 25 bp, probe
gagggagaaaacctgggtgtgtcct

SEQ ID NO: 226376 - DNA, 25 bp, probe
gagggtatgaatgccgggatgctgt

SEQ ID NO: 226377 - DNA, 25 bp, probe
gagggctgagtttgcacagtggtct

SEQ ID NO: 226378 - DNA, 25 bp, probe
gagtggtggctcatgcctgtaatcc

SEQ ID NO: 226379 - DNA, 25 bp, probe
gagtggtggctcatgcctgtaatcc

SEQ ID NO: 226380 - DNA, 25 bp, probe
gagtgatcaggcaattcggtcaatt

SEQ ID NO: 226381 - DNA, 25 bp, probe
gagtgacggcatatgaactgctgag

SEQ ID NO: 226382 - DNA, 25 bp, probe
gagtgcaaggatgtgaacaaggtcg

SEQ ID NO: 226383 - DNA, 25 bp, probe
gagtgcggagaggcgaaactgagtc

SEQ ID NO: 226384 - DNA, 25 bp, probe
gagtgctgagagctcacacagagtc

SEQ ID NO: 226385 - DNA, 25 bp, probe
gaggggaaatcagcaagtccaccca

SEQ ID NO: 226386 - DNA, 25 bp, probe
gagggccataaaggcagtgatcatc

SEQ ID NO: 226387 - DNA, 25 bp, probe
gagggtctgaaattgaataaagtaa

SEQ ID NO: 226388 - DNA, 25 bp, probe
gaggtttgggcatataaccagatta

SEQ ID NO: 226389 - DNA, 25 bp, probe
gagtgttttgtatgttagcatcgac

SEQ ID NO: 226390 - DNA, 25 bp, probe
gagtggtgctcaaatttaagcatct

SEQ ID NO: 226391 - DNA, 25 bp, probe
gagtggtgctcaaatttaagcatct

SEQ ID NO: 226392 - DNA, 25 bp, probe
gaggtgtgctcatactaaaattatt

SEQ ID NO: 226393 - DNA, 25 bp, probe
gagtgctgcgtggaagtaaaactat

SEQ ID NO: 226394 - DNA, 25 bp, probe
gagtgctgcgtggaagtaaaactat

SEQ ID NO: 226395 - DNA, 25 bp, probe
gagtgcgcctgggagagcacaacct

SEQ ID NO: 226396 - DNA, 25 bp, probe
gagtgagcctcaggggccatgaagg

SEQ ID NO: 226397 - DNA, 25 bp, probe
gagtgaggccagtaagctcagaaag

SEQ ID NO: 226398 - DNA, 25 bp, probe
gagtgagtgggatggcatcgtcacg

SEQ ID NO: 226399 - DNA, 25 bp, probe
gagtgagggcagctgtgctttaggt

SEQ ID NO: 226400 - DNA, 25 bp, probe
gagtgggagacccattggtcaggct

SEQ ID NO: 226401 - DNA, 25 bp, probe
gagtgggagacagtcatgtgaccag

SEQ ID NO: 226402 - DNA, 25 bp, probe
gaggggaaagccatgtatctgaaat

SEQ ID NO: 226403 - DNA, 25 bp, probe
gagggtgaaagtgattatgggaatc

SEQ ID NO: 226404 - DNA, 25 bp, probe
gagtggtatcagcttttaggaattc

SEQ ID NO: 226405 - DNA, 25 bp, probe
gaggtgcttgcagttgtcttaaaaa

SEQ ID NO: 226406 - DNA, 25 bp, probe
gaggtgcttgcagttgtcttaaaaa

SEQ ID NO: 226407 - DNA, 25 bp, probe
gaggttgctctgtcttctttagcaa

SEQ ID NO: 226408 - DNA, 25 bp, probe
gaggttgctctgtcttctttagcaa

SEQ ID NO: 226409 - DNA, 25 bp, probe
gaggtgtttgactgcatcgtcaaca

SEQ ID NO: 226410 - DNA, 25 bp, probe
gaggtgtttgactgcatcgtcaaca

SEQ ID NO: 226411 - DNA, 25 bp, probe
gaggtgtttgactgcatcgtcaaca

SEQ ID NO: 226412 - DNA, 25 bp, probe
gagtgggttgatttcagcacctaca

SEQ ID NO: 226413 - DNA, 25 bp, probe
gaggggctgtattttcaccaagcct

SEQ ID NO: 226414 - DNA, 25 bp, probe
gaggtggtaaatcttcaaacccagc

SEQ ID NO: 226415 - DNA, 25 bp, probe
gaggtggtaaatcttcaaacccagc

SEQ ID NO: 226416 - DNA, 25 bp, probe
gaggtggggtctggattccacccca

SEQ ID NO: 226417 - DNA, 25 bp, probe
gagggtgggtgccaattccaccagc

SEQ ID NO: 226418 - DNA, 25 bp, probe
gagggagggagccaaggtcactcca

SEQ ID NO: 226419 - DNA, 25 bp, probe
gaggcccttggccaagggaccagag

SEQ ID NO: 226420 - DNA, 25 bp, probe
gaggaccattgggaagggcaacttt

SEQ ID NO: 226421 - DNA, 25 bp, probe
gaggacacacgggaagtgaaggggc

SEQ ID NO: 226422 - DNA, 25 bp, probe
gaggacgaaatgcctttgggtgggc

SEQ ID NO: 226423 - DNA, 25 bp, probe
gagggagagaatggcccgagggagg

SEQ ID NO: 226424 - DNA, 25 bp, probe
gagtgatagggatcctggtgggagg

SEQ ID NO: 226425 - DNA, 25 bp, probe
gaggtaacgcaagttcgtcctgtgc

SEQ ID NO: 226426 - DNA, 25 bp, probe
gaggatgaactcaggtttccggcta

SEQ ID NO: 226427 - DNA, 25 bp, probe
gatggtacgtaatgagttcccctga

SEQ ID NO: 226428 - DNA, 25 bp, probe
gaggtgatcggaaagggtcccttca

SEQ ID NO: 226429 - DNA, 25 bp, probe
gagggattcgaaaacagtcctcagt

SEQ ID NO: 226430 - DNA, 25 bp, probe
gagggatcacgagacacagaacctg

SEQ ID NO: 226431 - DNA, 25 bp, probe
gagggcatcaagtacatcgcagaga

SEQ ID NO: 226432 - DNA, 25 bp, probe
gagggctccatgtcagaagatgaat

SEQ ID NO: 226433 - DNA, 25 bp, probe
gaggtgatcctggcagaagataaga

SEQ ID NO: 226434 - DNA, 25 bp, probe
gaggtgagcacggccaacaaagctg

SEQ ID NO: 226435 - DNA, 25 bp, probe
gagtggagaatggcacaccctactg

SEQ ID NO: 226436 - DNA, 25 bp, probe
gaggggcacatcaaaatcgctgact

SEQ ID NO: 226437 - DNA, 25 bp, probe
gaggtagccttcaatcactggactc

SEQ ID NO: 226438 - DNA, 25 bp, probe
gagtgtcacctcaaatgcaatactt

SEQ ID NO: 226439 - DNA, 25 bp, probe
gagtgtcacctcaaatgcaatactt

SEQ ID NO: 226440 - DNA, 25 bp, probe
gagtgtcaactccaggacttgcttc

SEQ ID NO: 226441 - DNA, 25 bp, probe
gaggtctgtctgaaggactggtatc

SEQ ID NO: 226442 - DNA, 25 bp, probe
gagtgtggtcacctggattggctac

SEQ ID NO: 226443 - DNA, 25 bp, probe
gaggggagcatccattattggtaca

SEQ ID NO: 226444 - DNA, 25 bp, probe
gagggagagctgcttaatgtgcttt

SEQ ID NO: 226445 - DNA, 25 bp, probe
gaggttggggctacaatgagctatg

SEQ ID NO: 226446 - DNA, 25 bp, probe
gaggattgatacgttttgagtatgt

SEQ ID NO: 226447 - DNA, 25 bp, probe
gaggttctcactgttgtgaaggttg

SEQ ID NO: 226448 - DNA, 25 bp, probe
gggcgtccatctgattggaattttc

SEQ ID NO: 226449 - DNA, 25 bp, probe
gagggctccattgaggagaacttcc

SEQ ID NO: 226450 - DNA, 25 bp, probe
gagggcttcattgccagaacacatt

SEQ ID NO: 226451 - DNA, 25 bp, probe
gaggcgctggcaagcccgaatcggt

SEQ ID NO: 226452 - DNA, 25 bp, probe
gaggccgaggccaggaactgagtga

SEQ ID NO: 226453 - DNA, 25 bp, probe
gaggaccgtcccaagagacgaggac

SEQ ID NO: 226454 - DNA, 25 bp, probe
gatgggtaccccaagaaggatgtga

SEQ ID NO: 226455 - DNA, 25 bp, probe
gagtggtacaagccttggggactga

SEQ ID NO: 226456 - DNA, 25 bp, probe
gagtggtacaagccttggggactga

SEQ ID NO: 226457 - DNA, 25 bp, probe
gagtgttcaaagccattgggcttcc

SEQ ID NO: 226458 - DNA, 25 bp, probe
gaggtgtcaaggctgggacttcagg

SEQ ID NO: 226459 - DNA, 25 bp, probe
gaggtgtcaaggctgggacttcagg

SEQ ID NO: 226460 - DNA, 25 bp, probe
gaggagcccagagttgggcactggc

SEQ ID NO: 226461 - DNA, 25 bp, probe
gagggctggacatttgtggcagtgc

SEQ ID NO: 226462 - DNA, 25 bp, probe
gagggcaggacatcaatacactgct

SEQ ID NO: 226463 - DNA, 25 bp, probe
gagggcggaccaaatgtcaccagta

SEQ ID NO: 226464 - DNA, 25 bp, probe
gagggcggaagtagagtcctccaag

SEQ ID NO: 226465 - DNA, 25 bp, probe
gagtgaggaatagttgagccccaag

SEQ ID NO: 226466 - DNA, 25 bp, probe
gatgctgaggagtatctggtacccc

SEQ ID NO: 226467 - DNA, 25 bp, probe
gagtgagcagaatctggtagactgc

SEQ ID NO: 226468 - DNA, 25 bp, probe
gagtgaagaagctggcttgacatgc

SEQ ID NO: 226469 - DNA, 25 bp, probe
gagtggaggagtcggctctgagagc

SEQ ID NO: 226470 - DNA, 25 bp, probe
gagtggtagagcagagcctgaccct

SEQ ID NO: 226471 - DNA, 25 bp, probe
gagtggtagagcagagcctgaccct

SEQ ID NO: 226472 - DNA, 25 bp, probe
gagtgggatactcaatctggcctta

SEQ ID NO: 226473 - DNA, 25 bp, probe
gagtgggcaactccaaagagcactt

SEQ ID NO: 226474 - DNA, 25 bp, probe
gagtgggcaaagacagcaagagagc

SEQ ID NO: 226475 - DNA, 25 bp, probe
gagtgggtaaaggcagccaggcgtg

SEQ ID NO: 226476 - DNA, 25 bp, probe
gagtgggtaaaggcagccaggcgtg

SEQ ID NO: 226477 - DNA, 25 bp, probe
gaggagggtaattcatccaagtctg

SEQ ID NO: 226478 - DNA, 25 bp, probe
gaggagggtaattcatccaagtctg

SEQ ID NO: 226479 - DNA, 25 bp, probe
gaggacgagattagcccacaaactg

SEQ ID NO: 226480 - DNA, 25 bp, probe
gaggacgagattagcccacaaactg

SEQ ID NO: 226481 - DNA, 25 bp, probe
gaggcctagtttgggtgcaagtagg

SEQ ID NO: 226482 - DNA, 25 bp, probe
gagggctagttgaaggatccaggag

SEQ ID NO: 226483 - DNA, 25 bp, probe
gagggctatacatggtagccagttg

SEQ ID NO: 226484 - DNA, 25 bp, probe
gagggctatacatggtagccagttg

SEQ ID NO: 226485 - DNA, 25 bp, probe
gagggctatacatggtagccagttg

SEQ ID NO: 226486 - DNA, 25 bp, probe
gagggtgggcagggatactcaggga

SEQ ID NO: 226487 - DNA, 25 bp, probe
gagtggagggagggtggcctaagag

SEQ ID NO: 226488 - DNA, 25 bp, probe
gagtggtgaggccctgggcctccag

SEQ ID NO: 226489 - DNA, 25 bp, probe
gagtgttgcaggctcatgggtgtgc

SEQ ID NO: 226490 - DNA, 25 bp, probe
gagtggctgaggatatgtgggatgt

SEQ ID NO: 226491 - DNA, 25 bp, probe
gagtgtgtgaagtactgcgtggtgt

SEQ ID NO: 226492 - DNA, 25 bp, probe
gaggtgggcagatcacttcaggtca

SEQ ID NO: 226493 - DNA, 25 bp, probe
gaggtggcctgaacacctgagggac

SEQ ID NO: 226494 - DNA, 25 bp, probe
gaggtggcctgaacacctgagggac

SEQ ID NO: 226495 - DNA, 25 bp, probe
gaggagagactcaccatcgagggag

SEQ ID NO: 226496 - DNA, 25 bp, probe
gaggatcaagtcagcaacaaggttg

SEQ ID NO: 226497 - DNA, 25 bp, probe
gagtgtcggatcctgtgagtaggct

SEQ ID NO: 226498 - DNA, 25 bp, probe
gagtgtcggatcctgtgagtaggct

SEQ ID NO: 226499 - DNA, 25 bp, probe
gagtgtcttactggtggatgaggct

SEQ ID NO: 226500 - DNA, 25 bp, probe
gagtgactggagacagggatgatgg

SEQ ID NO: 226501 - DNA, 25 bp, probe
gagtgactgctggatctacaagtgg

SEQ ID NO: 226502 - DNA, 25 bp, probe
gagtgtctgtccagactcagtggat

SEQ ID NO: 226503 - DNA, 25 bp, probe
gaggtttccactatcaatgcctctg

SEQ ID NO: 226504 - DNA, 25 bp, probe
gaggttatcggcagtggagctactg

SEQ ID NO: 226505 - DNA, 25 bp, probe
gaggtgaagaagtcgttcctactga

SEQ ID NO: 226506 - DNA, 25 bp, probe
gaggataaaattcacctttctgata

SEQ ID NO: 226507 - DNA, 25 bp, probe
gaggtgcaaaaatactttgtcaaag

SEQ ID NO: 226508 - DNA, 25 bp, probe
gagggaaataatttttgatgtcaaa

SEQ ID NO: 226509 - DNA, 25 bp, probe
gaggtggatgtcttgttttgtgtca

SEQ ID NO: 226510 - DNA, 25 bp, probe
gagggcttttctttgtatgtgtagc

SEQ ID NO: 226511 - DNA, 25 bp, probe
gaggaggttccctttgtgattacca

SEQ ID NO: 226512 - DNA, 25 bp, probe
gaggaggttccctttgtgattacca

SEQ ID NO: 226513 - DNA, 25 bp, probe
gaggggtgggaatctgtgtaaccgt

SEQ ID NO: 226514 - DNA, 25 bp, probe
gagggcagcgaggagtgccaggtaa

SEQ ID NO: 226515 - DNA, 25 bp, probe
gagggcagcgaggagtgccaggtaa

SEQ ID NO: 226516 - DNA, 25 bp, probe
gaggggggaagatcaggtcatacta

SEQ ID NO: 226517 - DNA, 25 bp, probe
gagggccggaagaaggcttttgcca

SEQ ID NO: 226518 - DNA, 25 bp, probe
gagggccaggatttgaggctgcccc

SEQ ID NO: 226519 - DNA, 25 bp, probe
gagggccaggagagagcttcaccca

SEQ ID NO: 226520 - DNA, 25 bp, probe
gaggatccggaaagagtttccgaag

SEQ ID NO: 226521 - DNA, 25 bp, probe
gggtcgcctgactgaattacggaca

SEQ ID NO: 226522 - DNA, 25 bp, probe
gaggtcacttactaaatatagtgga

SEQ ID NO: 226523 - DNA, 25 bp, probe
gagggcacttgatgagtaaggtgaa

SEQ ID NO: 226524 - DNA, 25 bp, probe
gagggcacttgatgagtaaggtgaa

SEQ ID NO: 226525 - DNA, 25 bp, probe
gagggagttaaatacctgtgcatcc

SEQ ID NO: 226526 - DNA, 25 bp, probe
gagggggctgaagaaaatggcaaca

SEQ ID NO: 226527 - DNA, 25 bp, probe
gagggagggggctaagagaggagca

SEQ ID NO: 226528 - DNA, 25 bp, probe
gaggtgggggaggaggaggaaggcg

SEQ ID NO: 226529 - DNA, 25 bp, probe
gaggtgtcggaggccgtggagaagg

SEQ ID NO: 226530 - DNA, 25 bp, probe
gagggtgggactgaaggcaagattg

SEQ ID NO: 226531 - DNA, 25 bp, probe
gagggtgggactgaaggcaagattg

SEQ ID NO: 226532 - DNA, 25 bp, probe
gaggtggggaccaaaaccatgcatt

SEQ ID NO: 226533 - DNA, 25 bp, probe
gaggtggggaccaaaaccatgcatt

SEQ ID NO: 226534 - DNA, 25 bp, probe
gaggtggaaacactacagacactac

SEQ ID NO: 226535 - DNA, 25 bp, probe
gaggtggaaacactacagacactac

SEQ ID NO: 226536 - DNA, 25 bp, probe
gaggtggaaacactacagacactac

SEQ ID NO: 226537 - DNA, 25 bp, probe
gagggccgaacccacatgacaaaga

SEQ ID NO: 226538 - DNA, 25 bp, probe
gagggctcagaagcagctagtaaag

SEQ ID NO: 226539 - DNA, 25 bp, probe
gaggactcagaagttcaagctaaat

SEQ ID NO: 226540 - DNA, 25 bp, probe
gagggcttgcattggtcaggataga

SEQ ID NO: 226541 - DNA, 25 bp, probe
gaggctcgtgcatgtaatcctagca

SEQ ID NO: 226542 - DNA, 25 bp, probe
gagggcttcagaaatatgccatcgc

SEQ ID NO: 226543 - DNA, 25 bp, probe
gagggcttcagaaatatgccatcgc

SEQ ID NO: 226544 - DNA, 25 bp, probe
gagggccatcagaatcatcctttcc

SEQ ID NO: 226545 - DNA, 25 bp, probe
gagtgatcctccaacttcatttgat

SEQ ID NO: 226546 - DNA, 25 bp, probe
gagtgataccatttctacatttgat

SEQ ID NO: 226547 - DNA, 25 bp, probe
gagtgtcacagatttaaccttgatc

SEQ ID NO: 226548 - DNA, 25 bp, probe
gagggcacaagtcaacttgcttctc

SEQ ID NO: 226549 - DNA, 25 bp, probe
gagggaaagcatatgatctctttat

SEQ ID NO: 226550 - DNA, 25 bp, probe
gagggaaagcatatgatctctttat

SEQ ID NO: 226551 - DNA, 25 bp, probe
gatgtccagattgttgcatttccgt

SEQ ID NO: 226552 - DNA, 25 bp, probe
gagggcaatgatgtgtgcaagtacg

SEQ ID NO: 226553 - DNA, 25 bp, probe
gagtggacagatgagggtgatgaca

SEQ ID NO: 226554 - DNA, 25 bp, probe
gagtgtgggagctaatgggaatcag

SEQ ID NO: 226555 - DNA, 25 bp, probe
gaggtggcgagtgaaggcaccatgc

SEQ ID NO: 226556 - DNA, 25 bp, probe
gagtgtctggacggcaaggactgtg

SEQ ID NO: 226557 - DNA, 25 bp, probe
gaggtctggaccgaattaatgagcg

SEQ ID NO: 226558 - DNA, 25 bp, probe
gaggcttggcacctaataccagatt

SEQ ID NO: 226559 - DNA, 25 bp, probe
gaggtcatgtgagcatactggccag

SEQ ID NO: 226560 - DNA, 25 bp, probe
gaggtggtgacggactggcacatgc

SEQ ID NO: 226561 - DNA, 25 bp, probe
gagggcagagactgatcggctgcgc

SEQ ID NO: 226562 - DNA, 25 bp, probe
gaggtgatgaagctgatcggccgac

SEQ ID NO: 226563 - DNA, 25 bp, probe
gaggtgatgaagctgatcggccgac

SEQ ID NO: 226564 - DNA, 25 bp, probe
gaggtaaccaggtggcatctacccc

SEQ ID NO: 226565 - DNA, 25 bp, probe
gaggtcagaccaggatttgcattga

SEQ ID NO: 226566 - DNA, 25 bp, probe
gaggctcggcttggattattctgca

SEQ ID NO: 226567 - DNA, 25 bp, probe
gaggctcggcttggattattctgca

SEQ ID NO: 226568 - DNA, 25 bp, probe
gggcctggctgttaaatttattagt

SEQ ID NO: 226569 - DNA, 25 bp, probe
gagtggttgctgttaatattatctt

SEQ ID NO: 226570 - DNA, 25 bp, probe
gagtggtatgcttacaattgtcatg

SEQ ID NO: 226571 - DNA, 25 bp, probe
gaggctcttgcttacactaatcagc

SEQ ID NO: 226572 - DNA, 25 bp, probe
gaggtcattgagtgcattacccaag

SEQ ID NO: 226573 - DNA, 25 bp, probe
gaggtgcttgatctatctacaaaga

SEQ ID NO: 226574 - DNA, 25 bp, probe
gagtggccaagcttcctaagaacaa

SEQ ID NO: 226575 - DNA, 25 bp, probe
ggggacaagtttgacgagaacgctc

SEQ ID NO: 226576 - DNA, 25 bp, probe
gagggacatcggatggaccgacccc

SEQ ID NO: 226577 - DNA, 25 bp, probe
gagggacatcggatggaccgacccc

SEQ ID NO: 226578 - DNA, 25 bp, probe
gagggacacaggatggacaagccca

SEQ ID NO: 226579 - DNA, 25 bp, probe
gagggaagcaggaatgaggccaaaa

SEQ ID NO: 226580 - DNA, 25 bp, probe
gagtggatatggtatctaggcaata

SEQ ID NO: 226581 - DNA, 25 bp, probe
gagtgggatgattactcggacaccg

SEQ ID NO: 226582 - DNA, 25 bp, probe
gagtggcagctatagtctggcacca

SEQ ID NO: 226583 - DNA, 25 bp, probe
gagtgggctaagcacgggccatatg

SEQ ID NO: 226584 - DNA, 25 bp, probe
gagtggcattaatcacggcgtgaag

SEQ ID NO: 226585 - DNA, 25 bp, probe
gagtggatgttatcattgagaaaac

SEQ ID NO: 226586 - DNA, 25 bp, probe
gagggttcctccaaagaacagcact

SEQ ID NO: 226587 - DNA, 25 bp, probe
gagggtgagcctgaggagggaactt

SEQ ID NO: 226588 - DNA, 25 bp, probe
gagggttcctggtgcgagaagactt

SEQ ID NO: 226589 - DNA, 25 bp, probe
gaggggtttgagtggcaactgaaat

SEQ ID NO: 226590 - DNA, 25 bp, probe
gaggggtttgagtggcaactgaaat

SEQ ID NO: 226591 - DNA, 25 bp, probe
gaggggttgctggaggtgacaagga

SEQ ID NO: 226592 - DNA, 25 bp, probe
gaggggggcgaaagcaacgggactg

SEQ ID NO: 226593 - DNA, 25 bp, probe
gagggggtcagagcaaacccagtgt

SEQ ID NO: 226594 - DNA, 25 bp, probe
gaggaaggccaagcagaagccgagg

SEQ ID NO: 226595 - DNA, 25 bp, probe
gaggaaggccaagcagaagccgagg

SEQ ID NO: 226596 - DNA, 25 bp, probe
gaggaaagccctaactgagcctgag

SEQ ID NO: 226597 - DNA, 25 bp, probe
gattcaaagcccttactttcctaat

SEQ ID NO: 226598 - DNA, 25 bp, probe
gatgtcaaaccctgaagtgatccga

SEQ ID NO: 226599 - DNA, 25 bp, probe
gaggctatacctcaaagtagctgcg

SEQ ID NO: 226600 - DNA, 25 bp, probe
gagggataagctcgacacagtcgta

SEQ ID NO: 226601 - DNA, 25 bp, probe
gagggaatggcatacatcgagcgga

SEQ ID NO: 226602 - DNA, 25 bp, probe
gagggaaggcataaagggagccacg

SEQ ID NO: 226603 - DNA, 25 bp, probe
gagggaaggcataaagggagccacg

SEQ ID NO: 226604 - DNA, 25 bp, probe
gagggaagctcacagcatgatgggc

SEQ ID NO: 226605 - DNA, 25 bp, probe
gagggcaaccaggacagctgtgtgt

SEQ ID NO: 226606 - DNA, 25 bp, probe
gagtggccagcaaggagcagcagct

SEQ ID NO: 226607 - DNA, 25 bp, probe
gagtgtgcaatgcagtgccacggca

SEQ ID NO: 226608 - DNA, 25 bp, probe
gagtggaaaaggaagcgacccagaa

SEQ ID NO: 226609 - DNA, 25 bp, probe
gagggcaaaagactatggactggaa

SEQ ID NO: 226610 - DNA, 25 bp, probe
gagggctaatcagttaggagggaca

SEQ ID NO: 226611 - DNA, 25 bp, probe
gagggctaatcagttaggagggaca

SEQ ID NO: 226612 - DNA, 25 bp, probe
gaggtcataatccttagtgagggtg

SEQ ID NO: 226613 - DNA, 25 bp, probe
gaggtaaaccagtgggggtgcaagg

SEQ ID NO: 226614 - DNA, 25 bp, probe
gatggttttttgggggatgggctag

SEQ ID NO: 226615 - DNA, 25 bp, probe
gagggtttgtgtgacaggcattcct

SEQ ID NO: 226616 - DNA, 25 bp, probe
gagggcttgggtggaaggtggctgc

SEQ ID NO: 226617 - DNA, 25 bp, probe
gaggacctggtggccaaggtcagcg

SEQ ID NO: 226618 - DNA, 25 bp, probe
gaggacctgattgacttgtgtgagc

SEQ ID NO: 226619 - DNA, 25 bp, probe
gaggactttaatatctatggccatg

SEQ ID NO: 226620 - DNA, 25 bp, probe
gaggtgcttgtaaatgtcttgggaa

SEQ ID NO: 226621 - DNA, 25 bp, probe
gaggtggtttagatggctgggaaca

SEQ ID NO: 226622 - DNA, 25 bp, probe
gaggtgtgtaggttagggggaatca

SEQ ID NO: 226623 - DNA, 25 bp, probe
gaggatgtcggggtgaagggtggta

SEQ ID NO: 226624 - DNA, 25 bp, probe
gagggtgccagggtggaggtggagt

SEQ ID NO: 226625 - DNA, 25 bp, probe
gaggagaggcgggcggatttgggga

SEQ ID NO: 226626 - DNA, 25 bp, probe
gaggcgaaggccaggttgggggcag

SEQ ID NO: 226627 - DNA, 25 bp, probe
gagggacaaggtatggggtgggagc

SEQ ID NO: 226628 - DNA, 25 bp, probe
gagggtaaggccagggtgtgaaggg

SEQ ID NO: 226629 - DNA, 25 bp, probe
gagggtaaggactgaggcactgagg

SEQ ID NO: 226630 - DNA, 25 bp, probe
gagggtgaagagcatagttaataag

SEQ ID NO: 226631 - DNA, 25 bp, probe
gagggcatgggaaaagtccagaaac

SEQ ID NO: 226632 - DNA, 25 bp, probe
gagggataaaatgaggctccaatac

SEQ ID NO: 226633 - DNA, 25 bp, probe
gagggaattaactggcttcatcacc

SEQ ID NO: 226634 - DNA, 25 bp, probe
gagggaattaactggcttcatcacc

SEQ ID NO: 226635 - DNA, 25 bp, probe
gaggggactaagtgttctcagagtg

SEQ ID NO: 226636 - DNA, 25 bp, probe
gaggggactgaaggtgggcaaggtg

SEQ ID NO: 226637 - DNA, 25 bp, probe
gagggagttaagccataggaatttg

SEQ ID NO: 226638 - DNA, 25 bp, probe
gaggggcggaagatgaagatttcgg

SEQ ID NO: 226639 - DNA, 25 bp, probe
gagggtgggaagagtcatgtttttt

SEQ ID NO: 226640 - DNA, 25 bp, probe
gaggaagggaagagctttattttgt

SEQ ID NO: 226641 - DNA, 25 bp, probe
gagggaaggcaaaatctttcttagt

SEQ ID NO: 226642 - DNA, 25 bp, probe
gagggctaggaaagtcttgttcata

SEQ ID NO: 226643 - DNA, 25 bp, probe
gagggcttggagaatatttctacta

SEQ ID NO: 226644 - DNA, 25 bp, probe
gagtggtctgtgttattttctattt

SEQ ID NO: 226645 - DNA, 25 bp, probe
gagtggtttctgcgtgtgtatattt

SEQ ID NO: 226646 - DNA, 25 bp, probe
gaggtctgttctaatggttccattt

SEQ ID NO: 226647 - DNA, 25 bp, probe
gagggtggcctaagagttgagctct

SEQ ID NO: 226648 - DNA, 25 bp, probe
gagggccagctatgagtttgactct

SEQ ID NO: 226649 - DNA, 25 bp, probe
gagggactgtgttgactgacgagcc

SEQ ID NO: 226650 - DNA, 25 bp, probe
gagtggactggagtggagcattggc

SEQ ID NO: 226651 - DNA, 25 bp, probe
gagtggagtggtttggcatttctgt

SEQ ID NO: 226652 - DNA, 25 bp, probe
gagggaggagtctttcttacataat

SEQ ID NO: 226653 - DNA, 25 bp, probe
gagggcggagtctattttacgcgtc

SEQ ID NO: 226654 - DNA, 25 bp, probe
gatgcgggtagtattgttcccgttg

SEQ ID NO: 226655 - DNA, 25 bp, probe
gtggggctggttttgtaggccctag

SEQ ID NO: 226656 - DNA, 25 bp, probe
gaggggctagtgttggtaggtccta

SEQ ID NO: 226657 - DNA, 25 bp, probe
gagggtgctcaggagggtaaggcca

SEQ ID NO: 226658 - DNA, 25 bp, probe
gagggtgctcaggagggtaaggcca

SEQ ID NO: 226659 - DNA, 25 bp, probe
gagggcagtgagggggttgatgggc

SEQ ID NO: 226660 - DNA, 25 bp, probe
gagggcatgataaagatggcattag

SEQ ID NO: 226661 - DNA, 25 bp, probe
gagggcatgataaagatggcattag

SEQ ID NO: 226662 - DNA, 25 bp, probe
gagggcatgagctacctggaggagc

SEQ ID NO: 226663 - DNA, 25 bp, probe
gagggcatgagctacctggaggagc

SEQ ID NO: 226664 - DNA, 25 bp, probe
gagggcatggcctacatggaacgca

SEQ ID NO: 226665 - DNA, 25 bp, probe
gagggcgatgcctcagaatgcccac

SEQ ID NO: 226666 - DNA, 25 bp, probe
gagggtgatgccatctaaccctgcc

SEQ ID NO: 226667 - DNA, 25 bp, probe
gagggtatctggatcaacccgacaa

SEQ ID NO: 226668 - DNA, 25 bp, probe
gaggttaggaattccaaactacaga

SEQ ID NO: 226669 - DNA, 25 bp, probe
gaggtacaattttccaaacttccag

SEQ ID NO: 226670 - DNA, 25 bp, probe
gaggtacaattttccaaacttccag

SEQ ID NO: 226671 - DNA, 25 bp, probe
gaggtacaattttccaaacttccag

SEQ ID NO: 226672 - DNA, 25 bp, probe
gaggtgaaatgaatcccaaatgcat

SEQ ID NO: 226673 - DNA, 25 bp, probe
gaggtcatgaagactaccaaaatca

SEQ ID NO: 226674 - DNA, 25 bp, probe
gaggttcaagatttaaagcatcaga

SEQ ID NO: 226675 - DNA, 25 bp, probe
gaggttcaagatttaaagcatcaga

SEQ ID NO: 226676 - DNA, 25 bp, probe
gagggtgccactttctcaagatgaa

SEQ ID NO: 226677 - DNA, 25 bp, probe
gagggctggcgttttggaatgcaat

SEQ ID NO: 226678 - DNA, 25 bp, probe
gaggtcttcctatctggaatgacta

SEQ ID NO: 226679 - DNA, 25 bp, probe
gaggtcttcctatctggaatgacta

SEQ ID NO: 226680 - DNA, 25 bp, probe
gaggttagagccatctggaaactat

SEQ ID NO: 226681 - DNA, 25 bp, probe
gaggtctatggccccatgaagaact

SEQ ID NO: 226682 - DNA, 25 bp, probe
gagtggcaagtcgtctgtgggaagt

SEQ ID NO: 226683 - DNA, 25 bp, probe
gagtggcaagtcgtctgtgggaagt

SEQ ID NO: 226684 - DNA, 25 bp, probe
gaggtggagctgcccagtattgaag

SEQ ID NO: 226685 - DNA, 25 bp, probe
gaggtgaactgggcttcatgggagc

SEQ ID NO: 226686 - DNA, 25 bp, probe
gaggtgaactggtctcactggaacc

SEQ ID NO: 226687 - DNA, 25 bp, probe
gaggtgaaagagttcagacttatca

SEQ ID NO: 226688 - DNA, 25 bp, probe
gagggagaaggttgcagagcacttc

SEQ ID NO: 226689 - DNA, 25 bp, probe
gagggtacatggatgaggcaggtgg

SEQ ID NO: 226690 - DNA, 25 bp, probe
gagggtaatgtgcaccacaggggcg

SEQ ID NO: 226691 - DNA, 25 bp, probe
gagggacaagcataagaaggaggcg

SEQ ID NO: 226692 - DNA, 25 bp, probe
gagggccagagacaggaatgtaagg

SEQ ID NO: 226693 - DNA, 25 bp, probe
gagggccagagtgtgtatacccagg

SEQ ID NO: 226694 - DNA, 25 bp, probe
gaggtgtcaactgttagccacgcag

SEQ ID NO: 226695 - DNA, 25 bp, probe
gaggtgccaacagtgttaggcctgg

SEQ ID NO: 226696 - DNA, 25 bp, probe
gaggtgccaacagtgttaggcctgg

SEQ ID NO: 226697 - DNA, 25 bp, probe
gaggtcgacacaaggtacttcgatg

SEQ ID NO: 226698 - DNA, 25 bp, probe
gaggtcgacacaaggtacttcgatg

SEQ ID NO: 226699 - DNA, 25 bp, probe
gaggtcgacacaaggtacttcgatg

SEQ ID NO: 226700 - DNA, 25 bp, probe
gaggggacatgaagagtttcctgag

SEQ ID NO: 226701 - DNA, 25 bp, probe
gaggggttgagaatggaatcctctg

SEQ ID NO: 226702 - DNA, 25 bp, probe
gaggtggtcggcaatggaacctacg

SEQ ID NO: 226703 - DNA, 25 bp, probe
gaggtggtcaaggttgtgacctcca

SEQ ID NO: 226704 - DNA, 25 bp, probe
gaggtattcttggaatgtgaagccc

SEQ ID NO: 226705 - DNA, 25 bp, probe
gaggctatgctttggggggacaggc

SEQ ID NO: 226706 - DNA, 25 bp, probe
gagggtgcttcgagggtgaggactt

SEQ ID NO: 226707 - DNA, 25 bp, probe
gaggattgtttgaggccgggagttc

SEQ ID NO: 226708 - DNA, 25 bp, probe
gaggttatgttgagggtcgcttgtt

SEQ ID NO: 226709 - DNA, 25 bp, probe
gaggaccaggtcaagggacgttctg

SEQ ID NO: 226710 - DNA, 25 bp, probe
gaggaacaaggcaaggctgtcaatt

SEQ ID NO: 226711 - DNA, 25 bp, probe
gaggaaatcacgccaggtggccaca

SEQ ID NO: 226712 - DNA, 25 bp, probe
gaggaaatcacgccaggtggccaca

SEQ ID NO: 226713 - DNA, 25 bp, probe
gagggaacagaggccgtgagccctg

SEQ ID NO: 226714 - DNA, 25 bp, probe
gagggaacagaggccgtgagccctg

SEQ ID NO: 226715 - DNA, 25 bp, probe
gagggcaaagagggcactgggcact

SEQ ID NO: 226716 - DNA, 25 bp, probe
gagggcaaggaaggcagcatggaga

SEQ ID NO: 226717 - DNA, 25 bp, probe
gagggcaggtctttcatgcacataa

SEQ ID NO: 226718 - DNA, 25 bp, probe
gagggcaggtctttcatgcacataa

SEQ ID NO: 226719 - DNA, 25 bp, probe
gagggagtgtgcagatacagaagaa

SEQ ID NO: 226720 - DNA, 25 bp, probe
gaggagacttcttaaagacagcaac

SEQ ID NO: 226721 - DNA, 25 bp, probe
gaggaaggacttaaggacagcatgt

SEQ ID NO: 226722 - DNA, 25 bp, probe
gaggaaatagtttagtcacaggttt

SEQ ID NO: 226723 - DNA, 25 bp, probe
gaggatcaatcacattagctcctgg

SEQ ID NO: 226724 - DNA, 25 bp, probe
gaggatgaatctcttcagcgtctgc

SEQ ID NO: 226725 - DNA, 25 bp, probe
gaggagaacttcctgcagttccttc

SEQ ID NO: 226726 - DNA, 25 bp, probe
gagggactgttggcatgcagtgccc

SEQ ID NO: 226727 - DNA, 25 bp, probe
gagggcatcataggccagacaggcc

SEQ ID NO: 226728 - DNA, 25 bp, probe
gaggtgcacagatgctcagattggt

SEQ ID NO: 226729 - DNA, 25 bp, probe
gagggcccaatgtatgatctattac

SEQ ID NO: 226730 - DNA, 25 bp, probe
gaggtcctcaaattgtatacgacaa

SEQ ID NO: 226731 - DNA, 25 bp, probe
gaggtcctcaaattgtatacgacaa

SEQ ID NO: 226732 - DNA, 25 bp, probe
gatggtcacaccgaaggtatcgaac

SEQ ID NO: 226733 - DNA, 25 bp, probe
gatggtcacaccgaaggtatcgaac

SEQ ID NO: 226734 - DNA, 25 bp, probe
gaggatcgaccagtcagagttcgaa

SEQ ID NO: 226735 - DNA, 25 bp, probe
gaggaggacctggcggatgaaatga

SEQ ID NO: 226736 - DNA, 25 bp, probe
gaggaggacctggcggatgaaatga

SEQ ID NO: 226737 - DNA, 25 bp, probe
gaggtgcaccctgcaggagatacag

SEQ ID NO: 226738 - DNA, 25 bp, probe
gagggcaatgccagggacatcatca

SEQ ID NO: 226739 - DNA, 25 bp, probe
gagggcttcaattgagaactccact

SEQ ID NO: 226740 - DNA, 25 bp, probe
gagggtccagataagtcagtcacca

SEQ ID NO: 226741 - DNA, 25 bp, probe
gagggcacaaggaattagtaacagg

SEQ ID NO: 226742 - DNA, 25 bp, probe
gagggcagaaatacatctactaatg

SEQ ID NO: 226743 - DNA, 25 bp, probe
gagggctgcaagagcttcttcaagc

SEQ ID NO: 226744 - DNA, 25 bp, probe
gaggatgtgcggaagctttactggt

SEQ ID NO: 226745 - DNA, 25 bp, probe
gatgatggggagcacttttcagggt

SEQ ID NO: 226746 - DNA, 25 bp, probe
gaggtggagctgcccagtattgaag

SEQ ID NO: 226747 - DNA, 25 bp, probe
gagggatggctaccaggaggaaatc

SEQ ID NO: 226748 - DNA, 25 bp, probe
gagggggctaagagaggagcaaagc

SEQ ID NO: 226749 - DNA, 25 bp, probe
gaggggacataaagggaatgcatac

SEQ ID NO: 226750 - DNA, 25 bp, probe
gaggggatgctactgatgggaatga

SEQ ID NO: 226751 - DNA, 25 bp, probe
gagggaacaactcgagctttgaggc

SEQ ID NO: 226752 - DNA, 25 bp, probe
gtgggccattatagggcccgtgcca

SEQ ID NO: 226753 - DNA, 25 bp, probe
gtgggccattatagggcccgtgcca

SEQ ID NO: 226754 - DNA, 25 bp, probe
gaggcctatgttagggcctttgccc

SEQ ID NO: 226755 - DNA, 25 bp, probe
gaggtccatgtgggggactcttgga

SEQ ID NO: 226756 - DNA, 25 bp, probe
gaggttgcatggcatggtccttgtg

SEQ ID NO: 226757 - DNA, 25 bp, probe
gaggtggatgagccagagtcccatt

SEQ ID NO: 226758 - DNA, 25 bp, probe
gagggaatatgcgaagctgccgcgt

SEQ ID NO: 226759 - DNA, 25 bp, probe
gagggaattgtgttgctcctggagg

SEQ ID NO: 226760 - DNA, 25 bp, probe
gagggagattgtgtgcatcaagaag

SEQ ID NO: 226761 - DNA, 25 bp, probe
gagggaagcactgatgccaaggatg

SEQ ID NO: 226762 - DNA, 25 bp, probe
gagggaagcactgatgccaaggatg

SEQ ID NO: 226763 - DNA, 25 bp, probe
gaggtatcttctgcagcacaaggag

SEQ ID NO: 226764 - DNA, 25 bp, probe
gatgtcttctgtgcccagaggagca

SEQ ID NO: 226765 - DNA, 25 bp, probe
gatgtcttctgtgcccagaggagca

SEQ ID NO: 226766 - DNA, 25 bp, probe
ggtctttaccccagaagaagccgtg

SEQ ID NO: 226767 - DNA, 25 bp, probe
ggtctttaccccagaagaagccgtg

SEQ ID NO: 226768 - DNA, 25 bp, probe
gaggctttacacaccaaagaagccg

SEQ ID NO: 226769 - DNA, 25 bp, probe
gaggtataaccccaacgagaagctg

SEQ ID NO: 226770 - DNA, 25 bp, probe
gaggaacaactagaaccaagatctg

SEQ ID NO: 226771 - DNA, 25 bp, probe
gatggaaacacggaaacgcctggct

SEQ ID NO: 226772 - DNA, 25 bp, probe
gaggggaacagatacactccgagag

SEQ ID NO: 226773 - DNA, 25 bp, probe
gaggtggaaaaatagccccaagcag

SEQ ID NO: 226774 - DNA, 25 bp, probe
gagggtattaaagagacacagaaga

SEQ ID NO: 226775 - DNA, 25 bp, probe
gagggggattagctagactaggaga

SEQ ID NO: 226776 - DNA, 25 bp, probe
gaggcggtaaatctgaagtgggaac

SEQ ID NO: 226777 - DNA, 25 bp, probe
gaggggagaaatcctgatctttaaa

SEQ ID NO: 226778 - DNA, 25 bp, probe
gaggatgctgagaacggtgtctttc

SEQ ID NO: 226779 - DNA, 25 bp, probe
gaggtgtaatgaaggcttgtcttcc

SEQ ID NO: 226780 - DNA, 25 bp, probe
gaggtggaatgcccgagattcctcc

SEQ ID NO: 226781 - DNA, 25 bp, probe
gagggagcaatacctgtggcatcac

SEQ ID NO: 226782 - DNA, 25 bp, probe
gagggatgcagatgcttggccaccc

SEQ ID NO: 226783 - DNA, 25 bp, probe
gaggtggagatcattgggctccctg

SEQ ID NO: 226784 - DNA, 25 bp, probe
gaggtagtgctgatagtggcccacc

SEQ ID NO: 226785 - DNA, 25 bp, probe
gaggtagtgctgatagtggcccacc

SEQ ID NO: 226786 - DNA, 25 bp, probe
gaggtagtagactagtggaaatccc

SEQ ID NO: 226787 - DNA, 25 bp, probe
gaggggataagtatgcagaaatctg

SEQ ID NO: 226788 - DNA, 25 bp, probe
gaggggataagtatgcagaaatctg

SEQ ID NO: 226789 - DNA, 25 bp, probe
gaggggaagagacttggaaatggga

SEQ ID NO: 226790 - DNA, 25 bp, probe
gaggggtgagaagttggccctggtc

SEQ ID NO: 226791 - DNA, 25 bp, probe
gaggggtgacaagtttccccaagag

SEQ ID NO: 226792 - DNA, 25 bp, probe
gagggttaaagtatctgcaccaaga

SEQ ID NO: 226793 - DNA, 25 bp, probe
gaggggtcagtagacctcctgcaaa

SEQ ID NO: 226794 - DNA, 25 bp, probe
gaggggtcagtagacctcctgcaaa

SEQ ID NO: 226795 - DNA, 25 bp, probe
gaggaggtacattgaaaccctccaa

SEQ ID NO: 226796 - DNA, 25 bp, probe
gaggccttatctcaacaacaaccac

SEQ ID NO: 226797 - DNA, 25 bp, probe
gaggttgtcattcagaaccaagtac

SEQ ID NO: 226798 - DNA, 25 bp, probe
gagggagaatgtcagaactcaagtg

SEQ ID NO: 226799 - DNA, 25 bp, probe
gagggaggcattcacctttatgtgt

SEQ ID NO: 226800 - DNA, 25 bp, probe
gaggtgaggcaatatatctttctgt

SEQ ID NO: 226801 - DNA, 25 bp, probe
gaggtcacgattctgtcattttgga

SEQ ID NO: 226802 - DNA, 25 bp, probe
gaggtcacgattctgtcattttgga

SEQ ID NO: 226803 - DNA, 25 bp, probe
gaggtgacgaatgtgatcttcctag

SEQ ID NO: 226804 - DNA, 25 bp, probe
gaggtgacaaatgtgagggacactg

SEQ ID NO: 226805 - DNA, 25 bp, probe
gagggtgcaattgagatgggccaaa

SEQ ID NO: 226806 - DNA, 25 bp, probe
gagggtgagagggagatgtgtctac

SEQ ID NO: 226807 - DNA, 25 bp, probe
gagggtgagagggagatgtgtctac

SEQ ID NO: 226808 - DNA, 25 bp, probe
gaggtccaatggaaggttctggcat

SEQ ID NO: 226809 - DNA, 25 bp, probe
gaggtccacgacaaggtggttgccc

SEQ ID NO: 226810 - DNA, 25 bp, probe
gaggtaactgaggagaggggcgcct

SEQ ID NO: 226811 - DNA, 25 bp, probe
gaggggactggcatggggggatctc

SEQ ID NO: 226812 - DNA, 25 bp, probe
gagggtaggggagtgtgggtgatca

SEQ ID NO: 226813 - DNA, 25 bp, probe
gagggtaggggagtgtgggtgatca

SEQ ID NO: 226814 - DNA, 25 bp, probe
gagggtatggagtggggcctgatgg

SEQ ID NO: 226815 - DNA, 25 bp, probe
gagggatatggggctggggccagtt

SEQ ID NO: 226816 - DNA, 25 bp, probe
gagggtgaggcagggcagggacagt

SEQ ID NO: 226817 - DNA, 25 bp, probe
gagggtgaggcagggcagggacagt

SEQ ID NO: 226818 - DNA, 25 bp, probe
gaggtggatgaaggtggagggcggc

SEQ ID NO: 226819 - DNA, 25 bp, probe
gaggtggatgaaggtggagggcggc

SEQ ID NO: 226820 - DNA, 25 bp, probe
gagggtgggagagtggatgaggggc

SEQ ID NO: 226821 - DNA, 25 bp, probe
gagggtgggttcagctatgtggacc

SEQ ID NO: 226822 - DNA, 25 bp, probe
gagggatggtatgccgcatctggag

SEQ ID NO: 226823 - DNA, 25 bp, probe
gagggatgaggactccctctcaggc

SEQ ID NO: 226824 - DNA, 25 bp, probe
gaggggagagaccagctctccagcc

SEQ ID NO: 226825 - DNA, 25 bp, probe
gaggtgaatggacagccagccacca

SEQ ID NO: 226826 - DNA, 25 bp, probe
gaggtggaggctcatctcaggaagc

SEQ ID NO: 226827 - DNA, 25 bp, probe
gaggtggaggctcatctcaggaagc

SEQ ID NO: 226828 - DNA, 25 bp, probe
gagggatgtgttcatcctactcagc

SEQ ID NO: 226829 - DNA, 25 bp, probe
gaggggtgagctcatttcattctct

SEQ ID NO: 226830 - DNA, 25 bp, probe
gaggtggtgcgaaattctcacacta

SEQ ID NO: 226831 - DNA, 25 bp, probe
gaggaggacgacatttacactagtt

SEQ ID NO: 226832 - DNA, 25 bp, probe
gagggaacagacatgttggcagaga

SEQ ID NO: 226833 - DNA, 25 bp, probe
gagggaacagacatgttggcagaga

SEQ ID NO: 226834 - DNA, 25 bp, probe
gagggataagacacacatccaaatt

SEQ ID NO: 226835 - DNA, 25 bp, probe
gagggaaaatctgaccataagaaat

SEQ ID NO: 226836 - DNA, 25 bp, probe
gagggactaactgatgctgcatcta

SEQ ID NO: 226837 - DNA, 25 bp, probe
gagggatattaggatattgctcaaa

SEQ ID NO: 226838 - DNA, 25 bp, probe
gagggtctggattattgtcataaga

SEQ ID NO: 226839 - DNA, 25 bp, probe
gagggacggttttgctttatggcta

SEQ ID NO: 226840 - DNA, 25 bp, probe
gagggacggttttgctttatggcta

SEQ ID NO: 226841 - DNA, 25 bp, probe
gaggtaaggataagaggtaatggta

SEQ ID NO: 226842 - DNA, 25 bp, probe
gaggaaatgcgaaaggttgtatgtg

SEQ ID NO: 226843 - DNA, 25 bp, probe
gaggaaccgaggtgttgccagtgct

SEQ ID NO: 226844 - DNA, 25 bp, probe
gaggaagcgcaagatggtctccttc

SEQ ID NO: 226845 - DNA, 25 bp, probe
gaggtggctacagacgcacctcttc

SEQ ID NO: 226846 - DNA, 25 bp, probe
gaggtaggagcagagccactatctc

SEQ ID NO: 226847 - DNA, 25 bp, probe
gagggagccagggacctcatttcaa

SEQ ID NO: 226848 - DNA, 25 bp, probe
gagggactggacatcccatgttcag

SEQ ID NO: 226849 - DNA, 25 bp, probe
gaggggctggacaggcactgtcagc

SEQ ID NO: 226850 - DNA, 25 bp, probe
gaggtgacggactgagacgcatctg

SEQ ID NO: 226851 - DNA, 25 bp, probe
gagggttggtctcgaggcagaggtc

SEQ ID NO: 226852 - DNA, 25 bp, probe
gagggttggtctcgaggcagaggtc

SEQ ID NO: 226853 - DNA, 25 bp, probe
gagggtctttctcaggagcagttaa

SEQ ID NO: 226854 - DNA, 25 bp, probe
gagggtctgtaccgtagacttcaca

SEQ ID NO: 226855 - DNA, 25 bp, probe
gaggagctgttgaggtacctccaag

SEQ ID NO: 226856 - DNA, 25 bp, probe
gagggtgttctagggacttctgaag

SEQ ID NO: 226857 - DNA, 25 bp, probe
gaggaggacgtgagccagtttgata

SEQ ID NO: 226858 - DNA, 25 bp, probe
gaggaggacgtgagccagtttgata

SEQ ID NO: 226859 - DNA, 25 bp, probe
gaggaggacgtgagccagtttgata

SEQ ID NO: 226860 - DNA, 25 bp, probe
gagggagagtggagggtttgacggg

SEQ ID NO: 226861 - DNA, 25 bp, probe
gagggagagtggtgtgtttgctttt

SEQ ID NO: 226862 - DNA, 25 bp, probe
gagggagaggtggcaggaatacttc

SEQ ID NO: 226863 - DNA, 25 bp, probe
gaggtggaggtggccgatgaaacca

SEQ ID NO: 226864 - DNA, 25 bp, probe
gaggatccggggcaatacagaccat

SEQ ID NO: 226865 - DNA, 25 bp, probe
gaggtccgcgggaggatggagcagt

SEQ ID NO: 226866 - DNA, 25 bp, probe
gaggtagccggtgtgcggtgaactc

SEQ ID NO: 226867 - DNA, 25 bp, probe
gaggtaggtgttgtgcgaggaatta

SEQ ID NO: 226868 - DNA, 25 bp, probe
gaggtaggtgttgtgcgaggaatta

SEQ ID NO: 226869 - DNA, 25 bp, probe
gaggtcagggttttagagagcagtg

SEQ ID NO: 226870 - DNA, 25 bp, probe
gaggtagtggacaaagccaacagag

SEQ ID NO: 226871 - DNA, 25 bp, probe
gaggtggtggactcgacaacgtcat

SEQ ID NO: 226872 - DNA, 25 bp, probe
gagggtgtgtactccaattcttttt

SEQ ID NO: 226873 - DNA, 25 bp, probe
gaggggatggatttccataagtttt

SEQ ID NO: 226874 - DNA, 25 bp, probe
gaggttgtggacttcctctcagatt

SEQ ID NO: 226875 - DNA, 25 bp, probe
gagggtgttgagttcactgtgccag

SEQ ID NO: 226876 - DNA, 25 bp, probe
gagggtgttgagttcactgtgccag

SEQ ID NO: 226877 - DNA, 25 bp, probe
gagggtgtatattttctgtgcagcc

SEQ ID NO: 226878 - DNA, 25 bp, probe
gaggactggctttgctgccagtacc

SEQ ID NO: 226879 - DNA, 25 bp, probe
gaggccgatgtttccggtatgcaga

SEQ ID NO: 226880 - DNA, 25 bp, probe
gaggccgatgtttccggtatgcaga

SEQ ID NO: 226881 - DNA, 25 bp, probe
gaggaccttaagccagttatcgatg

SEQ ID NO: 226882 - DNA, 25 bp, probe
gaggacgcttgagccagaatctcag

SEQ ID NO: 226883 - DNA, 25 bp, probe
gaggtgtctacagtccagatgttct

SEQ ID NO: 226884 - DNA, 25 bp, probe
gatggttctccaactaggattgcgt

SEQ ID NO: 226885 - DNA, 25 bp, probe
gaggaatttgcaacgagagattgaa

SEQ ID NO: 226886 - DNA, 25 bp, probe
gaggttgtttcccataatagaactg

SEQ ID NO: 226887 - DNA, 25 bp, probe
gaggtggttttccatgaatcagcca

SEQ ID NO: 226888 - DNA, 25 bp, probe
gaggtggagttcaggagagaggagt

SEQ ID NO: 226889 - DNA, 25 bp, probe
gaggtggtttgtgggaggaatagtg

SEQ ID NO: 226890 - DNA, 25 bp, probe
gagggagttttctgggtgtagagag

SEQ ID NO: 226891 - DNA, 25 bp, probe
gaggaagttttgggagtgtttatcg

SEQ ID NO: 226892 - DNA, 25 bp, probe
gaggacgtttcagaggtcttctttt

SEQ ID NO: 226893 - DNA, 25 bp, probe
gaggacgtttcagaggtcttctttt

SEQ ID NO: 226894 - DNA, 25 bp, probe
gaggtgtccttacagaggcctcttt

SEQ ID NO: 226895 - DNA, 25 bp, probe
gagggtctcagtacaagggccctgg

SEQ ID NO: 226896 - DNA, 25 bp, probe
gagggtgtcgtgaccaagagcacac

SEQ ID NO: 226897 - DNA, 25 bp, probe
gagggtggagcacttcatgaaccac

SEQ ID NO: 226898 - DNA, 25 bp, probe
gaggttggcagctgatcagacctca

SEQ ID NO: 226899 - DNA, 25 bp, probe
gaggtcaggagatcgagaccatcct

SEQ ID NO: 226900 - DNA, 25 bp, probe
gaggtcctgcagtcgcagaagggcc

SEQ ID NO: 226901 - DNA, 25 bp, probe
gaggctccggatggagcctggggct

SEQ ID NO: 226902 - DNA, 25 bp, probe
gaggtgctcggtggagtcatggcat

SEQ ID NO: 226903 - DNA, 25 bp, probe
gaggtgctcgagggagccatcaact

SEQ ID NO: 226904 - DNA, 25 bp, probe
gaggatcagccgggtgcaatgactc

SEQ ID NO: 226905 - DNA, 25 bp, probe
gaggatcagccgggtgcaatgactc

SEQ ID NO: 226906 - DNA, 25 bp, probe
gaggggctctgctgtgtagatgcca

SEQ ID NO: 226907 - DNA, 25 bp, probe
gagggattgctggcatgctgtaccc

SEQ ID NO: 226908 - DNA, 25 bp, probe
gaggtgtctcaggctgcctgagtcg

SEQ ID NO: 226909 - DNA, 25 bp, probe
gaggtccatcagagctctgatttcc

SEQ ID NO: 226910 - DNA, 25 bp, probe
gaggttcaagcaaggtatttcaggt

SEQ ID NO: 226911 - DNA, 25 bp, probe
gaggttataaagcaattccgtcatc

SEQ ID NO: 226912 - DNA, 25 bp, probe
gaggttataaagcaattccgtcatc

SEQ ID NO: 226913 - DNA, 25 bp, probe
gaggaattcaaaggtttctcctact

SEQ ID NO: 226914 - DNA, 25 bp, probe
gaggacatcatcagcaggatattcc

SEQ ID NO: 226915 - DNA, 25 bp, probe
gaggtctatctccggaagtgcacct

SEQ ID NO: 226916 - DNA, 25 bp, probe
gaggtattattgcaataatgcactt

SEQ ID NO: 226917 - DNA, 25 bp, probe
gaggttgcatatttaaagacactta

SEQ ID NO: 226918 - DNA, 25 bp, probe
gaggttgcatatttaaagacactta

SEQ ID NO: 226919 - DNA, 25 bp, probe
gaggttatttcctctgagcagtctg

SEQ ID NO: 226920 - DNA, 25 bp, probe
gaggtttgttctttccagtgaatgg

SEQ ID NO: 226921 - DNA, 25 bp, probe
gaggttttggcctgcaagtactaca

SEQ ID NO: 226922 - DNA, 25 bp, probe
gaggatattttgcttctggtagtaa

SEQ ID NO: 226923 - DNA, 25 bp, probe
gaggtctcatttcttgtaaagtata

SEQ ID NO: 226924 - DNA, 25 bp, probe
gaggcccctagctttgaaaagcaac

SEQ ID NO: 226925 - DNA, 25 bp, probe
gaggtcctgctacccagtaaaaatc

SEQ ID NO: 226926 - DNA, 25 bp, probe
gaggtcctgctacccagtaaaaatc

SEQ ID NO: 226927 - DNA, 25 bp, probe
gaggtcctgtgtccacagctggaca

SEQ ID NO: 226928 - DNA, 25 bp, probe
gaggactcttgcgatcacgcaggaa

SEQ ID NO: 226929 - DNA, 25 bp, probe
gaggaccgtctcggtggtgaagtag

SEQ ID NO: 226930 - DNA, 25 bp, probe
gaggtccatgctgcagggagctgaa

SEQ ID NO: 226931 - DNA, 25 bp, probe
gaggtccatattagattgcatccaa

SEQ ID NO: 226932 - DNA, 25 bp, probe
gaggtcctgatgaacacctacagtg

SEQ ID NO: 226933 - DNA, 25 bp, probe
gatgatacctggagcgccaaggtct

SEQ ID NO: 226934 - DNA, 25 bp, probe
gatgaccactgacagtgccaagtca

SEQ ID NO: 226935 - DNA, 25 bp, probe
gaggggcatgcacatgcccacgtca

SEQ ID NO: 226936 - DNA, 25 bp, probe
gaggtggagatgctgtaccagtgcc

SEQ ID NO: 226937 - DNA, 25 bp, probe
gaggtggtgagcatgtaacatgagc

SEQ ID NO: 226938 - DNA, 25 bp, probe
gagggtgaatgcggctgacattgag

SEQ ID NO: 226939 - DNA, 25 bp, probe
gagggtgaaagggacagatagatgc

SEQ ID NO: 226940 - DNA, 25 bp, probe
gagggtgaaagggacagatagatgc

SEQ ID NO: 226941 - DNA, 25 bp, probe
gaggagacaaaagcaagatagccaa

SEQ ID NO: 226942 - DNA, 25 bp, probe
gaggagacaaaagcaagatagccaa

SEQ ID NO: 226943 - DNA, 25 bp, probe
gaggagtccaaaataatgatcagtg

SEQ ID NO: 226944 - DNA, 25 bp, probe
gaggagggatccatacttgcatttg

SEQ ID NO: 226945 - DNA, 25 bp, probe
gagggggattacaagctcctcaaga

SEQ ID NO: 226946 - DNA, 25 bp, probe
gagggggattacaagctcctcaaga

SEQ ID NO: 226947 - DNA, 25 bp, probe
gaggaggagaaaaagctgactcgga

SEQ ID NO: 226948 - DNA, 25 bp, probe
gaggggagaagtttgcgactctgac

SEQ ID NO: 226949 - DNA, 25 bp, probe
gaggggtgatgactttggcacgtca

SEQ ID NO: 226950 - DNA, 25 bp, probe
gaggtcgggagttcgagatcagtct

SEQ ID NO: 226951 - DNA, 25 bp, probe
gaggttgtgtgtgtcaaacgtttgc

SEQ ID NO: 226952 - DNA, 25 bp, probe
gagggtggtgtggtctctatttgaa

SEQ ID NO: 226953 - DNA, 25 bp, probe
gaggagggggctgctattttggacc

SEQ ID NO: 226954 - DNA, 25 bp, probe
gaggagggtcctattgtttgggaca

SEQ ID NO: 226955 - DNA, 25 bp, probe
gaggagggactctttagtcttggga

SEQ ID NO: 226956 - DNA, 25 bp, probe
gaggaggtgaactgggcttcatggg

SEQ ID NO: 226957 - DNA, 25 bp, probe
gaggggagctatttggacttttggg

SEQ ID NO: 226958 - DNA, 25 bp, probe
gaggtgggcgctttggaggtttgcc

SEQ ID NO: 226959 - DNA, 25 bp, probe
gaggtagctagcgtgtgagggttgg

SEQ ID NO: 226960 - DNA, 25 bp, probe
gaggggtagtcgaagagctctggtg

SEQ ID NO: 226961 - DNA, 25 bp, probe
gaggggtaccagaacatctcgtgaa

SEQ ID NO: 226962 - DNA, 25 bp, probe
gaggggtggccacacagtggggagc

SEQ ID NO: 226963 - DNA, 25 bp, probe
gaggaggtagaggccacgcggggcc

SEQ ID NO: 226964 - DNA, 25 bp, probe
gagggtggagatggccattgcgagg

SEQ ID NO: 226965 - DNA, 25 bp, probe
gaggattgctgggaccatgatgcag

SEQ ID NO: 226966 - DNA, 25 bp, probe
gaggtgctggaggacaatgactatg

SEQ ID NO: 226967 - DNA, 25 bp, probe
gaggatgcaggtggaactcagtcat

SEQ ID NO: 226968 - DNA, 25 bp, probe
gaggaaagtgcgtcagatcagtgat

SEQ ID NO: 226969 - DNA, 25 bp, probe
gaggaaagtggctattacaatttta

SEQ ID NO: 226970 - DNA, 25 bp, probe
gaggatcaggggttagaagacataa

SEQ ID NO: 226971 - DNA, 25 bp, probe
gaggaaagggcacgaatatacaaat

SEQ ID NO: 226972 - DNA, 25 bp, probe
gaggaaagggcatgaatatataaat

SEQ ID NO: 226973 - DNA, 25 bp, probe
gaggtgacaggtaaactaaaacagc

SEQ ID NO: 226974 - DNA, 25 bp, probe
gaggtgacaggtaaactaaaacagc

SEQ ID NO: 226975 - DNA, 25 bp, probe
gaggagagagggattcgaaaacagt

SEQ ID NO: 226976 - DNA, 25 bp, probe
gaggatgagtaccagttctgttacc

SEQ ID NO: 226977 - DNA, 25 bp, probe
gaggacgtgagccagtttgataccc

SEQ ID NO: 226978 - DNA, 25 bp, probe
gaggacgtgagccagtttgataccc

SEQ ID NO: 226979 - DNA, 25 bp, probe
gaggacgtgagccagtttgataccc

SEQ ID NO: 226980 - DNA, 25 bp, probe
gaggatgcaggccaggttaaaaccc

SEQ ID NO: 226981 - DNA, 25 bp, probe
gaggatggcatgaagtttaaggaat

SEQ ID NO: 226982 - DNA, 25 bp, probe
gaggtggccataaataaaggagttt

SEQ ID NO: 226983 - DNA, 25 bp, probe
gaggtggccataaataaaggagttt

SEQ ID NO: 226984 - DNA, 25 bp, probe
gaggggccagaaataggaggaggtt

SEQ ID NO: 226985 - DNA, 25 bp, probe
gaggggccagaaataggaggaggtt

SEQ ID NO: 226986 - DNA, 25 bp, probe
gaggggctggagagggggaggcctt

SEQ ID NO: 226987 - DNA, 25 bp, probe
gaggtggtggagaacgtgggcatgc

SEQ ID NO: 226988 - DNA, 25 bp, probe
gaggtggtggagaacgtgggcatgc

SEQ ID NO: 226989 - DNA, 25 bp, probe
gaggtggaggcaagacgatcaatag

SEQ ID NO: 226990 - DNA, 25 bp, probe
gaggtggaagagactcgtgcaatgg

SEQ ID NO: 226991 - DNA, 25 bp, probe
gaggagtcacaggactcgaggggga

SEQ ID NO: 226992 - DNA, 25 bp, probe
gaggacatcaaggccttaaacgcca

SEQ ID NO: 226993 - DNA, 25 bp, probe
gaggagaatggtgttattactgaca

SEQ ID NO: 226994 - DNA, 25 bp, probe
gaggagtatttgttaatgtggagaa

SEQ ID NO: 226995 - DNA, 25 bp, probe
gatggaaattggttgaaaagagtaa

SEQ ID NO: 226996 - DNA, 25 bp, probe
gaggaccttgagtggagaaatggat

SEQ ID NO: 226997 - DNA, 25 bp, probe
gaggacttcaagtgtgtggacgaaa

SEQ ID NO: 226998 - DNA, 25 bp, probe
gaggtaatcaagagaggaggtgaag

SEQ ID NO: 226999 - DNA, 25 bp, probe
gaggttataaatagctggcagggca

SEQ ID NO: 227000 - DNA, 25 bp, probe
gaggttgaccatatcaacagtggcc

SEQ ID NO: 227001 - DNA, 25 bp, probe
gaggttggtcaattaccgtggcaca

SEQ ID NO: 227002 - DNA, 25 bp, probe
gagggggtgcaaacatgactgggac

SEQ ID NO: 227003 - DNA, 25 bp, probe
gaggggtgggatccacactgagaga

SEQ ID NO: 227004 - DNA, 25 bp, probe
gaggggcagaggcccacattggaag

SEQ ID NO: 227005 - DNA, 25 bp, probe
gaggtggcaggggacagatgtgctg

SEQ ID NO: 227006 - DNA, 25 bp, probe
gaggtggctgtgcgaagaggggctc

SEQ ID NO: 227007 - DNA, 25 bp, probe
gaggtgatcttgagctcagaggagg

SEQ ID NO: 227008 - DNA, 25 bp, probe
gaggagcatttcagctttaagtgat

SEQ ID NO: 227009 - DNA, 25 bp, probe
gaggactaccttttccaagtgatcc

SEQ ID NO: 227010 - DNA, 25 bp, probe
gaggagtacgtgaggagccagtacc

SEQ ID NO: 227011 - DNA, 25 bp, probe
gaggcaggggtgaaggagcgggttc

SEQ ID NO: 227012 - DNA, 25 bp, probe
gaggtgtggctgtgaggtcagggtt

SEQ ID NO: 227013 - DNA, 25 bp, probe
gaggtgttggaacgggagctggcct

SEQ ID NO: 227014 - DNA, 25 bp, probe
gaggtgcctgaaagctgggagcgtg

SEQ ID NO: 227015 - DNA, 25 bp, probe
gaggaagctgaatgctcggaggtag

SEQ ID NO: 227016 - DNA, 25 bp, probe
gaggaagaaccccgcagagcgtatg

SEQ ID NO: 227017 - DNA, 25 bp, probe
gaggagaaatcccaggagatacctg

SEQ ID NO: 227018 - DNA, 25 bp, probe
gaggacacactcacggaaatctcgg

SEQ ID NO: 227019 - DNA, 25 bp, probe
gaggaaaccttctggctgattggga

SEQ ID NO: 227020 - DNA, 25 bp, probe
gaggtgaagcacatcaaggtggtgg

SEQ ID NO: 227021 - DNA, 25 bp, probe
gaggtggagactcgcaaggtggtgc

SEQ ID NO: 227022 - DNA, 25 bp, probe
gaggggagttccaagtgtgccctcc

SEQ ID NO: 227023 - DNA, 25 bp, probe
gaggggagttccaagtgtgccctcc

SEQ ID NO: 227024 - DNA, 25 bp, probe
gaggggaggccaagagtggccccac

SEQ ID NO: 227025 - DNA, 25 bp, probe
gaggcccagggaaagttcctgtcac

SEQ ID NO: 227026 - DNA, 25 bp, probe
gaggcccagggaaagttcctgtcac

SEQ ID NO: 227027 - DNA, 25 bp, probe
gaggttagggacagctatccccagg

SEQ ID NO: 227028 - DNA, 25 bp, probe
gaggttagggacagctatccccagg

SEQ ID NO: 227029 - DNA, 25 bp, probe
gaggtgggaggatcgcttgagccca

SEQ ID NO: 227030 - DNA, 25 bp, probe
gaggtgggaggacacaccatgctcc

SEQ ID NO: 227031 - DNA, 25 bp, probe
gaggggcttgaacagactatacctt

SEQ ID NO: 227032 - DNA, 25 bp, probe
gaggggcttggaatagagaaaccta

SEQ ID NO: 227033 - DNA, 25 bp, probe
gaggggctggaaatgaaatccaccc

SEQ ID NO: 227034 - DNA, 25 bp, probe
gaggaggctagcatctacgacaagc

SEQ ID NO: 227035 - DNA, 25 bp, probe
gaggatgaggacagcgacctcaagg

SEQ ID NO: 227036 - DNA, 25 bp, probe
gaggatgaggacagcgacctcaagg

SEQ ID NO: 227037 - DNA, 25 bp, probe
gaggataggcacagtggaccgggca

SEQ ID NO: 227038 - DNA, 25 bp, probe
gaggattgtccaatgtgtgccctca

SEQ ID NO: 227039 - DNA, 25 bp, probe
gaggggcagtagttgatgccctgca

SEQ ID NO: 227040 - DNA, 25 bp, probe
gaggggcagcttctgaggttgccaa

SEQ ID NO: 227041 - DNA, 25 bp, probe
gaggggcagcttctgaggttgccaa

SEQ ID NO: 227042 - DNA, 25 bp, probe
gatggggcttggttagtttgcaata

SEQ ID NO: 227043 - DNA, 25 bp, probe
gaggttctgaagatcagctttgaaa

SEQ ID NO: 227044 - DNA, 25 bp, probe
gaggtttcaggagatgtgttacaag

SEQ ID NO: 227045 - DNA, 25 bp, probe
gaggtttaacatgggttgcttaagg

SEQ ID NO: 227046 - DNA, 25 bp, probe
gaggtttatcatgaccttccgggga

SEQ ID NO: 227047 - DNA, 25 bp, probe
tgatggatttttaacttcccgtgga

SEQ ID NO: 227048 - DNA, 25 bp, probe
gttgattttattcatttcctgggaa

SEQ ID NO: 227049 - DNA, 25 bp, probe
gaggcttagtttgatcttccatggt

SEQ ID NO: 227050 - DNA, 25 bp, probe
gaggtctatttttacctactgtgtc

SEQ ID NO: 227051 - DNA, 25 bp, probe
gaggtttgtcatattcatctttggt

SEQ ID NO: 227052 - DNA, 25 bp, probe
gaggttcctgcaggattactttgat

SEQ ID NO: 227053 - DNA, 25 bp, probe
gaggttctatcaggtttgtaatcac

SEQ ID NO: 227054 - DNA, 25 bp, probe
gaggattctagagtgaacttccaca

SEQ ID NO: 227055 - DNA, 25 bp, probe
gaggaagctggagaattctcaccaa

SEQ ID NO: 227056 - DNA, 25 bp, probe
gaggacgtgggagactgtacacatt

SEQ ID NO: 227057 - DNA, 25 bp, probe
gatgaccctgagaaagtttacaatg

SEQ ID NO: 227058 - DNA, 25 bp, probe
gatcgccctgtgataggatctaact

SEQ ID NO: 227059 - DNA, 25 bp, probe
gaggcccacggtaattgaaactgat

SEQ ID NO: 227060 - DNA, 25 bp, probe
gaggaccgaagtgattgtggactgt

SEQ ID NO: 227061 - DNA, 25 bp, probe
gaggaaggaactgtagatgggctga

SEQ ID NO: 227062 - DNA, 25 bp, probe
gaggaagggacttctgggctgggga

SEQ ID NO: 227063 - DNA, 25 bp, probe
gaggacaacgactttgtgttcgtgg

SEQ ID NO: 227064 - DNA, 25 bp, probe
gaggatctatgcttgtttgtttttg

SEQ ID NO: 227065 - DNA, 25 bp, probe
gaggattcgctgctggtgttaattt

SEQ ID NO: 227066 - DNA, 25 bp, probe
gaggtacctcttggtgtatagtatt

SEQ ID NO: 227067 - DNA, 25 bp, probe
gaggtcacctttgggtgtgcggtgt

SEQ ID NO: 227068 - DNA, 25 bp, probe
gaggcagacgctgccgagggggtgt

SEQ ID NO: 227069 - DNA, 25 bp, probe
gaggagattgttgctgagttggttt

SEQ ID NO: 227070 - DNA, 25 bp, probe
gaggtttgctgagcggcttatgttc

SEQ ID NO: 227071 - DNA, 25 bp, probe
gaggtatgttgatcatggctttgct

SEQ ID NO: 227072 - DNA, 25 bp, probe
gaggtcacctggaaagctttgttaa

SEQ ID NO: 227073 - DNA, 25 bp, probe
gaggtaccaggcaaacttcctgcta

SEQ ID NO: 227074 - DNA, 25 bp, probe
gaggtgacaaggcagtctcttgctc

SEQ ID NO: 227075 - DNA, 25 bp, probe
gaggtacgagtgtatgacctgacac

SEQ ID NO: 227076 - DNA, 25 bp, probe
gaggtactggatatgtcactggcac

SEQ ID NO: 227077 - DNA, 25 bp, probe
gaggtgcagctgcaacagtacttcc

SEQ ID NO: 227078 - DNA, 25 bp, probe
gaggtgactctggaagatacttctt

SEQ ID NO: 227079 - DNA, 25 bp, probe
gaggtgctgccaggatggacatctt

SEQ ID NO: 227080 - DNA, 25 bp, probe
gaggatgcaccagagaagtgtcatg

SEQ ID NO: 227081 - DNA, 25 bp, probe
gaggacccacaagtatgatcctgct

SEQ ID NO: 227082 - DNA, 25 bp, probe
gaggtgaagaccctgatgatccagc

SEQ ID NO: 227083 - DNA, 25 bp, probe
gaggtgaagaacttgcaccagcgtc

SEQ ID NO: 227084 - DNA, 25 bp, probe
gaggagagagcagcttctgccactt

SEQ ID NO: 227085 - DNA, 25 bp, probe
gaggagagagcagcttctgccactt

SEQ ID NO: 227086 - DNA, 25 bp, probe
gaggaggagcatgatctggtccaat

SEQ ID NO: 227087 - DNA, 25 bp, probe
gaggaggagcatgatctggtccaat

SEQ ID NO: 227088 - DNA, 25 bp, probe
gaggtgggctggatgccacacagat

SEQ ID NO: 227089 - DNA, 25 bp, probe
gaggtgctgagcgagtatccacaag

SEQ ID NO: 227090 - DNA, 25 bp, probe
gaggtgctagctgtgttagagcagg

SEQ ID NO: 227091 - DNA, 25 bp, probe
gaggagtatgctctgcttacagcaa

SEQ ID NO: 227092 - DNA, 25 bp, probe
gaggaacagcgagtcttacgagcag

SEQ ID NO: 227093 - DNA, 25 bp, probe
gaggatcaagctagacttcaaggcg

SEQ ID NO: 227094 - DNA, 25 bp, probe
gaggatcaagctagacttcaaggcg

SEQ ID NO: 227095 - DNA, 25 bp, probe
gaggaccacatcgctcacatagtgg

SEQ ID NO: 227096 - DNA, 25 bp, probe
gaggacgacatttacactagttact

SEQ ID NO: 227097 - DNA, 25 bp, probe
gaggaacaaagccatgcccgtaagc

SEQ ID NO: 227098 - DNA, 25 bp, probe
gaggtagcaaaggggcacctgaggt

SEQ ID NO: 227099 - DNA, 25 bp, probe
gaggtatgagaagcctgaactgaag

SEQ ID NO: 227100 - DNA, 25 bp, probe
gaggtctgagaatgacgatacccgt

SEQ ID NO: 227101 - DNA, 25 bp, probe
gaggacgacacaggtcgctacacct

SEQ ID NO: 227102 - DNA, 25 bp, probe
gaggaaaatcactcctacacgctat

SEQ ID NO: 227103 - DNA, 25 bp, probe
gaggaggaatcttacttctccacag

SEQ ID NO: 227104 - DNA, 25 bp, probe
gaggacgacctatttgagtccatcc

SEQ ID NO: 227105 - DNA, 25 bp, probe
gaggacagaccttagttgaaatgat

SEQ ID NO: 227106 - DNA, 25 bp, probe
gaggaagactcagttgggaaatttt

SEQ ID NO: 227107 - DNA, 25 bp, probe
gaggatggtgcctctgaggaaaact

SEQ ID NO: 227108 - DNA, 25 bp, probe
gaggatggtgcctgagacaaccctc

SEQ ID NO: 227109 - DNA, 25 bp, probe
gaggatggtgcctgagacaaccctc

SEQ ID NO: 227110 - DNA, 25 bp, probe
gaggtgtctcgagagaagatcaccc

SEQ ID NO: 227111 - DNA, 25 bp, probe
gaggcttccactggggagaagtcca

SEQ ID NO: 227112 - DNA, 25 bp, probe
gaggcttccactggggagaagtcca

SEQ ID NO: 227113 - DNA, 25 bp, probe
gaggcctccaaacaaacactggaga

SEQ ID NO: 227114 - DNA, 25 bp, probe
gaggaccccaaggcgggtctggaag

SEQ ID NO: 227115 - DNA, 25 bp, probe
gaggaccccaaggcgggtctggaag

SEQ ID NO: 227116 - DNA, 25 bp, probe
gaggaaccgcaagccggagaggatt

SEQ ID NO: 227117 - DNA, 25 bp, probe
gaggagaccctaagccaagaaggag

SEQ ID NO: 227118 - DNA, 25 bp, probe
gaggaggaccgtcccaagagacgag

SEQ ID NO: 227119 - DNA, 25 bp, probe
gaggaggacacggactttgaggagg

SEQ ID NO: 227120 - DNA, 25 bp, probe
gaggaggaggatgaggaggaggagg

SEQ ID NO: 227121 - DNA, 25 bp, probe
gaggagaagattgagggagggggga

SEQ ID NO: 227122 - DNA, 25 bp, probe
gaggagaagattgagggagggggga

SEQ ID NO: 227123 - DNA, 25 bp, probe
gaggcgaaactgagtcagagcgggg

SEQ ID NO: 227124 - DNA, 25 bp, probe
gggcgaaggctgtgctcaaagggag

SEQ ID NO: 227125 - DNA, 25 bp, probe
gaggtgaaagcttcgtccgagaaac

SEQ ID NO: 227126 - DNA, 25 bp, probe
gaggtgaacctggtgtcggagcaca

SEQ ID NO: 227127 - DNA, 25 bp, probe
gaggtgatagcattgctttcgtgta

SEQ ID NO: 227128 - DNA, 25 bp, probe
gaggtgaaggatctggcttgttttt

SEQ ID NO: 227129 - DNA, 25 bp, probe
gaggtgtacgatgtcatgctggggt

SEQ ID NO: 227130 - DNA, 25 bp, probe
gaggtgtacgatgtcatgctggggt

SEQ ID NO: 227131 - DNA, 25 bp, probe
gaggtgtacgatgtcatgctggggt

SEQ ID NO: 227132 - DNA, 25 bp, probe
gaggtgtacgatgtcatgctggggt

SEQ ID NO: 227133 - DNA, 25 bp, probe
gaggtcaaagatgctctgtgcaggg

SEQ ID NO: 227134 - DNA, 25 bp, probe
gaggtcaagtgtgcatgcaagaggt

SEQ ID NO: 227135 - DNA, 25 bp, probe
gaggtgcagatgttaatagaggtca

SEQ ID NO: 227136 - DNA, 25 bp, probe
gaggtgatgacctatggcgagcggc

SEQ ID NO: 227137 - DNA, 25 bp, probe
gaggtgacccaaatcacagagtgcc

SEQ ID NO: 227138 - DNA, 25 bp, probe
gaggtgagcagaggagtccagggcg

SEQ ID NO: 227139 - DNA, 25 bp, probe
gaggtgcagctgagagtgcagaggg

SEQ ID NO: 227140 - DNA, 25 bp, probe
gaggattgtcaacatgcagggcgag

SEQ ID NO: 227141 - DNA, 25 bp, probe
gaggtcttctcatatggacgggctc

SEQ ID NO: 227142 - DNA, 25 bp, probe
gaggtttctcgatggcaacgagctc

SEQ ID NO: 227143 - DNA, 25 bp, probe
gaggtttctcgatggcaacgagctc

SEQ ID NO: 227144 - DNA, 25 bp, probe
gaggtttcaccatgatggccaggct

SEQ ID NO: 227145 - DNA, 25 bp, probe
gaggtttgcccatttggcagcagtg

SEQ ID NO: 227146 - DNA, 25 bp, probe
gaggttgggaagagggagtgggagg

SEQ ID NO: 227147 - DNA, 25 bp, probe
gaggttgggaagagggagtgggagg

SEQ ID NO: 227148 - DNA, 25 bp, probe
gaggattttaactggttgtggggag

SEQ ID NO: 227149 - DNA, 25 bp, probe
gaggatgatttcactaggcatttgg

SEQ ID NO: 227150 - DNA, 25 bp, probe
gaggattgcttccctgaatcctctc

SEQ ID NO: 227151 - DNA, 25 bp, probe
gaggttctggcaaaaatctcctcag

SEQ ID NO: 227152 - DNA, 25 bp, probe
gaggatacttgaatggacctctata

SEQ ID NO: 227153 - DNA, 25 bp, probe
gaggaacagatgatttcagcccttc

SEQ ID NO: 227154 - DNA, 25 bp, probe
gaggagaaggttgtcacctatgacc

SEQ ID NO: 227155 - DNA, 25 bp, probe
gaggaaaggcaagacacgcttacac

SEQ ID NO: 227156 - DNA, 25 bp, probe
gaggaactccaaaagggcttcaatg

SEQ ID NO: 227157 - DNA, 25 bp, probe
gaggaactcctatagatttctggca

SEQ ID NO: 227158 - DNA, 25 bp, probe
gatccttcttcgaaagttttgccag

SEQ ID NO: 227159 - DNA, 25 bp, probe
gatcctccaccgaaaactcttgtga

SEQ ID NO: 227160 - DNA, 25 bp, probe
gatcgctttgggagtgaccttcaga

SEQ ID NO: 227161 - DNA, 25 bp, probe
gaggatttggtccctcaactatcac

SEQ ID NO: 227162 - DNA, 25 bp, probe
gaggacctggtaaccaaggtcagcg

SEQ ID NO: 227163 - DNA, 25 bp, probe
gaggaccttgataaaaaattagcac

SEQ ID NO: 227164 - DNA, 25 bp, probe
gaggaagcgaataaaaccaaagatc

SEQ ID NO: 227165 - DNA, 25 bp, probe
gaggaagcgaataaaaccaaagatc

SEQ ID NO: 227166 - DNA, 25 bp, probe
gaggatagcagcatggtttccaaaa

SEQ ID NO: 227167 - DNA, 25 bp, probe
gaggtacagctgaagtcagctcgga

SEQ ID NO: 227168 - DNA, 25 bp, probe
gaggtaatgctgaggctattgctga

SEQ ID NO: 227169 - DNA, 25 bp, probe
gaggaaagcgtctctgagtgtagca

SEQ ID NO: 227170 - DNA, 25 bp, probe
gaggaggagagtttctttgtccaag

SEQ ID NO: 227171 - DNA, 25 bp, probe
gaggaggagacgctcactttcgaag

SEQ ID NO: 227172 - DNA, 25 bp, probe
gaggaggagacgctcactttcgaag

SEQ ID NO: 227173 - DNA, 25 bp, probe
gaggacagagcagaggatctttcca

SEQ ID NO: 227174 - DNA, 25 bp, probe
gaggaagaggcaatggatataccaa

SEQ ID NO: 227175 - DNA, 25 bp, probe
gaggaggctgacgatgagtggacca

SEQ ID NO: 227176 - DNA, 25 bp, probe
gaggaggctgacgatgagtggacca

SEQ ID NO: 227177 - DNA, 25 bp, probe
gaggaggcagaaggatgcatcccca

SEQ ID NO: 227178 - DNA, 25 bp, probe
gaggcaggagaagataacagaagct

SEQ ID NO: 227179 - DNA, 25 bp, probe
gaggcaggagaagataacagaagct

SEQ ID NO: 227180 - DNA, 25 bp, probe
gaggagtggagtgaatccctggctg

SEQ ID NO: 227181 - DNA, 25 bp, probe
gaggagtggagtgaatccctggctg

SEQ ID NO: 227182 - DNA, 25 bp, probe
gaggaggggtgatgactttggcacg

SEQ ID NO: 227183 - DNA, 25 bp, probe
gaggacggacgttactctgtggact

SEQ ID NO: 227184 - DNA, 25 bp, probe
gaggacggacgttactctgtggact

SEQ ID NO: 227185 - DNA, 25 bp, probe
gaggccagagacacaagccttcggc

SEQ ID NO: 227186 - DNA, 25 bp, probe
gaggccaaatgtgtcaccttcagcc

SEQ ID NO: 227187 - DNA, 25 bp, probe
gatgagtaaagtctcagttttcact

SEQ ID NO: 227188 - DNA, 25 bp, probe
gatgagtaaagtctcagttttcact

SEQ ID NO: 227189 - DNA, 25 bp, probe
gaggctcaaacctcattctatccat

SEQ ID NO: 227190 - DNA, 25 bp, probe
gaggctcaaacctcattctatccat

SEQ ID NO: 227191 - DNA, 25 bp, probe
gaggtccagaagggaagtcatccac

SEQ ID NO: 227192 - DNA, 25 bp, probe
gaggcccagaaaagcagcgatacgc

SEQ ID NO: 227193 - DNA, 25 bp, probe
gaggctcacagggaacaagacacgg

SEQ ID NO: 227194 - DNA, 25 bp, probe
gaggaggcagagaagaaagaacgga

SEQ ID NO: 227195 - DNA, 25 bp, probe
gaggatctgaagcaaagaactctgc

SEQ ID NO: 227196 - DNA, 25 bp, probe
gaggacatgacagaagaggccttcc

SEQ ID NO: 227197 - DNA, 25 bp, probe
gaggacatgacagaagaggccttcc

SEQ ID NO: 227198 - DNA, 25 bp, probe
gaggatagactgtgcagtgacctcc

SEQ ID NO: 227199 - DNA, 25 bp, probe
gaggtaggtgctagcagccacctgc

SEQ ID NO: 227200 - DNA, 25 bp, probe
gaggtcagcattgaggtcacctgct

SEQ ID NO: 227201 - DNA, 25 bp, probe
gaggtcatgattgttgtctctgctc

SEQ ID NO: 227202 - DNA, 25 bp, probe
gaggtctcagtggttagagctgctc

SEQ ID NO: 227203 - DNA, 25 bp, probe
gaggttgcactggactgcaagcaca

SEQ ID NO: 227204 - DNA, 25 bp, probe
gaggtctgcgtcgaagacagaatgg

SEQ ID NO: 227205 - DNA, 25 bp, probe
gaggccggcttcaacaaaatgggat

SEQ ID NO: 227206 - DNA, 25 bp, probe
gaggacggtgtcaaacagtgtgacc

SEQ ID NO: 227207 - DNA, 25 bp, probe
gaggactgtgtgaccaccattgtct

SEQ ID NO: 227208 - DNA, 25 bp, probe
gaggccttggatgaacttgcttcac

SEQ ID NO: 227209 - DNA, 25 bp, probe
gaggacctggagaagatcggcatgg

SEQ ID NO: 227210 - DNA, 25 bp, probe
gaggactgtgagctcaggatcctgg

SEQ ID NO: 227211 - DNA, 25 bp, probe
gaggttctgatgctcaggaaataga

SEQ ID NO: 227212 - DNA, 25 bp, probe
gaggttggagcaatcactgaagaaa

SEQ ID NO: 227213 - DNA, 25 bp, probe
gaggaatcgcagatcccaatcaaag

SEQ ID NO: 227214 - DNA, 25 bp, probe
gaggagacctgaacatcaacatgac

SEQ ID NO: 227215 - DNA, 25 bp, probe
gaggatgactattgccaagcacacc

SEQ ID NO: 227216 - DNA, 25 bp, probe
gaggtcatcagaagtcagcagcaga

SEQ ID NO: 227217 - DNA, 25 bp, probe
gaggatgaagtgccttcatgcagac

SEQ ID NO: 227218 - DNA, 25 bp, probe
gaggaacatcatggttcagcagcca

SEQ ID NO: 227219 - DNA, 25 bp, probe
gaggaacatcatggttcagcagcca

SEQ ID NO: 227220 - DNA, 25 bp, probe
gaggatgaatatgatgtcctcatag

SEQ ID NO: 227221 - DNA, 25 bp, probe
gaggtacatattaggccttttatga

SEQ ID NO: 227222 - DNA, 25 bp, probe
gaggtcaattaaatgccttgttctg

SEQ ID NO: 227223 - DNA, 25 bp, probe
gaggttattgagaatatctatgatt

SEQ ID NO: 227224 - DNA, 25 bp, probe
gaggactttgcgaatatcagagacc

SEQ ID NO: 227225 - DNA, 25 bp, probe
gaggcaggttggaaggcaggcacca

SEQ ID NO: 227226 - DNA, 25 bp, probe
gaggcagggtggtcaggaaccacct

SEQ ID NO: 227227 - DNA, 25 bp, probe
gaggcagggtggtcaggaaccacct

SEQ ID NO: 227228 - DNA, 25 bp, probe
gaggaggtggggtgaactgctcctt

SEQ ID NO: 227229 - DNA, 25 bp, probe
gaggaggtggggagtatcactgtgc

SEQ ID NO: 227230 - DNA, 25 bp, probe
gaggagagggggtgtcactggtgcc

SEQ ID NO: 227231 - DNA, 25 bp, probe
gaggagaggaggatccatgcctttg

SEQ ID NO: 227232 - DNA, 25 bp, probe
gaggagggagactctgctgctataa

SEQ ID NO: 227233 - DNA, 25 bp, probe
gaggaggtgaacgccatcctcaagg

SEQ ID NO: 227234 - DNA, 25 bp, probe
gaggctgggaacggaatccctgagc

SEQ ID NO: 227235 - DNA, 25 bp, probe
gaggcaaggaacacagacacactgg

SEQ ID NO: 227236 - DNA, 25 bp, probe
gaggcaaaacctgaatatccagtga

SEQ ID NO: 227237 - DNA, 25 bp, probe
gaggaacaacctagaagctttgctg

SEQ ID NO: 227238 - DNA, 25 bp, probe
gaggaaaagcggacatcagctggtc

SEQ ID NO: 227239 - DNA, 25 bp, probe
gaggaaaagcggacatcagctggtc

SEQ ID NO: 227240 - DNA, 25 bp, probe
gaggaggagttgaaagctctgctgt

SEQ ID NO: 227241 - DNA, 25 bp, probe
gaggagcgaggcctgaagcattact

SEQ ID NO: 227242 - DNA, 25 bp, probe
gaggagatagccctgcacaagtacc

SEQ ID NO: 227243 - DNA, 25 bp, probe
gaggcagcaagcactacagagtcag

SEQ ID NO: 227244 - DNA, 25 bp, probe
gaggagcagcagaagcagcagcgca

SEQ ID NO: 227245 - DNA, 25 bp, probe
gaggagcatcatgagagcatcaggg

SEQ ID NO: 227246 - DNA, 25 bp, probe
gaggagcatcatgagagcatcaggg

SEQ ID NO: 227247 - DNA, 25 bp, probe
gaggctgtgatgggacttggagacc

SEQ ID NO: 227248 - DNA, 25 bp, probe
gaggttgaggacgtgggagactgta

SEQ ID NO: 227249 - DNA, 25 bp, probe
gaggcttagaacgctggtgcaatgt

SEQ ID NO: 227250 - DNA, 25 bp, probe
gaggcttagaacgctggtgcaatgt

SEQ ID NO: 227251 - DNA, 25 bp, probe
gaggctctcaaacacgggaagttca

SEQ ID NO: 227252 - DNA, 25 bp, probe
gaggatccaatctttggggagagtc

SEQ ID NO: 227253 - DNA, 25 bp, probe
gatggggccaagattgggaactgcc

SEQ ID NO: 227254 - DNA, 25 bp, probe
gatggggccaagattgggaactgcc

SEQ ID NO: 227255 - DNA, 25 bp, probe
gaggaggactctatttggatcctgg

SEQ ID NO: 227256 - DNA, 25 bp, probe
gaggagccaatggcctttggatcac

SEQ ID NO: 227257 - DNA, 25 bp, probe
gaggatgtcaatgtttatttcagca

SEQ ID NO: 227258 - DNA, 25 bp, probe
gaggcattcacctttatgtgttaga

SEQ ID NO: 227259 - DNA, 25 bp, probe
gaggttcacgctgctagcgtggaca

SEQ ID NO: 227260 - DNA, 25 bp, probe
gaggaatccgtagagcagggcaaaa

SEQ ID NO: 227261 - DNA, 25 bp, probe
gaggaatccgtagagcagggcaaaa

SEQ ID NO: 227262 - DNA, 25 bp, probe
gaggagctcctgcgggcagggaagt

SEQ ID NO: 227263 - DNA, 25 bp, probe
gaggacctcatcggggaggggaact

SEQ ID NO: 227264 - DNA, 25 bp, probe
gaggccctgaccgtggaaggggaga

SEQ ID NO: 227265 - DNA, 25 bp, probe
gaggttctagcccaggagggtgggg

SEQ ID NO: 227266 - DNA, 25 bp, probe
gaggagttacgtagagagggtggcc

SEQ ID NO: 227267 - DNA, 25 bp, probe
gaggcagtttcgagtgggcggagga

SEQ ID NO: 227268 - DNA, 25 bp, probe
gaggagttcaccagtgttagaagtg

SEQ ID NO: 227269 - DNA, 25 bp, probe
gaggatattgactgggtacagacag

SEQ ID NO: 227270 - DNA, 25 bp, probe
gaggatttaaagtcagtcacaaagg

SEQ ID NO: 227271 - DNA, 25 bp, probe
gaggagtgttaatggtcacttagaa

SEQ ID NO: 227272 - DNA, 25 bp, probe
gaggatgttgtaccgggaccagaac

SEQ ID NO: 227273 - DNA, 25 bp, probe
gaggctgtgttacaagtaccagagt

SEQ ID NO: 227274 - DNA, 25 bp, probe
gaggtttcttggggtcccagggatg

SEQ ID NO: 227275 - DNA, 25 bp, probe
gaggattttttggttgcctaaagtg

SEQ ID NO: 227276 - DNA, 25 bp, probe
gaggattttttggttgcctaaagtg

SEQ ID NO: 227277 - DNA, 25 bp, probe
gaggtttgttggactttcataaatt

SEQ ID NO: 227278 - DNA, 25 bp, probe
gaggacgggtggatatttcaaattt

SEQ ID NO: 227279 - DNA, 25 bp, probe
gaggacgtgtctgttatttcctaat

SEQ ID NO: 227280 - DNA, 25 bp, probe
gaggaaggtcatgttctttcagctt

SEQ ID NO: 227281 - DNA, 25 bp, probe
gaggaaggtcatgttctttcagctt

SEQ ID NO: 227282 - DNA, 25 bp, probe
gaggaaagtcctctcttttgcatat

SEQ ID NO: 227283 - DNA, 25 bp, probe
gaggacaattccaagactttttctg

SEQ ID NO: 227284 - DNA, 25 bp, probe
gaggacaaatctgttgtttgtttga

SEQ ID NO: 227285 - DNA, 25 bp, probe
gaggcctcctctctcagtttttata

SEQ ID NO: 227286 - DNA, 25 bp, probe
gaggccagcctagaggtggcttctg

SEQ ID NO: 227287 - DNA, 25 bp, probe
gaggcagcggcttaagggcgatgcc

SEQ ID NO: 227288 - DNA, 25 bp, probe
gaggatggggctcagaatgcagacc

SEQ ID NO: 227289 - DNA, 25 bp, probe
gaggatgagggctaggaaagtcttg

SEQ ID NO: 227290 - DNA, 25 bp, probe
gaggaaggcagctggtatattcagt

SEQ ID NO: 227291 - DNA, 25 bp, probe
gaggaaggcctgtacttttggtcat

SEQ ID NO: 227292 - DNA, 25 bp, probe
gaggagaccctggttttcatggtgc

SEQ ID NO: 227293 - DNA, 25 bp, probe
gaggagaccctggttttcatggtgc

SEQ ID NO: 227294 - DNA, 25 bp, probe
gaggaggcccagaccatgtttgggc

SEQ ID NO: 227295 - DNA, 25 bp, probe
gaggaggtgccaacagtgttaggcc

SEQ ID NO: 227296 - DNA, 25 bp, probe
gaggaggtgccaacagtgttaggcc

SEQ ID NO: 227297 - DNA, 25 bp, probe
gaggactgggcagcttgttgaaggc

SEQ ID NO: 227298 - DNA, 25 bp, probe
gaggttgatggcgagtggtgctgaa

SEQ ID NO: 227299 - DNA, 25 bp, probe
gaggaggatgcagatgtggaatgga

SEQ ID NO: 227300 - DNA, 25 bp, probe
gaggaggatgcagatgtggaatgga

SEQ ID NO: 227301 - DNA, 25 bp, probe
gaggatgacgctgatgtggagtgga

SEQ ID NO: 227302 - DNA, 25 bp, probe
gaggatgatccggaagcagcttaca

SEQ ID NO: 227303 - DNA, 25 bp, probe
gaggagttggaccacactgtgagca

SEQ ID NO: 227304 - DNA, 25 bp, probe
gaggatttaatttcactgtggcagt

SEQ ID NO: 227305 - DNA, 25 bp, probe
gaggtttcaggtccctgtgaagaac

SEQ ID NO: 227306 - DNA, 25 bp, probe
gaggtttcaggtccctgtgaagaac

SEQ ID NO: 227307 - DNA, 25 bp, probe
gatggatataatcctcccgtaaagc

SEQ ID NO: 227308 - DNA, 25 bp, probe
gaggcattatttgaccggatctaca

SEQ ID NO: 227309 - DNA, 25 bp, probe
gaggcattatttgaccggatctaca

SEQ ID NO: 227310 - DNA, 25 bp, probe
gaggccatggaatacctggagggca

SEQ ID NO: 227311 - DNA, 25 bp, probe
gaggatatcaaactaccacaaagga

SEQ ID NO: 227312 - DNA, 25 bp, probe
gaggatatcaaactaccacaaagga

SEQ ID NO: 227313 - DNA, 25 bp, probe
gaggttcagaatcaacatctcacac

SEQ ID NO: 227314 - DNA, 25 bp, probe
gaggatgtcgaaaacctcatctacg

SEQ ID NO: 227315 - DNA, 25 bp, probe
gaggagatgcgaaaactcttcatcc

SEQ ID NO: 227316 - DNA, 25 bp, probe
gaggagatgcgaaaactcttcatcc

SEQ ID NO: 227317 - DNA, 25 bp, probe
gaggcaatggaaaagctcattaact

SEQ ID NO: 227318 - DNA, 25 bp, probe
gaggatgtgggaaagctaataagca

SEQ ID NO: 227319 - DNA, 25 bp, probe
gaggatctggtgagcctgagaaagc

SEQ ID NO: 227320 - DNA, 25 bp, probe
gaggatctggtgagcctgagaaagc

SEQ ID NO: 227321 - DNA, 25 bp, probe
gaggacaggatcactgtggaatcga

SEQ ID NO: 227322 - DNA, 25 bp, probe
gaggaaggacaaatgctgcagaaat

SEQ ID NO: 227323 - DNA, 25 bp, probe
gaggatgagtgctgacatgtctgaa

SEQ ID NO: 227324 - DNA, 25 bp, probe
gaggatgagtgctgacatgtctgaa

SEQ ID NO: 227325 - DNA, 25 bp, probe
gaggatggtatggactgcatggaca

SEQ ID NO: 227326 - DNA, 25 bp, probe
gaggatggtatggactgcatggaca

SEQ ID NO: 227327 - DNA, 25 bp, probe
gaggaggttggaggtgtagcgatgg

SEQ ID NO: 227328 - DNA, 25 bp, probe
gaggagtacggctgctgcaaggagc

SEQ ID NO: 227329 - DNA, 25 bp, probe
gaggaaatcccaagcttaggagccc

SEQ ID NO: 227330 - DNA, 25 bp, probe
gaggagacacaatgagcttagtacc

SEQ ID NO: 227331 - DNA, 25 bp, probe
gaggagacacaatgagcttagtacc

SEQ ID NO: 227332 - DNA, 25 bp, probe
gaggaggatccatgcctttgtcatg

SEQ ID NO: 227333 - DNA, 25 bp, probe
gaggagccactattccagaaggctc

SEQ ID NO: 227334 - DNA, 25 bp, probe
gaggagcaagaaatccgagacctgc

SEQ ID NO: 227335 - DNA, 25 bp, probe
gaggatgaggaagtccctgatcggc
